United States Patent Application Publication US 2026/0226531 A1 - sequence listing, part 2

SEQ ID NO: 16956 - DNA, 110 bp, synthetic construct
  source 1..110: mol_type = other DNA
aatggttggtcctaagaagctggctgacaaagtgaacagctggtggcagaaaagaggttctcctgaaaggtcagaagtcacggtccaggtaacaccagtggagcagaaag

SEQ ID NO: 16957 - DNA, 110 bp, synthetic construct
  source 1..110: mol_type = other DNA
cctggcaaattgatgtccctaaaatgtccaggccatgaggtcttatcattcctctaggctaggggctgtgcaatcttgagctataaaaataacacagaaggtagttccca

SEQ ID NO: 16958 - DNA, 110 bp, synthetic construct
  source 1..110: mol_type = other DNA
aaaaatgtatttgcgtgttggtgtcacacaccagagccagtagcaataacatgatatggaaatattaaatgacaaatgagggtgagaccaagaacaattagcaaattaga

SEQ ID NO: 16959 - DNA, 110 bp, synthetic construct
  source 1..110: mol_type = other DNA
atggaaatattaaatgacaaatgagggtgagaccaagaacaattagcaaattagactatttctatatgcacacctgtgttctcaacttcctattttatttaacccatagc

SEQ ID NO: 16960 - DNA, 110 bp, synthetic construct
  source 1..110: mol_type = other DNA
acagtttctttcctgtctaccactctgttccgtgttatcacagagcccagctcgtactgggcactcccaggatacgtctaatgatttttcagaaaccagttcttgaagtc

SEQ ID NO: 16961 - DNA, 110 bp, synthetic construct
  source 1..110: mol_type = other DNA
tgctcagcttctttaatgacactgtactgaatgcgataaactccttcttcactatattttgatggcatggcccacacacctttcatctctatatccttttttgtctattg

SEQ ID NO: 16962 - DNA, 110 bp, synthetic construct
  source 1..110: mol_type = other DNA
aaattgtagagatcactgtccctgacagtacaccccttcaaataataaataccgtgcaagtattatgtgccttgaaagaaagctagccttatcttcaggatggtggagta

SEQ ID NO: 16963 - DNA, 110 bp, synthetic construct
  source 1..110: mol_type = other DNA
aatcatagatctaatcatttcagctttttcttccctctcatgtgcaaaagcaaataactaaaccatttgtgaaaagattgctgaagagttccagttttggtctggggttc

SEQ ID NO: 16964 - DNA, 110 bp, synthetic construct
  source 1..110: mol_type = other DNA
aaatcagaagagggtacttcaaagaggaagctaagacaaaaacactgtgaaacacttgccatatgatatattaaaaaactgcatgacatattgtactatacaactgtcta

SEQ ID NO: 16965 - DNA, 110 bp, synthetic construct
  source 1..110: mol_type = other DNA
ctgaagacatgaacacagggatgctgtgttgtttgagtttctcaaataaattcttatatctctcctttaggataacataaatttattccaaagttgctttaaatttagct

SEQ ID NO: 16966 - DNA, 110 bp, synthetic construct
  source 1..110: mol_type = other DNA
taaaagaggttacagagaaaacataacagggaaaggggacagcaaataggatggagggggctgtgattttcaatgagctggttgtggaaagccacattgagaaggtgaca

SEQ ID NO: 16967 - DNA, 110 bp, synthetic construct
  source 1..110: mol_type = other DNA
gggggctgtgattttcaatgagctggttgtggaaagccacattgagaaggtgacatttgaaccaagactaggagatgagggtgtgagccatgtggattttggaggggaga

SEQ ID NO: 16968 - DNA, 110 bp, synthetic construct
  source 1..110: mol_type = other DNA
ctcatcaactctgccacatgcatgactttgtaagtaggagggaaacaacacccaatggggcaacacttgaccaacagggagcaggagctggtgcttccttcctcttctga

SEQ ID NO: 16969 - DNA, 110 bp, synthetic construct
  source 1..110: mol_type = other DNA
aaacacttcttaactgttctacaacataatatagaaatcagtattccttttcccccatcttttatagctaaaaaaaaataaggccacgggacaggagagtcccaaccttg

SEQ ID NO: 16970 - DNA, 110 bp, synthetic construct
  source 1..110: mol_type = other DNA
tcactggcagggctagggcccagggcattctgaggctggtgcctgcccactagtaggcagagctggatcctatggtctcaagtctagtgcctgcacactggtatgtagag

SEQ ID NO: 16971 - DNA, 110 bp, synthetic construct
  source 1..110: mol_type = other DNA
tgcaagcaggtacacaaagagaaaataaaggggaaaaagaatacatgtagaccgtaacttcattacagttttatgggacagaaggtatatttgtttgtgaaaaggaaaac

SEQ ID NO: 16972 - DNA, 110 bp, synthetic construct
  source 1..110: mol_type = other DNA
acttacatttagagggagaagtctcagctatgagttttggcattattaccacagaagtaatggttaagttgggggacaaatgtaagtagtaaggacctgtttctttctac

SEQ ID NO: 16973 - DNA, 110 bp, synthetic construct
  source 1..110: mol_type = other DNA
ttttttttttttttttttctttttttctagctgtgcccatggcatgtggaagtctgtggaatctgagagccacagcagtaataacgctgaatcttgaactgcttaggcca

SEQ ID NO: 16974 - DNA, 110 bp, synthetic construct
  source 1..110: mol_type = other DNA
atttaggttgcaattatgacgaaagagtaggaaataaaaatccacacactaatgtggaaataagtcagtattggggtcttaagaagggcactctagagattctcatgaac

SEQ ID NO: 16975 - DNA, 110 bp, synthetic construct
  source 1..110: mol_type = other DNA
ggaaataagtcagtattggggtcttaagaagggcactctagagattctcatgaactactccttacatctatacaggacttatagttaggtgtggatctactggatataag

SEQ ID NO: 16976 - DNA, 110 bp, synthetic construct
  source 1..110: mol_type = other DNA
tcctaagtgtgtaggggaagccagctgctcatgctgtctggagccagaattgggctttaagagtagctagaatgtgaatattgagtgaagtttccttatggcaggtgtgc

SEQ ID NO: 16977 - DNA, 110 bp, synthetic construct
  source 1..110: mol_type = other DNA
gttccttttttcccgcttttcatgaagagctgctttaattcttttggacttcagatcatggggctagaggtggttagagtaaggccatcctaaaagagtggtgctgccat

SEQ ID NO: 16978 - DNA, 110 bp, synthetic construct
  source 1..110: mol_type = other DNA
tacaaagtattcagtaaaggatggctattactattgtgagtctgggtctaggaaactgaacactgagttcgagtcaaatcagttgtatttgaggcctaccttctctacct

SEQ ID NO: 16979 - DNA, 110 bp, synthetic construct
  source 1..110: mol_type = other DNA
ctgaacactgagttcgagtcaaatcagttgtatttgaggcctaccttctctacctgtgaccttgtaagttatttaattttgaaagcaataactgtactctttccaacctt

SEQ ID NO: 16980 - DNA, 110 bp, synthetic construct
  source 1..110: mol_type = other DNA
atctgtacactttatcctataagcatactagtttacccttaaattctcagttgacttagttaagaatgaaaattagctttcttaggatgtagtttcttaactgtgcttca

SEQ ID NO: 16981 - DNA, 110 bp, synthetic construct
  source 1..110: mol_type = other DNA
catgaacatagggagatctcgacaaggccctttacttctgcagaagagcgtgggcactcaaaaatcatgcacaaagacgaaaaaaaccctccctatttatccttaatgca

SEQ ID NO: 16982 - DNA, 110 bp, synthetic construct; identical to SEQ ID NO: 16981
  source 1..110: mol_type = other DNA

SEQ ID NO: 16983 - DNA, 110 bp, synthetic construct
  source 1..110: mol_type = other DNA
gaggtgctgaagaggcagctggaatcacagaacttcggtttgagggaaaatccgagctggaagtctaaatttgagagttgttgtcatagggatggaatttaaagttacta

SEQ ID NO: 16984 - DNA, 110 bp, synthetic construct
  source 1..110: mol_type = other DNA
gttgaatttcagttcctcaaaagatgctggactgagggtctcattttcactctgactattgaccagatctttttatcagctccttaccacgtgggcctcaccctatctga

SEQ ID NO: 16985 - DNA, 110 bp, synthetic construct
  source 1..110: mol_type = other DNA
ctattgaccagatctttttatcagctccttaccacgtgggcctcaccctatctgactttcctcagagaggaagaaaagagaaagcaagagaagcaaggtgggaatcacag

SEQ ID NO: 16986 - DNA, 110 bp, synthetic construct
  source 1..110: mol_type = other DNA
gatggtatatgttccttggagcttggtgaactagcgtctgactcacatctgataaaccaaagaatgagaggccatgtaactactgtgatggcggtttcaggagggcttaa

SEQ ID NO: 16987 - DNA, 110 bp, synthetic construct
  source 1..110: mol_type = other DNA
accaaagaatgagaggccatgtaactactgtgatggcggtttcaggagggcttaaaacactgggcagtctctgcctccagagttgtctggacaaaggctgcctgggcagt

SEQ ID NO: 16988 - DNA, 110 bp, synthetic construct
  source 1..110: mol_type = other DNA
gacctcttttctccagtctctagtctcatgtttttaagtttaccagaaccctctcattgatgtccagtagggaatcaaactcgtatggccatcactaagctcattcgctt

SEQ ID NO: 16989 - DNA, 110 bp, synthetic construct
  source 1..110: mol_type = other DNA
attgatgtccagtagggaatcaaactcgtatggccatcactaagctcattcgcttattcatccatttactgttttccagacactgtgcttggctcaagagcagtgttggt

SEQ ID NO: 16990 - DNA, 110 bp, synthetic construct
  source 1..110: mol_type = other DNA
actccaaaggtggtcatggcctgctactactaggagctcctgaacaggcacagcccatagctccaaccacctcagaggagggtattgcaattgaacacaagctgttgttg

SEQ ID NO: 16991 - DNA, 110 bp, synthetic construct; identical to SEQ ID NO: 16990
  source 1..110: mol_type = other DNA

SEQ ID NO: 16992 - DNA, 110 bp, synthetic construct; identical to SEQ ID NO: 16990
  source 1..110: mol_type = other DNA

SEQ ID NO: 16993 - DNA, 110 bp, synthetic construct; identical to SEQ ID NO: 16990
  source 1..110: mol_type = other DNA

SEQ ID NO: 16994 - DNA, 110 bp, synthetic construct
  source 1..110: mol_type = other DNA
aactaaatagttgattctacctaactgcatacaccatagacatgcatgcatatggcaagaggatcccagctgcttctgattatgttttcttccagtataacacatcccac

SEQ ID NO: 16995 - DNA, 110 bp, synthetic construct
  source 1..110: mol_type = other DNA
tgagacaagttttctctgcaggtgggttaacagctgctgccaaacacctctccatcctcacatcttgcagcaagccttatagcagataggttgaatcatttttctgtcat

SEQ ID NO: 16996 - DNA, 110 bp, synthetic construct
  source 1..110: mol_type = other DNA
aggggaagagttgagatatcaggaattgagggcatcacaactaggctttttatttctttcagttctgtttagcgtctgttcaatggtactcagctggatgcttactggtc

SEQ ID NO: 16997 - DNA, 110 bp, synthetic construct
  source 1..110: mol_type = other DNA
ctttcagttctgtttagcgtctgttcaatggtactcagctggatgcttactggtctggagggcccaatacaacttcatccaaatgcctgggaccttggcagaaagagcta

SEQ ID NO: 16998 - DNA, 110 bp, synthetic construct
  source 1..110: mol_type = other DNA
ggcagagccagatcctgacatggctagttgtaggattcatggtgtctcaaagccagtgtcagcttgctggtaaatggggcctgatctcagacagctagctgaggggttca

SEQ ID NO: 16999 - DNA, 110 bp, synthetic construct
  source 1..110: mol_type = other DNA
agaagttttgtcatgaatctatgtccctacagacaaagttctctatgttcccacactgaaataagctaaatgcattttataatgttatacatgcatattatacatatttg

SEQ ID NO: 17000 - DNA, 110 bp, synthetic construct
  source 1..110: mol_type = other DNA
cagcaactggaaacaaagagctatgctttgtatcagtagcagctgaactgaaagaggagaaagctggaaaaaggagcatttttccattttctgtgaggaaagcaaggtgg

SEQ ID NO: 17001 - DNA, 110 bp, synthetic construct
  source 1..110: mol_type = other DNA
ggagaaagctggaaaaaggagcatttttccattttctgtgaggaaagcaaggtggcttcagtgcactgtggtctccaaaggagtcagcaacagcatagtgatcaccatgc

SEQ ID NO: 17002 - DNA, 110 bp, synthetic construct
  source 1..110: mol_type = other DNA
acagcatctgaaggatgggtaatgcttcaactctggaagaacagaacagggccgtggagctcctgctatatgcccttgggtggcaatagctcatgtcacagtggcatcta

SEQ ID NO: 17003 - DNA, 110 bp, synthetic construct
  source 1..110: mol_type = other DNA
cttccatataccacacgtgtgctctaaaactttatttataggagttcactggtggtctagtaattacaactcagctttttcaccactatggcctgggttcaatccctggt

SEQ ID NO: 17004 - DNA, 110 bp, synthetic construct
  source 1..110: mol_type = other DNA
gtcttacgaaggttttctggccatctcaattcccctgcagaaactggtaagattaaaccctccaggagggaaccagctggattttaggaaagggtagaagggaagatctt

SEQ ID NO: 17005 - DNA, 110 bp, synthetic construct
  source 1..110: mol_type = other DNA
aaccctccaggagggaaccagctggattttaggaaagggtagaagggaagatcttcattacacatgaccttttacttatttttaactacttttcctagtcaaagaaataa

SEQ ID NO: 17006 - DNA, 110 bp, synthetic construct
  source 1..110: mol_type = other DNA
ggggttgatttcctacacaggttgctacaggttgtgagtcagagttttatttgcatatgtggtccagctgttgcccatggaatagtcagtctctcatggtcacatgtgat

SEQ ID NO: 17007 - DNA, 110 bp, synthetic construct
  source 1..110: mol_type = other DNA
ccaaagtagacgctagtgtgtgtgtgtatatatatatatcttgtacttaatcggccttccgtttttccatcattgcctccctatcttagaaatatcttttaagtaaatac

SEQ ID NO: 17008 - DNA, 110 bp, synthetic construct
  source 1..110: mol_type = other DNA
tgtctgtcacatttctgtacatctgagcaaggggcattaacttctttattctgtttgcactgatgtttgtgtagctaaagtctccctccagggaaggtaacagatttgtt

SEQ ID NO: 17009 - DNA, 110 bp, synthetic construct
  source 1..110: mol_type = other DNA
ctattggaattgggatgaggggggcagtcttagggagctgaactaagtgatggatctgatgctctctccaggttgatagtgcaaagttaagttaaattatggaataccca

SEQ ID NO: 17010 - DNA, 110 bp, synthetic construct
  source 1..110: mol_type = other DNA
gaggtggagttcttgcaggtgagatgcatctcattgcactccagattgaagtggcaggtgcagtgtctctgcacacactctgctgagctgaggtgttgggcataaccatt

SEQ ID NO: 17011 - DNA, 110 bp, synthetic construct
  source 1..110: mol_type = other DNA
tgaaatgaaaacttttacgtttctacaaaaacctgtataggagttgttcatggaggttttattagtaataggcaaaaactggaaacagctgaatgttaaacccattgagg

SEQ ID NO: 17012 - DNA, 110 bp, synthetic construct
  source 1..110: mol_type = other DNA
acaggttttatatttcctttccaacaacttatctccctctagactgaggtgggattgtgaaaatgataggtttactgtccccagctttctctttggccctgtagcccttc

SEQ ID NO: 17013 - DNA, 110 bp, synthetic construct
  source 1..110: mol_type = other DNA
ggctctgaatattgacctctgcattttgttctgcttctacccaaccccagccatgccctgaattgaggccatgtccagtgggactgcaacttcttgtctctgtcaagcct

SEQ ID NO: 17014 - DNA, 110 bp, synthetic construct
  source 1..110: mol_type = other DNA
agaaagttatggaagtttctgtgacagcatccaggaatgtggagctgtgcttacctgggcatggaggcccgacctactaacctttgggaacacactcctaataccttccc

SEQ ID NO: 17015 - DNA, 110 bp, synthetic construct
  source 1..110: mol_type = other DNA
taagctttttcccaggaacttggtgtcagctgcatctaatttgagctgagctgattaagatgtggtaggaccaatcctccaactgggcatgtgtgagtgcgaccttttga

SEQ ID NO: 17016 - DNA, 110 bp, synthetic construct
  source 1..110: mol_type = other DNA
gtttcttctcagaagcttttccagaataggaggctagctgtgaccagcaaggtgcaggaaacatctccccaatcccattgcatcttcccagtgctctgttggagtgcagg

SEQ ID NO: 17017 - DNA, 110 bp, synthetic construct
  source 1..110: mol_type = other DNA
ttgctacagcttctacatctgctgcttcaccttgtactctgaagttacggagatggcctctttccttaaaccgcctgaatgaacctctgctagcttcaaatgtttcttct

SEQ ID NO: 17018 - DNA, 110 bp, synthetic construct
  source 1..110: mol_type = other DNA
cacctctaatcaggcccagagacaaagtctccctcagcaagagggacaagactcagctgcatccgctaggggacaggcaccagttcctcccatcaggaagcctgccacaa

SEQ ID NO: 17019 - DNA, 110 bp, synthetic construct
  source 1..110: mol_type = other DNA
atccttacctccttccatagcatatacctacagtagagaaacaaatgttaaatacatgctttgatttggaaaacatggagtcaatgtctgtatttgagctgtgaaggagg

SEQ ID NO: 17020 - DNA, 110 bp, synthetic construct
  source 1..110: mol_type = other DNA
atgctttgatttggaaaacatggagtcaatgtctgtatttgagctgtgaaggaggtgaagggttaggatgatgtggcactgaggtgtctggctcaggtgtggtggtgaca

SEQ ID NO: 17021 - DNA, 110 bp, synthetic construct
  source 1..110: mol_type = other DNA
ttattcattcttcttgactttgggccaccaaatagggcttctcttagactggacgaaatccaccttcctgctaagtgagtatacatctcctcccactcactcaccctagc

SEQ ID NO: 17022 - DNA, 110 bp, synthetic construct
  source 1..110: mol_type = other DNA
tatctaattattgtattagtttgctagggctgtcataacaagtactacatgttagatagcttaaacaacagaaatttatcccctcgcagttctggagattagaagtctga

SEQ ID NO: 17023 - DNA, 110 bp, synthetic construct
  source 1..110: mol_type = other DNA
tataccagagactggcaaactgatagtggcccttaggccaaatatagtctttgcatgatccagggacaaagaatggtttttatatgtttaaagagttgtagaagaggaag

SEQ ID NO: 17024 - DNA, 110 bp, synthetic construct
  source 1..110: mol_type = other DNA
acaagcactgcaccaaagtgggaactccctccggcatttttaaaaattattaaatttattgcccaatgcattctaacttatcagaagctattactatctcaccaagtctt

SEQ ID NO: 17025 - DNA, 110 bp, synthetic construct
  source 1..110: mol_type = other DNA
tagactgtatagttatagtctcattctctcggtaacttgtgatccacttaatagaagcttccttaatacccagaatctctggtgttactttacatgtaaacagtcatttg

SEQ ID NO: 17026 - DNA, 110 bp, synthetic construct
  source 1..110: mol_type = other DNA
ttttcatcccaggtaagatagacagttactatgagggaaggcgggattgctaaggcggagggcatttctgagaaggtgcatggtagtttcctagagctgctataacacat

SEQ ID NO: 17027 - DNA, 110 bp, synthetic construct
  source 1..110: mol_type = other DNA
cggagggcatttctgagaaggtgcatggtagtttcctagagctgctataacacatcaccacaaacggggaatcttaaaacaaaagaaattctctcacagttctggaggcc

SEQ ID NO: 17028 - DNA, 110 bp, synthetic construct
  source 1..110: mol_type = other DNA
agagtgtttattaggagaaaaatgtgtggatagacacacaggagggctcagagaaagagctgcatgctcttgggatggtttaaattatttaaatatggtggcagtttttc

SEQ ID NO: 17029 - DNA, 110 bp, synthetic construct
  source 1..110: mol_type = other DNA
ggccaatgaaggaggaagtatccgaatctttcatatgtggcaaaatttagagcaagtagaagctcggagacagaaagattgagaatttttttgcaattaatgtagaaact

SEQ ID NO: 17030 - DNA, 110 bp, synthetic construct
  source 1..110: mol_type = other DNA
cagaattacctaaggaaagctgggaagtcaggacccagaattcttattggaacagcatatgtctctcagtatttcaccctagttccaccagtgtcattgctctgctatgt

SEQ ID NO: 17031 - DNA, 110 bp, synthetic construct
  source 1..110: mol_type = other DNA
gaactttggacccagagagacatgaatttgtggctagacaagttttgtaagctgtctctgagctgtgcccattcaacttggatagaaatctctatgttgcagagttgtag

SEQ ID NO: 17032 - DNA, 110 bp, synthetic construct
  source 1..110: mol_type = other DNA
ctctgagctgtgcccattcaacttggatagaaatctctatgttgcagagttgtagggattagaaggaattcttaaatcctaaggttgttttgaggactaaataagttaat

SEQ ID NO: 17033 - DNA, 110 bp, synthetic construct; identical to SEQ ID NO: 17031
  source 1..110: mol_type = other DNA

SEQ ID NO: 17034 - DNA, 110 bp, synthetic construct; identical to SEQ ID NO: 17032
  source 1..110: mol_type = other DNA

SEQ ID NO: 17035 - DNA, 110 bp, synthetic construct
  source 1..110: mol_type = other DNA
attgcaattgacttaatgtgagaccacagtcaaggctggctgcgcagaatacttctatgagcacctatgcgggagttatgcaggacctgtgcagaacccttattattaga

SEQ ID NO: 17036 - DNA, 110 bp, synthetic construct
  source 1..110: mol_type = other DNA
ggataaaatagtcaagaaaagtgtaactgcactactctctataaaagagacaattagcaaggacctattcaatattctctattaacctacatgggaaaaaagaatgagta

SEQ ID NO: 17037 - DNA, 110 bp, synthetic construct
  source 1..110: mol_type = other DNA
aagaaagcatatgctctgtgactcagtgtactttactttgcattttgtaaatattgatgtagcagctcctaaagtgctctcagaagtcgttgtgactgacagcccatttc

SEQ ID NO: 17038 - DNA, 110 bp, synthetic construct
  source 1..110: mol_type = other DNA
gatgtagcagctcctaaagtgctctcagaagtcgttgtgactgacagcccatttcaaaacaaatatgctttattgatggagagcacgtgcatctccatctaattattctg

SEQ ID NO: 17039 - DNA, 110 bp, synthetic construct
  source 1..110: mol_type = other DNA
gagacgacaaagcagcttcaagctatctaaatttcagtatgcagagttccaaaggaaccatacggtgtgtcccatgaacacacaactactcagcaaagagtctcaacaaa

SEQ ID NO: 17040 - DNA, 110 bp, synthetic construct
  source 1..110: mol_type = other DNA
ttgctatatagagaatacacaggtttgctatatagagaattgctgtatttctcaaattttcctaggtaatgacaaattgttcccctacgtagttgtatcaaagcgtacaa

SEQ ID NO: 17041 - DNA, 110 bp, synthetic construct
  source 1..110: mol_type = other DNA
attttcctaggtaatgacaaattgttcccctacgtagttgtatcaaagcgtacaatgatctggaatggagtataaattatcagcaatctgtcccaagcatagtgttcaag

SEQ ID NO: 17042 - DNA, 110 bp, synthetic construct
  source 1..110: mol_type = other DNA
ctggctgtatttttctgcccgcttatagctagtctatctccatttaccgtcctactttaggaaacttcctggaatttaccttttcatgcctatctctggcctcctgttct

SEQ ID NO: 17043 - DNA, 110 bp, synthetic construct
  source 1..110: mol_type = other DNA
caaaaaacaacgagctattaacatgcctaccatccataagctaggagcatacaacttagcagttgggattcactcatatgttgagaaatttatgtcattaatgaaaataa

SEQ ID NO: 17044 - DNA, 110 bp, synthetic construct
  source 1..110: mol_type = other DNA
gtctgtactgcctatagcagtgggtctccaacttgggtacacattagaatcagctggggagcttaaaaaagtactgatgattggctcccatcaccagcattctgatgtaa

SEQ ID NO: 17045 - DNA, 110 bp, synthetic construct
  source 1..110: mol_type = other DNA
tggacttggcagttcttagggctgacttgagaacacacttatcaggtccatgtctgccttcttcttcagctttcatcttagactcaaacagaaagtgacaagggaagaca

SEQ ID NO: 17046 - DNA, 110 bp, synthetic construct
  source 1..110: mol_type = other DNA
gacccacaataggcactcctaaagtttttaatactcttcatcaaaagattcatcttaactgtcttccccttgaatagtgttcagttttaaattagtggcttgcatctaac

SEQ ID NO: 17047 - DNA, 110 bp, synthetic construct
  source 1..110: mol_type = other DNA
taactgtcttccccttgaatagtgttcagttttaaattagtggcttgcatctaacaaagagaatgcattaaaaagtgatgttgtgtcactacctaggtcaagctccaaaa

SEQ ID NO: 17048 - DNA, 110 bp, synthetic construct
  source 1..110: mol_type = other DNA
tctagtcaccaagagtttcacatatctcaatggcaagatcaggaattgtgatttgaacacaagcaatgctttgccttatagtctatccaccagcttttaagacctctgtg

SEQ ID NO: 17049 - DNA, 110 bp, synthetic construct
  source 1..110: mol_type = other DNA
aacacaagcaatgctttgccttatagtctatccaccagcttttaagacctctgtggagttcttttgtctccttggtatgccattgccttgagattagtaaatcactggca

SEQ ID NO: 17050 - DNA, 110 bp, synthetic construct
  source 1..110: mol_type = other DNA
ttcaaggagtgaaggaatagagtccaactctttgtggccagagctgcaaaatttggtgcaaacagatataggaaaaaggagagatttgatttatggtcacttaacacata

SEQ ID NO: 17051 - DNA, 110 bp, synthetic construct
  source 1..110: mol_type = other DNA
cagaacttacttatctcgtaaccgggagtttatacaattttcctcatttcctccagtgatatataagagttcctgatttattaaaaacatttaattgtctatcatgcttt

SEQ ID NO: 17052 - DNA, 110 bp, synthetic construct
  source 1..110: mol_type = other DNA
gtatgggtgaaccacctgagacaggaaacctgacagatgtgcgggtaaacctggcccaagttaccaaactgaaactgagctatacaaatgattctgcttaagtcacaaag

SEQ ID NO: 17053 - DNA, 110 bp, synthetic construct
  source 1..110: mol_type = other DNA
attttgtccccatcccactcccacacacaaatctgtgcttgagtgtgttcagaagtgagtactatcaagcatttaaacaaaagacaataccaattctgtacaaattctcc

SEQ ID NO: 17054 - DNA, 110 bp, synthetic construct
  source 1..110: mol_type = other DNA
tgagtactatcaagcatttaaacaaaagacaataccaattctgtacaaattctcccagaaaattgaagaggagggaataacccctgattcattttataatttcagcatca

SEQ ID NO: 17055 - DNA, 110 bp, synthetic construct
  source 1..110: mol_type = other DNA
tttatagatttatttgcataataccagttaggaaaatgcaaattcaagacaagtattactagaatttaaatatttccatcatcagggagttccccatccagcatggcagt

SEQ ID NO: 17056 - DNA, 110 bp, synthetic construct
  source 1..110: mol_type = other DNA
tagacaataagaattatttcctgtcaaggacattggatgtagcttagtatttataattaacatttgtttaaaaatgtgccttggagttccttttgcagcttagcataacg

SEQ ID NO: 17057 - DNA, 110 bp, synthetic construct
  source 1..110: mol_type = other DNA
tcagtatgggcacagagctaaactacactttccaagctccttgtatttgggtggggctctgtgactaaattctggccagggaatttatgagccacttctagatatggctc

SEQ ID NO: 17058 - DNA, 110 bp, synthetic construct
  source 1..110: mol_type = other DNA
gctctgtgactaaattctggccagggaatttatgagccacttctagatatggctcattaaaatctcccatgcatccacaaggaactcttcattccctgtctttatgcagc

SEQ ID NO: 17059 - DNA, 110 bp, synthetic construct
  source 1..110: mol_type = other DNA
gaaaaactttttctcttctctcttaagttctgaggctagagcttgcaaatcaagctgacaaaggacagtttaacgggaaaaaagcaacaaattttatttttaatgttatg

SEQ ID NO: 17060 - DNA, 110 bp, synthetic construct
  source 1..110: mol_type = other DNA
tgttttctgctttagctcctcagaataggtattctcttaggtacttctaatctataaaacctcagattttgttcctcccagggaagtagtgccataataagaaaatctaa

SEQ ID NO: 17061 - DNA, 110 bp, synthetic construct
  source 1..110: mol_type = other DNA
aaaacctcagattttgttcctcccagggaagtagtgccataataagaaaatctaaaagggaaatgtacccgttatacatatagaatactctggaatataaaggtcgttgc

SEQ ID NO: 17062 - DNA, 110 bp, synthetic construct
  source 1..110: mol_type = other DNA
gtatagtctctgtttaaacaggtgtttaaatccaatattgatgattttcaccatcagtgcttttatattcattatccacacaaacagaggcctcaagaatgtgtcattta

SEQ ID NO: 17063 - DNA, 110 bp, synthetic construct; identical to SEQ ID NO: 17062
  source 1..110: mol_type = other DNA

SEQ ID NO: 17064 - DNA, 110 bp, synthetic construct; identical to SEQ ID NO: 17062
  source 1..110: mol_type = other DNA

SEQ ID NO: 17065 - DNA, 110 bp, synthetic construct; identical to SEQ ID NO: 17062
  source 1..110: mol_type = other DNA

SEQ ID NO: 17066 - DNA, 110 bp, synthetic construct
  source 1..110: mol_type = other DNA
tcagaccagtagcaatttttgctgattagtgcatctgctctgattcacagttgattagatacttaactaccgtagactaaaaatcataatatttaagaaggatccagtga

SEQ ID NO: 17067 - DNA, 110 bp, synthetic construct
  source 1..110: mol_type = other DNA
gggtatatgtttactttcttaaatgacttttatgccaaatcaacaatatcatatcaaaacctaatatttttctaaaggtcagagttgatgtctttccctgtactgagcag

SEQ ID NO: 17068 - DNA, 110 bp, synthetic construct; identical to SEQ ID NO: 17067
  source 1..110: mol_type = other DNA

SEQ ID NO: 17069 - DNA, 110 bp, synthetic construct
  source 1..110: mol_type = other DNA
gagagaagttgaaactagagacatatgtttggtagatataacccccttccataacattagaggcagcattccaagctacaggacagcaagagatttggaaggcagactag

SEQ ID NO: 17070 - DNA, 110 bp, synthetic construct
  source 1..110: mol_type = other DNA
attgaacgggttttataaacaagtacattgctgagccgtaaacaggaacacaagcagcacaaatagagcatgtcagcaagacaggatgtgatgagagggacaaggttgga

SEQ ID NO: 17071 - DNA, 110 bp, synthetic construct
  source 1..110: mol_type = other DNA
agcacaaatagagcatgtcagcaagacaggatgtgatgagagggacaaggttggagagctttctctgctccaacctggggaagcaagtctctcatctttgatttaaggag

SEQ ID NO: 17072 - DNA, 110 bp, synthetic construct
  source 1..110: mol_type = other DNA
cctcaaaaataatttaaatatgtagtagtttaggaaaagcaagcacttgaacacttgtgcttagtttcgggttggccttctgcagtagtctgtgagcttctggagggcgg

SEQ ID NO: 17073 - DNA, 110 bp, synthetic construct
  source 1..110: mol_type = other DNA
tgtgcttagtttcgggttggccttctgcagtagtctgtgagcttctggagggcggaggccgtgccttgctcttcctttcaacctcagagacttgaatattgcctgacaca

SEQ ID NO: 17074 - DNA, 110 bp, synthetic construct
  source 1..110: mol_type = other DNA
gatctctgtctttaaaaatctacagatggttcacaagcaccagccagacctcctaaaccacgaccccgcaggactgcaccggaaattcaccacagaaaacccgaggcagc

SEQ ID NO: 17075 - DNA, 110 bp, synthetic construct
  source 1..110: mol_type = other DNA
aggtggtcttatgttaactcttctaactttgcatttggaccctaactctttgcagctgaggtcagaaatcttgggctgacttagcagtctggaggactctacccttaact

SEQ ID NO: 17076 - DNA, 110 bp, synthetic construct
  source 1..110: mol_type = other DNA
ctgaggtcagaaatcttgggctgacttagcagtctggaggactctacccttaactaactctggatagatgaatgtgaaaaacacacagttaataccatatataatatttt

SEQ ID NO: 17077 - DNA, 110 bp, synthetic construct
  source 1..110: mol_type = other DNA
cctttagggaattgtttttcttttaacggctgctctgagtagcttgtattccaacaaatcatcttaactacctatttaatctggacacatacacccccattctgcctatc

SEQ ID NO: 17078 - DNA, 110 bp, synthetic construct
  source 1..110: mol_type = other DNA
ttatataatgtggttgtataggcttccagtggtttttcagcagttgcattttcgatagctgtacttctaaaagataaatgtaaatacatggcagtaggttataattcatt

SEQ ID NO: 17079 - DNA, 110 bp, synthetic construct
  source 1..110: mol_type = other DNA
tttctgtgattggtaatggaagtcttgatacaagctttatattattccaggaagaattacatggggctatttccacaagaaacagcagaaagaaagtcaggatgggttag

SEQ ID NO: 17080 - DNA, 110 bp, synthetic construct
  source 1..110: mol_type = other DNA
ttgaaccaaggtcagtcagtgcctctgcttgcgagatatgtgaaacatgagagattcatggagaaatgtctcccatttaagctgtgctgatggatttagtttttttaaaa

SEQ ID NO: 17081 - DNA, 110 bp, synthetic construct
  source 1..110: mol_type = other DNA
taagggagacattcaaataatatagaactataaagaatgaaagccagctattataccggaagttcatgactaagagcaggtatttgtagtatagaatcaaaaagacttgg

SEQ ID NO: 17082 - DNA, 110 bp, synthetic construct
  source 1..110: mol_type = other DNA
gatagaaagagatcatctctgttttatatggagagctcatgctaaaaatagcacagagcaaagcataatcaagaaattgggaaaaacaaggagttcccctcatggctcaa

SEQ ID NO: 17083 - DNA, 110 bp, synthetic construct
  source 1..110: mol_type = other DNA
gtctgagacagactcaacacacccttgcttgtcagagacagggggagtcaaattagaagaaatgcaagtggcttttaggagcagagagaggcccttgacaaccagccagg

SEQ ID NO: 17084 - DNA, 110 bp, synthetic construct
  source 1..110: mol_type = other DNA
gaagaaatgcaagtggcttttaggagcagagagaggcccttgacaaccagccaggaacagagtccaaccactgcaaggaacttgattctgtcaaaaacttgaattgactt

SEQ ID NO: 17085 - DNA, 110 bp, synthetic construct
  source 1..110: mol_type = other DNA
tgtcattacctcactgctaattataactactatactttaaaatcttatcactccagtattgttccatttctttctatatctcagtaaatcccaaagggattctgccctcc

SEQ ID NO: 17086 - DNA, 110 bp, synthetic construct
  source 1..110: mol_type = other DNA
gtattgttccatttctttctatatctcagtaaatcccaaagggattctgccctccaaaaccaaaccaaaacaaaaaccaaccaaacaaaaatcctcatttgagcagaagc

SEQ ID NO: 17087 - DNA, 110 bp, synthetic construct
  source 1..110: mol_type = other DNA
attcctgaacttaaaagaccaatcagggactacacgtctttagtttttgttttgggtttcttcccttctactagtaggttaagttagctataaaagtaactatagacatg

SEQ ID NO: 17088 - DNA, 110 bp, synthetic construct
  source 1..110: mol_type = other DNA
gtatcacacagagattctaataaccttactttttcttattaattcaaatgatatctattttcctcccaaaagtagtagataagaggaagtggcagagaggcatatctaat

SEQ ID NO: 17089 - DNA, 110 bp, synthetic construct
  source 1..110: mol_type = other DNA
tagctagaattgaaaatatgatggctgattgatgcttcatggctcttatttatgtttctatgggtaggactacttattttcaacaaatttttgacactggaacccacagc

SEQ ID NO: 17090 - DNA, 110 bp, synthetic construct; identical to SEQ ID NO: 17089
  source 1..110: mol_type = other DNA

SEQ ID NO: 17091 - DNA, 110 bp, synthetic construct
  source 1..110: mol_type = other DNA
gtttttgcttcagctttattagtcccttgcatggctgtaaatacctactttaataatagaaatatttttgtatgcattctttcttgtcaccttttttgtacatccttctt

SEQ ID NO: 17092 - DNA, 110 bp, synthetic construct
  source 1..110: mol_type = other DNA
ttagagttgattgaaatcatatatgtactattttcctatctaagaccataaattcccttaaatctttccttagggcaaggtccatggaacccattctaagactctgggat

SEQ ID NO: 17093 - DNA, 110 bp, synthetic construct; identical to SEQ ID NO: 17092
  source 1..110: mol_type = other DNA

SEQ ID NO: 17094 - DNA, 110 bp, synthetic construct
  source 1..110: mol_type = other DNA
taaacattcctatttccaagctaacttaattgcagtgttgttttcctgtatctccaacttcagttgaactggacgaaagcctaaaacctgggcttaattttgcagatttc

SEQ ID NO: 17095 - DNA, 110 bp, synthetic construct
  source 1..110: mol_type = other DNA
taagagaatgaggaacctcatgaccccaagtggtgtatgagcggtcattagcagaacatgcatcagtagagagaactgtggtgcaaacctaggcaagctgggttgcaaca

SEQ ID NO: 17096 - DNA, 110 bp, synthetic construct
  source 1..110: mol_type = other DNA
acatgcatcagtagagagaactgtggtgcaaacctaggcaagctgggttgcaacagatagtcagtcatgccatttgtggaaccacaatgatgactctctagatgctatgc

SEQ ID NO: 17097 - DNA, 110 bp, synthetic construct
  source 1..110: mol_type = other DNA
ttactcctttgccatcttgatccttctccaaagaagctgatttagtcccatggctgacctcaaggtgttcatgattttggtgaaggaagtgattgcaaatgtggtggaaa

SEQ ID NO: 17098 - DNA, 110 bp, synthetic construct
  source 1..110: mol_type = other DNA
attaacctctgacccacgatgggaatccgatatgttattattttaaaaaaatatgtagattacttgtgaaatccactagaaatggcttgaattgtcagaatgattcaaga

SEQ ID NO: 17099 - DNA, 110 bp, synthetic construct; identical to SEQ ID NO: 17098
  source 1..110: mol_type = other DNA

SEQ ID NO: 17100 - DNA, 110 bp, synthetic construct
  source 1..110: mol_type = other DNA
ttgtgtcttccttttaaatgtcaaaatatccttgtaattcaacactttcctttctccctccacctaatctcaatcttttcaggtgagagtccaggtaattttgaagctac

SEQ ID NO: 17101 - DNA, 110 bp, synthetic construct
  source 1..110: mol_type = other DNA
aaagacttccgtgtaactagataggatgaaagaaaatgggaggaaagatgaagcaggatgggacttgcacccctgagaaggcgctgaaggagaggagaggttcttgcact

SEQ ID NO: 17102 - DNA, 110 bp, synthetic construct
  source 1..110: mol_type = other DNA
ggatgggacttgcacccctgagaaggcgctgaaggagaggagaggttcttgcactgagctaagtccccacactggtgaggagatcagctgggacataaaaagagcttcag

SEQ ID NO: 17103 - DNA, 110 bp, synthetic construct
  source 1..110: mol_type = other DNA
caaaatggatctgtataacagtatgacattcctttccttaaagtacaacataatagctgattcattaatattgacccaattttccagtaaaatgactatgcttagagaga

SEQ ID NO: 17104 - DNA, 110 bp, synthetic construct
  source 1..110: mol_type = other DNA
gcatgctcgtaggtagaaaaacaactatggaaataagtgctggggtaggaaaatctgaactataattgacaaatttttggaagttcagtatggaaaaccccccttttttg

SEQ ID NO: 17105 - DNA, 110 bp, synthetic construct
  source 1..110: mol_type = other DNA
agtgctggggtaggaaaatctgaactataattgacaaatttttggaagttcagtatggaaaaccccccttttttgaggatcaggacagattcagttttatttttttaaat

SEQ ID NO: 17106 - DNA, 110 bp, synthetic construct
  source 1..110: mol_type = other DNA
gtgagtgtgtacatggaagtgcatgaatatatactgactcagtggcatgccttatggactgctacagtggtgaggggaggtagaaaaagggaaaaatactcttcctttgt

SEQ ID NO: 17107 - DNA, 110 bp, synthetic construct
  source 1..110: mol_type = other DNA
taatggttgcatatggttagatgtaaatagtaagcaaatgactaaaaaggtctctaattttcttttaaaggaatcctagtgacttaaaataaaggtagcctcaaacatcc

SEQ ID NO: 17108 - DNA, 110 bp, synthetic construct
  source 1..110: mol_type = other DNA
tttgttttcaaacttgatttacattttccagcaaccatacacagttttacttcaaagacactggacaacatttctgtggatttactaaacatatgccttgatccaggagt

SEQ ID NO: 17109 - DNA, 110 bp, synthetic construct
  source 1..110: mol_type = other DNA
agacactggacaacatttctgtggatttactaaacatatgccttgatccaggagtgatatgataaaaaatatttagaaaccaatctagcacagatcttggctaattcaga

SEQ ID NO: 17110 - DNA, 110 bp, synthetic construct
  source 1..110: mol_type = other DNA
ataaaatcagtactgggttgaatacttgaggaggactttctgttgatctctgatattctctctgtgtgaagctccttcctgtattatattctgtctttcaaacttgagct

SEQ ID NO: 17111 - DNA, 110 bp, synthetic construct
  source 1..110: mol_type = other DNA
actgtgagcctttctggtcgaggacaatagacaggatattcccagcacctaattcagtttctaatctaatataaaccaaaaagttcagctatttatgaaaattgcttgta

SEQ ID NO: 17112 - DNA, 110 bp, synthetic construct
  source 1..110: mol_type = other DNA
ggtcgaggacaatagacaggatattcccagcacctaattcagtttctaatctaatataaaccaaaaagttcagctatttatgaaaattgcttgtagcaattttaatttta

SEQ ID NO: 17113 - DNA, 110 bp, synthetic construct
  source 1..110: mol_type = other DNA
tttatggctcagaatgtgtctgtctcagtcattgtttcatgcaaaattaagaatgtgaattctactattattggatgcactattctataaatgttaattaaatccaggtg

SEQ ID NO: 17114 - DNA, 110 bp, synthetic construct; identical to SEQ ID NO: 17113
  source 1..110: mol_type = other DNA

SEQ ID NO: 17115 - DNA, 110 bp, synthetic construct
  source 1..110: mol_type = other DNA
cagagcttaattgacctggaggaaggaaaatacaattccagctccctctagccgtccatgtagaagaaaagatatacccaaatagagcacaatggagccatcttgcccca

SEQ ID NO: 17116 - DNA, 110 bp, synthetic construct
  source 1..110: mol_type = other DNA
ctttagagacctgccttcaagtatgttgataaaggtgaataaggcaagaaaattaaaaagatcatttccatgatgacaatccctttcctcccaatggtaagagtcattag

SEQ ID NO: 17117 - DNA, 110 bp, synthetic construct
  source 1..110: mol_type = other DNA
caatttgacattaaagagccgaagggcttttaaaacgtctttgagaaaacttgtcactggttaaatagagttggtcgtttagacaggtgaggcaaaactgttcataattt

SEQ ID NO: 17118 - DNA, 110 bp, synthetic construct
  source 1..110: mol_type = other DNA
tggtagtgttaacttttatagcacagttgagagctctgggaagccatggatccttatgcatcaaaggttatataaacagcaccacctagggaccaagtcaaaggcattat

SEQ ID NO: 17119 - DNA, 110 bp, synthetic construct
  source 1..110: mol_type = other DNA
taattctataatactttttacctacatgtcctttcaccttcgtccacaagcttactggggagggcaataatgaaagtccccctaaacaatctgctttcctatttcctgtt

SEQ ID NO: 17120 - DNA, 110 bp, synthetic construct
  source 1..110: mol_type = other DNA
cgcttgaggcaacttcactaaaagcacagggtatgcatttatgaatacgtgcttctgccctccaaaagtttttaattaaaagggcaacacttcagctctatattaattat

SEQ ID NO: 17121 - DNA, 110 bp, synthetic construct
  source 1..110: mol_type = other DNA
tacgtgcttctgccctccaaaagtttttaattaaaagggcaacacttcagctctatattaattatattaccaacattaaaacttctagagattaatttaggggaatatct

SEQ ID NO: 17122 - DNA, 110 bp, synthetic construct
  source 1..110: mol_type = other DNA
atggctcatccccatagagaagcttaggaccctccatacagacaaaaatatagctcaggctttccagtgctcatagcaagaggtcaactcttgcttttattccagtaaca

SEQ ID NO: 17123 - DNA, 110 bp, synthetic construct
  source 1..110: mol_type = other DNA
ctgttttctttattccatagtatttgtgaattgaaaccatcaacatacaaagagtttaccaccaggactgagacctgaggcctcagtatgaacatgatacaaaacatttt

SEQ ID NO: 17124 - DNA, 110 bp, synthetic construct
  source 1..110: mol_type = other DNA
cctggaatcagcacccagactgatgcttagggaaagaagggaagcttgcaaaattattgagatttcaaagcgatgtcagaaaaaagcatactgagtacccactcagaaca

SEQ ID NO: 17125 - DNA, 110 bp, synthetic construct
  source 1..110: mol_type = other DNA
gacattctcaaattataatgttaagctgaaaaaaggtccaaaactgcacatgcagatggacagctgcgtatttaaaaaccacctcacagaaaaaatgaaaaagtaaaatt

SEQ ID NO: 17126 - DNA, 110 bp, synthetic construct
  source 1..110: mol_type = other DNA
gactatttccccctttgctacagcgtgccccagcccacggcagggacttctcaaggattcctggatacattagttctgagaggacccagtgtgccctttaatagttaagt

SEQ ID NO: 17127 - DNA, 110 bp, synthetic construct
  source 1..110: mol_type = other DNA
gattcctggatacattagttctgagaggacccagtgtgccctttaatagttaagtaatctgtgagcacgtgacaaaatctctgctcgcaaaacatattcagagtgtgtta

SEQ ID NO: 17128 - DNA, 110 bp, synthetic construct
  source 1..110: mol_type = other DNA
actttgtcatctcatagacatctcacactcgtctttgtcaaagctgctttcacaaacttgcccctcttcctggctatctaagctcaaaaaatgtctccaacattcagcca

SEQ ID NO: 17129 - DNA, 110 bp, synthetic construct
  source 1..110: mol_type = other DNA
acaaagacctaagaaagcaaagaaacaagccatgtggctatctgggggaacaatgctaaaggcagagggagcagcaagtgtaaaaggccttgaaaagagcacagggtaag

SEQ ID NO: 17130 - DNA, 110 bp, synthetic construct
  source 1..110: mol_type = other DNA
aaaaaaaaaaaaaaaatggttacagcttggagttccccctgtggctcagcggaaacgaaactgactagtatcccctgaggattcaggttcaaaccttggcctcactcagt

SEQ ID NO: 17131 - DNA, 110 bp, synthetic construct
  source 1..110: mol_type = other DNA
tcagcggaaacgaaactgactagtatcccctgaggattcaggttcaaaccttggcctcactcagtggttcggggatccggtgttgtcacgaactgtggtgtaggtcacag

SEQ ID NO: 17132 - DNA, 110 bp, synthetic construct
  source 1..110: mol_type = other DNA
aaaagaatgcataacagtagttcctggggccacacagtaagaatccgactgcactggcttgggttgctaggaaaatgagggttctatcaccacctggtgcgcttggttaa

SEQ ID NO: 17133 - DNA, 110 bp, synthetic construct
  source 1..110: mol_type = other DNA
ccattttccccgccgcggcctcccctgcagccacgccaaagacgtcacggccctgcccagcaaccattgagcttcggagccagccgtggaagaggcagcctagagcggcc

SEQ ID NO: 17134 - DNA, 110 bp, synthetic construct
  source 1..110: mol_type = other DNA
gtttactgggagactgagggagaggaaaaaaagggaggaagaaggggagaaccgacaggtgagagctagactgaagcagtttacctatatttgttgcctttctgtgatct

SEQ ID NO: 17135 - DNA, 110 bp, synthetic construct
  source 1..110: mol_type = other DNA
tgtattaacttttctttattgttttccttttttggttgtgccctcagtatgtgaaagttccatcctgggccagggatcgaacctatgccacatcagcaatctgagctgca

SEQ ID NO: 17136 - DNA, 110 bp, synthetic construct
  source 1..110: mol_type = other DNA
gatacttgaagacagccacagtatcaccacagggtccttgcgtagtactttatattctgaaggctgctgtatgtcagcttgctaacagcatccatgtggataaacatctc

SEQ ID NO: 17137 - DNA, 110 bp, synthetic construct
  source 1..110: mol_type = other DNA
gttttacccatgtgggatactcagcactgcatccccggagatgggcagttagtctgtgctgtagcccccctctagaagcagcacattgcattttcaggcatctctgttta

SEQ ID NO: 17138 - DNA, 110 bp, synthetic construct
  source 1..110: mol_type = other DNA
gtgctgtagcccccctctagaagcagcacattgcattttcaggcatctctgtttaattaattgattcgaattaatattatgtgaacacttgccagatgttgtgttaagtc

SEQ ID NO: 17139 - DNA, 110 bp, synthetic construct
  source 1..110: mol_type = other DNA
acatgtaactcttctttagctttacatgaattatgttgaaatttgaagcatggagttaaatgacagctgaaataaatactaactaaacaacttgcttcctgttttcctga

SEQ ID NO: 17140 - DNA, 110 bp, synthetic construct
  source 1..110: mol_type = other DNA
ttaaatgacagctgaaataaatactaactaaacaacttgcttcctgttttcctgaaagtatctgacatggctagttttacattccagctactcagctcaggatatgtccc

SEQ ID NO: 17141 - DNA, 110 bp, synthetic construct
  source 1..110: mol_type = other DNA
tttccagtaaagtcttctcattgtggttttttgtttacagggagtttttaaaattagactctatttcacctccagtgattggtctagtcaagttatctatttcttcttga

SEQ ID NO: 17142 - DNA, 110 bp, synthetic construct; identical to SEQ ID NO: 17141
  source 1..110: mol_type = other DNA

SEQ ID NO: 17143 - DNA, 110 bp, synthetic construct
  source 1..110: mol_type = other DNA
agtggccaatgtcaacactggcaggttcagtctgtctcattcagtcatccaaagtcaccagacagtgaagtattggcctgaggtttcagggcgctggggattctgaccac

SEQ ID NO: 17144 - DNA, 110 bp, synthetic construct
  source 1..110: mol_type = other DNA
caccagacagtgaagtattggcctgaggtttcagggcgctggggattctgaccacagtggaaacagtggttattttagccaaaatggaaatcacttacacaaacagctgg

SEQ ID NO: 17145 - DNA, 110 bp, synthetic construct
  source 1..110: mol_type = other DNA
cctgtgaatacttcagcatgtgttctaacaggtaaatatttttagtactgccttgtttttctcgtaacaataatcccatgatattgttttataacttgtccatgtttaaa

SEQ ID NO: 17146 - DNA, 110 bp, synthetic construct
  source 1..110: mol_type = other DNA
tttttctcgtaacaataatcccatgatattgttttataacttgtccatgtttaaatttctctggtgatctttaagaatgccttcttagagttgctgcctttttgaatcag

SEQ ID NO: 17147 - DNA, 110 bp, synthetic construct
  source 1..110: mol_type = other DNA
tcaggctgaaaatcgttcagaactaacagagcttcaacgtggttgcaggtctgatgggtctgctctctcttcccgtttccttggatgaacctgactctcctgcattaaaa

SEQ ID NO: 17148 - DNA, 110 bp, synthetic construct
  source 1..110: mol_type = other DNA
attttttttcctgctcattgtcaacccactctgtcatcatcatcatcacattatcaccagcttcataagactgtcttgccatcctctgctgttcttcaactttctttttc

SEQ ID NO: 17149 - DNA, 110 bp, synthetic construct
  source 1..110: mol_type = other DNA
tttaaacatagtaggcaaggcatttgctgatttatggttacataaatacctactcaagatgtgaacaaaatcattgaaacagtgtaatccacttacacagtttgcaagaa

SEQ ID NO: 17150 - DNA, 110 bp, synthetic construct
  source 1..110: mol_type = other DNA
cattcggtgacacccttcaatctatgagcagtgaggacaaaaataaaacatagcagctattaaaattaattattttccctcttaggctatttcagagcagttcgccagga

SEQ ID NO: 17151 - DNA, 110 bp, synthetic construct
  source 1..110: mol_type = other DNA
gctattaaaattaattattttccctcttaggctatttcagagcagttcgccaggaacctgtccaattcggagaaattggcggtcacacccaaattaattacgtccagtgg

SEQ ID NO: 17152 - DNA, 110 bp, synthetic construct
  source 1..110: mol_type = other DNA
gaattattaaagtgcagtgttatcttcctccctgtcacgatgagtctgtattcctggaatctaagcttggccatatgacatactttcatcagtgggacattagcatttat

SEQ ID NO: 17153 - DNA, 110 bp, synthetic construct
  source 1..110: mol_type = other DNA
ggaatctaagcttggccatatgacatactttcatcagtgggacattagcatttattccacaaacagaagcctgaaagcatctgctcatcagggcatgccttttcttattg

SEQ ID NO: 17154 - DNA, 110 bp, synthetic construct
  source 1..110: mol_type = other DNA
ataatgtcctcaaaacccatcacctacaactgaattacaatctatttcacagtaaaaccctgaaaaacagatttttcaaagctctttataatgacagtattgaactgtcc

SEQ ID NO: 17155 - DNA, 110 bp, synthetic construct
  source 1..110: mol_type = other DNA
caactcagggagttggagttccacctgggtctcagcctggatgctctccagggcagctggagcagccctagtgctcacctcgtttgtctgtgatttcttgaaaacctttg

SEQ ID NO: 17156 - DNA, 110 bp, synthetic construct
  source 1..110: mol_type = other DNA
atcaggaaggaagagaagttgttgcctggaacaatcactatttgatcaaataattctattgctattatttttagctcctctaaaaacgcctgttgctaaggaacccgatt

SEQ ID NO: 17157 - DNA, 110 bp, synthetic construct
  source 1..110: mol_type = other DNA
tcttgaggtcaagattatctttttactcaagcagagctcaactcctcagtagtgctgcctttactttgaagtttcaacaggagacaagctccagctactgagcctggggt

SEQ ID NO: 17158 - DNA, 110 bp, synthetic construct
  source 1..110: mol_type = other DNA
ctattgaaagttgtttgcagagtagcttaggccaaccatggggtgaagttctcgtcatgtatctgtcgtgatatcattcagcaccggatgcctcgtaatggaggctgcag

SEQ ID NO: 17159 - DNA, 110 bp, synthetic construct
  source 1..110: mol_type = other DNA
ttttggccacctgcagccataaggacttccctggctagggatcagatctgagctgcagttgtgacctatgttccagatgcggggacactggatccttaacccattgtgct

SEQ ID NO: 17160 - DNA, 110 bp, synthetic construct; identical to SEQ ID NO: 17159
  source 1..110: mol_type = other DNA

SEQ ID NO: 17161 - DNA, 110 bp, synthetic construct
  source 1..110: mol_type = other DNA
aagaaagtaatttaaaactacaagctatcgtcacaaacctattaaagtccagcattaaaaaaacagcaccattgggagttcatgtcgtggctcagcagtaatgaacctga

SEQ ID NO: 17162 - DNA, 110 bp, synthetic construct; identical to SEQ ID NO: 17161
  source 1..110: mol_type = other DNA

SEQ ID NO: 17163 - DNA, 110 bp, synthetic construct; identical to SEQ ID NO: 17161
  source 1..110: mol_type = other DNA

SEQ ID NO: 17164 - DNA, 110 bp, synthetic construct; identical to SEQ ID NO: 17161
  source 1..110: mol_type = other DNA

SEQ ID NO: 17165 - DNA, 110 bp, synthetic construct
  source 1..110: mol_type = other DNA
acgattggtttgttgctggccctgaatcatgaagctactgagagggtcagggtaaccagttgtgtgacctgggggctaataggaaggcctgatctccccaacctcttgct

SEQ ID NO: 17166 - DNA, 110 bp, synthetic construct
  source 1..110: mol_type = other DNA
cagccttccctttgatgggttccaaacatcttgaggacatctttagtattttcaatcagagctgactcatttctattcccttgagcaaatatggccaaatggttcactgt

SEQ ID NO: 17167 - DNA, 110 bp, synthetic construct
  source 1..110: mol_type = other DNA
ctaagttcactaacgagttttagtaacttacataaatttactaaataaggggatgagagaactttgattaaccaactataaagctgtattcaaactctccattcctgtaa

SEQ ID NO: 17168 - DNA, 110 bp, synthetic construct
  source 1..110: mol_type = other DNA
ctgggagtgtatatgttggggtgcggtggtatgtagaatatgcctcaagtaacgtttggccatttcctgtaactaaattaagtaaatagttgcaaattctctacttgttc

SEQ ID NO: 17169 - DNA, 110 bp, synthetic construct
  source 1..110: mol_type = other DNA
ccagccccgttttctgtctgagtctgatttccagagctggaattttagttctcggctcctgtccatcccccattatggctgggaagtgcagggcgatgatactgaccatt

SEQ ID NO: 17170 - DNA, 110 bp, synthetic construct
  source 1..110: mol_type = other DNA
gacaggtaaggtaaagatagtttctcataggtggatgacaagcacatcgtctgtgttcccagacagcctgagccccacctgtttgtcaccttggagcactagttcaaaca

SEQ ID NO: 17171 - DNA, 110 bp, synthetic construct
  source 1..110: mol_type = other DNA
ctcactgggatatggaaaccagacattatcctttgccctgacactggcattactgggggctaattgaagtcctgttattaattcattgaacacatattttgtgagggctg

SEQ ID NO: 17172 - DNA, 110 bp, synthetic construct
  source 1..110: mol_type = other DNA
gtatggtctcaagcggggaaaggcaaacttgttcacccacatgttgaggggaaacaaagaagaccgtaatttgttcccctgtataaatgtgttccacccactcctagcca

SEQ ID NO: 17173 - DNA, 110 bp, synthetic construct
  source 1..110: mol_type = other DNA
aagtcatctagtttatggtactttgttatggcagctctagcaaactaatccagccattaagcacattgttttgaaaattgcttttttgaagttcctctggtggcacagca

SEQ ID NO: 17174 - DNA, 110 bp, synthetic construct
  source 1..110: mol_type = other DNA
ctagtgtttttgctctgttgcaaaggagtcatggattctttctttagccactggctcatgtctgcagatgagaattttatttgtatgtatttaaatgtgatttaaaacat

SEQ ID NO: 17175 - DNA, 110 bp, synthetic construct
  source 1..110: mol_type = other DNA
gagtcatggattctttctttagccactggctcatgtctgcagatgagaattttatttgtatgtatttaaatgtgatttaaaacatggttattcttttatggctaaatgta

SEQ ID NO: 17176 - DNA, 110 bp, synthetic construct
  source 1..110: mol_type = other DNA
gaaaacaaatatgtaagatcaatagagtttttcaacaatagtttatgtgtttgacctgtgagcagttgcaggctgagtggctacaaatgctttgtaggatctgccttcac

SEQ ID NO: 17177 - DNA, 110 bp, synthetic construct
  source 1..110: mol_type = other DNA
agttttctctcctagcaattcaagagtgccaggaatgagtgagccaagaaggagagttatggccctttgcaaacccataaggagtagttctcagtctgcacttgacaagt

SEQ ID NO: 17178 - DNA, 110 bp, synthetic construct
  source 1..110: mol_type = other DNA
gttatggccctttgcaaacccataaggagtagttctcagtctgcacttgacaagtcagagggtttagaagactgttttgtggtatagctgaatcccctgtgtgctgtgtt

SEQ ID NO: 17179 - DNA, 110 bp, synthetic construct
  source 1..110: mol_type = other DNA
cttccacacagaggactcaaataatcttgagtagtgaagactcgtctgtgatatttcatcatattttctaaggtgtaattttgatcaacacatttcaactggatggtggg

SEQ ID NO: 17180 - DNA, 110 bp, synthetic construct
  source 1..110: mol_type = other DNA
tcatcatattttctaaggtgtaattttgatcaacacatttcaactggatggtgggacataaaagtggattcagttggtttcttgaaaaacaaaaactttgtcagaaagga

SEQ ID NO: 17181 - DNA, 110 bp, synthetic construct
  source 1..110: mol_type = other DNA
ttatgaccggctggaatatatttcccagagcttaagcagggggcctgactacatacaacctttcagggtgtggacagaagcaggggttactttaggaaggaaacagaagc

SEQ ID NO: 17182 - DNA, 110 bp, synthetic construct
  source 1..110: mol_type = other DNA
taaacacatctaaaatgtaccttcaccacaacatctaaacttgtgtttgaccaaacaactgtacaccatggcctaggtaagttgacacatgaaattagccatcacactgt

SEQ ID NO: 17183 - DNA, 110 bp, synthetic construct
  source 1..110: mol_type = other DNA
ggaacctatttgtagtacttctcttgaaacattctctcccttcccacctccactacacatgctgctagctatcatctctgataacccatctagagatgttttagaccggg

SEQ ID NO: 17184 - DNA, 110 bp, synthetic construct
  source 1..110: mol_type = other DNA
actctgtagagtttattggctttataactgaatgaagtgaatggatgtaagctgtgatttatccatacaatggaatactacttaggatgagaaggactcaacaacatgat

SEQ ID NO: 17185 - DNA, 110 bp, synthetic construct
  source 1..110: mol_type = other DNA
tgtaagctgtgatttatccatacaatggaatactacttaggatgagaaggactcaacaacatgattatatctcaaaagaattattctgagtaaaaaagaccaaaccaaaa

SEQ ID NO: 17186 - DNA, 110 bp, synthetic construct
  source 1..110: mol_type = other DNA
ttaatttttctgtgatgacttctagaaaagaatcactgagatttatattcctttccaacctttccaccctggagtgagatcatagctgattctgtccttatacattttct

SEQ ID NO: 17187 - DNA, 110 bp, synthetic construct
  source 1..110: mol_type = other DNA
ctgccatgaaataaactttcaaaggtagtgatgtacattagtgttaactcttatggaaggtaaaggtagtgatgtaaattaatataattcttatgatgggagttcccgtg

SEQ ID NO: 17188 - DNA, 110 bp, synthetic construct
  source 1..110: mol_type = other DNA
gaaggtaaaggtagtgatgtaaattaatataattcttatgatgggagttcccgtggtggcccagtggttaacaaatccgactaatgcaggttcgatccctggccttgctc

SEQ ID NO: 17189 - DNA, 110 bp, synthetic construct
  source 1..110: mol_type = other DNA
tgaaggctggttggctttggttgagagtctcagtttgtttccatccaggaaacctagctgccacactgaattccattaatattttcaaggaacatcactacatgtctcca

SEQ ID NO: 17190 - DNA, 110 bp, synthetic construct
  source 1..110: mol_type = other DNA
tttatttgcatctgaattattgattccatctcccacaaaaacataagctctgttatgggggtttcatctgctttgttcgaagctgcatgaactatctagaacattttctt

SEQ ID NO: 17191 - DNA, 110 bp, synthetic construct
  source 1..110: mol_type = other DNA
atgtggagcagccataataataatggttataatataataatagaggtgctgtgttgtcttagacagatactttgtcagagttgttttaataccctaatttcttttcatag

SEQ ID NO: 17192 - DNA, 110 bp, synthetic construct
  source 1..110: mol_type = other DNA
caatatgcctgctttgggaaccatctgttataatgaggaactcatcatttgacgtcagcttttaataataaatttatggctgtcatattgcattgtgtaaaacaaacact

SEQ ID NO: 17193 - DNA, 110 bp, synthetic construct
  source 1..110: mol_type = other DNA
ctgctggatctcttagtgggtggaatcaaagcatttccagggaggataaagtgaaataactgtaattggcttcttcagggtctcagtatttgggagaaagaggctggctc

SEQ ID NO: 17194 - DNA, 110 bp, synthetic construct
  source 1..110: mol_type = other DNA
tctttatgctttgccctcttcagccaacttctgagcttttgtatgaggctttggggtccctctgtttcagctgttctccctttcagttaggtggcatcccaggctgtggg

SEQ ID NO: 17195 - DNA, 110 bp, synthetic construct
  source 1..110: mol_type = other DNA
atacaagggaggtttgacacattgttaatacatgtactaaataagatttgccacagttagtcaacaaccagaatttagttatacagttctagttttatttttggttcttg

SEQ ID NO: 17196 - DNA, 110 bp, synthetic construct
  source 1..110: mol_type = other DNA
ctcaccttcagtcagtatgtttcccaagatctgaagtcagtcgcatgtagatagcatacatgtgggtcttatttttgtatcccttcagtgagtctgtgttttttggttgg

SEQ ID NO: 17197 - DNA, 110 bp, synthetic construct
  source 1..110: mol_type = other DNA
tatgtttcccaagatctgaagtcagtcgcatgtagatagcatacatgtgggtcttatttttgtatcccttcagtgagtctgtgttttttggttggagcatttaacccact

SEQ ID NO: 17198 - DNA, 110 bp, synthetic construct
  source 1..110: mol_type = other DNA
ttcatgacatcaaagttctaaattctcctcaggagccagcccccaagaaggttgtcctccccatggaaactgtagctcacatcgagacttacacctaactctccacttta

SEQ ID NO: 17199 - DNA, 110 bp, synthetic construct
  source 1..110: mol_type = other DNA
tcctcaggagccagcccccaagaaggttgtcctccccatggaaactgtagctcacatcgagacttacacctaactctccactttacactgaaaactgttgaggaatctta

SEQ ID NO: 17200 - DNA, 110 bp, synthetic construct
  source 1..110: mol_type = other DNA
actaatcaggttcattttccctgagccacaacaggaattccctatgaagagtttttaaatgagtatagtatacctggaaaccaaagagctcatacatattacaaacttag

SEQ ID NO: 17201 - DNA, 110 bp, synthetic construct
  source 1..110: mol_type = other DNA
aattccctatgaagagtttttaaatgagtatagtatacctggaaaccaaagagctcatacatattacaaacttagaaaattgggattttagtttcactcataaggatggt

SEQ ID NO: 17202 - DNA, 110 bp, synthetic construct
  source 1..110: mol_type = other DNA
agcctggtcctgacctcagtacagcagtagggcagtctagacccacagaggagctgaaaggcctgtttccagccctctagacagaacaagaaaggcattcagtctataaa

SEQ ID NO: 17203 - DNA, 110 bp, synthetic construct
  source 1..110: mol_type = other DNA
gaaaggcctgtttccagccctctagacagaacaagaaaggcattcagtctataaaggtttatgaacatgattttcaataggatgcctgaagctgactgctcagcacttac

SEQ ID NO: 17204 - DNA, 110 bp, synthetic construct
  source 1..110: mol_type = other DNA
gacaaaatgccttagatctgtgagcaggaggtcccactaatatttcatcacagtgttaaacgtacttactatcttggtcaccagcgaagctagacaattcaggattcccc

SEQ ID NO: 17205 - DNA, 110 bp, synthetic construct
  source 1..110: mol_type = other DNA
ttaaacgtacttactatcttggtcaccagcgaagctagacaattcaggattcccctgtaaggacagtctcctttacctcatttcagagaacaaacccagacttgaagcag

SEQ ID NO: 17206 - DNA, 110 bp, synthetic construct
  source 1..110: mol_type = other DNA
actgagccacgacgggaactcctataagggcattttaaagtttgttatatttctatgttaaggcagtattttctgacattttaatgaaaagtgtctcctcctatgtatgt

SEQ ID NO: 17207 - DNA, 110 bp, synthetic construct
  source 1..110: mol_type = other DNA
tcattttgtttactttaaaaaagttgaaccacatcatcaaatgagagagtaactaatttcacctcctcacttcacaccccatctctatgcattataaagtcagttaatta

SEQ ID NO: 17208 - DNA, 110 bp, synthetic construct; identical to SEQ ID NO: 17207
  source 1..110: mol_type = other DNA

SEQ ID NO: 17209 - DNA, 110 bp, synthetic construct; identical to SEQ ID NO: 17207
  source 1..110: mol_type = other DNA

SEQ ID NO: 17210 - DNA, 110 bp, synthetic construct; identical to SEQ ID NO: 17207
  source 1..110: mol_type = other DNA

SEQ ID NO: 17211 - DNA, 110 bp, synthetic construct
  source 1..110: mol_type = other DNA
aagtgggtatgttatcctagtcccactgaccacagatattaattcagtgatgacagtaagaagccagtcctctcttttctcatattaataagcagagattatttaagcta

SEQ ID NO: 17212 - DNA, 110 bp, synthetic construct
  source 1..110: mol_type = other DNA
gtaagaagccagtcctctcttttctcatattaataagcagagattatttaagctagataattagatagttatgttttcagcttcttggaaagaaccctaatgcagtagca

SEQ ID NO: 17213 - DNA, 110 bp, synthetic construct
  source 1..110: mol_type = other DNA
caatacgcaccacttaaaagtagctgtcatttttgacaatgactaaaaagaattgcttgtggttaaaaataccgttacttaagaaaacctctgtgtaataataccagtgc

SEQ ID NO: 17214 - DNA, 110 bp, synthetic construct
  source 1..110: mol_type = other DNA
cgattggacccctagcctgtgaacctccatgtgctgtggaggctggcccgagaaaagataaaaataccaaaaaaaatttttgattttgcttctcagggaatgcatatatt

SEQ ID NO: 17215 - DNA, 110 bp, synthetic construct; identical to SEQ ID NO: 17214
  source 1..110: mol_type = other DNA

SEQ ID NO: 17216 - DNA, 110 bp, synthetic construct
  source 1..110: mol_type = other DNA
atattttgttcatttctgaatccccagtgtttaaaatatatctggcacacatcagaagctcaatattaatgaaaaggattagtacatgtattagcaatttcccaggatcc

SEQ ID NO: 17217 - DNA, 110 bp, synthetic construct; identical to SEQ ID NO: 17216
  source 1..110: mol_type = other DNA

SEQ ID NO: 17218 - DNA, 110 bp, synthetic construct
  source 1..110: mol_type = other DNA
tagcatcagagaggcttcttgtatttcgagttctttcctttcttacattgttcacttgtcatacatgggttttggatacttccctttaaaaaaaaaaatgaaacttgagg

SEQ ID NO: 17219 - DNA, 110 bp, synthetic construct
  source 1..110: mol_type = other DNA
cattgttcacttgtcatacatgggttttggatacttccctttaaaaaaaaaaatgaaacttgaggcctgaaatgtgcttaaatcattgttttttatagctctagtaaaag

SEQ ID NO: 17220 - DNA, 110 bp, synthetic construct
  source 1..110: mol_type = other DNA
tttttaaattatcagttattcttaagagtagaacaagaaaatgaccacacttattttcctttgagtaattctgaaaagcacagagtcctaatccagctatctctagcatg

SEQ ID NO: 17221 - DNA, 110 bp, synthetic construct; identical to SEQ ID NO: 17220
  source 1..110: mol_type = other DNA

SEQ ID NO: 17222 - DNA, 110 bp, synthetic construct; identical to SEQ ID NO: 17220
  source 1..110: mol_type = other DNA

SEQ ID NO: 17223 - DNA, 110 bp, synthetic construct; identical to SEQ ID NO: 17220
  source 1..110: mol_type = other DNA

SEQ ID NO: 17224 - DNA, 110 bp, synthetic construct
  source 1..110: mol_type = other DNA
tctttttagccttgtggaaaaagctaaatcctctgtaaataacccttttactcgtaactcagctgagctacctggtcaatcaatgaaggaagcattcactgtcaactaaa

SEQ ID NO: 17225 - DNA, 110 bp, synthetic construct
  source 1..110: mol_type = other DNA
ctcaacttgccctctacctctatcatggccctagtgatacaaactaccatcggaagcaagacgtaatttcctccataaggaaggcagtcttaaacagttcagccactgga

SEQ ID NO: 17226 - DNA, 110 bp, synthetic construct
  source 1..110: mol_type = other DNA
gataccaaccttggtcagttttgtattccatgaacactttaagaattcttggtttatctttccttttttaatgtcatcttttgatgccatcacttcaagcccttttacat

SEQ ID NO: 17227 - DNA, 110 bp, synthetic construct
  source 1..110: mol_type = other DNA
atctttccttttttaatgtcatcttttgatgccatcacttcaagcccttttacatagacctttgtctatacatagtaactaagacattctcatatacttcttacagatat

SEQ ID NO: 17228 - DNA, 110 bp, synthetic construct
  source 1..110: mol_type = other DNA
caatgagtgtactctcctgaattagttggtcacgaaggagtcagtgcctgaatgaatgtaatacaggctaggtaaatttaccatattggttatgaagtattgaccaaaaa

SEQ ID NO: 17229 - DNA, 110 bp, synthetic construct
  source 1..110: mol_type = other DNA
atgtaatacaggctaggtaaatttaccatattggttatgaagtattgaccaaaaattgctgatttgcgtagacaccagagaaaggaaagcataaatttatcaagaggtca

SEQ ID NO: 17230 - DNA, 110 bp, synthetic construct
  source 1..110: mol_type = other DNA
ctatgcaagcaacttgtatgtttttagttatagtaattcttttcccacacacaatctctatttgactaaattactagtagctcagttttaaaaagtacattttccattcc

SEQ ID NO: 17231 - DNA, 110 bp, synthetic construct
  source 1..110: mol_type = other DNA
cacctcagctaatctgtgaggatttcaattgctgtgaaaacaatctttgacttttttgcagttccactttagtccaagtatgagaaattgaaagttcagcttctggatcc

SEQ ID NO: 17232 - DNA, 110 bp, synthetic construct
  source 1..110: mol_type = other DNA
ttgcagttccactttagtccaagtatgagaaattgaaagttcagcttctggatcctcagaaggcaaaattttatggagatagattctgacaagttcagaggaaagagaag

SEQ ID NO: 17233 - DNA, 110 bp, synthetic construct
  source 1..110: mol_type = other DNA
ccatcactcctattgttttaaaccttggattcttgtatttcaaacaatttttagggaaaaatgataatagctatcagtttcaggtcacattactatttatccatggaaac

SEQ ID NO: 17234 - DNA, 110 bp, synthetic construct
  source 1..110: mol_type = other DNA
aaagacttacattgctctatcaggatggcagattttcagagatatggcatgggggagaagtaaatcccgtaatcattcatgcaataccatacttccctttaaaaaatagt

SEQ ID NO: 17235 - DNA, 110 bp, synthetic construct
  source 1..110: mol_type = other DNA
agaagtaaatcccgtaatcattcatgcaataccatacttccctttaaaaaatagtttctttggtctatagtaaaatcatgcaagatctcttgtcagtaaatcaaatactc

SEQ ID NO: 17236 - DNA, 110 bp, synthetic construct
  source 1..110: mol_type = other DNA
gataaccttctacctgttaagggccttggacttctagctgaaaaatcttcccaaaaagaaaactctggaccatgggagttcccctcgtggcagagcggaaatgaatccta

SEQ ID NO: 17237 - DNA, 110 bp, synthetic construct
  source 1..110: mol_type = other DNA
cttgcccttgccagcatttgtgaaacacacacatgtttcttttagattttccagtctccagcctgctgtgagctagagactgaagattccacctggacctccacactgcc

SEQ ID NO: 17238 - DNA, 110 bp, synthetic construct
  source 1..110: mol_type = other DNA
ttacaccagctagaatttaaagtttatattgaataagatgtattaaaagtagacttccttgggagttcccattatggcacagtagaaatgaatctgactagtatccacca

SEQ ID NO: 17239 - DNA, 110 bp, synthetic construct; identical to SEQ ID NO: 17238
  source 1..110: mol_type = other DNA

SEQ ID NO: 17240 - DNA, 110 bp, synthetic construct
  source 1..110: mol_type = other DNA
ctcttgtgcaggttatgggcagaagggggcaaacctcctcggccttctcagacgccagatttgaaagtgggaactgtgaacatgtacctcaagggtcatcacagaggagg

SEQ ID NO: 17241 - DNA, 110 bp, synthetic construct
  source 1..110: mol_type = other DNA
atgtttacaggagaagagagagcattttggtatggaatgagctgccatgtatccatgtgccattgctgtatcaaaattggatcttccatgaaatgtttaaaataaatgtt

SEQ ID NO: 17242 - DNA, 110 bp, synthetic construct
  source 1..110: mol_type = other DNA
aatgagctgccatgtatccatgtgccattgctgtatcaaaattggatcttccatgaaatgtttaaaataaatgttttatttaaaaccatggatcttgtcacataatggaa

SEQ ID NO: 17243 - DNA, 110 bp, synthetic construct
  source 1..110: mol_type = other DNA
gcttgtgataacagaaacacaataaaacttttttagctaaaagtcaaacttacgttgctaatacttcaaaaatattgaaaagactggcaacctaactccgaaaggatttt

SEQ ID NO: 17244 - DNA, 110 bp, synthetic construct
  source 1..110: mol_type = other DNA
ctgttggtttattgacagcttctctccagagaaatataacaaataggtgtatatattaaaatacagagcttatcagagtgggttgaaaaaaaaaagagagagaggaccaa

SEQ ID NO: 17245 - DNA, 110 bp, synthetic construct
  source 1..110: mol_type = other DNA
gtctatcttttctatagggtagcttatttcctccagctgaagcctcccacaaggctcctaaaggttatatgcatttcagaattggattcattgagaaaagtcaaaactgt

SEQ ID NO: 17246 - DNA, 110 bp, synthetic construct
  source 1..110: mol_type = other DNA
ttctcttggctaataaacacttcacaagctaaaccctctccctgcaacttcttactcacttccttaccctcactggccacatctcctatatgccccaccccaaactccct

SEQ ID NO: 17247 - DNA, 110 bp, synthetic construct
  source 1..110: mol_type = other DNA
ctcatatctgaatagaacaccagttatggcctacagtgcaaagatgcaagacataataactaaattaggagttcctgctgtggcacaatggtatcggtggcatctcggga

SEQ ID NO: 17248 - DNA, 110 bp, synthetic construct
  source 1..110: mol_type = other DNA
gtggtgaaggtcgcagatgcaactcagataccccattgctgtggctgctgcagctgaggtcggcagctgtagctgatttgacccctagcatgggaacttcatatgccaca

SEQ ID NO: 17249 - DNA, 110 bp, synthetic construct
  source 1..110: mol_type = other DNA
tgatttcattctaagtgcagtgcaaagccacttaaaatttttcagctgagggattgaattgaagatttaaaaataattatttgactgttatgtagaaaatggtctggatg

SEQ ID NO: 17250 - DNA, 110 bp, synthetic construct
  source 1..110: mol_type = other DNA
aattaacggcaagatataagaattactgcacttttgttgttattaacttgaatacaccctccaaattacatggcaaatagaaagcttttctcactgtcaggactccaaat

SEQ ID NO: 17251 - DNA, 110 bp, synthetic construct
  source 1..110: mol_type = other DNA
gttaagtgttttaagtgtgaaataatatgcgtcatactggggctctttaggataacaatagaaatatatgtatcatcactgtgtgtgtgtgactgtggtatatgagccat

SEQ ID NO: 17252 - DNA, 110 bp, synthetic construct
  source 1..110: mol_type = other DNA
caatagaaatatatgtatcatcactgtgtgtgtgtgactgtggtatatgagccatagtaataacagtcacagtaatatagtgggatgggtgagttaaggtgttaataaaa

SEQ ID NO: 17253 - DNA, 110 bp, synthetic construct
  source 1..110: mol_type = other DNA
gcagaaatttgagaaactcctttttaatgtccaaatacttggcatttccataatcctttatatttgcaaattgctccacagtcatactcattatgtatgcttcaccatcc

SEQ ID NO: 17254 - DNA, 110 bp, synthetic construct; identical to SEQ ID NO: 17253
  source 1..110: mol_type = other DNA

SEQ ID NO: 17255 - DNA, 110 bp, synthetic construct
  source 1..110: mol_type = other DNA
gtcttcgtcacttaggttttttgtgtgatcattgttttaagatgttctcagaggctagttccagagctaatctatcaaatccgaagacctttgttagcacaggtattcat

SEQ ID NO: 17256 - DNA, 110 bp, synthetic construct
  source 1..110: mol_type = other DNA
tgtagtaactgtatatataaatctttaagcagtggtggaaacatggtcctgaaagttatgttgagatgatagctgaagtccctttatatggtgagactgaccccaaaggg

SEQ ID NO: 17257 - DNA, 110 bp, synthetic construct
  source 1..110: mol_type = other DNA
cttttggcatcaacaacatgaatgtggtgatatcaaattacatttttccctctgaagttcacataggcctggtgataattctagtagatgatttgtctctagtttatcag

SEQ ID NO: 17258 - DNA, 110 bp, synthetic construct
  source 1..110: mol_type = other DNA
agttcacataggcctggtgataattctagtagatgatttgtctctagtttatcagtttccccactgaaagtcagagaggaaaaaggtgaaatcgcaacatgtaaattgtg

SEQ ID NO: 17259 - DNA, 110 bp, synthetic construct
  source 1..110: mol_type = other DNA
atgctgagaagatggccaaaaattccccaaaacgaaacaaaacaaccactccaagatttgcgcattggagaatatctaagacagaagggaagagctgttaaagagataac

SEQ ID NO: 17260 - DNA, 110 bp, synthetic construct
  source 1..110: mol_type = other DNA
taaaaaaaaaaaaaattgtcccagaaaactttctgccagactaagagcgaccagtgctgagcttgtgtgataaaacaccgaggcccttgaggataaattggtggcaggaa

SEQ ID NO: 17261 - DNA, 110 bp, synthetic construct
  source 1..110: mol_type = other DNA
gttctccaccaataatagtgatctggttctcgtctcttctgccaagagatgccgaggttgtaggaggaactggcacatatacaacaaatggtgtagcccacgaagatact

SEQ ID NO: 17262 - DNA, 110 bp, synthetic construct
  source 1..110: mol_type = other DNA
acctccaaatagtttttttcacttttaatctgtctaattagagtgactgctttcaccaataccttgatgtaattagcatcaggcagtaatctgtctgtaatatgtaaaat

SEQ ID NO: 17263 - DNA, 110 bp, synthetic construct
  source 1..110: mol_type = other DNA
aattagagtgactgctttcaccaataccttgatgtaattagcatcaggcagtaatctgtctgtaatatgtaaaatcaaaaaagtgattccagaacagtacttaaaattaa

SEQ ID NO: 17264 - DNA, 110 bp, synthetic construct
  source 1..110: mol_type = other DNA
acttcgttgtttcttcagtcctcttataaggagcctggaatctccacaagctacaaccacaccctgttacacactgtagaagcaatcgctcatttcaatcagtttcttgg

SEQ ID NO: 17265 - DNA, 110 bp, synthetic construct
  source 1..110: mol_type = other DNA
ccacgatgggaactcccagcttcttttctttttttttttttaaactattagtacattttccatggatattttcattcccgttacagtctagaaaggggccaagtcaatta

SEQ ID NO: 17266 - DNA, 110 bp, synthetic construct
  source 1..110: mol_type = other DNA
ttttccatggatattttcattcccgttacagtctagaaaggggccaagtcaattagtgctaatatcttgatatatggattttagtaaatataatagcatcctttctagct

SEQ ID NO: 17267 - DNA, 110 bp, synthetic construct
  source 1..110: mol_type = other DNA
ggcccatcactcattcactcactaacacaaggtattggcaaaaatagcccaggagccaaatctggcctgccatcagtttttgtgtagcccataagcttagaacaatttac

SEQ ID NO: 17268 - DNA, 110 bp, synthetic construct
  source 1..110: mol_type = other DNA
ccaaatctggcctgccatcagtttttgtgtagcccataagcttagaacaatttacatattttaatggttgtaaaaaaaaatcaaaagaagattttgtgaaatgggaaaag

SEQ ID NO: 17269 - DNA, 110 bp, synthetic construct
  source 1..110: mol_type = other DNA
tctctgtctttactttacccatcatctcacactcacaaatgcttccacctttagcctcagtacttctcagttcctatacccctagactaagtcaaaaaccaggacagcct

SEQ ID NO: 17270 - DNA, 110 bp, synthetic construct
  source 1..110: mol_type = other DNA
aagatagattaatatctcatgatagtacagtgagattttacatagagaggcgtatacatgaaaagtaagatggagtcactaactgtgctaagcaaaaatataattatgtg

SEQ ID NO: 17271 - DNA, 110 bp, synthetic construct
  source 1..110: mol_type = other DNA
atggtgggggaggaggaagaaacacaaagtgaatgggagaaattgccatctatctcacacaaaaccattttaaaatgccttctacccaaacagagtgcttctgtctatgg

SEQ ID NO: 17272 - DNA, 110 bp, synthetic construct
  source 1..110: mol_type = other DNA
cacacaaaaccattttaaaatgccttctacccaaacagagtgcttctgtctatggaaagattgcagcagctcacacagtgctcctgagggaaatattatcaatgacgtgc

SEQ ID NO: 17273 - DNA, 110 bp, synthetic construct
  source 1..110: mol_type = other DNA
cctctacttggatcctgcttccttctgagctgggttgtcaggtcttgctgatattcctaccaataaattccttttctgactaaatcagcctgaatgggtttctgatgcta

SEQ ID NO: 17274 - DNA, 110 bp, synthetic construct
  source 1..110: mol_type = other DNA
ctgttaattaaagtggaagaatcctgaggagaaaaaaagccacctggagggactgcttactctctgaagccttaataaattgttcattagcttgttcaacacatgcacac

SEQ ID NO: 17275 - DNA, 110 bp, synthetic construct
  source 1..110: mol_type = other DNA
tagagtttttggatctttctgttaaaaaatgttggtctgtttcactatatgaagagtagttggaatataagctcaaagagatggatagggtatatgtgacttttaattct

SEQ ID NO: 17276 - DNA, 110 bp, synthetic construct
  source 1..110: mol_type = other DNA
tatcatgttaaaaatcaagttaattttatatagtaatttggtaccaaaaaatcatcacatcatgatacaggaatttgtagagacctcactaaaggcacctcaggtgttaa

SEQ ID NO: 17277 - DNA, 110 bp, synthetic construct
  source 1..110: mol_type = other DNA
tcaaaagttatcctgtacaaaatactgtgctgattccatgaaatagttgcaacctttgtcctgtattcccttgtgtctctgtatccctaagccagagatgagcatggtat

SEQ ID NO: 17278 - DNA, 110 bp, synthetic construct
  source 1..110: mol_type = other DNA
tgaccattgcaagttatctagctaccaatgactttcaaaatgacgaggaagcataagtctagcctgtacctaggaagtaaatgagaaatgaatggtagaggagttcccat

SEQ ID NO: 17279 - DNA, 110 bp, synthetic construct
  source 1..110: mol_type = other DNA
acgtgaaccaaggaatgaagtagcatctgccagctggaaatggcaaagaaatagattttcccctagcacctctagaaggaatacaactctgtgatccattttggacttct

SEQ ID NO: 17280 - DNA, 110 bp, synthetic construct
  source 1..110: mol_type = other DNA
ctattatgtttgttgagctttgttaatggggaatgttcagccaaattactttaaatactctttcagccactttctttttcttctccatctgttggaccttttattattgt

SEQ ID NO: 17281 - DNA, 110 bp, synthetic construct; identical to SEQ ID NO: 17280
  source 1..110: mol_type = other DNA

SEQ ID NO: 17282 - DNA, 110 bp, synthetic construct; identical to SEQ ID NO: 17280
  source 1..110: mol_type = other DNA

SEQ ID NO: 17283 - DNA, 110 bp, synthetic construct; identical to SEQ ID NO: 17280
  source 1..110: mol_type = other DNA

SEQ ID NO: 17284 - DNA, 110 bp, synthetic construct
  source 1..110: mol_type = other DNA
gaagaaaaaagagaaagattttaaaatgttcttgttgaaagtaacatgggggaaagaagcaaggagccatgtgtaataagcaaaatcaagaaaaagattagatttgaagc

SEQ ID NO: 17285 - DNA, 110 bp, synthetic construct; identical to SEQ ID NO: 17284
  source 1..110: mol_type = other DNA

SEQ ID NO: 17286 - DNA, 110 bp, synthetic construct
  source 1..110: mol_type = other DNA
taagtcctctttatgctttacctgggtgttgaagaaaccaaaaattttagagtcggagaaagtggccctgggacttggagtctttcctccccacacttacagaggtgtgg

SEQ ID NO: 17287 - DNA, 110 bp, synthetic construct
  source 1..110: mol_type = other DNA
aacagggaatcagggaaccaggagctcaaagacaggttgtcgcaaatttctctagtgcaattttacagcacatggactagtttagattgtcaatttgtgtagtgttgggt

SEQ ID NO: 17288 - DNA, 110 bp, synthetic construct
  source 1..110: mol_type = other DNA
aaggccagctaggtggcaatagctcacagggttggggcaagcttctctagaaggctgcatatagtctgaatcaacatccaatatgtggggcagtttctcatataggtagt

SEQ ID NO: 17289 - DNA, 110 bp, synthetic construct
  source 1..110: mol_type = other DNA
aaaaggtttagattttaaagcattccttggtttcaagaggataaatgaatagattggaagggagatagcatggggtcttcgggaaccactgaaaggctgtagtggtagat

SEQ ID NO: 17290 - DNA, 110 bp, synthetic construct; identical to SEQ ID NO: 17289
  source 1..110: mol_type = other DNA

SEQ ID NO: 17291 - DNA, 110 bp, synthetic construct
  source 1..110: mol_type = other DNA
tatgctgatggctagtatatttttacctccaactctaacttttcccctgagctgtgtcccaactaccttgtgatgcctgcatttgaatatctaacaggctgatcaaaact

SEQ ID NO: 17292 - DNA, 110 bp, synthetic construct
  source 1..110: mol_type = other DNA
agacaaatcacataaagaattatattctctgtatgactcagggattaacagacaaaacataaagctaattgtagctatcattggctggaccatcactaagccaatactta

SEQ ID NO: 17293 - DNA, 110 bp, synthetic construct
  source 1..110: mol_type = other DNA
taggtgttctcacaatggagacaattaaaaatcttctgaaaatcaggattaataaggtttgcaagaacctaagatggattatctaaatgatttacttgtatattgccaga

SEQ ID NO: 17294 - DNA, 110 bp, synthetic construct
  source 1..110: mol_type = other DNA
ggtttgcaagaacctaagatggattatctaaatgatttacttgtatattgccagaatgtgtaagaactttagcgttgtttgtaaatacttttgccatctgtttaactaaa

SEQ ID NO: 17295 - DNA, 110 bp, synthetic construct
  source 1..110: mol_type = other DNA
taaataaaacaaaactaaatatttacccatctattaatttaaaaattatcaaaagagctaaaatcttttcctttcacccctcccagttccaccttcctagattacagctg

SEQ ID NO: 17296 - DNA, 110 bp, synthetic construct
  source 1..110: mol_type = other DNA
atgtatttggagtagtcagacttcctttacccatttctcactgcccccccccccataggacagcaaagccctcagggccgctaataatcctgctgttgctgctacaattt

SEQ ID NO: 17297 - DNA, 110 bp, synthetic construct
  source 1..110: mol_type = other DNA
taggacagcaaagccctcagggccgctaataatcctgctgttgctgctacaatttagctaagagtctgttcatgaaaacttttctcagaacgacatagtggtatgcaagg

SEQ ID NO: 17298 - DNA, 110 bp, synthetic construct
  source 1..110: mol_type = other DNA
aacacagtggatattgaaactctcaagtctttttcttcaacttgggttcaggaattctgtcagccaggttgctactagctaaacattgagcatgagaaattgcttttgtt

SEQ ID NO: 17299 - DNA, 110 bp, synthetic construct
  source 1..110: mol_type = other DNA
tctgtcagccaggttgctactagctaaacattgagcatgagaaattgcttttgtttaatctgaaaagactatgaggaaaagcctaaaaatagtgactgggggagttcccg

SEQ ID NO: 17300 - DNA, 110 bp, synthetic construct
  source 1..110: mol_type = other DNA
caagaagaatatccacctaataccagccatccatattgtttttgttgatgtttgggattccttccttttctcttagggactatgtagcttttactatatagaaaaacatg

SEQ ID NO: 17301 - DNA, 110 bp, synthetic construct
  source 1..110: mol_type = other DNA
cattgcagagtagtcattattttgaaggaatactgagctcctctcagtgaaactaaatttaaaatctgcttcaatctaaaattaaagaaataccaaatcagaagtttgga

SEQ ID NO: 17302 - DNA, 110 bp, synthetic construct
  source 1..110: mol_type = other DNA
tacaggttcacgtaaaaatttctccggcattaaaagaatatcctttcatgaccacattttatagctgtaagctctgaccagaaaattgtagttagttctactcttgtata

SEQ ID NO: 17303 - DNA, 110 bp, synthetic construct
  source 1..110: mol_type = other DNA
aaaatgctaaatattcagtgagtggtacaaaaaagatgcccttagaatggtggttataattataaatactgctgcagataacaaaatagagctagttgcttggatatata

SEQ ID NO: 17304 - DNA, 110 bp, synthetic construct
  source 1..110: mol_type = other DNA
atgcccttagaatggtggttataattataaatactgctgcagataacaaaatagagctagttgcttggatatatacattttctgctttagcaaatataacagtaaaggaa

SEQ ID NO: 17305 - DNA, 110 bp, synthetic construct
  source 1..110: mol_type = other DNA
gctatctttgtttttgggaaatcatctgtttcatgggcttatttgatgagaaggtgtgtgcaagtctggattcagctgggttgaggctgatttttttttttttttttttt

SEQ ID NO: 17306 - DNA, 110 bp, synthetic construct
  source 1..110: mol_type = other DNA
taccaagattatgggaattcagaggagtagcagagtacatatatttaagtgaggaaaggctataaaaagtatcatttgaaattggctttgaatatttggtaaatagtcaa

SEQ ID NO: 17307 - DNA, 110 bp, synthetic construct
  source 1..110: mol_type = other DNA
aattcagaggagtagcagagtacatatatttaagtgaggaaaggctataaaaagtatcatttgaaattggctttgaatatttggtaaatagtcaaccatgtgaaatagga

SEQ ID NO: 17308 - DNA, 110 bp, synthetic construct
  source 1..110: mol_type = other DNA
agtaagagaaattgatggtgataacattgagcttagtttcaacatactgaatttctgatcctgtttaatatccaagaaaagatgacagaaagcattgggagatacaaatc

SEQ ID NO: 17309 - DNA, 110 bp, synthetic construct
  source 1..110: mol_type = other DNA
tgatcctgtttaatatccaagaaaagatgacagaaagcattgggagatacaaatctagatgcatggaaagagagccagaccaggagatgcagatttaaaagcctttaaat

SEQ ID NO: 17310 - DNA, 110 bp, synthetic construct; identical to SEQ ID NO: 17308
  source 1..110: mol_type = other DNA

SEQ ID NO: 17311 - DNA, 110 bp, synthetic construct; identical to SEQ ID NO: 17309
  source 1..110: mol_type = other DNA

SEQ ID NO: 17312 - DNA, 110 bp, synthetic construct
  source 1..110: mol_type = other DNA
gtttccccttctctcagtgcacagagctaaacatttaccagcgccatttgtagctgaagattaaccatgtgatttgtattctagacaaatgaaagaaggcctagccaata

SEQ ID NO: 17313 - DNA, 110 bp, synthetic construct
  source 1..110: mol_type = other DNA
tttaataaactgattcccacatggaatgtagtgacacaaattgacaaccttgcccaaattatttacatttaaaacagaggctcgataaagaagtgaacctttaccaaagt

SEQ ID NO: 17314 - DNA, 110 bp, synthetic construct
  source 1..110: mol_type = other DNA
aaattatttacatttaaaacagaggctcgataaagaagtgaacctttaccaaagtaatatattttcttgttgtgaaatttcttcttctcctggccacgtgtcctggaata

SEQ ID NO: 17315 - DNA, 110 bp, synthetic construct; identical to SEQ ID NO: 17313
  source 1..110: mol_type = other DNA

SEQ ID NO: 17316 - DNA, 110 bp, synthetic construct; identical to SEQ ID NO: 17314
  source 1..110: mol_type = other DNA

SEQ ID NO: 17317 - DNA, 110 bp, synthetic construct
  source 1..110: mol_type = other DNA
aatcttccacagacacttaatgaagacatggttcaggggtttttctgttcttagatcactttgcccaccaagaaaagacaaaaacagcggatttcttcagttaaagcctg

SEQ ID NO: 17318 - DNA, 110 bp, synthetic construct
  source 1..110: mol_type = other DNA
cacttttttttgaattatccatttacttatctatctccctaactagattatttgcttcattatgccaagatcaaggtcttcatgccccttcaattataagctcctgaaat

SEQ ID NO: 17319 - DNA, 110 bp, synthetic construct
  source 1..110: mol_type = other DNA
ttcattatgccaagatcaaggtcttcatgccccttcaattataagctcctgaaatatatgaaccatacttctttactttttttttttgctttttagggccacacctgcag

SEQ ID NO: 17320 - DNA, 110 bp, synthetic construct
  source 1..110: mol_type = other DNA
agagtgagttagctgcattcctgactacagcttcgagttgctagtagctttcacgtggggtctatggaaataggaaaataaagacaagacaaaataaggattgcctgtga

SEQ ID NO: 17321 - DNA, 110 bp, synthetic construct
  source 1..110: mol_type = other DNA
ctgacagattttttctttgtattttgagtggtatttctgtatatgagtagtccataatttgtttatccatttacctgttaatggacagttgagctgtttgcattttttgg

SEQ ID NO: 17322 - DNA, 110 bp, synthetic construct
  source 1..110: mol_type = other DNA
gagtggtatttctgtatatgagtagtccataatttgtttatccatttacctgttaatggacagttgagctgtttgcattttttggctattaaaaatatagttgctatgat

SEQ ID NO: 17323 - DNA, 110 bp, synthetic construct
  source 1..110: mol_type = other DNA
ttaagattaaaataattcagtatgtcaatacagtcctcaatggaaatgatggcttaatgtgtcacctcaatttcttgtctatgtagtacagccatgtctagtgcttgttt

SEQ ID NO: 17324 - DNA, 110 bp, synthetic construct; identical to SEQ ID NO: 17323
  source 1..110: mol_type = other DNA

SEQ ID NO: 17325 - DNA, 110 bp, synthetic construct
  source 1..110: mol_type = other DNA
cttgagatggttgcaaaaatccataagggaactgttaaagtgcttattagaattatcagcttaaaaaattccatgataagaatataaatcaaaagctgtccctggactgc

SEQ ID NO: 17326 - DNA, 110 bp, synthetic construct; identical to SEQ ID NO: 17325
  source 1..110: mol_type = other DNA

SEQ ID NO: 17327 - DNA, 110 bp, synthetic construct
  source 1..110: mol_type = other DNA
ctgaatcctgtttccagttctcagtgaactgaaatttcaattctatttgacctgttaaggcatctaacccatatgatctcttgctccccctgaaacactctacatggcta

SEQ ID NO: 17328 - DNA, 110 bp, synthetic construct
  source 1..110: mol_type = other DNA
cagaggaagtgagaaaaaaacaaatctgggaaagttaagaacttgacatctgcagatgatggcaatactttagcacatggtctagttttgaagtgagaaggataagctta

SEQ ID NO: 17329 - DNA, 110 bp, synthetic construct
  source 1..110: mol_type = other DNA
atgatggcaatactttagcacatggtctagttttgaagtgagaaggataagcttaagaaaatgaataagtgctagtagaatatcggccctgctgcccatgtgaaatgcta

SEQ ID NO: 17330 - DNA, 110 bp, synthetic construct
  source 1..110: mol_type = other DNA
cacgatgtactctaatataagcaagggatggagttctaatagatatgacacagtacaaggagcattgtttttagataggatgttttaaaaatgttttccctgaggcatca

SEQ ID NO: 17331 - DNA, 110 bp, synthetic construct
  source 1..110: mol_type = other DNA
caaggagcattgtttttagataggatgttttaaaaatgttttccctgaggcatcagcagctctttaaatgactgttgctggtaacatcagaattgctcaagcagaacttc

SEQ ID NO: 17332 - DNA, 110 bp, synthetic construct
  source 1..110: mol_type = other DNA
acatactgatagaatatggtgtgaaaatcagcagttatattagggccctaaatgctgcttctacaacctaaactgctatattctaccttcatcctcaatttgaagctgta

SEQ ID NO: 17333 - DNA, 110 bp, synthetic construct
  source 1..110: mol_type = other DNA
ccgtatgtatgtatatgatgacatttggctctcactgtagcactccaggagtaggaaattgagacactgcacagtttctagttgctttaaagtaattaatagctggctct

SEQ ID NO: 17334 - DNA, 110 bp, synthetic construct
  source 1..110: mol_type = other DNA
ggtcctttggaatccatataaattctaggattgtttatgtatggaataccactggaatgttgataggaatttcaatgaatctatagacagctttaagtaatatggacaat

SEQ ID NO: 17335 - DNA, 110 bp, synthetic construct
  source 1..110: mol_type = other DNA
tcagtgggttaaaaatctggcattggcttgagctatggtgtagattgcagacagtacagatcctacattgttttggctctggcataggcgagaagctatagctccaaatg

SEQ ID NO: 17336 - DNA, 110 bp, synthetic construct
  source 1..110: mol_type = other DNA
ggatttggggaccagcaggataatacagggtgatctcaacttgagatctctaatgtcattcatctgcaaacaacctttttccaaattagatcatgtgcggtttccatgaa

SEQ ID NO: 17337 - DNA, 110 bp, synthetic construct
  source 1..110: mol_type = other DNA
aatcatgtgttgagatgtaggtgctataggactaaaacacttaaatcaatgagtcataacttcaaggacagctgacctggagagttgctcagacctatggcagaacttgt

SEQ ID NO: 17338 - DNA, 110 bp, synthetic construct
  source 1..110: mol_type = other DNA
cttaaatctggttattttaagaagtgccctgggaaaggcaaagcaggaatttacggcagggatcctctttcaaatccttacccaaatgtccatactctggatacaagcag

SEQ ID NO: 17339 - DNA, 110 bp, synthetic construct
  source 1..110: mol_type = other DNA
ggaggaaggaaggaagctggacaactcatgtggtatgtaacagataaagaatgcaaaatgacatttgttggatttcattcatcacagtgaggcaaattgtaaggccagaa

SEQ ID NO: 17340 - DNA, 110 bp, synthetic construct
  source 1..110: mol_type = other DNA
ggtcatgcttcctctaaagttgcctgagaaggcaccctttccatgcttctctcttagctgctgatagccgcttggcttgtagttgcatcactccagtgcactgtcttcac

SEQ ID NO: 17341 - DNA, 110 bp, synthetic construct
  source 1..110: mol_type = other DNA
acttgctcctttgttctttaactcattaatttgtaactcttttggttaacaatcactgcattacaagctatctcaaaaattggtggcttaaaacagtaacacttttttag

SEQ ID NO: 17342 - DNA, 110 bp, synthetic construct
  source 1..110: mol_type = other DNA
atggtctggttttgggagttgtcatagcattcagcattgagcctctttttttcagcactcccaatgatttaggaggtaccattatcttttaataaatcactttctgcttt

SEQ ID NO: 17343 - DNA, 110 bp, synthetic construct
  source 1..110: mol_type = other DNA
cactcccaatgatttaggaggtaccattatcttttaataaatcactttctgctttcattagctagagttctgtcatctgtaactaaaaaccctgatcattacgagttgcg

SEQ ID NO: 17344 - DNA, 110 bp, synthetic construct
  source 1..110: mol_type = other DNA
gatgaaaaagtcacagcttccctcctaaaattattatctattaatagtaataatgataatagctaacacatgtagtgcttactatatgataggcactatcctaagaactc

SEQ ID NO: 17345 - DNA, 110 bp, synthetic construct
  source 1..110: mol_type = other DNA
tatgtacatttcagtctaaacaagtgttataagttaaaaattgtgaattaaaaagcatattacagcatggcctctccctgaggtggtaaaaagttacagcttacaattat

SEQ ID NO: 17346 - DNA, 110 bp, synthetic construct
  source 1..110: mol_type = other DNA
catattacagcatggcctctccctgaggtggtaaaaagttacagcttacaattatagagcgattgctggctactgtggggatggctcctagtttgatttcattgattcct

SEQ ID NO: 17347 - DNA, 110 bp, synthetic construct; identical to SEQ ID NO: 17345
  source 1..110: mol_type = other DNA

SEQ ID NO: 17348 - DNA, 110 bp, synthetic construct; identical to SEQ ID NO: 17346
  source 1..110: mol_type = other DNA

SEQ ID NO: 17349 - DNA, 110 bp, synthetic construct
  source 1..110: mol_type = other DNA
agccacagccactgtagaagcaacaccgaatagttatcttgtgagccacacggaagtccgaccgtgctaatatttggagtataatatgttttgctggcccaggaccacac

SEQ ID NO: 17350 - DNA, 110 bp, synthetic construct; identical to SEQ ID NO: 17349
  source 1..110: mol_type = other DNA

SEQ ID NO: 17351 - DNA, 110 bp, synthetic construct
  source 1..110: mol_type = other DNA
ctctaaaagtacctagattagctcaggccagaagggcctttttagctcctactaatggccgccactttctattttgtgcagcctttgatgtcatgacagtgattatgagt

SEQ ID NO: 17352 - DNA, 110 bp, synthetic construct
  source 1..110: mol_type = other DNA
tgctaggtgttaatttaggccctaaatagaggggagaggggttgcagaaaggcagaactcccttgtagagattgattttaataaagtacaagggaaaacatcataattaa

SEQ ID NO: 17353 - DNA, 110 bp, synthetic construct
  source 1..110: mol_type = other DNA
agtgtcattttgcactcactccagtaatggaaataatgaaaaacattgcatgtaatttcatttcacagatgcctctagccatattgtcagctattgattaaaaccaatcg

SEQ ID NO: 17354 - DNA, 110 bp, synthetic construct
  source 1..110: mol_type = other DNA
tttcatttcacagatgcctctagccatattgtcagctattgattaaaaccaatcgtatgatgtagaggtaagtatacctcccctcccccacacacagagtggctctctat

SEQ ID NO: 17355 - DNA, 110 bp, synthetic construct
  source 1..110: mol_type = other DNA
ttgacagttgacttggatcaatgtcacaagggagaaaaagaacattctaatgcaacatttaagtcttttaactaagttgtaatagatagaactgtacaaggaaaatgtta

SEQ ID NO: 17356 - DNA, 110 bp, synthetic construct; identical to SEQ ID NO: 17355
  source 1..110: mol_type = other DNA

SEQ ID NO: 17357 - DNA, 110 bp, synthetic construct
  source 1..110: mol_type = other DNA
agtagatgagtttgggtcttttaatcacaggaccaacagctataggacaagaatggacagagcattggacagaggaaattactgaaacactatgcagtgataaatgcctc

SEQ ID NO: 17358 - DNA, 110 bp, synthetic construct
  source 1..110: mol_type = other DNA
acagagagggagctcaaaatgtcagaagactacctcaatcagctgtaaagtgttgtaacaaaattgggaagcaaatgtggtttggcctcattgctgtcaggaccccatct

SEQ ID NO: 17359 - DNA, 110 bp, synthetic construct
  source 1..110: mol_type = other DNA
ttctttaaccttttctatttgtagggaaaataggctatttaagtctactcctggttaaccatagctaatggaacatgacatgagtgaagcctgggacaagtcccttgagc

SEQ ID NO: 17360 - DNA, 110 bp, synthetic construct
  source 1..110: mol_type = other DNA
taaccatagctaatggaacatgacatgagtgaagcctgggacaagtcccttgagcaagaagctacagatatgtggaacaccaagaaactaagtcacttcctagtcagggg

SEQ ID NO: 17361 - DNA, 110 bp, synthetic construct
  source 1..110: mol_type = other DNA
tgcagtctactttttaaatccatttttgaggtaaacacatcacctgttaactcgttttgagcttgtaagcaatccttctgtccctcagcacacagtaaagagctatgaga

SEQ ID NO: 17362 - DNA, 110 bp, synthetic construct
  source 1..110: mol_type = other DNA
tgtgaaacttcatgcttctacaatgaagtttgattaatcctatcctgaatccagggtgttgagcatagaattttgtgtataatattgattgtaatgtaccttttgtaagt

SEQ ID NO: 17363 - DNA, 110 bp, synthetic construct
  source 1..110: mol_type = other DNA
catagttgtcatctgttttatttgtgattttctgatattattttaccttgtaattaaatatccacattcatacctaatgaagagtgagcagtctgtactcttccagtgtt

SEQ ID NO: 17364 - DNA, 110 bp, synthetic construct
  source 1..110: mol_type = other DNA
aaatatccacattcatacctaatgaagagtgagcagtctgtactcttccagtgttccctgccccaatcttactcaggaattcaactagggctcggctggacagttcctgt

SEQ ID NO: 17365 - DNA, 110 bp, synthetic construct
  source 1..110: mol_type = other DNA
ttgagagtgagcaactttcttaggggtcagaccacaatttggcatccttcttcaatgaaaaaggctggtacctgtcacttaagatgaggcctgtctacctgcatttctca

SEQ ID NO: 17366 - DNA, 110 bp, synthetic construct
  source 1..110: mol_type = other DNA
tgaaaaaggctggtacctgtcacttaagatgaggcctgtctacctgcatttctcacatagttcacagaacttaagtagtttggtacctcatcgctaaataaaaatcaatg

SEQ ID NO: 17367 - DNA, 110 bp, synthetic construct
  source 1..110: mol_type = other DNA
gctagtgtgtaagtgtagaatctaaagcatgttatggccgcttattttgagaagtgcaaattctagtttcaaataacttttcttagtctataagataagatagtgtagtg

SEQ ID NO: 17368 - DNA, 110 bp, synthetic construct; identical to SEQ ID NO: 17367
  source 1..110: mol_type = other DNA

SEQ ID NO: 17369 - DNA, 110 bp, synthetic construct
  source 1..110: mol_type = other DNA
ggcaaagtttggaaacttgaagggaatgaaaatgtgttacacatagatactctgtagtagttagttgtgtttagaaagtattgaattatagcatcattgatgtttttctg

SEQ ID NO: 17370 - DNA, 110 bp, synthetic construct
  source 1..110: mol_type = other DNA
agtagttagttgtgtttagaaagtattgaattatagcatcattgatgtttttctgtagtccctgaaacctaaaactcatattggtgaaaagattactttcactgccaaat

SEQ ID NO: 17371 - DNA, 110 bp, synthetic construct
  source 1..110: mol_type = other DNA
gtggacttgcccaattcaaacccatgtaaagggtcagctgtatgtgtgtataatatttataatagaataaattttctgttgattgtaagtcacccagcatatattttgtt

SEQ ID NO: 17372 - DNA, 110 bp, synthetic construct
  source 1..110: mol_type = other DNA
gaaataatgctgagcagtcagctaaaatgcattgatgtggcaatgcattttaaaactatatttaactctctgatttctgctcttgctttcaatagctttgaagggagaga

SEQ ID NO: 17373 - DNA, 110 bp, synthetic construct
  source 1..110: mol_type = other DNA
ctatatttaactctctgatttctgctcttgctttcaatagctttgaagggagagaataatggttccttttccttggtgccatcactctaaattccaaaggatattatgta

SEQ ID NO: 17374 - DNA, 110 bp, synthetic construct
  source 1..110: mol_type = other DNA
tgggaaaactggaaaatagcatgtaaataagtgaaacgggaacacaccctcataagaataaactcaaaatggctgaaagacttaaaagaaaagacaccatcaaactcctg

SEQ ID NO: 17375 - DNA, 110 bp, synthetic construct; identical to SEQ ID NO: 17374
  source 1..110: mol_type = other DNA

SEQ ID NO: 17376 - DNA, 110 bp, synthetic construct
  source 1..110: mol_type = other DNA
tctttctattagcatgtaagaggaaggcactatggagttcccactgtggccccaaagggtcagcagcatctgtggcatccagagtggagctttgatccccaccagcacgg

SEQ ID NO: 17377 - DNA, 110 bp, synthetic construct
  source 1..110: mol_type = other DNA
agggtcagcagcatctgtggcatccagagtggagctttgatccccaccagcacggtgggttaagaatcctgctttgtagcagctgcagggtaggttgcgactgcagcttg

SEQ ID NO: 17378 - DNA, 110 bp, synthetic construct
  source 1..110: mol_type = other DNA
gggacacacagacatgactccaccatgtttggtgatgccaatccaatgctcacctttctattctaatttcagctaggatagtgagagttttgatcctcacaatcattact

SEQ ID NO: 17379 - DNA, 110 bp, synthetic construct
  source 1..110: mol_type = other DNA
gtttagtcaggtgcataaataaacatttttctacaagaaagagagagtctaacatttagttcaaaatctgaaccagataggcctgtcttggtttattccttgcaagatat

SEQ ID NO: 17380 - DNA, 110 bp, synthetic construct
  source 1..110: mol_type = other DNA
aattctgtctccactgtcatcaatgggaagcctttgtattcagttagcctcagtagctacttccaagttattgttgtatccacctcttctgaaacacaaaactttctttg

SEQ ID NO: 17381 - DNA, 110 bp, synthetic construct
  source 1..110: mol_type = other DNA
tttttctttagtttctcccttccctactcctataggagcagtttcagatttcacctgggaagctgttgagaagcttttgaattaatacagtgacaaattgggatctcatt

SEQ ID NO: 17382 - DNA, 110 bp, synthetic construct
  source 1..110: mol_type = other DNA
tgggaagctgttgagaagcttttgaattaatacagtgacaaattgggatctcattatcacaagacagtaacctacttactcatagaatacacagaaagtgcttctgagaa

SEQ ID NO: 17383 - DNA, 110 bp, synthetic construct; identical to SEQ ID NO: 17381
  source 1..110: mol_type = other DNA

SEQ ID NO: 17384 - DNA, 110 bp, synthetic construct; identical to SEQ ID NO: 17382
  source 1..110: mol_type = other DNA

SEQ ID NO: 17385 - DNA, 110 bp, synthetic construct
  source 1..110: mol_type = other DNA
ttttttttaatgtgtttgttggaaaaggttagtgccacatcttattcctctgctatcttgatcctgccacctcttctagttgtatgttttatgtcaccattttgcatatt

SEQ ID NO: 17386 - DNA, 110 bp, synthetic construct
  source 1..110: mol_type = other DNA
ccacaaataattcacagttgttcacatacaaagctgcaggaggcagaggtatgatcaggttacagccctctgcatcttttatcagcctttatttatttttttttattttt

SEQ ID NO: 17387 - DNA, 110 bp, synthetic construct
  source 1..110: mol_type = other DNA
attagagaactcctaaaacagacatactcctggggtttgtttccagattgtgctgtttgttccatttcagagcaggagctcttaaatctgggcagctgcttcgtgaaagt

SEQ ID NO: 17388 - DNA, 110 bp, synthetic construct
  source 1..110: mol_type = other DNA
agtctctacctcaaagtgttgttatgaggaataaatgaattcataaatatataagatttagatttcaagtgctcagtagatgttagcttacatcatgtcttctgtagtaa

SEQ ID NO: 17389 - DNA, 110 bp, synthetic construct
  source 1..110: mol_type = other DNA
tgttgccattaggaaaacaaaccagtaaatgtacagattttaaacagcattaagttgaaaatcagaaatcgttgcattaaatagaccctttgtataatcccattcttaaa

SEQ ID NO: 17390 - DNA, 110 bp, synthetic construct
  source 1..110: mol_type = other DNA
ccacatgttttgatcttgttctgatcgtctgattggttctgggcaaggacaccttatttgcatgggaaagcggttatcagacagagcttcaaaaagcattcctctggtac

SEQ ID NO: 17391 - DNA, 110 bp, synthetic construct
  source 1..110: mol_type = other DNA
atttgcatgggaaagcggttatcagacagagcttcaaaaagcattcctctggtacctgcaggtgtctttgttgttggattgcaggcctcctattattggtaatcaatcaa

SEQ ID NO: 17392 - DNA, 110 bp, synthetic construct
  source 1..110: mol_type = other DNA
ttcttaacatttcctatgggtgaaaaactataggaaatcatgtgagggggaaaaatgatttcactgttattttattctcatatagatggaaaattcttctctgccagccc

SEQ ID NO: 17393 - DNA, 110 bp, synthetic construct
  source 1..110: mol_type = other DNA
tgatttcactgttattttattctcatatagatggaaaattcttctctgccagcccattgatattcagaccatctcaggccagaattctctgagctaattattttgttctc

SEQ ID NO: 17394 - DNA, 110 bp, synthetic construct
  source 1..110: mol_type = other DNA
tttttttttttttgctttttagggttgcacatgtggcatatggaatttcccttgctagggttgaattggagctttagctggcggcgatagcaacagccacagcaacgtgg

SEQ ID NO: 17395 - DNA, 110 bp, synthetic construct
  source 1..110: mol_type = other DNA
tagggttgaattggagctttagctggcggcgatagcaacagccacagcaacgtggaatccgatccacatctgcaacctacaacacagctcatggatggcaacgctggata

SEQ ID NO: 17396 - DNA, 110 bp, synthetic construct
  source 1..110: mol_type = other DNA
gagaactactgaagccagagtgaagcactcagacaaaaggcatcagagtattactccactctatctccacactgcaaattaaaagaagctgtaagacaggaacatgggat

SEQ ID NO: 17397 - DNA, 110 bp, synthetic construct
  source 1..110: mol_type = other DNA
ccactctatctccacactgcaaattaaaagaagctgtaagacaggaacatgggatggatcttatgttattcaagggactggggttgaaagcagatattaccagatttgaa

SEQ ID NO: 17398 - DNA, 110 bp, synthetic construct
  source 1..110: mol_type = other DNA
tttctcaaagagacagacatgtgctaacaagtcttgatggtggccttttgccttatatgggaattttaataagctttataggaatttctgggtactgtgattcaagagct

SEQ ID NO: 17399 - DNA, 110 bp, synthetic construct
  source 1..110: mol_type = other DNA
atatatgtttttgtgatgatgaagatgttttagaattagaccatgctttgtgaatatactaaaaatgggagttcctgttgtggctcaacaagttaaggacccagtgttgt

SEQ ID NO: 17400 - DNA, 110 bp, synthetic construct
  source 1..110: mol_type = other DNA
atgatgaagatgttttagaattagaccatgctttgtgaatatactaaaaatgggagttcctgttgtggctcaacaagttaaggacccagtgttgtctctgtgaggatgta

SEQ ID NO: 17401 - DNA, 110 bp, synthetic construct
  source 1..110: mol_type = other DNA
actgtattcctggtttcaagtatatgacaccttgaaagaggagatggccatggtaagagagctgtaggaagaagagtcagaggtctcttgactggttaacaaaggttgac

SEQ ID NO: 17402 - DNA, 110 bp, synthetic construct
  source 1..110: mol_type = other DNA
gagcaaaaagaggagattacagggaaaagtaaaagctggtttgatgggcaaagagtctttttggaagagtagtggcaaataaacccgggtaaatgcaatagaagtcaatt

SEQ ID NO: 17403 - DNA, 110 bp, synthetic construct
  source 1..110: mol_type = other DNA
tagtaaaggtgcagtgaattaaagttaacaggtaaaatcaatctgttcaaagtcgctttgcttgaaatcttgattttccccctcatacatttattttggtacaactggat

SEQ ID NO: 17404 - DNA, 110 bp, synthetic construct
  source 1..110: mol_type = other DNA
tacatttttggataatcgtgagataggcaaaatttctgttgcttgttaaaagtttttagtgagtcaagtgcactattttcttttccactttcaaaaacttactcagagag

SEQ ID NO: 17405 - DNA, 110 bp, synthetic construct; identical to SEQ ID NO: 17404
  source 1..110: mol_type = other DNA

SEQ ID NO: 17406 - DNA, 110 bp, synthetic construct
  source 1..110: mol_type = other DNA
agctaccataaaaagttaaaagatgaaacaacaaataggaagtcttctttctacatgaacatctttatccctccaactttatagtatatgcaggaaatgtagagttcaac

SEQ ID NO: 17407 - DNA, 110 bp, synthetic construct; identical to SEQ ID NO: 17406
  source 1..110: mol_type = other DNA

SEQ ID NO: 17408 - DNA, 110 bp, synthetic construct
  source 1..110: mol_type = other DNA
gagataaacaatggttagagccacacagatcataagagccaaggccaagtgcttccagagctacgtggtacagaccacagtgagggagggacttggatgttaagctgctg

SEQ ID NO: 17409 - DNA, 110 bp, synthetic construct
  source 1..110: mol_type = other DNA
aggccaaacaggtttaagtatttaatacagtctttgttaactgatatttgatcataagtcagtactatcagtttgtatagtgctgaaaagaaagtagcaagaatgaggct

SEQ ID NO: 17410 - DNA, 110 bp, synthetic construct; identical to SEQ ID NO: 17409
  source 1..110: mol_type = other DNA

SEQ ID NO: 17411 - DNA, 110 bp, synthetic construct
  source 1..110: mol_type = other DNA
gacccttcacaagatagaaatgtataaatattgtctatttttgcagctgagttgagctacttctctgtcttttctacactaccatcagtatcttctcttcattttcttct

SEQ ID NO: 17412 - DNA, 110 bp, synthetic construct
  source 1..110: mol_type = other DNA
aaatattgtctatttttgcagctgagttgagctacttctctgtcttttctacactaccatcagtatcttctcttcattttcttcttattttttctactcctttttctttc

SEQ ID NO: 17413 - DNA, 110 bp, synthetic construct
  source 1..110: mol_type = other DNA
ttctccagatctcagcttaattatcatccagatatttttttccccctcacatctcctcttcaacaattgctgcccttatcacaggattgtctaaatgtcttaaatgaata

SEQ ID NO: 17414 - DNA, 110 bp, synthetic construct
  source 1..110: mol_type = other DNA
tacaaccattacatatcaccaacctgtctcagaatattgagtgttttgctgccggcaaaagaaagatccttttgttgttaagtaaatcaagttaattgaagttaagggca

SEQ ID NO: 17415 - DNA, 110 bp, synthetic construct
  source 1..110: mol_type = other DNA
tttagttttttaaagaacctccacgatgttttccacagtggctccatcaatttacattgctaccaacaacgtacaagggttctttttctgcacataatcaccaatatttg

SEQ ID NO: 17416 - DNA, 110 bp, synthetic construct; identical to SEQ ID NO: 17415
  source 1..110: mol_type = other DNA

SEQ ID NO: 17417 - DNA, 110 bp, synthetic construct
  source 1..110: mol_type = other DNA
caatatgtgattcaaaagagttccttggaaaaggactccttctacttagatactctttaggtactctttttacttgtagtcttgctgtgccatgtgctaccatctcacag

SEQ ID NO: 17418 - DNA, 110 bp, synthetic construct
  source 1..110: mol_type = other DNA
ctagttttcccagttcctagatattgtctaatacagaaacagaagtatgtaaggtacaactaaagtcagctacctgtagtgtgtcataaccaagcattcttttactgaat

SEQ ID NO: 17419 - DNA, 110 bp, synthetic construct
  source 1..110: mol_type = other DNA
acatttatgagatctttttagggacagagatcagcatgggaaaattttcttataaatgtggtctaatatgatcgcactaaaaagtcagtacactgattaccaaacactaa

SEQ ID NO: 17420 - DNA, 110 bp, synthetic construct
  source 1..110: mol_type = other DNA
atctggtttgtcatctgtaaagtaatgaatttatgtctttaagtctgaatttttcctgtacttcgactatcacaaatgcagcagaacctaagagtaagatgaacataatt

SEQ ID NO: 17421 - DNA, 110 bp, synthetic construct
  source 1..110: mol_type = other DNA
tttaatggtgggatttatccacttggaatttctacagttttgaccagaccactgttcacccctaagccattagaatgatctactctatattctttgatcaggggccaaac

SEQ ID NO: 17422 - DNA, 110 bp, synthetic construct
  source 1..110: mol_type = other DNA
aaccaccattgcaagttgagtagacaatggaatgtggcaatagagctgtaaaattgatggtgttggctttattttatctatctataatatcacaactaaattgaaagtta

SEQ ID NO: 17423 - DNA, 110 bp, synthetic construct
  source 1..110: mol_type = other DNA
ctaattagtctgtatgaaattccctaaatgtgtcttaaactcaccaagatctcgtcagcaatgctactttccggcccacagagggctactttagagctagcaggtggggc

SEQ ID NO: 17424 - DNA, 110 bp, synthetic construct
  source 1..110: mol_type = other DNA
ggtttatggagaagaagatattttaaaaatataaagagctaggatcaagttctcctctaccaccactggtgaccttgagatatcagtttatctttttgagttttctcaaa

SEQ ID NO: 17425 - DNA, 110 bp, synthetic construct
  source 1..110: mol_type = other DNA
tgaggaaactggctacctcgtgacatctagtcatattctatttattctgtgaatcccccttcccccctccaaaagctttgttcttctcatcaagtcattcatctccaaat

SEQ ID NO: 17426 - DNA, 110 bp, synthetic construct
  source 1..110: mol_type = other DNA
aatgaaaacatatgtatagaaagatgtgaagttgtaaaaatcatagagaatctatgctatacaaatacctgatagtagaatagaagaactcaagttcacctcctcccatg

SEQ ID NO: 17427 - DNA, 110 bp, synthetic construct
  source 1..110: mol_type = other DNA
aactcagtaatctttaaactatatttaaagttctgtgtttaatgcattagcatttgtatataagattacagttctcttagccctcagaggacatactctttcaataagtc

SEQ ID NO: 17428 - DNA, 110 bp, synthetic construct
  source 1..110: mol_type = other DNA
ataaggagggtatggtcagcatatccgataagaacataggatggttctggaaaaaagttcatggatttggccgttagaatttcctggtaatcttttaatgtgaatgtgtt

SEQ ID NO: 17429 - DNA, 110 bp, synthetic construct
  source 1..110: mol_type = other DNA
acattctgcagcccccatgatcatgtccatgataaacagctcttgtgggattagtgttcccaatttttcatatctctttctttcccaaatttttcagatttatttccaaa

SEQ ID NO: 17430 - DNA, 110 bp, synthetic construct
  source 1..110: mol_type = other DNA
tattttactctatttttgcaactagatgcggggagaagtgtttcactgaggcttgagaagaatgtcctggggcctgtaattcccatatgtcactagaaaaggggcactgc

SEQ ID NO: 17431 - DNA, 110 bp, synthetic construct
  source 1..110: mol_type = other DNA
ggcatgtctctgtactttcagattgcagtataaggttgggagaaaatacataaaaaactggtttgcatgtaggatgtgctcagaaattggtagcttggttgtcaatgacc

SEQ ID NO: 17432 - DNA, 110 bp, synthetic construct
  source 1..110: mol_type = other DNA
aactggtttgcatgtaggatgtgctcagaaattggtagcttggttgtcaatgacctcctattcccacccatatcataattagtatccagtaaaattaggttgcagtaaat

SEQ ID NO: 17433 - DNA, 110 bp, synthetic construct
  source 1..110: mol_type = other DNA
acagatgctcatttccactccctggggagatcaagcactcggagcagaaataatagctcctcctcacaaaaacaaacaaacaaacaaacaaaaaaaaagcaaggtaaact

SEQ ID NO: 17434 - DNA, 110 bp, synthetic construct
  source 1..110: mol_type = other DNA
aataactgtaggatttttttacataaaaattaactttgatgtataagccagattttagctatgacgaacattgaccatttagcccatgcttctgggacacattaatcttg

SEQ ID NO: 17435 - DNA, 110 bp, synthetic construct
  source 1..110: mol_type = other DNA
tagctatgacgaacattgaccatttagcccatgcttctgggacacattaatcttgagtgtacaaacagggacacagtaagattcatgtattaccttattttgtggggttt

SEQ ID NO: 17436 - DNA, 110 bp, synthetic construct
  source 1..110: mol_type = other DNA
atgctccccatcttgtccaggaagagggcttttgattgtctactcacgattttgggtggaagcttttgtgttagaggattatctggattaatccttttcttttcattcct

SEQ ID NO: 17437 - DNA, 110 bp, synthetic construct
  source 1..110: mol_type = other DNA
gacctgatgttttcagttatattggatggagtaaattttataggaaaaatatctgaaatcctccatagctaaatctctttccctcttgtgcgttcatttccctcattatt

SEQ ID NO: 17438 - DNA, 110 bp, synthetic construct; identical to SEQ ID NO: 17437
  source 1..110: mol_type = other DNA

SEQ ID NO: 17439 - DNA, 110 bp, synthetic construct
  source 1..110: mol_type = other DNA
aagctttccaaccttttctcaagcatagtgaccaacttgcatttaatgcagacataactcatgaaacccacaattcaaattcgtaagcataaaaaactcagaaattaaat

SEQ ID NO: 17440 - DNA, 110 bp, synthetic construct
  source 1..110: mol_type = other DNA
cttgcatttaatgcagacataactcatgaaacccacaattcaaattcgtaagcataaaaaactcagaaattaaattaacccttctattcctataccctttgtcaaagtta

SEQ ID NO: 17441 - DNA, 110 bp, synthetic construct
  source 1..110: mol_type = other DNA
gaagaaaggagggagtcaaataacactagcccttgtcagctgctgggtggaaactggccccaagtcttgctcatacaatgtgctatgcaactttgcggatttgataatgt

SEQ ID NO: 17442 - DNA, 110 bp, synthetic construct
  source 1..110: mol_type = other DNA
ctctgagtggctcataaggagtgatggcaagacaggggaggggtttctacttttatcttctcatttttggacttactaattaccaaggtctgaggataaaatggccattg

SEQ ID NO: 17443 - DNA, 110 bp, synthetic construct
  source 1..110: mol_type = other DNA
tcttctcatttttggacttactaattaccaaggtctgaggataaaatggccattggctaaagttatataccatatctaaaggaatcctccaaactagcaagcagggtgtt

SEQ ID NO: 17444 - DNA, 110 bp, synthetic construct
  source 1..110: mol_type = other DNA
taggaattggataagtaccataatctgccatctgcaagctggagaaaaaagaatgctggtggtaaaattcaatccgagtcagaaagcctgagaatttggaggccgagggt

SEQ ID NO: 17445 - DNA, 110 bp, synthetic construct
  source 1..110: mol_type = other DNA
tgaagtttcccttcatgctttttttcccttccctgggaagagaaggtagcttggaggacatgccttcaagtgggggtgggtccataaagaaagatgttctgttttcactc

SEQ ID NO: 17446 - DNA, 110 bp, synthetic construct
  source 1..110: mol_type = other DNA
tgaaaactaagcacttttacctttcctttcactttttatctttgacagaaggagaggtagtaagagaaaggagagcaggtatcttctgctttgaggataagagcttgacc

SEQ ID NO: 17447 - DNA, 110 bp, synthetic construct
  source 1..110: mol_type = other DNA
ggtagtaagagaaaggagagcaggtatcttctgctttgaggataagagcttgacctctgggtgtggaaactagtttctcacttacttaataaatcattcaaaaaatatca

SEQ ID NO: 17448 - DNA, 110 bp, synthetic construct
  source 1..110: mol_type = other DNA
gtaaatccctcctttagccagctaattacaggaagagggtcaccagtagctttacatttcagtaatgctgtaccatctactgctagcgtttggttggctgggccttgtag

SEQ ID NO: 17449 - DNA, 110 bp, synthetic construct
  source 1..110: mol_type = other DNA
taatcaaaacatacggcacaatgaaaaacatgatgtttaataaaaattaaatgggagtctgcataaagtagctaattagtgccagatgcatggaaacttaaggattccta

SEQ ID NO: 17450 - DNA, 110 bp, synthetic construct
  source 1..110: mol_type = other DNA
gtccaagggactccatgacctggcgtctgctcaccactctcacctcaaagcacccactcactctcccttatcctcactcaggccactccaatcacagtaaccttccggaa

SEQ ID NO: 17451 - DNA, 110 bp, synthetic construct
  source 1..110: mol_type = other DNA
actcactctcccttatcctcactcaggccactccaatcacagtaaccttccggaactttctaacttgggaccctcttcctagaacactgtccaccaccctcattcccacg

SEQ ID NO: 17452 - DNA, 110 bp, synthetic construct
  source 1..110: mol_type = other DNA
aatccttcaatgatgactgaggagtgtgactagtagcaccttcatgaggccagcagagaacttctgccaaatgtgtacatggctgtgtgcacctccctcttcatctttat

SEQ ID NO: 17453 - DNA, 110 bp, synthetic construct
  source 1..110: mol_type = other DNA
gagaacttctgccaaatgtgtacatggctgtgtgcacctccctcttcatctttatgatttatatcgtgatactccccctttcctcttttggagagtatttcagagctatc

SEQ ID NO: 17454 - DNA, 110 bp, synthetic construct
  source 1..110: mol_type = other DNA
cagagactaagacgtccaccgggtggaagaaattaacaacatcatgatcaaactgtagccaagacataagctgccacaattccaagaactgccctcacagaaatgggagc

SEQ ID NO: 17455 - DNA, 110 bp, synthetic construct
  source 1..110: mol_type = other DNA
ccaccgggtggaagaaattaacaacatcatgatcaaactgtagccaagacataagctgccacaattccaagaactgccctcacagaaatgggagcaaactgaccctagaa

SEQ ID NO: 17456 - DNA, 110 bp, synthetic construct
  source 1..110: mol_type = other DNA
accacaggacagaaagcctggaccccactgcctattctattatttcaacttggatcattcttttaactttcctaagcttcaacttacgtatctgttcaatagctttaatg

SEQ ID NO: 17457 - DNA, 110 bp, synthetic construct
  source 1..110: mol_type = other DNA
aaatcttaaaattctttttgtcctataaggtaagatagtcagaggatgtggggattaagatgtggccatctttagcagtccactattttgtctaccaagctaaaggaacc

SEQ ID NO: 17458 - DNA, 110 bp, synthetic construct
  source 1..110: mol_type = other DNA
taagatgtggccatctttagcagtccactattttgtctaccaagctaaaggaacctaaatgaattgtttctcctcttcctcgacatttgcatgtttggatatttgatgta

SEQ ID NO: 17459 - DNA, 110 bp, synthetic construct; identical to SEQ ID NO: 17457
  source 1..110: mol_type = other DNA

SEQ ID NO: 17460 - DNA, 110 bp, synthetic construct; identical to SEQ ID NO: 17458
  source 1..110: mol_type = other DNA

SEQ ID NO: 17461 - DNA, 110 bp, synthetic construct
  source 1..110: mol_type = other DNA
attttcacgaagcatgtctcacctataaaaacagagctaatgagaacaacaccccccttagttaataaggaggccagaacacaattcaacatgtatgcagacttggcatg

SEQ ID NO: 17462 - DNA, 110 bp, synthetic construct
  source 1..110: mol_type = other DNA
aaatgatcatgttttcatttacttgttaccataactgttcaccacagtgcttaaaaaatggagtttaaatgctgaaatcaaggttgttgatgatgcaaagcacaaattca

SEQ ID NO: 17463 - DNA, 110 bp, synthetic construct
  source 1..110: mol_type = other DNA
aaatggagtttaaatgctgaaatcaaggttgttgatgatgcaaagcacaaattcaaggatataaaaggactgaaaaaaatcattgatgcttacttaatagggttcaagac

SEQ ID NO: 17464 - DNA, 110 bp, synthetic construct
  source 1..110: mol_type = other DNA
gctttttcctgcaaatctttgcaaggctggcccttatacaggttttagctcaaatatttcctcctaataagacatctcctgacgactctacctaagaatactgcatctgc

SEQ ID NO: 17465 - DNA, 110 bp, synthetic construct
  source 1..110: mol_type = other DNA
atttcctcctaataagacatctcctgacgactctacctaagaatactgcatctgcctggcagagtcatagcactacactgtgtctttaaaaattgtctaacaactgattt

SEQ ID NO: 17466 - DNA, 110 bp, synthetic construct
  source 1..110: mol_type = other DNA
ccaggctttcaaatcacaaaggcggactgaaacacttaaaaacatacttagctgcaaagtcacctccatgtattcgtgatagtcagcaactctccagtgcaacctgttag

SEQ ID NO: 17467 - DNA, 110 bp, synthetic construct
  source 1..110: mol_type = other DNA
ggttttattattaaatttccaccaccaacatttatcagctctagctttgattctatatcttaataattccatacacagtccttactggatgatgcttgcctcttaagcta

SEQ ID NO: 17468 - DNA, 110 bp, synthetic construct
  source 1..110: mol_type = other DNA
tatcttaataattccatacacagtccttactggatgatgcttgcctcttaagctatagtgatatcattaaccagcataatagtcaataaggagattgtctttgctaacag

SEQ ID NO: 17469 - DNA, 110 bp, synthetic construct
  source 1..110: mol_type = other DNA
ctaatctttgaacatcatttggaactgtccccaggtgcatgaaaatattaggaaactctttatttagctttagggacagctagagtgaccatgctcccaattagtgagca

SEQ ID NO: 17470 - DNA, 110 bp, synthetic construct
  source 1..110: mol_type = other DNA
ctctttatttagctttagggacagctagagtgaccatgctcccaattagtgagcaaagtcattgataaacatattaaagatcattggatctccatgactgcctgaccaat

SEQ ID NO: 17471 - DNA, 110 bp, synthetic construct
  source 1..110: mol_type = other DNA
gccacggcaggaactccctgggatacaatttaaacatgcatacttcagaattatcccagtttgggaaggtgaggtattgttaagtgagagagctggaatattcatttgtc

SEQ ID NO: 17472 - DNA, 110 bp, synthetic construct
  source 1..110: mol_type = other DNA
ccagtttgggaaggtgaggtattgttaagtgagagagctggaatattcatttgtcagctcccattagttcctgggcatgtggatgtcagcagatctcaaggatgaggcaa

SEQ ID NO: 17473 - DNA, 110 bp, synthetic construct
  source 1..110: mol_type = other DNA
attctgagaaagaaacactatagggagaatacagaagaaaccttttagactcttacatctacatggaggtaattgatcttttctgcagaccaactaaacttccatcaatt

SEQ ID NO: 17474 - DNA, 110 bp, synthetic construct
  source 1..110: mol_type = other DNA
catctacatggaggtaattgatcttttctgcagaccaactaaacttccatcaattatcaataagtatgataaacttttatataagaaccagggacatgggcattttatac

SEQ ID NO: 17475 - DNA, 110 bp, synthetic construct
  source 1..110: mol_type = other DNA
tataaatgcaaaagctgtctatttattatttataatttttaaaaggattaaggttaagcttgctctacagttttcaaactgcaactgttcactccttcagtgaacaggct

SEQ ID NO: 17476 - DNA, 110 bp, synthetic construct; identical to SEQ ID NO: 17475
  source 1..110: mol_type = other DNA

SEQ ID NO: 17477 - DNA, 110 bp, synthetic construct
  source 1..110: mol_type = other DNA
ttcagcactagccccagagagcggtctgctattaatattctaactcaggagcagagtgtagaagaactgggtggatcctttaccctggctgctcagttatctgttctcca

SEQ ID NO: 17478 - DNA, 110 bp, synthetic construct
  source 1..110: mol_type = other DNA
gtgtagaagaactgggtggatcctttaccctggctgctcagttatctgttctccatgttaggggcctctgcaggtggccccagacagagagcaaaaggatgaaggctaaa

SEQ ID NO: 17479 - DNA, 110 bp, synthetic construct
  source 1..110: mol_type = other DNA
tctgacttactatggtggcccccacaggtgacctacaaatacataggtacataaagtgtaaatattcattcatcttcattgggcaggaaacagctttttttttttttttt

SEQ ID NO: 17480 - DNA, 110 bp, synthetic construct
  source 1..110: mol_type = other DNA
gtgtaaatattcattcatcttcattgggcaggaaacagcttttttttttttttttgcgtttcttttattgataacatactgtaatggattcctaagttgccatggcaaaa

SEQ ID NO: 17481 - DNA, 110 bp, synthetic construct; identical to SEQ ID NO: 17479
  source 1..110: mol_type = other DNA

SEQ ID NO: 17482 - DNA, 110 bp, synthetic construct; identical to SEQ ID NO: 17480
  source 1..110: mol_type = other DNA

SEQ ID NO: 17483 - DNA, 110 bp, synthetic construct
  source 1..110: mol_type = other DNA
tgaagaacacagtcatgaaaaagtccttttgagaatattaccaacagagaaatagtaagttcaaattctctgaagctgattagaggagaaaaatatgtagtatgtactat

SEQ ID NO: 17484 - DNA, 110 bp, synthetic construct; identical to SEQ ID NO: 17483
  source 1..110: mol_type = other DNA

SEQ ID NO: 17485 - DNA, 110 bp, synthetic construct
  source 1..110: mol_type = other DNA
agatgagaccgaaatggttgtggaaatataattcaaaaggcataaggtaacatgcctattttgcatctttaaattgcatattctcctgttatatacattcagggttaaga

SEQ ID NO: 17486 - DNA, 110 bp, synthetic construct
  source 1..110: mol_type = other DNA
gaaatcttgaaatgtttagaaattctcaaagaaaagagaggccgttacaagtctcagagtattcactgttgtttcttcatttctgccaaagtttttggtgaagtgaatgg

SEQ ID NO: 17487 - DNA, 110 bp, synthetic construct
  source 1..110: mol_type = other DNA
tacaagtctcagagtattcactgttgtttcttcatttctgccaaagtttttggtgaagtgaatggaaaaattctactttgtatgtgaacaatcaaatatttcccataata

SEQ ID NO: 17488 - DNA, 110 bp, synthetic construct
  source 1..110: mol_type = other DNA
gtattcattcactgtatttgctcagtattatttttttcattcaaccataacgtgttgagtatatatgtcagctagaaaatgtactttgtactagtggtacaaaagatgga

SEQ ID NO: 17489 - DNA, 110 bp, synthetic construct
  source 1..110: mol_type = other DNA
agagaacccagtgtgagtccagtttgatgctgtggtgccttttctccctcacattatcactgatgaaatctggccctttcttcacttccaaaggggatagtatatattgt

SEQ ID NO: 17490 - DNA, 110 bp, synthetic construct
  source 1..110: mol_type = other DNA
agcatttggtttcaaatacctactgtgcaaaaacaatgataaaaacacttccaatttaaaacattcttcaaatgaaagtttttggtgtaaacataaaagttctgcagggc

SEQ ID NO: 17491 - DNA, 110 bp, synthetic construct
  source 1..110: mol_type = other DNA
ttaaaacattcttcaaatgaaagtttttggtgtaaacataaaagttctgcagggcaagtgtccttttcaaaataaaaattatgactaaactgccaaggcgactaagccac

SEQ ID NO: 17492 - DNA, 110 bp, synthetic construct
  source 1..110: mol_type = other DNA
tatgtatgatataagcacttgaactgtgttcagcctgactacaaaatgggagaggcttatcaaggcaatacagttagttatgtgacttgttgatcaggaattataattgg

SEQ ID NO: 17493 - DNA, 110 bp, synthetic construct
  source 1..110: mol_type = other DNA
cttatcaaggcaatacagttagttatgtgacttgttgatcaggaattataattggagctggatagggagaaagagatagtgggaacaatgggattatagtttcaattagt

SEQ ID NO: 17494 - DNA, 110 bp, synthetic construct
  source 1..110: mol_type = other DNA
tgactatgtaatttgggatgaattcttgaatttctctattcctcagcttgctcatctgtaaaactgccacacagaactgcagtgaggattaaataatataaggcttataa

SEQ ID NO: 17495 - DNA, 110 bp, synthetic construct
  source 1..110: mol_type = other DNA
aaatcagtacaaaggacttgattatctcagagacagaaaaaatgtaggacagatggaagcatctatctctcctgaattcaccagcttgcaggagtccagctccagcagcc

SEQ ID NO: 17496 - DNA, 110 bp, synthetic construct
  source 1..110: mol_type = other DNA
gcgagcgtcccctcagcgaccttttgacctaagagggtgaaaacctcacgcataggacatgcagaggcctgtagcctagttacgcctgcgcagaggagactacggcactt

SEQ ID NO: 17497 - DNA, 110 bp, synthetic construct
  source 1..110: mol_type = other DNA
gacatgcagaggcctgtagcctagttacgcctgcgcagaggagactacggcacttttttctggtcatgtttcccacgctttccctgcctcagacgaatggcttctttcca

SEQ ID NO: 17498 - DNA, 110 bp, synthetic construct
  source 1..110: mol_type = other DNA
agggtcagtgaaaaatgtgatggaagcagtaagtcaagctgatatctgcttgcacatggggtattcaaagaagttggtgaaatatgtgagacagagcattagaggaaatg

SEQ ID NO: 17499 - DNA, 110 bp, synthetic construct
  source 1..110: mol_type = other DNA
ggaggtaagtgaactgcctgggcgattaattccaaatagctagaggaaatggattagctactacacaagggtcataaagggaggtctatctggaattgaggtgttctgta

SEQ ID NO: 17500 - DNA, 110 bp, synthetic construct
  source 1..110: mol_type = other DNA
agctactacacaagggtcataaagggaggtctatctggaattgaggtgttctgtatcttagtgttcccaaactggttattatttaatgtgcccagcagatggtgctcaag

SEQ ID NO: 17501 - DNA, 110 bp, synthetic construct; identical to SEQ ID NO: 17499
  source 1..110: mol_type = other DNA

SEQ ID NO: 17502 - DNA, 110 bp, synthetic construct; identical to SEQ ID NO: 17500
  source 1..110: mol_type = other DNA

SEQ ID NO: 17503 - DNA, 110 bp, synthetic construct
  source 1..110: mol_type = other DNA
ttcatttagttcttttcttttttcttttaaattttatgccccccacccatggcatatggatgttctcaggccagggattttatcccagctgcagctgaaacctatactga

SEQ ID NO: 17504 - DNA, 110 bp, synthetic construct
  source 1..110: mol_type = other DNA
actcttgattttcgtgtccagtttgtagcaattatctggggctgatgaatgatggtccagttaagtcagggcacactctacccagctctcccctcaccccaactgtcctc

SEQ ID NO: 17505 - DNA, 110 bp, synthetic construct
  source 1..110: mol_type = other DNA
tcaatctagattttatttgtaaagcccctgggttgaaaagcatcggtgccatatttttaatgagcagcttgtctagggaaccgatcaattgactctatttctaagttatc

SEQ ID NO: 17506 - DNA, 110 bp, synthetic construct
  source 1..110: mol_type = other DNA
tttaatgagcagcttgtctagggaaccgatcaattgactctatttctaagttatccctcatacctcaaaacctctcctcctagaagcccatgcctagtgttcaaatttca

SEQ ID NO: 17507 - DNA, 110 bp, synthetic construct
  source 1..110: mol_type = other DNA
aacagccaatagtcttgaatttgattggttcacaatctcatcttccagaacaagtatgtcttggagggcaggtagctaagcagtatttgttggatatcaatattgcctac

SEQ ID NO: 17508 - DNA, 110 bp, synthetic construct
  source 1..110: mol_type = other DNA
atcctgtctaccctagaccattgtagaaagtgcatttttttaaaacatagatggaaatattctatactttcaataattcaatgagttcagagatgtactgtggtatcgag

SEQ ID NO: 17509 - DNA, 110 bp, synthetic construct
  source 1..110: mol_type = other DNA
aatattctatactttcaataattcaatgagttcagagatgtactgtggtatcgagaaccaatgagagctacactgaacctacagagaaaaccagtgattgctcccaactc

SEQ ID NO: 17510 - DNA, 110 bp, synthetic construct; identical to SEQ ID NO: 17508
  source 1..110: mol_type = other DNA

SEQ ID NO: 17511 - DNA, 110 bp, synthetic construct; identical to SEQ ID NO: 17509
  source 1..110: mol_type = other DNA

SEQ ID NO: 17512 - DNA, 110 bp, synthetic construct
  source 1..110: mol_type = other DNA
ggtctgttgccattaggaaagattagttgacagaaatcacaatactctctaacatcatgtttgctatagctttccacacacatcaaatgctacaagcctcctggggatga

SEQ ID NO: 17513 - DNA, 110 bp, synthetic construct
  source 1..110: mol_type = other DNA
cctcttcttaggactcccctctcaacagctgtaaagaagggtggaaattccttgtgagtcaaagtgtgacttcaaagtcaaggatgcaatctgagagacgtgatcatatt

SEQ ID NO: 17514 - DNA, 110 bp, synthetic construct
  source 1..110: mol_type = other DNA
ttcacgtcaccatcatttctcctcaattattacaacagcttcctaacctagacttctctgcctgttaggtccatttgacacaactgtcaaagtgattctgtgccaatatt

SEQ ID NO: 17515 - DNA, 110 bp, synthetic construct
  source 1..110: mol_type = other DNA
cctgccactcctgctctcccttaattaagcctaatgccttatgctttgaccttttgttctagcctattaaccctatctagtacaagttcaattatgttaaactaaaaact

SEQ ID NO: 17516 - DNA, 110 bp, synthetic construct
  source 1..110: mol_type = other DNA
gtgcagactgttccctgactccggagcctacctgagcaccgctgaggggacccggaatctcattttatttctcacacagagctccaagtttctgaaaagttgccctgctg

SEQ ID NO: 17517 - DNA, 110 bp, synthetic construct
  source 1..110: mol_type = other DNA
tggggtctggtaagacaggtgactgaaaatgtgagcatgtgaatctgggaaaccagaaactagctgagtgtgttaagaaaaacggaacgtaattggatttgaattttcgg

SEQ ID NO: 17518 - DNA, 110 bp, synthetic construct
  source 1..110: mol_type = other DNA
gaaactagctgagtgtgttaagaaaaacggaacgtaattggatttgaattttcggaggtgtaccttcactccagtgtgaaaaatatattggaggatagcaggactgggct

SEQ ID NO: 17519 - DNA, 110 bp, synthetic construct
  source 1..110: mol_type = other DNA
agtcatttatgtagattctgtgtagcttgttggcatgtgacaataacaatggatctgctattcagtgtgatttattaaccgttataaactttgatttgattagaattgct

SEQ ID NO: 17520 - DNA, 110 bp, synthetic construct
  source 1..110: mol_type = other DNA
agaagcagaaagagcacttgggaatagtgtagtcattcaggtgagagatgatggtggcttagtctagggaaattgtggacatgatggtgggagaaagggccagattctgg

SEQ ID NO: 17521 - DNA, 110 bp, synthetic construct
  source 1..110: mol_type = other DNA
ggcttagtctagggaaattgtggacatgatggtgggagaaagggccagattctggatgtctttggaaactagaaataacatcatttacttacactgcctgtgagagagag

SEQ ID NO: 17522 - DNA, 110 bp, synthetic construct
  source 1..110: mol_type = other DNA
ttttttaatttcgaaggtgccatttttggaaaatattcatggaaaatggagagaactctccagactccagatccagagatacatgctctttagctttggagtttggatgt

SEQ ID NO: 17523 - DNA, 110 bp, synthetic construct
  source 1..110: mol_type = other DNA
ggtcaagtaggaaagtttgagggtgacaggcaaatgtctgagacaagtctgatgctcagtattggagtctgtgatttctgaaccatgatgcatgagtggatcactttcat

SEQ ID NO: 17524 - DNA, 110 bp, synthetic construct
  source 1..110: mol_type = other DNA
tcagtattggagtctgtgatttctgaaccatgatgcatgagtggatcactttcattaaagagttggggatagagcctaatgatcggttgttattactgagtcattttatt

SEQ ID NO: 17525 - DNA, 110 bp, synthetic construct
  source 1..110: mol_type = other DNA
aagccaagttcagccttgtaagatgcagaaaaagcttaggtcatgtaggatgaaagactttagaacaaaaaaaggaaatgaaaaccaaatagatattaatgaaatctatg

SEQ ID NO: 17526 - DNA, 110 bp, synthetic construct
  source 1..110: mol_type = other DNA
accaactcaacattaaatacagagtagggaagagatgcacagatgcagtccttctgagctggcataccagaaaccagaagctggactgctcaagcagaatttggagctgt

SEQ ID NO: 17527 - DNA, 110 bp, synthetic construct
  source 1..110: mol_type = other DNA
ttctatgggcttcaatcataagggctggttaaaagttgctatcttttcaatagggtcttcccatctgttttaattgcccattgctattataccagattaacacaactttg

SEQ ID NO: 17528 - DNA, 110 bp, synthetic construct
  source 1..110: mol_type = other DNA
tcttcccatctgttttaattgcccattgctattataccagattaacacaactttgatggtttaaaacgacagacatttacttcctcacggctctggaagccagacatcca

SEQ ID NO: 17529 - DNA, 110 bp, synthetic construct
  source 1..110: mol_type = other DNA
gcaaatgctttcagcaattaaaataaatctaataaacctgttcttacagctttattgacttataatttatctatttttttgcctcgcccatagcatgtggatattcctag

SEQ ID NO: 17530 - DNA, 110 bp, synthetic construct
  source 1..110: mol_type = other DNA
ctacctgtgttatctggattcttaaaagtgattattaaagtttatcagtgttgaagtctttgtacttggttttgataagttgttccaaagctcttgtgttgtataaatgt

SEQ ID NO: 17531 - DNA, 110 bp, synthetic construct
  source 1..110: mol_type = other DNA
ggaatctattttaatgttcattggaatcctttgtctcctgtcattagtagaaaatttttgctttcatgcccatgccatctttttcctctttctcctcatagttttcaaag

SEQ ID NO: 17532 - DNA, 110 bp, synthetic construct
  source 1..110: mol_type = other DNA
catgtttgaatccagtaaagaatggaagccagtgtagacaaacccagtaccaggagctgcttttcctgttcagtatatttaccaattccttatataaatataaaatagta

SEQ ID NO: 17533 - DNA, 110 bp, synthetic construct; identical to SEQ ID NO: 17532
  source 1..110: mol_type = other DNA

SEQ ID NO: 17534 - DNA, 110 bp, synthetic construct
  source 1..110: mol_type = other DNA
ctggatgtttgaatataatgttatgacactggatctcatctaagtctggttttggcaggcctcctctgcagctggcataggatgtaggagtatcacatcactactgctag

SEQ ID NO: 17535 - DNA, 110 bp, synthetic construct
  source 1..110: mol_type = other DNA
caggcctcctctgcagctggcataggatgtaggagtatcacatcactactgctaggagaggatggaaatccaggctcccccacctctattgaccccatggtgtagggaag

SEQ ID NO: 17536 - DNA, 110 bp, synthetic construct
  source 1..110: mol_type = other DNA
tactgccaaagaaaccacaagcctagactgaaggggcctttgactgtagaagctgaaaatggcctttgtgctcacaatcttaatgtgaacgagaaggaacctgagcaagc

SEQ ID NO: 17537 - DNA, 110 bp, synthetic construct
  source 1..110: mol_type = other DNA
aaaatggcctttgtgctcacaatcttaatgtgaacgagaaggaacctgagcaagctgtgcagccctgacgcttatttccagctacagtcaaagaagggaatggaaaaaga

SEQ ID NO: 17538 - DNA, 110 bp, synthetic construct
  source 1..110: mol_type = other DNA
cacttgactcaaggactccactcttttactctactgctgcgttttttcttttgtagcttactgtggaatggcaaagaagaatatctccttctttgaaagttaatgatgta

SEQ ID NO: 17539 - DNA, 110 bp, synthetic construct
  source 1..110: mol_type = other DNA
gccccaccgtctacacttggaatagtctttgagagttagagggaacttctctttaacttttttaaaaaatgactttagctttgattggtggaagctaaagtatttttttt

SEQ ID NO: 17540 - DNA, 110 bp, synthetic construct
  source 1..110: mol_type = other DNA
ttggttgagtggtactcctgaggccattaactctataattccagcctgcctccaggcagttcaagcatattcttagctagagaacaccctcagtcagtaagtggcgggag

SEQ ID NO: 17541 - DNA, 110 bp, synthetic construct
  source 1..110: mol_type = other DNA
taaatcttgagagcataatggtggatgaaatgtgatgacaaatccacacaaacgtcacagctttcattattggcacatcagtgcagtagcagtcagcaagaaggtgatcc

SEQ ID NO: 17542 - DNA, 110 bp, synthetic construct
  source 1..110: mol_type = other DNA
catcatctgtaaaataaaaagcagttgcacacgcatctcatggttctcataaggaataaatgagctaagaaataatctcgtaatgagccaaatgcaattgccctttttat

SEQ ID NO: 17543 - DNA, 110 bp, synthetic construct
  source 1..110: mol_type = other DNA
gcttaggtgttgcttctggaggaattttccagagcattaagcagtaagtactaactctcagaatgatgtgagtctccagtccaatgatgccagctttccatcttggtaaa

SEQ ID NO: 17544 - DNA, 110 bp, synthetic construct
  source 1..110: mol_type = other DNA
tctcagaatgatgtgagtctccagtccaatgatgccagctttccatcttggtaaagtggaagaagtttgggtgggttgaatgggtaccatctttgatcttagaggtacta

SEQ ID NO: 17545 - DNA, 110 bp, synthetic construct
  source 1..110: mol_type = other DNA
aaaactaaactaaattgaacaaaagaataaaggatgagggaaaagcagaacttgatagtcagcactcagtctaggagtgcgagggagtcagagcagacgtggtggtacta

SEQ ID NO: 17546 - DNA, 110 bp, synthetic construct
  source 1..110: mol_type = other DNA
tagtcagcactcagtctaggagtgcgagggagtcagagcagacgtggtggtactaatgaggaggccatttcactcatctttgtttgtttgtttgttttccgtttcaccag

SEQ ID NO: 17547 - DNA, 110 bp, synthetic construct
  source 1..110: mol_type = other DNA
acataatataatactctttattggtatgtttggttaaattgctcagtttaagtaatagttccattgttatgttgggattcccaaaatttgatggaatgcgtgttcctcaa

SEQ ID NO: 17548 - DNA, 110 bp, synthetic construct; identical to SEQ ID NO: 17547
  source 1..110: mol_type = other DNA

SEQ ID NO: 17549 - DNA, 110 bp, synthetic construct; identical to SEQ ID NO: 17547
  source 1..110: mol_type = other DNA

SEQ ID NO: 17550 - DNA, 110 bp, synthetic construct; identical to SEQ ID NO: 17547
  source 1..110: mol_type = other DNA

SEQ ID NO: 17551 - DNA, 110 bp, synthetic construct
  source 1..110: mol_type = other DNA
tctcactcacattacctgtttgaatgcttctcaccctttcaatcccagcttaattggagtctttttcagctcatgaggaaatatcatcttctcagcctccacatggcttg

SEQ ID NO: 17552 - DNA, 110 bp, synthetic construct
  source 1..110: mol_type = other DNA
ggagtctttttcagctcatgaggaaatatcatcttctcagcctccacatggcttgcacacagtgtgccccatctgtgctaatacctgtcctgtatttccgacctgcaaag

SEQ ID NO: 17553 - DNA, 110 bp, synthetic construct
  source 1..110: mol_type = other DNA
agcaagagatgtcgccatcaagccttgatgtgcttcacaagtgtaagagcgagatctggtcaccaatttttttaaaaataaaatttgaagtagaataacttcatgtcgga

SEQ ID NO: 17554 - DNA, 110 bp, synthetic construct
  source 1..110: mol_type = other DNA
taaattctcttcctttgcagctgagctcagagttcctagacaagcaacaaagacgagatctaaactgaagacacatgaagccagcagatttgtggttcaagatattggtc

SEQ ID NO: 17555 - DNA, 110 bp, synthetic construct
  source 1..110: mol_type = other DNA
gataaactgtaatccatgaatttaaactagaatgcacatttgattttcacaacgtctaagctggcatacgtaactcacaggagaacccggtgcctttgccacagagctgc

SEQ ID NO: 17556 - DNA, 110 bp, synthetic construct
  source 1..110: mol_type = other DNA
ctaattaaggaacaagctcactgccttgatatccaaagtttggaactaggtggttggcatagcatggactgagatactatttctgacgtaatttaaagttattcttttgc

SEQ ID NO: 17557 - DNA, 110 bp, synthetic construct
  source 1..110: mol_type = other DNA
ggcatagcatggactgagatactatttctgacgtaatttaaagttattcttttgctggaaaagtattgaggttgcttgcagtcgtacctatgctggtgacgacttgcaat

SEQ ID NO: 17558 - DNA, 110 bp, synthetic construct
  source 1..110: mol_type = other DNA
ggctcaaaaaatccccacactctcaccttctaaattatctatttagctatgggtgagactctctctgtatgatccatcctacagcaaaattcctcaccatctgtaaaact

SEQ ID NO: 17559 - DNA, 110 bp, synthetic construct
  source 1..110: mol_type = other DNA
gccacatactgtgatttccttagcgggaggcaaattctagaaacaccaaaaaacactctggcccactgaaccactcccatcggctagcttatcactcagctttgtccttt

SEQ ID NO: 17560 - DNA, 110 bp, synthetic construct
  source 1..110: mol_type = other DNA
aattgtaagaactaccctgtctacagggatcctgggaagacactcccaggggctgtgctctgaatccactagagtgtgagttacaaggtcaagctgcccatgacctgctc

SEQ ID NO: 17561 - DNA, 110 bp, synthetic construct
  source 1..110: mol_type = other DNA
tgctctgaatccactagagtgtgagttacaaggtcaagctgcccatgacctgctcccaccaatggccccctcgtagtagggaaataaaggtaggctcattcctcacctgg

SEQ ID NO: 17562 - DNA, 110 bp, synthetic construct
  source 1..110: mol_type = other DNA
ttgaaacaccccagaatgagaatcatacatgtgaggaggaggaaattgaggcttatggatgtgaaggaacacgcccagctggcaacagacaaactgggggggtctttgca

SEQ ID NO: 17563 - DNA, 110 bp, synthetic construct
  source 1..110: mol_type = other DNA
ttgtatgcctgcctttcaaaataccctgctcttctccaaccatggctgtgtgcattagatcttttgccctagcttgctttcctcctgattcagaatcacaaaaacccaaa

SEQ ID NO: 17564 - DNA, 110 bp, synthetic construct
  source 1..110: mol_type = other DNA
acttgcactgcatcctggacaaataagtgacagctacttcctaggtattcatatctgtctgctctccaatccacaggccgcttgggctgtgacatgtacattgaacactt

SEQ ID NO: 17565 - DNA, 110 bp, synthetic construct
  source 1..110: mol_type = other DNA
gtgatttttgcaaggacctacctccaataaaataaaaagctgtctggatcaagtgaactgtattgacagaaggtccggatcatccttagcaccattcaaggaaaaagatt

SEQ ID NO: 17566 - DNA, 110 bp, synthetic construct
  source 1..110: mol_type = other DNA
agtatcctctctggtttcacccatgacccttgacatgtgttgtaggagggtgaatcaagatgaaagttttagtgtgcttgttactagagtgaatccacagctggcccatg

SEQ ID NO: 17567 - DNA, 110 bp, synthetic construct
  source 1..110: mol_type = other DNA
caagatgaaagttttagtgtgcttgttactagagtgaatccacagctggcccatgttaaattgaactccatggccttgacttcagtggggttgtgtagtaactgactgaa

SEQ ID NO: 17568 - DNA, 110 bp, synthetic construct
  source 1..110: mol_type = other DNA
aagtgtgtgtgtttgcaggtatcatttggcccttttagtgtcagcctgtaggactcgagcttgggaactgggtcacaagtgccaattctctggctactgctattactgtg

SEQ ID NO: 17569 - DNA, 110 bp, synthetic construct
  source 1..110: mol_type = other DNA
gagagagctcccatgtttgttttaaaaaggtttattttgagctctttgtttccaacagactgaggattattttccagacaaagactacctggtttaactctcagtgaata

SEQ ID NO: 17570 - DNA, 110 bp, synthetic construct
  source 1..110: mol_type = other DNA
caagagagaagatgtgatgagctcagttagtcaacaactagctcagattagtcctactgaagagatctctcaactcaggccaccttgtaggcttttagccagtattgaga

SEQ ID NO: 17571 - DNA, 110 bp, synthetic construct
  source 1..110: mol_type = other DNA
tgcatcagtatttgagagtttcataacaaaaggcgtcttagtggtttacaggtatatttcacactacttctcctaagcttcagagtattattatttttttccataaaaag

SEQ ID NO: 17572 - DNA, 110 bp, synthetic construct
  source 1..110: mol_type = other DNA
ctgttatttttttggctgcctaggagctgaaccttgttttgatgttttgggggttattgaccttggatcttggtgagattcagagggtatgtgcaattaagaagttgaaa

SEQ ID NO: 17573 - DNA, 110 bp, synthetic construct
  source 1..110: mol_type = other DNA
ccattaaacatgatgctgactctgattttgagatgtgtaggtctgtataatgtgaaggtgatctagacctgtctcataataggcctcttcctttgatttagtattattcg

SEQ ID NO: 17574 - DNA, 110 bp, synthetic construct
  source 1..110: mol_type = other DNA
ttttttctgctgtaagggatttgacagtagaaatgtacttttgccttttttcccctttctgtccaggtttattttaaaagggtttctttacaatgcagaatatttagact

SEQ ID NO: 17575 - DNA, 110 bp, synthetic construct; identical to SEQ ID NO: 17574
  source 1..110: mol_type = other DNA

SEQ ID NO: 17576 - DNA, 110 bp, synthetic construct
  source 1..110: mol_type = other DNA
cacctgattagatatgccactcttcagccttccgaagtgtctcatatcccatataccatggccaaatgaatcctcaccagggcctagaatctggtcttgcttacacatgc

SEQ ID NO: 17577 - DNA, 110 bp, synthetic construct
  source 1..110: mol_type = other DNA
aattatctatttatgtgtctatctccaccacagaagcatttaaagcaaaaactatatcttattcatccaaaggccaggcacagtattgttgctcatgcttagatatctga

SEQ ID NO: 17578 - DNA, 110 bp, synthetic construct
  source 1..110: mol_type = other DNA
attaactgtgatttttaaatgtgtgacttggcaccactatactactcaatactacaccaccaatactgggaaacacaacatactaatgacagctaatattgagaattttt

SEQ ID NO: 17579 - DNA, 110 bp, synthetic construct
  source 1..110: mol_type = other DNA
accaccaatactgggaaacacaacatactaatgacagctaatattgagaatttttttctttttttctttctttctaggggtgcacctgtggcatacagaagttcccaggc

SEQ ID NO: 17580 - DNA, 110 bp, synthetic construct
  source 1..110: mol_type = other DNA
tggactagtaggttaaagctcctgtattttcacagctgtggctgtggttgctgctgcagcacaggtttaattcctggccccaggaaattccacctgctgtgggtgttgca

SEQ ID NO: 17581 - DNA, 110 bp, synthetic construct
  source 1..110: mol_type = other DNA
ttcaactactggaaggcttctattatgagctgacttatgtttcccacaaattcatgtgtcaaagttacttacccccattacctcagaatgtaaccttatttggatatagg

SEQ ID NO: 17582 - DNA, 110 bp, synthetic construct
  source 1..110: mol_type = other DNA
cccaaaccccaaacctggttacatactgtagctcaggggggaagaggaacacctagacacaagtcacaggtcaaggaatttccaggccaagaaacagcatcccaaggccc

SEQ ID NO: 17583 - DNA, 110 bp, synthetic construct
  source 1..110: mol_type = other DNA
tatatttcacctctgtctttgttcaatgactatttgttcctcatgttctgagatcctatgtccttatattttagtccttcttgttagattagctatttcctgtagaaaga

SEQ ID NO: 17584 - DNA, 110 bp, synthetic construct
  source 1..110: mol_type = other DNA
ctatgtccttatattttagtccttcttgttagattagctatttcctgtagaaagaatcatgtattatttatccttttcacctgcctcagagctcgacacataggaagagc

SEQ ID NO: 17585 - DNA, 110 bp, synthetic construct
  source 1..110: mol_type = other DNA
ctgccagtctcaaaggaaagcttccctcttttccacttacttgatatgagacttggtcttctgccctttccctgggggtatggctcaatttcatatgccttcaatccacc

SEQ ID NO: 17586 - DNA, 110 bp, synthetic construct
  source 1..110: mol_type = other DNA
agaaaaggtgttgatcatgagaacacttcataactttccaaagtaatagtcgtctgctgccaagattgagaatcactgattttcatgaaaattccatctgtgctgtgaag

SEQ ID NO: 17587 - DNA, 110 bp, synthetic construct
  source 1..110: mol_type = other DNA
tgtgtaaagccaagatgcaactggggccagcagctgtgtgtttgaaaacatgctacttccatttgtgtcccttcataccttgttaatcattgagtcccactagacccacc

SEQ ID NO: 17588 - DNA, 110 bp, synthetic construct
  source 1..110: mol_type = other DNA
ggtagaaaggactggagttaaggaagtgaaaaacatgaattttggtctaatgtggtggccctatggttttttttagcagctgtatctgcaagtacatgaacatttcagtc

SEQ ID NO: 17589 - DNA, 110 bp, synthetic construct
  source 1..110: mol_type = other DNA
taatttcttgggaagggaatgtagatcagccaaaccctaactaatcccaagtctctaggcacatgtggaagcacaaagctcagcagagtcatcaaattaaacccagttga

SEQ ID NO: 17590 - DNA, 110 bp, synthetic construct
  source 1..110: mol_type = other DNA
acttctaaaagccacttacacaacctggcccctttcatcttcaatgttagcaatagttggtggagtttttatcatgcttctagtctttctgacctctctgtctgcctgct

SEQ ID NO: 17591 - DNA, 110 bp, synthetic construct
  source 1..110: mol_type = other DNA
tgctacagatatttaatacccagggtgttgaaatggctaaaaaccctgcacctaggccaaagtcccataaaatgcgaatagcttactttttttttttttttaaagtaaaa

SEQ ID NO: 17592 - DNA, 110 bp, synthetic construct
  source 1..110: mol_type = other DNA
ctgtgacttacactgcagcttgtggcaatactggatcattaacccattgagtgaggtaaaggatcaagtccacattctcatgaatactggtcaggttcttaacctgctga

SEQ ID NO: 17593 - DNA, 110 bp, synthetic construct
  source 1..110: mol_type = other DNA
gtaaaggatcaagtccacattctcatgaatactggtcaggttcttaacctgctgagccacaatgggaactcaagtactatgtcttcttaatccattaatctgtcaatgga

SEQ ID NO: 17594 - DNA, 110 bp, synthetic construct
  source 1..110: mol_type = other DNA
gaggcagtacagggaatgaaaagagaagagcaatgatgttctgatccacaggaagagaactctggactatacaccacacatataagattgtcttttattttaggtaagag

SEQ ID NO: 17595 - DNA, 110 bp, synthetic construct
  source 1..110: mol_type = other DNA
agaactctggactatacaccacacatataagattgtcttttattttaggtaagagggtagagctttcaagtcctcatactgtatttcacagactgaagaccattccctga

SEQ ID NO: 17596 - DNA, 110 bp, synthetic construct
  source 1..110: mol_type = other DNA
tagtgaaatgagaacatagtacactgttgatgagaatgtaaactggtccagccaatgtggaaaacaatatggaggttcatcaaaaaactaaaagcagaattaccaaatga

SEQ ID NO: 17597 - DNA, 110 bp, synthetic construct
  source 1..110: mol_type = other DNA
gtccagccaatgtggaaaacaatatggaggttcatcaaaaaactaaaagcagaattaccaaatgatctagcaattcaactccctggtgtgtatatacatatatacatata

SEQ ID NO: 17598 - DNA, 110 bp, synthetic construct
  source 1..110: mol_type = other DNA
gttgggtcccagagccttctccagttccaacagtgatagtgtggaggagagtgttggctttgaggagaatagctcattgaccccctctgacttctgcactaaaggtaaag

SEQ ID NO: 17599 - DNA, 110 bp, synthetic construct
  source 1..110: mol_type = other DNA
cattctcctctagctctattgggtaaagattagttttcaagcttccttgattttttggccaaagccatttccttgttgacaaagaacttatggcagttgtcttcttcaat

SEQ ID NO: 17600 - DNA, 110 bp, synthetic construct
  source 1..110: mol_type = other DNA
agctgcattccccagtagatatcatatactccagtcatttactaacctatactaattatctatggaacattaagtgtactagtaataagatttctctgatgaaaaaggtc

SEQ ID NO: 17601 - DNA, 110 bp, synthetic construct; identical to SEQ ID NO: 17600
  source 1..110: mol_type = other DNA

SEQ ID NO: 17602 - DNA, 110 bp, synthetic construct
  source 1..110: mol_type = other DNA
tacgagagagtcctttctcttaatttaatcaatgttaagcattgatgtgtgtgggggggtgtgtgtgtacatgtgtgtacgtttggtaactaggaatgttgctctttatt

SEQ ID NO: 17603 - DNA, 110 bp, synthetic construct
  source 1..110: mol_type = other DNA
gactgtacatggcaatgctttctgaaatgaagagctcctagacatccatgaatatatacatagacttcattgtcaactacttctaacgttagaatgatgtcaagtagttg

SEQ ID NO: 17604 - DNA, 110 bp, synthetic construct
  source 1..110: mol_type = other DNA
ccaattcttttgatccacacatataagcagttcatgggtaatttagttactatacatagcttttgaagaaatgaagaatagatatgctcatactaattcttgtacctgta

SEQ ID NO: 17605 - DNA, 110 bp, synthetic construct
  source 1..110: mol_type = other DNA
gattcagtcaccctttcattcacatatagttattgaggcctcagcatgacaatcattgctatgttaacatgccccaaaccaagcatttgctttcccccatctacaaccat

SEQ ID NO: 17606 - DNA, 110 bp, synthetic construct
  source 1..110: mol_type = other DNA
actggtccctgttgggagtaatgctaagcacaatggcttatgttaaaatgggatctgtgcttttatgagtcaatatctttgatacaaaagctatttatacaagaatctat

SEQ ID NO: 17607 - DNA, 110 bp, synthetic construct
  source 1..110: mol_type = other DNA
tgcagatactcaggcacacactatgtgctcaaggatttattaagtgagtgaatggatgcacaatatttttaacacaaacatatgttgtatattgattataaattttagct

SEQ ID NO: 17608 - DNA, 110 bp, synthetic construct
  source 1..110: mol_type = other DNA
aatctgcaaaattacataaactgtttgtcaagagttctaattggagctggaaagaagtaaggattagttgggatccaaaatggtttcataactacaaggagagaccttga

SEQ ID NO: 17609 - DNA, 110 bp, synthetic construct
  source 1..110: mol_type = other DNA
agaggatgtcatttgaattcacatgaaaactattcagtacatcgacagatgacgtgaaatggcagtttgacttcccaagacagctatttccttcttctctttaactgggg

SEQ ID NO: 17610 - DNA, 110 bp, synthetic construct
  source 1..110: mol_type = other DNA
agaaatatctaccataaggacattgatgaaacaccaaaagatgggcttaatcatcccaacttagcctggctttatctgtcatacatcgctaagcatgtattttttaactt

SEQ ID NO: 17611 - DNA, 110 bp, synthetic construct
  source 1..110: mol_type = other DNA
caggcaacttttcaagttagctatgctccttgtgttgactcaattcaactacacgatctgatggcccaactgtacttctatgcccaaagctattgggaaagaaaatgcaa

SEQ ID NO: 17612 - DNA, 110 bp, synthetic construct
  source 1..110: mol_type = other DNA
tagtaaaaaagcaaagcttttcttaagcctgtaactcaacttccactgttcagcatgaaaagttcaaagactgaatcacaagctataaaactcatgaaagaaataagggg

SEQ ID NO: 17613 - DNA, 110 bp, synthetic construct
  source 1..110: mol_type = other DNA
aaacatgcaatgggggacgcagaaaggcttgtgtgcctaggagccacacagcacactagcttggttacattaataagccattcattgaagatttcagcagtgggaacaat

SEQ ID NO: 17614 - DNA, 110 bp, synthetic construct
  source 1..110: mol_type = other DNA
ctaacctggtttaaaaaaaaaatcttgcagctgataaaacagttggtatttcaacactgctccacaaagtcatcaagggtccagcttgttcctccatcacacagacaata

SEQ ID NO: 17615 - DNA, 110 bp, synthetic construct
  source 1..110: mol_type = other DNA
aaaataactggacttgtgattttccaactttgccatagtgtgaaagctatataaattccatagaaaccgtattttgaattttgatcttttccaaggctaataataagcag

SEQ ID NO: 17616 - DNA, 110 bp, synthetic construct
  source 1..110: mol_type = other DNA
gcattttttacaagatcaagtatgatattggcacactgcacaactgaactctttcactcttatgaaaggccaaagattctaatatcctatgttctttgagagtctggaag

SEQ ID NO: 17617 - DNA, 110 bp, synthetic construct
  source 1..110: mol_type = other DNA
actcttatgaaaggccaaagattctaatatcctatgttctttgagagtctggaagatacaaaacataattttatttaaaggacctgtcagaagctgatatagattccata

SEQ ID NO: 17618 - DNA, 110 bp, synthetic construct
  source 1..110: mol_type = other DNA
ctttctgtctcgatgcactgtgttagcttcacacacacacaaatttacttttccggtctcaatgtattgttttgctttaaaccaatggaagcatctactgtggaagtact

SEQ ID NO: 17619 - DNA, 110 bp, synthetic construct
  source 1..110: mol_type = other DNA
agtacattgacatagaatgtgaggtgattgaaaccttggccaaattgctgaggttgatttctttctattatcagagattgtttatcagtgaaaaggagacagtctgttga

SEQ ID NO: 17620 - DNA, 110 bp, synthetic construct
  source 1..110: mol_type = other DNA
tctgattttcgacaacattaggaatcactgacttagattaacatttgctttactccacagtgcacacgaaaacagtcttagatagcaatataaaatattctgtgtgggtg

SEQ ID NO: 17621 - DNA, 110 bp, synthetic construct; identical to SEQ ID NO: 17620
  source 1..110: mol_type = other DNA

SEQ ID NO: 17622 - DNA, 110 bp, synthetic construct
  source 1..110: mol_type = other DNA
taagagttttggagatctaaagtttgttcaaactcgggattaatagtctaagcgtagatccacttctgcattgtcatgagggcttcagaaacagataaacattctggtcc

SEQ ID NO: 17623 - DNA, 110 bp, synthetic construct
  source 1..110: mol_type = other DNA
ctagtgccatggactcctccttgaatttctaacagcctgtgcttgacatagttagacctttatcagtcagaatatcccaccacagtttagatggaccatttcagggcaat

SEQ ID NO: 17624 - DNA, 110 bp, synthetic construct
  source 1..110: mol_type = other DNA
acctttatcagtcagaatatcccaccacagtttagatggaccatttcagggcaatcgcagcttagccactctagttacttacccccttggtgtgttaagggagcctcagc

SEQ ID NO: 17625 - DNA, 110 bp, synthetic construct
  source 1..110: mol_type = other DNA
ataaggtctttaccttcatttctgaatgatatttttgctgaccatagagctttattttgacatatctttttgtggcacttcaaaaatactatttcacctccctttggccg

SEQ ID NO: 17626 - DNA, 110 bp, synthetic construct
  source 1..110: mol_type = other DNA
tttgacatatctttttgtggcacttcaaaaatactatttcacctccctttggccgccatggtttctgataagaaatccacagttatttgaattattgttctcccacaaat

SEQ ID NO: 17627 - DNA, 110 bp, synthetic construct
  source 1..110: mol_type = other DNA
cttaacagtcagtattagatctaatcacatcacaaaataaagctcctcgatctttcattacaatgcacagatattgttctggaatcttattctcatcattttatctttcc

SEQ ID NO: 17628 - DNA, 110 bp, synthetic construct
  source 1..110: mol_type = other DNA
ctcgatctttcattacaatgcacagatattgttctggaatcttattctcatcattttatctttccagagagaatggctttcagtttagaattctttccttaaagtttaat

SEQ ID NO: 17629 - DNA, 110 bp, synthetic construct
  source 1..110: mol_type = other DNA
gcacctgaatgttcagtttgcctaagagtaactagaggtttttgatagaactgttggaaatgtgtttagtcaataatcaaccatttatcacattcttcagattaatgccc

SEQ ID NO: 17630 - DNA, 110 bp, synthetic construct
  source 1..110: mol_type = other DNA
ggaaatgtgtttagtcaataatcaaccatttatcacattcttcagattaatgcccccaaacaggtcagctcttctcatttcttttaataatgagagatttggatagttaa

SEQ ID NO: 17631 - DNA, 110 bp, synthetic construct
  source 1..110: mol_type = other DNA
taacgggtgattggtatttaaagcctgagtggggataaaaccacacagtgagtaatgactaagctctatgaaaagaagttgatgaatgtgaaattcagagatgtttccca

SEQ ID NO: 17632 - DNA, 110 bp, synthetic construct
  source 1..110: mol_type = other DNA
tgactaagctctatgaaaagaagttgatgaatgtgaaattcagagatgtttcccactacctagaagggtgactggcacagcatcagtgttcaaggggtgcttgttgagtt

SEQ ID NO: 17633 - DNA, 110 bp, synthetic construct
  source 1..110: mol_type = other DNA
tcttccaacattgttgtgtgtttattacttgcttctcatcatccggaacaaaataagtataatcaaaattttcttgggcatatgagttccaagtttgttgattcagtgct

SEQ ID NO: 17634 - DNA, 110 bp, synthetic construct
  source 1..110: mol_type = other DNA
agtataatcaaaattttcttgggcatatgagttccaagtttgttgattcagtgcttaaagaattcttatttgcagcatcccaaggacactgtagaaatctgaatcctagc

SEQ ID NO: 17635 - DNA, 110 bp, synthetic construct
  source 1..110: mol_type = other DNA
ttttgttatcatagtatgtttgcaaagctgtcttaagaaataaagattgcttttgcttcataggttacaattgaaaacaactctcaaaaatgtactcataggagttccct

SEQ ID NO: 17636 - DNA, 110 bp, synthetic construct
  source 1..110: mol_type = other DNA
gaagacttcggcaggaattggaatgcaagtgaaactctatgaaaagcttctaatttatttaatacaaccactaataaaactgcttcattaaaaagtgaaaaatagagagt

SEQ ID NO: 17637 - DNA, 110 bp, synthetic construct
  source 1..110: mol_type = other DNA
tgtaaatggaacatttatctctatctactatttcctccttgaatcctccagaaaagtaaaggtccctcagaaagatatttagctctctatccacttacctaaccttccac

SEQ ID NO: 17638 - DNA, 110 bp, synthetic construct
  source 1..110: mol_type = other DNA
ccacaatgttttaagcaaaagaatggcatgacttacatcgacagctttattacgaaaagaacataaagtcacaaaagttaaagtttgaccagtctggtggctcctgcagt

SEQ ID NO: 17639 - DNA, 110 bp, synthetic construct
  source 1..110: mol_type = other DNA
taggacccatcgctgttcagagctttatacatgttaatacatttactcttcacaacacaactatcatgtcaatatggcaactattccatttgacgggttaagaaattgag

SEQ ID NO: 17640 - DNA, 110 bp, synthetic construct; identical to SEQ ID NO: 17639
  source 1..110: mol_type = other DNA

SEQ ID NO: 17641 - DNA, 110 bp, synthetic construct
  source 1..110: mol_type = other DNA
aactgtcactgttctgaaacagatcaccatttcctctgattctttcagtttttccttcttgagcctcctgcagttttttcacatgtctgcgaaatactcaattgagacca

SEQ ID NO: 17642 - DNA, 110 bp, synthetic construct
  source 1..110: mol_type = other DNA
ttcttgagcctcctgcagttttttcacatgtctgcgaaatactcaattgagaccatctgtgattttctggagttctctgtccatgcgtacctctcctctccggtattctg

SEQ ID NO: 17643 - DNA, 110 bp, synthetic construct
  source 1..110: mol_type = other DNA
ggttttaacggagggcataacctcctcattttccttggattataaaaatgtagcccacggaatccttggggccgtgtttctttacctaccatttgtatctctcataagca

SEQ ID NO: 17644 - DNA, 110 bp, synthetic construct
  source 1..110: mol_type = other DNA
tttttctgccttttgcttattcaggccctcagcttggactgagtaatactttcccacattcagaagtcaagccactttatgaatctactgatgcaaatactaatatcacc

SEQ ID NO: 17645 - DNA, 110 bp, synthetic construct
  source 1..110: mol_type = other DNA
acattcagaagtcaagccactttatgaatctactgatgcaaatactaatatcacccagaaacacccttaagacacatccaggtatgatggttcctcaaatatctgggcct

SEQ ID NO: 17646 - DNA, 110 bp, synthetic construct
  source 1..110: mol_type = other DNA
aggctccttgtgatttcctttttgtcagctaatttgatgttctacgccagtcacatacaactgaactcagttatgaacagagatcaatgaagttctcatgaaagaggaat

SEQ ID NO: 17647 - DNA, 110 bp, synthetic construct
  source 1..110: mol_type = other DNA
gccaggtcagtgatcagacccacatcctcatagattctggttggcttcatttatgctgtgccacaatgggagctcccatggccaaatttttctaattatctcacggatat

SEQ ID NO: 17648 - DNA, 110 bp, synthetic construct
  source 1..110: mol_type = other DNA
cagtatggacatacacttcattaacgctttaggatggaaggtttctttctatggatagttcatttgtaggaattgttaatatctgttttactttaaaatgactagagtgt

SEQ ID NO: 17649 - DNA, 110 bp, synthetic construct
  source 1..110: mol_type = other DNA
catataatctatgttaggtcttatttgtagtgggatagggagctatttaaaagtcagggaaactagtttagactcttttgggggatgggcgagaagttctagagtaagaa

SEQ ID NO: 17650 - DNA, 110 bp, synthetic construct
  source 1..110: mol_type = other DNA
gaagttcggtcaggcaaaaaactttggcacatgttaaaatgaagcatttgaaactgtctgcaaattagtcataaaagaaaaaaaaaactgtctgatcattgcaagttgtg

SEQ ID NO: 17651 - DNA, 110 bp, synthetic construct
  source 1..110: mol_type = other DNA
tggtgttggttgcagatatggctcagacccatgttgctgtggtggagcccagcagacacagctccaattcaacccctaggtttggaacttctatatgtcgcaggtgtggc

SEQ ID NO: 17652 - DNA, 110 bp, synthetic construct
  source 1..110: mol_type = other DNA
acacagctccaattcaacccctaggtttggaacttctatatgtcgcaggtgtggccctaaaaagcaaaacaaaacaaaaaaaaatgcaagtcggaaagtgaaactgttat

SEQ ID NO: 17653 - DNA, 110 bp, synthetic construct
  source 1..110: mol_type = other DNA
cgaagacagaaatccctaaatgaatatgttctcctatctatactacagatgtgtgaccacagctgtcaactactcagtaatatattatcgtgaaaattgtggaagtgcta

SEQ ID NO: 17654 - DNA, 110 bp, synthetic construct
  source 1..110: mol_type = other DNA
accacagctgtcaactactcagtaatatattatcgtgaaaattgtggaagtgctaattcataactgtgtgaggcaaaaatcactgtcaaggaattcctactgtggtgtaa

SEQ ID NO: 17655 - DNA, 110 bp, synthetic construct; identical to SEQ ID NO: 17653
  source 1..110: mol_type = other DNA

SEQ ID NO: 17656 - DNA, 110 bp, synthetic construct; identical to SEQ ID NO: 17654
  source 1..110: mol_type = other DNA

SEQ ID NO: 17657 - DNA, 110 bp, synthetic construct
  source 1..110: mol_type = other DNA
gcagtaacaacatggaatccttaacccactgccccacaaaagaactctaagtgcgaggcttttatgtgggatttttgccatggaaatagttaaatttttatgtggtatga

SEQ ID NO: 17658 - DNA, 110 bp, synthetic construct
  source 1..110: mol_type = other DNA
atatggaagttccctggctaggggtcaaatcatagctacagcttcaggcctatgctacaaccatagtaacgtgggatccaggtcacatctttgacctacaccatagcaca

SEQ ID NO: 17659 - DNA, 110 bp, synthetic construct
  source 1..110: mol_type = other DNA
ggctaggggtcaaatcatagctacagcttcaggcctatgctacaaccatagtaacgtgggatccaggtcacatctttgacctacaccatagcacatggcaatgccagatc

SEQ ID NO: 17660 - DNA, 110 bp, synthetic construct
  source 1..110: mol_type = other DNA
agaaatcaaggggttgacaggactatgcaccccctgaaagctctcagaaacaaggcttcttggtctctttttagcttctattggctcatattcatcttggcatcctgtgc

SEQ ID NO: 17661 - DNA, 110 bp, synthetic construct
  source 1..110: mol_type = other DNA
cccccttcacctttgtcacatatatcctgatatttctcctttcctctttggggtgatattccagagctgtctaacataccacccctcaggctattctttctaaaaacaaa

SEQ ID NO: 17662 - DNA, 110 bp, synthetic construct
  source 1..110: mol_type = other DNA
ctgagtaacttttgatcatctataagtgctaggccaccaaaaatatgtttagtttgtggactagattaagaagcaacatgcttcattggttgtcattatatcaggaaagt

SEQ ID NO: 17663 - DNA, 110 bp, synthetic construct
  source 1..110: mol_type = other DNA
tcatttctagattacttatgataccaatctatgcctagctgaatctgcagattcaaatcctgaatacagagggacaatttgataactggttatcaaattgagcaattgat

SEQ ID NO: 17664 - DNA, 110 bp, synthetic construct
  source 1..110: mol_type = other DNA
cctagtggcataaatgctaaaaactgagcatttatttctatttttgcatattttgaaataaccagggatatgggaacatgacatacctttaaatttggcattagattaga

SEQ ID NO: 17665 - DNA, 110 bp, synthetic construct
  source 1..110: mol_type = other DNA
gagcacattctggaggacacgtttttcacccagaaaaaaaaaaaaaaaaggatagcagcagccaacaataacaaaaattctcgtgcaaatatatttgcagtgaaacactt

SEQ ID NO: 17666 - DNA, 110 bp, synthetic construct
  source 1..110: mol_type = other DNA
aaaaggatagcagcagccaacaataacaaaaattctcgtgcaaatatatttgcagtgaaacacttcacattaaaaaaaaaaaaagaatgagcaaacaaaaacctttggag

SEQ ID NO: 17667 - DNA, 110 bp, synthetic construct
  source 1..110: mol_type = other DNA
acttgaagaagcccctataaaattgcactattacagagatctgggagctgccaagttggtgaacacatccgtgttcaggggggctaagaacttgaactctatggggacag

SEQ ID NO: 17668 - DNA, 110 bp, synthetic construct
  source 1..110: mol_type = other DNA
aataaatgaggccagtttagttgaaggtcattacagtggaaaaataggaataggaagtaagaaaattttatctatgcagtcaagaattctagatgaccatacgctgctaa

SEQ ID NO: 17669 - DNA, 110 bp, synthetic construct; identical to SEQ ID NO: 17668
  source 1..110: mol_type = other DNA

SEQ ID NO: 17670 - DNA, 110 bp, synthetic construct
  source 1..110: mol_type = other DNA
aaaaatggacagggttttaccactgacttagcttagatctagtgcctaacccatcactgcagagaatttgtaattcttgaattggaagttcacagaaaaacaagccagtt

SEQ ID NO: 17671 - DNA, 110 bp, synthetic construct
  source 1..110: mol_type = other DNA
tctggctagaataaaatgaagaaaagaatcttgcttttaaagtctcctctaaccatcagcacaactgtgactaattctgttagaataatagttgtttgcaatagtcttta

SEQ ID NO: 17672 - DNA, 110 bp, synthetic construct
  source 1..110: mol_type = other DNA
tgttgttgctgttatttaaagtatgaggataattttagtttctgttactccatcatgatgggctacagatgttagaggaataatcaagggtatttttcagttctgtactc

SEQ ID NO: 17673 - DNA, 110 bp, synthetic construct; identical to SEQ ID NO: 17672
  source 1..110: mol_type = other DNA

SEQ ID NO: 17674 - DNA, 110 bp, synthetic construct
  source 1..110: mol_type = other DNA
tatgtcaaccacggattccttgtttatggaatgaattagaataagtcacattgatattcttcatcatttctcagataatataatgcttgccgcttttttaacgtattgaa

SEQ ID NO: 17675 - DNA, 110 bp, synthetic construct
  source 1..110: mol_type = other DNA
cagtgagaggagcaaaatcaaagctaccatatcatttaagtgataaacaatcttcagagtagtgcaggtagagagcactcagccatttcccaagatatccttacgtcctg

SEQ ID NO: 17676 - DNA, 110 bp, synthetic construct
  source 1..110: mol_type = other DNA
gaactacaaagaattactctacacacatgttcaagatttaaaattttacaaatcgccacatgagaagagaatactggagttcccataatggcaaagcagaaatgaatccg

SEQ ID NO: 17677 - DNA, 110 bp, synthetic construct; identical to SEQ ID NO: 17676
  source 1..110: mol_type = other DNA

SEQ ID NO: 17678 - DNA, 110 bp, synthetic construct
  source 1..110: mol_type = other DNA
actatagagacaatggagcctttgaaatgtgaggatacaggccactttttattgccaactgatctgtgattttagctaatatgattaatgtcaattattgaaagacgcca

SEQ ID NO: 17679 - DNA, 110 bp, synthetic construct
  source 1..110: mol_type = other DNA
aagatgtgggtctgatatctaatatcactgtcagctcagccacaaatgagctttcagtgctgtattatctctgcaggtttgaagaagtgcgtcaacgtgcctcaactgtt

SEQ ID NO: 17680 - DNA, 110 bp, synthetic construct
  source 1..110: mol_type = other DNA
tgaagagatcctgtgattttacagaaggatcattccttcatggtctgaggaacacttgcagtacacaggataaccccagcatccagctctagccaagtggatgactccag

SEQ ID NO: 17681 - DNA, 110 bp, synthetic construct
  source 1..110: mol_type = other DNA
gaggtagaatctttatttccctaccttttaatcttcattggccttgggattaccttgctgataggacatgccagaaatggctgtatgccagttctcagtctctcctgaaa

SEQ ID NO: 17682 - DNA, 110 bp, synthetic construct
  source 1..110: mol_type = other DNA
tgctgataggacatgccagaaatggctgtatgccagttctcagtctctcctgaaagcttgtggacttttctctttcttgaaacttgtctccttcatgaacaaaagccttt

SEQ ID NO: 17683 - DNA, 110 bp, synthetic construct
  source 1..110: mol_type = other DNA
tgttctataactttggggagatgtcttaatctcatcagcctcagttttctcatctggaaaatgagtattaatagtatacaacgtccagaactgttttgaagattcagggc

SEQ ID NO: 17684 - DNA, 110 bp, synthetic construct
  source 1..110: mol_type = other DNA
ggaaaatgagtattaatagtatacaacgtccagaactgttttgaagattcagggccatataaataaaaagatacctcagagagcctgttgtggcagagtggaaacaaatc

SEQ ID NO: 17685 - DNA, 110 bp, synthetic construct
  source 1..110: mol_type = other DNA
cctgccatcacaactcaacttgtcactcattccatcactgtattactattgtccgtaccatggcatcttgacatttcttctccaagccatgccacttttagttttagttt

SEQ ID NO: 17686 - DNA, 110 bp, synthetic construct
  source 1..110: mol_type = other DNA
agaaacctgtgaaagggaaggaggatgaagatgactgtgcaaacagaaacttagactatgatgcacatctgacaaagtacacaatggtccagttaggctcgccagagcca

SEQ ID NO: 17687 - DNA, 110 bp, synthetic construct
  source 1..110: mol_type = other DNA
ctatgatgcacatctgacaaagtacacaatggtccagttaggctcgccagagccaagattatccattggaggagccttgcattgaacaaaaatggtcagagcatagttcc

SEQ ID NO: 17688 - DNA, 110 bp, synthetic construct
  source 1..110: mol_type = other DNA
aagtttattctaatgggcaaatattttctatagctcatgggcaggctttaagacggacattacaatactgattttttgaaaagattttcatacttaattttgtggaagga

SEQ ID NO: 17689 - DNA, 110 bp, synthetic construct
  source 1..110: mol_type = other DNA
acttgaggcttcatacttggttatatttaaaatagcttaaaagccagtttcaacgtcagcattccagtacctttgttaatggcatacttcccttcgggtccaacgggtca

SEQ ID NO: 17690 - DNA, 110 bp, synthetic construct
  source 1..110: mol_type = other DNA
tttatttgtgtgtctagcccattacagatattagacatctgtatagttcatgggccagtggatttaattaggttttcagttgcttagtttgcttatccctttgtattgtg

SEQ ID NO: 17691 - DNA, 110 bp, synthetic construct
  source 1..110: mol_type = other DNA
tccatcacccttcaccactgaatttctgaatttctggccttcgaaattttttttttaattcttttgtcctagtatatctatatggtgagaatagataatcttgcaaagga

SEQ ID NO: 17692 - DNA, 110 bp, synthetic construct
  source 1..110: mol_type = other DNA
taattcttttgtcctagtatatctatatggtgagaatagataatcttgcaaaggaagataatggaatagcaagaagagtttttgtggagaggaaagcattattgctacat

SEQ ID NO: 17693 - DNA, 110 bp, synthetic construct
  source 1..110: mol_type = other DNA
agtcaggtttgttaacccctgagccacaacaggaactccaatttaaaatatgtttatgaaactttaacatgacatagaaatatattagtatgtatctgaggttaacagtt

SEQ ID NO: 17694 - DNA, 110 bp, synthetic construct
  source 1..110: mol_type = other DNA
cccctgagccacaacaggaactccaatttaaaatatgtttatgaaactttaacatgacatagaaatatattagtatgtatctgaggttaacagttctttatattggctaa

SEQ ID NO: 17695 - DNA, 110 bp, synthetic construct
  source 1..110: mol_type = other DNA
cttcatggttcctagttggtttcattaacccctgctccacgatggaaactcctaatgtattcatatttaaattttgcatatttatctattattgagaaattattatctat

SEQ ID NO: 17696 - DNA, 110 bp, synthetic construct
  source 1..110: mol_type = other DNA
cctctaatatttgtatgaccttaatcactaaatagctcctcttcaaccctcttagtaagagagactttaccatagaaacagttgctaaatcctggaacaaattctccatc

SEQ ID NO: 17697 - DNA, 110 bp, synthetic construct
  source 1..110: mol_type = other DNA
atgttcatatctgtcatttgaacctaataaacgtactctaaccatctccaaaaaagttgagatactttaaatagttgagcaaatgtggacatgtttccctgaacttttca

SEQ ID NO: 17698 - DNA, 110 bp, synthetic construct
  source 1..110: mol_type = other DNA
cccctggcctgtgaacttccgcttgtcacaggtgaggccatataaagaaaaaataaaaaggaggggggacaatttttaatattaattctcttggagaaaagtatttgtat

SEQ ID NO: 17699 - DNA, 110 bp, synthetic construct
  source 1..110: mol_type = other DNA
caatactgcaaaaaggaggaagctaggctaataggctgtgatgcagtgtggaagggtaatagctatcaaaatgtcaagtcaacaggttatgcgcagaaggatattacagt

SEQ ID NO: 17700 - DNA, 110 bp, synthetic construct
  source 1..110: mol_type = other DNA
gtaatagctatcaaaatgtcaagtcaacaggttatgcgcagaaggatattacagtgcatcaggcaagcggcagattgcacactcaaatgaatttaacagaagagaaaaca

SEQ ID NO: 17701 - DNA, 110 bp, synthetic construct
  source 1..110: mol_type = other DNA
tcataacctctgaaaagcaacctccacagcatgatacttaggctgacccccagtctcctatgccacagatcctggggttcgatcagtattactatcacttctctttgaca

SEQ ID NO: 17702 - DNA, 110 bp, synthetic construct
  source 1..110: mol_type = other DNA
cctccctaactacaggtcatgtgaccacttatcatccacattggatgagaatggcagtgtcagtccttatgctagtaatagcgaagtttaatgctttaattttttccttt

SEQ ID NO: 17703 - DNA, 110 bp, synthetic construct
  source 1..110: mol_type = other DNA
agcatcacccacccatctcatagtaatgccccttcccccactttgagcagctgggcccaccaaacatatcatcaagggattccccagggaaattttcttataacctgtgt

SEQ ID NO: 17704 - DNA, 110 bp, synthetic construct
  source 1..110: mol_type = other DNA
agcagctgggcccaccaaacatatcatcaagggattccccagggaaattttcttataacctgtgtcctgtgcaagtaaggtatcctgcctgagaccaatcagaaggtcaa

SEQ ID NO: 17705 - DNA, 110 bp, synthetic construct; identical to SEQ ID NO: 17703
  source 1..110: mol_type = other DNA

SEQ ID NO: 17706 - DNA, 110 bp, synthetic construct
  source 1..110: mol_type = other DNA
ccccactttgagcagctgggcccaccaaacatatcatcaagggattccccagggaaattttcttataacctgtgtcctgtgcaagtaaggtatcctgcctgagaccaatc

SEQ ID NO: 17707 - DNA, 110 bp, synthetic construct
  source 1..110: mol_type = other DNA
tccctttgtatagtatgtccttccactttgtctagtttgaacactaatttttcccaagtctttgtgagctacaagcattatttcacttattcctttccattatttctttc

SEQ ID NO: 17708 - DNA, 110 bp, synthetic construct
  source 1..110: mol_type = other DNA
aagtctttgtgagctacaagcattatttcacttattcctttccattatttctttccctaacctcagatagcactcttgcatgcacgtaaaattcagtactcagacgaaaa

SEQ ID NO: 17709 - DNA, 110 bp, synthetic construct
  source 1..110: mol_type = other DNA
gtaaatcttgttagctgtaaaccttttgttaccattaccttgcctttgttgcaaaaactcaaagatcctagctccccccttctctccttggagctgttttctcagggcta

SEQ ID NO: 17710 - DNA, 110 bp, synthetic construct
  source 1..110: mol_type = other DNA
cattatagaggagaaaacggagatacacaaagttaaagaacttgactcagatcgcacattcagtgatggagctgagttttaaaacaaggcagttgcctcttttgcagtgt

SEQ ID NO: 17711 - DNA, 110 bp, synthetic construct
  source 1..110: mol_type = other DNA
acattcagtgatggagctgagttttaaaacaaggcagttgcctcttttgcagtgttgttaaggaaacacacatgtaaatgtgcaattccaaagtggtgatacaaatgttg

SEQ ID NO: 17712 - DNA, 110 bp, synthetic construct
  source 1..110: mol_type = other DNA
ccagctccttataaccacagctattctttagcttagcaaaacctctctctaacataaccctttcctgcatccctctaagcagcaatctgtttccctgactctctcagtgg

SEQ ID NO: 17713 - DNA, 110 bp, synthetic construct
  source 1..110: mol_type = other DNA
aaccctttcctgcatccctctaagcagcaatctgtttccctgactctctcagtggatatggttatatagtccttggctattgctcaaagaaaatagtttacgattaagaa

SEQ ID NO: 17714 - DNA, 110 bp, synthetic construct
  source 1..110: mol_type = other DNA
gagctccctattttttttgtttgggtttctttgttgttgtttttttgtttgtttgtttttttagggccacatctgtggcatacggaggttgccaggttaggggtttaatc

SEQ ID NO: 17715 - DNA, 110 bp, synthetic construct
  source 1..110: mol_type = other DNA
tttgtttgggtttctttgttgttgtttttttgtttgtttgtttttttagggccacatctgtggcatacggaggttgccaggttaggggtttaatcagagatgtagctgcc

SEQ ID NO: 17716 - DNA, 110 bp, synthetic construct
  source 1..110: mol_type = other DNA
ggctggaaatagcaggaaactgaaggccagacacttaaattccagtaacatgcgaggagggaattttctttttcttaaatccggggtggaaagccaaacccttctgttta

SEQ ID NO: 17717 - DNA, 110 bp, synthetic construct
  source 1..110: mol_type = other DNA
catgtccatgtcctctagaggtacccccatcattttcctaataacctgttccttttatgtagccattcctctcatgaaacaatcagccagtgcagaaagttagctttgat

SEQ ID NO: 17718 - DNA, 110 bp, synthetic construct
  source 1..110: mol_type = other DNA
gaggaactgtgtgcttaggactttagacagcctctttgctgatgggtaggactgtgttcccacctagtgtgttttttggcctagagcttcttagctctggtgggtgggga

SEQ ID NO: 17719 - DNA, 110 bp, synthetic construct
  source 1..110: mol_type = other DNA
gttcccacctagtgtgttttttggcctagagcttcttagctctggtgggtggggacagatttttccaaatgattcatgccaatgatcattcctgaaacctctgcctccaa

SEQ ID NO: 17720 - DNA, 110 bp, synthetic construct
  source 1..110: mol_type = other DNA
gatttcaatattactgtacctcagggaataggaaggaccatggagagagaaagggaaggggcaatagctggtcgatggagcagccagaacaggcaatatttattggctaa

SEQ ID NO: 17721 - DNA, 110 bp, synthetic construct
  source 1..110: mol_type = other DNA
aaatgggctggcaccttgatcgtgtactttccagcctccagaactgtaagaaatcagtgtctgctctttaggccaccgcctcaccccccaccccaggttattttattaca

SEQ ID NO: 17722 - DNA, 110 bp, synthetic construct
  source 1..110: mol_type = other DNA
agtgtctgctctttaggccaccgcctcaccccccaccccaggttattttattacagcagcccaagcccactaagcaaacacatccaagtcgcgctgagttgtcagcatgg

SEQ ID NO: 17723 - DNA, 110 bp, synthetic construct
  source 1..110: mol_type = other DNA
aatatctgtgctaattctgaaacagtataaattcctggccgtcttaacaaaatacagtgctcttttatgtggctgcgcacagtcaggccagtatcatggttcagagcatg

SEQ ID NO: 17724 - DNA, 110 bp, synthetic construct
  source 1..110: mol_type = other DNA
aaattgggtctgtaataggatgtcctcatctcctgcccattctaggatgcacccctgtagctccactgattggactgtatgcagattgtcttagttatgtgtgaactgct

SEQ ID NO: 17725 - DNA, 110 bp, synthetic construct
  source 1..110: mol_type = other DNA
ttcctccagcctgccctccttccttccagaaattctccaaggggctaaaactactagtaacaattaggaagctcattacatccacgcctgaactttgagttcctctggca

SEQ ID NO: 17726 - DNA, 110 bp, synthetic construct
  source 1..110: mol_type = other DNA
agtaacaattaggaagctcattacatccacgcctgaactttgagttcctctggcagggagtagagggagcaagggttagacgttatgacctcagaattttccaatactcg

SEQ ID NO: 17727 - DNA, 110 bp, synthetic construct
  source 1..110: mol_type = other DNA
gtcatggctgttgtgaccaccatcattttaactattactcagactttgaatggagaatagattgggcttaaatgtgagggacgaaagcaagtttcatgacctgggacagg

SEQ ID NO: 17728 - DNA, 110 bp, synthetic construct
  source 1..110: mol_type = other DNA
aatagattgggcttaaatgtgagggacgaaagcaagtttcatgacctgggacagggttgagagcaagatagatagttagggaggtgattctggaaggtatcacaagtgcc

SEQ ID NO: 17729 - DNA, 110 bp, synthetic construct
  source 1..110: mol_type = other DNA
gcaaaaaaaacccaaaaacaaattcccaaacctgtcttctgcatgtcagaggaatctctacaggaactgaggagagcaatgatctgaggtctgtagatgcatatataaaa

SEQ ID NO: 17730 - DNA, 110 bp, synthetic construct
  source 1..110: mol_type = other DNA
ctctacaggaactgaggagagcaatgatctgaggtctgtagatgcatatataaaataaggtgtggtgggtcctggaggggggaaaaaagccccattggtcgtgtgtgcca

SEQ ID NO: 17731 - DNA, 110 bp, synthetic construct
  source 1..110: mol_type = other DNA
catgtaatctcagcacaattataaaaatcaggactatagtgctttttcaagtttaaaataatgtatcctagctgatggcaccgttgctattcttttctttctcatctcct

SEQ ID NO: 17732 - DNA, 110 bp, synthetic construct
  source 1..110: mol_type = other DNA
aaataatgtatcctagctgatggcaccgttgctattcttttctttctcatctccttcaatctccactttgccacctcagaaaaggtaaagccaaattttggagagggttc

SEQ ID NO: 17733 - DNA, 110 bp, synthetic construct
  source 1..110: mol_type = other DNA
cccactgagcaaggtcagggattgaacttgtatccccatggatactagtcagtttcgtaacttgctgagccgcaacggaaactccctgttttttcttttgtacagaattg

SEQ ID NO: 17734 - DNA, 110 bp, synthetic construct; identical to SEQ ID NO: 17733
  source 1..110: mol_type = other DNA

SEQ ID NO: 17735 - DNA, 110 bp, synthetic construct
  source 1..110: mol_type = other DNA
agcctgtacatgtttgtgtgatgtgctttcctgtttgtaacacataatgatactcatcattaagctcttcctattccaaaaagactgccaggcaatgatgtcttctgagc

SEQ ID NO: 17736 - DNA, 110 bp, synthetic construct
  source 1..110: mol_type = other DNA
aaaggtgctaagtggttgctagaaatattcctgaggcatttttccccccagtatctctagctttagagattcctgatgtaatttcacttaattcttgcgtgtctggaatg

SEQ ID NO: 17737 - DNA, 110 bp, synthetic construct
  source 1..110: mol_type = other DNA
tccaacccatgattgactttcaatgaataaaggacatcaggctcattactaaattgttttagttttgtctttcgaccatatcaagctttttttttccctgcagatattct

SEQ ID NO: 17738 - DNA, 110 bp, synthetic construct
  source 1..110: mol_type = other DNA
cactcctgaaccacaaggatgtctttctgacatgtctatggaaaaacaagccctaagacagagaaagagcttgtagtacaatctacatcctgcccttgaggaagagaggc

SEQ ID NO: 17739 - DNA, 110 bp, synthetic construct
  source 1..110: mol_type = other DNA
agacagagaaagagcttgtagtacaatctacatcctgcccttgaggaagagaggcattgtactgtgttggaaaaatttaagttccaccaagaactctaacctcagactgt

SEQ ID NO: 17740 - DNA, 110 bp, synthetic construct
  source 1..110: mol_type = other DNA
ttaatcagcaactgtaggcttaagcataatcttaaatggatgtgccttcgcacaggaacaacctgtgctcagtttcctttgagttaaaactttaaatatatttaaagtaa

SEQ ID NO: 17741 - DNA, 110 bp, synthetic construct
  source 1..110: mol_type = other DNA
atggatgtgccttcgcacaggaacaacctgtgctcagtttcctttgagttaaaactttaaatatatttaaagtaataattaagtttatttcataaagacaatcacaatcc

SEQ ID NO: 17742 - DNA, 110 bp, synthetic construct
  source 1..110: mol_type = other DNA
tgaagaatagcatcatctagcagtttccaaactgtgtatcgcggaacccctgtacagcagtatgttcctgcatgttactttcagagaggaaaagagttctgtaatcaagt

SEQ ID NO: 17743 - DNA, 110 bp, synthetic construct
  source 1..110: mol_type = other DNA
aacttatccttttaagaggcttttcctctcacacagttctccattgaacgtgaatcctgagaggggagagattatgtttagaaggtcccaccaggaccaatctgcttaga

SEQ ID NO: 17744 - DNA, 110 bp, synthetic construct
  source 1..110: mol_type = other DNA
gaccttgaagatgtatatgtgtgtaaaaggaaaaccttcagcatcctcttgcagctgtaaagagctctaacatgaatttggatgtcggccaatggatttgccattggcaa

SEQ ID NO: 17745 - DNA, 110 bp, synthetic construct
  source 1..110: mol_type = other DNA
tgtaaagagctctaacatgaatttggatgtcggccaatggatttgccattggcaaggttgcttggtgtagagacatctgcacagatagctaagattcatactgttgtttc

SEQ ID NO: 17746 - DNA, 110 bp, synthetic construct; identical to SEQ ID NO: 17744
  source 1..110: mol_type = other DNA

SEQ ID NO: 17747 - DNA, 110 bp, synthetic construct; identical to SEQ ID NO: 17745
  source 1..110: mol_type = other DNA

SEQ ID NO: 17748 - DNA, 110 bp, synthetic construct
  source 1..110: mol_type = other DNA
atgtgccacgagagcagccctaaaaagacaaaagataaaaaattgacatttggtacatttagggtctctctgaccctctttcctcaggccccccagtataattgccatca

SEQ ID NO: 17749 - DNA, 110 bp, synthetic construct
  source 1..110: mol_type = other DNA
gaagaaactgagatgggttagcaaggtcattcttgactgacttcatcctctgtgtggctgtgctccagcaacgttgacacagagctggtaccagtgcgggtgagggatag

SEQ ID NO: 17750 - DNA, 110 bp, synthetic construct
  source 1..110: mol_type = other DNA
tggtagcacatgccaggagattatactacgttctactccttcttattagctgtggtcccttctacccaaaaatctcatttactgaagtggtacctttctctccatcatgg

SEQ ID NO: 17751 - DNA, 110 bp, synthetic construct
  source 1..110: mol_type = other DNA
tcccttctacccaaaaatctcatttactgaagtggtacctttctctccatcatggtgtctattgacattctcagtaatgtcaacatccacttgttgaaataaatttctag

SEQ ID NO: 17752 - DNA, 110 bp, synthetic construct
  source 1..110: mol_type = other DNA
caaatgtcagttctgttcatctttcacctaaatatctaaatgataccacagagtcagaaaggaaacgtcaagcaagtatagaagtgtgcgactatgaggatttctagtgg

SEQ ID NO: 17753 - DNA, 110 bp, synthetic construct
  source 1..110: mol_type = other DNA
agaaaggaaacgtcaagcaagtatagaagtgtgcgactatgaggatttctagtggccatctgttttgaaaggcctcctttcaaaaaagtcttaaattatttaacaccaaa

SEQ ID NO: 17754 - DNA, 110 bp, synthetic construct
  source 1..110: mol_type = other DNA
ttgtaagaattaatgatgatccagaaaatgtactgaagatgaagtgcacaccctgagagagagctgataagtattattaaaagtgtcagtggctaagtatattttaatga

SEQ ID NO: 17755 - DNA, 110 bp, synthetic construct
  source 1..110: mol_type = other DNA
agagagagctgataagtattattaaaagtgtcagtggctaagtatattttaatgaatgtgggaaaagcatacagcaaaggatcttggcctgcttgccctagtacctcagt

SEQ ID NO: 17756 - DNA, 110 bp, synthetic construct
  source 1..110: mol_type = other DNA
ggttattgtcaggccaaagctgcaaggttattgagagatcttgcattctggatgggttgctggagcagagctccacctaacttccttgtacacacactgacctcctccca

SEQ ID NO: 17757 - DNA, 110 bp, synthetic construct
  source 1..110: mol_type = other DNA
gttgctggagcagagctccacctaacttccttgtacacacactgacctcctcccatttttccatgtacttccagtgccctctactgagaaagcttaacatcacgctcact

SEQ ID NO: 17758 - DNA, 110 bp, synthetic construct
  source 1..110: mol_type = other DNA
agcaaaagagccaagaatttgtaactgtcagccctgatcattgtacacactgtgatggaaaagctgaagagtaggagcataaagcctagagaccttacaaggcgtctggg

SEQ ID NO: 17759 - DNA, 110 bp, synthetic construct
  source 1..110: mol_type = other DNA
tggaaaagctgaagagtaggagcataaagcctagagaccttacaaggcgtctgggtttaaaaaagttttcatgagggagttcccatcgtggcgcagcggaaacgaatcgg

SEQ ID NO: 17760 - DNA, 110 bp, synthetic construct
  source 1..110: mol_type = other DNA
gggcaggcataaaaaggcctctgaaataagaattcaggaattaatatcaaaagaatatccgctaacccatttcttatcaacctactcttggcttgcaatgacttttgcag

SEQ ID NO: 17761 - DNA, 110 bp, synthetic construct
  source 1..110: mol_type = other DNA
ctactttaatttatggagtattagtttttaatatgttgtcccttttaaagccagcgatttgattaatatgaaaatatcacttggagcattttctcctctgagcatcttgt

SEQ ID NO: 17762 - DNA, 110 bp, synthetic construct
  source 1..110: mol_type = other DNA
gatttgattaatatgaaaatatcacttggagcattttctcctctgagcatcttgtatatgtcttagaccactgacccattactctaaggattggcttccttacctacctc

SEQ ID NO: 17763 - DNA, 110 bp, synthetic construct
  source 1..110: mol_type = other DNA
cagggaaaatttttacagcctccccaaactccatttcctcccctccctgggcaatccaagatgacttttgttgtcagataagattcttctgtaccaggaagcagccctgc

SEQ ID NO: 17764 - DNA, 110 bp, synthetic construct
  source 1..110: mol_type = other DNA
ccaagatgacttttgttgtcagataagattcttctgtaccaggaagcagccctgccacctatgactctgattgtcattggccatccttgacctctcaaggcatccttttt

SEQ ID NO: 17765 - DNA, 110 bp, synthetic construct
  source 1..110: mol_type = other DNA
ccactagggaactcctagataaaactattctttttttttgctttttagggccgaacccatgcatatgaaagttcccaggctaaggggtcgaatcggagctacactgccag

SEQ ID NO: 17766 - DNA, 110 bp, synthetic construct
  source 1..110: mol_type = other DNA
cccatgcatatgaaagttcccaggctaaggggtcgaatcggagctacactgccagcctacaggacagccaccaccacatcaacatgggatccaagccacatctacaacct

SEQ ID NO: 17767 - DNA, 110 bp, synthetic construct
  source 1..110: mol_type = other DNA
ttcaaagacggccaaagcagactccccatcctaaaggattttataaaccagtcaggaattcaaagctcacacatacccatctatggcacagtcatctagaagcgctgagc

SEQ ID NO: 17768 - DNA, 110 bp, synthetic construct
  source 1..110: mol_type = other DNA
gaattcaaagctcacacatacccatctatggcacagtcatctagaagcgctgagcttcagctggtgcagttggagaaggctacttgtaggaacagagaattctgcaaagt

SEQ ID NO: 17769 - DNA, 110 bp, synthetic construct
  source 1..110: mol_type = other DNA
tgtccaagcttacagctatgatcactctttccttaggccaaattttgtttcatttttttctttttagagcttcacctgtggcgtatggattttccaaggcttgggatcaa

SEQ ID NO: 17770 - DNA, 110 bp, synthetic construct
  source 1..110: mol_type = other DNA
acggatacttcctttcaagtgacaacgaagtagtttttcaggaggcatcaagtgccacctcacctgccagctgcacctttgtcttccctttctgtctgcaggttctttta

SEQ ID NO: 17771 - DNA, 110 bp, synthetic construct
  source 1..110: mol_type = other DNA
actgaggataggtggaggagtatagaagtggaggcagggagacccactgggaggcattgtcataaaccgagtgagggatggctgtagcttggaccagaatgtctatggaa

SEQ ID NO: 17772 - DNA, 110 bp, synthetic construct
  source 1..110: mol_type = other DNA
attgtcataaaccgagtgagggatggctgtagcttggaccagaatgtctatggaaaccgtaagtaaagaggggcctggaaactctttgagggcagagaatatggggtttg

SEQ ID NO: 17773 - DNA, 110 bp, synthetic construct
  source 1..110: mol_type = other DNA
tcactactgccttctgacaggatacttacaatgcagagtgttaaaatatgaatactagtatgagagcattttaattagaaaatcacagaatttaaagaatatccaacttc

SEQ ID NO: 17774 - DNA, 110 bp, synthetic construct
  source 1..110: mol_type = other DNA
tagtatgagagcattttaattagaaaatcacagaatttaaagaatatccaacttctaaaagaaactgtcgcagtgctacagagagcaccccagaatactttgtgctttga

SEQ ID NO: 17775 - DNA, 110 bp, synthetic construct
  source 1..110: mol_type = other DNA
aaccagagtcaattctagttctacctcggagccagatttatcctctcagcaaaacaatgcttctactcattccatacatgtcggcagacacaagagttcaatgctcagac

SEQ ID NO: 17776 - DNA, 110 bp, synthetic construct
  source 1..110: mol_type = other DNA
aatgcttctactcattccatacatgtcggcagacacaagagttcaatgctcagacgttcaaaaggtccatttgcacgtgctactgctagccacccagtaacaagaacttt

SEQ ID NO: 17777 - DNA, 110 bp, synthetic construct
  source 1..110: mol_type = other DNA
gcatatggaagttcccaagctaggggttgatctgagctgcgtcttcagcctccaccattgttcacagcgatgcctgatatgtaactcactgagcaaggccagagatggaa

SEQ ID NO: 17778 - DNA, 110 bp, synthetic construct; identical to SEQ ID NO: 17777
  source 1..110: mol_type = other DNA

SEQ ID NO: 17779 - DNA, 110 bp, synthetic construct
  source 1..110: mol_type = other DNA
ataaggaaggggtcaaagggagaaatatcaggaccagagattgatctgctcagttgtgtatccagagatgctttcccttttcactgggactagactgtaaaatcagtcag

SEQ ID NO: 17780 - DNA, 110 bp, synthetic construct
  source 1..110: mol_type = other DNA
gtgtatccagagatgctttcccttttcactgggactagactgtaaaatcagtcaggggcaagctggtatgatcagaggtgttcttgcttctcccttcaggagattaattt

SEQ ID NO: 17781 - DNA, 110 bp, synthetic construct
  source 1..110: mol_type = other DNA
actgcacacgtctgtgaaatttgggaacataaggacacctaataccctcctttgtgtgctctgaggagatatttggcaccctgcccctctttgtgctggccccacagggt

SEQ ID NO: 17782 - DNA, 110 bp, synthetic construct
  source 1..110: mol_type = other DNA
aacaaaaatagaaatatagctggcaaaatccccaaactttgaagattaagcaacatatttttaaatcactcatgtgccaaagaagaaatcacatggatatcagaaaacat

SEQ ID NO: 17783 - DNA, 110 bp, synthetic construct
  source 1..110: mol_type = other DNA
tgtcgcctgcaagaaacaagtcctgtaagatgtttacaagtgttctgtgtgtgaaggaagatttcctaggccaactaggaaagggctgaattaacagatctgagttcaga

SEQ ID NO: 17784 - DNA, 110 bp, synthetic construct
  source 1..110: mol_type = other DNA
ggaagatttcctaggccaactaggaaagggctgaattaacagatctgagttcagaattcagctcttctatttatagatatatacttgagaagtcatatttttctgaaccc

SEQ ID NO: 17785 - DNA, 110 bp, synthetic construct; identical to SEQ ID NO: 17783
  source 1..110: mol_type = other DNA

SEQ ID NO: 17786 - DNA, 110 bp, synthetic construct; identical to SEQ ID NO: 17784
  source 1..110: mol_type = other DNA

SEQ ID NO: 17787 - DNA, 110 bp, synthetic construct
  source 1..110: mol_type = other DNA
aaaagaaaggaacttcaacttccctaattaagagtgacaggaccagtcattgttaagaacaatgtgacattgaagtagaaatttcaaaaatccaataaattaacacatct

SEQ ID NO: 17788 - DNA, 110 bp, synthetic construct; identical to SEQ ID NO: 17787
  source 1..110: mol_type = other DNA

SEQ ID NO: 17789 - DNA, 110 bp, synthetic construct
  source 1..110: mol_type = other DNA
ttagagggatgggcaggaataggattattaaaaccttcacagcttcgaatctattctttaaaatgtgtagcttaataaacgaggagttttgtaacaaatttctctaatgt

SEQ ID NO: 17790 - DNA, 110 bp, synthetic construct
  source 1..110: mol_type = other DNA
atcctattccactaattcatatttctgtttttgtaccagtactgtaatgttttgataactgtaactttgtagtacaggctgaatcattcaggaatcctgattcctccagc

SEQ ID NO: 17791 - DNA, 110 bp, synthetic construct
  source 1..110: mol_type = other DNA
gtgaatgaagatcaaaggcagatatggtttgtaccaattgcagcctatcagtcgccaatgttgtggttggactggccctgtgtttcttgttatgattgaaaggctatctt

SEQ ID NO: 17792 - DNA, 110 bp, synthetic construct
  source 1..110: mol_type = other DNA
caatgttgtggttggactggccctgtgtttcttgttatgattgaaaggctatcttcagaaataaccatcaggaaactttgaaaagataggggtttattacacatctgggg

SEQ ID NO: 17793 - DNA, 110 bp, synthetic construct
  source 1..110: mol_type = other DNA
aatttttcccatcattccttgaacacatttatttaattaaaaaaagtcccctctcaacaggacttccataataattaacaaataattccaaacttctgggaaggagctgg

SEQ ID NO: 17794 - DNA, 110 bp, synthetic construct
  source 1..110: mol_type = other DNA
gtcccctctcaacaggacttccataataattaacaaataattccaaacttctgggaaggagctggttttgaaaatccattgcttgtggataatatttaaaatgactaaac

SEQ ID NO: 17795 - DNA, 110 bp, synthetic construct
  source 1..110: mol_type = other DNA
caatctatagattgaatgtaatacctatcaaaatacccatgacagttttcacagaactaaaacaaataatcctaaaattcacgtggaaccacaaaagacacaaaattgcc

SEQ ID NO: 17796 - DNA, 110 bp, synthetic construct
  source 1..110: mol_type = other DNA
actaaaacaaataatcctaaaattcacgtggaaccacaaaagacacaaaattgccaaaacattcttgagaaaaaaaagaacaaagctcattcccagatttcaaacaatac

SEQ ID NO: 17797 - DNA, 110 bp, synthetic construct
  source 1..110: mol_type = other DNA
gattaaaaagttggtgtgtatgctttttggtatttaccagaatgagcagaaaacctatacccccagaaaaacccacacacaggtatttatagcagctttattcattactg

SEQ ID NO: 17798 - DNA, 110 bp, synthetic construct
  source 1..110: mol_type = other DNA
cttagtccttattacaacctttagaagaaatatattccatcttaaagatataacataggaacaacttagaaatgatagtgttgtaatcaggtgaagaggcatgctccttg

SEQ ID NO: 17799 - DNA, 110 bp, synthetic construct
  source 1..110: mol_type = other DNA
taggaacaacttagaaatgatagtgttgtaatcaggtgaagaggcatgctccttgttagccagaggtgagaatatatggtttaaagagtgtgatgacattaggacatgaa

SEQ ID NO: 17800 - DNA, 110 bp, synthetic construct
  source 1..110: mol_type = other DNA
atgctaactaaatattagactcactaagggaggttttataaaattcagaggtctgggttacatcctagactaattacatcagaatttctagggacaagacctaggaattg

SEQ ID NO: 17801 - DNA, 110 bp, synthetic construct
  source 1..110: mol_type = other DNA
tcttaatatctccaaagtcccttttgccatcgtatacatataaatacattctttttctcgtactgtcatccgtcatgttgtatcccaagagactggatatagatccctgt

SEQ ID NO: 17802 - DNA, 110 bp, synthetic construct
  source 1..110: mol_type = other DNA
agtcccttttgccatcgtatacatataaatacattctttttctcgtactgtcatccgtcatgttgtatcccaagagactggatatagatccctgtgctgtacagtaggac

SEQ ID NO: 17803 - DNA, 110 bp, synthetic construct
  source 1..110: mol_type = other DNA
tcttctgtttgcacactaatcattcagcccatagctgtccagcactaagcagcgctataacacctccaggagacatgttttcctgtggtttataatagagggcggagaaa

SEQ ID NO: 17804 - DNA, 110 bp, synthetic construct
  source 1..110: mol_type = other DNA
ccatcttgttcactagcatcttgttcactagcagcttgaatgtcctggtaggattgtccaaactcctagtatgggtctcaagcctccaaatttgtaagcagatgtcctag

SEQ ID NO: 17805 - DNA, 110 bp, synthetic construct
  source 1..110: mol_type = other DNA
ttatgcaatatcaaggttgttggttcccacaatggatcctcatgtaaatatttattttctatgcttcataacaaagtataaacaaacatagcagcttaaaacagtgctca

SEQ ID NO: 17806 - DNA, 110 bp, synthetic construct
  source 1..110: mol_type = other DNA
aaaaatcagaggatggtcaatggaagatagatcacatggtcatgccaccataactgatccagagggaaagaagcatcagctgataatatggcccttataactttaccaaa

SEQ ID NO: 17807 - DNA, 110 bp, synthetic construct
  source 1..110: mol_type = other DNA
gatccagagggaaagaagcatcagctgataatatggcccttataactttaccaaacattgtaacataggctcagtcacaaaaaaattgcatatctctctagacacagact

SEQ ID NO: 17808 - DNA, 110 bp, synthetic construct
  source 1..110: mol_type = other DNA
tgagggatgaaagttgaaggaattagaggatggagatccatatgaattgtcaattatgagagatcaaatgaataccatgtctgtgtgacaaaatgtcaatcaattctgtg

SEQ ID NO: 17809 - DNA, 110 bp, synthetic construct
  source 1..110: mol_type = other DNA
atgagagatcaaatgaataccatgtctgtgtgacaaaatgtcaatcaattctgtggtcctggaggataagccctattattagcaataccttgactcagttctcacaactg

SEQ ID NO: 17810 - DNA, 110 bp, synthetic construct
  source 1..110: mol_type = other DNA
ccatgttgctatgaccacctttcagcttatccttgcttaactaactctattcactcttaaggttcagcccaaaacaacataccctctgggaaaccttgcctgttccatct

SEQ ID NO: 17811 - DNA, 110 bp, synthetic construct
  source 1..110: mol_type = other DNA
gttgtcattcacacctacctctggggacttctcagaggtgaaccaaatgtccagaggagctgtgacaaattcacggtggccttgggtcttagatgcaagatggtttcaaa

SEQ ID NO: 17812 - DNA, 110 bp, synthetic construct
  source 1..110: mol_type = other DNA
gcatatgttgaaattccaacttccactgtgttggtataggtggtgggtgtttgggaagtgattagacctgaaggataaagccttcatgaattggattagtgcctctgtaa

SEQ ID NO: 17813 - DNA, 110 bp, synthetic construct
  source 1..110: mol_type = other DNA
aagtgattagacctgaaggataaagccttcatgaattggattagtgcctctgtaaaaggaatcccagagagtctctcactctctttctgccatgtcagtatacaagaagt

SEQ ID NO: 17814 - DNA, 110 bp, synthetic construct
  source 1..110: mol_type = other DNA
tattaatctgcaaagcaaaccctgctggcaaagagattcatcagcttagcagctacctcgtaagaattagtgatacgcggagattcaccagttgtagaatctcagcagag

SEQ ID NO: 17815 - DNA, 110 bp, synthetic construct
  source 1..110: mol_type = other DNA
catttcaagcaccagctacaagtgcgaggctccccaacaccaccctcattcagactggcttgctacaaattccagggtttccacaatcacccttgggttcaataattcac

SEQ ID NO: 17816 - DNA, 110 bp, synthetic construct
  source 1..110: mol_type = other DNA
ctaactctacatgtctctctctcagatcttttctccataattttctgccttagaatgtggccatcctccaagccttaattatatcaaatattgctttgagacttgtggtt

SEQ ID NO: 17817 - DNA, 110 bp, synthetic construct
  source 1..110: mol_type = other DNA
catggagcattgtcttccaacaggcacagacttacttaagtttatcaatgtttcatttactcctctattgagcttccagaagataaagtgtaccagctagttcttgcttt

SEQ ID NO: 17818 - DNA, 110 bp, synthetic construct
  source 1..110: mol_type = other DNA
gatctcttctcttgtggggatataagcaatagagtcactctaagtgacttaggcgacaaaaatcctgttgaaaagataacacgtagctcatggaatcattggggatgttg

SEQ ID NO: 17819 - DNA, 110 bp, synthetic construct
  source 1..110: mol_type = other DNA
acaaaaatcctgttgaaaagataacacgtagctcatggaatcattggggatgttggagaatcaggtttagggttaaagagcctggaaaaaatgtcaaatcatgccacaga

SEQ ID NO: 17820 - DNA, 110 bp, synthetic construct
  source 1..110: mol_type = other DNA
acatttgaaggtgcttccataagttatcagtgtgtaacaaactagctcaaaacgtaatggcttaaaataacattatgttatctccacagttctatcagttgaataagttc

SEQ ID NO: 17821 - DNA, 110 bp, synthetic construct
  source 1..110: mol_type = other DNA
actgttcagcatccagaattggctttgacctaatgtgcaggaatatcctaggtctacataccaccatcccatttaactagcatacatatcatccttgaaggctgtaggta

SEQ ID NO: 17822 - DNA, 110 bp, synthetic construct
  source 1..110: mol_type = other DNA
cctacattggctccccactgacctgagcataaatgcccagcttgacgtggcctctgccacattattggctcatctttcccaatgccatcaagctaccaactgaccaactt

SEQ ID NO: 17823 - DNA, 110 bp, synthetic construct
  source 1..110: mol_type = other DNA
gctctaagggaatatgctgcctgaatagctccttgaaataagatcttatcaccagacagagaaaagcttcgtatcttcagcatggctgatgccatcttttctaaatgtag

SEQ ID NO: 17824 - DNA, 110 bp, synthetic construct
  source 1..110: mol_type = other DNA
acagagaaaagcttcgtatcttcagcatggctgatgccatcttttctaaatgtagtaatatacattttagcattaagttcaaacatcaggagtataatgcctgctcataa

SEQ ID NO: 17825 - DNA, 110 bp, synthetic construct
  source 1..110: mol_type = other DNA
tgtttgtttgtttttcactgataattttgaatcctcaaatgcagggtcacagataatacaccctttaggctcccatttgaaaatcccagacaataactttatacctaagt

SEQ ID NO: 17826 - DNA, 110 bp, synthetic construct
  source 1..110: mol_type = other DNA
gtcacagataatacaccctttaggctcccatttgaaaatcccagacaataactttatacctaagtaacacagaaacaacaaaagtatattttatctatgtaaaaagcgca

SEQ ID NO: 17827 - DNA, 110 bp, synthetic construct
  source 1..110: mol_type = other DNA
atgtgatgcagtgacttgcctgtggacacacggctgcttaaggaccaagtggaatggaatcttattgtccccacagctactccaggatactgtgtgtgctgactctctat

SEQ ID NO: 17828 - DNA, 110 bp, synthetic construct
  source 1..110: mol_type = other DNA
gaaatcccacctacaatgctctaccaggtcctgcaccagcctctccaccgctactccctgaaatctgatgtgaagttgtttttctatgagctgaaccctgatgtcctgga

SEQ ID NO: 17829 - DNA, 110 bp, synthetic construct
  source 1..110: mol_type = other DNA
ccctgaaatctgatgtgaagttgtttttctatgagctgaaccctgatgtcctggagcaagcaaaatactccccggctgcaatttgtggctgggattctgcttacaaatat

SEQ ID NO: 17830 - DNA, 110 bp, synthetic construct
  source 1..110: mol_type = other DNA
aagcataggtaaaagtcaacaactgaaaaatcaaatacatgggaatatttgggcttctttcttttggcttactgaatttctggttagtggaagatttacccaaagccacc

SEQ ID NO: 17831 - DNA, 110 bp, synthetic construct
  source 1..110: mol_type = other DNA
tctttcttttggcttactgaatttctggttagtggaagatttacccaaagccacctagttttacacctttatttgttaatgatttattttcagaaatcatcctagatccc

SEQ ID NO: 17832 - DNA, 110 bp, synthetic construct
  source 1..110: mol_type = other DNA
tgttgcatattaactgaccatagtaaggtttggttttgatccctggcccagaaatatccacatgaagcagatgtggctaaaaaaaaaaaatagtttgttttaaaattgaa

SEQ ID NO: 17833 - DNA, 110 bp, synthetic construct; identical to SEQ ID NO: 17832
  source 1..110: mol_type = other DNA

SEQ ID NO: 17834 - DNA, 110 bp, synthetic construct
  source 1..110: mol_type = other DNA
ttgtttccgacgtgccatgacgggaacgcctacatttttgaagtagacagatgtggcggcttatttagcagatttgctaagttctgataccaccctggctcccatagtgt

SEQ ID NO: 17835 - DNA, 110 bp, synthetic construct; identical to SEQ ID NO: 17834
  source 1..110: mol_type = other DNA

SEQ ID NO: 17836 - DNA, 110 bp, synthetic construct
  source 1..110: mol_type = other DNA
ggccaaaaatagtaataataatttcaccaatttcttcttaaatttggctactaacaaaacttaaaacagtacatgcggctcataatacagttctactgaatggtacttga

SEQ ID NO: 17837 - DNA, 110 bp, synthetic construct
  source 1..110: mol_type = other DNA
aaaacttaaaacagtacatgcggctcataatacagttctactgaatggtacttgattagtctattctctaaggaaatggctgtcaactgagggcaattttgccacgcagg

SEQ ID NO: 17838 - DNA, 110 bp, synthetic construct
  source 1..110: mol_type = other DNA
gtacagtacccaataaactaaatgagatactcaacactctgtcatgttagatgactgtgcccagtgcaggctaatgtaaatgttcagaagcacacttaagtagctaagcg

SEQ ID NO: 17839 - DNA, 110 bp, synthetic construct
  source 1..110: mol_type = other DNA
tgtgcccagtgcaggctaatgtaaatgttcagaagcacacttaagtagctaagcgaggctgatgttcaagaggttaggcatatcaaatgcatttctgactcaacactatc

SEQ ID NO: 17840 - DNA, 110 bp, synthetic construct; identical to SEQ ID NO: 17838
  source 1..110: mol_type = other DNA

SEQ ID NO: 17841 - DNA, 110 bp, synthetic construct; identical to SEQ ID NO: 17839
  source 1..110: mol_type = other DNA

SEQ ID NO: 17842 - DNA, 110 bp, synthetic construct
  source 1..110: mol_type = other DNA
ttatactcaactctatgatactgaggctctgcaaactatttctcctttagtcaactggcttcctgttatgttctgtcaacaggggactagatgcagaccgaaagagaaga

SEQ ID NO: 17843 - DNA, 110 bp, synthetic construct
  source 1..110: mol_type = other DNA
tggcttcctgttatgttctgtcaacaggggactagatgcagaccgaaagagaagagcaaatagaagggacttgctccatactgttagcatcatccgagcagcagcgcttt

SEQ ID NO: 17844 - DNA, 110 bp, synthetic construct
  source 1..110: mol_type = other DNA
ttctcaggtactgtgccagaaaaacagtgagggagcagggaggtaatatgtgtacaaagaggcagtgctacggggcctcagctgatcccagaatgaactctgcccttcag

SEQ ID NO: 17845 - DNA, 110 bp, synthetic construct
  source 1..110: mol_type = other DNA
tgcatgtgtagtcactgacccctgctggagttcagtagccttactgctctgcatagccctcttctcttggaatagaggccctgtatgacagcattttactgattggtgat

SEQ ID NO: 17846 - DNA, 110 bp, synthetic construct
  source 1..110: mol_type = other DNA
gccctcttctcttggaatagaggccctgtatgacagcattttactgattggtgatggtttatctctgctttaaatcagagaacttctttataatttatttgatccttcgt

SEQ ID NO: 17847 - DNA, 110 bp, synthetic construct
  source 1..110: mol_type = other DNA
tgctgggagaaaggttcgatccttggcctagcacagtgggttaagcatccagtgttacacagctggggcttacactgcaactatagatcggatctgatctgatgctttgg

SEQ ID NO: 17848 - DNA, 110 bp, synthetic construct
  source 1..110: mol_type = other DNA
tacacagctggggcttacactgcaactatagatcggatctgatctgatgctttgggtccaacaacaacaaaaaaattctaccgaaaaagatggcaaattttgaaacatct

SEQ ID NO: 17849 - DNA, 110 bp, synthetic construct
  source 1..110: mol_type = other DNA
gggagtgagaatagggctaatctcacagacggtaatttgcaaagccccttgttcgaattctgatgttataaaaatgctgggcccattgtcccaattgcaagcagagcatt

SEQ ID NO: 17850 - DNA, 110 bp, synthetic construct
  source 1..110: mol_type = other DNA
aattctgatgttataaaaatgctgggcccattgtcccaattgcaagcagagcattaaaaccaagttggggggggggtcctcctgagtaagaggcccggtgtcactgccca

SEQ ID NO: 17851 - DNA, 110 bp, synthetic construct
  source 1..110: mol_type = other DNA
tgagccagagctgcagcctatgccatggctgccgcaatgccagatccttaactcactgagccacagcaggaatttgccaaatcggttttataaactataggttttataat

SEQ ID NO: 17852 - DNA, 110 bp, synthetic construct; identical to SEQ ID NO: 17851
  source 1..110: mol_type = other DNA

SEQ ID NO: 17853 - DNA, 110 bp, synthetic construct
  source 1..110: mol_type = other DNA
agagagaaagaccaaaaaaaaaaaaaatcctcacaagaatctatacgttaaatatagattttccatccttagtagataaagtggcatattctggttaaccatcttgtccc

SEQ ID NO: 17854 - DNA, 110 bp, synthetic construct
  source 1..110: mol_type = other DNA
agattttccatccttagtagataaagtggcatattctggttaaccatcttgtcccaatcctggctaaccattagataaaatttctgagatttgaacatcttcactagaca

SEQ ID NO: 17855 - DNA, 110 bp, synthetic construct
  source 1..110: mol_type = other DNA
cttcctcttctgggccctttccactccgcccacctgcctttcctacccccaccccaaatagcatgtgatgtattttacttactctttatggaattctcattagggagcct

SEQ ID NO: 17856 - DNA, 110 bp, synthetic construct
  source 1..110: mol_type = other DNA
aaatagcatgtgatgtattttacttactctttatggaattctcattagggagcctccttgcccctgataatgcggttgacttgcagaattcccaagtacgacgtttcgat

SEQ ID NO: 17857 - DNA, 110 bp, synthetic construct
  source 1..110: mol_type = other DNA
tggagataagaatagtaaacatctggtcagattattgtaaccattaaatggtaacagatgtaaacaggatggtaactgcctccgatagtttcctttcgtgttagctttat

SEQ ID NO: 17858 - DNA, 110 bp, synthetic construct
  source 1..110: mol_type = other DNA
agatgtaaacaggatggtaactgcctccgatagtttcctttcgtgttagctttattgttccctaaccttcttctggccacttagtagccaaagtagaaaacacagcatct

SEQ ID NO: 17859 - DNA, 110 bp, synthetic construct
  source 1..110: mol_type = other DNA
tatcctactacttagcattcaatccccttcttctgccctttccgatcccatcatatttctctaagtggcatggctcccagatgtagcttaacaactttcttctactttcc

SEQ ID NO: 17860 - DNA, 110 bp, synthetic construct
  source 1..110: mol_type = other DNA
tttctctaagtggcatggctcccagatgtagcttaacaactttcttctactttcctatcaaaatgcacagaacccccttcaccctgagtgtgtttacaagcttattctct

SEQ ID NO: 17861 - DNA, 110 bp, synthetic construct
  source 1..110: mol_type = other DNA
attcacctttcagtgtgtgcggatagtagggttgctaagctcatttcagcatttgtggtatgtctacatgttaggttttgggtttacatttgatttgtgaaacaaatatt

SEQ ID NO: 17862 - DNA, 110 bp, synthetic construct
  source 1..110: mol_type = other DNA
tttactattttgtatgggcacaaccccaaagtcgagttagttctagtacatgattttgtagttgccatgatttcatgtggtatactgaatcagtaaatgagaggttgtga

SEQ ID NO: 17863 - DNA, 110 bp, synthetic construct
  source 1..110: mol_type = other DNA
ttgtagttgccatgatttcatgtggtatactgaatcagtaaatgagaggttgtgatccttaaccttgggtagagtttaaccacatagggagagagtttatattcattgac

SEQ ID NO: 17864 - DNA, 110 bp, synthetic construct
  source 1..110: mol_type = other DNA
aggctaaagatgaaatatgcacttaaggaccaaaggaattacacaaatttaggcaatgcctcgggcataaatccaggcctttgcagaaagaggactgtggaagtgaatag

SEQ ID NO: 17865 - DNA, 110 bp, synthetic construct
  source 1..110: mol_type = other DNA
atgcctcgggcataaatccaggcctttgcagaaagaggactgtggaagtgaatagtaagaacatggacctggagttaagacctggttttgaagcctggttttgacactta

SEQ ID NO: 17866 - DNA, 110 bp, synthetic construct
  source 1..110: mol_type = other DNA
aagccctctacttgcaccctcaattccattgccccctaattcctcacgaatatgactgtaacaattttcctctagctcttttcaagcacttacatttcttcctccattag

SEQ ID NO: 17867 - DNA, 110 bp, synthetic construct
  source 1..110: mol_type = other DNA
ctgtaacaattttcctctagctcttttcaagcacttacatttcttcctccattagttattcccatcagtgagcaaacacactgtgatttttcccatcttaagaaaactct

SEQ ID NO: 17868 - DNA, 110 bp, synthetic construct
  source 1..110: mol_type = other DNA
catagagaagttcccaggataggtgtcgaatcagagctgctgatgctagcctacaccacaggtgcagcaacacaggatctgatcagcatctgcaacctataccacagttc

SEQ ID NO: 17869 - DNA, 110 bp, synthetic construct
  source 1..110: mol_type = other DNA
ccacaggtgcagcaacacaggatctgatcagcatctgcaacctataccacagttcacggcaacactggatccccaagccactgaggactgaacccctgtcctcagggatg

SEQ ID NO: 17870 - DNA, 110 bp, synthetic construct
  source 1..110: mol_type = other DNA
atctttccatgtgctttttggccttctgtatgaatgaacttattttcagaagaaaaacagacccaaatactttgaaaacaaatttatggttaccaaaggggacaggttgg

SEQ ID NO: 17871 - DNA, 110 bp, synthetic construct; identical to SEQ ID NO: 17870
  source 1..110: mol_type = other DNA

SEQ ID NO: 17872 - DNA, 110 bp, synthetic construct
  source 1..110: mol_type = other DNA
atggacaaaccctgtaaccaaacgtaccacataaaaccaagacagaactctagacaagaagagtcaggggacagagaccaacggacagaaggttttatatttctcatgac

SEQ ID NO: 17873 - DNA, 110 bp, synthetic construct
  source 1..110: mol_type = other DNA
aagaagagtcaggggacagagaccaacggacagaaggttttatatttctcatgaccgatagtcagtgttgacaacttctgcctccattttgattcttcagagaaaacaat

SEQ ID NO: 17874 - DNA, 110 bp, synthetic construct
  source 1..110: mol_type = other DNA
gaggtggtcttttccaacccacacccccctgggatgaaagacttcagcccaccagatcctcagggcacatcctccttgcctgccagcctgcatttcttacaagtgtccta

SEQ ID NO: 17875 - DNA, 110 bp, synthetic construct
  source 1..110: mol_type = other DNA
aacccacacccccctgggatgaaagacttcagcccaccagatcctcagggcacatcctccttgcctgccagcctgcatttcttacaagtgtcctatcctaataagtctat

SEQ ID NO: 17876 - DNA, 110 bp, synthetic construct
  source 1..110: mol_type = other DNA
tggttctttgaattctctagaatgtaaaggtgaactctgaaattatttggttcaaacatctcctaggaaactgatttaagcttaataatacatttggtggatgaggaaac

SEQ ID NO: 17877 - DNA, 110 bp, synthetic construct
  source 1..110: mol_type = other DNA
acatctcctaggaaactgatttaagcttaataatacatttggtggatgaggaaactgagacttgaatttggtaagtgacacgttcacattcataccagtcattgtctcca

SEQ ID NO: 17878 - DNA, 110 bp, synthetic construct
  source 1..110: mol_type = other DNA
tatattttgaaggctctgaataattggaaaggaaagagctgacatgttgagattaacacttgtctagactgtccattccttttcaataagaaaaagctgagctgggaatt

SEQ ID NO: 17879 - DNA, 110 bp, synthetic construct
  source 1..110: mol_type = other DNA
acacttgtctagactgtccattccttttcaataagaaaaagctgagctgggaattccatgactcccctctgcttctgatgagtttttcatgaaacttttcccacattagg

SEQ ID NO: 17880 - DNA, 110 bp, synthetic construct
  source 1..110: mol_type = other DNA
ggccaggggttgaactcacattttcctggatagtggtgggctccaggcatttcccagtgctaccacaaaaaagcaatcatagaggttgtatatacgtaccctagtgtttt

SEQ ID NO: 17881 - DNA, 110 bp, synthetic construct
  source 1..110: mol_type = other DNA
agtgctaccacaaaaaagcaatcatagaggttgtatatacgtaccctagtgttttagaatcctcattagatcacttccttgaaacaatatttcaattgcctagtgaataa

SEQ ID NO: 17882 - DNA, 110 bp, synthetic construct
  source 1..110: mol_type = other DNA
tgcacacaaagggagtcagtattcacatattatttcccagtgataattagcttgacgttgaaatcactggtttgtaatttcaatactgtcgacaactaaagccctggccg

SEQ ID NO: 17883 - DNA, 110 bp, synthetic construct
  source 1..110: mol_type = other DNA
tagactccagagggatcgtgcagaggggagtgggtcaaaataagccatataggcaccacataggcaccataatttttcagactgagaacatgtcttctgttctttgtggc

SEQ ID NO: 17884 - DNA, 110 bp, synthetic construct
  source 1..110: mol_type = other DNA
ccacataggcaccataatttttcagactgagaacatgtcttctgttctttgtggcttagaattcagggttcatgttctaatgctttccaaagtgtgtgggcagattaaaa

SEQ ID NO: 17885 - DNA, 110 bp, synthetic construct
  source 1..110: mol_type = other DNA
ccagagaggaaagagggtgattttcctgaagcagctgagcagtggcttgctacttgtgactggaccgtagaacacaccagaaatttgttattgtcacctccaccaaaatt

SEQ ID NO: 17886 - DNA, 110 bp, synthetic construct
  source 1..110: mol_type = other DNA
ctgaagcagctgagcagtggcttgctacttgtgactggaccgtagaacacaccagaaatttgttattgtcacctccaccaaaattgatatcaatggagtaaaaattccag

SEQ ID NO: 17887 - DNA, 110 bp, synthetic construct
  source 1..110: mol_type = other DNA
tgcataaaatgtcactgtgttagagcttaatggtgttatgtgaacatgcattctcatgcctctgacctcaatttttccttctctctgtgtcccatctttcaggcaggaat

SEQ ID NO: 17888 - DNA, 110 bp, synthetic construct
  source 1..110: mol_type = other DNA
atgcctctgacctcaatttttccttctctctgtgtcccatctttcaggcaggaataccaaagaggagagggacaagcagccctgcacaattctgcctgcctggcaccatt

SEQ ID NO: 17889 - DNA, 110 bp, synthetic construct
  source 1..110: mol_type = other DNA
ttattcttattatactgtaatgtaagaaagaattacatttttggtcttctccatagttcctagcacagagctcctaaaaccattgttatttctggagcgatagtggtgat

SEQ ID NO: 17890 - DNA, 110 bp, synthetic construct
  source 1..110: mol_type = other DNA
gttcctagcacagagctcctaaaaccattgttatttctggagcgatagtggtgataggattatcttttggtatagtatttgttctcagtccaattcctaacacaagcatt

SEQ ID NO: 17891 - DNA, 110 bp, synthetic construct
  source 1..110: mol_type = other DNA
tgaaatactgtctgtggaagtcatgctgggttcagtcacaactataaccatttcctaattgtcaagctctgaaacataatcatgatcactgttgaaagtggaaccaaaat

SEQ ID NO: 17892 - DNA, 110 bp, synthetic construct
  source 1..110: mol_type = other DNA
taattgtcaagctctgaaacataatcatgatcactgttgaaagtggaaccaaaatgtacctagttttttgtggatccatgagttaaccaatatgaggaacttgttttctg

SEQ ID NO: 17893 - DNA, 110 bp, synthetic construct
  source 1..110: mol_type = other DNA
gaaagtaaaaaaaaaaaaaaaaaaaaaaaaagtggtgtcttgaaatagggtaatagaaatgaccaaagtggtaaatggcagattggggactcccacaatgggcctgactt

SEQ ID NO: 17894 - DNA, 110 bp, synthetic construct
  source 1..110: mol_type = other DNA
gaaatgaccaaagtggtaaatggcagattggggactcccacaatgggcctgacttaaaactgtgtcctttcccattatttcacactgcatttcaagcctagtgatccatc

SEQ ID NO: 17895 - DNA, 110 bp, synthetic construct
  source 1..110: mol_type = other DNA
ttctggggattggccaagcactaactacatctaagaaatgtaattccaaagcccaagtttatttctggttgctgttgaatttccccatttgttgttacatgtgcagattg

SEQ ID NO: 17896 - DNA, 110 bp, synthetic construct
  source 1..110: mol_type = other DNA
agtttatttctggttgctgttgaatttccccatttgttgttacatgtgcagattgcaaagtagcatattgttcatgacaactttgcacaatggtggagatctgcagatgg

SEQ ID NO: 17897 - DNA, 110 bp, synthetic construct
  source 1..110: mol_type = other DNA
tgggtcatgtgaacacagagcaggaaggcagctgtcgacaaggcaggaattcaatctgctggcacctttgttgtggatttctcagcctccaaaactatcaacaagcaggc

SEQ ID NO: 17898 - DNA, 110 bp, synthetic construct
  source 1..110: mol_type = other DNA
ctgctggcacctttgttgtggatttctcagcctccaaaactatcaacaagcaggcaaacaagcaaacaaaaaacctctgttgtttaagcctcgcagtctatagcacttca

SEQ ID NO: 17899 - DNA, 110 bp, synthetic construct
  source 1..110: mol_type = other DNA
gcctctctaatacttagtatgcatgaatttcatctcaaattttataccattcattctctcatttttttccccctcaagggctaaagtttgagcagaagctcttgtaagtg

SEQ ID NO: 17900 - DNA, 110 bp, synthetic construct
  source 1..110: mol_type = other DNA
ctctcatttttttccccctcaagggctaaagtttgagcagaagctcttgtaagtgtaattagaccactaattaattcattcaagattcaagtgccttctctttgtaagca

SEQ ID NO: 17901 - DNA, 110 bp, synthetic construct; identical to SEQ ID NO: 17899
  source 1..110: mol_type = other DNA

SEQ ID NO: 17902 - DNA, 110 bp, synthetic construct; identical to SEQ ID NO: 17900
  source 1..110: mol_type = other DNA

SEQ ID NO: 17903 - DNA, 110 bp, synthetic construct
  source 1..110: mol_type = other DNA
ctctcccacagattacagtaaaactcaggacaaaggacatgaaagtggattatctaaccagaaacagataccttcataaaggattttttgcataatttttacagaaagat

SEQ ID NO: 17904 - DNA, 110 bp, synthetic construct
  source 1..110: mol_type = other DNA
aaccagaaacagataccttcataaaggattttttgcataatttttacagaaagattctagactagcgaagtttgttaactttattttctgtcattcacttttccctctga

SEQ ID NO: 17905 - DNA, 110 bp, synthetic construct
  source 1..110: mol_type = other DNA
ccaggggttggatcagagttgcagctgcagcctatgccacagccacagcaacaccaaacctgatctgtgtctgtgctctatgccacagctttcaacaatgctggatcctt

SEQ ID NO: 17906 - DNA, 110 bp, synthetic construct; identical to SEQ ID NO: 17905
  source 1..110: mol_type = other DNA

SEQ ID NO: 17907 - DNA, 110 bp, synthetic construct
  source 1..110: mol_type = other DNA
gcccacctggccttgggagccaatttggattccacctctgccacaaagcatcatcccagctgtcctgaaggggcacaggtctctcttccccatggtgatatggtactttg

SEQ ID NO: 17908 - DNA, 110 bp, synthetic construct
  source 1..110: mol_type = other DNA
atcctttctctggccttttcatatctgcttcagacctgagtttcttcatctgggtttcttaggttataaagaaaagattctgataaagctaccatcagataacttacaca

SEQ ID NO: 17909 - DNA, 110 bp, synthetic construct
  source 1..110: mol_type = other DNA
ttcttaggttataaagaaaagattctgataaagctaccatcagataacttacacaatgtgagccagatctattgaccaaaacccggaaacacagcaagaagcatcagaga

SEQ ID NO: 17910 - DNA, 110 bp, synthetic construct
  source 1..110: mol_type = other DNA
gcagaagagtggtagccagagtcccgaccatgcccaggaagccaagaaccaggccggcgatttgcagtggataaaacgccattacttttgctttgaagagggatccaatc

SEQ ID NO: 17911 - DNA, 110 bp, synthetic construct
  source 1..110: mol_type = other DNA
ggcgatttgcagtggataaaacgccattacttttgctttgaagagggatccaatctgcagtggaagctgctcaccaggcagaacgtggaggcccccgtgagtctagagcg

SEQ ID NO: 17912 - DNA, 110 bp, synthetic construct
  source 1..110: mol_type = other DNA
tgtgatgaatgatttaacagaaatctagtgtgtcatttgttcattcctctggtgttgtatctaagatatctctaaatattgcttccaaaagattatgcctaaatttacca

SEQ ID NO: 17913 - DNA, 110 bp, synthetic construct; identical to SEQ ID NO: 17912
  source 1..110: mol_type = other DNA

SEQ ID NO: 17914 - DNA, 110 bp, synthetic construct
  source 1..110: mol_type = other DNA
attattaattgctaaacattggcctgggcattgaagatttgaaggcaatgaacctcacctcattcagatactgtcaatgtctccatagaattgaccttctggtggggtaa

SEQ ID NO: 17915 - DNA, 110 bp, synthetic construct
  source 1..110: mol_type = other DNA
cacctcattcagatactgtcaatgtctccatagaattgaccttctggtggggtaaggggatgtggaaaatgactctcactcagctcttggcacttacttcatgttgcagg

SEQ ID NO: 17916 - DNA, 110 bp, synthetic construct
  source 1..110: mol_type = other DNA
gggtggagtctttgagttaaaataagggcagtttgcaggttcttctccgaaacgcagctcacagaggaaattcagcctcctatgggtacttcctttgttttccttccctt

SEQ ID NO: 17917 - DNA, 110 bp, synthetic construct
  source 1..110: mol_type = other DNA
tagggaatattcaactctataggttttgtagtcaatttaaaaagagtgaaagaaaagatagtatttccatgggtgttgaaggttaaaagagatgtggcattccttccaga

SEQ ID NO: 17918 - DNA, 110 bp, synthetic construct; identical to SEQ ID NO: 17917
  source 1..110: mol_type = other DNA

SEQ ID NO: 17919 - DNA, 110 bp, synthetic construct
  source 1..110: mol_type = other DNA
gaagagctgaagtcaagaacttggaggctggcattccctggtggcctaggggttacggattccatgttgtcactgcagtgacttgggtcatctgctgtagcacaggttca

SEQ ID NO: 17920 - DNA, 110 bp, synthetic construct
  source 1..110: mol_type = other DNA
agaacttggaggctggcattccctggtggcctaggggttacggattccatgttgtcactgcagtgacttgggtcatctgctgtagcacaggttcaatccctggcctggga

SEQ ID NO: 17921 - DNA, 110 bp, synthetic construct
  source 1..110: mol_type = other DNA
ttaggttatcttctcactctatttcaaatagtcaaaaccagttgagcctaatgactggcttatagactgcttccatatttctcagacattctgagagcttcttcaatttg

SEQ ID NO: 17922 - DNA, 110 bp, synthetic construct
  source 1..110: mol_type = other DNA
tggcttatagactgcttccatatttctcagacattctgagagcttcttcaatttgtctgactcattctgggtacgccacaataaaagacttcaactcttttagtagctgc

SEQ ID NO: 17923 - DNA, 110 bp, synthetic construct
  source 1..110: mol_type = other DNA
tatcttccttggcggcccaagacaaactctcaaaaataacactgatcatgttggaatataaaaaaaagaattatatcacagagaagactccaatattctgagttctgaag

SEQ ID NO: 17924 - DNA, 110 bp, synthetic construct
  source 1..110: mol_type = other DNA
ataacactgatcatgttggaatataaaaaaaagaattatatcacagagaagactccaatattctgagttctgaagtgattattgtctttttcagtagaactttgaggacc

SEQ ID NO: 17925 - DNA, 110 bp, synthetic construct
  source 1..110: mol_type = other DNA
gcactttttttatagcagccttaggaaattaatgcaatcacctactgtactatatgcattataatataccaatttgtttgcatgcttatgtggtagtggagggtaggttt

SEQ ID NO: 17926 - DNA, 110 bp, synthetic construct
  source 1..110: mol_type = other DNA
cagccttaggaaattaatgcaatcacctactgtactatatgcattataatataccaatttgtttgcatgcttatgtggtagtggagggtaggtttattttacaacagtat

SEQ ID NO: 17927 - DNA, 110 bp, synthetic construct
  source 1..110: mol_type = other DNA
gacaagacccacaacagtttcaaccccaggcacttaatccactcagccacagagactcttccctttataccattttaaccccgtaaatctccatcagggctatctcgcct

SEQ ID NO: 17928 - DNA, 110 bp, synthetic construct
  source 1..110: mol_type = other DNA
ctcttccctttataccattttaaccccgtaaatctccatcagggctatctcgccttttatttatagtgtttgaaatttctcccttatactctactacttagatgactttt

SEQ ID NO: 17929 - DNA, 110 bp, synthetic construct
  source 1..110: mol_type = other DNA
atatgcttggatgaagcattcactagatcagcatcaatggcagcctagagagttatcatttggtaaactgtattatctggcccatgcaatctccctctccttctctgcaa

SEQ ID NO: 17930 - DNA, 110 bp, synthetic construct
  source 1..110: mol_type = other DNA
tgttctcttatgaggcaccatgtgtaactcctacactaatcataataagtatgttcttgtctgtcaaacaatgaccaccaaatttaagctaccatgcaacatcagactat

SEQ ID NO: 17931 - DNA, 110 bp, synthetic construct
  source 1..110: mol_type = other DNA
tctggtgttgccctaggtgtggtggaggctggtagctgcaattctgattctatccctagtaggcacttccatatgcccaggagcttccatatgctgtaggtgtagcctta

SEQ ID NO: 17932 - DNA, 110 bp, synthetic construct
  source 1..110: mol_type = other DNA
ctagtaggcacttccatatgcccaggagcttccatatgctgtaggtgtagccttaaaaggaaaagaacaaaaaaactcagatctgtaattggttactatgggatggcttt

SEQ ID NO: 17933 - DNA, 110 bp, synthetic construct
  source 1..110: mol_type = other DNA
ctatggtagtttgttatgactgcccaagccaactaatacagttactctcagctcagatctgcttatgaccacctttagtttccacaataacattcgagttaggacactaa

SEQ ID NO: 17934 - DNA, 110 bp, synthetic construct
  source 1..110: mol_type = other DNA
gatctgcttatgaccacctttagtttccacaataacattcgagttaggacactaaaagttcccacttaattaattacagcagccagaggttttcagatcaaaatataaat

SEQ ID NO: 17935 - DNA, 110 bp, synthetic construct
  source 1..110: mol_type = other DNA
tttctagactcttcctcaatttcttacattcttaataacattcagatgataaaacagaatcaatattctactacgggtctggacagagccatatagcggaaggcttaatt

SEQ ID NO: 17936 - DNA, 110 bp, synthetic construct; identical to SEQ ID NO: 17935
  source 1..110: mol_type = other DNA

SEQ ID NO: 17937 - DNA, 110 bp, synthetic construct
  source 1..110: mol_type = other DNA
gaatctgcatcttcatggatgctagtcagattcgtttctgatgaaccacgatgggaattcccgagaaggtcctcttttaagagtaaaactcactacctggtattgaccct

SEQ ID NO: 17938 - DNA, 110 bp, synthetic construct; identical to SEQ ID NO: 17937
  source 1..110: mol_type = other DNA

SEQ ID NO: 17939 - DNA, 110 bp, synthetic construct
  source 1..110: mol_type = other DNA
ctctattcctggtgatgtacaacagagggacggaggtctacttcttgtgacacaaagtgggcgtttgtaccagaaattggaaatgtgtataaactcaaggcacaacacca

SEQ ID NO: 17940 - DNA, 110 bp, synthetic construct
  source 1..110: mol_type = other DNA
agtgggcgtttgtaccagaaattggaaatgtgtataaactcaaggcacaacaccaacctgcgagctgcatcagtgatataataaaggatgagaaattatagtctgtggtg

SEQ ID NO: 17941 - DNA, 110 bp, synthetic construct
  source 1..110: mol_type = other DNA
ccagtcccaaatgtctcagggttactccagaggcagtgcatgagaaaaagattgaatacaaatagttcatttggaaagtgcagatcatattgatagggaagcagggaagg

SEQ ID NO: 17942 - DNA, 110 bp, synthetic construct
  source 1..110: mol_type = other DNA
atacaaatagttcatttggaaagtgcagatcatattgatagggaagcagggaaggaacacagcgaagggaaggaagcagtaataaaacaccactggaggagtcccactgt

SEQ ID NO: 17943 - DNA, 110 bp, synthetic construct
  source 1..110: mol_type = other DNA
gactgaagacagttttctcagatccacatagctatgggtttgtcagagttccaatacaacaggaagaaatcagccagcccagcccctctagctgaagtctctaaaagcag

SEQ ID NO: 17944 - DNA, 110 bp, synthetic construct
  source 1..110: mol_type = other DNA
acaacaggaagaaatcagccagcccagcccctctagctgaagtctctaaaagcagatactgctgaatgattgctgctttgctcagttgggtgagatgtgtgggtgaaact

SEQ ID NO: 17945 - DNA, 110 bp, synthetic construct
  source 1..110: mol_type = other DNA
acataaagcatcagagaaaatgtattaactttatcttctcactaaaattctacctctcttcctgataaatagagtcagtatgcacacattgcaccaatcaaaattgccag

SEQ ID NO: 17946 - DNA, 110 bp, synthetic construct
  source 1..110: mol_type = other DNA
cacttagatgtacaaataaaagaaagcactaggagtttccactgcgaaacagtgggttgagaagccacctgcagcggctccagtcactgcagaggcataggtttaacccc

SEQ ID NO: 17947 - DNA, 110 bp, synthetic construct
  source 1..110: mol_type = other DNA
gaaacagtgggttgagaagccacctgcagcggctccagtcactgcagaggcataggtttaacccctgctggcacggtgagttaaaggatccagcgttgccacagctgtga

SEQ ID NO: 17948 - DNA, 110 bp, synthetic construct
  source 1..110: mol_type = other DNA
attttgaactctaaggcctgaaagagaatgaaaataggacatcagaacagtttagatctggaatgaagtacagattatctggttcaattcatttggtttaccgaagtcca

SEQ ID NO: 17949 - DNA, 110 bp, synthetic construct; identical to SEQ ID NO: 17948
  source 1..110: mol_type = other DNA

SEQ ID NO: 17950 - DNA, 110 bp, synthetic construct
  source 1..110: mol_type = other DNA
agaataagattgtagaatatgcttgagcctacatgactatcagtctaaaaagtaagccaatataggaatgggttaatacacttgaaaaatctgggcaatcacaaatcaaa

SEQ ID NO: 17951 - DNA, 110 bp, synthetic construct
  source 1..110: mol_type = other DNA
taaaaagtaagccaatataggaatgggttaatacacttgaaaaatctgggcaatcacaaatcaaaaataaacaatagattcacaaaaaccaaaaagaagaggacacaagc

SEQ ID NO: 17952 - DNA, 110 bp, synthetic construct
  source 1..110: mol_type = other DNA
ttgttgtgtggttttcaacctgtaatacctggcatgttggttcaccccagctctactctactccagctcttgactgtttttgctctctggagggggatcctaaaactagc

SEQ ID NO: 17953 - DNA, 110 bp, synthetic construct
  source 1..110: mol_type = other DNA
ctctactccagctcttgactgtttttgctctctggagggggatcctaaaactagccactgggggagacccaaaagtgtgacctgtgacctttgaagcacataactccaac

SEQ ID NO: 17954 - DNA, 110 bp, synthetic construct
  source 1..110: mol_type = other DNA
ccacagcaacagtgcctcctgggacgtgcattcaggagattggacttgacctttagcagagcccaccctggacatcaggaggcagctatacacgacttgaggatgaggct

SEQ ID NO: 17955 - DNA, 110 bp, synthetic construct
  source 1..110: mol_type = other DNA
acgtggaaatagggtctttgcggatgtaaataaggtaggatgaagtcaagctgggttagggtgggtcccaaatccaatggccagtgttctcttaagaaagccaggtggga

SEQ ID NO: 17956 - DNA, 110 bp, synthetic construct
  source 1..110: mol_type = other DNA
ttagggtgggtcccaaatccaatggccagtgttctcttaagaaagccaggtgggaattcccatcatggctcagaggaaaccaatctgactagcatgcttgaggatgcagg

SEQ ID NO: 17957 - DNA, 110 bp, synthetic construct
  source 1..110: mol_type = other DNA
agagagcaccaagtcagggctttcctcatgccagggggaaaaaaaaaaaaaaaatcagccactctctgttaaaagtaccttcttctgtgaacactgacccgtctaagcaa

SEQ ID NO: 17958 - DNA, 110 bp, synthetic construct
  source 1..110: mol_type = other DNA
cagccactctctgttaaaagtaccttcttctgtgaacactgacccgtctaagcaatggtggaaagtggtcctgtctcatgacataataagggtgtgacaaaagcaggccc

SEQ ID NO: 17959 - DNA, 110 bp, synthetic construct
  source 1..110: mol_type = other DNA
tctttggagaatgctctagcccatagctcccaggtactctgcttttagttctccatatccaagcccgagttggcagccagctccgcctttgagtggcaggacaagccttg

SEQ ID NO: 17960 - DNA, 110 bp, synthetic construct
  source 1..110: mol_type = other DNA
tatccaagcccgagttggcagccagctccgcctttgagtggcaggacaagccttgagtttgtcaacatataatgggacctgtcaaatgggagtgagacgcaaaggactca

SEQ ID NO: 17961 - DNA, 110 bp, synthetic construct
  source 1..110: mol_type = other DNA
cactgcagccagagggacccgattaaaacctaaatcaggagtttccgctgtggagcaatgggttaaaaatcctactgcttcagctcaggtcactgtggaggtgtgcagtc

SEQ ID NO: 17962 - DNA, 110 bp, synthetic construct
  source 1..110: mol_type = other DNA
ccactgagcagggccagggatatgagttaggttcgttaacccctgagccacaacggggactccattctttaaagggaatattaaatatgacttaaggagttcccactgtg

SEQ ID NO: 17963 - DNA, 110 bp, synthetic construct; identical to SEQ ID NO: 17962
  source 1..110: mol_type = other DNA

SEQ ID NO: 17964 - DNA, 110 bp, synthetic construct
  source 1..110: mol_type = other DNA
aggatactagctgtgtttgttaccgctgagccacatggaaactcctaaaagcaacttttaaagactttagaacaattgaatctggagttcctgtcgtggcgcagtggtta

SEQ ID NO: 17965 - DNA, 110 bp, synthetic construct; identical to SEQ ID NO: 17964
  source 1..110: mol_type = other DNA

SEQ ID NO: 17966 - DNA, 110 bp, synthetic construct
  source 1..110: mol_type = other DNA
aatcactttatcaaaacaccactgagagactggaagaaggaaggaaaagaaggggagaagggagatgaaggggcagtatctgtgtgcaaacagtcctccacgtgggccag

SEQ ID NO: 17967 - DNA, 110 bp, synthetic construct
  source 1..110: mol_type = other DNA
agaagggagatgaaggggcagtatctgtgtgcaaacagtcctccacgtgggccagccctcccttatctccatgttacacctacttttttctctgcctgaaacaccattac

SEQ ID NO: 17968 - DNA, 110 bp, synthetic construct
  source 1..110: mol_type = other DNA
caaatggtaacctctgtcctgtgtcagctcccctgctgggccagacatcacctttttcccctggtttgtacatagtgtcaaggccatctcccaggacagctgtatctagg

SEQ ID NO: 17969 - DNA, 110 bp, synthetic construct
  source 1..110: mol_type = other DNA
ttcccctggtttgtacatagtgtcaaggccatctcccaggacagctgtatctaggagcgtctcctctgaactcatagtgaaaaggttttgaatacaatgaatagtcttct

SEQ ID NO: 17970 - DNA, 110 bp, synthetic construct
  source 1..110: mol_type = other DNA
ttggaatattctgaattattccatgtctgcgactcagctctgtctataggtgcctttcaatagctgcattattcattcctttcggcatttacattattttttttccttct

SEQ ID NO: 17971 - DNA, 110 bp, synthetic construct
  source 1..110: mol_type = other DNA
ttcaatagctgcattattcattcctttcggcatttacattattttttttccttctaaaacaagcgttgcatttatcgtctcaaaacttgcggtatgtaggaagcaacatt

SEQ ID NO: 17972 - DNA, 110 bp, synthetic construct; identical to SEQ ID NO: 17970
  source 1..110: mol_type = other DNA

SEQ ID NO: 17973 - DNA, 110 bp, synthetic construct; identical to SEQ ID NO: 17971
  source 1..110: mol_type = other DNA

SEQ ID NO: 17974 - DNA, 110 bp, synthetic construct
  source 1..110: mol_type = other DNA
aacgggcactcccacttgattcatcaaacatttagtaagggtttactgcgtgcccagggctccgctggcgctggaggtttaatgatgaatgagacagacaaggtcaaatt

SEQ ID NO: 17975 - DNA, 110 bp, synthetic construct
  source 1..110: mol_type = other DNA
agggctccgctggcgctggaggtttaatgatgaatgagacagacaaggtcaaatttgaagccaggcaccgctatgagatggctttcagttattttcgattccggaggaaa

SEQ ID NO: 17976 - DNA, 110 bp, synthetic construct; identical to SEQ ID NO: 17974
  source 1..110: mol_type = other DNA

SEQ ID NO: 17977 - DNA, 110 bp, synthetic construct; identical to SEQ ID NO: 17975
  source 1..110: mol_type = other DNA

SEQ ID NO: 17978 - DNA, 110 bp, synthetic construct
  source 1..110: mol_type = other DNA
ttcagttgactctttttccttagaattttcttcagctgtggttgtgaggcaaaaaatccatttatcaatgtttgatgagcaacatttaaaacactattgcttgactattt

SEQ ID NO: 17979 - DNA, 110 bp, synthetic construct
  source 1..110: mol_type = other DNA
atccatttatcaatgtttgatgagcaacatttaaaacactattgcttgactatttcaagctgtctttaggattaccttttatgggcctgtagttcattaggcatgatttt

SEQ ID NO: 17980 - DNA, 110 bp, synthetic construct
  source 1..110: mol_type = other DNA
gtttttaatagcatactcgcattatagaatgctgcttattgactaaataatgcagagaccattaactacgatggggaataccgacaaaatatctgtgcctgtctatatgt

SEQ ID NO: 17981 - DNA, 110 bp, synthetic construct
  source 1..110: mol_type = other DNA
agaccattaactacgatggggaataccgacaaaatatctgtgcctgtctatatgtacaatgtattgattcacggataatgatgagacatactgaatttaatttgggatgc

SEQ ID NO: 17982 - DNA, 110 bp, synthetic construct
  source 1..110: mol_type = other DNA
cagtcatgacctaagctgcagctgcagaaatgcaggatccttaacccacagtgtgggacagggaatcaaacctgcgtcccagcactcctaagatgccatcctgttgtgcc

SEQ ID NO: 17983 - DNA, 110 bp, synthetic construct; identical to SEQ ID NO: 17982
  source 1..110: mol_type = other DNA

SEQ ID NO: 17984 - DNA, 110 bp, synthetic construct
  source 1..110: mol_type = other DNA
agaacttctaaggatgagctgggggaatgtgcatttaaataaccccagttagggctaatagtggttggcccctcagtgctcttctgccaatcaggacaaaatccctaagt

SEQ ID NO: 17985 - DNA, 110 bp, synthetic construct
  source 1..110: mol_type = other DNA
aatgaaaaaggctcaagacttgaaagtcaaaaaatattccatatttgacattaaagtcaatgaatggatcccatccgctgaatgtagctagtaaaaagtgctaatttatg

SEQ ID NO: 17986 - DNA, 110 bp, synthetic construct; identical to SEQ ID NO: 17985
  source 1..110: mol_type = other DNA

SEQ ID NO: 17987 - DNA, 110 bp, synthetic construct
  source 1..110: mol_type = other DNA
ctggagaggggagggggcggcccacgagggagggggagagaccctttgctggaggacgtggtgtttcacctcgtggagaaccaactttgacactgacttttctctgagcc

SEQ ID NO: 17988 - DNA, 110 bp, synthetic construct
  source 1..110: mol_type = other DNA
acgtggtgtttcacctcgtggagaaccaactttgacactgacttttctctgagccttccacgcagccactcaagctgacttgagtaaatttcatcctcttccggattagt

SEQ ID NO: 17989 - DNA, 110 bp, synthetic construct
  source 1..110: mol_type = other DNA
tttaagatcaagcatgtttttgtagacccaggtcaggagttgagggaggaaactgatggagttaatggaacctggtggacatgagaaaggaagtcttgctttggggctct

SEQ ID NO: 17990 - DNA, 110 bp, synthetic construct
  source 1..110: mol_type = other DNA
atggagttaatggaacctggtggacatgagaaaggaagtcttgctttggggctcttggacgattgggcctctaacatgactattgatgaaatttccttaacatggtgccc

SEQ ID NO: 17991 - DNA, 110 bp, synthetic construct
  source 1..110: mol_type = other DNA
cagaaatatggatcagcagtggcttgggaggtgtcttggggtgtgtgtagggggggtcacctgccttgagtgtttgctcaacctgtgtgttcactcagcctgtgtgttca

SEQ ID NO: 17992 - DNA, 110 bp, synthetic construct
  source 1..110: mol_type = other DNA
gtcacctgccttgagtgtttgctcaacctgtgtgttcactcagcctgtgtgttcattcagcctgtgacacagatgtgttctttgcccaatgtcttcacaggagccgtgaa

SEQ ID NO: 17993 - DNA, 110 bp, synthetic construct
  source 1..110: mol_type = other DNA
ttaataattccttttatttaaggagaatgttaggcatggagttctcattgtggctcagtgggttatggacctgactaatatctatgaggagatgggtttgattcctggcc

SEQ ID NO: 17994 - DNA, 110 bp, synthetic construct
  source 1..110: mol_type = other DNA
cattgtggctcagtgggttatggacctgactaatatctatgaggagatgggtttgattcctggcctcgctccttgggttaaatatctggccttgccgtgagctgtggtgt

SEQ ID NO: 17995 - DNA, 110 bp, synthetic construct
  source 1..110: mol_type = other DNA
ggaccaacccatcttcagatacgcctcattcagtgtcccaaatcagggctgccaaggcttcatttgatttctggtgcttttttctctgagaatcaaacacagacatgaat

SEQ ID NO: 17996 - DNA, 110 bp, synthetic construct
  source 1..110: mol_type = other DNA
ggcttcatttgatttctggtgcttttttctctgagaatcaaacacagacatgaattaaagagaagcaatgcttcaagtgaaatgtgaaattcagccacatgagttttcct

SEQ ID NO: 17997 - DNA, 110 bp, synthetic construct
  source 1..110: mol_type = other DNA
gaggttcaccaggacatttgctgctgtccctgccctccaggaagtcaccaactgaagagcacgtggccaagagatgtttcccactagctgggtcagtggatgaccatctg

SEQ ID NO: 17998 - DNA, 110 bp, synthetic construct
  source 1..110: mol_type = other DNA
agagcacgtggccaagagatgtttcccactagctgggtcagtggatgaccatctgggggctggctccctgcttggaactgtgaccctgaagccaccgctaaacctgaaaa

SEQ ID NO: 17999 - DNA, 110 bp, synthetic construct
  source 1..110: mol_type = other DNA
ggaggtggctgggaccaccaaggctgccccaccaaccttgcatttttccagaagaagagactgccgcctgagtggtaagtgatgtttattgagcccttcctatctcccag

SEQ ID NO: 18000 - DNA, 110 bp, synthetic construct
  source 1..110: mol_type = other DNA
agagactgccgcctgagtggtaagtgatgtttattgagcccttcctatctcccaggtgttgtccctgagtttactttgttctttaatgactctgcatggaaataatagta

SEQ ID NO: 18001 - DNA, 110 bp, synthetic construct
  source 1..110: mol_type = other DNA
gcaaactttgaggtgccctaagggagctgcaattaaaagaggtctgtgcagtggccttctgcaaaacaatcaccctttgacttcgtggctgcttgctccgcccaaatctg

SEQ ID NO: 18002 - DNA, 110 bp, synthetic construct
  source 1..110: mol_type = other DNA
cttctgcaaaacaatcaccctttgacttcgtggctgcttgctccgcccaaatctgtctgctttgcaagttcaggtttcgtgcattagagtggcttaaaataggactcaca

SEQ ID NO: 18003 - DNA, 110 bp, synthetic construct
  source 1..110: mol_type = other DNA
gccaaatatctattccatgaagacattttcatcagctacacagaaaatcatcagatgcgtgtttaatcccccttcttttttgctgtccgagtaattcaaagtggagtgga

SEQ ID NO: 18004 - DNA, 110 bp, synthetic construct
  source 1..110: mol_type = other DNA
tgcgtgtttaatcccccttcttttttgctgtccgagtaattcaaagtggagtggaaacctggcagctaaccaattcacttgattggcgtaaacagccaaattagataatt

SEQ ID NO: 18005 - DNA, 110 bp, synthetic construct
  source 1..110: mol_type = other DNA
ccagaacaaatattttaggctgcagaccatatggtgtctgaaaaaggcaaccccaaggttgaggttttactgtcctgtaggttattagctagatttgtcgtctatagtat

SEQ ID NO: 18006 - DNA, 110 bp, synthetic construct
  source 1..110: mol_type = other DNA
aggttgaggttttactgtcctgtaggttattagctagatttgtcgtctatagtatcctcctcaaaaccagctttgccaggccctagttccctcattaaggagttaaataa

SEQ ID NO: 18007 - DNA, 110 bp, synthetic construct
  source 1..110: mol_type = other DNA
tcccctcctgcagatttgattgtcatcgccttctgggtgagcctggtggctttcgtggtgtttctcttcctcatcctgctctacatgtcctggtcaggctccccgcagac

SEQ ID NO: 18008 - DNA, 110 bp, synthetic construct
  source 1..110: mol_type = other DNA
gtgttgagaggttctctgatgatcttcctttgggtcattttactatttgtgacatgagacagctggttgctgtgggtgtcatcaaagaagtagcaaagaaagctgctgga

SEQ ID NO: 18009 - DNA, 110 bp, synthetic construct
  source 1..110: mol_type = other DNA
ctcgtcactttcccagtggcaggacccggctctgatgggtgagggtccgctggtagctccttaagttgataagctgagacctgtgcccctcttggcgctgttggtacacg

SEQ ID NO: 18010 - DNA, 110 bp, synthetic construct
  source 1..110: mol_type = other DNA
gctccttaagttgataagctgagacctgtgcccctcttggcgctgttggtacacgtgttggttcacgttgcacttggtttgccatccgcatagtctgagtgtgccccgac

SEQ ID NO: 18011 - DNA, 110 bp, synthetic construct
  source 1..110: mol_type = other DNA
ttgagacagagtagagatattaaccctttacaagctgtttctgctgtaagtacaccaccccacagtatgttttgttctgaacttgtcgtccaggtttgttacaaagggct

SEQ ID NO: 18012 - DNA, 110 bp, synthetic construct
  source 1..110: mol_type = other DNA
ttttatatggggacccgaccctactctttttctgcgggtaaccagatgcagtggaggtagggggcaaagacctttccagaagtctgaccgagaaggaaagccatgaggct

SEQ ID NO: 18013 - DNA, 110 bp, synthetic construct
  source 1..110: mol_type = other DNA
ggtagggggcaaagacctttccagaagtctgaccgagaaggaaagccatgaggctggagagatgttctggaattgtgggagtgcaggagttttgtctttagggggtagga

SEQ ID NO: 18014 - DNA, 110 bp, synthetic construct
  source 1..110: mol_type = other DNA
gggattgatccctcgttgtcatggatactagttgggtttgttaccgctgagccacgacgagaactcctagagataactattgctaatatattcattctgcccttccagct

SEQ ID NO: 18015 - DNA, 110 bp, synthetic construct
  source 1..110: mol_type = other DNA
gacgagaactcctagagataactattgctaatatattcattctgcccttccagctctccaccaggctctgcctctgccagcccctctgctgtttcctacaaggctcccaa

SEQ ID NO: 18016 - DNA, 110 bp, synthetic construct
  source 1..110: mol_type = other DNA
attcctctgttaaaggttccaagatatcatcatattgggtgttaagctttaacgtgagtttcggggaggacacaaacttttagtctacaccagagttgaaattcacatga

SEQ ID NO: 18017 - DNA, 110 bp, synthetic construct
  source 1..110: mol_type = other DNA
gaacctgcatcctcatggatactatgttgagcccttaaccctctgagctccaacgggaactccgtgaatggggttttatgagcagctctcggatccgtaggcatttcaac

SEQ ID NO: 18018 - DNA, 110 bp, synthetic construct
  source 1..110: mol_type = other DNA
ggaactccgtgaatggggttttatgagcagctctcggatccgtaggcatttcaactatggtgcccgagcatcctggtttgctgggggccaaggggttttctgcaatgcag

SEQ ID NO: 18019 - DNA, 110 bp, synthetic construct
  source 1..110: mol_type = other DNA
ccctctgatcaccacctcccagcctctcagcctcgcccttggttactctttcctcttctgacttcaccgggatccaggcctttgagccctcttctcttggtgcctatggg

SEQ ID NO: 18020 - DNA, 110 bp, synthetic construct
  source 1..110: mol_type = other DNA
ttctgacttcaccgggatccaggcctttgagccctcttctcttggtgcctatgggatttttcctctttgcatctgtcttcacaccccctggtttctgccttggctactac

SEQ ID NO: 18021 - DNA, 110 bp, synthetic construct
  source 1..110: mol_type = other DNA
aggaagccctgtattgatctgcacggtggtgccagcttcttacctcacccagaccaataaccaaacagttcctgggacgtaaccagtccacgggccatacttcgagtcac

SEQ ID NO: 18022 - DNA, 110 bp, synthetic construct
  source 1..110: mol_type = other DNA
gccagaggttgaatccaagctgtagctgcaacctgtgccacagatgcaataacgctggaactttaaccactgtgccaggccgggaatcaaacctgtgcctcctcagtgac

SEQ ID NO: 18023 - DNA, 110 bp, synthetic construct
  source 1..110: mol_type = other DNA
ccaccagaggtcttgcacatctttcgttagacggattaagcaaattcttattgaagtgagacatctttgccacagagttcacatatcttaatcgtgtataataagctcca

SEQ ID NO: 18024 - DNA, 110 bp, synthetic construct
  source 1..110: mol_type = other DNA
gtgagacatctttgccacagagttcacatatcttaatcgtgtataataagctccacgaaggctcacaaagcaaatatgttttgtcaccagcacttccatcacggaagaga

SEQ ID NO: 18025 - DNA, 110 bp, synthetic construct
  source 1..110: mol_type = other DNA
ctttggtaactaaatgtggtaaacgtagttttgaaatattgaaggtttcatttggttaaagaaaaaaaaaaaaaaaaacaactggggattttgagggcacgaacgttgcc

SEQ ID NO: 18026 - DNA, 110 bp, synthetic construct
  source 1..110: mol_type = other DNA
ttaaagaaaaaaaaaaaaaaaaacaactggggattttgagggcacgaacgttgccactctcccagatgttattgtcctggatacctagttatttattgctttttgccccg

SEQ ID NO: 18027 - DNA, 110 bp, synthetic construct
  source 1..110: mol_type = other DNA
gtctaccacatccgcgggaatccactgaggggcacggaccaggagattaacatgatttgagtcttaaggagatttgaagagtcataagatttttctgaccatccttttgc

SEQ ID NO: 18028 - DNA, 110 bp, synthetic construct
  source 1..110: mol_type = other DNA
tttgagtcttaaggagatttgaagagtcataagatttttctgaccatccttttgcaatggacagcaattatctgaaccgaggaatgccacagtgcatctaaccagagcat

SEQ ID NO: 18029 - DNA, 110 bp, synthetic construct
  source 1..110: mol_type = other DNA
agatccaggttgcatcttcgacctacaccatagctctcggcaatgccggatccttaacaccctgactgaacctgcaccctcgcggatactagttgggtttgttaccacca

SEQ ID NO: 18030 - DNA, 110 bp, synthetic construct
  source 1..110: mol_type = other DNA
aacaccctgactgaacctgcaccctcgcggatactagttgggtttgttaccaccaagccacaacaggaatgcctctttcctcttttcctcaaactcgtgtcacacatttc

SEQ ID NO: 18031 - DNA, 110 bp, synthetic construct
  source 1..110: mol_type = other DNA
ctatttatagtttatagtggaaattaacttgatcttgagcccctaatccaacttggtagaaaagaaacacttaaatttgctatgtgttatggactaaatatttgtgggcc

SEQ ID NO: 18032 - DNA, 110 bp, synthetic construct
  source 1..110: mol_type = other DNA
gtagaaaagaaacacttaaatttgctatgtgttatggactaaatatttgtgggcccctcccaaaattcatgtcaaagccttgacacccatggggtcaagtggctatattt

SEQ ID NO: 18033 - DNA, 110 bp, synthetic construct
  source 1..110: mol_type = other DNA
cgagatggcaccaaggcggagaggcgcacacttcaccaggaagcatttcctggagcttcctagggccctggtggctgcaggcgtctctcagagggacccttgcttggagt

SEQ ID NO: 18034 - DNA, 110 bp, synthetic construct
  source 1..110: mol_type = other DNA
cttcctagggccctggtggctgcaggcgtctctcagagggacccttgcttggagttttctccagtactttgtggctggaggcaggcagggtccacgccccaaagtgagat

SEQ ID NO: 18035 - DNA, 110 bp, synthetic construct
  source 1..110: mol_type = other DNA
atgacccaggaccccaagagaggtccagaaatgtccctgagctctatatagggctcctctccaattccccagggcagggcaaagccactgttctcacctttgcatggccg

SEQ ID NO: 18036 - DNA, 110 bp, synthetic construct
  source 1..110: mol_type = other DNA
acagtgacagggtctatacatggatgcatctgtgcagatagaagagacaggcttagttcagagctgccaacaaaagcctcgctgctataattagaaagagcccagctgcc

SEQ ID NO: 18037 - DNA, 110 bp, synthetic construct
  source 1..110: mol_type = other DNA
gttcagagctgccaacaaaagcctcgctgctataattagaaagagcccagctgccttttgatctgcaccatcaacatccaggatcccctttgtcagaactaatagataag

SEQ ID NO: 18038 - DNA, 110 bp, synthetic construct
  source 1..110: mol_type = other DNA
aagaaacaaaatcctgacccacgcgaaagcaggggccaacactgtgcacattatgctaaacgaaataagctggtccctagaagataaacactgcatgattccacttatat

SEQ ID NO: 18039 - DNA, 110 bp, synthetic construct
  source 1..110: mol_type = other DNA
ctaaacgaaataagctggtccctagaagataaacactgcatgattccacttatatgaggtacctagagaagtcagactcagatacagaagaataatggtcaccaagagtt

SEQ ID NO: 18040 - DNA, 110 bp, synthetic construct
  source 1..110: mol_type = other DNA
attgtcaaattacccccccaaagttaaccatcctgccaacaatttacaggggtgcctgtttccatgagataaacagggtctcatccttcttggaaggtgcatattgcaga

SEQ ID NO: 18041 - DNA, 110 bp, synthetic construct
  source 1..110: mol_type = other DNA
ctgtttccatgagataaacagggtctcatccttcttggaaggtgcatattgcagatatcttttctggagagaggagagaaccagtctggtagggctgtgagaatccttta

SEQ ID NO: 18042 - DNA, 110 bp, synthetic construct
  source 1..110: mol_type = other DNA
agttgcataaatggtgaaatgattctttcggggggaataatccactttgggatctaaattacttggatcagcaatctacactgacatcagtgactgttcattatgagcaa

SEQ ID NO: 18043 - DNA, 110 bp, synthetic construct
  source 1..110: mol_type = other DNA
gctggcagggctgtggagacaattaaatacgattctacactcaatattcataaactcacagaagatgttcagtgaattgtaattcttgtgcgttgaattgtgttcccccc

SEQ ID NO: 18044 - DNA, 110 bp, synthetic construct
  source 1..110: mol_type = other DNA
tcacagaagatgttcagtgaattgtaattcttgtgcgttgaattgtgttcccccccaaaaaaaagatattcacagctccccccagcccctacccctgtgaatgtgacttt

SEQ ID NO: 18045 - DNA, 110 bp, synthetic construct
  source 1..110: mol_type = other DNA
attcagacccaacccaactttgctgaaaggcgtgcatttttcccacccctgcttctctcccactatgacctgggttttattaatgtcaccagccaaatccatcccagcta

SEQ ID NO: 18046 - DNA, 110 bp, synthetic construct
  source 1..110: mol_type = other DNA
tctcccactatgacctgggttttattaatgtcaccagccaaatccatcccagctagtgctgactaactcaaacttgggccccaccaggaaaaggaacttgagctgtcatt

SEQ ID NO: 18047 - DNA, 110 bp, synthetic construct
  source 1..110: mol_type = other DNA
gccagagtgatttcccggtccctcaaatcaggatcattttcccaacagcccgggggtaaagccacttctgactacatcccaacacacccacatcacatacaccccccgac

SEQ ID NO: 18048 - DNA, 110 bp, synthetic construct
  source 1..110: mol_type = other DNA
cagcccgggggtaaagccacttctgactacatcccaacacacccacatcacatacaccccccgacacacacacaccgtgcctacacgtaagacacacccccccacacaca

SEQ ID NO: 18049 - DNA, 110 bp, synthetic construct
  source 1..110: mol_type = other DNA
aattcaaagagcatgtggcccagagccatttatgattcattccagaattattgagaccctactatgtgccaggcaaggtctcagtgctgaagctacaacagtgaacagga

SEQ ID NO: 18050 - DNA, 110 bp, synthetic construct
  source 1..110: mol_type = other DNA
accctactatgtgccaggcaaggtctcagtgctgaagctacaacagtgaacaggatgaaaccccctaccttggtggaacacacatcctatggggaaacagacaataataa

SEQ ID NO: 18051 - DNA, 110 bp, synthetic construct
  source 1..110: mol_type = other DNA
taaccactgagccacgacgggaactcctgtcacattttttcacacagcgttttccagccaggagctctgtataaaatcatccacccagaaaaagcaatgagaacattggc

SEQ ID NO: 18052 - DNA, 110 bp, synthetic construct
  source 1..110: mol_type = other DNA
agccaggagctctgtataaaatcatccacccagaaaaagcaatgagaacattggccaattaactctttttctatctctcctgcagtttttgagccacccccatcacagca

SEQ ID NO: 18053 - DNA, 110 bp, synthetic construct
  source 1..110: mol_type = other DNA
ttgggtggtcagagaggaggagaaacatgggttggaggagccagaaagaaaaatcagagagggcatccagctggtggaagatttgtactccagtgtgagaaataaagaga

SEQ ID NO: 18054 - DNA, 110 bp, synthetic construct
  source 1..110: mol_type = other DNA
agagagggcatccagctggtggaagatttgtactccagtgtgagaaataaagagataagttagggattcatagatacaacctactgtacataaaatagataagcaacaag

SEQ ID NO: 18055 - DNA, 110 bp, synthetic construct
  source 1..110: mol_type = other DNA
tgaccacgaatcaattcacaagacaaactacagcttggactataagaaatatagctggggaacctatttgcaatgcatatgatggaatcaggctaatatccctaatcaac

SEQ ID NO: 18056 - DNA, 110 bp, synthetic construct
  source 1..110: mol_type = other DNA
tggggaacctatttgcaatgcatatgatggaatcaggctaatatccctaatcaacacaaatcaattttttttatctgtcttttgtctttttagggccacacccaaggcat

SEQ ID NO: 18057 - DNA, 110 bp, synthetic construct
  source 1..110: mol_type = other DNA
agtgatttgctcacaattttaaaaattcagggcagagtcaaaaacagaaacagccactcttctcagtccgccttctggatgccttcattagctttcacgctagcatctca

SEQ ID NO: 18058 - DNA, 110 bp, synthetic construct
  source 1..110: mol_type = other DNA
actcttctcagtccgccttctggatgccttcattagctttcacgctagcatctcacaaatctgagcataatgtatttctccttattttataaagagaaactgctgctata

SEQ ID NO: 18059 - DNA, 110 bp, synthetic construct
  source 1..110: mol_type = other DNA
atgaactcggaagccaatttattggttaaaaaccaagcgtcttccccagcacaactaccattgctacctgggctacgctcctcatctaaaaggacactcaacactttatg

SEQ ID NO: 18060 - DNA, 110 bp, synthetic construct
  source 1..110: mol_type = other DNA
taccattgctacctgggctacgctcctcatctaaaaggacactcaacactttatgattaatcctggaaagaatgttgaccctcctctattccctctttccacctctgtcc

SEQ ID NO: 18061 - DNA, 110 bp, synthetic construct
  source 1..110: mol_type = other DNA
attgtcactgcagtggcttgggtcactgctgtgctgtgggttctggctcaggaacttccacatggcagaagtgcagccaaaaaaaaagagataaaaaaataaagtgatat

SEQ ID NO: 18062 - DNA, 110 bp, synthetic construct; identical to SEQ ID NO: 18061
  source 1..110: mol_type = other DNA

SEQ ID NO: 18063 - DNA, 110 bp, synthetic construct
  source 1..110: mol_type = other DNA
tttatttactaactttcaaaagacatttaattatacagaaggcaaactgaatcaattagggtaaggaacttgctggaggtcataccgaaaagaggggggtgaagcctgga

SEQ ID NO: 18064 - DNA, 110 bp, synthetic construct
  source 1..110: mol_type = other DNA
ttagggtaaggaacttgctggaggtcataccgaaaagaggggggtgaagcctggattccaatggaactaattttgcttcagataatatatgaggaagaaaaattaattat

SEQ ID NO: 18065 - DNA, 110 bp, synthetic construct
  source 1..110: mol_type = other DNA
ctccatcccgaatggttccagcagcttctgtccacgtaactttttctggtttgtgaactaccgcaaagaacaaggggaaacaatctgttagcaatcccattaatgctgcc

SEQ ID NO: 18066 - DNA, 110 bp, synthetic construct
  source 1..110: mol_type = other DNA
aactaccgcaaagaacaaggggaaacaatctgttagcaatcccattaatgctgcctccggagccgtttctatcgccactcccaccagggctctggtccaagcctctactc

SEQ ID NO: 18067 - DNA, 110 bp, synthetic construct
  source 1..110: mol_type = other DNA
tgaatgttatgtaacctcaaaattatatattctactataagcttccttttataaaaaaaagtgctgcataaagggagttcccgttttggctcagtggtaatgaaccagat

SEQ ID NO: 18068 - DNA, 110 bp, synthetic construct
  source 1..110: mol_type = other DNA
tatattctactataagcttccttttataaaaaaaagtgctgcataaagggagttcccgttttggctcagtggtaatgaaccagattagtattcaggagaatgcgggttca

SEQ ID NO: 18069 - DNA, 110 bp, synthetic construct
  source 1..110: mol_type = other DNA
aactttcggagtgtctgtctgactcagcttgaatctcttaatcatctaacctatactcctcatttcagtgttcaacctgctccccaagaatttgtggtgttcattttaaa

SEQ ID NO: 18070 - DNA, 110 bp, synthetic construct
  source 1..110: mol_type = other DNA
aagaatgtggttttgctctaattacttcacctctttgattctcgttttctttgtgtgtaatatggggatggtaatataggacctgtgatgtggaaagagataagacctat

SEQ ID NO: 18071 - DNA, 110 bp, synthetic construct
  source 1..110: mol_type = other DNA
ctcacctcctggaatagtttcaagttccaagtcagtacacttggttggcatgtacacatgtaaccaaccctaggatttggagggctgaatgtactacaccattttatgta

SEQ ID NO: 18072 - DNA, 110 bp, synthetic construct
  source 1..110: mol_type = other DNA
acatgtaaccaaccctaggatttggagggctgaatgtactacaccattttatgtaagggacttgaacaccctcggattttgctattgaggggatcctgggaccagtcccc

SEQ ID NO: 18073 - DNA, 110 bp, synthetic construct
  source 1..110: mol_type = other DNA
tggccataaaaaaaaaaaggctgacctttataagaaaattttattgtggttttgttgttgttacgaatagcaatctccctacccctccaaaaagttttttatgctttttt

SEQ ID NO: 18074 - DNA, 110 bp, synthetic construct
  source 1..110: mol_type = other DNA
tgttgttacgaatagcaatctccctacccctccaaaaagttttttatgctttttttctctctcttttttttttctttttctttttttggctgtcctgaggcatatggagt

SEQ ID NO: 18075 - DNA, 110 bp, synthetic construct
  source 1..110: mol_type = other DNA
tttaacctactgcaccagccaagattcaacctgcatctccactgtgccacagcaggaattcctttaaaaattttttttcttattgctttttaaaaaatatataaaggcct

SEQ ID NO: 18076 - DNA, 110 bp, synthetic construct
  source 1..110: mol_type = other DNA
tcaacctgcatctccactgtgccacagcaggaattcctttaaaaattttttttcttattgctttttaaaaaatatataaaggcctagggaaaaatggagaaaaaagtgga

SEQ ID NO: 18077 - DNA, 110 bp, synthetic construct
  source 1..110: mol_type = other DNA
catttaccaagaagtctatgatatcatttgccccaaaggggtcattctatttgcagaagtttccagcatatagactagatcagtcatgaagctagaaagaccctggggtg

SEQ ID NO: 18078 - DNA, 110 bp, synthetic construct
  source 1..110: mol_type = other DNA
gaagtttccagcatatagactagatcagtcatgaagctagaaagaccctggggtgacctggaaactctgaggaacccttgatagtctagggcagggtcctcaaactttag

SEQ ID NO: 18079 - DNA, 110 bp, synthetic construct
  source 1..110: mol_type = other DNA
gccttgtttctacgggtaaggcaatcacgcaaactactgaactttcagaaagcattttctagaggcgttgaattaatattgtgtcagtgtttgttttcctgaatgaatct

SEQ ID NO: 18080 - DNA, 110 bp, synthetic construct
  source 1..110: mol_type = other DNA
gtcttataactcctgctggatttttctgaaagccttataatgatgctgtcatctgcactgcacaaagtgaagcagagctctttgttggggagaaagggagcagcaggctg

SEQ ID NO: 18081 - DNA, 110 bp, synthetic construct
  source 1..110: mol_type = other DNA
aaagagcctgatgcccttcctggtgggatgtcctttgaagaacattctggaagtggaggcctgggctaaagcagctatggggacacctgcctcaggaggaagttgaggag

SEQ ID NO: 18082 - DNA, 110 bp, synthetic construct
  source 1..110: mol_type = other DNA
gaggcctgggctaaagcagctatggggacacctgcctcaggaggaagttgaggaggagcaacgtccgaggagaaggatgagaatcgcctcgatctggggactgtggcggg

SEQ ID NO: 18083 - DNA, 110 bp, synthetic construct; identical to SEQ ID NO: 18081
  source 1..110: mol_type = other DNA

SEQ ID NO: 18084 - DNA, 110 bp, synthetic construct; identical to SEQ ID NO: 18082
  source 1..110: mol_type = other DNA

SEQ ID NO: 18085 - DNA, 110 bp, synthetic construct
  source 1..110: mol_type = other DNA
cttgtttatgctctgcatctgtctccctcaactgaaatataagttcataactttacatgtttttctctctttcgttccctacgctagctatcctcagtgcctggcatagc

SEQ ID NO: 18086 - DNA, 110 bp, synthetic construct
  source 1..110: mol_type = other DNA
catgtttttctctctttcgttccctacgctagctatcctcagtgcctggcatagctcatggtacatagtaggcactcagtggatcattgccgaatgaatgaaatgagaaa

SEQ ID NO: 18087 - DNA, 110 bp, synthetic construct
  source 1..110: mol_type = other DNA
tctagggattgaattggagctgcagttgctggcctacactacagccacagtcacagcaatgtcagatttgagccccatttgcaacatacactgtggctcgcctcaatgct

SEQ ID NO: 18088 - DNA, 110 bp, synthetic construct
  source 1..110: mol_type = other DNA
ggagctgcagttgctggcctacactacagccacagtcacagcaatgtcagatttgagccccatttgcaacatacactgtggctcgcctcaatgctggatccttaacctac

SEQ ID NO: 18089 - DNA, 110 bp, synthetic construct
  source 1..110: mol_type = other DNA
cacatcaataaagtgttaatattcaaagtatacaaacaactcatacaacttaacatgaaaaaataagctaccaggagttcccagagtggctcagtggtaatgaacccaac

SEQ ID NO: 18090 - DNA, 110 bp, synthetic construct
  source 1..110: mol_type = other DNA
ttaatattcaaagtatacaaacaactcatacaacttaacatgaaaaaataagctaccaggagttcccagagtggctcagtggtaatgaacccaactagtatccatgggga

SEQ ID NO: 18091 - DNA, 110 bp, synthetic construct; identical to SEQ ID NO: 18089
  source 1..110: mol_type = other DNA

SEQ ID NO: 18092 - DNA, 110 bp, synthetic construct; identical to SEQ ID NO: 18090
  source 1..110: mol_type = other DNA

SEQ ID NO: 18093 - DNA, 110 bp, synthetic construct
  source 1..110: mol_type = other DNA
agaatttgggactaatactacactgccctttattctggtttatgagaactgctgtgagaaggccaggattttgagatcatccttcgcccttggtgaccccatcttcatca

SEQ ID NO: 18094 - DNA, 110 bp, synthetic construct
  source 1..110: mol_type = other DNA
atcactcatggatcattcttttcccatccgtgccttggtctgggtctatccaagtttcctggctctgaggctacatgcagagagttctagtttggtttctggaaacagag

SEQ ID NO: 18095 - DNA, 110 bp, synthetic construct
  source 1..110: mol_type = other DNA
ttcctggctctgaggctacatgcagagagttctagtttggtttctggaaacagagttactcttggtaactcctggtctcatgctggtggctcctccatctcctcgcctct

SEQ ID NO: 18096 - DNA, 110 bp, synthetic construct
  source 1..110: mol_type = other DNA
tatcctgataaatcacaacagactctgttaattagatgggcagctttaactggctgactcctgtccaacaattacctcagagagacgcaccactgggaatatttccttcc

SEQ ID NO: 18097 - DNA, 110 bp, synthetic construct
  source 1..110: mol_type = other DNA
tttagtgtttcacgtggtacttctcctttggggatgactgatctcagggttttttatactgcctgaaatttttacttttgccgtcatagccaaaggaccttttgctagat

SEQ ID NO: 18098 - DNA, 110 bp, synthetic construct
  source 1..110: mol_type = other DNA
gactgatctcagggttttttatactgcctgaaatttttacttttgccgtcatagccaaaggaccttttgctagatatagaattctagtctgatatattttttttctttca

SEQ ID NO: 18099 - DNA, 110 bp, synthetic construct
  source 1..110: mol_type = other DNA
tgtattctgcattgcattctgagatctcctgatctcctaaatgattttactccagctttaatagaaaagtatcagggaaggacttccactcggaccagcacttgtgatta

SEQ ID NO: 18100 - DNA, 110 bp, synthetic construct
  source 1..110: mol_type = other DNA
ctttaatagaaaagtatcagggaaggacttccactcggaccagcacttgtgattaaaataatgggaggctttgatcaccagagcctatgtcagttgctcactcctgtgct

SEQ ID NO: 18101 - DNA, 110 bp, synthetic construct
  source 1..110: mol_type = other DNA
gacagaatgaaaacctaagcgctgtgcagcatctcacgagtttgtgcggcttttcctcttagttgtgcaaactcagtccagggggatagagacacgagtgctgcaagaaa

SEQ ID NO: 18102 - DNA, 110 bp, synthetic construct
  source 1..110: mol_type = other DNA
ctcttagttgtgcaaactcagtccagggggatagagacacgagtgctgcaagaaagcattttttttttctgtttgcccaaaagcagtcatgtcgaatggcttgagagacc

SEQ ID NO: 18103 - DNA, 110 bp, synthetic construct
  source 1..110: mol_type = other DNA
gactcatacctgcccagggtcccaggggattctgtgccctgcactcgcctctggcctcagctgcagccaaggtctcccgaccatggcccaactcccagtagccaccttaa

SEQ ID NO: 18104 - DNA, 110 bp, synthetic construct
  source 1..110: mol_type = other DNA
ctcagctgcagccaaggtctcccgaccatggcccaactcccagtagccaccttaatcacacggtataagcatctattttagttacataaacagagttgtctacatttgga

SEQ ID NO: 18105 - DNA, 110 bp, synthetic construct
  source 1..110: mol_type = other DNA
ccccgggctgatccgggcttgggccttagaggccaaccaggtgatatcctaggttcatcttgaaccccttccttcccacacctaccgctctttcaaaagattgggtgaag

SEQ ID NO: 18106 - DNA, 110 bp, synthetic construct
  source 1..110: mol_type = other DNA
catcttgaaccccttccttcccacacctaccgctctttcaaaagattgggtgaagggttggggtgaaaagggtagagactgggaatgagaacagctccggaaagttcaaa

SEQ ID NO: 18107 - DNA, 110 bp, synthetic construct
  source 1..110: mol_type = other DNA
aatgcattctcttctacactctgaatgtcattttgaagctggacccagagtccaatgaattctcctaattgcttgttccatatgttgaattgcagattgtcactctggag

SEQ ID NO: 18108 - DNA, 110 bp, synthetic construct
  source 1..110: mol_type = other DNA
gaacccagggtttttcatgtacccagtgtctggacttactgaggttccaattctttgtctcagcacagaattcagtaagagataaagtgataggcaagaaatagatgttt

SEQ ID NO: 18109 - DNA, 110 bp, synthetic construct
  source 1..110: mol_type = other DNA
catgtacccagtgtctggacttactgaggttccaattctttgtctcagcacagaattcagtaagagataaagtgataggcaagaaatagatgttttaagataggacgctt

SEQ ID NO: 18110 - DNA, 110 bp, synthetic construct
  source 1..110: mol_type = other DNA
ttgtagggttcaaaaaaattagttatctcagctgatattttccccccaaaaaaggggttttggctaatgattcatgtatctaaaccaccatataaaagaaagaaatgaaa

SEQ ID NO: 18111 - DNA, 110 bp, synthetic construct
  source 1..110: mol_type = other DNA
agcacagtactttttaaatggatttattacgatataatttaaataccattgtggtactttatttttggccacacctatggcacgcggaagcgcccgggccagggatccaa

SEQ ID NO: 18112 - DNA, 110 bp, synthetic construct
  source 1..110: mol_type = other DNA
attacgatataatttaaataccattgtggtactttatttttggccacacctatggcacgcggaagcgcccgggccagggatccaacctgcgccacagcagagactcaagt

SEQ ID NO: 18113 - DNA, 110 bp, synthetic construct
  source 1..110: mol_type = other DNA
tttttctcctcgcccccacccccacctcttttctgcctaaaggtaggaggtaaatgccccctttaaagcaggtgactccagacgcttacagaggaatatgctaacgcatc

SEQ ID NO: 18114 - DNA, 110 bp, synthetic construct
  source 1..110: mol_type = other DNA
gccccctttaaagcaggtgactccagacgcttacagaggaatatgctaacgcatcccattagcttcctcccacgtttactcccccagtgtgcagcggtgtggaacctgag

SEQ ID NO: 18115 - DNA, 110 bp, synthetic construct
  source 1..110: mol_type = other DNA
caaaaaaaaaaaaaaaaaaaatctaactttgtgctacagattatgtcctagttaggccagctaccttgtgtgaggtggtttttctcgaaactaaggaaaagaggctggga

SEQ ID NO: 18116 - DNA, 110 bp, synthetic construct
  source 1..110: mol_type = other DNA
gccagctaccttgtgtgaggtggtttttctcgaaactaaggaaaagaggctgggatcagctgggctgagaagaggaggagaggagagagcagcaggtaaggatgaggtgg

SEQ ID NO: 18117 - DNA, 110 bp, synthetic construct
  source 1..110: mol_type = other DNA
caggaagctttggaaagttttcaagcataaaagtggcaggtggactcgcgatttcaaaggaggaccctctagctgtgggggcggaaaacagcctgcagaaggatgaggga

SEQ ID NO: 18118 - DNA, 110 bp, synthetic construct
  source 1..110: mol_type = other DNA
aaaggaggaccctctagctgtgggggcggaaaacagcctgcagaaggatgagggagaagcaggggaccagtaaggaggtgatggccacttggaccactctggtagcaatg

SEQ ID NO: 18119 - DNA, 110 bp, synthetic construct
  source 1..110: mol_type = other DNA
agaggttttaccgtgtccaggggtcctagaacttgtacaatccaacccttgttccaaagatgaaaataatagagaaaattgaggaagatgtctgggtaggagaggccgtg

SEQ ID NO: 18120 - DNA, 110 bp, synthetic construct
  source 1..110: mol_type = other DNA
aaagatgaaaataatagagaaaattgaggaagatgtctgggtaggagaggccgtgggtctggtttttttttgttcgtttgtttgtttagggctgtgcttgaggcacatgg

SEQ ID NO: 18121 - DNA, 110 bp, synthetic construct
  source 1..110: mol_type = other DNA
atttctcagttgtgcgagctagactctgagaagagtgtgccctttgcgtttccctcccgatagccatgctctgcaaaagaacgcccgtattttaaccatgtgcatgtcat

SEQ ID NO: 18122 - DNA, 110 bp, synthetic construct
  source 1..110: mol_type = other DNA
cccgatagccatgctctgcaaaagaacgcccgtattttaaccatgtgcatgtcatgcaaccctctgtgatatacagccttgtagtttgtcaactcacttgtgtagctgaa

SEQ ID NO: 18123 - DNA, 110 bp, synthetic construct
  source 1..110: mol_type = other DNA
tagaaggggctaaaggagcagcagatggggacctgagagaggtgacacatgtcacatgcgtagctgtaacgtgacaggtgaggctttctcacagggtgatccttgggctg

SEQ ID NO: 18124 - DNA, 110 bp, synthetic construct
  source 1..110: mol_type = other DNA
atgcgtagctgtaacgtgacaggtgaggctttctcacagggtgatccttgggctggttgttatcagaaccactttggggagcagtggcgacagtggtggagccttgttaa

SEQ ID NO: 18125 - DNA, 110 bp, synthetic construct
  source 1..110: mol_type = other DNA
aaacaaaaaaacagaagatgcttaactatcctttagcttgtgttggcgccatacgttcccaggtctgaggaacctcgtccccaagctgctgcccagagagaaagggactg

SEQ ID NO: 18126 - DNA, 110 bp, synthetic construct
  source 1..110: mol_type = other DNA
aaacatctttttctagaacgttctatttcaatcatcgagtcactcgttgtctccggatggagctttctttgactcctccctttcaacttcctgaagttttcttgcagaac

SEQ ID NO: 18127 - DNA, 110 bp, synthetic construct
  source 1..110: mol_type = other DNA
cccagcagagcctgattcttctggggaaaaatgattgaccaaattagcatggagataaaaatacttctttcttcaattgagcggctctttatagaactgaaacaaaatta

SEQ ID NO: 18128 - DNA, 110 bp, synthetic construct
  source 1..110: mol_type = other DNA
agcatggagataaaaatacttctttcttcaattgagcggctctttatagaactgaaacaaaattagatccaggaagtggtaggtattttggaaaatggttcttgataata

SEQ ID NO: 18129 - DNA, 110 bp, synthetic construct
  source 1..110: mol_type = other DNA
tcccatcctccagtggttaatttcttgggtgacctctccctgctgtctctcttattctggctggctgccctcctttttgcccatttggtggtcagctcaatacccccact

SEQ ID NO: 18130 - DNA, 110 bp, synthetic construct
  source 1..110: mol_type = other DNA
aagacacaggttcaatacctggccgcccttagtgggataaggatctggcatggccatgagctgcggcagaggtctcagactcggctcagaattggtattgatgtggctgt

SEQ ID NO: 18131 - DNA, 110 bp, synthetic construct
  source 1..110: mol_type = other DNA
tacctggccgcccttagtgggataaggatctggcatggccatgagctgcggcagaggtctcagactcggctcagaattggtattgatgtggctgtggtataggccagcgg

SEQ ID NO: 18132 - DNA, 110 bp, synthetic construct
  source 1..110: mol_type = other DNA
aatcaatctatcgcacttagagtaagtaaataaatatgaaccagaatggtgtcacgaagtgagaagaagggaaaggatggagtctctggttcaaggtctttgccctttcc

SEQ ID NO: 18133 - DNA, 110 bp, synthetic construct
  source 1..110: mol_type = other DNA
gaagtgagaagaagggaaaggatggagtctctggttcaaggtctttgccctttccatagatgctagatcatgaataggtcatatcttgtcctgtcatgtccttaatcaca

SEQ ID NO: 18134 - DNA, 110 bp, synthetic construct
  source 1..110: mol_type = other DNA
ctgtctcaaactactacaatgtagggtaatttattatgcagccctgaactggaaaaatgttcatgtcctggaaagttcaatattttaacagtattctctccaagttgatc

SEQ ID NO: 18135 - DNA, 110 bp, synthetic construct
  source 1..110: mol_type = other DNA
caccaccctttcggtagctagttgatagtccctacatccttcactgtcccttaagacttgcccaagagtttctatacctgtacagagttcctttcattaaattctcccta

SEQ ID NO: 18136 - DNA, 110 bp, synthetic construct
  source 1..110: mol_type = other DNA
acttgcccaagagtttctatacctgtacagagttcctttcattaaattctccctaatttccacaatttaagagccagccatccttttccttccaggagttaaatggctat

SEQ ID NO: 18137 - DNA, 110 bp, synthetic construct
  source 1..110: mol_type = other DNA
cagaataaagttacctacaaacaacactgtctcacaatcatgatagttagacacaatcttaggcaaaactttaagaaatgtatgtttttactaaaaaccggtcttgaata

SEQ ID NO: 18138 - DNA, 110 bp, synthetic construct; identical to SEQ ID NO: 18137
  source 1..110: mol_type = other DNA

SEQ ID NO: 18139 - DNA, 110 bp, synthetic construct
  source 1..110: mol_type = other DNA
tcaaaccattatgtttgcaaataaaacaggaaagaaatgggttgggaaacggtgactgtagtaaaagaaggagtagaagcagcagaaggaaaaggaatggaaattttaaa

SEQ ID NO: 18140 - DNA, 110 bp, synthetic construct
  source 1..110: mol_type = other DNA
aatttttacatatctaaacttgcatcactaccacccatagcaagaaatagaacgtaactacaatcccagatttccctgtagcctccccaagtcagtctccaaagtctctt

SEQ ID NO: 18141 - DNA, 110 bp, synthetic construct
  source 1..110: mol_type = other DNA
tttctacctaacaaaatcccacgcactcactgagtgccacagggaggtatggattaattatacagagtccctgatctgcctaagtctaaataagactgacaaaacagaga

SEQ ID NO: 18142 - DNA, 110 bp, synthetic construct
  source 1..110: mol_type = other DNA
aattatacagagtccctgatctgcctaagtctaaataagactgacaaaacagagaaatttcaacacatacaatgtgataagcccaatgctctggggatgctcttgaggtc

SEQ ID NO: 18143 - DNA, 110 bp, synthetic construct
  source 1..110: mol_type = other DNA
cagtgcattttacactgtaacatagtgggcacatgtctacgtgcattaagtgtttttaacaacacacttcttaaaaccagaacttacattgaccacccacaaaaaaccaa

SEQ ID NO: 18144 - DNA, 110 bp, synthetic construct
  source 1..110: mol_type = other DNA
ttaacaacacacttcttaaaaccagaacttacattgaccacccacaaaaaaccaacagaaactctctattctttctgttctattccattccattccattcatgttttagg

SEQ ID NO: 18145 - DNA, 110 bp, synthetic construct
  source 1..110: mol_type = other DNA
atcaagtttaagcagtctcccttttaagtctcctagaagtctctgaaaaataaaaataggcagaaaaggatgattatggaggtctgtgggtgggaaaaccatgtacccaa

SEQ ID NO: 18146 - DNA, 110 bp, synthetic construct
  source 1..110: mol_type = other DNA
ataggcagaaaaggatgattatggaggtctgtgggtgggaaaaccatgtacccaatttgttcccaaagttttgggaaaagcaagatgattataataacatattttcgctg

SEQ ID NO: 18147 - DNA, 110 bp, synthetic construct
  source 1..110: mol_type = other DNA
gtaccactaatgtagggaagcagctattgcttgggaactgaggcaggaatactgctgttgtggattattgtgtatcaattatgtcttccttcatgccatcttcctggaag

SEQ ID NO: 18148 - DNA, 110 bp, synthetic construct
  source 1..110: mol_type = other DNA
aaaatgatcttgaggagaaagaacacagctacagatatcacatgtcctgatttaaaacaaacctacagtcatcaaaacagtatggtatggacataaacacaaagatcaat

SEQ ID NO: 18149 - DNA, 110 bp, synthetic construct
  source 1..110: mol_type = other DNA
tcaaatatcaagttaaataaaacactgcccatttcctgtatttggttgggtgaatgatgagaaaatgttctcatgtaggcatattccagcctctgaacactgaagcaaaa

SEQ ID NO: 18150 - DNA, 110 bp, synthetic construct
  source 1..110: mol_type = other DNA
gatgagaaaatgttctcatgtaggcatattccagcctctgaacactgaagcaaaataattacactcattcaagaaaaaaaaagtgaatttaagaatattattcagccaaa

SEQ ID NO: 18151 - DNA, 110 bp, synthetic construct
  source 1..110: mol_type = other DNA
ctggagcctctccctcagctttctcataatgcaaggtgtcacctcccctgagagccgaccatttaaaaattaatcaccatgatgtttcattccacagtgaagatcctgtt

SEQ ID NO: 18152 - DNA, 110 bp, synthetic construct
  source 1..110: mol_type = other DNA
ttgtccaggtctcttgatgtttgggagggtgacagcaaaagcctgaggatgttaaccatcaatgaaatgctaagtgtgaaaggcagaagtcctccttgccagctcctaaa

SEQ ID NO: 18153 - DNA, 110 bp, synthetic construct
  source 1..110: mol_type = other DNA
ccatcaatgaaatgctaagtgtgaaaggcagaagtcctccttgccagctcctaaagagactcagccctcgtattcaaattgcagagaaagctaaggatcaggcacaggac

SEQ ID NO: 18154 - DNA, 110 bp, synthetic construct
  source 1..110: mol_type = other DNA
ggaagaacttaagaatgtacttgtagtatcttggggggacagagacaagagggcctgtcaccactgtaagccatgtgactcccttgcgcttcccacctcaagcacacgat

SEQ ID NO: 18155 - DNA, 110 bp, synthetic construct
  source 1..110: mol_type = other DNA
tgtcaccactgtaagccatgtgactcccttgcgcttcccacctcaagcacacgattacgggtcaactgtgccctcactcccagacacatcaaattcatatattgaaatcc

SEQ ID NO: 18156 - DNA, 110 bp, synthetic construct
  source 1..110: mol_type = other DNA
tagcatagaggtgagcacgggctctacctgaggagtagacacctgtgggagaaggaaggccaaggaacacaacacgtgatattgcagctcaccagatcatggagatgctg

SEQ ID NO: 18157 - DNA, 110 bp, synthetic construct
  source 1..110: mol_type = other DNA
aaggccaaggaacacaacacgtgatattgcagctcaccagatcatggagatgctgagacagcctcccaggcagagaaaccagcagaggccatggtaaagaaacatgaaag

SEQ ID NO: 18158 - DNA, 110 bp, synthetic construct
  source 1..110: mol_type = other DNA
ctttccaataagggtctaatcatatgtatttaaaagctgttataccactccatgacaccaaagtcccaattctgtcttcctgctctgctattcaaaatgcatggcttcaa

SEQ ID NO: 18159 - DNA, 110 bp, synthetic construct
  source 1..110: mol_type = other DNA
ttacttttaacacttcctctaaagtgggaaaaaccatggccaattctttatgttggtgacaatcaagcttcccaagaacttccacatagaggacctactctgtccaattt

SEQ ID NO: 18160 - DNA, 110 bp, synthetic construct
  source 1..110: mol_type = other DNA
ccatcatggcacagcagaaacaaaacaaatctgaccaggaaccatgaagttgcgggttcaatctctggcctctgatccaacattgccgtgagcggtggtggaggtcacag

SEQ ID NO: 18161 - DNA, 110 bp, synthetic construct
  source 1..110: mol_type = other DNA
agaaacaaaacaaatctgaccaggaaccatgaagttgcgggttcaatctctggcctctgatccaacattgccgtgagcggtggtggaggtcacagatgtggctcggatct

SEQ ID NO: 18162 - DNA, 110 bp, synthetic construct
  source 1..110: mol_type = other DNA
gcgcattgttagcttcttccactgttactgcttctgtgtagagagcttgcttcagggacagggaggcagagggaaggacagcggagaagagcctcgggaggggttccaat

SEQ ID NO: 18163 - DNA, 110 bp, synthetic construct
  source 1..110: mol_type = other DNA
ggacagggaggcagagggaaggacagcggagaagagcctcgggaggggttccaatccagtgggacaggcagtgcctcgttggagagaattaccttccctggtgccgcatg

SEQ ID NO: 18164 - DNA, 110 bp, synthetic construct
  source 1..110: mol_type = other DNA
ttgtagatctcggtagccatcctctgaagggctttggaaatgggctggctcttcatctctttgggatgagctcttctcaagccaatcatctaactgaggccacctctcag

SEQ ID NO: 18165 - DNA, 110 bp, synthetic construct
  source 1..110: mol_type = other DNA
ttctgggcctttgttttcctttggtcaattatcttgtttaatttctcacacctgactggacccagggccctccctgataggcgtgtgcatcttttggcatagatggattc

SEQ ID NO: 18166 - DNA, 110 bp, synthetic construct
  source 1..110: mol_type = other DNA
ctggacccagggccctccctgataggcgtgtgcatcttttggcatagatggattccaaagctgggccttgtgggaagcttagctggacttattatggcctggcagcccct

SEQ ID NO: 18167 - DNA, 110 bp, synthetic construct
  source 1..110: mol_type = other DNA
cagtgtttttaataacattgataatagcagttgaacttagaacatctttgttttgttttgggttttttggtcacgcctatggtgtgtgggaattcctgggccagggattg

SEQ ID NO: 18168 - DNA, 110 bp, synthetic construct
  source 1..110: mol_type = other DNA
cattgataatagcagttgaacttagaacatctttgttttgttttgggttttttggtcacgcctatggtgtgtgggaattcctgggccagggattgaacctgtaccacagc

SEQ ID NO: 18169 - DNA, 110 bp, synthetic construct
  source 1..110: mol_type = other DNA
cagacagagacacaaaagaaggccaggtcgtcatccttcccttcaaagaattaccaatttagtgaacttcacttaaatgaaataggaatttcaaaggaataaagctctga

SEQ ID NO: 18170 - DNA, 110 bp, synthetic construct
  source 1..110: mol_type = other DNA
aattgatgcctcgcctgagaacttccatatgcctcgggttcagccctaaaaagtggaaaaaaaaaaaaaaaccgggtacgagataggtatctgctgttaccattcttggt

SEQ ID NO: 18171 - DNA, 110 bp, synthetic construct; identical to SEQ ID NO: 18170
  source 1..110: mol_type = other DNA

SEQ ID NO: 18172 - DNA, 110 bp, synthetic construct
  source 1..110: mol_type = other DNA
taactcaagctccaaaggcagcttctgggctgaggcctctcccaagaatcttctgtagctgggttggctgccaagtggtgtatgacccaagtaaatcttggtgccctctc

SEQ ID NO: 18173 - DNA, 110 bp, synthetic construct
  source 1..110: mol_type = other DNA
tagctgggttggctgccaagtggtgtatgacccaagtaaatcttggtgccctctcccctccagcctcaggcacttatatttgctgaggtagcagtcatttacaccatagt

SEQ ID NO: 18174 - DNA, 110 bp, synthetic construct
  source 1..110: mol_type = other DNA
gtgagctctgggtttggtgagcgtgtggttgaatgaattgatgggcggcacgttgtccatcacagggacccctgaaggagggttttgtcacccctgtgtcgaaagggctg

SEQ ID NO: 18175 - DNA, 110 bp, synthetic construct
  source 1..110: mol_type = other DNA
ccgtgttttatccaaatatgctgtggactttggaatgaactcttactcctccttcctgctgacccgactgcaaatcagctttggatggggttggacagttgggagagatg

SEQ ID NO: 18176 - DNA, 110 bp, synthetic construct
  source 1..110: mol_type = other DNA
ctgctgacccgactgcaaatcagctttggatggggttggacagttgggagagatgggcagccatcacactgaaatatgatgacaggggcaagactgtgaggctgtcctcc

SEQ ID NO: 18177 - DNA, 110 bp, synthetic construct
  source 1..110: mol_type = other DNA
agtcaattttgtttccactgctccacaatgggaactccctccagctattcttaatgtgcaaaatgttttctttctctgagcctgaaattgtccaggctccaacaccccta

SEQ ID NO: 18178 - DNA, 110 bp, synthetic construct; identical to SEQ ID NO: 18177
  source 1..110: mol_type = other DNA

SEQ ID NO: 18179 - DNA, 110 bp, synthetic construct
  source 1..110: mol_type = other DNA
atattatcaaatactccattgccaatgcttaatggtaagtaaaacatacttggctacattcgaagtcttgaagggaaatatgaccatttaaacaggcagatataaataga

SEQ ID NO: 18180 - DNA, 110 bp, synthetic construct; identical to SEQ ID NO: 18179
  source 1..110: mol_type = other DNA

SEQ ID NO: 18181 - DNA, 110 bp, synthetic construct; identical to SEQ ID NO: 18179
  source 1..110: mol_type = other DNA

SEQ ID NO: 18182 - DNA, 110 bp, synthetic construct; identical to SEQ ID NO: 18179
  source 1..110: mol_type = other DNA

SEQ ID NO: 18183 - DNA, 110 bp, synthetic construct
  source 1..110: mol_type = other DNA
taatcctcaggtcaaggtttttttaaaaaatgagccagtgatcactgtattatttattggttctgaaggaagcctacatcacaccggggatagtgggacactggggagtg

SEQ ID NO: 18184 - DNA, 110 bp, synthetic construct
  source 1..110: mol_type = other DNA
attggttctgaaggaagcctacatcacaccggggatagtgggacactggggagtgtttaataacttgaccaccagggagaaagaagcccctgatttgtagcatctgccaa

SEQ ID NO: 18185 - DNA, 110 bp, synthetic construct
  source 1..110: mol_type = other DNA
ctgtgactgcgaccttatttggaaggagggtcattgcagatgtaattggttgtgttaagatgaggtcattagggggctcttactccagctgtgactcatgtccttacaag

SEQ ID NO: 18186 - DNA, 110 bp, synthetic construct
  source 1..110: mol_type = other DNA
taagatgaggtcattagggggctcttactccagctgtgactcatgtccttacaaggagaggggattagcacctggacacagacccacggggagagaaagccgtgtgacga

SEQ ID NO: 18187 - DNA, 110 bp, synthetic construct
  source 1..110: mol_type = other DNA
tgcagcagaagaaccacccagctgatcccaggccacgcagagtcataagcagatgaggcattgacaaatgttcagatacccttccagatatgggtcctgcaggcaaaacc

SEQ ID NO: 18188 - DNA, 110 bp, synthetic construct
  source 1..110: mol_type = other DNA
tatacctcctgttcatgataaatgccacaaaaggaaatctaggcagaatgacaatttaaattgtatcccttctggtcctaatgcggacagaaaactttgtgcttcataat

SEQ ID NO: 18189 - DNA, 110 bp, synthetic construct
  source 1..110: mol_type = other DNA
ttaaattgtatcccttctggtcctaatgcggacagaaaactttgtgcttcataattttgaaagcggagggtgtcatccactaccattttccaagaaggctgtataagtgt

SEQ ID NO: 18190 - DNA, 110 bp, synthetic construct
  source 1..110: mol_type = other DNA
acaaagatgaagacaaagctgagaacaaacccgtaccccccacaggtaaccctcgcccccagcaggggctccggacactgggtatcttaagggatgatgagcctctgact

SEQ ID NO: 18191 - DNA, 110 bp, synthetic construct
  source 1..110: mol_type = other DNA
cccccagcaggggctccggacactgggtatcttaagggatgatgagcctctgactgcacgtgggagtctccctgcctggacgtccctctgggatgtcccgcccacagggc

SEQ ID NO: 18192 - DNA, 110 bp, synthetic construct
  source 1..110: mol_type = other DNA
tgtagtagagtgtgagcacaagcatggggtggaaccacaggaaatcgctgacattcctcggttttagaccaacctgcgaaaagggcacttccctgggagtcgaagcgagg

SEQ ID NO: 18193 - DNA, 110 bp, synthetic construct
  source 1..110: mol_type = other DNA
cctcggttttagaccaacctgcgaaaagggcacttccctgggagtcgaagcgaggaggaggagcgtcatcgccagctgattttattgcatcagctccagtgagctcctgc

SEQ ID NO: 18194 - DNA, 110 bp, synthetic construct
  source 1..110: mol_type = other DNA
ttccacggtgaaaattgtttttgttcagaactttaaagatgctgttccattctcatcagtcttccatagcttctgaggtcaggcactaactggatttagttccctcgcat

SEQ ID NO: 18195 - DNA, 110 bp, synthetic construct
  source 1..110: mol_type = other DNA
tcagtcttccatagcttctgaggtcaggcactaactggatttagttccctcgcatcgtttctcttttgcggcttttttgaggttttctctttacctttggttttcagaat

SEQ ID NO: 18196 - DNA, 110 bp, synthetic construct
  source 1..110: mol_type = other DNA
gattagacgtaagacaagcagcccgagacacaggccaccgccatgcttttacagctcagattttctagcttcctaccaccactgtggaagagaaaaaaactgctctcaat

SEQ ID NO: 18197 - DNA, 110 bp, synthetic construct
  source 1..110: mol_type = other DNA
tcagattttctagcttcctaccaccactgtggaagagaaaaaaactgctctcaattccctgagacatgtgttcttgcacataaattggcatttaggctcaattagatact

SEQ ID NO: 18198 - DNA, 110 bp, synthetic construct
  source 1..110: mol_type = other DNA
gggagagcagttgcaggtcaacaagtttgaaagccttggctgaattctctcctcaaatttcttactgcattttctgggtcccgtcacccccagctccaatgaggaacccc

SEQ ID NO: 18199 - DNA, 110 bp, synthetic construct
  source 1..110: mol_type = other DNA
aatttcttactgcattttctgggtcccgtcacccccagctccaatgaggaaccccctgtcctggggcagtcaggttccccaagccagccagaaagcaggggaaagttcag

SEQ ID NO: 18200 - DNA, 110 bp, synthetic construct
  source 1..110: mol_type = other DNA
tctcagatgattttgcccaactgttagtaagtgttctgagcacattgaaggcaagctaggctaagctatgatatttaacacagcgtattaaatggatttttgatttacac

SEQ ID NO: 18201 - DNA, 110 bp, synthetic construct
  source 1..110: mol_type = other DNA
ggcgcctttgaattagccacagcactagggaaacactagctattctcaaggaatgtgattgtgctgttgttttttattgggatatgttgcacataacctgaaaaacctca

SEQ ID NO: 18202 - DNA, 110 bp, synthetic construct
  source 1..110: mol_type = other DNA
cttctgccacaggagggcagacaccagcacaaataaaaggtgtgattttcccatgcaaagactcactgagaaaggcccaaatcaaagcgaagatttttaatcccaatcga

SEQ ID NO: 18203 - DNA, 110 bp, synthetic construct
  source 1..110: mol_type = other DNA
cctaactagccatgtggtctcaagcacatcatttcatctctctggatccgagtcttgcagctgttttaaaaatcaggagggtgtccactgctggctcagcaggttaagga

SEQ ID NO: 18204 - DNA, 110 bp, synthetic construct
  source 1..110: mol_type = other DNA
aagaaatgccttaacccctccatggttcagtttcttcacctgcaaaatgtaaacaatactgctctcttccttatgcgtttgtgtgggctgagtgaattaatatccattac

SEQ ID NO: 18205 - DNA, 110 bp, synthetic construct
  source 1..110: mol_type = other DNA
atactgctctcttccttatgcgtttgtgtgggctgagtgaattaatatccattacccacagtggcagccacaaaataaatggtcagtaaatgtttgccaaagttatggta

SEQ ID NO: 18206 - DNA, 110 bp, synthetic construct
  source 1..110: mol_type = other DNA
agggatcaaaccaaagacctcatggatgatagtcaggttcattaccactgagccacattgggaactctgggtcttttggttcttagtgggcattttgctgttttctggaa

SEQ ID NO: 18207 - DNA, 110 bp, synthetic construct; identical to SEQ ID NO: 18206
  source 1..110: mol_type = other DNA

SEQ ID NO: 18208 - DNA, 110 bp, synthetic construct
  source 1..110: mol_type = other DNA
gcagtataactcaagcaattggggagaaattgtgcatttagtttatcctgctatagtttgttgccaagctttccaatacagagtcatctattttttcttattcttgcttt

SEQ ID NO: 18209 - DNA, 110 bp, synthetic construct
  source 1..110: mol_type = other DNA
acagtcctactaagctgtgagagggtgtggtataataaaaatgtatatgtattcggcctctgtccccagttcctggcacagagctcctaggacctttgggatttcctgag

SEQ ID NO: 18210 - DNA, 110 bp, synthetic construct
  source 1..110: mol_type = other DNA
agagaagttgagctccagtccttctattccaccatcttaatcctgcccctcccgacacagaactttaaatggcaaaagagaatggctctccctgcatcttacatgcctgc

SEQ ID NO: 18211 - DNA, 110 bp, synthetic construct
  source 1..110: mol_type = other DNA
gtgtaaccgagtcactctgttgtacagcagaaatgatcacaacttgtaaatcagctctacttcgataaaattttctaatatggggaaaaaaaggaaagagattcacaaag

SEQ ID NO: 18212 - DNA, 110 bp, synthetic construct; identical to SEQ ID NO: 18211
  source 1..110: mol_type = other DNA

SEQ ID NO: 18213 - DNA, 110 bp, synthetic construct
  source 1..110: mol_type = other DNA
ccctgaatgtgtacttacgaaataagtgacataaacctcctttggggtcacatgttacagtccataaaatatctcaagtatttctccagtaatcctgtggtggtcctttg

SEQ ID NO: 18214 - DNA, 110 bp, synthetic construct
  source 1..110: mol_type = other DNA
ttagcctgattattcctcactattgagaaaatactatcctgtttaatttatttaactgtgtgagtcttggcgtttcccagtctggtttttgcctaacttctggtggtttg

SEQ ID NO: 18215 - DNA, 110 bp, synthetic construct
  source 1..110: mol_type = other DNA
gtgttgactgctggcagtcctcttcaggtaactgcattttcgaaaccgtcaacaagggtacgtcatctgacaggtcccagtaggagggacagctgtctggtaaccttggg

SEQ ID NO: 18216 - DNA, 110 bp, synthetic construct
  source 1..110: mol_type = other DNA
gggtacgtcatctgacaggtcccagtaggagggacagctgtctggtaaccttgggtcactgtcatcatttctttcattgaaattgtggttgaaagacaccctagactctc

SEQ ID NO: 18217 - DNA, 110 bp, synthetic construct
  source 1..110: mol_type = other DNA
aagaatatgaacctactaggtggttctttgatttcagattcctagcttggataacaggaatttcacatctctaaaatctttgaaagtgaggtttttaaaacgataatctt

SEQ ID NO: 18218 - DNA, 110 bp, synthetic construct; identical to SEQ ID NO: 18217
  source 1..110: mol_type = other DNA

SEQ ID NO: 18219 - DNA, 110 bp, synthetic construct
  source 1..110: mol_type = other DNA
ggagggtagtcaggtggcgggaatgttctagaacctcaaagaaggaaaaagtgcgttcaaagcctgatgtaatgaggaagtgagaggccttgcgagtgtccgttgacaag

SEQ ID NO: 18220 - DNA, 110 bp, synthetic construct
  source 1..110: mol_type = other DNA
aaggcggcaggccctgctggctgccccctctgtgatgtgtccggtcaagctgagtggtgacctttgccctgggagagacgaggttgcagcttctgtcctttctcgaccga

SEQ ID NO: 18221 - DNA, 110 bp, synthetic construct
  source 1..110: mol_type = other DNA
ggtgacctttgccctgggagagacgaggttgcagcttctgtcctttctcgaccgagccagggtttgtactcgtgtgacccaagttctcccacgccaggcagccctggagt

SEQ ID NO: 18222 - DNA, 110 bp, synthetic construct
  source 1..110: mol_type = other DNA
ccagtggactgtgggagggcccctgacccagaagacaaggtccaggtggcttcctcggtgtcaggtggaaaaggtgagagcttcagggtcagaagggagctccatggagg

SEQ ID NO: 18223 - DNA, 110 bp, synthetic construct
  source 1..110: mol_type = other DNA
cggtgtcaggtggaaaaggtgagagcttcagggtcagaagggagctccatggaggaggaggtgtgggagagagagagattttacagcctttgcagtgcaaagcactgtgt

SEQ ID NO: 18224 - DNA, 110 bp, synthetic construct
  source 1..110: mol_type = other DNA
agaaatagggagagagctcacacctgggtaccacgtcacagctacagaacagacgtatgtgcatgaccaaagagtttccgaggctcttcattcagttgtgctaaagggcc

SEQ ID NO: 18225 - DNA, 110 bp, synthetic construct
  source 1..110: mol_type = other DNA
tttgtcagggctcattggttagaacttagttcagggaggttctcagagccgcacgtgggtggagctccgaggaggcattccaggcagtccctgggttttgtttttttcca

SEQ ID NO: 18226 - DNA, 110 bp, synthetic construct
  source 1..110: mol_type = other DNA
aacactttctcccaaatcctcaccagaggggaaaatatgtggaaaaatgaagaacatttcacaccccaacgtaccttaagctctttcactgctacgaggtctttgaaggc

SEQ ID NO: 18227 - DNA, 110 bp, synthetic construct
  source 1..110: mol_type = other DNA
atcttgagggttaaaaagggctctaaaagttgtttatatatttggctaaagcatggactcaaatatagcctagactaaatgacgttgaaatgccttggtatcgtagagga

SEQ ID NO: 18228 - DNA, 110 bp, synthetic construct
  source 1..110: mol_type = other DNA
gactcaaatatagcctagactaaatgacgttgaaatgccttggtatcgtagaggaaggtaaccagaggcttaggatagactgaaatgtttgagagaaattatcgtagaag

SEQ ID NO: 18229 - DNA, 110 bp, synthetic construct
  source 1..110: mol_type = other DNA
tccatcccactttctccttccaccctccccacccacaccccaggaaccatgaggctgctctccatgcctgtgatctgtttctgttttgtagataagatcatttgcgccaa

SEQ ID NO: 18230 - DNA, 110 bp, synthetic construct
  source 1..110: mol_type = other DNA
ggttagctcataattgttctccagttacctcatctgtgattaatttttcttcagcttgaatttaaccccttcttgggggaagaccccggggctctgtgttctaagtaaat

SEQ ID NO: 18231 - DNA, 110 bp, synthetic construct
  source 1..110: mol_type = other DNA
acaggtagattcttgtatctttggagcaggttgtacttcccagaggcagagtgtgaggcagggattcaggagcccttgttttagagaggtcaccatcttagaagagacat

SEQ ID NO: 18232 - DNA, 110 bp, synthetic construct
  source 1..110: mol_type = other DNA
aggcagggattcaggagcccttgttttagagaggtcaccatcttagaagagacatgcaagatactgaaggggaagatgctaagcatcaaagggaaagatgcttcagcctg

SEQ ID NO: 18233 - DNA, 110 bp, synthetic construct
  source 1..110: mol_type = other DNA
tttattttggctttaagaaaaggggagtgcttctacataaagcgtgttctttttaccacaacttcaccaacaatcaaaattattactaattattactgaaagaaactctg

SEQ ID NO: 18234 - DNA, 110 bp, synthetic construct; identical to SEQ ID NO: 18233
  source 1..110: mol_type = other DNA

SEQ ID NO: 18235 - DNA, 110 bp, synthetic construct
  source 1..110: mol_type = other DNA
gggacacatattagataatttatcaaattagagattgtgtctttacacaccaaggtggccgggttgaaggaaaaggctgcatttgtataagagcagagacactgcaagct

SEQ ID NO: 18236 - DNA, 110 bp, synthetic construct
  source 1..110: mol_type = other DNA
agcaaagtagatgcatattcactgaattaacaaataattcgtgtgccagctctattgcagctgctgtcgtgtttgctaagcatctagtacaacatggccctgtgcaagca

SEQ ID NO: 18237 - DNA, 110 bp, synthetic construct
  source 1..110: mol_type = other DNA
atcttcagaacacttcccatctcctgccgtccttcagttctcacggatggcccttactctgcattttcatcaggtcacacccggggctgtgaattgagctgtgtccacca

SEQ ID NO: 18238 - DNA, 110 bp, synthetic construct
  source 1..110: mol_type = other DNA
actctgcattttcatcaggtcacacccggggctgtgaattgagctgtgtccaccaaaaagatatgcccaggtcctagcctgccatgcctgtgcgtgggccctatttggaa

SEQ ID NO: 18239 - DNA, 110 bp, synthetic construct
  source 1..110: mol_type = other DNA
ctcagggttgagcgtgagcgacagcgccccctggtgcacagctcagctatgccaggatggagctcctatagggggcaggactgctagatgaaggatgttgagtgttctac

SEQ ID NO: 18240 - DNA, 110 bp, synthetic construct
  source 1..110: mol_type = other DNA
gatggagctcctatagggggcaggactgctagatgaaggatgttgagtgttctactgggcaggcctgcaacacatgacaatggggagcagagtcaccccaccgccttggg

SEQ ID NO: 18241 - DNA, 110 bp, synthetic construct; identical to SEQ ID NO: 18239
  source 1..110: mol_type = other DNA

SEQ ID NO: 18242 - DNA, 110 bp, synthetic construct; identical to SEQ ID NO: 18240
  source 1..110: mol_type = other DNA

SEQ ID NO: 18243 - DNA, 110 bp, synthetic construct
  source 1..110: mol_type = other DNA
caggaggagcgcagggaggggcaggaccagggttcctcagtgacgctgcaccttcctcgggtccaggctcggaaccggggtacgttctttccaattcccatcctgctgcc

SEQ ID NO: 18244 - DNA, 110 bp, synthetic construct
  source 1..110: mol_type = other DNA
ctcgggtccaggctcggaaccggggtacgttctttccaattcccatcctgctgcccctggcttggcgatcacggaaggatccagagacatgactcttcagggtccatgaa

SEQ ID NO: 18245 - DNA, 110 bp, synthetic construct
  source 1..110: mol_type = other DNA
acactatcatcactgggtctgacaataggacgaggtcagagagggaggctcagcggggagagatggaggctggagagctggactgaaagctgagtgtacctcctcctggc

SEQ ID NO: 18246 - DNA, 110 bp, synthetic construct
  source 1..110: mol_type = other DNA
ttagagaatcagagtctgtatcttaactggacccccaagtgattcaggtaaaaatgaaagttggagaagctccactctggacgttttcccagtaaccttctgaagccagg

SEQ ID NO: 18247 - DNA, 110 bp, synthetic construct
  source 1..110: mol_type = other DNA
gaaagttggagaagctccactctggacgttttcccagtaaccttctgaagccagggggtgccagttctttgataaggaccaatatattcctttccatgatttcattcctt

SEQ ID NO: 18248 - DNA, 110 bp, synthetic construct
  source 1..110: mol_type = other DNA
agacatgcttcattaaggcagctgtgcggccaacaccaggtcacacactggtttgtgtctggtcggtgctcacacttgctccattttgctgcctcaggcagcaccatgct

SEQ ID NO: 18249 - DNA, 110 bp, synthetic construct
  source 1..110: mol_type = other DNA
ctcacagaagaaacactggacagtcccttcagctactcttccatggcataaccttgggctccttcattcctctcatctctattaggcttgttctagctaacccatgtgcc

SEQ ID NO: 18250 - DNA, 110 bp, synthetic construct
  source 1..110: mol_type = other DNA
gggctccttcattcctctcatctctattaggcttgttctagctaacccatgtgcctcggcaagtgtgtgtccagaagtgatgttgaatccagtcaaaagagcataaataa

SEQ ID NO: 18251 - DNA, 110 bp, synthetic construct
  source 1..110: mol_type = other DNA
cagagagctattgccccaaaccaatctataaaccattattcaatgcaaggaatttctagagtcaagtctgctaagataactatatcagtctctcctgttttcctccagat

SEQ ID NO: 18252 - DNA, 110 bp, synthetic construct
  source 1..110: mol_type = other DNA
ctagagtcaagtctgctaagataactatatcagtctctcctgttttcctccagatctctccacagtcttctaaaatcctctgtcaaaaccgtggtgatcagagggcattt

SEQ ID NO: 18253 - DNA, 110 bp, synthetic construct
  source 1..110: mol_type = other DNA
taaccaagcagaatctgcttcatcacatacctgctcatgccgtgagacatcttttagccactttctcttgactcataaaccactggtccatggcataagaagccaggtta

SEQ ID NO: 18254 - DNA, 110 bp, synthetic construct
  source 1..110: mol_type = other DNA
agccactttctcttgactcataaaccactggtccatggcataagaagccaggttaccttggtaagcatttttcacagagtatccccttaaatcctatttcactgatttta

SEQ ID NO: 18255 - DNA, 110 bp, synthetic construct
  source 1..110: mol_type = other DNA
ctttgaagactgttggcccaaaactccaacagtgcctcctgttgggaagagcagggtctacacagctcatcaaagaacgacatatttcaagaattgttagaaagcaaagt

SEQ ID NO: 18256 - DNA, 110 bp, synthetic construct
  source 1..110: mol_type = other DNA
gtctacacagctcatcaaagaacgacatatttcaagaattgttagaaagcaaagtctcattctttctggatagatccaatcacactaaggatttctgttttaccctgtct

SEQ ID NO: 18257 - DNA, 110 bp, synthetic construct
  source 1..110: mol_type = other DNA
aaaaagcagtgatagaatcactctaaagaatcactctatatagataattaaggagcagttcaggcttccagaacattctctcgagcctcacggtcctacataagcgtatg

SEQ ID NO: 18258 - DNA, 110 bp, synthetic construct
  source 1..110: mol_type = other DNA
cagttcaggcttccagaacattctctcgagcctcacggtcctacataagcgtatgtcatggggaaaatgacccccaacctccaccctttccaagtcttctttccatggtc

SEQ ID NO: 18259 - DNA, 110 bp, synthetic construct
  source 1..110: mol_type = other DNA
gaactggagcgacaggggctgacctagggtcttaaccggccactttggctgccgggagaacaggcccaggaaaggttagagcagaagggaggctggtgagaagacaaaca

SEQ ID NO: 18260 - DNA, 110 bp, synthetic construct
  source 1..110: mol_type = other DNA
cttcccccctttcgggctgatactacttgccccgacttggaccttcagaacaccccagagagtagctctggctggtctcttccgttgtcccttcaagcctgagagcattc

SEQ ID NO: 18261 - DNA, 110 bp, synthetic construct
  source 1..110: mol_type = other DNA
tctttgattcccctgaaaataatctttacattgtacctacagttaacaatcccgtactgtgcacttaaaaagctgttaagagcgcagacctcatgttaaatagtttaata

SEQ ID NO: 18262 - DNA, 110 bp, synthetic construct
  source 1..110: mol_type = other DNA
actgtgcacttaaaaagctgttaagagcgcagacctcatgttaaatagtttaataataacgtcttcagtgcttaatagaggaaattattttctccgttttccttctcttc

SEQ ID NO: 18263 - DNA, 110 bp, synthetic construct
  source 1..110: mol_type = other DNA
gcacgtgagggttaagcccgctgaccctccgccctcactggccgcgtgacaccagtcaagtcccttctctgtccctccggtttgccaacgatcaagtaagaattaaatta

SEQ ID NO: 18264 - DNA, 110 bp, synthetic construct
  source 1..110: mol_type = other DNA
tcaagtcccttctctgtccctccggtttgccaacgatcaagtaagaattaaattatcccaagcgccctggatggctgggcccacgaagtgagtgaccagttctgagaacg

SEQ ID NO: 18265 - DNA, 110 bp, synthetic construct
  source 1..110: mol_type = other DNA
agggacggtccctttactgacacattgcacgtctttgatgagctcagaggacctcactggtttgagagaagagacggtgtgtgtccctcggccactggccatttcctctt

SEQ ID NO: 18266 - DNA, 110 bp, synthetic construct
  source 1..110: mol_type = other DNA
tttgcccacccccacccccagttgcctccactgtcagcctcagcccgtctggctccatcccagcagaaagcgccactggaagttctcggtccaccttctgtagctggagg

SEQ ID NO: 18267 - DNA, 110 bp, synthetic construct
  source 1..110: mol_type = other DNA
catcccagcagaaagcgccactggaagttctcggtccaccttctgtagctggaggtgctgttgtggcagaaaccgtgcagccgaaagagacaagtggactcagagatgca

SEQ ID NO: 18268 - DNA, 110 bp, synthetic construct
  source 1..110: mol_type = other DNA
tctggatatttcttccaagttgtatgcctctccatggacccccaaaagccttctctcctgctcagctctgcacgttgggccctcctgccagctactttccagttggcttt

SEQ ID NO: 18269 - DNA, 110 bp, synthetic construct
  source 1..110: mol_type = other DNA
ctcctttaccttttaaaataatacataggtttgattttctgacttgaaagcattccgaagcatacagagtgactgcctagacagcttagccaagcataaaacaattcgtt

SEQ ID NO: 18270 - DNA, 110 bp, synthetic construct
  source 1..110: mol_type = other DNA
aaatgcacagctaagcagcacgtcaaagagacatattttgagcttgtgtactcagcgcaggaggatgtgggacccggcgagagggtttggtctcaggcagtggttttccc

SEQ ID NO: 18271 - DNA, 110 bp, synthetic construct
  source 1..110: mol_type = other DNA
gcaggggtgtgtctgaaagcatctttatgtggatatagataacggcaatatcattccagaccactgtgctatgggctgaaccgtgtccccctcagcttcagatgctgaag

SEQ ID NO: 18272 - DNA, 110 bp, synthetic construct
  source 1..110: mol_type = other DNA
ccagaccactgtgctatgggctgaaccgtgtccccctcagcttcagatgctgaagtcttaacccttggtaactcagaagctgactgcatttggagatgggatcttgacaa

SEQ ID NO: 18273 - DNA, 110 bp, synthetic construct
  source 1..110: mol_type = other DNA
tattttttttatttccctagttgtgtttgtttaagggaaattcagctgagtgtttctcagtccaaatgttgaatttccattacgaagggggggtgacatgggaaacgttc

SEQ ID NO: 18274 - DNA, 110 bp, synthetic construct
  source 1..110: mol_type = other DNA
tgtgagtggggttagtgcccttataaaaagacctcaggagttccctggtggcctagcagctaagggcccggcattgtcactgccatggctcacgtcattgtcatggcaca

SEQ ID NO: 18275 - DNA, 110 bp, synthetic construct
  source 1..110: mol_type = other DNA
aggagttccctggtggcctagcagctaagggcccggcattgtcactgccatggctcacgtcattgtcatggcacaggttctattcctggcctgggaatttctgcatgctg

SEQ ID NO: 18276 - DNA, 110 bp, synthetic construct
  source 1..110: mol_type = other DNA
agggagagacactttcctcttatttgacaagtgcagaaactgagggactccattcctatgtggggcggggtggggggagccaggtcggcacctgctccacattctgagct

SEQ ID NO: 18277 - DNA, 110 bp, synthetic construct
  source 1..110: mol_type = other DNA
ctatgtggggcggggtggggggagccaggtcggcacctgctccacattctgagctctcattcctcccccacacctttcttctgtgtagcagagagagagagagagagaga

SEQ ID NO: 18278 - DNA, 110 bp, synthetic construct
  source 1..110: mol_type = other DNA
caccgctgctctcctctgttcagggcagcatagctgcagaagatcagctatgaaatgagaccgaattccagcccagaggcttttcagtggactcccaggccagtctgata

SEQ ID NO: 18279 - DNA, 110 bp, synthetic construct
  source 1..110: mol_type = other DNA
acaagaaaggaagctgagagtatggttcagcggtctataagcacagcatcaacagaaactaaaataaaataatctgagtcatatttaaatgggagaattttctagacttg

SEQ ID NO: 18280 - DNA, 110 bp, synthetic construct
  source 1..110: mol_type = other DNA
ctgcacgtccagagtgatgcctgtaaagcactttgaacaaagctagctcccaacgtgatgcgatctccaaaaaatggttacttttctcttcattccctcatctctgaaga

SEQ ID NO: 18281 - DNA, 110 bp, synthetic construct
  source 1..110: mol_type = other DNA
tatattgattcatactgagatgttctgattttgacactttccttccatgtattaatagacaaattcagctgccaattgttagtgccctttttgagagctgcccaaagggt

SEQ ID NO: 18282 - DNA, 110 bp, synthetic construct
  source 1..110: mol_type = other DNA
atgttgcccccagtaaaacttaactcgccgcctcgaagttgtgcatgatttttaagtggatgtggctgtcgagcttcagagtgtaagacaagtttggtggctcgctgagg

SEQ ID NO: 18283 - DNA, 110 bp, synthetic construct
  source 1..110: mol_type = other DNA
gtggatgtggctgtcgagcttcagagtgtaagacaagtttggtggctcgctgaggctggcatgctagtttgtggcagggacctcctcttaggtccctacctgggctgagt

SEQ ID NO: 18284 - DNA, 110 bp, synthetic construct
  source 1..110: mol_type = other DNA
gtgcaagctagaggcggaaggaactaaggtttattgaagagccacgtgttaggcgaggtcctttatatgtgggtgtctcatttaatacagcccttttaagggcaggagcc

SEQ ID NO: 18285 - DNA, 110 bp, synthetic construct
  source 1..110: mol_type = other DNA
ccagtgctttggccactgtctgttcccactggggggcccccatgacatgaaacggtaaaagggtttgaacataactcctggcaaaaagttaggcttaaaatagaaatgtt

SEQ ID NO: 18286 - DNA, 110 bp, synthetic construct
  source 1..110: mol_type = other DNA
agtgtcaccctcagctgcagggccctcggctcaccctcggccatgattctccttcatctgctctttgctctttcggggagtttttttggggggctgcacgtgcagcatat

SEQ ID NO: 18287 - DNA, 110 bp, synthetic construct
  source 1..110: mol_type = other DNA
aaatgaagtcgtttgccgtgtgcatggagcaaaaatacccaacgcgcccaaccgctttgcgggtgagctcatcctcagatgctgtgtcaaccaagcgtttgtcttcatgt

SEQ ID NO: 18288 - DNA, 110 bp, synthetic construct
  source 1..110: mol_type = other DNA
agaatacgaggaggaaggagttaaaactgttttgagacaggattctgattatacgaagctgtcaaccttgtcattaggtgtgagagcactttttactctacagatattct

SEQ ID NO: 18289 - DNA, 110 bp, synthetic construct
  source 1..110: mol_type = other DNA
aagctgtcaaccttgtcattaggtgtgagagcactttttactctacagatattctttgttaatttttcctgttcttcctaatacctgtggggaaaacggccaatgaggat

SEQ ID NO: 18290 - DNA, 110 bp, synthetic construct
  source 1..110: mol_type = other DNA
atgcctgaaggtggccttaccccaggggttttaatgcattgtattgatgcataacacccgcgcagaaaatacacacgttataaaaggacaggttgatgaagttttacacg

SEQ ID NO: 18291 - DNA, 110 bp, synthetic construct
  source 1..110: mol_type = other DNA
acccgcgcagaaaatacacacgttataaaaggacaggttgatgaagttttacacggagcacctttgtgtgtcaccagggagcccaagggcacttcacaggtgcttcattc

SEQ ID NO: 18292 - DNA, 110 bp, synthetic construct
  source 1..110: mol_type = other DNA
ggttcaaatgcagaaaatatgattcgttatatccaaaatgcattaggcgagtatgtacctaaacaggaccattttctggcctatgccgatgcagcctcaaaggagaagta

SEQ ID NO: 18293 - DNA, 110 bp, synthetic construct
  source 1..110: mol_type = other DNA
tacctaaacaggaccattttctggcctatgccgatgcagcctcaaaggagaagtactaggacgtgcttgggcggtggtgtccccaataaggacgtctgttccccccgttt

SEQ ID NO: 18294 - DNA, 110 bp, synthetic construct
  source 1..110: mol_type = other DNA
gcgtgccttcaggggttcttctccgtggggacctttcaggatggggacaggcaggccatctggccaaagtcagccttggaagggaaggggaggaaagggttgcattgcgg

SEQ ID NO: 18295 - DNA, 110 bp, synthetic construct
  source 1..110: mol_type = other DNA
ccatctggccaaagtcagccttggaagggaaggggaggaaagggttgcattgcggggccgcgagaaagccttgcctgtaaaactgcaattgcagttaatcagagtaaagc

SEQ ID NO: 18296 - DNA, 110 bp, synthetic construct
  source 1..110: mol_type = other DNA
ttggttgttttccattcgttccctccaccctccttcaagagcgtcctgggttgttttctagtctttgctggtaagaatggaatcccttcaggatgcagagctttgggtcc

SEQ ID NO: 18297 - DNA, 110 bp, synthetic construct
  source 1..110: mol_type = other DNA
ttctagtctttgctggtaagaatggaatcccttcaggatgcagagctttgggtccttaataatcaggaaagggatgctgcaaaacgctctgggctctagcttggttttgt

SEQ ID NO: 18298 - DNA, 110 bp, synthetic construct
  source 1..110: mol_type = other DNA
gggataggagctcctcgctggccagtgggggtcacatgcccagtctgtagctgtcccaggagcatgctggccttggcatccaccaagaccacccaactgtgttaagactc

SEQ ID NO: 18299 - DNA, 110 bp, synthetic construct
  source 1..110: mol_type = other DNA
ccaggagcatgctggccttggcatccaccaagaccacccaactgtgttaagactcccaggaagcgaaacccccagcgatgtgccctgctgcgttgcaaccgagtcgtaaa

SEQ ID NO: 18300 - DNA, 110 bp, synthetic construct
  source 1..110: mol_type = other DNA
tgttttaagtttcctgaaggatgaggggcctggtgggtcttcagaatgactgaagaaaaagcaagtaagtcgttagctctcaggattaactgcttgatggaaagaatggg

SEQ ID NO: 18301 - DNA, 110 bp, synthetic construct
  source 1..110: mol_type = other DNA
aaaaagcaagtaagtcgttagctctcaggattaactgcttgatggaaagaatgggtgtggtgtattcagatagcagaggggtttctgtctctgtagtgaggcgggttcta

SEQ ID NO: 18302 - DNA, 110 bp, synthetic construct
  source 1..110: mol_type = other DNA
catgtctatgagcctggttgaagcctttaatacatcctgtaggtcccccacaacgcctgagcatgatgagagtctagtcactagatacactttgcagacaacatccccca

SEQ ID NO: 18303 - DNA, 110 bp, synthetic construct
  source 1..110: mol_type = other DNA
tgagctactagaaatgttctttagtaatttctataaaacgagatatttacccagtcgtggccgaatccatttccagatccctttcgatactgagctcaatggatgaacgt

SEQ ID NO: 18304 - DNA, 110 bp, synthetic construct
  source 1..110: mol_type = other DNA
gccagggatcgaaccttcacccacaaggacactatatggcgttcttaacctgctgagccccaacgggaacaccagccttcattttcttgttgagacagattcgtagtcaa

SEQ ID NO: 18305 - DNA, 110 bp, synthetic construct; identical to SEQ ID NO: 18304
  source 1..110: mol_type = other DNA

SEQ ID NO: 18306 - DNA, 110 bp, synthetic construct
  source 1..110: mol_type = other DNA
atatcctataatccagtctactttcttttccaagaagttgaggcatataatctttcattaatggattgctggtgcccttttaaataccagcactcttacaaacaagattt

SEQ ID NO: 18307 - DNA, 110 bp, synthetic construct; identical to SEQ ID NO: 18306
  source 1..110: mol_type = other DNA

SEQ ID NO: 18308 - DNA, 110 bp, synthetic construct
  source 1..110: mol_type = other DNA
ctgctgagccaccagggaactcccaatggctttccctgtaagtgcagctatagcccagtttagaaacacaatgtggagttcccactgtggctcaatggaaacaaacccaa

SEQ ID NO: 18309 - DNA, 110 bp, synthetic construct
  source 1..110: mol_type = other DNA
tgataacaggtaatttattttacatgaagtcctcataaatcttcttagggacctgacctatcaaagctatgctcagccctacaacggcccgatgtcatatgactctgata

SEQ ID NO: 18310 - DNA, 110 bp, synthetic construct
  source 1..110: mol_type = other DNA
ggaggggggagcctgtgtgagacagaatctctgggtctgccctgttccctgggcagctctccttgcttcctgtcaagccctatgaaacgcaacggaagagatgctttcca

SEQ ID NO: 18311 - DNA, 110 bp, synthetic construct
  source 1..110: mol_type = other DNA
gctctccttgcttcctgtcaagccctatgaaacgcaacggaagagatgctttccacagcaacctcagagcaaataaaacttcagaagccatggttatgacgcagcaaggg

SEQ ID NO: 18312 - DNA, 110 bp, synthetic construct
  source 1..110: mol_type = other DNA
acgatagcaaaaaattaaaatgtgtcagtgaggagtgaggaagctggacctttcgtttgttacccataaggagattctcacaaataacttactctttctacgtgaaatac

SEQ ID NO: 18313 - DNA, 110 bp, synthetic construct
  source 1..110: mol_type = other DNA
tgagcaattccagcatacataaaagtcttgttcttcaagtccagatctataaatagccctccagttttcatgctgtgccctggagtgggggtatgggtagggggatggat

SEQ ID NO: 18314 - DNA, 110 bp, synthetic construct
  source 1..110: mol_type = other DNA
tggtctttccctgacttacttcacttcgtgtgataatctctaggtccatccatcgtttccttttaataaaggccaccaactgacaatctgttactcttgtctcttcaaca

SEQ ID NO: 18315 - DNA, 110 bp, synthetic construct
  source 1..110: mol_type = other DNA
tcgtagctttaactgccccccctccacagctcttctttcattcggaaggtcctcatataggagaaatgttctctcctggggaaaatttttctcccaggaaatatgtgacg

SEQ ID NO: 18316 - DNA, 110 bp, synthetic construct
  source 1..110: mol_type = other DNA
aaaaatatccccggtcatgtttatcctgggaagggataggaatgtcaactcctgagtgcacagactcagctgaggagctggtgaccaagattcactagctgtagggtgta

SEQ ID NO: 18317 - DNA, 110 bp, synthetic construct
  source 1..110: mol_type = other DNA
cagcagactttttccaaagtagatgaaaaaaaccccagaatgtgacctaaactaggacatttactcattcatttagcaaatatttattgagctcttgctaagggctagga

SEQ ID NO: 18318 - DNA, 110 bp, synthetic construct
  source 1..110: mol_type = other DNA
gacatttactcattcatttagcaaatatttattgagctcttgctaagggctaggactgtgggcatatgagatactttggtgaacaaattaggtagaaatgctcctccttt

SEQ ID NO: 18319 - DNA, 110 bp, synthetic construct
  source 1..110: mol_type = other DNA
aatctttgtctccttctttacggctgctccccattgcctagcctcagttctcaagagacaagctccccgtctatttcacagaggaatcagaagttgcccatggaggtatg

SEQ ID NO: 18320 - DNA, 110 bp, synthetic construct
  source 1..110: mol_type = other DNA
aatccgcatgtggaatatggtctggggacgtctgttagttttctgtgttgcatgcaaattactacaaccttagtagctcaaagcaacaccatttgttatctcagtttctg

SEQ ID NO: 18321 - DNA, 110 bp, synthetic construct
  source 1..110: mol_type = other DNA
aaattactacaaccttagtagctcaaagcaacaccatttgttatctcagtttctgtggctcgggatttccagcacaacttacttgggttctctgctcagaggtctcacaa

SEQ ID NO: 18322 - DNA, 110 bp, synthetic construct
  source 1..110: mol_type = other DNA
tttaagatttaagtttcctccatgtcttttcatggcttgacggcacatttctttttagtgctgactaatattccatagtattgtggcccatggtttgtttatccattcac

SEQ ID NO: 18323 - DNA, 110 bp, synthetic construct
  source 1..110: mol_type = other DNA
tagtgctgactaatattccatagtattgtggcccatggtttgtttatccattcacctgctggaggacgacttggttgactccaggttttggtgcttaggaattaagttgc

SEQ ID NO: 18324 - DNA, 110 bp, synthetic construct
  source 1..110: mol_type = other DNA
atgatcttggtgaattgtcaggatgccagccagaccccaagagcttcgggatccagccccaaggatccaagcaggttgctggccaaggtgtctgagaggagggcagaggc

SEQ ID NO: 18325 - DNA, 110 bp, synthetic construct
  source 1..110: mol_type = other DNA
gagagacagaaaataggagatgggagctcaacaggagggtacagctacctgctagtcgtctccgggtaccaggtgagcacaggtgggcgtctaaccagaaactgctgccg

SEQ ID NO: 18326 - DNA, 110 bp, synthetic construct
  source 1..110: mol_type = other DNA
cgtactagtctctggaaaataactcctggtttggttaatcaatcagctcacgtaaggaaggaaaatcagtttaagctggtcaatgttttgcctgatatttcatcagtagt

SEQ ID NO: 18327 - DNA, 110 bp, synthetic construct
  source 1..110: mol_type = other DNA
ggaaggaaaatcagtttaagctggtcaatgttttgcctgatatttcatcagtagttctttatttcaaatgtcccgtttcccccaccatgtggcttctatctcctcactgg

SEQ ID NO: 18328 - DNA, 110 bp, synthetic construct
  source 1..110: mol_type = other DNA
gagtcatgcgggaccttgttaagtgtatgaatgccaggctctcacctgtggattggagattctttttttttaattgctggagtgattccaatgagcaaagcaatggcccc

SEQ ID NO: 18329 - DNA, 110 bp, synthetic construct
  source 1..110: mol_type = other DNA
gagattctttttttttaattgctggagtgattccaatgagcaaagcaatggcccccaagattcatttcagttcttcaatatttgtatttcttaattctgtgtttggttac

SEQ ID NO: 18330 - DNA, 110 bp, synthetic construct
  source 1..110: mol_type = other DNA
ttcgtggaggctgtgggactccagaacgaaacccttggggatattcaagaaaagtcactctagaggaatattttctagaagattaatgcttccattttccagtagtagtt

SEQ ID NO: 18331 - DNA, 110 bp, synthetic construct
  source 1..110: mol_type = other DNA
cactctagaggaatattttctagaagattaatgcttccattttccagtagtagttcatcagtgaacaaaggtcacacaagcaattaaataattataataatggcagctat

SEQ ID NO: 18332 - DNA, 110 bp, synthetic construct
  source 1..110: mol_type = other DNA
gatccttaacccactgagccaccagggaactcctgcctgtttttgtattgagttatttgtttccttatttttgcattttcagtcttctttatattcagaatacaaaccgt

SEQ ID NO: 18333 - DNA, 110 bp, synthetic construct
  source 1..110: mol_type = other DNA
tttgtttccttatttttgcattttcagtcttctttatattcagaatacaaaccgtctatcacacatgtgactcacaaatattttctcccagtcttttccatctcttaata

SEQ ID NO: 18334 - DNA, 110 bp, synthetic construct
  source 1..110: mol_type = other DNA
acgtaaaggccaggaaatgactatattaagggaagaagtaaaagctgtctgagacgtgagatcaagactgtttagtgccttgatcacacctcttaaccgctgggcgtgta

SEQ ID NO: 18335 - DNA, 110 bp, synthetic construct
  source 1..110: mol_type = other DNA
atgtgggagagatccagtgtgggaaagaggatacggacccggataatgcctaagtctccgttagcagcttcccttggagggaggacactgggccttgattgagagcgcgg

SEQ ID NO: 18336 - DNA, 110 bp, synthetic construct
  source 1..110: mol_type = other DNA
gccgtacttggtaggaacatgtcattgagaacccagcttctggcaaacacggagatttgcacatggaagcttggcccagaagcgtgactctccggggtcacagctcggct

SEQ ID NO: 18337 - DNA, 110 bp, synthetic construct
  source 1..110: mol_type = other DNA
tttgcacatggaagcttggcccagaagcgtgactctccggggtcacagctcggctcataaaaagcttgcatgaatacgtgcattgttttcaagggtgacctgttactagg

SEQ ID NO: 18338 - DNA, 110 bp, synthetic construct
  source 1..110: mol_type = other DNA
ttttagttccgtgttcaacataatggtacttcctaagctgtttacacaacagcaggggccgggggggagcataaaagagacataatctccttctcatccaaccagaacaa

SEQ ID NO: 18339 - DNA, 110 bp, synthetic construct
  source 1..110: mol_type = other DNA
caggtgcagcaggatgctgaataagtaatgcccaagggaagcactggtttttattactgagatggcctcgcccctgaaatccgaacagaatttcagaaatgatccaggag

SEQ ID NO: 18340 - DNA, 110 bp, synthetic construct
  source 1..110: mol_type = other DNA
actgagatggcctcgcccctgaaatccgaacagaatttcagaaatgatccaggaggggtacaaatatttaaggtgtatggacaaaactcacaagattttgctttcaagga

SEQ ID NO: 18341 - DNA, 110 bp, synthetic construct
  source 1..110: mol_type = other DNA
aagttactgttgggaccactgggcatgagtctacttgggttgcctgctagcttcacccactcgaactgaaaagccgaacttcaggccctagatctgtacgggagcaggac

SEQ ID NO: 18342 - DNA, 110 bp, synthetic construct
  source 1..110: mol_type = other DNA
atgcaaagcaagttgggatgccccagccagacactgaggtccctgactcaccagagcacagacctcaacacggtcctggccaacccagctacgacacccaagtggcttcc

SEQ ID NO: 18343 - DNA, 110 bp, synthetic construct
  source 1..110: mol_type = other DNA
gcacagacctcaacacggtcctggccaacccagctacgacacccaagtggcttccaagccctagcctgtgaatgaagggagagtctgatgcagaatgtgggcagcgatgc

SEQ ID NO: 18344 - DNA, 110 bp, synthetic construct
  source 1..110: mol_type = other DNA
ccccagagctgcacctgcaaacgtcacaacagagacgatggggcggcctgggatgaagcaggaccccacctgcagtttctcttaggctttgaaatggtgcatatttactc

SEQ ID NO: 18345 - DNA, 110 bp, synthetic construct
  source 1..110: mol_type = other DNA
gattcaagtggcctcccctggatccagcacgttctcatagctttgtctggctccatatttacgaccccgaatcacactgtcaacaagatcagtgggtgaaaatccacggt

SEQ ID NO: 18346 - DNA, 110 bp, synthetic construct
  source 1..110: mol_type = other DNA
gtgcacctcttcccacaggggaatattgcagaaaggggggctcttggagacatggggggttcacgtcccgtctgccaaggccagccattgggcactgaattcagcacctg

SEQ ID NO: 18347 - DNA, 110 bp, synthetic construct
  source 1..110: mol_type = other DNA
ggggttcacgtcccgtctgccaaggccagccattgggcactgaattcagcacctgtcccacagatgtccttgggttcctaagtggactggggcacctcccagagcagccc

SEQ ID NO: 18348 - DNA, 110 bp, synthetic construct
  source 1..110: mol_type = other DNA
attagcaatgtgtggtttaataaaagagtttttgaaaatataattcatggagttcccatcatggctcagaggagacgaatccgactagtatccatgaggacacaggttcg

SEQ ID NO: 18349 - DNA, 110 bp, synthetic construct; identical to SEQ ID NO: 18348
  source 1..110: mol_type = other DNA

SEQ ID NO: 18350 - DNA, 110 bp, synthetic construct
  source 1..110: mol_type = other DNA
aaatagaaatatctctgaaaacaaattttttgaaccatagtttcaactctgtcgagctcagcctgaagctgaaaatgccttcgcatcagggctcttgtcaccaggctgaa

SEQ ID NO: 18351 - DNA, 110 bp, synthetic construct
  source 1..110: mol_type = other DNA
gctcagcctgaagctgaaaatgccttcgcatcagggctcttgtcaccaggctgaaacaaatgcactgtggacacagcctcgggtcaaaatgagtctgaccacgagaactg

SEQ ID NO: 18352 - DNA, 110 bp, synthetic construct
  source 1..110: mol_type = other DNA
caaccacgcccatcatctgttaggctaaaaataaccccaaatttgggggccgcatctcctgtatcggccgtatcatcaccatgcatacatttcccaccggcagcatttgg

SEQ ID NO: 18353 - DNA, 110 bp, synthetic construct
  source 1..110: mol_type = other DNA
ctcctgtatcggccgtatcatcaccatgcatacatttcccaccggcagcatttggggtgggctctgaggcggcaaggcagcctcagaaaccagtgccagctctttgctag

SEQ ID NO: 18354 - DNA, 110 bp, synthetic construct
  source 1..110: mol_type = other DNA
aggttgtgactgaggtttttcactagaagtgaataacagagaggcagattcactttgaagctaatgaggccacactccagggttcctcacgtgtggaggattgcacaaac

SEQ ID NO: 18355 - DNA, 110 bp, synthetic construct
  source 1..110: mol_type = other DNA
tgaagctaatgaggccacactccagggttcctcacgtgtggaggattgcacaaacaatcctcttatggcaaattttataaaagtgtgaccagccacacaatgaacacaac

SEQ ID NO: 18356 - DNA, 110 bp, synthetic construct
  source 1..110: mol_type = other DNA
gtttcattcttcctaccaaggcccccaaatccctcctttataaaagggctgctagactgagcttcctgaaacaatgctctgattgctcaacagatgcacacattaagcat

SEQ ID NO: 18357 - DNA, 110 bp, synthetic construct
  source 1..110: mol_type = other DNA
gggctgctagactgagcttcctgaaacaatgctctgattgctcaacagatgcacacattaagcattactactatgggagttcccatcgtggctcagtggttagtgaaccc

SEQ ID NO: 18358 - DNA, 110 bp, synthetic construct
  source 1..110: mol_type = other DNA
ggggctccctgcagctcctgcctggggggcagaggagggggacccctgcacccgctagtggggcaaagctgccttctctgctccagacaagcacccttgtcttgtgagac

SEQ ID NO: 18359 - DNA, 110 bp, synthetic construct
  source 1..110: mol_type = other DNA
tagtggggcaaagctgccttctctgctccagacaagcacccttgtcttgtgagacaggagggcttgagaaacgggggctgcagcacaagagccaagaggtgggaaccacc

SEQ ID NO: 18360 - DNA, 110 bp, synthetic construct
  source 1..110: mol_type = other DNA
ccctgaatcttcctggatactcgtcagttttataacccgctgagtcacaacaggaactcctggcatcttaagtcaaagaatgaatgtgagggattcccgctgtggctcag

SEQ ID NO: 18361 - DNA, 110 bp, synthetic construct
  source 1..110: mol_type = other DNA
actcctggcatcttaagtcaaagaatgaatgtgagggattcccgctgtggctcagtgggttacaaacctgctaacaatcagcaggatttgggtttgatccctggcctcgc

SEQ ID NO: 18362 - DNA, 110 bp, synthetic construct
  source 1..110: mol_type = other DNA
tgaaagctggtcctggctgcccgccgatcagcagctgcagggctgcattgtgtgatgagaggaaggacgggggctcttcgggaaggtgcagggctggggaggtcgtcgag

SEQ ID NO: 18363 - DNA, 110 bp, synthetic construct
  source 1..110: mol_type = other DNA
tgagaggaaggacgggggctcttcgggaaggtgcagggctggggaggtcgtcgagcagctttgcttgcccgcgtctgaggcatcagggcttcccagtagcacggggtctt

SEQ ID NO: 18364 - DNA, 110 bp, synthetic construct
  source 1..110: mol_type = other DNA
gggccaggggtcgaaccctcatcctcatggatactagtcaggtgccttacccctgaggcacaataggaattccctcagtgttactttaaaagcagaagttgggaataagc

SEQ ID NO: 18365 - DNA, 110 bp, synthetic construct
  source 1..110: mol_type = other DNA
aggcacaataggaattccctcagtgttactttaaaagcagaagttgggaataagctgtcatctgggaatagggaagagattaggtcagtcacgccctatcagtgccatgg

SEQ ID NO: 18366 - DNA, 110 bp, synthetic construct
  source 1..110: mol_type = other DNA
cgtgccctcgtggccggcccgtgtccacgtctcctcctgggcctgcagcttccccagccaggcctccttccccaagttcagctcttcagtctctcgaggtcacggaaatt

SEQ ID NO: 18367 - DNA, 110 bp, synthetic construct
  source 1..110: mol_type = other DNA
agccaggcctccttccccaagttcagctcttcagtctctcgaggtcacggaaattcaatacaactcaaccaagggcggtccatcatagatagcctcctccttgaagtggg

SEQ ID NO: 18368 - DNA, 110 bp, synthetic construct
  source 1..110: mol_type = other DNA
catcatgaagacaccgcattcacagggagaccggtgctgtgggcacttagagaagctcgttgagaacgtgtggtccttacccactgaccggacgtgggatagcgtgtttg

SEQ ID NO: 18369 - DNA, 110 bp, synthetic construct
  source 1..110: mol_type = other DNA
ctcgttgagaacgtgtggtccttacccactgaccggacgtgggatagcgtgtttgacaaggtcccaggtagttcttgagcgcagacccagggtgctcgttctcaagtttg

SEQ ID NO: 18370 - DNA, 110 bp, synthetic construct
  source 1..110: mol_type = other DNA
cgtttctcctccacacccggggctcagcgtgctggggggcgtcggggggaggtcgtggcacagctagcccccacgggccccaagggatgctgcttcctgcctctccttct

SEQ ID NO: 18371 - DNA, 110 bp, synthetic construct
  source 1..110: mol_type = other DNA
tggcacagctagcccccacgggccccaagggatgctgcttcctgcctctccttctggagcacatttccacagtgataggccacgtgcccacggccctgtggacctcacag

SEQ ID NO: 18372 - DNA, 110 bp, synthetic construct
  source 1..110: mol_type = other DNA
ctggggtctttcactccatggaaacctgatcccacccagagacattctgatatgactggcacatcccaagcttcaagcgttggcaaagtttccaggtgatgctgacaggt

SEQ ID NO: 18373 - DNA, 110 bp, synthetic construct
  source 1..110: mol_type = other DNA
aatcctgcccccaacgtgcatctactaataataaataacattcatttagcgctctgcagcttttccaaacacatcacacaattttgctgacaacccgagtcatcccagca

SEQ ID NO: 18374 - DNA, 110 bp, synthetic construct
  source 1..110: mol_type = other DNA
tatttttgcgtatggggtgagaaagcggtccagtttcattcttttcatgcagctgaaaagactgtcttttccccactgtgtatgcttgcctccttcgtcttggattaatc

SEQ ID NO: 18375 - DNA, 110 bp, synthetic construct
  source 1..110: mol_type = other DNA
aaaagactgtcttttccccactgtgtatgcttgcctccttcgtcttggattaatcacttgcataagtgtgtggatttatttctgggctctctagtctgttccactgatct

SEQ ID NO: 18376 - DNA, 110 bp, synthetic construct
  source 1..110: mol_type = other DNA
aattcctttggcccctctgttgggcatcagttggccgcatggggggggtgtctttttcaccctccaccaccacactacggccacctgatgtttaaatgtatctgaaaaat

SEQ ID NO: 18377 - DNA, 110 bp, synthetic construct
  source 1..110: mol_type = other DNA
ttcaccctccaccaccacactacggccacctgatgtttaaatgtatctgaaaaatccaaaggccttagagggatgagagaatcttaaagtggaagacaaatcagagggct

SEQ ID NO: 18378 - DNA, 110 bp, synthetic construct
  source 1..110: mol_type = other DNA
acccctattcacaccttttaggcaattttatatgatcatttttttttgccagagctttaaagtagatgaaaggggacaaggagaggtgttaaaacacacaaaactatggg

SEQ ID NO: 18379 - DNA, 110 bp, synthetic construct
  source 1..110: mol_type = other DNA
gcaccacgcagctgaggaccggcttgccctcagcagaccatctgaagatctgctggtcggctgtcagacccaccccaacctcagtgcttgaaagaaggagggggcagcaa

SEQ ID NO: 18380 - DNA, 110 bp, synthetic construct
  source 1..110: mol_type = other DNA
gtcggctgtcagacccaccccaacctcagtgcttgaaagaaggagggggcagcaaattcacatttaaactgccaaggcggcgacacccaggtgtgtttcacaaccgcgga

SEQ ID NO: 18381 - DNA, 110 bp, synthetic construct
  source 1..110: mol_type = other DNA
agactcaggctccaggctggggggcggctcggggacccagctccaaaggagttgaggcgcagccccggccttttgctcagcagcctttcctcctgcttttgtgattaagt

SEQ ID NO: 18382 - DNA, 110 bp, synthetic construct
  source 1..110: mol_type = other DNA
ggcgcagccccggccttttgctcagcagcctttcctcctgcttttgtgattaagtgactgtgttcccaaagcctctgaatctttttgagacgattctaagggtgcgtctc

SEQ ID NO: 18383 - DNA, 110 bp, synthetic construct; identical to SEQ ID NO: 18381
  source 1..110: mol_type = other DNA

SEQ ID NO: 18384 - DNA, 110 bp, synthetic construct; identical to SEQ ID NO: 18382
  source 1..110: mol_type = other DNA

SEQ ID NO: 18385 - DNA, 110 bp, synthetic construct
  source 1..110: mol_type = other DNA
tctgtttcacggtccccggggaagggcctctgagccatccgtccctttcgccttcgggccagtgcgatgatgtgccttccatttcttggaggccagcatggctgttctga

SEQ ID NO: 18386 - DNA, 110 bp, synthetic construct
  source 1..110: mol_type = other DNA
gggccagtgcgatgatgtgccttccatttcttggaggccagcatggctgttctgagaagtcacgaccctgttttggttgtgatagaatttgttccaggatgagttgcatg

SEQ ID NO: 18387 - DNA, 110 bp, synthetic construct
  source 1..110: mol_type = other DNA
ttcctactaacacattaaggttttttgtgtctgcgttcttgtggaacgttggcttataggttgttcttgtcgtgtctttaccatgtttcgatagtggggttgtggtggcc

SEQ ID NO: 18388 - DNA, 110 bp, synthetic construct
  source 1..110: mol_type = other DNA
ataggttgttcttgtcgtgtctttaccatgtttcgatagtggggttgtggtggccttatcaaacatatcgggggggagggggttgctttctgctctgtttcctgaaagat

SEQ ID NO: 18389 - DNA, 110 bp, synthetic construct
  source 1..110: mol_type = other DNA
atgctcctgacgctgggattttcgaggaagcagctgggttccagcatcaaaccatctcccgtggtgaaaggcttacacagccctcctgggaaaagcgcatgacgtacctg

SEQ ID NO: 18390 - DNA, 110 bp, synthetic construct
  source 1..110: mol_type = other DNA
cctctaaagggaacagggagctgtgtaccaggaggcggtcacagccaaggcaatgcgtgtagcctcgcacctcctgtgggctaagacggggaagctctcgggaagtcagg

SEQ ID NO: 18391 - DNA, 110 bp, synthetic construct
  source 1..110: mol_type = other DNA
attatggaatatccccagtatttctgccttcaaggtgtaaaagaatgcttttcttttttttcttttttttttctttttccttttattttttttagggctgcacctgtggc

SEQ ID NO: 18392 - DNA, 110 bp, synthetic construct; identical to SEQ ID NO: 18391
  source 1..110: mol_type = other DNA

SEQ ID NO: 18393 - DNA, 110 bp, synthetic construct
  source 1..110: mol_type = other DNA
ccagagcccccgggaagggctgagtgtggacgaagtcacaggagccagatggagttaatgagaagactgagccataagctacggaagcagcctagtgccgttcttaaaat

SEQ ID NO: 18394 - DNA, 110 bp, synthetic construct
  source 1..110: mol_type = other DNA
taatgagaagactgagccataagctacggaagcagcctagtgccgttcttaaaatgcttaagaggagttcccatcctgctcagggggaatgaatctgactagtatccatg

SEQ ID NO: 18395 - DNA, 110 bp, synthetic construct
  source 1..110: mol_type = other DNA
ggccgcagcacgtggctaagagccacctttacagcgactccgcctgccgggacgtcggcttgatgagcatctactgagtgggaagaaagctccttctgcctggaaatagg

SEQ ID NO: 18396 - DNA, 110 bp, synthetic construct
  source 1..110: mol_type = other DNA
ggggtccatgtccagagatgaaattgccaggtgatatggcagacctgctgacttttttgaggaactactgtgcgtaatttttaaaggctttgggtttctttggacgtttc

SEQ ID NO: 18397 - DNA, 110 bp, synthetic construct
  source 1..110: mol_type = other DNA
tttgaggaactactgtgcgtaatttttaaaggctttgggtttctttggacgtttccctaatatttctataataaagtctcgcaagcaatatggcgaaaattcttgttctt

SEQ ID NO: 18398 - DNA, 110 bp, synthetic construct
  source 1..110: mol_type = other DNA
gggtggcggggacagatgtacagccgggctgggaggcagccgaccaggtcgcgcatccctccgcatgtggccccttcaggccagggtgccaggtgcagcttccctgctct

SEQ ID NO: 18399 - DNA, 110 bp, synthetic construct
  source 1..110: mol_type = other DNA
tccctccgcatgtggccccttcaggccagggtgccaggtgcagcttccctgctcttgacgagttcatggtcttgagcagaggcagaccctgcccctggggtcaaggcgcc

SEQ ID NO: 18400 - DNA, 110 bp, synthetic construct
  source 1..110: mol_type = other DNA
ggggatcgaacgtgcaacctcacgggtactagtcagcttcattaaccaccgagccgtgacgggaaatcccagtacagaccttaattttaaaaataccttattggagttcc

SEQ ID NO: 18401 - DNA, 110 bp, synthetic construct
  source 1..110: mol_type = other DNA
gcacagggacctcgccccaatattctgtgatcatctatgtcggccaagaatctgagaaagaatggatgtgtgtgcgcggagaacggaatcactctgctgtacagcagaaa

SEQ ID NO: 18402 - DNA, 110 bp, synthetic construct; identical to SEQ ID NO: 18401
  source 1..110: mol_type = other DNA

SEQ ID NO: 18403 - DNA, 110 bp, synthetic construct
  source 1..110: mol_type = other DNA
acctggacttgaaaagtatccaaagccctttattgtccttttgctccacctccagaggccgcatctcccggcaggatgctgtgccctgtgctgagtcccatacgatacca

SEQ ID NO: 18404 - DNA, 110 bp, synthetic construct
  source 1..110: mol_type = other DNA
gaagaggagcagagcagttagctcactccaggcctcgttcggttttgcaggtttagcgcaggtgcgtgtggagagcaaagcgtctaggtttccttaggaacctttgttgt

SEQ ID NO: 18405 - DNA, 110 bp, synthetic construct
  source 1..110: mol_type = other DNA
gcgcaggtgcgtgtggagagcaaagcgtctaggtttccttaggaacctttgttgtttccttttcagattccgggacctctcggaaggtgaggaaaatcagaagactgtaa

SEQ ID NO: 18406 - DNA, 110 bp, synthetic construct
  source 1..110: mol_type = other DNA
gaaaagaaaacgccaggacgccaggtacaacataactgcaaccagaaagtaaccattcgttaaaaaaaaaaaaagcagtcatgcgagggagaaatcatttgtgaaaagcc

SEQ ID NO: 18407 - DNA, 110 bp, synthetic construct
  source 1..110: mol_type = other DNA
ttcgttaaaaaaaaaaaaagcagtcatgcgagggagaaatcatttgtgaaaagccgattacagggggtcagtggagcgggacagggcgggacagaatggcgactctttta

SEQ ID NO: 18408 - DNA, 110 bp, synthetic construct
  source 1..110: mol_type = other DNA
aagactgtgcccgccttggaagggattaggagggcacagtctttatggttttctatggtttggggagtggaaaatagggccgcagataagcatcagggtggaggccagct

SEQ ID NO: 18409 - DNA, 110 bp, synthetic construct
  source 1..110: mol_type = other DNA
gaagcacatgtaaaactagaagaacacgactccaaacctaagctgcccaagattccctcagtaaaattctgctggacccattcatagccaagatccgtcgtgggcaagta

SEQ ID NO: 18410 - DNA, 110 bp, synthetic construct
  source 1..110: mol_type = other DNA
ccagccgctgacctccgctcaggggaggaaaaatgacgcgtggatacacagacacaagagatgcctgccgtgctcttggtgctaggcagcttcctggaaggtcagagggc

SEQ ID NO: 18411 - DNA, 110 bp, synthetic construct
  source 1..110: mol_type = other DNA
aagagatgcctgccgtgctcttggtgctaggcagcttcctggaaggtcagagggcttcaaacgcaaggccttccccgtgaaacaccgcccggggctctacatctcgcagc

SEQ ID NO: 18412 - DNA, 110 bp, synthetic construct
  source 1..110: mol_type = other DNA
cgttaccacccagcctcggggcaagagctggggttgcggagtccccgttctggcccagcaggtcaggaatccgactagtatctgtgaggatgtgggttcgatccctggcc

SEQ ID NO: 18413 - DNA, 110 bp, synthetic construct; identical to SEQ ID NO: 18412
  source 1..110: mol_type = other DNA

SEQ ID NO: 18414 - DNA, 110 bp, synthetic construct
  source 1..110: mol_type = other DNA
gtgtctctccctgagatcggactccgcaaacatcagctccagggccctggggccaaagctgtttcactcgttcacgactgacatcaaccagccttcggtgcgatcttgca

SEQ ID NO: 18415 - DNA, 110 bp, synthetic construct
  source 1..110: mol_type = other DNA
aagctgtttcactcgttcacgactgacatcaaccagccttcggtgcgatcttgcagctgcaggaatgacaagcggtgggaaaccagcggccgggccaacccaggccctgg

SEQ ID NO: 18416 - DNA, 110 bp, synthetic construct
  source 1..110: mol_type = other DNA
gccccagaggactcctccttgggcagagggggaaacagcgccacctgctctgggctgtgggtggctggtggctgtggcatcctggggctttccccttcttgtgggaatac

SEQ ID NO: 18417 - DNA, 110 bp, synthetic construct
  source 1..110: mol_type = other DNA
tgtgggtggctggtggctgtggcatcctggggctttccccttcttgtgggaatactctttgcctgtctttctaactgggagggctgggtggtgggatccaggagcgggtg

SEQ ID NO: 18418 - DNA, 110 bp, synthetic construct
  source 1..110: mol_type = other DNA
gtaaagtgaggtccatggtatttgtttttctctgtgtctgtgtcttggtggttgtaaatggggctgcagtgaacataggggcgcaggtatcgtctcacatcagtggtttc

SEQ ID NO: 18419 - DNA, 110 bp, synthetic construct
  source 1..110: mol_type = other DNA
aaatggggctgcagtgaacataggggcgcaggtatcgtctcacatcagtggtttcattttggggggatgaatatccaggagcggaattgctgcatcggacggcgcttcta

SEQ ID NO: 18420 - DNA, 110 bp, synthetic construct
  source 1..110: mol_type = other DNA
tgggcggcagctgccgggctgacccacctgcgccatgtggctcctttcgggtggcggctgggtgcgccgtctgcagaggtgtaataggtacaactcggtaacatcaaacg

SEQ ID NO: 18421 - DNA, 110 bp, synthetic construct
  source 1..110: mol_type = other DNA
ggctgggtgcgccgtctgcagaggtgtaataggtacaactcggtaacatcaaacgccttgtcctgaggtgtcagcggtgggctttgtcagttcgtgtgcagctcgtgggg

SEQ ID NO: 18422 - DNA, 110 bp, synthetic construct
  source 1..110: mol_type = other DNA
tcactcgaagtgcctgaggcccggttggggaccgcccgcgcccccgattctgatagacgtgggcagggatgccgacgggaagcggcttgagacgcagtttgagtgaagcc

SEQ ID NO: 18423 - DNA, 110 bp, synthetic construct
  source 1..110: mol_type = other DNA
gacgtgggcagggatgccgacgggaagcggcttgagacgcagtttgagtgaagccccgacacctgtgcttttccccgcagcctcccggagccacgacggctttggccacg

SEQ ID NO: 18424 - DNA, 110 bp, synthetic construct
  source 1..110: mol_type = other DNA
gtggtggctttgagaataagcacactgggggagggagccggagaaggaggtggcacctggggataattgttcccaactggagaggcgccttctttctcctccagaaaatt

SEQ ID NO: 18425 - DNA, 110 bp, synthetic construct
  source 1..110: mol_type = other DNA
cctggggataattgttcccaactggagaggcgccttctttctcctccagaaaattccaccaaatcccatcctatgcttcagttcgcactgcgctgggaggcagccacagc

SEQ ID NO: 18426 - DNA, 110 bp, synthetic construct
  source 1..110: mol_type = other DNA
aggaaaatgctctaaattgtgattggagtggttagagggtgtatacacttgacggaataatcacacttaaaatctgaccatttcactgcatgtgcctacaaaagagtccc

SEQ ID NO: 18427 - DNA, 110 bp, synthetic construct
  source 1..110: mol_type = other DNA
gggtcccacccacagaaggcgtctccactgaccggaaatgcctcctcccgcttccccctgcccggagccggggggcggccaggatgaagggggagccccggctggacctt

SEQ ID NO: 18428 - DNA, 110 bp, synthetic construct
  source 1..110: mol_type = other DNA
caccccttcactcgacatgggccacagactgaaatatgcgagctgagagcaccatccatgggcgacaccctcaggaagctcacgttcagcgatgactttcacactaacac

SEQ ID NO: 18429 - DNA, 110 bp, synthetic construct
  source 1..110: mol_type = other DNA
ccatgggcgacaccctcaggaagctcacgttcagcgatgactttcacactaacacggaaagtaagacatgtcggtgtgcccgtcgtggcgcagcagaaacgcatccaaca

SEQ ID NO: 18430 - DNA, 110 bp, synthetic construct; identical to SEQ ID NO: 18428
  source 1..110: mol_type = other DNA

SEQ ID NO: 18431 - DNA, 110 bp, synthetic construct; identical to SEQ ID NO: 18429
  source 1..110: mol_type = other DNA

SEQ ID NO: 18432 - DNA, 110 bp, synthetic construct
  source 1..110: mol_type = other DNA
ccacgaggcaatcaggactgcggctcctgcagtgagacctgcgggcccgcggaacggggaacctagacagagcccccccccaacacgggcgttctagcttaagcctattt

SEQ ID NO: 18433 - DNA, 110 bp, synthetic construct
  source 1..110: mol_type = other DNA
ggggaacctagacagagcccccccccaacacgggcgttctagcttaagcctatttctggcctaaaaagtaaataaataaacaagtgtctaagatttactgaaagggacac

SEQ ID NO: 18434 - DNA, 110 bp, synthetic construct
  source 1..110: mol_type = other DNA
acaaaactgacctaccctccaccaccacctgtccccatccctccaaatcctgccgagatttgcttccaagggcaggctctgtccatgccaccctcaggacaccaacccag

SEQ ID NO: 18435 - DNA, 110 bp, synthetic construct
  source 1..110: mol_type = other DNA
agatttgcttccaagggcaggctctgtccatgccaccctcaggacaccaacccagccctgcttggcgcctggatggggcagtggcccttcacaggtctgcccccggctag

SEQ ID NO: 18436 - DNA, 110 bp, synthetic construct
  source 1..110: mol_type = other DNA
tttgtgcaaggtgtgagggtgtgttctagtttcattggtttatatgcagctgtccacttgcattttatgttttgcctcctttgttgaagattaattgaccgtaggtgtct

SEQ ID NO: 18437 - DNA, 110 bp, synthetic construct; identical to SEQ ID NO: 18436
  source 1..110: mol_type = other DNA

SEQ ID NO: 18438 - DNA, 110 bp, synthetic construct
  source 1..110: mol_type = other DNA
atccatcacagcctcatctcaaggtttttaatagcagagcctttaccgtttgttttactttcaagggctccagtgcagaacagtgaggaaatcagatcccacagatccag

SEQ ID NO: 18439 - DNA, 110 bp, synthetic construct
  source 1..110: mol_type = other DNA
tactttcaagggctccagtgcagaacagtgaggaaatcagatcccacagatccaggcagcttccccacagcagggtctacacccaaaccgtgagctggtttccacgagcc

SEQ ID NO: 18440 - DNA, 110 bp, synthetic construct
  source 1..110: mol_type = other DNA
agactgcacaaaaaagaaaccatctgaatccaggggcgattagaaccgaaataaaagaaatatttggattctcaaaccaggtatgaggatcaaaagcctgaaatcctgat

SEQ ID NO: 18441 - DNA, 110 bp, synthetic construct
  source 1..110: mol_type = other DNA
agaaatatttggattctcaaaccaggtatgaggatcaaaagcctgaaatcctgataaaatacttttaataatctgatctttataagtgtccaatcgcatagaacgaaatt

SEQ ID NO: 18442 - DNA, 110 bp, synthetic construct
  source 1..110: mol_type = other DNA
cggcccctgagtctgaatttctcgactggcccagtctgctgtccaggcatcctggagtctcaagaaggaaaactgcttgactgtcccggggccctggctccagcggccat

SEQ ID NO: 18443 - DNA, 110 bp, synthetic construct
  source 1..110: mol_type = other DNA
agtctcaagaaggaaaactgcttgactgtcccggggccctggctccagcggccatgtgacagccaggctgcctggggttccaggatgagacttcccccagggctggttct

SEQ ID NO: 18444 - DNA, 110 bp, synthetic construct
  source 1..110: mol_type = other DNA
taaggtctttgtcttattcgggtgggaaatgtgagcaaccgttgtctttgcgatgaacctgcgtcaaagatcttcgttacctagagcggaggcggcggctgagaggatgc

SEQ ID NO: 18445 - DNA, 110 bp, synthetic construct
  source 1..110: mol_type = other DNA
aacctgcgtcaaagatcttcgttacctagagcggaggcggcggctgagaggatgctgctacaccaggaagtgccttcggcctccttcctgctcgtcctggccgagagcgg

SEQ ID NO: 18446 - DNA, 110 bp, synthetic construct
  source 1..110: mol_type = other DNA
ctgcagtcagttctggaacatttctttcacttcgagaagaagccttgaagggagttcccgttggggctcagtgggctaagaacctgactagtatccgcgaggatgtgcgt

SEQ ID NO: 18447 - DNA, 110 bp, synthetic construct
  source 1..110: mol_type = other DNA
gaacatttctttcacttcgagaagaagccttgaagggagttcccgttggggctcagtgggctaagaacctgactagtatccgcgaggatgtgcgttccatccctggcctc

SEQ ID NO: 18448 - DNA, 110 bp, synthetic construct
  source 1..110: mol_type = other DNA
ttaaatccagagccggccttgcgtgcgtccagcgtgagggcgctccgtgctccgttaaaggacaaacgtcatcaggggacaagagcatgaccgtgtgctgcccccaagag

SEQ ID NO: 18449 - DNA, 110 bp, synthetic construct
  source 1..110: mol_type = other DNA
taaaggacaaacgtcatcaggggacaagagcatgaccgtgtgctgcccccaagagacccccacccaataaaaggacatgagcgctgagggcagaggatctgaacggctga

SEQ ID NO: 18450 - DNA, 110 bp, synthetic construct
  source 1..110: mol_type = other DNA
cccccagcacccatgggtggctcggggtgtcagacaagcttgtagccttgtcctcactgaggagcaccccagggccagtctcgggcagggctgtgggcatccagcatccg

SEQ ID NO: 18451 - DNA, 110 bp, synthetic construct
  source 1..110: mol_type = other DNA
actgaggagcaccccagggccagtctcgggcagggctgtgggcatccagcatccgaggggctggccagaggctggaacgccagaccgtgccagctcctggtgaggaggct

SEQ ID NO: 18452 - DNA, 110 bp, synthetic construct
  source 1..110: mol_type = other DNA
gcgttaccctgacagcctcccaaggaaatttcacaagagggagagggactcacaggggaggaatgagtgagttgatcgaacccgcatactcatggatactagtcggattt

SEQ ID NO: 18453 - DNA, 110 bp, synthetic construct
  source 1..110: mol_type = other DNA
gggaggaatgagtgagttgatcgaacccgcatactcatggatactagtcggatttgttgccgttgagccacaaccgaaagtcctacaatgatctccaatacattccctat

SEQ ID NO: 18454 - DNA, 110 bp, synthetic construct
  source 1..110: mol_type = other DNA
aaaaaaaagaaaagactgaaacaaaagtttccatgttttgcaaatgatagctgaggggtgagcagagatagtggctgatggagaggctggccttggagtgggaagcccca

SEQ ID NO: 18455 - DNA, 110 bp, synthetic construct
  source 1..110: mol_type = other DNA
ttatctgtttttccttctgttgcgtatgttttggtgtcatatctaatctcttgtgaaatccaaggttataaaaatttacctctatggtttctcctaaaagtcttgtagtt

SEQ ID NO: 18456 - DNA, 110 bp, synthetic construct
  source 1..110: mol_type = other DNA
aattaggcaaagagctcaggccctcggcagagcccagctgtgggatctactcatggggtgactgtaggtaaggcgttcagctacttttactgataggtcacgtgatgtat

SEQ ID NO: 18457 - DNA, 110 bp, synthetic construct
  source 1..110: mol_type = other DNA
gggtgactgtaggtaaggcgttcagctacttttactgataggtcacgtgatgtatgaggaccaggctgatgcatagattcagagccctgtcagctgactgtgttccagca

SEQ ID NO: 18458 - DNA, 110 bp, synthetic construct
  source 1..110: mol_type = other DNA
atcttggttgccaaattgctcatctgttttcattctcagaggtacatgtggtggagattaacaagctacttagaaaaaaaaaatcagtgctccagaaacttccattactt

SEQ ID NO: 18459 - DNA, 110 bp, synthetic construct
  source 1..110: mol_type = other DNA
gattaacaagctacttagaaaaaaaaaatcagtgctccagaaacttccattacttgagcacactaggccaggggcatcaggctccagagatttctgctattgtatcactt

SEQ ID NO: 18460 - DNA, 110 bp, synthetic construct; identical to SEQ ID NO: 18458
  source 1..110: mol_type = other DNA

SEQ ID NO: 18461 - DNA, 110 bp, synthetic construct; identical to SEQ ID NO: 18459
  source 1..110: mol_type = other DNA

SEQ ID NO: 18462 - DNA, 110 bp, synthetic construct
  source 1..110: mol_type = other DNA
gtggtcttggggagactttgttcataaagacttaaaggggactcgggattgacctggaatagaaaaggggaggagccttctgaacagaaagagctttaaggtacggaggg

SEQ ID NO: 18463 - DNA, 110 bp, synthetic construct
  source 1..110: mol_type = other DNA
ggaatagaaaaggggaggagccttctgaacagaaagagctttaaggtacggagggagcagagaaaaggtctgcatggctaatggccaacgccggagacacaggaggggcc

SEQ ID NO: 18464 - DNA, 110 bp, synthetic construct
  source 1..110: mol_type = other DNA
gaagcagctctgatctgcaggaagagccattttccagcccagggaaacccaggggccatggtgagaagctgtgtcgcgcaggcgcagatccctcacaatcttcgaggaga

SEQ ID NO: 18465 - DNA, 110 bp, synthetic construct
  source 1..110: mol_type = other DNA
ctccccagtgttcactacagcccttgaacaacctgcacgtctgctcttcatctggattgtgtggaacacaaggacactgccacgggctttttccatcctatctccctcct

SEQ ID NO: 18466 - DNA, 110 bp, synthetic construct
  source 1..110: mol_type = other DNA
attgtgtggaacacaaggacactgccacgggctttttccatcctatctccctcctcggccttaacacctaacagagtaccgagagcccaaaggaccatcgaggaatgatt

SEQ ID NO: 18467 - DNA, 110 bp, synthetic construct
  source 1..110: mol_type = other DNA
ggggatggtgaagagaagagaacttttgctgtgctgtgcacacggcctctatgcttcctcccaacaaaatgctcagtgaggttccacaacctgttcatcacagccgggtt

SEQ ID NO: 18468 - DNA, 110 bp, synthetic construct
  source 1..110: mol_type = other DNA
tcctcccaacaaaatgctcagtgaggttccacaacctgttcatcacagccgggttgactcaccgatattctgaggataacaggcattctggggctggatttacagaggga

SEQ ID NO: 18469 - DNA, 110 bp, synthetic construct
  source 1..110: mol_type = other DNA
ttatcaacatgacatttccctaacgtagcactgcgttcttggtatatctcttgaaatccatattgattttcaagagcttttcatcccctattaaaacaaagagagtcact

SEQ ID NO: 18470 - DNA, 110 bp, synthetic construct
  source 1..110: mol_type = other DNA
atccatattgattttcaagagcttttcatcccctattaaaacaaagagagtcactcagtcaagggctttctggggagatgttattatcgagggtgtcctttttcctggcg

SEQ ID NO: 18471 - DNA, 110 bp, synthetic construct
  source 1..110: mol_type = other DNA
ctccaagcagagttccttcccctgtaactctgcaaatggggactctcttatcccagtgtgctcagaaacttgtgatgagctcaccatatgataggctgctaggagcccag

SEQ ID NO: 18472 - DNA, 110 bp, synthetic construct
  source 1..110: mol_type = other DNA
taagtgaagggtactttgactacaaaatatttggagttaggtttttttatccttagtatcattgatgtatttctccactgtattctgccacagaaaataattatttgggg

SEQ ID NO: 18473 - DNA, 110 bp, synthetic construct; identical to SEQ ID NO: 18472
  source 1..110: mol_type = other DNA

SEQ ID NO: 18474 - DNA, 110 bp, synthetic construct
  source 1..110: mol_type = other DNA
gtgggtcagtgcctgcagcaggttaatctttgtaggcctgaatggtgagcaaaatgctctttgctctttttctgtttgcacatgattggaaccagaaattgtctctgggg

SEQ ID NO: 18475 - DNA, 110 bp, synthetic construct
  source 1..110: mol_type = other DNA
gctctttgctctttttctgtttgcacatgattggaaccagaaattgtctctggggaacacctgccactctgtggagaaagagctttgcttggaagaaaaccccatatcca

SEQ ID NO: 18476 - DNA, 110 bp, synthetic construct
  source 1..110: mol_type = other DNA
gtgtgacatccaccatcctgtgggactccgcccaccccccttgaggccctacagtctcactttctacacctctgaccaacaccactctctctacagtgtgaagtttacct

SEQ ID NO: 18477 - DNA, 110 bp, synthetic construct
  source 1..110: mol_type = other DNA
agtgcctgatccatttaggctccagggtcttctgaatgtaccaagctgctgatgtcatcagccaccctccccagaatcccaccggccactgtccactgtgcctggagagg

SEQ ID NO: 18478 - DNA, 110 bp, synthetic construct
  source 1..110: mol_type = other DNA
catcagccaccctccccagaatcccaccggccactgtccactgtgcctggagagggaggctcgtggaccacacagcgtacaaggtgtttcccagaacatctggatggtgt

SEQ ID NO: 18479 - DNA, 110 bp, synthetic construct
  source 1..110: mol_type = other DNA
caccctcaggcgccctcgtcttgaacagtcagtgcacagcaggatggcactcaggttggtatcctctggggtaaatttagacacagaactgttttgcatcctcgtctctc

SEQ ID NO: 18480 - DNA, 110 bp, synthetic construct
  source 1..110: mol_type = other DNA
ttggtatcctctggggtaaatttagacacagaactgttttgcatcctcgtctctctgagtaatctgttctgccaagtttccccctttagagtcagggaccaaccaattac

SEQ ID NO: 18481 - DNA, 110 bp, synthetic construct
  source 1..110: mol_type = other DNA
ggcaaagtggattctctcatggcccaggatgtccctcgctgagacagaaggtggtgtgtccccacctgctccctccatcgcacacctgctcaatggactcacaggcagct

SEQ ID NO: 18482 - DNA, 110 bp, synthetic construct
  source 1..110: mol_type = other DNA
gtgtccccacctgctccctccatcgcacacctgctcaatggactcacaggcagcttgtcagacaaggtgggatggatgtcagggaatgcaggtccccttgcttctgctct

SEQ ID NO: 18483 - DNA, 110 bp, synthetic construct
  source 1..110: mol_type = other DNA
ttgagaaacattgccctagaggcctttaaaggtgtcccaaaacagtctaggattacttgaggcccacctggaacaaataaaaataaaggaaaaacttcaccaactggtaa

SEQ ID NO: 18484 - DNA, 110 bp, synthetic construct
  source 1..110: mol_type = other DNA
cttgaggcccacctggaacaaataaaaataaaggaaaaacttcaccaactggtaactttaggagaaagggcagccttccacctcccactcccccaagattggagggaaag

SEQ ID NO: 18485 - DNA, 110 bp, synthetic construct
  source 1..110: mol_type = other DNA
tgaaacagccagaagatgcgcacgcaccaccgttgatggcaggaaggatttcagtacactgatgggaaaccatcaatgtctaccgtggagccagttcactaaattatggt

SEQ ID NO: 18486 - DNA, 110 bp, synthetic construct
  source 1..110: mol_type = other DNA
acactgatgggaaaccatcaatgtctaccgtggagccagttcactaaattatggtacctccataaaatgggccaccaacagcatcgtcgatggtgccctcttcctctcac

SEQ ID NO: 18487 - DNA, 110 bp, synthetic construct
  source 1..110: mol_type = other DNA
gacacaacctaagcatccactgacagatgactagataaagaaagtgtaacatatatatgaatataaatggaatattactcagtcactgaaaagaatgaaatgtcatttgc

SEQ ID NO: 18488 - DNA, 110 bp, synthetic construct; identical to SEQ ID NO: 18487
  source 1..110: mol_type = other DNA

SEQ ID NO: 18489 - DNA, 110 bp, synthetic construct
  source 1..110: mol_type = other DNA
ggaaatgctgaatatttgcaaaacaaaaagcaataggactgaacctgatctagcagtccctctagacagtcagacaattatatctaatggactttgttaaaataaagttg

SEQ ID NO: 18490 - DNA, 110 bp, synthetic construct
  source 1..110: mol_type = other DNA
gtccctctagacagtcagacaattatatctaatggactttgttaaaataaagttggtcagaaggatcccagcaaagaacagtgctggtgtgaggttgggtcaaggtccag

SEQ ID NO: 18491 - DNA, 110 bp, synthetic construct
  source 1..110: mol_type = other DNA
caaaaaaaaaaacccaaactcatcacaaagcaagccccagggcctgggccacctacatcctgctcattctccacctaccctccgcatacacccctgactgttccctatcc

SEQ ID NO: 18492 - DNA, 110 bp, synthetic construct
  source 1..110: mol_type = other DNA
catcctgctcattctccacctaccctccgcatacacccctgactgttccctatccattaagtaaacatctgctcaaagttagctcctcagtggggtctttcctggggacc

SEQ ID NO: 18493 - DNA, 110 bp, synthetic construct
  source 1..110: mol_type = other DNA
gatttggcatacaaaaatgacttccccaaatatttaacagaactgcaaataggaacatgatcacatcagggcctgcattccccgaggcagagctctgtagctctctgcat

SEQ ID NO: 18494 - DNA, 110 bp, synthetic construct
  source 1..110: mol_type = other DNA
catgatcacatcagggcctgcattccccgaggcagagctctgtagctctctgcattgtccagcaccttaagaagctcagacaaatgaacagttacctcagtcttcctcct

SEQ ID NO: 18495 - DNA, 110 bp, synthetic construct
  source 1..110: mol_type = other DNA
agctcagagctgccgccgccgtgagcacttccggccggaagcagggcggggccgaggcgcgtttttgtggcgcatttcctggcgtcagctccgaaggcggaaaagcggag

SEQ ID NO: 18496 - DNA, 110 bp, synthetic construct
  source 1..110: mol_type = other DNA
agtttgcacgcactgccctcagtcctgggtcatgctgcgggtttgtgctctgagtcgccttctagtcagtctctcagttcatcctggaaccgtgttgctcaaatgctggg

SEQ ID NO: 18497 - DNA, 110 bp, synthetic construct
  source 1..110: mol_type = other DNA
ttctgcgctgctgtggctgtggcgtaggctggtagctgcagctaaaacgtgacccttaacctgggaacctccatatgccaccagggtggtcacaaaaagaaaaaagaaag

SEQ ID NO: 18498 - DNA, 110 bp, synthetic construct
  source 1..110: mol_type = other DNA
ttaacctgggaacctccatatgccaccagggtggtcacaaaaagaaaaaagaaagaaaatccaagataaaataacggtgatccctgtgggtgctgcaggcccggggaggg

SEQ ID NO: 18499 - DNA, 110 bp, synthetic construct
  source 1..110: mol_type = other DNA
tgcgaaaggccaaggagacccacggaggaacactgagtccctgtcatcactgcaggagccctcctgggacgagaagagagtgagtcaggccacctatgcccccaggaatg

SEQ ID NO: 18500 - DNA, 110 bp, synthetic construct
  source 1..110: mol_type = other DNA
gagccctcctgggacgagaagagagtgagtcaggccacctatgcccccaggaatgtgctgatgtccacaaggattcttcctcccgcaaccatgaccatcatcagatacct

SEQ ID NO: 18501 - DNA, 110 bp, synthetic construct
  source 1..110: mol_type = other DNA
acagtatagaggtacctcggaaaactaaatacagaactatatctgattccgcaatcccactcctggaatatatccggacaaaactcttattcaaaaagatacatgcgccc

SEQ ID NO: 18502 - DNA, 110 bp, synthetic construct; identical to SEQ ID NO: 18501
  source 1..110: mol_type = other DNA

SEQ ID NO: 18503 - DNA, 110 bp, synthetic construct
  source 1..110: mol_type = other DNA
taaggaaataaaatatgagagttccctgtgggctcagggggttaaggatctgatgttgccattgctgtggcccaggctacagttatggtgcaggtttgatccaggaactt

SEQ ID NO: 18504 - DNA, 110 bp, synthetic construct
  source 1..110: mol_type = other DNA
ttgccattgctgtggcccaggctacagttatggtgcaggtttgatccaggaacttccacatgtcatgggcacaaccaggaaacaaatgaagaaaggaaataaaatatgtt

SEQ ID NO: 18505 - DNA, 110 bp, synthetic construct
  source 1..110: mol_type = other DNA
tgaggagcctgtgtgatgtcagaacttaccagacggaagtagaactttgacaaggtcaactacagagcttcaaatcctggaagggaaaatgtccttcttcctgttgccca

SEQ ID NO: 18506 - DNA, 110 bp, synthetic construct
  source 1..110: mol_type = other DNA
tcaactacagagcttcaaatcctggaagggaaaatgtccttcttcctgttgcccacggagaggacaggaaatcccacaggtgtctggatgctgtcgggcccggtctgcta

SEQ ID NO: 18507 - DNA, 110 bp, synthetic construct
  source 1..110: mol_type = other DNA
acaacggaaactcctcttttcattttaaaaaatttaaaaagttttttggctgcgcctgtgacatttggaaattcccaggccagggattgaaccggtgccacagttgtaac

SEQ ID NO: 18508 - DNA, 110 bp, synthetic construct
  source 1..110: mol_type = other DNA
cttttcattttaaaaaatttaaaaagttttttggctgcgcctgtgacatttggaaattcccaggccagggattgaaccggtgccacagttgtaaccagagccacagcagt

SEQ ID NO: 18509 - DNA, 110 bp, synthetic construct
  source 1..110: mol_type = other DNA
ggtggccctgctgccatttctgatctgaggctcagcagcctatgtgggactgcgtggctgtctttacctgcagttcgcagctgccacagctgagatttcagtataaagct

SEQ ID NO: 18510 - DNA, 110 bp, synthetic construct
  source 1..110: mol_type = other DNA
aaaaaacttgcagttctcagagcctgttggattttgagtgactgataaggaattacagatctgcaaaaataaacagaccccggtgacacaactagacttgaaagtcagac

SEQ ID NO: 18511 - DNA, 110 bp, synthetic construct
  source 1..110: mol_type = other DNA
cagatctgcaaaaataaacagaccccggtgacacaactagacttgaaagtcagacctgggttttgccagcacgcagtctgtgcgtgtctgtgagtgtgtgtgtgcatgca

SEQ ID NO: 18512 - DNA, 110 bp, synthetic construct
  source 1..110: mol_type = other DNA
aattaaacatacttctgcctttgtggtttccctcctcctctacactttcttgtacccacagacaggaagtgggggaggcacatggggatccctcctagacactggacatt

SEQ ID NO: 18513 - DNA, 110 bp, synthetic construct
  source 1..110: mol_type = other DNA
ccacagacaggaagtgggggaggcacatggggatccctcctagacactggacattggtgagggtggtctgtgtgtccctagacaggaggcctgtgccctgacccttggcg

SEQ ID NO: 18514 - DNA, 110 bp, synthetic construct
  source 1..110: mol_type = other DNA
gggtaaaatacacctgactcacgaaagaatacggaggatgaaataggatgatggaggctggtcgtctttatccttcagctagggttgcagccttttggaggtttgttaaa

SEQ ID NO: 18515 - DNA, 110 bp, synthetic construct
  source 1..110: mol_type = other DNA
ggctggtcgtctttatccttcagctagggttgcagccttttggaggtttgttaaaactcaggtctctgggcaggtctgggcaggagcatttcctcatgtgccaggtgatg

SEQ ID NO: 18516 - DNA, 110 bp, synthetic construct
  source 1..110: mol_type = other DNA
ggctgacgaatcctgtgttacggaaacgttgcaaaagcagcttgtaatttgttgttcttcattcctatgttgctttgagagagcgagagagagagaggggctgactttcc

SEQ ID NO: 18517 - DNA, 110 bp, synthetic construct
  source 1..110: mol_type = other DNA
tcttcattcctatgttgctttgagagagcgagagagagagaggggctgactttccttccttggcggatcataacccacatcactgctgatttgaaaaaatcattgtgtcc

SEQ ID NO: 18518 - DNA, 110 bp, synthetic construct
  source 1..110: mol_type = other DNA
ctgaatccttgtatgtgttggcgaagggctctgggcagagctgtgccactggacgcaggtcattttctgctgcaggagagagaagacggctgggagataataaatgttag

SEQ ID NO: 18519 - DNA, 110 bp, synthetic construct
  source 1..110: mol_type = other DNA
tgaaatccccaaattgtactcctttcaacacctgcaccgaagttctctccgttttgtggccacttgcttatttatagaagccattcatattaatctttttttttttcttc

SEQ ID NO: 18520 - DNA, 110 bp, synthetic construct
  source 1..110: mol_type = other DNA
gtggccacttgcttatttatagaagccattcatattaatctttttttttttcttccaagaaggaccatagcagcttcagaacttcctttaagggcagcagagcagggggt

SEQ ID NO: 18521 - DNA, 110 bp, synthetic construct
  source 1..110: mol_type = other DNA
gccactcccttcttcagcccagatacagtgaggcagggcatggctcagggccacttttgggaactggcaattaggcacctgagtgcagctgtctagttggcctttgactg

SEQ ID NO: 18522 - DNA, 110 bp, synthetic construct
  source 1..110: mol_type = other DNA
gggtgagatcatcttgctgactaagaagtcgcctatatttgaaggactccaattggagggtcaggactcaaagtactgctccatgtgatttattaaatgtctaggagttc

SEQ ID NO: 18523 - DNA, 110 bp, synthetic construct
  source 1..110: mol_type = other DNA
gagggtcaggactcaaagtactgctccatgtgatttattaaatgtctaggagttcctgtcgtggctcagcagaaacacatccgactaggaacaatgaggttgtgggttgg

SEQ ID NO: 18524 - DNA, 110 bp, synthetic construct
  source 1..110: mol_type = other DNA
aggatagccattctgacaggtgtgaagggatagctctgtgttgttttggtttgcatttcacctatgctaagtgatgctgagcgtttttcgtgggcctggtagcgatctgt

SEQ ID NO: 18525 - DNA, 110 bp, synthetic construct
  source 1..110: mol_type = other DNA
tttcacctatgctaagtgatgctgagcgtttttcgtgggcctggtagcgatctgtacaattgctttgccagagagtctcttcaggcgctctgcccattttttgctaacaa

SEQ ID NO: 18526 - DNA, 110 bp, synthetic construct
  source 1..110: mol_type = other DNA
aaaagagcagagagcaccaaatgctacataggcctctacatagctgggcagagtgacaggctggctgagtgttgctgtcagcctccccaggaggcagcctgaagctgaca

SEQ ID NO: 18527 - DNA, 110 bp, synthetic construct
  source 1..110: mol_type = other DNA
tgggccaacactggctttagaggtgtagtggttaagtaattgccaaacaatcaggatttttctcttttgtgtgtgcgtgtggtctaggggaggatgcattttataacttt

SEQ ID NO: 18528 - DNA, 110 bp, synthetic construct
  source 1..110: mol_type = other DNA
atttttctcttttgtgtgtgcgtgtggtctaggggaggatgcattttataacttttatctgctctggttgagttgggggatattattgccactacaaatttaaatggcag

SEQ ID NO: 18529 - DNA, 110 bp, synthetic construct
  source 1..110: mol_type = other DNA
atgggcagaaatacctctcagtgcggaccctgctgcttagaggtgcctggaggtggtaaattgagtgaatgcctggccggggtggtggggtgttctctgggaccttgtgg

SEQ ID NO: 18530 - DNA, 110 bp, synthetic construct
  source 1..110: mol_type = other DNA
gtaaattgagtgaatgcctggccggggtggtggggtgttctctgggaccttgtggcattaatcctgtgagggctcaagaggccccatgtccccatcctgatgcatcggct

SEQ ID NO: 18531 - DNA, 110 bp, synthetic construct
  source 1..110: mol_type = other DNA
tcagatatttctaaccgctggcctgggtggccatgcctgagcttgcaaagaacccagcatgtccatgaaggtgtgctggaggggaggcagtggtagcatccaccactgtg

SEQ ID NO: 18532 - DNA, 110 bp, synthetic construct
  source 1..110: mol_type = other DNA
agcatgtccatgaaggtgtgctggaggggaggcagtggtagcatccaccactgtgcagctactgggtagggctgtctggtggtagccgggggctgccagacacagaccca

SEQ ID NO: 18533 - DNA, 110 bp, synthetic construct
  source 1..110: mol_type = other DNA
agcccatgattgtgttttgcactagttagcagagaacctgggccacccagccataagctgctttttttttttttttttatcagttcttcaattcctttttcatcccagag

SEQ ID NO: 18534 - DNA, 110 bp, synthetic construct
  source 1..110: mol_type = other DNA
gcaggcaacagcctgtacgtggattgcgtcaaggggtttaacaggagaatccgcccatcctgaaactgcttttgaaacaacgatgtgggctgtgagtgttccaaccacag

SEQ ID NO: 18535 - DNA, 110 bp, synthetic construct
  source 1..110: mol_type = other DNA
catcctgaaactgcttttgaaacaacgatgtgggctgtgagtgttccaaccacaggtcaaggaaatacacatataaactcctcaggcagcctgcaaaagcctgcgtccat

SEQ ID NO: 18536 - DNA, 110 bp, synthetic construct
  source 1..110: mol_type = other DNA
tactcaaggtatttgtcacctttgggaattgcagcctcattcatgcactgtagaatgaaaaagttcaggctcactgggtcatctggagagatgagtgttatctacaagct

SEQ ID NO: 18537 - DNA, 110 bp, synthetic construct
  source 1..110: mol_type = other DNA
tgaaaaagttcaggctcactgggtcatctggagagatgagtgttatctacaagctgtagtcacgaactcagctgtctacagggacaatctgtcatgagaaattagtaaga

SEQ ID NO: 18538 - DNA, 110 bp, synthetic construct
  source 1..110: mol_type = other DNA
caggttcctctgatctcatatttatgaacagaagtcagaaaaaggcatttgggagtccagaatgtatggagcagtttgtacatgaaacaagtgaccctaagatccagaat

SEQ ID NO: 18539 - DNA, 110 bp, synthetic construct
  source 1..110: mol_type = other DNA
acgagggctgagatttgcccccaggtgccaattagcctcctacgggacggagatcttgcaaacagaaagctcagagggtgtctggctatttgcctgttttcacaggagat

SEQ ID NO: 18540 - DNA, 110 bp, synthetic construct
  source 1..110: mol_type = other DNA
ttgcaaacagaaagctcagagggtgtctggctatttgcctgttttcacaggagatagaaatctccttgctgctatgcagggcagtgtttgtgtagtttagttttaagtct

SEQ ID NO: 18541 - DNA, 110 bp, synthetic construct
  source 1..110: mol_type = other DNA
caggttgtttaccactgaaccactatgggaactcctctccgcccatctttctctctttctttctctgtctctctctgtcttctgctgtctctgttttctctgtctgtttc

SEQ ID NO: 18542 - DNA, 110 bp, synthetic construct
  source 1..110: mol_type = other DNA
tgaaccactatgggaactcctctccgcccatctttctctctttctttctctgtctctctctgtcttctgctgtctctgttttctctgtctgtttctctctgtccgtttct

SEQ ID NO: 18543 - DNA, 110 bp, synthetic construct
  source 1..110: mol_type = other DNA
cgcagctagtaatcttttcaccatcacctctttctctttttccacattctcactcactgactctttcatccagatcacttgccgaagtctttggaatccgctccctcaat

SEQ ID NO: 18544 - DNA, 110 bp, synthetic construct
  source 1..110: mol_type = other DNA
actgactctttcatccagatcacttgccgaagtctttggaatccgctccctcaatcaccccgttttagtagaacatgtcttcacactgcactgtctctaacctctgagtg

SEQ ID NO: 18545 - DNA, 110 bp, synthetic construct
  source 1..110: mol_type = other DNA
ccatcacaaatgattggacataggtccctgtgctatacagcaggacctcattgtctattctttctaaatctattaacccagaactcccagtccatctcactccccccgtt

SEQ ID NO: 18546 - DNA, 110 bp, synthetic construct
  source 1..110: mol_type = other DNA
tattctttctaaatctattaacccagaactcccagtccatctcactccccccgtttggcaaccgcaagtctgttgtccatgtctgtgagtccgtttctgatctatagata

SEQ ID NO: 18547 - DNA, 110 bp, synthetic construct
  source 1..110: mol_type = other DNA
tttgaagtgttttgaagacaggctcatatcttctcatattcctccataggtcaaggaaaccaagatcctgaattttaaatctatcttacctttgttattctttatgacat

SEQ ID NO: 18548 - DNA, 110 bp, synthetic construct
  source 1..110: mol_type = other DNA
agacaggctcatatcttctcatattcctccataggtcaaggaaaccaagatcctgaattttaaatctatcttacctttgttattctttatgacatatatattccaacata

SEQ ID NO: 18549 - DNA, 110 bp, synthetic construct
  source 1..110: mol_type = other DNA
tatactcttgttactaaatgggacagttgggggtgagggatagaccagaggtttgggattggtatattcacactgaggtatacggaatgactagccaacagggacctgct

SEQ ID NO: 18550 - DNA, 110 bp, synthetic construct
  source 1..110: mol_type = other DNA
aaatgggacagttgggggtgagggatagaccagaggtttgggattggtatattcacactgaggtatacggaatgactagccaacagggacctgctgtataacacagacaa

SEQ ID NO: 18551 - DNA, 110 bp, synthetic construct
  source 1..110: mol_type = other DNA
atttgggtggccatgaagttgttcatgaattcctatacctcactgactgtcctgtggttttgatgggttgggacttattgggcaagctacaggcccagataactttcaac

SEQ ID NO: 18552 - DNA, 110 bp, synthetic construct
  source 1..110: mol_type = other DNA
actgtcctgtggttttgatgggttgggacttattgggcaagctacaggcccagataactttcaactcccatggccaaacggccctgaccctagggaggccaggggcaaag

SEQ ID NO: 18553 - DNA, 110 bp, synthetic construct
  source 1..110: mol_type = other DNA
aacacatgctgaaatgggaaatctgttcaattgcacatactactaggtgagacaatggaagaagctagaaatacaaagtgaagatttaccaaatgtgtgctggataagag

SEQ ID NO: 18554 - DNA, 110 bp, synthetic construct
  source 1..110: mol_type = other DNA
cggttcccctgtgagacctgagacaccgttttcgccacaccaagcctacctaccagctggtgcaattaaggtctttgctgtcttaggttatctttgagaacacacgttcc

SEQ ID NO: 18555 - DNA, 110 bp, synthetic construct
  source 1..110: mol_type = other DNA
atgtagtatctttcagttacctttcaagaatgtacagtggacatcagaggtgaccagaggctggacaggggcccttggaaagctgctattggagcagagattcgagatcg

SEQ ID NO: 18556 - DNA, 110 bp, synthetic construct
  source 1..110: mol_type = other DNA
agaggctggacaggggcccttggaaagctgctattggagcagagattcgagatcggtgatggtgtgaaatctgcacacccggggaagaaggggaagaacttccctaccag

SEQ ID NO: 18557 - DNA, 110 bp, synthetic construct; identical to SEQ ID NO: 18555
  source 1..110: mol_type = other DNA

SEQ ID NO: 18558 - DNA, 110 bp, synthetic construct; identical to SEQ ID NO: 18556
  source 1..110: mol_type = other DNA

SEQ ID NO: 18559 - DNA, 110 bp, synthetic construct
  source 1..110: mol_type = other DNA
accttccttctaagcatctatctctgccacatcatcacatttcccttttctttctttctttttctttcctttttagggccacacccatgccatatggatgttcccaggct

SEQ ID NO: 18560 - DNA, 110 bp, synthetic construct
  source 1..110: mol_type = other DNA
atctatctctgccacatcatcacatttcccttttctttctttctttttctttcctttttagggccacacccatgccatatggatgttcccaggctaggggctgaatcgga

SEQ ID NO: 18561 - DNA, 110 bp, synthetic construct
  source 1..110: mol_type = other DNA
atgaacatgagggtgcagatatcttttcaagttcctgctgtcattttcttcaggcaaatactccgaaatggaattcttagatgatatggtagttctcttctcagtgtttt

SEQ ID NO: 18562 - DNA, 110 bp, synthetic construct
  source 1..110: mol_type = other DNA
aaatactccgaaatggaattcttagatgatatggtagttctcttctcagtgttttgaggagcccctttactgttttccatagcggctggaccaatttacattcccatcag

SEQ ID NO: 18563 - DNA, 110 bp, synthetic construct
  source 1..110: mol_type = other DNA
ggtaccaggagggtaccggtgaacaggttcagaggtcagagctccaccatcaggattgaaagtcctgacacttcatcagcttgatttctctttaaatttggcaggagatc

SEQ ID NO: 18564 - DNA, 110 bp, synthetic construct
  source 1..110: mol_type = other DNA
gtgtgtgtgtgtgtgtagatgattgctatgcttgttttttgagcttttttcttggttttttggtctttttagggccacacctaccacagatggaagttcccagacaagga

SEQ ID NO: 18565 - DNA, 110 bp, synthetic construct; identical to SEQ ID NO: 18564
  source 1..110: mol_type = other DNA

SEQ ID NO: 18566 - DNA, 110 bp, synthetic construct
  source 1..110: mol_type = other DNA
tagtgttcacttctggggcaagtcggctcaatggaatggcatagaatggagaccaagctgatccccaagttggaaagcataccgagatgacgcttatcggaccagtcaac

SEQ ID NO: 18567 - DNA, 110 bp, synthetic construct
  source 1..110: mol_type = other DNA
agctgatccccaagttggaaagcataccgagatgacgcttatcggaccagtcaactagagtcgcaaagaaccagttcaacccagatctgccaattccaaataacacaaag

SEQ ID NO: 18568 - DNA, 110 bp, synthetic construct
  source 1..110: mol_type = other DNA
gtggctacgtgggacccgcaccactggcctcttttcctgcctctcacagtgctcagatgatgcctaaaccacttgaaatccaattgtccattctgggggccttttgagct

SEQ ID NO: 18569 - DNA, 110 bp, synthetic construct
  source 1..110: mol_type = other DNA
gatgatgcctaaaccacttgaaatccaattgtccattctgggggccttttgagctaccaaatatgggtaaggtattaataagtaacaagccgttttaaaaatatatatat

SEQ ID NO: 18570 - DNA, 110 bp, synthetic construct
  source 1..110: mol_type = other DNA
taagcactgttatcgtccacaaaattccgtaacattgtgaatttcagggacacatatccttctttgtaggagaaatgactatgtattgaaattcaggttatttttattaa

SEQ ID NO: 18571 - DNA, 110 bp, synthetic construct
  source 1..110: mol_type = other DNA
tccgtaacattgtgaatttcagggacacatatccttctttgtaggagaaatgactatgtattgaaattcaggttatttttattaagaattattttattttcacgtctccg

SEQ ID NO: 18572 - DNA, 110 bp, synthetic construct
  source 1..110: mol_type = other DNA
gcttcgttgaaaaggagaagctgaaaatcagatgcatacacgagcgtgtgatctgacagatcagatgttggaggaaacacttgagaaccgacgtggttcaaggagagcaa

SEQ ID NO: 18573 - DNA, 110 bp, synthetic construct
  source 1..110: mol_type = other DNA
agccaattatgagatttatggattccagagttcccatctgtggctcagtggaaaagaacctgactagtattcatgaggatgacgtttcagtctctggtctcgcttggtgg

SEQ ID NO: 18574 - DNA, 110 bp, synthetic construct
  source 1..110: mol_type = other DNA
gaacctgactagtattcatgaggatgacgtttcagtctctggtctcgcttggtgggttatggacctggttttgccgtgagctatgatgtaggtagcagacatggctggca

SEQ ID NO: 18575 - DNA, 110 bp, synthetic construct
  source 1..110: mol_type = other DNA
cccaggcaaggggactaatcaactacagctgccgacctataccacagccacattaaggcaggatctgagctgagtctgcgacttacagctcaaggcaatgccagatcctt

SEQ ID NO: 18576 - DNA, 110 bp, synthetic construct; identical to SEQ ID NO: 18575
  source 1..110: mol_type = other DNA

SEQ ID NO: 18577 - DNA, 110 bp, synthetic construct
  source 1..110: mol_type = other DNA
tcgggcgttgccccgtgaattgtgatgtaggtatcagacgtggctcggatctggtgttgctatggctgtgcacagcataggccggaggctgcagctccaatttgactgct

SEQ ID NO: 18578 - DNA, 110 bp, synthetic construct
  source 1..110: mol_type = other DNA
gttgctatggctgtgcacagcataggccggaggctgcagctccaatttgactgctaacctaggaatttccatatgctgcaggtgcaaccaaaaacaaacaaaaacaaaaa

SEQ ID NO: 18579 - DNA, 110 bp, synthetic construct
  source 1..110: mol_type = other DNA
ggtaggggtgagagctgggtgcacttgctgggcaggacctggggtagctctcagcaagacatctgtttgcagatggaccaggaggaaatgcttgaaggtgatttgggggc

SEQ ID NO: 18580 - DNA, 110 bp, synthetic construct
  source 1..110: mol_type = other DNA
aagacatctgtttgcagatggaccaggaggaaatgcttgaaggtgatttgggggcttcttggggagaggatgactggttgagctgaggttggccctccgtagccactgtg

SEQ ID NO: 18581 - DNA, 110 bp, synthetic construct
  source 1..110: mol_type = other DNA
tatgatgatacacacttgaacaaagtacacatataggtccactgcaggtactttattcggtatacagataacttgctctttactttggtcgctggggttccaggtgctga

SEQ ID NO: 18582 - DNA, 110 bp, synthetic construct
  source 1..110: mol_type = other DNA
ctgaagcaccgaaaatacgcccaaatccacaaaactgccttaccaagctttacgctttaattctacagtttggaaaagctgctgttcaattaagctaggctatgtggaaa

SEQ ID NO: 18583 - DNA, 110 bp, synthetic construct
  source 1..110: mol_type = other DNA
agaggacttacaactttgaaaggagtcttatattctttggctttgtattctctaaaggggtattcagtagcttgaatgaacacaactcctgatggactcaaagctcaatt

SEQ ID NO: 18584 - DNA, 110 bp, synthetic construct
  source 1..110: mol_type = other DNA
ggatagaggaatagatggcaaatacaaatttgcatcctcttgagggttggcggagggattcttgcaggtgttattatagactctagacccatggggcattgcatccacca

SEQ ID NO: 18585 - DNA, 110 bp, synthetic construct
  source 1..110: mol_type = other DNA
cctgcgtcttcatggaagttagtcagattcgtttctgctgagccacaatgggaacctctgacttgatcactttgattggggacctaagaattcaccctggggaaaggata

SEQ ID NO: 18586 - DNA, 110 bp, synthetic construct
  source 1..110: mol_type = other DNA
ctctgacttgatcactttgattggggacctaagaattcaccctggggaaaggataatctcttctataaattgtgctgggaaaacttgatatctaaaagcaaaagaatgac

SEQ ID NO: 18587 - DNA, 110 bp, synthetic construct
  source 1..110: mol_type = other DNA
aaaaagcaaccaagagtcctgcagaaagggatcttagcgtccctgtgaaggggtggagctaagctaccctgtggaggggcggggctaagctaccctgtggaggggcggag

SEQ ID NO: 18588 - DNA, 110 bp, synthetic construct
  source 1..110: mol_type = other DNA
gagctaagctaccctgtggaggggcggggctaagctaccctgtggaggggcggagctactaagcagccatcactgccttcctttcctctctgctctctgcccttgcttct

SEQ ID NO: 18589 - DNA, 110 bp, synthetic construct
  source 1..110: mol_type = other DNA
tttgaagagtaaaatgtttaatattgatgaattccaattccaatttttttcctattccggaagtttcctggtggtgcagtccattacattatcattttagaggcttgggt

SEQ ID NO: 18590 - DNA, 110 bp, synthetic construct
  source 1..110: mol_type = other DNA
tccggaagtttcctggtggtgcagtccattacattatcattttagaggcttgggttgtggctgtggcgtcgttttgatccctggcctgggaactttcacatgctgtgggc

SEQ ID NO: 18591 - DNA, 110 bp, synthetic construct
  source 1..110: mol_type = other DNA
gtctcagcttaggtccactctgcagcctccaatatccatcttgtccaggatgctctgagcagagcatgctgcagcttgaaccgaggagtcagaggctcttcagcacctgt

SEQ ID NO: 18592 - DNA, 110 bp, synthetic construct
  source 1..110: mol_type = other DNA
tgagcagagcatgctgcagcttgaaccgaggagtcagaggctcttcagcacctgttgacttctcaaggcactaacaggagcttccttctgtcaagtcaatcctgagtgtc

SEQ ID NO: 18593 - DNA, 110 bp, synthetic construct
  source 1..110: mol_type = other DNA
actgggcaactcaaatatttcactgctcttcacatatccaggagtgaccacaaaagtatcctaagtattggtttggaggtgataaagaaactttagtaagaaaatctcca

SEQ ID NO: 18594 - DNA, 110 bp, synthetic construct
  source 1..110: mol_type = other DNA
gtatcctaagtattggtttggaggtgataaagaaactttagtaagaaaatctccaagtattgaatccacaaataaggaggacagactgtatacaaactgacaatccaata

SEQ ID NO: 18595 - DNA, 110 bp, synthetic construct
  source 1..110: mol_type = other DNA
tacctgtgtgacccctagagcttagccctttcagtacaaagagagacattgggccaccttggctgagactgttggacctgagaggacacgagggacatgggttcactccc

SEQ ID NO: 18596 - DNA, 110 bp, synthetic construct
  source 1..110: mol_type = other DNA
ccctttcagtacaaagagagacattgggccaccttggctgagactgttggacctgagaggacacgagggacatgggttcactccctggcctccctcagtgggttaaggat

SEQ ID NO: 18597 - DNA, 110 bp, synthetic construct
  source 1..110: mol_type = other DNA
ccatgtttctaaagagacattatttatgcaaacatgcttttcttccatgtgccctagcttgccaacagcaaagagctcgtaatgggcccaggccctgtttaaaatatgca

SEQ ID NO: 18598 - DNA, 110 bp, synthetic construct
  source 1..110: mol_type = other DNA
agcttgccaacagcaaagagctcgtaatgggcccaggccctgtttaaaatatgcaccaacaccctcgccaagtctagcaccatgtaaatgtcgaggggagtaaaggcctg

SEQ ID NO: 18599 - DNA, 110 bp, synthetic construct
  source 1..110: mol_type = other DNA
cttttgtattttcagagcattcaacttgagttttcctttctttgcatatcatactcctttgcacttacgggttatataattaagtcacatatgtgtgctcacaaacgtgg

SEQ ID NO: 18600 - DNA, 110 bp, synthetic construct
  source 1..110: mol_type = other DNA
tgcatatctgtttcgtctttttttgcttttgtcttggctgtccctggggcatgtataagttcccaggccggggatcaaacccatgccacagcagcaaccggagtcactgc

SEQ ID NO: 18601 - DNA, 110 bp, synthetic construct
  source 1..110: mol_type = other DNA
tctttttttgcttttgtcttggctgtccctggggcatgtataagttcccaggccggggatcaaacccatgccacagcagcaaccggagtcactgcagtgatagcaccaga

SEQ ID NO: 18602 - DNA, 110 bp, synthetic construct
  source 1..110: mol_type = other DNA
ttctagagatttggtggccaaagctgaccaaggggaggacaattgggacccactattaatttaaaatacggcattaattgataaattagttacctctaggtggcaatggg

SEQ ID NO: 18603 - DNA, 110 bp, synthetic construct
  source 1..110: mol_type = other DNA
ttcttcatgccttgacaccttccgtccccgcctcttttctagggccacacctgcggcatgtggaagttcttggcctaggggtcgaattggagctggagctgccggcccac

SEQ ID NO: 18604 - DNA, 110 bp, synthetic construct
  source 1..110: mol_type = other DNA
gcatgtggaagttcttggcctaggggtcgaattggagctggagctgccggcccacgtcacagccacagcaacgcccagatctgagttattattattttgttctttttttt

SEQ ID NO: 18605 - DNA, 110 bp, synthetic construct
  source 1..110: mol_type = other DNA
gtctgatggtctacatttgtctctttgattatgtccagtttctaagtcagtcttgtaatctgtgcatttcagcccaggtgctacttaccttgaccctagggttatccaac

SEQ ID NO: 18606 - DNA, 110 bp, synthetic construct
  source 1..110: mol_type = other DNA
taatctgtgcatttcagcccaggtgctacttaccttgaccctagggttatccaacagtccaagaaaattaaatgaggcgaagtttatacattcttttccatttaccacaa

SEQ ID NO: 18607 - DNA, 110 bp, synthetic construct
  source 1..110: mol_type = other DNA
tagctctcaacctacaaaaatcttttcataagaaatcacccctgctttttttgggggggagggaaggcagttatcacagttagcagcataaaaatgaggccgttcatatg

SEQ ID NO: 18608 - DNA, 110 bp, synthetic construct
  source 1..110: mol_type = other DNA
ggggagggaaggcagttatcacagttagcagcataaaaatgaggccgttcatatgagttttcaacagtatccccaaatttgatgaaaaataacacatttaacaagaagtt

SEQ ID NO: 18609 - DNA, 110 bp, synthetic construct
  source 1..110: mol_type = other DNA
tcacaacagccaggatgtgacagcaatctaagtgtccattgatatgtaaacggataaagacggtatggtatatagtgatgacggaacattagtcatgtcagataatgaaa

SEQ ID NO: 18610 - DNA, 110 bp, synthetic construct
  source 1..110: mol_type = other DNA
aaagacggtatggtatatagtgatgacggaacattagtcatgtcagataatgaaatcctgccatttgtaacaacatggatggacccagaaggtatcaggctcagcgaaat

SEQ ID NO: 18611 - DNA, 110 bp, synthetic construct
  source 1..110: mol_type = other DNA
tggctctgcttctgtcacgtctctccctctgcctgtagtcaaatctccctccacctcttcttacaaggaccatgatgacgacgtggggccagccaggtactgggtgggat

SEQ ID NO: 18612 - DNA, 110 bp, synthetic construct
  source 1..110: mol_type = other DNA
tcttcttacaaggaccatgatgacgacgtggggccagccaggtactgggtgggattaacgccctgcaagacccttaatcacatctgccacctaaggtaacacattcccag

SEQ ID NO: 18613 - DNA, 110 bp, synthetic construct
  source 1..110: mol_type = other DNA
ctggcttctctgcttttctgtaaacaacattattttgtagttaaagcacaaagaatttcttagctccagggtggtaataactatatcttatactctattactctctatga

SEQ ID NO: 18614 - DNA, 110 bp, synthetic construct
  source 1..110: mol_type = other DNA
tcttcgccttgtctgcaaccttcaccacagctcatgacaacaccagattcccgacccacctagcaagcctggggcttgaacccacatcctcatcctcggttttgtttctg

SEQ ID NO: 18615 - DNA, 110 bp, synthetic construct; identical to SEQ ID NO: 18614
  source 1..110: mol_type = other DNA

SEQ ID NO: 18616 - DNA, 110 bp, synthetic construct
  source 1..110: mol_type = other DNA
agagtcacgcagccagaccaccacaggcccatctggaagctaagattattattttgctcaggcttccataacaaaataccacaggtgggtggcttaaaccatagaagtct

SEQ ID NO: 18617 - DNA, 110 bp, synthetic construct
  source 1..110: mol_type = other DNA
gtgtcacttaattaacaacgtggagggattccccccgtcatagcccctgtgtgagatctgtgttctttgcagctctctacgagcagtcctgtgaagcccacaggcacaga

SEQ ID NO: 18618 - DNA, 110 bp, synthetic construct
  source 1..110: mol_type = other DNA
atctgtgttctttgcagctctctacgagcagtcctgtgaagcccacaggcacagaggaaactcctcaggcctctactacatcgattcagacggaagtggcccactgggag

SEQ ID NO: 18619 - DNA, 110 bp, synthetic construct
  source 1..110: mol_type = other DNA
gtggtagcacttctaccccactggcagaactcagctagtattctccaattcctctacaggaccagtgttaaaaaagctaaaataggaggtataacgaagatccagattct

SEQ ID NO: 18620 - DNA, 110 bp, synthetic construct
  source 1..110: mol_type = other DNA
acaggaccagtgttaaaaaagctaaaataggaggtataacgaagatccagattcttataatacagtacccaaaatattcagtttcagtacaaaatcattcatcataccaa

SEQ ID NO: 18621 - DNA, 110 bp, synthetic construct
  source 1..110: mol_type = other DNA
ttgaataggcactgattctaaatcctaagtacaatgcccccacttcgttctcccttttgctcaaaggttatcctaccattaagttttccccaactgtcttttgaaaccac

SEQ ID NO: 18622 - DNA, 110 bp, synthetic construct
  source 1..110: mol_type = other DNA
tttgctcaaaggttatcctaccattaagttttccccaactgtcttttgaaaccacggcaagctcagcccagcgctgtcgtcccccatggccctcccctgtgcacctgtag

SEQ ID NO: 18623 - DNA, 110 bp, synthetic construct
  source 1..110: mol_type = other DNA
aggtgtctcatccattggtaagtgactgaggccatgttctccagggttcctggactgtgactgagaggagctagagtcagttactggaccactgcagagtcagtcaggac

SEQ ID NO: 18624 - DNA, 110 bp, synthetic construct
  source 1..110: mol_type = other DNA
tgtgactgagaggagctagagtcagttactggaccactgcagagtcagtcaggactgagatctgtatgcctattatctgatgcatgcatgggcaagatgcctgcagtgtc

SEQ ID NO: 18625 - DNA, 110 bp, synthetic construct
  source 1..110: mol_type = other DNA
accctgtctggtcccggagctcttcttaacccctcatctagagcccaaaaaaacttcatagttaagctctgaataagaaatcggtccaaaaattctgcattccctccggg

SEQ ID NO: 18626 - DNA, 110 bp, synthetic construct
  source 1..110: mol_type = other DNA
tcatagttaagctctgaataagaaatcggtccaaaaattctgcattccctccgggcaacctgaaagacagtcagttaggaccagagagggtgaatggctttcccagtgca

SEQ ID NO: 18627 - DNA, 110 bp, synthetic construct
  source 1..110: mol_type = other DNA
atacccgaagtaagctaacctatagttgtgttttttcctgtatttagattctctagcagcaaatatatttttctgccttctgctcaatttggggtattttatacttcttt

SEQ ID NO: 18628 - DNA, 110 bp, synthetic construct
  source 1..110: mol_type = other DNA
tcaacatccctaatcctactagcttccaaacttcttgccttgcattccctcttctgccaccatataatctttcctataagtatagtccaggttaaacactacattttcca

SEQ ID NO: 18629 - DNA, 110 bp, synthetic construct
  source 1..110: mol_type = other DNA
gccaccatataatctttcctataagtatagtccaggttaaacactacattttccacaagatctctttttagcgcccctgaactttcttgttgcacggcctccaatctgct

SEQ ID NO: 18630 - DNA, 110 bp, synthetic construct
  source 1..110: mol_type = other DNA
ctgtgtccaattcttcagaatacatattcttttcataaatgtacatagaacttatgcgaaaattggccaaatgctaggccatatatcaagcttctacaatttcaaaggaa

SEQ ID NO: 18631 - DNA, 110 bp, synthetic construct
  source 1..110: mol_type = other DNA
gcgaaaattggccaaatgctaggccatatatcaagcttctacaatttcaaaggaatgaaatcatggggtactttctacgaccacagtggagttaataagctagaaatcaa

SEQ ID NO: 18632 - DNA, 110 bp, synthetic construct
  source 1..110: mol_type = other DNA
gactttatattataaaaactaagtccaaagacttagacttagactttatattataaaaactaagtccaaagacttagtgggtgtggagctagccaatgctaccactctac

SEQ ID NO: 18633 - DNA, 110 bp, synthetic construct
  source 1..110: mol_type = other DNA
aaaactaagtccaaagacttagtgggtgtggagctagccaatgctaccactctaccttccccaagatgctccctttcttttatagcccttacctgtgcccttgccaaatg

SEQ ID NO: 18634 - DNA, 110 bp, synthetic construct
  source 1..110: mol_type = other DNA
cagatctggggtcgagtgtgtccccatactgtgggtctcaggccatctccatcccttaggtggggttccaggctgcagctggaaaacctcatgactgacatcagagtgtc

SEQ ID NO: 18635 - DNA, 110 bp, synthetic construct
  source 1..110: mol_type = other DNA
ttaggtggggttccaggctgcagctggaaaacctcatgactgacatcagagtgtccaaattgctaaagccatttagtcttaagaaaatgtcctcccaatggaatagaatt

SEQ ID NO: 18636 - DNA, 110 bp, synthetic construct; identical to SEQ ID NO: 18634
  source 1..110: mol_type = other DNA

SEQ ID NO: 18637 - DNA, 110 bp, synthetic construct
  source 1..110: mol_type = other DNA
tctccatcccttaggtggggttccaggctgcagctggaaaacctcatgactgacatcagagtgtccaaattgctaaagccatttagtcttaagaaaatgtcctcccaatg

SEQ ID NO: 18638 - DNA, 110 bp, synthetic construct
  source 1..110: mol_type = other DNA
gccctctcctccaacccaccgccagcgctatcgtggaacttttcctctcactgcgaccccgttaccccgcaaggcagcaggcagggccggacacgcggtccccataccag

SEQ ID NO: 18639 - DNA, 110 bp, synthetic construct
  source 1..110: mol_type = other DNA
gatcccttggacagtgttaagatcttcctgccgtttttctgttgaatttttatatgatccctaagtgccagcagggatcagatcaccatccctacctacaccagcaaagg

SEQ ID NO: 18640 - DNA, 110 bp, synthetic construct
  source 1..110: mol_type = other DNA
gatccctaagtgccagcagggatcagatcaccatccctacctacaccagcaaagggatggtgagagtggaggttctggatcgcggacctacgataagattccttttcttc

SEQ ID NO: 18641 - DNA, 110 bp, synthetic construct
  source 1..110: mol_type = other DNA
tgacttatttcacttagtataaggtcctccaagttcattcagcttgtctcaaatgcgggctttccttctttcccatggctgagtatattccattgtacatatattactta

SEQ ID NO: 18642 - DNA, 110 bp, synthetic construct
  source 1..110: mol_type = other DNA
cgggctttccttctttcccatggctgagtatattccattgtacatatattacttagttttcacatatttgtgaataatttctccttttttttttttctgttacggacttc

SEQ ID NO: 18643 - DNA, 110 bp, synthetic construct
  source 1..110: mol_type = other DNA
tgcaacctcatagttactagttggattcatttccactatgccacaacaggaactccaaaattactcctgcttgagaaccactgatttatatgtagttttttacagggtag

SEQ ID NO: 18644 - DNA, 110 bp, synthetic construct; identical to SEQ ID NO: 18643
  source 1..110: mol_type = other DNA

SEQ ID NO: 18645 - DNA, 110 bp, synthetic construct
  source 1..110: mol_type = other DNA
gagctcaataccttccttctctaatgtactcagatttgcccctgaaggacagacttgagactctgaacactattgtgctttggtttttgtgtccgagccaacaggcttcc

SEQ ID NO: 18646 - DNA, 110 bp, synthetic construct
  source 1..110: mol_type = other DNA
tgagactctgaacactattgtgctttggtttttgtgtccgagccaacaggcttcccgaaggctcatttcttttccatttcatgtaggtgtattgggctgacatatcctaa

SEQ ID NO: 18647 - DNA, 110 bp, synthetic construct
  source 1..110: mol_type = other DNA
cctataaggtcaaggtgcttatgcaaatcagcagaagggcggtccttaaattcctgccctgggtctgaaggcaggcctcacctcaccccccacccaatgacctcgggcat

SEQ ID NO: 18648 - DNA, 110 bp, synthetic construct
  source 1..110: mol_type = other DNA
tgcttatgcaaatcagcagaagggcggtccttaaattcctgccctgggtctgaaggcaggcctcacctcaccccccacccaatgacctcgggcatatctcgtgcctccac

SEQ ID NO: 18649 - DNA, 110 bp, synthetic construct
  source 1..110: mol_type = other DNA
ttactttaagtactttaaatgtattaatatatttgtcatatgcatttaatcacgtccgtttccatcacactgcctctcccattgtcattagaggaaaagagggaaggact

SEQ ID NO: 18650 - DNA, 110 bp, synthetic construct
  source 1..110: mol_type = other DNA
tgcttgttatgtgggaaaatgatgataggagtgcaagatgataatttaccctcccagccttggtttttttcagctgtaaattaggaacagtaatgcctaaggaagataag

SEQ ID NO: 18651 - DNA, 110 bp, synthetic construct
  source 1..110: mol_type = other DNA
agccttggtttttttcagctgtaaattaggaacagtaatgcctaaggaagataaggtgaaatgccacatttgaaaaggaccaatatgtcacagattccctttaagaaatt

SEQ ID NO: 18652 - DNA, 110 bp, synthetic construct
  source 1..110: mol_type = other DNA
tgtttgggatgaaatttaagaaggaagaacttccagatgctttactggaatgcttcactgttagtgagaagccaaataaagggttttcaagctaagtagccaatgttatt

SEQ ID NO: 18653 - DNA, 110 bp, synthetic construct
  source 1..110: mol_type = other DNA
cactgttagtgagaagccaaataaagggttttcaagctaagtagccaatgttattgtttatgtaatccaattacattgaatctttatccatgtatatctgacttctgctt

SEQ ID NO: 18654 - DNA, 110 bp, synthetic construct
  source 1..110: mol_type = other DNA
ctctggctctgttgtacttgtccccagaatctgctcttcagtagcagtcagatataaccctagcactaaggaaatttcactcgtggtttacttaataaacacaattctca

SEQ ID NO: 18655 - DNA, 110 bp, synthetic construct
  source 1..110: mol_type = other DNA
agcctgtttctgcttcaattcctcctctcagttgttctgaggagacacaaggcccatcccagatgagggactgtggctcatgtagagaagcagttcataccgggaaggag

SEQ ID NO: 18656 - DNA, 110 bp, synthetic construct
  source 1..110: mol_type = other DNA
atcccagatgagggactgtggctcatgtagagaagcagttcataccgggaaggagagagtatggaaggaccgctgagacgctagcttggctggggcacaggaaggggaga

SEQ ID NO: 18657 - DNA, 110 bp, synthetic construct
  source 1..110: mol_type = other DNA
gttcctagtcggattcgtttccactgcgccacgtcgggaactccctcactatccttttaatcaattcctttcctgccccattaagcctgtgtcagagtctgttgcttgtc

SEQ ID NO: 18658 - DNA, 110 bp, synthetic construct; identical to SEQ ID NO: 18657
  source 1..110: mol_type = other DNA

SEQ ID NO: 18659 - DNA, 110 bp, synthetic construct
  source 1..110: mol_type = other DNA
caacccaaactgctgccagagccttaacttactgcgccatagcaggaactcctcagttcaaactctttgttctatgaaaactactctttcccctccagtccttaaggacc

SEQ ID NO: 18660 - DNA, 110 bp, synthetic construct
  source 1..110: mol_type = other DNA
gttcaaactctttgttctatgaaaactactctttcccctccagtccttaaggacctttctcttgtcattcttcttcttcttcttttttttttcctttttagggatgcacc

SEQ ID NO: 18661 - DNA, 110 bp, synthetic construct
  source 1..110: mol_type = other DNA
tttcccctgagccacgatgggaactcccaaggctgctttattggctcagggctgaattgctttctcccagtgaccacctcgctgtcccctctggccagctctgagaggct

SEQ ID NO: 18662 - DNA, 110 bp, synthetic construct
  source 1..110: mol_type = other DNA
attgctttctcccagtgaccacctcgctgtcccctctggccagctctgagaggctctggcacagtatttcttcctagttggagctcaggcttggggcatttttctttttt

SEQ ID NO: 18663 - DNA, 110 bp, synthetic construct
  source 1..110: mol_type = other DNA
gtggagtattacgaaggataaattaactgaatgcatgcaaagcccatagcaagaatacaagtgttgtgttattatcacagtgcctaattcctgcctagatgttgaaggtt

SEQ ID NO: 18664 - DNA, 110 bp, synthetic construct
  source 1..110: mol_type = other DNA
tacaagtgttgtgttattatcacagtgcctaattcctgcctagatgttgaaggtttttcacttcaaatgtacaaaaacaacataagtgatcatttgaagagataacacac

SEQ ID NO: 18665 - DNA, 110 bp, synthetic construct
  source 1..110: mol_type = other DNA
cttccaaatgctgtgggtgcagtggtgaaaaaaaaaactcttctgttttaatacataatcaactaaatgatgctatatgcatatatgatcgaatagaactctacctacct

SEQ ID NO: 18666 - DNA, 110 bp, synthetic construct
  source 1..110: mol_type = other DNA
cagcatgtgctctggaaatagatagacgcaggtgcaactgctcaggaaggtcattgaagacccaggcttctctctcttcctgccctctcattatgagcgtctttagctct

SEQ ID NO: 18667 - DNA, 110 bp, synthetic construct
  source 1..110: mol_type = other DNA
gaagacccaggcttctctctcttcctgccctctcattatgagcgtctttagctctctcttaagcatcttcagctctagcatcattaacatcgttagctccagcatgttta

SEQ ID NO: 18668 - DNA, 110 bp, synthetic construct
  source 1..110: mol_type = other DNA
ggcaggcattcaagttaatttcctgaggatactgaagctcctgttggtcttttgattgcagtcttagaaccttttggggttgcgggttcttttctcctttttcataaaaa

SEQ ID NO: 18669 - DNA, 110 bp, synthetic construct
  source 1..110: mol_type = other DNA
ttgcagtcttagaaccttttggggttgcgggttcttttctcctttttcataaaaaatgggaaagaggcagtttttcaggggatagaggggagtttgggttatgccctgca

SEQ ID NO: 18670 - DNA, 110 bp, synthetic construct
  source 1..110: mol_type = other DNA
aacaacaacaaacccaaataacaaatgtcagcaagaatgtggagaaagggtaaacctcttgcactattggtgggaatgtaaattggcataggcaccatggaatacagtat

SEQ ID NO: 18671 - DNA, 110 bp, synthetic construct
  source 1..110: mol_type = other DNA
ctcttgcactattggtgggaatgtaaattggcataggcaccatggaatacagtatggaagttcctcaaaaaattaaaaataaacctaccatgcaatccagcagttgcact

SEQ ID NO: 18672 - DNA, 110 bp, synthetic construct
  source 1..110: mol_type = other DNA
tgaagccagagagaggagcaaggggggggagaagtaaaacctctttggataaggttaggcatcacatcaatatgccagatgccactttcttggtatcaagtgctacgtgt

SEQ ID NO: 18673 - DNA, 110 bp, synthetic construct
  source 1..110: mol_type = other DNA
taggcatcacatcaatatgccagatgccactttcttggtatcaagtgctacgtgttttacatttattatgtcattttatcctcacaataagttcctgaaaggctactata

SEQ ID NO: 18674 - DNA, 110 bp, synthetic construct
  source 1..110: mol_type = other DNA
ttctgctagaagacatatattctggcccactcggcttgtctgccctgagaagcaaaagcaagatcctgggaataaggggttacgtttaccaggagcagatggtcgttctc

SEQ ID NO: 18675 - DNA, 110 bp, synthetic construct
  source 1..110: mol_type = other DNA
aagcaagatcctgggaataaggggttacgtttaccaggagcagatggtcgttctccatcaagctcagtaccctgggtacttgaacggacttggctttcctcagggatgat

SEQ ID NO: 18676 - DNA, 110 bp, synthetic construct
  source 1..110: mol_type = other DNA
tatttcggtcagcctcattttctaaagagattgttcaccagagccatctgtgatcattagggtgagcaaaatcttcaaaggcgtgtctgtgttaggggaggtacccacgg

SEQ ID NO: 18677 - DNA, 110 bp, synthetic construct
  source 1..110: mol_type = other DNA
attagggtgagcaaaatcttcaaaggcgtgtctgtgttaggggaggtacccacggcattatcgccaagctggattgaccgtgctggagatgagaacactgatgatgcctg

SEQ ID NO: 18678 - DNA, 110 bp, synthetic construct
  source 1..110: mol_type = other DNA
gccattcactgtgctgtagttatttgtgtctgagagtaagtcctataattggtgaatatataaagtacaatgggaacacacatgactatttctgaaggaggagagatgag

SEQ ID NO: 18679 - DNA, 110 bp, synthetic construct
  source 1..110: mol_type = other DNA
atatataaagtacaatgggaacacacatgactatttctgaaggaggagagatgagtcagcaaaaactacaaaaaggtgttgacatttgaacttactagaaagatgcgtaa

SEQ ID NO: 18680 - DNA, 110 bp, synthetic construct
  source 1..110: mol_type = other DNA
atgccctgagagttttccttgtcctgcttgaaaagtcaagctggatctcttagacagttgaatacactttcctcttgccaagcacaatgcctaatttgggctacaggctc

SEQ ID NO: 18681 - DNA, 110 bp, synthetic construct
  source 1..110: mol_type = other DNA
cccatgccaaacaagattttgccttcaactactccaaccaaactactcttgtttgtttaaggttacaatgacttcaacactgcgaaatccctaatctagtcttaaagcta

SEQ ID NO: 18682 - DNA, 110 bp, synthetic construct
  source 1..110: mol_type = other DNA
tttaaggttacaatgacttcaacactgcgaaatccctaatctagtcttaaagctaatcatatttgaccttttggcaagcatttcatggctattcattttccactcctaaa

SEQ ID NO: 18683 - DNA, 110 bp, synthetic construct
  source 1..110: mol_type = other DNA
cttctgctccaccccacttccaactagtgcatagttctcacccttacctatctagggctctgctcatgcttctttcccaggagctgctcttctgcagatgtaatagtatc

SEQ ID NO: 18684 - DNA, 110 bp, synthetic construct
  source 1..110: mol_type = other DNA
ggctctgctcatgcttctttcccaggagctgctcttctgcagatgtaatagtatctgctcctttttgacctctttctttgttctagtacattcatgacccttattgctgc

SEQ ID NO: 18685 - DNA, 110 bp, synthetic construct
  source 1..110: mol_type = other DNA
ctataatggtggcatgagcacaggttgagatggagcttctatcagcccaggtcgctgagggaccaggatgaacagagccccacagccaactctcattggacacagagtgt

SEQ ID NO: 18686 - DNA, 110 bp, synthetic construct
  source 1..110: mol_type = other DNA
ataaaagcatctttgaaatgggaagaatcctactgccatctcaggctgcctggcctgacacaaaagattcctctctgtctcttgttcctcaagacaggactctaaataac

SEQ ID NO: 18687 - DNA, 110 bp, synthetic construct
  source 1..110: mol_type = other DNA
tgacacaaaagattcctctctgtctcttgttcctcaagacaggactctaaataacactgcaggcttgcacagacaacggtcaggaggaggctgcctgtgtcagctgctta

SEQ ID NO: 18688 - DNA, 110 bp, synthetic construct
  source 1..110: mol_type = other DNA
ctgggaaaactggaataactggccttcagataaatattttcagaagactttacgagctcaattcttgcatctcctcatatctggaaaaactaaaattcgccaatgatgac

SEQ ID NO: 18689 - DNA, 110 bp, synthetic construct
  source 1..110: mol_type = other DNA
gctcaattcttgcatctcctcatatctggaaaaactaaaattcgccaatgatgactgatgtcgtgactagtggtaactgtcatgagaccaacagaaatcctctgtaaaac

SEQ ID NO: 18690 - DNA, 110 bp, synthetic construct
  source 1..110: mol_type = other DNA
tgtttaccaaattacattgtaggaagaattaaattaaggatctagagataagctcctcctggattatcagagttggccctaagtccaaagccaagtgtctaacaggagac

SEQ ID NO: 18691 - DNA, 110 bp, synthetic construct
  source 1..110: mol_type = other DNA
ctcctggattatcagagttggccctaagtccaaagccaagtgtctaacaggagacccacaggagttcccatcatggctcagtggtaataaactcgactagcatccatgag

SEQ ID NO: 18692 - DNA, 110 bp, synthetic construct
  source 1..110: mol_type = other DNA
gaatcaagggctggagaagaagagaaagaaatctagaactcactgcaaaagatgcatgtctgagtctgctcaacatctctgagcctgagtctcttgtgtggcttggagag

SEQ ID NO: 18693 - DNA, 110 bp, synthetic construct
  source 1..110: mol_type = other DNA
aatcaagagatgggatgggaaagatgcgatcatactacctcttgatccagctacatctccagcccaatccctttagaggggataaagtacttcttaccctttagcaagta

SEQ ID NO: 18694 - DNA, 110 bp, synthetic construct
  source 1..110: mol_type = other DNA
tcagagcaaagccagttgcccaatgtcacaactttaggtctatatactaaagatttaggtaatctactctgggtctgaaaaatgtggaacatacatgggcttagcatctt

SEQ ID NO: 18695 - DNA, 110 bp, synthetic construct
  source 1..110: mol_type = other DNA
taggtaatctactctgggtctgaaaaatgtggaacatacatgggcttagcatcttgacagacaagttgtggtatttatctgagacataatacgtggtcttatcctcaagg

SEQ ID NO: 18696 - DNA, 110 bp, synthetic construct
  source 1..110: mol_type = other DNA
tgtcctacagtggcattgtggacacacagcttgctgcctgctcctggggtccccctcaagccctgggcatctcctcatcctcatccgacatcacaagtccgatgatggct

SEQ ID NO: 18697 - DNA, 110 bp, synthetic construct
  source 1..110: mol_type = other DNA
cagcatcttccctcagtcctcaaactgggatggagttgtctagccatcagtctaatccagcaaactctcagctctgtgggagttgaggacatgcctgctttatcagcact

SEQ ID NO: 18698 - DNA, 110 bp, synthetic construct
  source 1..110: mol_type = other DNA
tggttcctctcctccagacctggtctagcaaagcctggcatctagaacacattcctatgatttcacttacacaggatgtaacatcacagtcgcctgcatcactttagaca

SEQ ID NO: 18699 - DNA, 110 bp, synthetic construct
  source 1..110: mol_type = other DNA
tatgatttcacttacacaggatgtaacatcacagtcgcctgcatcactttagacattccaattttgttcatgcagccaaaagtaactttgattttaggggaccacaatga

SEQ ID NO: 18700 - DNA, 110 bp, synthetic construct
  source 1..110: mol_type = other DNA
agttgctaagggcagcccactcttaagggggaggaggtaccctcatctcctcgaaggtagaatatttacctaaattattgaggatgctgcataggttatttgtctatttc

SEQ ID NO: 18701 - DNA, 110 bp, synthetic construct
  source 1..110: mol_type = other DNA
ggtaccctcatctcctcgaaggtagaatatttacctaaattattgaggatgctgcataggttatttgtctatttccccccttttattcatttttttttttttttttgtct

SEQ ID NO: 18702 - DNA, 110 bp, synthetic construct
  source 1..110: mol_type = other DNA
cctaactacctctatgaaggcccctcttcaaatagaatcacatataagaattgtgtgattctctctataacagcaaatatactctctataacagcacgattttattttta

SEQ ID NO: 18703 - DNA, 110 bp, synthetic construct
  source 1..110: mol_type = other DNA
agaatgagaagtgactgctcaatgaatacaaagcttccttttggggtgataaatatgttttagggagttccctgtggcacagaagaaaaaactctgactagtgtccataa

SEQ ID NO: 18704 - DNA, 110 bp, synthetic construct
  source 1..110: mol_type = other DNA
atacaaagcttccttttggggtgataaatatgttttagggagttccctgtggcacagaagaaaaaactctgactagtgtccataaggattcgggtttgatccctggcctc

SEQ ID NO: 18705 - DNA, 110 bp, synthetic construct
  source 1..110: mol_type = other DNA
gctgcaaaccagacaaacatgatccctgcctcatagagctaagctggacctgtacagggttctaggagaccattcaaggacagaagttcacagaggaagcatctgtagcc

SEQ ID NO: 18706 - DNA, 110 bp, synthetic construct
  source 1..110: mol_type = other DNA
gcaaagagccttaagaagaaggacacaagagttccccctgtggggcaccgagttaaggacccagagtcatctctgcagtggcgcatgttcgatcccttgcccagcacagt

SEQ ID NO: 18707 - DNA, 110 bp, synthetic construct
  source 1..110: mol_type = other DNA
aggacccagagtcatctctgcagtggcgcatgttcgatcccttgcccagcacagtgggttaagactctggagttgctgtaggtgtggtgtaggttgcagcagcacctcag

SEQ ID NO: 18708 - DNA, 110 bp, synthetic construct
  source 1..110: mol_type = other DNA
gagatgcacgtgagcacatgcacaccaatccatgctcgttgcacaagctgcaggctattaaagctgataacccaaccctgaagacccctgcaagcctccatgggggccct

SEQ ID NO: 18709 - DNA, 110 bp, synthetic construct
  source 1..110: mol_type = other DNA
gccctgtggctagaagcataaacactggagcctgactgcaagggttcaaatatcagattggaatatatagtcatttcctatgtatcagccattgttattattgttgttac

SEQ ID NO: 18710 - DNA, 110 bp, synthetic construct
  source 1..110: mol_type = other DNA
gattggaatatatagtcatttcctatgtatcagccattgttattattgttgttactgtgcattattttaccctatgcattttgctagtgctgggccttctactttagtcc

SEQ ID NO: 18711 - DNA, 110 bp, synthetic construct
  source 1..110: mol_type = other DNA
gcaagaagtgtgaagctagagacatttgcccagaatagaagcagagctccaaattgggccagcaaggtgcctgacccaggcggagggcaaagaggtgggtaagagctgga

SEQ ID NO: 18712 - DNA, 110 bp, synthetic construct
  source 1..110: mol_type = other DNA
tacatacatgaaacccccccaccagatggaagaagtcaagtgtatgctgcccatgagcacatagaccccagactggttggaaacagaaggttgatgacgctgactcccag

SEQ ID NO: 18713 - DNA, 110 bp, synthetic construct
  source 1..110: mol_type = other DNA
cccccaccagatggaagaagtcaagtgtatgctgcccatgagcacatagaccccagactggttggaaacagaaggttgatgacgctgactcccagttacctcaccaccca

SEQ ID NO: 18714 - DNA, 110 bp, synthetic construct
  source 1..110: mol_type = other DNA
ccatatagatggatgtcccctggtggatgcagctttcttgctttttctatcaacgtgctggtttgaagcttcttcaatgcacaagtcagaaactagaagctaaatgaaga

SEQ ID NO: 18715 - DNA, 110 bp, synthetic construct
  source 1..110: mol_type = other DNA
aagcaaggtattattagctttcttccccaaaaccacctgtcttccaggatgctgggcccttcccacactcagagctaagaggatcgggagaagttaaaacctgggcacag

SEQ ID NO: 18716 - DNA, 110 bp, synthetic construct
  source 1..110: mol_type = other DNA
gcccttcccacactcagagctaagaggatcgggagaagttaaaacctgggcacagcatagtaatataatggtgcaaattacatcatccgtaacctttttgcacaacgggc

SEQ ID NO: 18717 - DNA, 110 bp, synthetic construct
  source 1..110: mol_type = other DNA
atcagtgggaggacattttcagaactgtaaacataagacaacagacccacttatacagaacatttgctccataaatgaacaaactactgatctgactgggggtcaagact

SEQ ID NO: 18718 - DNA, 110 bp, synthetic construct
  source 1..110: mol_type = other DNA
tacaagttctttgtcgaatacatgtgctatgcatcttacctcccagcctgtggtttgcctttttaatttcttaaaggaatttttcgtgttttgattttttaaactgtgaa

SEQ ID NO: 18719 - DNA, 110 bp, synthetic construct
  source 1..110: mol_type = other DNA
tggaattttctgcttgtctgattgatgacttgcttccggggtattagaaatcctcgaagcctcaaattcaattttgaattcgaaccttaaagccagtcttgaatttgagt

SEQ ID NO: 18720 - DNA, 110 bp, synthetic construct
  source 1..110: mol_type = other DNA
tccttttttttcttcatgaattcctccttctcatcatttcaagaccatgaatctaaacatatggatccatcatcttctgtgtatgaaccaccagaatattccagcataaa

SEQ ID NO: 18721 - DNA, 110 bp, synthetic construct
  source 1..110: mol_type = other DNA
aacatatggatccatcatcttctgtgtatgaaccaccagaatattccagcataaagaccaacctccctagcacggcattcaaggcttgcaccacttagatccaatctgct

SEQ ID NO: 18722 - DNA, 110 bp, synthetic construct
  source 1..110: mol_type = other DNA
actgctttttgattcctgtagccccagtggcacgcatggttattgaaatgagtaggcagtgaagaactgaagaaggatgagagaaaagaaggatgggtggaaggaaggaa

SEQ ID NO: 18723 - DNA, 110 bp, synthetic construct
  source 1..110: mol_type = other DNA
cgctcctagccccaagttcatgtaatgtccatcataccttgccatgcctttttacctagtccttttctaaattagccttctttacattattcctgagtgtgccagctgtt

SEQ ID NO: 18724 - DNA, 110 bp, synthetic construct
  source 1..110: mol_type = other DNA
ctagtccttttctaaattagccttctttacattattcctgagtgtgccagctgttcactaacactgatacagtgttagtaaacattaagaggggaaggagttctatggcc

SEQ ID NO: 18725 - DNA, 110 bp, synthetic construct
  source 1..110: mol_type = other DNA
ccctcaccccacaggaagggatccagccactcctctgggcagtggccataacctgtctgctctccctctgaatagagtaagtaggatatataggcggggaaccattgctc

SEQ ID NO: 18726 - DNA, 110 bp, synthetic construct
  source 1..110: mol_type = other DNA
ttggtaacagcagtaagtctcattttacagatgaaaaattgaagtctgggattggtgacaaagattaatcaagctccaggacagcagaggttttgcctcttatattcact

SEQ ID NO: 18727 - DNA, 110 bp, synthetic construct
  source 1..110: mol_type = other DNA
tgacaaagattaatcaagctccaggacagcagaggttttgcctcttatattcactgttattcactgtgcttggctcatctggaagggagggaaacatcaagagtcctgtc

SEQ ID NO: 18728 - DNA, 110 bp, synthetic construct
  source 1..110: mol_type = other DNA
tttcaagaaactcaaactagacttcgtgcctgcattaaccacatatcacatggttaatgcaagaaagctgaaggggaacccttgttagcagacccatattcaaagactgg

SEQ ID NO: 18729 - DNA, 110 bp, synthetic construct
  source 1..110: mol_type = other DNA
aatgcaagaaagctgaaggggaacccttgttagcagacccatattcaaagactgggctctgacctttcatcaaagattggcaaatacatgcacatttatatatttcaagg

SEQ ID NO: 18730 - DNA, 110 bp, synthetic construct
  source 1..110: mol_type = other DNA
cttccagccagctccacagtcctggtgtgcccaatggcatccagagcttgccagctagcctgctacagcacagtggtagggaaggttgggttacagatgggtaaaacgtt

SEQ ID NO: 18731 - DNA, 110 bp, synthetic construct
  source 1..110: mol_type = other DNA
cacacacgcacacgcacacgcacaccccgctatccccataaagacacagtaacactcagctacactcctctcacttctttgccttggcctttagccaagagaaagtacag

SEQ ID NO: 18732 - DNA, 110 bp, synthetic construct
  source 1..110: mol_type = other DNA
gctctcttgtcccttttccaaagtcaccttagaatacatagttctaatctgaaagcctccaccacaacagcactttggtaggccacacctcaggcagcccgccaagagca

SEQ ID NO: 18733 - DNA, 110 bp, synthetic construct
  source 1..110: mol_type = other DNA
cctccaccacaacagcactttggtaggccacacctcaggcagcccgccaagagcaagggcgccacctgcatggaggagatggagtccgcacacgggaacacacactgcac

SEQ ID NO: 18734 - DNA, 110 bp, synthetic construct
  source 1..110: mol_type = other DNA
agacacagacacactagatcaatgaggcaccatttctgtcttagataagatggtatcatagagcttccagcctagttggggaaggcagatgtacagcaaataactgcaac

SEQ ID NO: 18735 - DNA, 110 bp, synthetic construct
  source 1..110: mol_type = other DNA
tcatagagcttccagcctagttggggaaggcagatgtacagcaaataactgcaacagagtttggaagctgtggtgtagaattagggtatagtggggagagggactgactg

SEQ ID NO: 18736 - DNA, 110 bp, synthetic construct
  source 1..110: mol_type = other DNA
cctacctgcgtttcaggagaggccttgcctgtgtccccaccaactccatgctttgtccagctttctgacccatgtcattctggtgggttcaaggtcacccctccattgtt

SEQ ID NO: 18737 - DNA, 110 bp, synthetic construct
  source 1..110: mol_type = other DNA
ctgggctgctctggctgccattttaggcaaagaagcgtttgctggagtggagacgggagccaggcgccggtggctcaaaactgggtgtgccctcttcctccctctgccat

SEQ ID NO: 18738 - DNA, 110 bp, synthetic construct
  source 1..110: mol_type = other DNA
gcccagaaggagaggcagggggcatctcacagcctcctcacccccgcttcatgcactatttccccacgtgtgggtcaagtcccgctgccgacccttggacagccattcaa

SEQ ID NO: 18739 - DNA, 110 bp, synthetic construct
  source 1..110: mol_type = other DNA
ctatttccccacgtgtgggtcaagtcccgctgccgacccttggacagccattcaagcactgatggcacaatgaaaaggttctccttttttgattctctttcaaagacccc

SEQ ID NO: 18740 - DNA, 110 bp, synthetic construct
  source 1..110: mol_type = other DNA
cacttgctattttcttctcttttttataaagccattctaataggtgtggttttgttttccattaccctgatgaatagtgatactgagcatcttttcgcatatctgttggc

SEQ ID NO: 18741 - DNA, 110 bp, synthetic construct
  source 1..110: mol_type = other DNA
tttccattaccctgatgaatagtgatactgagcatcttttcgcatatctgttggccacctgtatgtctttggaaaaatgtccattcagatccttgcccgttttaaaattg

SEQ ID NO: 18742 - DNA, 110 bp, synthetic construct
  source 1..110: mol_type = other DNA
aaaaaaaagagaagtagtgaacatccccaaaatgttataaagctcttctaagaaaagttcttgggagctatactgggaactagagtgcaaggtggttttgccttgttaga

SEQ ID NO: 18743 - DNA, 110 bp, synthetic construct
  source 1..110: mol_type = other DNA
aaataacctctcttccaatcacattttcaactgtttatggaaccaggcagtggcagtggtgatgattaacatactgtttgtgtatccagaaactctcactgctaataatt

SEQ ID NO: 18744 - DNA, 110 bp, synthetic construct
  source 1..110: mol_type = other DNA
gtggtgatgattaacatactgtttgtgtatccagaaactctcactgctaataatttattctgagttttaatgcaaacctcaattcttattctctttccgagttttctagg

SEQ ID NO: 18745 - DNA, 110 bp, synthetic construct
  source 1..110: mol_type = other DNA
ttggaagaagtaaaacaggctaatttccacagtggggaagtgctgttcagttagatgtgagaaggtcccttaggggagagagagtggtgtggagctggtggaaggaccct

SEQ ID NO: 18746 - DNA, 110 bp, synthetic construct
  source 1..110: mol_type = other DNA
tgtgagaaggtcccttaggggagagagagtggtgtggagctggtggaaggaccctcctaggagcaggatcagagaatgcggagggcctgaggaagaacaagcgtggaggt

SEQ ID NO: 18747 - DNA, 110 bp, synthetic construct
  source 1..110: mol_type = other DNA
gggctgcgtcagggctcaggtagaatcttcagcttgtatggggtggtgtgaccatgagaataacgctattgggtagagacagaagaggacagggcagggcagggggccga

SEQ ID NO: 18748 - DNA, 110 bp, synthetic construct
  source 1..110: mol_type = other DNA
aaaggcacgaactgtgaggcagctaggccaggagtcggggtggggtggggtgtaagttggccatcagggaccatgtccaattcagcccccaaggccaagtgaccctgctg

SEQ ID NO: 18749 - DNA, 110 bp, synthetic construct
  source 1..110: mol_type = other DNA
ggaacctgcccaggctggagagttgggggccagctcatgactgaagggtggagccaaggcacagggaaaccccagcaaggggcagaaactggggtgaagttttggagtgc

SEQ ID NO: 18750 - DNA, 110 bp, synthetic construct
  source 1..110: mol_type = other DNA
acctctcacccacccctggaccttctgtgtccttcctatttttattgttcccaggagtcagctttaaggcttttgtttccgttgattggaacgtggtgcttaatgtccta

SEQ ID NO: 18751 - DNA, 110 bp, synthetic construct
  source 1..110: mol_type = other DNA
gacgtaacagttcaggagttgccttaaagtcccagggtttgcatggaaggagtgttggtgagatgtagagatgggaagcgccgcaggagctcagggaggaggcaaagctg

SEQ ID NO: 18752 - DNA, 110 bp, synthetic construct
  source 1..110: mol_type = other DNA
tggtgagatgtagagatgggaagcgccgcaggagctcagggaggaggcaaagctgtgtggactttttatcgttgtgaccctgggcaggacattctgcccgaacctcattt

SEQ ID NO: 18753 - DNA, 110 bp, synthetic construct
  source 1..110: mol_type = other DNA
tgaatactggtcgggttcttaacctgccgagccacaacgggaactccctgctcctgtttgctcttaagggaagtcaggctcagcgaggggcagctccttgcctcagactt

SEQ ID NO: 18754 - DNA, 110 bp, synthetic construct; identical to SEQ ID NO: 18753
  source 1..110: mol_type = other DNA

SEQ ID NO: 18755 - DNA, 110 bp, synthetic construct
  source 1..110: mol_type = other DNA
ctccaaacccttaacaacacccactctcttcaggaacacccttcagccattctttcctgatactacctcagtacccaaccccaattcggcagagacattttatctaaatc

SEQ ID NO: 18756 - DNA, 110 bp, synthetic construct
  source 1..110: mol_type = other DNA
cctgatactacctcagtacccaaccccaattcggcagagacattttatctaaatccacagcctcctttatgcttctctcttctatatctgagccctcccacctccttgct

SEQ ID NO: 18757 - DNA, 110 bp, synthetic construct
  source 1..110: mol_type = other DNA
gaaactctagcctcccttgaggcttggaaaagagggatacatgtgttcaaaaagactcaagtaactattagaagctagcgtagatagacccggctggtgaaaccttccat

SEQ ID NO: 18758 - DNA, 110 bp, synthetic construct
  source 1..110: mol_type = other DNA
ctcaagtaactattagaagctagcgtagatagacccggctggtgaaaccttccatgttagagtaacctggtgaatagcagatgctctttgtgaatgctttcatgttccca

SEQ ID NO: 18759 - DNA, 110 bp, synthetic construct
  source 1..110: mol_type = other DNA
taaggtagcaggagaatttcaggcttttgagccaggtaaatctgttcagatcctggccccatcactctgcagcaggagacacttcttgatgttctcatatggcgcagcat

SEQ ID NO: 18760 - DNA, 110 bp, synthetic construct
  source 1..110: mol_type = other DNA
agccgagaacttatacttggctcaggttcccaggtgatggatgcggctggcccagggaccacactctgagaactgctttcctagagaacgtactcccacccccgttcagc

SEQ ID NO: 18761 - DNA, 110 bp, synthetic construct
  source 1..110: mol_type = other DNA
agggtggaggcaaacggggccttgtcttgttgctatgacctccactctggggctggctgggtttttcatccagtctccacccgtggtttaagcatgctgttctcatccag

SEQ ID NO: 18762 - DNA, 110 bp, synthetic construct
  source 1..110: mol_type = other DNA
gctgggtttttcatccagtctccacccgtggtttaagcatgctgttctcatccagttctgtgtcccggggcctagcatgactcttccatccactccctcccctctggttc

SEQ ID NO: 18763 - DNA, 110 bp, synthetic construct
  source 1..110: mol_type = other DNA
gagtagaattacttggtcatagagtaggtgtatgtttatttaattttataagaaactcccaaagtagttatagcatttttctctcccaccagcaatgtaggatagttcca

SEQ ID NO: 18764 - DNA, 110 bp, synthetic construct
  source 1..110: mol_type = other DNA
ctcccaaagtagttatagcatttttctctcccaccagcaatgtaggatagttccagatgcttccatctttgccgactcttagtattgagtctttatcttttttttttttt

SEQ ID NO: 18765 - DNA, 110 bp, synthetic construct
  source 1..110: mol_type = other DNA
agttaagaaatgcctcaaataagtaggcttgggaaaagcccatcatatcccaggattcagtggtgtcttactgaaggcaagctaaaaagaacatgagttttaaagtacat

SEQ ID NO: 18766 - DNA, 110 bp, synthetic construct
  source 1..110: mol_type = other DNA
tatgtttgttattaattgaagaaatacaatttacaatgtctaatatttccagtaggactcttcagtattggtagatggactgcagttattgagcagtccagtcaaaagct

SEQ ID NO: 18767 - DNA, 110 bp, synthetic construct
  source 1..110: mol_type = other DNA
gactcttcagtattggtagatggactgcagttattgagcagtccagtcaaaagctggagtgatttaagttaaaagttaaactgcggtcctattggtgtaatgccctttct

SEQ ID NO: 18768 - DNA, 110 bp, synthetic construct
  source 1..110: mol_type = other DNA
ccatcttctgatgctgtccatggggaggggctacgtgcactcagtggtgccacttctgctagtgcagccattctgttccacgcggcactgtgcagacactggaagctagg

SEQ ID NO: 18769 - DNA, 110 bp, synthetic construct
  source 1..110: mol_type = other DNA
ctgctagtgcagccattctgttccacgcggcactgtgcagacactggaagctaggggcatgcctctctctcagccttctcaacctaagcctcttcttctgctgttcccat

SEQ ID NO: 18770 - DNA, 110 bp, synthetic construct
  source 1..110: mol_type = other DNA
cagcctgagcttggggaccaacttcattggaagaaggagttattagccaatcctttttgtcagcagagaagcttgggggtagcctttggtctctgcctcctgccttcaat

SEQ ID NO: 18771 - DNA, 110 bp, synthetic construct
  source 1..110: mol_type = other DNA
tttgtcagcagagaagcttgggggtagcctttggtctctgcctcctgccttcaatttcacccaagccacctgctttgactcagacatgctggggtggggaggaggcactg

SEQ ID NO: 18772 - DNA, 110 bp, synthetic construct
  source 1..110: mol_type = other DNA
aggggcagagactgccctccaccctccgtgaggtgcactcttcacatcctgctgcctttgttccccagcggtggcaggtcacttcccagtaggtaattgctttctgtttc

SEQ ID NO: 18773 - DNA, 110 bp, synthetic construct
  source 1..110: mol_type = other DNA
ctttgttccccagcggtggcaggtcacttcccagtaggtaattgctttctgtttctcctccctggtctctttttgcagtttttgctgggccggaaagaagaggaggccgt

SEQ ID NO: 18774 - DNA, 110 bp, synthetic construct
  source 1..110: mol_type = other DNA
agcttccccaaccccacctcttggacccaaacagggaacaagagctcaacaactccatcaccagggccggaggatccaaacctgctctcttcatctccctccaggccctg

SEQ ID NO: 18775 - DNA, 110 bp, synthetic construct
  source 1..110: mol_type = other DNA
tccctctggttgttacaaaggatccctccactttgcacgtgaaaacctttctcaagtgaaggctcgacctgccagcactcccgtctgccttgacttcctggagtgcccgt

SEQ ID NO: 18776 - DNA, 110 bp, synthetic construct
  source 1..110: mol_type = other DNA
gtgaaggctcgacctgccagcactcccgtctgccttgacttcctggagtgcccgtgtggctggcaatctaggtgtgtgcgagacccagggagacagaccctggcttcaaa

SEQ ID NO: 18777 - DNA, 110 bp, synthetic construct
  source 1..110: mol_type = other DNA
tgtcttcttgaatataacactggagacaaaaaagctgacaagaacctgtgagtataacagacagaatgacgtctgtggtctgtcgtacaggatgatctggcagtgaagtt

SEQ ID NO: 18778 - DNA, 110 bp, synthetic construct
  source 1..110: mol_type = other DNA
ctgagaactggccagaaggttgaggtcagggactggatgactaagaacaagcctcagatccggggtgagggatgatcagggacgagctggggctgctgcgttttatttaa

SEQ ID NO: 18779 - DNA, 110 bp, synthetic construct
  source 1..110: mol_type = other DNA
agatccggggtgagggatgatcagggacgagctggggctgctgcgttttatttaaatctctgataaggatcaggaagcaggcaacagcccaatgacacattaactaactt

SEQ ID NO: 18780 - DNA, 110 bp, synthetic construct
  source 1..110: mol_type = other DNA
gcccctctcctcaggccccgtttcccctccgcaggctgctccatcccctctccttgttagccctcttcatcctgtgttctccaagcttctgcaggcctcaccgtcacagg

SEQ ID NO: 18781 - DNA, 110 bp, synthetic construct
  source 1..110: mol_type = other DNA
gttagccctcttcatcctgtgttctccaagcttctgcaggcctcaccgtcacaggcctcctgacagtctctgggtctgtccacactctctcccactgcatagaagagctc

SEQ ID NO: 18782 - DNA, 110 bp, synthetic construct
  source 1..110: mol_type = other DNA
agaggctggcaggttctcgatccagctcctgggctctgtcctctgctttgtcttcctcctttgccccatttcacgttccctacttggctccagtgggaagataaagcgta

SEQ ID NO: 18783 - DNA, 110 bp, synthetic construct
  source 1..110: mol_type = other DNA
catatcacagccatgtctctccttttcctgattgcacaactcgaatttcctaagagcaagaaaaggttaattagattccccactgcctgtttgatgcaagcaggtggcca

SEQ ID NO: 18784 - DNA, 110 bp, synthetic construct
  source 1..110: mol_type = other DNA
gcaagaaaaggttaattagattccccactgcctgtttgatgcaagcaggtggccagggagtagcctggcagtccagttcagcacacccttaaaagtgcctactgtgtaca

SEQ ID NO: 18785 - DNA, 110 bp, synthetic construct
  source 1..110: mol_type = other DNA
aaacactgtagatgccagtggggcacatcttaggtcaactgctctaccttctacacagggtgacattcctccgtcacccgtgcataagcaccctaagtgctcagtactcc

SEQ ID NO: 18786 - DNA, 110 bp, synthetic construct
  source 1..110: mol_type = other DNA
cagggtgacattcctccgtcacccgtgcataagcaccctaagtgctcagtactccctcctctgtggagtacgagctcagttctcaggcagctcaaattcttagaaagttc

SEQ ID NO: 18787 - DNA, 110 bp, synthetic construct
  source 1..110: mol_type = other DNA
tacatcccagcactccaaagacaccactgatcccattgcgccacaggaggaactcctggctagcgtttcaaattagactaataagacaaaaggactggccagcagtggga

SEQ ID NO: 18788 - DNA, 110 bp, synthetic construct; identical to SEQ ID NO: 18787
  source 1..110: mol_type = other DNA

SEQ ID NO: 18789 - DNA, 110 bp, synthetic construct
  source 1..110: mol_type = other DNA
aactgagagacgacccagcccgcagcaccttgcactcagctctatatcagagcacgaatctcacagccccagagctgcccgtctccttaacctgtctcccaagcatacga

SEQ ID NO: 18790 - DNA, 110 bp, synthetic construct
  source 1..110: mol_type = other DNA
gaatctcacagccccagagctgcccgtctccttaacctgtctcccaagcatacgaaggtccctgcccgcagggagttgatcttgtagttggacaaacagacaagagaaca

SEQ ID NO: 18791 - DNA, 110 bp, synthetic construct
  source 1..110: mol_type = other DNA
gctgcgatgggggtggggtgtgctgggccccctggaggctctggtgaggacagagaggaagaggctgctgtgtctgcaggattcggggtgcttcctctggccctgaatga

SEQ ID NO: 18792 - DNA, 110 bp, synthetic construct
  source 1..110: mol_type = other DNA
aggaagaggctgctgtgtctgcaggattcggggtgcttcctctggccctgaatgaatgccctctcctccccaaggctggcagtcttgtcctgctctcctcagcccctgca

SEQ ID NO: 18793 - DNA, 110 bp, synthetic construct
  source 1..110: mol_type = other DNA
cagaaaaccaggagtactttgagaagcaccgctggccgcccgtctggtacctgaaggaggaggatcactatcagcgggcccggaaggagcgtgagaaggaggactatctc

SEQ ID NO: 18794 - DNA, 110 bp, synthetic construct
  source 1..110: mol_type = other DNA
ggaggaggatcactatcagcgggcccggaaggagcgtgagaaggaggactatctccacctgaaacggcagcccaagcggcgctggctgttctggaacagtccctcctcac

SEQ ID NO: 18795 - DNA, 110 bp, synthetic construct
  source 1..110: mol_type = other DNA
caacatgctgaagagtcaccaggggagggagcagaacacacagggccctggcaggagcatgggttttattttgtgagtgagggacatctccaaaaagtttcaggcagaac

SEQ ID NO: 18796 - DNA, 110 bp, synthetic construct
  source 1..110: mol_type = other DNA
atgaaatgaaattaattttgactgtaacgtcacctcttgctcctgatttgtgacctaaaacctctttcttcctaatcctgatgtaatatgtgatgactctcggtcaggcc

SEQ ID NO: 18797 - DNA, 110 bp, synthetic construct
  source 1..110: mol_type = other DNA
tgggggagagatgaccactttattcagaaagttgggcctttgttgtctaagtcagcatgcatattccttccaggtcatgccaagtccatagctcctaggtggccttgcct

SEQ ID NO: 18798 - DNA, 110 bp, synthetic construct
  source 1..110: mol_type = other DNA
catgcatattccttccaggtcatgccaagtccatagctcctaggtggccttgcctcccagcctcatatctcccgtcagggaaacctggtcagataaatggtgccattatg

SEQ ID NO: 18799 - DNA, 110 bp, synthetic construct
  source 1..110: mol_type = other DNA
agatccttaacccactttggtgggcgccacagcaggaactccctccatgcttccatataaggaccaaaacatctttggctaattaggactttaggacataccgatagtaa

SEQ ID NO: 18800 - DNA, 110 bp, synthetic construct
  source 1..110: mol_type = other DNA
tataaggaccaaaacatctttggctaattaggactttaggacataccgatagtaattacagctgacctttgaacaatgcagaggttaggggtgctgaccgccacagagtt

SEQ ID NO: 18801 - DNA, 110 bp, synthetic construct
  source 1..110: mol_type = other DNA
ggcccttcaacatgtactggggggtcttttctcattttctagacaagtctggagggtgcaagagaggccggccacgaggttctagccaggcctaggacacagctctccat

SEQ ID NO: 18802 - DNA, 110 bp, synthetic construct
  source 1..110: mol_type = other DNA
gtgcaagagaggccggccacgaggttctagccaggcctaggacacagctctccattcccagggcgccctatcctggaagtgaactggatcccggcagaagatgctctggc

SEQ ID NO: 18803 - DNA, 110 bp, synthetic construct
  source 1..110: mol_type = other DNA
aagccttaatcatctagcatcttattcccactggatcatgccttctcagataggagaatggtcatttgactccatctgcccacgtatcctgttttgcatcagtttctctc

SEQ ID NO: 18804 - DNA, 110 bp, synthetic construct
  source 1..110: mol_type = other DNA
gaatggtcatttgactccatctgcccacgtatcctgttttgcatcagtttctctctctctctctctctctctctcatgtgtgtgtgtgtgtgtgtgtgtgtgtgtgtgtg

SEQ ID NO: 18805 - DNA, 110 bp, synthetic construct
  source 1..110: mol_type = other DNA
atttcacatattccagtggccttgtgttggccagatatctatcaggccctactatctggctttctcaggtttagaagtctgtcgtgttctctcacaaccacttttttatt

SEQ ID NO: 18806 - DNA, 110 bp, synthetic construct
  source 1..110: mol_type = other DNA
tatctatcaggccctactatctggctttctcaggtttagaagtctgtcgtgttctctcacaaccacttttttatttttaaaaattaaagtattgttgatttacaatatta

SEQ ID NO: 18807 - DNA, 110 bp, synthetic construct
  source 1..110: mol_type = other DNA
tcttcaggatgacctgagatgctaaagcacccgaaacagcctgcctggcccattgcaagctgttatgctattagctcttctgcacaggaagccctttctttctgtccaat

SEQ ID NO: 18808 - DNA, 110 bp, synthetic construct
  source 1..110: mol_type = other DNA
tcttctcttgtatttgctggatacttgccatgctaaaacattaaaaaaaaaaaaaaaaactcaagtcgttagataacttgtgcatgagctttgtgggaatattctaaccc

SEQ ID NO: 18809 - DNA, 110 bp, synthetic construct
  source 1..110: mol_type = other DNA
aaaactcaagtcgttagataacttgtgcatgagctttgtgggaatattctaacccagagtgtaaatgtccagtctagaacagaaagcaaacccaactcttgattgggtta

SEQ ID NO: 18810 - DNA, 110 bp, synthetic construct
  source 1..110: mol_type = other DNA
cccaagtggaaaatcccagtggttggtggtcccaccagcaaccaaggaagaacaactcctggacacagcatgtatttatttatctaattctggtctgactccaatgccca

SEQ ID NO: 18811 - DNA, 110 bp, synthetic construct
  source 1..110: mol_type = other DNA
ctcctggacacagcatgtatttatttatctaattctggtctgactccaatgcccatgctttttattgttctgctatatcatttccactctcctaaagagcgcctcagcta

SEQ ID NO: 18812 - DNA, 110 bp, synthetic construct
  source 1..110: mol_type = other DNA
ctactccgctcccctggaatagaggctgtcccatgagtgtctcgaccctgtctccagcctggattaaaggagcgagcagttggctgatgagctgatcggagacgcctgag

SEQ ID NO: 18813 - DNA, 110 bp, synthetic construct
  source 1..110: mol_type = other DNA
agcctggattaaaggagcgagcagttggctgatgagctgatcggagacgcctgagctgagaaatgggagggaagcctttctacaggaaagaagacaacagcgcatgtacc

SEQ ID NO: 18814 - DNA, 110 bp, synthetic construct
  source 1..110: mol_type = other DNA
tgcattctggagcatcacatgggtagcttgaaatcagcaatggtagagatgttgacatcacagaaataggccagtgcagcaaatcagggctctgtacatatttttaattt

SEQ ID NO: 18815 - DNA, 110 bp, synthetic construct
  source 1..110: mol_type = other DNA
tttatttgttcatgaaaggaaattgtgtatctccttatacccttgaaatatctgtgaggtcatcttcagtcttcagagatggaaacctcccttggagttttaggagttaa

SEQ ID NO: 18816 - DNA, 110 bp, synthetic construct
  source 1..110: mol_type = other DNA
gaggtcatcttcagtcttcagagatggaaacctcccttggagttttaggagttaatcaacactggatttagggtaaggtgacaaccagccctgtagattagagtggagga

SEQ ID NO: 18817 - DNA, 110 bp, synthetic construct
  source 1..110: mol_type = other DNA
tttcaaatccatgcatcatcccatcccttgttacagtttgcctcaaaccatggcgctcagaaccagctcaggtgaggtctgggcttgctcattccttcagcagacacata

SEQ ID NO: 18818 - DNA, 110 bp, synthetic construct
  source 1..110: mol_type = other DNA
aggctccgcccccttctgccttctgtcgctgtcgccgaagctacccgtgcagggaacctccgactctcgctgttctggaatccgtcgtaggtactgagagtttcccccgc

SEQ ID NO: 18819 - DNA, 110 bp, synthetic construct
  source 1..110: mol_type = other DNA
ttgggctcaaatctggacttcctaacatggcttgcaggatctgtacaagctggctcagctctctctgagggtctgaaactcattacatcgttttataagtactgctggct

SEQ ID NO: 18820 - DNA, 110 bp, synthetic construct
  source 1..110: mol_type = other DNA
agactgactctggaatggccgagtgaccacctgctctcatatttggtttctctgattgtgccggccatctcagaccctgggtcgattcatgaactctgcctcctcaatgt

SEQ ID NO: 18821 - DNA, 110 bp, synthetic construct
  source 1..110: mol_type = other DNA
ttgtgccggccatctcagaccctgggtcgattcatgaactctgcctcctcaatgttttctgcaacgcttcattgtcttttgttgccttacctgctaacagaagaacaggg

SEQ ID NO: 18822 - DNA, 110 bp, synthetic construct
  source 1..110: mol_type = other DNA
aatgtggtcatatattcaaccttcttcaatcaactttgttgagacagaatttgtatattccatttactcattccttttatttgtaaagatagctctctcgtctcttactt

SEQ ID NO: 18823 - DNA, 110 bp, synthetic construct
  source 1..110: mol_type = other DNA
tattccatttactcattccttttatttgtaaagatagctctctcgtctcttacttctgtatattaagtcccaccttacaatgttactatttttgttttcagcagtccatc

SEQ ID NO: 18824 - DNA, 110 bp, synthetic construct
  source 1..110: mol_type = other DNA
tgtgatatacagcaggacatttcccttaatagcagatattagaagtcctctgagaatgtctcagctcctttcatgtctcagcctcctttagaaggctcccgaatgccttc

SEQ ID NO: 18825 - DNA, 110 bp, synthetic construct; identical to SEQ ID NO: 18824
  source 1..110: mol_type = other DNA

SEQ ID NO: 18826 - DNA, 110 bp, synthetic construct
  source 1..110: mol_type = other DNA
cagacgaatgttcccagaccagggatcaaatctgagccacagctaagacctatgctgcagctgcaacgctggatccttaacctgccctgccgcagcgagaactccgtgtt

SEQ ID NO: 18827 - DNA, 110 bp, synthetic construct
  source 1..110: mol_type = other DNA
tgcagctgcaacgctggatccttaacctgccctgccgcagcgagaactccgtgttgtacctttttgatggcagaaaacactgagccacagaagggtgagataatatgcag

SEQ ID NO: 18828 - DNA, 110 bp, synthetic construct; identical to SEQ ID NO: 18826
  source 1..110: mol_type = other DNA

SEQ ID NO: 18829 - DNA, 110 bp, synthetic construct; identical to SEQ ID NO: 18827
  source 1..110: mol_type = other DNA

SEQ ID NO: 18830 - DNA, 110 bp, synthetic construct
  source 1..110: mol_type = other DNA
ttaaaaatagaaacaatagggacatgagatctgctggacccaggtatgcttctcagctcagtctgtggacacagaattaccctataatataatggatgccttggtgaatg

SEQ ID NO: 18831 - DNA, 110 bp, synthetic construct
  source 1..110: mol_type = other DNA
gctcagtctgtggacacagaattaccctataatataatggatgccttggtgaatggaaagcactgatcttccttttccctcaaagttccctatgtctcagtctcttcttt

SEQ ID NO: 18832 - DNA, 110 bp, synthetic construct
  source 1..110: mol_type = other DNA
ggttaaatgtgtcaaaaccctccagcgaaaacgaagaagctaagctgtccagatcggctcctttccccaaagcttccagcgagttcagctttgactgcatttccattagt

SEQ ID NO: 18833 - DNA, 110 bp, synthetic construct
  source 1..110: mol_type = other DNA
tgggttaagaatcttactgcagttgcttgggtcatcgtggaggtgcaagtcaatccctagcccctgcagcaggttgcactccatgcgctgcagagtaagctgcagctgtg

SEQ ID NO: 18834 - DNA, 110 bp, synthetic construct
  source 1..110: mol_type = other DNA
cctagcccctgcagcaggttgcactccatgcgctgcagagtaagctgcagctgtggcttggattcattccctggcctgggaacttgcatatgccatgggtgcagtcatta

SEQ ID NO: 18835 - DNA, 110 bp, synthetic construct
  source 1..110: mol_type = other DNA
caaaaacaagttcatgaggtgcaacctgatacatttattctgaaaagctcttgcagaatgggaaagggctgagtaattctccttctcagcctgttgctggggagagggtt

SEQ ID NO: 18836 - DNA, 110 bp, synthetic construct
  source 1..110: mol_type = other DNA
actcttggttgtcgacccgtttcctttcttccttgttgacaaaacatccaggtcccttctggggacaaaaatgcccagttaaacactcgttttctcagcttcttctgctg

SEQ ID NO: 18837 - DNA, 110 bp, synthetic construct
  source 1..110: mol_type = other DNA
cttctggggacaaaaatgcccagttaaacactcgttttctcagcttcttctgctgttggaggtggtcatagggttgagttctgtctactcaggggtacatggaagtcctg

SEQ ID NO: 18838 - DNA, 110 bp, synthetic construct
  source 1..110: mol_type = other DNA
tggttgaggctcgaaatttggaatgcctccatgttggtttggcttggcattgctctgtgctgtattgagctcggtttttttcatcgcttccttttgttttattagcctgg

SEQ ID NO: 18839 - DNA, 110 bp, synthetic construct
  source 1..110: mol_type = other DNA
caacaaaatgcaacacaatcaacagttaaatttgaaagcttttcatggaccaatacaaggatgcccctcttgctacttctattcaattgggagtcctaaaagcaactagg

SEQ ID NO: 18840 - DNA, 110 bp, synthetic construct
  source 1..110: mol_type = other DNA
tgagtcacacaataccttgcctaccttgttggttccttccgtagatcaaagtagaaatgaagaataagtgattaacatatgagcagatctcttccctagcttccctttca

SEQ ID NO: 18841 - DNA, 110 bp, synthetic construct
  source 1..110: mol_type = other DNA
aatgaagaataagtgattaacatatgagcagatctcttccctagcttccctttcagcaatctcccgaacaaaccgtatgaccaaaccatgtgagcaagataatatctaga

SEQ ID NO: 18842 - DNA, 110 bp, synthetic construct
  source 1..110: mol_type = other DNA
taaaaaaaaacccgttgacaattgcatcaaaaagagtaaaatatctaggaataaatattccatattaggagtctggttaactgcatgtgacatgcttgaattatggcttc

SEQ ID NO: 18843 - DNA, 110 bp, synthetic construct
  source 1..110: mol_type = other DNA
tattccatattaggagtctggttaactgcatgtgacatgcttgaattatggcttccattagcatttcagggggatgggaaaatcttaaatccaccctcagttaaactgat

SEQ ID NO: 18844 - DNA, 110 bp, synthetic construct
  source 1..110: mol_type = other DNA
gtagtagcttcctgacttaactctggtggaaatttgcccctcctagtaacaaagtgttgtttactaaaatcaatagcgaactctaaatccaggagctcaaggacgaattg

SEQ ID NO: 18845 - DNA, 110 bp, synthetic construct
  source 1..110: mol_type = other DNA
gttgtttactaaaatcaatagcgaactctaaatccaggagctcaaggacgaattgagccatttgtaaaggggcactttacagtgtttttttttttttttttaattattca

SEQ ID NO: 18846 - DNA, 110 bp, synthetic construct
  source 1..110: mol_type = other DNA
caaatataaactttttaatatttagtaggatctcttcctatcccccacactcttttgctccagtgatacgaaaatattaccaaccataaactaatgtgttatgatacagc

SEQ ID NO: 18847 - DNA, 110 bp, synthetic construct
  source 1..110: mol_type = other DNA
tgctccagtgatacgaaaatattaccaaccataaactaatgtgttatgatacagcctcttcacttttcctagttgattcttcctgatcttatttctgcctccaggaagcc

SEQ ID NO: 18848 - DNA, 110 bp, synthetic construct
  source 1..110: mol_type = other DNA
gttgctctgcgttccaggcttagcagctgcaaaggactgaaactttacagtcattgttgaaactcgtaggctacagagacattaaaaccttattgtggagttcctgtcat

SEQ ID NO: 18849 - DNA, 110 bp, synthetic construct
  source 1..110: mol_type = other DNA
tgtctggctgattaaaataggctctgttttactgctgacaaaatgttgattataatttcatctagcaacagttagccacaaggcccatgaatgaacacgctgtgcgcgag

SEQ ID NO: 18850 - DNA, 110 bp, synthetic construct
  source 1..110: mol_type = other DNA
ttgatatttagctaagaggtcaaaaccagttttctgccaccccttgtgcaaaagccagtggctcttttggcatctattctctcaagacttcatcaagatgaaaagtcctg

SEQ ID NO: 18851 - DNA, 110 bp, synthetic construct
  source 1..110: mol_type = other DNA
cagtggctcttttggcatctattctctcaagacttcatcaagatgaaaagtcctggtatatacaagatgagccagggctggggcaggaaatataaaaaacgagtttggag

SEQ ID NO: 18852 - DNA, 110 bp, synthetic construct
  source 1..110: mol_type = other DNA
ctagctgcatccatgctgctacaaatggcattattttattctgttttatggctgaatagtagtgcactgggtatatgtatcacatcttcttaatcatctgttgatggaca

SEQ ID NO: 18853 - DNA, 110 bp, synthetic construct
  source 1..110: mol_type = other DNA
atagtagtgcactgggtatatgtatcacatcttcttaatcatctgttgatggacatttgggctgcacaaaacatttttcttactgaatgagtgaacaaggatgaagtaga

SEQ ID NO: 18854 - DNA, 110 bp, synthetic construct
  source 1..110: mol_type = other DNA
aatacagaagatgactgtctatgaatattcatagacacactctagctaaaaccctctaacggttttctcagaacagttaaaatagaaacagtaaattttctacagctaac

SEQ ID NO: 18855 - DNA, 110 bp, synthetic construct
  source 1..110: mol_type = other DNA
ggttaagaacctgactgcagtggctggagtagcagcagagatggggatttgatccctggcctgacacaatgggttaaaggacatagcgctgtcatagccacagctgcagt

SEQ ID NO: 18856 - DNA, 110 bp, synthetic construct
  source 1..110: mol_type = other DNA
ctggcctgacacaatgggttaaaggacatagcgctgtcatagccacagctgcagtaccaggttgcagctgctgctcggattcaatccctggcccagaaacttctatatgc

SEQ ID NO: 18857 - DNA, 110 bp, synthetic construct
  source 1..110: mol_type = other DNA
gggttggccatattgagtcaaaagcaattgtaagcagctgttgtcccagtttgtaacaggcatcagttagagctgctagactctgaaattacctgtccaattagttacag

SEQ ID NO: 18858 - DNA, 110 bp, synthetic construct
  source 1..110: mol_type = other DNA
atgaacctgctcagtaatgcagcctggaaaaaccagtcccctaccatacagagaagaatcagcaaggccaaagaatatttcagagagtcacatggtcagggccagtatac

SEQ ID NO: 18859 - DNA, 110 bp, synthetic construct
  source 1..110: mol_type = other DNA
gaatcagcaaggccaaagaatatttcagagagtcacatggtcagggccagtatactgtgggagcacaaaggataaattaagcttgatatattaggacttttcacagagaa

SEQ ID NO: 18860 - DNA, 110 bp, synthetic construct
  source 1..110: mol_type = other DNA
cctgagatctcccagagattctgatttaataggctctgggtacaacttggtcattgagagttttcaaagctcccaaggtggttctaatatgcaaggttgaggatcactat

SEQ ID NO: 18861 - DNA, 110 bp, synthetic construct
  source 1..110: mol_type = other DNA
aaggagcaggatgtgaggggattccaagaatgaggcaaggcaccaagccagccaccccacatttggtcgggtatcaggctgtaggagagctttcttgaaagacaagtcag

SEQ ID NO: 18862 - DNA, 110 bp, synthetic construct
  source 1..110: mol_type = other DNA
cccacatttggtcgggtatcaggctgtaggagagctttcttgaaagacaagtcagcagaactcatgaaaaaaaatatgcctcataaatagagtgaaagcgtagtacactc

SEQ ID NO: 18863 - DNA, 110 bp, synthetic construct
  source 1..110: mol_type = other DNA
ggaataggacaagtatagcataggaagttctcttcaatatcttgtcataacctgcaatgaaaagaatatatatatgtatagctgaatcactttgctgtacatctgaaact

SEQ ID NO: 18864 - DNA, 110 bp, synthetic construct
  source 1..110: mol_type = other DNA
tatatatttactagggttgtctgtctggatgatctgtcaactgatttaagggggaattcttaaagtcttctgctattattgggttgctgttgatttctccttttatgtct

SEQ ID NO: 18865 - DNA, 110 bp, synthetic construct
  source 1..110: mol_type = other DNA
gaatgaatacatagaaaagactagctagtgacatgaattgtcagcaggcccacgggaaagacagtgagaaaggctgagccaaaaccacccagctaaactgcttttggact

SEQ ID NO: 18866 - DNA, 110 bp, synthetic construct
  source 1..110: mol_type = other DNA
agtaatgtgccagctcgcacagctacttcaaacctaaactttgtcagctcccagtctgtgtatgttctcattatacataccactgccactggcattggctgcttccattt

SEQ ID NO: 18867 - DNA, 110 bp, synthetic construct
  source 1..110: mol_type = other DNA
ttattctgggtactcacataggtggaattatacagaattgtccttttatgactggcttatttcccgcagcacaatgtcctcaggtttcatccatgttgtagcacatgtga

SEQ ID NO: 18868 - DNA, 110 bp, synthetic construct
  source 1..110: mol_type = other DNA
cttatttcccgcagcacaatgtcctcaggtttcatccatgttgtagcacatgtgagactttccttcttttttaaggctgaataacccatgttatgtacataccacttttg

SEQ ID NO: 18869 - DNA, 110 bp, synthetic construct
  source 1..110: mol_type = other DNA
agagagaaatgcacatcttctcacagacaactggacactcaagtagatggagaatgggagctcagaagtccagactgtcttattgggggcttttcaggagtggaacacac

SEQ ID NO: 18870 - DNA, 110 bp, synthetic construct
  source 1..110: mol_type = other DNA
gggagctcagaagtccagactgtcttattgggggcttttcaggagtggaacacacctctgtgaggagataggcagatgtgtaaaagtctaagttgatggtaccaagagcc

SEQ ID NO: 18871 - DNA, 110 bp, synthetic construct
  source 1..110: mol_type = other DNA
cagttaaggcaggatcatctccccagcccagcatccttaatctgcaaatttccttttcctacatgtattcatttgccagggcaccataacaagcatcacacactggatag

SEQ ID NO: 18872 - DNA, 110 bp, synthetic construct
  source 1..110: mol_type = other DNA
ttcctacatgtattcatttgccagggcaccataacaagcatcacacactggatagcttaaaatcacaccacctcaagtgcttgcttattttaaagcccaaacaaagtaat

SEQ ID NO: 18873 - DNA, 110 bp, synthetic construct; identical to SEQ ID NO: 18871
  source 1..110: mol_type = other DNA

SEQ ID NO: 18874 - DNA, 110 bp, synthetic construct; identical to SEQ ID NO: 18872
  source 1..110: mol_type = other DNA

SEQ ID NO: 18875 - DNA, 110 bp, synthetic construct
  source 1..110: mol_type = other DNA
cagtgggataatctatagccataaaacaggggaaaaatcagcaaatctttatgaactgataaggagtcacttgaagcagcaactaaaatccctaaaatgacaagctaagc

SEQ ID NO: 18876 - DNA, 110 bp, synthetic construct
  source 1..110: mol_type = other DNA
ctgataaggagtcacttgaagcagcaactaaaatccctaaaatgacaagctaagccctggcgcacccctgacgtatctcctattgctggtctctgacttatttctctaga

SEQ ID NO: 18877 - DNA, 110 bp, synthetic construct
  source 1..110: mol_type = other DNA
atcttagcatgttgcagccagcaatacaccagcactgtagccctccctatgctagggacacagtcaggctgcagctgccctcaccaccagaggattctctgcctccctgc

SEQ ID NO: 18878 - DNA, 110 bp, synthetic construct
  source 1..110: mol_type = other DNA
tggagttctcttgtggtgcagtggggaaagaatcctgagttgtcactgtagtggcttcactccctgctttgacacagcttcagtccctggcctgggcagttctacatgct

SEQ ID NO: 18879 - DNA, 110 bp, synthetic construct
  source 1..110: mol_type = other DNA
ttcactccctgctttgacacagcttcagtccctggcctgggcagttctacatgctacagggcggccaaaaaaaaaaaaaaaaatggtgatctaccattcagtgtagtgac

SEQ ID NO: 18880 - DNA, 110 bp, synthetic construct
  source 1..110: mol_type = other DNA
ttttcatttgggttggtggttttttgttgagttgtatgagttgtttgtgtattttgtatatgaagcccttgtcggctgcatcgcttgaaaatattttgtcccattctgta

SEQ ID NO: 18881 - DNA, 110 bp, synthetic construct; identical to SEQ ID NO: 18880
  source 1..110: mol_type = other DNA

SEQ ID NO: 18882 - DNA, 110 bp, synthetic construct
  source 1..110: mol_type = other DNA
aaaccacctagtggttttacaaattaaagaaggtaagagctttgcagaaactgattattgatcctagcaagattgtggtagcatggttaagggcaatatctaaaaaatca

SEQ ID NO: 18883 - DNA, 110 bp, synthetic construct; identical to SEQ ID NO: 18882
  source 1..110: mol_type = other DNA

SEQ ID NO: 18884 - DNA, 110 bp, synthetic construct
  source 1..110: mol_type = other DNA
cgaggaagaggcagccctaagttctaagttctagtgaacatgccactgcagctacaggccaggtccttagagaggagtgtagttggggcctcacccagtggtgcttctgc

SEQ ID NO: 18885 - DNA, 110 bp, synthetic construct
  source 1..110: mol_type = other DNA
tttgtcttccagtgagctcttctgcaagttcatcctgagcatccctgacaaccagttagttcgacagaagctgaactgcatggctaagatagtagagagcaatcttttcc

SEQ ID NO: 18886 - DNA, 110 bp, synthetic construct
  source 1..110: mol_type = other DNA
ttagttcgacagaagctgaactgcatggctaagatagtagagagcaatcttttccggcagtcaggtgagtagccacccaaaaccagagcttatggaaattcctatcttgc

SEQ ID NO: 18887 - DNA, 110 bp, synthetic construct
  source 1..110: mol_type = other DNA
acctctctgggccctagttcatatttgaaaaaagtaaggaaaatacataactcagtggagtgatgtggagcttacgagagacgccctgtctctgaggaacatcctacacc

SEQ ID NO: 18888 - DNA, 110 bp, synthetic construct
  source 1..110: mol_type = other DNA
tggagtgatgtggagcttacgagagacgccctgtctctgaggaacatcctacaccgcctgtcatatatagctgagcctttatcaatgttggttgatttcctgcctccttc

SEQ ID NO: 18889 - DNA, 110 bp, synthetic construct
  source 1..110: mol_type = other DNA
ggtttcagtttctcaatctgtaaactgggtcatactcctctgtcaaggtcctttccagctcttaccttccggtaagtcttgcactgggaaggtgcaatggattcgtgaca

SEQ ID NO: 18890 - DNA, 110 bp, synthetic construct
  source 1..110: mol_type = other DNA
tcatttgaaaggcatttttggcatttgttttcaacaagatcactttagctgattctcttaggcatactaactcaaaaaaaatgcaattatcctgcagacaatactcaaaa

SEQ ID NO: 18891 - DNA, 110 bp, synthetic construct; identical to SEQ ID NO: 18890
  source 1..110: mol_type = other DNA

SEQ ID NO: 18892 - DNA, 110 bp, synthetic construct
  source 1..110: mol_type = other DNA
caagggcacagagagagcacagcctagaaagaatcaggtgagtgtgtgtttaaaggtgtgatgaagaacagaagtgtacaactctttgttgtgtagttaggaaaacatgg

SEQ ID NO: 18893 - DNA, 110 bp, synthetic construct
  source 1..110: mol_type = other DNA
gaagttgggtgaaaggtactgggatacctctactagttttgtgcaatttcttgtgactctatcattacttccaaacaaaaagcttacaagtctgcagtgcttagaaccac

SEQ ID NO: 18894 - DNA, 110 bp, synthetic construct
  source 1..110: mol_type = other DNA
gaggtaacagccatgagtatctgacagtctaggaaattcttagaggcaagtgtgggctgatattacttgttagctccttggccgttaatagtgttttggcactgagcaga

SEQ ID NO: 18895 - DNA, 110 bp, synthetic construct
  source 1..110: mol_type = other DNA
gctgatattacttgttagctccttggccgttaatagtgttttggcactgagcagaggagggactgttccagagtggtcagcctggttttgaccctcttccttctagagta

SEQ ID NO: 18896 - DNA, 110 bp, synthetic construct
  source 1..110: mol_type = other DNA
actgtcctttaataaacacctggcgtctaagatgctcctcggcctcagaaccacaaaaccactattcgccttcacctgagggaaatgccttctctatcccaggatgagtc

SEQ ID NO: 18897 - DNA, 110 bp, synthetic construct
  source 1..110: mol_type = other DNA
ttaacccactgtgccacagcaggaactccatattatctgaagttttatagaatggtaaatatccaccttttctgagcttgtgttcttgctcatggaagattatttcctct

SEQ ID NO: 18898 - DNA, 110 bp, synthetic construct
  source 1..110: mol_type = other DNA
tttgcatatgctgctataaacattagcatatgcccctggggggtggctggggcgggagacttgctggcctcttctagcttctagcccctccttgcttttgctaactcctt

SEQ ID NO: 18899 - DNA, 110 bp, synthetic construct
  source 1..110: mol_type = other DNA
ctgagcaagggaccgaacccacatccttatggataccatgttggtttcttaacctgctgagccacaatgggaacttcctccgccatagttgtgattctcctctccttgga

SEQ ID NO: 18900 - DNA, 110 bp, synthetic construct; identical to SEQ ID NO: 18899
  source 1..110: mol_type = other DNA

SEQ ID NO: 18901 - DNA, 110 bp, synthetic construct
  source 1..110: mol_type = other DNA
ggttcagatttggtggtttgggtattaaaaactggtttctttctctgggttttatgttactgcttaaaattccattagacaaagaataagggatatagtaagaaagctca

SEQ ID NO: 18902 - DNA, 110 bp, synthetic construct
  source 1..110: mol_type = other DNA
gttactgcttaaaattccattagacaaagaataagggatatagtaagaaagctcagaggacaaaaaatgcccaccaaggactctgggaaggaccctcaacaagaatttgg

SEQ ID NO: 18903 - DNA, 110 bp, synthetic construct
  source 1..110: mol_type = other DNA
caagagaccagcattctcatttgagtcctttcaaacacagcagatgacaggcaatgtgagctagcaatttttttcccctcaaagcaggttagcaggttcaaataaaacag

SEQ ID NO: 18904 - DNA, 110 bp, synthetic construct
  source 1..110: mol_type = other DNA
gaccaagaaaggtaggatctgattccctgccatgaaagcacctccatagacctactgtcagttctttgtacttggatgctgggtccttggctcctgacctttcagagcca

SEQ ID NO: 18905 - DNA, 110 bp, synthetic construct
  source 1..110: mol_type = other DNA
tgtcagttctttgtacttggatgctgggtccttggctcctgacctttcagagccattttttcagctttccctttgaacctctgcgtgacctcatattgttccaattaatt

SEQ ID NO: 18906 - DNA, 110 bp, synthetic construct
  source 1..110: mol_type = other DNA
tgctggtcatcctgggggggaggggtgtgtgactataaactggcccctttgtgggtagggagatcctccaggaaatgcaggtatcatttcacctacgcagccccagagca

SEQ ID NO: 18907 - DNA, 110 bp, synthetic construct
  source 1..110: mol_type = other DNA
tttgtaaaaacagaattaaaaaggagctagtagaacaactgggaagttacataatttacctaatccttgcaaccacaaagcctaaacagaatatcataagatagatttat

SEQ ID NO: 18908 - DNA, 110 bp, synthetic construct
  source 1..110: mol_type = other DNA
ctgcatttgtttttcataagataacagctttaagttactctccctgacatgagtactctcaaaatcatcttaaatcttgccaaattaagtcctagctcccatacaaggcc

SEQ ID NO: 18909 - DNA, 110 bp, synthetic construct
  source 1..110: mol_type = other DNA
tactctccctgacatgagtactctcaaaatcatcttaaatcttgccaaattaagtcctagctcccatacaaggcctttttttttttcatttttttaaaattgtagtaaga

SEQ ID NO: 18910 - DNA, 110 bp, synthetic construct
  source 1..110: mol_type = other DNA
gcaaaggaaaccactaaaaaaacgaagacgacccacagaatgggagaaattctttgcagatgatgcaaccaacaagggccaacgtccaaaatatacaagcaattcataca

SEQ ID NO: 18911 - DNA, 110 bp, synthetic construct
  source 1..110: mol_type = other DNA
gaaattctttgcagatgatgcaaccaacaagggccaacgtccaaaatatacaagcaattcatacaactcaaaaacaaaacaaccgaactgaaaaatgggctgaagaccta

SEQ ID NO: 18912 - DNA, 110 bp, synthetic construct
  source 1..110: mol_type = other DNA
gccgagggtgcagccctaaaaagacaaggaaccaaaaaaaaaaagagctgtggtgtaaaatggtcaaggcttccatgtagcatgtcggctttggcaacctacttcctcct

SEQ ID NO: 18913 - DNA, 110 bp, synthetic construct
  source 1..110: mol_type = other DNA
ctcacagacatccaggctactaaaaaattcacagattgccagatggtacaacaacagttctttgcaaaggatctgagctttccagggaacaaaggacgtgtactcatggg

SEQ ID NO: 18914 - DNA, 110 bp, synthetic construct
  source 1..110: mol_type = other DNA
gagatgacgattggcatctcagctaataagcaggaaacaaagacccacgccagcctcccactcccaaggcaacacagtggtgagcaatttaaggcctttaaacagaaaaa

SEQ ID NO: 18915 - DNA, 110 bp, synthetic construct
  source 1..110: mol_type = other DNA
gctgtttattcggttggacaactggataccacacagccttccctgccacggggtgcaggcctgtgtgtccaacctttgctctctcttcccaactagagtgtatgctcctt

SEQ ID NO: 18916 - DNA, 110 bp, synthetic construct
  source 1..110: mol_type = other DNA
ccctcccaccccggccctgcccccagaacatgtggaagttcccggaccagggatcgaacttgtgctacagcaataaccagagccacggcagtaacgatgccagatcctta

SEQ ID NO: 18917 - DNA, 110 bp, synthetic construct
  source 1..110: mol_type = other DNA
cctgcccccagaacatgtggaagttcccggaccagggatcgaacttgtgctacagcaataaccagagccacggcagtaacgatgccagatccttaactgctgggccacca

SEQ ID NO: 18918 - DNA, 110 bp, synthetic construct
  source 1..110: mol_type = other DNA
ctgagtcatttgaattcttcctcctgctgccccttttctgcaaacccttttgcatctgagacggcaggcagcttggcagtggggccggcaggcagcagcatgatcctctg

SEQ ID NO: 18919 - DNA, 110 bp, synthetic construct
  source 1..110: mol_type = other DNA
ggttccttaaccactgagctactacgggaactccaggagtgggctgcctttttatgatatggcccaaagaacaaaatgggagtgactgtgtgtcatttcagactcactct

SEQ ID NO: 18920 - DNA, 110 bp, synthetic construct
  source 1..110: mol_type = other DNA
gatatggcccaaagaacaaaatgggagtgactgtgtgtcatttcagactcactctctcataaccctcttgtcaccatgtgaataagcctgggctagcctgctgggtgagg

SEQ ID NO: 18921 - DNA, 110 bp, synthetic construct
  source 1..110: mol_type = other DNA
caacgggaatttctgccttaagttttttagggcttttctcacaatctctgccgagatccagctatcattaatacttaatataaggttactaaattccttaaaacctagtc

SEQ ID NO: 18922 - DNA, 110 bp, synthetic construct
  source 1..110: mol_type = other DNA
aagaggatgcccttcatagtccagatttcatactgtcagagtaatgctttcaacttagtgccgagctgcttctgcctccaccacacaaaacaacttttattttaaggacg

SEQ ID NO: 18923 - DNA, 110 bp, synthetic construct
  source 1..110: mol_type = other DNA
ccagactaggggttgaacctagctacagcagtgaaagcaccaagtactaactacgaaaccaccagggaactccctctatgtacttctttttaaaaggattctattacttt

SEQ ID NO: 18924 - DNA, 110 bp, synthetic construct
  source 1..110: mol_type = other DNA
aaaccaccagggaactccctctatgtacttctttttaaaaggattctattactttgtcttcaagttcacaggtcttttcttctgcaataatgccatcaactttgtcattt

SEQ ID NO: 18925 - DNA, 110 bp, synthetic construct
  source 1..110: mol_type = other DNA
cattaaggaaacatacaaaaacgtacaaagtgattatctctgggcgataggataacagctatttttcttcttccaagtatttttttttctttggctgtgctcacggcatg

SEQ ID NO: 18926 - DNA, 110 bp, synthetic construct
  source 1..110: mol_type = other DNA
ctgagtgaggcctgggatggaacctagacatgatatcgggttcttaacctactgagccataatgagaaatccaaaaattcttttttaatttgttcactgtgattttttat

SEQ ID NO: 18927 - DNA, 110 bp, synthetic construct; identical to SEQ ID NO: 18926
  source 1..110: mol_type = other DNA

SEQ ID NO: 18928 - DNA, 110 bp, synthetic construct
  source 1..110: mol_type = other DNA
taaggtactgggctggttaggacttcaacatgtgaatctggattgcgggggaacacataatttatcacatagctttacttttccttgttcactgggggctcgagctgaag

SEQ ID NO: 18929 - DNA, 110 bp, synthetic construct
  source 1..110: mol_type = other DNA
caaatagcatcttttctcacatactctattggtcaaagcagtcacagtcttccccaaattcaagggcagggcacctagaccctacgcataataggagaatgtttaagaag

SEQ ID NO: 18930 - DNA, 110 bp, synthetic construct
  source 1..110: mol_type = other DNA
aaattcaagggcagggcacctagaccctacgcataataggagaatgtttaagaagtgtggccatgtttgtttttatatggccacattcatctctctctctcttgcccaga

SEQ ID NO: 18931 - DNA, 110 bp, synthetic construct
  source 1..110: mol_type = other DNA
ccaaccctgtgaggaggtactattatctccatttcacagataagaaaaactgagacccagagagggtgagggatcctgagtcgtacagctagtgggtggcagagctgagg

SEQ ID NO: 18932 - DNA, 110 bp, synthetic construct
  source 1..110: mol_type = other DNA
cccagagagggtgagggatcctgagtcgtacagctagtgggtggcagagctgaggtgcccactcaggcagtctgaccgcagagctcatgcttttgatccctatatgctga

SEQ ID NO: 18933 - DNA, 110 bp, synthetic construct
  source 1..110: mol_type = other DNA
gatgaaatcttttctcgtgttttccatccagctctgtccaaacaggatatgaaatgatttacaaaaatatgcacactctaccaagcttttagaaacagggtgtttgaaaa

SEQ ID NO: 18934 - DNA, 110 bp, synthetic construct
  source 1..110: mol_type = other DNA
gggtgggccttctacaatatgacccgtgtccttaaaagaggaggaaattgggtcacagatacacacagagggaaggccatgcaaggacacagggggaagatggtcattta

SEQ ID NO: 18935 - DNA, 110 bp, synthetic construct
  source 1..110: mol_type = other DNA
cagatacacacagagggaaggccatgcaaggacacagggggaagatggtcatttatgagccaaggagcgaggcctcatgcccacaccttgatcttgggcctccagaacta

SEQ ID NO: 18936 - DNA, 110 bp, synthetic construct
  source 1..110: mol_type = other DNA
tttagcataagccttgacccctgctcatgctgaggggctcctttctccagggcctttgtccagcttcccgggtacctcagttactgattgggggctctattgttcaagag

SEQ ID NO: 18937 - DNA, 110 bp, synthetic construct
  source 1..110: mol_type = other DNA
tgtgccacagtggggactcctattaaaatactctttaaggagcatcctaaccccaaagttttgcaactctcaggaaagcaaatagtactggggagaagacattggttgtt

SEQ ID NO: 18938 - DNA, 110 bp, synthetic construct
  source 1..110: mol_type = other DNA
aagttttgcaactctcaggaaagcaaatagtactggggagaagacattggttgttcgaatgtcttgcatctttttaatattgtaacaaagaaatttgcactgggtgcatc

SEQ ID NO: 18939 - DNA, 110 bp, synthetic construct
  source 1..110: mol_type = other DNA
cttcccgaggccacatcctttttgtttgaaaaatgagctggcatgttgagctaatgcttttattcctcagaaggaagaaagcaagtctctatctatcatggccctgcttc

SEQ ID NO: 18940 - DNA, 110 bp, synthetic construct
  source 1..110: mol_type = other DNA
ctgggttcgttaaccactgagccacgacgggaactcctatttttaataagtttaatttcaatggaatcttcgttggctcttaaattatgatataaatttcacccataaga

SEQ ID NO: 18941 - DNA, 110 bp, synthetic construct; identical to SEQ ID NO: 18940
  source 1..110: mol_type = other DNA

SEQ ID NO: 18942 - DNA, 110 bp, synthetic construct
  source 1..110: mol_type = other DNA
agcgggttactcactggtaactaaatgcctggcaataagctaaatgcggagagtacataaaaaaagaaggaaagttagcgtgcaatgttcccttttcaaaccctttttgg

SEQ ID NO: 18943 - DNA, 110 bp, synthetic construct
  source 1..110: mol_type = other DNA
taaattctatgaataaaatggcaagtagcaccaccaacaaaaaccacttaagccccctacgaagggttgaaccaggagagttccacagctgctgaagggcgactcagaca

SEQ ID NO: 18944 - DNA, 110 bp, synthetic construct
  source 1..110: mol_type = other DNA
cctacgaagggttgaaccaggagagttccacagctgctgaagggcgactcagacaggctcgggcagcaaccaaatctggtttggctgtgtcaccctgagaaagttacaag

SEQ ID NO: 18945 - DNA, 110 bp, synthetic construct
  source 1..110: mol_type = other DNA
ttttgtccctggtcctttcctggagtcatccttgtatctcatgccagcttgttcgagacatctgatatcggagctcctgttgcggctgagtgagttaggaatctgataca

SEQ ID NO: 18946 - DNA, 110 bp, synthetic construct
  source 1..110: mol_type = other DNA
atctcatgccagcttgttcgagacatctgatatcggagctcctgttgcggctgagtgagttaggaatctgatacagcatccatgaggatgcgggttccatccctggactg

SEQ ID NO: 18947 - DNA, 110 bp, synthetic construct
  source 1..110: mol_type = other DNA
cattagaccagagggacctaactgacatttatagaataatccatccaatagcagcagaatatatattcttctcaagctcacatagaacattctccaggataaatcatatg

SEQ ID NO: 18948 - DNA, 110 bp, synthetic construct
  source 1..110: mol_type = other DNA
caatagcagcagaatatatattcttctcaagctcacatagaacattctccaggataaatcatatgttaggccataaaagaagtcttaaaaaatttaaggagattgaagtc

SEQ ID NO: 18949 - DNA, 110 bp, synthetic construct
  source 1..110: mol_type = other DNA
ccacaacaagagctccacccctggcatttgtaatctggctgctggaaagaagtcatcttggagctgctgggcttaccttcccagtctcacggagggagggcaacacacag

SEQ ID NO: 18950 - DNA, 110 bp, synthetic construct
  source 1..110: mol_type = other DNA
actgataatctaagtgaaagttcactgttaactgcgagcttcatgagaaaaagaactgcactattttcctccttaccctgaaattacacagcatcgcattccaaatgcag

SEQ ID NO: 18951 - DNA, 110 bp, synthetic construct
  source 1..110: mol_type = other DNA
gctgcaaactacaaatggagtgcgccactgcggctgggcagttcctgagaaaaacacctgcagttatctttaatgagggaagagaggaaccctacaaagcataaagagag

SEQ ID NO: 18952 - DNA, 110 bp, synthetic construct
  source 1..110: mol_type = other DNA
acctgcagttatctttaatgagggaagagaggaaccctacaaagcataaagagaggaatagcaggatttgaggtagaaagaagtagagtctagatcagtagttccacctg

SEQ ID NO: 18953 - DNA, 110 bp, synthetic construct
  source 1..110: mol_type = other DNA
ttgcatggcttgcatcttagctctgcctctggattgttgtgtaatcttggacacgttacttaacctatttgtgccacagttttcccatctgtaaaatggagatgatagat

SEQ ID NO: 18954 - DNA, 110 bp, synthetic construct
  source 1..110: mol_type = other DNA
cagttccggtcccctgggaatgaattctctcaagtattaatgatttgaaagaagtgtccactttgccctcattcttgaaggatatttttgttggagataggtttttaaat

SEQ ID NO: 18955 - DNA, 110 bp, synthetic construct
  source 1..110: mol_type = other DNA
gtccactttgccctcattcttgaaggatatttttgttggagataggtttttaaatttccagttttctttgtagtagtttaaagattttgctccattactgtatttggatt

SEQ ID NO: 18956 - DNA, 110 bp, synthetic construct
  source 1..110: mol_type = other DNA
attcagaacagtccagctggcctgggcccagaggcctccccacagctacacaacacatggggccacctcgagaaggaggtgaccgatgtggggagatctaaagactccac

SEQ ID NO: 18957 - DNA, 110 bp, synthetic construct
  source 1..110: mol_type = other DNA
ttcttctgacaggggctcttgactcaggtcttccaaggagagccaccatcctgctgctcatgggcagtggggacagtccaggatatcctgctgagccctgggaagtctcc

SEQ ID NO: 18958 - DNA, 110 bp, synthetic construct
  source 1..110: mol_type = other DNA
gctcatgggcagtggggacagtccaggatatcctgctgagccctgggaagtctccctggtgaggtagggacagcctgggccagtgcagtctaggaggccatgggacttct

SEQ ID NO: 18959 - DNA, 110 bp, synthetic construct
  source 1..110: mol_type = other DNA
cactttatacagtggtgcctggatttgcaacgccagctcctgcctcctcccacgactccagctcacatgtccacctgcctgccatcgccactggccgcctattccatacg

SEQ ID NO: 18960 - DNA, 110 bp, synthetic construct
  source 1..110: mol_type = other DNA
acctgttgtctggtttccagagtgaaactctgtccttaaccctctagaactcacctctagcacctgtggtcccactctgtcagcgacccagtagtgagaagttgggttag

SEQ ID NO: 18961 - DNA, 110 bp, synthetic construct
  source 1..110: mol_type = other DNA
atgactatgctctctctttgtcccaactcaggtactccaagtcaccccagtcctgctcccgttctgcccctccctagctgaatgatatagggcctcactcatttgtagca

SEQ ID NO: 18962 - DNA, 110 bp, synthetic construct
  source 1..110: mol_type = other DNA
taaatatatcagtaatggattgatatcaataatgaaccagcatcagtagtaaatagatcaacagctagttgttaccaataaacaaaaataaggtggctacaaagtccacc

SEQ ID NO: 18963 - DNA, 110 bp, synthetic construct
  source 1..110: mol_type = other DNA
gatcaacagctagttgttaccaataaacaaaaataaggtggctacaaagtccacccccagaatactcacaggtgggtagttagggttggacagagaaatgaaaatggcag

SEQ ID NO: 18964 - DNA, 110 bp, synthetic construct
  source 1..110: mol_type = other DNA
gtctcataagatagggagagtgagccaggggacaattcagaagaaggaccccacgggacattggccctgctgggtgtcttggctccttggtcatcctcggggcacccagc

SEQ ID NO: 18965 - DNA, 110 bp, synthetic construct
  source 1..110: mol_type = other DNA
ttaacgcctatctggagaaggtgttctactgaggcagaaatagaaaacaagtcgagcccaccctgtcccattccccgggcccaccttccccgaggctgaaggctccaacc

SEQ ID NO: 18966 - DNA, 110 bp, synthetic construct
  source 1..110: mol_type = other DNA
gtttcaggcagggcttgcactcttcccacagggccatcatcgtctcattgcacaagccctgggatcccttcagctttgtctcggtatccctggtatcgttcagggcatcc

SEQ ID NO: 18967 - DNA, 110 bp, synthetic construct
  source 1..110: mol_type = other DNA
gccctgggatcccttcagctttgtctcggtatccctggtatcgttcagggcatccttggggaggacacaggctgggttagccacagacactgcaggcttctccttcccac

SEQ ID NO: 18968 - DNA, 110 bp, synthetic construct
  source 1..110: mol_type = other DNA
ctgataccaagatcttattacaggtgggggcacaggtcccctgtcccatgaggcccccggtcagcctctgtctgccttccctccccccgtgccaaccgctaatctttggt

SEQ ID NO: 18969 - DNA, 110 bp, synthetic construct
  source 1..110: mol_type = other DNA
cccggtcagcctctgtctgccttccctccccccgtgccaaccgctaatctttggttgttgagttcctccctggcctgacccaggtcccgccagctctcccctctctgccc

SEQ ID NO: 18970 - DNA, 110 bp, synthetic construct
  source 1..110: mol_type = other DNA
ttagtaggaaatcagttaaattatggtacttctcttagatggaaaattatgtggctgttaaaaagtcctaagccagttctctaggtactgataaggaataatttccaaaa

SEQ ID NO: 18971 - DNA, 110 bp, synthetic construct; identical to SEQ ID NO: 18970
  source 1..110: mol_type = other DNA

SEQ ID NO: 18972 - DNA, 110 bp, synthetic construct
  source 1..110: mol_type = other DNA
acggacttcagaattacagacttgagcttgaattcctgctttgcccctgatcagctataacctttcacacataaacctcctggctgaagtaatctctgcccccagtcaag

SEQ ID NO: 18973 - DNA, 110 bp, synthetic construct
  source 1..110: mol_type = other DNA
tataacctttcacacataaacctcctggctgaagtaatctctgcccccagtcaagttcatgtcagtgctcagactgacaacacacttacctgtgatttgccatcttacct

SEQ ID NO: 18974 - DNA, 110 bp, synthetic construct
  source 1..110: mol_type = other DNA
ttccagtcctaatataagagaagtgtgttctgggttgagtaaaaaccctgcatccttacctatagctttctgagcagagctgttctgtcaagatacaaaactcaaagact

SEQ ID NO: 18975 - DNA, 110 bp, synthetic construct
  source 1..110: mol_type = other DNA
ttacctatagctttctgagcagagctgttctgtcaagatacaaaactcaaagactttaaggagtttcccctctcctcattctagtttcttttctgcaacttttccaggct

SEQ ID NO: 18976 - DNA, 110 bp, synthetic construct
  source 1..110: mol_type = other DNA
aaatatatgactggggaaggggtgccttgtgaaaacaaaggagtccattaagtttggcttttttatttgtttagcttgcaaagtctgatggttccaaaatgccaattttc

SEQ ID NO: 18977 - DNA, 110 bp, synthetic construct
  source 1..110: mol_type = other DNA
tctgtggtatttgttatagcagctgagctgactaatacagaggactagcctgaggggcagacacagagctgtggctagagaccggagctggggaagagccaacctctctg

SEQ ID NO: 18978 - DNA, 110 bp, synthetic construct
  source 1..110: mol_type = other DNA
ggcagacacagagctgtggctagagaccggagctggggaagagccaacctctctgcaacaggaaagggacagatggctcaaatcagctgcctgcccaggaagggtctata

SEQ ID NO: 18979 - DNA, 110 bp, synthetic construct
  source 1..110: mol_type = other DNA
taatggtacacttcccaactcctggcccagtgggttctggctactgatgcaccactctgctaagtgagctgaagaggttctggggaaatgattccatgacccagtcacag

SEQ ID NO: 18980 - DNA, 110 bp, synthetic construct
  source 1..110: mol_type = other DNA
atgtaagacaatcctatctgtcaccttcccaagggaaggaccatgtcccccttatcattgcctccctagcctatagctccataaatgtttgtgagctggttgcttaaagc

SEQ ID NO: 18981 - DNA, 110 bp, synthetic construct
  source 1..110: mol_type = other DNA
cctcccaaggaagagagctggaggtgagaaggaagcaacgtgaactgggcactggccagctgagttgggtgtgacagagtccgtgtcagttcaggcggtggccttagtga

SEQ ID NO: 18982 - DNA, 110 bp, synthetic construct
  source 1..110: mol_type = other DNA
ccagctgagttgggtgtgacagagtccgtgtcagttcaggcggtggccttagtgatatcagcccagagtagggcaggcttgagcaccatcgggccaagaaactgaggcca

SEQ ID NO: 18983 - DNA, 110 bp, synthetic construct
  source 1..110: mol_type = other DNA
acagggtccagagagcttccaggctggtggaagctctgggaggatgatgcaccccaactccacagggacagacgcacttgcactggggaccctcccacacttccccctat

SEQ ID NO: 18984 - DNA, 110 bp, synthetic construct
  source 1..110: mol_type = other DNA
aactccacagggacagacgcacttgcactggggaccctcccacacttccccctatgtagctcttcatcaggcagttcatcttttatcatatcctttattatgtgataaac

SEQ ID NO: 18985 - DNA, 110 bp, synthetic construct
  source 1..110: mol_type = other DNA
gtatcagtgcattgtttcatggccatagactattccattgtgtgatagcataaaggctttttgttaagccattacaaacaatattgtatttaatgacctggtttaaaggt

SEQ ID NO: 18986 - DNA, 110 bp, synthetic construct
  source 1..110: mol_type = other DNA
gctttttgttaagccattacaaacaatattgtatttaatgacctggtttaaaggttattttatcaagtaaccctgttgaatatgtgtgcacatctctgtctgtgagcagt

SEQ ID NO: 18987 - DNA, 110 bp, synthetic construct
  source 1..110: mol_type = other DNA
taacattaaaagcttaattttatagacattatgaaatatcattgtggacattatcctgacttcccaccagctgagaaaataaggacttgagacaacaggagcagcaagta

SEQ ID NO: 18988 - DNA, 110 bp, synthetic construct
  source 1..110: mol_type = other DNA
ctgacttcccaccagctgagaaaataaggacttgagacaacaggagcagcaagtataatctctttaggaaaattgtaaaggagtcataacaggaagaattaaaaacacat

SEQ ID NO: 18989 - DNA, 110 bp, synthetic construct
  source 1..110: mol_type = other DNA
ttgattagcccctattaaatccaagtgctttattatcgttcaccaacttactcatgtcgcttctgtcaacacacatgtgttgaagagcaacaaatcttatcttcttaagt

SEQ ID NO: 18990 - DNA, 110 bp, synthetic construct
  source 1..110: mol_type = other DNA
ctggctctgtcctgaagcacagatgagggccctttggagggccctttgggctcggcaagctggaggaagcccaggtgtcttccaggggaccatgttttctcagagttctc

SEQ ID NO: 18991 - DNA, 110 bp, synthetic construct
  source 1..110: mol_type = other DNA
taaattgtagaaatttcagttaatgtagacctcaagtgacaggaaaagaaaaagcctctttaaaaattatatttgcttttctcctcctctcctctaaatgattccttcct

SEQ ID NO: 18992 - DNA, 110 bp, synthetic construct
  source 1..110: mol_type = other DNA
ccaagaggggacgcaaaaaccaaccaccaacaaaccctcccctttcgagcttctgtaaaaatgaggagtgggtctagtcattgcagcaccatctgcgggtggtcctgctc

SEQ ID NO: 18993 - DNA, 110 bp, synthetic construct
  source 1..110: mol_type = other DNA
atggatattagttggatttgtttccgctgcaccacgacggaaactcctttaaaagcattttaaagactgccaggagttctcattgtggcacagtggaaacaaatctgact

SEQ ID NO: 18994 - DNA, 110 bp, synthetic construct
  source 1..110: mol_type = other DNA
gctgcaccacgacggaaactcctttaaaagcattttaaagactgccaggagttctcattgtggcacagtggaaacaaatctgactagtaaccgtgaggatctgggcttga

SEQ ID NO: 18995 - DNA, 110 bp, synthetic construct
  source 1..110: mol_type = other DNA
atagttccctgtgccatacagtaggtcgttgtcatatattttatatattactgtatgtatctactagtgtgtatctgtcccaatagcccttacatcacctctcaagtaaa

SEQ ID NO: 18996 - DNA, 110 bp, synthetic construct; identical to SEQ ID NO: 18995
  source 1..110: mol_type = other DNA

SEQ ID NO: 18997 - DNA, 110 bp, synthetic construct
  source 1..110: mol_type = other DNA
ttgcaagcagatgaacaggctgcataagcagcagactacaaagatggaacttatatggatgttttagtacagtgaccaaataaagctttcagcggttgacacatttaatg

SEQ ID NO: 18998 - DNA, 110 bp, synthetic construct
  source 1..110: mol_type = other DNA
caaaataaatgacttttcagagtagctggcttgctagattagaggttacttcctagatcctctataaaataaactgatgaccaatgcatgttggctgcttgggctagaag

SEQ ID NO: 18999 - DNA, 110 bp, synthetic construct
  source 1..110: mol_type = other DNA
actcactggatccccttgttccactctttcccctcagaaaggtaattatagagtagatgctagctggacttcacctgagaaacactcatgagaaacacacctgagaaaca

SEQ ID NO: 19000 - DNA, 110 bp, synthetic construct
  source 1..110: mol_type = other DNA
agaaaggtaattatagagtagatgctagctggacttcacctgagaaacactcatgagaaacacacctgagaaacagacttcaggagttcccatcgtggctcagtggttaa

SEQ ID NO: 19001 - DNA, 110 bp, synthetic construct
  source 1..110: mol_type = other DNA
ccgtggggctctaaacgcgacctccccacccccacacaccccctatagccctagttacctcgcacccacctccaccccttttcctcaaagctcggcctcagctgtgcagc

SEQ ID NO: 19002 - DNA, 110 bp, synthetic construct
  source 1..110: mol_type = other DNA
tacctcgcacccacctccaccccttttcctcaaagctcggcctcagctgtgcagcctcttatgcttcttgaagccctcccccttcctttgccctctgtgtttgttcagct

SEQ ID NO: 19003 - DNA, 110 bp, synthetic construct
  source 1..110: mol_type = other DNA
atttctgacaaattagaacatctgttcttcctctccttcgccagcctctcatttcctttgacctcctcctactgctgtattattgaggcaagagcctgttgttagctgtg

SEQ ID NO: 19004 - DNA, 110 bp, synthetic construct
  source 1..110: mol_type = other DNA
ctttgacctcctcctactgctgtattattgaggcaagagcctgttgttagctgtgataaaaatctcagtggagtatgttcctttgtaccatgatgataagtagatagctc

SEQ ID NO: 19005 - DNA, 110 bp, synthetic construct
  source 1..110: mol_type = other DNA
gtgttcactggaattttctagaggctccataacatgtatatcacaacagactggaagcaaaaggagacagccaaatccagctgtcttccacaagtaggcatttgcaagaa

SEQ ID NO: 19006 - DNA, 110 bp, synthetic construct
  source 1..110: mol_type = other DNA
tcaccttgtcttgggtcttgtgatactcatctaggccaggtgcacatgctttgtgctctttgggaagacagcctgactgagcatcagagcaagggaagtggcacagaagc

SEQ ID NO: 19007 - DNA, 110 bp, synthetic construct
  source 1..110: mol_type = other DNA
ctctttgggaagacagcctgactgagcatcagagcaagggaagtggcacagaagctctctttggaggaggttactggcaggggtggctgctactgcttctctctttctgc

SEQ ID NO: 19008 - DNA, 110 bp, synthetic construct
  source 1..110: mol_type = other DNA
tctagaaccatttgtatacacatgagaaaatgaaggcagagtagcagagtgacaggtccagaagaaaacaagggaaggacagttgaagcaacagtaaagctcaaaagcat

SEQ ID NO: 19009 - DNA, 110 bp, synthetic construct
  source 1..110: mol_type = other DNA
gtccagaagaaaacaagggaaggacagttgaagcaacagtaaagctcaaaagcatccctaccttaattctacctatatagaaactgggtaggaatagttgaaatttttct

SEQ ID NO: 19010 - DNA, 110 bp, synthetic construct
  source 1..110: mol_type = other DNA
gaggtactgtcttgcagaggttgcaaatatctgaacacatgccttccctcttccgctttgtcatgacagacatctgtatcaggttcagcctaccatcctcctaaaggcag

SEQ ID NO: 19011 - DNA, 110 bp, synthetic construct
  source 1..110: mol_type = other DNA
tatcagataaaattgagataaaccattgtaattctggaatagaatatgtgatcgtgctataatgaccaggtcatggggaacgctgaaggaaaaagaaatagagaaaatag

SEQ ID NO: 19012 - DNA, 110 bp, synthetic construct
  source 1..110: mol_type = other DNA
aactgaagagttgcactgcagagttgcatccagcattgcaaggatggagatgatgtgagtggtcagtactaccacagctccatgggaagttgtagtactagggactttga

SEQ ID NO: 19013 - DNA, 110 bp, synthetic construct
  source 1..110: mol_type = other DNA
tgagtggtcagtactaccacagctccatgggaagttgtagtactagggactttgaccagaatgggttgtggtagagagccctctagtggaagggagcatggcatttgagg

SEQ ID NO: 19014 - DNA, 110 bp, synthetic construct
  source 1..110: mol_type = other DNA
gaaattttgtgttggggcagatttcatacatgatatccatagtcttctcttgtgtggaattttcttttttaaattagtgaagaaaggccatcctaatgaggacttggaag

SEQ ID NO: 19015 - DNA, 110 bp, synthetic construct
  source 1..110: mol_type = other DNA
tcccggaccactctgggcttccagaaccttccaccttgtagcttggctgagacgtcgccttcctctctggggagagagaaacgggaggagatcagcggccctgtgtcgtt

SEQ ID NO: 19016 - DNA, 110 bp, synthetic construct
  source 1..110: mol_type = other DNA
aatctaaccacaactgtacttcaggaacatatcttgaggggccagagggaggattgaggagctggggtaacagctagatgtgcgtgggatccaaacaaccttcacagagg

SEQ ID NO: 19017 - DNA, 110 bp, synthetic construct
  source 1..110: mol_type = other DNA
ctgactccttgctgtgttctcctgggaaccacaaggacagaaaagattcctgcccacaaggagctaacaatttagcttaaggtaagaaaatacaatcatataaagaatgt

SEQ ID NO: 19018 - DNA, 110 bp, synthetic construct
  source 1..110: mol_type = other DNA
acaaggagctaacaatttagcttaaggtaagaaaatacaatcatataaagaatgtggtgcacaaaatattactttataaagcccaagcttccttgaataaataagcacca

SEQ ID NO: 19019 - DNA, 110 bp, synthetic construct
  source 1..110: mol_type = other DNA
ttagatatggtcattaccatggttttgattcaggacacaatgttaaggcggaggtgaagtcagctagcaagttgagaaaactaaagtttctagctcactactataattat

SEQ ID NO: 19020 - DNA, 110 bp, synthetic construct
  source 1..110: mol_type = other DNA
aactctgtggcttaggaccctgaatggaattgtctggattttgagcaatttcagtgatgttcggaagagtcctctcgggtgttggaggtgagaggtgtcccctgatgtgt

SEQ ID NO: 19021 - DNA, 110 bp, synthetic construct
  source 1..110: mol_type = other DNA
cttctcaatattccagacaccatgatgtgcaactcagttcccacgtcagtgaaggactcactgccccagctgttggaagtgtagtcaacagactgtctacagccatcagc

SEQ ID NO: 19022 - DNA, 110 bp, synthetic construct
  source 1..110: mol_type = other DNA
actcactgccccagctgttggaagtgtagtcaacagactgtctacagccatcagcccctttgaggtctgcctcagtgcagagccactttgccaaagtccatccttctgag

SEQ ID NO: 19023 - DNA, 110 bp, synthetic construct; identical to SEQ ID NO: 19021
  source 1..110: mol_type = other DNA

SEQ ID NO: 19024 - DNA, 110 bp, synthetic construct; identical to SEQ ID NO: 19022
  source 1..110: mol_type = other DNA

SEQ ID NO: 19025 - DNA, 110 bp, synthetic construct
  source 1..110: mol_type = other DNA
aaaagaaagctggaatagcaatactaacatcaggcaaaatgactttaaaatgaagactcttggagttcctgttatggttcagtggttaataaacctgactagcatccatg

SEQ ID NO: 19026 - DNA, 110 bp, synthetic construct; identical to SEQ ID NO: 19025
  source 1..110: mol_type = other DNA

SEQ ID NO: 19027 - DNA, 110 bp, synthetic construct
  source 1..110: mol_type = other DNA
gggcacagaaataaaataaggcaaaaatacttaaaaaaaaaattttttttaaggccattgcccccaataggctcagctccccccagtgagccagtaaggcagggggcagg

SEQ ID NO: 19028 - DNA, 110 bp, synthetic construct
  source 1..110: mol_type = other DNA
cattgcccccaataggctcagctccccccagtgagccagtaaggcagggggcaggttcccaggcatctatgagagacaaaaacttccctcttcatttctgaagggtgcct

SEQ ID NO: 19029 - DNA, 110 bp, synthetic construct
  source 1..110: mol_type = other DNA
agttcttgtcagcttctgctccaattacaggaggctcgacaactcaagaggcagtggtctaagactatgagctggagtgcagctcctagcctttgttgtgactctgcttt

SEQ ID NO: 19030 - DNA, 110 bp, synthetic construct
  source 1..110: mol_type = other DNA
acaaagaaatcaaaagattccaatcaaaaccccaaaggatttggggaagcaattgacaaactcatttaaactctatcagcaaaaatgaatagggagttcccatcatggct

SEQ ID NO: 19031 - DNA, 110 bp, synthetic construct
  source 1..110: mol_type = other DNA
gattccaatcaaaaccccaaaggatttggggaagcaattgacaaactcatttaaactctatcagcaaaaatgaatagggagttcccatcatggctcagtggttaacgaat

SEQ ID NO: 19032 - DNA, 110 bp, synthetic construct
  source 1..110: mol_type = other DNA
ttgctattaagttgttaattttttttaatattttatttatttttgttatttgaaatttttttggctacgcccatgacatgtggaagctcccaggtcagggatcaaacctg

SEQ ID NO: 19033 - DNA, 110 bp, synthetic construct
  source 1..110: mol_type = other DNA
taatattttatttatttttgttatttgaaatttttttggctacgcccatgacatgtggaagctcccaggtcagggatcaaacctgtgccacagcactgacgcaagctgca

SEQ ID NO: 19034 - DNA, 110 bp, synthetic construct
  source 1..110: mol_type = other DNA
gtagtaactattattatccctgcttttaggtgtggaagctgaggcctgtagaggttaggtgatttatgcaaggttatatagctaataagtggtgggtctgggatatgaat

SEQ ID NO: 19035 - DNA, 110 bp, synthetic construct
  source 1..110: mol_type = other DNA
gagttaagtagtgcacaggccattaagaagagagaactgactataggaaaacacggaagttaacgcagtgctcagttaaaggtggaagctcatgaatttatagtggcaac

SEQ ID NO: 19036 - DNA, 110 bp, synthetic construct
  source 1..110: mol_type = other DNA
tgtccatgttgcttcttctttaattcataggtttttgctttctgtgcaggcccaggttctgctgtgatgtgcctgctgctggatcaggggagtgctggatggagggactg

SEQ ID NO: 19037 - DNA, 110 bp, synthetic construct
  source 1..110: mol_type = other DNA
gttctgctgtgatgtgcctgctgctggatcaggggagtgctggatggagggactggcagctgccaatggccagctctcacagaagcgggcagagggctttactgcaggcc

SEQ ID NO: 19038 - DNA, 110 bp, synthetic construct
  source 1..110: mol_type = other DNA
tatgaaaaacaaagttcacatatagatgataatactagcctgtcagctaagtgttatgtactgtgtgccagacactcctctaaatgctttacatatgttaactcatttaa

SEQ ID NO: 19039 - DNA, 110 bp, synthetic construct
  source 1..110: mol_type = other DNA
attctcattattctctccagagagccatccgaccattcactgaccaagctggatgttagaagtaatttagttcaactcatttttcaggcctaaaacatccgcatgagtgg

SEQ ID NO: 19040 - DNA, 110 bp, synthetic construct
  source 1..110: mol_type = other DNA
agaaaacacagtgtaatgtacaataaactaagtgactgccgggtaattccacattgaagtttcagaaatgtggcctacaattgtctaagcagaggagctgcgctaggacc

SEQ ID NO: 19041 - DNA, 110 bp, synthetic construct
  source 1..110: mol_type = other DNA
aacaaagcgccttccatagtgggtgtgggcccctagtaaggcctggctcctggccggggagctgtgagttgatccagcttttcccctctccctggccctgcccaggccga

SEQ ID NO: 19042 - DNA, 110 bp, synthetic construct
  source 1..110: mol_type = other DNA
ggggagctgtgagttgatccagcttttcccctctccctggccctgcccaggccgagcagctgccaggtagcagaggcagaatggcacccaggcagcctggcttcggagtg

SEQ ID NO: 19043 - DNA, 110 bp, synthetic construct
  source 1..110: mol_type = other DNA
gagccacatacggctgttgagcacttgaagcgtggctcatgcgacttaggaaccaaatattttgttttattgtgtatctaaagaggcacatgaggcccatgctgcctggc

SEQ ID NO: 19044 - DNA, 110 bp, synthetic construct
  source 1..110: mol_type = other DNA
aatattttgttttattgtgtatctaaagaggcacatgaggcccatgctgcctggcagcacagcagtataaggggggtggggtgttgcagggggcaggggagtcagtatgg

SEQ ID NO: 19045 - DNA, 110 bp, synthetic construct
  source 1..110: mol_type = other DNA
aataaatattagctataatgacactctgatagaaccccctgactttttaatcacttttatattcctctttgagcttcaaaacaatgacctcttggaggtgtgcatttgta

SEQ ID NO: 19046 - DNA, 110 bp, synthetic construct
  source 1..110: mol_type = other DNA
tttatattcctctttgagcttcaaaacaatgacctcttggaggtgtgcatttgtaacagcatagcagccctcaccactaggaatccctgaagctttcccccagccctggt

SEQ ID NO: 19047 - DNA, 110 bp, synthetic construct
  source 1..110: mol_type = other DNA
gagtgaattcttaggtaaatttgcctttcctacatttttagaaggaagatcggtttatttagcttttcttacttaacagtattccttcttctgttgtttcacctgatgtt

SEQ ID NO: 19048 - DNA, 110 bp, synthetic construct
  source 1..110: mol_type = other DNA
ttctctagctgtttcacactaagttgccatgaggttttttgtttagggctcattcccaaagcctcaggaaggagtggcctgaggagcagaagccttggaacatttcggga

SEQ ID NO: 19049 - DNA, 110 bp, synthetic construct
  source 1..110: mol_type = other DNA
ccaaagcctcaggaaggagtggcctgaggagcagaagccttggaacatttcgggagaagagctgggaggaaggaggctgtgaggcttagatcctggaactgggtctgtca

SEQ ID NO: 19050 - DNA, 110 bp, synthetic construct
  source 1..110: mol_type = other DNA
tcccatgaccactgtgatagttcccaatgtcatgtctaatctagagaatgaatataataactccaaactataatcatagttacgctgtatttcttgtttatagacatata

SEQ ID NO: 19051 - DNA, 110 bp, synthetic construct
  source 1..110: mol_type = other DNA
aataactccaaactataatcatagttacgctgtatttcttgtttatagacatatagtagagtttacagctgaatactgagaaggccaaagcattgggtatgcagtggcct

SEQ ID NO: 19052 - DNA, 110 bp, synthetic construct
  source 1..110: mol_type = other DNA
tttttcactgggatggcaaaccccgtttctgcagccctacattagaggtgtcctccttgcctaatagaaagtagtgataggcgagtatgctgaaggggcaggattgtgct

SEQ ID NO: 19053 - DNA, 110 bp, synthetic construct
  source 1..110: mol_type = other DNA
cttgcctaatagaaagtagtgataggcgagtatgctgaaggggcaggattgtgctgagaagtgagccatagcaggttccaagaagtcaagtctgtaggactataggagtc

SEQ ID NO: 19054 - DNA, 110 bp, synthetic construct
  source 1..110: mol_type = other DNA
actgtggtcaaagcggggaagggagaccattgctcctggatggcggaacagaggaacagaagaccttggcaaagacatctcttggcccctggttcttttctggggctgcc

SEQ ID NO: 19055 - DNA, 110 bp, synthetic construct
  source 1..110: mol_type = other DNA
gttgcctcaccaagcctcttctcagctagtcatttacactttagtctaaatttcatagtcagctcactatctctggagcagttagtttggagtagtctccaagggaagcc

SEQ ID NO: 19056 - DNA, 110 bp, synthetic construct
  source 1..110: mol_type = other DNA
tccaacttggccggcagccgcggcccggccccttatttatcagcttcgtgcgaccgcgtcctccaatgactctcgaaggcggcgcggcccctccctccgtttcggcgcgg

SEQ ID NO: 19057 - DNA, 110 bp, synthetic construct; identical to SEQ ID NO: 19056
  source 1..110: mol_type = other DNA

SEQ ID NO: 19058 - DNA, 110 bp, synthetic construct
  source 1..110: mol_type = other DNA
ctaacacctattgaaaaatatgtagctttaaaatgaacttagttggagattaacatgtaatattttagagatgggacctggtttgtgaaggatgcaatagatgtgatatg

SEQ ID NO: 19059 - DNA, 110 bp, synthetic construct
  source 1..110: mol_type = other DNA
tgagcagccccactgggaggtgacagtcactctgggaacatggtggcagggagtagctctactctcaaggagcttcaaggtcaaatactggtatttaaaggagccagcag

SEQ ID NO: 19060 - DNA, 110 bp, synthetic construct
  source 1..110: mol_type = other DNA
gaatgagcacgtttcttaggaaaggcggacttttgaaaagtgctatcagggcgtacaacaggccctcagcttatggcagctatttattattttggcagctgatagtgatg

SEQ ID NO: 19061 - DNA, 110 bp, synthetic construct
  source 1..110: mol_type = other DNA
actcaaatctacattacaaagttcatggcagggaggagatatattgacaaggatgtttattagtctgatgtttataaaagtgtcaactgcctaccaggctgggaacacag

SEQ ID NO: 19062 - DNA, 110 bp, synthetic construct
  source 1..110: mol_type = other DNA
tttattagtctgatgtttataaaagtgtcaactgcctaccaggctgggaacacagaactgcttaagcgaacttgttgctcatgcatacaatggaacgccctgctgtcaat

SEQ ID NO: 19063 - DNA, 110 bp, synthetic construct
  source 1..110: mol_type = other DNA
gtagcttcaagccttctgccccctcaagcagaaaacagcgccagctcaaagagtgagaggaagctgcaaccaggagcccaaggtcacatgggatccccaaagctctaaaa

SEQ ID NO: 19064 - DNA, 110 bp, synthetic construct
  source 1..110: mol_type = other DNA
ggaagtccaagatcaggttgtcggctctgctgggttctggcaaaggccctcttttgggttgtatcctcatatggcagagagcgactaagaggaaggaagttctcttgtga

SEQ ID NO: 19065 - DNA, 110 bp, synthetic construct
  source 1..110: mol_type = other DNA
agtcacccatagaaatacttaacattgttatcagcttctgaatttagtctacggaagtctaaggtacaaagtggtagttttaaaaacttcgtaggagaaaacaagagttc

SEQ ID NO: 19066 - DNA, 110 bp, synthetic construct
  source 1..110: mol_type = other DNA
taccattgggagaggtgtacactgttctacagttttgaggcactatgacaatatcttcaaaaaagtagaaaccagagttcccgtcgtggcgcagcagaaacgaatccgac

SEQ ID NO: 19067 - DNA, 110 bp, synthetic construct; identical to SEQ ID NO: 19066
  source 1..110: mol_type = other DNA

SEQ ID NO: 19068 - DNA, 110 bp, synthetic construct
  source 1..110: mol_type = other DNA
tagccattatagctccagcccagtcaatccacggtcatgctaaaatgtgtagctctcaaacctagagagtaggcctcacatctcaaggctttgtaagtatttctttaaag

SEQ ID NO: 19069 - DNA, 110 bp, synthetic construct
  source 1..110: mol_type = other DNA
tgcaacgccacatgttccgggctccgtcacagcttctgatctgctaaataactggatttactagtggacagtttaaaggttaccacatgggagaatagaagagaggacca

SEQ ID NO: 19070 - DNA, 110 bp, synthetic construct
  source 1..110: mol_type = other DNA
atttactagtggacagtttaaaggttaccacatgggagaatagaagagaggaccagtgtttagcaagtacttactgtataacaagccttgtgtcaggtactgtgcgctca

SEQ ID NO: 19071 - DNA, 110 bp, synthetic construct
  source 1..110: mol_type = other DNA
taaagaggccctatttgggaagatgtcagagcacccgacaaacagcagcttcctcctggagccggcgggacaggctgccaagagaagtcccattgaaaatcccaggatga

SEQ ID NO: 19072 - DNA, 110 bp, synthetic construct
  source 1..110: mol_type = other DNA
ctggagccggcgggacaggctgccaagagaagtcccattgaaaatcccaggatgagtgagatctggtgccctgttacctttgcacacttgcttcaagaatagtttctttc

SEQ ID NO: 19073 - DNA, 110 bp, synthetic construct
  source 1..110: mol_type = other DNA
caactgttgctcatatctgattcttggcccagagaacttccatatgccacggtaaagccgaaaatgaaggaaaaaacaaagtaagtggaagcctgaaaaaattggagaaa

SEQ ID NO: 19074 - DNA, 110 bp, synthetic construct
  source 1..110: mol_type = other DNA
ggtggagtagggggcaggaagaagagccgtcaagggccccctgtttgacaaagtggtttaggaaagaaatacactctggttctgcagagctgagccacgccttgctggat

SEQ ID NO: 19075 - DNA, 110 bp, synthetic construct
  source 1..110: mol_type = other DNA
gtttaggaaagaaatacactctggttctgcagagctgagccacgccttgctggattaagtcccaaagaatttccatcccctcccagtacctgtccctgctggtctggaaa

SEQ ID NO: 19076 - DNA, 110 bp, synthetic construct
  source 1..110: mol_type = other DNA
actggactggaaatttaatctagttacaatgcatgttactatgctctgccaaccccacctgtgaccagctaatggcccagtcacattagaatcacctgcaggcacatatg

SEQ ID NO: 19077 - DNA, 110 bp, synthetic construct
  source 1..110: mol_type = other DNA
cacctgtgaccagctaatggcccagtcacattagaatcacctgcaggcacatatgacgtcccacccttaggcatctgaatttccacggcaggtagggagggatctgtttt

SEQ ID NO: 19078 - DNA, 110 bp, synthetic construct
  source 1..110: mol_type = other DNA
tggctctgttagtaattagacctctgtccagtcacttgaatgaaaggttcagctctggcatcttctgacccaagattccatgacccctcccacccactgaatggaatgca

SEQ ID NO: 19079 - DNA, 110 bp, synthetic construct
  source 1..110: mol_type = other DNA
tggcatcttctgacccaagattccatgacccctcccacccactgaatggaatgcatcatgctgggcagaagacaggaccagaaactgcaaagcgggagggccaggcagat

SEQ ID NO: 19080 - DNA, 110 bp, synthetic construct
  source 1..110: mol_type = other DNA
ccagtggagatagaaggtccaaaccaggaggggggcaagtgcttggagtttaggaatggctaatgagagaattccagtgggtggacctgaagttttgggtagagatacag

SEQ ID NO: 19081 - DNA, 110 bp, synthetic construct
  source 1..110: mol_type = other DNA
atggctaatgagagaattccagtgggtggacctgaagttttgggtagagatacagctgagaaggtcagagtcatggggtcagaggtggctttagcaagctggactggagg

SEQ ID NO: 19082 - DNA, 110 bp, synthetic construct; identical to SEQ ID NO: 19080
  source 1..110: mol_type = other DNA

SEQ ID NO: 19083 - DNA, 110 bp, synthetic construct; identical to SEQ ID NO: 19081
  source 1..110: mol_type = other DNA

SEQ ID NO: 19084 - DNA, 110 bp, synthetic construct
  source 1..110: mol_type = other DNA
cctcccacagagctaggggttcacagaacatactttggaaaacacagctctaacgtatgagcagcaaaacctaatacctgaatgaaagtctccacaggcactcagtttta

SEQ ID NO: 19085 - DNA, 110 bp, synthetic construct
  source 1..110: mol_type = other DNA
tgcaattccttcagtggaagtgaccaaaatccaactcaggcctggttaaataacagtgaaatatttgggacatcagacaccgctaagccctgagactcataggatgctct

SEQ ID NO: 19086 - DNA, 110 bp, synthetic construct
  source 1..110: mol_type = other DNA
gtgaaatatttgggacatcagacaccgctaagccctgagactcataggatgctctcaaagctgctggctcactctctcctccatcacaccacattgtagcaacagctggt

SEQ ID NO: 19087 - DNA, 110 bp, synthetic construct
  source 1..110: mol_type = other DNA
caccagaaaacactttatttagtacctgtagcacctcaaccttcaccggagacgacatggctgatgggtgaccaggtctccctgcgtgtcacttccaatccctcctgttt

SEQ ID NO: 19088 - DNA, 110 bp, synthetic construct
  source 1..110: mol_type = other DNA
catggctgatgggtgaccaggtctccctgcgtgtcacttccaatccctcctgtttttccttccccttcccacaggggatcacggtagagtagacatttcatataaattgc

SEQ ID NO: 19089 - DNA, 110 bp, synthetic construct
  source 1..110: mol_type = other DNA
gtcagggctggagacactggttggtggtagaaactgtgggtctggacaagactgcacagtgggaagaaaacctcgacctgagtcctgagggggcgccaactttatcagct

SEQ ID NO: 19090 - DNA, 110 bp, synthetic construct
  source 1..110: mol_type = other DNA
acagtgggaagaaaacctcgacctgagtcctgagggggcgccaactttatcagctggagggacagtttccggcaacagagactaagaagtgaccggagcagagagaggaa

SEQ ID NO: 19091 - DNA, 110 bp, synthetic construct
  source 1..110: mol_type = other DNA
cattaactgctgagccatgaggggaaatcctacacagatatcttaacatatgcatctctttagaggtctcaaccatgtgttatatagctgtggataaaactaaccatcat

SEQ ID NO: 19092 - DNA, 110 bp, synthetic construct
  source 1..110: mol_type = other DNA
ctctttagaggtctcaaccatgtgttatatagctgtggataaaactaaccatcatctcaactaacatttacatagcttgtagttcatacagtactttctaattatgttgt

SEQ ID NO: 19093 - DNA, 110 bp, synthetic construct
  source 1..110: mol_type = other DNA
attaaaatcgtgtaatgctgtgtatttacaaagttccttcacaaatgttatctcactgatccttaaagactcccatgagaccccatttatgacgcccattttactaagga

SEQ ID NO: 19094 - DNA, 110 bp, synthetic construct
  source 1..110: mol_type = other DNA
ctgatccttaaagactcccatgagaccccatttatgacgcccattttactaaggagcaagctgaggctcagagagggcagtgacttaacaagggtcgcacagctgtgaat

SEQ ID NO: 19095 - DNA, 110 bp, synthetic construct
  source 1..110: mol_type = other DNA
ctagttctgtctaaacattgggtctgttggtctttctacagttgttctgcattagttaaatgtaactcattctaggagtagtagtgacatccagctggtaggttttttat

SEQ ID NO: 19096 - DNA, 110 bp, synthetic construct
  source 1..110: mol_type = other DNA
ctcgatgtggctcagatctgtcagtgtggtgtaggcttcagctgcagcttcaactggacccctggcctaggaacttccatgtgccgcaggtacaatcctaaaaaaagggg

SEQ ID NO: 19097 - DNA, 110 bp, synthetic construct
  source 1..110: mol_type = other DNA
ggacccctggcctaggaacttccatgtgccgcaggtacaatcctaaaaaaaggggaaaaagaaaataggaaatttaacggtaaaataccaataactgtccattttacaag

SEQ ID NO: 19098 - DNA, 110 bp, synthetic construct
  source 1..110: mol_type = other DNA
tctaacctgcatcctcatggacactatgtcaggctcttaaccagctgagccacaacgggaacccctggtcttcatatttttaatagactatttttttagagcctgttcag

SEQ ID NO: 19099 - DNA, 110 bp, synthetic construct; identical to SEQ ID NO: 19098
  source 1..110: mol_type = other DNA

SEQ ID NO: 19100 - DNA, 110 bp, synthetic construct
  source 1..110: mol_type = other DNA
tgggctagtgtctctctgttccaaccccgggctttcaccaacactgcaaaagctcactcagtttacatataagaaaggtctggaggtttgatggtgttaacacttctagc

SEQ ID NO: 19101 - DNA, 110 bp, synthetic construct
  source 1..110: mol_type = other DNA
actcagtttacatataagaaaggtctggaggtttgatggtgttaacacttctagcagcagccctgaaccaatggagaatgagaataagtaaataaacatctcaattgaat

SEQ ID NO: 19102 - DNA, 110 bp, synthetic construct
  source 1..110: mol_type = other DNA
ggggccgaggaagtgagacagaaggtggctgccagatcacagacaggtgatacaaatcccacctacaatgagggctgcatgctgggcacagagtactgatttattaatct

SEQ ID NO: 19103 - DNA, 110 bp, synthetic construct
  source 1..110: mol_type = other DNA
atcccacctacaatgagggctgcatgctgggcacagagtactgatttattaatctatttgatctttacaacacggctctgagagagctccagcctcattttacagctggg

SEQ ID NO: 19104 - DNA, 110 bp, synthetic construct
  source 1..110: mol_type = other DNA
tgccatccttattatcatctctatgttccagtaaaaacccctccactacacaccccatgctaccctcctaacttaccctgttggaagagtgtgcctcctttttcagctgt

SEQ ID NO: 19105 - DNA, 110 bp, synthetic construct
  source 1..110: mol_type = other DNA
catgctaccctcctaacttaccctgttggaagagtgtgcctcctttttcagctgtctcttctctggtcagatagttcccaggtgcagcaacttcactgtttctttttctc

SEQ ID NO: 19106 - DNA, 110 bp, synthetic construct
  source 1..110: mol_type = other DNA
aggctacactttcaggtcctaatcatttttccaaggccccgcctccaaacactatcacattggggattaagcttcagtctgtcttcttgtgtggttattctcagatttct

SEQ ID NO: 19107 - DNA, 110 bp, synthetic construct
  source 1..110: mol_type = other DNA
gagctacatatgaggcctatgcctcagccacaacaacaccagatttgaactgcatctgtgacctacactgcagcttgtaacaatgctgaatcttaactcactgaacaagg

SEQ ID NO: 19108 - DNA, 110 bp, synthetic construct
  source 1..110: mol_type = other DNA
ctgtgacctacactgcagcttgtaacaatgctgaatcttaactcactgaacaaggccagggattaaatctgcctcctcacagagaattgttgggtccttacctgctgagc

SEQ ID NO: 19109 - DNA, 110 bp, synthetic construct
  source 1..110: mol_type = other DNA
aggagcgaggagttcaagccccacatgagtactccttgggaaatagtgttggaaagacgaggccccataattggctttgaaagccactgggactagggggagagccagag

SEQ ID NO: 19110 - DNA, 110 bp, synthetic construct
  source 1..110: mol_type = other DNA
gacgaggccccataattggctttgaaagccactgggactagggggagagccagagggctataggaaattgagattctattcttatgaattcatgcacagactcacttgct

SEQ ID NO: 19111 - DNA, 110 bp, synthetic construct
  source 1..110: mol_type = other DNA
tgaagaattaaacttccgtatttgtcccatggaagctcatactacaagtgtgtgtgtgtcaccgaaggaaacatagctagtaaagaaatgtggaatatttttctgctcag

SEQ ID NO: 19112 - DNA, 110 bp, synthetic construct
  source 1..110: mol_type = other DNA
agttcagatggacaggcacctggggccgtgccaaaaatgtcccatcaaatacaacagatcaggcagtggcgtcaggcagctcaggttgcttagggagtccttacaagatg

SEQ ID NO: 19113 - DNA, 110 bp, synthetic construct
  source 1..110: mol_type = other DNA
gtcaattcagctgccttataagacttaagattggattcaatatgtgttgattttagaaatgtgagatataggagttcccgtcctggctcagcagttaacgagtctgacta

SEQ ID NO: 19114 - DNA, 110 bp, synthetic construct; identical to SEQ ID NO: 19113
  source 1..110: mol_type = other DNA

SEQ ID NO: 19115 - DNA, 110 bp, synthetic construct
  source 1..110: mol_type = other DNA
gagcctgcttcctggttcttagatggtgatccattagctgtgtcttctcacagtggaaggggccagggagctctctgggattcttttgataaggtcctagtcccattcat

SEQ ID NO: 19116 - DNA, 110 bp, synthetic construct
  source 1..110: mol_type = other DNA
gcccttgattgtttacgaattgtctcttgtggtttacccaggctatttccagaaacaggcctgatgtcactgggcttttggtggatccagtctgaatcttaagcttaacc

SEQ ID NO: 19117 - DNA, 110 bp, synthetic construct
  source 1..110: mol_type = other DNA
caggcctgatgtcactgggcttttggtggatccagtctgaatcttaagcttaacctagtcacgtgtgcccacataatttccaaaccttgcctgactctctcctcaaagag

SEQ ID NO: 19118 - DNA, 110 bp, synthetic construct
  source 1..110: mol_type = other DNA
ctacctccttcttaggattactcatcactgagtacttgtgtgataggcacatgcgtgatgaacgttaataaaattctgttcatgttttctctcggtaatttggttttttt

SEQ ID NO: 19119 - DNA, 110 bp, synthetic construct
  source 1..110: mol_type = other DNA
aagaaaagtaaagaggcgattagatgtccgtatttaacaagctaatttcctataaggtggatgtggagttctgaagagtagaacatacttaggatggaaagtaaaaatta

SEQ ID NO: 19120 - DNA, 110 bp, synthetic construct
  source 1..110: mol_type = other DNA
cgatatctcacttactatgctcaaccaccctgggaagtagattatgtcatctctaacttgcagataaggggaccaagccaggagagcttaagtatcttggctgagcttac

SEQ ID NO: 19121 - DNA, 110 bp, synthetic construct
  source 1..110: mol_type = other DNA
acttgcagataaggggaccaagccaggagagcttaagtatcttggctgagcttacacagcaagggagcagtgatgctagaattctcatgccagcagcctaagatgagatc

SEQ ID NO: 19122 - DNA, 110 bp, synthetic construct
  source 1..110: mol_type = other DNA
ttgttgatttgtgccaatttcaaaagtgcctacttttctataattttttttcctaatctccaggagttatttagtgttctatgtatagctgttgaggagaagaaaacagt

SEQ ID NO: 19123 - DNA, 110 bp, synthetic construct
  source 1..110: mol_type = other DNA
atctccaggagttatttagtgttctatgtatagctgttgaggagaagaaaacagttttgtcatatcctctactgtagatgtttctttgtgctcaaacccataataaaaag

SEQ ID NO: 19124 - DNA, 110 bp, synthetic construct
  source 1..110: mol_type = other DNA
taaagcattattaggtgacaggtaccaccttctttcagcattacctggatgcatatcaccagcacagcttttgtcagtgaaccaaataaacttatgggaaataaaagaca

SEQ ID NO: 19125 - DNA, 110 bp, synthetic construct
  source 1..110: mol_type = other DNA
ggaggagccttcttttgataatttctctcttccttttgtgtggatatgatttgtattactgacactgatcaattatttaatgcatttttagctatattttctcaaatgtg

SEQ ID NO: 19126 - DNA, 110 bp, synthetic construct
  source 1..110: mol_type = other DNA
ggagatggaacctgtgccctggtgcagcagaggcactgctgagctcgttgtgccgcagcaggaaccctgaatgttcctctgattcctgcctctgacctcactgaaggagg

SEQ ID NO: 19127 - DNA, 110 bp, synthetic construct
  source 1..110: mol_type = other DNA
ttagttgcttgtttacttgtttgtcttctccattggcctattatagactccttgagggaagggaccctttattttagagactgcagctcttagtgtagtgtaagtcatgt

SEQ ID NO: 19128 - DNA, 110 bp, synthetic construct
  source 1..110: mol_type = other DNA
gggaagggaccctttattttagagactgcagctcttagtgtagtgtaagtcatgtggtaagtattccacaaatgttccttaaataaatgaagaggtggatgaacttccag

SEQ ID NO: 19129 - DNA, 110 bp, synthetic construct
  source 1..110: mol_type = other DNA
cagctgccagcctacaccacagccttggcaacctggtatccaaactgtgactgtgatttacaccacatctcagggcaatgccagatatcttaatccactaagcaaggcca

SEQ ID NO: 19130 - DNA, 110 bp, synthetic construct
  source 1..110: mol_type = other DNA
accacagccttggcaacctggtatccaaactgtgactgtgatttacaccacatctcagggcaatgccagatatcttaatccactaagcaaggccagggatcaaacacaca

SEQ ID NO: 19131 - DNA, 110 bp, synthetic construct; identical to SEQ ID NO: 19129
  source 1..110: mol_type = other DNA

SEQ ID NO: 19132 - DNA, 110 bp, synthetic construct; identical to SEQ ID NO: 19129
  source 1..110: mol_type = other DNA

SEQ ID NO: 19133 - DNA, 110 bp, synthetic construct
  source 1..110: mol_type = other DNA
tcatatatcttcttggtgggactaaatactccttgagaacaggggccaatgctcagtaagacttgttggttgaatgtttgttaaatgagtatgaaatctgtaaatacatt

SEQ ID NO: 19134 - DNA, 110 bp, synthetic construct
  source 1..110: mol_type = other DNA
gtaagacttgttggttgaatgtttgttaaatgagtatgaaatctgtaaatacatttcctaagctggtcaacattttctcgaggactttctcatgatgggctaaagcaaaa

SEQ ID NO: 19135 - DNA, 110 bp, synthetic construct
  source 1..110: mol_type = other DNA
ataacatttgtctgtgtggacacacagggtgttcattactgcagctattttagctatgtgtgcaggttaaaatctatgttaatgtattcctgtgggaacacagaatgtaa

SEQ ID NO: 19136 - DNA, 110 bp, synthetic construct
  source 1..110: mol_type = other DNA
atgtgtgcaggttaaaatctatgttaatgtattcctgtgggaacacagaatgtaaaatgcatatggtgtattctactgtgatcatactgtgtgctaatttctattctttg

SEQ ID NO: 19137 - DNA, 110 bp, synthetic construct
  source 1..110: mol_type = other DNA
caagtccagatgagatcaagcgttaggaggatgcatgactcatagctagtttagcacataggcacttcctgcaaatatttgcaccctgtaatgctggcaaaggggacatt

SEQ ID NO: 19138 - DNA, 110 bp, synthetic construct
  source 1..110: mol_type = other DNA
agcaaccgccaagttcatatgagatgaaatataagatccacaaataggtggaatgcccaagctcagtcttgaggggtttcagtggagattacaaaagtagggatgttggc

SEQ ID NO: 19139 - DNA, 110 bp, synthetic construct
  source 1..110: mol_type = other DNA
taacttcagttttcttttgtttttcttttttccatctttaagccactccacacgtattagctttggctagatcactggttctgaaatccagtcgtaaagccagttctgga

SEQ ID NO: 19140 - DNA, 110 bp, synthetic construct
  source 1..110: mol_type = other DNA
tcggcaacacatcaaatgctttgtggcaggatgacaccatgacacatacttgagtgaaataaaaacactgcgagcttacaaagaactcacccaaagaaacgttctccccc

SEQ ID NO: 19141 - DNA, 110 bp, synthetic construct
  source 1..110: mol_type = other DNA
accgaaggaaaaaaccctgccactttcggccactccccctgaccaagctgcctgcacttgtccaaaccagcagcggttgaaagccacagagcaagagcaggacccagtga

SEQ ID NO: 19142 - DNA, 110 bp, synthetic construct
  source 1..110: mol_type = other DNA
tttgaaggacttttggtgtctagcttcattttatttaaagatgttagagctgttttgagattcatatcaacaatcagaaagtaatatcatggttctggttgtcgttatcc

SEQ ID NO: 19143 - DNA, 110 bp, synthetic construct
  source 1..110: mol_type = other DNA
acatgaaacttatagtactcgctgtcaccattggactaactgtgctgctagggatccaggccatgcctgcaaatcgcctctcttgctacagaaagattctaaaagatcgc

SEQ ID NO: 19144 - DNA, 110 bp, synthetic construct
  source 1..110: mol_type = other DNA
atgcttctcccgtccaacaaccccattgtttcccatcacatacaggataaaatctgagcccttcaaaagttggcccctgcctagtctattgcctctttctaccataccac

SEQ ID NO: 19145 - DNA, 110 bp, synthetic construct
  source 1..110: mol_type = other DNA
gagcccttcaaaagttggcccctgcctagtctattgcctctttctaccataccacttctcacctggtactctacacatctgcataactgagccacccagaacacacccca

SEQ ID NO: 19146 - DNA, 110 bp, synthetic construct
  source 1..110: mol_type = other DNA
ccaacctaggctcctctagctcccatcctggtaaagacgacactggtgccccccgtcctcagacagtgcagctcaggctacatctccctgccttcttcctccaagctgcc

SEQ ID NO: 19147 - DNA, 110 bp, synthetic construct
  source 1..110: mol_type = other DNA
attagcgggttaattaggattcccccaagggggaaggtatttcaagggagattttttttctttcttaaagtacagaaacctatagattttagaaagtcctctagaaacaa

SEQ ID NO: 19148 - DNA, 110 bp, synthetic construct
  source 1..110: mol_type = other DNA
tggaaaccctttatgcccaaaccacacaaatgttttgtttcacaacgcccactcgtgctctagagaagcactactcaaagtgtgggccctggaccagtagcagcagcaag

SEQ ID NO: 19149 - DNA, 110 bp, synthetic construct
  source 1..110: mol_type = other DNA
agagaattttggaaccacagctcttatctctttgacttttctttccccgaagcgaaggtgaggaggagacaaaccttagccatcacagggaaggaaattctagataagga

SEQ ID NO: 19150 - DNA, 110 bp, synthetic construct
  source 1..110: mol_type = other DNA
gtgattacttttctcaaataccacaatactgcctgtttttggtcttccagccctgtgatcttgatttaaggagctttaaaattaggagtttgggattaacagatatactt

SEQ ID NO: 19151 - DNA, 110 bp, synthetic construct
  source 1..110: mol_type = other DNA
taaattaaatgccccctagaggatcagccaaatgggaaggagaggaccgtcggtgcaatgtccacatcatgtccgcatttagaaaagttgcagaatgagaacaaaatgaa

SEQ ID NO: 19152 - DNA, 110 bp, synthetic construct
  source 1..110: mol_type = other DNA
caatgtccacatcatgtccgcatttagaaaagttgcagaatgagaacaaaatgaatggtaattcttccccagtgtgacattaacttgggtgtgaagaactgagtagttag

SEQ ID NO: 19153 - DNA, 110 bp, synthetic construct
  source 1..110: mol_type = other DNA
tttaatgataacccaccatttagctgcccttaaacataaaagctgcgctttccagtatattcaaacacaagtttcaaggttatacgctttcttgagcttattttcattca

SEQ ID NO: 19154 - DNA, 110 bp, synthetic construct
  source 1..110: mol_type = other DNA
ctgtctccaccgcgtgacctggctgacatcacagcgacaactagcttcgtacatgagactctcctagatcatcgggctccctagagccaccagatgaccatggccatgca

SEQ ID NO: 19155 - DNA, 110 bp, synthetic construct
  source 1..110: mol_type = other DNA
cctttgcagtgttcctacaacacccccacgtgctccagctcaggtgctccatcacttctggtttcttctcaaacaataccacatgagagggggcttccccaccaccctgc

SEQ ID NO: 19156 - DNA, 110 bp, synthetic construct
  source 1..110: mol_type = other DNA
tatctttttgtacaaagcaaaccttctttgaccacccgcctccagcttccatccactcatcgactccacgtttcagcatgattttgggagggagttgtctagagtggcat

SEQ ID NO: 19157 - DNA, 110 bp, synthetic construct
  source 1..110: mol_type = other DNA
tacgttgtaaagtggtcaccacaatcaggttcactaacacacccatctcctcgtagagctgtctggattttcttactcagtttctcccttcctccttcccttccttcctt

SEQ ID NO: 19158 - DNA, 110 bp, synthetic construct
  source 1..110: mol_type = other DNA
ccttacagtaattatgggaggactgtgattttgctctcagctcttcagtgaagcctcttcctggtctaatctgtgtggccacttgatccttctctttccaggactctggg

SEQ ID NO: 19159 - DNA, 110 bp, synthetic construct
  source 1..110: mol_type = other DNA
atcataagcttgttttttccaaatcccatgacacagaggacacttaagaaacaggaatgctctagaagtgtcctcacttctggggcttgtctcaggccagatgataaagt

SEQ ID NO: 19160 - DNA, 110 bp, synthetic construct
  source 1..110: mol_type = other DNA
aatgctctagaagtgtcctcacttctggggcttgtctcaggccagatgataaagtgtcaccaagtgctctgtacagaacaagacccgagcctagtaaagcactatgcctc

SEQ ID NO: 19161 - DNA, 110 bp, synthetic construct
  source 1..110: mol_type = other DNA
gcaagacgactaaaggccaggctgctgagtgacagtctgggccacctccactccccaaccagagggggattagctgagcctgtggctctgataagatgaccataggagtt

SEQ ID NO: 19162 - DNA, 110 bp, synthetic construct
  source 1..110: mol_type = other DNA
caaccagagggggattagctgagcctgtggctctgataagatgaccataggagtttcttactggatgtttgctctgggctgaaaaataagtaggctggtaaatattccca

SEQ ID NO: 19163 - DNA, 110 bp, synthetic construct
  source 1..110: mol_type = other DNA
aaagccaggtcacagggaccgagaaggtgagtcagcagcaaagttggagctcagagaaggtcctgtccctcccctgctcacaaacttcccattgttccccagtgtcttca

SEQ ID NO: 19164 - DNA, 110 bp, synthetic construct
  source 1..110: mol_type = other DNA
tgcttctttgatgtcttcattcctgcaaccaccatccttttatcaaaggcccattgtgtatggagctccatgatctaagatggtcatgctttccaggggtttaaactgag

SEQ ID NO: 19165 - DNA, 110 bp, synthetic construct
  source 1..110: mol_type = other DNA
gctcacttccacaaactttgttctttgcatgctggaagtgtgtgctgcttttccgagggaatgagctgttacggtttaactgtgtggtatctggattggttgaacaatga

SEQ ID NO: 19166 - DNA, 110 bp, synthetic construct
  source 1..110: mol_type = other DNA
gccctgtgctcacccagtttcagagctgtccttaattttgacagtcctttttacggtaagcattatttgtctttgatttgagctgtgctgagggtgtgctcagtatcttt

SEQ ID NO: 19167 - DNA, 110 bp, synthetic construct
  source 1..110: mol_type = other DNA
gtggaggcggacagtggtggtcatatctcagatatattttgaaagtgaagctgacagaattcctgaaagatagaatttaaatatggacctaaaatagtaagagagacacc

SEQ ID NO: 19168 - DNA, 110 bp, synthetic construct
  source 1..110: mol_type = other DNA
actcattgtcaattgaccagccacaagcagttcataagcgacaggaaagggaggaaccaattattatctttagattttgtatgcatagcttttaggcactttctacagaa

SEQ ID NO: 19169 - DNA, 110 bp, synthetic construct
  source 1..110: mol_type = other DNA
atgctatgtgaccagcatcctcagcagtttctaagaagtaaacctgaggggacctagaaccagtgtaaatggagctggaagccttcatttcctcagacacatctcccatg

SEQ ID NO: 19170 - DNA, 110 bp, synthetic construct
  source 1..110: mol_type = other DNA
actcagtgatcatagcattaacatgctgcaaaagctttgctaatgtcatcatgatgacatcagagtgccaggtcatcaaaaatctattgtctgggagttcccattgtgga

SEQ ID NO: 19171 - DNA, 110 bp, synthetic construct
  source 1..110: mol_type = other DNA
taagtgtccaagtttgcacagctagtatcaggcacagccagagtttacatgacttttgactgggtccagaacctggttctaaggactactcaactcagcttcttggaaag

SEQ ID NO: 19172 - DNA, 110 bp, synthetic construct
  source 1..110: mol_type = other DNA
atgtagtggtctaaatcaaggcaaccggaatctcagagctaaggagctgagaggtctggatttgaatttcagcttggcctctcacctgctgtgtaatgatgggcaaggtc

SEQ ID NO: 19173 - DNA, 110 bp, synthetic construct
  source 1..110: mol_type = other DNA
ctggatttgaatttcagcttggcctctcacctgctgtgtaatgatgggcaaggtctcagcgtctgtttttaggttccttatctacttaatggggtttttttgttgttttg

SEQ ID NO: 19174 - DNA, 110 bp, synthetic construct
  source 1..110: mol_type = other DNA
ctccatgccacataggaccttccaataaatagaaagaatatttttaggagttccctgggcgtctagaggttaaggatctggcgttgtgactgctgtggagtaggtttgat

SEQ ID NO: 19175 - DNA, 110 bp, synthetic construct
  source 1..110: mol_type = other DNA
tgggcgtctagaggttaaggatctggcgttgtgactgctgtggagtaggtttgatccatggcctgggaacttctgcatgctgtgtgtgtgacaataaatagataggtata

SEQ ID NO: 19176 - DNA, 110 bp, synthetic construct
  source 1..110: mol_type = other DNA
tttaaatgcatggattggccagaaacaggaaaaaacatacaagttatagagcccagtgaggttggctgaacattcgcttttcacctgcagaaaagctgccctactgatga

SEQ ID NO: 19177 - DNA, 110 bp, synthetic construct
  source 1..110: mol_type = other DNA
ttcatgagcattgttcttagaaaatacaacaaacacactcatacattcattgctaggcctgagctgtctcaaatggcagctggtgcttttattaccgtgtaaaatatctg

SEQ ID NO: 19178 - DNA, 110 bp, synthetic construct
  source 1..110: mol_type = other DNA
gtggtacaaggtacccaacagggcctggctatggggcgtgcactccacaagtacagtaggggaaaagcagctctaaaccatctgctggatagttaagaacgcatctctca

SEQ ID NO: 19179 - DNA, 110 bp, synthetic construct
  source 1..110: mol_type = other DNA
gcagctcataaaataaattccaaatgaggaaaataaacagtaaattcacataaccaatgtttaaacaactgaattctgttcaatgtgttcctatgtcctggcctgagcat

SEQ ID NO: 19180 - DNA, 110 bp, synthetic construct
  source 1..110: mol_type = other DNA
aatgtttaaacaactgaattctgttcaatgtgttcctatgtcctggcctgagcatggcaggagggacagttatccagccccataaaaacatattctcaagtaattcaaga

SEQ ID NO: 19181 - DNA, 110 bp, synthetic construct
  source 1..110: mol_type = other DNA
gggaaagggtgttgggggaaataacaataaaaaataaatttaaaaaaagaaatgctttcagcttttttgctattgagtacattgttagctatgggcttgtcttatatggc

SEQ ID NO: 19182 - DNA, 110 bp, synthetic construct
  source 1..110: mol_type = other DNA
ctgaggcttttggtgtttcttgcaaaactgtgatcctgtgaccctggagtggcagatgtttaaccttaatcactggggctgctggagttctaggtgtgcggtcatggcaa

SEQ ID NO: 19183 - DNA, 110 bp, synthetic construct
  source 1..110: mol_type = other DNA
atgtttaaccttaatcactggggctgctggagttctaggtgtgcggtcatggcaagtgcctggcttgtcacctgggttttatgacagcaagtgatagctaccatcattgc

SEQ ID NO: 19184 - DNA, 110 bp, synthetic construct
  source 1..110: mol_type = other DNA
aaatgcctcagttttctacctttcccaagcctcacagagcaagaatgtacccatcccactagctgccccacactttcagactaccccaattttttcagcactctgaccca

SEQ ID NO: 19185 - DNA, 110 bp, synthetic construct
  source 1..110: mol_type = other DNA
gctctggcaaggaatatagaggcacctctagaagctggcctagccctcagctggcaaccagcacctcagtcctacaacttccaggaactgaattctgtcaacaaccagaa

SEQ ID NO: 19186 - DNA, 110 bp, synthetic construct
  source 1..110: mol_type = other DNA
tgatcatttgcacttctctctcaatgcctctgtttgatcagtatttccaggagtttaccaaatttactactcattttaaagggttaacttttatccagttttattttccc

SEQ ID NO: 19187 - DNA, 110 bp, synthetic construct
  source 1..110: mol_type = other DNA
aactgatccaggataatttccccaatttaaggtggctgattagagagcttaaatcttaactccctttgccaggcaacataatatatccacaggccccaggggttaggata

SEQ ID NO: 19188 - DNA, 110 bp, synthetic construct
  source 1..110: mol_type = other DNA
aatcaagaaccctaggactaccctagattcctaaaatgtcagagcttagaaattaccttaagaatcattttttaaatgcacttaccttcacagctaaaagcaattgtcaa

SEQ ID NO: 19189 - DNA, 110 bp, synthetic construct
  source 1..110: mol_type = other DNA
ccttccaatgttctgcttcctagctctgggaccacagacaaaggacttagcttatcagagcctgaaggccatgattgtgcagtgggaataatactgtacttctcataaga

SEQ ID NO: 19190 - DNA, 110 bp, synthetic construct
  source 1..110: mol_type = other DNA
gaagatctggtctttcatttgctttctaaactattattttaaaatagaatgtcctaaactgtatttagtctatccattctcataccttacacacacacaagagagactct

SEQ ID NO: 19191 - DNA, 110 bp, synthetic construct
  source 1..110: mol_type = other DNA
aaactgtatttagtctatccattctcataccttacacacacacaagagagactctcaacagggaggttcactggtgaaacaagaaaaggtaggtgatgcgcagggagata

SEQ ID NO: 19192 - DNA, 110 bp, synthetic construct
  source 1..110: mol_type = other DNA
actctttcccagtacataactgcaacacagcaacggtgtcttcaggttatgccgagctactagtgcaagttgccagcaaacgtgttactttctagtgatgcatgttttcc

SEQ ID NO: 19193 - DNA, 110 bp, synthetic construct
  source 1..110: mol_type = other DNA
ggtggacagcctctagaaggtggaagaggctggacagagattcatgcctggagcctggaaagaggaacacactgctaatgcacagatttagctcagcatggcttctatcc

SEQ ID NO: 19194 - DNA, 110 bp, synthetic construct
  source 1..110: mol_type = other DNA
tggaaagaggaacacactgctaatgcacagatttagctcagcatggcttctatccacaaaactgtaaaataataaatttatattgattcaagcaatacatttgtggtatt

SEQ ID NO: 19195 - DNA, 110 bp, synthetic construct
  source 1..110: mol_type = other DNA
ttctagcacttatcacagtgctggatggatacatgctccataaatgttagctattgcgcacaccactcactgtggtaggacctgcagatcggaacagcatttctctatga

SEQ ID NO: 19196 - DNA, 110 bp, synthetic construct
  source 1..110: mol_type = other DNA
gcgcacaccactcactgtggtaggacctgcagatcggaacagcatttctctatgacgaggtgatcttaacatatgcatggggctgcctctgggatgtcctagagaatagt

SEQ ID NO: 19197 - DNA, 110 bp, synthetic construct
  source 1..110: mol_type = other DNA
ggactgagactggcaaatgcactttagaatataaaggaccaacactgagtaccataatcaactggttgcaagactcactctaaagctacggtaatccagaagtgtgaaga

SEQ ID NO: 19198 - DNA, 110 bp, synthetic construct
  source 1..110: mol_type = other DNA
acctgtgtcttttgcttcataatatactgactcaaggggaaaactgaacaaacgtcaggttcttacatcctagcttctcttatttttctcctctctctaagcattcccta

SEQ ID NO: 19199 - DNA, 110 bp, synthetic construct
  source 1..110: mol_type = other DNA
tgtatgatatcaaggtgaccctctggttttcccattttgcaataaattagtgattagtctttctcatcctatcattatctttcttttcctaattccttgttattaccaaa

SEQ ID NO: 19200 - DNA, 110 bp, synthetic construct
  source 1..110: mol_type = other DNA
gaacctagggatccttccatccatgtcaaaggagtggttttcccctcgcatgttacagagaaacagctgcttctctcctgtgtgtagatggaatgttggcacttgtgaag

SEQ ID NO: 19201 - DNA, 110 bp, synthetic construct
  source 1..110: mol_type = other DNA
agcagttcccaaagaatgctctcaagtcaatgagaatacattgtattaaaaattacaaggctttagcccaataacagggattagaaagaaatggctgctttttatttatt

SEQ ID NO: 19202 - DNA, 110 bp, synthetic construct
  source 1..110: mol_type = other DNA
cccaatcacctcagagggtaccacagaggagggcattttgactgaacatcacaagttgttgctctcactccccccgagaacatacacacacactgctgctgccactgtca

SEQ ID NO: 19203 - DNA, 110 bp, synthetic construct
  source 1..110: mol_type = other DNA
ttgttgctctcactccccccgagaacatacacacacactgctgctgccactgtcaattgctccaggcaccacctaaatgtgcctgaggctcattatgacttctcagaacc

SEQ ID NO: 19204 - DNA, 110 bp, synthetic construct
  source 1..110: mol_type = other DNA
acttccacatgcaatggacatggccaaaaaaaataaaagctggttcaggcctaaagataagttacaaaataattttgatcataagagaattttaacaaatgtgtatgttg

SEQ ID NO: 19205 - DNA, 110 bp, synthetic construct
  source 1..110: mol_type = other DNA
attctcggcttccctggcactgtggaaaacacctgaactttggtctgagccctctctttcccacctgttgcaaagcatttctgggaagctgagggtatctggcctgcttt

SEQ ID NO: 19206 - DNA, 110 bp, synthetic construct
  source 1..110: mol_type = other DNA
ataagtataaaataagataaaataagtatagttagatcatatttagctgtatggctataaaaatcatcccaggagttcctgttgtggctcagagggttatgaacccaact

SEQ ID NO: 19207 - DNA, 110 bp, synthetic construct; identical to SEQ ID NO: 19206
  source 1..110: mol_type = other DNA

SEQ ID NO: 19208 - DNA, 110 bp, synthetic construct
  source 1..110: mol_type = other DNA
tttttcttattgaaatgttctacattgcttctttcaaccttgatatcttcactcgtatgcttcttttaaggtgtctgacatagagtcagatgagaatttattttatagaa

SEQ ID NO: 19209 - DNA, 110 bp, synthetic construct
  source 1..110: mol_type = other DNA
gcagcagtatccagtagaaacttctgcaatgatggaggttttctgagctctcaaatatggtagccaactagccatgtgtgcctatcaagcactggaaatgtggccagtgt

SEQ ID NO: 19210 - DNA, 110 bp, synthetic construct
  source 1..110: mol_type = other DNA
gcatgtgacacacatattcaagtaagggcttcctgtccagagagtgtcctcacgtcacttctttaaagcacaatcattgtctgtatatatgcccaagagtgggattgctg

SEQ ID NO: 19211 - DNA, 110 bp, synthetic construct
  source 1..110: mol_type = other DNA
gatatgctttaaaatttgataaaggaatatgtgtgaaagcttgttttaattaatctgaaaaggtaactgagtgactgaccacacagagaggtcaacgccattgaatgagg

SEQ ID NO: 19212 - DNA, 110 bp, synthetic construct
  source 1..110: mol_type = other DNA
cattggtgactatacaatgctaaggtgaaaatacatctcttaaaatttgatgccattaacctattgtttgtaactactactattgttctgaagcaagtttcagcaagttt

SEQ ID NO: 19213 - DNA, 110 bp, synthetic construct
  source 1..110: mol_type = other DNA
ttttttaaatttgttatttattccatcctgtctcctctgttcctagttggaaccaaaggtttagaagaatcaaaaagggagacgtagatttcccataaatctctctctcc

SEQ ID NO: 19214 - DNA, 110 bp, synthetic construct
  source 1..110: mol_type = other DNA
ataagagaagggccctccgcatgcaaagtagcagagacctcttagcagaagcctaggatgaaccaggccagggcttgaagtgactcattcatgtcttttcaacatctagc

SEQ ID NO: 19215 - DNA, 110 bp, synthetic construct
  source 1..110: mol_type = other DNA
atttgtttccactgcgccacgacaggaactccaataatccatcatttaatgtatagctcgttgtctcaaaaaatttacataactgtgcttttgaattctaaggagtggaa

SEQ ID NO: 19216 - DNA, 110 bp, synthetic construct
  source 1..110: mol_type = other DNA
acagctctgtacacgatactgcggcatcttccccctgaaagcttctctctgcccatcctccaggtgccaggtcgcataagcttactacttcctgtggcatgcagagagaa

SEQ ID NO: 19217 - DNA, 110 bp, synthetic construct
  source 1..110: mol_type = other DNA
aagaaaactgccttcccggaaccaagacattttaatgtgatatcaggcctggtggggcatgagcttttggtcctggctcgaagccactaaattgtgtgaccctaggtaat

SEQ ID NO: 19218 - DNA, 110 bp, synthetic construct
  source 1..110: mol_type = other DNA
aaaagttttatctccaactctcagagtataaacattcaccatgtgttgtggagatcagcagattctgaccatggatctgttcacccagagcagccacaggagctcccaag

SEQ ID NO: 19219 - DNA, 110 bp, synthetic construct
  source 1..110: mol_type = other DNA
cacctgctgcctgttctcatacagagctgggctccacatctacaagcaaagcttgtgtcctgtggactcttgcagctctccagctttgtctctgtgtcggagcaagataa

SEQ ID NO: 19220 - DNA, 110 bp, synthetic construct
  source 1..110: mol_type = other DNA
tctgcaggtggtctgaggtttcccttatcacccatctgtgtgttttcactatcagaccctgtgctcccaactccacccgggcaccctctcttccccttctgctcctgctt

SEQ ID NO: 19221 - DNA, 110 bp, synthetic construct
  source 1..110: mol_type = other DNA
cctgactaactgctggcaaccccaacatcattcagctcggtgacaagctcacacgagcttagattcccctgagactacaaaagactaggaaacaaaaatatagaaggggc

SEQ ID NO: 19222 - DNA, 110 bp, synthetic construct
  source 1..110: mol_type = other DNA
gttcagtacaaggtttcacggtcaagtaagtttgggtaacgaagaacagccccgtctagcactgtaactagctctgtaatggctaacagcataagaaagattattgagaa

SEQ ID NO: 19223 - DNA, 110 bp, synthetic construct
  source 1..110: mol_type = other DNA
ggaactttgtggagtgataagatatgcttttgattgtggcagtggttccacaagcatatccatttgtcagagaatcaagatgcccttatacttggtaagtaagtaaagga

SEQ ID NO: 19224 - DNA, 110 bp, synthetic construct
  source 1..110: mol_type = other DNA
tttagccttaaagtttatattccaagtcctttttcaaccagtgtttttcctgaactagcttaatggaaacagactataaaacagtcttagaaatcattgagaaatctgat

SEQ ID NO: 19225 - DNA, 110 bp, synthetic construct
  source 1..110: mol_type = other DNA
tatattccaagtcctttttcaaccagtgtttttcctgaactagcttaatggaaacagactataaaacagtcttagaaatcattgagaaatctgattatgaaagcatagaa

SEQ ID NO: 19226 - DNA, 110 bp, synthetic construct
  source 1..110: mol_type = other DNA
taaatatttgcttcacataaattaaaatcacggttgacaagatggcactgaaacagggtgatgtcctcaatgcaattcctccttgttttgcaacaaatacaaaccgggct

SEQ ID NO: 19227 - DNA, 110 bp, synthetic construct
  source 1..110: mol_type = other DNA
cagcaagattagatggacagattgtatatttgtgcagtggaatatgcactgatgtaaaggaatgaacggacaagtacatgtaaccacacagataaatttcacacacgtaa

SEQ ID NO: 19228 - DNA, 110 bp, synthetic construct
  source 1..110: mol_type = other DNA
tccaaaggtaacaattgctccattgattgtaaagaggagccagcagctgttcgtggtgcacttgttaaagattaccggccctgatagtcctaaatttcaaaagctggcaa

SEQ ID NO: 19229 - DNA, 110 bp, synthetic construct
  source 1..110: mol_type = other DNA
acacgcccatggctctctggggacgtttgtgaccatggccaggtgccaagggccaggcagcacttttgcaattgtgtctggaaacagagtccatgacccagagccccagc

SEQ ID NO: 19230 - DNA, 110 bp, synthetic construct
  source 1..110: mol_type = other DNA
ggcagcacttttgcaattgtgtctggaaacagagtccatgacccagagccccagctccgagtagtaacctaatgcttcatgtgaggtgttaaattgactcaaactaaatt

SEQ ID NO: 19231 - DNA, 110 bp, synthetic construct
  source 1..110: mol_type = other DNA
atcttaatatttacacagatgtaaccccttttctgactcctggcagtttactacgtagactcagcagtaaccttctataggactttgcttagaatcacacccttggtctc

SEQ ID NO: 19232 - DNA, 110 bp, synthetic construct
  source 1..110: mol_type = other DNA
tcaaaggggaggatctcagccatcacctggattcaggctgagctgcagcctctaaagtatgaagatacacctcttcaggggaagatgcattaacatttctgtctgctagc

SEQ ID NO: 19233 - DNA, 110 bp, synthetic construct
  source 1..110: mol_type = other DNA
gttcacaggcccgcccagtgattctgatgcagatgaaaatctgagcaacaaactcagggaaagagaggcacacaaactataagggaagtaaagggtgacccactcagaaa

SEQ ID NO: 19234 - DNA, 110 bp, synthetic construct
  source 1..110: mol_type = other DNA
agggaaagagaggcacacaaactataagggaagtaaagggtgacccactcagaaattcagggcagtggtcacctccaagcagaatggatgcaattgggcacagtcgaagg

SEQ ID NO: 19235 - DNA, 110 bp, synthetic construct
  source 1..110: mol_type = other DNA
agctgatctacaacctccccaaccacagccctgagcaatccccaaagaaaacctaaagaactcctggcaggtctccagccggtgtaaggagttcagagctccaggagacc

SEQ ID NO: 19236 - DNA, 110 bp, synthetic construct
  source 1..110: mol_type = other DNA
aagaactcctggcaggtctccagccggtgtaaggagttcagagctccaggagacccagcgtggttcgtgggttacagaggttcctgcagaccctcacaggtgagcacggt

SEQ ID NO: 19237 - DNA, 110 bp, synthetic construct; identical to SEQ ID NO: 19235
  source 1..110: mol_type = other DNA

SEQ ID NO: 19238 - DNA, 110 bp, synthetic construct; identical to SEQ ID NO: 19236
  source 1..110: mol_type = other DNA

SEQ ID NO: 19239 - DNA, 110 bp, synthetic construct
  source 1..110: mol_type = other DNA
tgcatccccgtcctgcttcccctgtccctgttacatgcagctggtcctgatctagagttccggggaggctgctggttcctgaaatcccttcccctccctcctctggccat

SEQ ID NO: 19240 - DNA, 110 bp, synthetic construct
  source 1..110: mol_type = other DNA
atttcattttaaagaaatacaaaggaatgtgccaccaacaactaaaaggcctgcggtctcagggacagaacagaccagctgggtcttaatcggcacagagggattttccc

SEQ ID NO: 19241 - DNA, 110 bp, synthetic construct
  source 1..110: mol_type = other DNA
acccttctgggtttaagaggctactgcaatgaatgttcagctcttcttgaatgcgatggtcaagcagagcacctccaagctgcttaaagaaaggaggggtggagtttccg

SEQ ID NO: 19242 - DNA, 110 bp, synthetic construct
  source 1..110: mol_type = other DNA
ctccaaagctcaacccctaatggtgttgatttcttaggttggaagaaagtcactcctggtgttggagggggaggggacttcacatctacccttcccgatggtttgctttg

SEQ ID NO: 19243 - DNA, 110 bp, synthetic construct
  source 1..110: mol_type = other DNA
ctggtgttggagggggaggggacttcacatctacccttcccgatggtttgctttgcttcatacggtttccaaaaataacactcgcaagcattattgtttcctgaggtaag

SEQ ID NO: 19244 - DNA, 110 bp, synthetic construct
  source 1..110: mol_type = other DNA
aaggagcctgccgaggggaatggaccccccacagccttcagaccatgtgcaagacgacctggtccagcagggccagttagcacaagcttcctcgtgggaatgacagccat

SEQ ID NO: 19245 - DNA, 110 bp, synthetic construct
  source 1..110: mol_type = other DNA
gacctggtccagcagggccagttagcacaagcttcctcgtgggaatgacagccatcctgccccaccctttctacactttccactgcttttcatgagtgacctgagggctg

SEQ ID NO: 19246 - DNA, 110 bp, synthetic construct
  source 1..110: mol_type = other DNA
ggggagggccggggccgagaagggagttgtgctggagaaaagcagggtggagggagcccagaacgtgtgggcagctggactcggagcgggaaggcaggtctcctagaaaa

SEQ ID NO: 19247 - DNA, 110 bp, synthetic construct
  source 1..110: mol_type = other DNA
gcccagaacgtgtgggcagctggactcggagcgggaaggcaggtctcctagaaaacacacctttaaattccaaaaagctcaagccatttgcaacatacactgcgtaaatg

SEQ ID NO: 19248 - DNA, 110 bp, synthetic construct
  source 1..110: mol_type = other DNA
tagcggggttttcctgcagggtcgctgtctcatcagtagttgctctgtgaagagtggtgactttggtgcagggggaggaagctagcttggcttctactccgccgtcctgg

SEQ ID NO: 19249 - DNA, 110 bp, synthetic construct
  source 1..110: mol_type = other DNA
ggtgactttggtgcagggggaggaagctagcttggcttctactccgccgtcctggccacgccctcctgttttactctattaattgaaaaatgtttatagatttttctgct

SEQ ID NO: 19250 - DNA, 110 bp, synthetic construct
  source 1..110: mol_type = other DNA
ggcccagcggctacggtggaagaggctgcctcagaatggtccctggtatgtgtgtgtggctgtggatggctgggtggtgaggagtccgggcagtctcaggcttcctgatc

SEQ ID NO: 19251 - DNA, 110 bp, synthetic construct
  source 1..110: mol_type = other DNA
gtggctgtggatggctgggtggtgaggagtccgggcagtctcaggcttcctgatctctcatacctaaaatttgtttttataaacagagatgagaaaagcctaaaaaagcc

SEQ ID NO: 19252 - DNA, 110 bp, synthetic construct
  source 1..110: mol_type = other DNA
gagctagctgtcggccaccagacagaccatgtgggctggaacgtggggggccaactgggtgtcagggagatgctttgcctctagcaagagcaaaggtgagaccaaaccac

SEQ ID NO: 19253 - DNA, 110 bp, synthetic construct
  source 1..110: mol_type = other DNA
aatgcatttaggaacagaatgtctggtgtttaactttagcagaactgcagtgtgaccccacctgttatcataaacccccatttttgctcttccatgtctttcttggtgac

SEQ ID NO: 19254 - DNA, 110 bp, synthetic construct
  source 1..110: mol_type = other DNA
ctcagcctctcgaaatatctcatctgataatttagctgcttggataaagaaatatgtgtgctaatgagatacttcagaatatgttagttcctaccatggtaaatataatt

SEQ ID NO: 19255 - DNA, 110 bp, synthetic construct
  source 1..110: mol_type = other DNA
ttagctggctcgttcttctcaaagggacctttctgtgtcggatgtccaaaggcacttgcttttggccttttcccttccctgtatttttgtctaaatggtcatttttggag

SEQ ID NO: 19256 - DNA, 110 bp, synthetic construct
  source 1..110: mol_type = other DNA
aaggaaccaccttatcaatccaaactcccaaacacacagaaaacaaaattagcaatgtgtgtatgaagctcctctccagtcacctctctcctcagaggaactactattaa

SEQ ID NO: 19257 - DNA, 110 bp, synthetic construct
  source 1..110: mol_type = other DNA
aaattagcaatgtgtgtatgaagctcctctccagtcacctctctcctcagaggaactactattaataaccacacagttgggagttcccgtcatggcgcagtggttaacga

SEQ ID NO: 19258 - DNA, 110 bp, synthetic construct
  source 1..110: mol_type = other DNA
ctgagaggctggcgctgtcttcattccggtgcatgactctatccctctatgagcgcttctcatttggaagctcaggcccagcatctccatcctctacccccttcactttt

SEQ ID NO: 19259 - DNA, 110 bp, synthetic construct
  source 1..110: mol_type = other DNA
ggaacactggacttgatttgaatgttcgcagctcccaggagaaagcttggccgttaagttacagttgaccttggttgcttttgtcttcaatatggcagtagttccctatc

SEQ ID NO: 19260 - DNA, 110 bp, synthetic construct
  source 1..110: mol_type = other DNA
agtagttttcacgtggtggtctgggcatcagacactgtcatccatcttcctccaaaagaacttgagtcttaggttccagtcccaatctgacttggtgcctaagtccctct

SEQ ID NO: 19261 - DNA, 110 bp, synthetic construct
  source 1..110: mol_type = other DNA
aaagatgagagaagaagcctgactaatggtttccttgtggcttgaggtggggccagagtggggagccccccaagcccctgcccacaaggtgtgaaattcactagtatcag

SEQ ID NO: 19262 - DNA, 110 bp, synthetic construct
  source 1..110: mol_type = other DNA
gagtggggagccccccaagcccctgcccacaaggtgtgaaattcactagtatcagcaaagggagtggcagcctttctcatccattttccgggatgtgaggacaaggggtg

SEQ ID NO: 19263 - DNA, 110 bp, synthetic construct
  source 1..110: mol_type = other DNA
tttccaagttggcacacgcacaccaagacctaagaggtgatacagaatgacacgggttcattatgcagcatttatgataaatgagcactgcagtttttgccgcccccacc

SEQ ID NO: 19264 - DNA, 110 bp, synthetic construct
  source 1..110: mol_type = other DNA
aaatagcgaggactcctggtttgcatcctggctgcccaggttcaattcatgagcagagaattaagatctcacttcaaggagttcccgtcatcactcagcggaaacgaatc

SEQ ID NO: 19265 - DNA, 110 bp, synthetic construct
  source 1..110: mol_type = other DNA
gcagcacagaggggacagagggctgtcagataccagctagtaaggagggcaccgtggcctgagtccacccttggcagctgtggaccctgagctgtgtttcaattccttag

SEQ ID NO: 19266 - DNA, 110 bp, synthetic construct
  source 1..110: mol_type = other DNA
ccacttcctcgttttgaagccctgaatccatccagagggcatctggctctcaccttcgattctgagaagtcacaggccacgggtcactaggttttctgcttacttaacat

SEQ ID NO: 19267 - DNA, 110 bp, synthetic construct
  source 1..110: mol_type = other DNA
catagctacgacttacaccatagctgtggccatgctggatcctttaatccagtattccaggtcgggatcaaacctgtagctctcacagcaacccaagctgctgcagtcag

SEQ ID NO: 19268 - DNA, 110 bp, synthetic construct
  source 1..110: mol_type = other DNA
ttctagaggtcaccccctgtgggcagaggtctcacaagagaagcacagaggcctctctctggctcctgggggtgctcagtggatagctagtgatccaggctttggaagat

SEQ ID NO: 19269 - DNA, 110 bp, synthetic construct
  source 1..110: mol_type = other DNA
gtctttgatgctgaaggaaacagtccaggtgtaggcactgcagcagagggcccgggttccagcttgtctcagaaccacttaatgaaccatacttttcctcagtaaatatt

SEQ ID NO: 19270 - DNA, 110 bp, synthetic construct
  source 1..110: mol_type = other DNA
aaatgctgcctcagtgtgtgtgtgaactcagtgcagctacttttcgttgacatatgaacactccaggtccccttcacactaatgtgcccacaagtcttttccactagcac

SEQ ID NO: 19271 - DNA, 110 bp, synthetic construct
  source 1..110: mol_type = other DNA
aaatattcattgatcgccttttcctgtggacttcagtagaaggaaatactccccactctctttgacctgaaatcagctgcaataagcctcatgctcttcagagcctttta

SEQ ID NO: 19272 - DNA, 110 bp, synthetic construct
  source 1..110: mol_type = other DNA
tcctgacaggacactgcttcccaagtctgtgcggacagagctgttacaccaagtgttagaatcgttcaccccagtgggctttaacttcagcccccaagcaagcatttgtg

SEQ ID NO: 19273 - DNA, 110 bp, synthetic construct
  source 1..110: mol_type = other DNA
gatggcaactctagggagatggaacagggggcaggtcttggggctcagaggccggttggtggcaggaggttgtgggactctgtctatattttctcagtgaactggatgcc

SEQ ID NO: 19274 - DNA, 110 bp, synthetic construct
  source 1..110: mol_type = other DNA
gggtccgtgatatactttccctgcccttgagcttgccctgggctagtggcccatcacgcaccactctctgaagtcctacaggtgtcatgcacaccgtggatcttgttaga

SEQ ID NO: 19275 - DNA, 110 bp, synthetic construct
  source 1..110: mol_type = other DNA
gaactttttttctagctccagcttgtgtaactagtttctgagttgcatctacaacagggttacaggagttgccatctccctgaggtactgcctcaggcactcagctctgt

SEQ ID NO: 19276 - DNA, 110 bp, synthetic construct
  source 1..110: mol_type = other DNA
actgtagtcaccattcggtatggtagagtcccagaatttactcacctttttttttttttttttttttggctttttaaggctgcacttgtgacatatggagtgtcccaggt

SEQ ID NO: 19277 - DNA, 110 bp, synthetic construct
  source 1..110: mol_type = other DNA
cggtatggtagagtcccagaatttactcacctttttttttttttttttttttggctttttaaggctgcacttgtgacatatggagtgtcccaggttaggggtctaatcag

SEQ ID NO: 19278 - DNA, 110 bp, synthetic construct
  source 1..110: mol_type = other DNA
tctactccaaacccacctttctttgcactgagatgcaaaccagagctgatttgaagtgtctctccattgccagctcacacagtattaagctttgtcagtagtggatgctg

SEQ ID NO: 19279 - DNA, 110 bp, synthetic construct
  source 1..110: mol_type = other DNA
gtgtctctccattgccagctcacacagtattaagctttgtcagtagtggatgctggaggaggaagggtcttcccatcctggctctggagagattttcccagcttcctcct

SEQ ID NO: 19280 - DNA, 110 bp, synthetic construct
  source 1..110: mol_type = other DNA
ccactgcgccacgacgggaactcccgaggcaaattctttaatacatatgtgttcgtaaatatttttgtcagcttgtgacttgtcttttgattttctgaatcagtttttcc

SEQ ID NO: 19281 - DNA, 110 bp, synthetic construct
  source 1..110: mol_type = other DNA
tctgcctccccacccaatgggtcttgggagccttctttaaatcagtcagctttcgttcattcacgagctctgccttaaagtctgctccctgtgaaacagcggttggagaa

SEQ ID NO: 19282 - DNA, 110 bp, synthetic construct
  source 1..110: mol_type = other DNA
tgattgagtaggcaacgccttaagtctattaaaccatgctcagctatgctaacatggagcctatttggagatgactataatgggtagccatgacagcccccgcctttcta

SEQ ID NO: 19283 - DNA, 110 bp, synthetic construct
  source 1..110: mol_type = other DNA
cttcttgttgccatggcctggtaagccctgggttctgcataatttccttttctgttttcttctgcagctaaactcaagctcagtcacagccagtaatcatgtttactata

SEQ ID NO: 19284 - DNA, 110 bp, synthetic construct
  source 1..110: mol_type = other DNA
gttagcagttactctgtgaccagggccaggggtcagtgcacagtgagctgagcaccagaattcaaggtgtggtgggttggtaattaccggttgctgttcagacagagaca

SEQ ID NO: 19285 - DNA, 110 bp, synthetic construct
  source 1..110: mol_type = other DNA
cagaattcaaggtgtggtgggttggtaattaccggttgctgttcagacagagacagatcaaagcacaaagcacactgggtggcgccctttcccaggaggctggctgctcc

SEQ ID NO: 19286 - DNA, 110 bp, synthetic construct
  source 1..110: mol_type = other DNA
tgaacagaatagtatatagtttctatcagctcaaagcctcatccccaagacaatcctagctccctaccaaaaaggatggcaaaatcatgtgaggtttggtacacttgtcg

SEQ ID NO: 19287 - DNA, 110 bp, synthetic construct
  source 1..110: mol_type = other DNA
ttaaagccagtacgaccacgatggaatataagacattccctgttcctacgctaacaaaaatgagcataatcacgttcagcagccgctggaaagggcatactcaaattttt

SEQ ID NO: 19288 - DNA, 110 bp, synthetic construct
  source 1..110: mol_type = other DNA
aaaaatgagcataatcacgttcagcagccgctggaaagggcatactcaaatttttaaacatctagtcccaattgggaaagaaaaggtaaaccggaatatgagaacgttat

SEQ ID NO: 19289 - DNA, 110 bp, synthetic construct
  source 1..110: mol_type = other DNA
ccgcggccgcagcctcctacagagcagtcctccccactcagactacaacttccagaaccgactgcagccccaatacctcccttgaggaccccccatccctgacagctgca

SEQ ID NO: 19290 - DNA, 110 bp, synthetic construct
  source 1..110: mol_type = other DNA
aaccgactgcagccccaatacctcccttgaggaccccccatccctgacagctgcaatggctgactgtatcggtgaactgaaggaaaggacctgagccaggaatgccattg

SEQ ID NO: 19291 - DNA, 110 bp, synthetic construct
  source 1..110: mol_type = other DNA
gagggctcccagcagcactgtgcccaggcccacagcagtgcaatggcacacccgtggcatccccaaccccacctcacctccctttctcccactatacggtaggggacatg

SEQ ID NO: 19292 - DNA, 110 bp, synthetic construct
  source 1..110: mol_type = other DNA
ttcctcataaatttactactcttctagaacaacagttcctcagtgttcccagaatcttaccatcagaggccacaaggttcttggtgcacacaagcaataatactattgtg

SEQ ID NO: 19293 - DNA, 110 bp, synthetic construct
  source 1..110: mol_type = other DNA
gcactgttcccaatgtggtccatgtcaataaacttgtgtatcactctcgtcctctctttaaggaattagctagtgaatgacataagtattttgatgtttgggcatgattg

SEQ ID NO: 19294 - DNA, 110 bp, synthetic construct
  source 1..110: mol_type = other DNA
caccgtcctgggaccctcctcttcctgttttttggtggcagcttccttccagtcagaagctggtaaactggtggcttccccaccagttcaaacaagtctgtttctgacca

SEQ ID NO: 19295 - DNA, 110 bp, synthetic construct
  source 1..110: mol_type = other DNA
gggccctggcagcccatctcaggctcttccagtcccgtgccaggggactgagtataacaggaattccagatggattgaatgctcccaccagccgttttgcagacatccta

SEQ ID NO: 19296 - DNA, 110 bp, synthetic construct
  source 1..110: mol_type = other DNA
aaagatgttcctaaccgaattgagtgtcctctgatctaccacctggacgtgggtgccatgtaccccaacatcatcttgacaaaccgcctgcaggtgagccagattctcac

SEQ ID NO: 19297 - DNA, 110 bp, synthetic construct
  source 1..110: mol_type = other DNA
gaggaatgcaggactttaatggaggaaagccttgggagagctgagtgtggtattcctttcctcctgcatgacgttttgcccattgcctctttctctaggcagctaacatg

SEQ ID NO: 19298 - DNA, 110 bp, synthetic construct
  source 1..110: mol_type = other DNA
ctttcctcctgcatgacgttttgcccattgcctctttctctaggcagctaacatgcctgattctgagctgttcgagctgatctctgagaaccgttccatgtctcggaagc

SEQ ID NO: 19299 - DNA, 110 bp, synthetic construct
  source 1..110: mol_type = other DNA
cctggatgcccttctttgctcacacactcctctggcttttatttagatacatgttcagttcaagctccctcctgcacccaagacaacagcttgcaactctaggcttctat

SEQ ID NO: 19300 - DNA, 110 bp, synthetic construct
  source 1..110: mol_type = other DNA
gcctgggagctccatatgctgtgggagcagctggaaaaaaaatgaaaggctcatctgtgttttcacctgtgtcggcgctgcttccttttcatgagcactgtggctggacc

SEQ ID NO: 19301 - DNA, 110 bp, synthetic construct
  source 1..110: mol_type = other DNA
ggcacctggagaattgaaagctagctataaagaggaacttcctctttcacccacaggagactgcagtaaggatggactgcaggtggggatccgcaggctgtcttcctcaa

SEQ ID NO: 19302 - DNA, 110 bp, synthetic construct
  source 1..110: mol_type = other DNA
caaggaattgataacaatcccagccaacatttagagatttaggtcacaagttatcactctaaatacaggctggaaagcctgagtgctgaaggttggtgcctgctggagtt

SEQ ID NO: 19303 - DNA, 110 bp, synthetic construct
  source 1..110: mol_type = other DNA
actctaaatacaggctggaaagcctgagtgctgaaggttggtgcctgctggagttgtgcagtgtgcaacttatgtaactgtccatggagaccctgatctggcggagaata

SEQ ID NO: 19304 - DNA, 110 bp, synthetic construct; identical to SEQ ID NO: 19302
  source 1..110: mol_type = other DNA

SEQ ID NO: 19305 - DNA, 110 bp, synthetic construct; identical to SEQ ID NO: 19303
  source 1..110: mol_type = other DNA

SEQ ID NO: 19306 - DNA, 110 bp, synthetic construct
  source 1..110: mol_type = other DNA
tcttaccctcgactcctgctcccccagggctatcccggaagatttgctaacgttttatgatcacctgcccaggaggtggaggggacttcccaaagcccagtcacacccgc

SEQ ID NO: 19307 - DNA, 110 bp, synthetic construct
  source 1..110: mol_type = other DNA
gctcaaagcacactccccttgaggctctgggaaactgcatctgaacccccacccctaagatgtggagtcacctgccctgcatcttcccgtgagcctggctgacctcagca

SEQ ID NO: 19308 - DNA, 110 bp, synthetic construct
  source 1..110: mol_type = other DNA
ctccccacccctaccccatgcatcaagatttggctcttgctggtaggaagctctttagaacagagcctggaggccctgtgaccaagaggtgctccggcttcctgaccaca

SEQ ID NO: 19309 - DNA, 110 bp, synthetic construct
  source 1..110: mol_type = other DNA
tagaacagagcctggaggccctgtgaccaagaggtgctccggcttcctgaccacagagggagaggaagggggtgagaggtccatgaccgcagagtccactagcttcctct

SEQ ID NO: 19310 - DNA, 110 bp, synthetic construct
  source 1..110: mol_type = other DNA
atccgagacccctgacttggcatgagagttggggaggcgcaggcctgggtgtcaccgagtaggcagccgggagagggcaatggcgagacaggcaggtctccatgttggtg

SEQ ID NO: 19311 - DNA, 110 bp, synthetic construct
  source 1..110: mol_type = other DNA
cgagtaggcagccgggagagggcaatggcgagacaggcaggtctccatgttggtgtcacctgggagcattcggggagatgtggggttatcctcctggaggattttgcagc

SEQ ID NO: 19312 - DNA, 110 bp, synthetic construct
  source 1..110: mol_type = other DNA
atgaaggaatacgtgagcttaggtggaccaagcagaaggggtcccagggaataatcccagctggccttactattcctggagctcctggtcaggaatagtcctaagaagac

SEQ ID NO: 19313 - DNA, 110 bp, synthetic construct
  source 1..110: mol_type = other DNA
gcaatttagcaaagaaaacgggagattctacccccattcttccaggttcctgagctaattgtaggtttattttagcgtaagaaatttcagtaaaccaataggtgagcttg

SEQ ID NO: 19314 - DNA, 110 bp, synthetic construct
  source 1..110: mol_type = other DNA
taattgtaggtttattttagcgtaagaaatttcagtaaaccaataggtgagcttgacaggctccatgaagaataagaaaggtttagcaggagttcttgtcatggctcggt

SEQ ID NO: 19315 - DNA, 110 bp, synthetic construct
  source 1..110: mol_type = other DNA
cgcatgtccccatctttccctctgctcaagtcttacccctacctgcttcccacgcctgggcctagacaccccataaactgactaaccaccttcatgccccgactagcacc

SEQ ID NO: 19316 - DNA, 110 bp, synthetic construct
  source 1..110: mol_type = other DNA
tcactaggatttagcactttgtcccatttctggaaaggaacaaagtacctatgtatgtgtttgtgaacatgtctgtttacactggatgaagggaggctgagcacacacct

SEQ ID NO: 19317 - DNA, 110 bp, synthetic construct
  source 1..110: mol_type = other DNA
tgtgtttgtgaacatgtctgtttacactggatgaagggaggctgagcacacaccttgtggtcactgctgaggatggaagctggtgggaaaaggtggtaagtttgtgaggg

SEQ ID NO: 19318 - DNA, 110 bp, synthetic construct
  source 1..110: mol_type = other DNA
aactcagcttgctcaagacaaaggacacaatgacaaagggggcagagtgggctagaagcttagccatgacaatgatggatatagatggcacttgcctgagttcctagaag

SEQ ID NO: 19319 - DNA, 110 bp, synthetic construct
  source 1..110: mol_type = other DNA
aagcttagccatgacaatgatggatatagatggcacttgcctgagttcctagaagggccagccccagcccccatggtccccaccccccaacactatgacccccctagtcc

SEQ ID NO: 19320 - DNA, 110 bp, synthetic construct; identical to SEQ ID NO: 19318
  source 1..110: mol_type = other DNA

SEQ ID NO: 19321 - DNA, 110 bp, synthetic construct; identical to SEQ ID NO: 19319
  source 1..110: mol_type = other DNA

SEQ ID NO: 19322 - DNA, 110 bp, synthetic construct
  source 1..110: mol_type = other DNA
ccagctgggaggtgcagcccactgcactgcctacttttctactcccaaatccaagcagacccctggaccccacaaccacctcccccagaaaggaggtcccagtggcatca

SEQ ID NO: 19323 - DNA, 110 bp, synthetic construct
  source 1..110: mol_type = other DNA
ttactgctaatcacaaaaatctcaaattagtgattttttttcttttttggacatacccacggcatatggaaattcccaggccaggggtcaaacctgagctgcagctttga

SEQ ID NO: 19324 - DNA, 110 bp, synthetic construct
  source 1..110: mol_type = other DNA
cccacggcatatggaaattcccaggccaggggtcaaacctgagctgcagctttgacctattgcttcaggtggtcacatccttaacccactgcaagacccacagataaatg

SEQ ID NO: 19325 - DNA, 110 bp, synthetic construct
  source 1..110: mol_type = other DNA
ctctgccatccctgaacccccttcttttgtgaggactgcccttctcatcattttggacacattaaattgcatcccgacagcaggatttactgagcgtgtcccatggctag

SEQ ID NO: 19326 - DNA, 110 bp, synthetic construct
  source 1..110: mol_type = other DNA
ttttcagaaagcaactgaactccagaagggggagggaataataacaccttgcaaatccctccccccaatcccattaacatggctctaaaaactccagagcaggcctcggg

SEQ ID NO: 19327 - DNA, 110 bp, synthetic construct
  source 1..110: mol_type = other DNA
gggtgggtgggatgagtgggggagacccccatctgaatgacccgtcattaaatgatgcagcttatggtggtgcttcgaccagcggaaggaacaattactgttcctgtgtt

SEQ ID NO: 19328 - DNA, 110 bp, synthetic construct
  source 1..110: mol_type = other DNA
tgcagcttatggtggtgcttcgaccagcggaaggaacaattactgttcctgtgttttatgctctcacccaaggaccctcctgctttccacttgactgtctctatccagaa

SEQ ID NO: 19329 - DNA, 110 bp, synthetic construct; identical to SEQ ID NO: 19327
  source 1..110: mol_type = other DNA

SEQ ID NO: 19330 - DNA, 110 bp, synthetic construct; identical to SEQ ID NO: 19328
  source 1..110: mol_type = other DNA

SEQ ID NO: 19331 - DNA, 110 bp, synthetic construct
  source 1..110: mol_type = other DNA
aatctgaagtccttgctctatttctctacgctatgttttatctctgttccatttgcagtttaaaaaattctctgagcacagtacacacaaaatagctgtaaacttcctcc

SEQ ID NO: 19332 - DNA, 110 bp, synthetic construct
  source 1..110: mol_type = other DNA
acataacatataatgaaagattttaaagtgtacagtccagtggcggttagtgcgtttataatgctgtgcagccctcacctccgggttgttccggaacgttttgatcaccc

SEQ ID NO: 19333 - DNA, 110 bp, synthetic construct
  source 1..110: mol_type = other DNA
tttgtaacctctccttccctcagccactgaaatctggtctctccccctgcgccctcaggacagctctgaacacaattgccagtgactgccttgttcctaaatccagtggg

SEQ ID NO: 19334 - DNA, 110 bp, synthetic construct
  source 1..110: mol_type = other DNA
ctggacaacaagataccaaaacccccctaaaaaacccaactgccacttttgaagagctgagcaaaagcagggtactaggcacgccccctgcacacaccagcaccggaggg

SEQ ID NO: 19335 - DNA, 110 bp, synthetic construct
  source 1..110: mol_type = other DNA
agctgtacctgcagcatatgaaagttcccagggccaggagtcaaatctgagtcaaagctgtgacttatgtcacagccatggcaatgctggattgttaactccatggtgcc

SEQ ID NO: 19336 - DNA, 110 bp, synthetic construct
  source 1..110: mol_type = other DNA
acctagtgaggttttggaagatcagcaaagggtagttaggtttggtggccaaatggacatttaactgtgcagcttctccagcgtgtctgattgtgatgctaggtagaaac

SEQ ID NO: 19337 - DNA, 110 bp, synthetic construct
  source 1..110: mol_type = other DNA
gcattgccctgtccgaggctcccccaggtcacctgagtatgtcatcagactgtgggcagtgacagctgggggtctagaggcttctctacctgcatccttctccccacccc

SEQ ID NO: 19338 - DNA, 110 bp, synthetic construct
  source 1..110: mol_type = other DNA
gcagtgacagctgggggtctagaggcttctctacctgcatccttctccccaccccaccctggcatgtgggtctgacagcagggtcccaacaccccgtgtcctctgggctc

SEQ ID NO: 19339 - DNA, 110 bp, synthetic construct
  source 1..110: mol_type = other DNA
gaccagtgacaccccgggtgagagagtgagcttggacagaactattatgagatggtccggctcccgagcctgtcccttggtgggtggcactggaggcatctggagtctgg

SEQ ID NO: 19340 - DNA, 110 bp, synthetic construct
  source 1..110: mol_type = other DNA
ctgtgtatagcacattcttcccatccagcagctgccaaagggtctctcctgggtcttctctgccctgaggccccaccagccatgtcctctatgaggtcactgcctccaga

SEQ ID NO: 19341 - DNA, 110 bp, synthetic construct
  source 1..110: mol_type = other DNA
ttctctgccctgaggccccaccagccatgtcctctatgaggtcactgcctccagaatcctaggcatgaactgttctggggtgacccagagctctactttagagggcactt

SEQ ID NO: 19342 - DNA, 110 bp, synthetic construct; identical to SEQ ID NO: 19340
  source 1..110: mol_type = other DNA

SEQ ID NO: 19343 - DNA, 110 bp, synthetic construct; identical to SEQ ID NO: 19341
  source 1..110: mol_type = other DNA

SEQ ID NO: 19344 - DNA, 110 bp, synthetic construct
  source 1..110: mol_type = other DNA
agggctgggttgcactgcagtggtatttgccaggatttgacctgtggcttggtggtgtgggctgtgtatggccatgggcattcaccgctgccctgcctttggggactcag

SEQ ID NO: 19345 - DNA, 110 bp, synthetic construct
  source 1..110: mol_type = other DNA
tgtgggctgtgtatggccatgggcattcaccgctgccctgcctttggggactcagactctagggatcccaagtccctggtttccaggctgtcaccctttctgtccttcat

SEQ ID NO: 19346 - DNA, 110 bp, synthetic construct
  source 1..110: mol_type = other DNA
ctgcaaacaccgcaattcatgggcctccactgtgggagcaagaccccggcccgcctccagggccacaccagcctgagcccagtccagcagagaagcccctttctacatgg

SEQ ID NO: 19347 - DNA, 110 bp, synthetic construct
  source 1..110: mol_type = other DNA
tccagggccacaccagcctgagcccagtccagcagagaagcccctttctacatggtgggctctctctccatgggttctactgtaacgcatacagacaagatctgccgtcc

SEQ ID NO: 19348 - DNA, 110 bp, synthetic construct
  source 1..110: mol_type = other DNA
aaaatcagcctcgcaagtccaagtccagttgtgtttccctctcccctccaccctgccctggatctgggatctctgcaggggtgtgactggactcctttgtttccctgttt

SEQ ID NO: 19349 - DNA, 110 bp, synthetic construct
  source 1..110: mol_type = other DNA
ccctgaagtatactctgtacctctgcatttcagcccagtactggctgacgtgatagtttctacccacatcttcctaagagctgatcattccacccactctggtcttggac

SEQ ID NO: 19350 - DNA, 110 bp, synthetic construct
  source 1..110: mol_type = other DNA
tgcttttgggaagaagggctggggatcgggtttcctccatgggggctcctcttaagatgctgcaggctccagggggcggaagcagacaggcatcaggcctcccaggtact

SEQ ID NO: 19351 - DNA, 110 bp, synthetic construct
  source 1..110: mol_type = other DNA
tgttaccgaccaatcagaatggactgcggtcaggtaccagacaatgaaaatggatgccatacctaaacgatagaaatagagcctgtgcagtgcatcatcctccttaatgc

SEQ ID NO: 19352 - DNA, 110 bp, synthetic construct
  source 1..110: mol_type = other DNA
gagatctgatccagatggaaagggcccagctgttctctctctgtactaacgacgggagggctctgaatggcattacacaactttgcatctggtgcttctctgttatctcg

SEQ ID NO: 19353 - DNA, 110 bp, synthetic construct
  source 1..110: mol_type = other DNA
cctgtatccagtcattctctcattgtttaagggtctattcaagacaagtttatcagagccaactgcacatcagctagttgggaaagccagaacggtgaccaaagccaatg

SEQ ID NO: 19354 - DNA, 110 bp, synthetic construct
  source 1..110: mol_type = other DNA
gagccaactgcacatcagctagttgggaaagccagaacggtgaccaaagccaatgatatctgtaccctcatggaaatagcggtgtcatggaggtcatggcagtgcagagg

SEQ ID NO: 19355 - DNA, 110 bp, synthetic construct
  source 1..110: mol_type = other DNA
gcgtgctggaagataattgtgttacagagctcataaacctctctccaaacaccaaggcctctagactggcctgaatgatgccttggagctcagcatcactgtcataacaa

SEQ ID NO: 19356 - DNA, 110 bp, synthetic construct
  source 1..110: mol_type = other DNA
gatgcaaatccttattctattttgccactttagaacacgtgcttgcatatgacagctcagatgttcaaaagctcaagcgtgccgactccagcatgcagggaagcccagca

SEQ ID NO: 19357 - DNA, 110 bp, synthetic construct
  source 1..110: mol_type = other DNA
ctcagatgttcaaaagctcaagcgtgccgactccagcatgcagggaagcccagcagggagacttgcacaacagcaaatacgaatatcttctatgagggtagagtggggat

SEQ ID NO: 19358 - DNA, 110 bp, synthetic construct
  source 1..110: mol_type = other DNA
ttggtttcatcatgtgaccactacacaaagctcacaggaagggtctctttttctgtctactgggtcttcccacttagaagcctatttggtcacaaccttcacaacgtggc

SEQ ID NO: 19359 - DNA, 110 bp, synthetic construct
  source 1..110: mol_type = other DNA
tctactgggtcttcccacttagaagcctatttggtcacaaccttcacaacgtggccagaacaaaacttcctatgtctgctctcccaaaccattggctctcccagtttttc

SEQ ID NO: 19360 - DNA, 110 bp, synthetic construct
  source 1..110: mol_type = other DNA
gacactaggccacctgccaagagcacacagctcctaagagcagagtgttagccatgttgagaatccgaaaagtgcacagatcaagaagtttatcctttatgctttgcatt

SEQ ID NO: 19361 - DNA, 110 bp, synthetic construct
  source 1..110: mol_type = other DNA
cccagaagacaagatgcggggcctggaagctccctccccctgcagcttttcctaacacctctgctcttctcttccaagttagagaaaaggagcgttttcctggaaaggag

SEQ ID NO: 19362 - DNA, 110 bp, synthetic construct
  source 1..110: mol_type = other DNA
aggaacctcagaatgcgacttcattcggaaataggatctttacagatggagctcattaagcatctcaagatgaaatcttcctggatttagggtggggctccaaatccagt

SEQ ID NO: 19363 - DNA, 110 bp, synthetic construct
  source 1..110: mol_type = other DNA
tggggagaccggaattgctccggtaggcagctgttaacgcatgtaagtcgggagctctggggaggtagagccatcagtggatttgtagaggaagaacttacagggaagga

SEQ ID NO: 19364 - DNA, 110 bp, synthetic construct
  source 1..110: mol_type = other DNA
tctggggaggtagagccatcagtggatttgtagaggaagaacttacagggaaggagagggagagaggaaaatcctgcctcttctcttgctattttaagtgacatctgtac

SEQ ID NO: 19365 - DNA, 110 bp, synthetic construct
  source 1..110: mol_type = other DNA
acatagttagttagtcaggaaatttccaagtcagtattgtggatgtgaatatcatactgagatccagagcttctgggatggaagggaagaaggatgcattgacctccttt

SEQ ID NO: 19366 - DNA, 110 bp, synthetic construct
  source 1..110: mol_type = other DNA
actgagatccagagcttctgggatggaagggaagaaggatgcattgacctcctttttcctcttgtgttatcatcatcctctcaacagagcacacaggaaaacacggtggc

SEQ ID NO: 19367 - DNA, 110 bp, synthetic construct
  source 1..110: mol_type = other DNA
tttacttggagcattgtcatctttagcaaaagccacaaggaagaggagttcctgttgtagctcactgggttaagaacacaaagcagtggccatgaggatgcaggttcaat

SEQ ID NO: 19368 - DNA, 110 bp, synthetic construct
  source 1..110: mol_type = other DNA
ctgaactggtagtagcttaatgaagtcatcacagttggctctttctagttttgtaccttccatcctcagagggttggccttaatagtgaagctattgcctcatggttgca

SEQ ID NO: 19369 - DNA, 110 bp, synthetic construct
  source 1..110: mol_type = other DNA
cagggaagtaggaatcacaagtgtgtgcagtgttttagagaaattagcattgattagtacctttacagtattgccatgctttgacatgaaaaccaagctttgagggtctc

SEQ ID NO: 19370 - DNA, 110 bp, synthetic construct
  source 1..110: mol_type = other DNA
agtacctttacagtattgccatgctttgacatgaaaaccaagctttgagggtctcaagaaatctccagagctgggctcagatctggctggagaccagcagccactgtctc

SEQ ID NO: 19371 - DNA, 110 bp, synthetic construct
  source 1..110: mol_type = other DNA
aagggggggagcatggatttcagaaagcaatctcttaggaattctccccacagttgtacagtcttggtgggtctatacatcatggtatcctgcctccctaaccacggcat

SEQ ID NO: 19372 - DNA, 110 bp, synthetic construct
  source 1..110: mol_type = other DNA
gtacagtcttggtgggtctatacatcatggtatcctgcctccctaaccacggcatgtgatccaaatttggccaactggactgtttctcccatggctttaaatttgctagg

SEQ ID NO: 19373 - DNA, 110 bp, synthetic construct
  source 1..110: mol_type = other DNA
ctgcagttataactcaggttaatggtcacaaagttggtgaaaaaattcaatctctgatgaaaaatgtgtcataaccttataatgtttaataatcaagtactctttcctgc

SEQ ID NO: 19374 - DNA, 110 bp, synthetic construct
  source 1..110: mol_type = other DNA
gatgaaaaatgtgtcataaccttataatgtttaataatcaagtactctttcctgcaaatattctctgcagtataacctataatatactttcctagttcagggtctgagaa

SEQ ID NO: 19375 - DNA, 110 bp, synthetic construct
  source 1..110: mol_type = other DNA
gtttgatctcggcccagtgcagtggtttaaaggacccagcgtggacctacaccgaagctgaagctcagatttaatccctgacctgggaactgccatatgtggtgggtaca

SEQ ID NO: 19376 - DNA, 110 bp, synthetic construct
  source 1..110: mol_type = other DNA
tctggttttgattgcaccagagaccctgtcttggatatggaaattaaaggctctgtccacatcctcagagatgggaggaagccaagagggacccacagcagctttgagac

SEQ ID NO: 19377 - DNA, 110 bp, synthetic construct
  source 1..110: mol_type = other DNA
tccacatcctcagagatgggaggaagccaagagggacccacagcagctttgagacagccacatggaaaacttccaaagaggcacactgcatttctctattttgctgagcc

SEQ ID NO: 19378 - DNA, 110 bp, synthetic construct
  source 1..110: mol_type = other DNA
caaaggggctaaagaaatcagatcttgctggtgcaggagctcagaaaagtaaacgggtcctttcaatgcattagtctcatcatgggagcctgactcgggccacacagatg

SEQ ID NO: 19379 - DNA, 110 bp, synthetic construct
  source 1..110: mol_type = other DNA
ttatgcaaatcaccttcaggacaaaatcctctatgtctaaagcctcctgttgtttcttagaactggtgcaaaagcatagctttccgggtacaccagccccatcaccttct

SEQ ID NO: 19380 - DNA, 110 bp, synthetic construct
  source 1..110: mol_type = other DNA
gggagatgagtaagagagatggagggtttgcacccaggcaagctggggctccatctctcaggttagagcagaaggaccaggagatgctcggggatgggcagatgagagga

SEQ ID NO: 19381 - DNA, 110 bp, synthetic construct
  source 1..110: mol_type = other DNA
tgtgtgataaatcacactatgcctctagttgggtttttagactcgagcatttttttttttttttttttcctttctaggaaatacatttttcactagaaaactggatggaa

SEQ ID NO: 19382 - DNA, 110 bp, synthetic construct
  source 1..110: mol_type = other DNA
tagttgggtttttagactcgagcatttttttttttttttttttcctttctaggaaatacatttttcactagaaaactggatggaactgagctggatgtgacaattttcac

SEQ ID NO: 19383 - DNA, 110 bp, synthetic construct; identical to SEQ ID NO: 19381
  source 1..110: mol_type = other DNA

SEQ ID NO: 19384 - DNA, 110 bp, synthetic construct; identical to SEQ ID NO: 19382
  source 1..110: mol_type = other DNA

SEQ ID NO: 19385 - DNA, 110 bp, synthetic construct
  source 1..110: mol_type = other DNA
agccaggggttcaagccctacattgggctccccagcccagggtcccctaaccaagaagacaggatcatctgattccagaacatctgtcttgaaggtcagggagacttgca

SEQ ID NO: 19386 - DNA, 110 bp, synthetic construct
  source 1..110: mol_type = other DNA
ttacacttattctagtgacaactgaaggcagcttgctgtgtcacctggtcgagaacctctcttgaccatcgcttctccaggtcagttaggaaacagcatattaatttccc

SEQ ID NO: 19387 - DNA, 110 bp, synthetic construct
  source 1..110: mol_type = other DNA
caaagcactaaccattgaaatgctgagacccaactgagacccaaccccttttgatgattaaattcagctctgaaacctcctgggatttttatcttcaatattttgatttg

SEQ ID NO: 19388 - DNA, 110 bp, synthetic construct
  source 1..110: mol_type = other DNA
gattaaattcagctctgaaacctcctgggatttttatcttcaatattttgatttgaatgagggttgtcctggtatccggttggaatgcttttctttcccaactcttaatt

SEQ ID NO: 19389 - DNA, 110 bp, synthetic construct
  source 1..110: mol_type = other DNA
tatttgcatcagtggcttctacatctcctttgcagtaatgagagctaatgtgtgtgcatccaggaagggccccagggacatggttttctgccttctatgtctccattcat

SEQ ID NO: 19390 - DNA, 110 bp, synthetic construct
  source 1..110: mol_type = other DNA
aacactggtagcctgggtggcccagcaaccattgcttttatgtttcctctagggctctactgaatcctgagccttttcactgtttccccataaatgaattgtgatggtgg

SEQ ID NO: 19391 - DNA, 110 bp, synthetic construct
  source 1..110: mol_type = other DNA
cttaacacagctcctactctggatacacagagaatgaaggtcattcagcacatggctaaaaatgtagtgaaagtaaatgaaaacctaaccaaattcatggccatcaagaa

SEQ ID NO: 19392 - DNA, 110 bp, synthetic construct
  source 1..110: mol_type = other DNA
ctaaaaatgtagtgaaagtaaatgaaaacctaaccaaattcatggccatcaagaaaaagtaggcaagcagccaactcctgaagatcagcatgattcctcaacagaactca

SEQ ID NO: 19393 - DNA, 110 bp, synthetic construct; identical to SEQ ID NO: 19391
  source 1..110: mol_type = other DNA

SEQ ID NO: 19394 - DNA, 110 bp, synthetic construct; identical to SEQ ID NO: 19392
  source 1..110: mol_type = other DNA

SEQ ID NO: 19395 - DNA, 110 bp, synthetic construct
  source 1..110: mol_type = other DNA
tgacatctcaggcaaactatctctctggagactctccctgcccctgggacctcatctcagggagcaagtaacagggtagcttttctgctcttggaccctatctctgctta

SEQ ID NO: 19396 - DNA, 110 bp, synthetic construct
  source 1..110: mol_type = other DNA
attctggaatggttaacagaagttactatgcaatggcactctcgccctttctgacccagagaggtctttctgtgcatgtgcatttgggagtctccctgaccctgaggata

SEQ ID NO: 19397 - DNA, 110 bp, synthetic construct
  source 1..110: mol_type = other DNA
ccagagaggtctttctgtgcatgtgcatttgggagtctccctgaccctgaggataggaaataagtgacctcttgatcttttgcccaagcagggctcagcccgtctcttcc

SEQ ID NO: 19398 - DNA, 110 bp, synthetic construct
  source 1..110: mol_type = other DNA
tgtgaataatgccattatgaacacacagaattttaacacatcctctgaaacgaggatggtactcatttccagggcctgttttgtttttgcttccatcactcatcatttag

SEQ ID NO: 19399 - DNA, 110 bp, synthetic construct
  source 1..110: mol_type = other DNA
atggtactcatttccagggcctgttttgtttttgcttccatcactcatcatttaggacaggggttggcaaactatggctgccatggtaacaagttgaggatattcatcca

SEQ ID NO: 19400 - DNA, 110 bp, synthetic construct
  source 1..110: mol_type = other DNA
caaggtcataaccccaggagaagctatgcacaaggaacttagaggcagcaggtgtcaatcagcaagaggtggaggaataaaagccctgaactttccctgctcctggtctg

SEQ ID NO: 19401 - DNA, 110 bp, synthetic construct
  source 1..110: mol_type = other DNA
atgctgagatataaagaaccagagctcctcgagtcccccagatgcatttctgccgtttcaaaagcaaactaatttttcctacaactggacctgcacatttgcacagagac

SEQ ID NO: 19402 - DNA, 110 bp, synthetic construct
  source 1..110: mol_type = other DNA
tcaattaattaaaaaaataagagagcttacctgggggaggggaattagtcaaaatcaatttctgtgactggcaaccaaagaaccttggatgaaccccaaaagatgagccc

SEQ ID NO: 19403 - DNA, 110 bp, synthetic construct; identical to SEQ ID NO: 19402
  source 1..110: mol_type = other DNA

SEQ ID NO: 19404 - DNA, 110 bp, synthetic construct
  source 1..110: mol_type = other DNA
ccgtgatggtggctgagcttacccatgtccctgtggtcaactctccagtcagctgtaggctgaatcgtctagtgtggcctcagctggaatagctcttctctgcccccgaa

SEQ ID NO: 19405 - DNA, 110 bp, synthetic construct
  source 1..110: mol_type = other DNA
taggctgaatcgtctagtgtggcctcagctggaatagctcttctctgcccccgaaaggctctcttcctccagccagctagtctgggcctatttatggagcagttcagcag

SEQ ID NO: 19406 - DNA, 110 bp, synthetic construct
  source 1..110: mol_type = other DNA
caaagggcagggagcaggaccaaaagaggcctgggctcgctgaaatccttcctttgatatgctcctctgctataagagccaggatcctgagttttcatagcctgcaggac

SEQ ID NO: 19407 - DNA, 110 bp, synthetic construct; identical to SEQ ID NO: 19406
  source 1..110: mol_type = other DNA

SEQ ID NO: 19408 - DNA, 110 bp, synthetic construct
  source 1..110: mol_type = other DNA
ttcgactttaccttttctcaagaagttgcagcagtggtggtggtgggagggggtatttacatacaaaggagcgattcagcaaaagcttgaggatgagtgctgcagggatg

SEQ ID NO: 19409 - DNA, 110 bp, synthetic construct
  source 1..110: mol_type = other DNA
tttacatacaaaggagcgattcagcaaaagcttgaggatgagtgctgcagggatgtacatttttaaagttaatatagagagcaaaatgcatctctccagcgactacagtc

SEQ ID NO: 19410 - DNA, 110 bp, synthetic construct
  source 1..110: mol_type = other DNA
ctccttcaaactctgagaaatgagaagccaaaaacaaatgtgttgatgcatggaaaaaaaacaggttgaattttacttagggaacccataccagagagatttctggcaga

SEQ ID NO: 19411 - DNA, 110 bp, synthetic construct
  source 1..110: mol_type = other DNA
ggtgccccctcccctctagtaggtatccaaggggcctccttcaacgctccacctgccttgtggaaagaacctgtcattactgggttaatgcccatccctccacagagcca

SEQ ID NO: 19412 - DNA, 110 bp, synthetic construct
  source 1..110: mol_type = other DNA
ccttgtggaaagaacctgtcattactgggttaatgcccatccctccacagagccataagcttccttaaaccagttatgagaatcccattttgctcaacaggattggtttg

SEQ ID NO: 19413 - DNA, 110 bp, synthetic construct
  source 1..110: mol_type = other DNA
tcatttctcttcagattgccgcagagtttctgccagcaggtaccactggagaaacacagacttacaattgtaaaccatttaacgatcagtcctggggagttgcaacttgt

SEQ ID NO: 19414 - DNA, 110 bp, synthetic construct
  source 1..110: mol_type = other DNA
taagaatcacacatcttccttttggctggatacatttaggcaacaaaaatgctggaacaatgtccttctggccggggcagtgtgagacactggtgacccagtgatggagg

SEQ ID NO: 19415 - DNA, 110 bp, synthetic construct
  source 1..110: mol_type = other DNA
aacaatgtccttctggccggggcagtgtgagacactggtgacccagtgatggaggggacaggagtctctcacctggaagaccttatacttggatgctgaagacaggcatg

SEQ ID NO: 19416 - DNA, 110 bp, synthetic construct
  source 1..110: mol_type = other DNA
cagaaggcatcctgctaggtggatgagcctgggggaacagttgttcttggctcagcccccagctgggtttctaagagagttgaagaaagagtgtgagagctgagagtgcc

SEQ ID NO: 19417 - DNA, 110 bp, synthetic construct
  source 1..110: mol_type = other DNA
cccccagctgggtttctaagagagttgaagaaagagtgtgagagctgagagtgcccagcacgcagaggaaggcccaggagcatgggggagcttcagctgaagggccgggg

SEQ ID NO: 19418 - DNA, 110 bp, synthetic construct; identical to SEQ ID NO: 19416
  source 1..110: mol_type = other DNA

SEQ ID NO: 19419 - DNA, 110 bp, synthetic construct; identical to SEQ ID NO: 19417
  source 1..110: mol_type = other DNA

SEQ ID NO: 19420 - DNA, 110 bp, synthetic construct
  source 1..110: mol_type = other DNA
tacagccgctatacacattttaatcaagtctttttgtggatgcctcagtgttttaatgggctatatttgctttaaaaatatatgttaaagatactttcgactgcaattca

SEQ ID NO: 19421 - DNA, 110 bp, synthetic construct
  source 1..110: mol_type = other DNA
actaaatgcatgatatatgtaagccgggtcatcatgctgtacaccttaaactgacgccgttctgtgtgtcaattatacaatgccactggaagggggaatactaaaataat

SEQ ID NO: 19422 - DNA, 110 bp, synthetic construct
  source 1..110: mol_type = other DNA
gccgttctgtgtgtcaattatacaatgccactggaagggggaatactaaaataatggtaactttggcaggaacatggtgggggggtgtgattggaagtgactagaaaggg

SEQ ID NO: 19423 - DNA, 110 bp, synthetic construct
  source 1..110: mol_type = other DNA
taaaggaaatatacgttccctttgattagaagagtatttctggaacttagggagctgcatactcaggaactactcaagaactgctagaaccccacaaagcatgttttgtc

SEQ ID NO: 19424 - DNA, 110 bp, synthetic construct
  source 1..110: mol_type = other DNA
tgcatactcaggaactactcaagaactgctagaaccccacaaagcatgttttgtctggaacagacagggagaggtggggagagtggaccgttgacttagcaccaatatga

SEQ ID NO: 19425 - DNA, 110 bp, synthetic construct; identical to SEQ ID NO: 19423
  source 1..110: mol_type = other DNA

SEQ ID NO: 19426 - DNA, 110 bp, synthetic construct; identical to SEQ ID NO: 19424
  source 1..110: mol_type = other DNA

SEQ ID NO: 19427 - DNA, 110 bp, synthetic construct
  source 1..110: mol_type = other DNA
aaggaacacacatggggacccaagtctactcctgaatcaattagtggtggaagaaacggatttttccttagaccagctggccccaattttaagttttaagatacagcccc

SEQ ID NO: 19428 - DNA, 110 bp, synthetic construct
  source 1..110: mol_type = other DNA
ctcttttaatttagcaatctgactacatcaggaccaaaaacagcacatactgggggtgatggagctggtgtgggaaccctggaatggcagcctccacgagttcaagtgaa

SEQ ID NO: 19429 - DNA, 110 bp, synthetic construct
  source 1..110: mol_type = other DNA
gtgatggagctggtgtgggaaccctggaatggcagcctccacgagttcaagtgaaggcgtcggtaggtaagaaagccagtgttgagttcctgctgtagtgcagtgggtta

SEQ ID NO: 19430 - DNA, 110 bp, synthetic construct
  source 1..110: mol_type = other DNA
aaatacttgttcaacgaagagctggtaaccgtttcgaacaagaagacagcaaatggacgtggctcttaatgctaatatttcgagatgatagtccccgggctgggtgcaga

SEQ ID NO: 19431 - DNA, 110 bp, synthetic construct
  source 1..110: mol_type = other DNA
tcctgattttatgcacccctccactttgccaccatcatagccatggacctaactgagggccaactccatgcttggtttcaagggttggttctaatccatctaaggtcatc

SEQ ID NO: 19432 - DNA, 110 bp, synthetic construct
  source 1..110: mol_type = other DNA
gggggccagccacagggctgagaggccgggtcacaaagcagagcagccactgcccagaactccccacatgacgtcagctgctgagagatgggactggtgtatgagccctg

SEQ ID NO: 19433 - DNA, 110 bp, synthetic construct
  source 1..110: mol_type = other DNA
tttcagtcaatggtcccctcatatcagggcttcctttctgtctcttccctctctagctcacagctctgagtttaggatgaactgagtcctgggtttcttgctataaccac

SEQ ID NO: 19434 - DNA, 110 bp, synthetic construct
  source 1..110: mol_type = other DNA
ctcaaggcttttagtttggggatgtgatgggcacaatattttcaccaaacccctttcactttcccctggtcccttggcctgaccatatctgccagccacccttgcaatta

SEQ ID NO: 19435 - DNA, 110 bp, synthetic construct
  source 1..110: mol_type = other DNA
actcttgtctccacatttctattaggctccagtggacagagtctgagtttccgagacagtctgaggacaggaagaaacccattaagccagttaaaatggctccaagcaag

SEQ ID NO: 19436 - DNA, 110 bp, synthetic construct
  source 1..110: mol_type = other DNA
acagttatcccatgctggtggttctcaatgctgctgcatgttagaattacctggtgaccttcaaaaaaatactggttccagctacagctatgtacagtatgatcctaact

SEQ ID NO: 19437 - DNA, 110 bp, synthetic construct
  source 1..110: mol_type = other DNA
ttagcccagatgctctgatgatggtgaggaatgggccagatgtgtggtgttcacggcataagcggcctgaaaaacatgtatctccgagagttcctacttgtccagaattg

SEQ ID NO: 19438 - DNA, 110 bp, synthetic construct
  source 1..110: mol_type = other DNA
agtctctgcccttcccagtctctaaggtcacctgtgtactggtttgtcctggcaggtctcctacgctgtactggaactctaccagtgaggggtgtggtccacttggctcc

SEQ ID NO: 19439 - DNA, 110 bp, synthetic construct
  source 1..110: mol_type = other DNA
ggatttgttaacctctgagccacgatgggaactccgagtgcacactttcgttatagctaaaaatgagttaaaatcgtctcgaagctgtaatgccgttctttgatccactc

SEQ ID NO: 19440 - DNA, 110 bp, synthetic construct
  source 1..110: mol_type = other DNA
taatagtgcaatggagcgatgagcagagatcagttctaacacgagcctataaggcagagctacccatagccaaaacattcctcgagagtcctttaaagaacacctgagct

SEQ ID NO: 19441 - DNA, 110 bp, synthetic construct
  source 1..110: mol_type = other DNA
agagctacccatagccaaaacattcctcgagagtcctttaaagaacacctgagcttatagaaattccaaggacagttggagagttttttgttttcattttgcttttattt

SEQ ID NO: 19442 - DNA, 110 bp, synthetic construct
  source 1..110: mol_type = other DNA
gcggagcacttgagttccatataggtcaaagtgtcaaggtcaaagctgtttcacctcccaccactcagtcttggcgtcaggatttatgggacagtaaatcctacataatg

SEQ ID NO: 19443 - DNA, 110 bp, synthetic construct
  source 1..110: mol_type = other DNA
aacgtcataagtaacgaattcaccattcttggcagatccattctctattttagtttcaggagtagaaaggctctttagttgttggtgtcagggggctgtcgcagctgcta

SEQ ID NO: 19444 - DNA, 110 bp, synthetic construct
  source 1..110: mol_type = other DNA
tcaggagtagaaaggctctttagttgttggtgtcagggggctgtcgcagctgctatttatgctaattcttgcttacctgcaaatatgcctgtgggtgtttagtgtctcaa

SEQ ID NO: 19445 - DNA, 110 bp, synthetic construct
  source 1..110: mol_type = other DNA
cctttcctcatccattggcctaaggcaaggaaggtggccaatgtctttgagatcctagagatggcagaagcctagatccccaagtgactgtgtggagtggaacccttccc

SEQ ID NO: 19446 - DNA, 110 bp, synthetic construct
  source 1..110: mol_type = other DNA
atttcccacccaagacagtggaatgaacacatagtttgatctcctttctgccacattaaaatgatagctaagggataaaatgatgaaatcaccctccacgagctatttaa

SEQ ID NO: 19447 - DNA, 110 bp, synthetic construct
  source 1..110: mol_type = other DNA
cccggcatccgggatggcaggaaaagcagtcaagtagctttgatggaaaacgtccctcgctgtgctcctcgggaacgttgagatgtgcacagtcctgaagggttgaggaa

SEQ ID NO: 19448 - DNA, 110 bp, synthetic construct
  source 1..110: mol_type = other DNA
cttgatttactgggaggaaaacctcttcttttggaatatatgggatgcgtctttagaacctcccaattcattggatccgggggctctccctcttttcatgatcatccctt

SEQ ID NO: 19449 - DNA, 110 bp, synthetic construct
  source 1..110: mol_type = other DNA
gaacctcccaattcattggatccgggggctctccctcttttcatgatcatccctttaagtcattcaactgagccccaaaatacctccataaaacaaggctacattgttga

SEQ ID NO: 19450 - DNA, 110 bp, synthetic construct
  source 1..110: mol_type = other DNA
aatacctaagaggcaggaggcatgattaaaccatgatccttggtaagaaccaacagaatcaactctacaggaaaggggcccatacatctgtcatcaaaatgtcccccttc

SEQ ID NO: 19451 - DNA, 110 bp, synthetic construct
  source 1..110: mol_type = other DNA
gcactgtcatctccaccacacctgcccttcttattcttcaaggccttctgatgcggacctaactcaagctcaagggtgagctatgctgactttgcctcccttggaacttg

SEQ ID NO: 19452 - DNA, 110 bp, synthetic construct
  source 1..110: mol_type = other DNA
gctgcatttgtaaggacaccgtgattaaggccaccagcaatgctgtgccctggcaagaaacttctagcttctctctgcttagcttggttttggttgggggcagaggggtg

SEQ ID NO: 19453 - DNA, 110 bp, synthetic construct
  source 1..110: mol_type = other DNA
cagaaggtcccatcagagggcagacaccgtgacctcagaaatttccaccccaatcctggccaactttagcacttcgactagactagctttggtggtacccaacgtcctca

SEQ ID NO: 19454 - DNA, 110 bp, synthetic construct
  source 1..110: mol_type = other DNA
acagaattacttctccggtgcacctgtgcccctcttgcttgctatgtgtcttaacttcttcatcctgacctgaacacttggcccatttcccatatttgcaggcaggcatc

SEQ ID NO: 19455 - DNA, 110 bp, synthetic construct
  source 1..110: mol_type = other DNA
attttcagaaaagatgcctaggctctcacctgcaccattaaaacatcacacatgatgaaaccaagtgtcttttgcaggctcatcaactgtgctgctggctgagagcaggg

SEQ ID NO: 19456 - DNA, 110 bp, synthetic construct
  source 1..110: mol_type = other DNA
tgaaaccaagtgtcttttgcaggctcatcaactgtgctgctggctgagagcagggaccctaattggttctcaaacagtcaaattaaggacatgctgcgttgtccctctca

SEQ ID NO: 19457 - DNA, 110 bp, synthetic construct; identical to SEQ ID NO: 19455
  source 1..110: mol_type = other DNA

SEQ ID NO: 19458 - DNA, 110 bp, synthetic construct; identical to SEQ ID NO: 19456
  source 1..110: mol_type = other DNA

SEQ ID NO: 19459 - DNA, 110 bp, synthetic construct
  source 1..110: mol_type = other DNA
aagccaacttggtctggatgacttggagatatttaaatggaagtgaacagctgataataaaacaggatagcattcaaagaatttcaagaggagtgaagtcagcaaagaga

SEQ ID NO: 19460 - DNA, 110 bp, synthetic construct
  source 1..110: mol_type = other DNA
ggctgcactgtgcttgtaaccagatctaaggagctgcttctaactccccactggtctcagcattcagaaaatcacagaaaatgaatgccaagaaagcaaaaaaatccaat

SEQ ID NO: 19461 - DNA, 110 bp, synthetic construct
  source 1..110: mol_type = other DNA
ggcaagattgtgaggatggcatagattcatatgagaaagtccatgcaagagtgcgttgtgcctctgtttggggagctttattctgtcctctctcagaaagagggagaaac

SEQ ID NO: 19462 - DNA, 110 bp, synthetic construct
  source 1..110: mol_type = other DNA
tgggggcagggatggcaggggagaggaagacagtgcaatggagagctggttggagaacaaatctctggagcaggaggcactgaaactccgcaatgccagacttgtacatc

SEQ ID NO: 19463 - DNA, 110 bp, synthetic construct
  source 1..110: mol_type = other DNA
aagaagcaggtgacgctgatgccaagccaccctgaaccacccccatggggcccacagcacgcagctggatcctgggctggtgacattcatggcgcagcaaagccagtaga

SEQ ID NO: 19464 - DNA, 110 bp, synthetic construct
  source 1..110: mol_type = other DNA
tgtcccttacaatcagtccctttctgttacatgtcaactgacatccggtgagcggtggcttccggccagctccgtcatctgagaagacacgaggtggggcccattcatgc

SEQ ID NO: 19465 - DNA, 110 bp, synthetic construct
  source 1..110: mol_type = other DNA
aacagaaggcctcctgcccgcaatcagcactgactccctgccccatgagctggtccctgtgaagtagggcctccagccctcatcaaaccttcatcaagcccatcatccag

SEQ ID NO: 19466 - DNA, 110 bp, synthetic construct
  source 1..110: mol_type = other DNA
gcagtaccagccaggagaaagaatcaaaaagagggtgggagtgatgggaacctatggaagaatcagggttagtatgtaaatctatttaaattcactttgaactgtctgga

SEQ ID NO: 19467 - DNA, 110 bp, synthetic construct
  source 1..110: mol_type = other DNA
ttgagtcttttttttttcttttctttttttctctttttggccatgacaccagcatgcagaagctctggagccaagagatcccattgtggctcagctgaaacaaacccagc

SEQ ID NO: 19468 - DNA, 110 bp, synthetic construct
  source 1..110: mol_type = other DNA
ggaactccatatgctgtggggcagccaaaaagaaaaaaaagaaagaaaaaaattacctattaacattagttatgtcaactccggagcggcatgtgtgaacagctttccca

SEQ ID NO: 19469 - DNA, 110 bp, synthetic construct
  source 1..110: mol_type = other DNA
cctattaacattagttatgtcaactccggagcggcatgtgtgaacagctttcccatcacctttggtccccagagcatcccccctcccagacagggagccccttttctgat

SEQ ID NO: 19470 - DNA, 110 bp, synthetic construct
  source 1..110: mol_type = other DNA
ttagggatccagccttgtcagtgctgtggctcgggctgcagctgtggcgtgggttcagcccttggccccagaacttccacataccgcagatgctggaaaaaaaaaaaaaa

SEQ ID NO: 19471 - DNA, 110 bp, synthetic construct
  source 1..110: mol_type = other DNA
cagcccttggccccagaacttccacataccgcagatgctggaaaaaaaaaaaaaaaaaaaaaaaaaagtgcaccctttcccagctgtcgctctttggctcacttgcatcc

SEQ ID NO: 19472 - DNA, 110 bp, synthetic construct
  source 1..110: mol_type = other DNA
ccgttagttggataagctctggggcccaagtgctgggtttggatcccagctcttctgctgctccctaattgtgttttctcagctgagtcacccactctgagccttagttt

SEQ ID NO: 19473 - DNA, 110 bp, synthetic construct
  source 1..110: mol_type = other DNA
agcgacagttcatccatcagactgggtggactccttccctctgggctggcaacgtgattgcgcttggggacttgcttcctgtggccccatgcgtcatcactccatataga

SEQ ID NO: 19474 - DNA, 110 bp, synthetic construct
  source 1..110: mol_type = other DNA
actacctccccacaggcttgttttaggggacactttgtcattcaaccaacatttgttggccctgactaaataccaggtgctagggttagagcaggggctgaggcaaggtc

SEQ ID NO: 19475 - DNA, 110 bp, synthetic construct
  source 1..110: mol_type = other DNA
gagaccagcaagtcaggttcttaatctccaagggcctccgtttctccacttgtaatgtggattttttggggggcatttatgagctccaaggccatacacttgtgttgctc

SEQ ID NO: 19476 - DNA, 110 bp, synthetic construct
  source 1..110: mol_type = other DNA
ccagaattacaacctcctcctgctccgattttctgtagcttttgttggggggcagtgtggaagtagaggaggaggaggtctggattccagtcaagcctgtgccctgatgg

SEQ ID NO: 19477 - DNA, 110 bp, synthetic construct
  source 1..110: mol_type = other DNA
agcgtgcttttctttcccaggactgcagtccggccactgccccctgttagcccggtcacctcgggcaagtcacctcactttgtcagtaagttggtctccttggagagtca

SEQ ID NO: 19478 - DNA, 110 bp, synthetic construct
  source 1..110: mol_type = other DNA
atgagctggaggtccgaaattatgtgaaatgtcctgatttttaaatcgtaggtcacataagaaacagtaacagcgaaacactttataggccagacagttcatatctgctc

SEQ ID NO: 19479 - DNA, 110 bp, synthetic construct
  source 1..110: mol_type = other DNA
cataagaaacagtaacagcgaaacactttataggccagacagttcatatctgctcttgaaatctgtcctcagccctcagtataagacctctggcatggagtatggaaagg

SEQ ID NO: 19480 - DNA, 110 bp, synthetic construct
  source 1..110: mol_type = other DNA
ctgttttgccctccagctgaattccagcccacagcgcaccctgcctttaagcgtactgtttgatcattcagctggctctgcgccctgcaggcagacactggattctgggt

SEQ ID NO: 19481 - DNA, 110 bp, synthetic construct
  source 1..110: mol_type = other DNA
ggagggaaagtcagaacaggctgcctccgttccgatgctgctggaaaaagcaggccaggaacagcatgctctcgcttggtctaagcagatctggggtgaatctacccaca

SEQ ID NO: 19482 - DNA, 110 bp, synthetic construct
  source 1..110: mol_type = other DNA
caggaacagcatgctctcgcttggtctaagcagatctggggtgaatctacccacaaatcctgggacctgaaagggatggagaccaggagaagacagagtagcctggcagc

SEQ ID NO: 19483 - DNA, 110 bp, synthetic construct; identical to SEQ ID NO: 19481
  source 1..110: mol_type = other DNA

SEQ ID NO: 19484 - DNA, 110 bp, synthetic construct; identical to SEQ ID NO: 19482
  source 1..110: mol_type = other DNA

SEQ ID NO: 19485 - DNA, 110 bp, synthetic construct
  source 1..110: mol_type = other DNA
ttttttttttaatttttgcaccacagtgggaattccaggcacatcttttaaaccagcctcaatggctctaatgaacacctgaacacctactgtgagtgggcgttgtgctg

SEQ ID NO: 19486 - DNA, 110 bp, synthetic construct
  source 1..110: mol_type = other DNA
gcctcaatggctctaatgaacacctgaacacctactgtgagtgggcgttgtgctggtcagatggcaggatttcagcatgtgcttagtaaaaggaaattctgttcttaact

SEQ ID NO: 19487 - DNA, 110 bp, synthetic construct
  source 1..110: mol_type = other DNA
gtccctgacgtgtcctcgacctgggtgctctctgcactttgcgaacttaggatgtgctaagggaggggagctggtctcttggcagatacgacttcatacttagagataca

SEQ ID NO: 19488 - DNA, 110 bp, synthetic construct
  source 1..110: mol_type = other DNA
atggtatttattgccaactgtcaaatccgagttttcatgtgaaaactgggattctggaaaactcttgtcaccatgagctcaacagcttcctaatgcctgaagacctttct

SEQ ID NO: 19489 - DNA, 110 bp, synthetic construct
  source 1..110: mol_type = other DNA
ggctaggagctgctacaaggctcagatgcagcatttcttgatttatgtgttcgcttgtgggtaggatattcctgtttttcctcacaggggtgttataaaaacaaacaatc

SEQ ID NO: 19490 - DNA, 110 bp, synthetic construct
  source 1..110: mol_type = other DNA
tgtgggtaggatattcctgtttttcctcacaggggtgttataaaaacaaacaatcaaaaatgatgtaagtggtgggaaagcactctgcctgtgcaagtggagatggtcca

SEQ ID NO: 19491 - DNA, 110 bp, synthetic construct
  source 1..110: mol_type = other DNA
catctatgcgattaaactcgtcaaagcagccccaagccccacattgagcaaggcccgagaaaatcttcccaacagcctaggacgacagaaatgtcaggacaagggcaatt

SEQ ID NO: 19492 - DNA, 110 bp, synthetic construct
  source 1..110: mol_type = other DNA
cgagaaaatcttcccaacagcctaggacgacagaaatgtcaggacaagggcaattttcatctttaacactgcaagcagtccatttatggatacaattttctaaagtaaag

SEQ ID NO: 19493 - DNA, 110 bp, synthetic construct; identical to SEQ ID NO: 19491
  source 1..110: mol_type = other DNA

SEQ ID NO: 19494 - DNA, 110 bp, synthetic construct; identical to SEQ ID NO: 19492
  source 1..110: mol_type = other DNA

SEQ ID NO: 19495 - DNA, 110 bp, synthetic construct
  source 1..110: mol_type = other DNA
agaaatgaacactcatgtcctcactctccccagacccgactccatcctttccaagatcaaataaggggtgacactggggcagacagtggtcttctggctccccccatccg

SEQ ID NO: 19496 - DNA, 110 bp, synthetic construct
  source 1..110: mol_type = other DNA
aggatgcccacaacgcttttggcctgagcagtcaaaggacggagctgccacttatgagatggacaagcctgaaagggcagctttgagatggaagactgggagttcagctt

SEQ ID NO: 19497 - DNA, 110 bp, synthetic construct
  source 1..110: mol_type = other DNA
cattgatttatcctttcagataaactgtttactttcttaaatccccctactcttccaggaaaagaaaaaactgattaacattttgagattgcagtgaatttacagttaat

SEQ ID NO: 19498 - DNA, 110 bp, synthetic construct
  source 1..110: mol_type = other DNA
aaaaggagttcctgctgtggtacagtgggatcggctgtatctctgcagcacctgtgcagcaccaggatgcacatttgattcccagagctggcacagtggattaaaggatc

SEQ ID NO: 19499 - DNA, 110 bp, synthetic construct
  source 1..110: mol_type = other DNA
gcagcaccaggatgcacatttgattcccagagctggcacagtggattaaaggatccggcgttgccaaagctgcggtgtggattgaagttgagagtcagatctgatccctg

SEQ ID NO: 19500 - DNA, 110 bp, synthetic construct
  source 1..110: mol_type = other DNA
cgctctccttattgaagagatctttgagcgccagtgagacttttcgttctcaggttcactgtgagaaattgattttgttttgttttttttccttagaaaatgcgtatgct

SEQ ID NO: 19501 - DNA, 110 bp, synthetic construct
  source 1..110: mol_type = other DNA
gtttccactgtaccatggcaggaacttctggagctttttaaaatatcaaaagcctaaggctactcagtcgaagacattttggcgttttgaaaacataatttactagattt

SEQ ID NO: 19502 - DNA, 110 bp, synthetic construct; identical to SEQ ID NO: 19501
  source 1..110: mol_type = other DNA

SEQ ID NO: 19503 - DNA, 110 bp, synthetic construct
  source 1..110: mol_type = other DNA
cctcaaaagcactagtatcgactccatgtcacagagaaggaaagggcacgaagagaggttaggtaacccgctcaaggttacacagctgctaagtggctggaaccagaggt

SEQ ID NO: 19504 - DNA, 110 bp, synthetic construct
  source 1..110: mol_type = other DNA
agccgggtgaaggtagtcaccattattacctcctccacagatagggaaaataatgctcagaaaagtgagaagcttggccaaattctcagaactagaaatagatttccagg

SEQ ID NO: 19505 - DNA, 110 bp, synthetic construct
  source 1..110: mol_type = other DNA
ctcagaaaagtgagaagcttggccaaattctcagaactagaaatagatttccaggccaacagaccccagaggctgtagtcttagccactatcttcctggttacagatgag

SEQ ID NO: 19506 - DNA, 110 bp, synthetic construct
  source 1..110: mol_type = other DNA
attcattgcctatttcagggtcttagattttctgaagtatagttgatttacaatgttgtgatatcaatcaggatttttttttaaatttatttttgtggccacacccatgg

SEQ ID NO: 19507 - DNA, 110 bp, synthetic construct
  source 1..110: mol_type = other DNA
ttgtgatatcaatcaggatttttttttaaatttatttttgtggccacacccatggcatatgaacattcccaagctaggggccattttggagctgcagctgccagcctaaa

SEQ ID NO: 19508 - DNA, 110 bp, synthetic construct
  source 1..110: mol_type = other DNA
ttcctcctctggcaccctggggcagttgaactgcgccgtttgcagcagcagctttcaggactccatcagacagactgcgcccttggagtgcagagcaagggatgccactg

SEQ ID NO: 19509 - DNA, 110 bp, synthetic construct
  source 1..110: mol_type = other DNA
ttttacttagtcttctgcagccagctcttcctggtctcctaagtactgagacataaatttgacagaaatttgagcaggtaagagttttagaagagacatttgttgcaaaa

SEQ ID NO: 19510 - DNA, 110 bp, synthetic construct
  source 1..110: mol_type = other DNA
tgcagttccttccatgtggccttttttaagcttctttgcagcacgatggctgaatactaaggacaaatgtcctaaaagagccttctaacagccacagtgccttttatgag

SEQ ID NO: 19511 - DNA, 110 bp, synthetic construct
  source 1..110: mol_type = other DNA
tgatcacccatgcccccagaatgtctggtcagcccttgggttggcaaggctcaaataagacaggtacttctgaaataagttttgtagagagtttgtgacagagttcccat

SEQ ID NO: 19512 - DNA, 110 bp, synthetic construct
  source 1..110: mol_type = other DNA
taagacaggtacttctgaaataagttttgtagagagtttgtgacagagttcccattgtagctcagtggattaaggacctgacatagtcccttcaaggatgtgggttccat

SEQ ID NO: 19513 - DNA, 110 bp, synthetic construct
  source 1..110: mol_type = other DNA
agacgctgtcaagaaacccagtttgttcttccagggacatggcagggagggtatgctattcttggagaatcctttcattgctccaaggagcagctaacggagcagtttgt

SEQ ID NO: 19514 - DNA, 110 bp, synthetic construct
  source 1..110: mol_type = other DNA
gatccaagacgagcttcttggcagcccaagtggagactagctgggcaaggagacagggaggacagtgcagctgtgggacacccaggcctgcctctcgcccccaggcactg

SEQ ID NO: 19515 - DNA, 110 bp, synthetic construct
  source 1..110: mol_type = other DNA
gtaagagcgaaaagttaaaacaagtgcccatcaaccaggaattgggtgaatacagtacgtgtttattccagacacagtccatctgagctgtgaacactaggcagcagcca

SEQ ID NO: 19516 - DNA, 110 bp, synthetic construct
  source 1..110: mol_type = other DNA
ggggaggggtgggagaagccccccagcctgtggagccgccatctgcccagatgacccggggagaggggacaaggacgtccagtcagggcgcagagtgggactgagaccac

SEQ ID NO: 19517 - DNA, 110 bp, synthetic construct
  source 1..110: mol_type = other DNA
ccggggagaggggacaaggacgtccagtcagggcgcagagtgggactgagaccaccacctatgtctagaaaagcctcagggccttaggacagtcccctggggtcaggcca

SEQ ID NO: 19518 - DNA, 110 bp, synthetic construct; identical to SEQ ID NO: 19516
  source 1..110: mol_type = other DNA

SEQ ID NO: 19519 - DNA, 110 bp, synthetic construct; identical to SEQ ID NO: 19517
  source 1..110: mol_type = other DNA

SEQ ID NO: 19520 - DNA, 110 bp, synthetic construct
  source 1..110: mol_type = other DNA
tgtgaacagaggtcacttttcagctacagagatgtgacagaattctcatctggaggatgtgaggggatgtttttctgaaaaacggctagtaattccactcctaggtatgc

SEQ ID NO: 19521 - DNA, 110 bp, synthetic construct
  source 1..110: mol_type = other DNA
gatgtgaggggatgtttttctgaaaaacggctagtaattccactcctaggtatgccccgcaaagaactcaaagacacgcccaggcgcattcacagccacactcgtcatag

SEQ ID NO: 19522 - DNA, 110 bp, synthetic construct
  source 1..110: mol_type = other DNA
ttcattaatttagaaattaagagcaaggttgggaaggattcttcgctgagttccgtagctgaaaaggaaacaaagacagcatgatttatttaagaaaaaggtcttggcta

SEQ ID NO: 19523 - DNA, 110 bp, synthetic construct
  source 1..110: mol_type = other DNA
taaagaatagtattattttatttgggctcaaatattttttaaaaacagttcaaacatttgtttctgcagtgcctccttcagtaaaaaaaaatcccctggagaagtggcct

SEQ ID NO: 19524 - DNA, 110 bp, synthetic construct
  source 1..110: mol_type = other DNA
aggaaagaccagtctgtgtcactggctgactgtgagtcacctggcctattttgcgaatggttagagctttttcgatgaatgcgaccaatagaaactgtcctgtggggtgg

SEQ ID NO: 19525 - DNA, 110 bp, synthetic construct
  source 1..110: mol_type = other DNA
ggttgagcttgccttctccacacagctctccctacgagccttcagttcttccttttatctcaggaatagcagagcaggaaagtggtttctctgttaggcaggaggttcag

SEQ ID NO: 19526 - DNA, 110 bp, synthetic construct
  source 1..110: mol_type = other DNA
ttaatgagtccttcccctgatttaaggttctttaggggaaaaagaagtattttgggggtgagcgaaactcagtatccattgtgttttcctccagcatctcaaaacagtga

SEQ ID NO: 19527 - DNA, 110 bp, synthetic construct
  source 1..110: mol_type = other DNA
gggacctagtctagccccctgtatcctcagtgcctaaacagtgcctggctcagcagcgcttgttcagtgtccagcagagggtgggcaagggagggaaccatcctctttgc

SEQ ID NO: 19528 - DNA, 110 bp, synthetic construct
  source 1..110: mol_type = other DNA
gcgcttgttcagtgtccagcagagggtgggcaagggagggaaccatcctctttgcgtgctcagggtctcccgggtgcccctgcccgcaggtcctcgggcctcccgcgcag

SEQ ID NO: 19529 - DNA, 110 bp, synthetic construct
  source 1..110: mol_type = other DNA
tgcgaggagagagctgatgagtgagccagcccccaccacccatcaccccgccctgccccgccccaagagcaagttaccaacatgtgacagctaattcctttttgtttatt

SEQ ID NO: 19530 - DNA, 110 bp, synthetic construct
  source 1..110: mol_type = other DNA
ccccgccccaagagcaagttaccaacatgtgacagctaattcctttttgtttattcttttcacatgtccctttcccagatgacacctgctatgccagcccttgtttccct

SEQ ID NO: 19531 - DNA, 110 bp, synthetic construct
  source 1..110: mol_type = other DNA
tttgcatcctgagagaaacaaccacaaaataagttcctcactggagggggtggaaggaggtgggtgcaggttccagtgccttctactgggtgttctcgacaccccacccc

SEQ ID NO: 19532 - DNA, 110 bp, synthetic construct
  source 1..110: mol_type = other DNA
aaaaacaactttaaaaagttatcaggagtttcacagctcagctgtaacaaacctagctagtatccatgaggacgcagtttgattcctagcctcactgaggaggttaagga

SEQ ID NO: 19533 - DNA, 110 bp, synthetic construct
  source 1..110: mol_type = other DNA
aagatacttacctgaggtcacacagctctggagtgctggagctctgaagattacaggagaggttgctttcgaagtccaacatggatgttagcctctgtctatctccttgt

SEQ ID NO: 19534 - DNA, 110 bp, synthetic construct
  source 1..110: mol_type = other DNA
atagatgaggaaactgagacttggagagattcagaaacctgaccaagcctcaacagctggcaggtagttacagtcaggagccaagcccagggccacctgacccaggagcc

SEQ ID NO: 19535 - DNA, 110 bp, synthetic construct
  source 1..110: mol_type = other DNA
actctcatatccattattcaatgcttagctaaaaccagaagatcctctttccttctcttgggacatttatcaccttctaccctgtgtcccggggtctccccaactggttg

SEQ ID NO: 19536 - DNA, 110 bp, synthetic construct
  source 1..110: mol_type = other DNA
ccactactattgctccctttccacagatggggagactgaggcttagagaaatacgtaactttctgcagttacaaagaacatagcagctccaggatttaaacccccatacc

SEQ ID NO: 19537 - DNA, 110 bp, synthetic construct
  source 1..110: mol_type = other DNA
ctggttggtgacctaggcagtttcccacccctccaggagtcatggtctcccccatgttagccaggaagagggagttgctggataaccttttagctgtttcccagtatggc

SEQ ID NO: 19538 - DNA, 110 bp, synthetic construct
  source 1..110: mol_type = other DNA
ctatacagcacagggaatacagccaatattttatgatgactatacatggaatacaaccttatttgctggaacacttgctcctgaaacttacataacatcgtaaatcaatt

SEQ ID NO: 19539 - DNA, 110 bp, synthetic construct
  source 1..110: mol_type = other DNA
agatcaaggggacagcaaggggcagagctcgttccctccctcaatcctctggcttttccactgaggcctggggtgctgagggcctgcttagggcctccaaaaatttcttg

SEQ ID NO: 19540 - DNA, 110 bp, synthetic construct
  source 1..110: mol_type = other DNA
tagtttttttatcctcatcaggaactggcaattctaaacaatgtcagaactcattgcctgcagcctttggttgcctcttggatgcgccatgtgaagtccacacctgagtt

SEQ ID NO: 19541 - DNA, 110 bp, synthetic construct
  source 1..110: mol_type = other DNA
attggacccctagagccagctcccagcccctcgttgcccctggctggggttgcctcgtactggaggctggggagggagggagctggatttagcatcacctcgaagcatca

SEQ ID NO: 19542 - DNA, 110 bp, synthetic construct
  source 1..110: mol_type = other DNA
gttggaagatagttgtgctggttttggtatgtgataccagtggttttgaaaaaatcttgacagaaattttagtttcatgccgtggcttacgacaagaacagagagggcag

SEQ ID NO: 19543 - DNA, 110 bp, synthetic construct
  source 1..110: mol_type = other DNA
cttgacagaaattttagtttcatgccgtggcttacgacaagaacagagagggcagcttgggaagctgggtagcagctgtccacaagggtcctgcagctgcagagccagct

SEQ ID NO: 19544 - DNA, 110 bp, synthetic construct; identical to SEQ ID NO: 19542
  source 1..110: mol_type = other DNA

SEQ ID NO: 19545 - DNA, 110 bp, synthetic construct; identical to SEQ ID NO: 19543
  source 1..110: mol_type = other DNA

SEQ ID NO: 19546 - DNA, 110 bp, synthetic construct
  source 1..110: mol_type = other DNA
gagcaggggacccagccccccaaacccaccctgctctgcgaggcgatttctagagtgtgacacagatcttgtcacgatatccattatcatgactaacctgaggcgtcact

SEQ ID NO: 19547 - DNA, 110 bp, synthetic construct
  source 1..110: mol_type = other DNA
tgtgacacagatcttgtcacgatatccattatcatgactaacctgaggcgtcactaagtaaagcgaggctaaattttaatttagagtccatttgagaaagttatgcagta

SEQ ID NO: 19548 - DNA, 110 bp, synthetic construct
  source 1..110: mol_type = other DNA
agagttatgtagggtgagggccagaagggtcctgagtgcagaagcttttgtactgctggagttggggtgcaccacgctcccaaaatatgcatgttttcttctgtacggag

SEQ ID NO: 19549 - DNA, 110 bp, synthetic construct
  source 1..110: mol_type = other DNA
cagccccagccaccatttgactgcaaccccataagagacccccagcagatcccaagatcagcagaactgcccaactgagcttggtaaaccactgaactgtgagacttggt

SEQ ID NO: 19550 - DNA, 110 bp, synthetic construct
  source 1..110: mol_type = other DNA
tggcagatcaacccatgacctagcccaatcagcttaagaccaccagacacaaaactgccatccaacaaaatcaggtttattgacccattcaatgaggaagaatacaggag

SEQ ID NO: 19551 - DNA, 110 bp, synthetic construct
  source 1..110: mol_type = other DNA
tagcctaaaaagaaatacctataaaaacaaaaagtaaccattatcaagtgtggtacacaagaattgaatattgtccacattgccatgcctcacaaatgtctactgttaat

SEQ ID NO: 19552 - DNA, 110 bp, synthetic construct
  source 1..110: mol_type = other DNA
tgaggtattggttattttcagtttagagctaatacaaagttgagggatagtcagtcagacccaagcctgagtctactaacatcttagattttaaaaagcactcaccagtc

SEQ ID NO: 19553 - DNA, 110 bp, synthetic construct
  source 1..110: mol_type = other DNA
aatatctgaccattccctccctgaatttaaaagctctgaaatacagaaaaatcagaaccaaattgaagattgaattaatgaaataaagctacttcttgaacagtatggct

SEQ ID NO: 19554 - DNA, 110 bp, synthetic construct
  source 1..110: mol_type = other DNA
tacttgcatacctactggcaacaaaagaatttctcctctctgagttcccatcatggctcagttgttaatgaatccgactaggctgcgggtttgatcccttgccttgctca

SEQ ID NO: 19555 - DNA, 110 bp, synthetic construct; identical to SEQ ID NO: 19554
  source 1..110: mol_type = other DNA

SEQ ID NO: 19556 - DNA, 110 bp, synthetic construct
  source 1..110: mol_type = other DNA
acgtggaggaaacgtgtattaccagtggggttttttagcttttaaatcaaaataataattacaaatgtacaatttagcttaatggatcagaaatcctctccagagaagtt

SEQ ID NO: 19557 - DNA, 110 bp, synthetic construct
  source 1..110: mol_type = other DNA
tatatatttgagggcccactgtatgcaccttatggtttcgggcactggggctacaagaatgataagcaaggcccaagaccatgttaagaaaaatttaaacagcaatataa

SEQ ID NO: 19558 - DNA, 110 bp, synthetic construct
  source 1..110: mol_type = other DNA
agaatgataagcaaggcccaagaccatgttaagaaaaatttaaacagcaatataagacagacagataatgaatggttcgggaagaagtcttcgaggaacttgtgataaaa

SEQ ID NO: 19559 - DNA, 110 bp, synthetic construct; identical to SEQ ID NO: 19557
  source 1..110: mol_type = other DNA

SEQ ID NO: 19560 - DNA, 110 bp, synthetic construct; identical to SEQ ID NO: 19558
  source 1..110: mol_type = other DNA

SEQ ID NO: 19561 - DNA, 110 bp, synthetic construct
  source 1..110: mol_type = other DNA
gctgtagtttgcttcacccacagcccataatgctcccatcctctgtgtccccagtcattccctatgaccttcctaaaaaatgcttacctctcacattcaatccgttgtca

SEQ ID NO: 19562 - DNA, 110 bp, synthetic construct
  source 1..110: mol_type = other DNA
tcagaatcctctgagctggaacctggacatccgcatttttttaaacaagcactgcagtccgcttggaaacttcatcggttattcacaagccctaggtctccaccgacttc

SEQ ID NO: 19563 - DNA, 110 bp, synthetic construct
  source 1..110: mol_type = other DNA
gttttagagctaaaggatctaagagctcatctggtttaaaaccaaggcacagaaatactaaaagcaatctgaatagggcgttcccattatggctgagcagaaatgaaccc

SEQ ID NO: 19564 - DNA, 110 bp, synthetic construct
  source 1..110: mol_type = other DNA
gtggtaagtaactttaccccattttccagacaaggtaactgaggctcagggaggtcaagggcctggccagatgactgggggccattaaaaaatgcaaagctgggctttga

SEQ ID NO: 19565 - DNA, 110 bp, synthetic construct
  source 1..110: mol_type = other DNA
caagggcctggccagatgactgggggccattaaaaaatgcaaagctgggctttgaacgatctgtttccgattatcaagctatcttgaatccttcaaagattttacctttg

SEQ ID NO: 19566 - DNA, 110 bp, synthetic construct
  source 1..110: mol_type = other DNA
tgtaaggttgcaatttcccacatgtcacaagcctggcttaggagactgcacccaggacagttaggaagggtggccatctctgtgcatcccatatgacagagcaggcctct

SEQ ID NO: 19567 - DNA, 110 bp, synthetic construct
  source 1..110: mol_type = other DNA
gggcaaccaatgggttaactagctttgcatcagtagaccacagctggtccaaatagggattcaccgggtctagagacccagcagggagggagaagggaggggagcaggac

SEQ ID NO: 19568 - DNA, 110 bp, synthetic construct
  source 1..110: mol_type = other DNA
cttccaaaacttgaaagtgcatacagatcacttgaagatcttgttacaaagaagattcagtaggtcctgggttggggcctgagctgctgcatttctccaagcttccaaag

SEQ ID NO: 19569 - DNA, 110 bp, synthetic construct
  source 1..110: mol_type = other DNA
actcctgggacatttctgtggtttatttctattctggcggtgggccattctctggtaggccactgggggcagcaaagcacatgctgcccattgagtctctccattacagc

SEQ ID NO: 19570 - DNA, 110 bp, synthetic construct
  source 1..110: mol_type = other DNA
taggccactgggggcagcaaagcacatgctgcccattgagtctctccattacagcaacctctccctggaccctggtatggggaatgtagacttgtaggtagggctcaagt

SEQ ID NO: 19571 - DNA, 110 bp, synthetic construct
  source 1..110: mol_type = other DNA
aaaatccttgacctcccggagctgaccttttgactggggtgggggtaagagctaatggatgataaacataataaattagaaaattgtatattcgggagttcccatcatgg

SEQ ID NO: 19572 - DNA, 110 bp, synthetic construct
  source 1..110: mol_type = other DNA
aacaaacaaaaaaccactgtattgggagagaagccttactcagaagagcatgtcgtatgattccatatagctgaagttctagaatatgctaaactaacctacattaagag

SEQ ID NO: 19573 - DNA, 110 bp, synthetic construct
  source 1..110: mol_type = other DNA
ctggggcagcccccctctaatcagacacattagtaattccaccatgaaaggtatcagtgttcccataaagtgggatgaataaggtttatagatagcttcatatccattta

SEQ ID NO: 19574 - DNA, 110 bp, synthetic construct
  source 1..110: mol_type = other DNA
agtgttcccataaagtgggatgaataaggtttatagatagcttcatatccatttacatcaggttttgccacccaatgtgttagcaataaaaactcacaattttcagagcc

SEQ ID NO: 19575 - DNA, 110 bp, synthetic construct
  source 1..110: mol_type = other DNA
gcagggttatcccaaccccgtctcagccagttcaagaatggacatgtgatatttcacggtgctcttaatttctgagctggctcccactctgtctagggaatgtgtatctc

SEQ ID NO: 19576 - DNA, 110 bp, synthetic construct
  source 1..110: mol_type = other DNA
tgagaaaactacatctatcccattttacatttgagcagactgaagcatagaaggttaaatccaaggccacattgtcagcaagcagcagagcctgaacttgaacccaggac

SEQ ID NO: 19577 - DNA, 110 bp, synthetic construct
  source 1..110: mol_type = other DNA
catgctataacagggcacatccagggagcctgggaagctttctgcaggaggtagtacctaagctgagagctgaaagatgcctgggctttgccaggtgagtgagaaacagg

SEQ ID NO: 19578 - DNA, 110 bp, synthetic construct
  source 1..110: mol_type = other DNA
gggtcctgaggagaattagcttcaccttgaatgatagctgcttcagggaaaggccatggcagtttcttcaggcagtgcatggttgatcccctcaggtgggatggagaagc

SEQ ID NO: 19579 - DNA, 110 bp, synthetic construct
  source 1..110: mol_type = other DNA
catggcaagatgtaatatttctgctctcctggcctccaagcccagagctgcctaagcaagggcctctctctgcccagcagccccctctggccccagttccttcttgcctt

SEQ ID NO: 19580 - DNA, 110 bp, synthetic construct
  source 1..110: mol_type = other DNA
agattaagatcagccaaatcctgtgtcccagaagcaggcagaggccttgccctgaaactcagggactgagacagagctggggtcaggggctgggaggtgcttattttttg

SEQ ID NO: 19581 - DNA, 110 bp, synthetic construct
  source 1..110: mol_type = other DNA
cctacgacggcggggagagggtttgagatcaaattaaatcaggggtggcaacttcagtgtctcgagtggccaggcaagcagccagtctggctgggttaggtactacagtg

SEQ ID NO: 19582 - DNA, 110 bp, synthetic construct
  source 1..110: mol_type = other DNA
gcctcccgcaggtgcagctctgggttttcctgagtcttggagagaattctggaggctatagctatgaggccttgcttaaccatcacagccttgctttcttcatctgtcaa

SEQ ID NO: 19583 - DNA, 110 bp, synthetic construct
  source 1..110: mol_type = other DNA
ctatagctatgaggccttgcttaaccatcacagccttgctttcttcatctgtcaaatgggtgtggtaataggacctacttcttagggtcattgggaccatacattagtaa

SEQ ID NO: 19584 - DNA, 110 bp, synthetic construct
  source 1..110: mol_type = other DNA
cctcccccagctggggtgtgcggcctggaaggtgagcgcagctggtgaagatattggtggctcataagccccttggttcactagttcacctatgctgacaagggggtgca

SEQ ID NO: 19585 - DNA, 110 bp, synthetic construct
  source 1..110: mol_type = other DNA
gaaagaatttcactagccagagtaacctcaaaagaaatatgatgggctagttttagtaaaaatatgttcattaaagataagaacccaaagccaattttttgtgaatctca

SEQ ID NO: 19586 - DNA, 110 bp, synthetic construct
  source 1..110: mol_type = other DNA
ccaaacccatcaacacacagttttctgtcttaacttgttcactgattttcaaacatgctaataacatgctaataacagctcaaagtttcttaaaattttttggccacacc

SEQ ID NO: 19587 - DNA, 110 bp, synthetic construct
  source 1..110: mol_type = other DNA
ccactgaaaaaatccacatctaagtggatctgtgcagttcaaacccatgtggcttaagggtcaactgtattacccaaataatctgaagatacttgtaacagctgattcta

SEQ ID NO: 19588 - DNA, 110 bp, synthetic construct
  source 1..110: mol_type = other DNA
aagggtcaactgtattacccaaataatctgaagatacttgtaacagctgattctaggtgcttgggttttttcccctccaaactcactattaattttcttatgtaccatta

SEQ ID NO: 19589 - DNA, 110 bp, synthetic construct
  source 1..110: mol_type = other DNA
cctcgcggtggtaaacctgggcccttctcgacgggatctcgtagaggtcgtggaagaggcccgtctggaggatcaccggtcctcgttaggcaggtcggtgggtttgcgcc

SEQ ID NO: 19590 - DNA, 110 bp, synthetic construct
  source 1..110: mol_type = other DNA
taatcactgtcacaaatgtaatctctcagcatcaaagaccaaaagccctggcaaaacaggcttttaattgaaaaggacaaattctaatctgcttttgtttctggaggagg

SEQ ID NO: 19591 - DNA, 110 bp, synthetic construct
  source 1..110: mol_type = other DNA
acaggcttttaattgaaaaggacaaattctaatctgcttttgtttctggaggagggtcattaatcagtgtcagatccctattgctagttaaatgaaaaatatttcagaag

SEQ ID NO: 19592 - DNA, 110 bp, synthetic construct
  source 1..110: mol_type = other DNA
atacctgggagtcaaaaaaacaaatatccattctctttccttttgtgcttcttacaagcagagctgtataaacacttaaaatacctattacatgttgtgtcaaactcata

SEQ ID NO: 19593 - DNA, 110 bp, synthetic construct
  source 1..110: mol_type = other DNA
ctattggctgtgagccaagatactgctaaatatcctacaactcccggtgtgatagactagctacacttcttcctaaaacacaggaacgtgcataatttaaaaaataaatg

SEQ ID NO: 19594 - DNA, 110 bp, synthetic construct
  source 1..110: mol_type = other DNA
tcagaatggaatgatctggatgtcagctccaaagtcagctgagatggggatcctgttgcccacgtcctgttataaacccatctacacgccaataagcacgttggaccaaa

SEQ ID NO: 19595 - DNA, 110 bp, synthetic construct
  source 1..110: mol_type = other DNA
tctccccgttctctctgtctgacttgtcttgcatctcctgacctctctctcgccttcctttctctgacgaacttcatgaaagaagagcctacattcagtgcttctttttc

SEQ ID NO: 19596 - DNA, 110 bp, synthetic construct
  source 1..110: mol_type = other DNA
gtgtacagcttaataagtagtaagccctgtcactttgtagctcagtgatatccgcgtagttcccgaatggcttgtctgtaaggtggaggtcacagtcgtaccatccttgt

SEQ ID NO: 19597 - DNA, 110 bp, synthetic construct
  source 1..110: mol_type = other DNA
tcctgtcaataacctttggaaaggccagcgctggctgtgttctgacacgtagttggggagctggtcctcctcagggcccaggaggttgtgctgttgcctgctatctggat

SEQ ID NO: 19598 - DNA, 110 bp, synthetic construct
  source 1..110: mol_type = other DNA
gggagctggtcctcctcagggcccaggaggttgtgctgttgcctgctatctggatgggatccattagatcagtgcatttgcctgtcagagaaggttgtcccgtccctaga

SEQ ID NO: 19599 - DNA, 110 bp, synthetic construct
  source 1..110: mol_type = other DNA
tggagacccttctgctcttcagctaaaacagttaggctagttgggtgcaatgtcatgtaggaactcattcagcagatcagatgcgaaggcagagtgagtaataacctaaa

SEQ ID NO: 19600 - DNA, 110 bp, synthetic construct
  source 1..110: mol_type = other DNA
ggggctaactgcaccctcaaggggctcacacacacaaatcggtgcaaagaagtaaaggtgctctgagagaaatctgctgagtgtagtgggtacaagatagggtgagggca

SEQ ID NO: 19601 - DNA, 110 bp, synthetic construct
  source 1..110: mol_type = other DNA
aggtgctctgagagaaatctgctgagtgtagtgggtacaagatagggtgagggcaagagggcaataagaaagactttaggaaggaggtgattttccagctgagctttgaa

SEQ ID NO: 19602 - DNA, 110 bp, synthetic construct
  source 1..110: mol_type = other DNA
acaaaaaaaatccatttcattatgtgtgatatcttgaaaaaaaatgtcatgagcgtcacccacatgtttggcaagcacagtgtgagaaaagtttgtagagtgagtacaag

SEQ ID NO: 19603 - DNA, 110 bp, synthetic construct
  source 1..110: mol_type = other DNA
agaacttttcatgctgctcccttaataggcttctagggaggtagccttttggctattcagttttcagagcccagaggtgtttttcgtagcacatatcagcttttgggact

SEQ ID NO: 19604 - DNA, 110 bp, synthetic construct
  source 1..110: mol_type = other DNA
ttcagttttcagagcccagaggtgtttttcgtagcacatatcagcttttgggactgggccttgccaaatatttacaaatatccccaaagagctcttaacttggcaaacag

SEQ ID NO: 19605 - DNA, 110 bp, synthetic construct
  source 1..110: mol_type = other DNA
aatgatggagagtagatttaaatgcctccttttctcgcgagggcttatttgccaaatatcgctgggaacctaccgtgggccagccagtaggtcaagctggagagaggaag

SEQ ID NO: 19606 - DNA, 110 bp, synthetic construct
  source 1..110: mol_type = other DNA
atatcgctgggaacctaccgtgggccagccagtaggtcaagctggagagaggaaggttctagaagcagccagtgaacagagcgtgtaaaaacccccttctctcacagaac

SEQ ID NO: 19607 - DNA, 110 bp, synthetic construct
  source 1..110: mol_type = other DNA
atgtgaaaaacagaagcttctattatgaagtatattctgcatattcagaaaaaagcaaaaaattagaggttgataatcattgcaggtggccaaggcagctgatctggaga

SEQ ID NO: 19608 - DNA, 110 bp, synthetic construct
  source 1..110: mol_type = other DNA
caaaaaattagaggttgataatcattgcaggtggccaaggcagctgatctggagagctgaattttaatacataatgatgcaaatgtacctccccttctaccattcctcct

SEQ ID NO: 19609 - DNA, 110 bp, synthetic construct
  source 1..110: mol_type = other DNA
ctggaccagaagaggccacgtggccttctgtcatcctgtccaccttctgagggaagctccattaaatgagatctcaattccttgctgtgtccattcactgaaaacatcac

SEQ ID NO: 19610 - DNA, 110 bp, synthetic construct
  source 1..110: mol_type = other DNA
ctcccaatctagctttcaacagagaactagaccctggagctctgcaaccttccgtctactcaggtgcaaaaggggttaataactacacctctataattgcatcaattaaa

SEQ ID NO: 19611 - DNA, 110 bp, synthetic construct
  source 1..110: mol_type = other DNA
ccaccctccaagtctcccaatgcctccacctcctgatggccctgccgggaccagatgatgtattcttctggctgatcaggaggacaggctgtgactacgtagaggggagg

SEQ ID NO: 19612 - DNA, 110 bp, synthetic construct
  source 1..110: mol_type = other DNA
catttattgagcactgcctgtataccaggccctgtgcccagcattttcattcatcacctaaatgaatccttatggttcagagaggtgaaggcacctgccctgggccacac

SEQ ID NO: 19613 - DNA, 110 bp, synthetic construct
  source 1..110: mol_type = other DNA
acctaaatgaatccttatggttcagagaggtgaaggcacctgccctgggccacacagctgctgaggatgacaactagagccagtgggacctgggagcccacagtcacaac

SEQ ID NO: 19614 - DNA, 110 bp, synthetic construct
  source 1..110: mol_type = other DNA
ccatggggcccaactgggtccctgcagctaatatctctgagctgcctggcccccgaggcatctcagttggtgaccctctggtctaagtgttggctgatatctggatctat

SEQ ID NO: 19615 - DNA, 110 bp, synthetic construct
  source 1..110: mol_type = other DNA
ttaccaagcacctactcgatgccagacacccagctaagcccttctcatgcgtcatctcatttagatgccaaagaaacccagaagaaggcccagccatccccactatgaag

SEQ ID NO: 19616 - DNA, 110 bp, synthetic construct
  source 1..110: mol_type = other DNA
ggaacagttcctgagtcccaggtcactgggatttgtcctagaggtttctccaagatgggcaggtactaatgggcagctgcccaccgccaccagtatgttccacacagaga

SEQ ID NO: 19617 - DNA, 110 bp, synthetic construct
  source 1..110: mol_type = other DNA
tgggcaggtactaatgggcagctgcccaccgccaccagtatgttccacacagagaaggcacatggctcactgctggtttcctgctgcaagcacccctaccccccgacccc

SEQ ID NO: 19618 - DNA, 110 bp, synthetic construct
  source 1..110: mol_type = other DNA
cctgggaagggactatgtgaggtagcctttctcaaaaatgcgtggccacataatatttttatggtctagtagctaatcgtgcatggagtagctgggaaacatagctccat

SEQ ID NO: 19619 - DNA, 110 bp, synthetic construct
  source 1..110: mol_type = other DNA
tgattttcctcctggaaacttagtttgccttataagtgggcccagattctaagaaagctccagctaacccaaagcccagaataacttcgaaagcatttaatctttcctct

SEQ ID NO: 19620 - DNA, 110 bp, synthetic construct
  source 1..110: mol_type = other DNA
aagcatccgcacatctgcttattaccaggcttccctactaaagctcaagctacgtgtggaggcacaataactgtttgttccttaatgtctctctggtgcctagaacagtg

SEQ ID NO: 19621 - DNA, 110 bp, synthetic construct
  source 1..110: mol_type = other DNA
taggtgcatggttatacagtacccaaccttcccacctcccaaaaaggcaatatccgactagagctgagagaagagagaagggcaggaaccaatgatacgacatctctgca

SEQ ID NO: 19622 - DNA, 110 bp, synthetic construct
  source 1..110: mol_type = other DNA
aaataccatgtgatgtcatgtctatgtggaatctaaaatatggcacaaaggcactcaactgtcccatgagtggagacctaaccaactgctttccctagcaatgcttcttt

SEQ ID NO: 19623 - DNA, 110 bp, synthetic construct
  source 1..110: mol_type = other DNA
caactgtcccatgagtggagacctaaccaactgctttccctagcaatgcttctttttggcaggaaacagtcagaacagtcattctccaccccaccccccacccggcagtt

SEQ ID NO: 19624 - DNA, 110 bp, synthetic construct
  source 1..110: mol_type = other DNA
tgcttcttgcctgagtctcaagtcacttgtctaggatatggcctgggtatcagaatgtgtaaaagattccccatgtgattccaataattggcagtaattagtataatgaa

SEQ ID NO: 19625 - DNA, 110 bp, synthetic construct
  source 1..110: mol_type = other DNA
cagggactgtgacactccagaaacactggaaagacaatgtccttcacatgcccaaccactccacccccatgtctgtgctctttccagctagtacacaacaatgccatggt

SEQ ID NO: 19626 - DNA, 110 bp, synthetic construct
  source 1..110: mol_type = other DNA
caacaataaaatcatttgccataacactactatcaaaagcctaaaactcagagtccccattgtggctcagtggttaagaacccgatatagagtcagtgaggatgcgggtt

SEQ ID NO: 19627 - DNA, 110 bp, synthetic construct
  source 1..110: mol_type = other DNA
ttgccataacactactatcaaaagcctaaaactcagagtccccattgtggctcagtggttaagaacccgatatagagtcagtgaggatgcgggttcaatctctggcctcg

SEQ ID NO: 19628 - DNA, 110 bp, synthetic construct
  source 1..110: mol_type = other DNA
actgagactcagagaggggaaaacatttttccaaggtcacacagtcagaatgtagccgagccaccagacatgactgagctgatgttcttagccattgcactgacttttta

SEQ ID NO: 19629 - DNA, 110 bp, synthetic construct
  source 1..110: mol_type = other DNA
gaatcacttgctcttgcctaaagcaatcattggcaacaagaaaaaatcaccatgttaggtctaggctaatcaaaatttatcacataaaactggggaaggaccactttccc

SEQ ID NO: 19630 - DNA, 110 bp, synthetic construct
  source 1..110: mol_type = other DNA
gtagattatttttattttacaacgtaatgacataggggtcagtttcttgatttaacacagatcttctcccagcttttgtctactctctcagaaatacacattttcatccc

SEQ ID NO: 19631 - DNA, 110 bp, synthetic construct
  source 1..110: mol_type = other DNA
cacagatcttctcccagcttttgtctactctctcagaaatacacattttcatccccagcatgggtgagaaaagaaatatacctcaataaacattttatacctaacaaaac

SEQ ID NO: 19632 - DNA, 110 bp, synthetic construct; identical to SEQ ID NO: 19630
  source 1..110: mol_type = other DNA

SEQ ID NO: 19633 - DNA, 110 bp, synthetic construct; identical to SEQ ID NO: 19631
  source 1..110: mol_type = other DNA

SEQ ID NO: 19634 - DNA, 110 bp, synthetic construct
  source 1..110: mol_type = other DNA
atctctgatgaaatcttccccttgagctagctggattgttcagttgcgccaagagcctaagacctgaaattctgcattcttggtacggttctgagttcttactataaatg

SEQ ID NO: 19635 - DNA, 110 bp, synthetic construct
  source 1..110: mol_type = other DNA
catgtgaatgtataaaatagaatttgatggtatcaaattatattgatttttaacccttccaaatctcttgactacccagttctctacagataatgttgtaaccagatgct

SEQ ID NO: 19636 - DNA, 110 bp, synthetic construct; identical to SEQ ID NO: 19635
  source 1..110: mol_type = other DNA

SEQ ID NO: 19637 - DNA, 110 bp, synthetic construct
  source 1..110: mol_type = other DNA
agtcaaagaaactggtaagttcctctctaaaccaataaccttaatactgtagatcttaaagtctttcgaggaaaaacccatttgttgtgaccttttagaagtatgttctt

SEQ ID NO: 19638 - DNA, 110 bp, synthetic construct
  source 1..110: mol_type = other DNA
ttaaagtctttcgaggaaaaacccatttgttgtgaccttttagaagtatgttctttcagaagtatgtttcttactgaatggtccccaaatactctttgttttagaagcag

SEQ ID NO: 19639 - DNA, 110 bp, synthetic construct
  source 1..110: mol_type = other DNA
tcccaccccgtgcctatcccacccctaactgcgctgtttctgccacagtggtcaccttttggtttcccaaatgcaaaaagctgtgcccttctccaaggtctttgcttgta

SEQ ID NO: 19640 - DNA, 110 bp, synthetic construct
  source 1..110: mol_type = other DNA
cttttggtttcccaaatgcaaaaagctgtgcccttctccaaggtctttgcttgtagtctttttcttccaccagggtgctttccccaccccagtcccagtccctcctcaac

SEQ ID NO: 19641 - DNA, 110 bp, synthetic construct
  source 1..110: mol_type = other DNA
taaagactcagccctgggagcctttgggagctcctggaatatagtagatgctcagtatttactgcttactcagagcatggtcgatgtcttaaaggaggtggggaaagcag

SEQ ID NO: 19642 - DNA, 110 bp, synthetic construct
  source 1..110: mol_type = other DNA
tatttactgcttactcagagcatggtcgatgtcttaaaggaggtggggaaagcagtctttaaaaagaaaaaaaaaatgttatatttattgacactcatctcctgtgtata

SEQ ID NO: 19643 - DNA, 110 bp, synthetic construct
  source 1..110: mol_type = other DNA
ttgtgcttggctggggtgcctcccttttcttccacgtggcccctctatagcaggacagcccatatttcttacatggtggcagcagctgtgttccaagaagacaagctcca

SEQ ID NO: 19644 - DNA, 110 bp, synthetic construct
  source 1..110: mol_type = other DNA
aatgctgggtctctggctttgtttagtctttcttcacctggcattcaaaggcatggtgatggttcactttagctcaaccattttctggctcgcttgaaaatttccgagtt

SEQ ID NO: 19645 - DNA, 110 bp, synthetic construct
  source 1..110: mol_type = other DNA
gtccatgttactatttctagcttctggtaagaaaactgaggctcggagtcacatagcaactgagtatcagaggctgggtttgaacctggctctgattcctgttaagccag

SEQ ID NO: 19646 - DNA, 110 bp, synthetic construct
  source 1..110: mol_type = other DNA
ggtgatgagctcatcacctcccctccctgacctgtaattcagggccatgggatatctgctctaaagattcaatgatcagatgggagaggagacaaaaggagaatgtgatt

SEQ ID NO: 19647 - DNA, 110 bp, synthetic construct
  source 1..110: mol_type = other DNA
tatgtgctttttaggcatgtctgtaaagattcgcactcaattaattgttcccagggtacataaagcttctatgaagtgttccctaagtggcaaaatactcacagtttccc

SEQ ID NO: 19648 - DNA, 110 bp, synthetic construct
  source 1..110: mol_type = other DNA
cttagggcttaccttgcttccgtggtctggggggtgacaagcagggggagggcggggagtcaaaggagctctggcttatgaggaatctgtctctaaggttaaccacagac

SEQ ID NO: 19649 - DNA, 110 bp, synthetic construct
  source 1..110: mol_type = other DNA
ggagtcaaaggagctctggcttatgaggaatctgtctctaaggttaaccacagacaaagcgcaagataacaggctccccggctccatgtggaagatgctgactcaggagt

SEQ ID NO: 19650 - DNA, 110 bp, synthetic construct
  source 1..110: mol_type = other DNA
gaggttgagtcactgcacctgagagaggtggcttctctgggaactttgggaaattttgcagacagtgagcttatgtggctagtagaacctgtggctgcaggactgacctt

SEQ ID NO: 19651 - DNA, 110 bp, synthetic construct
  source 1..110: mol_type = other DNA
tagcatgaagagctttcgtcaaggattggttggcaccttggatgaatcagtgggattttagctagtgactggcctatggcccccaaagaaaagttgaatgctctaagttt

SEQ ID NO: 19652 - DNA, 110 bp, synthetic construct
  source 1..110: mol_type = other DNA
ttttagctagtgactggcctatggcccccaaagaaaagttgaatgctctaagttttattaattgccggaatcttgctaaagaacttgctacttgctttgaataatgcagc

SEQ ID NO: 19653 - DNA, 110 bp, synthetic construct
  source 1..110: mol_type = other DNA
gccctccagataaattcacatattgaattttcagacagagaggctctctcattcggccggcagcccctctgcagaatgagatagcccacataagcaacttttcttgataa

SEQ ID NO: 19654 - DNA, 110 bp, synthetic construct
  source 1..110: mol_type = other DNA
tcccagaccctcatctcataagagcagaggtcctgtgccaggcttattatctcataggcataatggtggcatgtccacacacgcccactctcttctgtgtcagcttcaat

SEQ ID NO: 19655 - DNA, 110 bp, synthetic construct
  source 1..110: mol_type = other DNA
aggcataatggtggcatgtccacacacgcccactctcttctgtgtcagcttcaatagctctcatgagtggcccttctcttgacaaccagcaattaattttgttcctttgt

SEQ ID NO: 19656 - DNA, 110 bp, synthetic construct
  source 1..110: mol_type = other DNA
atggtgtatatgtgggcgtgtgagggggtgggtgtaacgaagcacagatgggtgtgtgagggtgtgtatgaatgagcttgcccacatgggcacacataagggtgtgtgag

SEQ ID NO: 19657 - DNA, 110 bp, synthetic construct
  source 1..110: mol_type = other DNA
gtgagggtgtgtatgaatgagcttgcccacatgggcacacataagggtgtgtgaggggtgtgtatacctgtgtgtgtgcacgtggcgtaggtgtccatacctgtgagtgg

SEQ ID NO: 19658 - DNA, 110 bp, synthetic construct
  source 1..110: mol_type = other DNA
tatttatcacagtgtgacgctatattatttatttgttgacttgtggcttcttacatgatgtatgtctttacttgtttttggtcagcctcccccaccagaatgtcagttcc

SEQ ID NO: 19659 - DNA, 110 bp, synthetic construct
  source 1..110: mol_type = other DNA
ccattcttgaactctgaaaggcctggcatagaataagcgctccaaaaatgttcgtggttgttaatactattgtcgtcattgttatttggctcattattattttgctgatc

SEQ ID NO: 19660 - DNA, 110 bp, synthetic construct
  source 1..110: mol_type = other DNA
tgggtctgaatagatagtgagtgcaaattaaaagcaaatgaaacagcactattgagtaaataacagtactggtggtagtgagatgtggcagctgtctcaaacataaaaaa

SEQ ID NO: 19661 - DNA, 110 bp, synthetic construct
  source 1..110: mol_type = other DNA
gtaaataacagtactggtggtagtgagatgtggcagctgtctcaaacataaaaaatattggaggtttggggagcaatgaattacaagccatgaccatcacagtgttggac

SEQ ID NO: 19662 - DNA, 110 bp, synthetic construct; identical to SEQ ID NO: 19660
  source 1..110: mol_type = other DNA

SEQ ID NO: 19663 - DNA, 110 bp, synthetic construct; identical to SEQ ID NO: 19661
  source 1..110: mol_type = other DNA

SEQ ID NO: 19664 - DNA, 110 bp, synthetic construct
  source 1..110: mol_type = other DNA
cgcaagtgtggcttggacctgatttctggcccggaactccataggcacccccccaaaaaaagtcctagctggaaaaccactcagacttctcccagtgggggctcctccca

SEQ ID NO: 19665 - DNA, 110 bp, synthetic construct
  source 1..110: mol_type = other DNA
aggacatcaaaagagcctcagtgtccaccaaggaagccatttacaaccaaacaaccagcacaagtccccagaggatctgtgcataagttgacaccccaagaggtctggag

SEQ ID NO: 19666 - DNA, 110 bp, synthetic construct
  source 1..110: mol_type = other DNA
cagcacaagtccccagaggatctgtgcataagttgacaccccaagaggtctggagggtgatccaggaaaaaaataggagccttcccagccttgccacatctgggagatcc

SEQ ID NO: 19667 - DNA, 110 bp, synthetic construct
  source 1..110: mol_type = other DNA
gtgatcatttgggctgggtataaaatttgaggtggctgcatattttctctcagcactgaatttttaatctcgtctttccatagaggccagctcttttatctgattgatat

SEQ ID NO: 19668 - DNA, 110 bp, synthetic construct
  source 1..110: mol_type = other DNA
ctgaatttttaatctcgtctttccatagaggccagctcttttatctgattgatatttccttgttaaaagctgattgtcccccctctattaaaattttttgttggtggtgt

SEQ ID NO: 19669 - DNA, 110 bp, synthetic construct
  source 1..110: mol_type = other DNA
tacagttggtaggatgtaagctggttcaacgtctatggagggaaattcgagaacagttatcacaacgccaaaggcacatatgtgctaacccaggaaatcacttctaggaa

SEQ ID NO: 19670 - DNA, 110 bp, synthetic construct
  source 1..110: mol_type = other DNA
tgcccagatccaacttgagactcattatcaaaaccatggagggagtcgaggaaagcacacacagtaagagactatcactcacagccctggacttccttttgctttctctt

SEQ ID NO: 19671 - DNA, 110 bp, synthetic construct
  source 1..110: mol_type = other DNA
cacacacagtaagagactatcactcacagccctggacttccttttgctttctcttctggattacgtgagtaccgggaaaggcggaggtctaccttatccacctggtaaag

SEQ ID NO: 19672 - DNA, 110 bp, synthetic construct
  source 1..110: mol_type = other DNA
tatctgcttctagcttcttttagaacattctagaagaatgtattagggctgctataacaaagtgccacagattggtggtgggcgagttaaacatcagaaagttactgtct

SEQ ID NO: 19673 - DNA, 110 bp, synthetic construct
  source 1..110: mol_type = other DNA
gggctgctataacaaagtgccacagattggtggtgggcgagttaaacatcagaaagttactgtctcacagttctagaagcccaaagtccaagatcaaggtgtcagcaggg

SEQ ID NO: 19674 - DNA, 110 bp, synthetic construct
  source 1..110: mol_type = other DNA
tgttttcttctctgggccattcaaggtctgatcttggcattcctacgccccgagcagaagaggcaggggtctgccaaaccttggtaggctaccaggtgagctgaaccaca

SEQ ID NO: 19675 - DNA, 110 bp, synthetic construct
  source 1..110: mol_type = other DNA
agaagaggcaggggtctgccaaaccttggtaggctaccaggtgagctgaaccacaggactgatgttgacctccaacctctgcagagtcctgacctgtgaggctcacggga

SEQ ID NO: 19676 - DNA, 110 bp, synthetic construct
  source 1..110: mol_type = other DNA
aggaaggggcagagcccaggttcagacatgagcaggctgaattcctaggtattacactctattccttcactttacccaaccatccaaccagctgaggaagtttctattgc

SEQ ID NO: 19677 - DNA, 110 bp, synthetic construct
  source 1..110: mol_type = other DNA
actctattccttcactttacccaaccatccaaccagctgaggaagtttctattgcaacccccactgaacagataaggaaactgaggttagtgatttgtctcaagtcacac

SEQ ID NO: 19678 - DNA, 110 bp, synthetic construct
  source 1..110: mol_type = other DNA
gaccagggagatcacagcaatgatgataaaagccaccccctcagggtgcctgcgtgggccagcctcatctgaacactctgaatgtgtaggttcattcaatgcccccagtc

SEQ ID NO: 19679 - DNA, 110 bp, synthetic construct
  source 1..110: mol_type = other DNA
gggccagcctcatctgaacactctgaatgtgtaggttcattcaatgcccccagtcaccctggagctaaccctgggaaccttccctattccatacatgaggaaatggactc

SEQ ID NO: 19680 - DNA, 110 bp, synthetic construct
  source 1..110: mol_type = other DNA
ctaagctctttaaacattccatgcacgcacacacccctggacagatctcctctatatttctgagcaatagataggatggatggcatgtccatctaacagacgaaaaaaac

SEQ ID NO: 19681 - DNA, 110 bp, synthetic construct
  source 1..110: mol_type = other DNA
atttctgagcaatagataggatggatggcatgtccatctaacagacgaaaaaaacgaagtcccaggcagagggtcctactcaataaagaaaggtttctaggtgaggagga

SEQ ID NO: 19682 - DNA, 110 bp, synthetic construct; identical to SEQ ID NO: 19680
  source 1..110: mol_type = other DNA

SEQ ID NO: 19683 - DNA, 110 bp, synthetic construct; identical to SEQ ID NO: 19681
  source 1..110: mol_type = other DNA

SEQ ID NO: 19684 - DNA, 110 bp, synthetic construct
  source 1..110: mol_type = other DNA
ttctgagaaataatatgtatggtgctttcttcaagcagtggttctcaaatattttctaggactttatttttctttttttaggggcacacctgtggcatatggaagttctc

SEQ ID NO: 19685 - DNA, 110 bp, synthetic construct; identical to SEQ ID NO: 19684
  source 1..110: mol_type = other DNA

SEQ ID NO: 19686 - DNA, 110 bp, synthetic construct
  source 1..110: mol_type = other DNA
gtggaaagaggagatgtgagagcttttaacttccacccacccacagaaggctgcccctgggtggtttatgtatgtctgtgttccacacacatccagcacagcgtccagca

SEQ ID NO: 19687 - DNA, 110 bp, synthetic construct
  source 1..110: mol_type = other DNA
ggggcggggacaacagctgtgactcgggtcacctctgtccctcctggccaaaaatggaacacctgctccctgccaggcatggatgaaggtggatggagaaataagtattt

SEQ ID NO: 19688 - DNA, 110 bp, synthetic construct
  source 1..110: mol_type = other DNA
tccccaccagtcagaatatgtttaaactaaacttggtgttcttaagcagccttcgtcactgtatttactttttccagttgctttaagacctttacatagtttcttccaga

SEQ ID NO: 19689 - DNA, 110 bp, synthetic construct
  source 1..110: mol_type = other DNA
tttcatcagcccgcagttcacattctagtttctgcagaatttcaggttgctacattttagtggcccttcctttgcatcttgaatagttgaaattgaaaactttaaatctg

SEQ ID NO: 19690 - DNA, 110 bp, synthetic construct
  source 1..110: mol_type = other DNA
tttagtggcccttcctttgcatcttgaatagttgaaattgaaaactttaaatctgtcagggccaaagatcttctatatagtcttactttcatatgtgggttttctgtgaa

SEQ ID NO: 19691 - DNA, 110 bp, synthetic construct
  source 1..110: mol_type = other DNA
aaacctgggccctaaaaagaaaaaaacaaaaaaaaggaataacagttggtcacgactatgatgctttccttgttcatattaactttcatgttgactaggtttgtttcatt

SEQ ID NO: 19692 - DNA, 110 bp, synthetic construct
  source 1..110: mol_type = other DNA
tctgctaaccttgaaaacatattttctcatattttgggttaacatatataagctttaatctttcagttcctggctaacatattttttttcctgtcaactactgaactccc

SEQ ID NO: 19693 - DNA, 110 bp, synthetic construct; identical to SEQ ID NO: 19692
  source 1..110: mol_type = other DNA

SEQ ID NO: 19694 - DNA, 110 bp, synthetic construct
  source 1..110: mol_type = other DNA
gtataaaattttaaaaatctaaatcatttcaatttcaagcttcttggtcatggaaaatgcctttgcgatgatttatgagcagttatctccacttacgctttagcagaata

SEQ ID NO: 19695 - DNA, 110 bp, synthetic construct
  source 1..110: mol_type = other DNA
atcttcttgaggcattcggattttccaaactgaaaaaaaaatcagtacactttagccttcccatgacattttagttttctttctacgtctgtgtttgttcctagctttat

SEQ ID NO: 19696 - DNA, 110 bp, synthetic construct
  source 1..110: mol_type = other DNA
ccttcccatgacattttagttttctttctacgtctgtgtttgttcctagctttattttattgatgtgcatttatatcagtcttttgttagtttatatgctccttaaagac

SEQ ID NO: 19697 - DNA, 110 bp, synthetic construct
  source 1..110: mol_type = other DNA
tgttgatactgattttgattttgatttcagcggcccagcccaatccagctttattcccctccttttatattggccccaatcaaagacaagcagacagagctgggcgaaac

SEQ ID NO: 19698 - DNA, 110 bp, synthetic construct
  source 1..110: mol_type = other DNA
gctgccccacacgagcagtatggcaaccgggtgcacctggccaatgactggggcccaagcaaaccacaaccggacctaacgtggcaccacgcacacgagtataaaatgca

SEQ ID NO: 19699 - DNA, 110 bp, synthetic construct
  source 1..110: mol_type = other DNA
caagcaaaccacaaccggacctaacgtggcaccacgcacacgagtataaaatgcacacagcacctaggatctttttagcctccaccctcatcgccctgccagagaaccat

SEQ ID NO: 19700 - DNA, 110 bp, synthetic construct
  source 1..110: mol_type = other DNA
gcactttcattaccaaaacgcataggcacaatgttagcggtttcgtttttatggccactggacttaggaatatcataaaacctgaccgtaaggttgaaaatgaacattct

SEQ ID NO: 19701 - DNA, 110 bp, synthetic construct
  source 1..110: mol_type = other DNA
agtacactgggtccactcaggtaagtcagggtaatctccctatgttatagtcaattaagcagcaaccataattcaagctgctacccaaattccccctggcgggggaatgt

SEQ ID NO: 19702 - DNA, 110 bp, synthetic construct
  source 1..110: mol_type = other DNA
acgatatcatcaaaagatgaagagaaggaggaacatgatcaagccaggttgccacatttgtaggttgtgggttgtcttgcttttgagaagcttgctagagctaaaaaaga

SEQ ID NO: 19703 - DNA, 110 bp, synthetic construct
  source 1..110: mol_type = other DNA
ttggcccgataattatccagctggtaattacagccagttgcacaggaatacagtacagagccccaaacggtcaccctgccagctgggaagagccctcacccagtgatgga

SEQ ID NO: 19704 - DNA, 110 bp, synthetic construct
  source 1..110: mol_type = other DNA
agaccaagatgaaaactgaggggcctcttatgaactagctcagaagtgacccacgatcactttcacttaattatcttcattataagcgagtcactacatcctgcccattc

SEQ ID NO: 19705 - DNA, 110 bp, synthetic construct
  source 1..110: mol_type = other DNA
ttttctacctgcttcttacttgggacctagctgcattgctgaggatgctcagttgcccgtcgaccacaaggccttacctgccatgtgccttggggagcaagtgtgagatg

SEQ ID NO: 19706 - DNA, 110 bp, synthetic construct
  source 1..110: mol_type = other DNA
ctactactattagctaagagttatcttgatctgggcattgtaacaagtatgtccatgtttaattcttgaaatatcttgataatgcaaataatattactatgatgctggtg

SEQ ID NO: 19707 - DNA, 110 bp, synthetic construct; identical to SEQ ID NO: 19706
  source 1..110: mol_type = other DNA

SEQ ID NO: 19708 - DNA, 110 bp, synthetic construct; identical to SEQ ID NO: 19706
  source 1..110: mol_type = other DNA

SEQ ID NO: 19709 - DNA, 110 bp, synthetic construct; identical to SEQ ID NO: 19706
  source 1..110: mol_type = other DNA

SEQ ID NO: 19710 - DNA, 110 bp, synthetic construct
  source 1..110: mol_type = other DNA
tcacctatggtggccattcattaattcattaattcattcatgctgtgccagggacattgatgagctaggccagcatagggaaggcaattacatatttccttggtttgtct

SEQ ID NO: 19711 - DNA, 110 bp, synthetic construct
  source 1..110: mol_type = other DNA
ggttaggtgcttttcaaaacagaagtgaaggaagtgatgagagacggaaaagcatagaggctcccagcacaatgagctttggagatagatgttggttccaaacccagtgc

SEQ ID NO: 19712 - DNA, 110 bp, synthetic construct
  source 1..110: mol_type = other DNA
acatgctctgtcaccacctgggtgaaagccaggttttgctcatgatttccattcttgaatgactcagggatgagtaggggactgagtcagagggagctggtggaaggggt

SEQ ID NO: 19713 - DNA, 110 bp, synthetic construct
  source 1..110: mol_type = other DNA
tgaatgactcagggatgagtaggggactgagtcagagggagctggtggaaggggtgggggtggcagtgcagcacttacactgaagttacatggcattgggggaaaactca

SEQ ID NO: 19714 - DNA, 110 bp, synthetic construct; identical to SEQ ID NO: 19712
  source 1..110: mol_type = other DNA

SEQ ID NO: 19715 - DNA, 110 bp, synthetic construct; identical to SEQ ID NO: 19713
  source 1..110: mol_type = other DNA

SEQ ID NO: 19716 - DNA, 110 bp, synthetic construct
  source 1..110: mol_type = other DNA
ggtgctgaagttgctttttccactccctctctcatgattctgacaacatccaaagagctagttaccacattatactcattttacaaagtcaccaaggttcagaaaggttt

SEQ ID NO: 19717 - DNA, 110 bp, synthetic construct
  source 1..110: mol_type = other DNA
ggagggctgttccgtgcactgtaagatgctgaaaagggtccctggcctccacccattagaggccagcagtatcccccaccccatgtcatgacaaacatttccaaacatgt

SEQ ID NO: 19718 - DNA, 110 bp, synthetic construct
  source 1..110: mol_type = other DNA
ttagaggccagcagtatcccccaccccatgtcatgacaaacatttccaaacatgtatcctctggcggacaaagttagggctaattaacatatacatacatacatacatat

SEQ ID NO: 19719 - DNA, 110 bp, synthetic construct
  source 1..110: mol_type = other DNA
attaccttggcctataaaaccttactttaagaagaaacactttccctccccggccgccgggctaagcctccctcctttctcaagaagagttggaggtgacacctgggtat

SEQ ID NO: 19720 - DNA, 110 bp, synthetic construct
  source 1..110: mol_type = other DNA
gccgggctaagcctccctcctttctcaagaagagttggaggtgacacctgggtatcaaaaggaagggtgccttctcatttgcatggtaaggagagagatgggaggccccc

SEQ ID NO: 19721 - DNA, 110 bp, synthetic construct
  source 1..110: mol_type = other DNA
ttctcaagcatcccagtgattctaatgtgcaaacaaggtcgggaaaggctatgttaagaagtcatctgggctagaggttgccaaacctggctttctgttcccctggggat

SEQ ID NO: 19722 - DNA, 110 bp, synthetic construct
  source 1..110: mol_type = other DNA
aagaagtcatctgggctagaggttgccaaacctggctttctgttcccctggggatagattctttctccccccaccccaccccccatatactgaaccagactctttagagg

SEQ ID NO: 19723 - DNA, 110 bp, synthetic construct
  source 1..110: mol_type = other DNA
tctctcctctctttctcattctccttcttcatcttatattagtatcaatggtatatgtcttggttttaccataatcatctttcccccaaatttctccctcagttttggat

SEQ ID NO: 19724 - DNA, 110 bp, synthetic construct
  source 1..110: mol_type = other DNA
acacacttcctgttatcccttcttccacccacagccatgttcctatatgctttccaaggctgatggatcttcagaagcagccgacctcacagaatccagagcagctgcaa

SEQ ID NO: 19725 - DNA, 110 bp, synthetic construct
  source 1..110: mol_type = other DNA
aaggctgatggatcttcagaagcagccgacctcacagaatccagagcagctgcaagtcattcttgagattctttaatattattcatagaaatattgcctcattctgacca

SEQ ID NO: 19726 - DNA, 110 bp, synthetic construct
  source 1..110: mol_type = other DNA
agactcagctcgaatcccgcattgctttagctgtggcataggttggaaactgcagctcagatttgaccccccaggaactttcatatgctgcaggtggggccctaaaaaaa

SEQ ID NO: 19727 - DNA, 110 bp, synthetic construct
  source 1..110: mol_type = other DNA
tgctcgctctgaacaatgaactttccactcaggcacaggccctgaaaaacaggttcctgttgtctcctgccttgctgtgcagctgcgcagccctccgctgggaggtcaca

SEQ ID NO: 19728 - DNA, 110 bp, synthetic construct
  source 1..110: mol_type = other DNA
gattcacctatcaaaccctggaaagaacatgcaggaaactggccttagggatgcccagaatcaaggactcagaactcacggtcctctgtctctgctttgtttcagagtca

SEQ ID NO: 19729 - DNA, 110 bp, synthetic construct
  source 1..110: mol_type = other DNA
cagaatcaaggactcagaactcacggtcctctgtctctgctttgtttcagagtcagctcccacctggaagctgaaattatagccacagctgaatgaacaacaaattcttc

SEQ ID NO: 19730 - DNA, 110 bp, synthetic construct
  source 1..110: mol_type = other DNA
aagttctccaaaccctgttctttggggagtcttatggaggtgcatgacaagggcaaccttgattcaatcatgggcttttggtagctagttcaatctccagcttctcccct

SEQ ID NO: 19731 - DNA, 110 bp, synthetic construct
  source 1..110: mol_type = other DNA
accttgattcaatcatgggcttttggtagctagttcaatctccagcttctcccctccccagagtagtggggatggggaactgggagttctagtcttctcattatgcctcg

SEQ ID NO: 19732 - DNA, 110 bp, synthetic construct
  source 1..110: mol_type = other DNA
tcacatcaatttcaaaaagttagctcatataacatagcctttaagtactgctctcatctttggcccaagatctagtctttgtcaacctctccagttacacctaccataaa

SEQ ID NO: 19733 - DNA, 110 bp, synthetic construct
  source 1..110: mol_type = other DNA
ttgagcaaatcgagtttgtctaaaacgcatccagcatttaacatttaataggagctgatcaatttaatgcaccacatgccttaggtaaatggatccttcccctttaaggg

SEQ ID NO: 19734 - DNA, 110 bp, synthetic construct
  source 1..110: mol_type = other DNA
tgatcaatttaatgcaccacatgccttaggtaaatggatccttcccctttaagggtctgttgacgttaggtgaaggagaaaaacagttgttatgattcagaaactcagga

SEQ ID NO: 19735 - DNA, 110 bp, synthetic construct
  source 1..110: mol_type = other DNA
ctcgccagacctcacgcatgccaaaaaaagaatatttacagcaaacttgccaaagtaaacgacccctcctacccaccatccttcccccgcctccgcacattccccccctt

SEQ ID NO: 19736 - DNA, 110 bp, synthetic construct
  source 1..110: mol_type = other DNA
taaacgacccctcctacccaccatccttcccccgcctccgcacattcccccccttttttgtaaacttcagataaacacttttcggtcacaaaggggtcgatttgccccct

SEQ ID NO: 19737 - DNA, 110 bp, synthetic construct
  source 1..110: mol_type = other DNA
atctctctcaatttctccgacactgtttccttcctgattttgaagctaagcctctagacctggaaggactcaggcattgtctcattagctgactaattaatgatactaac

SEQ ID NO: 19738 - DNA, 110 bp, synthetic construct
  source 1..110: mol_type = other DNA
gaattctgtcctcaaggatgatacgtcaagaagccttaaacatggtcctctagtggtttttataattcaagcttcttggcccatttcatcctcagtttcattccaaagca

SEQ ID NO: 19739 - DNA, 110 bp, synthetic construct
  source 1..110: mol_type = other DNA
ggtgattgtaaccagaaacacctcggcaggcatctcgctgctgtcctgagcggccgctggcaggcagccgggcccagagccgggagccggcccggggtgccctggctcgc

SEQ ID NO: 19740 - DNA, 110 bp, synthetic construct
  source 1..110: mol_type = other DNA
gggcagtgtgtcctgtgcactgtcttgattccttatatatgttttgtctctgtctccacatccttgggtctgagtctatctgttcaaacacctatgaagttattctattc

SEQ ID NO: 19741 - DNA, 110 bp, synthetic construct
  source 1..110: mol_type = other DNA
gggtaatactagagattcctttgatatgtctcctccaagctctagccccttccttggggacagaccttattgaactggtgagacccatttatttgtttgtgcttgcacac

SEQ ID NO: 19742 - DNA, 110 bp, synthetic construct
  source 1..110: mol_type = other DNA
tccttctctggccgttggtgtgtgctgggccagggaattaagtaacgagggatgggagaagcaacctgtaaataccccagcttcctgtccccttggtgggacagtttctc

SEQ ID NO: 19743 - DNA, 110 bp, synthetic construct
  source 1..110: mol_type = other DNA
gagaagcaacctgtaaataccccagcttcctgtccccttggtgggacagtttctcttatggggtccctagtgggactgagtcccagttactcgcagaggtgacctgctga

SEQ ID NO: 19744 - DNA, 110 bp, synthetic construct
  source 1..110: mol_type = other DNA
ccccaggagtgatccataccccaggctgccctcctggaaatgggaccagacatgggaccctgtgacaaccccagcggtacaaattctggagctcctcaaggtgtttgctt

SEQ ID NO: 19745 - DNA, 110 bp, synthetic construct
  source 1..110: mol_type = other DNA
gaccctgtgacaaccccagcggtacaaattctggagctcctcaaggtgtttgcttaacttcgtgcatgagtctgagggccagagagagccacaaaggagagtgtcaggga

SEQ ID NO: 19746 - DNA, 110 bp, synthetic construct
  source 1..110: mol_type = other DNA
tcatttatggggaaagaacagctggtctcataaaaataatcggagctacaattcatgttgactgggtttcaacttctaaattctgcacagtgctcggtggaaaaagccaa

SEQ ID NO: 19747 - DNA, 110 bp, synthetic construct
  source 1..110: mol_type = other DNA
aggtcaaccagcaagtaaagagattcagacttggtttataaagactggtcgtcatcttttatgtacaagctcccataggcacatccatgtagttgaaatggagtgaagag

SEQ ID NO: 19748 - DNA, 110 bp, synthetic construct
  source 1..110: mol_type = other DNA
atgaagggcatgtgactcctgactggcctcaggcaattggtacccatctctagatcagaggaagagtacatatcactcactgatcatttggcacaagctcaacattcttt

SEQ ID NO: 19749 - DNA, 110 bp, synthetic construct
  source 1..110: mol_type = other DNA
cagaggaagagtacatatcactcactgatcatttggcacaagctcaacattctttgcaggctgatacagctcaacctggggaggcacttggctctgatgcccttcctgtg

SEQ ID NO: 19750 - DNA, 110 bp, synthetic construct
  source 1..110: mol_type = other DNA
gggactggattgatgaggcttcctactggctctggcacatccagctcctgccatactggcttagccaatttgccaactcagtctgtctgagggatcccaaactgagacca

SEQ ID NO: 19751 - DNA, 110 bp, synthetic construct
  source 1..110: mol_type = other DNA
actttcttaaaacacaaggcagaagggggaaaaaacctcttcattgcttgcctgtgcacaggtggtccttaaccaagatgcgtttcctttggctataagattgttttaca

SEQ ID NO: 19752 - DNA, 110 bp, synthetic construct
  source 1..110: mol_type = other DNA
caggaagataccccataactcatgcagggcagcaccccataatcaggcacatggtgtttctgcagctgaactagaggtaaccactcagcttcatgggatcgatgtcaacc

SEQ ID NO: 19753 - DNA, 110 bp, synthetic construct
  source 1..110: mol_type = other DNA
ctcctcagacatttcacttgtgggactggtagccaagaggattaggctgttccccctgagtcctctcccttcatcacctccgttcacttgtaaaatgcagttcagaacat

SEQ ID NO: 19754 - DNA, 110 bp, synthetic construct
  source 1..110: mol_type = other DNA
ctggtctaatccaggcacatcagtcaccacttcttggggccttttaggagcctacccctcctaaccccttttcccttctcagctgctctgggaccagaaactaggtaagc

SEQ ID NO: 19755 - DNA, 110 bp, synthetic construct
  source 1..110: mol_type = other DNA
cccccgggaagagacgagcaagggtagggaggaagtgaatgtttctttttgcaaaagctgagcccagggaagatttgtgtgctttgattactggggatgctacagtcgtg

SEQ ID NO: 19756 - DNA, 110 bp, synthetic construct
  source 1..110: mol_type = other DNA
taccagctgtgcaacttggggcaagtgatttcatctctctgaacctaaattgtacttatctgtataataggcctaagaattagcaaagatacaggcaaagcaccagctat

SEQ ID NO: 19757 - DNA, 110 bp, synthetic construct
  source 1..110: mol_type = other DNA
tcttgtgcttcacaaggcttagctcctttaagcttcacaatccagacagatgggtgctattcttatttccatgtgacggatctggaaactgaggttcgcctcggggcggc

SEQ ID NO: 19758 - DNA, 110 bp, synthetic construct
  source 1..110: mol_type = other DNA
gctattcttatttccatgtgacggatctggaaactgaggttcgcctcggggcggcacagctagcgcctgacagagaatgggcttggcactcaggactgtcagagcccagg

SEQ ID NO: 19759 - DNA, 110 bp, synthetic construct
  source 1..110: mol_type = other DNA
cattttggttttacatgttctcttgctgctctgtaagagtgtgtatagtgtctagagcttactagtagaggaggtaaaatgggaacatacaggagtgtgtgtgtatttca

SEQ ID NO: 19760 - DNA, 110 bp, synthetic construct
  source 1..110: mol_type = other DNA
ggcaagctggaggaagaagtaatagtggaagctgcccagtttggggactccttttcagaagcccagcttgtgggtcaatgcaccacccagtgaccagcacctgtcaactc

SEQ ID NO: 19761 - DNA, 110 bp, synthetic construct
  source 1..110: mol_type = other DNA
tgggccctgtccccagccaggctggagaccccgttttgcccctttatggcatctgctgagcttagacatccccagtcacatgtccgcatcagtgagtacagaatggactt

SEQ ID NO: 19762 - DNA, 110 bp, synthetic construct
  source 1..110: mol_type = other DNA
ctgagcttagacatccccagtcacatgtccgcatcagtgagtacagaatggactttgcatccctgacgggacagggtgttcccgaggataggggaccggggggcagattc

SEQ ID NO: 19763 - DNA, 110 bp, synthetic construct
  source 1..110: mol_type = other DNA
gagtgggaggagggaggcatggggatggctgaccctggtcctccagactgaagcttcccattgccaaggcaaccgaggccccggtgcagcctatgagagaaaagggatgg

SEQ ID NO: 19764 - DNA, 110 bp, synthetic construct
  source 1..110: mol_type = other DNA
tcccattgccaaggcaaccgaggccccggtgcagcctatgagagaaaagggatggggtctctgaagagttaggcagccagggccctcaccttcaccctggtcccaatata

SEQ ID NO: 19765 - DNA, 110 bp, synthetic construct
  source 1..110: mol_type = other DNA
acgttggaatcctccaggaatgtcatcctggaagttaagagggaaaaacccaggctggaccctgagtgccaatgctgctctctaacccagagaatctgctggttgcagga

SEQ ID NO: 19766 - DNA, 110 bp, synthetic construct
  source 1..110: mol_type = other DNA
aagaagaagggaagttactgggtggattaagatgcagaggaggaacacgatctgatttcatatttcaaagatagctcttgtacatacagtggattgttattctgccataa

SEQ ID NO: 19767 - DNA, 110 bp, synthetic construct
  source 1..110: mol_type = other DNA
gagctcaggaagaaggccttggaccctatgtttgcttgttcctctgctgtccttctgggatccctggggaggagggaggagtgagtggggtgcgagggggagggcagggc

SEQ ID NO: 19768 - DNA, 110 bp, synthetic construct
  source 1..110: mol_type = other DNA
tgggatccctggggaggagggaggagtgagtggggtgcgagggggagggcagggctccagaggtggccctcagcctgtcgcccacatgtcctcctctccctcccgcagta

SEQ ID NO: 19769 - DNA, 110 bp, synthetic construct
  source 1..110: mol_type = other DNA
tttcatttttccctgttgacaaagctgacaagttttcatcaacttagtaaccacttgcattttcttctccgtgaactgtctgctcacactgagtatttttctttttcttc

SEQ ID NO: 19770 - DNA, 110 bp, synthetic construct
  source 1..110: mol_type = other DNA
tttgctactactagatggggagaggaggccacaaagtgagaggcaagggggaaatctggctgggtagcctaatgggtaagaatacaggcttttgagctggtcaatattgg

SEQ ID NO: 19771 - DNA, 110 bp, synthetic construct
  source 1..110: mol_type = other DNA
ctggctgggtagcctaatgggtaagaatacaggcttttgagctggtcaatattggttcaaatcccagctccgccacttccttggtgtgtgatctgggcaagtccctaatg

SEQ ID NO: 19772 - DNA, 110 bp, synthetic construct
  source 1..110: mol_type = other DNA
ctcatggcctcttgcctcaagtcaagctttgccagcctagctcaggaagagagcgtgggatagaggacccaattctaaactgcagtgccctttgctcgggaaacttagac

SEQ ID NO: 19773 - DNA, 110 bp, synthetic construct
  source 1..110: mol_type = other DNA
cagtctttggctccataagactgcctacctggactttgttacttcagcctctggcagagctgtcctttatgttacgcttaaagtcagcttttcatcaaagaacacaatga

SEQ ID NO: 19774 - DNA, 110 bp, synthetic construct
  source 1..110: mol_type = other DNA
gaaagggaagcaaacccaagaaatgctgaaactgagccaattcatctgcatccaatggcaatttttgtcctccaaacttttccagacacacaggcagcttagttggtatt

SEQ ID NO: 19775 - DNA, 110 bp, synthetic construct
  source 1..110: mol_type = other DNA
tggcaatttttgtcctccaaacttttccagacacacaggcagcttagttggtattcaggtggtggctgtgcttgctgaggtcatccagcatttatcccaagtggagtccc

SEQ ID NO: 19776 - DNA, 110 bp, synthetic construct
  source 1..110: mol_type = other DNA
gtgctgaatacatgatgatgatgttggttctaaaagctgaatgcacattgaccaaagtttgtccccccaaattcttcatgtggaagccccaacacctcatacgtcagaat

SEQ ID NO: 19777 - DNA, 110 bp, synthetic construct
  source 1..110: mol_type = other DNA
gggaaaagaaatgacacaatggacaaagagaaataaacattctctttgtcttcctaggaaggtgtccttccaatctaacatgccatcttttgaggaaaaagagttgggag

SEQ ID NO: 19778 - DNA, 110 bp, synthetic construct
  source 1..110: mol_type = other DNA
aggaaggtgtccttccaatctaacatgccatcttttgaggaaaaagagttgggagccatatttattcctttgtctattctataatattcattgagccctatctgtcaaaa

SEQ ID NO: 19779 - DNA, 110 bp, synthetic construct
  source 1..110: mol_type = other DNA
ccccacccctgccaccaaaaaaaaaaggaagaaagaaaatgcttccattaacacatcaggcccttctaaacatgaactatgcctacctggtcagtttcatttacctctac

SEQ ID NO: 19780 - DNA, 110 bp, synthetic construct
  source 1..110: mol_type = other DNA
tctgactttttgatgcatttgtgccctgataggttgaaaagaaaaagaaggtgagagttcttgctactgtcacaaaacccgttggtggtgacaagaatggtggtacccga

SEQ ID NO: 19781 - DNA, 110 bp, synthetic construct
  source 1..110: mol_type = other DNA
agttcttgctactgtcacaaaacccgttggtggtgacaagaatggtggtacccgagttgttaaacttcgaaaaatggtaagatttctggaatattgtaagttgactgttc

SEQ ID NO: 19782 - DNA, 110 bp, synthetic construct
  source 1..110: mol_type = other DNA
ccccatgaagtccagcataggaaaagctgtcaagagatgatactgatttctcacctggcccttggtgtctccatttagggagatggcaaacattttgcccttttctggtt

SEQ ID NO: 19783 - DNA, 110 bp, synthetic construct
  source 1..110: mol_type = other DNA
ctggcgccccctgctggtccactctgtaaacctgtgataagctgatggcacctatgtgattgctgctgcattagagggctggttctttctttaccaggctgggacagttc

SEQ ID NO: 19784 - DNA, 110 bp, synthetic construct
  source 1..110: mol_type = other DNA
gcctggctccctcgggttgtagttcaggcagggcagccctgcccaagacacaggagatcttcctggccgccagctctgctgaagtcaaaatatcatctccaagaaattcc

SEQ ID NO: 19785 - DNA, 110 bp, synthetic construct
  source 1..110: mol_type = other DNA
gatcttcctggccgccagctctgctgaagtcaaaatatcatctccaagaaattccacatgcctcagggaagaatagatgattatgactgaaagtaaagattggaaatctg

SEQ ID NO: 19786 - DNA, 110 bp, synthetic construct
  source 1..110: mol_type = other DNA
gatgaccgagagtaggaactgaatccagggtttacaatttgtggctcattatatagctgtctgcaaaagctgcctgtagacttctctctctctctctttttttggccttt

SEQ ID NO: 19787 - DNA, 110 bp, synthetic construct
  source 1..110: mol_type = other DNA
gatatccttacctagattcaccacttgttaatgatttgctacaattgctttatttctctcattctctacctccctgaccactgttcattgaaccatttgaaagaaaacta

SEQ ID NO: 19788 - DNA, 110 bp, synthetic construct
  source 1..110: mol_type = other DNA
ctctcattctctacctccctgaccactgttcattgaaccatttgaaagaaaactatagactttgtgatacttaacacaccaggatagaacaagggcagtctactacaaaa

SEQ ID NO: 19789 - DNA, 110 bp, synthetic construct
  source 1..110: mol_type = other DNA
acttaatctggcagagttaagtgtttaatatgtggtagttgttagtatttgctatgtccttcccaacaggcagtagcagccccaagggttgacactaagacaactggttt

SEQ ID NO: 19790 - DNA, 110 bp, synthetic construct
  source 1..110: mol_type = other DNA
gtccttcccaacaggcagtagcagccccaagggttgacactaagacaactggtttcttatacctggccaagaccacctgttactgggtggtagtatagaagtttggggtt

SEQ ID NO: 19791 - DNA, 110 bp, synthetic construct
  source 1..110: mol_type = other DNA
tgtatttcaggaagctacactgaaagtgtattgaaaacaatatgactttgtgtaggacatgaatttcaagtcatttgattgggctgtcttgtttattcattctccctgtg

SEQ ID NO: 19792 - DNA, 110 bp, synthetic construct
  source 1..110: mol_type = other DNA
gacatgaatttcaagtcatttgattgggctgtcttgtttattcattctccctgtgtgcgcacacttccccctttctacttcccgcccctcctccactagttttccatatg

SEQ ID NO: 19793 - DNA, 110 bp, synthetic construct
  source 1..110: mol_type = other DNA
tttttcaaatatgctgagtttgttcctgtcccagggcctttgtacttgccgttccctccagctgggctctttcagcagctctgcagatggccagctccatcttttagttt

SEQ ID NO: 19794 - DNA, 110 bp, synthetic construct
  source 1..110: mol_type = other DNA
tgttgggttttgacaaaggcactttggcaaagatgtaaagagaattcacataaagaccacatgagcatcaggaaaatgttgactcataaatgtcctaaggaaaacatgtc

SEQ ID NO: 19795 - DNA, 110 bp, synthetic construct
  source 1..110: mol_type = other DNA
accacatgagcatcaggaaaatgttgactcataaatgtcctaaggaaaacatgtctatgcaaatcagatgggcatacattcacctctttcataaattctaatgtgatggg

SEQ ID NO: 19796 - DNA, 110 bp, synthetic construct
  source 1..110: mol_type = other DNA
ttcttcctcttcaatctttctgagcttatactttctgaggtttgttgtgatgattgtatcacttgctcagcctcattattactaaaatttatggtctctgtttggtgtta

SEQ ID NO: 19797 - DNA, 110 bp, synthetic construct
  source 1..110: mol_type = other DNA
ctaggctgctccttgcgccacctgccgggagacgcctgtaagctctagaggctgcagccgccatgggcaccagaagtttgctctgacgttctagttgaccggttgggcgt

SEQ ID NO: 19798 - DNA, 110 bp, synthetic construct
  source 1..110: mol_type = other DNA
acacacacacacacacacacaccccgcccccgcaacctgcggcccagccacactgctcagggtcggtacacccagctaccacaaggcaagaaacagtaatcgggggacaa

SEQ ID NO: 19799 - DNA, 110 bp, synthetic construct
  source 1..110: mol_type = other DNA
ctcagggtcggtacacccagctaccacaaggcaagaaacagtaatcgggggacaacagggtcttctcgtcagactaccaggatacagttttagtttctttttcaatgccc

SEQ ID NO: 19800 - DNA, 110 bp, synthetic construct
  source 1..110: mol_type = other DNA
ggaggggcatcaggggcaacgttcaggcgccagctctcatccccgcctctgctgtagggaccggctggtaccaacttccttctccactttcctcctctcctccctccgca

SEQ ID NO: 19801 - DNA, 110 bp, synthetic construct
  source 1..110: mol_type = other DNA
caaactgcagggagaaccaagccatacttggagataagagacaactgaaaggcgggtaagatccctgccttcaagaggcttacggggcagaggacaagacaaaaggagaa

SEQ ID NO: 19802 - DNA, 110 bp, synthetic construct
  source 1..110: mol_type = other DNA
aaactagaagactagttctgtgttctttaatttctgtccagggagcttctgaggagtgttgtcattgttgttagagatgctaagcaaaataccatcccatttaagtacca

SEQ ID NO: 19803 - DNA, 110 bp, synthetic construct
  source 1..110: mol_type = other DNA
cctgaacctcagggacagaacaccacatcttgctcctcacttttccctcccttttccctgcctgctgtatggatgctctcattcctaatttaattgaaattataacggtg

SEQ ID NO: 19804 - DNA, 110 bp, synthetic construct
  source 1..110: mol_type = other DNA
ccctgcctgctgtatggatgctctcattcctaatttaattgaaattataacggtgctactgtttaacccagcacctttcctgccaggaatttatcccacagagattcttg

SEQ ID NO: 19805 - DNA, 110 bp, synthetic construct
  source 1..110: mol_type = other DNA
aagttcttgcttcatgtgttggaaggagatttatgctgtatgctgggttcagaagctgccaaatcggcaatacgccatctccagaaaactaggagacagactttctctct

SEQ ID NO: 19806 - DNA, 110 bp, synthetic construct
  source 1..110: mol_type = other DNA
ccctgtggtggggaggggaagtgtgtagtgccggtaagggactgaaacaaggtctgtgtggtgctctgcttccctgctctgcgccttacgttggaggcccctgaaggttt

SEQ ID NO: 19807 - DNA, 110 bp, synthetic construct
  source 1..110: mol_type = other DNA
gtgtggtgctctgcttccctgctctgcgccttacgttggaggcccctgaaggtttcttgtgtctgctcagtagctgtggctgtggacagaaaggtgagtgagggtgaagt

SEQ ID NO: 19808 - DNA, 110 bp, synthetic construct
  source 1..110: mol_type = other DNA
ttctgcatgcgtccagagatgttggcgggcccagaggcactgcaggagtcaccattggcttgctttttgtagttgtcgtaacgaaggacaaaacacaacaggagtccagg

SEQ ID NO: 19809 - DNA, 110 bp, synthetic construct
  source 1..110: mol_type = other DNA
gatccctgatactgaggagttctgagaaaccaaaacgaagaataagagagctaggggtaagaaaattcgcaaaggattgggaccatggctttgggtggtaattctcagta

SEQ ID NO: 19810 - DNA, 110 bp, synthetic construct
  source 1..110: mol_type = other DNA
agactgagattgaaactgagtctgccaacctcaaacactcaggtagatctctcattctcagaaccctccccccacctccaaggagagggttcttctgtgcctggcctgga

SEQ ID NO: 19811 - DNA, 110 bp, synthetic construct
  source 1..110: mol_type = other DNA
agcctcttcatctgattctgtctgtgctgctgtgcctagaacaaaatgagattcttacagctaccagtgtgcctgcttcgagtctcacttgtgggatagaaggaatgaag

SEQ ID NO: 19812 - DNA, 110 bp, synthetic construct
  source 1..110: mol_type = other DNA
gggtagttgagattatgaaaacaattttataaacatgggaaccaaagtagaccttgacagtttacctcacacaaaaaggttaattattctaagaagtcacatttgataaa

SEQ ID NO: 19813 - DNA, 110 bp, synthetic construct
  source 1..110: mol_type = other DNA
ctttgtgggaccacaaaactggcataaagaaaaaggactcagacctaacagtttaaggggccaaagagaatagagatgtctcgtaggaaacacacatgaagaagaactca

SEQ ID NO: 19814 - DNA, 110 bp, synthetic construct
  source 1..110: mol_type = other DNA
aggggccaaagagaatagagatgtctcgtaggaaacacacatgaagaagaactcagagcaagcacttctcttggctggctctggaacgagctcttatcaggtgaccccac

SEQ ID NO: 19815 - DNA, 110 bp, synthetic construct
  source 1..110: mol_type = other DNA
aaggatggggaaggagacatggaaaacgggcctggcccccagcctgtcagactaatggctcgaggtcctggggcctcctttgcagccatgccttccagccacagatgaac

SEQ ID NO: 19816 - DNA, 110 bp, synthetic construct
  source 1..110: mol_type = other DNA
gggtgcctggaaaccccaggccgtgtttatgcagcctgagtatgtacaggtgttgagctcggtgagctggcctacatcccccagtgctccctggggtatatactctttga

SEQ ID NO: 19817 - DNA, 110 bp, synthetic construct
  source 1..110: mol_type = other DNA
tataaaccaggcactttacccaagtctttatttaaccttggcaaggggattattgtcactttatggatgatgaaactgaggaccagagaggccacgttgcctaaggacac

SEQ ID NO: 19818 - DNA, 110 bp, synthetic construct
  source 1..110: mol_type = other DNA
tcactttatggatgatgaaactgaggaccagagaggccacgttgcctaaggacacacagtaagtggtagagccaggaaggaaatacagtctgtaggccttctcttcccat

SEQ ID NO: 19819 - DNA, 110 bp, synthetic construct
  source 1..110: mol_type = other DNA
aaaaaagaaagaaactgaggctcaggaagggtaagaacttcacaaaagctagtaagtgaccccgtgctggggttttgaccaacgctgtctgaccctcagcccgtgccctg

SEQ ID NO: 19820 - DNA, 110 bp, synthetic construct
  source 1..110: mol_type = other DNA
gtgaccccgtgctggggttttgaccaacgctgtctgaccctcagcccgtgccctgtgtcaccatgtgacaccacctcaacaggaatgtccccctcttggagctggctttc

SEQ ID NO: 19821 - DNA, 110 bp, synthetic construct
  source 1..110: mol_type = other DNA
tttgaattacacatcaccctctgtggcacgagctcattattccattttacagagttggaaagtaaggctcagagaggagagggaatttacccaaggtcagaataagtagg

SEQ ID NO: 19822 - DNA, 110 bp, synthetic construct
  source 1..110: mol_type = other DNA
gaggcaccctttttagaacaggaaactgccagacagagaggtttagtgagacactgacgtcatccagctagtagtcgcagagttgggtgtccagcacaggcccacgctct

SEQ ID NO: 19823 - DNA, 110 bp, synthetic construct
  source 1..110: mol_type = other DNA
gacgtcatccagctagtagtcgcagagttgggtgtccagcacaggcccacgctctcaaccaccacaccttgctaggtctctcagcctgtcctggagcgtctgggtctgta

SEQ ID NO: 19824 - DNA, 110 bp, synthetic construct
  source 1..110: mol_type = other DNA
atcttcctcgatctgttaataaacattcactactgagtgacttcctgagctgcagatgaaaccacctacctcccctggaccacggtgacaatgttctccttctgaaccag

SEQ ID NO: 19825 - DNA, 110 bp, synthetic construct
  source 1..110: mol_type = other DNA
agtctagcttttgatgttctcatggggcagaccactgccctccccacatcttcccagctcgacaagtcactgctggcattagcttggctaatttggtcataaaatgtgag

SEQ ID NO: 19826 - DNA, 110 bp, synthetic construct
  source 1..110: mol_type = other DNA
agctcgacaagtcactgctggcattagcttggctaatttggtcataaaatgtgagcctgtggccctggaagacgttgtaggatccaacctaattctctctgtgtgatgtg

SEQ ID NO: 19827 - DNA, 110 bp, synthetic construct
  source 1..110: mol_type = other DNA
agacggtggccctccaagatcagagggtgaggaaacgagaagaaatgaccagggcaagagagtcaagctgaagacagacatcgtctcatatctctttgaaaagatctgaa

SEQ ID NO: 19828 - DNA, 110 bp, synthetic construct
  source 1..110: mol_type = other DNA
aagagagtcaagctgaagacagacatcgtctcatatctctttgaaaagatctgaaagggcagatgaaacatctcaatgtcctgaaattaacagaactgagttcaggctca

SEQ ID NO: 19829 - DNA, 110 bp, synthetic construct
  source 1..110: mol_type = other DNA
cccaagggtgtgagtgtcaaggtgaggtgctgggcaaccacctggatgggcaccctgctccccctccctgggatacaagggaccttgggagacagaacagctggacgccc

SEQ ID NO: 19830 - DNA, 110 bp, synthetic construct
  source 1..110: mol_type = other DNA
tgctccccctccctgggatacaagggaccttgggagacagaacagctggacgcccaacatctatcctaggaccttccagctctccttgtgcccctcacagggaagttatg

SEQ ID NO: 19831 - DNA, 110 bp, synthetic construct
  source 1..110: mol_type = other DNA
ttagaacccagcaatcccacagctaagatggatttggtaaaggatgcctgccacgttgtatgcgtgtccaagatgcagggatgagcaggtgcacagctctcatcaggtaa

SEQ ID NO: 19832 - DNA, 110 bp, synthetic construct
  source 1..110: mol_type = other DNA
aaagggctcgtcctggcgcagcgcggacatggaggaggacttattccagctaaggcagctgccgtgagtatcctggggccgattgaggcagataggctttcctttaaaaa

SEQ ID NO: 19833 - DNA, 110 bp, synthetic construct
  source 1..110: mol_type = other DNA
cagctgccgtgagtatcctggggccgattgaggcagataggctttcctttaaaaaacgaaaacctgtaggggggcctctctgcatggcttcttgaatttaaagggaactg

SEQ ID NO: 19834 - DNA, 110 bp, synthetic construct; identical to SEQ ID NO: 19832
  source 1..110: mol_type = other DNA

SEQ ID NO: 19835 - DNA, 110 bp, synthetic construct; identical to SEQ ID NO: 19833
  source 1..110: mol_type = other DNA

SEQ ID NO: 19836 - DNA, 110 bp, synthetic construct
  source 1..110: mol_type = other DNA
cagtttacagtggagaccttctcaatcagcccctcttggggtggggcccagacttctgtgttgtgatcagttctgttggggttttgaggcatggtccagttcaagaaccc

SEQ ID NO: 19837 - DNA, 110 bp, synthetic construct
  source 1..110: mol_type = other DNA
tcttcaagcccgtgtctgtccaggccatgtggtaagtgtggttttagggacttttaactcctctgaaatgtttttctagctggcagcatgaacagaaaaacccctgtcta

SEQ ID NO: 19838 - DNA, 110 bp, synthetic construct
  source 1..110: mol_type = other DNA
aactcctctgaaatgtttttctagctggcagcatgaacagaaaaacccctgtctacttagaagcacacttaggtgcatttatttcctgaatgtgacaaaatacacataac

SEQ ID NO: 19839 - DNA, 110 bp, synthetic construct
  source 1..110: mol_type = other DNA
gtctgcagtgatgaggttttctgctttatgaattttttttgttaggtcaggaaattaggaaatagagcttctccatttcctgttgcatatttaggcatgattaaggaaat

SEQ ID NO: 19840 - DNA, 110 bp, synthetic construct
  source 1..110: mol_type = other DNA
tttcccccagtggcgaccttttgtaaaatagtagtacagtctcccatccagccatattgacattgacagagtcaacacacagatcagctctgtcaccacaggatccccct

SEQ ID NO: 19841 - DNA, 110 bp, synthetic construct
  source 1..110: mol_type = other DNA
ctgtggttctagcgctgaacctcttgtacattttctcacagactccagtaaagagctagaggagctgcggtcggcgttcgcccgcgctttggagtacctgaaacaggagg

SEQ ID NO: 19842 - DNA, 110 bp, synthetic construct
  source 1..110: mol_type = other DNA
ctagaggagctgcggtcggcgttcgcccgcgctttggagtacctgaaacaggaggtagaagagcgtaagtgggcccttcctgcctcatttgtgtgcttcctattctggtt

SEQ ID NO: 19843 - DNA, 110 bp, synthetic construct
  source 1..110: mol_type = other DNA
ctctctcttgctggcgtcgaataaatctctcctggcttcctgccctgaactcctagcgacaatccttgctgccacctctcccagctttatcagatttaggtgctggagta

SEQ ID NO: 19844 - DNA, 110 bp, synthetic construct
  source 1..110: mol_type = other DNA
aaagtcaccaactccttcacatcccctttattagcttgtatcccttccccatcgttcttccctattccttcctttgctctttctggtgttgcctcccaagtaaacagcat

SEQ ID NO: 19845 - DNA, 110 bp, synthetic construct
  source 1..110: mol_type = other DNA
tggttcctagttggattcgtttccatggtgccacaacaggagcatctttgggccaaaccaagcacttgggtcctcaaagctccagaggctggctgcattattggtgggtg

SEQ ID NO: 19846 - DNA, 110 bp, synthetic construct
  source 1..110: mol_type = other DNA
gatattatcttcaaagcgatttagaatgctaatctactaggccttcaagatactggctgtattcccaagtcaatgaatgacctgggacttcatgctgtctctttggtccc

SEQ ID NO: 19847 - DNA, 110 bp, synthetic construct
  source 1..110: mol_type = other DNA
gctgtattcccaagtcaatgaatgacctgggacttcatgctgtctctttggtccccagtttcctgtatgaggtgcctggcatacagtaagtgctcaaggaatgacttaaa

SEQ ID NO: 19848 - DNA, 110 bp, synthetic construct
  source 1..110: mol_type = other DNA
tcctgcccaagagagaaagctggacaaaagatggtcaaacctcctttaatcttgtacactttgcccctgaccttccaggatgcctcttgggagcaaagcaagcactcggg

SEQ ID NO: 19849 - DNA, 110 bp, synthetic construct
  source 1..110: mol_type = other DNA
ctggtccatcctgccttgaactccaaggaccaaggaaaaatctcaatgtttctgctctctagctagagtccaggttcaagagtagagtctaggttcaagagcagggtcca

SEQ ID NO: 19850 - DNA, 110 bp, synthetic construct
  source 1..110: mol_type = other DNA
tctctagctagagtccaggttcaagagtagagtctaggttcaagagcagggtccaggccaccctcccatctgcacagaaatggagatcagggtgacaggaaaagatccgg

SEQ ID NO: 19851 - DNA, 110 bp, synthetic construct; identical to SEQ ID NO: 19849
  source 1..110: mol_type = other DNA

SEQ ID NO: 19852 - DNA, 110 bp, synthetic construct; identical to SEQ ID NO: 19850
  source 1..110: mol_type = other DNA

SEQ ID NO: 19853 - DNA, 110 bp, synthetic construct
  source 1..110: mol_type = other DNA
ggctttactgtttagagccccagtttcctcaatggtgaaatgggctagtgcctagttcatcgtcttgttctgaggagtaaacgagctaatgcatgtgatatgcgagaaca

SEQ ID NO: 19854 - DNA, 110 bp, synthetic construct
  source 1..110: mol_type = other DNA
ttcatcgtcttgttctgaggagtaaacgagctaatgcatgtgatatgcgagaacagtagaggtggacctcagagatactgcaggtttggttctagtccactgcaataaag

SEQ ID NO: 19855 - DNA, 110 bp, synthetic construct
  source 1..110: mol_type = other DNA
cacttggggtgataatacccaaaaaggcatcctttgcagaattgcttcacctatactccagtgttaacgatttgggtacagctccagagatgaacaaatgacccaggctt

SEQ ID NO: 19856 - DNA, 110 bp, synthetic construct
  source 1..110: mol_type = other DNA
aaaatgagatttatttcttgatccaagtgtcaatccctttaatatgtctcctaagaagctgcaaataaaagtgaagtgaggaaacagagcagggcaaaagagggaatatt

SEQ ID NO: 19857 - DNA, 110 bp, synthetic construct
  source 1..110: mol_type = other DNA
gacccagaagtgggattgctcaaccatgttaagtgaaataagccagttacagatggacaaatattgtatgattccacttatatgaagtatttgaaacagtcgaactcact

SEQ ID NO: 19858 - DNA, 110 bp, synthetic construct
  source 1..110: mol_type = other DNA
gacaaatattgtatgattccacttatatgaagtatttgaaacagtcgaactcactccagttgataacagtgtatagtatagttgatatttgctaagaaagtggaacttga

SEQ ID NO: 19859 - DNA, 110 bp, synthetic construct
  source 1..110: mol_type = other DNA
cagtatggcgttgcagtacacccagcacatatactcaggaagcagtagtaaatgggatattttactgagaacattgacacttggcagttcagctgtgtaaagggaatata

SEQ ID NO: 19860 - DNA, 110 bp, synthetic construct
  source 1..110: mol_type = other DNA
gatattttactgagaacattgacacttggcagttcagctgtgtaaagggaatataactctcaggaaagacataacacacatgctcacagtcacgccacactcacatatac

SEQ ID NO: 19861 - DNA, 110 bp, synthetic construct
  source 1..110: mol_type = other DNA
ctggtctctccccttgacacagcaaagtgtgtgccctgtcctctgtgctgggcccctgcccctgctctggttgttgtgaccgcttgtcccagcctcccagcagctgtggc

SEQ ID NO: 19862 - DNA, 110 bp, synthetic construct
  source 1..110: mol_type = other DNA
ctgcccctgctctggttgttgtgaccgcttgtcccagcctcccagcagctgtggcctcatgggtaactcaagaggatctgggaactgactggaagcttagggtatgagtc

SEQ ID NO: 19863 - DNA, 110 bp, synthetic construct
  source 1..110: mol_type = other DNA
cttgggttgctgctgttgtacaggttccacccgctgcctgggaacttccatgtgctatgggtgtagccaaaaaatagttgatgtttacatgtattacataaataatacat

SEQ ID NO: 19864 - DNA, 110 bp, synthetic construct
  source 1..110: mol_type = other DNA
ctcagcgcctcattcagtttaagcctcatggccacttgatggtaggataggtaattcccattttacaggtgacacagagaagcctcaggtagtgagtggtggaccaggga

SEQ ID NO: 19865 - DNA, 110 bp, synthetic construct
  source 1..110: mol_type = other DNA
gtttgcaagaaagcaaaagctgttctctggagcatcctccaggatggtggttacggggtcacgtggccacagctagcatgaagagggtctggggaagtcaatattcagtg

SEQ ID NO: 19866 - DNA, 110 bp, synthetic construct
  source 1..110: mol_type = other DNA
cttgttcccagcctgttgcagatggtggttggagaaccgagctgggagttcctgttctttctgagatgagtgggataaaaacatctaggtcttcagggaaattctgtctg

SEQ ID NO: 19867 - DNA, 110 bp, synthetic construct
  source 1..110: mol_type = other DNA
ttagcaccgcttaagtggggaaatatgaccttttagatgtcattaaaatggcaaccacccaaagaaggtgattctgcccctcacgtggctgtctggtgggtggcagctct

SEQ ID NO: 19868 - DNA, 110 bp, synthetic construct
  source 1..110: mol_type = other DNA
ctctggctctacgatttctaagaagacccactgtgggggtggcattattttacagggacttgattctcctctggagcctccctgccccctgctttgggcttgggagcagc

SEQ ID NO: 19869 - DNA, 110 bp, synthetic construct
  source 1..110: mol_type = other DNA
gagcatctccagaagctctgtgctgtgagaaagctctcttggaattcatcctgcgcacagatatctcgctgtccttttgtggtcctctgaaaccacaggggtcctccctc

SEQ ID NO: 19870 - DNA, 110 bp, synthetic construct
  source 1..110: mol_type = other DNA
gggagagaagtgagtccaagagatctgggctcagtgattggaatatagtgggtgtttgacactgtgggactgaagagctttacccaaggacagtgtagtgggtgataaag

SEQ ID NO: 19871 - DNA, 110 bp, synthetic construct
  source 1..110: mol_type = other DNA
catgtgtggtaaagtcacgcacggtggaagtgcgtgtgatagaatcacgcttggtggaatcatgaggggtggaagccccgttgtcccctctctcttttttgtagttgatg

SEQ ID NO: 19872 - DNA, 110 bp, synthetic construct
  source 1..110: mol_type = other DNA
ggaatcatgaggggtggaagccccgttgtcccctctctcttttttgtagttgatgctgtttgatgaatggcatgtgggcctctcgatgagcaggcaatcttctataagct

SEQ ID NO: 19873 - DNA, 110 bp, synthetic construct; identical to SEQ ID NO: 19871
  source 1..110: mol_type = other DNA

SEQ ID NO: 19874 - DNA, 110 bp, synthetic construct; identical to SEQ ID NO: 19872
  source 1..110: mol_type = other DNA

SEQ ID NO: 19875 - DNA, 110 bp, synthetic construct
  source 1..110: mol_type = other DNA
ctctgatcttttagcatgtttgaaattgagatctgtgtgtttaaataaacataagactccccaagattcctcttgccaggggaaatgccatctttctctcctcagttcta

SEQ ID NO: 19876 - DNA, 110 bp, synthetic construct
  source 1..110: mol_type = other DNA
ggaatcggccccttttcttgctgctggagtaattgcgatctgagaccacaaacacattatccagaagccagggggatcaagtatgcttagaggaagaagtatttattggt

SEQ ID NO: 19877 - DNA, 110 bp, synthetic construct
  source 1..110: mol_type = other DNA
attatccagaagccagggggatcaagtatgcttagaggaagaagtatttattggtgtggaacctcccctgtgaactgccaggggaggaagctgcttcctgcttggtcctt

SEQ ID NO: 19878 - DNA, 110 bp, synthetic construct
  source 1..110: mol_type = other DNA
agacccccaccattgaatccccccaccccccagcctctctaacagttttctgcaagctaactgcctctctccagcctccccttccaccccaggtgcacctgcctcagtgc

SEQ ID NO: 19879 - DNA, 110 bp, synthetic construct
  source 1..110: mol_type = other DNA
gctaactgcctctctccagcctccccttccaccccaggtgcacctgcctcagtgccatgacccgtgttctgcttggacaggtttgacgcacagctggcccaggccctggg

SEQ ID NO: 19880 - DNA, 110 bp, synthetic construct
  source 1..110: mol_type = other DNA
tggacagacatttggggaatgtttatcaatttcttcacaagcttctacaagttggagcttccggattaaatattttggtttgggttcccaacttttcccttagtagttaa

SEQ ID NO: 19881 - DNA, 110 bp, synthetic construct
  source 1..110: mol_type = other DNA
agtccaagaaaattgctggggacaggcagtgggcagggacgtaaattcagtgaagaggtcagcagagtgtggacagtggtcaccaatgcaggtgggagcttcaatcttat

SEQ ID NO: 19882 - DNA, 110 bp, synthetic construct
  source 1..110: mol_type = other DNA
gactcatccccactctcttgccaaatctgtcttcctctagagctcatgttatctgtcattcctccaacacttatggagcacctgctgtatacctggcatggtactaggca

SEQ ID NO: 19883 - DNA, 110 bp, synthetic construct
  source 1..110: mol_type = other DNA
ggggagcttgatatagctttggtttctcttactgcacctattttataagcattctgaaatattttttttcctgaaagctaaacgaataaataaaggatgtggttagtctc

SEQ ID NO: 19884 - DNA, 110 bp, synthetic construct
  source 1..110: mol_type = other DNA
ctcttactgcacctattttataagcattctgaaatattttttttcctgaaagctaaacgaataaataaaggatgtggttagtctctgcctttgcttaaaactttgcataa

SEQ ID NO: 19885 - DNA, 110 bp, synthetic construct
  source 1..110: mol_type = other DNA
tgatctagtgggatgatatatatgaaaggactccagaaagcccatagggagaatgtaggtaactaacataggtattagttatcactagaatcaacccaagattatacctt

SEQ ID NO: 19886 - DNA, 110 bp, synthetic construct
  source 1..110: mol_type = other DNA
taggtaactaacataggtattagttatcactagaatcaacccaagattataccttagactcggaggtccctctggaagctcatggtgtggacagtgatggcaggagcaca

SEQ ID NO: 19887 - DNA, 110 bp, synthetic construct
  source 1..110: mol_type = other DNA
attaagaaatggcagagccagaattccaataccaaagccctggactccaaccaagctggaccttggaggagagaaatgatggggcgggcagagagaggggaacttcagcc

SEQ ID NO: 19888 - DNA, 110 bp, synthetic construct
  source 1..110: mol_type = other DNA
ctgttttcccctgcagtcaagtgtttctgcagctcgctgatctggggggagtcgctggaactcagaggagaacaggcatttaactccagccagcattcagagtcttatag

SEQ ID NO: 19889 - DNA, 110 bp, synthetic construct
  source 1..110: mol_type = other DNA
ctgtatgctccatttctgtctaggaagctgctaatacacattggctggcaaagacactgacaagtccttcaaggggaaaaaatgtttaatttttatttaacctggcattt

SEQ ID NO: 19890 - DNA, 110 bp, synthetic construct
  source 1..110: mol_type = other DNA
ttctctgacaccaggcgtgcaagtcagaagggctaagttgcagctctcacccaatgagggatgggagttggaggacaaataccccagctccctttcccctcaaggtatgt

SEQ ID NO: 19891 - DNA, 110 bp, synthetic construct
  source 1..110: mol_type = other DNA
gagggatgggagttggaggacaaataccccagctccctttcccctcaaggtatgttctgtactctgcctcatagttcctgcagatggagcctaatgcccacagtggaact

SEQ ID NO: 19892 - DNA, 110 bp, synthetic construct
  source 1..110: mol_type = other DNA
ctctcaaaggacagaggagcgtgtgtggttttctgtgctgtctggctccaggaagaacccagctgaggaaggctgtccaggaggtgagacccaaacaaacacctgtattt

SEQ ID NO: 19893 - DNA, 110 bp, synthetic construct
  source 1..110: mol_type = other DNA
gcccaagtgtcttcatcttgttagttcttcacaaacacactgtctcttcatctgaaagaggccccctttggcccttccttttgaatctcatatttttatgagcccctgta

SEQ ID NO: 19894 - DNA, 110 bp, synthetic construct
  source 1..110: mol_type = other DNA
aggaaggaacccacttcataggctgttgagaggccttgacggctcagggcagccacagcaggcagcctggcccttggtaccccgaaaagccttacggaacaagagccatc

SEQ ID NO: 19895 - DNA, 110 bp, synthetic construct
  source 1..110: mol_type = other DNA
cagcaggcagcctggcccttggtaccccgaaaagccttacggaacaagagccatcgcccagaacccacagggggagagggaggtctcagctgcccacatgccttctcagg

SEQ ID NO: 19896 - DNA, 110 bp, synthetic construct; identical to SEQ ID NO: 19894
  source 1..110: mol_type = other DNA

SEQ ID NO: 19897 - DNA, 110 bp, synthetic construct; identical to SEQ ID NO: 19895
  source 1..110: mol_type = other DNA

SEQ ID NO: 19898 - DNA, 110 bp, synthetic construct
  source 1..110: mol_type = other DNA
gaacatctcgccccggaagttggactgctcaaaggcgacccagctggatgtgacggagaggggaacggtggggagagtcaggagggtaatcattatcagaagccccctcc

SEQ ID NO: 19899 - DNA, 110 bp, synthetic construct
  source 1..110: mol_type = other DNA
agaccccgcatagtggttgtgaggctcaaagcctcctcctggccttttgtaacgtccccacatgttgtgacatcgtagatggtgcagatctgctccagtcccgcaaggtc

SEQ ID NO: 19900 - DNA, 110 bp, synthetic construct
  source 1..110: mol_type = other DNA
cgaacgcttcctgaaggaggtgacccctgagctgaggcttgagaaaggacttggaattcaccaaatcggggaggggaacaggtgagcattccaggtggaatggcatgtgc

SEQ ID NO: 19901 - DNA, 110 bp, synthetic construct
  source 1..110: mol_type = other DNA
atggggagagtcacacatgcttggagggctgttttcatcatcaaatgtgcttgctttgcgtctggtctcagcacagcatctgacaaaaaggaagcatgtcataaatgtaa

SEQ ID NO: 19902 - DNA, 110 bp, synthetic construct
  source 1..110: mol_type = other DNA
ttgcgtctggtctcagcacagcatctgacaaaaaggaagcatgtcataaatgtaagctattgtgactgtcggttgggtcctgcaatatttttttcattctgaggggggca

SEQ ID NO: 19903 - DNA, 110 bp, synthetic construct
  source 1..110: mol_type = other DNA
tcggttctatggcgctaagtatatttacattgttgtgcaaacatcaccaccattcagctcctggattttttacctttgggaaaaaaaaaacaaaaacctgaaactttgtt

SEQ ID NO: 19904 - DNA, 110 bp, synthetic construct
  source 1..110: mol_type = other DNA
cccacaggaagtggttacatttgagacctggaagatgagtaggtgtaaaactgatagaaataaagcagtacatatgaatcgtgtgtgtgtgtgtgtgtgtgtgtgtgtgt

SEQ ID NO: 19905 - DNA, 110 bp, synthetic construct
  source 1..110: mol_type = other DNA
agcatcttatgaggggctggttttatagcatcccctgcaagagctggcctggagaggcaggggctccaagggaaaccccactgatgagatttccagctccaaacaggtgg

SEQ ID NO: 19906 - DNA, 110 bp, synthetic construct
  source 1..110: mol_type = other DNA
gcactgctgatgggcatttaagttgtccacataaagagctgctataggtagtttctttgtggctcagcaggttaaggatcttgctttgtcagtactgtggctcaggtcac

SEQ ID NO: 19907 - DNA, 110 bp, synthetic construct
  source 1..110: mol_type = other DNA
aagaatcctgtacatcactgctccccactgggtgtgtaaagagctgcttctggcgtgcagacgacagagctttcagtagccctgacccacggaatgagacagaccttcca

SEQ ID NO: 19908 - DNA, 110 bp, synthetic construct
  source 1..110: mol_type = other DNA
atgttacctctccccacttccagaaggaccaagcacccccagaggaccccaaacacagcccctcgcccagcggccctcggactccacccgggggctggtgagcgctaaga

SEQ ID NO: 19909 - DNA, 110 bp, synthetic construct
  source 1..110: mol_type = other DNA
cagcccctcgcccagcggccctcggactccacccgggggctggtgagcgctaagaacaaatagcaagggaaatgaacaaattatcctgatagtttgtttaagaagagggg

SEQ ID NO: 19910 - DNA, 110 bp, synthetic construct
  source 1..110: mol_type = other DNA
ctcagtgggtgccatccttgcaccctgcatttgcctctccaatgctgcaaggctgactgattttatgcccaagcctgtcaacctcccaagttagctggacaccttcacaa

SEQ ID NO: 19911 - DNA, 110 bp, synthetic construct
  source 1..110: mol_type = other DNA
actgattttatgcccaagcctgtcaacctcccaagttagctggacaccttcacaagcatcattgttgcccctgggtcggcgagggtgctggggcaccaagatggtcaagg

SEQ ID NO: 19912 - DNA, 110 bp, synthetic construct
  source 1..110: mol_type = other DNA
cccctggatgggatgaatccattgtctgatctcagaagatttccatgcaggctgcacatgatttccatgagcagggatgagctttaaacccctaaagcaggttgaggggc

SEQ ID NO: 19913 - DNA, 110 bp, synthetic construct
  source 1..110: mol_type = other DNA
agttgggaaacatcccttccacttagaataaaccccagtctttttcccctccctcccacttccagctctctaaatatgtgtgaatagaaaatataaatatatgtaaatat

SEQ ID NO: 19914 - DNA, 110 bp, synthetic construct
  source 1..110: mol_type = other DNA
attgtcactgcctcttttcttggttccaataaacccacaggacaaaataatgacatcacctcagtggtatccaatgcttatctagagctcagctggctgttggctgatct

SEQ ID NO: 19915 - DNA, 110 bp, synthetic construct
  source 1..110: mol_type = other DNA
gaaaaagaggagcagtaccccgagacacccggctgaagagcccacaccatcaagaataacacaggctccgcttctgagactcagtgttcagaaggccaatgctatgggcc

SEQ ID NO: 19916 - DNA, 110 bp, synthetic construct
  source 1..110: mol_type = other DNA
acctgaataaccatgacagactgtatggcctatagagcctaaaatatttactgtgtttgcagacccctgccctagatgaggacggctcttcagaacaaagcttgggccag

SEQ ID NO: 19917 - DNA, 110 bp, synthetic construct
  source 1..110: mol_type = other DNA
tttgcagacccctgccctagatgaggacggctcttcagaacaaagcttgggccaggacattcaagagtagcgggatttcacaagcatttgggggcacttttaagactcag

SEQ ID NO: 19918 - DNA, 110 bp, synthetic construct
  source 1..110: mol_type = other DNA
agcctgtatctgctacaaacagcagtggcataccagccagctactgaaaccttggttacttgaccttagtttcctcaccagaaaaggttgctgtgtggaatgaacgggct

SEQ ID NO: 19919 - DNA, 110 bp, synthetic construct
  source 1..110: mol_type = other DNA
ggccactaggaagatcagaagctctgagaccaggttggaaagggcctacgcaatgctaagggttggaaacctctaattccctgagttagatctacattcttcctaaaaga

SEQ ID NO: 19920 - DNA, 110 bp, synthetic construct
  source 1..110: mol_type = other DNA
gagaacacgtgtccacttcagcctccagacgctgactgagaagctggatggaggagccccttgtcctggaaaacctccggctatctcaggaccctgttttgtgtctgagg

SEQ ID NO: 19921 - DNA, 110 bp, synthetic construct
  source 1..110: mol_type = other DNA
tgtgatgccctccctgcccctccctgaggggggagctgtccaacatcccatgcttcagcttgtgttgcacacttcacctgggtttcagatggccttgttggcttggcgaa

SEQ ID NO: 19922 - DNA, 110 bp, synthetic construct
  source 1..110: mol_type = other DNA
atcccaaggttttacaagcttctagaaacaaaatccacttgggacagggttcttctgctcacctgatgttgggcttcctccaggttcccactcgcccaaagggagaggcc

SEQ ID NO: 19923 - DNA, 110 bp, synthetic construct
  source 1..110: mol_type = other DNA
aaacaggttgagttcaggtacatcccagccaaatcaccagctagtctgaggaagtatcaagatttgggaactggaagagctcgcctaactttataaataatgtgaccctg

SEQ ID NO: 19924 - DNA, 110 bp, synthetic construct
  source 1..110: mol_type = other DNA
atcaagatttgggaactggaagagctcgcctaactttataaataatgtgaccctggcccagtgagaggaagtgagtttgttaccgatctgggagagggactcctgaccca

SEQ ID NO: 19925 - DNA, 110 bp, synthetic construct
  source 1..110: mol_type = other DNA
taaggttcagagcccttgaatgtctaatcccagtacagccaatatctgagccacagaacattagcttatcagacctgctcgagttttccctttcttggtataaaactgat

SEQ ID NO: 19926 - DNA, 110 bp, synthetic construct
  source 1..110: mol_type = other DNA
aagaacacacatttcttgaagggaaatagcaggcaagctcacactgaagcagtgaaagactcgactaaagccctggctgaggacaagatctgtccaactctgagcagcca

SEQ ID NO: 19927 - DNA, 110 bp, synthetic construct
  source 1..110: mol_type = other DNA
atccttttagtgacattttcaaagtttaacatcagatattttatcttatttaaacctaaagggcatgtcaaagcctagtgtgccctcaagaacgagctaatgcattcttt

SEQ ID NO: 19928 - DNA, 110 bp, synthetic construct
  source 1..110: mol_type = other DNA
ctaaagggcatgtcaaagcctagtgtgccctcaagaacgagctaatgcattctttgttgttcatttagactagagatgcatagtctgtacactcaagagattaaaagcaa

SEQ ID NO: 19929 - DNA, 110 bp, synthetic construct
  source 1..110: mol_type = other DNA
cataaacaagaaaaagttcttgtgaagctgacacttttttccaaagactttacggtatagaaatcagaacttaaaacccagaaaggcatattatgctggtttttcaaaac

SEQ ID NO: 19930 - DNA, 110 bp, synthetic construct
  source 1..110: mol_type = other DNA
taggggatgaggatatttgtagaacaatgcaaattatcataggcacctgggcatcacccacagcttggtgtgtagggtacacaacaaatcccatgcccatacccaagtcc

SEQ ID NO: 19931 - DNA, 110 bp, synthetic construct
  source 1..110: mol_type = other DNA
tctgcaacctaatttttaaagactttgcccttccatttcaataggttttcacctcatctaatacccagaccaaattcagatcacccagatgaccacagctggtttgtcta

SEQ ID NO: 19932 - DNA, 110 bp, synthetic construct
  source 1..110: mol_type = other DNA
atctaatacccagaccaaattcagatcacccagatgaccacagctggtttgtctaaattagtatcaaatctagaatgatcataaagaaacatttactttaagctatctct

SEQ ID NO: 19933 - DNA, 110 bp, synthetic construct
  source 1..110: mol_type = other DNA
gaaggtctcttgttaactacctcaaacatctaaaactcagcctaaaaccatatggtaaatatttttttaaaaaaaacctctaagttggagatctcgtagtggtgcagcag

SEQ ID NO: 19934 - DNA, 110 bp, synthetic construct
  source 1..110: mol_type = other DNA
tagaggcgtatttttgatgtgtttgtggaagaaggtgaacacaacatcttactccttcgccatcttgatccttcccataaatcaacattttgcttaggccaactagaaac

SEQ ID NO: 19935 - DNA, 110 bp, synthetic construct; identical to SEQ ID NO: 19934
  source 1..110: mol_type = other DNA

SEQ ID NO: 19936 - DNA, 110 bp, synthetic construct
  source 1..110: mol_type = other DNA
agggtaaactcaaaatagccaaactgttgctcctaagaagttactgggtagcttctagttaaagataacagattaaacacaagtagttagtggagttcccctagtggcgc

SEQ ID NO: 19937 - DNA, 110 bp, synthetic construct
  source 1..110: mol_type = other DNA
gggtagcttctagttaaagataacagattaaacacaagtagttagtggagttcccctagtggcgcagcagatatgaacctgactagtatccacaaggatgcaggtttaat

SEQ ID NO: 19938 - DNA, 110 bp, synthetic construct; identical to SEQ ID NO: 19936
  source 1..110: mol_type = other DNA

SEQ ID NO: 19939 - DNA, 110 bp, synthetic construct; identical to SEQ ID NO: 19937
  source 1..110: mol_type = other DNA

SEQ ID NO: 19940 - DNA, 110 bp, synthetic construct
  source 1..110: mol_type = other DNA
tctttggtggaagacctctaagagcttttattttgcatactgtcaatctgagaaaagatactgtacagtgtaagttcagagtacctttttggtagagtacctaaccagcc

SEQ ID NO: 19941 - DNA, 110 bp, synthetic construct
  source 1..110: mol_type = other DNA
ctttgactctgctacccagctgtcagatgtcacgttcctcttcacaaatctttaagagctttttcactctttataggatggaatctaaaccctgtcttacctgaatatcc

SEQ ID NO: 19942 - DNA, 110 bp, synthetic construct
  source 1..110: mol_type = other DNA
gagctttttcactctttataggatggaatctaaaccctgtcttacctgaatatcctaaagcccttggtattttgctcctcgtctgtctttgtagtttgatactttattat

SEQ ID NO: 19943 - DNA, 110 bp, synthetic construct
  source 1..110: mol_type = other DNA
attgaaaattactgttaacttcgctaagtcccgtgtcccccaggaatgtgggatgctgaggaaatgcttctggccctcccttctggatgggttctgcgctgcggcagctg

SEQ ID NO: 19944 - DNA, 110 bp, synthetic construct
  source 1..110: mol_type = other DNA
ggccacctttactttaggttcatttctcctctgtgcgtggaagtgtgttctccctatcttagcatttctcagagtgtgtcccgtgaaatggtgtgagatgggcttatcat

SEQ ID NO: 19945 - DNA, 110 bp, synthetic construct
  source 1..110: mol_type = other DNA
atcttagcatttctcagagtgtgtcccgtgaaatggtgtgagatgggcttatcatcaaaggggaggaaatgttgcttttagcaaaggttaaaaccttgtaaagtttttta

SEQ ID NO: 19946 - DNA, 110 bp, synthetic construct
  source 1..110: mol_type = other DNA
ttgttaagcctgattccgccacctaattaacacttgtttatattaaacaagtgttagctgccatatgcagagaagggggtggtcctttttgaagtttctagttgcagact

SEQ ID NO: 19947 - DNA, 110 bp, synthetic construct
  source 1..110: mol_type = other DNA
aaaaagactattttagaatattttgaaattacacttcgtgagaaggagactatacaaagctcagttcgttaagcttttagaatgagtttttgctattcaggttgagtaaa

SEQ ID NO: 19948 - DNA, 110 bp, synthetic construct
  source 1..110: mol_type = other DNA
tccaggcctaaaggaccagctcctgaccacccctccaatccctcaatggccacatggacaggaagcgccctgggctggctcagggcctaaagcatctctgctcctctttc

SEQ ID NO: 19949 - DNA, 110 bp, synthetic construct
  source 1..110: mol_type = other DNA
caagtccctgcttctccccaatctggaggacagaaaatgcagaaaggagcaaagtctagaaggggagcacagctctcagatgcgtgctgcatcctgtgctggcaaatgac

SEQ ID NO: 19950 - DNA, 110 bp, synthetic construct
  source 1..110: mol_type = other DNA
ctagaaggggagcacagctctcagatgcgtgctgcatcctgtgctggcaaatgacgcagggcagtggctcaccccagggaacagggggaacaacaggcctggggtgacct

SEQ ID NO: 19951 - DNA, 110 bp, synthetic construct
  source 1..110: mol_type = other DNA
cgttgtaagagaaaaccttagaccttccaaggagagcttaatgatgtcccatcctccttttggctgggttaatcaggacttcagttgctatagcaatctcactcccaact

SEQ ID NO: 19952 - DNA, 110 bp, synthetic construct
  source 1..110: mol_type = other DNA
ccagactactcccttggctgaggtgtagcgggattcttcttccaggtggtttctgtgtccatgaatgaggccccatagctttcatagggtgagggttggccccagcaagc

SEQ ID NO: 19953 - DNA, 110 bp, synthetic construct
  source 1..110: mol_type = other DNA
gtcagttttctccgcaattactgggcagtcagagtgaaggcacattcctggcttttctttctagtctccccaaaaccccactgcacagctaacaccccacggcaaggtct

SEQ ID NO: 19954 - DNA, 110 bp, synthetic construct
  source 1..110: mol_type = other DNA
gagctgattcccatgagcagacaaagacctgcagaggcagtgccctttataacgggctagctttgtgccatttccgcttttatgactgcctcccaccagaggctgtgcga

SEQ ID NO: 19955 - DNA, 110 bp, synthetic construct
  source 1..110: mol_type = other DNA
ccatgtcacaacactagggatgcagcagtgaacaaaatccagcaccgggcaagaaaagaaagtccacagagtgttatgtggtggtaagtgcaagccaggacaatgaagca

SEQ ID NO: 19956 - DNA, 110 bp, synthetic construct
  source 1..110: mol_type = other DNA
aagaaagtccacagagtgttatgtggtggtaagtgcaagccaggacaatgaagcaggacagtgagagaacaggtgtagtttgtctatgcatgtgtgttataaacaacggt

SEQ ID NO: 19957 - DNA, 110 bp, synthetic construct; identical to SEQ ID NO: 19955
  source 1..110: mol_type = other DNA

SEQ ID NO: 19958 - DNA, 110 bp, synthetic construct; identical to SEQ ID NO: 19956
  source 1..110: mol_type = other DNA

SEQ ID NO: 19959 - DNA, 110 bp, synthetic construct
  source 1..110: mol_type = other DNA
gaggaatttaattttaagagacttatgttctgaaatctcttcatgatgttcctgctctttttttcttctgtcttttaaaaagttacagttcgcattttacaggtgaaaga

SEQ ID NO: 19960 - DNA, 110 bp, synthetic construct
  source 1..110: mol_type = other DNA
gatagggattgcagtaaatctgtaaatttctttgggtgttacggccattttaacaatattctcccaatccaggagcatgggatgtctttccatttctttgaatctttaaa

SEQ ID NO: 19961 - DNA, 110 bp, synthetic construct; identical to SEQ ID NO: 19960
  source 1..110: mol_type = other DNA

SEQ ID NO: 19962 - DNA, 110 bp, synthetic construct
  source 1..110: mol_type = other DNA
cttctttcttcttcaccagaggttaagcacgaggtggcgggacattaatgagcgtgcaggaatttgccttctcttaatttccataaggtagaccttggaactagtcaaag

SEQ ID NO: 19963 - DNA, 110 bp, synthetic construct
  source 1..110: mol_type = other DNA
actaggttagctagcaacccttatgctttgaccactacatgttattatttaagatgtccattgttttgtaacactgtatgttttacagtaggtaatgctatatcattaag

SEQ ID NO: 19964 - DNA, 110 bp, synthetic construct
  source 1..110: mol_type = other DNA
cctgatagaagtatttattcccttctctgactcagtgtttgaaggactagactatggtcttaattacaaatctgattgcattttcaggaaattggagttttttgtggggg

SEQ ID NO: 19965 - DNA, 110 bp, synthetic construct
  source 1..110: mol_type = other DNA
ggctctgctggctccagctggatggcccatctcctgaaactaagctggcccctatgttttacagatgactcgatggctccctgaccacctggctgcccactgctatgcgt

SEQ ID NO: 19966 - DNA, 110 bp, synthetic construct
  source 1..110: mol_type = other DNA
ctggagagtgaatgatagaaatgttaattaacagtattgagcattgttctcagggctttatgtgcattatcattttaaatcttcccagctattttatgaagtagattcta

SEQ ID NO: 19967 - DNA, 110 bp, synthetic construct
  source 1..110: mol_type = other DNA
aatgagacttaacacactgtgcttcctccacacaggatgagtctggagtctgtacaagtgaggaaatgcctttgtttgtcccaaatgtatcctctttagaaattattaga

SEQ ID NO: 19968 - DNA, 110 bp, synthetic construct
  source 1..110: mol_type = other DNA
gtctggaaatgtaaaggctcacgttggctttggccaccaaagggaggaacccttctgcaacgcttgaaaacgcacagctgaggggggcggggagcatggtttgagccttg

SEQ ID NO: 19969 - DNA, 110 bp, synthetic construct
  source 1..110: mol_type = other DNA
aaattacagcctttcaggagctcacaagtgagggagggcagagaggcagacaaatccattcacaacaccagaaatcacagccctgggtgagggtgagcttctggcccagg

SEQ ID NO: 19970 - DNA, 110 bp, synthetic construct
  source 1..110: mol_type = other DNA
gtgagtgcaaagtaccataatcatgctggctgaactgctaggatcgctgcctgttcagggtttgagaagaagccagaaccctgctcttagcagctgccccagctctgggc

SEQ ID NO: 19971 - DNA, 110 bp, synthetic construct
  source 1..110: mol_type = other DNA
actctcatcctcatggatcctagttgggatcatcggctgctgagccatgaagggaactccccttgaaggcctttcttggcaaatctacctcctcccaaaagcaaccttca

SEQ ID NO: 19972 - DNA, 110 bp, synthetic construct
  source 1..110: mol_type = other DNA
tgttgtctgaactgcaaagacggtctgtgctgccggggcttgggcagctaccttattcgggacccacacctccttttgaggtcctaattctggagaagaacacccatctc

SEQ ID NO: 19973 - DNA, 110 bp, synthetic construct
  source 1..110: mol_type = other DNA
acaggaaaggacctggtcccaagacccctgagcccatggcaaagccagggaccatagcacccaggcccagtcctctggagctcaaaccccaactcactgcaacagtgcct

SEQ ID NO: 19974 - DNA, 110 bp, synthetic construct
  source 1..110: mol_type = other DNA
tcctagtcggattcatttccactgcgccataatgagaactcccccatgggcagcttcttaatagtgacagcaaaaatcccgaagaaggttgtcattggcctcgctgggac

SEQ ID NO: 19975 - DNA, 110 bp, synthetic construct
  source 1..110: mol_type = other DNA
gtattctggatgcaggggtatcaaccaggccccagccctattactaatccaagctatccccacttacagccatgggagattctttgctaccagtgggaagcgaggaaaga

SEQ ID NO: 19976 - DNA, 110 bp, synthetic construct
  source 1..110: mol_type = other DNA
atccccacttacagccatgggagattctttgctaccagtgggaagcgaggaaagatacaacgccttgcaccccagggccaaatgcacagagccctgtgcatcaccaagtg

SEQ ID NO: 19977 - DNA, 110 bp, synthetic construct
  source 1..110: mol_type = other DNA
gtcctgccccgccccgtccccgcccgcttctctcctcccctgggggcttttcctacagtcaccaagatatcctgcccggggcaggaaggtgacctgttccaagaaatatc

SEQ ID NO: 19978 - DNA, 110 bp, synthetic construct
  source 1..110: mol_type = other DNA
gcctgacccattgcactaccaagggaactcccaggcattcagtttaaaatgtaaatggtacaagatattgataaaccaattggcgttgatgcaaaggaaattcctccttt

SEQ ID NO: 19979 - DNA, 110 bp, synthetic construct
  source 1..110: mol_type = other DNA
gtcactcacagggtgggaaacttatctacaccatcttacagttattaagttgactctttaaagatatgaattataaggttaaaagctgcagcatccttccttttttctca

SEQ ID NO: 19980 - DNA, 110 bp, synthetic construct
  source 1..110: mol_type = other DNA
actggtttaggggggaggagcgggaggacaagttttcttgtctgtgtgcttgcatgtccagctctgtagtttcatttttggatatttccagattccaaggtgggcagaaa

SEQ ID NO: 19981 - DNA, 110 bp, synthetic construct
  source 1..110: mol_type = other DNA
gtccagctctgtagtttcatttttggatatttccagattccaaggtgggcagaaatgttgcttaaatcacctgatggaacaaatgatccctgatgtttgctagccctccg

SEQ ID NO: 19982 - DNA, 110 bp, synthetic construct
  source 1..110: mol_type = other DNA
ggccttcccagccagattctctgctggatccccaaggctgccagctggagaatatgtgagagtaaggttggatggggcagaggtgtcagtggattcaggtgacagttgca

SEQ ID NO: 19983 - DNA, 110 bp, synthetic construct
  source 1..110: mol_type = other DNA
aagtttattttaattgcctagcaacacattatcataaattgctctcaaattaatcctttagcttcagtgcagcatcatttattaatgatgatggctgttagcatctatgc

SEQ ID NO: 19984 - DNA, 110 bp, synthetic construct
  source 1..110: mol_type = other DNA
cttagaagaaaaaatggtcattcctctagtgtttagagcttcataaatgtcaagggtaggaggaagggagcctgactcatcttcgcaccaagatcatctttccctctttg

SEQ ID NO: 19985 - DNA, 110 bp, synthetic construct
  source 1..110: mol_type = other DNA
ccaacatcttctgagcaccgcccactcctgcaaatacaggcgcctgcacagaccggtccaccttttatttaatgcactcaagttagtactcaacggcccttctaccctac

SEQ ID NO: 19986 - DNA, 110 bp, synthetic construct
  source 1..110: mol_type = other DNA
aaagccagactgcttagcacagcattcaaggcctccaagccacagaacagctttgtccctcacctcagacatgcgtatccatctcttcattgcctaaacaaacaaggtgg

SEQ ID NO: 19987 - DNA, 110 bp, synthetic construct
  source 1..110: mol_type = other DNA
ataacaaggattggacactaatggatgatcaggggttagagggagaaactgaggcacagagcccaagtccctgtagtttctagaggccccagcaggcctgattcatgtct

SEQ ID NO: 19988 - DNA, 110 bp, synthetic construct
  source 1..110: mol_type = other DNA
gccgctcttctcccccaacccaagacccatttgaaggcctactcagctacttccctcactcagcttctccttccctagattctgctgctcgctccctagatggagataat

SEQ ID NO: 19989 - DNA, 110 bp, synthetic construct
  source 1..110: mol_type = other DNA
tcctatcaacctcatcaggggtgtttggccaaggagaaggaggggtcacgggaagagggaaaagctgcttgttttagtctttatagctcctacctgggactctgtggttt

SEQ ID NO: 19990 - DNA, 110 bp, synthetic construct
  source 1..110: mol_type = other DNA
cttttgaacttctctcatgctgcgcaaacaggcgtctacaaatgctgtttccacatgtggtatgtccctgtcttttgaagggaggagctcccggagatgatggggcttgt

SEQ ID NO: 19991 - DNA, 110 bp, synthetic construct
  source 1..110: mol_type = other DNA
aactttggtatccctgttcagctctcagccctgagaaatttctctttgctgaacctcacagtctcactctgtacacacacagcccacagtccaaccttcattggccaaag

SEQ ID NO: 19992 - DNA, 110 bp, synthetic construct
  source 1..110: mol_type = other DNA
ttgatttgcatccacacatgaagcattccaaaaaagtagtcaacttctgctccctctctgttctagttacaccaaacccaaaggccagttgccagattacacatccccag

SEQ ID NO: 19993 - DNA, 110 bp, synthetic construct
  source 1..110: mol_type = other DNA
caaccactctgacttctatgaaggaaaaaacctaaggagccaaattaagtggatttgaattctcaaaataaggaagataactcaagagctggattcagtttatatcaacc

SEQ ID NO: 19994 - DNA, 110 bp, synthetic construct
  source 1..110: mol_type = other DNA
tgaattctcaaaataaggaagataactcaagagctggattcagtttatatcaacctcaagagagaaaatacaaaagtgtaacatgaacctatttatttagaagggccact

SEQ ID NO: 19995 - DNA, 110 bp, synthetic construct
  source 1..110: mol_type = other DNA
cccaaatcagggtacaacctttaagcagctttaatataaaaagaaaccaagactagtcgctgcaacccatgaaggccgttcaggcagtagtggggaagtttgcaggagtg

SEQ ID NO: 19996 - DNA, 110 bp, synthetic construct
  source 1..110: mol_type = other DNA
cttctagtttattaagaacccacatttagctttgtggaaatttttgtgaaggatgagtacattgtctcttgagagaaagtaatgctaagtcaaagggaagatgttcaatt

SEQ ID NO: 19997 - DNA, 110 bp, synthetic construct
  source 1..110: mol_type = other DNA
tatagaggtcagttggggatgaaccatctcagcttttgttttatggagatttcactctctcacctcactctcctttttaaaggacctttccctggatatgaaataatgag

SEQ ID NO: 19998 - DNA, 110 bp, synthetic construct
  source 1..110: mol_type = other DNA
tcccccgagagtctcaaggatactctgtggaggcaagtttggagctgtgaccagtaggactttaaagtcattacctggcctaagggccagccatgcggaacatgagaact

SEQ ID NO: 19999 - DNA, 110 bp, synthetic construct
  source 1..110: mol_type = other DNA
aagctgcctggagaagatgcatgccagtgctccatgacgttgaggtcgggaacaggcttgctgctgcccctcagtggggtcagtcaagctctgggcagtgagggtgcctt

SEQ ID NO: 20000 - DNA, 110 bp, synthetic construct
  source 1..110: mol_type = other DNA
tttaatgatctactctggggacataccttggtgtgtccttgcagtagtccaaccaaaacagctttattggccacaggatgaaatatatagtggctccttctgggtatcat

SEQ ID NO: 20001 - DNA, 110 bp, synthetic construct
  source 1..110: mol_type = other DNA
acccatctaattttattgagtatctgctacatcttagctccagtcctaggtacagtgatggccaagggacactgacattaccttcatgaagcttatagtctagtgggaac

SEQ ID NO: 20002 - DNA, 110 bp, synthetic construct
  source 1..110: mol_type = other DNA
gtgtagagatccatcgtgaagagggtgctggcgctgttgaagatggaggtcagagagctcatgagagaggccaacatgactgacagcatcaggcctcgaagtcctagtgc

SEQ ID NO: 20003 - DNA, 110 bp, synthetic construct
  source 1..110: mol_type = other DNA
ttagctggtagaggtcatgagggacctgggaaaggaatgtttcagccacactgccctgaggggccccattctactgccttgggcgatgacatcagaaagatccactggca

SEQ ID NO: 20004 - DNA, 110 bp, synthetic construct
  source 1..110: mol_type = other DNA
gaggaatccctctgcctttgttcctaactcctaacatgtgtctcttttggtttcagggtccagttccaagctgtgtgactcaggaaccctcaaagactgtgtccccagga

SEQ ID NO: 20005 - DNA, 110 bp, synthetic construct
  source 1..110: mol_type = other DNA
ggaggtggggagaacatttttagacagaaccctctctgcaacatgtctggacaattttgtgtccgtagcgatcccctttagctttttcaggtgacaggggtgacttttgc

SEQ ID NO: 20006 - DNA, 110 bp, synthetic construct
  source 1..110: mol_type = other DNA
ggcagggagacggctcccttctcacctacttccccacatccacagaaatggccaaatgaatagtacagctttttaaaatcctgcattagctctgtggctcagtaagctag

SEQ ID NO: 20007 - DNA, 110 bp, synthetic construct
  source 1..110: mol_type = other DNA
atgaatagtacagctttttaaaatcctgcattagctctgtggctcagtaagctagcagtgttgagacagttccagctgagggaaacaccagccaccccacagttcaggaa

SEQ ID NO: 20008 - DNA, 110 bp, synthetic construct
  source 1..110: mol_type = other DNA
tatgtgcccaccgtggaggacatcctgcgctcccgggacatgaccacgggcatcgtggagaacaagttcaccttcaaggagctcaccttcaagatggtggacgtgggcgg

SEQ ID NO: 20009 - DNA, 110 bp, synthetic construct
  source 1..110: mol_type = other DNA
atatgaaaatgctcactgcatcatgtgacaggacaggtgccagtgtgacatgcctgagagctgtcaatctcaaccctggagctgcagtctgtcagcaggtggccgtaacc

SEQ ID NO: 20010 - DNA, 110 bp, synthetic construct
  source 1..110: mol_type = other DNA
cagcgcacttgcccccttctcccagaggagctgctgagatgcatccatccccacggtctttctcctgaggtctcattgtcatcagtgatcccactatcacttccatgaat

SEQ ID NO: 20011 - DNA, 110 bp, synthetic construct
  source 1..110: mol_type = other DNA
agagaccaccccatgagatgctggcttaaggagcttggattaggtcccagaggtgctcagagctgccagaagtgcccaggctgagccacagtgtaatgctctgtatcaca

SEQ ID NO: 20012 - DNA, 110 bp, synthetic construct
  source 1..110: mol_type = other DNA
agcaagagagggcgggctatgacactcactagagcaggggctggtacgtgacacttagcacattctccactctcaagcctcatgcacatcaataatgttgaggagctgtc

SEQ ID NO: 20013 - DNA, 110 bp, synthetic construct
  source 1..110: mol_type = other DNA
tagcacattctccactctcaagcctcatgcacatcaataatgttgaggagctgtctaatcaatggagatagattttctgaactcatatcatcttcctctgactctccgaa

SEQ ID NO: 20014 - DNA, 110 bp, synthetic construct
  source 1..110: mol_type = other DNA
ctcacaggcctgtggagacggtccacatgggaggcccatcaccccggccagaaagcacttccatggcattggagttcctttgagatgaactgtcctagagctgttgcccc

SEQ ID NO: 20015 - DNA, 110 bp, synthetic construct
  source 1..110: mol_type = other DNA
ctgagcacagcagggctgggtgggcttcatggtacctggcagggccctagcaggcctgggagagctgcaaagtgtcctcaggagcttggcctcctctctcccccacaggc

SEQ ID NO: 20016 - DNA, 110 bp, synthetic construct
  source 1..110: mol_type = other DNA
ctgggagagctgcaaagtgtcctcaggagcttggcctcctctctcccccacaggcacaggagtgcctctcaggtgtggcggctccagcaacctgaggcacattggagtta

SEQ ID NO: 20017 - DNA, 110 bp, synthetic construct
  source 1..110: mol_type = other DNA
tcctcacccattaggtgccaataatctgcctggctgtcatgtgagctcactgacggaatcaggtaaaatcaaggataagaagccgtaaatgtatgaaatcaatgacaaac

SEQ ID NO: 20018 - DNA, 110 bp, synthetic construct
  source 1..110: mol_type = other DNA
cttttctggcaagtcaaaggacagggacagtcggcagctcagaggcgctgacacggcctttgtctttcagtccacttactacatggagggaaacctgggccaccccgtgt

SEQ ID NO: 20019 - DNA, 110 bp, synthetic construct
  source 1..110: mol_type = other DNA
cctgtaccttttacgaatgggccttgttattgctgaggtgtgggtgacctgacttcagtgtctccacacccactgccacctgatcctgttcacaggcttatgcaaaatcc

SEQ ID NO: 20020 - DNA, 110 bp, synthetic construct
  source 1..110: mol_type = other DNA
tggaaccctggagccttctgggctgagaggctatatggcccgggaggctcagattgagaggtggtatgggtctggcttccttatactctcactgtgccaccaggagctgg

SEQ ID NO: 20021 - DNA, 110 bp, synthetic construct
  source 1..110: mol_type = other DNA
cactctgcctcagttttcccatctccttctcaccctaggcggccagctgactcggaaggacctggcctcattccaggtggaggtggtggacgccctggccatgcccctgg

SEQ ID NO: 20022 - DNA, 110 bp, synthetic construct
  source 1..110: mol_type = other DNA
tgccaacaaaggctctgaaactggggctgacatctgggggtgacaccagtgacatagcttgaggagtgggtgagtaggggtgaggcagggggctgcatgaactagcaggg

SEQ ID NO: 20023 - DNA, 110 bp, synthetic construct
  source 1..110: mol_type = other DNA
caggaaggtaggtgcatcctggggaagccgctcctgcctcctcagggcacccagtgaccggcagacctgggtgcccaacgatgcacagagaattcgtgaggagctgcacc

SEQ ID NO: 20024 - DNA, 110 bp, synthetic construct
  source 1..110: mol_type = other DNA
gaccggcagacctgggtgcccaacgatgcacagagaattcgtgaggagctgcaccctacagcactgaccgtgaaggaagcagcaccaacagggtgtgcctggtgggcaag

SEQ ID NO: 20025 - DNA, 110 bp, synthetic construct
  source 1..110: mol_type = other DNA
ctgctcacaggtcacaagtgcatgacctttccaccaggacttagcagctgggcctcacctaatggggttcaaggagctgcatccatgaggacctcctttgggggggtcca

SEQ ID NO: 20026 - DNA, 110 bp, synthetic construct
  source 1..110: mol_type = other DNA
cgagtggccagccatcagccactctccccgctgccagccccctctcgcagctgactctgctcgccccgggtagggctccgctgagcccttgagatctaatccatacatct

SEQ ID NO: 20027 - DNA, 110 bp, synthetic construct
  source 1..110: mol_type = other DNA
ccagagtgtgcattttttggctttgtccctccaggtcctttgtaacacaaagcgtctaatatctgattgtttggcctcagtaaaaccccagaaaggtgagcagggcctct

SEQ ID NO: 20028 - DNA, 110 bp, synthetic construct
  source 1..110: mol_type = other DNA
ccagcaactctgccagaagtgaccctcctcacaggtctcagtgaccgtctaacgtcctcataccctctgccctgcccctgaccactcactgtctgtccccactccgctgg

SEQ ID NO: 20029 - DNA, 110 bp, synthetic construct
  source 1..110: mol_type = other DNA
aggtagaagctgcagggatatgtatacattacatataatcatcaagccatacgttttaagatgtgtgccctttactgtgtaagctacatctcaatgaaaagcagccacct

SEQ ID NO: 20030 - DNA, 110 bp, synthetic construct
  source 1..110: mol_type = other DNA
acttggctgcacagagctgcaggagtaggtttctgtcccacttctgccagccctaaagctccttgggcactgagggtggtggtgttggtgaggcactagtaagtagcctc

SEQ ID NO: 20031 - DNA, 110 bp, synthetic construct
  source 1..110: mol_type = other DNA
ctccaggacatctctcccggctcttctcctgaagctgcctctctgacctttgggtcacctagggttgtccctcccatgtgggccccagaactgtgtgccaggatgatggc

SEQ ID NO: 20032 - DNA, 110 bp, synthetic construct
  source 1..110: mol_type = other DNA
caggcagttgcctctggtagttgggtgtgagcaaagggcagaggcatcatgaccgggggggtcgatttccatggcccttgtcacccacacttggcccccacctctggggt

SEQ ID NO: 20033 - DNA, 110 bp, synthetic construct
  source 1..110: mol_type = other DNA
tctgagttcttcatcagtgagtatgagtgtggacaaaggtgggttcagctggcatcgctgacattaacactagagcttctttttgggagggtgggggcgggtatcaactc

SEQ ID NO: 20034 - DNA, 110 bp, synthetic construct
  source 1..110: mol_type = other DNA
aggtgtacgagggcgccctgctctaccactactccctggagcaggtgcaggccgaccggctcccactgcatgagccccccaaactcttggagaccgtgcgattccccctc

SEQ ID NO: 20035 - DNA, 110 bp, synthetic construct
  source 1..110: mol_type = other DNA
atagccttttgtgcatttgttcaataactgattcccgagtacccactctgtgccagaccaggcccaggagaccgagctcgaatgtaacaaggagcaaaccctgtcaaagc

SEQ ID NO: 20036 - DNA, 110 bp, synthetic construct
  source 1..110: mol_type = other DNA
ccactttcaacccattgtgccgggcgggggcttgaacctgcgtcctggtgctgcagagatactgccaatcccatgccacagcaggaactctgaaactgcaattctcaata

SEQ ID NO: 20037 - DNA, 110 bp, synthetic construct
  source 1..110: mol_type = other DNA
gagatactgccaatcccatgccacagcaggaactctgaaactgcaattctcaatagctgcaaactgtagccaatccaatgtccatcacctggtgagtgaagaaacaaaat

SEQ ID NO: 20038 - DNA, 110 bp, synthetic construct
  source 1..110: mol_type = other DNA
cggcacctgcaagcaggcctccctccagctgggtcagtggcccaactgtcaactcatgttggtacctcatcaaacatttagaggcaattcagattttaatcattgcctgt

SEQ ID NO: 20039 - DNA, 110 bp, synthetic construct
  source 1..110: mol_type = other DNA
gggagggtggggggcacagacaggaggggctggtggcctaaggccggaaaatcaggagagtcaggaagcggggggagggccctgacagaccaatgcatgccaagccttca

SEQ ID NO: 20040 - DNA, 110 bp, synthetic construct
  source 1..110: mol_type = other DNA
gagagtcaggaagcggggggagggccctgacagaccaatgcatgccaagccttcactcggtcttcctggaacaatgaggcgtatcatcctcaccctcttatctacaggga

SEQ ID NO: 20041 - DNA, 110 bp, synthetic construct
  source 1..110: mol_type = other DNA
ttatttccttttctcatttcactgcactggttaggatatccagtagcatgtcatgtagaagacttcatcatgggcatcatgtagagctcctgatctcacagggaatgctt

SEQ ID NO: 20042 - DNA, 110 bp, synthetic construct
  source 1..110: mol_type = other DNA
tggacatgcttcagccctcatcttccctggaaagaggctggagatcctgaggctcacggctgggtcagctcctggtctctaaggctcaagccaacggcaccccgctgttc

SEQ ID NO: 20043 - DNA, 110 bp, synthetic construct
  source 1..110: mol_type = other DNA
gcctgctcatctccacccccgcaggccagatcgtggacactgtggtgcaggagcagcgtccttctgtgctgctggagctgggggcttactgtggctactcggctgtgcgc

SEQ ID NO: 20044 - DNA, 110 bp, synthetic construct
  source 1..110: mol_type = other DNA
tgggtgaagcacaggagcccagagggaaaagtttcctccctcggcttgggctagagttccagctttcaggtgtcaatctttgtgactgtagtgttcagggctgaggtctc

SEQ ID NO: 20045 - DNA, 110 bp, synthetic construct
  source 1..110: mol_type = other DNA
gttccagctttcaggtgtcaatctttgtgactgtagtgttcagggctgaggtctcaagtctcactgaggtaggtgggacccccaacttgccaagcaacaaagtgtggtga

SEQ ID NO: 20046 - DNA, 110 bp, synthetic construct; identical to SEQ ID NO: 20044
  source 1..110: mol_type = other DNA

SEQ ID NO: 20047 - DNA, 110 bp, synthetic construct; identical to SEQ ID NO: 20045
  source 1..110: mol_type = other DNA

SEQ ID NO: 20048 - DNA, 110 bp, synthetic construct
  source 1..110: mol_type = other DNA
actattttcaacctggaactctgactgggcctatccagcctgaatagctttgccaacattcaagggctcttagaataattcttcactgtggcttccttatataggtgggg

SEQ ID NO: 20049 - DNA, 110 bp, synthetic construct
  source 1..110: mol_type = other DNA
ccagggaacctggagcccaagacccaagtggcccatctgagcttttgtgctttccacagccctaggtcctggacccctgcacaccagccccagcaaagcttagggcagct

SEQ ID NO: 20050 - DNA, 110 bp, synthetic construct
  source 1..110: mol_type = other DNA
acagccctaggtcctggacccctgcacaccagccccagcaaagcttagggcagctggggctgtttcctcccttcgtgtctgggtaccactccctcacacccctgcctgag

SEQ ID NO: 20051 - DNA, 110 bp, synthetic construct
  source 1..110: mol_type = other DNA
gaggcttctgaattgccagcccaagattcaagagatattttggttccagagactttcgtctagagaaacaaaaaagcaatctaaccctggagaagctgtcaatatctttg

SEQ ID NO: 20052 - DNA, 110 bp, synthetic construct
  source 1..110: mol_type = other DNA
tgtgctatggcaacggcaacacggatccaagttgcatatgctgcagcttgtggtgcaacattggatccttaactcaatggccaaggccaaagatcaaacctgtatcctca

SEQ ID NO: 20053 - DNA, 110 bp, synthetic construct
  source 1..110: mol_type = other DNA
cacaatgtacaagaacagcagaccagcctgcttcaccaggtagatctggggcagcatgcatgtgtgtccttgtcccaggatgagctcagtgcacaggtgtcatacaaaca

SEQ ID NO: 20054 - DNA, 110 bp, synthetic construct
  source 1..110: mol_type = other DNA
aaagaagttttactttcttttcctaatctaccatgactctatccttgtgaagctaaatatagctttgactatgtttacacacaaaggtaaggggtgtgtgtgtgaatgtt

SEQ ID NO: 20055 - DNA, 110 bp, synthetic construct
  source 1..110: mol_type = other DNA
ttgttaagcaggagggtagacaacctggcggatcatttatgtggacaaggccttaaccagtggttgagaacatgggcaaagtttagtttgagggcaatgggactggtcat

SEQ ID NO: 20056 - DNA, 110 bp, synthetic construct
  source 1..110: mol_type = other DNA
tcttcctaaaaaggcttaaaacacagccctttaagtaaacttctatccctgcttcaaggagaactggtcaagctttctttgtgccccacatgcaccttgttttaacatag

SEQ ID NO: 20057 - DNA, 110 bp, synthetic construct; identical to SEQ ID NO: 20056
  source 1..110: mol_type = other DNA

SEQ ID NO: 20058 - DNA, 110 bp, synthetic construct
  source 1..110: mol_type = other DNA
cacaggaggccacatgctctccctgccctagctactcctagccagcagtcaagtgaggggagggtaccagaatcaggttgtgcctcagagacttccagtcaacttggcca

SEQ ID NO: 20059 - DNA, 110 bp, synthetic construct
  source 1..110: mol_type = other DNA
ttgtttttgatttatactgcagttttaaatctaaatgtcttcccagcatggtagggtgggtcaaatggtaaaataagattggaacaaaggtcaagagagctgacagaagc

SEQ ID NO: 20060 - DNA, 110 bp, synthetic construct
  source 1..110: mol_type = other DNA
gtgggtcaaatggtaaaataagattggaacaaaggtcaagagagctgacagaagccaaattagtaggtggatcattgtttttacaaatataaaggaagtaggtggcagaa

SEQ ID NO: 20061 - DNA, 110 bp, synthetic construct
  source 1..110: mol_type = other DNA
aaatgaattggttggatttgtctttctctgttccttgacattttggttaaagtgagtgggtcagagtctcctaggggagaccctggagttattgctcaaatttaaagata

SEQ ID NO: 20062 - DNA, 110 bp, synthetic construct
  source 1..110: mol_type = other DNA
gtgggtcagagtctcctaggggagaccctggagttattgctcaaatttaaagatatttgcctctttaagatttctatttctgcttgcaccaaatttggtgtttcttatat

SEQ ID NO: 20063 - DNA, 110 bp, synthetic construct
  source 1..110: mol_type = other DNA
aaaaatgggacaagaaaagagaagtaacaaaggacaagatagtaggccacagtccaagaatatcagagtcagacctatccatctgagtttaaaaagataaatgttgttat

SEQ ID NO: 20064 - DNA, 110 bp, synthetic construct
  source 1..110: mol_type = other DNA
gccacagtccaagaatatcagagtcagacctatccatctgagtttaaaaagataaatgttgttataaagtctttcccaagaagtgtaaaaataactacctcattttttga

SEQ ID NO: 20065 - DNA, 110 bp, synthetic construct
  source 1..110: mol_type = other DNA
aagatagtagagagctagactcatacattatatgtttctgttttcacacttgttgatgggcacatagggggtatgcagaagtgatagacaagagttgtttatggaatgat

SEQ ID NO: 20066 - DNA, 110 bp, synthetic construct
  source 1..110: mol_type = other DNA
acctgactccctagaaaatgttggatcatgttatttgtgcatgtggtgtgtgtctttgtactttgcagtcccaatattcagagactttttcaataaatgttatattaggc

SEQ ID NO: 20067 - DNA, 110 bp, synthetic construct
  source 1..110: mol_type = other DNA
ttgtactttgcagtcccaatattcagagactttttcaataaatgttatattaggcaatgatgaggaatgttaagtggcaagacaaaaagaatttgtgctccataattata

SEQ ID NO: 20068 - DNA, 110 bp, synthetic construct
  source 1..110: mol_type = other DNA
aatttgtagcattaagttggagctgatgtcaaataacccaacttttgtgactctttatgcataaatgtgattttaataagggatagatagcatcacatatatagaagtcc

SEQ ID NO: 20069 - DNA, 110 bp, synthetic construct
  source 1..110: mol_type = other DNA
ctttccaactcagtagccaatagccacatgtggttatttaaattatatctaaaataaaataaataaattcagctcattgctacaaccacatcttaaagtcactatagcca

SEQ ID NO: 20070 - DNA, 110 bp, synthetic construct
  source 1..110: mol_type = other DNA
agaataaaatgatgcctctacagtgttctgaaatgtaagtttctgaatgaatttacagaatgctgcttttcattccttttctaaaggccaatcctagtcttatttttctg

SEQ ID NO: 20071 - DNA, 110 bp, synthetic construct
  source 1..110: mol_type = other DNA
cagaatgctgcttttcattccttttctaaaggccaatcctagtcttatttttctggccctgtatgttagaagtagttgtggctagaaatgactgaaattttcaaacagta

SEQ ID NO: 20072 - DNA, 110 bp, synthetic construct
  source 1..110: mol_type = other DNA
caattccaaatgtactgtttccttcatatgatggattgttgccgtccatgcctatgaagtgttataaatttgtatatctgatcctaacatgctcaagacgagcagttcta

SEQ ID NO: 20073 - DNA, 110 bp, synthetic construct
  source 1..110: mol_type = other DNA
agtacgtaatagatccttgacccatctgtggattgaaacggtgaaagttgtcaatcattccatagcttttagtcaaagatctatgtttaagtctgcgttatagacacaga

SEQ ID NO: 20074 - DNA, 110 bp, synthetic construct
  source 1..110: mol_type = other DNA
cacatttgtggaattatgataggggaaatcacaaccagcttaaaataatactttgcaattatttgtccagaaacttgtggcaaaaagactagattgcagtgataggctgc

SEQ ID NO: 20075 - DNA, 110 bp, synthetic construct
  source 1..110: mol_type = other DNA
aggcagcaggcaaggggtgcagggcacccgccaggcatggcactgtcagggtctccatccaaagttggccaaaagcctgcatgggagtgaaactgtgtacaaacccctaa

SEQ ID NO: 20076 - DNA, 110 bp, synthetic construct
  source 1..110: mol_type = other DNA
gttggtgagcaaaaaaggcaaatttgatgatcctttgccattaaaacatcactaacatactgacctgtaggattatttgaccccctaaaactcttcctcaactgatgatt

SEQ ID NO: 20077 - DNA, 110 bp, synthetic construct
  source 1..110: mol_type = other DNA
cattaccaaaataaaagcaggagcacatggggagggaaaatgtgaatgagaagaacctcctctcgtcctgagacaggccacccgtctttttaaaaaggtgtgtgcaaact

SEQ ID NO: 20078 - DNA, 110 bp, synthetic construct
  source 1..110: mol_type = other DNA
cctcctctcgtcctgagacaggccacccgtctttttaaaaaggtgtgtgcaaactgcttttcttaccctctcccaccaaagaaaagcatgaaaaaaaaaaaaaccctcac

SEQ ID NO: 20079 - DNA, 110 bp, synthetic construct
  source 1..110: mol_type = other DNA
gcagcacctaacagtttggctcttgatctcacaaggctaaaataatcagtatacagaaaaagtatgcttttttctgtcttagcttttacatgtcataatgcttagctagt

SEQ ID NO: 20080 - DNA, 110 bp, synthetic construct
  source 1..110: mol_type = other DNA
cagtagcaatgccagattcttacttatcccaatgtgctgggctgaggattaaacccatgctgctgcagagacaaatctagattcttaacttgctgtgctactgtgggaac

SEQ ID NO: 20081 - DNA, 110 bp, synthetic construct
  source 1..110: mol_type = other DNA
atattctgacttctgaagatgcagttttagtagctgctatggtaataaaaccacagatgtttctaaaaactatattttaaaacttagcaccatcacacagcaggaaggac

SEQ ID NO: 20082 - DNA, 110 bp, synthetic construct; identical to SEQ ID NO: 20081
  source 1..110: mol_type = other DNA

SEQ ID NO: 20083 - DNA, 110 bp, synthetic construct
  source 1..110: mol_type = other DNA
actgcctttgtgcgcatccttgacttgctccagctggctcacagcatctcccaaagggagctcttgtgcaatacgggtccggttttgcttccactccccccaccccacct

SEQ ID NO: 20084 - DNA, 110 bp, synthetic construct
  source 1..110: mol_type = other DNA
gattttgtttttaataagcagtttgagtgagctttcctggataatgtagtttctctgagacaagacttttctcttttatgcctccagatgaccaggactttgtggagtgc

SEQ ID NO: 20085 - DNA, 110 bp, synthetic construct
  source 1..110: mol_type = other DNA
tgagacaagacttttctcttttatgcctccagatgaccaggactttgtggagtgccaccctaaagggctgtgggcagggagaaacagaatcaaaagtggagaatgctcct

SEQ ID NO: 20086 - DNA, 110 bp, synthetic construct
  source 1..110: mol_type = other DNA
taactgggtcattctggagcacaacacagcactttagaagcttgctccaaggcagtgactaaggacattaggatcttagtcatccagtgggggacacagacagaaaccag

SEQ ID NO: 20087 - DNA, 110 bp, synthetic construct
  source 1..110: mol_type = other DNA
cttcaaaaggcatttgctgggtaaacatcaggtacataaaataatgacaatatttaaaaggaaacatgaacatttaccttgttctcaaacatacagagctctaactataa

SEQ ID NO: 20088 - DNA, 110 bp, synthetic construct
  source 1..110: mol_type = other DNA
gcattctttgagaggtatcactgaaaaaaggcaaatgaattggcccgctgtcaaaacagatacatcaatattaatcaagtatccagtctacagaaggaaaatcagttaaa

SEQ ID NO: 20089 - DNA, 110 bp, synthetic construct
  source 1..110: mol_type = other DNA
tctacaccatggaagacaatcacagaaacagctagtaaggaaaactagcactcatgtttgcacataaagcattaacatcgaaccctgagacaagcagagtaattaatatt

SEQ ID NO: 20090 - DNA, 110 bp, synthetic construct
  source 1..110: mol_type = other DNA
taacctcatcggcagatggtagttttagtgactctttgtccaacaagctctacgcggatgtctcttcactatttgaaatatttcagaggacagatgaaagcaatatagaa

SEQ ID NO: 20091 - DNA, 110 bp, synthetic construct
  source 1..110: mol_type = other DNA
cctccaagcattttacccacctgcccacctccatcctgcccatcttcatgggctcagctctgccccagtctatctggccccacagagctctctcacggctaaattcctac

SEQ ID NO: 20092 - DNA, 110 bp, synthetic construct
  source 1..110: mol_type = other DNA
acgcccaggacagatctcagggatgaacccaggaagcttagaaactggtaccaccccaaaaatctctacttgaatcaagaggggccaaggcatggcccaagacctgtcac

SEQ ID NO: 20093 - DNA, 110 bp, synthetic construct
  source 1..110: mol_type = other DNA
cccagactggccaagctgagatgtacagagatggatgggaacagggaaggggcgcagggggtccctgtatcagctacacagcagaaacagccaaggctcccagtaccctg

SEQ ID NO: 20094 - DNA, 110 bp, synthetic construct
  source 1..110: mol_type = other DNA
ttaaaaaataaatctaaatgctttttcttgtacctaatttctgtagaaaaatcctttcttgctgcaactaatggtactataaataggttgctgtcactaaggcttccctt

SEQ ID NO: 20095 - DNA, 110 bp, synthetic construct
  source 1..110: mol_type = other DNA
ttcttgctgcaactaatggtactataaataggttgctgtcactaaggcttcccttcccctcctgtcactgtccctgacaccatggctatggaaattccagggagaagaga

SEQ ID NO: 20096 - DNA, 110 bp, synthetic construct
  source 1..110: mol_type = other DNA
caatcaagcctggatgactcgggtcatagtcaaccatctagtgagaaaaaggcaatgcatttgtctgtaatagctaaagggtaggggtaactctataacatgcattcctc

SEQ ID NO: 20097 - DNA, 110 bp, synthetic construct
  source 1..110: mol_type = other DNA
tgcatttgtctgtaatagctaaagggtaggggtaactctataacatgcattcctctatggtagaagcagaataggatggtttaagttgaaccatgtcccccttccaaact

SEQ ID NO: 20098 - DNA, 110 bp, synthetic construct
  source 1..110: mol_type = other DNA
gtttctacgagcatctgctctatgctgagctctccagatgctgtcgtctatgatgcctgcattgcacctagaccccgtgtttcctgcatttcgagcatcacctcaggcct

SEQ ID NO: 20099 - DNA, 110 bp, synthetic construct
  source 1..110: mol_type = other DNA
ggacactaagagaaactgaacctcctaaccgatgagcttttaaaattctgaataagaatcaccacctcccacaggtacgtgcagagaggctgtgacgaagctgagcccga

SEQ ID NO: 20100 - DNA, 110 bp, synthetic construct
  source 1..110: mol_type = other DNA
cttccccaaacccacaagcaagctggcaggaagggcaatctctggacatctggagtgtcaaaacaagttgatgtggtcaattatgctgagaattataagaaagcacagtc

SEQ ID NO: 20101 - DNA, 110 bp, synthetic construct
  source 1..110: mol_type = other DNA
atattttcctttgttggctcattgggatctggtctgatattggattgcccgcattgagagctcccttcatgtaatagaagctgtctctcctcctatggcttgacaaagta

SEQ ID NO: 20102 - DNA, 110 bp, synthetic construct
  source 1..110: mol_type = other DNA
gcacaatgggagagcagtctcacactaagaataagatcatttttggatttcaagtttgttcattgatctcaaatgcctttttcctgcctctagattacgaagccattctt

SEQ ID NO: 20103 - DNA, 110 bp, synthetic construct
  source 1..110: mol_type = other DNA
ttgttcattgatctcaaatgcctttttcctgcctctagattacgaagccattctttgcagctatatcagatgaaaaggttcagcagaagcttttgtgcatgttgtttgat

SEQ ID NO: 20104 - DNA, 110 bp, synthetic construct
  source 1..110: mol_type = other DNA
cactggacacagcctcatgctctgaagggaagacaagctggcattaggtggacacagtggcaaagagtcagttatccacactcagcagagcaagtgcggagccagcgcct

SEQ ID NO: 20105 - DNA, 110 bp, synthetic construct
  source 1..110: mol_type = other DNA
gaacaaactgatcctgagcacactgagtggttagtgcattagttttaccacaggctactcttaagggtcagactattcaagacatggtctcttgcatatgaaagagaagc

SEQ ID NO: 20106 - DNA, 110 bp, synthetic construct
  source 1..110: mol_type = other DNA
tactcttaagggtcagactattcaagacatggtctcttgcatatgaaagagaagctgttaagagagtcagtgcaattccccttgggaattctttacggataaaccttgaa

SEQ ID NO: 20107 - DNA, 110 bp, synthetic construct
  source 1..110: mol_type = other DNA
ggctgaaccaggaccataatcccaacttctgttttccagaggcattcttttgcaacttgatctccttagaaagcctggcacacaattttggtctttaataaataaaaatc

SEQ ID NO: 20108 - DNA, 110 bp, synthetic construct
  source 1..110: mol_type = other DNA
ccaagttggtttcaaagactctttctggatatctagcagttagaacaaatcctatagattatgcaaagaaataaccagctgaaataactagatacagtgctttttatagg

SEQ ID NO: 20109 - DNA, 110 bp, synthetic construct
  source 1..110: mol_type = other DNA
tgtcttagaatctttaagcctcagaacagagagtgcagaagagaaaaaacttacctaactacaagagaactaatgaattccaaaagaaagagccagtccttttgctaagc

SEQ ID NO: 20110 - DNA, 110 bp, synthetic construct
  source 1..110: mol_type = other DNA
gaaagactttacatagaggtagtttgagtcaggaagatgagtagaggccagattattgagcagcttgagagctagatttttcttgttagtggctgggggtttttgggtaa

SEQ ID NO: 20111 - DNA, 110 bp, synthetic construct
  source 1..110: mol_type = other DNA
ttgagcagcttgagagctagatttttcttgttagtggctgggggtttttgggtaaacaagtaagataatgatgaatgatcttagtaagagtatgctgaatgaatgaatct

SEQ ID NO: 20112 - DNA, 110 bp, synthetic construct
  source 1..110: mol_type = other DNA
gaagtcaatttctatatttctcaggactcttgattgcaagcaagagaaattttgtctaattttttttttcaccccagtctctacctttgttctcacgtggtgttctctct

SEQ ID NO: 20113 - DNA, 110 bp, synthetic construct
  source 1..110: mol_type = other DNA
ctaattttttttttcaccccagtctctacctttgttctcacgtggtgttctctctgcgtccaaatttcctctttttatatggactccagttatattgcattaggactcac

SEQ ID NO: 20114 - DNA, 110 bp, synthetic construct
  source 1..110: mol_type = other DNA
ttttttaaaaattgcaggaagcaattaatatatgcttatttttaaccatattaaatagcaaggtgtagcagtggatccagtggtgggtcagctagtaacagaactttcaa

SEQ ID NO: 20115 - DNA, 110 bp, synthetic construct
  source 1..110: mol_type = other DNA
tagcaaggtgtagcagtggatccagtggtgggtcagctagtaacagaactttcaaggtcatgaggactgtaaataatattgagacccttgcagtggttaaatgtgataga

SEQ ID NO: 20116 - DNA, 110 bp, synthetic construct
  source 1..110: mol_type = other DNA
tagcctcgcatgccctcatttccacatcggctcttccatcccttcttttcctctaagtcctttcactgaaacgccaaggagctcgtgtcaagcactctcaccaataccct

SEQ ID NO: 20117 - DNA, 110 bp, synthetic construct
  source 1..110: mol_type = other DNA
aaggaagagaaagtagtgcacccctgcctgggccgacttggggtgtcgctcaggtgagggacatgggctggggaggaacatccgtcacacaccaagtctctgctaggtct

SEQ ID NO: 20118 - DNA, 110 bp, synthetic construct
  source 1..110: mol_type = other DNA
gagggacatgggctggggaggaacatccgtcacacaccaagtctctgctaggtctctgctttgttccaggcaccatcaggtgccctgggggatgcagcagggaaagcatg

SEQ ID NO: 20119 - DNA, 110 bp, synthetic construct
  source 1..110: mol_type = other DNA
gcacaaggaaccctttcatgctctccagctctttgtctcatgatctggtttctctagaccagatgtcattagacttatgcagaaagtggacaatcaaggtacctgatcct

SEQ ID NO: 20120 - DNA, 110 bp, synthetic construct
  source 1..110: mol_type = other DNA
cctccatatgccaatgtgtggccctaaaaaaaaaaaaaaaaaaaaaaaaaaaaaaaagagcgtattttcaaaagctccatatgcatcctaagaaagtaaagcactccaaa

SEQ ID NO: 20121 - DNA, 110 bp, synthetic construct
  source 1..110: mol_type = other DNA
aagagcgtattttcaaaagctccatatgcatcctaagaaagtaaagcactccaaaactgatggattatacacctataattttttaatgtagcaattacttggtctatagt

SEQ ID NO: 20122 - DNA, 110 bp, synthetic construct
  source 1..110: mol_type = other DNA
gtgttggaagtctctcatggctgctgtttttgaccctgttccactcatcagttgaacacctcccacttctcactctcagctggtaaccttgtggtttctttcactgagaa

SEQ ID NO: 20123 - DNA, 110 bp, synthetic construct
  source 1..110: mol_type = other DNA
aaccctcttggtttcttgtttttttttatgagaaattttggttgaagtgttttaaataagtaactttgttttttgctatccaggagctaaaattggttcacaagaggcat

SEQ ID NO: 20124 - DNA, 110 bp, synthetic construct
  source 1..110: mol_type = other DNA
taaccacccatcgcctgctatacagcaaggagttattaaagtaaggactgatactaaatatgttgtttaattttggaaaaataagtatacgtgtcatttaaactttgaat

SEQ ID NO: 20125 - DNA, 110 bp, synthetic construct
  source 1..110: mol_type = other DNA
gtgctattctgctctacagctcctacggttccctactacccagtgagcacagcaccagttccctagtgcctgtgtcttttttccttgctctagacatggatgagagggag

SEQ ID NO: 20126 - DNA, 110 bp, synthetic construct
  source 1..110: mol_type = other DNA
cagttccctagtgcctgtgtcttttttccttgctctagacatggatgagagggagagagagaattttgcctaaacctagtatcatactcaccctctgtgtttgtaaactg

SEQ ID NO: 20127 - DNA, 110 bp, synthetic construct
  source 1..110: mol_type = other DNA
gtgggatccgagccatatctgcaacctacaccaaagcacaacaccagatctttaacccactaagtgggccagggacaaacccgtggatactatttgggttcattactgct

SEQ ID NO: 20128 - DNA, 110 bp, synthetic construct
  source 1..110: mol_type = other DNA
cccactaagtgggccagggacaaacccgtggatactatttgggttcattactgctgagccacagtgggaactcctgtcagtaagttctggtgactctcttttcaggatgc

SEQ ID NO: 20129 - DNA, 110 bp, synthetic construct
  source 1..110: mol_type = other DNA
tccttgaggtgcaaatgtgaccatgatatcgtttctgtatcttagtgtaaggcacctttgaaatgtttaatggtttattaattgatcattaatatgatccagtcaggttt

SEQ ID NO: 20130 - DNA, 110 bp, synthetic construct
  source 1..110: mol_type = other DNA
cctccgaaaagttcctcaatgaaacaaagataagtgacttaactgaaaagagttgtaaagatactcaccgaagccaggagaataatgcattgatgaaataaaaattgaca

SEQ ID NO: 20131 - DNA, 110 bp, synthetic construct
  source 1..110: mol_type = other DNA
gaaagggaagaatgtgtgtaatctataccaagatccataacaagtctcttcctggtatgtactctggagaaggtcttactcaagagagatgtccccagcactgttgtaca

SEQ ID NO: 20132 - DNA, 110 bp, synthetic construct
  source 1..110: mol_type = other DNA
tgttaagtataaactactcctcaggcaaaacaaaggaaaccatttcccgcaacgaattcattgctttgtagcagatgccactcgtgtaacagctgttttctaataaaata

SEQ ID NO: 20133 - DNA, 110 bp, synthetic construct
  source 1..110: mol_type = other DNA
attcattgctttgtagcagatgccactcgtgtaacagctgttttctaataaaataatttattatttcgtcttagccctgcctgggttcaaatactcagaagcacagatcg

SEQ ID NO: 20134 - DNA, 110 bp, synthetic construct
  source 1..110: mol_type = other DNA
tttgaagacataactgttcctctaggtcccgccttaattaataggtgtgtgctagagactgcctcggccgccaagtgcccgcatcagtcctagagttaaaccgaagtgtg

SEQ ID NO: 20135 - DNA, 110 bp, synthetic construct
  source 1..110: mol_type = other DNA
caagtgaaggagtgtgtgacagtacctgagagttaattagatgtcttttgagatccccccctcaagctcctcattcctttttttttttttttgtctttttagggctgcac

SEQ ID NO: 20136 - DNA, 110 bp, synthetic construct
  source 1..110: mol_type = other DNA
atgctcgagctattcccctggaactcgggcggatagaacgaccataggaatgcgcattttccacttgttatcacggaagcgaattacaagtcctgtgtgagattccgtta

SEQ ID NO: 20137 - DNA, 110 bp, synthetic construct
  source 1..110: mol_type = other DNA
tgtaatgacaaatgacttctgaagagtttttgtctggcatgtactgtatttgggccaatttttgcctccacatatttttaatacctgacttataagctgaatttgaaaga

SEQ ID NO: 20138 - DNA, 110 bp, synthetic construct
  source 1..110: mol_type = other DNA
ggcatgtactgtatttgggccaatttttgcctccacatatttttaatacctgacttataagctgaatttgaaagattaagtttttagccctatgtaagttaagatttttg

SEQ ID NO: 20139 - DNA, 110 bp, synthetic construct
  source 1..110: mol_type = other DNA
ttctttcagcaaatagtagtgatagtgaagaactttctgctggtgaaagtataactaagactcagcctgtcaaatcagtttccactggaataaaggctcatggtaccaaa

SEQ ID NO: 20140 - DNA, 110 bp, synthetic construct
  source 1..110: mol_type = other DNA
agttacatctgccctcaggcatctatcacttgttctttccagaaatcaggaacaagctgccctttcgtattcccagctgcccgactgcacatctgcttgcatcctggccc

SEQ ID NO: 20141 - DNA, 110 bp, synthetic construct
  source 1..110: mol_type = other DNA
cacgtgccagaggtagaaaaccagcggccccaccttccccgcgcaccccgggtctgctccctaccccatcctgcctgcttcctgatgtgaaatctgggacagatttctgc

SEQ ID NO: 20142 - DNA, 110 bp, synthetic construct
  source 1..110: mol_type = other DNA
gtcagctgtcagcaagcatgaaaaggccgccgtgctggtgggaaggccccagtatctgtgtgggggaatatcttatctactaccatcagtaggaacgggcagtgaaagcc

SEQ ID NO: 20143 - DNA, 110 bp, synthetic construct
  source 1..110: mol_type = other DNA
ccattgcttccagattaatctgagtggtttgcaattcagtgtcttgtggggaacgtgtggctcactgaaaatgcgtcccccttgtgttgggaagctcggcaattattctc

SEQ ID NO: 20144 - DNA, 110 bp, synthetic construct
  source 1..110: mol_type = other DNA
aaaaacctcagccttgtccctgactgattcaccacttgactgggcccagggtaagacagtcaacttttcctaatgccctcagctctacaatagctcaactgctttataat

SEQ ID NO: 20145 - DNA, 110 bp, synthetic construct
  source 1..110: mol_type = other DNA
acagtcaacttttcctaatgccctcagctctacaatagctcaactgctttataatctttttttttggaaaagtccatcccagtgcgtgatattaatcagttcatgtctgc

SEQ ID NO: 20146 - DNA, 110 bp, synthetic construct
  source 1..110: mol_type = other DNA
cgggaactcctgcatcttttgttaatgatctccctaccattgcatttctctccactagaattgaagctccaggagagcagggatttgtgtctgttcggccactgctcgtc

SEQ ID NO: 20147 - DNA, 110 bp, synthetic construct
  source 1..110: mol_type = other DNA
tctaccataaatcaattattccgaggcaacacatttagcccttccttcagcaagcatttatttcagaggaggcaggggacacgccagtgagtgtctaagacgtagggtgg

SEQ ID NO: 20148 - DNA, 110 bp, synthetic construct
  source 1..110: mol_type = other DNA
atttatttcagaggaggcaggggacacgccagtgagtgtctaagacgtagggtgggatgtgaagggggcacaagagaaattcggcagaggagccacggaaactctgagag

SEQ ID NO: 20149 - DNA, 110 bp, synthetic construct
  source 1..110: mol_type = other DNA
gttcaggtatctgtttaaggattaagtaagtaaattcttgggtaatcccagatcgctctccttttttaaatgttaagaatcacctccctcccaggatgacagaaaagaag

SEQ ID NO: 20150 - DNA, 110 bp, synthetic construct
  source 1..110: mol_type = other DNA
tggacgagtgtcatcatacagatggggctccgggatttcacaaaatcattcttttcctgcccaaatggagtgatggtgctctggactgacttggggaggtgggcactgag

SEQ ID NO: 20151 - DNA, 110 bp, synthetic construct
  source 1..110: mol_type = other DNA
cctgcccaaatggagtgatggtgctctggactgacttggggaggtgggcactgagctggggtctggtggcatcacagacagggccctccagtccctggcaggtttgtgaa

SEQ ID NO: 20152 - DNA, 110 bp, synthetic construct
  source 1..110: mol_type = other DNA
acacacacacacacggtcctaggagcagtggtgtgtttattgcttgatggcactaccaccttgcccagcttctcatccatcctgcaagccctccctcagcctctgaaaat

SEQ ID NO: 20153 - DNA, 110 bp, synthetic construct
  source 1..110: mol_type = other DNA
tgcttctgccacaaggcctttatatttgctcttctctgcttagaatactcttctgaggtgtatgcccagctccctccctcatttccctctggtctctgctccagtgtctg

SEQ ID NO: 20154 - DNA, 110 bp, synthetic construct
  source 1..110: mol_type = other DNA
tggaagggaggaagggaggggagagacagaggggagaataggagttttcctttgggtaggtttttcctcttcttgacaacattgggtaagaccttggtagtaaacaccac

SEQ ID NO: 20155 - DNA, 110 bp, synthetic construct
  source 1..110: mol_type = other DNA
gtaggtttttcctcttcttgacaacattgggtaagaccttggtagtaaacaccacgacagctcaggtgaggcagatgtgaacaaaggctaatgagtctttttaaatccca

SEQ ID NO: 20156 - DNA, 110 bp, synthetic construct; identical to SEQ ID NO: 20154
  source 1..110: mol_type = other DNA

SEQ ID NO: 20157 - DNA, 110 bp, synthetic construct; identical to SEQ ID NO: 20155
  source 1..110: mol_type = other DNA

SEQ ID NO: 20158 - DNA, 110 bp, synthetic construct
  source 1..110: mol_type = other DNA
tctctagcctgctgtgtccacctcagtgtttcttctcccttttaaggacactcatcaagctgcatcaagggcacacctgtgacagctcgacctcaacttagctcgatgcc

SEQ ID NO: 20159 - DNA, 110 bp, synthetic construct
  source 1..110: mol_type = other DNA
caaaaccaaaaccaaaaaaacctgtggcaattactgagctgatgttcaagttttgaagacatgacaatccttttttttttttttggccttacccacagcatgtgggattt

SEQ ID NO: 20160 - DNA, 110 bp, synthetic construct
  source 1..110: mol_type = other DNA
agaaactggtattgtcagaaatgtggattatggtaggagtaaggcagatttaaggcagctctggttattaataccaccctctcgtcaaaggaacataggggcacgagtgc

SEQ ID NO: 20161 - DNA, 110 bp, synthetic construct
  source 1..110: mol_type = other DNA
gggagttaagctgaacacctgtgggtcaaccaagagccatgagggaggtgactactggaggaagaggaggagcagctggaagcctgcagagtgcagcagccctgtcacca

SEQ ID NO: 20162 - DNA, 110 bp, synthetic construct
  source 1..110: mol_type = other DNA
tcgcttcctggcaatggcgtcacttggaattggctttggtctcagaatcatgctatcaaagctccatgcattctcctggctctttgcatcaaaataaaggcaccatgggc

SEQ ID NO: 20163 - DNA, 110 bp, synthetic construct
  source 1..110: mol_type = other DNA
gagctttacttaatctgttcaaataacagttaaaaatccagctaagatattcagtagtcagaaaacagaccacttaattcactgtttcagagtcctttacagtattaagc

SEQ ID NO: 20164 - DNA, 110 bp, synthetic construct
  source 1..110: mol_type = other DNA
aactcacccttcgtaagtagcaaaatggtcatgtaaggacacaccaacaaaaaacactgtcttttccactatccacaggtattagagtttttttttattatctttattgc

SEQ ID NO: 20165 - DNA, 110 bp, synthetic construct
  source 1..110: mol_type = other DNA
tttctattgcttagggaaggacaaagacctggtcagcaacagcgtgatggctggatggccctcagttccttgtggctatggggctgggagcttcagtttttttgctggcc

SEQ ID NO: 20166 - DNA, 110 bp, synthetic construct
  source 1..110: mol_type = other DNA
tggccctcagttccttgtggctatggggctgggagcttcagtttttttgctggccagaggccaccctcaaatatcaaaggccacctgcaatctttgtcacactgaccttt

SEQ ID NO: 20167 - DNA, 110 bp, synthetic construct
  source 1..110: mol_type = other DNA
tccgcttcagccatatgcagcgtcagacctcctcatcaagtttagacacattcgcttgacaagctcattgttccaaggatccatctaatacgactctaatgctccattgt

SEQ ID NO: 20168 - DNA, 110 bp, synthetic construct
  source 1..110: mol_type = other DNA
ttgacaagctcattgttccaaggatccatctaatacgactctaatgctccattgttaactttaagatagcaattagcctaacagccttttgctgactgcctgagaaagaa

SEQ ID NO: 20169 - DNA, 110 bp, synthetic construct
  source 1..110: mol_type = other DNA
gcttgagaccatcagatacagcattttatatttgcacacagatttcaaaatcagatcagcttactcactggttttcctttttacaaagaagaaaaccctatcatttggat

SEQ ID NO: 20170 - DNA, 110 bp, synthetic construct
  source 1..110: mol_type = other DNA
tggctaatgtttattaaacatcagagtcaggtatggttcttagagctttaaatgtattaactcacttcattctcaccaaaacctttgtgactcaggaatgattatcccct

SEQ ID NO: 20171 - DNA, 110 bp, synthetic construct
  source 1..110: mol_type = other DNA
cagggcagatggccggatgctccctgcactctgtctggcctcaaagaaggtctggtcctgtacccacctccacgtctccatcggagacaggaccctcccctttgcagccc

SEQ ID NO: 20172 - DNA, 110 bp, synthetic construct
  source 1..110: mol_type = other DNA
tcctgtacccacctccacgtctccatcggagacaggaccctcccctttgcagccctccagcttccttattctcctgacctcagagcctacggcagataaaatggacaagc

SEQ ID NO: 20173 - DNA, 110 bp, synthetic construct
  source 1..110: mol_type = other DNA
ccctcacacccaggagaggagtcagatcaaattcgggtcaatgcttcaaaagctctatcttgttaccatggtaacaggagtaccatcagtggaggccacacatttgggaa

SEQ ID NO: 20174 - DNA, 110 bp, synthetic construct
  source 1..110: mol_type = other DNA
tatcttgttaccatggtaacaggagtaccatcagtggaggccacacatttgggaaggccgccattttggatccaatcttcccagctcctcccacacatcccagcctggtc

SEQ ID NO: 20175 - DNA, 110 bp, synthetic construct
  source 1..110: mol_type = other DNA
aaacactggttggagaatatgcctcttcctctagatcacccggggcccttcacagggcatggagtagacaggaggcatcagctccaactgttttcgtatcatgaatgaaa

SEQ ID NO: 20176 - DNA, 110 bp, synthetic construct
  source 1..110: mol_type = other DNA
acacagcaacctgctgttaaaaggaaattattggagggcaggtgacagaggcaggactccgtttccatctccttgtgttttataaatagactaacacctggcaaaccggc

SEQ ID NO: 20177 - DNA, 110 bp, synthetic construct
  source 1..110: mol_type = other DNA
actccgtttccatctccttgtgttttataaatagactaacacctggcaaaccggcccctggaaaacatggtcctggctgtccgattccctctcatcactgcaggcctggc

SEQ ID NO: 20178 - DNA, 110 bp, synthetic construct
  source 1..110: mol_type = other DNA
attctttcctcactggctggggccctctttgctaaggatgataggtttaaagcggtggttcctgaaagcagaagggaaattttgtccccgggggggacacctggagacat

SEQ ID NO: 20179 - DNA, 110 bp, synthetic construct
  source 1..110: mol_type = other DNA
ctcccacccaaagcaggtgccatagtatccacctttgcacggacacacgcgaccctcggttttcacgagaaaacatcttacacgtctctgcctgtggaagctgagctctg

SEQ ID NO: 20180 - DNA, 110 bp, synthetic construct
  source 1..110: mol_type = other DNA
tcggttttcacgagaaaacatcttacacgtctctgcctgtggaagctgagctctgtattcccatcaccttagtattttaagtattttgtcaaggtgtgtaacaaagaaaa

SEQ ID NO: 20181 - DNA, 110 bp, synthetic construct
  source 1..110: mol_type = other DNA
cactgagtaccagtggtccccttcaccaattctggacctgtcacatcctcactttggtgagggatcttacagtcatccagcttatggtcataacccatttagacgtttct

SEQ ID NO: 20182 - DNA, 110 bp, synthetic construct
  source 1..110: mol_type = other DNA
ggtgagggatcttacagtcatccagcttatggtcataacccatttagacgtttctggctgtggtttgtgtaagaagttgcactggaatctaacatctatcctgctttggc

SEQ ID NO: 20183 - DNA, 110 bp, synthetic construct
  source 1..110: mol_type = other DNA
agcattggagggcatctgttcccaccccagacagctgctgcatctcaccttccgtgcatctgtgggctcaggaagcctgggtaaccggattttccagttttctccacaag

SEQ ID NO: 20184 - DNA, 110 bp, synthetic construct
  source 1..110: mol_type = other DNA
cgtgggtcagccaggcttccactggtgcactttgcttgccttaaggtctcggcagtgtttgatatcaaatgctctgcttacatgagggcccttcatgtcatagtgctgga

SEQ ID NO: 20185 - DNA, 110 bp, synthetic construct
  source 1..110: mol_type = other DNA
tgtttgatatcaaatgctctgcttacatgagggcccttcatgtcatagtgctggagagtcccgctctggagccagatggctggctgtttgaattccagctctgcttcttc

SEQ ID NO: 20186 - DNA, 110 bp, synthetic construct
  source 1..110: mol_type = other DNA
ccatgtgttggctgtgagacttgccaatgcagaagggaactcttggcgtttgtgttccagccgtctcggggatgctgtctgcggtttacagtgttgcgcggagtgcctct

SEQ ID NO: 20187 - DNA, 110 bp, synthetic construct
  source 1..110: mol_type = other DNA
tccagccgtctcggggatgctgtctgcggtttacagtgttgcgcggagtgcctctgcagcggccgtgctgcatgtgttctgtttcagcgccgtgaaggtaggtgggaggc

SEQ ID NO: 20188 - DNA, 110 bp, synthetic construct
  source 1..110: mol_type = other DNA
ctccaaacccaggtagcactgagtcatctcaagctatggttggatgtctttgatggtggctgtggacactgacttgggggaaaacaggcaaaataacgttagctctgttg

SEQ ID NO: 20189 - DNA, 110 bp, synthetic construct
  source 1..110: mol_type = other DNA
gtggctgtggacactgacttgggggaaaacaggcaaaataacgttagctctgttgttcaaactggaattgcgattgtcaagtgaaggaagatgtaggttcaggtttgggt

SEQ ID NO: 20190 - DNA, 110 bp, synthetic construct
  source 1..110: mol_type = other DNA
gtgttcctgtccttgcgtgtacgtatcagtttggctctgcactcttctcacctcttcatcctcccgtagttacagtgcccatccgggcagccctgggctactgataggac

SEQ ID NO: 20191 - DNA, 110 bp, synthetic construct
  source 1..110: mol_type = other DNA
tcatcctcccgtagttacagtgcccatccgggcagccctgggctactgataggacagcggagccagaggaagggcagacaaggccagtggaggggtggaaggactgtatc

SEQ ID NO: 20192 - DNA, 110 bp, synthetic construct
  source 1..110: mol_type = other DNA
aagcactgggttaggtgctgtgagtacagatgtgaaggtgcggccttatggagcttggagccttctagaagacagatgtgcagtgagtagttactgctcagcgagatgtg

SEQ ID NO: 20193 - DNA, 110 bp, synthetic construct
  source 1..110: mol_type = other DNA
attaccgctgagccatgatggcaactccaacgtacttcatgtttacctctcagatgagctcctctgcgagtgcttataatacacaaagacacttgcctcacctcctagga

SEQ ID NO: 20194 - DNA, 110 bp, synthetic construct
  source 1..110: mol_type = other DNA
aatgggtgctggatcacaacaggcacagtcacagagtggactcagggctcaggtggccattttagcaatactcagaagggctccccaatgcagttatttttacaaaactt

SEQ ID NO: 20195 - DNA, 110 bp, synthetic construct
  source 1..110: mol_type = other DNA
gccattttagcaatactcagaagggctccccaatgcagttatttttacaaaacttttttcagctgttatatctagaaatctaggaactatccatcctatttttgtacatt

SEQ ID NO: 20196 - DNA, 110 bp, synthetic construct
  source 1..110: mol_type = other DNA
attgtctttgcttctctcttcctaagtaagtcctctgcagccccaggatctcagcctcccctcctcccttccgagcatgcagaccctctacaggccacgtctggtcatca

SEQ ID NO: 20197 - DNA, 110 bp, synthetic construct
  source 1..110: mol_type = other DNA
ctcccctcctcccttccgagcatgcagaccctctacaggccacgtctggtcatcagcccaattcccagccccctcttgctccagccatcagtgcagaattcttctctgcc

SEQ ID NO: 20198 - DNA, 110 bp, synthetic construct
  source 1..110: mol_type = other DNA
actcacactgaacccctttgctgcctccaatccccccctttatctctttgcccaattcatccctcattagctctgccaagccctttagagttttaaattaactaacattt

SEQ ID NO: 20199 - DNA, 110 bp, synthetic construct
  source 1..110: mol_type = other DNA
ccaaaacaggcttcttccccacctggctggtagctaacattctttgggtctggctttcacaccatatctcttcctgactgctggagtggagtggattcaagtcctaggaa

SEQ ID NO: 20200 - DNA, 110 bp, synthetic construct
  source 1..110: mol_type = other DNA
tggaatgaacacttgctaggttttctctagtgtgtacagcaaccaacctagagcgtatggtctccaggttgatttctttatgattaattttgatgggtgatgatatgggt

SEQ ID NO: 20201 - DNA, 110 bp, synthetic construct
  source 1..110: mol_type = other DNA
ggcacacacactgcgggttctcttcctctgctggaacccaggtggatacactgctctagacagcatattaggaaatatccaattgtactgttttcctagcagcccgtctc

SEQ ID NO: 20202 - DNA, 110 bp, synthetic construct
  source 1..110: mol_type = other DNA
ctagacagcatattaggaaatatccaattgtactgttttcctagcagcccgtctccattccctgggaaagaccacgcatataggggtgatggggagcccaggaccatctg

SEQ ID NO: 20203 - DNA, 110 bp, synthetic construct
  source 1..110: mol_type = other DNA
agtcttttgtgcccatctcgtttttttcttgggattttctatgccaagtacaaaaaaagaaatgtgtgtcttgtgggaatcctttgtaaggagctgaattggttttatgg

SEQ ID NO: 20204 - DNA, 110 bp, synthetic construct
  source 1..110: mol_type = other DNA
gggttccttctctcctgccgcatccgtaatgtactgggttttccagctgtttatctggtggaattctgtgtgtctgaagtacatttaaaaggctagattttgggggttcc

SEQ ID NO: 20205 - DNA, 110 bp, synthetic construct
  source 1..110: mol_type = other DNA
gggttttccagctgtttatctggtggaattctgtgtgtctgaagtacatttaaaaggctagattttgggggttcccatggtggctcagcagtaatgaactcgactagtat

SEQ ID NO: 20206 - DNA, 110 bp, synthetic construct
  source 1..110: mol_type = other DNA
tgtaacatggacatattagaacagctttgttggtggaaatacatttaatttaaactggccccatccttacttgtcctttgtggcttatatctgacacaggtctattctcc

SEQ ID NO: 20207 - DNA, 110 bp, synthetic construct
  source 1..110: mol_type = other DNA
aaccctgatttttccacactgccttaaaccccaaactggaccctattgaacctgcttgcagcttggttcccacagtgatttccgcccttggccaaagagcccttgagcca

SEQ ID NO: 20208 - DNA, 110 bp, synthetic construct
  source 1..110: mol_type = other DNA
ttgcagcttggttcccacagtgatttccgcccttggccaaagagcccttgagccagatcagggcagagacggagaacaggtcagattccagacgttccatcagcccccat

SEQ ID NO: 20209 - DNA, 110 bp, synthetic construct
  source 1..110: mol_type = other DNA
aagcagaatactttgcgaagtaagcttctgtgagccaagaacatagtagagcaaccccacctcacacccaaggctcttcagaaactccttgagtgattgattaaagactc

SEQ ID NO: 20210 - DNA, 110 bp, synthetic construct
  source 1..110: mol_type = other DNA
caccctggggtgaggaggcgcccacacaaggccgggccagcacaggcccatccctgttggcccaatgggaggcggctgtttacctggaacccacagcaagttgcaacccg

SEQ ID NO: 20211 - DNA, 110 bp, synthetic construct
  source 1..110: mol_type = other DNA
gttggcccaatgggaggcggctgtttacctggaacccacagcaagttgcaacccggatagcttctaacaactcccgcttcctcccccaaaggagtattagcttctcaggg

SEQ ID NO: 20212 - DNA, 110 bp, synthetic construct
  source 1..110: mol_type = other DNA
tgtagagggttagcagtgggctccacagaagaaacgtgctcccatctgcaatagctctgatggaaaacgctaggagtcatggcgagtgggtgcatttaggtaagccaaag

SEQ ID NO: 20213 - DNA, 110 bp, synthetic construct
  source 1..110: mol_type = other DNA
tctgatggaaaacgctaggagtcatggcgagtgggtgcatttaggtaagccaaagcagaggtgggcttgaaatcggtgactatgacatatttgtgacttctcagggtgcc

SEQ ID NO: 20214 - DNA, 110 bp, synthetic construct
  source 1..110: mol_type = other DNA
cttctagcacagcatctgcctcacagccagaaactgcgactatttagatgaaatcagcttcagttaggtgaataaaaaccttcgagagtcacaaaatttagtgtatctca

SEQ ID NO: 20215 - DNA, 110 bp, synthetic construct
  source 1..110: mol_type = other DNA
agcttcagttaggtgaataaaaaccttcgagagtcacaaaatttagtgtatctcattggaaagggactcaaattgctggacattcccaaggtttagaaataacagaaggg

SEQ ID NO: 20216 - DNA, 110 bp, synthetic construct; identical to SEQ ID NO: 20214
  source 1..110: mol_type = other DNA

SEQ ID NO: 20217 - DNA, 110 bp, synthetic construct; identical to SEQ ID NO: 20215
  source 1..110: mol_type = other DNA

SEQ ID NO: 20218 - DNA, 110 bp, synthetic construct
  source 1..110: mol_type = other DNA
cctacaccacagcttgcagcaataccggatgcttgacccacagagtggggccaggaatcgaactcgaatcttcaaggacactaagttgggttcttaacctgctgagccac

SEQ ID NO: 20219 - DNA, 110 bp, synthetic construct; identical to SEQ ID NO: 20218
  source 1..110: mol_type = other DNA

SEQ ID NO: 20220 - DNA, 110 bp, synthetic construct
  source 1..110: mol_type = other DNA
tgcagtttgatttggaaggaagaagacagatcatgacagccaacatttaaatcgtgagcatttaaatagtctgagtgactattgtgtgtcctgtgctcctcacgcctcat

SEQ ID NO: 20221 - DNA, 110 bp, synthetic construct
  source 1..110: mol_type = other DNA
gacttgtggtgagcacaaaccagctagttacatactagttatatacaagaaaaaataacaccttttttttggctcttgaaagtgttgctagatccagtgttttaatatca

SEQ ID NO: 20222 - DNA, 110 bp, synthetic construct
  source 1..110: mol_type = other DNA
taacaccttttttttggctcttgaaagtgttgctagatccagtgttttaatatcacaggcagtcagattcaggtataaactagtcaggagtgatcatcatatttaaatga

SEQ ID NO: 20223 - DNA, 110 bp, synthetic construct
  source 1..110: mol_type = other DNA
cacacaaacagaaggctcacaaaagtaccaagtttggtccaattatggaaacataaagcagcggtcactctggcagcatcgcagaaggagattcggcccaccttgcaggg

SEQ ID NO: 20224 - DNA, 110 bp, synthetic construct
  source 1..110: mol_type = other DNA
aagcagcggtcactctggcagcatcgcagaaggagattcggcccaccttgcagggagggggtaaaaaaatgtctctcagcggaagtgactgagtaaagattttaaaggat

SEQ ID NO: 20225 - DNA, 110 bp, synthetic construct
  source 1..110: mol_type = other DNA
ccccagactgggggcattttaccctcttggacttttcttcatggcaggtgtcacagcttataattacctatctgtgtctttgaccaatatctgtctccctcactagactc

SEQ ID NO: 20226 - DNA, 110 bp, synthetic construct
  source 1..110: mol_type = other DNA
ccacacctggtgcagggggcatctccagcaagtggcagttgctgccaccatcattctgcattgcaaggcattttgaggtgactacattcctgatgtgaaaatatggccaa

SEQ ID NO: 20227 - DNA, 110 bp, synthetic construct
  source 1..110: mol_type = other DNA
ctgcattgcaaggcattttgaggtgactacattcctgatgtgaaaatatggccaaaccaatgcttttccaaatgcaacaaagaaggcccaaagcttcccaggtccctcga

SEQ ID NO: 20228 - DNA, 110 bp, synthetic construct; identical to SEQ ID NO: 20226
  source 1..110: mol_type = other DNA

SEQ ID NO: 20229 - DNA, 110 bp, synthetic construct; identical to SEQ ID NO: 20227
  source 1..110: mol_type = other DNA

SEQ ID NO: 20230 - DNA, 110 bp, synthetic construct
  source 1..110: mol_type = other DNA
acccctgctctgcaacaagggaaccacacccaagtaagttttttaaagcacctatcaaaatattttgtgctacaaacaacacagttaaaaacctctaggtgtacgccaaa

SEQ ID NO: 20231 - DNA, 110 bp, synthetic construct
  source 1..110: mol_type = other DNA
tgataaaagtatcatacacacaagacaataaaaattcaaatagtatagacaggagcagactaaaacaaaacctgccccaaaagccctctctgagcatctcttagggttcg

SEQ ID NO: 20232 - DNA, 110 bp, synthetic construct
  source 1..110: mol_type = other DNA
cagactaaaacaaaacctgccccaaaagccctctctgagcatctcttagggttcgtcttgtagcacttccctttgtgatactgtgttattttgctcttaacattattaag

SEQ ID NO: 20233 - DNA, 110 bp, synthetic construct
  source 1..110: mol_type = other DNA
gacgcccaaggtgcacggggtccaagcatgagaacaaatcctggctgtggacaacagtgatacatgtattttatgccaaatgcttaatcatataaatgggacatgggttt

SEQ ID NO: 20234 - DNA, 110 bp, synthetic construct
  source 1..110: mol_type = other DNA
tcacttttgctccctgcattcccagcccctctgccaagagtagtctcctcccctctctccacttgtcagaatccagtctgttctgtcaggctcacctccatgttttaatt

SEQ ID NO: 20235 - DNA, 110 bp, synthetic construct
  source 1..110: mol_type = other DNA
tctccacttgtcagaatccagtctgttctgtcaggctcacctccatgttttaattggcagcagcaatagttctaaggcagaagtgatgaagccaagtgctatggggaaag

SEQ ID NO: 20236 - DNA, 110 bp, synthetic construct
  source 1..110: mol_type = other DNA
tccaccaaattttattaagctgtacttaccaagcatttcttctaactttgttgcggcaggttcattcacattaaatacagtatcactatttctaggagaaaaagtaacaa

SEQ ID NO: 20237 - DNA, 110 bp, synthetic construct
  source 1..110: mol_type = other DNA
ctccctgcagatgagcagtggcagatgagcagcctgtgacctgtcactttgacctcaaatcccaggcttcccaggggagaggtgtgatacaaggccacaggttggtgatg

SEQ ID NO: 20238 - DNA, 110 bp, synthetic construct
  source 1..110: mol_type = other DNA
actcatcgctaagtctacagatttgggtggcaaccccccagaattagttctagacttctaggttgtgaaaattaaccagctcgtaaaatctgaatgtgaatttatatact

SEQ ID NO: 20239 - DNA, 110 bp, synthetic construct
  source 1..110: mol_type = other DNA
gcaataccagattcagtatttaacacttcttcaacaaggaaggctaagctctaagcaccattctagactcatccaagacgcccatcccagtgttgggggctcagcttggg

SEQ ID NO: 20240 - DNA, 110 bp, synthetic construct
  source 1..110: mol_type = other DNA
caccattctagactcatccaagacgcccatcccagtgttgggggctcagcttgggaaatgtctctagcgtgaaatctgaggaatcagaataccttaggaagaggacgact

SEQ ID NO: 20241 - DNA, 110 bp, synthetic construct
  source 1..110: mol_type = other DNA
aatagaaaatctggaaaattcaggaaagccccaaataaaagtcacctatgatctcaacagcttgctacactgcagctggcatcgtggcatcttccagtgttgtctgcact

SEQ ID NO: 20242 - DNA, 110 bp, synthetic construct
  source 1..110: mol_type = other DNA
aacagcttgctacactgcagctggcatcgtggcatcttccagtgttgtctgcactggctgatgtgcaggctgatggtcaaggcgctggagccctctgaccgatttcgact

SEQ ID NO: 20243 - DNA, 110 bp, synthetic construct; identical to SEQ ID NO: 20241
  source 1..110: mol_type = other DNA

SEQ ID NO: 20244 - DNA, 110 bp, synthetic construct; identical to SEQ ID NO: 20242
  source 1..110: mol_type = other DNA

SEQ ID NO: 20245 - DNA, 110 bp, synthetic construct
  source 1..110: mol_type = other DNA
tcagaccaacagctctctttactcagccctttctaaggaccaggcacttgtgaggtgctggccacttggtttaagacataagctctatcctcaaggaccttacagtttag

SEQ ID NO: 20246 - DNA, 110 bp, synthetic construct
  source 1..110: mol_type = other DNA
aagggcaggttataaaacaatgtagctcattcagttctcacaacctaatgacaataatagtagcccgcgttctttgagctccattatgtcagaaactaccgcatgcttta

SEQ ID NO: 20247 - DNA, 110 bp, synthetic construct
  source 1..110: mol_type = other DNA
aatagtagcccgcgttctttgagctccattatgtcagaaactaccgcatgctttacttaaatttcctcatttaaatctcacaacctcccctgtgatataggtaatttgtt

SEQ ID NO: 20248 - DNA, 110 bp, synthetic construct
  source 1..110: mol_type = other DNA
aatcttacagttttgatgactctataatgtgtcatccatgtatagttgtaaaatgtatggctcttgcagttgcattcagaaagtagatcagaaattttctctttgcgcta

SEQ ID NO: 20249 - DNA, 110 bp, synthetic construct
  source 1..110: mol_type = other DNA
tatggctcttgcagttgcattcagaaagtagatcagaaattttctctttgcgctaagagaagatattactctactggagtctgataaagcattttcatccatttgtgatg

SEQ ID NO: 20250 - DNA, 110 bp, synthetic construct
  source 1..110: mol_type = other DNA
gatgcgatgggcctgggctctggaggtgtttcatcccgtccatgtgggagcagagtgctcagaggttctgttcttcctctgatccagcggagtaaagggctgtgtgagtc

SEQ ID NO: 20251 - DNA, 110 bp, synthetic construct
  source 1..110: mol_type = other DNA
tgctcagaggttctgttcttcctctgatccagcggagtaaagggctgtgtgagtcctgtcagatcgtggagccgattcatctcttgttcctcactgcgctggcaccgagg

SEQ ID NO: 20252 - DNA, 110 bp, synthetic construct
  source 1..110: mol_type = other DNA
ctctctgcgatgctctgcagtgagatcttctcctggaggaagcactgatgtcagatatgtgagcctcttaactgtaaagagatgcgggaaagtgcttacaagggggtgtg

SEQ ID NO: 20253 - DNA, 110 bp, synthetic construct
  source 1..110: mol_type = other DNA
tatgtgagcctcttaactgtaaagagatgcgggaaagtgcttacaagggggtgtggtggagagtagggcacagcacctgaaatcctttgaaagaacagatttctgagtgc

SEQ ID NO: 20254 - DNA, 110 bp, synthetic construct
  source 1..110: mol_type = other DNA
gtagcatctctggtggtgagaccagatcttcatggagcctaaagcttctgggtaagagaggtgagctctggaggctgagaagaacctgtgagagtaaatgtaggtggaac

SEQ ID NO: 20255 - DNA, 110 bp, synthetic construct
  source 1..110: mol_type = other DNA
tggagtgacccaggcttgctgtttggcaggtgctgaacagcgtcctttttgagctcaaagcagacgagggagagcagcccacggagtccgccctgcagccggccgggccc

SEQ ID NO: 20256 - DNA, 110 bp, synthetic construct
  source 1..110: mol_type = other DNA
caaagcagacgagggagagcagcccacggagtccgccctgcagccggccgggcccgaggccttggaggtgacgctgaacagcccattcctattggccgtcttggagcgag

SEQ ID NO: 20257 - DNA, 110 bp, synthetic construct
  source 1..110: mol_type = other DNA
ggagcccaagtcagagtgtttggacggctgtgggaggtagggaagggcccactcgggagggattcttccggaaactggcttcgcccttggcacccgatgaaaacacaggg

SEQ ID NO: 20258 - DNA, 110 bp, synthetic construct
  source 1..110: mol_type = other DNA
taaacaaatacatctgcacacatggttatttttcatctaaaccaggagtgggcagatgtcagaatctgtggccagtgttggtgcgatcaaaccgggaactgaggtttggc

SEQ ID NO: 20259 - DNA, 110 bp, synthetic construct
  source 1..110: mol_type = other DNA
ttatttttcatctaaaccaggagtgggcagatgtcagaatctgtggccagtgttggtgcgatcaaaccgggaactgaggtttggcacttgccatcagcctctacatggat

SEQ ID NO: 20260 - DNA, 110 bp, synthetic construct
  source 1..110: mol_type = other DNA
ttatggttactagtcagatttgtttttgctgcaccacacaggaactccccatttagtcactctttaatgcactcattcaatagctatcacggaacatcttcaatcagcca

SEQ ID NO: 20261 - DNA, 110 bp, synthetic construct
  source 1..110: mol_type = other DNA
cctagagcccaaagtttacccaggatggttgataacactttttctgcatccactggcaagagtgactcatggctagctaagaggtcttatgacttactgacattcctctc

SEQ ID NO: 20262 - DNA, 110 bp, synthetic construct
  source 1..110: mol_type = other DNA
gcaagagtgactcatggctagctaagaggtcttatgacttactgacattcctctcgaaaggtcaccaaaacatctcccagttgcaaaatccaaagatctgacttctgagt

SEQ ID NO: 20263 - DNA, 110 bp, synthetic construct
  source 1..110: mol_type = other DNA
tggagcccttataaataggattagcggcttcaaagaagagaccacagagagctccctggtcccttcccctttgcaaggtgacagtgagaagatggctgtatgaaccagga

SEQ ID NO: 20264 - DNA, 110 bp, synthetic construct
  source 1..110: mol_type = other DNA
cctttctgataccctgcatttttattgtcctcacaattgctggttttgaaatcatatttgtgtggatgatttcctacctttactgtatgtttgcttttacccttgagctt

SEQ ID NO: 20265 - DNA, 110 bp, synthetic construct
  source 1..110: mol_type = other DNA
ttgaaatcatatttgtgtggatgatttcctacctttactgtatgtttgcttttacccttgagctttcctattcataatttacttgttcatagttgtggcctattcttcct

SEQ ID NO: 20266 - DNA, 110 bp, synthetic construct
  source 1..110: mol_type = other DNA
ctgcctctggggagcacttgctgcgggatggactccacgcttaagcactttacatgaattgctcatcttcttttcatgaccaccttgtgaagtgagcaggggtaccttgt

SEQ ID NO: 20267 - DNA, 110 bp, synthetic construct
  source 1..110: mol_type = other DNA
gtgccgctgacacaggtgggatcctagggaccgtgctgtgggctgctggggaacctccagaccaggctccatgtggcccaggtgcctgggctgctccccctcaggacgga

SEQ ID NO: 20268 - DNA, 110 bp, synthetic construct
  source 1..110: mol_type = other DNA
tccagaccaggctccatgtggcccaggtgcctgggctgctccccctcaggacggaacaccatgaatttctacttggatcctgtgaactaaagccagagttcccccttcat

SEQ ID NO: 20269 - DNA, 110 bp, synthetic construct
  source 1..110: mol_type = other DNA
ggtagccttgaactcctcaaaaccacccaccaaagcagatataactcttccccagtcacagtaaatgaccccagttctcaacagaagcatgtcagctcaagtacaacaag

SEQ ID NO: 20270 - DNA, 110 bp, synthetic construct
  source 1..110: mol_type = other DNA
tcacagtaaatgaccccagttctcaacagaagcatgtcagctcaagtacaacaagaacgtcaactcagttctgagaccacagagtcagagagacgtggacgtggggaaag

SEQ ID NO: 20271 - DNA, 110 bp, synthetic construct; identical to SEQ ID NO: 20269
  source 1..110: mol_type = other DNA

SEQ ID NO: 20272 - DNA, 110 bp, synthetic construct; identical to SEQ ID NO: 20270
  source 1..110: mol_type = other DNA

SEQ ID NO: 20273 - DNA, 110 bp, synthetic construct
  source 1..110: mol_type = other DNA
cccagacctgctctcacacctctccccaagaacatcaggctgcaaagcactcaaaggcggggctttttaaagtcaagtacatttgggcagcttccagagaactgacatct

SEQ ID NO: 20274 - DNA, 110 bp, synthetic construct
  source 1..110: mol_type = other DNA
ggcggggctttttaaagtcaagtacatttgggcagcttccagagaactgacatctccgaaggttttaaaaagcaccacctctgtttgaaaggtgtttgtttgtttgtttt

SEQ ID NO: 20275 - DNA, 110 bp, synthetic construct
  source 1..110: mol_type = other DNA
gtcttgacctgtggcttttgctttcgctgcttatgaaacttgaaattcagctcgaaggtgacctctggcatcaatctgctctcctctgatctctattctgcctcctgtta

SEQ ID NO: 20276 - DNA, 110 bp, synthetic construct
  source 1..110: mol_type = other DNA
actactggaggggggataatgggcttggaactcttcctaagacttatccccagagaattatcactatttaacagtttgacaggtgactgaaaagctccattctcaggact

SEQ ID NO: 20277 - DNA, 110 bp, synthetic construct
  source 1..110: mol_type = other DNA
aattatcactatttaacagtttgacaggtgactgaaaagctccattctcaggacttgtctttatttgacctgactcagtgcaagcaatcctacccccagggtatttgtca

SEQ ID NO: 20278 - DNA, 110 bp, synthetic construct
  source 1..110: mol_type = other DNA
tgatgtgtcagtaggagacagtggcaatcatctggtggaaatttactaaacatcagatatcatgttaaatgcttggcacagatgagctggcagaacactgccacatcatc

SEQ ID NO: 20279 - DNA, 110 bp, synthetic construct
  source 1..110: mol_type = other DNA
tttgaaaattaaactttaacagctacttccaaaaacatatttagctgctgaaacactgcttgcttttttccccaatttcatcaagcccaccaacatcctttggaaccata

SEQ ID NO: 20280 - DNA, 110 bp, synthetic construct
  source 1..110: mol_type = other DNA
gcccaagagccatcttggtcttcccttcagtgaggggtccaggagctaaagggcaaagctccgacatctgagagcacggcttgctatgaaaagtttgttctcggaaaaag

SEQ ID NO: 20281 - DNA, 110 bp, synthetic construct
  source 1..110: mol_type = other DNA
aagctccgacatctgagagcacggcttgctatgaaaagtttgttctcggaaaaagcacaagggactcaacacccttgaaacacccttgcttgaaacactgatgaaccgag

SEQ ID NO: 20282 - DNA, 110 bp, synthetic construct; identical to SEQ ID NO: 20280
  source 1..110: mol_type = other DNA

SEQ ID NO: 20283 - DNA, 110 bp, synthetic construct; identical to SEQ ID NO: 20281
  source 1..110: mol_type = other DNA

SEQ ID NO: 20284 - DNA, 110 bp, synthetic construct
  source 1..110: mol_type = other DNA
ttcctgccctacctgtgaaggatgagcatgatcaggccgttgccctttccacatgacagggaaagggccatcagaggggcggacggtgagggaagacagctgctatgggg

SEQ ID NO: 20285 - DNA, 110 bp, synthetic construct
  source 1..110: mol_type = other DNA
acagggaaagggccatcagaggggcggacggtgagggaagacagctgctatggggactaaccacacagtgtgcagccactgttgaccccccagcaggtaatttgttacaa

SEQ ID NO: 20286 - DNA, 110 bp, synthetic construct
  source 1..110: mol_type = other DNA
gatttttttttttttggctgccccatggcatatggatttcctgagccataattgcaacctaaggtgagctaactgatcactacccaggtggaggggctgagtgttcatag

SEQ ID NO: 20287 - DNA, 110 bp, synthetic construct
  source 1..110: mol_type = other DNA
aacctaaggtgagctaactgatcactacccaggtggaggggctgagtgttcataggttaagtctatattacccctctttgcctgaccttcactcaggcgacttacagtaa

SEQ ID NO: 20288 - DNA, 110 bp, synthetic construct
  source 1..110: mol_type = other DNA
ctattgtctcatccaggacctgcaggaaaggggcctaagcccaggctgggtcaacattccacgtgtgaaatttgcctcattccatgcagagtgggctcttcatttccttt

SEQ ID NO: 20289 - DNA, 110 bp, synthetic construct
  source 1..110: mol_type = other DNA
gattgacgtgcgagcccttcagattcagggccaaggttgagggcagctcacagaccctagtctctcctggttgtggctgcctatcaagtgctgggtaatgcttcatgtgt

SEQ ID NO: 20290 - DNA, 110 bp, synthetic construct
  source 1..110: mol_type = other DNA
catatttccccgtactgagatgaggcgatttgggccagagtaagggccatcctataaccaaccccaacattctgggcatgtcctgggtgttccagcaacccatcttcaac

SEQ ID NO: 20291 - DNA, 110 bp, synthetic construct
  source 1..110: mol_type = other DNA
acatggccatagttggggacaacacagggactgagttagacacagtgtcagagtcttaggtatggacagcaaggaccttagctgggaacataactgggcattagttaagg

SEQ ID NO: 20292 - DNA, 110 bp, synthetic construct
  source 1..110: mol_type = other DNA
ttaggtatggacagcaaggaccttagctgggaacataactgggcattagttaaggaaaattcacaaccttaggaagagtgcagagtctaagttgaggaaaacattaagac

SEQ ID NO: 20293 - DNA, 110 bp, synthetic construct
  source 1..110: mol_type = other DNA
agttaaggaagcaaacaatgaagaaaggtgtgacatagaaaaagatctgtcatacctaaatggtgtttgaggagaggggatcaaataatgtctaacatgagcataggcaa

SEQ ID NO: 20294 - DNA, 110 bp, synthetic construct
  source 1..110: mol_type = other DNA
aaaacatatgtaggttcccagtctaggagtcaaattgaagttacagatgccagcctacaccacagcaacgtgggatcctaggtggtctgagactgaaaccgcagctcaca

SEQ ID NO: 20295 - DNA, 110 bp, synthetic construct
  source 1..110: mol_type = other DNA
gatgccagcctacaccacagcaacgtgggatcctaggtggtctgagactgaaaccgcagctcacagcaaggcctgagctttaacccactaagcgaggccagggattgaac

SEQ ID NO: 20296 - DNA, 110 bp, synthetic construct
  source 1..110: mol_type = other DNA
taacatcagtttctaatttcaggatttctcctttataatgcactgtactgcatatataggcaccagctggcctttactgtgttgccccgtgggaactggagttcagggaa

SEQ ID NO: 20297 - DNA, 110 bp, synthetic construct
  source 1..110: mol_type = other DNA
ttgaggataaattgctgatgagtggtaaatatcctttgtggtgtgtttttaacgttgtgttaccattcactattggcttctagccagtatgaagtacaggtggcagtttt

SEQ ID NO: 20298 - DNA, 110 bp, synthetic construct
  source 1..110: mol_type = other DNA
ctgaggtgccggcaggctggagctgggatgggggagctggaagagctgcaaagagagtccagagctcattgccctgagcagggggccctgatagaaggggtgactcagat

SEQ ID NO: 20299 - DNA, 110 bp, synthetic construct
  source 1..110: mol_type = other DNA
agtccagagctcattgccctgagcagggggccctgatagaaggggtgactcagatgcataccctctgcagcacacaggttttctaggcagccctccttacctataaaact

SEQ ID NO: 20300 - DNA, 110 bp, synthetic construct
  source 1..110: mol_type = other DNA
cttggtgtgacccttctctctggggcctttgtttttcccttcactaaatgaatcccatttgagggcatttcctgctgagccacttctagctaccctgatggggcctgctg

SEQ ID NO: 20301 - DNA, 110 bp, synthetic construct
  source 1..110: mol_type = other DNA
catttgagggcatttcctgctgagccacttctagctaccctgatggggcctgctgggagaggaagtgctccctgggggcttttgttggaaggatgttaaccatgagagga

SEQ ID NO: 20302 - DNA, 110 bp, synthetic construct
  source 1..110: mol_type = other DNA
atgtatggtgacacttctgttgacaacgctcctatggggagattggggggagtggtgaccagctgtaccttcttccatgttgccgggccaggggctggcatcttttttat

SEQ ID NO: 20303 - DNA, 110 bp, synthetic construct
  source 1..110: mol_type = other DNA
gccaccatcccaggcagaccagccacccagctaaggcaccccctgtgtcccacacctagattgggaaagtctgcgtggaaaactgccaggagttcagtggcatccatgtg

SEQ ID NO: 20304 - DNA, 110 bp, synthetic construct
  source 1..110: mol_type = other DNA
cgcctcacaagtgacctgagtcactgcactcagattcttaacccaccagtgccatgatgggaactcccgtataatagctgtttcttgacctgttttctgaacttgcccat

SEQ ID NO: 20305 - DNA, 110 bp, synthetic construct
  source 1..110: mol_type = other DNA
gacccacctgtcggcccctgggccgcctagcggatccaggaccatgggaagctgagccaggaaaaggcccggttgcttactcggcattgcccaacctgcggctgggggcc

SEQ ID NO: 20306 - DNA, 110 bp, synthetic construct
  source 1..110: mol_type = other DNA
gccaggaaaaggcccggttgcttactcggcattgcccaacctgcggctgggggcctgcccagctctacgacccactccccagaacgttgctttaggtgatgcccattctg

SEQ ID NO: 20307 - DNA, 110 bp, synthetic construct
  source 1..110: mol_type = other DNA
agtcccatcagacccagttctcttttggtcactgaccagcagctccctaaagggcaaggcccaaggagcctagaggtgtagaggttgcaggcagcttccacgggtagctc

SEQ ID NO: 20308 - DNA, 110 bp, synthetic construct
  source 1..110: mol_type = other DNA
aggggtcactgccgacccccaaccaagcagagccttgttctttatcacacacctctggacgccccagcacagtgtagactaagctgcacagctggccagatggctcaccg

SEQ ID NO: 20309 - DNA, 110 bp, synthetic construct
  source 1..110: mol_type = other DNA
tggacgccccagcacagtgtagactaagctgcacagctggccagatggctcaccgctgtgctgcccttgtggccccagcgatgcatcagggaggcagtttctgcctgttt

SEQ ID NO: 20310 - DNA, 110 bp, synthetic construct
  source 1..110: mol_type = other DNA
tcctgtctcccacctggcaaaactccagtgacagatgaatccaagtctgtctactccagatgtaccctcgggtagctaagtgctgctaggggcaatcatacagccctgct

SEQ ID NO: 20311 - DNA, 110 bp, synthetic construct
  source 1..110: mol_type = other DNA
ccagatgtaccctcgggtagctaagtgctgctaggggcaatcatacagccctgctatcactctcaattcacaataaatttatcaatggaatggaggacttaacactactc

SEQ ID NO: 20312 - DNA, 110 bp, synthetic construct
  source 1..110: mol_type = other DNA
agcctctcaagcactgtaagtagggctccaagttcacttctctaagaggctcttcctttctctcatggtcatggattggcaccacagctccacacaccacttaccgagga

SEQ ID NO: 20313 - DNA, 110 bp, synthetic construct
  source 1..110: mol_type = other DNA
ctttctctcatggtcatggattggcaccacagctccacacaccacttaccgaggaaactctcccagatcacacactcccctaggcctaaatctcccttcctgacaaaggg

SEQ ID NO: 20314 - DNA, 110 bp, synthetic construct; identical to SEQ ID NO: 20312
  source 1..110: mol_type = other DNA

SEQ ID NO: 20315 - DNA, 110 bp, synthetic construct; identical to SEQ ID NO: 20313
  source 1..110: mol_type = other DNA

SEQ ID NO: 20316 - DNA, 110 bp, synthetic construct
  source 1..110: mol_type = other DNA
aataacctagctgggcttggaagcagattcttgctcagagcttccagataagttcccagagggcccacaccttgactgggtcgctgggaccctgccagagaaccctgccc

SEQ ID NO: 20317 - DNA, 110 bp, synthetic construct
  source 1..110: mol_type = other DNA
ccagagggcccacaccttgactgggtcgctgggaccctgccagagaaccctgccccgcacacgtgcaactcctgaccctgagagctgtgaggtgataaacagaaacagtc

SEQ ID NO: 20318 - DNA, 110 bp, synthetic construct
  source 1..110: mol_type = other DNA
ctagtacttcctgggactcactggtacaaattagcttatttcagggcttttcccaggacaggctggggtgctgctgcctctgttgtggtgtgttcagctttccagcttct

SEQ ID NO: 20319 - DNA, 110 bp, synthetic construct
  source 1..110: mol_type = other DNA
ggacaggctggggtgctgctgcctctgttgtggtgtgttcagctttccagcttctgaaacgtggctgccattgtctctttaccccttctctttctcctggtgagtgtatt

SEQ ID NO: 20320 - DNA, 110 bp, synthetic construct
  source 1..110: mol_type = other DNA
tggtaggcatgatagctcattaagtactcacagaaaactctaccagctagttatcactcctgttttatagatgggaaacgtgagatccagaaaggttatgtggtcagccc

SEQ ID NO: 20321 - DNA, 110 bp, synthetic construct
  source 1..110: mol_type = other DNA
atgattattctatttttcatatactctcctgattcttcctcctttcttccagtttttttggtatccacattgttagcagacacggagacagtacatactacattatctcc

SEQ ID NO: 20322 - DNA, 110 bp, synthetic construct
  source 1..110: mol_type = other DNA
ttttggtatccacattgttagcagacacggagacagtacatactacattatctcctttataaccataatttagcctcgttcttagtcttaatttcttatcggtccttatg

SEQ ID NO: 20323 - DNA, 110 bp, synthetic construct
  source 1..110: mol_type = other DNA
ttaaaaatgtcttcatgggccaaataaaatactacctgttttcagcctccagtatagagtacaggaagccagctttttggcacctccaggtagcaggtgatgttcagaga

SEQ ID NO: 20324 - DNA, 110 bp, synthetic construct
  source 1..110: mol_type = other DNA
cttgtaagtgaggggaggacagttacagctggtcagagggggcagctgctaagaaacagagagaccacaggatccagaaggtcggccagggccagaggaggctctagcag

SEQ ID NO: 20325 - DNA, 110 bp, synthetic construct
  source 1..110: mol_type = other DNA
acagagagaccacaggatccagaaggtcggccagggccagaggaggctctagcagatagagaaagctgcttctctatgatgagatgaggttggtatccaagctgcccagc

SEQ ID NO: 20326 - DNA, 110 bp, synthetic construct
  source 1..110: mol_type = other DNA
caaaaagaaaatccaagtcgtgttttgattcaggagctgccagttctctctgggcatgaggaacatttcatgtctcagccacaagaatttgccattttggttcagacatg

SEQ ID NO: 20327 - DNA, 110 bp, synthetic construct
  source 1..110: mol_type = other DNA
tatttgactgggctaaaattcttcataatacactaacagttagttttacataggcttcctggtgaggtaggactatcatatatccttctgaaaaggcttagggtcttgca

SEQ ID NO: 20328 - DNA, 110 bp, synthetic construct
  source 1..110: mol_type = other DNA
aacctttgtgtcccagtttgcacagacaatggaactgtgccacccatggtcaccgcaggaccaagagctgtgacggctgtcagttttaaggtgcatcacaagctcattgc

SEQ ID NO: 20329 - DNA, 110 bp, synthetic construct
  source 1..110: mol_type = other DNA
atgtctctctctctctctctctctctctctctctatcacaccttgtaaatcatggccttgttgactatgaggtaggtggagctggggagggtagaccacaatttcaggaa

SEQ ID NO: 20330 - DNA, 110 bp, synthetic construct
  source 1..110: mol_type = other DNA
actaggagggagttctttatatcccagtaaaacctcccctgctgtagttaattcaccttctttttgcaaactgagttctcttatataggagagaagccaagtaatctgtg

SEQ ID NO: 20331 - DNA, 110 bp, synthetic construct
  source 1..110: mol_type = other DNA
ccttctttttgcaaactgagttctcttatataggagagaagccaagtaatctgtgcaaaaagctgtagaataaatactttgtccttgacaggctctacactcagattttc

SEQ ID NO: 20332 - DNA, 110 bp, synthetic construct
  source 1..110: mol_type = other DNA
tgagacccttctgtcccacaagtagggttcatgcccctaccatggttccaaggcaagtccaaagctgtcctggggcacacatgaaacattgaaaatgtaccccatgaatg

SEQ ID NO: 20333 - DNA, 110 bp, synthetic construct
  source 1..110: mol_type = other DNA
aaattggcaaaagtgagtgtggactagagggagagctggaagaccctgaggtttacagatatgatagaggggaggaatttacatcctcttgcaatatttttctctacaaa

SEQ ID NO: 20334 - DNA, 110 bp, synthetic construct
  source 1..110: mol_type = other DNA
attctttctagagttgcatttctacttggtaaaagaatagctgaaaaacaagcgatggtgacacctcatcactttctccatcacaagactgataggcattaaattacact

SEQ ID NO: 20335 - DNA, 110 bp, synthetic construct
  source 1..110: mol_type = other DNA
aaaaagctcttttttaaaaaagggagactagattttctatctgagtaactatttgacatcatcttttacaatatgtcgggtcttcttaacctttcctcacagcagaaaat

SEQ ID NO: 20336 - DNA, 110 bp, synthetic construct; identical to SEQ ID NO: 20335
  source 1..110: mol_type = other DNA

SEQ ID NO: 20337 - DNA, 110 bp, synthetic construct
  source 1..110: mol_type = other DNA
ccaaaatccagattcagtaaacccaggttgggtcctagaactgacctttgaattaagtttaaaagaagagtcttatgttccccagagcatacttctgactttctaaaatg

SEQ ID NO: 20338 - DNA, 110 bp, synthetic construct
  source 1..110: mol_type = other DNA
agtttaaaagaagagtcttatgttccccagagcatacttctgactttctaaaatgtttggctaagtaaaggcctggcttccttcactttttgatcagctagagaacttca

SEQ ID NO: 20339 - DNA, 110 bp, synthetic construct
  source 1..110: mol_type = other DNA
ataaaaatcaatgactataatagtgtaactctaaatatgggaagaagcaacataaggaaaccattttgtggaacataagagactaatgtggaccataaggtggtccagag

SEQ ID NO: 20340 - DNA, 110 bp, synthetic construct
  source 1..110: mol_type = other DNA
agagatacttgggcagtgacaaaggtagagtagagaggggtgtccccccactttgatagtggacttgcccagtcgcagctctggcccaccaagacccactgctctgtaca

SEQ ID NO: 20341 - DNA, 110 bp, synthetic construct
  source 1..110: mol_type = other DNA
ctctctcaacaatttctattttccagtcataaattcaatcccatcaaattttggtatttatgagactgtttttaccccaataaatgtttagatttgcttttgtataggcc

SEQ ID NO: 20342 - DNA, 110 bp, synthetic construct
  source 1..110: mol_type = other DNA
cagtatttgaacccagcccaaacccaaattgggacttgaagccacatgcccctactcgaacccagcctaaacccagattgagacttgacccagtggttttaaattagagt

SEQ ID NO: 20343 - DNA, 110 bp, synthetic construct
  source 1..110: mol_type = other DNA
gcccaaacccaaattgggacttgaagccacatgcccctactcgaacccagcctaaacccagattgagacttgacccagtggttttaaattagagtcattcacacagtgtc

SEQ ID NO: 20344 - DNA, 110 bp, synthetic construct
  source 1..110: mol_type = other DNA
tgtggaacactattgtttacccagttttaaagacagaatcattgtcttctgtcacctcaaaatctctcttaaaaaatgattcacacagcttgcggaggaagcaaattaga

SEQ ID NO: 20345 - DNA, 110 bp, synthetic construct
  source 1..110: mol_type = other DNA
ggtgggtcctgttttccaggtaaggttaaagtagccaaagctgagttggaggattgtgattggtttggtttaaatttctttgccaggtgtttcacctaagcgcaggctga

SEQ ID NO: 20346 - DNA, 110 bp, synthetic construct
  source 1..110: mol_type = other DNA
ccaccccatatttatccctctcaaaatttcagcccttcagtccttgccttaggctcttcttgcaaatgggtcaagaaaaagatacattttctgagttaggattgacagtt

SEQ ID NO: 20347 - DNA, 110 bp, synthetic construct
  source 1..110: mol_type = other DNA
cttcttgcaaatgggtcaagaaaaagatacattttctgagttaggattgacagttgcctaataacagattggtgtgggagatagagaataattaaatttgtccaacaatg

SEQ ID NO: 20348 - DNA, 110 bp, synthetic construct
  source 1..110: mol_type = other DNA
tccaattcgatgcctagcctgggaaattccacattgcacagctatggtcataaaaaaaaaaagaaagaaagaaagaaatgtacagttgactcttagatgtaagtcacgaa

SEQ ID NO: 20349 - DNA, 110 bp, synthetic construct
  source 1..110: mol_type = other DNA
aaaaaaagaaagaaagaaagaaatgtacagttgactcttagatgtaagtcacgaaccagtccactctgcacccacatttcagtatgaaactatacaaactattacagcct

SEQ ID NO: 20350 - DNA, 110 bp, synthetic construct
  source 1..110: mol_type = other DNA
ggatggaggtccatttgtctgcatcagtgatcaactttcccagctttctaactacactcttcccaggctcctattccttggattcacttccctaaataaacaatctccac

SEQ ID NO: 20351 - DNA, 110 bp, synthetic construct
  source 1..110: mol_type = other DNA
tatttattccttccttcttcctcctccttactgccttctatttcactatagaatctctttccaagtgttgaggaagaatgtttgtgctcctccaaagttcaaatgttaaa

SEQ ID NO: 20352 - DNA, 110 bp, synthetic construct; identical to SEQ ID NO: 20351
  source 1..110: mol_type = other DNA

SEQ ID NO: 20353 - DNA, 110 bp, synthetic construct
  source 1..110: mol_type = other DNA
atgccagtttctatggcaaccaaagggctcaggcaaaaagtggggggaggggagttaatttaaaagcaagataagcacataaatatggttcttgtccacattttctttgg

SEQ ID NO: 20354 - DNA, 110 bp, synthetic construct
  source 1..110: mol_type = other DNA
ggaggggagttaatttaaaagcaagataagcacataaatatggttcttgtccacattttctttggaattcccataatcaatctttgctgcaattaaatgattatacaaag

SEQ ID NO: 20355 - DNA, 110 bp, synthetic construct; identical to SEQ ID NO: 20353
  source 1..110: mol_type = other DNA

SEQ ID NO: 20356 - DNA, 110 bp, synthetic construct; identical to SEQ ID NO: 20354
  source 1..110: mol_type = other DNA

SEQ ID NO: 20357 - DNA, 110 bp, synthetic construct
  source 1..110: mol_type = other DNA
ttgtgtaattttattttgatataatatcaaactcaaagttgcaagaatagtacaaagaatttgtgcacaccctttatcagctgtcctcattgtttgcatgttgtccattt

SEQ ID NO: 20358 - DNA, 110 bp, synthetic construct
  source 1..110: mol_type = other DNA
agaatttgtgcacaccctttatcagctgtcctcattgtttgcatgttgtccatttgcccacatccattgtctctctttctctctcaaacatgcacataacatttgtacat

SEQ ID NO: 20359 - DNA, 110 bp, synthetic construct
  source 1..110: mol_type = other DNA
gaaaacagccatccacacaccagagagtcctcaccagaaaccaattgtgctgccaccctgtcctcagacttccagcttccggaaccataagaagtatatttgagtcattt

SEQ ID NO: 20360 - DNA, 110 bp, synthetic construct
  source 1..110: mol_type = other DNA
ttgagtatctatctggtatattttccagagctgttttttcaggcaaagggcaatcagaggactggaggggtctcatcagactgccacaggctagtatgtttaaagctaaa

SEQ ID NO: 20361 - DNA, 110 bp, synthetic construct
  source 1..110: mol_type = other DNA
agaggactggaggggtctcatcagactgccacaggctagtatgtttaaagctaaagcacccacaatcagcaggcatccatccagtccatataaatcaatcagcagcctct

SEQ ID NO: 20362 - DNA, 110 bp, synthetic construct
  source 1..110: mol_type = other DNA
atgccagagtttccaatgaaaccacggtctgtgccggcatgcatcccccaaccactaaaaagacagtggtccagctcccgtctaggccaccagtcgagggttgagaggtg

SEQ ID NO: 20363 - DNA, 110 bp, synthetic construct
  source 1..110: mol_type = other DNA
tctctgtgggaagaataagggatgaggtacagaagccaacttttcagcatgtgtataaccttttgtgctttaaaattttacaccatgggcataaaaatgattaaattaaa

SEQ ID NO: 20364 - DNA, 110 bp, synthetic construct
  source 1..110: mol_type = other DNA
cctgtactctgcacccacccctcttattacaaggagattccaaatgcattaacaaagacggttttgcaatttctggacacaatcctgagtccatcaccagaatgcaaaaa

SEQ ID NO: 20365 - DNA, 110 bp, synthetic construct
  source 1..110: mol_type = other DNA
agacggttttgcaatttctggacacaatcctgagtccatcaccagaatgcaaaaagctgctttcatatggcagacaggtccaatgctgcggtatgtgcatcaattaatga

SEQ ID NO: 20366 - DNA, 110 bp, synthetic construct
  source 1..110: mol_type = other DNA
agaatcttaagagccagtctggcttccatacttcacaagtttccattgttccctatcccatagtatcttaaagcttccactttcagagcttacttaaaaacattccttcc

SEQ ID NO: 20367 - DNA, 110 bp, synthetic construct
  source 1..110: mol_type = other DNA
tcccatagtatcttaaagcttccactttcagagcttacttaaaaacattccttccaggcaaagctgggagcaagctggctctctctcagctttatcaccaactgcctcag

SEQ ID NO: 20368 - DNA, 110 bp, synthetic construct
  source 1..110: mol_type = other DNA
gaatataaattgtttagcttattaatacgctagtcactcttctaatcatccaccactgaaaatgcccacaattatttaaggcaaaaactatgtgtgagcggtaaagaagt

SEQ ID NO: 20369 - DNA, 110 bp, synthetic construct; identical to SEQ ID NO: 20368
  source 1..110: mol_type = other DNA

SEQ ID NO: 20370 - DNA, 110 bp, synthetic construct
  source 1..110: mol_type = other DNA
cctattcaaagaaacactgtaccactgccattgtcactgggctctcaccccaatggatccttgaatcattcaagacactaggatagtgataaataaaccaagtccctgcg

SEQ ID NO: 20371 - DNA, 110 bp, synthetic construct
  source 1..110: mol_type = other DNA
taggttctggtcccagacctgccactgtccagctgcgagatttgggtatatcagttgatctgcaatccttggttttgccatccaggaaaagaagtcattttagtctcagt

SEQ ID NO: 20372 - DNA, 110 bp, synthetic construct
  source 1..110: mol_type = other DNA
acaaggcaagaagaaggggatgtacatcgttgacatggtacttctggtagctttccgatgtcctaaagcagcagtactcaacctggaggatgcattagagtcacctgaaa

SEQ ID NO: 20373 - DNA, 110 bp, synthetic construct
  source 1..110: mol_type = other DNA
cacaaaacaatgcaactccaacaaattcaaagagtccaaggatgttaaagccaagaaggcttgtttcagagaccctccttagctgcttggaaaatggaaatttgtgcctg

SEQ ID NO: 20374 - DNA, 110 bp, synthetic construct
  source 1..110: mol_type = other DNA
ccaagacgccagtgatttcattgtgctacgtcaggagctccatattatttattccctaacagttcaatcaatttaggaatcttcaggaatccctatcatggctcagccga

SEQ ID NO: 20375 - DNA, 110 bp, synthetic construct
  source 1..110: mol_type = other DNA
caaaatgatttcaaaacccgacttctctcttcattttccaaaacctccttcgtcccccaccttcagctgcttcatacctcacagagaaaacagacgtaagaggatgagta

SEQ ID NO: 20376 - DNA, 110 bp, synthetic construct
  source 1..110: mol_type = other DNA
gccagtccctttactacccttcctgcctcccctcctcacctaaatgatgtctcttcatccttcaggtatcagctcaagcactacatccttgatatcttgacaaagtcaac

SEQ ID NO: 20377 - DNA, 110 bp, synthetic construct
  source 1..110: mol_type = other DNA
tgcctgccttgtgtattttctctactcttctgtttgaaagtgactccccatcccatgacctcaacccgctagctggggagagagctgtgagattctagcatggccaattt

SEQ ID NO: 20378 - DNA, 110 bp, synthetic construct
  source 1..110: mol_type = other DNA
gtactctagcctcatttcaaatcccagctctgctccctcctagctggatgaacttcgtcgggttcattttcctttaaaatggaactgatggtaaagccagtattaaggtg

SEQ ID NO: 20379 - DNA, 110 bp, synthetic construct
  source 1..110: mol_type = other DNA
aagaaaattctcttttgtgatcacctttagtgacagctaaatgtacatgcttagcatgttggtgcctggtgggggtgggtagagacggttagaaaagatggtcaggagtt

SEQ ID NO: 20380 - DNA, 110 bp, synthetic construct
  source 1..110: mol_type = other DNA
ccaagcttctcaggagtcatccagatttttccagcaacaacttctctattatttttaccatttgaaataatctattaacggccttgaggattgttttcaaattattgtta

SEQ ID NO: 20381 - DNA, 110 bp, synthetic construct
  source 1..110: mol_type = other DNA
attaacttctcttttattttatgttttaaaaatttccttctgagatgtggttcgtaggcttcatctgttggccaaaagagtcttaaataaaggtcagtatgagagtttag

SEQ ID NO: 20382 - DNA, 110 bp, synthetic construct
  source 1..110: mol_type = other DNA
ttctgacaatgatatcatgtattaaaataattgattaaaaattttaaaccgtggtcaaagacgcttttgagtaaccactgaatcctagaaatagggcaggaatggggaag

SEQ ID NO: 20383 - DNA, 110 bp, synthetic construct; identical to SEQ ID NO: 20382
  source 1..110: mol_type = other DNA

SEQ ID NO: 20384 - DNA, 110 bp, synthetic construct
  source 1..110: mol_type = other DNA
tttttataaagcatcatgttgctcctggttttaaacccttcaggggctttccacttgttggttttatgctccaacatccattttccccttccctgaagtaacagagacat

SEQ ID NO: 20385 - DNA, 110 bp, synthetic construct
  source 1..110: mol_type = other DNA
agcattgctgcaactacagcttggattcaatccctggcccataacttcaatatactataggtgctattgaaaaactgggggcaggggggcatgatatacttacttccaat

SEQ ID NO: 20386 - DNA, 110 bp, synthetic construct
  source 1..110: mol_type = other DNA
aggtgggaaaaacaaaatctgtagggaggtctggtcaaaacagggcctgacagagggacgctctgaagagtaagtaggattttgaaaggtagaagagggagaggagctgg

SEQ ID NO: 20387 - DNA, 110 bp, synthetic construct
  source 1..110: mol_type = other DNA
ggacgctctgaagagtaagtaggattttgaaaggtagaagagggagaggagctggacttactaattagagacaaaggcacaagctagtcccaccaggcatgtgtgccatc

SEQ ID NO: 20388 - DNA, 110 bp, synthetic construct
  source 1..110: mol_type = other DNA
agaaaccacttttccacggggattcagaaatcgatcaactcttcagaattttcaggtatttttgttttttatacgtaagctgttaagaactttaaatattaagacaacat

SEQ ID NO: 20389 - DNA, 110 bp, synthetic construct
  source 1..110: mol_type = other DNA
ggggacagagtcccgggacccttgtccatcttgattcaagtcagtggagaatctgcatgcagaaacacggcaagatcaaggactaccgagagacgtacatcctaatccag

SEQ ID NO: 20390 - DNA, 110 bp, synthetic construct
  source 1..110: mol_type = other DNA
gctttacttttgctgagtgtccgtgttaatggcatttcttggggtcatatacctcccgaaagagctgtaactttgtaggtagcatttctgaaaatgtatttctgagcatt

SEQ ID NO: 20391 - DNA, 110 bp, synthetic construct
  source 1..110: mol_type = other DNA
cactttaatgtacagtttgaaacccaaagctctttagcaaggcaccaatcatcctataaaagttgaagatggatgaggaggagaaaggaatacattgtgaaaattaggat

SEQ ID NO: 20392 - DNA, 110 bp, synthetic construct
  source 1..110: mol_type = other DNA
acacaagtgttaatggaattattgttatcagctgatcaatgctttcattcagacaagggataggaggtttgctttttatatcaagactgatccacacataggtcaagtag

SEQ ID NO: 20393 - DNA, 110 bp, synthetic construct
  source 1..110: mol_type = other DNA
cctgaaactcttctgcttttccttctttaactgtaccatgggccgtctaatcattcatcttctcatttaatgaaacataccatcatagttgattttgaaagtacatatac

SEQ ID NO: 20394 - DNA, 110 bp, synthetic construct
  source 1..110: mol_type = other DNA
agggatgtgtaattatctgtaacagttggcttaatcccaaatcattgttttgccagatgaaaacctttcttttcttttagagctagggctggtaagcaaatcttttttta

SEQ ID NO: 20395 - DNA, 110 bp, synthetic construct
  source 1..110: mol_type = other DNA
gtcatatcaattggtatatactcaatacatccataaattatggtttagtcaaggccatgaccaagtttcaagaaataaaagcgcaaggaaaatagaaaagtcacagcttc

SEQ ID NO: 20396 - DNA, 110 bp, synthetic construct
  source 1..110: mol_type = other DNA
catgaccaagtttcaagaaataaaagcgcaaggaaaatagaaaagtcacagcttcagtaaaggaagttctctagaggattgcatttattggttgggttggttgtggttca

SEQ ID NO: 20397 - DNA, 110 bp, synthetic construct
  source 1..110: mol_type = other DNA
gaaagaaactttctcagattggtgtccagagaaaacaaaaagcatgtatcacttcaagcctgacctacagaaagggaacatcgaccaaacaaagactgccaggattaaac

SEQ ID NO: 20398 - DNA, 110 bp, synthetic construct
  source 1..110: mol_type = other DNA
aagcctgacctacagaaagggaacatcgaccaaacaaagactgccaggattaaacacactgcagatggtacaaaaggagaattctaaagtcatattttttttacccctca

SEQ ID NO: 20399 - DNA, 110 bp, synthetic construct
  source 1..110: mol_type = other DNA
aagatgccaaggaccccataaaaggatgatttcagcatggcaacaaaagaaaatagtaccaggatagctgaaccttccctgtgccttgtttgctctccaggtatgaaaac

SEQ ID NO: 20400 - DNA, 110 bp, synthetic construct
  source 1..110: mol_type = other DNA
gtaccaggatagctgaaccttccctgtgccttgtttgctctccaggtatgaaaacaagtgggtgaaagtgggaatccctgggaagaaaattgctaagaaattaaaactgg

SEQ ID NO: 20401 - DNA, 110 bp, synthetic construct
  source 1..110: mol_type = other DNA
catgcctgtggattttccaattgtcttttgagtattaatttcagttttattccactctagcttgaagatgcattgtgtgtgacacctgtgttttaaaatttgctaagata

SEQ ID NO: 20402 - DNA, 110 bp, synthetic construct
  source 1..110: mol_type = other DNA
ccaacccagagcctggcaagtactaggtactgaaaattgagctgtgaacaagccttccctttcatggaacttgcattttgtggggatgtgagttaaatatgaactgcatg

SEQ ID NO: 20403 - DNA, 110 bp, synthetic construct
  source 1..110: mol_type = other DNA
tttaaccaatctacctaaaataatatcccccctcagcaccatcaatccctggtagctttacattactttttaacttccttgtcttatctgtcattcaatctatgtacctg

SEQ ID NO: 20404 - DNA, 110 bp, synthetic construct
  source 1..110: mol_type = other DNA
ctttacattactttttaacttccttgtcttatctgtcattcaatctatgtacctgctttaaaaaaattaccttctggagtttccattgtggctcagtgggttaaaaaccc

SEQ ID NO: 20405 - DNA, 110 bp, synthetic construct
  source 1..110: mol_type = other DNA
gtcctgaggaaagactctttgggtgactttatctataagctggagagccacaagctagagagacctgggaacatttgcattatacatgtcttaaaccacattagatcaag

SEQ ID NO: 20406 - DNA, 110 bp, synthetic construct
  source 1..110: mol_type = other DNA
tagagagacctgggaacatttgcattatacatgtcttaaaccacattagatcaagacttatttgtgattccagagcaaaccatggctagtattaagaatgtaatttagac

SEQ ID NO: 20407 - DNA, 110 bp, synthetic construct; identical to SEQ ID NO: 20405
  source 1..110: mol_type = other DNA

SEQ ID NO: 20408 - DNA, 110 bp, synthetic construct; identical to SEQ ID NO: 20406
  source 1..110: mol_type = other DNA

SEQ ID NO: 20409 - DNA, 110 bp, synthetic construct
  source 1..110: mol_type = other DNA
aatatctgacttcgcccagaatagacagaggtctccaccgtgtctgccactagtatgaccatggagagaccagtagctgcaccaggcctccccaagacttacaagtaggt

SEQ ID NO: 20410 - DNA, 110 bp, synthetic construct
  source 1..110: mol_type = other DNA
tgaccatggagagaccagtagctgcaccaggcctccccaagacttacaagtaggtatgtcttgcctggggtcccatgtagtcactgcttctgtcgtgggtctgaatgtgc

SEQ ID NO: 20411 - DNA, 110 bp, synthetic construct
  source 1..110: mol_type = other DNA
atgcagtgtagtattttccctcttcagctcattctcatgtccaactcttaagtaataaaaggagcacaaaaacattccatgttttcacatgtttggaatgtgtgtggggt

SEQ ID NO: 20412 - DNA, 110 bp, synthetic construct
  source 1..110: mol_type = other DNA
tcagcaggctccttaccctctgacttctcgtgggccagtgtgggaacatgggtgggagaagagagaggcttaggtgttttcatgcctggctccctccctattgggtcacc

SEQ ID NO: 20413 - DNA, 110 bp, synthetic construct
  source 1..110: mol_type = other DNA
tccctctcggacagtttgtgtcttttcacttgtcactaatagctactggctctatgtatgaatagtgttatcactgacaccaaaggacgcatgaaaatggtgatggtaat

SEQ ID NO: 20414 - DNA, 110 bp, synthetic construct
  source 1..110: mol_type = other DNA
aaacccaagtcctcatagatactgttcaggtttgttactcctgagctatgcagggaactccccagatacctttaaaatacacacacatggagttcccgtcgtggctcaat

SEQ ID NO: 20415 - DNA, 110 bp, synthetic construct
  source 1..110: mol_type = other DNA
aatgtggaaccaaattgtacagctccagagatgactatatttcaaacggtttggagggaagaaaaaaaagtggcagcctgactgtgagggcctgaagagtgactgggagg

SEQ ID NO: 20416 - DNA, 110 bp, synthetic construct
  source 1..110: mol_type = other DNA
catgtgctcagcgctttgctcagtacagagatggatgtgaaacaattcgtgatgtggccctttttcttaagaagcttatcaatcttgataagatcaacacctgtttttaa

SEQ ID NO: 20417 - DNA, 110 bp, synthetic construct
  source 1..110: mol_type = other DNA
aaaggtacccagcctctctgcctcctggctttactcacagccacaggaggggcggcccatccatgggatgatgaaagctagactgggtccagaaccacaacctggtgaca

SEQ ID NO: 20418 - DNA, 110 bp, synthetic construct
  source 1..110: mol_type = other DNA
gtccaggaagaatttggaggaccccgtctgagttccaatggtcaggaaacagtttgggccaaaaagggcagacatttcagagaaaggggcgtggacagtgggcacatgtg

SEQ ID NO: 20419 - DNA, 110 bp, synthetic construct
  source 1..110: mol_type = other DNA
gggtgtaatctttgtgcttagccaagatgaagagctagccacaccccagcgctgtgactgggcaccttggactggtcctcactgaaaatatgtttccaagatggcatgct

SEQ ID NO: 20420 - DNA, 110 bp, synthetic construct
  source 1..110: mol_type = other DNA
aaaagtgttaatatttgagctgaggcttgaatgaagagaaggatctggccttgccatgtcctggggcaaaaccttccaggcaccaggaataataaaaggtggagagacaa

SEQ ID NO: 20421 - DNA, 110 bp, synthetic construct
  source 1..110: mol_type = other DNA
cagtctggagtaagactttacccatgtctggggtcttggagtactcatccatatgtggccactttccactgggctagcttgaccttccttacaatttggtggtctcaggt

SEQ ID NO: 20422 - DNA, 110 bp, synthetic construct
  source 1..110: mol_type = other DNA
gtatgtattggttccaaatgatccttataaaatgcaaatctcattgtatttttccccagtttaaaatctgacattgttccctaagatactttggattaaacacagaactt

SEQ ID NO: 20423 - DNA, 110 bp, synthetic construct
  source 1..110: mol_type = other DNA
actcattgagcagttttgatctcgtctgtaaacccatctgctaacaagagacactggaataaacttgtttaaaagagcaaaagttcataaatcatatattcattccttca

SEQ ID NO: 20424 - DNA, 110 bp, synthetic construct
  source 1..110: mol_type = other DNA
ggctctgagattaatggtttacagcaacaaaagtctatttcttactttcattacacgtcctttggtggaggggctccagctctgctttacgtcactttcattctgggttc

SEQ ID NO: 20425 - DNA, 110 bp, synthetic construct
  source 1..110: mol_type = other DNA
gtaggcatgcaggcaattttggtttcccctggaaagtgacccattcctgttgaattctgggaggtcagggatctatagaaggtttgggagagagcctcaaaatgaagtag

SEQ ID NO: 20426 - DNA, 110 bp, synthetic construct
  source 1..110: mol_type = other DNA
ccctctctggattcatcctccagactgtgcaccttactcctgtgtcaggggccttctggtggtcccagactctgcccctgagtgcctttgtcttgatgccaggtgggcat

SEQ ID NO: 20427 - DNA, 110 bp, synthetic construct
  source 1..110: mol_type = other DNA
atttatggaaaatacaatctgccataccaagaacatttgtataccacagcatggtctatagtacattacaaataccagctcatttaataaattgggtactagcctttctt

SEQ ID NO: 20428 - DNA, 110 bp, synthetic construct
  source 1..110: mol_type = other DNA
gagtcgtgactgatcctagaaataacatgagggtatttgagccaatattcaccgtaagagaaaattctaattctctcagagctgctacagaacttgtgattgtgttcttt

SEQ ID NO: 20429 - DNA, 110 bp, synthetic construct
  source 1..110: mol_type = other DNA
aacgagaaaaggctatcactgcttactgttgtaattaccccaacctagctgcagaaaaaattaccccaacctaactgcgtaaaataaccattttattacactcactgaga

SEQ ID NO: 20430 - DNA, 110 bp, synthetic construct
  source 1..110: mol_type = other DNA
ggtgttttgagtgagaaaggcggtaggggcagaggggaaggcttgttgaaaggggaatgccagcagctggtgctcagtgcagcactgtgtagtgggaaaagcactagatt

SEQ ID NO: 20431 - DNA, 110 bp, synthetic construct
  source 1..110: mol_type = other DNA
ataagcagaattcaggcacaaagagattaactcagttgcccaacatctctaacatcagagttgttcgagaagaaaatcatcaggttatttcctattctctttgaggactt

SEQ ID NO: 20432 - DNA, 110 bp, synthetic construct
  source 1..110: mol_type = other DNA
cagagttgttcgagaagaaaatcatcaggttatttcctattctctttgaggacttaaagatttcaatggggaggtggctggagaaattgaactgtctccaagatgtgtct

SEQ ID NO: 20433 - DNA, 110 bp, synthetic construct
  source 1..110: mol_type = other DNA
aaacacaacatgatttctacattgaagagaatcctctctgctagggatcagctcttgctcagcacttcagttcttcacccactttgtctgcctcctctcttctccaggag

SEQ ID NO: 20434 - DNA, 110 bp, synthetic construct
  source 1..110: mol_type = other DNA
tcatggatcagggattgcacattatacaacccattaagcttttgtgtgttcctggaagactgtgtattgtataaaaatacaaatgatccagcggttaaaataatttgcta

SEQ ID NO: 20435 - DNA, 110 bp, synthetic construct
  source 1..110: mol_type = other DNA
ccggaggaagaacctgcactcctacatcagtgtcttgcttgcctcatccctgcactttctccccccaactcctgcctacactgtagggaagaacttcaaaattctagctc

SEQ ID NO: 20436 - DNA, 110 bp, synthetic construct
  source 1..110: mol_type = other DNA
tttctccccccaactcctgcctacactgtagggaagaacttcaaaattctagctctgatggcttcaaatggtttaaggaatcataatcaaattgaacatatattgagtag

SEQ ID NO: 20437 - DNA, 110 bp, synthetic construct
  source 1..110: mol_type = other DNA
tatacagcacaatctcattgccgatccactccaaatgcaagacttttcatctacgaaggtatatacttttttaaatgatggtgacaaatatcaattgttgactactatag

SEQ ID NO: 20438 - DNA, 110 bp, synthetic construct
  source 1..110: mol_type = other DNA
taagacttagcaatagttaacttagtgctgggattgacatcaggcacttaaatgtattatttcttgttttcttagctgtatgaaatattcacccgttttatggataacag

SEQ ID NO: 20439 - DNA, 110 bp, synthetic construct
  source 1..110: mol_type = other DNA
gttctttcagtaataggtgtgttagaaataactttttacatacctgatgaagtgttcctgctggtaagacaatggcatcaccaaggaactgaacaagagtgcaggttttg

SEQ ID NO: 20440 - DNA, 110 bp, synthetic construct
  source 1..110: mol_type = other DNA
tcctgctggtaagacaatggcatcaccaaggaactgaacaagagtgcaggttttgactccatattcctcaagcagtctctgacgaagttttttgttcacataccaacttt

SEQ ID NO: 20441 - DNA, 110 bp, synthetic construct
  source 1..110: mol_type = other DNA
tatattttgcctaaatttacatttacatttttccatatgtttccatcactagagtttaaagatctatgcaggctgtgtatttgtatacctgaacacaacagagcagaccc

SEQ ID NO: 20442 - DNA, 110 bp, synthetic construct
  source 1..110: mol_type = other DNA
ttaaagatctatgcaggctgtgtatttgtatacctgaacacaacagagcagacccccaaacatttcaataaaacagtttccaatcattatttattgactaaagtctagtg

SEQ ID NO: 20443 - DNA, 110 bp, synthetic construct
  source 1..110: mol_type = other DNA
agagctggcttactggataaataatgaaatgtaaaaatgtttacatgagctaactatataatctcttgattactgttatctgtaatagttactgagaaagttaagggaga

SEQ ID NO: 20444 - DNA, 110 bp, synthetic construct
  source 1..110: mol_type = other DNA
gcttcacccatcagtaagcaaataacagcctcaaagtcttctggatcctaactgtgcccataagtgagccctatgaggttccgcaataagctgctttgggacctggtcac

SEQ ID NO: 20445 - DNA, 110 bp, synthetic construct
  source 1..110: mol_type = other DNA
gcccataagtgagccctatgaggttccgcaataagctgctttgggacctggtcacacaaaccagcagccagcagcatctacacaaggcagggcctgaaaaccaactaaac

SEQ ID NO: 20446 - DNA, 110 bp, synthetic construct; identical to SEQ ID NO: 20444
  source 1..110: mol_type = other DNA

SEQ ID NO: 20447 - DNA, 110 bp, synthetic construct; identical to SEQ ID NO: 20445
  source 1..110: mol_type = other DNA

SEQ ID NO: 20448 - DNA, 110 bp, synthetic construct
  source 1..110: mol_type = other DNA
aaagaattgaaaagtggcaattgagcatacaacaagagtcttaacagggtgtcctagagcattttttgtttattcatcatccctttcataaatgcttccactattagagt

SEQ ID NO: 20449 - DNA, 110 bp, synthetic construct
  source 1..110: mol_type = other DNA
agagcattttttgtttattcatcatccctttcataaatgcttccactattagagttcccttcgtggcagttaatgatccccacgaggatccatgaggatgtgggttcaat

SEQ ID NO: 20450 - DNA, 110 bp, synthetic construct
  source 1..110: mol_type = other DNA
cataccatccggtttcaaaggatataaaaaaaagctacagtaatcaaaacagaatatatcttaaaaaatagacacatagatcaatggaacagaacagaggacctaacaaa

SEQ ID NO: 20451 - DNA, 110 bp, synthetic construct
  source 1..110: mol_type = other DNA
gagagggagaatgaatgtaagagagggagagagctaaaaagattggtttgatggcagccacgtgtttgagaaatctgcttatggagtgcctgtcgtggctcagcagaaat

SEQ ID NO: 20452 - DNA, 110 bp, synthetic construct
  source 1..110: mol_type = other DNA
tcctggttgggttgttactgctgagccacaatgagaactctcaggttgtacatgatctttaagtcgacaccccagagactggagctgggagtgcttttggttggtgaaca

SEQ ID NO: 20453 - DNA, 110 bp, synthetic construct
  source 1..110: mol_type = other DNA
tggtgtcagaggggagcctgtgagagaggaggatgtgggatgggcaggaagcattggaggttttccagagcctattgcctttgagctgaaatccatattgggtaaaagtg

SEQ ID NO: 20454 - DNA, 110 bp, synthetic construct
  source 1..110: mol_type = other DNA
ggaggttttccagagcctattgcctttgagctgaaatccatattgggtaaaagtgagttgggataaaaggatgggtgggtattataagtcgtcttaggacttgggtgcat

SEQ ID NO: 20455 - DNA, 110 bp, synthetic construct
  source 1..110: mol_type = other DNA
tagaaagatgggcatgatgctaggcaataaatatctagatgaggtgagggcaggctgctgtggtacaatatcagtggctccagaggcctttgctttcccatttccttctt

SEQ ID NO: 20456 - DNA, 110 bp, synthetic construct
  source 1..110: mol_type = other DNA
atttggagaaaatgaactctatttgaatgtgggtacaaacaatgaaatgctcagtgatgccaatagcagctcacagagattctcagggactaaaatcttcataatcttat

SEQ ID NO: 20457 - DNA, 110 bp, synthetic construct
  source 1..110: mol_type = other DNA
tggataaaatagtgtggacacatactgagtcttactgaagctgggagatggtacatggatgtcagttgtgatgttactctcttttgtatgtgtttggagttgtacatata

SEQ ID NO: 20458 - DNA, 110 bp, synthetic construct
  source 1..110: mol_type = other DNA
atattttttctgtcacagagtatgaatggcagagtcaaaagtaaaagtggtcttgggagctgaaatgatagaatgaaaccaacaagaatatagagagtaggttgggaaaa

SEQ ID NO: 20459 - DNA, 110 bp, synthetic construct
  source 1..110: mol_type = other DNA
ggagctgaaatgatagaatgaaaccaacaagaatatagagagtaggttgggaaaaacttctcaagggacccatggaatggttttgtcttctaacaggaatagaagttatt

SEQ ID NO: 20460 - DNA, 110 bp, synthetic construct
  source 1..110: mol_type = other DNA
ggaacttcccagccctggttccttctgccagtgctgctcagagtcagctctctgcccaattaggcagcctctgcggagatgctttcatcaagccttgttaagagggaaaa

SEQ ID NO: 20461 - DNA, 110 bp, synthetic construct
  source 1..110: mol_type = other DNA
aaactgaggtaaggaggagtaaagcaatttaccagctggtagatgattcaaacccacacactctgattctagtatctgtgctttaactcattttaccaaattgtctcttg

SEQ ID NO: 20462 - DNA, 110 bp, synthetic construct
  source 1..110: mol_type = other DNA
caggtccctttctgggatacattctaataggtgattatttgaactgaggatttctctagccaagtgagtgacattagcttgaaccagagttgaccagttgggggcaatag

SEQ ID NO: 20463 - DNA, 110 bp, synthetic construct
  source 1..110: mol_type = other DNA
ctagccaagtgagtgacattagcttgaaccagagttgaccagttgggggcaatagagaccctgtgtttagaagatgcataaggaaagataaagaccacagagacctctga

SEQ ID NO: 20464 - DNA, 110 bp, synthetic construct
  source 1..110: mol_type = other DNA
taaggatcttgttaaactgcaaattctgattgaataggtttgagtcatggcctgaggttctgcatttctatcaagctcccacatgacagcagatgctgtttgtctgcagg

SEQ ID NO: 20465 - DNA, 110 bp, synthetic construct
  source 1..110: mol_type = other DNA
ctataccagcagcaatgagtaacccacaacttgtaaccttcccatgttcctgtatgaccatcatcatttattgtacttggccctgcccatcacggaagagctatcatttc

SEQ ID NO: 20466 - DNA, 110 bp, synthetic construct
  source 1..110: mol_type = other DNA
actctgccaggacaagtggagtcactttatgcattttggcatgaagaatttaacacagaattaggggcttatgcaacataggaagaattgaggaagtcagagaagtcacc

SEQ ID NO: 20467 - DNA, 110 bp, synthetic construct
  source 1..110: mol_type = other DNA
tactcattctcacttctattgatataaacacacaatggcaatatcaaaaagctcatggacagattatatttaagagagtgtgggaaacagattttgctggtaaaaatgta

SEQ ID NO: 20468 - DNA, 110 bp, synthetic construct
  source 1..110: mol_type = other DNA
tgctcagaaattacccacttaagctctcagcaagagcagtgagagagcactgtcgtgccagacaagagtcctgggttatccaagttgcccatctgtttctggttttgtgt

SEQ ID NO: 20469 - DNA, 110 bp, synthetic construct
  source 1..110: mol_type = other DNA
caaccttaactcccttttgctgtgtaacctaacatattcatagcttccagaaagtaggaattgcacatcttgggagggcaattattcctcctaccatagacacattccat

SEQ ID NO: 20470 - DNA, 110 bp, synthetic construct
  source 1..110: mol_type = other DNA
atgatgtgggaaaatagagatgcctcctgtctctctaggatcctgagaaaagatgctgagatatgcttgcaggaagcttattggggtgtgttctcaggaacaactgttag

SEQ ID NO: 20471 - DNA, 110 bp, synthetic construct
  source 1..110: mol_type = other DNA
cagggatcctctcaggtacctccctcaaagtactgggaacacctccagtactttgttcaatagagtagctttgggacaggggtctgcttcagagttatatctgggttctc

SEQ ID NO: 20472 - DNA, 110 bp, synthetic construct
  source 1..110: mol_type = other DNA
caaatcttgggaaattttagtttcaatggtagaactaaggcagctggatgtcatgtggaaggtatcataaaagagactgaggtaacaaacatttggtaaatgtaatctta

SEQ ID NO: 20473 - DNA, 110 bp, synthetic construct
  source 1..110: mol_type = other DNA
gggatgtgtagcacttaattatatcatagatatctgtggccaacatggcagaacatctcacttactacatgtttcttaatatttctgtcctattaatgtgatcatcaaca

SEQ ID NO: 20474 - DNA, 110 bp, synthetic construct
  source 1..110: mol_type = other DNA
cagatgcaggggtttttttttgtttgttttctgtgcaaaaggagaacagtgccacctaaagttaactattactggtaaaacacgtggagatttaaataatcattcagaaa

SEQ ID NO: 20475 - DNA, 110 bp, synthetic construct
  source 1..110: mol_type = other DNA
gttttctgtgcaaaaggagaacagtgccacctaaagttaactattactggtaaaacacgtggagatttaaataatcattcagaaaaaaattgattgtccaaaagattttt

SEQ ID NO: 20476 - DNA, 110 bp, synthetic construct
  source 1..110: mol_type = other DNA
ggcaatgaggtcctgctgtatagcccagggaacaatatccaattacttgtgatggaacatgatagctaacatgagaaagagagtatgtatagatgtaagactgggtcact

SEQ ID NO: 20477 - DNA, 110 bp, synthetic construct
  source 1..110: mol_type = other DNA
ctgtatagcccagggaacaatatccaattacttgtgatggaacatgatagctaacatgagaaagagagtatgtatagatgtaagactgggtcactttgctgtacagcaga

SEQ ID NO: 20478 - DNA, 110 bp, synthetic construct
  source 1..110: mol_type = other DNA
agaataaaagtaatgtaggtggtaacattaataaggtcgtaagtatataagctaagaacttccattaggtgagggccagtttctccccagtcatcatctcaattgctatc

SEQ ID NO: 20479 - DNA, 110 bp, synthetic construct
  source 1..110: mol_type = other DNA
gaacttccattaggtgagggccagtttctccccagtcatcatctcaattgctatctttaagggaaatgataatattggcattgtacataaagttcaccaaagatatctac

SEQ ID NO: 20480 - DNA, 110 bp, synthetic construct
  source 1..110: mol_type = other DNA
atccgaaacactacctcccacccattagaataggtataatatttaaaaaaaaaaaagaagaagaagaagatagggagttcttgccatgtctcagtggttagtgaacctga

SEQ ID NO: 20481 - DNA, 110 bp, synthetic construct; identical to SEQ ID NO: 20480
  source 1..110: mol_type = other DNA

SEQ ID NO: 20482 - DNA, 110 bp, synthetic construct
  source 1..110: mol_type = other DNA
cttctccacagaaacactaattatacaaccattcacagatgaaaacaccttcatgagagctcagaatccaggtgataggttacagcatcccagtggagcacagaaaagag

SEQ ID NO: 20483 - DNA, 110 bp, synthetic construct
  source 1..110: mol_type = other DNA
tgccaacaccaacactgctcatgtgtactgtaattagagctgaggtaaggtaaggaaaaaaaaattcacagggacagtattgtacagcagttaccccttatctggtgttt

SEQ ID NO: 20484 - DNA, 110 bp, synthetic construct
  source 1..110: mol_type = other DNA
ttacgtggcatcttaaatagacagttaagtggttttaaagctcagtggattcttgggcctacatacttcccatatacaatttttccatctgcagtatcccagtcagaatt

SEQ ID NO: 20485 - DNA, 110 bp, synthetic construct
  source 1..110: mol_type = other DNA
tgcaaaattctctggttctctaatgagcatacttgaacaatgaaaatcaatttctattttaagatagggagtttttccagtccaactttatcctgtatgagagtacatat

SEQ ID NO: 20486 - DNA, 110 bp, synthetic construct; identical to SEQ ID NO: 20485
  source 1..110: mol_type = other DNA

SEQ ID NO: 20487 - DNA, 110 bp, synthetic construct
  source 1..110: mol_type = other DNA
tgtttaagtcctcaagtcattttgagtttgtttcggggcatggtgtgtggatgatttctaatttcattagtttatatgtagctgtctagtgttcccagcatcactcactg

SEQ ID NO: 20488 - DNA, 110 bp, synthetic construct
  source 1..110: mol_type = other DNA
cgccatagctcactgtgatgccggattcctgacccactgagccagggatagaacccacatcctcatgaatactaattgtattcctttccactgcatcacagtggaaacgc

SEQ ID NO: 20489 - DNA, 110 bp, synthetic construct
  source 1..110: mol_type = other DNA
gagtcaggattgggacaaacatgcattcttttttcttttgggggatcttagtcatcaaagctggagtcagaggtgttcacgatggtggtcttctggattattgcttagaa

SEQ ID NO: 20490 - DNA, 110 bp, synthetic construct
  source 1..110: mol_type = other DNA
ttcttttttcttttgggggatcttagtcatcaaagctggagtcagaggtgttcacgatggtggtcttctggattattgcttagaacaacagtacttacaaaaagggcata

SEQ ID NO: 20491 - DNA, 110 bp, synthetic construct
  source 1..110: mol_type = other DNA
atatcccattgtgcactgaattctcacaagattgaagcttttgttggcctgccgtaattgttagcaaaattattggaagctaaccctcagttgagtctaggcacacaggt

SEQ ID NO: 20492 - DNA, 110 bp, synthetic construct
  source 1..110: mol_type = other DNA
cttaattcattctgtgatgtcaaatcctaatttttctttttaaaagaaacacaaactggagtcaaaacccccaaagtcttaacagtgaacaagtgtcattattttatagt

SEQ ID NO: 20493 - DNA, 110 bp, synthetic construct
  source 1..110: mol_type = other DNA
gggcatcgaatattgagtgagagtatgggtatcaagttgaagatgcttacttaccagctctagacttccagcatgcctgtgtttatctttggatatatgtacttctgcat

SEQ ID NO: 20494 - DNA, 110 bp, synthetic construct
  source 1..110: mol_type = other DNA
gtggagaagcagatgtataatagacctatttgaaaatgctatattagagaaacagctctacaaacaaaattagtgagataattctcgaggtttgccttcctctgttccat

SEQ ID NO: 20495 - DNA, 110 bp, synthetic construct
  source 1..110: mol_type = other DNA
ctctacaaacaaaattagtgagataattctcgaggtttgccttcctctgttccatcataatttatcatccagaaaaaggaactaacaggtaacacagaggagtgcaatta

SEQ ID NO: 20496 - DNA, 110 bp, synthetic construct
  source 1..110: mol_type = other DNA
atggttatactatgtaaaacccatatgttcagctctcaagaggaagctcacagaattcatttctatggcttagactctggtgctgaatgacttttgccccagtgggggaa

SEQ ID NO: 20497 - DNA, 110 bp, synthetic construct
  source 1..110: mol_type = other DNA
aacaccactgtttcttaaagaaatctttcccaaatcttaaagctagagtactgccattaaatgacaatcaacttgttggagttccccatcgtggcgcagtggaaacaaat

SEQ ID NO: 20498 - DNA, 110 bp, synthetic construct
  source 1..110: mol_type = other DNA
aagaaatacaggattattagggatataagattcctgggagagatcataaaatttgtctaaacatgaggttggctctggccagacaatctgggtagaggacaggtttgagc

SEQ ID NO: 20499 - DNA, 110 bp, synthetic construct
  source 1..110: mol_type = other DNA
tctaaacatgaggttggctctggccagacaatctgggtagaggacaggtttgagccatccaccttggttgctggtatgaaagcaggatctgttataataaactcacaaga

SEQ ID NO: 20500 - DNA, 110 bp, synthetic construct
  source 1..110: mol_type = other DNA
ggtgggcatggccggccaccactaggggtccgtgaacaggcaccgtgtgcagccccaaacacatcaagggcaccacaaaggaggacaatgtgactgaacaccacctgatg

SEQ ID NO: 20501 - DNA, 110 bp, synthetic construct; identical to SEQ ID NO: 20500
  source 1..110: mol_type = other DNA

SEQ ID NO: 20502 - DNA, 110 bp, synthetic construct
  source 1..110: mol_type = other DNA
gcttctggaagaagcccgacacagctgacaacttgatttgagattgctagcatctagaattgtgagacaatacatctctgctgttttaagccactcagtttgtagtactt

SEQ ID NO: 20503 - DNA, 110 bp, synthetic construct
  source 1..110: mol_type = other DNA
acatcatcttaattttcagtcttcctccacctgtatactgggatccaggcatcgtagcttaatttcaattctctaaacattcccttacctctatatcctcggaaaagtcc

SEQ ID NO: 20504 - DNA, 110 bp, synthetic construct
  source 1..110: mol_type = other DNA
ttgtctcaatactttatctcctaatttattggcctgtcatgtggtaaccagtatgagcttagattcagtaacaatagccccagtgtaataataaaaaaatttagacaaac

SEQ ID NO: 20505 - DNA, 110 bp, synthetic construct
  source 1..110: mol_type = other DNA
agcttagattcagtaacaatagccccagtgtaataataaaaaaatttagacaaacccaaattgagagttattttctacaatacctgaccagtgctctttaatagtaacaa

SEQ ID NO: 20506 - DNA, 110 bp, synthetic construct
  source 1..110: mol_type = other DNA
tattttgaggaatagttttaactctgcaaagctcacatggatagtgctctagtgatgccaacaatctggatctgtacagagatgtcatacctagagggaatctaaaatat

SEQ ID NO: 20507 - DNA, 110 bp, synthetic construct
  source 1..110: mol_type = other DNA
gtggtcagaggtagagaaggttagccacagcactctgatgtcatagaggctgggagaagagaaatttcaagaaggtctcaaatgtccaataatgagagggtaagtaagtg

SEQ ID NO: 20508 - DNA, 110 bp, synthetic construct
  source 1..110: mol_type = other DNA
gaagagaaatttcaagaaggtctcaaatgtccaataatgagagggtaagtaagtgaaattgaaatcactcagtgattcaggcacattgagggccattgttcgtttgggaa

SEQ ID NO: 20509 - DNA, 110 bp, synthetic construct
  source 1..110: mol_type = other DNA
gccctcgctcagtgagtctgggatctggtgttgttgagctgcggtgtggatcacagacatgacttgaatcccacaatgctgtggctgtgacataggccggctgcagctct

SEQ ID NO: 20510 - DNA, 110 bp, synthetic construct
  source 1..110: mol_type = other DNA
tgtctaatcgtggagtgagatcaagttatctgccagcctgaggttttttttctactctaacattctaggtttttggccattccatttgatttttatgtactttctctttg

SEQ ID NO: 20511 - DNA, 110 bp, synthetic construct
  source 1..110: mol_type = other DNA
cctcattttcagtctagaaagactgaaaatgaaatgaaatgttgcctggcctatgtcatgtgtaacagataccagagctaccacaccttttcaaaaatgcagagttagcg

SEQ ID NO: 20512 - DNA, 110 bp, synthetic construct
  source 1..110: mol_type = other DNA
gtcacaatgggaactccccatatactttaaaacatctctaaatgacttataatacctagtacaatgtaaacagctgcaaatgtaatgccaatgctatgtaaatagctgcc

SEQ ID NO: 20513 - DNA, 110 bp, synthetic construct
  source 1..110: mol_type = other DNA
tattttccacagatcgtcagcatattatttctgtttgaattaatacagtcttctcgctctccggcattatgtagcctgcattcccaacttgtctttgtagtcctcttgtt

SEQ ID NO: 20514 - DNA, 110 bp, synthetic construct
  source 1..110: mol_type = other DNA
gctctccggcattatgtagcctgcattcccaacttgtctttgtagtcctcttgttccaaagctaaaatgctctccaactgattccacctgttccaggctgaattcaagat

SEQ ID NO: 20515 - DNA, 110 bp, synthetic construct
  source 1..110: mol_type = other DNA
ttactttacaaatgaaaaaacaaagctcaaagaggttaaagactcaagatcacgtaattattcgtagttcttaggattcaaacctaaacctctttcattccaaagttcat

SEQ ID NO: 20516 - DNA, 110 bp, synthetic construct
  source 1..110: mol_type = other DNA
tcagagggagaagtgattacttccagctgggaagatccagaagggatttattgatgaggctacatttgagctgcaccttaaaagatggttaagaaaggtaaatcaaattg

SEQ ID NO: 20517 - DNA, 110 bp, synthetic construct
  source 1..110: mol_type = other DNA
gaggctacatttgagctgcaccttaaaagatggttaagaaaggtaaatcaaattgactggcaagggcattccataaactaacagggtgtgcaaatgacaggtgagaatgt

SEQ ID NO: 20518 - DNA, 110 bp, synthetic construct
  source 1..110: mol_type = other DNA
agcacgtagtcaagaaagggaggtgactaagagtacatgggtaaccattttgaataaatcactttaaatcgagtcacagtgtgactgaggataattatatggctcccaac

SEQ ID NO: 20519 - DNA, 110 bp, synthetic construct
  source 1..110: mol_type = other DNA
aaatcactttaaatcgagtcacagtgtgactgaggataattatatggctcccaactctcctcatgttattttctctttcaattgcaaatcccctcaactgtcatgttcag

SEQ ID NO: 20520 - DNA, 110 bp, synthetic construct
  source 1..110: mol_type = other DNA
acttagatgaacgaagctttatttctcttacctgctgctctttctcctccttcgttattcagctttggagtttaactcttttcttaacaatatacaaaataggctcaaaa

SEQ ID NO: 20521 - DNA, 110 bp, synthetic construct
  source 1..110: mol_type = other DNA
caactataataggagtttataatataaaaatctataaaatctcaaattgttaagctgaaattaagcctctgctcatcagagatgccaacctagcatttcatgtacccaaa

SEQ ID NO: 20522 - DNA, 110 bp, synthetic construct
  source 1..110: mol_type = other DNA
ataccaaaaatgcaccagtaaaatctaaacaagtgagtagaagttagtccactgctttagccatcattgcttctttgtttaaaagataatgattgactgttctaatatat

SEQ ID NO: 20523 - DNA, 110 bp, synthetic construct
  source 1..110: mol_type = other DNA
actctgcttcctgctgggttggcatcttctctagtctgataacaggttagaaaagttagctgagccatacattgtctttgaattgcaaaatatcttaacccagaaaaacc

SEQ ID NO: 20524 - DNA, 110 bp, synthetic construct
  source 1..110: mol_type = other DNA
ttagctgagccatacattgtctttgaattgcaaaatatcttaacccagaaaaaccagtctgactcacttcaagatgtgccacctgtaaaattgaaaagtcactgatcctg

SEQ ID NO: 20525 - DNA, 110 bp, synthetic construct
  source 1..110: mol_type = other DNA
atccctgcggttttcataaaagaagtgttatttgaactaaatctccaagtgcaagatttttatgcaacttagcaaatacatatattatcatctcatttggttcagagata

SEQ ID NO: 20526 - DNA, 110 bp, synthetic construct; identical to SEQ ID NO: 20525
  source 1..110: mol_type = other DNA

SEQ ID NO: 20527 - DNA, 110 bp, synthetic construct
  source 1..110: mol_type = other DNA
agagaaataagggagagacagagttaagaaatatgctataggttgaacttttttcagctacagttttatgccaatacttttacaagattctatgaaaggagacagagttg

SEQ ID NO: 20528 - DNA, 110 bp, synthetic construct
  source 1..110: mol_type = other DNA
gtataggagttcctattgtggatcagtgggctaaggacacaaagttttctccgtgaggttgcaggtttgatccctagcctcattcagcaggttaagggtccagtgttgct

SEQ ID NO: 20529 - DNA, 110 bp, synthetic construct
  source 1..110: mol_type = other DNA
ttgtggatcagtgggctaaggacacaaagttttctccgtgaggttgcaggtttgatccctagcctcattcagcaggttaagggtccagtgttgctgtagctgcagtatag

SEQ ID NO: 20530 - DNA, 110 bp, synthetic construct
  source 1..110: mol_type = other DNA
ctaaatcttaaacttagcggggaacacctgccactaacaaaagctatagatgccaaaatctaggaatagcatggccactgtacaatgttctctgtgataaagcagtaatc

SEQ ID NO: 20531 - DNA, 110 bp, synthetic construct
  source 1..110: mol_type = other DNA
tttgtgcctttactcaaaatccacttttcagtaagacctccgtcagccacccagtctaaaagttcagctaacaattacacccttgatatgccatactactttccctgttt

SEQ ID NO: 20532 - DNA, 110 bp, synthetic construct
  source 1..110: mol_type = other DNA
cttaagataatcagtctttcagagtttctcttggttgtctctccatgtttttattcagagattggtgaaatacctttataacacctacattaacagctttaggactctaa

SEQ ID NO: 20533 - DNA, 110 bp, synthetic construct
  source 1..110: mol_type = other DNA
cagagattggtgaaatacctttataacacctacattaacagctttaggactctaaacataaacctgaaacttccaatctcaaccttgaccctgaattatattgtacaata

SEQ ID NO: 20534 - DNA, 110 bp, synthetic construct
  source 1..110: mol_type = other DNA
tcaagggttcaacattgataccttatcttggcaagttggatactcagccactctagaagccacatcaactttgggaaaggaacatccatgttgctgagccttgcatagct

SEQ ID NO: 20535 - DNA, 110 bp, synthetic construct
  source 1..110: mol_type = other DNA
gaagccacatcaactttgggaaaggaacatccatgttgctgagccttgcatagctctattcagccaccatatccacactgtacaggaactccttgatcaaaccccaaggg

SEQ ID NO: 20536 - DNA, 110 bp, synthetic construct
  source 1..110: mol_type = other DNA
gatatgtattacatgaatgccatagagaaggtagctaaaggaatttacaaaaccgaagattaggaggtttcttctgtaccttcgaagggctttaaaataaatgaaataat

SEQ ID NO: 20537 - DNA, 110 bp, synthetic construct
  source 1..110: mol_type = other DNA
aagattaggaggtttcttctgtaccttcgaagggctttaaaataaatgaaataattgaaatttggagttggagttttgactctggaagacactgaaaccctttgggcaat

SEQ ID NO: 20538 - DNA, 110 bp, synthetic construct
  source 1..110: mol_type = other DNA
ctagaataaaacttcaattcaaataacacattttctagccatctgcacattcattatgaaaggcagggaaagggtaaacagataaaacagggatggcaagaccaatgagt

SEQ ID NO: 20539 - DNA, 110 bp, synthetic construct
  source 1..110: mol_type = other DNA
atgaaaggcagggaaagggtaaacagataaaacagggatggcaagaccaatgagttataaggcctcatggtttttacaatctagttattgagctaagacatacatacatt

SEQ ID NO: 20540 - DNA, 110 bp, synthetic construct
  source 1..110: mol_type = other DNA
gtttatcttgaaaacatgtaagtaatgggttgcatctgcttggctctataaaagggtaagctctttttctgtctttgcaatctcctagcagattgcctatgatgcataca

SEQ ID NO: 20541 - DNA, 110 bp, synthetic construct
  source 1..110: mol_type = other DNA
tctgaatgctccctcagtccccactccttcctgtggcactgatgacactggaggtcagctacaccttcccctcatccatccttcttctatctgcttcccttgtcacctcc

SEQ ID NO: 20542 - DNA, 110 bp, synthetic construct
  source 1..110: mol_type = other DNA
catcaaagcagtatgtgctaattacttgtagataattcaccagactaaagagaatagagtgaattttaagtctccatactaatcctccaaaaaatccattaagttcttgt

SEQ ID NO: 20543 - DNA, 110 bp, synthetic construct; identical to SEQ ID NO: 20542
  source 1..110: mol_type = other DNA

SEQ ID NO: 20544 - DNA, 110 bp, synthetic construct
  source 1..110: mol_type = other DNA
gtaaatggccaccaacagtccccattctgttcttgtggttgggagctactgaaaatttttgaacagggaagtagcatgatctgacctaaaatgtgaaaggttcattctgg

SEQ ID NO: 20545 - DNA, 110 bp, synthetic construct
  source 1..110: mol_type = other DNA
aggttttcaggtactgaaataatgtcataaaagcgagcatttattttaaatgtcattaaaaatttatcttgagtacagaacaaaaattggcaagcttcactctcccccat

SEQ ID NO: 20546 - DNA, 110 bp, synthetic construct
  source 1..110: mol_type = other DNA
agtctgcttttgaagattcaaccgacctcagattgtatagtactattacatgaaaaaaaaaatctgtttataagtgaactgtgccattcaatccacgttgtttaagggtt

SEQ ID NO: 20547 - DNA, 110 bp, synthetic construct
  source 1..110: mol_type = other DNA
aaaaaaatctgtttataagtgaactgtgccattcaatccacgttgtttaagggttaactatatacgtaagttaaaccattatgctgtacaccttaaacttattcagtgat

SEQ ID NO: 20548 - DNA, 110 bp, synthetic construct
  source 1..110: mol_type = other DNA
agcgcataggcagctgccagattccgtacgccttccctcacactttcctctcttgacgcagcaagagagctcaacgcgggaaacgctcaacctctgacgcaaatgcagaa

SEQ ID NO: 20549 - DNA, 110 bp, synthetic construct
  source 1..110: mol_type = other DNA
aaaatagtgacttaagggcatgacatgggcccaataattcataaattctggcagtaaaatcagattctctgatcctattgagtcctgattcccagaacctcctagttctg

SEQ ID NO: 20550 - DNA, 110 bp, synthetic construct
  source 1..110: mol_type = other DNA
gaaattactgaaaagcctccacgaacacaaaaagagttggctcacttgtcagaattaccacccacacctcttaatatttcagaaggctctagttcaccagaaagaacttc

SEQ ID NO: 20551 - DNA, 110 bp, synthetic construct
  source 1..110: mol_type = other DNA
aaaacaaaatagtgagagtaggggacaggacattacaaaatatgtgaggtcaagtaaaagtctacagctaaaaattcagcatatgattcaaagcgtgactattattggct

SEQ ID NO: 20552 - DNA, 110 bp, synthetic construct
  source 1..110: mol_type = other DNA
ttctgtggaatggtgagttttagagttgttcttagtatggaaaacatttttttaaagtactgcgtcatcagaagacaaaattatacactgaatctctggtaaggtgaaat

SEQ ID NO: 20553 - DNA, 110 bp, synthetic construct
  source 1..110: mol_type = other DNA
agtactgcgtcatcagaagacaaaattatacactgaatctctggtaaggtgaaataccgtatcatccttcttctggttacaaatagtttggataagacttttgtttattt

SEQ ID NO: 20554 - DNA, 110 bp, synthetic construct
  source 1..110: mol_type = other DNA
tattgattcctaattccattgcccaaccaactgtattttatctttcagtatgtatctcctgccacctcagtattctatacctgggtgaaaggtaggataccaggcttatc

SEQ ID NO: 20555 - DNA, 110 bp, synthetic construct
  source 1..110: mol_type = other DNA
attctgacttgtccttctgtgcatctctgatgtctgactcaatgcctggaacatgctggtgcttaacaaatgttgaatcaatagctaaataaatgaacccttacctttta

SEQ ID NO: 20556 - DNA, 110 bp, synthetic construct
  source 1..110: mol_type = other DNA
agcttataagttttttgaaggaaggagcaaatttcaaatatctagtctaatgtattcaattaatacatatttcctgccaggttgactgaagttcttattcaggctgagct

SEQ ID NO: 20557 - DNA, 110 bp, synthetic construct; identical to SEQ ID NO: 20556
  source 1..110: mol_type = other DNA

SEQ ID NO: 20558 - DNA, 110 bp, synthetic construct
  source 1..110: mol_type = other DNA
taggtcctagaagccagtgaggctacttgggaagcagaaattcccacattaacatatctgcttcctttgcattgttctcttccctctaggaacacacttcagtgtcccag

SEQ ID NO: 20559 - DNA, 110 bp, synthetic construct
  source 1..110: mol_type = other DNA
tatagtatttttaggggggctggggtggaaggaggttagtttcacaatgtacaaatgatgcaagtttccaaccaaagtaatattccctggcctaatgacttattctatac

SEQ ID NO: 20560 - DNA, 110 bp, synthetic construct
  source 1..110: mol_type = other DNA
tgatgcaagtttccaaccaaagtaatattccctggcctaatgacttattctatacaccagtttctcaaaatgttatttttgtggtaaatttaaaaggaacttaattctgg

SEQ ID NO: 20561 - DNA, 110 bp, synthetic construct
  source 1..110: mol_type = other DNA
aacatgcttgttttgtgcatttttatttaaattgatcaagactggacattagtgtacattttattgagtctcttttccacggcctgcttgattctaccatctcaaactca

SEQ ID NO: 20562 - DNA, 110 bp, synthetic construct
  source 1..110: mol_type = other DNA
tattacttgagtagcaacatctacaatctaaggaccttcttatgctgtaatcagttttgtccttagtgagtactaatgagttttaagctgcaatcccagaaagcactggg

SEQ ID NO: 20563 - DNA, 110 bp, synthetic construct
  source 1..110: mol_type = other DNA
gacttgccaggaggttctgaatctctgtcttatgcttagcactcaaattccaccgctctacccactaccagctcctaaactctcaggaacttccgtttcttcttactagc

SEQ ID NO: 20564 - DNA, 110 bp, synthetic construct
  source 1..110: mol_type = other DNA
tctatccttggcctggtgcaatggcttaggtcgaagctggggctcaaattcaatccctggccaggaactcgaacaggttgcaggtgcgattgttaaagaaagaaagaaag

SEQ ID NO: 20565 - DNA, 110 bp, synthetic construct
  source 1..110: mol_type = other DNA
gtgcagagtgagctgagaataagtgagaattatcatcatgattattatggaaaagatgctgcagtagctgctagagatgtggggataaaaatcatagttcctctggttgg

SEQ ID NO: 20566 - DNA, 110 bp, synthetic construct
  source 1..110: mol_type = other DNA
tgtcttctggaacaggaagggcagctgggctagaaaaggagctcggaatcagagaggagcagagaagaatctccaaaacagtaatccagactccactcctgtggtgctgg

SEQ ID NO: 20567 - DNA, 110 bp, synthetic construct
  source 1..110: mol_type = other DNA
ccagaagaaattcaggatgtcagctgtgcttggaaagaacttaacaaaaagctgagcagtaatgtcttgtcccaaattaccagaatgtgcctcttaaaaggaaatatggt

SEQ ID NO: 20568 - DNA, 110 bp, synthetic construct
  source 1..110: mol_type = other DNA
actgtggtgcaatgggattgggggcatttctgcagtactaggatgaaggttagatccccagcccaccacaataggtggaaagatctggtgttgccacagctgtggtgtag

SEQ ID NO: 20569 - DNA, 110 bp, synthetic construct
  source 1..110: mol_type = other DNA
gattgggggcatttctgcagtactaggatgaaggttagatccccagcccaccacaataggtggaaagatctggtgttgccacagctgtggtgtaggtcacaactgttgct

SEQ ID NO: 20570 - DNA, 110 bp, synthetic construct
  source 1..110: mol_type = other DNA
taaagctccacttccccagtttcagctgttttgagaaccaggtgctagttatttcttggcccttcctctgtgaggctcttgctgaccttacaacctgctgaatctctgcc

SEQ ID NO: 20571 - DNA, 110 bp, synthetic construct
  source 1..110: mol_type = other DNA
tttttccccccaattcttaaagcctcctttattctattatcctggaaaatacctgcatttcctttgtaatacagtcaacatcattctgaagttaactagacttttcccat

SEQ ID NO: 20572 - DNA, 110 bp, synthetic construct
  source 1..110: mol_type = other DNA
cctttattctattatcctggaaaatacctgcatttcctttgtaatacagtcaacatcattctgaagttaactagacttttcccatacctatacaattgctttaaagaata

SEQ ID NO: 20573 - DNA, 110 bp, synthetic construct
  source 1..110: mol_type = other DNA
actgaatgtcctgtggtccgaagtatcatttcagtaaacgagccatattttgattcattattttattataactttataatgtgagattaaccagtttgggtaggtaattt

SEQ ID NO: 20574 - DNA, 110 bp, synthetic construct
  source 1..110: mol_type = other DNA
ccctgcagagcagggatgttaccatagcccctgaaggcagaagttagggagagctaccagtagatggcgctgtggtgccggagaaaaacgtagttgctggtggggcatca

SEQ ID NO: 20575 - DNA, 110 bp, synthetic construct
  source 1..110: mol_type = other DNA
ggctctctcactcccaggttagggctcttcctttacagcctcctcctggagggctcagctattgactgttccactaaaagccacccccatactttgtggcttaaaacaag

SEQ ID NO: 20576 - DNA, 110 bp, synthetic construct
  source 1..110: mol_type = other DNA
gggaggggaaacagaagactgagaggtcagcctgcaagggagatgggagctgaaatcaggcagcagtggccagttgggggcggtgtggggtttcctgctgggatgcctgg

SEQ ID NO: 20577 - DNA, 110 bp, synthetic construct
  source 1..110: mol_type = other DNA
tcaggcagcagtggccagttgggggcggtgtggggtttcctgctgggatgcctggcttcaactacagaggagtcttcggggaggacttccaggaggtgggaacaaggctt

SEQ ID NO: 20578 - DNA, 110 bp, synthetic construct
  source 1..110: mol_type = other DNA
gggcctcttcttttgtaatttctctgtctaaacagaccatcgactttctgaatgacaacattcgaagaggcatcgagaactactatgatgacctggacttcaaaaacatc

SEQ ID NO: 20579 - DNA, 110 bp, synthetic construct
  source 1..110: mol_type = other DNA
caacattcgaagaggcatcgagaactactatgatgacctggacttcaaaaacatcatggactttgttcagaaggaggtgagccaggtgctttgggtcagagatctgcttc

SEQ ID NO: 20580 - DNA, 110 bp, synthetic construct
  source 1..110: mol_type = other DNA
agcagtaagtattcctaggaggaaagctaagaaaatcccagattattataatgttgtaatgccatttcccatgaaaagaacacagggctttgggaaaatagaagattcca

SEQ ID NO: 20581 - DNA, 110 bp, synthetic construct
  source 1..110: mol_type = other DNA
caaagggagggagttggaaaagaacacacctggaaggggcagaacttaacccaccacttggttctaagcatgtggggttcttgggctaagctcaaggtcatggcatgtag

SEQ ID NO: 20582 - DNA, 110 bp, synthetic construct
  source 1..110: mol_type = other DNA
acttggttctaagcatgtggggttcttgggctaagctcaaggtcatggcatgtagcctgccccaggctcaggagagcagtagatacccatccatcaccaggaggaggaag

SEQ ID NO: 20583 - DNA, 110 bp, synthetic construct
  source 1..110: mol_type = other DNA
acgaaatggtgctgtcaggggtttccggaagcatctccaccaggaacctggccgaggaagtggcaggctgagcaggggtggcattcccagatgagcccctgtgacggcct

SEQ ID NO: 20584 - DNA, 110 bp, synthetic construct
  source 1..110: mol_type = other DNA
ggaagtggcaggctgagcaggggtggcattcccagatgagcccctgtgacggcctggagcagacctgcaatgctaccctgttgacctctgtgaacccagcatatggtcga

SEQ ID NO: 20585 - DNA, 110 bp, synthetic construct
  source 1..110: mol_type = other DNA
gtaaattggtacaaacactttctgcagcagttcagctgtaataatatattaaacctgaaaatatgcatcatctataatccagcagtttctaggaacctgctgaagcatgt

SEQ ID NO: 20586 - DNA, 110 bp, synthetic construct
  source 1..110: mol_type = other DNA
aaggatcggctgagccctatgtgagcactgatgtgaatgagatgccaccctcgctcctcagagaactcagagctggggcaggtagggtgggaaaaggcaaattgctgggc

SEQ ID NO: 20587 - DNA, 110 bp, synthetic construct
  source 1..110: mol_type = other DNA
ctgtacacagagcaccaggcactcaggtgggtacaagctttacagaggcttcagatctgccttgagtgacggctctagtgcccaggatgtagccctaagtccctgggcct

SEQ ID NO: 20588 - DNA, 110 bp, synthetic construct
  source 1..110: mol_type = other DNA
tctgccttgagtgacggctctagtgcccaggatgtagccctaagtccctgggcctcagctcctgcatctgtaaaatggagctgtgacagtctcactgagtctctcaggga

SEQ ID NO: 20589 - DNA, 110 bp, synthetic construct
  source 1..110: mol_type = other DNA
accagtgcacccaccctgacggcagcacccccatcctacccagccatgcccccaagcagaggcctctgggcactcacatccacagcttcaagttagatccaagcagcctg

SEQ ID NO: 20590 - DNA, 110 bp, synthetic construct
  source 1..110: mol_type = other DNA
atttcccgtagcttcccccttctccgccactagaaggaaaggaggagggagctgggctggatccgggccctcctctgagtcttccaggctgtctaagagcaggacctgaa

SEQ ID NO: 20591 - DNA, 110 bp, synthetic construct
  source 1..110: mol_type = other DNA
gctggatccgggccctcctctgagtcttccaggctgtctaagagcaggacctgaagcatctaaggcagagaactgggagcaaatagtgcattttagtcaagaaccaatga

SEQ ID NO: 20592 - DNA, 110 bp, synthetic construct; identical to SEQ ID NO: 20590
  source 1..110: mol_type = other DNA

SEQ ID NO: 20593 - DNA, 110 bp, synthetic construct; identical to SEQ ID NO: 20591
  source 1..110: mol_type = other DNA

SEQ ID NO: 20594 - DNA, 110 bp, synthetic construct
  source 1..110: mol_type = other DNA
gcggggctcccccaaccccccccaccctaccccacctcaggcccctcacctctgctttctctcacctccccagggtactccaggaccaattggagttccaggcccagcgg

SEQ ID NO: 20595 - DNA, 110 bp, synthetic construct
  source 1..110: mol_type = other DNA
tgcccacaggtggaatagcaccttatggctagtggtcatccttacctgctgcaggtgatacgacatgccaggtctcagggccatgggggacccacacagctctgaccagg

SEQ ID NO: 20596 - DNA, 110 bp, synthetic construct
  source 1..110: mol_type = other DNA
tctcccatggggccggctttccagtgttggtttagattgtgtccgaaatgaggggtcgtgggctcttccaaaataatgtgatgagctctccaaatggtttttggctacag

SEQ ID NO: 20597 - DNA, 110 bp, synthetic construct
  source 1..110: mol_type = other DNA
tcgtgggctcttccaaaataatgtgatgagctctccaaatggtttttggctacagaaatcattctttttaccatcagatactcagctgtgttccagatggttagtgatgt

SEQ ID NO: 20598 - DNA, 110 bp, synthetic construct
  source 1..110: mol_type = other DNA
ttcatgggtatttgacctgagtgtgtcttatatggaattttttttcaagtgagctgccttttggggcttcagttaataaaacaactgcatcaaatgaggattcatcctct

SEQ ID NO: 20599 - DNA, 110 bp, synthetic construct
  source 1..110: mol_type = other DNA
ggtagccaggtttcagccgcttgacatcattaatatctaagaagggaataagcaggtggcaagaggaatatgtaatgatttacgcattcaatgaaaaagtcaagtactca

SEQ ID NO: 20600 - DNA, 110 bp, synthetic construct
  source 1..110: mol_type = other DNA
gtggcaagaggaatatgtaatgatttacgcattcaatgaaaaagtcaagtactcacttggagagagctgtggtatagattaccaaaaaagttcaacataatgggagagct

SEQ ID NO: 20601 - DNA, 110 bp, synthetic construct
  source 1..110: mol_type = other DNA
ggtctattttcagagcctggagtcagagttctttacaacaagcagctgggaatgctccagcctgtgtgacacataacactgacacagcaccagaaatgtggctcatacat

SEQ ID NO: 20602 - DNA, 110 bp, synthetic construct
  source 1..110: mol_type = other DNA
accccttgcaggaagcactgctttctctgcaaccacagggctcatgccagggctgagtgaggccagcatgggaaactggccaatggcttacaggtgctaccagacatgcg

SEQ ID NO: 20603 - DNA, 110 bp, synthetic construct
  source 1..110: mol_type = other DNA
agtgaggccagcatgggaaactggccaatggcttacaggtgctaccagacatgcgacacttgcacctgcttcccaggtaccaccccaccctccttttccatcacacgagg

SEQ ID NO: 20604 - DNA, 110 bp, synthetic construct
  source 1..110: mol_type = other DNA
tcacaggtgcagccaaaagagaaaaaaaaaaatcatagctgctggagttcctacgtaactaaaatgctatgaccaattcaacaatacatgacacaattcaattaaaactg

SEQ ID NO: 20605 - DNA, 110 bp, synthetic construct
  source 1..110: mol_type = other DNA
gatccttctggctgctgcatggagggtggattgttggggggaaagagggaaggagagactcctagaggccatgtagtcgtctccttaggggccaggggccagtgatggca

SEQ ID NO: 20606 - DNA, 110 bp, synthetic construct
  source 1..110: mol_type = other DNA
agactcctagaggccatgtagtcgtctccttaggggccaggggccagtgatggcagagcagctgggccaactaggggtgcaaatggttcatctatgagtgtggtttgaga

SEQ ID NO: 20607 - DNA, 110 bp, synthetic construct
  source 1..110: mol_type = other DNA
tctggatcaaggaagattgtttgagcacttgctgcttcagcgcagatggtggcagtgttggagcagagcggggagcgccagcttgtctctaggcacagagcctgcaggga

SEQ ID NO: 20608 - DNA, 110 bp, synthetic construct
  source 1..110: mol_type = other DNA
ggcggtgatggccctcttgggcaagctataggaaccggtgggcttttctttgccagcatcactgtgccaatgggagcctggcctgtagctccccactttggtgccaggat

SEQ ID NO: 20609 - DNA, 110 bp, synthetic construct
  source 1..110: mol_type = other DNA
tgccccctggctttgtgtgacctttgcagaagctgggtcgggccttggaggctatccatggttgtggcttctggaagcctgttctgtagtggaactgaggctcagggagt

SEQ ID NO: 20610 - DNA, 110 bp, synthetic construct
  source 1..110: mol_type = other DNA
accggctgtgctgtgtgctctgttgggcactctctgtggaaggctaggcagcagtggccccagggtaatctcacaccctctgctctttcccagtggtgcttcaaaggtca

SEQ ID NO: 20611 - DNA, 110 bp, synthetic construct
  source 1..110: mol_type = other DNA
agcccacctgtaaggtagctgttgctctcttgagatggttcttgaatttcctgaagctggttcaggagtttttcttctgggatggagaccagaggctggggtagaagctg

SEQ ID NO: 20612 - DNA, 110 bp, synthetic construct
  source 1..110: mol_type = other DNA
aatggtggggggagaggggcggggctgtgggcagctccatgtctgccccaagaacatgggacatctgaagagctggggcaactaaaagaaaggaagagctctctgcacat

SEQ ID NO: 20613 - DNA, 110 bp, synthetic construct
  source 1..110: mol_type = other DNA
agtcagcatcgtctgaggtcccttctagcttcttggctgtccttccttttgtgaccagggagctgttcttatgccatggagtgctaggcaccaggctggggggttctcac

SEQ ID NO: 20614 - DNA, 110 bp, synthetic construct
  source 1..110: mol_type = other DNA
atagaagtcaacacaccagcccctttccccatggctccctcaccactcctctagggcttcttggcaaggaaactgaatggccaggagctgtcaggggtttgtgtggtgct

SEQ ID NO: 20615 - DNA, 110 bp, synthetic construct
  source 1..110: mol_type = other DNA
tgtaggagttcccttctcagtacttaccatggttattttggtgaatagccattcgatgtctattctaattagtttcctggaaaaaaaagtatttctacattattttgtct

SEQ ID NO: 20616 - DNA, 110 bp, synthetic construct
  source 1..110: mol_type = other DNA
cagacctgccatgtcccaagctagctgggctgccgagacagaagaggagggaataggcagtgggtaaaagacacattccagctaccctgacttacctatcctcagggaaa

SEQ ID NO: 20617 - DNA, 110 bp, synthetic construct
  source 1..110: mol_type = other DNA
tgtgatggggatttagggacccagagcaaggcacctaaatagagtctgggtgacaaagaaggcctcctggagaaagtgatatttacattgagacaggaaggaggaagtgg

SEQ ID NO: 20618 - DNA, 110 bp, synthetic construct
  source 1..110: mol_type = other DNA
gttagttgtttggcctgagagggagggacctatgcaatggccccgcccaccagtgctggcttcacaggcacagaccaagctcccaaatatggctgcagtgtgtctgtgtg

SEQ ID NO: 20619 - DNA, 110 bp, synthetic construct
  source 1..110: mol_type = other DNA
ccagcaggtagcacgagattggggctcccacagaggaggcctgcatgcaggcctcaagaatcaggtttgtggtgcccacacaggtactaagctttcacccatcagctcct

SEQ ID NO: 20620 - DNA, 110 bp, synthetic construct
  source 1..110: mol_type = other DNA
ctactcaaaagcccttctgcctcctcatcccactctgtggcagcctcttagatgtccacacagaaccatgggactccctggagcacagactgaaaatcaccaaggtggag

SEQ ID NO: 20621 - DNA, 110 bp, synthetic construct
  source 1..110: mol_type = other DNA
atctatacccaagttcacagagaagtaagccccagcttgaccagcacttgagtatttgagatttttctcatttgaggagctatttttgggaaagacccccacatgtaaga

SEQ ID NO: 20622 - DNA, 110 bp, synthetic construct
  source 1..110: mol_type = other DNA
gggtaggggaccgccagccagcaaaggacagagctcttcaagcaaggacagagctgacaggggttcctcacagatgaggtggagagggggtgctgcaggctcggggctgg

SEQ ID NO: 20623 - DNA, 110 bp, synthetic construct
  source 1..110: mol_type = other DNA
ggacagagctgacaggggttcctcacagatgaggtggagagggggtgctgcaggctcggggctgggggtaagattctgaggggggtgaggggacagggagaggtcccagc

SEQ ID NO: 20624 - DNA, 110 bp, synthetic construct
  source 1..110: mol_type = other DNA
gtttgtccagctgtgtcactgcagtagtatctcaggtcccagcctgtctcactagtaatgctccactgcttgctccaggtgctggtggcatggatgcttccattgtgcgg

SEQ ID NO: 20625 - DNA, 110 bp, synthetic construct
  source 1..110: mol_type = other DNA
gagtgaatgaatgaatgataagtgcacagcccatgccaccccctccttccactcccttcatgccaccccctccctccaggcgacctgtggttttgcttccctagctccct

SEQ ID NO: 20626 - DNA, 110 bp, synthetic construct
  source 1..110: mol_type = other DNA
cttcatgccaccccctccctccaggcgacctgtggttttgcttccctagctccctagtaccttctgaaatgaacacccctcttcagcctggtatgtgacaccacctgtta

SEQ ID NO: 20627 - DNA, 110 bp, synthetic construct
  source 1..110: mol_type = other DNA
ggaagaacacagacatctatattctctgaaaatcatggactgttctgcctgacagtcatagggtgggtaaagctcccttctaagttcagactcccattaactcctttcat

SEQ ID NO: 20628 - DNA, 110 bp, synthetic construct
  source 1..110: mol_type = other DNA
ctagaatgaatccaactttgtcatgacgcattattcttttcataatcccttggaagctaatggactagctataacagttttcttgaatatgcatgtgaattagtaatatt

SEQ ID NO: 20629 - DNA, 110 bp, synthetic construct
  source 1..110: mol_type = other DNA
tcccttggaagctaatggactagctataacagttttcttgaatatgcatgtgaattagtaatattctttaaaatgtttttttttatctgtgtttatgaaggagatggacc

SEQ ID NO: 20630 - DNA, 110 bp, synthetic construct
  source 1..110: mol_type = other DNA
gtggccctgccctggttagtggccatccttctggatgcttgcgccagaacccttggctctgttctttccagcacagctacagcctctctatcaggatagctcttggctct

SEQ ID NO: 20631 - DNA, 110 bp, synthetic construct
  source 1..110: mol_type = other DNA
cgccccacccccatgctggtgggaggaagtgtcctgaggctgctgggagctgcggattccaaatgactcgggttcttccaaagttgctgagtacacaggcagagcaaaga

SEQ ID NO: 20632 - DNA, 110 bp, synthetic construct
  source 1..110: mol_type = other DNA
tttcacattagaggctcttctcaaatgtttagtgacccctagttgcctgttcatatttaagagtgagttcacatttagctacctagcaacttgctgtgtatattaggaca

SEQ ID NO: 20633 - DNA, 110 bp, synthetic construct
  source 1..110: mol_type = other DNA
tttaagagtgagttcacatttagctacctagcaacttgctgtgtatattaggacatggtagggaagggggttacttattaaacaatgggcttcactatgggatgactagg

SEQ ID NO: 20634 - DNA, 110 bp, synthetic construct
  source 1..110: mol_type = other DNA
aggtcacatagcaatttgatgggtggtggagatagagaccagctctcttgtcctcctgctggatgctcttccatcagcacttctttcctgggtggttcatccgaatgaag

SEQ ID NO: 20635 - DNA, 110 bp, synthetic construct
  source 1..110: mol_type = other DNA
agtgtggtgggaagtagaggattaggaggaggaagtgagatcagagagctggatgggggctgatcatttaggggcttgcaaaccaggatgaggaggtggggttattccat

SEQ ID NO: 20636 - DNA, 110 bp, synthetic construct
  source 1..110: mol_type = other DNA
ccctgtggatgtgcaattatccaatcatccaggcccttctttcccctccattatggagataactgggatctggctgggaaccacccacctcccactgaatccccctgggg

SEQ ID NO: 20637 - DNA, 110 bp, synthetic construct
  source 1..110: mol_type = other DNA
tgtaagtgatggcagtgctccccccattgacacggtccagagggaggacaggggagaagcagtctcctgctctgcccccggtaccctctcctgtccaagctgaatgggga

SEQ ID NO: 20638 - DNA, 110 bp, synthetic construct
  source 1..110: mol_type = other DNA
gaagcagtctcctgctctgcccccggtaccctctcctgtccaagctgaatggggatgcttactcgcttctctcccctccagtccctcctgaccctctctccccctcttgc

SEQ ID NO: 20639 - DNA, 110 bp, synthetic construct
  source 1..110: mol_type = other DNA
ctcatggacactcacctggtgaaactatggggccaagaggtatgacgagatggaaactgaacttgactagctgacatccaagctgaacccaaggcccagccacccgcagg

SEQ ID NO: 20640 - DNA, 110 bp, synthetic construct
  source 1..110: mol_type = other DNA
ttcccgacccccacgtttccccaaatcctgctttgcatccttgaactgtagcctagccagagggccacctggccacctcatgaccccccgcctggctctggttatacatt

SEQ ID NO: 20641 - DNA, 110 bp, synthetic construct
  source 1..110: mol_type = other DNA
gacatgagctctcatgccctctgcagacaggatggatagctttagttagttgatatcagcggcattttcattttaattggtttctcagggacttttgtaggcagagaggg

SEQ ID NO: 20642 - DNA, 110 bp, synthetic construct
  source 1..110: mol_type = other DNA
aatgctgcagtttctccaggatggaacgtgccttctagttccacacgtgacgcttgcagtgctcgacagcctgacaggagagagcgaacagtttagtctacaggtgacaa

SEQ ID NO: 20643 - DNA, 110 bp, synthetic construct
  source 1..110: mol_type = other DNA
acagagaaggaactaacacatctgggtgagatgaaggaacacctgtgaacatggctgcacttagagaaaccgtcatgaacctttggacctaatcaggctaatgccatgca

SEQ ID NO: 20644 - DNA, 110 bp, synthetic construct
  source 1..110: mol_type = other DNA
tgcacttagagaaaccgtcatgaacctttggacctaatcaggctaatgccatgcacagggccacacagacatcctgcacggatgcccgagaggttcagcttctgagagac

SEQ ID NO: 20645 - DNA, 110 bp, synthetic construct
  source 1..110: mol_type = other DNA
ctgtaaggagccacagaaagcaggagccggtgtcaggccacctctgagaaaggtgtggaggtcagaggtgggaaggaaacatgctttttgctctatgcaccgtcaccctg

SEQ ID NO: 20646 - DNA, 110 bp, synthetic construct
  source 1..110: mol_type = other DNA
gggatgtgcatggtatctacctagggggctgttgtaaggattaagtaaaataacagatgtaagggccctagagcatagtaagtgctcataaatggtagctattttgttaa

SEQ ID NO: 20647 - DNA, 110 bp, synthetic construct
  source 1..110: mol_type = other DNA
gatgtaagggccctagagcatagtaagtgctcataaatggtagctattttgttaagagcctggtcagaggtgggactaaagaaagtaaaatgaagttctaatgatttagc

SEQ ID NO: 20648 - DNA, 110 bp, synthetic construct
  source 1..110: mol_type = other DNA
atgaagccccggccattgatgtcttcatctcacagtaaataaagcagccttgccttgcccaggtatacagagcagcagtgtatagtagaaggagctgagtttattgtcat

SEQ ID NO: 20649 - DNA, 110 bp, synthetic construct
  source 1..110: mol_type = other DNA
tgcccaggtatacagagcagcagtgtatagtagaaggagctgagtttattgtcatacatacagactggggatggaatcccacttagtagctgggttctggggcaaattcc

SEQ ID NO: 20650 - DNA, 110 bp, synthetic construct
  source 1..110: mol_type = other DNA
aatctgagctccagtgggcttcggaggtacatttccagaggagagctttggaaagagaggtagaccctgtgaaagctgaacacacctaagttctccctgtgcccacaacc

SEQ ID NO: 20651 - DNA, 110 bp, synthetic construct
  source 1..110: mol_type = other DNA
agaggtagaccctgtgaaagctgaacacacctaagttctccctgtgcccacaaccatcttggctgacagtttgatgactgtggacaaccatgagatagcatggtgtcctt

SEQ ID NO: 20652 - DNA, 110 bp, synthetic construct
  source 1..110: mol_type = other DNA
ccatctacgaatctacatttattctcaaagacaacgatcacgcagacattagtgatgagttaatggtacagctcctattcaagtcagaccctccttcttgatgccacact

SEQ ID NO: 20653 - DNA, 110 bp, synthetic construct
  source 1..110: mol_type = other DNA
tgtttaaaaaaaacttgtacaagagttccctcatggcaccacgggttatagatctgacaatgtcagcaatttggcccagcttgcgctatggtacaggtttgatccctggc

SEQ ID NO: 20654 - DNA, 110 bp, synthetic construct
  source 1..110: mol_type = other DNA
ttatagatctgacaatgtcagcaatttggcccagcttgcgctatggtacaggtttgatccctggcccgggaacttccgaatgctgtaagcaagagcaaaaacaaaaacaa

SEQ ID NO: 20655 - DNA, 110 bp, synthetic construct; identical to SEQ ID NO: 20653
  source 1..110: mol_type = other DNA

SEQ ID NO: 20656 - DNA, 110 bp, synthetic construct; identical to SEQ ID NO: 20654
  source 1..110: mol_type = other DNA

SEQ ID NO: 20657 - DNA, 110 bp, synthetic construct
  source 1..110: mol_type = other DNA
aataggagttgttatgtttattgacagagttaggaaaatactaaaggatataggagtgtttttaaaaccaaaaagagctccagaaaggttgaagagctttgtaaggaggt

SEQ ID NO: 20658 - DNA, 110 bp, synthetic construct
  source 1..110: mol_type = other DNA
gtgtttttaaaaccaaaaagagctccagaaaggttgaagagctttgtaaggaggtgtcgaagttgccaggtgcaactggcagctcccatcacctgccagctgagtttccc

SEQ ID NO: 20659 - DNA, 110 bp, synthetic construct
  source 1..110: mol_type = other DNA
gacgtggcccaccgacctggacagacatacaccaggcacgaagtgggcttgggtccccaggccctcaggtcctgactggggtctgccagaggaggtgccatagaggccac

SEQ ID NO: 20660 - DNA, 110 bp, synthetic construct
  source 1..110: mol_type = other DNA
cccaggccctcaggtcctgactggggtctgccagaggaggtgccatagaggccacaggagtagctgcttccttcccaaactagagcaggaactccgcactaccccaggga

SEQ ID NO: 20661 - DNA, 110 bp, synthetic construct
  source 1..110: mol_type = other DNA
gtatattcctttttctctcctagcttcttgagggcagaaacctgtgccctgcaatagtgcccatgttgcgggctgaagaaatggatgaaccacaccaaatctggttacct

SEQ ID NO: 20662 - DNA, 110 bp, synthetic construct
  source 1..110: mol_type = other DNA
gtagtagaacgatctctgtgacgcattcccatgctggtttgggagcgaatgatgctttgaacctaatggaaaagcaaaacccgtccagaaaaacattacgaggtagatgg

SEQ ID NO: 20663 - DNA, 110 bp, synthetic construct
  source 1..110: mol_type = other DNA
tttgaacctaatggaaaagcaaaacccgtccagaaaaacattacgaggtagatggaaaatatagaaaagtaagaacaataactcaactgcttactatttgcctacaccgt

SEQ ID NO: 20664 - DNA, 110 bp, synthetic construct
  source 1..110: mol_type = other DNA
gccttttccagccacttcatgattttccttctgatttccttctctttaagctttgtagagccatccctggctcgctcttctttctgctgcactttcttcctcctctttaa

SEQ ID NO: 20665 - DNA, 110 bp, synthetic construct
  source 1..110: mol_type = other DNA
tgccaaataatttttaaaacatctccacatatttcttttagatgaaatgaatcagactgaaagttctgcaatgaagacactaggatgactgccaaaatacagtagagatt

SEQ ID NO: 20666 - DNA, 110 bp, synthetic construct; identical to SEQ ID NO: 20665
  source 1..110: mol_type = other DNA

SEQ ID NO: 20667 - DNA, 110 bp, synthetic construct; identical to SEQ ID NO: 20665
  source 1..110: mol_type = other DNA

SEQ ID NO: 20668 - DNA, 110 bp, synthetic construct; identical to SEQ ID NO: 20665
  source 1..110: mol_type = other DNA

SEQ ID NO: 20669 - DNA, 110 bp, synthetic construct
  source 1..110: mol_type = other DNA
tttccctggtgttgtgtgcttgacagaaaaaacaagacaaaacaaaaaaacttaaagattggatgttactgacatagaagaatgttagattagagtcgctgagttataaa

SEQ ID NO: 20670 - DNA, 110 bp, synthetic construct
  source 1..110: mol_type = other DNA
agattggatgttactgacatagaagaatgttagattagagtcgctgagttataaaatgcatacagagtcagtcctcctttggaagccagggcatgaaacacttgtcacac

SEQ ID NO: 20671 - DNA, 110 bp, synthetic construct; identical to SEQ ID NO: 20669
  source 1..110: mol_type = other DNA

SEQ ID NO: 20672 - DNA, 110 bp, synthetic construct; identical to SEQ ID NO: 20670
  source 1..110: mol_type = other DNA

SEQ ID NO: 20673 - DNA, 110 bp, synthetic construct
  source 1..110: mol_type = other DNA
ttcctctgtgccacaatgggaactccttctttatttttttcatagcacctccgtgttgctctgtaggtagtaggtacttaattgatagcttttatttaagaaaagtgata

SEQ ID NO: 20674 - DNA, 110 bp, synthetic construct
  source 1..110: mol_type = other DNA
cctgtggtatatgaaatttctggggctagtagctgaatccaagctacagctgctggtctacttcaaagccacggcaacgccagatccgagccacatccacgacctatgta

SEQ ID NO: 20675 - DNA, 110 bp, synthetic construct
  source 1..110: mol_type = other DNA
gtctacttcaaagccacggcaacgccagatccgagccacatccacgacctatgtacacttcattagtttaatttgtgggaggtcacactttgaaccaagatagtttaaac

SEQ ID NO: 20676 - DNA, 110 bp, synthetic construct
  source 1..110: mol_type = other DNA
aagctttgtcagttctgaaatgtgctatccatgcaaaagtttttccaagctttcgtaatttaattccttttaaaggcttcataatctttaaaggaaaaagttaaactgag

SEQ ID NO: 20677 - DNA, 110 bp, synthetic construct
  source 1..110: mol_type = other DNA
tgtgtcagttaaactagcacgctagttttggaaaccgaatcatgaaaaacttccgatgaaagctacgaaaggacttaaaaagccttgagttttaatggacctagagcttt

SEQ ID NO: 20678 - DNA, 110 bp, synthetic construct
  source 1..110: mol_type = other DNA
gttgttcatattatcatagaagactgcctcacacacacaaaatttatcagacatattctcctgcagtgtaaattcctttaatgcatttaaaacacaatttgatttagaag

SEQ ID NO: 20679 - DNA, 110 bp, synthetic construct
  source 1..110: mol_type = other DNA
gccacagttgcaacctaagccaaataccagatctttaaccctctgtgccaggcggggcacagcactatttatttaggaagctggctgtttcccattgtatatacttgcct

SEQ ID NO: 20680 - DNA, 110 bp, synthetic construct
  source 1..110: mol_type = other DNA
ttaccccatttgtttccaaccagcactggacaggctgcatgccgtgtactatagtctccttctccactggcaaacagattataccagaaaacagcagttccctgtggaga

SEQ ID NO: 20681 - DNA, 110 bp, synthetic construct
  source 1..110: mol_type = other DNA
gtaattcagcaggagacccagccgttggcatcattccagttgaacagcagttgaggatttgactggaaagaagctttaaatcaagatattgccctaactaaaagtgctac

SEQ ID NO: 20682 - DNA, 110 bp, synthetic construct
  source 1..110: mol_type = other DNA
acatgaggattaatgataaatatgtgaaacactttgcatagcgccttgaatacagtaaatgctcaattaatcttagctatttgtcttagtgcgtttgggctgctatcaca

SEQ ID NO: 20683 - DNA, 110 bp, synthetic construct
  source 1..110: mol_type = other DNA
gcagctgaggccggactaggttctagcgctctttactcaaaacaagggtcccttcttcatccaacaaaatgaagccaatttcgcttccagttctaaagcctgggcctctt

SEQ ID NO: 20684 - DNA, 110 bp, synthetic construct
  source 1..110: mol_type = other DNA
agaactttgagttaggaactataagagtctgttcaacttaaagggacaagctgtgaaactagtagcttcactactggagagggctctgtagatttggaaagaaactttga

SEQ ID NO: 20685 - DNA, 110 bp, synthetic construct
  source 1..110: mol_type = other DNA
aaactagtagcttcactactggagagggctctgtagatttggaaagaaactttgatgaactctctatccaacagcattgtcaataacagtagcaaactcagtggcatatg

SEQ ID NO: 20686 - DNA, 110 bp, synthetic construct
  source 1..110: mol_type = other DNA
gtataattaatattttctttttttcctcttctagatttggtattaggggaaagaagttacatttttcatcttcttatgctcccaaagggtcttccattgccaaatcccct

SEQ ID NO: 20687 - DNA, 110 bp, synthetic construct
  source 1..110: mol_type = other DNA
gttacatttttcatcttcttatgctcccaaagggtcttccattgccaaatcccctagcttgtgttccacggaaagagaagaggaagactgtataattttttctgaaggag

SEQ ID NO: 20688 - DNA, 110 bp, synthetic construct
  source 1..110: mol_type = other DNA
aatacttcctcgcacagctccagaagtcccatggctggtagtggtgcagagcgggcggcagcctcactgaaaacagcaggtccctacaacagagcagaacactacaccgc

SEQ ID NO: 20689 - DNA, 110 bp, synthetic construct
  source 1..110: mol_type = other DNA
ttagaattaagagtaggattatgtgatcattgtgcagtaactgaagaacatacgcggaagaaacagcaagagtttgaaaatatccatcagcagaatcttaaacttatcac

SEQ ID NO: 20690 - DNA, 110 bp, synthetic construct
  source 1..110: mol_type = other DNA
tctttggcaagagagaaacctccagcttgagatgttctatgcagacaagcaacacatgtcagaaataaaacaagtgacttaagaagctccaaactggagttccctggtgg

SEQ ID NO: 20691 - DNA, 110 bp, synthetic construct
  source 1..110: mol_type = other DNA
aatagggaaagtcagtctatattaggtcccattgactcctaccttgaatatacacccttcaaatatccttcagctcctttttggctcctcactgtcaatcacagatagat

SEQ ID NO: 20692 - DNA, 110 bp, synthetic construct
  source 1..110: mol_type = other DNA
cagattccattcgctggattaggcgaggatgctgctctaaaaggtgacagcctggccgtgctgggccccagatcttgtactgggagcttggtccaccagttttaatgtca

SEQ ID NO: 20693 - DNA, 110 bp, synthetic construct
  source 1..110: mol_type = other DNA
aaaaggttagacaaggggaaaaatacagtgctgttactgagtttctacacacctcagtctgtcatgctagcatttttgtacttacagctatggaatcaaatgtacttccc

SEQ ID NO: 20694 - DNA, 110 bp, synthetic construct
  source 1..110: mol_type = other DNA
agtctgtcatgctagcatttttgtacttacagctatggaatcaaatgtacttcccctaagttaacatgcttgtggttattaataaaagagttaaaaatcaagatccataa

SEQ ID NO: 20695 - DNA, 110 bp, synthetic construct
  source 1..110: mol_type = other DNA
aggaatgtaaggcttctacaactctcttattctgtttgtcctgtctacaaatctcaatcaaccaaggcagttaaataaactatatgcatttatagctaaatgttccaaac

SEQ ID NO: 20696 - DNA, 110 bp, synthetic construct
  source 1..110: mol_type = other DNA
aatcaaccaaggcagttaaataaactatatgcatttatagctaaatgttccaaactcaagtttgctccacagtttcactacttccaaaaaaatatttactctgacttagc

SEQ ID NO: 20697 - DNA, 110 bp, synthetic construct
  source 1..110: mol_type = other DNA
tccgagagttcctgaacaggatggtctacctctggaagggccagatcttggcaggacaagggaccatattaaccaaagccagtacttaggcagtcagggataatgtgggt

SEQ ID NO: 20698 - DNA, 110 bp, synthetic construct; identical to SEQ ID NO: 20697
  source 1..110: mol_type = other DNA

SEQ ID NO: 20699 - DNA, 110 bp, synthetic construct
  source 1..110: mol_type = other DNA
tgaaagtgaggccaaaaatcaagagaaggccaaatttttcttcaacccccacccccatcatgtctctaggtcagcctgagctccatctgtacctgccaaagagggcttcg

SEQ ID NO: 20700 - DNA, 110 bp, synthetic construct
  source 1..110: mol_type = other DNA
aacctatccagaacctgaggtctccaaattcaagtgtacaaggcagactcacagctcaaaccaatactaatattcgagtatcttgtataaccatttggacagcaagaaag

SEQ ID NO: 20701 - DNA, 110 bp, synthetic construct
  source 1..110: mol_type = other DNA
tcaaaccaatactaatattcgagtatcttgtataaccatttggacagcaagaaagaaacctccctatagactttaagcagcaggaactggggaagggagctgggcaaaga

SEQ ID NO: 20702 - DNA, 110 bp, synthetic construct
  source 1..110: mol_type = other DNA
cttctgctgcttttgctacataagctctcggtctgtgggtagcaggagatgacaggccgggcttcttgcagtgcccagaatctaaatcagagggcaagtctccgtgtgtc

SEQ ID NO: 20703 - DNA, 110 bp, synthetic construct
  source 1..110: mol_type = other DNA
gggccgtgaatgtgccatgaaggacaaacccggcgtctacacaagggtctcacacttcctgacctggatccacactcatgttgggggagagaatggcctagcccactgag

SEQ ID NO: 20704 - DNA, 110 bp, synthetic construct
  source 1..110: mol_type = other DNA
tggctaagagggaggtggagaactctgaggatcccaagttccgtgaggcggtgaaagctgcctctgacgaattgagcaaaacaatctccccaatggtgatggatgcaaag

SEQ ID NO: 20705 - DNA, 110 bp, synthetic construct
  source 1..110: mol_type = other DNA
agctgcctctgacgaattgagcaaaacaatctccccaatggtgatggatgcaaaggctgtggcaggaaacatttctgaccctggtaagcaaagcctggtgtgattcacct

SEQ ID NO: 20706 - DNA, 110 bp, synthetic construct
  source 1..110: mol_type = other DNA
gagagagctgcctctgtttgggaactacatttgtttggtcggactgaagcgagtgtagggtccaggctttgagctggtcaccttcgcatgtatcatctttctgtttctct

SEQ ID NO: 20707 - DNA, 110 bp, synthetic construct
  source 1..110: mol_type = other DNA
aaagagggcattattttaaccactcttatgctctaatctaatattcacagcaacctcatgaagtagatagtatcatcattcccagtttacagaaaactgagacttgtaga

SEQ ID NO: 20708 - DNA, 110 bp, synthetic construct
  source 1..110: mol_type = other DNA
gagttatgggcagaagtaaaatgtgttttcctggactgactggagcatttaattacctgcaagtctgtccagagctctctttgtgtcaaccgtgatgactggcagaattt

SEQ ID NO: 20709 - DNA, 110 bp, synthetic construct
  source 1..110: mol_type = other DNA
cctgcaagtctgtccagagctctctttgtgtcaaccgtgatgactggcagaatttgagatggtgattgctccatcatcttgggtagtgaaatgaaaagacatggagtgga

SEQ ID NO: 20710 - DNA, 110 bp, synthetic construct
  source 1..110: mol_type = other DNA
tttaagctatctaaaaagtctagccaggtacagcccaccagggaaggtgccggattttgttttatgtttgtgtgtttgattggttggctttgaaccaaccgtcttcttat

SEQ ID NO: 20711 - DNA, 110 bp, synthetic construct
  source 1..110: mol_type = other DNA
ttgttatccatccacttggggaatgatgattttcaacatagggatacattctagaaagttgaagaatatacagttgacccttgaatattttggaagttaaggatgcccac

SEQ ID NO: 20712 - DNA, 110 bp, synthetic construct; identical to SEQ ID NO: 20711
  source 1..110: mol_type = other DNA

SEQ ID NO: 20713 - DNA, 110 bp, synthetic construct; identical to SEQ ID NO: 20711
  source 1..110: mol_type = other DNA

SEQ ID NO: 20714 - DNA, 110 bp, synthetic construct; identical to SEQ ID NO: 20711
  source 1..110: mol_type = other DNA

SEQ ID NO: 20715 - DNA, 110 bp, synthetic construct
  source 1..110: mol_type = other DNA
tgtcataatccatattcgatcctcccactccgacaaggaaatatatattttatcttctctgggatacttgcataacatgcagaatccattaaaaggaagaaaacatgcta

SEQ ID NO: 20716 - DNA, 110 bp, synthetic construct
  source 1..110: mol_type = other DNA
attgactgtcttatgtgctgtgtggcagcatgtatctggtaaccattggtctaaatgatatagcaggccagtctaagagaacacataaatcatcacttaggtagagatat

SEQ ID NO: 20717 - DNA, 110 bp, synthetic construct
  source 1..110: mol_type = other DNA
tttttcaaaataagaagtttaaaataaagcctttaaaatgtataaagataccacgatatttctgatatctctaatgtggtaggggtcattgtttagagtggctccatgat

SEQ ID NO: 20718 - DNA, 110 bp, synthetic construct
  source 1..110: mol_type = other DNA
cgtcttcccaaggcactctcacccccaatctgttctcctcaaggcagctgctctgtgaacagttcgcaatgatttatttcatagctgaagtgaggctcggggatgtgaag

SEQ ID NO: 20719 - DNA, 110 bp, synthetic construct
  source 1..110: mol_type = other DNA
tgaacagttcgcaatgatttatttcatagctgaagtgaggctcggggatgtgaagttattcatttgaaattatcgggtagcggtggaaattttactcttctttacccaga

SEQ ID NO: 20720 - DNA, 110 bp, synthetic construct
  source 1..110: mol_type = other DNA
gtgcagacatgtaaacagggagatggaaaagctgtatgtgtaaaagggaagcagtgggaaataagattttgaaaggtaagttacagccatgaagagctgagaacgccaag

SEQ ID NO: 20721 - DNA, 110 bp, synthetic construct
  source 1..110: mol_type = other DNA
gtccacatgattcttccagtacctgttggatgggccctaggagagtcatgacatgtcagcgtagttgctgcagcctgtttcagcagtgaaacatctaggtggaggcacac

SEQ ID NO: 20722 - DNA, 110 bp, synthetic construct
  source 1..110: mol_type = other DNA
tcagcgtagttgctgcagcctgtttcagcagtgaaacatctaggtggaggcacacacacaccaataggacttagggttgcagttcagttttcttaacttgaagcacattt

SEQ ID NO: 20723 - DNA, 110 bp, synthetic construct
  source 1..110: mol_type = other DNA
tgttgagaggctaatcatgtgaatgctctcaaagaaaaaacttctacccctatatcatagacactagctactaggttaactgttaaatacaggaataaatttcataatat

SEQ ID NO: 20724 - DNA, 110 bp, synthetic construct
  source 1..110: mol_type = other DNA
cggatcattctcagcaagtcgtcgacagcggatttagtgacctgggcagtatcgagagcacaaccgagaactacgaaaacccaagcagctatgattctactatgggtggc

SEQ ID NO: 20725 - DNA, 110 bp, synthetic construct
  source 1..110: mol_type = other DNA
gagcacaaccgagaactacgaaaacccaagcagctatgattctactatgggtggcagcatttgtggaaacggctcttcccagaacagctgctcctatagcaacctcacct

SEQ ID NO: 20726 - DNA, 110 bp, synthetic construct
  source 1..110: mol_type = other DNA
ctggagatgccactagccgttgatgctgttgatctggttgggagcagaaaaacggaagggtgagacagagagacacctggcaagtgagctcagacccctggctgctggct

SEQ ID NO: 20727 - DNA, 110 bp, synthetic construct
  source 1..110: mol_type = other DNA
ctgtgtatacaaagcttgcagttttccttttcctccattctagatctctccccacttctctagagctccctcgggaggctccagattcctcttcactgatgattaggccg

SEQ ID NO: 20728 - DNA, 110 bp, synthetic construct
  source 1..110: mol_type = other DNA
tcatctttccgtatctgtttagtgcaggttttcacagtgttagctaaatatgcgcctctaactatatgtactcagcgtacaattaaaggacgtgtgctgagttgatgaag

SEQ ID NO: 20729 - DNA, 110 bp, synthetic construct
  source 1..110: mol_type = other DNA
tttccccactcaatttaacagctatttcttgatccactaagaataacgcccttcaaaggagttaaagatgaagattaaactgggcctctttaagactttataatctggta

SEQ ID NO: 20730 - DNA, 110 bp, synthetic construct
  source 1..110: mol_type = other DNA
aaggagttaaagatgaagattaaactgggcctctttaagactttataatctggtagggaaaaatagaaaaaacacaagtgatgaaaccatcattatcagtctgtctgttg

SEQ ID NO: 20731 - DNA, 110 bp, synthetic construct
  source 1..110: mol_type = other DNA
gatttgcaatggcttctgtttaaatgcaaagctacagtatcaacctgtgccttagatattattactagatattgtctagtctacattgactaatttaaaatatcttacag

SEQ ID NO: 20732 - DNA, 110 bp, synthetic construct; identical to SEQ ID NO: 20731
  source 1..110: mol_type = other DNA

SEQ ID NO: 20733 - DNA, 110 bp, synthetic construct
  source 1..110: mol_type = other DNA
aagggcccctcccccccaaggagggagaacggggttcatgtgggcctcactttcctcaagagccttgctttagactttgaacatttccaagtgaagctttctatacagtg

SEQ ID NO: 20734 - DNA, 110 bp, synthetic construct
  source 1..110: mol_type = other DNA
tcaagagccttgctttagactttgaacatttccaagtgaagctttctatacagtgatggtgttattattttttgcatctggttaaaagccacacagtgttaaatagaaac

SEQ ID NO: 20735 - DNA, 110 bp, synthetic construct
  source 1..110: mol_type = other DNA
ttttggtcacttggtcttgtctcctggtaagtctgattacttttcattgaataatggacattgtggataaaaaattatagtggaaatttgagcttgaatgttattttcct

SEQ ID NO: 20736 - DNA, 110 bp, synthetic construct
  source 1..110: mol_type = other DNA
ggacattgtggataaaaaattatagtggaaatttgagcttgaatgttattttcctgcagaaggaatttgcttttgtttcaggtcagggtcagaccaaacatcagatcaac

SEQ ID NO: 20737 - DNA, 110 bp, synthetic construct; identical to SEQ ID NO: 20735
  source 1..110: mol_type = other DNA

SEQ ID NO: 20738 - DNA, 110 bp, synthetic construct; identical to SEQ ID NO: 20736
  source 1..110: mol_type = other DNA

SEQ ID NO: 20739 - DNA, 110 bp, synthetic construct
  source 1..110: mol_type = other DNA
gccgagatttgcatataatatataatgttgtagtagaaaggacccacaaagcaggcaggggctgtggagcattgatcctcagcccctttgttcaaactgggtcacctact

SEQ ID NO: 20740 - DNA, 110 bp, synthetic construct
  source 1..110: mol_type = other DNA
caggggctgtggagcattgatcctcagcccctttgttcaaactgggtcacctactcttcctggttattattttatcacagccattcctcccataaggggacaggacagca

SEQ ID NO: 20741 - DNA, 110 bp, synthetic construct
  source 1..110: mol_type = other DNA
gtgcccaggggtgagatgtttgtgatatttcattaaatgaaaaaagctggttatgaaagagcagggacatgcacatgcccacagttagcacatgtcacctagaaagcagg

SEQ ID NO: 20742 - DNA, 110 bp, synthetic construct
  source 1..110: mol_type = other DNA
tgaaccccaagtgcctgctgccttctgtctaccccatcaccccctggcctcccgttctgatgactgtgattgtatccagccttgttcttagcttcctctcaataaggtgg

SEQ ID NO: 20743 - DNA, 110 bp, synthetic construct
  source 1..110: mol_type = other DNA
tggggtcatgagttaagttcaagaataaggatggaagatgatggtagtttctggtcttaagcttttaagtcaaggactgctttctaaaatgtgtgtgagttcttggcagg

SEQ ID NO: 20744 - DNA, 110 bp, synthetic construct
  source 1..110: mol_type = other DNA
ccccttgggaacaacagcaagggaggattctaggagcgaattgaaagcagtcagaataatccggttcttgagggagcaatgcaaaggatgggtgctctcaaaatgttctg

SEQ ID NO: 20745 - DNA, 110 bp, synthetic construct
  source 1..110: mol_type = other DNA
ataatccggttcttgagggagcaatgcaaaggatgggtgctctcaaaatgttctgtgtggttctagtacttgcctcctccaggggaagagggtggtatcgtttcgtttgt

SEQ ID NO: 20746 - DNA, 110 bp, synthetic construct
  source 1..110: mol_type = other DNA
ctctttcctcactctgcctcccagaatcaccctgctctccagtctcctctccagtcctgaggcccaccccatccagctgccctttctctctctgcaaagtggtggggggc

SEQ ID NO: 20747 - DNA, 110 bp, synthetic construct
  source 1..110: mol_type = other DNA
aataagacaagggcaaaaacaggcaccaggattgcgtagcaatactctgtgatagggtgattttttagctggatctatatttcctggtctatctatttataaatagttgc

SEQ ID NO: 20748 - DNA, 110 bp, synthetic construct
  source 1..110: mol_type = other DNA
ggtgattttttagctggatctatatttcctggtctatctatttataaatagttgcatgtgtgtgggtttttggtaattgcagcagagattaaggctctagttagggacat

SEQ ID NO: 20749 - DNA, 110 bp, synthetic construct
  source 1..110: mol_type = other DNA
cgtcttcatataggagatactcaaatagtggaaaatctttcagctaaaggagtgtttttcctccagaagcttagactcaactcaccctgtttgtaatatgaactcactgc

SEQ ID NO: 20750 - DNA, 110 bp, synthetic construct
  source 1..110: mol_type = other DNA
ttttcctccagaagcttagactcaactcaccctgtttgtaatatgaactcactgcttattcttagattttcctcccaactaacacatcagatcataactcataacaaggc

SEQ ID NO: 20751 - DNA, 110 bp, synthetic construct
  source 1..110: mol_type = other DNA
gtcctggttggaatattttttcacttcataagctgggaaaaaaaagtgtggtgtgtgtgtgtgtgtgtattccctgccctatgggcactatactctaggaagttggttgt

SEQ ID NO: 20752 - DNA, 110 bp, synthetic construct
  source 1..110: mol_type = other DNA
aactcagaaaataaaccagggatcagtagcctatctcaaacaccttttttttttttcttctttatttacattcagtttcattttgaaaccagcaagacaatctgacaagt

SEQ ID NO: 20753 - DNA, 110 bp, synthetic construct
  source 1..110: mol_type = other DNA
tcttctttatttacattcagtttcattttgaaaccagcaagacaatctgacaagtcaaaggagaagatattaccactaaatacaaaccactcaaggcagtgttcccagat

SEQ ID NO: 20754 - DNA, 110 bp, synthetic construct
  source 1..110: mol_type = other DNA
attagtgcccttgtagaagagctgccagggagctcccggacccttctgccctgtgaagacccagcaagaactccgtgacccagagcaagaccttcatttcagacttctag

SEQ ID NO: 20755 - DNA, 110 bp, synthetic construct
  source 1..110: mol_type = other DNA
ccttcaagacctgctgataaagtcacccctctttctttattccattctggagagattggagccccagagaggggaaggaagggcccggctggcacagtgcattaagtgag

SEQ ID NO: 20756 - DNA, 110 bp, synthetic construct
  source 1..110: mol_type = other DNA
atctttccttaggataagctctggttgaagtacacccactggtcacagacgctgccccttgacttggagctgatctcagagggcagtacatgtgccttctctcacctgga

SEQ ID NO: 20757 - DNA, 110 bp, synthetic construct
  source 1..110: mol_type = other DNA
cccttgacttggagctgatctcagagggcagtacatgtgccttctctcacctggaaagcagcctcatacctgggccactggatgtgacaccatggactcccctcctccct

SEQ ID NO: 20758 - DNA, 110 bp, synthetic construct
  source 1..110: mol_type = other DNA
gaaaataccttatgaatgtgggatctggccttggaaggccaaggctcccctgaggaggcatgctctgtaccccaagtgacatttgcactgagaaaaagctaagcacttgg

SEQ ID NO: 20759 - DNA, 110 bp, synthetic construct
  source 1..110: mol_type = other DNA
aaaaattgtaagtacaggtgtagcatctcaaccagctttaactagatcactaattactggcttggatcctagcatatggagtattcctgtattaatactcgcctataaaa

SEQ ID NO: 20760 - DNA, 110 bp, synthetic construct
  source 1..110: mol_type = other DNA
cagccacctagagaagaacataggtgctgaatgccaagtgcatgtgcaggctcccaatgctccaagagttcagccagactgtagaaggcagcaaaagttcttactgggaa

SEQ ID NO: 20761 - DNA, 110 bp, synthetic construct
  source 1..110: mol_type = other DNA
aatgctccaagagttcagccagactgtagaaggcagcaaaagttcttactgggaaatattagtcatgattgactccaggaaggataaataccatccatatggcaataggt

SEQ ID NO: 20762 - DNA, 110 bp, synthetic construct
  source 1..110: mol_type = other DNA
ggctgattttagaaactacaatgaatttgcctcatcctggctaaaccataggcacacattccccagggaatccttttagagtccttttgcccttggccctttgtaaccat

SEQ ID NO: 20763 - DNA, 110 bp, synthetic construct
  source 1..110: mol_type = other DNA
ttcttcagtatgttctttatggctcaaaaccagaggaaaccatgtagtccacacactctagtgtccttttgtacctgaggacagcttttgacacttagtgaaataaaagc

SEQ ID NO: 20764 - DNA, 110 bp, synthetic construct
  source 1..110: mol_type = other DNA
atcaaccccgctcatcctgtcttaggtgaactctcttcacaaatcatcagagaactatcctccaagagatcttagttctgggttcatcagtctattaggccccacctgtt

SEQ ID NO: 20765 - DNA, 110 bp, synthetic construct
  source 1..110: mol_type = other DNA
tatcctccaagagatcttagttctgggttcatcagtctattaggccccacctgttttcagaagctacacagaaggaaaattcaaggatgacaatttatctcctaggtcct

SEQ ID NO: 20766 - DNA, 110 bp, synthetic construct
  source 1..110: mol_type = other DNA
attatgtagggcatgagtggggggaacatgtgttccagaccatttaactttcttttaaagaaaaaagctgatcacctacctgctcccaaaaagattgaaatcaccgaaat

SEQ ID NO: 20767 - DNA, 110 bp, synthetic construct
  source 1..110: mol_type = other DNA
taaagaaaaaagctgatcacctacctgctcccaaaaagattgaaatcaccgaaatattataaagttagaatttttctatttcaacttctttaagaggcagatggagagaa

SEQ ID NO: 20768 - DNA, 110 bp, synthetic construct
  source 1..110: mol_type = other DNA
agactaggaaagataaagttaccacacaaaaagattttttttttccttcataatggattcagcagggagtttataatcaggcagtttagttctcttagtactttttaatc

SEQ ID NO: 20769 - DNA, 110 bp, synthetic construct
  source 1..110: mol_type = other DNA
ttttgcaagatactctttcctacctgccttccttctttctttttttccttgaatgtgtttattttatacaggttatactaaccacatttttcagaagaaaacttcttttc

SEQ ID NO: 20770 - DNA, 110 bp, synthetic construct
  source 1..110: mol_type = other DNA
tgtttattttatacaggttatactaaccacatttttcagaagaaaacttcttttcagaagaaaacttcttccggtgcttatttttatgggatgaataattcagcaccagt

SEQ ID NO: 20771 - DNA, 110 bp, synthetic construct
  source 1..110: mol_type = other DNA
gcaagaccaggagaggtgtctgtgataagaaatgaagtggtgtgactctgttcgcacatttgctccctcactgaccctatagatacatggggagtggcagggagggacgt

SEQ ID NO: 20772 - DNA, 110 bp, synthetic construct
  source 1..110: mol_type = other DNA
catcagacagatcctgcctgttttaagtggttccagatagcagaacccaggtcaaggatgtgaggacattgcaaggtgagctaaggaagaacttcctcttatccatatca

SEQ ID NO: 20773 - DNA, 110 bp, synthetic construct
  source 1..110: mol_type = other DNA
tgaggaactatattgggaatttagcacagggaaaatggagggagctatatcccttgaaaaggaacacaaacagttgtgaaggccacaacctgtgacagggctccactaaa

SEQ ID NO: 20774 - DNA, 110 bp, synthetic construct
  source 1..110: mol_type = other DNA
gccttaaagggacatcaggtcgcaaaagaaaactttcagttagcccaaacccaggtttgatatttagggcatctgatatcaggattaaggatacatctagacccagactc

SEQ ID NO: 20775 - DNA, 110 bp, synthetic construct
  source 1..110: mol_type = other DNA
aagcagagacatgatcaaagctacaagtactatatccatctgggattttctttcgtgaatgaaaagaagcaaagagcattaataatggaagcttggacttaccggcaata

SEQ ID NO: 20776 - DNA, 110 bp, synthetic construct
  source 1..110: mol_type = other DNA
cttttaggaaataggcctcattcggcctccttatccttacctgagttcctaagagcatattctaacagctacgaatcagaaagggaggggatgcagagaccaagcaggaa

SEQ ID NO: 20777 - DNA, 110 bp, synthetic construct
  source 1..110: mol_type = other DNA
taataatttacttatttattaggcttatttttcctgtttttcccccactgtgaggtcagggggtgggatgttgtctattttattcgctattgttttctaagcatctggaa

SEQ ID NO: 20778 - DNA, 110 bp, synthetic construct
  source 1..110: mol_type = other DNA
ggggttttcactactggtctgtccacctgacaccagacaagctctagagcacaacagtccttacacaaaacaactgcctctcccagctcaaacctggtgcctacagaagg

SEQ ID NO: 20779 - DNA, 110 bp, synthetic construct
  source 1..110: mol_type = other DNA
atccttgctgaaagggcttctatttttgtaccaccaatgactcatcactggccagggtctccccaaagctacaatttgtcagcctgtcagtaaggacaagaggaacagaa

SEQ ID NO: 20780 - DNA, 110 bp, synthetic construct
  source 1..110: mol_type = other DNA
ggtctccccaaagctacaatttgtcagcctgtcagtaaggacaagaggaacagaagtggaaacagaggtcacatctccattcctgtctgcagtccataaaccctacaatg

SEQ ID NO: 20781 - DNA, 110 bp, synthetic construct
  source 1..110: mol_type = other DNA
ggacatctgatgtctggattcgcccccagcctggcaattaacaatagctggcagccttctcctgaattccaggagattggcagccctcactggctgaggtcacagagccc

SEQ ID NO: 20782 - DNA, 110 bp, synthetic construct
  source 1..110: mol_type = other DNA
attgttcctccactttccactacaaccacagagaaactacaaagaggaagtcggagcaggaagagagctggaagggccggtggtccaggtcacagctaccaacaggggtc

SEQ ID NO: 20783 - DNA, 110 bp, synthetic construct
  source 1..110: mol_type = other DNA
aaacttttatagcccccaggataaagctgaggactctacctctgttcccaccctgcaaggcttgcagacttttccattcaagcccaagcagaaattgcttttggtcagag

SEQ ID NO: 20784 - DNA, 110 bp, synthetic construct
  source 1..110: mol_type = other DNA
atacccagtgagaagtaccagcgaaaactagaggtgcttccccataattcaaaaacttcccgaaggaagtagcagggaccagatttactgcctctcccaaaacaattaaa

SEQ ID NO: 20785 - DNA, 110 bp, synthetic construct
  source 1..110: mol_type = other DNA
tggaaagacctagaaaagtggccatcttgtccatactcaggggaactcacagctagaagtggacagcatccctgctcagggaaatgcaatgcacacagtgggaccaccag

SEQ ID NO: 20786 - DNA, 110 bp, synthetic construct
  source 1..110: mol_type = other DNA
gaagtggacagcatccctgctcagggaaatgcaatgcacacagtgggaccaccagcagcttttctttcttagctttgcaccccacacttccctgtacaggatcagactcg

SEQ ID NO: 20787 - DNA, 110 bp, synthetic construct; identical to SEQ ID NO: 20785
  source 1..110: mol_type = other DNA

SEQ ID NO: 20788 - DNA, 110 bp, synthetic construct; identical to SEQ ID NO: 20786
  source 1..110: mol_type = other DNA

SEQ ID NO: 20789 - DNA, 110 bp, synthetic construct
  source 1..110: mol_type = other DNA
caacagagatctctgacccaaggttcaccagtttcaatgaggtgccagaaagtgccttagatgacaggtgtcctaaggcaaaaaggccaggcttccagccagttccaaga

SEQ ID NO: 20790 - DNA, 110 bp, synthetic construct
  source 1..110: mol_type = other DNA
cttagatgacaggtgtcctaaggcaaaaaggccaggcttccagccagttccaagaagatagattcctacaacacagctggtaatactgcagaccttttatccttagacct

SEQ ID NO: 20791 - DNA, 110 bp, synthetic construct
  source 1..110: mol_type = other DNA
accactgtaaagacgtgttccataaaaaccttcttctggtctccatccaagacagtggagccagcatggtcctggatggatatttcaggaaggcaaggagcaaccgcaaa

SEQ ID NO: 20792 - DNA, 110 bp, synthetic construct
  source 1..110: mol_type = other DNA
cttggttcggaggttggccctcactggattgtcatagctgggtctgaggatgacgctgaacacctgctttcctgtccacagggtgacgggctgaaggaggaaaggaagtc

SEQ ID NO: 20793 - DNA, 110 bp, synthetic construct
  source 1..110: mol_type = other DNA
gccttcctccctccctctgcacccacagcacatagaagttcctggggccagcaattcaatccaagactctctagccacctgagccactgctgtcaggttctttactcagt

SEQ ID NO: 20794 - DNA, 110 bp, synthetic construct
  source 1..110: mol_type = other DNA
agaggcctggagcttcctcagggagagaagtgctttgtaggaggagcttctgcagcatagggaaatccaggagggaagtttttccccacttaagaccaggaatctgagaa

SEQ ID NO: 20795 - DNA, 110 bp, synthetic construct
  source 1..110: mol_type = other DNA
ggttgcttgatgtaccaaaccctaggagaggcctgtgatgggagagagcaacccccttctttaaccggtctggtcaacagctgccctgagttgagatgcttcctgcccag

SEQ ID NO: 20796 - DNA, 110 bp, synthetic construct
  source 1..110: mol_type = other DNA
agggacactggcaccatgactggcacatgccagttactcagtggacatttggtgaactactgtcacatgctaccttttgccatttccaaaccagctgttgaaacatctga

SEQ ID NO: 20797 - DNA, 110 bp, synthetic construct
  source 1..110: mol_type = other DNA
actactgtcacatgctaccttttgccatttccaaaccagctgttgaaacatctgagaacttgaacggagaggcctggatgaggcaatattaaattttgtgcaggtgattg

SEQ ID NO: 20798 - DNA, 110 bp, synthetic construct
  source 1..110: mol_type = other DNA
ttctccagctctccatcccagggccatgtccccttggccagggcttgcacatgctcccacagcaactgtgatcccttccatcccagctggcctggcaaatagaaggagct

SEQ ID NO: 20799 - DNA, 110 bp, synthetic construct
  source 1..110: mol_type = other DNA
cccacagcaactgtgatcccttccatcccagctggcctggcaaatagaaggagctccccagaaggttgccaaggagccaccacatttgctaccaatttaagcgagactct

SEQ ID NO: 20800 - DNA, 110 bp, synthetic construct
  source 1..110: mol_type = other DNA
gatgtcagcctagcagaaaacaggggctgggaggtgaatgatgtgtccagagagtccacctttatgtgtcagcaccagagcccgaatcccattagtaggtgccgagctcc

SEQ ID NO: 20801 - DNA, 110 bp, synthetic construct
  source 1..110: mol_type = other DNA
ccacctttatgtgtcagcaccagagcccgaatcccattagtaggtgccgagctccatgcatactgctggaactctgtgatcccatcaaggctgaccagctagggggccaa

SEQ ID NO: 20802 - DNA, 110 bp, synthetic construct
  source 1..110: mol_type = other DNA
agactagctcccaggaaccaacatctcccaccagctcccaaagtgatttttctagaacccacctcagagcacaccactcctcactcaaaactctccttatacctccctgt

SEQ ID NO: 20803 - DNA, 110 bp, synthetic construct
  source 1..110: mol_type = other DNA
aacccacctcagagcacaccactcctcactcaaaactctccttatacctccctgtcttcaggatccagctccgactcctcggtgtggcttgaaaggactgtcacgattgg

SEQ ID NO: 20804 - DNA, 110 bp, synthetic construct
  source 1..110: mol_type = other DNA
ggggtccaggcatcagagtcactccagggctccctatatgttttgtaggtgaataggctggaggcctcctaagctggaggacctcagcccctactcctgggaggggcatt

SEQ ID NO: 20805 - DNA, 110 bp, synthetic construct
  source 1..110: mol_type = other DNA
catatatcatcgtcagtgctctgggtgtgtctgaggtctgtgttccagggactgttagaaccaggaacctgggtgactgcctgggctgaagcaagcctgcctgccttccc

SEQ ID NO: 20806 - DNA, 110 bp, synthetic construct
  source 1..110: mol_type = other DNA
tgctaatgcagctatttataccaggagccaaagcagatctttcacctgaaagttgggctgtcatgtctgtttaagcattcaggccagctctgcagcttatttgagaagac

SEQ ID NO: 20807 - DNA, 110 bp, synthetic construct
  source 1..110: mol_type = other DNA
ggctgtcatgtctgtttaagcattcaggccagctctgcagcttatttgagaagactttcaaatgggttttgcccagagtaattgatcacctgtgggccgagggtttcttt

SEQ ID NO: 20808 - DNA, 110 bp, synthetic construct
  source 1..110: mol_type = other DNA
cacctggggagctcttcttacttcatctcatcatcatcatcgtcactgcagtcaccatttactgagttacagccatgtgcctagagcactgtcagggtctagctcataag

SEQ ID NO: 20809 - DNA, 110 bp, synthetic construct
  source 1..110: mol_type = other DNA
catttactgagttacagccatgtgcctagagcactgtcagggtctagctcataaggtgagccatgttttttaagggaaatatgtggggtaggggaaacatgcaaaaaccc

SEQ ID NO: 20810 - DNA, 110 bp, synthetic construct
  source 1..110: mol_type = other DNA
ccctggcacagggatggcagtaactctctgactaaaaccattagaatggaggcaggtgtcagggaggacggaggccacatcaaggtttggatgaaaggagtgccatgatc

SEQ ID NO: 20811 - DNA, 110 bp, synthetic construct
  source 1..110: mol_type = other DNA
gtgtcagggaggacggaggccacatcaaggtttggatgaaaggagtgccatgatccattcacgagggctgggaagtgaggggacctgtgctgggtactcgttatttctag

SEQ ID NO: 20812 - DNA, 110 bp, synthetic construct
  source 1..110: mol_type = other DNA
cattcctgcctgagaaacactcaagctgtgatttccacaaatcgctaaaacccgatggtcccagtgggtaaatacccggtaatggaccagtcaactccaaactactgact

SEQ ID NO: 20813 - DNA, 110 bp, synthetic construct
  source 1..110: mol_type = other DNA
actctcaccctcttctcacctccgacttccatgcacctgctggactgcgtccacagctccgggagtgtctgagaaccaggtgaagtgagctttcctcaaggcttcatgcc

SEQ ID NO: 20814 - DNA, 110 bp, synthetic construct
  source 1..110: mol_type = other DNA
ggggtgagggggctggaggggtcaaggctgggagagtcatgagcaggcaggaccctggggaccctgttcagactcagaaggatgcaacatcttggcctttgttttaagaa

SEQ ID NO: 20815 - DNA, 110 bp, synthetic construct
  source 1..110: mol_type = other DNA
tggggaccctgttcagactcagaaggatgcaacatcttggcctttgttttaagaaggcaaggtaacccctgggggctctaggaccctctgagcatagcattgtgctctgg

SEQ ID NO: 20816 - DNA, 110 bp, synthetic construct
  source 1..110: mol_type = other DNA
accggcttctccctgggttccactccacccctcacatccccacacaccccctcggcctcgcatctgcgagcaagtccctgccaagtaaacagctgcagcccatgctccaa

SEQ ID NO: 20817 - DNA, 110 bp, synthetic construct
  source 1..110: mol_type = other DNA
cctcgcatctgcgagcaagtccctgccaagtaaacagctgcagcccatgctccaaggctccccaaaccccagcactacccacaatagccaaagccacatcccatccgtcc

SEQ ID NO: 20818 - DNA, 110 bp, synthetic construct
  source 1..110: mol_type = other DNA
tgcgcatggacgctctctcctagcagtgggcttcgaagcagccaaggcccatcatcaagccaaggaaacctagctgcttgggcgcagatactctccctgaccaggatgga

SEQ ID NO: 20819 - DNA, 110 bp, synthetic construct
  source 1..110: mol_type = other DNA
caagccaaggaaacctagctgcttgggcgcagatactctccctgaccaggatggatcccaggaaaccctggcacatggggctctctttcaagcagaccaacactgggggc

SEQ ID NO: 20820 - DNA, 110 bp, synthetic construct
  source 1..110: mol_type = other DNA
tagattgattccaaggctggagtgggcagagcgggcttcctggaagaggtagccttcttcaagcccctgggcctcatcattctctctgcctctggtaaaagcttggcagc

SEQ ID NO: 20821 - DNA, 110 bp, synthetic construct
  source 1..110: mol_type = other DNA
aggcagctcctgagagccacagaatttgaccttgatcctgcagaaagtagggagccagaaggagctgtggtgcattgacagctcctctctaaaggccaggaggcagggtc

SEQ ID NO: 20822 - DNA, 110 bp, synthetic construct
  source 1..110: mol_type = other DNA
ccaggtggccaaacccctgcaagctgtgaggctcacctaagagcactctggggatgggcatgggggtggatgatactgcctctgtgttcacagccctgcctgggtctggc

SEQ ID NO: 20823 - DNA, 110 bp, synthetic construct
  source 1..110: mol_type = other DNA
catattgcttctggaactcggtgcctcggtttccccatctgtgaaatggagctaattatagcatgaatgtcctaagatggttaagaaaataaaataaataaatgtgtgta

SEQ ID NO: 20824 - DNA, 110 bp, synthetic construct
  source 1..110: mol_type = other DNA
ttatagcatgaatgtcctaagatggttaagaaaataaaataaataaatgtgtgtagaaagcttaaaacaggacaggctcaggaaggtttggctctcatcaccattaagta

SEQ ID NO: 20825 - DNA, 110 bp, synthetic construct
  source 1..110: mol_type = other DNA
gactaagttggcccagaggcctctttctcatccccctacccctgctctttggccgtgacagggcttgctgaagccagagctgatggcatgcaggcctggggtgtggtggt

SEQ ID NO: 20826 - DNA, 110 bp, synthetic construct
  source 1..110: mol_type = other DNA
tgacagggcttgctgaagccagagctgatggcatgcaggcctggggtgtggtggtagtggttaaagggccaggggaggggggtgcctcatcaagaaggaatctccaggag

SEQ ID NO: 20827 - DNA, 110 bp, synthetic construct
  source 1..110: mol_type = other DNA
ctattaacagatgcttcattatattcctgggcacattttctggcttgttgaggctggccaggtggaaaatgctgcctggggctggactcctgtagggaattccaaaggac

SEQ ID NO: 20828 - DNA, 110 bp, synthetic construct
  source 1..110: mol_type = other DNA
tgcttaagagagtcacaaaagggagtatccaagctgggctttgatgtgtaggtatgagtttgttagagaaacgaaggcagaggaacactgaggactcagaggcttagaaa

SEQ ID NO: 20829 - DNA, 110 bp, synthetic construct
  source 1..110: mol_type = other DNA
ttgcccctctatgaggcccaaagccagcccctagctgagggctcacagagtgtctgattcactgccctaggctctcattcaacattgaggcaggccagaggtctaagcta

SEQ ID NO: 20830 - DNA, 110 bp, synthetic construct
  source 1..110: mol_type = other DNA
accaaccacaacggcacaggagggaagtccatctacggaagccgttttcctgacgagaacttcaaactcaagcacgtggggcccggtgagtgcagccgccagtccccagg

SEQ ID NO: 20831 - DNA, 110 bp, synthetic construct
  source 1..110: mol_type = other DNA
ccccctctgcccgtcccgcccccttgcctttgcgcttgctgttccctgcaccccaaacatttctccacccagtgaatgcccctggtagccaaggccaagctccaaggtta

SEQ ID NO: 20832 - DNA, 110 bp, synthetic construct
  source 1..110: mol_type = other DNA
aacatttctccacccagtgaatgcccctggtagccaaggccaagctccaaggttaacccctctggccgcccgcatcccagacagggttaactcctcggggtgctcaccac

SEQ ID NO: 20833 - DNA, 110 bp, synthetic construct
  source 1..110: mol_type = other DNA
gatgagtgatttccacgcaagtgctccaggaaccacattttgggaaaaccgaaatgcagatctgataatattttaatggacttcttggaaaaataaaaagtggagaattt

SEQ ID NO: 20834 - DNA, 110 bp, synthetic construct
  source 1..110: mol_type = other DNA
gaggaatgggcagtgtgtagaggtcaggagctgttcagaccggcttagggctgtctaactcttcatctccccaacagccaggtcctggagggaggccaggccgggttgtg

SEQ ID NO: 20835 - DNA, 110 bp, synthetic construct
  source 1..110: mol_type = other DNA
ctgatccgcatcatggtgtctcgcagcgagattgacctcctggacatccgggcggagtataagcggctgtacggcaagtcgctgtaccacgacatcacggtatgagcccc

SEQ ID NO: 20836 - DNA, 110 bp, synthetic construct
  source 1..110: mol_type = other DNA
tacttgatgacatgaccacatagcccacaagcctcctcctagggcctaaagattggtaatattaacccttctgaccctgccctgttacctcactatcactcaatcacaag

SEQ ID NO: 20837 - DNA, 110 bp, synthetic construct
  source 1..110: mol_type = other DNA
gtattttgtggctaatctaggtccttgagtttttgtctggattcaccagccatccccatgccatcagacaaaccacaagcacaaggctgctacttttaagctggaaagag

SEQ ID NO: 20838 - DNA, 110 bp, synthetic construct
  source 1..110: mol_type = other DNA
ccatgccatcagacaaaccacaagcacaaggctgctacttttaagctggaaagagactctgtggctaacaatgtcaatataatggaagagaaagacatctctcatggtgg

SEQ ID NO: 20839 - DNA, 110 bp, synthetic construct; identical to SEQ ID NO: 20837
  source 1..110: mol_type = other DNA

SEQ ID NO: 20840 - DNA, 110 bp, synthetic construct; identical to SEQ ID NO: 20838
  source 1..110: mol_type = other DNA

SEQ ID NO: 20841 - DNA, 110 bp, synthetic construct
  source 1..110: mol_type = other DNA
tgaggatgggagcaagggtgccccttccacccaacaaagaaagcttaacctgagattgaacttccatctttcaggtaagtaggaactcagagacagagttaccttgattt

SEQ ID NO: 20842 - DNA, 110 bp, synthetic construct
  source 1..110: mol_type = other DNA
gcccacagttgatctcacttctgtgcagaaacctttaactctgaagctctgctgacaagcctctgaaatatcactctcagttagatttaccccaatgaatctcaaaatgt

SEQ ID NO: 20843 - DNA, 110 bp, synthetic construct
  source 1..110: mol_type = other DNA
cactgaaatgagacagtgaagtcaagcacccatttttttattttcttgttgatgttagctgcttccagaactgttcctactgagcctagacacactgtaagaccatcggc

SEQ ID NO: 20844 - DNA, 110 bp, synthetic construct
  source 1..110: mol_type = other DNA
gtgagggtgatggatatggcatgaaacttgggccacattcaactgtattaaatcaatacggcttgaggagctggggaagccctatgggcctgcaaaggcagaggcctggg

SEQ ID NO: 20845 - DNA, 110 bp, synthetic construct
  source 1..110: mol_type = other DNA
atacggcttgaggagctggggaagccctatgggcctgcaaaggcagaggcctgggaaagaatgcaaattcagataagcacctgggagagctgctcttctggccactggat

SEQ ID NO: 20846 - DNA, 110 bp, synthetic construct
  source 1..110: mol_type = other DNA
gagttacctttggggttctaaaaggaacgtggtaagggtgggccaggccctcaaagttcattcccctccttttttgtgggctttgggggatggacacagataacaaagag

SEQ ID NO: 20847 - DNA, 110 bp, synthetic construct
  source 1..110: mol_type = other DNA
cggatacttctgataaccaagactgaccccaaatggagggttcatctgccagcgcagctttagaacctcatcatagggaagagggagaggatgcctgcttccttcgtgtc

SEQ ID NO: 20848 - DNA, 110 bp, synthetic construct
  source 1..110: mol_type = other DNA
caacatcctacttgagatttttggttgattcaaggagatgaaaaatgtatattttctgtccagtctgtgaggttatttgtaaccttgcttatctactcattctgagagga

SEQ ID NO: 20849 - DNA, 110 bp, synthetic construct
  source 1..110: mol_type = other DNA
ctgtccagtctgtgaggttatttgtaaccttgcttatctactcattctgagaggatttggagctggaaaaggaggtatactgtcctctgataggaagcttaggtttcctg

SEQ ID NO: 20850 - DNA, 110 bp, synthetic construct; identical to SEQ ID NO: 20848
  source 1..110: mol_type = other DNA

SEQ ID NO: 20851 - DNA, 110 bp, synthetic construct; identical to SEQ ID NO: 20849
  source 1..110: mol_type = other DNA

SEQ ID NO: 20852 - DNA, 110 bp, synthetic construct
  source 1..110: mol_type = other DNA
cgtttaaagtgcctttcctttcctggggctgccaccgatgggcagcgatggagtaaatattttgatagcgaacgtgtagttggtggtggtgtttgaaggcacctgcatga

SEQ ID NO: 20853 - DNA, 110 bp, synthetic construct
  source 1..110: mol_type = other DNA
aatattttgatagcgaacgtgtagttggtggtggtgtttgaaggcacctgcatgaatccagggaggtgacgagggggggtgtcctgaagaactcagggtgtcatgaagaa

SEQ ID NO: 20854 - DNA, 110 bp, synthetic construct
  source 1..110: mol_type = other DNA
cggatactgaattttaaatgatattcacgatcactctcgttgatattatcattggaattacctaaggcttctgagctccagcttccagaatggatgactgatactgccct

SEQ ID NO: 20855 - DNA, 110 bp, synthetic construct; identical to SEQ ID NO: 20854
  source 1..110: mol_type = other DNA

SEQ ID NO: 20856 - DNA, 110 bp, synthetic construct; identical to SEQ ID NO: 20854
  source 1..110: mol_type = other DNA

SEQ ID NO: 20857 - DNA, 110 bp, synthetic construct; identical to SEQ ID NO: 20854
  source 1..110: mol_type = other DNA

SEQ ID NO: 20858 - DNA, 110 bp, synthetic construct
  source 1..110: mol_type = other DNA
gaaatggcaaaaagacacacacacacacacaaattactgcaaagctgcagttactcaaatgctggagagggtgtggaaaaatgaaagttcctacactgttggtgggaatg

SEQ ID NO: 20859 - DNA, 110 bp, synthetic construct
  source 1..110: mol_type = other DNA
taagaaatggccagtgtaaggacactctgaccctcttgtctgattccttgaaagcaggaaataaatctttcatgtgaaaggtgcacagctagcattgagaggtaggacac

SEQ ID NO: 20860 - DNA, 110 bp, synthetic construct
  source 1..110: mol_type = other DNA
aggaaataaatctttcatgtgaaaggtgcacagctagcattgagaggtaggacacccttatcacaagagataagaaattcaggcagagaagcatatataaacagatcttg

SEQ ID NO: 20861 - DNA, 110 bp, synthetic construct
  source 1..110: mol_type = other DNA
tacaacggaaccaggactaagtgacactgacttctgtggtgaagaacagcggtgttcaaggccaagtttgctcttagaattcgggatcagggagttccctccatggctca

SEQ ID NO: 20862 - DNA, 110 bp, synthetic construct
  source 1..110: mol_type = other DNA
actgacttctgtggtgaagaacagcggtgttcaaggccaagtttgctcttagaattcgggatcagggagttccctccatggctcagtggttaataaatctgactaggaac

SEQ ID NO: 20863 - DNA, 110 bp, synthetic construct
  source 1..110: mol_type = other DNA
agggaaggagggttagtggaaaggggagactaaagggcggaaggatttaagcttagaataaaggtgaaggtaaccactgagaaagagagagaaggaaccaaggcacaggg

SEQ ID NO: 20864 - DNA, 110 bp, synthetic construct
  source 1..110: mol_type = other DNA
gaataaaggtgaaggtaaccactgagaaagagagagaaggaaccaaggcacaggggggaagatgagttgagaccaagatatgaccccgtaatgaggttaggaagcctctg

SEQ ID NO: 20865 - DNA, 110 bp, synthetic construct
  source 1..110: mol_type = other DNA
gcattatttgtattagcaaaacaagagacataacaaaactgctcagtatattacggtaatgaaagagaaatatccttattcttaggagatgcatgttgaagagctcaggg

SEQ ID NO: 20866 - DNA, 110 bp, synthetic construct
  source 1..110: mol_type = other DNA
gtgattctggtgagcccatgagaggcccagagctcaggctccaccatcttggccgctctcaagggctccggcttctctggttcctgctacttgcttgggtctctaagatc

SEQ ID NO: 20867 - DNA, 110 bp, synthetic construct
  source 1..110: mol_type = other DNA
ctttagaagaacattttaacctcacagagctcaaatttttacctttaagtattacttaatgtgtaaaacctttatcttcagagacttctgcactcttggtgattatattg

SEQ ID NO: 20868 - DNA, 110 bp, synthetic construct
  source 1..110: mol_type = other DNA
tgtgaggttccatagatgtgaaatgtttcacttaaagtgaaatcttatcttttatgtgtatcagttaattatagaatcagctgcacttggaggatcaacattaattagag

SEQ ID NO: 20869 - DNA, 110 bp, synthetic construct
  source 1..110: mol_type = other DNA
tgaagtgtaagtggctaacattaagcttttcattcccaattattgtttcaaaagacattcatcttgaataaacatattgccaactgtatgacacagtactaacaaaacaa

SEQ ID NO: 20870 - DNA, 110 bp, synthetic construct
  source 1..110: mol_type = other DNA
cattcatcttgaataaacatattgccaactgtatgacacagtactaacaaaacaaccagctaaggaactaggccatccatagccaggaaattcctcttttagaaagccct

SEQ ID NO: 20871 - DNA, 110 bp, synthetic construct
  source 1..110: mol_type = other DNA
cagggcatgtaattgtatctcaaaatcatttccagataggctggaaacagcaataggaccagctgtgtttctcataaaagattaggcacaagtcatgtatgaggcttttc

SEQ ID NO: 20872 - DNA, 110 bp, synthetic construct
  source 1..110: mol_type = other DNA
tggagctaatttggccatcagtgaaagctccatgcactatatgaaaggaacttatggccgtgtgcttggtgttagctgagcataatgccccatcctcttcccctaatcca

SEQ ID NO: 20873 - DNA, 110 bp, synthetic construct
  source 1..110: mol_type = other DNA
cttggtgcgaatttttattagtctttactttcctttgcttttggtaaccaaagactagctcttcaaggatagctttggctgcgcctgtttagactctgggcacagtgtgt

SEQ ID NO: 20874 - DNA, 110 bp, synthetic construct
  source 1..110: mol_type = other DNA
tagctcttcaaggatagctttggctgcgcctgtttagactctgggcacagtgtgtctgcagggcctgggtatgtggggtgatccaagtggcctgggaagtaaagcccttc

SEQ ID NO: 20875 - DNA, 110 bp, synthetic construct; identical to SEQ ID NO: 20873
  source 1..110: mol_type = other DNA

SEQ ID NO: 20876 - DNA, 110 bp, synthetic construct; identical to SEQ ID NO: 20874
  source 1..110: mol_type = other DNA

SEQ ID NO: 20877 - DNA, 110 bp, synthetic construct
  source 1..110: mol_type = other DNA
cacatttcttatcccactcttttttttgaactaatcctcttcctatgagatagtaacccactagctaatgaaggaatatggcttcaaatgggaagcagcggtgttcattg

SEQ ID NO: 20878 - DNA, 110 bp, synthetic construct
  source 1..110: mol_type = other DNA
aaaggtgttggagctgctttgactttaaaatgcatacccaaagaatattgtgtttctgtctttgacttgattttaatatggacggtgaaacccaaacatggttttagcta

SEQ ID NO: 20879 - DNA, 110 bp, synthetic construct
  source 1..110: mol_type = other DNA
ctgtctttgacttgattttaatatggacggtgaaacccaaacatggttttagctagctcttataagtcctttggtaagtgtcttcatatcctggaggatgaaacaaataa

SEQ ID NO: 20880 - DNA, 110 bp, synthetic construct
  source 1..110: mol_type = other DNA
taattgcatctagggaagtcaggagttgcattttcacagccatgtatggctaagagaaaaaaatcagggagggcacttaaaaatattcagcttgaatatctctgagtttg

SEQ ID NO: 20881 - DNA, 110 bp, synthetic construct
  source 1..110: mol_type = other DNA
gaaaaaaatcagggagggcacttaaaaatattcagcttgaatatctctgagtttgcccattgttagaattctttctctaagtgcttcctgaaattatgaaatatttgaga

SEQ ID NO: 20882 - DNA, 110 bp, synthetic construct
  source 1..110: mol_type = other DNA
ggaagcttgaaacaagatcaagtcccatgtaagaagtgacctcagaattgcccgcagcaatattttgcattagggaagagctgatcaatgcctcctgagtcttgagggaa

SEQ ID NO: 20883 - DNA, 110 bp, synthetic construct
  source 1..110: mol_type = other DNA
atcaagacactattattctctattcctctcaagaaaataaaccctagaataacgtcagtgtttcttcccccaccaacacatacatgcacttgcatagaaagacacacaac

SEQ ID NO: 20884 - DNA, 110 bp, synthetic construct
  source 1..110: mol_type = other DNA
acagaggattggggagcctgcagtttctcttctgcctctctgtggctcttcctcgcagctcaggtccagggatgatctgggacggactttagtggctatctagtccaact

SEQ ID NO: 20885 - DNA, 110 bp, synthetic construct
  source 1..110: mol_type = other DNA
ttgactttgtgtactaataagtgccaaaaggtacactcagttaaggaaattatgtatggaggattctggttataaatttctgttgcattttctgagttgaattgcttatg

SEQ ID NO: 20886 - DNA, 110 bp, synthetic construct
  source 1..110: mol_type = other DNA
tgtccagttatttttcttaggtctccgtggaaatttcttctttttatagatgctatctggcctaatgagattctaacaacttctacacattttctgtctttgcattttca

SEQ ID NO: 20887 - DNA, 110 bp, synthetic construct
  source 1..110: mol_type = other DNA
agaacagagtgggtacttaaaggccttgagtgccataataaggaattaaacttcagagcatttgcaggatttttcagcaggggtatgacttgatagtggtgggtttggga

SEQ ID NO: 20888 - DNA, 110 bp, synthetic construct
  source 1..110: mol_type = other DNA
gagcatttgcaggatttttcagcaggggtatgacttgatagtggtgggtttgggaaaatgaatatgtggaggggaaggaaggtcatctaggaaattaaaaggctttaatt

SEQ ID NO: 20889 - DNA, 110 bp, synthetic construct
  source 1..110: mol_type = other DNA
ttttcttgttctttattttccttaggctattcagttacttagagcaataccattccataggtgccactccccacttgtagctgtttaaatttaatttccaatcaacttaa

SEQ ID NO: 20890 - DNA, 110 bp, synthetic construct
  source 1..110: mol_type = other DNA
cataggtgccactccccacttgtagctgtttaaatttaatttccaatcaacttaaataatatgtaaaatgcagtttcccagtagcactaaccatttacatccaatgggtg

SEQ ID NO: 20891 - DNA, 110 bp, synthetic construct
  source 1..110: mol_type = other DNA
tgtaagatgccagagcctatcatgatgtggttcagaggaagactagtgaaaaagatgttataggtggtagactttccatcactccaaactgggcttgtgtaccctaactt

SEQ ID NO: 20892 - DNA, 110 bp, synthetic construct
  source 1..110: mol_type = other DNA
tgttataggtggtagactttccatcactccaaactgggcttgtgtaccctaacttctcaggaatattcaccttgcaaaaccaaaaaataaatgtgccatgacctatcatt

SEQ ID NO: 20893 - DNA, 110 bp, synthetic construct
  source 1..110: mol_type = other DNA
attttatttgggatcttaaaaacttcagtctttttaagaaagttgtgtgggaaaattaacgtggaattgatctggcagaaaaccacgtgattcccactgtgttttaaatc

SEQ ID NO: 20894 - DNA, 110 bp, synthetic construct
  source 1..110: mol_type = other DNA
ttaacgtggaattgatctggcagaaaaccacgtgattcccactgtgttttaaatcatgaggagataatgaaattttcagtttttcctgatttcttgtctcacagcaatgc

SEQ ID NO: 20895 - DNA, 110 bp, synthetic construct; identical to SEQ ID NO: 20893
  source 1..110: mol_type = other DNA

SEQ ID NO: 20896 - DNA, 110 bp, synthetic construct; identical to SEQ ID NO: 20894
  source 1..110: mol_type = other DNA

SEQ ID NO: 20897 - DNA, 110 bp, synthetic construct
  source 1..110: mol_type = other DNA
tcaagaggaatcagtcatgagcttttgtgaagaaaaagtaagaggtgatgtttcattgcaagggccatgaaagggggaagggagtatgtgctttctggaaaagtggtttt

SEQ ID NO: 20898 - DNA, 110 bp, synthetic construct
  source 1..110: mol_type = other DNA
agtttggacacacacactgataatccatacacatgtgcacatgcagttgttaaaaaggagtagggtcagaagagagaaggaaaaggctctgagcttggggcctgcatttg

SEQ ID NO: 20899 - DNA, 110 bp, synthetic construct
  source 1..110: mol_type = other DNA
aggagtagggtcagaagagagaaggaaaaggctctgagcttggggcctgcatttgcactctgggcttggaattctcaaccttagtcatgggtatgaatggaaggagcatt

SEQ ID NO: 20900 - DNA, 110 bp, synthetic construct
  source 1..110: mol_type = other DNA
tgggagtggcaagtctcaagtaggaaagtcacactggccaggctctcattagggaccgtactttcccacccctgtgcaaaccctggtatacatcatgcctggatggctga

SEQ ID NO: 20901 - DNA, 110 bp, synthetic construct
  source 1..110: mol_type = other DNA
ccgtactttcccacccctgtgcaaaccctggtatacatcatgcctggatggctgactccctatttaacctccagtaggtggtacgtccatataactggtctatttaacca

SEQ ID NO: 20902 - DNA, 110 bp, synthetic construct
  source 1..110: mol_type = other DNA
tttcctagcaatctccatcacaatacattaagtaacaacaacaataacaatagaaaatgctttaaattttatggatacgttcaatgagccaggcactgtgtttagtaaat

SEQ ID NO: 20903 - DNA, 110 bp, synthetic construct; identical to SEQ ID NO: 20902
  source 1..110: mol_type = other DNA

SEQ ID NO: 20904 - DNA, 110 bp, synthetic construct; identical to SEQ ID NO: 20902
  source 1..110: mol_type = other DNA

SEQ ID NO: 20905 - DNA, 110 bp, synthetic construct; identical to SEQ ID NO: 20902
  source 1..110: mol_type = other DNA

SEQ ID NO: 20906 - DNA, 110 bp, synthetic construct
  source 1..110: mol_type = other DNA
aaatattaaacaaacagagctatgccatacccatgttgtaaatgcaaagtagataataatgctcagagcctccaaatcctgtagcagatactgtgacttgcttgtgagag

SEQ ID NO: 20907 - DNA, 110 bp, synthetic construct
  source 1..110: mol_type = other DNA
tttaatttagttattcttcaggaagtttatagatgaacacactaaagatagtagagcttaaatggctaccccatgtgataactccatataaaaagaactggactgaatac

SEQ ID NO: 20908 - DNA, 110 bp, synthetic construct
  source 1..110: mol_type = other DNA
gcttaaatggctaccccatgtgataactccatataaaaagaactggactgaatactgacctttctgactaaatagaccactaaaccaagaaaggaatgtgaagaaaaatc

SEQ ID NO: 20909 - DNA, 110 bp, synthetic construct
  source 1..110: mol_type = other DNA
ccagcttgtgattgaaaaacctaaggatacagggagttgatgaataggaaaggacgggagcaagcttttttaggtagagtaactggaaaaaacacctctgagatgattcc

SEQ ID NO: 20910 - DNA, 110 bp, synthetic construct
  source 1..110: mol_type = other DNA
gggagcaagcttttttaggtagagtaactggaaaaaacacctctgagatgattccatatgtgtccaaataagcctgagtgctgaaaaggagtcactcaaagacctgggca

SEQ ID NO: 20911 - DNA, 110 bp, synthetic construct
  source 1..110: mol_type = other DNA
gagaaaaaccctagtaaagggataattttgctaaatggaggaagaagatattacatttccaggatactgaatccattagaatatgtaggacaggatcttggaaagtgggg

SEQ ID NO: 20912 - DNA, 110 bp, synthetic construct
  source 1..110: mol_type = other DNA
agatgacttgttaaatcactttataagcacagcaagcttcatattgggtagacggataaaacacactcaacgtgggtaacagatactacataacttggagacacaataat

SEQ ID NO: 20913 - DNA, 110 bp, synthetic construct
  source 1..110: mol_type = other DNA
gccagtacaatacttaatggtgaaaagctgaaacacttcttctaaaatctggaacaatgcaaggatgcccatacttaccacttctcttcgaaagagtgttgggataccta

SEQ ID NO: 20914 - DNA, 110 bp, synthetic construct
  source 1..110: mol_type = other DNA
gagtcctaagcaatgagctggtggaacaggtgtgtcctcctggaagacagtgatagtaggtgagcccccagccacactctgaaaagagctaggaatatgcaagtcccatc

SEQ ID NO: 20915 - DNA, 110 bp, synthetic construct
  source 1..110: mol_type = other DNA
taaattaatggcaaaacagaatttttcaaagattgttggctaggtttagaatttaaatccttttaagatgcaactctctatgctgaaaaaagttgctgtaacatcagcag

SEQ ID NO: 20916 - DNA, 110 bp, synthetic construct
  source 1..110: mol_type = other DNA
aatccttttaagatgcaactctctatgctgaaaaaagttgctgtaacatcagcagcttagctagaagttcctagggaagagattctacaaaattctctcatatatgtgca

SEQ ID NO: 20917 - DNA, 110 bp, synthetic construct
  source 1..110: mol_type = other DNA
tcacctatagaatctcaaaaaattagtctctcaaaactaaaaggaagtttaaagatgggccacacaagcccctataatatttgacatccttctaagttattatgaccaac

SEQ ID NO: 20918 - DNA, 110 bp, synthetic construct
  source 1..110: mol_type = other DNA
gtgcctggtgagaaccccctttctggcttgcagatggctgccttctctctgtcctcacatggcagaaggagaaagagagacacatagtgagcaagagctttctagtctct

SEQ ID NO: 20919 - DNA, 110 bp, synthetic construct
  source 1..110: mol_type = other DNA
cacatggcagaaggagaaagagagacacatagtgagcaagagctttctagtctctcttcttctttcagggacactaacctcatcatgagagccacactgtcagaacttca

SEQ ID NO: 20920 - DNA, 110 bp, synthetic construct; identical to SEQ ID NO: 20918
  source 1..110: mol_type = other DNA

SEQ ID NO: 20921 - DNA, 110 bp, synthetic construct; identical to SEQ ID NO: 20919
  source 1..110: mol_type = other DNA

SEQ ID NO: 20922 - DNA, 110 bp, synthetic construct
  source 1..110: mol_type = other DNA
cttcctgcccacctcttgggtagcagggaaccagatatgcaagacatgcaggacaactctggcagggctgtaatgggctggtgatggcaggaacctttgggggaggagct

SEQ ID NO: 20923 - DNA, 110 bp, synthetic construct
  source 1..110: mol_type = other DNA
actctggcagggctgtaatgggctggtgatggcaggaacctttgggggaggagctatagacatctgggatttcttacctaagctgtcttctgggagtttgaaaatgatgt

SEQ ID NO: 20924 - DNA, 110 bp, synthetic construct; identical to SEQ ID NO: 20922
  source 1..110: mol_type = other DNA

SEQ ID NO: 20925 - DNA, 110 bp, synthetic construct; identical to SEQ ID NO: 20923
  source 1..110: mol_type = other DNA

SEQ ID NO: 20926 - DNA, 110 bp, synthetic construct
  source 1..110: mol_type = other DNA
tttttttaatggccaaacctgtggcatatggaagttgccaggctaggtgtcaaattagagctgcagcttcaagccagtgacacagccaggcaacactggatatgaactgc

SEQ ID NO: 20927 - DNA, 110 bp, synthetic construct
  source 1..110: mol_type = other DNA
tagagctgcagcttcaagccagtgacacagccaggcaacactggatatgaactgcatctgtgacctttgccagagcttgtggcagtgcgggatccttaacccactcaagc

SEQ ID NO: 20928 - DNA, 110 bp, synthetic construct
  source 1..110: mol_type = other DNA
cttgtatttactagactgtatttagtattattgggccagagagctaggtaaaggctagttaaaaagaaatgatgtgaatccctactagcggatcaatcaaggtacaggag

SEQ ID NO: 20929 - DNA, 110 bp, synthetic construct
  source 1..110: mol_type = other DNA
gtattatgttgccaaaagaaagacattaattcaatctagactcaaagagtgggaaaataggcacaacctcttaatggcacaacctcttaatggcacttgcagcaaagtca

SEQ ID NO: 20930 - DNA, 110 bp, synthetic construct
  source 1..110: mol_type = other DNA
tcttcctatattttccacccacaaacttcagcttgccttgtggccagaaatattcacatgttcacacagagctgccagggagcctgtcaaatgtggtctaaggtggatac

SEQ ID NO: 20931 - DNA, 110 bp, synthetic construct
  source 1..110: mol_type = other DNA
acatgttcacacagagctgccagggagcctgtcaaatgtggtctaaggtggatacactgtcactctgacacacatcagggctcttttcccaaaggaagaaggcaaagtaa

SEQ ID NO: 20932 - DNA, 110 bp, synthetic construct; identical to SEQ ID NO: 20930
  source 1..110: mol_type = other DNA

SEQ ID NO: 20933 - DNA, 110 bp, synthetic construct; identical to SEQ ID NO: 20931
  source 1..110: mol_type = other DNA

SEQ ID NO: 20934 - DNA, 110 bp, synthetic construct
  source 1..110: mol_type = other DNA
gtcccaatgtcctctatgctgcttatcattgactgactcagctccaaattgatactgaacctgagatgctggaatatttctcccctgtctacagcaccatgttaaccttt

SEQ ID NO: 20935 - DNA, 110 bp, synthetic construct
  source 1..110: mol_type = other DNA
gtacatgtattacatgcaatctgctcagccaccaccccttagctagaatttggctttagatgtgttagatggaaatgtccaaaaacagttagaaataagatattggggag

SEQ ID NO: 20936 - DNA, 110 bp, synthetic construct
  source 1..110: mol_type = other DNA
ggtaaaggttagatggtatcagggtatacagtgctcgcctagatagaaatccaaggatttaagtttatcaattctttcctctccggcgccaccattacttccactactcc

SEQ ID NO: 20937 - DNA, 110 bp, synthetic construct
  source 1..110: mol_type = other DNA
atgtgttgtaatgcacagaatagcacccacaacaaagaattatccagcctaagttatcagtagagctgctgttaaaaatccctaggctaggctgtgctgaggtaacattc

SEQ ID NO: 20938 - DNA, 110 bp, synthetic construct
  source 1..110: mol_type = other DNA
aagaaatagatattacaatagctactatcttaagactgttgtaaaggaagcataaggaaattcagataaagcactaagcatagtgtctgatgcatagaaagcagttaata

SEQ ID NO: 20939 - DNA, 110 bp, synthetic construct
  source 1..110: mol_type = other DNA
atatagagggccccccaatgtccttagcactggcatctgtgttaaaaatgatgagtcatgttctcaaaggctctagagacagcaattcatggtttttttcttttctttct

SEQ ID NO: 20940 - DNA, 110 bp, synthetic construct
  source 1..110: mol_type = other DNA
gatgaaattaagcttatctggtttccagtgccaagttccccggcatgggactcgctggccagctcagatcaggttccccagcaggcctgggactgcgaaagggcctgtaa

SEQ ID NO: 20941 - DNA, 110 bp, synthetic construct
  source 1..110: mol_type = other DNA
gagagagctggctcaggcagctctgcagtgacttcccttcacagaatagctgaagtctgaggagtatgtatctccctttccccctctggatctgagttgtccaaacacat

SEQ ID NO: 20942 - DNA, 110 bp, synthetic construct
  source 1..110: mol_type = other DNA
tacatgtcagagggaaggccaagaaccatgtttaagtgtccccatgtgagtggtcccacatggataactgcatgagctacttcaagatcacaactctccttggagccttt

SEQ ID NO: 20943 - DNA, 110 bp, synthetic construct
  source 1..110: mol_type = other DNA
cagggggtacttcatagccctggttagtcagtgtcttaggggccttctcagttcattttagctgttatagaggacagggttcaacccacatggaaagggcagctttgcag

SEQ ID NO: 20944 - DNA, 110 bp, synthetic construct
  source 1..110: mol_type = other DNA
aagcatcttgctgtgaagctgaggcctgagtgctatgagaatccacaggaagtatgagctaggcagatcccttgggatggaagtccagaagagggaaggtgtgcatggct

SEQ ID NO: 20945 - DNA, 110 bp, synthetic construct
  source 1..110: mol_type = other DNA
gatggctaccaatagcttttgtagcagcctttctaaaagttccaactcccctgcaacccactggccatcaaaaattcagatggtgtaaacaaattctaggccatttaaat

SEQ ID NO: 20946 - DNA, 110 bp, synthetic construct
  source 1..110: mol_type = other DNA
aaaaatcacttgcagccccatttacctaaagggcaccacagaggaaggtattgtgaccaatcaccacctgttggtgctcttaaaaccctgggaatacacccgtcctgctg

SEQ ID NO: 20947 - DNA, 110 bp, synthetic construct
  source 1..110: mol_type = other DNA
accaatcaccacctgttggtgctcttaaaaccctgggaatacacccgtcctgctgctgccactgccagtcattctgggaagtacccacatgactgatctctgcaactttc

SEQ ID NO: 20948 - DNA, 110 bp, synthetic construct
  source 1..110: mol_type = other DNA
gctgaaaagccttatatgagtttttaagttcaactgtttaaattctaggttttacgtctcctttatagcctctagaatttgaaagccttatttgcagtttttcctagaga

SEQ ID NO: 20949 - DNA, 110 bp, synthetic construct; identical to SEQ ID NO: 20948
  source 1..110: mol_type = other DNA

SEQ ID NO: 20950 - DNA, 110 bp, synthetic construct
  source 1..110: mol_type = other DNA
atgtgaaagggaaaacactctcccctttcttcctctatgaaaccatgggctcacgctgcttcccaccagcttctgcttcatctgccccttcactgatctttcttttacca

SEQ ID NO: 20951 - DNA, 110 bp, synthetic construct
  source 1..110: mol_type = other DNA
aacgtgccttcttcctccccacaccaaacctctaagcttctttgtgttgtgcttttgactgtggtaccagtttcccgaagagggagtgaagagattagactaatagatcc

SEQ ID NO: 20952 - DNA, 110 bp, synthetic construct
  source 1..110: mol_type = other DNA
gaactcttcaataccaaatagagtatttacatctcagactcctacaaaattaagtccctgaacttcgtaccatcttctttcacttgagtaattatgataaacaaaatact

SEQ ID NO: 20953 - DNA, 110 bp, synthetic construct
  source 1..110: mol_type = other DNA
tctcagttgccttctgttccaaaaaaaataaataaataaaaggcatatttggggtgttatattttgctacccttcacagctcggtaatcaaaagttagcatgaccttaaa

SEQ ID NO: 20954 - DNA, 110 bp, synthetic construct
  source 1..110: mol_type = other DNA
gttatattttgctacccttcacagctcggtaatcaaaagttagcatgaccttaaaaagcttcatgtttctgactatgggatattcaaattttagtttccatctctgaaaa

SEQ ID NO: 20955 - DNA, 110 bp, synthetic construct
  source 1..110: mol_type = other DNA
gcagaatcagcttatgcttggcacacatggtgaaggaagcttgcctagaacctggagtcagagctacagcattccctgtgctaggtgtgcctgaagggatgtgtgcaaag

SEQ ID NO: 20956 - DNA, 110 bp, synthetic construct
  source 1..110: mol_type = other DNA
agtcagagctacagcattccctgtgctaggtgtgcctgaagggatgtgtgcaaagagaggaagagagggagaagggatgatgggaggggcaggggcccgtcccccctcac

SEQ ID NO: 20957 - DNA, 110 bp, synthetic construct
  source 1..110: mol_type = other DNA
acctcctgtacaatgggggagaagagaggtaccacagagagtggtcacatatacttcagaaggcagggctggagcttctgctgtggtgcaaggggatccacagcaccttg

SEQ ID NO: 20958 - DNA, 110 bp, synthetic construct
  source 1..110: mol_type = other DNA
cacaaggtttatgaatttccagagcatggactcagatctttgtctgataggctccacatctctgcttctttcaccccaaccatatgcttccctagaacactctctggatc

SEQ ID NO: 20959 - DNA, 110 bp, synthetic construct
  source 1..110: mol_type = other DNA
acatctctgcttctttcaccccaaccatatgcttccctagaacactctctggatcctcacctctgttcctacccaacatgcattgcttctttacctggaatgccccactc

SEQ ID NO: 20960 - DNA, 110 bp, synthetic construct; identical to SEQ ID NO: 20958
  source 1..110: mol_type = other DNA

SEQ ID NO: 20961 - DNA, 110 bp, synthetic construct; identical to SEQ ID NO: 20959
  source 1..110: mol_type = other DNA

SEQ ID NO: 20962 - DNA, 110 bp, synthetic construct
  source 1..110: mol_type = other DNA
gggctgtctagcagaaggaatctagaaggaccttaaggggactttgagaggaagcaaaatggcctttgaggagaatggttgtgagagtttaaagaaagtgaggaaaatat

SEQ ID NO: 20963 - DNA, 110 bp, synthetic construct
  source 1..110: mol_type = other DNA
aaaatggcctttgaggagaatggttgtgagagtttaaagaaagtgaggaaaatattactgggagctccagaaaaggacacccttgttatacagtgacagaaaatttagca

SEQ ID NO: 20964 - DNA, 110 bp, synthetic construct
  source 1..110: mol_type = other DNA
catgttgtgtgtgatgtggccttaaacctgtccccatttttatgactcctgtcttaggaactactgaatacctcagaatctggaaaaaggctgagaattacagaaaccta

SEQ ID NO: 20965 - DNA, 110 bp, synthetic construct
  source 1..110: mol_type = other DNA
ctcctgtcttaggaactactgaatacctcagaatctggaaaaaggctgagaattacagaaacctagaagggaaggcacttgggaaagctacttaagagacttgacgaaga

SEQ ID NO: 20966 - DNA, 110 bp, synthetic construct
  source 1..110: mol_type = other DNA
gaggttgtatgtgttaatctgcatctatgctgaagttggaaccagaactagtttctccaggacagggcttaagtctctcatattctgctgccttcctagtgctgagcacc

SEQ ID NO: 20967 - DNA, 110 bp, synthetic construct
  source 1..110: mol_type = other DNA
tccactcatatcctgcctggttgtcatgtgatagtctcttctgaatgtggcagaagcaggtaacctctcctgtgttccttccttcattcaacagacggtatcagccaaac

SEQ ID NO: 20968 - DNA, 110 bp, synthetic construct
  source 1..110: mol_type = other DNA
gcaggtaacctctcctgtgttccttccttcattcaacagacggtatcagccaaactcagcagacaggtgtgagccaggagcctcatccactccatcatggagccaacggt

SEQ ID NO: 20969 - DNA, 110 bp, synthetic construct
  source 1..110: mol_type = other DNA
gtgcggttttgaccccaagggaccctcttagcctgatctgtgctcatgtgtgtagtctgattactgtaagttgcccaaacattgagtagcataagaacagccccttcaga

SEQ ID NO: 20970 - DNA, 110 bp, synthetic construct
  source 1..110: mol_type = other DNA
cagagaggagcagagtctaagtggcagaatccaaacaccacaaagtgagcctgagaacggaaagaggcagcaggaccagaggtgtcaccagaatgttctcaccagggata

SEQ ID NO: 20971 - DNA, 110 bp, synthetic construct
  source 1..110: mol_type = other DNA
ccaaattcaatttgtacccatttataacacaaacatgtctcaggtgtaatatcacggagactcatttagcattctgcccacttgcctcccagggctggcattgcacaagg

SEQ ID NO: 20972 - DNA, 110 bp, synthetic construct
  source 1..110: mol_type = other DNA
ggagactcatttagcattctgcccacttgcctcccagggctggcattgcacaaggtgaggtggtgcagatccacttataagcaaaacctgttccaatgtgggagaaaaac

SEQ ID NO: 20973 - DNA, 110 bp, synthetic construct
  source 1..110: mol_type = other DNA
caattcatgcctgcccaagcttgagagcatctcagcacccagcagacacccacacccaaaccagtagcagctcgcgtgccaggcatgcaatagcttgtgcccaaatggcc

SEQ ID NO: 20974 - DNA, 110 bp, synthetic construct
  source 1..110: mol_type = other DNA
ttgacaaaggaggaagagtcccacccggggatgtgtcagaacagacgaggagctattctggtccacggtctaaaagatggatggaccactgcacccgtgctccctgtctg

SEQ ID NO: 20975 - DNA, 110 bp, synthetic construct
  source 1..110: mol_type = other DNA
ttctggtccacggtctaaaagatggatggaccactgcacccgtgctccctgtctgtctgcagcagaatgccgacgggtcttaaatagcactttgaatcaaagacttttct

SEQ ID NO: 20976 - DNA, 110 bp, synthetic construct
  source 1..110: mol_type = other DNA
cactgtctgtaataaacagagccaccaccattaccaactgtcctggatgtcaaggtccagtctttgcctgtggcttaaagtgcccagtgtaagaaagacctgccatgctg

SEQ ID NO: 20977 - DNA, 110 bp, synthetic construct
  source 1..110: mol_type = other DNA
ctggggtgtgccccctgcaatgggggcctgtggttaagtgactccaagtgaccgcatccacagtggtctgcccactctggcaccccattcggaggagtgacaggacttca

SEQ ID NO: 20978 - DNA, 110 bp, synthetic construct
  source 1..110: mol_type = other DNA
gggcttggctctcgcatgctaccctgacgtatatcgggaatagggatggagctgcattcagcggacacctcctagcatcctatatcaacttaaatttacacaggagttcc

SEQ ID NO: 20979 - DNA, 110 bp, synthetic construct
  source 1..110: mol_type = other DNA
ccacatcctccttctgccaaaagctaccctgtggccctttctgagcaatgacaatggctgaagactttgctcttccctcttcccctgtcttccttcagacctggaatatg

SEQ ID NO: 20980 - DNA, 110 bp, synthetic construct
  source 1..110: mol_type = other DNA
agcttttgctgcccccagcatcttagatcattggattgatgaggatgcaactcagctgatggcagaaagggcctccatagaagccctgttaccgcaattatccaatcaag

SEQ ID NO: 20981 - DNA, 110 bp, synthetic construct
  source 1..110: mol_type = other DNA
ctgatggcagaaagggcctccatagaagccctgttaccgcaattatccaatcaagatcccatcgcctctgaaagacgcacagagggctgtgctttgcgtttcacctggaa

SEQ ID NO: 20982 - DNA, 110 bp, synthetic construct
  source 1..110: mol_type = other DNA
gtccataggatgaaatctgtataaaggaacaaaatcttgcttccacaaggagactgattaaacagacattttctgtatcctttacaaaagtgatgttttattatgtcctt

SEQ ID NO: 20983 - DNA, 110 bp, synthetic construct
  source 1..110: mol_type = other DNA
tgctctaaattctaagaatacagaatacatgtggaaataatctgaaaagcaacgggcattatacaaatgtgttgccattgtttcagaaatagttatttatcatgaccagc

SEQ ID NO: 20984 - DNA, 110 bp, synthetic construct
  source 1..110: mol_type = other DNA
cggttctcacccatgcctaactttggtttgtttatcaatcccagaggcttttccgcccgctctcaaggagacagacccaagcctggagggaagcttaaaaatattaacat

SEQ ID NO: 20985 - DNA, 110 bp, synthetic construct
  source 1..110: mol_type = other DNA
gaactcttggcctcctgggcaggaaggacagctacataacaaagggcaggggaggtggtgaagtgcagaaaagaacacaggtccttctctggctattgtcacttgatatt

SEQ ID NO: 20986 - DNA, 110 bp, synthetic construct
  source 1..110: mol_type = other DNA
aaaatgactttggatggattaacttgtattaccctattgagctaatgccttccgtgaaggcagcactctccatttcactgaagatggtataacccagtttccctgaccca

SEQ ID NO: 20987 - DNA, 110 bp, synthetic construct
  source 1..110: mol_type = other DNA
tgatgtcttagactgggtgtatttatcaaaagcatatttatgctgttttctgcaaattctactaatataggagttatagggtgacattctaacacctcaaagataataat

SEQ ID NO: 20988 - DNA, 110 bp, synthetic construct; identical to SEQ ID NO: 20987
  source 1..110: mol_type = other DNA

SEQ ID NO: 20989 - DNA, 110 bp, synthetic construct
  source 1..110: mol_type = other DNA
tgggtaccaaacgctacatggctccagaagtgctggatgaaagcctgaataaaaaccatttccagccctacataatggctgatatctatagctttggcctgatcatttgg

SEQ ID NO: 20990 - DNA, 110 bp, synthetic construct
  source 1..110: mol_type = other DNA
ccatttccagccctacataatggctgatatctatagctttggcctgatcatttgggaaatggctcgtcgttgtatcacaggaggtaggagttttgtagcatgtttctggt

SEQ ID NO: 20991 - DNA, 110 bp, synthetic construct
  source 1..110: mol_type = other DNA
tctaaggacttctgctctaaaggccctccttaccctcccccagctgtacatagacccagcttctccagcacccagggtgggccacccgcatcatcaccagagctcccctg

SEQ ID NO: 20992 - DNA, 110 bp, synthetic construct
  source 1..110: mol_type = other DNA
ccagcttctccagcacccagggtgggccacccgcatcatcaccagagctcccctggactcacaaagagggcagcctagggtctctggtagagccagagttggtttttttc

SEQ ID NO: 20993 - DNA, 110 bp, synthetic construct
  source 1..110: mol_type = other DNA
caaaagtggtcccaaactatatccacaaccccaaaacaagtagttttagaaacctttaacattaatgtcataagagggttaatcatttaaaactcaagctaaaaaggaat

SEQ ID NO: 20994 - DNA, 110 bp, synthetic construct
  source 1..110: mol_type = other DNA
agacctcaagaatgagggaagtttgtgatgaaagattcaaattaaagcagttatttatccttgccttcatgtgttttttctaggtcggatataaaaaggaacaataatta

SEQ ID NO: 20995 - DNA, 110 bp, synthetic construct; identical to SEQ ID NO: 20994
  source 1..110: mol_type = other DNA

SEQ ID NO: 20996 - DNA, 110 bp, synthetic construct
  source 1..110: mol_type = other DNA
aaataattggaatagaaagatctgttataaatttcaactgtgtcagtgctatgcagacatcagctacttttctgataaagtgttgttgtcatgatacaggttgtatggga

SEQ ID NO: 20997 - DNA, 110 bp, synthetic construct
  source 1..110: mol_type = other DNA
atatactgtgggtgaggccctaaaaaggcaaaagggaaaaaaagaggaatgctataaaaaacacatctgggagtttctgctgtggcacagtgggttaaagcatctgtgga

SEQ ID NO: 20998 - DNA, 110 bp, synthetic construct; identical to SEQ ID NO: 20997
  source 1..110: mol_type = other DNA

SEQ ID NO: 20999 - DNA, 110 bp, synthetic construct
  source 1..110: mol_type = other DNA
tggattctattcaggttccttaacagctgagcatcgaagggaactccctaatgaatatatttaaatacagtttcaaaattttgtcactaactgtattccatagggcctgt

SEQ ID NO: 21000 - DNA, 110 bp, synthetic construct
  source 1..110: mol_type = other DNA
tatatttaaatacagtttcaaaattttgtcactaactgtattccatagggcctgtgaggaatgctgctaatggtcagtcctattttggttgagttttcccaggcttctat

SEQ ID NO: 21001 - DNA, 110 bp, synthetic construct
  source 1..110: mol_type = other DNA
aggcttccaggccctaagcagcaggatctcaggctgtggggagtagacagtggtagctgtcattcaaagccaggtggggaagcgtgaaggcatgacccatagggccaaat

SEQ ID NO: 21002 - DNA, 110 bp, synthetic construct
  source 1..110: mol_type = other DNA
gctgtcattcaaagccaggtggggaagcgtgaaggcatgacccatagggccaaatgttgtgcgtgacatggtcatagggtgggccctccacattcatgggttcctgcatc

SEQ ID NO: 21003 - DNA, 110 bp, synthetic construct; identical to SEQ ID NO: 21001
  source 1..110: mol_type = other DNA

SEQ ID NO: 21004 - DNA, 110 bp, synthetic construct; identical to SEQ ID NO: 21002
  source 1..110: mol_type = other DNA

SEQ ID NO: 21005 - DNA, 110 bp, synthetic construct
  source 1..110: mol_type = other DNA
aaagggatcttggttgcttctaagttcttgcagttatgaataaagctgccctaaacatcccagtgcaggtttctgtgcagatgtaagcactggactcatttgggcccaag

SEQ ID NO: 21006 - DNA, 110 bp, synthetic construct
  source 1..110: mol_type = other DNA
catcccagtgcaggtttctgtgcagatgtaagcactggactcatttgggcccaagatgttcagggctggatcatacggtaagaatgtgttttcattttgaatgacagagc

SEQ ID NO: 21007 - DNA, 110 bp, synthetic construct; identical to SEQ ID NO: 21005
  source 1..110: mol_type = other DNA

SEQ ID NO: 21008 - DNA, 110 bp, synthetic construct; identical to SEQ ID NO: 21006
  source 1..110: mol_type = other DNA

SEQ ID NO: 21009 - DNA, 110 bp, synthetic construct
  source 1..110: mol_type = other DNA
cttgggcttaggccaagggattacctgcaagaccttagtccttggccccacacagctgcccaagggatgaagtgtcagtgtctaagttcttgaccacacagggtacagat

SEQ ID NO: 21010 - DNA, 110 bp, synthetic construct
  source 1..110: mol_type = other DNA
ctgcccaagggatgaagtgtcagtgtctaagttcttgaccacacagggtacagatgtctatacgtgagtgggttttggacaggaaggattttccactttggactccagga

SEQ ID NO: 21011 - DNA, 110 bp, synthetic construct
  source 1..110: mol_type = other DNA
tcctggattctgagcatgatttcctcccacacgtgatgactttgtgctgtccctatgaggcccaggcatgctcagtgggtcgaagtgcttcctgccttggaacccccgtg

SEQ ID NO: 21012 - DNA, 110 bp, synthetic construct
  source 1..110: mol_type = other DNA
tgaggcccaggcatgctcagtgggtcgaagtgcttcctgccttggaacccccgtgtggaggatggacaatcaaaaggtatggaggagaaaccctaggatgttattggaaa

SEQ ID NO: 21013 - DNA, 110 bp, synthetic construct; identical to SEQ ID NO: 21011
  source 1..110: mol_type = other DNA

SEQ ID NO: 21014 - DNA, 110 bp, synthetic construct; identical to SEQ ID NO: 21012
  source 1..110: mol_type = other DNA

SEQ ID NO: 21015 - DNA, 110 bp, synthetic construct
  source 1..110: mol_type = other DNA
cgacactggtgggcagagctagttctggccattgggactggtggtcagggattgcaagatcttttaaaaagggttcaactagggtctgattctgcagggcttgtttgtca

SEQ ID NO: 21016 - DNA, 110 bp, synthetic construct
  source 1..110: mol_type = other DNA
aagatcttttaaaaagggttcaactagggtctgattctgcagggcttgtttgtcatagcagtgtcagaatctgaaacagggcctggggccaagtcggtgccaaaagagtt

SEQ ID NO: 21017 - DNA, 110 bp, synthetic construct
  source 1..110: mol_type = other DNA
tcacttcgctgcacacttgaaactaagacaacattgtaaatcaactatacttcgatttaaaaaatggaagtctttgaattatatgacaaagtgttcagaataatctttct

SEQ ID NO: 21018 - DNA, 110 bp, synthetic construct
  source 1..110: mol_type = other DNA
aagatcatcacttcatgatctcatgatctaagggctagggaaagcatggagagtctgcgactgaaatcaagttctttcagtaggaagacagtggtggtactgaaggaggt

SEQ ID NO: 21019 - DNA, 110 bp, synthetic construct
  source 1..110: mol_type = other DNA
tgcgactgaaatcaagttctttcagtaggaagacagtggtggtactgaaggaggtctgtgtggctcagactgaaagaaccagggaacacaagaagagccccttctcagga

SEQ ID NO: 21020 - DNA, 110 bp, synthetic construct
  source 1..110: mol_type = other DNA
gccaggggcctgaggttaccagagcctggagaaggtgcaagaaaagtgaactttaccaacagatgatgcatttttcaggagagaagtttccaaaccaaatttccaacttc

SEQ ID NO: 21021 - DNA, 110 bp, synthetic construct
  source 1..110: mol_type = other DNA
ccaacagatgatgcatttttcaggagagaagtttccaaaccaaatttccaacttcacaagcatgcatgtgtacctgaggagcaggtagccagcagcagatcctggaagct

SEQ ID NO: 21022 - DNA, 110 bp, synthetic construct
  source 1..110: mol_type = other DNA
gggaaggatccgatagaggggatgggagccatctatttttctttgtgctaaatctcagggtaattgctaagatctagaatgtcggaacaattgcaaagggtaggaaaccc

SEQ ID NO: 21023 - DNA, 110 bp, synthetic construct
  source 1..110: mol_type = other DNA
cagggtaattgctaagatctagaatgtcggaacaattgcaaagggtaggaaaccccagcctttccctcaagatcttgaaaagctctattcagaagattctttttttcaaa

SEQ ID NO: 21024 - DNA, 110 bp, synthetic construct
  source 1..110: mol_type = other DNA
ggtctggcacaaattaatgaaaacctctttgcttgtaaaagaaaaataaagattcagttcattcaaacaaggagagctctgtggaagaagcatacattttccatttgact

SEQ ID NO: 21025 - DNA, 110 bp, synthetic construct
  source 1..110: mol_type = other DNA
agttcattcaaacaaggagagctctgtggaagaagcatacattttccatttgacttcaacacctccaaatgtcctgagcagagagcgagaggcccgcacacacatgccat

SEQ ID NO: 21026 - DNA, 110 bp, synthetic construct
  source 1..110: mol_type = other DNA
ccaagcagtccaatggagtccaaagctgatgctggagcttgcacatcatggagcaggctgtcaggaaaggaggtcactgggagcctggaactaatgagcaaaagggcagg

SEQ ID NO: 21027 - DNA, 110 bp, synthetic construct
  source 1..110: mol_type = other DNA
catgccctcccatcctgcaaatgttatagcagcttacagagtatgcagaagaagcaagcatttgctcactttcaggaaacttggctttgagcccttccctctggattgtc

SEQ ID NO: 21028 - DNA, 110 bp, synthetic construct
  source 1..110: mol_type = other DNA
tcattctggggcactccctgcaaaggtgagcacgacagccccacactaagtacttcacatattaacatgacgagggccatcatgagtatcagacagatctgtttgttgga

SEQ ID NO: 21029 - DNA, 110 bp, synthetic construct
  source 1..110: mol_type = other DNA
cacatattaacatgacgagggccatcatgagtatcagacagatctgtttgttggacttctaaccatcttgtttttaaatcacaaaagtaaaaataaataagcttttttaa

SEQ ID NO: 21030 - DNA, 110 bp, synthetic construct
  source 1..110: mol_type = other DNA
agagtcctataattacaacctcaatcaagatacataattggggaattcccttcatggctcagctgttaacgaacccggctaggacccacaaagatgcgggtttgatccct

SEQ ID NO: 21031 - DNA, 110 bp, synthetic construct
  source 1..110: mol_type = other DNA
caaagagctcctgccagagactactctgggactaggaggtgaacagggaataaggcatggcccctgatcttgaggagcctctaatttaatgggaagagccaatagtgaaa

SEQ ID NO: 21032 - DNA, 110 bp, synthetic construct
  source 1..110: mol_type = other DNA
catggcccctgatcttgaggagcctctaatttaatgggaagagccaatagtgaaaaaaatgttacaatccagtagttagttctatggtagaagtagcgcagagcattata

SEQ ID NO: 21033 - DNA, 110 bp, synthetic construct
  source 1..110: mol_type = other DNA
cttggagtctgagccatttccagctcttcggtgtttctctcctggtctcgagtgtgtgatgaaaaacttcccctgtgcccggtactcaggctgtctgtagagaagacccc

SEQ ID NO: 21034 - DNA, 110 bp, synthetic construct
  source 1..110: mol_type = other DNA
gtcaggaaggtgatctctgttcctcatcagtgagtgttgggagggatgaggaaggaccccaggagcactcaagatctgtcttagctcaggtccccgagaaagcagagtct

SEQ ID NO: 21035 - DNA, 110 bp, synthetic construct
  source 1..110: mol_type = other DNA
acagcacaatgtaatgcgtgattacactttatgaataagtgaaatgaataagagccagcggagggagggagaaattgggatttcactgttataggcacctgcactacaca

SEQ ID NO: 21036 - DNA, 110 bp, synthetic construct; identical to SEQ ID NO: 21035
  source 1..110: mol_type = other DNA

SEQ ID NO: 21037 - DNA, 110 bp, synthetic construct
  source 1..110: mol_type = other DNA
aactgtagttctccaactctactgtattgaagcttcgaatactgatggctagatattatgctaagagcactttcttaagcttttctctgatactgggaagtgtagccttc

SEQ ID NO: 21038 - DNA, 110 bp, synthetic construct
  source 1..110: mol_type = other DNA
ttatgctaagagcactttcttaagcttttctctgatactgggaagtgtagccttcactacttcttgttgctaagaggccaaagctccctcatattttggggacactagaa

SEQ ID NO: 21039 - DNA, 110 bp, synthetic construct
  source 1..110: mol_type = other DNA
gctattggcttttttgactgtagtccgttggaaaaaatataacttttattgtgatacagtacacatttgtatgtgtgagtgtgtgtgaataaacaaaagatttatgaaca

SEQ ID NO: 21040 - DNA, 110 bp, synthetic construct
  source 1..110: mol_type = other DNA
gactgtagtccgttggaaaaaatataacttttattgtgatacagtacacatttgtatgtgtgagtgtgtgtgaataaacaaaagatttatgaacacttaacagatgatct

SEQ ID NO: 21041 - DNA, 110 bp, synthetic construct
  source 1..110: mol_type = other DNA
ctcctcagtgctcctcaagagaactctggccactgatgctgctcagggccctcggaaggcacctgtcctcttagctggagaggccaacattggcccagcagacagtcatc

SEQ ID NO: 21042 - DNA, 110 bp, synthetic construct
  source 1..110: mol_type = other DNA
gaggggggttgtcatggtgagaacagatgggcacagctcaagcgacaagaccaacgacataggatgtgaaaacagaatcgggactcaacataatcgctgatcattaggga

SEQ ID NO: 21043 - DNA, 110 bp, synthetic construct
  source 1..110: mol_type = other DNA
agcaaacaaaaaaacacccatgcctggtctgtccctaggaccccacagagaacagctctgcctactcctcccacatcatagagcttcacatgcatccatgtggccactga

SEQ ID NO: 21044 - DNA, 110 bp, synthetic construct
  source 1..110: mol_type = other DNA
tcacgctttcagtagaaactggacttcaaattttgaactttcatttttcctcgctggctacatgccagatgataccctcttgtgatgctgggcagaggctgagagctgca

SEQ ID NO: 21045 - DNA, 110 bp, synthetic construct
  source 1..110: mol_type = other DNA
ggctacatgccagatgataccctcttgtgatgctgggcagaggctgagagctgcagcccccagtcagccctgaaatgatgaccaataacttacaacaacaggtatacgta

SEQ ID NO: 21046 - DNA, 110 bp, synthetic construct
  source 1..110: mol_type = other DNA
ttcctcagggccacaagctcagggcccaggaaagcaagagggctcctgctgccatcatgggctgattgtggaccttccactcacaggttgaagtcctaatccccaggact

SEQ ID NO: 21047 - DNA, 110 bp, synthetic construct
  source 1..110: mol_type = other DNA
aatcttaactttttaataataagctgatgtattcagtcctactttttgttttccattgttaactgctttctgttagatattttgtctcctggtctattactcactcattc

SEQ ID NO: 21048 - DNA, 110 bp, synthetic construct
  source 1..110: mol_type = other DNA
tggctggaaccttaagtaaacaacttgggtaattttccttctcttggcgtcacatcatttttggctctgagattcagtaactttttgagttgttaggaatcttggtaatg

SEQ ID NO: 21049 - DNA, 110 bp, synthetic construct
  source 1..110: mol_type = other DNA
catgaatcaatggaatattctcaacataaggtcacaaccactgccattgaaaggcacatcaattctaaatcatttttagaaaagtctttagggatgaatatttagtttct

SEQ ID NO: 21050 - DNA, 110 bp, synthetic construct
  source 1..110: mol_type = other DNA
cttttgtttctcagcccaggaagcagctttgatgcacacagtcttagtcagaaacctctcaaatgcaacctgactagcttgagcaactccaggatttaggtagcaggaga

SEQ ID NO: 21051 - DNA, 110 bp, synthetic construct
  source 1..110: mol_type = other DNA
tgtccatccgcagggcattggtgaaggaaattatggtgaatccacacatggggtcttgtgtagctataatgaggaatgaagacgctatttagaatgtataaacgacaagg

SEQ ID NO: 21052 - DNA, 110 bp, synthetic construct
  source 1..110: mol_type = other DNA
ttgtgtagctataatgaggaatgaagacgctatttagaatgtataaacgacaaggtcctactggacagcacaaggaactatgcccaatctcctgagatagactatgatgg

SEQ ID NO: 21053 - DNA, 110 bp, synthetic construct
  source 1..110: mol_type = other DNA
tcatccatataacaagggggtctgggtccgatttgattgtttgcatccaaggagcatagcttatctatgagtttcatttcaagagagtaatggaatcatttcaaaatatc

SEQ ID NO: 21054 - DNA, 110 bp, synthetic construct
  source 1..110: mol_type = other DNA
ttaaaactggaagcttttacctccatatcaccatcttttggcacactgtctggcagctggtaggtgtccaggaaataaatgaatgatctatttctttggtcccacaaagg

SEQ ID NO: 21055 - DNA, 110 bp, synthetic construct
  source 1..110: mol_type = other DNA
gctggtaggtgtccaggaaataaatgaatgatctatttctttggtcccacaaaggaagcaatctagacaaccaggaatgaactcttagtggatatttggtcttgtatgtg

SEQ ID NO: 21056 - DNA, 110 bp, synthetic construct
  source 1..110: mol_type = other DNA
ggttagggcacatgtttcatcagcatgcctaacacacagtggaccatccacatattttcttgaatgaaggcagcctccttcttcaagagggtgaagacaaattctgcaga

SEQ ID NO: 21057 - DNA, 110 bp, synthetic construct
  source 1..110: mol_type = other DNA
atgtttaaaaaaattccattcgaagttcccagcacggctcagcagaaacaaatctgactaggcaggtttgatccccaacctcactcagtgggttaagggtctggcgttgc

SEQ ID NO: 21058 - DNA, 110 bp, synthetic construct; identical to SEQ ID NO: 21057
  source 1..110: mol_type = other DNA

SEQ ID NO: 21059 - DNA, 110 bp, synthetic construct
  source 1..110: mol_type = other DNA
ctcagggttgggtccttaaccctctaagccacagagggagctccaaatctcattttagaatatgtgtgcacttcacacttcagttttcaactttgtggtcttgtgtgaga

SEQ ID NO: 21060 - DNA, 110 bp, synthetic construct
  source 1..110: mol_type = other DNA
cttaagaagagtcctcggccctgctagccctcaactgactttgacagccaccaatctggcactagcttgatcagactgggcaaggagcagccctagggaaggggcctcag

SEQ ID NO: 21061 - DNA, 110 bp, synthetic construct
  source 1..110: mol_type = other DNA
acaggaggggaccacccgccccccaccgtgctgacagtctgaatcatgagctccatgcccatggtcatcgtgaaaaactgaattgagaagatgcttgggaggcgaataaa

SEQ ID NO: 21062 - DNA, 110 bp, synthetic construct
  source 1..110: mol_type = other DNA
tgcccatggtcatcgtgaaaaactgaattgagaagatgcttgggaggcgaataaaaatataaaccctcattttcttcatctatcctcaagtctcccttgagcttcagccc

SEQ ID NO: 21063 - DNA, 110 bp, synthetic construct
  source 1..110: mol_type = other DNA
ctgtctccgtcttggtctccacttctcctacatcctacctgacctctctggcctcttgcgggtcctcaggacatttgccccggctgcactggctctttcttttgctgaga

SEQ ID NO: 21064 - DNA, 110 bp, synthetic construct
  source 1..110: mol_type = other DNA
aaaaaaaaaaaagaaaattcctttgattttagcaatagctaataaaagcaagactccgtctcatcaaaactgagccaccaaattagagatagtcgtgattcacttctatt

SEQ ID NO: 21065 - DNA, 110 bp, synthetic construct
  source 1..110: mol_type = other DNA
atgtagggtgtcagcagttctaaataacacaagaaaaggatagcaggtcaatcgtctttcatgaaggccagtggaaagctacaagaattacaatagactaggtctcctaa

SEQ ID NO: 21066 - DNA, 110 bp, synthetic construct
  source 1..110: mol_type = other DNA
cttctccctgtacccacttctctggtctaagacctgcatcagcctgctcatcattttcaaggtgattctacccacaggggcagggtagaggcaggactccaagatgacct

SEQ ID NO: 21067 - DNA, 110 bp, synthetic construct
  source 1..110: mol_type = other DNA
cctgtctcatccccctgtctcaccacctgcttgttctctttgacccacctacataccccagacctgctccccactagaataggaaactaaggtcttgtctgcagctatat

SEQ ID NO: 21068 - DNA, 110 bp, synthetic construct
  source 1..110: mol_type = other DNA
ccccagacctgctccccactagaataggaaactaaggtcttgtctgcagctatatcaccagatcccagtatggtgcctggcccaggagaatgctcagtaacatttggtgg

SEQ ID NO: 21069 - DNA, 110 bp, synthetic construct
  source 1..110: mol_type = other DNA
tcctaccaccaccctccgcctctttgtccaagtcagtcatcccctgtctcgatcgactcccctggcgttctcaatgagctccctgcagccaccttgtccccttcagtctg

SEQ ID NO: 21070 - DNA, 110 bp, synthetic construct
  source 1..110: mol_type = other DNA
ggcacctccgtctcagagtcctgcactggccacaggtaccagctgagtctagcattcattgccagggcaatagaaaagggtaccagattctcacccaatttatcaatggt

SEQ ID NO: 21071 - DNA, 110 bp, synthetic construct
  source 1..110: mol_type = other DNA
aaaggagtaatgggatgagatacagaaaggttagggaaagctttgcagagccaagatgtgttgctgggtttagaagggacagaaatgttgaaaggcaaaaagaggatgta

SEQ ID NO: 21072 - DNA, 110 bp, synthetic construct
  source 1..110: mol_type = other DNA
tgtatgagggagttcaacattccagtgaattaacatggtgcaggtgtctattcaggtttcaaaattgttagcataaaaattcaaatgacgtttctaggttgaattggaat

SEQ ID NO: 21073 - DNA, 110 bp, synthetic construct
  source 1..110: mol_type = other DNA
aagtactacgtatagctacctaaataaaatgaattatcctggtatggaagcaagagaaaataacataaaagtgcaggtaatctgcatgagtgaacaaaagtgatgtacta

SEQ ID NO: 21074 - DNA, 110 bp, synthetic construct; identical to SEQ ID NO: 21073
  source 1..110: mol_type = other DNA

SEQ ID NO: 21075 - DNA, 110 bp, synthetic construct
  source 1..110: mol_type = other DNA
ttttgccatgacccccatccctgtggtgaagacctacgaattctgtatcctgtaaatcagtcctgtcagcaactgtcaacacgaagatctgaaggaactgcctttaaata

SEQ ID NO: 21076 - DNA, 110 bp, synthetic construct
  source 1..110: mol_type = other DNA
atcagtcctgtcagcaactgtcaacacgaagatctgaaggaactgcctttaaatatttatacagagcgtatgaggcaaatgatgtttttcttatgaaattggtttcttgt

SEQ ID NO: 21077 - DNA, 110 bp, synthetic construct
  source 1..110: mol_type = other DNA
ccattctcttgcggcacagtgggttgaggagtccagtgttgtcaatgcagcagctcaggttgctgccatggcatgagttcggtccctagcctaggaacttccacatgctg

SEQ ID NO: 21078 - DNA, 110 bp, synthetic construct
  source 1..110: mol_type = other DNA
caggttgctgccatggcatgagttcggtccctagcctaggaacttccacatgctgcaggtgcagccaaaaaataaatataagtgggtgtgaagaatttgcaagagaagaa

SEQ ID NO: 21079 - DNA, 110 bp, synthetic construct
  source 1..110: mol_type = other DNA
gcatacataatttataaattaaaagtacagacatattcaagtgtttgctcaagaattttttactaataggtagggttgtacaatcatagacagttagaggccataggaga

SEQ ID NO: 21080 - DNA, 110 bp, synthetic construct; identical to SEQ ID NO: 21079
  source 1..110: mol_type = other DNA

SEQ ID NO: 21081 - DNA, 110 bp, synthetic construct; identical to SEQ ID NO: 21079
  source 1..110: mol_type = other DNA

SEQ ID NO: 21082 - DNA, 110 bp, synthetic construct; identical to SEQ ID NO: 21079
  source 1..110: mol_type = other DNA

SEQ ID NO: 21083 - DNA, 110 bp, synthetic construct
  source 1..110: mol_type = other DNA
aattttgaccctcttagtgccatccttaagatgtcagggtcatcagcgaaaaattgggcaaagctaattgaaatatatgattaatttcatacttttccccacagggattc

SEQ ID NO: 21084 - DNA, 110 bp, synthetic construct
  source 1..110: mol_type = other DNA
ggggaagtaaggaacgaagccccatgtttcctgctctcagtgaggcaggcagtgatgatgatctctttcagtccgttaaaccaaaaccaaccaaaaaagcaaatcctttc

SEQ ID NO: 21085 - DNA, 110 bp, synthetic construct
  source 1..110: mol_type = other DNA
attcattctccctcaccccaccccagttagataattctgaaatcatccttcatataattgatgcgtaatttctaaagctaaaatttctttatggagtagaatttttcata

SEQ ID NO: 21086 - DNA, 110 bp, synthetic construct
  source 1..110: mol_type = other DNA
aagtaaatgtcagaaaggatttgaggtcccagttgtatatatcagactgagctatagaaggacagaaaatagtactggaaagataaaagctaacaaactggcctttgtga

SEQ ID NO: 21087 - DNA, 110 bp, synthetic construct
  source 1..110: mol_type = other DNA
gacaaacactggcttgccctgaatcataattcttatgaaagcttggccctccacaatcaggtctttcaactcagacacccaaaaataatcagaattctttatgagacact

SEQ ID NO: 21088 - DNA, 110 bp, synthetic construct
  source 1..110: mol_type = other DNA
tggggacgggggggggtgtccctctagccgtggattttgcatcctcagctcagcttcactccctattcctggttctctcctccacttctttgccaccttggtacgtcctc

SEQ ID NO: 21089 - DNA, 110 bp, synthetic construct
  source 1..110: mol_type = other DNA
tcactccctattcctggttctctcctccacttctttgccaccttggtacgtcctccctctcctaggtcttctacttttggcctatgcatgactccccagagcccctgctc

SEQ ID NO: 21090 - DNA, 110 bp, synthetic construct; identical to SEQ ID NO: 21088
  source 1..110: mol_type = other DNA

SEQ ID NO: 21091 - DNA, 110 bp, synthetic construct; identical to SEQ ID NO: 21089
  source 1..110: mol_type = other DNA

SEQ ID NO: 21092 - DNA, 110 bp, synthetic construct
  source 1..110: mol_type = other DNA
acaggctctcaatctcaatctgctccaagactggactcgtctcatcaccccccaaacttttttctcccccatttttcgccatcccgaagcatatggagtgccagggccag

SEQ ID NO: 21093 - DNA, 110 bp, synthetic construct
  source 1..110: mol_type = other DNA
ctcgtctcatcaccccccaaacttttttctcccccatttttcgccatcccgaagcatatggagtgccagggccagagatcagatctgagctgcagttttgacctacatcg

SEQ ID NO: 21094 - DNA, 110 bp, synthetic construct
  source 1..110: mol_type = other DNA
aataaactagtgatgggaaatgccttggcaatgaagaggtgttaaacggtgtggctggaagaagcagctggccccttcctgtcattccaggtttcgagtgtgagcaaact

SEQ ID NO: 21095 - DNA, 110 bp, synthetic construct
  source 1..110: mol_type = other DNA
tggaagaagcagctggccccttcctgtcattccaggtttcgagtgtgagcaaactgaaggacagtgactaagggaaggcaggattttgccgaggtgtgggtttggctcat

SEQ ID NO: 21096 - DNA, 110 bp, synthetic construct
  source 1..110: mol_type = other DNA
taacctaccataaagacatcacagtaagcacgacagctttagaagagcacaaatcaactatttacccactggagaaggtggcctacacagatagcaaagaggtccagtca

SEQ ID NO: 21097 - DNA, 110 bp, synthetic construct
  source 1..110: mol_type = other DNA
aaagtcccaggtggaaggagaaggctcacaaggtgatttccatctgctctgtgctctcacaggggtgctcagcaccccttgcaggtgcctcaaaaaaaaaatcctagcta

SEQ ID NO: 21098 - DNA, 110 bp, synthetic construct
  source 1..110: mol_type = other DNA
ggaccagcactgtttgagtctgagctgggggccatttcccattcatcaacaaccatgcataagattgtgtgtagtggggggcaagggcttggtaagagtgggtttctatt

SEQ ID NO: 21099 - DNA, 110 bp, synthetic construct
  source 1..110: mol_type = other DNA
ataaatgtagttttgtttagctgctgaagctggtggtgtttctagtagtaacgctggctatgggatgagcaggggcagtttgagagtgggggtggggagctagctgtttt

SEQ ID NO: 21100 - DNA, 110 bp, synthetic construct
  source 1..110: mol_type = other DNA
accattccttctcaaggtcagtatgaattctgtgctgactgactgagcttctaactcttctctcatttcaggagatggggttccccttggaaaatttgaccattgctagg

SEQ ID NO: 21101 - DNA, 110 bp, synthetic construct
  source 1..110: mol_type = other DNA
tcttctctcatttcaggagatggggttccccttggaaaatttgaccattgctaggggttcatctttggcttgagcttctgagagctcccaaagtccttgatgctctcaga

SEQ ID NO: 21102 - DNA, 110 bp, synthetic construct
  source 1..110: mol_type = other DNA
cacgtaacagtgtttaggcaatgagcaggcatccgggaagctaagccagacaactgccagaatcacacccagagctggtctggtgtgacccctatggacatacctgcttc

SEQ ID NO: 21103 - DNA, 110 bp, synthetic construct
  source 1..110: mol_type = other DNA
gccagaatcacacccagagctggtctggtgtgacccctatggacatacctgcttctcctagtcttcacctgccctgtagcctcagcaatgctggccatgctcacaggggc

SEQ ID NO: 21104 - DNA, 110 bp, synthetic construct
  source 1..110: mol_type = other DNA
gatcagctagaaatttaagggtaatactttgaaacttagagaggcatagaaggattaaatacattttcatcattggaagataggagaaccatccatgcacatcctggaaa

SEQ ID NO: 21105 - DNA, 110 bp, synthetic construct
  source 1..110: mol_type = other DNA
aatgatttaactcaacaaatattcatcgatgaccactacattttgggtcttgcactatatgctgttgaaaaagatacagtgtgattcctgcccttgggaagctcaaagtc

SEQ ID NO: 21106 - DNA, 110 bp, synthetic construct
  source 1..110: mol_type = other DNA
tatatgctgttgaaaaagatacagtgtgattcctgcccttgggaagctcaaagtctggtgaggcagacagatgcataaaccgtaaaccactcaataatatactgagactt

SEQ ID NO: 21107 - DNA, 110 bp, synthetic construct
  source 1..110: mol_type = other DNA
accctcttactgtggctacctggggctgcatcgggctgcgtgtgtcccatcattaccatcgcctgcatctccttaactacagctgagattaatgtcatcttggggagcag

SEQ ID NO: 21108 - DNA, 110 bp, synthetic construct
  source 1..110: mol_type = other DNA
tctcaacttctgcacagaaacagatctgagggaggtcccggtagcccgccctctgttggcacgtagtgggagctcaaacaccatgtgggcttgtggaagtattttccagg

SEQ ID NO: 21109 - DNA, 110 bp, synthetic construct
  source 1..110: mol_type = other DNA
ttggcacgtagtgggagctcaaacaccatgtgggcttgtggaagtattttccaggcacccctggttgagcaggtgctgcaaaggaggtttcctaacaggttaactgttag

SEQ ID NO: 21110 - DNA, 110 bp, synthetic construct
  source 1..110: mol_type = other DNA
ccttgctctttgctccatggaggccagggcccataccatctctaagcctcagtctcctctgtttgtgaggtatcattgaaagaacagaggctaaagtgccttgcaagacc

SEQ ID NO: 21111 - DNA, 110 bp, synthetic construct
  source 1..110: mol_type = other DNA
cagtgcattgcctttcccaggtggtggagccttttgtagctggaagagaagtgtggggggtcctgatccctctacacatctcacctgccccattccaagggagccccagc

SEQ ID NO: 21112 - DNA, 110 bp, synthetic construct
  source 1..110: mol_type = other DNA
gggggtcctgatccctctacacatctcacctgccccattccaagggagccccagcctggggacatgttccctagaaaccttcaagttccctaaggagatcactgacattg

SEQ ID NO: 21113 - DNA, 110 bp, synthetic construct
  source 1..110: mol_type = other DNA
gtgctgacagacaggcttcagctcacgtcctggcagctgggctgtgttctgagtggctcctgtactctagcagcctgctgtcctctaactagtccctctggctgtaattt

SEQ ID NO: 21114 - DNA, 110 bp, synthetic construct
  source 1..110: mol_type = other DNA
ggctctctttgagaaataaaaaaaaaagtagctctgtcaccaaataaccaccactgagttgccgcattttcagatgccttgtgtaacattcctacctaagactaaaggcc

SEQ ID NO: 21115 - DNA, 110 bp, synthetic construct
  source 1..110: mol_type = other DNA
ttcgaaaagggagctcccgtgagctcaaagcaaccggcagtcagtccagcaatgcccatgaatttattgggaactgcttcctggaggttggagtcgctgccatacagaga

SEQ ID NO: 21116 - DNA, 110 bp, synthetic construct
  source 1..110: mol_type = other DNA
cagctggcatgccagcagcccaggaggagcagcatctgcattagttcagctggagcctaagaggtcctcactgagcaggcaccagggcttctgcactaagctggaccatt

SEQ ID NO: 21117 - DNA, 110 bp, synthetic construct
  source 1..110: mol_type = other DNA
cctaagaggtcctcactgagcaggcaccagggcttctgcactaagctggaccattcctcagagagcatgtgccctggcgcctgcatcccccacctgaggctgggaggtcc

SEQ ID NO: 21118 - DNA, 110 bp, synthetic construct
  source 1..110: mol_type = other DNA
aatcaggccaaagcagtcattcattccgaagaccaccaccccatgacctgctctctttgccctattccttgtggatattttgtccctttaggctgtagctctaaagcagc

SEQ ID NO: 21119 - DNA, 110 bp, synthetic construct
  source 1..110: mol_type = other DNA
tttgccctattccttgtggatattttgtccctttaggctgtagctctaaagcagcagagatcctacggtgctcactattctcagtgcttaaaagacacttggcacaggag

SEQ ID NO: 21120 - DNA, 110 bp, synthetic construct
  source 1..110: mol_type = other DNA
tctgtttgggctgccataacaaaataccagactaggaagcttaagcaacagaaatttatttctcactgtttccagaggccagaaatctaaaattaaggtgctgggagatt

SEQ ID NO: 21121 - DNA, 110 bp, synthetic construct
  source 1..110: mol_type = other DNA
caggagatggcagagtgatagggagaggcttctctctaagtgaacataataaaaagtctactcaacttgaaattggaactcccacctggtcacttttggaccattgttgc

SEQ ID NO: 21122 - DNA, 110 bp, synthetic construct
  source 1..110: mol_type = other DNA
acctctgaagggcccccctggcttcaagatgctacgttagaacttgttctccatgctgggcagggggataggctcagcagctgctccatgttggaccagagattgtttct

SEQ ID NO: 21123 - DNA, 110 bp, synthetic construct
  source 1..110: mol_type = other DNA
ctgggcagggggataggctcagcagctgctccatgttggaccagagattgtttctaatgtcacagaaagaacggagaccaacagagccatatttaaggtgcaaaagcaaa

SEQ ID NO: 21124 - DNA, 110 bp, synthetic construct
  source 1..110: mol_type = other DNA
taactggaaaagggcacaaatatggagggtctagtgattgctgtgctttctctcctccctagtgcgttttccctcagagtccagcatcatggtcagctcacccctgctta

SEQ ID NO: 21125 - DNA, 110 bp, synthetic construct
  source 1..110: mol_type = other DNA
ctcagggactagggagggagacagccatgaccttagttgcaggaccacttcccccagtgccctgaaaagaggccagctgctcagagagcaggacccagcattggctgtgc

SEQ ID NO: 21126 - DNA, 110 bp, synthetic construct
  source 1..110: mol_type = other DNA
agtgccctgaaaagaggccagctgctcagagagcaggacccagcattggctgtgcacagacaggccaggaagtcagagagggaggccttccacaaaaccaatgagaatga

SEQ ID NO: 21127 - DNA, 110 bp, synthetic construct
  source 1..110: mol_type = other DNA
ccagaaaagaaaaagcagtaactccaaagtgaggaagaaaggattctgtggatacccagaatgtacatatgagctattctagtacagacattctatgctgtacataggtt

SEQ ID NO: 21128 - DNA, 110 bp, synthetic construct
  source 1..110: mol_type = other DNA
gaaaacagtgacaccaataaatacatctgagggttcttttaaaaataaactagagctgggagttccctgtggcacggtgagttaagaatctggcattgtcactgcagtgg

SEQ ID NO: 21129 - DNA, 110 bp, synthetic construct
  source 1..110: mol_type = other DNA
atcaggctaaaatatgaagacccactgaaggtctgtttaaaaaaggttagattcccaccatgggcagagaacatgatatccatcctctctaaagggtaaagtatttactc

SEQ ID NO: 21130 - DNA, 110 bp, synthetic construct
  source 1..110: mol_type = other DNA
aggaagaaaaaggacagtgacagggagacatggagacatgtcccaaacaccagagaagaaaaaaaagtcctcctgcaccaaaccccccccaaaaaagtgcagagaaatct

SEQ ID NO: 21131 - DNA, 110 bp, synthetic construct
  source 1..110: mol_type = other DNA
aagaaaaaaaagtcctcctgcaccaaaccccccccaaaaaagtgcagagaaatcttgaaagaagaggccttttgtgtttttctaaggcttctctcaatgctttgagaagt

SEQ ID NO: 21132 - DNA, 110 bp, synthetic construct
  source 1..110: mol_type = other DNA
ttcatttttttcctgaatataaacaagaattctgatgcgtgcacacacctttcactttttatttaacatgtacttacacggtacttatcattgccaaatactattctaag

SEQ ID NO: 21133 - DNA, 110 bp, synthetic construct
  source 1..110: mol_type = other DNA
tttttatttaacatgtacttacacggtacttatcattgccaaatactattctaagctcttaacaattacataatacacacacacacacacacacacacacacatgtataa

SEQ ID NO: 21134 - DNA, 110 bp, synthetic construct
  source 1..110: mol_type = other DNA
acccacacacaccatgcaacggattataacatcccttgagcattttgatctagccattcctgaagctaaatattcctggactctaagtgcttgagccagtaactcctcct

SEQ ID NO: 21135 - DNA, 110 bp, synthetic construct
  source 1..110: mol_type = other DNA
caggttgccaagtagggacacattttctagagccgtttctgtcttctagcacagacatcagggttatgttgcatacattatacttccttgtcttctctgaatatgtctac

SEQ ID NO: 21136 - DNA, 110 bp, synthetic construct
  source 1..110: mol_type = other DNA
cctgcagatccgctgttagtacccatgtgctcagaattgaaaagaaggaagagcgtgggaggatccacaggaagaatatttctttctcctcatatagtcttatacagctg

SEQ ID NO: 21137 - DNA, 110 bp, synthetic construct
  source 1..110: mol_type = other DNA
gcttcatgaggtgcttatataaatacacagcaagtgtttgtcttggtacatgggaactgctcaagtcccaatttaaaaaaatttaagagccagatataataggatcaaac

SEQ ID NO: 21138 - DNA, 110 bp, synthetic construct
  source 1..110: mol_type = other DNA
tctttcttcaatggtgtttgaaatttttgctatttggtaaaaacttcaaaaagcaggctctttaaaaatagaattggagtggcaaaaagagacaagttacttgacaataa

SEQ ID NO: 21139 - DNA, 110 bp, synthetic construct
  source 1..110: mol_type = other DNA
ttcttatctctgctgggttgtatggagatgaacttagatgagccagctgagtctttcttcatcctgaatatatcagacaaatactctagaatgagaaatagaagggaaac

SEQ ID NO: 21140 - DNA, 110 bp, synthetic construct
  source 1..110: mol_type = other DNA
tcttcatcctgaatatatcagacaaatactctagaatgagaaatagaagggaaactcttaggccattctttgtaccctaaatctgagaggataattggctaatggggaaa

SEQ ID NO: 21141 - DNA, 110 bp, synthetic construct
  source 1..110: mol_type = other DNA
cttaaaacgtttctctttctttatgtttgcattatcctattaataagctgggtttttaactttatgcatacccttccaaagcatgtccaaagcattgttttcttacttta

SEQ ID NO: 21142 - DNA, 110 bp, synthetic construct
  source 1..110: mol_type = other DNA
catcttaagccaggaaaacagccctcactgggaacctaatcagccagtattttatcttgtacctttcagcttccagttgtgagaaataaattccttttgtttaagcattc

SEQ ID NO: 21143 - DNA, 110 bp, synthetic construct
  source 1..110: mol_type = other DNA
tttttttttttttccctctctctctcttggccaccccttgacacatggagttcctatgccagggatcagatctgagccatgtttcaaccttaatcacagctgcggcagca

SEQ ID NO: 21144 - DNA, 110 bp, synthetic construct
  source 1..110: mol_type = other DNA
caaaaaatgcagtgggtgcaggaagtctttattaggaaaagctctcctccagcctggctaagggaggagacaggaagagtcttacagatcacgtagggtatggatagatc

SEQ ID NO: 21145 - DNA, 110 bp, synthetic construct
  source 1..110: mol_type = other DNA
aggtgaatgctactcagaagatagtgtattactttgagaagactagattcttaatttccaatgcaaatagctaaagcctgggtttgtaaaaatctagaaatgcttcagtc

SEQ ID NO: 21146 - DNA, 110 bp, synthetic construct
  source 1..110: mol_type = other DNA
tgttgcctgagtaaacccacagagcttgtcaaatattcttttctttaaaaaatctaagcgcctacttaaaacatagtaaattttttttaagtgagaccttagtcataatg

SEQ ID NO: 21147 - DNA, 110 bp, synthetic construct
  source 1..110: mol_type = other DNA
tgaagctgaacccttcatctgtgaagtatgtgttaactctagttaatgtgaacgttaaactgaattgcaggacacccagctagggtcacagaaaacttcttggtataggt

SEQ ID NO: 21148 - DNA, 110 bp, synthetic construct
  source 1..110: mol_type = other DNA
atccagttaaaggcacccactttttttttccattttgatcagggatattcagaattccattctaaaaccatctatcagctgaattacagtgacccactcagactttatta

SEQ ID NO: 21149 - DNA, 110 bp, synthetic construct
  source 1..110: mol_type = other DNA
aaatcagtataggtttatagagtgcagaagctgtacctagaacaggtgacatgcgtagggaaactgaatttaatgatatcaaatgaatagaaaagctttgcataaatata

SEQ ID NO: 21150 - DNA, 110 bp, synthetic construct
  source 1..110: mol_type = other DNA
atagataatataataagtgcacataggatagtaaattgagtgatgtttccaaaattagttatgccctttaagagctgtgaggaaagaaaaacattggcctcgatttttgt

SEQ ID NO: 21151 - DNA, 110 bp, synthetic construct
  source 1..110: mol_type = other DNA
tagttatgccctttaagagctgtgaggaaagaaaaacattggcctcgatttttgtgccattatttcagggaagatggaactctggagtataaaatatctttttcagagat

SEQ ID NO: 21152 - DNA, 110 bp, synthetic construct
  source 1..110: mol_type = other DNA
ggatatgtataaagaacttttcttgattgcttctgggaccttactgttcgacatgtgctcatagtaggtatatttgagctggatctcaatcctctgaaaagtaagatgtt

SEQ ID NO: 21153 - DNA, 110 bp, synthetic construct
  source 1..110: mol_type = other DNA
aaaatgtaagctgactcagatggaaataatgtctgagcgatgatagctgttaaagcagttagcctttattttttaatgaattgattaaaatcacatcacttgaggcagca

SEQ ID NO: 21154 - DNA, 110 bp, synthetic construct
  source 1..110: mol_type = other DNA
tggcagttagccagtgcagtctatgaagagggatatatggattctaattgggtgagacatgtcatacatatcaagcttccaaatgaatactctaaaaaatgtaatattac

SEQ ID NO: 21155 - DNA, 110 bp, synthetic construct
  source 1..110: mol_type = other DNA
ttttaaatagaattggaaatgaactcaggcacaaaagttagtatgtgccaccttccctctgattactactcaagtccatcaatggatgatagcattgaattgatacgtag

SEQ ID NO: 21156 - DNA, 110 bp, synthetic construct
  source 1..110: mol_type = other DNA
aaaaaagaaacaaaggaaccttagaagaaaaagtgctcaaagcaagaggccagtccagcttaaaacatttctgctgctatattccctggatatcctcagagaaagtatca

SEQ ID NO: 21157 - DNA, 110 bp, synthetic construct
  source 1..110: mol_type = other DNA
cagcttaaaacatttctgctgctatattccctggatatcctcagagaaagtatcaggaggaaaataacaccatagctatatgagaaccaggtcccttcaacataagcata

SEQ ID NO: 21158 - DNA, 110 bp, synthetic construct
  source 1..110: mol_type = other DNA
agttccctcaataaatgcatagatcttttttctcagaagagacatagatatcctctgttctggaatgtattgctgcaatttatcctcccccttacacacatgaacaaact

SEQ ID NO: 21159 - DNA, 110 bp, synthetic construct
  source 1..110: mol_type = other DNA
tgttctggaatgtattgctgcaatttatcctcccccttacacacatgaacaaactgatccaaggatggggacaagtcaagatatggagacacaattttttttgtgttcct

SEQ ID NO: 21160 - DNA, 110 bp, synthetic construct
  source 1..110: mol_type = other DNA
accccaaagtttagggtcataaatttataagtattttattatacccaaggattttgtggctcaggaatttagacaaagcacagagggaatatcctgtctttgttccagga

SEQ ID NO: 21161 - DNA, 110 bp, synthetic construct
  source 1..110: mol_type = other DNA
gtggctcaggaatttagacaaagcacagagggaatatcctgtctttgttccaggatgtctggagactaagctgaaaagattcaaccagcccagaacaagttgaccagctt

SEQ ID NO: 21162 - DNA, 110 bp, synthetic construct
  source 1..110: mol_type = other DNA
gttccttagaattacatgtgcagcttttctccataaggaaaatgctctggtactgccctagcaaactgtggccagtgtctttaatttaactgacttctaaatctgacaac

SEQ ID NO: 21163 - DNA, 110 bp, synthetic construct
  source 1..110: mol_type = other DNA
gatgtacaaaagtaatgagtaaaactaaactagtttagagtcagagtctctagtatcaagaagctcaccatttagtaaggcagatgccatgtccagacttagaatgaaat

SEQ ID NO: 21164 - DNA, 110 bp, synthetic construct
  source 1..110: mol_type = other DNA
ccttttttaaattgaaatatagttgacatacagtattatagtgcaccattgaatatgagagttaaggtgcatccatgcagctgtaacttgcagtgggcctttcatgtact

SEQ ID NO: 21165 - DNA, 110 bp, synthetic construct
  source 1..110: mol_type = other DNA
ctgttgcaaatggcaagatttcattgtttatgattaacattccattgtagttggaattccatcagttgacctttgaccaacacagctttgaattgcaagggtccagttat

SEQ ID NO: 21166 - DNA, 110 bp, synthetic construct
  source 1..110: mol_type = other DNA
acaggatattatatacaggctatgatggtggtaagaaaagtttacttgagaagcgttttattctagttttaaaggtatttttgaataatctgccctggttagagattaaa

SEQ ID NO: 21167 - DNA, 110 bp, synthetic construct
  source 1..110: mol_type = other DNA
ttgcatggttcacgtgttttgtcttattttttaaaaaaagtacaggaagaggcaatttctacacataaacagagagaaatcatatctgaacactatgaagaatcttcatg

SEQ ID NO: 21168 - DNA, 110 bp, synthetic construct
  source 1..110: mol_type = other DNA
catgaacatctgggctgccttctcagccggcttgcttgtaccctctgcatgcattacttctgatgagctgttcctggttggtcctttctgttcaatatgagaaaacttac

SEQ ID NO: 21169 - DNA, 110 bp, synthetic construct
  source 1..110: mol_type = other DNA
tctgaaagctttttgatacttcttacaaaaatgaattacccattgtagctagtggtaggtaattctcatgtaaactctaaattgttgttgcttggagagatgcaggtgtg

SEQ ID NO: 21170 - DNA, 110 bp, synthetic construct
  source 1..110: mol_type = other DNA
tgaagcacatgtatacacagtgtggctgcagagctgggctctgtgatccaagtaaagtatgaggttatggtatggcagcacaggtcctgaggtgatgcaacagcagcttc

SEQ ID NO: 21171 - DNA, 110 bp, synthetic construct
  source 1..110: mol_type = other DNA
aaggaaagccaatctattcactctgcagctttctccttaaagcttttgatgggctcgcttcattatattttaagagtcatcaaaattcaatccatcaaatatttgtctaa

SEQ ID NO: 21172 - DNA, 110 bp, synthetic construct
  source 1..110: mol_type = other DNA
aatatgcagattgttattcaatcacagattcatggttagccataagtctgaagcttcttctgaaaccctttcccattatagctcctttttctacagttatcttgcaaatt

SEQ ID NO: 21173 - DNA, 110 bp, synthetic construct
  source 1..110: mol_type = other DNA
cagattgtcttgaatttcattcctgtagggagatgaacttctttagcttctgtcagcctaactagattttctagattacattcgatagcattacctacattatgcattta

SEQ ID NO: 21174 - DNA, 110 bp, synthetic construct
  source 1..110: mol_type = other DNA
gcctaactagattttctagattacattcgatagcattacctacattatgcatttagcttggtagtatggagcactattgtatctctccttatgtccctagaagggataga

SEQ ID NO: 21175 - DNA, 110 bp, synthetic construct
  source 1..110: mol_type = other DNA
gggatcaaatccaagtacagctgtgaccaatgccatagctgtggcaatgtcagatctttaaactactgtgccatagtaggacctccaagttttgtttgggttggggggag

SEQ ID NO: 21176 - DNA, 110 bp, synthetic construct
  source 1..110: mol_type = other DNA
gtttcaccaaaagaaaaccaaatatttgaaaagctactgatggtaaaaaaagtgttggtaatttagctttacaaaaaaatcaatgtggttaatgctccactgcttgtgct

SEQ ID NO: 21177 - DNA, 110 bp, synthetic construct
  source 1..110: mol_type = other DNA
aagtttatttatgtaacaatccttatgagcactgtatgttactatatagtaatgtcataaatacaatgtgttaaaagtaaattctaggagttcccgtcatggcgcagtgg

SEQ ID NO: 21178 - DNA, 110 bp, synthetic construct; identical to SEQ ID NO: 21177
  source 1..110: mol_type = other DNA

SEQ ID NO: 21179 - DNA, 110 bp, synthetic construct; identical to SEQ ID NO: 21177
  source 1..110: mol_type = other DNA

SEQ ID NO: 21180 - DNA, 110 bp, synthetic construct; identical to SEQ ID NO: 21177
  source 1..110: mol_type = other DNA

SEQ ID NO: 21181 - DNA, 110 bp, synthetic construct
  source 1..110: mol_type = other DNA
ctttgaagccacacctgaagatccctctggaaggagcatgaagaaaaagcaatccttacacaacaccggctggccccctgcagattctgctctgaaagggccacatttac

SEQ ID NO: 21182 - DNA, 110 bp, synthetic construct
  source 1..110: mol_type = other DNA
aattggtgttttagagactctcataaagatcccacagctggagcaacatatgtgaatgggagagtagtagaaggaaggaatgggagaaagtatcatatggggatttatag

SEQ ID NO: 21183 - DNA, 110 bp, synthetic construct
  source 1..110: mol_type = other DNA
aagataatttcaaaccaaatgccattgcacattaaaaagctcatgatcaatgggatttatgtctggaatgtaaggatgggtaaacatacacaaatcaataaatgtgataa

SEQ ID NO: 21184 - DNA, 110 bp, synthetic construct
  source 1..110: mol_type = other DNA
gtacttcggaaggtttcttagactggtggaatgttccaaatctctgaatatgcgcttaactgtgattggtagaagaaaagatgacataagtgcttcagagagaagacaag

SEQ ID NO: 21185 - DNA, 110 bp, synthetic construct
  source 1..110: mol_type = other DNA
agttacatggtaaaaggagaggacacagggaatgtgaagagtgggggccatttgggggacttattttaaaatgcatagctctggttacctcaaatcctcctatttgaaaa

SEQ ID NO: 21186 - DNA, 110 bp, synthetic construct
  source 1..110: mol_type = other DNA
gtcccagttgcttagtgactattggccagaagcttccctcaccatcttgtcacgtgaatcttctccactcagaagctcacaacatggaaatcagcttccattccaagaaa

SEQ ID NO: 21187 - DNA, 110 bp, synthetic construct
  source 1..110: mol_type = other DNA
tagggagggaacagcccaggctaaataaggtgggggaaaggccaatgagacatggccagaggattttgggtttaaattactcgaaggggacttgaagcctaagacatagg

SEQ ID NO: 21188 - DNA, 110 bp, synthetic construct
  source 1..110: mol_type = other DNA
ccagaggattttgggtttaaattactcgaaggggacttgaagcctaagacatagggaccaacaatttctataaatgcttcacattttagggctctgcattattctctcaa

SEQ ID NO: 21189 - DNA, 110 bp, synthetic construct
  source 1..110: mol_type = other DNA
tctgatgtactaattattttagtcactgttcattcatttaattatttgtttacccaacacatttttaaaggtctctactctgtgccaggtactctgaaaaatttggggtc

SEQ ID NO: 21190 - DNA, 110 bp, synthetic construct
  source 1..110: mol_type = other DNA
cctttgtcttctgaggcccaaacaaaaatgagaaacatctgcttagcttcttttaaatagaaagttcagaaattactttttaataactctctttgtaagtagatagctaa

SEQ ID NO: 21191 - DNA, 110 bp, synthetic construct; identical to SEQ ID NO: 21190
  source 1..110: mol_type = other DNA

SEQ ID NO: 21192 - DNA, 110 bp, synthetic construct
  source 1..110: mol_type = other DNA
ctcttatttcactgaaagaagttttcttatttcagtgttgccagcatactggttgatcctagggagtagaaattattcaatcagagctactgcccaagtatttgtcttct

SEQ ID NO: 21193 - DNA, 110 bp, synthetic construct
  source 1..110: mol_type = other DNA
tacagaggaacatgctcttaagcttcaggctacaataagaacagcatgatcacagtttcagtacctttgaaaccagttattacacatcttactctttttaagttttaaat

SEQ ID NO: 21194 - DNA, 110 bp, synthetic construct
  source 1..110: mol_type = other DNA
caggctacaataagaacagcatgatcacagtttcagtacctttgaaaccagttattacacatcttactctttttaagttttaaatatgacttgttgcatgcaatttaaac

SEQ ID NO: 21195 - DNA, 110 bp, synthetic construct
  source 1..110: mol_type = other DNA
tgcccaccagtgaatcaacccctaaagcccccaagagttctgcaatcagctgcttcatgaccaggccctgaaaccagtagcttccacaaaagtcaagttctggcaaccaa

SEQ ID NO: 21196 - DNA, 110 bp, synthetic construct
  source 1..110: mol_type = other DNA
tcaatagtttagatccagggggatcttacctctgaagcaaagtcctggagctacaacccactgtgatggcagacagtgaaaagaacaaggcagcggtctttactgcatag

SEQ ID NO: 21197 - DNA, 110 bp, synthetic construct
  source 1..110: mol_type = other DNA
gagctactagagatagaatgcttcttagcagaagattctttttacaagtaatgaaagagagtttaaaaaaacaggaataagatacctatggccacatggagagtagatgt

SEQ ID NO: 21198 - DNA, 110 bp, synthetic construct
  source 1..110: mol_type = other DNA
agagagtttaaaaaaacaggaataagatacctatggccacatggagagtagatgtcacagttggatatttggcaatggtcttgtgatgctggtccctgtatatgttttct

SEQ ID NO: 21199 - DNA, 110 bp, synthetic construct; identical to SEQ ID NO: 21197
  source 1..110: mol_type = other DNA

SEQ ID NO: 21200 - DNA, 110 bp, synthetic construct; identical to SEQ ID NO: 21198
  source 1..110: mol_type = other DNA

SEQ ID NO: 21201 - DNA, 110 bp, synthetic construct
  source 1..110: mol_type = other DNA
atggtgttataagatgtcccttctttaagctcccaattttaacaaaaattagcatccatcaaatggatccatcgattagcatccatcaattagcatccatcaagttagta

SEQ ID NO: 21202 - DNA, 110 bp, synthetic construct
  source 1..110: mol_type = other DNA
gctactgggtaagaggtctgatagcaggttttctttcttacatggggatgagagtggtgcagtctcactgtaaggatgataaggagattgtgttgtaggcatctgtcaga

SEQ ID NO: 21203 - DNA, 110 bp, synthetic construct
  source 1..110: mol_type = other DNA
ggtgcagtctcactgtaaggatgataaggagattgtgttgtaggcatctgtcagagctaaggattttatttctattggcacgacccctaaaacaaatctatatgatatat

SEQ ID NO: 21204 - DNA, 110 bp, synthetic construct
  source 1..110: mol_type = other DNA
cctacttgttgctatgcttgttcattagttaactgaattcagttgaaaaataacgtatacattcagctatgtatctgtgactatcttaagtacttttccactagtttaaa

SEQ ID NO: 21205 - DNA, 110 bp, synthetic construct
  source 1..110: mol_type = other DNA
gaaatagaatatacacattatatcctcttaagcatgatggaatgtgtaaagtactttgtttacttgcattaggatagctaacgtgatcctttgaatgggtcattaattaa

SEQ ID NO: 21206 - DNA, 110 bp, synthetic construct
  source 1..110: mol_type = other DNA
tgcaaatattgtaaatacaaaacaaatgggatttgccagtggcttacattggggggtaagagtgatcatttatagtcaagctgaggcctgagctagtaagaggatgtagt

SEQ ID NO: 21207 - DNA, 110 bp, synthetic construct
  source 1..110: mol_type = other DNA
tggtggtccagtgggtagggcttggcattttcattgttgtgcctttgtttaatccctggtctggaactaagatcccacatcaagctgttgcatgtcatatcccaaaaaaa

SEQ ID NO: 21208 - DNA, 110 bp, synthetic construct
  source 1..110: mol_type = other DNA
tattttgattcatattttattcacaaatgtagctatgttgtaccccaaaaaatatgtgattgataattatggctcatattttgtcaggtgaccattgagaacaagttccc

SEQ ID NO: 21209 - DNA, 110 bp, synthetic construct
  source 1..110: mol_type = other DNA
tgatgagagactaagagtaggcctgctattcacctatgtggaatagatttcaaagtcttagtgtggacggcagaaatctcacttcaccttcgacacctgtgatcttggta

SEQ ID NO: 21210 - DNA, 110 bp, synthetic construct; identical to SEQ ID NO: 21209
  source 1..110: mol_type = other DNA

SEQ ID NO: 21211 - DNA, 110 bp, synthetic construct
  source 1..110: mol_type = other DNA
gtggtccttgccaatctccgagttccttcaaaaagtaagttgtatacttaaggattttgcaagaattttatggtgcttttacttactttctaatgaaatacatatgtcta

SEQ ID NO: 21212 - DNA, 110 bp, synthetic construct
  source 1..110: mol_type = other DNA
gtaaaagctatgtttattatttctattctacaaaggtgagttaaaagaggaatggtgaagcaggtggtctgactcctgaatctgagtataacaaatctgccagtagagaa

SEQ ID NO: 21213 - DNA, 110 bp, synthetic construct; identical to SEQ ID NO: 21212
  source 1..110: mol_type = other DNA

SEQ ID NO: 21214 - DNA, 110 bp, synthetic construct; identical to SEQ ID NO: 21212
  source 1..110: mol_type = other DNA

SEQ ID NO: 21215 - DNA, 110 bp, synthetic construct; identical to SEQ ID NO: 21212
  source 1..110: mol_type = other DNA

SEQ ID NO: 21216 - DNA, 110 bp, synthetic construct
  source 1..110: mol_type = other DNA
gctccaagaaacaaagagacattggtagtgcagcagtgagattttaggaagattaagctctgggaaacaggcccactgtagcatgtggtgctctgtagggcaatggcagc

SEQ ID NO: 21217 - DNA, 110 bp, synthetic construct
  source 1..110: mol_type = other DNA
aatttaactcagtagatcttgtttgggtctgaagtgtaaacgtcaggtttttactggagctaaagtcctctgaaggactggctgggctgcacatctatgatggctcaatc

SEQ ID NO: 21218 - DNA, 110 bp, synthetic construct
  source 1..110: mol_type = other DNA
atgctgtattactaaggaggagctattgtaaaatctgaagacaattcatctacgtaactaaaggtgagagttttaaaagaatttaaaaaatcagcctgtattgcatgtgt

SEQ ID NO: 21219 - DNA, 110 bp, synthetic construct
  source 1..110: mol_type = other DNA
cttgtgttgtggatctctagaaaaatatattaaatttgaacatggcctaaacatatctaaactcactgtagaggaaacaatttataagaatcagtgtcagggtaaggtct

SEQ ID NO: 21220 - DNA, 110 bp, synthetic construct
  source 1..110: mol_type = other DNA
caggaggagaaatccatagctggaacaaaacaaaactattatcatttgttttagctgaatgaaaggaaattccatttttatgtgtcatttaaatgggaactaacagaact

SEQ ID NO: 21221 - DNA, 110 bp, synthetic construct
  source 1..110: mol_type = other DNA
agcagttattatagataccagcagtgaccataacagtagcagtagaatatcagtgttattattcctaatcaatacacacatactgacaatgtcttctctttgcaaactta

SEQ ID NO: 21222 - DNA, 110 bp, synthetic construct
  source 1..110: mol_type = other DNA
ttattattcctaatcaatacacacatactgacaatgtcttctctttgcaaacttacagcttctcaaactggatcctatgcttgtttctgacataagaatcctaaattctg

SEQ ID NO: 21223 - DNA, 110 bp, synthetic construct; identical to SEQ ID NO: 21221
  source 1..110: mol_type = other DNA

SEQ ID NO: 21224 - DNA, 110 bp, synthetic construct; identical to SEQ ID NO: 21222
  source 1..110: mol_type = other DNA

SEQ ID NO: 21225 - DNA, 110 bp, synthetic construct
  source 1..110: mol_type = other DNA
aggaagctcagacaataacacttctcataaagggagtttctggctccaggtgggtatttaaacagctgtcaatctctaccactttaatagttcaaactgtacttcaagct

SEQ ID NO: 21226 - DNA, 110 bp, synthetic construct
  source 1..110: mol_type = other DNA
gtttgcagctacatgattgtggaacaccagctgcttgcttgatgtgatcaggtgatagaatacaatagcattgttatgtggcaaaactttagttctaggcctatcctgcc

SEQ ID NO: 21227 - DNA, 110 bp, synthetic construct
  source 1..110: mol_type = other DNA
ggggattgatgttacaaaaccgattttttttttttaagagtatgtgagaaaagcaaataggcaactagaatttttaccttgctattttgacagcatacctctctttaaac

SEQ ID NO: 21228 - DNA, 110 bp, synthetic construct; identical to SEQ ID NO: 21227
  source 1..110: mol_type = other DNA

SEQ ID NO: 21229 - DNA, 110 bp, synthetic construct
  source 1..110: mol_type = other DNA
gtcctgttgttttccttgattgaattatctagtcaataaaaggcattggaaaaggaacatgaaaaagaaaatatcttatttgagcttgctttgatatgcctaaaggtgaa

SEQ ID NO: 21230 - DNA, 110 bp, synthetic construct; identical to SEQ ID NO: 21229
  source 1..110: mol_type = other DNA

SEQ ID NO: 21231 - DNA, 110 bp, synthetic construct
  source 1..110: mol_type = other DNA
ttttgacaagacagaaaagaacagtacaaacaatgaatgttaatctctgatactgtagtattctagaatttcctcaaattgaaactagcatccagcttcagtatctgtaa

SEQ ID NO: 21232 - DNA, 110 bp, synthetic construct
  source 1..110: mol_type = other DNA
tagcttactttctacatgtaagtaacccgaatttcagaaaaattattcattcagtgtaacacacatatttgttgcagaatactaggaacagaatccaattctgtgacttg

SEQ ID NO: 21233 - DNA, 110 bp, synthetic construct; identical to SEQ ID NO: 21232
  source 1..110: mol_type = other DNA

SEQ ID NO: 21234 - DNA, 110 bp, synthetic construct
  source 1..110: mol_type = other DNA
cgtttccactgcgccacgaggggaaatccaggactggaatattttaaattgctcagagattaagaacttctaaaccagctttgctcatgttgtggatctatgtcctgaaa

SEQ ID NO: 21235 - DNA, 110 bp, synthetic construct; identical to SEQ ID NO: 21234
  source 1..110: mol_type = other DNA

SEQ ID NO: 21236 - DNA, 110 bp, synthetic construct
  source 1..110: mol_type = other DNA
tggatctgacaggaaaaagggtgaggtaccaaaattggaatgacggtgagcccaacaatgctgattctgcggaacactgtgtagaaatcctgaaggatggcaagtggaat

SEQ ID NO: 21237 - DNA, 110 bp, synthetic construct
  source 1..110: mol_type = other DNA
caatgctgattctgcggaacactgtgtagaaatcctgaaggatggcaagtggaatgacatcttctgttcctcccagcttttggctgtctgtgagttccctgcctgaggga

SEQ ID NO: 21238 - DNA, 110 bp, synthetic construct
  source 1..110: mol_type = other DNA
ctcctgaacttatttctattttcatttttcaagttaattataccaattaattactccctgcagaaaattagagctctccctagtttcctcctcttcttacctctgcatat

SEQ ID NO: 21239 - DNA, 110 bp, synthetic construct
  source 1..110: mol_type = other DNA
tgattttgtgagaaaagcattcttctagtaaaaactcagtggcagacatgagtataagcatgctatagagagacaaattgggcagagagtgaattcaatcttcctctacc

SEQ ID NO: 21240 - DNA, 110 bp, synthetic construct
  source 1..110: mol_type = other DNA
aatgtaagtcaatttaagtcatgaggaatcttcacaaagtaccatttagtccttactcactgctaccacgagaccccattaaacaacaaggcacttctcagtgggagacc

SEQ ID NO: 21241 - DNA, 110 bp, synthetic construct
  source 1..110: mol_type = other DNA
ctcactgctaccacgagaccccattaaacaacaaggcacttctcagtgggagaccaaagtccaggattgtaatccttcattagtaaacacagggaagactcagaatagta

SEQ ID NO: 21242 - DNA, 110 bp, synthetic construct
  source 1..110: mol_type = other DNA
acatcctgagagatctaacacaaaatgtttcttccacattctggtgattcatccgcaaagcttgatggtcattagaaaggactgaaagggaggcataaaacgtcttaggg

SEQ ID NO: 21243 - DNA, 110 bp, synthetic construct
  source 1..110: mol_type = other DNA
gtgacactcaggaacacttaaaacaaaaatcatgtataccagtcattttgagaagtacatttgactagataactcccaatttgaggggaataaatgaaagatgagaatat

SEQ ID NO: 21244 - DNA, 110 bp, synthetic construct; identical to SEQ ID NO: 21243
  source 1..110: mol_type = other DNA

SEQ ID NO: 21245 - DNA, 110 bp, synthetic construct
  source 1..110: mol_type = other DNA
gccccttgaatgggtatcctctgtcatatagcagcacacagagggttctactgaatctttcaaaggctgaagtggatgctgacatcttctgctattactcttccagggta

SEQ ID NO: 21246 - DNA, 110 bp, synthetic construct
  source 1..110: mol_type = other DNA
aaaatttcccaaatctttcaggatatagctgattatgtcctagacgatagctacgaggatttagccacagttcaaccacacaaaagtagccagattcagtgtgaaactgt

SEQ ID NO: 21247 - DNA, 110 bp, synthetic construct
  source 1..110: mol_type = other DNA
tctccacatcttcaccaacacttatctctgttttttatttttcctttaaataacatccattgtaacaggtatgaagtggtatctcatttttgggtgtgatttgcatttcc

SEQ ID NO: 21248 - DNA, 110 bp, synthetic construct
  source 1..110: mol_type = other DNA
attgtacaaatactttatggtaccccacagacctaaacacccatctgcacaagatgtgtggcacagtcagctaaccaacccgaagataatacttgtccctgtaaaatttc

SEQ ID NO: 21249 - DNA, 110 bp, synthetic construct
  source 1..110: mol_type = other DNA
gaaactttttagacaattgatcagtcactgtcctctggagtgtcttaaacccagcattttgtggttttaatgtagactttttaaatattacagaataagtgtaaattagg

SEQ ID NO: 21250 - DNA, 110 bp, synthetic construct
  source 1..110: mol_type = other DNA
attttgtggttttaatgtagactttttaaatattacagaataagtgtaaattaggacagttgctctcccctccgccagtatcagattgtcagtgtcaacgttggcatatc

SEQ ID NO: 21251 - DNA, 110 bp, synthetic construct
  source 1..110: mol_type = other DNA
taacacatatttagtggacacttgaacaacatggctttgaacttcccatgggtccacttatacacattttttcaactaaatacatcactgctacacggtccatagttggt

SEQ ID NO: 21252 - DNA, 110 bp, synthetic construct
  source 1..110: mol_type = other DNA
tttcaaaggtaagaaactatttaatagttcttaaaacctgtttgaatataaggtatatattttgtcctcaaaacctgtatgtatgtgtgtgtgtgtgtgtgtgtgtgtgt

SEQ ID NO: 21253 - DNA, 110 bp, synthetic construct; identical to SEQ ID NO: 21252
  source 1..110: mol_type = other DNA

SEQ ID NO: 21254 - DNA, 110 bp, synthetic construct
  source 1..110: mol_type = other DNA
tctgctgaaccaaatgggaactccctcttgatctctgttgtttttatacttcagatttttcacaaaatttggtacttcaaatatatttaagccagttcatgtatttactt

SEQ ID NO: 21255 - DNA, 110 bp, synthetic construct
  source 1..110: mol_type = other DNA
gggaactccctcttgatctctgttgtttttatacttcagatttttcacaaaatttggtacttcaaatatatttaagccagttcatgtatttacttttctttttgctcatg

SEQ ID NO: 21256 - DNA, 110 bp, synthetic construct
  source 1..110: mol_type = other DNA
aactaataagaacacaaggggatctataactaatactattagtagatattattcttttcactttttaaaaagtaccatatcacgacaggctctaggatgtccacataaca

SEQ ID NO: 21257 - DNA, 110 bp, synthetic construct
  source 1..110: mol_type = other DNA
tttcactttttaaaaagtaccatatcacgacaggctctaggatgtccacataacaaaaagatacagccactaggttgctctcttttctatggaaatttgaggccctggaa

SEQ ID NO: 21258 - DNA, 110 bp, synthetic construct
  source 1..110: mol_type = other DNA
tgctatacagactatcctctatccactatacagactatcctctactgcatttgcaaaaagctacagtttccttaaaatatgccggctattatctccctgtctgagcacat

SEQ ID NO: 21259 - DNA, 110 bp, synthetic construct
  source 1..110: mol_type = other DNA
aaaagctacagtttccttaaaatatgccggctattatctccctgtctgagcacatgcagatggctctcttcctgttcaaattttcatccatgcaaacttccatgatcttt

SEQ ID NO: 21260 - DNA, 110 bp, synthetic construct
  source 1..110: mol_type = other DNA
atatttcacacttctctttgagaatatgctatttagtttaaagggcatcttgagtcattgaagaccagaaagaagagaaagcaatgaggatttagattacatgaaggagg

SEQ ID NO: 21261 - DNA, 110 bp, synthetic construct
  source 1..110: mol_type = other DNA
tagaagaccacagatctgctgacactttcattttaactaagactcatttcagatttctgacttccagagctataagatggtacatttatgttgttttaagccactatgtt

SEQ ID NO: 21262 - DNA, 110 bp, synthetic construct
  source 1..110: mol_type = other DNA
tctgacttccagagctataagatggtacatttatgttgttttaagccactatgtttgggatgatttgttataacagcaaaaggaaactaatgcagcatctaataatactg

SEQ ID NO: 21263 - DNA, 110 bp, synthetic construct
  source 1..110: mol_type = other DNA
gtagtgtggcaaacaggacaggcggccttagcaaaagcttagttggatgtaggttaaggaactccatggtggaaaattcaatttaaggggagaagcacaaacagcacaat

SEQ ID NO: 21264 - DNA, 110 bp, synthetic construct
  source 1..110: mol_type = other DNA
tcaagtggagattagctatgggttgttccatccatctgaacaatgtaattcatttttagagactaattatgtatacataaaggaagaaggaaagtgttaggttgctgtac

SEQ ID NO: 21265 - DNA, 110 bp, synthetic construct
  source 1..110: mol_type = other DNA
acaagtgaagttctcccacctagtgagtggtggagtcaggatgggaactccggtagcctgtggtgagctatgtagtctccctgacaaaattagctgacagtttggcagtg

SEQ ID NO: 21266 - DNA, 110 bp, synthetic construct
  source 1..110: mol_type = other DNA
taagtgattctaagacatcatcacttttattcatcaccatttaaagtgacagctcttatgctattactgagcatttatttctgcgaacatattaagagggtgagagagat

SEQ ID NO: 21267 - DNA, 110 bp, synthetic construct
  source 1..110: mol_type = other DNA
ttatgctattactgagcatttatttctgcgaacatattaagagggtgagagagattactgaggttaggggaaagaaagggcattatcggagaaaagaaatacagtgaatg

SEQ ID NO: 21268 - DNA, 110 bp, synthetic construct
  source 1..110: mol_type = other DNA
tttaacaatgtattatctggccacaacagttcaacctgtatctgtatttttaaaatctcatgtactatttaaaatcttcctaggaattcagttcaatgagatcctcacag

SEQ ID NO: 21269 - DNA, 110 bp, synthetic construct
  source 1..110: mol_type = other DNA
tgcatggacctgtgcctggcccccagtgcctacattgaagccctaaccccctacgtgactgtacttggagatatggctcttaggaggtgattaagattaaatgaggtcat

SEQ ID NO: 21270 - DNA, 110 bp, synthetic construct
  source 1..110: mol_type = other DNA
ttttgtcaccatcttaacaataattgaggcccagataggtagagatactcttaaagcctgaactgtgctgagttggttattactcacttttcttttacaagtaataaagc

SEQ ID NO: 21271 - DNA, 110 bp, synthetic construct
  source 1..110: mol_type = other DNA
gggatccattatcagtaaaatttgggatccattgtcacttccttgatagacagtcaggatttgttgctatctgaaaattgtgagtagggtatttcttgaggaaagtgaag

SEQ ID NO: 21272 - DNA, 110 bp, synthetic construct
  source 1..110: mol_type = other DNA
aggatttgttgctatctgaaaattgtgagtagggtatttcttgaggaaagtgaagctaaaggtagagaattcctgcagttcctatcgtggtgcagtggaaacgaatctga

SEQ ID NO: 21273 - DNA, 110 bp, synthetic construct
  source 1..110: mol_type = other DNA
gcttgggaacttccacatgccaggggtgcaaccataaaaaggaaaaagtactatgtacaacattaacaatacagctaaggtaaaactttggcagatagtgccatcttata

SEQ ID NO: 21274 - DNA, 110 bp, synthetic construct
  source 1..110: mol_type = other DNA
aatgttcagaactgagcatgtgtgtaagaaagcagagcagtgtgatcttacctctcaaacattcaagaaagaaagaaggaagtacaaaatgttcaaagtggcctttctga

SEQ ID NO: 21275 - DNA, 110 bp, synthetic construct
  source 1..110: mol_type = other DNA
agcagtgtgatcttacctctcaaacattcaagaaagaaagaaggaagtacaaaatgttcaaagtggcctttctgagtagtggtgttctaaatgatttttttaaaaaaatc

SEQ ID NO: 21276 - DNA, 110 bp, synthetic construct
  source 1..110: mol_type = other DNA
actgtgccacaagagaactccctctttctattcattttcgcttttttaaaaaaaatgtgatactatattggtgtgtgtgtgtatatatatatatttactatgcactagct

SEQ ID NO: 21277 - DNA, 110 bp, synthetic construct; identical to SEQ ID NO: 21276
  source 1..110: mol_type = other DNA

SEQ ID NO: 21278 - DNA, 110 bp, synthetic construct
  source 1..110: mol_type = other DNA
gccacagcaataccagatctgagccccatttgcaacctacgcaacagctcaccacaatactggatctttaacccctgagcgaggtcagggatcaaaccagcatcctcatg

SEQ ID NO: 21279 - DNA, 110 bp, synthetic construct; identical to SEQ ID NO: 21278
  source 1..110: mol_type = other DNA

SEQ ID NO: 21280 - DNA, 110 bp, synthetic construct
  source 1..110: mol_type = other DNA
ttattaagaaatggatttttgaaggctttgactatcaactgaagagaaccgacattaatatgaagctgatatattttctgattaggaaaataccaatttaccactggaca

SEQ ID NO: 21281 - DNA, 110 bp, synthetic construct
  source 1..110: mol_type = other DNA
gtgacttaggtgcaagctgcaaatatccagtgcaggtgagcaattcctgacatgtgatataaggcgagagggagcagcagctctcacaggttactgggtacctcacccaa

SEQ ID NO: 21282 - DNA, 110 bp, synthetic construct
  source 1..110: mol_type = other DNA
gatataaggcgagagggagcagcagctctcacaggttactgggtacctcacccaaaccagtacgtggcaaacagcattacttcaaacagttttgcctccctttttttctc

SEQ ID NO: 21283 - DNA, 110 bp, synthetic construct
  source 1..110: mol_type = other DNA
gtgccacacgtgggtcctggctctgtcactttctagtttacatctcagtcccttagctaccacatatgtaaaataaataaccaccccatacgattactgccaaagtgaaa

SEQ ID NO: 21284 - DNA, 110 bp, synthetic construct
  source 1..110: mol_type = other DNA
ctgtcccaacctttcagccctttaagcagggagtttccttcaacttactacaagggccattctagcatttttcatccagactacattctctcccaatgttcatgatgata

SEQ ID NO: 21285 - DNA, 110 bp, synthetic construct
  source 1..110: mol_type = other DNA
ctcaccattagaaataagatggatacaagtaaggaataaaattcagtctaacttttggcctcgttatgttttgaatacctaccatggaccagacaccactctaccaagtc

SEQ ID NO: 21286 - DNA, 110 bp, synthetic construct
  source 1..110: mol_type = other DNA
tggcctcgttatgttttgaatacctaccatggaccagacaccactctaccaagtcacatcatttattcctcacaacaaacctatgaggtggtgctgtggtctggatgttt

SEQ ID NO: 21287 - DNA, 110 bp, synthetic construct
  source 1..110: mol_type = other DNA
tagcagctacacgctgacaatgcctaactcttatctcacacagacttctttctagagcgccagctgcaaggcttcttgcctcataagtacctcacactcactgtagctca

SEQ ID NO: 21288 - DNA, 110 bp, synthetic construct
  source 1..110: mol_type = other DNA
agcgccagctgcaaggcttcttgcctcataagtacctcacactcactgtagctcaacactaattgcatcttccttcccaaccaatctgcttctcctcttggattgtcaac

SEQ ID NO: 21289 - DNA, 110 bp, synthetic construct
  source 1..110: mol_type = other DNA
ctttccaccccttccaaactcgggttaatgattctttagggcaaaggccaaaacgcgattgggccctattaggctgatcagcttttcccactgtctctcccacttcagct

SEQ ID NO: 21290 - DNA, 110 bp, synthetic construct
  source 1..110: mol_type = other DNA
caataatctaaagaaattatggtgatacatgaaaatagttcagatattttcttaatagaggagaaccttagcaacccatttcaaagcggcccataaaaggagctggccac

SEQ ID NO: 21291 - DNA, 110 bp, synthetic construct
  source 1..110: mol_type = other DNA
tagaggagaaccttagcaacccatttcaaagcggcccataaaaggagctggccactcctgtttctccaactctgattttgaaaggcaatttgggcaggaaccataaaagt

SEQ ID NO: 21292 - DNA, 110 bp, synthetic construct
  source 1..110: mol_type = other DNA
ctctccttgacagatgttgatcctgagaacactccccagtaaagagctcacctgcaaatctgggacgacatccccttttcatggatgaggaaaccatgtttttgaaacat

SEQ ID NO: 21293 - DNA, 110 bp, synthetic construct
  source 1..110: mol_type = other DNA
tcgaactttccaaatacttcttagtccttccccatctttgctgtgaactgatagatgaccttgccctgagagaaataaaatcaggactaggattggtccaaatggaaaag

SEQ ID NO: 21294 - DNA, 110 bp, synthetic construct
  source 1..110: mol_type = other DNA
tgaccttgccctgagagaaataaaatcaggactaggattggtccaaatggaaaagctctaatatagtaaattcagcctgtaaattgcaaataggcactgaaaatacacac

SEQ ID NO: 21295 - DNA, 110 bp, synthetic construct
  source 1..110: mol_type = other DNA
tgtgactagctggttttaaccccaccatgactctataaggaagtattattattcactctcattttaaagatggagaaacttatacccagccaaattaatttgcccatggc

SEQ ID NO: 21296 - DNA, 110 bp, synthetic construct
  source 1..110: mol_type = other DNA
tcattcagacctaaacttcatgcagccaggctctttttgccagagaagctctttgagtctccagggtacatgtgtgtggggtatgtgtggcatatgtgtggtgtgtgtgt

SEQ ID NO: 21297 - DNA, 110 bp, synthetic construct
  source 1..110: mol_type = other DNA
agtctccagggtacatgtgtgtggggtatgtgtggcatatgtgtggtgtgtgtgtggtatgtatgcaatttatttggtgtgggatgaatgggggttggtatcaatttcag

SEQ ID NO: 21298 - DNA, 110 bp, synthetic construct
  source 1..110: mol_type = other DNA
tagtcagcagagaccttgggctgaaccaagaaatagtcaaagtttgttttctaggcaaaaatcagtagagagctctttctgtctcttctttctacatcttcttagtaact

SEQ ID NO: 21299 - DNA, 110 bp, synthetic construct
  source 1..110: mol_type = other DNA
atgatctcagaccatctgacaggaaacaccagttttcagagcagtacatttgagaccacatagagtcacagttttctctttgctgggataatagaagaagtacacaaact

SEQ ID NO: 21300 - DNA, 110 bp, synthetic construct
  source 1..110: mol_type = other DNA
ccacatagagtcacagttttctctttgctgggataatagaagaagtacacaaacttcaaggctccttttaaactaatataaaattaataggtaaatacttactaagaacc

SEQ ID NO: 21301 - DNA, 110 bp, synthetic construct
  source 1..110: mol_type = other DNA
attcacagtcatgaagacgttcacagttttgaaagggccagtgtcgtctaagaaaaggcagctggaatttactacccaggactttcaatgaaatagaaccaagatggtgt

SEQ ID NO: 21302 - DNA, 110 bp, synthetic construct
  source 1..110: mol_type = other DNA
ttcattatgaaagaaggggagaatgaatattgagagaaagctaatggaatctgccacaaatacctccatcacaggaaagatgtgagagttaaataagtaagggacttatt

SEQ ID NO: 21303 - DNA, 110 bp, synthetic construct
  source 1..110: mol_type = other DNA
taaaaattgctgggaaggaaataatacagactagagacaaaaggggagggagctactttagactgggtggtcaagaaaagtgcctctaagaaggggaaatttaggacttc

SEQ ID NO: 21304 - DNA, 110 bp, synthetic construct
  source 1..110: mol_type = other DNA
gacaaaaggggagggagctactttagactgggtggtcaagaaaagtgcctctaagaaggggaaatttaggacttcctgtcgtggcccagtggttaacgaatccgactaag

SEQ ID NO: 21305 - DNA, 110 bp, synthetic construct
  source 1..110: mol_type = other DNA
cttgtggcctctaaagaccctctctttcatctccacttaattatgtacacacacccatgagcaataaaaaacaaccatcagcctaaaatccataatctggggataagttt

SEQ ID NO: 21306 - DNA, 110 bp, synthetic construct
  source 1..110: mol_type = other DNA
ttacgtatcaagttactacctggtctttgcagtcatttgatcttgcaatctctggactaaaggttaaaaatcagtctgaccataaacacttcagaagtagggctgagctg

SEQ ID NO: 21307 - DNA, 110 bp, synthetic construct
  source 1..110: mol_type = other DNA
actaaaggttaaaaatcagtctgaccataaacacttcagaagtagggctgagctgggagtggacaacgagcatggaacatcttcccaaacttcctagttgtttgctagta

SEQ ID NO: 21308 - DNA, 110 bp, synthetic construct
  source 1..110: mol_type = other DNA
ggcgggagcccagacagtctgcattccagccctgggttagttctgcccgaggcgtgaatcaactgctgcgtggctgtggaacaatttaaatatataaatgacagcagtat

SEQ ID NO: 21309 - DNA, 110 bp, synthetic construct
  source 1..110: mol_type = other DNA
gaatcaactgctgcgtggctgtggaacaatttaaatatataaatgacagcagtattagcactaaaaacaggtgaaacacgaaattagaaagcttaagagaaagagatttg

SEQ ID NO: 21310 - DNA, 110 bp, synthetic construct
  source 1..110: mol_type = other DNA
ggtggtctgctcaaagaccatccagaatctgtttcccaaatgtgacttatatgtactccaatttatcagctccctaaactacctgtgctattatttcatagtcttcttca

SEQ ID NO: 21311 - DNA, 110 bp, synthetic construct
  source 1..110: mol_type = other DNA
ttggattcttggcctttttttctcccaaggagtaagttcatgaagaagggtttggactttttctatatgagagtgtctgagtcattaaaagcatgtactttgcagttccc

SEQ ID NO: 21312 - DNA, 110 bp, synthetic construct
  source 1..110: mol_type = other DNA
actttttctatatgagagtgtctgagtcattaaaagcatgtactttgcagttccctggtggctcatcgggttaaggctctggcattgttactgccatggcatagcttcta

SEQ ID NO: 21313 - DNA, 110 bp, synthetic construct
  source 1..110: mol_type = other DNA
acctcaacattttcttcctgcacttccccccgcatctcagtaaataataactctaagtttccagcagctcaggtcaaaatctcgggaggaaattggaatgtctctcttct

SEQ ID NO: 21314 - DNA, 110 bp, synthetic construct
  source 1..110: mol_type = other DNA
agtgtaaccttgcagtacacagccccatgttccataagctcggtccaaacatgccatgaaccccaaggatggtgactcaacacgaccatcccttttcatttgcctaaaac

SEQ ID NO: 21315 - DNA, 110 bp, synthetic construct
  source 1..110: mol_type = other DNA
tctggacagaggccgttggtcctctctgagatgtaataccccatggcccctgccggtagacagcttggatggtgatgttaacagtggacatttgttgaggtcctactacg

SEQ ID NO: 21316 - DNA, 110 bp, synthetic construct
  source 1..110: mol_type = other DNA
gagcttgatctccagttcccatgctgagctctgcctattttcccttatgcctacatctctagattattttgcccagattctccattttctgggctctcatggggaaaaga

SEQ ID NO: 21317 - DNA, 110 bp, synthetic construct
  source 1..110: mol_type = other DNA
actttcgtacttcttggtggcaggcatcttggccatcctgagcttctagaaggcagatggtttccttttgaggtgattgtatagcactaagagtgagagatccactggag

SEQ ID NO: 21318 - DNA, 110 bp, synthetic construct
  source 1..110: mol_type = other DNA
gtattttagtttctgctgccaaacacttttgtggggcaaaatagtcaagggacgtaccctctttgagataggcattaacttctttcccacttggctttatgaatggtttc

SEQ ID NO: 21319 - DNA, 110 bp, synthetic construct
  source 1..110: mol_type = other DNA
taaagctaaaatgtacctccataaaagtggctttattgctagaaaatgggacaccccaagtttaatgcagggaggagagagcagagttaaagatgtgttcagtgcctttt

SEQ ID NO: 21320 - DNA, 110 bp, synthetic construct; identical to SEQ ID NO: 21319
  source 1..110: mol_type = other DNA

SEQ ID NO: 21321 - DNA, 110 bp, synthetic construct
  source 1..110: mol_type = other DNA
cttatatagctagggagtcagctgtcaccttttgagtttggtgaagactcaaaggtaggcagggaagtggaaaagctttacagtgacaaaaggggaaggctttagtaagg

SEQ ID NO: 21322 - DNA, 110 bp, synthetic construct
  source 1..110: mol_type = other DNA
taggcagggaagtggaaaagctttacagtgacaaaaggggaaggctttagtaaggtatcctctgcctggaggctgtgccgagggaatctagaggaaggctacgataacca

SEQ ID NO: 21323 - DNA, 110 bp, synthetic construct
  source 1..110: mol_type = other DNA
cacacaaatacaggtgaatataaaatgtttttaaaattacatgccaagaggtggagaggccctgggccaccagcctgggtatctggtcaggtgggagacctatctgcccc

SEQ ID NO: 21324 - DNA, 110 bp, synthetic construct
  source 1..110: mol_type = other DNA
agagtggtggtgtgacaatatattcagtgaccaagattaggtcattagagaggcgagaaatgcgccatgggtaaccagggagagaaaaccactcaccctatataagctgc

SEQ ID NO: 21325 - DNA, 110 bp, synthetic construct
  source 1..110: mol_type = other DNA
ttatcatttcagaaaaaaataagatatattctctactgcatctgagcaggaggtcctagatttcttaaagctttgaccatgtgtccagtttacctgccaaaaagtaaagc

SEQ ID NO: 21326 - DNA, 110 bp, synthetic construct
  source 1..110: mol_type = other DNA
ctagatttcttaaagctttgaccatgtgtccagtttacctgccaaaaagtaaagcgcattttccagcttaagtcttgccagcttgcactctcccaatgtcatacaccagt

SEQ ID NO: 21327 - DNA, 110 bp, synthetic construct
  source 1..110: mol_type = other DNA
agaaatacaactccccctcccgccaaaaaatgaagctagagagaagccacccagttaaaatctcttatgtaacaaatcaaagcgtgctttcttccatcagcatggcttcc

SEQ ID NO: 21328 - DNA, 110 bp, synthetic construct
  source 1..110: mol_type = other DNA
tgggtagtttggaagaacaagaaattgggattgcttgacctagcttccagtagcaaacccaggccaagcaaaataccaagggaagtatactaccaaagtagcttactcct

SEQ ID NO: 21329 - DNA, 110 bp, synthetic construct
  source 1..110: mol_type = other DNA
cattctgatttcacttcttaggcctgcttatggtgagatgcagtcataagtaaatgaaaaatttagttcttatggcagttgggtttttcaggtaaattggtatattgcca

SEQ ID NO: 21330 - DNA, 110 bp, synthetic construct
  source 1..110: mol_type = other DNA
gcttatggtgagatgcagtcataagtaaatgaaaaatttagttcttatggcagttgggtttttcaggtaaattggtatattgccattatggtcattattatatttatacc

SEQ ID NO: 21331 - DNA, 110 bp, synthetic construct
  source 1..110: mol_type = other DNA
gaaatagcttgaatagctcgaattgaagcacagcagaaggaaatgagctggacatgaaatgtagagatggagaatagaataggaatggagtatgtggctactgttagagg

SEQ ID NO: 21332 - DNA, 110 bp, synthetic construct
  source 1..110: mol_type = other DNA
ggattcgctaaccactgagccacgaccggaactctgacatttttaatgaagatgactaccttttccaaaacaaaaatgtagtgataaaggtggctttttaaaaaacattc

SEQ ID NO: 21333 - DNA, 110 bp, synthetic construct
  source 1..110: mol_type = other DNA
cagatgtgactcccaccaaacccaggccaaatttgacatctgtttgtggtctctgatggtccagactcatgaggatgaaaattaaagggagaactttcatcactgcagtc

SEQ ID NO: 21334 - DNA, 110 bp, synthetic construct
  source 1..110: mol_type = other DNA
gattgaacccacatcctcatggacactagttgggttcagggctgttgagctattacggaaactccaaaatctgctttctttaatacagggatctgatccaaggctggaga

SEQ ID NO: 21335 - DNA, 110 bp, synthetic construct
  source 1..110: mol_type = other DNA
ctaattctgttcctttttaaagtggtgaaattattctctttcaagcagaccaacagcctagaagttgggggtgagagctggtttcccagacagagagaatctattctggt

SEQ ID NO: 21336 - DNA, 110 bp, synthetic construct
  source 1..110: mol_type = other DNA
aaggttaaggctattaagagctttgcattccttccatttctttcttacctccacgctgaccttaggggctaatgtttcagagagcagatctacaagataaaatagagatg

SEQ ID NO: 21337 - DNA, 110 bp, synthetic construct
  source 1..110: mol_type = other DNA
cttattctttcaggatctgaggactccactgttcatccaggactctctgaccttgtcatggagggcaagaggggcggggaacaaagggaaataagattgggctcacactc

SEQ ID NO: 21338 - DNA, 110 bp, synthetic construct
  source 1..110: mol_type = other DNA
tgagccagggtccttgaagagctaagttgtcttgggctctctgaagttcataatatgtacaagtcactctgtgttgcacggaaaggggctgggtggctaggaatgtctca

SEQ ID NO: 21339 - DNA, 110 bp, synthetic construct
  source 1..110: mol_type = other DNA
tgtaaactcatggttcatttgttcagagtgaaaagcagaatagtgagaagtagtgcagtggagtggttaaggcctggccccctggattcagcctgcctggagttctaatc

SEQ ID NO: 21340 - DNA, 110 bp, synthetic construct
  source 1..110: mol_type = other DNA
tgtgagagatattagagaccctagatgggggttggtaggggtagctgtggtggaggcaatgatataatgcttaggttttagatgtatttttttagatatactttgaaggg

SEQ ID NO: 21341 - DNA, 110 bp, synthetic construct
  source 1..110: mol_type = other DNA
agaattgagcatctgtggttttggttctatggggtggggtaagggtgagtagggtagtgctggaactaatttcatctggatactgagggactgtatacacagctgcctgt

SEQ ID NO: 21342 - DNA, 110 bp, synthetic construct
  source 1..110: mol_type = other DNA
cactgttctaggccctgaactttcaagagcgaacaaagtccttgccctctcaaggcttacatccatcctagtgatgctattacacattttctcttagcgagtcaatcagt

SEQ ID NO: 21343 - DNA, 110 bp, synthetic construct
  source 1..110: mol_type = other DNA
caagtacttttcacatcctgtgtacagctaagccaaataaacagtctgcaaactatctatatgcaaccacattgcttgtacttaaaaagtcttttctctctccacatgta

SEQ ID NO: 21344 - DNA, 110 bp, synthetic construct
  source 1..110: mol_type = other DNA
ctaattacaaaaacagaaaagaagacgttctagaaaacagctttcacacgtgagtgtcttctgtcaagatacaatgtttgagccagacatcacaggcttaaaatgaaagg

SEQ ID NO: 21345 - DNA, 110 bp, synthetic construct
  source 1..110: mol_type = other DNA
gtggtgggttatggataaaactccaagtggagttcctcatacgaggtgtaagtgggattttcatcaaaaccttatccttcctccaacgggtatgagggttcatggtcaaa

SEQ ID NO: 21346 - DNA, 110 bp, synthetic construct
  source 1..110: mol_type = other DNA
gattttcatcaaaaccttatccttcctccaacgggtatgagggttcatggtcaaatacagctgtgtcatggcacgtgtaccctgcagtcttaaaaggtacctactctggt

SEQ ID NO: 21347 - DNA, 110 bp, synthetic construct
  source 1..110: mol_type = other DNA
aaaggaactttaaggggatgaaagttaaagcttaaaagtggtcctaaaagagacgctgtgtcaggttggatattttcctcatctgttcttggccgacttgctgctggttg

SEQ ID NO: 21348 - DNA, 110 bp, synthetic construct
  source 1..110: mol_type = other DNA
cagcttttccaccatcatctttggttacttgtgtcttgatgtctaatacacatgccagctgtctttctttctcagctgatgatctgaaagactatactgaaaatcctact

SEQ ID NO: 21349 - DNA, 110 bp, synthetic construct
  source 1..110: mol_type = other DNA
tggaacagggtctccgggcagcggaagcgctcgttcccgatggtgatcacctgcccgtcaggcagctcgtagctcttctccagggaggaggaggacgcggcagtggccat

SEQ ID NO: 21350 - DNA, 110 bp, synthetic construct
  source 1..110: mol_type = other DNA
cgtcaggcagctcgtagctcttctccagggaggaggaggacgcggcagtggccatctcattttcaaagtccagggctacatagcacagcttctccttgatgtcccggaca

SEQ ID NO: 21351 - DNA, 110 bp, synthetic construct
  source 1..110: mol_type = other DNA
cctcactaacagtctgttgggagctgaggcagagataggcaaagcaacacctacaagacttggccatcctgcagggcaaaacacaaggtcagtgaaagtatttaggaaag

SEQ ID NO: 21352 - DNA, 110 bp, synthetic construct
  source 1..110: mol_type = other DNA
atcacctcttgcaaaacacccatactcatcaacattaacaatgaattttctcactttcagctctaggtaaccacttacctactttcttacttatatacttatatataatt

SEQ ID NO: 21353 - DNA, 110 bp, synthetic construct
  source 1..110: mol_type = other DNA
tctacacagagcaaaggggtctccactctgcctatgagtggagtgcaagctacctgctgatggcacaacgtgccttactgaagcagacactgccttccctataaaacaag

SEQ ID NO: 21354 - DNA, 110 bp, synthetic construct
  source 1..110: mol_type = other DNA
gaagcttctcagcagcctgagaaagtaggcaagaccagttattatggccccaacctccacccattttacagagagagaaaccaatgttcagagtgatgcagtgacttctc

SEQ ID NO: 21355 - DNA, 110 bp, synthetic construct
  source 1..110: mol_type = other DNA
ttctggaattggaaaacaaaggctgtctagtcaaccctcccaaacatctcccctagcacttgagcctagctagaatcctcgtaagtcaggctaatttcctggatgagttt

SEQ ID NO: 21356 - DNA, 110 bp, synthetic construct
  source 1..110: mol_type = other DNA
gtgggtacatgttctggcttttcaatcaaatactgtggttactgagctaccacggaccaggcactgtgctgggaagactggggaaatctgcagggctccatacactgcct

SEQ ID NO: 21357 - DNA, 110 bp, synthetic construct
  source 1..110: mol_type = other DNA
ggggagaagaggattttgctccttaggattaaaaaaaaaaaaaaaaaaaaaaagttggatttggcaacagctggagacaattgtgtttgccacaactgcagggtgctact

SEQ ID NO: 21358 - DNA, 110 bp, synthetic construct
  source 1..110: mol_type = other DNA
tggatttggcaacagctggagacaattgtgtttgccacaactgcagggtgctactgacatctagtggacagacccaaggttgctgcttcaacatcctaaaatgcactgga

SEQ ID NO: 21359 - DNA, 110 bp, synthetic construct
  source 1..110: mol_type = other DNA
tgttaagtaactgcacagtgagcaaaggtctgtcataagttagagtcaagctgtgtaaaaccacagaacaaggaaaatcctcacagagtcccagggtagggagaaaggac

SEQ ID NO: 21360 - DNA, 110 bp, synthetic construct
  source 1..110: mol_type = other DNA
gggagggattcagtgaggctttgaatgcaagctggctttcatttgttgggtcattgcaaagcctgtgtctgggataacggcagcagcaacacaccaacaacagtgatggt

SEQ ID NO: 21361 - DNA, 110 bp, synthetic construct
  source 1..110: mol_type = other DNA
gctttcaggtttcatttttatgtctacagaaggataggtatatatcccaagcagtagtggagaaaaacagtaaagctgagtcttaaaggaataatgaatttgcttccttg

SEQ ID NO: 21362 - DNA, 110 bp, synthetic construct
  source 1..110: mol_type = other DNA
agtggagaaaaacagtaaagctgagtcttaaaggaataatgaatttgcttccttgactaagacaggcttctataaaagcactttctgaaaagcaggtttctgaatggagc

SEQ ID NO: 21363 - DNA, 110 bp, synthetic construct
  source 1..110: mol_type = other DNA
atattttgaatttcctctaagaaagtgtttcttgcatttaacatggcatgtcacgttacgtgggtggtttcagttgaccctacgaagctagtgtggtttaagggggtttg

SEQ ID NO: 21364 - DNA, 110 bp, synthetic construct
  source 1..110: mol_type = other DNA
ttacgtgggtggtttcagttgaccctacgaagctagtgtggtttaagggggtttggagatttgtgtgtcatctgaattggtcttgttttctctctggatatttatatatt

SEQ ID NO: 21365 - DNA, 110 bp, synthetic construct
  source 1..110: mol_type = other DNA
ttgcttcccattccacagtaatgttctcaggctgagcaggtgggagggaaatacaatgacagacccttatggtcaccattcccatttctcaccaagaagctgcctgtcca

SEQ ID NO: 21366 - DNA, 110 bp, synthetic construct
  source 1..110: mol_type = other DNA
atgacagacccttatggtcaccattcccatttctcaccaagaagctgcctgtccatgagattttctggtggcttagtggctaaggacttggttgtcattgctgtggcaca

SEQ ID NO: 21367 - DNA, 110 bp, synthetic construct
  source 1..110: mol_type = other DNA
attcacattctatgttgatacaaccagaaaaccctacccatttatctttttatcctggtttttcaaattagctggatgcagaagtaggggacattctgagtgccaaagct

SEQ ID NO: 21368 - DNA, 110 bp, synthetic construct
  source 1..110: mol_type = other DNA
cctcatggatactagtcagggtcgtaacctgttgaaccacaatgggaactcccttcaatagcttttaattcagattgacttaattgtgaaactgccctatgataaaggat

SEQ ID NO: 21369 - DNA, 110 bp, synthetic construct
  source 1..110: mol_type = other DNA
caaagtgtcagaagaactggtttctagccacagctctgcatctgtcatctgccatttccttatcttatgaaatgagagggcttcagattcaatggtttttcagattttgc

SEQ ID NO: 21370 - DNA, 110 bp, synthetic construct
  source 1..110: mol_type = other DNA
aggacatgcccaaggacggggcttagttgaaaaagagcttagaggatactgattagagtttggtcaaggagaagtctttctcaccatacctctgtgagaggaaaacatgg

SEQ ID NO: 21371 - DNA, 110 bp, synthetic construct
  source 1..110: mol_type = other DNA
catcaagatgcctaatttcttgagagcagagctagaatggcccagatgaagtattctcatgtccttctcaaaactttcaaaattgtaggtatacaattttactttgtatg

SEQ ID NO: 21372 - DNA, 110 bp, synthetic construct
  source 1..110: mol_type = other DNA
ctcatgtccttctcaaaactttcaaaattgtaggtatacaattttactttgtatgtagtctgctggtaggaaagaagttaaagtttgctttaaaattcagaatcatgtgc

SEQ ID NO: 21373 - DNA, 110 bp, synthetic construct
  source 1..110: mol_type = other DNA
tgcacagcgccttgtggagaaatgccagctttggggatgaagggagggctcagagcccagggcaaatggaggccagagcccccacctcctcccctctgcagcccccaaag

SEQ ID NO: 21374 - DNA, 110 bp, synthetic construct
  source 1..110: mol_type = other DNA
aaacctgagtcctcatggatattaatctggttaaccactgagccatgacaggaactccggaggtagaaacttgctcatcaccacatggtggcagatggttgtgggacaga

SEQ ID NO: 21375 - DNA, 110 bp, synthetic construct; identical to SEQ ID NO: 21374
  source 1..110: mol_type = other DNA

SEQ ID NO: 21376 - DNA, 110 bp, synthetic construct
  source 1..110: mol_type = other DNA
tcactgatggcaagactgcccctttgagactggcaccagcagcttctaagcaaatgattttgtgtttgtatttttttagtggtcatgcttatttttctaaaaaagaaaaa

SEQ ID NO: 21377 - DNA, 110 bp, synthetic construct
  source 1..110: mol_type = other DNA
taccaactatagtcactatgttttccattagattcttagaccttaaccattttatagctgaaagtttgtacccttttaccaacatctctctctccctcacctctagatcc

SEQ ID NO: 21378 - DNA, 110 bp, synthetic construct; identical to SEQ ID NO: 21377
  source 1..110: mol_type = other DNA

SEQ ID NO: 21379 - DNA, 110 bp, synthetic construct
  source 1..110: mol_type = other DNA
ttaagaataaggtcttttggatcaatagatttagttcatgtcccagctctactaccaactaaccaggcatgttaagaacattatttgggagttcccattgtggctcagtg

SEQ ID NO: 21380 - DNA, 110 bp, synthetic construct
  source 1..110: mol_type = other DNA
caaggatgtgtctgagactaggtcttcgatggccacctgactccatttttgtacgcctgaattacttcattctgatttcaatttgttatcactagtgataacacccaaca

SEQ ID NO: 21381 - DNA, 110 bp, synthetic construct
  source 1..110: mol_type = other DNA
tcaaagtgcatctctccagaccctccccatactggctacatttttctctattcgttttgtttgaaagagctggaaaatgtccttattactgcccttattctatttcctcc

SEQ ID NO: 21382 - DNA, 110 bp, synthetic construct
  source 1..110: mol_type = other DNA
gacaagccaaaccattaagtcctgcagtctgacttgcattagctttatcacctcattaaattgtgaatgtgtctcatcttttgcctacacaggtctgtcgaaagagcaca

SEQ ID NO: 21383 - DNA, 110 bp, synthetic construct
  source 1..110: mol_type = other DNA
agccctttcagactggcttttattcacttagagatatggatttaaggtccatcaatgtctttttacaacgtgatagctcataaatttttattgctgagtaatattccact

SEQ ID NO: 21384 - DNA, 110 bp, synthetic construct
  source 1..110: mol_type = other DNA
gtttcatgagagcgtaggctcttgtacaggaggaaactggggtcctcagccagcatttcctggaaagaacttgtcctgcaagctcttaggagtccagagaagaagggcag

SEQ ID NO: 21385 - DNA, 110 bp, synthetic construct
  source 1..110: mol_type = other DNA
tttcctggaaagaacttgtcctgcaagctcttaggagtccagagaagaagggcagaactgacccaaatgaacattctggcaaaaattctggtcttcagggcccttcaaag

SEQ ID NO: 21386 - DNA, 110 bp, synthetic construct
  source 1..110: mol_type = other DNA
ataatgatttttgaggcaaaagccactattagcttaggaaaatgtggtgtgatccttagagaagctgccaaatcagaaatgtacaacaaagatcccacatatgcaagctt

SEQ ID NO: 21387 - DNA, 110 bp, synthetic construct
  source 1..110: mol_type = other DNA
agtctcctcctttgtaccttccatagcgttcttgatccacacagcctcactgaggtatttggttcttgcgtcagagtagggtacacagttctcagaaaagaggacctgga

SEQ ID NO: 21388 - DNA, 110 bp, synthetic construct
  source 1..110: mol_type = other DNA
tatttggttcttgcgtcagagtagggtacacagttctcagaaaagaggacctggacagatatccaactcagtggtgtctgccaccatgcctcacctgagttgcaggaaga

SEQ ID NO: 21389 - DNA, 110 bp, synthetic construct
  source 1..110: mol_type = other DNA
gtgagctgtcaatcagagacactaattaaacctggaactcctcctcccaccaaggatttccatccttgaaggagactcagactacaggaatgcctgactctcttggccat

SEQ ID NO: 21390 - DNA, 110 bp, synthetic construct
  source 1..110: mol_type = other DNA
atttccatccttgaaggagactcagactacaggaatgcctgactctcttggccatggaactggggaaaaggcccttagatttcctgattataagctcataatcgagcaac

SEQ ID NO: 21391 - DNA, 110 bp, synthetic construct
  source 1..110: mol_type = other DNA
attttattccgggtcacacagtcagccaaaggcactgccagcattcaacctgcgagccctctctgcctgtaatgccagtccccgctctcttcataccttgtagcttctca

SEQ ID NO: 21392 - DNA, 110 bp, synthetic construct
  source 1..110: mol_type = other DNA
gccctctctgcctgtaatgccagtccccgctctcttcataccttgtagcttctcacagtccaccgcagtcaaggagctgaagagttcgtatatacccatcccccactacc

SEQ ID NO: 21393 - DNA, 110 bp, synthetic construct
  source 1..110: mol_type = other DNA
aagcccagaagaaaggaccactggctcttcctggggacaccaaagaattcatacagctaacattccaactcaagcagaagtttcatcaataggggagtgcaatgccaaca

SEQ ID NO: 21394 - DNA, 110 bp, synthetic construct
  source 1..110: mol_type = other DNA
tagtgggttaagaatctgactgcagtggctcaagtcactgctctgcgtaggacgtagctgcagctcaaagttaatccctgacctgggaacttccaaatgctcaaagtaca

SEQ ID NO: 21395 - DNA, 110 bp, synthetic construct
  source 1..110: mol_type = other DNA
tttcccttacagcatatgaaacactagttaattagcacgggtagctgacattagggccgttaagaacctcccagaagacctaacccttgctggctccgtaatcacaagca

SEQ ID NO: 21396 - DNA, 110 bp, synthetic construct
  source 1..110: mol_type = other DNA
tgctctgaccctcgttatcctccacacagaacctccagttggtctctttgcctacaagttggtgtccctttttccttgggatactacgacacaatggcatttgcaagctg

SEQ ID NO: 21397 - DNA, 110 bp, synthetic construct
  source 1..110: mol_type = other DNA
aagttggtgtccctttttccttgggatactacgacacaatggcatttgcaagctggtcattggaggatcaggctcactgaagacttggctttgcaaggacagtgggtgat

SEQ ID NO: 21398 - DNA, 110 bp, synthetic construct
  source 1..110: mol_type = other DNA
gtcactagtttgctgtatctaaaagagaaataaagtctctcctagttttaagtacctaagctcattaaatagatgttcctgagaagggaagagagagtgaggaatgactt

SEQ ID NO: 21399 - DNA, 110 bp, synthetic construct
  source 1..110: mol_type = other DNA
gtttcaaaatacctgtgtctgagggtagaactctagccatttgaggtcatcatcatcatgactatggaaggcagctactgaatacccactagtcaccctcataaagaact

SEQ ID NO: 21400 - DNA, 110 bp, synthetic construct
  source 1..110: mol_type = other DNA
tcatgactatggaaggcagctactgaatacccactagtcaccctcataaagaactttaagctgaatgaaaccaggcttccagaagccttgaaactcagaaatagctggga

SEQ ID NO: 21401 - DNA, 110 bp, synthetic construct
  source 1..110: mol_type = other DNA
gtgaccttgggcaagaggacagaagctgccccgcctctgatgcagccaggaggacttccctgatggggcctctgggccgggccgcccagcttcgtctgcactcaggtagc

SEQ ID NO: 21402 - DNA, 110 bp, synthetic construct
  source 1..110: mol_type = other DNA
ttccctgatggggcctctgggccgggccgcccagcttcgtctgcactcaggtagccatggctccaagatgtggaaccatgtttgaggtgagacgtaacctccactgtcag

SEQ ID NO: 21403 - DNA, 110 bp, synthetic construct
  source 1..110: mol_type = other DNA
ttttcaacgtatgacccaaaagtttcccattatttcagttcccttgaattatacatttgatttgactgaactgaaaatgaaattgtaagtgcaaaggccattatatgtaa

SEQ ID NO: 21404 - DNA, 110 bp, synthetic construct
  source 1..110: mol_type = other DNA
cttcttttaaatacagggctaattatcatccactgttttcagctttggagaccttatctaaaagtccaaggccccaggaaaagtccctttcaatattcatcctagggagt

SEQ ID NO: 21405 - DNA, 110 bp, synthetic construct
  source 1..110: mol_type = other DNA
tcatccactgttttcagctttggagaccttatctaaaagtccaaggccccaggaaaagtccctttcaatattcatcctagggagttcccgttgtggcgcagtggttaacg

SEQ ID NO: 21406 - DNA, 110 bp, synthetic construct
  source 1..110: mol_type = other DNA
tttgaaccattttagtgattcttcctttttgccccaagttaacaactctgtctatgtagatggagtttatgactcttgtagtatagccctgcagtactagctttttccga

SEQ ID NO: 21407 - DNA, 110 bp, synthetic construct
  source 1..110: mol_type = other DNA
gtagatggagtttatgactcttgtagtatagccctgcagtactagctttttccgaagatcattgtatcacatttttatgagagtttggaaataatttaagagtaatggct

SEQ ID NO: 21408 - DNA, 110 bp, synthetic construct; identical to SEQ ID NO: 21406
  source 1..110: mol_type = other DNA

SEQ ID NO: 21409 - DNA, 110 bp, synthetic construct; identical to SEQ ID NO: 21407
  source 1..110: mol_type = other DNA

SEQ ID NO: 21410 - DNA, 110 bp, synthetic construct
  source 1..110: mol_type = other DNA
attatctttcccctagaacacacttctcagacatggttacctataaaaaaaatatctattccttcaattattagcctttatcctgccttagcatattaaaatgttggctg

SEQ ID NO: 21411 - DNA, 110 bp, synthetic construct; identical to SEQ ID NO: 21410
  source 1..110: mol_type = other DNA

SEQ ID NO: 21412 - DNA, 110 bp, synthetic construct
  source 1..110: mol_type = other DNA
ggaatgaagcctcatggaaacaagatcaacaaggaggtggataaagaaaaacagcaggagccccttgatccagctgaagccacttgcagctctggaccttccagttacat

SEQ ID NO: 21413 - DNA, 110 bp, synthetic construct
  source 1..110: mol_type = other DNA
gtgacccagattggccccttttgtggatgtgcagggggaggtgagctcttccaaacccctccgcctttagcccagggtctcccccatttcccacagtccatgaagcacgt

SEQ ID NO: 21414 - DNA, 110 bp, synthetic construct
  source 1..110: mol_type = other DNA
gaggttcccaggctaggggtagaatcggagctatgggaaaagaaaccaggaaaataattgccctagaaataactctgtcaatgggcatcttatgcccaaaccccacgaga

SEQ ID NO: 21415 - DNA, 110 bp, synthetic construct
  source 1..110: mol_type = other DNA
actggttttaacccatggactgcagtttgccaacccctgatcaaaatggagattatatggatattcactatatgattctttccatttttctatgtgttttaaagctttca

SEQ ID NO: 21416 - DNA, 110 bp, synthetic construct
  source 1..110: mol_type = other DNA
tggactgcagtttgccaacccctgatcaaaatggagattatatggatattcactatatgattctttccatttttctatgtgttttaaagctttcataataaaatattggg

SEQ ID NO: 21417 - DNA, 110 bp, synthetic construct
  source 1..110: mol_type = other DNA
tctagggctgccataacaaaatgctatagcctggatggcttaaaacaacagaaatgtattctgtcatagtagagactacaaatccaaaaatcaaggtgtcagaagggctg

SEQ ID NO: 21418 - DNA, 110 bp, synthetic construct
  source 1..110: mol_type = other DNA
tctttgtctttcatgttgtgtaatgcagtgttattgcctgacagatatttttccatttcagttttggttctgcttttgatgtaatactttaagatatttttctactcgca

SEQ ID NO: 21419 - DNA, 110 bp, synthetic construct; identical to SEQ ID NO: 21418
  source 1..110: mol_type = other DNA

SEQ ID NO: 21420 - DNA, 110 bp, synthetic construct
  source 1..110: mol_type = other DNA
ataaaattttgttgttcaaagatatagtcaatatatttattagctggtattacgattatttaatacttaggcatatgagaagcagacctccctccattggaactcttgcc

SEQ ID NO: 21421 - DNA, 110 bp, synthetic construct
  source 1..110: mol_type = other DNA
agtgaattgaagaggtttttttagtttctaggaatgataatttccagtaattatctcacttttataatggtttatttggtatgtagcagtttctgagcaaaccaggtttc

SEQ ID NO: 21422 - DNA, 110 bp, synthetic construct; identical to SEQ ID NO: 21421
  source 1..110: mol_type = other DNA

SEQ ID NO: 21423 - DNA, 110 bp, synthetic construct
  source 1..110: mol_type = other DNA
aaaggaaaagagagaaaagggtctcaggacaagaccagcactcctgggagggagctgtgaaagacggtaagaatcctcataccgggaggcccccgactggcctggtgggg

SEQ ID NO: 21424 - DNA, 110 bp, synthetic construct
  source 1..110: mol_type = other DNA
tgtgaaagacggtaagaatcctcataccgggaggcccccgactggcctggtggggagatgaggtgggagaaaagtgcagcagccagtctggggaggacaaagcagagagg

SEQ ID NO: 21425 - DNA, 110 bp, synthetic construct
  source 1..110: mol_type = other DNA
aatatatcctagtcagacttggctttaaactcagctggtatcagacagaagctaagagtatgggctgtgggatctgtttcttgacctactagttgtgatcgcaggtaaat

SEQ ID NO: 21426 - DNA, 110 bp, synthetic construct
  source 1..110: mol_type = other DNA
ttggattcagaaccaaacatatttctttgactatatttatcacacagagctcaggcacaaacattctggttctgcccccttttgcgtgttctattagactagtaactgtt

SEQ ID NO: 21427 - DNA, 110 bp, synthetic construct
  source 1..110: mol_type = other DNA
cacaaacattctggttctgcccccttttgcgtgttctattagactagtaactgtttcttggtgggcttgtgcttggcaggcagggtgggagaaggtgagaatggacaaga

SEQ ID NO: 21428 - DNA, 110 bp, synthetic construct
  source 1..110: mol_type = other DNA
aatctcacatttgtaagtgtagtggaaaaacgtatgcagaggaaattggacatgcaatgaaaaaggggccaccacaactggaatacggtactttcattaccccataggaa

SEQ ID NO: 21429 - DNA, 110 bp, synthetic construct
  source 1..110: mol_type = other DNA
ccttctctactgaaatcttgtcttttatttaaccaaaaaagaagcattttctgaaattttgtctttaggtcacgaagcttaatcatagtccctatttgaatagtcatgga

SEQ ID NO: 21430 - DNA, 110 bp, synthetic construct
  source 1..110: mol_type = other DNA
attttgtctttaggtcacgaagcttaatcatagtccctatttgaatagtcatggaaggctgcaaaaagagattgcaactgcaaagttaactcattgaggtattatatatg

SEQ ID NO: 21431 - DNA, 110 bp, synthetic construct
  source 1..110: mol_type = other DNA
ggcaactgtattttaggctttgcatgtggccatgttcctataaaactttaattacaaaaacattccacggaccatagttcctcaaacccaacattaataggtggaaacag

SEQ ID NO: 21432 - DNA, 110 bp, synthetic construct
  source 1..110: mol_type = other DNA
atttattcattcatctactgatagacatttgggcctttctcttttaaacctactccagtcatgctttcccccctacatcgcatacattaccaaaactgtactccaacaac

SEQ ID NO: 21433 - DNA, 110 bp, synthetic construct
  source 1..110: mol_type = other DNA
ttactatcagggagctgaacttctctataccgaaccagctgacttggaaggagcggtttcgtatgggcatgttcaataagggtgtcttcaaccatctgcataattcctaa

SEQ ID NO: 21434 - DNA, 110 bp, synthetic construct
  source 1..110: mol_type = other DNA
aaccagcccccttcctcaggttaactagaaaattcccaaagtcacctcattaaaataacaaaagacaaccttatagctctctccagttaggacatttcaaggcttttagg

SEQ ID NO: 21435 - DNA, 110 bp, synthetic construct
  source 1..110: mol_type = other DNA
taacaaaagacaaccttatagctctctccagttaggacatttcaaggcttttaggagctatgagatcagggacaaagaccaaatatatatttactaatataaatcacaat

SEQ ID NO: 21436 - DNA, 110 bp, synthetic construct
  source 1..110: mol_type = other DNA
ggaaaataatttctggtattcttaagaccttagtaatgaatgtctaaagttcttttttaatttttttttttttatgtttgctttttagggccacacccttggcacatgga

SEQ ID NO: 21437 - DNA, 110 bp, synthetic construct
  source 1..110: mol_type = other DNA
acaggaagggtttccatttctctaggatcagcttggatccattgggaaatgtgtgatcagtaagagcttgatcaactttgaagctgcttctaatttcagtttctttgatt

SEQ ID NO: 21438 - DNA, 110 bp, synthetic construct
  source 1..110: mol_type = other DNA
attccatgggtctcggcataactggttgctattatcatgcctggctttggggtcccttcagccccttggcttgactgtaaagaaatacatgctccctgtgtcatgtagtt

SEQ ID NO: 21439 - DNA, 110 bp, synthetic construct
  source 1..110: mol_type = other DNA
ttaaatttcctgtttctgatagcctaggatatagacgccaactggtcacttagttaggaagagacagaatatgtcagtgtagcttctcctaattccaggatccatacagg

SEQ ID NO: 21440 - DNA, 110 bp, synthetic construct
  source 1..110: mol_type = other DNA
gctctaaaaactatggaacaattagaaaatgtgtatttcccccgggtcagtcagtaccggttttgtcagttaatgatagaaaatcttcctaaactccgcgaagatattaa

SEQ ID NO: 21441 - DNA, 110 bp, synthetic construct
  source 1..110: mol_type = other DNA
aggtctgccacaattaaggtaactactagaagttgatgagtacctgcattaaaatggagtatgttaattagagtagtagtgagaattatcggtgttttgtcaaatcttgc

SEQ ID NO: 21442 - DNA, 110 bp, synthetic construct
  source 1..110: mol_type = other DNA
ctagaagttgatgagtacctgcattaaaatggagtatgttaattagagtagtagtgagaattatcggtgttttgtcaaatcttgctccatttgcatacttgaaataaata

SEQ ID NO: 21443 - DNA, 110 bp, synthetic construct
  source 1..110: mol_type = other DNA
gtagactctaaaaagctacataaatttgtggtactattataattttgacactaagctgtttggtttaatcccaagtggtgggactcattaaaccacaaatcttaaaacag

SEQ ID NO: 21444 - DNA, 110 bp, synthetic construct
  source 1..110: mol_type = other DNA
ctgtttggtttaatcccaagtggtgggactcattaaaccacaaatcttaaaacagaaactggaattcccgttgtggcgcagtggggagttcccgttgtggcgcagtggtt

SEQ ID NO: 21445 - DNA, 110 bp, synthetic construct; identical to SEQ ID NO: 21443
  source 1..110: mol_type = other DNA

SEQ ID NO: 21446 - DNA, 110 bp, synthetic construct; identical to SEQ ID NO: 21444
  source 1..110: mol_type = other DNA

SEQ ID NO: 21447 - DNA, 110 bp, synthetic construct
  source 1..110: mol_type = other DNA
ttgtatttaatctctcttttggccaagaaatagtatgcccctcttttatgctatgcagtaagttttgactctatttagtctagtatatgtctggaacagaattttttaaa

SEQ ID NO: 21448 - DNA, 110 bp, synthetic construct
  source 1..110: mol_type = other DNA
acttcctccttccacctcctcctgtgctcccatcacccggcccagagaacacacgtctgtcacttcaccttctcaacctctgctctgtgcatgtgaacatgaataattgg

SEQ ID NO: 21449 - DNA, 110 bp, synthetic construct
  source 1..110: mol_type = other DNA
taggacatcttccagagggtctctgagattgtcatgtcctgctcggatactccccatgacttaacagcttgtggcattgtggctgagcaccagactagctgatcataaca

SEQ ID NO: 21450 - DNA, 110 bp, synthetic construct
  source 1..110: mol_type = other DNA
atgacttaacagcttgtggcattgtggctgagcaccagactagctgatcataacagttaactgtgatacagagctcccacttatgatggtcatttgaggtggattatcct

SEQ ID NO: 21451 - DNA, 110 bp, synthetic construct
  source 1..110: mol_type = other DNA
aattacccacggcattggagatttaaataagtgaccctaaattttaattgattttactaatctcaagtacaatttgttagtgaaaagtatagccttacccaaatagtcat

SEQ ID NO: 21452 - DNA, 110 bp, synthetic construct
  source 1..110: mol_type = other DNA
tgtcctcactaaccttccttctttccatttcaaatcctattcccttctcctcatcagcaaccccagtccatccaaagcaagctgtcctgggtgaaaagcaatcatgtgca

SEQ ID NO: 21453 - DNA, 110 bp, synthetic construct
  source 1..110: mol_type = other DNA
acacttcgacaccagatacatggggaattttcccatatcgagggattctgcaataccagctgagtatcctacaatttaactcaattctgatactacccacctgtatatag

SEQ ID NO: 21454 - DNA, 110 bp, synthetic construct
  source 1..110: mol_type = other DNA
gtcttcctggatccgtagaggtaccaactcactgcatggctgtttcctacggacgtggccagagctgtgaaaaatgccatacctgtgcttctattcttggatgagctctt

SEQ ID NO: 21455 - DNA, 110 bp, synthetic construct
  source 1..110: mol_type = other DNA
aaagaaggtactcctttttttgcagtttttctttgcctgtcttcccacgtgaagtcttacaggaggggtttgtaagatttgtctccacttgacgacatggcttgtaatag

SEQ ID NO: 21456 - DNA, 110 bp, synthetic construct
  source 1..110: mol_type = other DNA
aaataatgttccaggaaattttaaaatgtgtattacaaaatcgtgggcataccctgaccctcagtttgtaaagtatctatatgcctacggacagcctcggacgtacagaa

SEQ ID NO: 21457 - DNA, 110 bp, synthetic construct
  source 1..110: mol_type = other DNA
gaccctcagtttgtaaagtatctatatgcctacggacagcctcggacgtacagaaaaaacactggaagtctatatagcaaagcttcatggggttatctctgcatggaaga

SEQ ID NO: 21458 - DNA, 110 bp, synthetic construct; identical to SEQ ID NO: 21456
  source 1..110: mol_type = other DNA

SEQ ID NO: 21459 - DNA, 110 bp, synthetic construct; identical to SEQ ID NO: 21457
  source 1..110: mol_type = other DNA

SEQ ID NO: 21460 - DNA, 110 bp, synthetic construct
  source 1..110: mol_type = other DNA
ctgcgcacacgtcccagttactgcaaaagccaggtggatcctgagccaggccaagcaaagggtgtcttccctccatcccacccgcggttctcctttccctccccagtcag

SEQ ID NO: 21461 - DNA, 110 bp, synthetic construct
  source 1..110: mol_type = other DNA
caaagggtgtcttccctccatcccacccgcggttctcctttccctccccagtcagagttgggcgctcagcccgggggaccctgcagcacaaagagcacagtccctctccc

SEQ ID NO: 21462 - DNA, 110 bp, synthetic construct
  source 1..110: mol_type = other DNA
ggattcaagtgtgttagcaaggaaaaagatatttccaggaaggaaaacttatcaatcagctattgtcatgtgatgctgcatagcaaccataaactcaccaaaaactctca

SEQ ID NO: 21463 - DNA, 110 bp, synthetic construct
  source 1..110: mol_type = other DNA
tcagctattgtcatgtgatgctgcatagcaaccataaactcaccaaaaactctcagtggtataggacaataagcatctgaattcatacctttgtccgttgaccaggattc

SEQ ID NO: 21464 - DNA, 110 bp, synthetic construct
  source 1..110: mol_type = other DNA
gggaggtacaaagtcaggcaagtattttcccttttctatcatgccctcaggcacggtccagggcccatgcgaaagtgaacatgaaggtatctggcaacctcaggacttta

SEQ ID NO: 21465 - DNA, 110 bp, synthetic construct
  source 1..110: mol_type = other DNA
cttcattgctttcaatgcttatttgtggacacaacccagcacaaactttagccagcttgtaaatcgtttagacatgtttttactaggccacactccacacttttcagagc

SEQ ID NO: 21466 - DNA, 110 bp, synthetic construct
  source 1..110: mol_type = other DNA
cttgtaaatcgtttagacatgtttttactaggccacactccacacttttcagagccagtgcaatacccagtgggaactaaaaggaatcaggcccactaaaaactgtgagt

SEQ ID NO: 21467 - DNA, 110 bp, synthetic construct
  source 1..110: mol_type = other DNA
attatataggctggatttgcctgcaatgctagcttaaaaattttattgttctacacataggtctccatcagaacctgctaaaaaatctttcttaaaaaaatctttcttta

SEQ ID NO: 21468 - DNA, 110 bp, synthetic construct
  source 1..110: mol_type = other DNA
cactagggcttatcactaaaggcagcatgcaaaaaaaattttaaaaaggcaaaagtaagctctataggagaagtgaaacatgacccatgttttcctatttttgcctgtag

SEQ ID NO: 21469 - DNA, 110 bp, synthetic construct
  source 1..110: mol_type = other DNA
cctcttcattatcacacattagtttcaaagtaggaagttgctaggtagggtgtaggttgcatacacaggaagactagtttctcatttaatcagggaagaacactgttata

SEQ ID NO: 21470 - DNA, 110 bp, synthetic construct
  source 1..110: mol_type = other DNA
ttgcataatatttcctctagtggtggaatataatttcctaaagctaacctttattgttagacatctgggctgtttccatttccaatttgcaggcatagcattttactttt

SEQ ID NO: 21471 - DNA, 110 bp, synthetic construct
  source 1..110: mol_type = other DNA
tatctaggtaggttccgtctaatcaagaggttcttataagagagaggccagaggagccgagtcccccgtaggaggtaggggtaatgtgaggaagggctgagaagccaagg

SEQ ID NO: 21472 - DNA, 110 bp, synthetic construct
  source 1..110: mol_type = other DNA
tctagaaggttggtgcagcaatagtttgagaatgaggctcgtggtcactgttcagaaaagttcctgaagagaatgtaactctgtggaaaggaagctacatagggagtctt

SEQ ID NO: 21473 - DNA, 110 bp, synthetic construct
  source 1..110: mol_type = other DNA
aatcctgacttcaccattttacagctgtgtgatctttggcaagtaacttagcttttctatgcttggtttttaatctgtcaaatgtgggtaatgatagaacttacctgtat

SEQ ID NO: 21474 - DNA, 110 bp, synthetic construct
  source 1..110: mol_type = other DNA
tctatgcttggtttttaatctgtcaaatgtgggtaatgatagaacttacctgtattagtcatctgttgctgtgcaacaaatgatttgcaaaacctagtgcctcaatatta

SEQ ID NO: 21475 - DNA, 110 bp, synthetic construct
  source 1..110: mol_type = other DNA
tttttttcccttttccccagatgtcctgcataatggaaattagcagctagagacgcctgctccatccctggaaatgggccatggttagaatgtgacctgaaaagaatcag

SEQ ID NO: 21476 - DNA, 110 bp, synthetic construct
  source 1..110: mol_type = other DNA
ttttagcctttatttccggaccagtgttttctctaaaatgtgcatctttcttcacatcactcactgccctcatctactggccttcatactggccctctccagggcatctc

SEQ ID NO: 21477 - DNA, 110 bp, synthetic construct
  source 1..110: mol_type = other DNA
ttccaagtgggagcataaggcttggcaaattggagttttagataattcagttgtttgcctagaaaggagaaaggtcagaggaaggagacctgtgaggaggtggctaccac

SEQ ID NO: 21478 - DNA, 110 bp, synthetic construct
  source 1..110: mol_type = other DNA
tgcctagaaaggagaaaggtcagaggaaggagacctgtgaggaggtggctaccacaatccagctgtgaggtgcagaggcattaagtgaggctggagcagtcggaatgaag

SEQ ID NO: 21479 - DNA, 110 bp, synthetic construct
  source 1..110: mol_type = other DNA
ctgagacctcataaatcagaatctacattattttattttaaaaagccctgtgttcaagtcctagctatgccactcactaatcgtgcaaacagtcttttttcccttgcctt

SEQ ID NO: 21480 - DNA, 110 bp, synthetic construct
  source 1..110: mol_type = other DNA
aagtcctagctatgccactcactaatcgtgcaaacagtcttttttcccttgcctttcttcttcaatctcttagtctcatttggtttcaaggtcaacttggaaaaaactaa

SEQ ID NO: 21481 - DNA, 110 bp, synthetic construct
  source 1..110: mol_type = other DNA
tggtcagagctttctgttcagctctgcagtttgagactagacattgagggatagttgggatagagggggaccatcgtggagaagggaaggaagacattccagataagaca

SEQ ID NO: 21482 - DNA, 110 bp, synthetic construct
  source 1..110: mol_type = other DNA
ctaacttttatcaagcgcctgccatgggccaagattcccatattatcctctcaataataatcagatgaggtagttattatccttaaccccattttgtagataaaccaagg

SEQ ID NO: 21483 - DNA, 110 bp, synthetic construct
  source 1..110: mol_type = other DNA
cataatttcagaaacagggaaagggggagttcccttgtggcacagcgggttaagtacctcatgttgtcactgaggcagctggggttgcttctgtggtgcaggtttgattc

SEQ ID NO: 21484 - DNA, 110 bp, synthetic construct
  source 1..110: mol_type = other DNA
acctcatgttgtcactgaggcagctggggttgcttctgtggtgcaggtttgattccctgggtacatccacatgctgtgggtgaggcaaaaaaaaaaaaaaaaaaaaaaaa

SEQ ID NO: 21485 - DNA, 110 bp, synthetic construct
  source 1..110: mol_type = other DNA
cagcattctgccaatagtcatctcattagcatacagaaagaaacttattgcatccacattagagatttcaaagagctgtctgccaggaagtgggtagagaccaaatatat

SEQ ID NO: 21486 - DNA, 110 bp, synthetic construct
  source 1..110: mol_type = other DNA
gactttctggttctccgttttggtcgtccagtgggacttagctcaactgtttctttctaaaacagaacaaattaaagaaataccatttatttttatgtaaaaaatgtttt

SEQ ID NO: 21487 - DNA, 110 bp, synthetic construct
  source 1..110: mol_type = other DNA
tgagtttactagttgtgtcatctgtgtccagggtgctgttaaaacccatctaacaagctcctaatttcagatattcattgttcagttctagaattcttatttctttttac

SEQ ID NO: 21488 - DNA, 110 bp, synthetic construct
  source 1..110: mol_type = other DNA
cctgattcagtctgtgaagattgtatgtttccagaaatggatccatttctttttaggtttaccatttggttggcattcattgcttgtagtattctctagaaaattagctg

SEQ ID NO: 21489 - DNA, 110 bp, synthetic construct
  source 1..110: mol_type = other DNA
ggtttaccatttggttggcattcattgcttgtagtattctctagaaaattagctggaaagtccccagatatttgagacaaaacaacacacttctaaatcaacctaggtca

SEQ ID NO: 21490 - DNA, 110 bp, synthetic construct
  source 1..110: mol_type = other DNA
agttacagccatgcacagcagtttaaaatacacattatcttatcttgtgttaggatcacactgaaataactgtagcctattatgaccagaatgagccctttgaagctgga

SEQ ID NO: 21491 - DNA, 110 bp, synthetic construct
  source 1..110: mol_type = other DNA
tcacactgaaataactgtagcctattatgaccagaatgagccctttgaagctggagaagaagaggtcaagaagcaggcaactaatattcaacaagattatgaaacagaga

SEQ ID NO: 21492 - DNA, 110 bp, synthetic construct
  source 1..110: mol_type = other DNA
ctcagctgagacctacacaacaactgcaacaatgccagatcctttcactccctgtgccaggccaggggttgaacctgcacctccatggtcacctgaattgctgcagttga

SEQ ID NO: 21493 - DNA, 110 bp, synthetic construct
  source 1..110: mol_type = other DNA
gccaggccaggggttgaacctgcacctccatggtcacctgaattgctgcagttgaattcttaacccaccgtgccctgatggaaactctctgtattatttgttttaaaata

SEQ ID NO: 21494 - DNA, 110 bp, synthetic construct
  source 1..110: mol_type = other DNA
gggtgtgcctgtgtgcatgttcagcactggaaatagggtagggggattgaaatatgggactttgaagtgtttccctctcccacgccccaacagagcttggtccacctgca

SEQ ID NO: 21495 - DNA, 110 bp, synthetic construct
  source 1..110: mol_type = other DNA
gggactttgaagtgtttccctctcccacgccccaacagagcttggtccacctgcaaggctgacaagtgtcagctagctcactttttccctaggacctccctcctagtctc

SEQ ID NO: 21496 - DNA, 110 bp, synthetic construct
  source 1..110: mol_type = other DNA
aatttctctttgggtcaggaattttatcttttatagaaaactgtattttggaagtttacctttaaatgatgcatagcacattagccacatacattatcttttccagtgtc

SEQ ID NO: 21497 - DNA, 110 bp, synthetic construct
  source 1..110: mol_type = other DNA
atttcacttcttcctttcctctcagctatcttaaggtaaaaatattaggttcctttgaattgtgcacaactaccaaaatttccaaagatctcttctttgcatttcggagt

SEQ ID NO: 21498 - DNA, 110 bp, synthetic construct
  source 1..110: mol_type = other DNA
aaacgggttggagaagtaggtttactagtagaatgtccctgcagctcctctagctctaggcctcaggatccaaacttctgtgcatccccagcatgattcattgacggctg

SEQ ID NO: 21499 - DNA, 110 bp, synthetic construct
  source 1..110: mol_type = other DNA
ctaggcctcaggatccaaacttctgtgcatccccagcatgattcattgacggctgccatccataacgagctgagtcagtgcctttctctggctgtgcggtcctgccaccc

SEQ ID NO: 21500 - DNA, 110 bp, synthetic construct
  source 1..110: mol_type = other DNA
acacattatccatataaggataagcatttacacaggggccaaattttccttggtgtgccttagtctttgcaccctcattctggggagtgccccatatccatacatatcct

SEQ ID NO: 21501 - DNA, 110 bp, synthetic construct
  source 1..110: mol_type = other DNA
caactgcttgtactaatcattgatttgatgttctattttcaaattgtttatgctttgtttccctactgcactgtggttttttcagtgttactagctgtattccttttatt

SEQ ID NO: 21502 - DNA, 110 bp, synthetic construct
  source 1..110: mol_type = other DNA
cagtttacgctgctgttgcaatatgggcaaaattccactttgtctgaccttagcagagtactagatggaggtctggtcagctttgccacgcatcaggtgacgatctgcct

SEQ ID NO: 21503 - DNA, 110 bp, synthetic construct
  source 1..110: mol_type = other DNA
gagtactagatggaggtctggtcagctttgccacgcatcaggtgacgatctgcctcgggagggccagatttagggaagagatgggtcagaaaaaccctaaagctgaaacg

SEQ ID NO: 21504 - DNA, 110 bp, synthetic construct
  source 1..110: mol_type = other DNA
aattccaacaactcaaattgaagctatttggaaaaatcctcccatcccctcagactcgaacctctgcagcacagagtgtagaggccacctcagctccactgcacactagc

SEQ ID NO: 21505 - DNA, 110 bp, synthetic construct
  source 1..110: mol_type = other DNA
caaacacggaaagcatcatcttttctgagaaagcctctcttctcagcagcatcggtttaagaaccaaggtagaacacatgtagccaggcccagaatcaatcatccctgaa

SEQ ID NO: 21506 - DNA, 110 bp, synthetic construct
  source 1..110: mol_type = other DNA
ttccaggcgccaggacagagctgctccttgtcttaatcctcccaaaataggatgggtgcctgagagggcaccggcccaacactgagttccagaaaagtgaaacgccccac

SEQ ID NO: 21507 - DNA, 110 bp, synthetic construct
  source 1..110: mol_type = other DNA
gtgcctgagagggcaccggcccaacactgagttccagaaaagtgaaacgccccactgcctgggtccccctgggttacagagtcctcagagtcactgccaacttcccaacc

SEQ ID NO: 21508 - DNA, 110 bp, synthetic construct
  source 1..110: mol_type = other DNA
gttttggctggtccatggagctagtaacaatacacggctcaattcaaacctatgactgagaattttggacagagtttaaagtcttattggcaagttcataaaaggcctaa

SEQ ID NO: 21509 - DNA, 110 bp, synthetic construct
  source 1..110: mol_type = other DNA
taggtccagaggttatgaagaaaataacaatcaagacccctcccctcaggaagcttccactttagtgaaggagacagagaaaaaaacaagcaaacaaatttttaaaagac

SEQ ID NO: 21510 - DNA, 110 bp, synthetic construct
  source 1..110: mol_type = other DNA
tccactttagtgaaggagacagagaaaaaaacaagcaaacaaatttttaaaagaccaggagttctcattatgactcaacaagttaagaacagggctagtatccatgaaga

SEQ ID NO: 21511 - DNA, 110 bp, synthetic construct
  source 1..110: mol_type = other DNA
caccaatatgtgtgcttcccgttcctttttttggccactgcattagtacattatagtgagttgcctgtcttgtttctgacattaatggaaacccttctaatattttgcca

SEQ ID NO: 21512 - DNA, 110 bp, synthetic construct
  source 1..110: mol_type = other DNA
tacatgatgaagcaggaaatctgggcaggctacggctgttttattgaacatgcggcacagtgtcaggaacagacacagaacttagggagtcttggggagacaataatcca

SEQ ID NO: 21513 - DNA, 110 bp, synthetic construct
  source 1..110: mol_type = other DNA
ccatcctcgccgcccgcccgtacctgcctcaccgcctccgcccggcgccgccgcccggcctacactccacgcctgccaactccggctccggctcactctcctttttcttg

SEQ ID NO: 21514 - DNA, 110 bp, synthetic construct
  source 1..110: mol_type = other DNA
ctcacaaggtcatcgtaaggactaaatgagagattcatgcggggttctcagaacagggcctgatgcatatagtatgtgctcaataaatgttagctgtcacgatcacccct

SEQ ID NO: 21515 - DNA, 110 bp, synthetic construct
  source 1..110: mol_type = other DNA
gggcctgatgcatatagtatgtgctcaataaatgttagctgtcacgatcaccccttcaagcctcatcttcgttgtcagtccccctttaagccttctccaaccctttgagc

SEQ ID NO: 21516 - DNA, 110 bp, synthetic construct
  source 1..110: mol_type = other DNA
aaaggagggtatttaatccatcattggaggaagggcaaaaggctttcagacctcctggaagtggtgacttgttaaactgataatcctcagcttcaatttcttcataaggt

SEQ ID NO: 21517 - DNA, 110 bp, synthetic construct
  source 1..110: mol_type = other DNA
tggaagtggtgacttgttaaactgataatcctcagcttcaatttcttcataaggtagaaaaagaaaaagaaaggaggaaagaagaatgattcatgtagaagaaagaaaga

SEQ ID NO: 21518 - DNA, 110 bp, synthetic construct
  source 1..110: mol_type = other DNA
ctgagtcctgttctcagaattgagccctcattgggatcccctctaacctgtttttttgccaccaaaagcttgtttctttgccctcctggatctttgtgctgatgagaatt

SEQ ID NO: 21519 - DNA, 110 bp, synthetic construct
  source 1..110: mol_type = other DNA
tgttcagtgaatgttcattgtaacgcagttctaacctgaacttgtggcatagaccagaaagacttcacagctaagttccagtacatttcatttatctgcatattaatcat

SEQ ID NO: 21520 - DNA, 110 bp, synthetic construct
  source 1..110: mol_type = other DNA
ttgctggtagtgctatcctgagccagttactcaacttgtctgagtttgattgaaatttgatgtgtgagctggagctgagaatgcatatgttacgctctgctttcagccac

SEQ ID NO: 21521 - DNA, 110 bp, synthetic construct
  source 1..110: mol_type = other DNA
tttgatgtgtgagctggagctgagaatgcatatgttacgctctgctttcagccacctctaaaaatgtatccaatcaaataagctatcagcagacagcttgcaaaattaaa

SEQ ID NO: 21522 - DNA, 110 bp, synthetic construct; identical to SEQ ID NO: 21520
  source 1..110: mol_type = other DNA

SEQ ID NO: 21523 - DNA, 110 bp, synthetic construct; identical to SEQ ID NO: 21521
  source 1..110: mol_type = other DNA

SEQ ID NO: 21524 - DNA, 110 bp, synthetic construct
  source 1..110: mol_type = other DNA
gaggatataagcagagtagcgagcgaagacctctctgtagagatcatgtttgcgctgagatttaaaagatgatttattaattagaatggcattcagttgcatgtaacaga

SEQ ID NO: 21525 - DNA, 110 bp, synthetic construct
  source 1..110: mol_type = other DNA
tggagccttcgtcccagttctcccaagacgctgcctatcccattgtgccacagtgggaatccgattttaggctttttatatcttgactttaaaaaaaattttatgatgat

SEQ ID NO: 21526 - DNA, 110 bp, synthetic construct
  source 1..110: mol_type = other DNA
tgccacagtgggaatccgattttaggctttttatatcttgactttaaaaaaaattttatgatgatatatcttggtgtagtcattttggtgggtgtttgatgaataatttc

SEQ ID NO: 21527 - DNA, 110 bp, synthetic construct
  source 1..110: mol_type = other DNA
aaggcagaagagctattgtatgttcagtagctggtgatcattggcacatcctgctctccctggttctgggctgtagaagaactgtactgggaggtggcagcagattctcc

SEQ ID NO: 21528 - DNA, 110 bp, synthetic construct
  source 1..110: mol_type = other DNA
ttagccaatggatggaaggaggcatccatgaggcacagagaatggatgagctacactggagagtcacagggaaatatgccaacaggtgaacaaagctagattcattgaca

SEQ ID NO: 21529 - DNA, 110 bp, synthetic construct
  source 1..110: mol_type = other DNA
ctggagagtcacagggaaatatgccaacaggtgaacaaagctagattcattgacagccaaggggatgctccagccccatggggcactacagactcagtgacaagctggag

SEQ ID NO: 21530 - DNA, 110 bp, synthetic construct
  source 1..110: mol_type = other DNA
tgttttacccaggtttgaccattttctttatttcttgtgggctgtccaaatcccgcttaccttcaaagcttcctcctcgaagcttgtcttttcttctggtccacctggta

SEQ ID NO: 21531 - DNA, 110 bp, synthetic construct
  source 1..110: mol_type = other DNA
ttagtttattctgtttactgatgcctactgtacaaggagctatgttaggtgctggggatgcagatgttaatatgacctccctgctccctgccccaataggtcttacagtc

SEQ ID NO: 21532 - DNA, 110 bp, synthetic construct
  source 1..110: mol_type = other DNA
gggtatccaaggaaagagggcagtgccctgtattgaaggataactagctgccctttgggctctatgaatctctcttgtaccttgtgcccctcccctcccgtgcttcaccc

SEQ ID NO: 21533 - DNA, 110 bp, synthetic construct
  source 1..110: mol_type = other DNA
ggcacgtctgcttaaaatctgcttgttaggtgacgggatctagtggacttagcacaaaactgaatgtcacaaggagctttgaagggagcgtgctggtacgtggcagtgag

SEQ ID NO: 21534 - DNA, 110 bp, synthetic construct
  source 1..110: mol_type = other DNA
cttctggctctccatgtgccattcccaatggtaggtgacctggctgagaccctgtggccatacagaagcttaatatctgccaggcccccttgggtccaagccagaccctc

SEQ ID NO: 21535 - DNA, 110 bp, synthetic construct
  source 1..110: mol_type = other DNA
tgtgtgtgtgcatttgtgtgtgtgtgtctaaaagaaacacagactttgagagctgaaaacaatctcattatccaacttcccttccaaaacaggacttcccttgaaaaatg

SEQ ID NO: 21536 - DNA, 110 bp, synthetic construct
  source 1..110: mol_type = other DNA
aaaacaatctcattatccaacttcccttccaaaacaggacttcccttgaaaaatggttcctgacctttttggtggtcatgggtccaccggaaaatctgaagaaagatagg

SEQ ID NO: 21537 - DNA, 110 bp, synthetic construct
  source 1..110: mol_type = other DNA
gatccaataccgatgacctgtggtccacatctacccctgctggaatccctgacccttccctccagggcagggctggagggggcgcagctcttacctgtgccatgtcccac

SEQ ID NO: 21538 - DNA, 110 bp, synthetic construct
  source 1..110: mol_type = other DNA
ttaaggatgtggctttgtccctgctgtgcctggggtttgatcccaggtgaagcagggtggcgaggcaagtctcagcttgatgttctctgtaccgagcctctttctgtctt

SEQ ID NO: 21539 - DNA, 110 bp, synthetic construct
  source 1..110: mol_type = other DNA
agttttattacaatgatcatgttctttactttatgcaatattatttgcactgggtacatatgcacaaatcttgaaaaacttacacaactggctaccagcaatggactcat

SEQ ID NO: 21540 - DNA, 110 bp, synthetic construct
  source 1..110: mol_type = other DNA
acatatgcacaaatcttgaaaaacttacacaactggctaccagcaatggactcattccagttaccaggaaaaaaactggcaaagagagaggctacctacattggatttct

SEQ ID NO: 21541 - DNA, 110 bp, synthetic construct; identical to SEQ ID NO: 21539
  source 1..110: mol_type = other DNA

SEQ ID NO: 21542 - DNA, 110 bp, synthetic construct; identical to SEQ ID NO: 21540
  source 1..110: mol_type = other DNA

SEQ ID NO: 21543 - DNA, 110 bp, synthetic construct
  source 1..110: mol_type = other DNA
tgcatcttaaatgaacatggtctgggtgtgttcactgctttaagcaatagagtttcatgcttccaacactgcacagtcttattcctggtagcttcctaattactcaagtc

SEQ ID NO: 21544 - DNA, 110 bp, synthetic construct
  source 1..110: mol_type = other DNA
catgcttccaacactgcacagtcttattcctggtagcttcctaattactcaagtcactcaagtactgataaaataacacgtgtgccaagcacagagcctagcatggaaca

SEQ ID NO: 21545 - DNA, 110 bp, synthetic construct
  source 1..110: mol_type = other DNA
acagaaggatgaaaattacattaaggcacagcacagttggacacggcagcccacaagctccttaccctcctcaggcttcggctgaaggctggtcgctgatagtcaaccca

SEQ ID NO: 21546 - DNA, 110 bp, synthetic construct
  source 1..110: mol_type = other DNA
attattaataatacggtattccattagcagttaggacaggagaacagcccccattgttgcaacagttagatttgagttgtatgaatctaccatagggacctggcataaag

SEQ ID NO: 21547 - DNA, 110 bp, synthetic construct
  source 1..110: mol_type = other DNA
ctattctgtttccactgctttgtgacagatgctcctggaccagtcatttggcatctttgaagctcagcttcctcatctgtataatgacacccacctctctgcattgttgt

SEQ ID NO: 21548 - DNA, 110 bp, synthetic construct
  source 1..110: mol_type = other DNA
caaggtctctcacccatgtcagttaagatatcttgattctttctttccacaaggtctctctcttccctagtaggatggcctagacctctttttttttttttttttttttc

SEQ ID NO: 21549 - DNA, 110 bp, synthetic construct
  source 1..110: mol_type = other DNA
gggatcaggcagaagttagctgagctggcctcaggttctcagaggagatgcgggagtcagtggctgccacagatggagatggtggtgtgaggggtctagtgagagaacca

SEQ ID NO: 21550 - DNA, 110 bp, synthetic construct
  source 1..110: mol_type = other DNA
tgctgtcagagcagcatatgtaaatcactacaggggtttagaaaaaggcaagattaccctcagcagctgactttgtaatactgttacctccagtgtgcaattggctcttc

SEQ ID NO: 21551 - DNA, 110 bp, synthetic construct
  source 1..110: mol_type = other DNA
accctcagcagctgactttgtaatactgttacctccagtgtgcaattggctcttcaagtgtttatagtgatcttgagtatctggagaaatccatagtcattactgagagc

SEQ ID NO: 21552 - DNA, 110 bp, synthetic construct
  source 1..110: mol_type = other DNA
acatccacagcatatcggacaccatctcttgaaacctaagctgctttagcctcacgtcctgttagaatcacccatcacagtggccaaaatgaggccatctttagcccctg

SEQ ID NO: 21553 - DNA, 110 bp, synthetic construct
  source 1..110: mol_type = other DNA
acactggcccaacaagtaggtgttttaagatgccccaaacttactcttggcactgccactgcatatgccctaagctatgcattcctagtgccctcaaatgacctgctggg

SEQ ID NO: 21554 - DNA, 110 bp, synthetic construct
  source 1..110: mol_type = other DNA
acagaggagcagtggaggccggaccagaagctggacttgcacacgctccatcctgcagggaggaggagctgcagggaggtcccgtagtggcacagtggaaaggaattcga

SEQ ID NO: 21555 - DNA, 110 bp, synthetic construct
  source 1..110: mol_type = other DNA
cttgcacacgctccatcctgcagggaggaggagctgcagggaggtcccgtagtggcacagtggaaaggaattcgactaggaaccaagaggatgtaggttcgatccctggc

SEQ ID NO: 21556 - DNA, 110 bp, synthetic construct
  source 1..110: mol_type = other DNA
tacttctctcgggcgcctcacaccctaaatgtaccatgcaagcccccaaagatcggattctcctgctttgcggccatgcaccagttcctgccctccgaggcatcaccctt

SEQ ID NO: 21557 - DNA, 110 bp, synthetic construct
  source 1..110: mol_type = other DNA
gattctcctgctttgcggccatgcaccagttcctgccctccgaggcatcacccttccccacccaaagaggcatatttaaagactgcaagacctactaaagaagaaaacaa

SEQ ID NO: 21558 - DNA, 110 bp, synthetic construct
  source 1..110: mol_type = other DNA
ccgcacctgaccccaaaaccctctctcacaacctcagagcactcagattcctgtaggaagaggaggcagaagcagagagcccgtgaccaactggaatcagcagggatgga

SEQ ID NO: 21559 - DNA, 110 bp, synthetic construct
  source 1..110: mol_type = other DNA
ggaagaggaggcagaagcagagagcccgtgaccaactggaatcagcagggatggaggtgaagcttaatacctcaggaactggagcaccgtgaggatgcccaggtggcagt

SEQ ID NO: 21560 - DNA, 110 bp, synthetic construct
  source 1..110: mol_type = other DNA
atggggaagtgcagagccaccaccctgaaaagccaccaggcctgttctctcagctcctacagccaggtctcaccttctcccctgcctccatctccctattctattatgga

SEQ ID NO: 21561 - DNA, 110 bp, synthetic construct
  source 1..110: mol_type = other DNA
tttaccaagtgccaggcaccttgctggctgtgaacagacatggtccttagccacgtggagcttacagtttggggaggtgggggcagacaggaaacatacaaagtatgtgt

SEQ ID NO: 21562 - DNA, 110 bp, synthetic construct
  source 1..110: mol_type = other DNA
tggcccccaggggggttagggggtccacccagcttctggagcaattctctcaagtgctccagaaaatctaagcgcagaaaaaaggccagaaggggcagtaagaggacttc

SEQ ID NO: 21563 - DNA, 110 bp, synthetic construct
  source 1..110: mol_type = other DNA
caggggtggcactttgggcctgacagtggacatctagtcaaggagaaggagggggctcttggcagtatcaggtcacagacttccaagggctttctttcctgcacattttc

SEQ ID NO: 21564 - DNA, 110 bp, synthetic construct
  source 1..110: mol_type = other DNA
ctcttggcagtatcaggtcacagacttccaagggctttctttcctgcacattttctcatttgagcctttaagacagccctataaagtagggttttcttgtcatcccatgg

SEQ ID NO: 21565 - DNA, 110 bp, synthetic construct
  source 1..110: mol_type = other DNA
gtataactaattcacccagggtctcccagctggtaagtgggaggcaagattccgacccaggcagactggctccagagttcatgcttctaaccactatgtcctgctgcctc

SEQ ID NO: 21566 - DNA, 110 bp, synthetic construct
  source 1..110: mol_type = other DNA
agttgttgggttcattaccactgagccatgaggggaactccagaaatcaggcactatcatccttatcccagttcacagaggcgccaagagaagctgagtacccatggtcc

SEQ ID NO: 21567 - DNA, 110 bp, synthetic construct
  source 1..110: mol_type = other DNA
atcatccttatcccagttcacagaggcgccaagagaagctgagtacccatggtccaggcaaggccagagcctggtctaagtggccacagcctaagattttaaaccacgca

SEQ ID NO: 21568 - DNA, 110 bp, synthetic construct
  source 1..110: mol_type = other DNA
cacaacccctctgtgaaagagaagatagctgctctccagaccagtgagagcctgggaactgtggatttgaacctttctttacattatctgggaaatgaagccaagttctc

SEQ ID NO: 21569 - DNA, 110 bp, synthetic construct
  source 1..110: mol_type = other DNA
agtgacttaatccctctgagcctcagccttgctttctataaaatagggatgatggtcagacagaccacgtcaaaggatgctgtgaggatgcaatgagttcacttacataa

SEQ ID NO: 21570 - DNA, 110 bp, synthetic construct
  source 1..110: mol_type = other DNA
tcagacagaccacgtcaaaggatgctgtgaggatgcaatgagttcacttacataacacactggggctcagcaggattaagtcatttgcccaaggtcacacagttggtaag

SEQ ID NO: 21571 - DNA, 110 bp, synthetic construct
  source 1..110: mol_type = other DNA
aggggaaatatcaagctgtaagtcctaaaggtggagggggaggtggctgcagccacgcacacgtcttacagaaagaagtttgctgctggtttcatgaagcttacgactgg

SEQ ID NO: 21572 - DNA, 110 bp, synthetic construct
  source 1..110: mol_type = other DNA
acaggaggaagatcattctgcaaagctgagatgtttccaaaaactaccggtggtgaagctcagagaatattcacagggaatccagccacacatcctttaaagcagtgtgt

SEQ ID NO: 21573 - DNA, 110 bp, synthetic construct
  source 1..110: mol_type = other DNA
agagttctctgtgctacacagcaggtctcccttggtctcttcctgcctcttcatgttggaattgccaggccgggctctgggctcccttctcgtctccccatcccctttca

SEQ ID NO: 21574 - DNA, 110 bp, synthetic construct
  source 1..110: mol_type = other DNA
ttggaattgccaggccgggctctgggctcccttctcgtctccccatcccctttcactaggggataatatccattctcatgactgacagctccgaaatttatacctccagc

SEQ ID NO: 21575 - DNA, 110 bp, synthetic construct
  source 1..110: mol_type = other DNA
cttggaatttctcaaccacatttaatcaatgctggtggccttaatactaggacggtcctagtttgtttaattttttcattatagctggtttacagtgttctgttgacttt

SEQ ID NO: 21576 - DNA, 110 bp, synthetic construct
  source 1..110: mol_type = other DNA
caaaatagcaacaacaacagccgcagcagtaatgacaacagcagctgagggcttacgttgcagcaggcgaggtaaggtacttatcagcatatttgctatgagcgaagtaa

SEQ ID NO: 21577 - DNA, 110 bp, synthetic construct
  source 1..110: mol_type = other DNA
ggctcctgggcttcggttagacagtcaccgatatgcaggcaggttcttggctgaggagctggaggtgctttgggattgtcgctaaaagtggcccctcacctgcctccccc

SEQ ID NO: 21578 - DNA, 110 bp, synthetic construct
  source 1..110: mol_type = other DNA
ctaactatgtgcaagttaacactggaatctgggagaagctagctttgaaatctcgtaccctgggatgactcagagctgtgattctcgaagtatggtccacatggatgttc

SEQ ID NO: 21579 - DNA, 110 bp, synthetic construct
  source 1..110: mol_type = other DNA
atttactttccttccaagccctggggcagaattccttggtcttaggctgatactgagaaaagcagggggtgggaaacattatataagcacttagtaagggcccgatttta

SEQ ID NO: 21580 - DNA, 110 bp, synthetic construct
  source 1..110: mol_type = other DNA
agaaaagcagggggtgggaaacattatataagcacttagtaagggcccgattttattgttagtatcatcttttggcccaatactagactcattcattccttcagcaaata

SEQ ID NO: 21581 - DNA, 110 bp, synthetic construct
  source 1..110: mol_type = other DNA
gataatctgttttacattctgcagagctaaactcaagtcttttttcaagaaggtgaaggtgatctaagaatctaactgctcttcaaacagcttttacccagtgctccttc

SEQ ID NO: 21582 - DNA, 110 bp, synthetic construct
  source 1..110: mol_type = other DNA
ttttttttcttgcagattgaagtggtgccatgcagcaagaaacagagagatgcagagttcgagccagaaggcctgacatggcgctttatgtacccaaagctcgaaggggc

SEQ ID NO: 21583 - DNA, 110 bp, synthetic construct
  source 1..110: mol_type = other DNA
agttcgagccagaaggcctgacatggcgctttatgtacccaaagctcgaaggggcatagtactactcaaatcaggtgatgagggcaaaagctgtggcccacctaactcca

SEQ ID NO: 21584 - DNA, 110 bp, synthetic construct
  source 1..110: mol_type = other DNA
ctcaaccagtttattttaacaatacatatgaatgtccatttacttgccagtctgtgatgtggtaccaaggcctttttttttttcaaagttactagtctgttgattgagtt

SEQ ID NO: 21585 - DNA, 110 bp, synthetic construct
  source 1..110: mol_type = other DNA
ttcctgtcggcctaggaaatgtggttggaagcttccatccctgctctgctgatccacttgtccatccatccatccagttctctggaggccagtgtttaccatgccgtttc

SEQ ID NO: 21586 - DNA, 110 bp, synthetic construct
  source 1..110: mol_type = other DNA
aggccaacccaggagtgagggtgggagatgccggggtgagaaaccagccccactagaaaggcagagctaatttaatgggcttgttcagacaacaccagacaggaccaggg

SEQ ID NO: 21587 - DNA, 110 bp, synthetic construct
  source 1..110: mol_type = other DNA
ctcgggaggtaaatactgggattcccattttaaagatgaggaaactgaggcttgaaaacatcagcttgtcccaaatcacacagctattctgtggctgagtggagaccctg

SEQ ID NO: 21588 - DNA, 110 bp, synthetic construct
  source 1..110: mol_type = other DNA
ccttttttaccccagactatgtgggacaaagctccccttacagatggaggaagggttgtggatcctgctccagttccgtcaccttcccccaggagaaacatcttcacccc

SEQ ID NO: 21589 - DNA, 110 bp, synthetic construct
  source 1..110: mol_type = other DNA
catctaagtggccttaagagtccttgaattcaagctggagctggcagggtggagagaggggttggggcacacagggtactgggttctaggaatttgggtgtctgtgcctg

SEQ ID NO: 21590 - DNA, 110 bp, synthetic construct
  source 1..110: mol_type = other DNA
gaattcaacttctgtacttctaagcctttagtaaactcatcccattgcctgaaattgccttccctccagcatttcctaggtgcatggctcatccttacagctcctgctca

SEQ ID NO: 21591 - DNA, 110 bp, synthetic construct
  source 1..110: mol_type = other DNA
tgccttccctccagcatttcctaggtgcatggctcatccttacagctcctgctcaatggcccccagccttgaggatttcccagattcatcgttcaaactccttatacttc

SEQ ID NO: 21592 - DNA, 110 bp, synthetic construct
  source 1..110: mol_type = other DNA
tggatttaattggtctagaatattgcctaggaattggaatttataaaagctcctaagtgatcctaaatgtgtagccaagactgagaacaactgaccttaatgaagatggc

SEQ ID NO: 21593 - DNA, 110 bp, synthetic construct
  source 1..110: mol_type = other DNA
tttgtttctgccttggccactagtgggtatgtttaacctgaatccttaacttgacaaagctgtggccgcaccaaccagaggcagggagatgagtagtaaatgaagaatca

SEQ ID NO: 21594 - DNA, 110 bp, synthetic construct
  source 1..110: mol_type = other DNA
aaagctgtggccgcaccaaccagaggcagggagatgagtagtaaatgaagaatcacagaactcagaaccattggctctgccttactgtgttcccttgaataaattggtgg

SEQ ID NO: 21595 - DNA, 110 bp, synthetic construct; identical to SEQ ID NO: 21593
  source 1..110: mol_type = other DNA

SEQ ID NO: 21596 - DNA, 110 bp, synthetic construct; identical to SEQ ID NO: 21594
  source 1..110: mol_type = other DNA

SEQ ID NO: 21597 - DNA, 110 bp, synthetic construct
  source 1..110: mol_type = other DNA
gctcagtgggttaagatgctgtgtggccctgagctgtggtttaggtcatagacatggcctaaaccacattgaatcccacgttgctgtggcacaggccaacagctgcagct

SEQ ID NO: 21598 - DNA, 110 bp, synthetic construct
  source 1..110: mol_type = other DNA
aatggctttagggacaaacatcatgacacattttctttttaaaaccatagattctgtcagagaacggtctttggccttggctctagagagcctggaaccaagtacttaag

SEQ ID NO: 21599 - DNA, 110 bp, synthetic construct
  source 1..110: mol_type = other DNA
tcagatgcagtgttgctgtggctgtggcacaggccccagcagcagctccagtttagctcctagcccaggaatgtctatgtgccacagtgcggctgttaaaaaaagaaaaa

SEQ ID NO: 21600 - DNA, 110 bp, synthetic construct
  source 1..110: mol_type = other DNA
gcacccatctcaagaccaaaactgccctccaatagaagactgtaaaataatgtcccaagcttgccatcaatatcaatctgaaaagccccttctcactgatataacaaagg

SEQ ID NO: 21601 - DNA, 110 bp, synthetic construct
  source 1..110: mol_type = other DNA
gacaacctgctctactaagagacagagctgggctttgaagccaggcctgtgaccttaaaatacatgctcttacccactttgtgacagtgttccaaagattacttccttaa

SEQ ID NO: 21602 - DNA, 110 bp, synthetic construct
  source 1..110: mol_type = other DNA
aagccagcagctgcagctctgattcaacccctagcttgtgagcttcaatatgctgtacatgtggccctaaagagcaaaataggagttcctgtcatggctcagtggttaac

SEQ ID NO: 21603 - DNA, 110 bp, synthetic construct; identical to SEQ ID NO: 21602
  source 1..110: mol_type = other DNA

SEQ ID NO: 21604 - DNA, 110 bp, synthetic construct
  source 1..110: mol_type = other DNA
cagccacctcacagggagacagggctttgagagcatttagtgagatgaggctgattcgctcactacctggaacatttctaagtcctttgtccaacccagcatccgccaca

SEQ ID NO: 21605 - DNA, 110 bp, synthetic construct
  source 1..110: mol_type = other DNA
tttagtgagatgaggctgattcgctcactacctggaacatttctaagtcctttgtccaacccagcatccgccacatttttttttttttctatttcttgggccgctcctgt

SEQ ID NO: 21606 - DNA, 110 bp, synthetic construct
  source 1..110: mol_type = other DNA
tgggtgcattcagaatggtgggtggggcatggaccagtggcagctggagctcagagactacacttgacatggcatcaccagtgccttgacttcagacctggtttggaggt

SEQ ID NO: 21607 - DNA, 110 bp, synthetic construct
  source 1..110: mol_type = other DNA
ggtctctatgccggtcttgaggttgaccaaaattccccacagaatcatccaaatccctgtggccagtccattgcccagtctctctagagtctttaggcccatgattcaga

SEQ ID NO: 21608 - DNA, 110 bp, synthetic construct
  source 1..110: mol_type = other DNA
ggcagttacagtgctgcagagcaatctgctgaaccatctcaatatttcgtgagatatatttaggtgagtttatacccagagcggagactgatcctcagggtaaggaaact

SEQ ID NO: 21609 - DNA, 110 bp, synthetic construct
  source 1..110: mol_type = other DNA
atatttaggtgagtttatacccagagcggagactgatcctcagggtaaggaaactataattttacatatcttatatttacaatcatgctgatgactatggttatgctgaa

SEQ ID NO: 21610 - DNA, 110 bp, synthetic construct
  source 1..110: mol_type = other DNA
agtcaggttcattaaccgctgagccacgacaggaactcccccattttcttgctagctgttggctggcaccactctcaactcctaggagctgcctctcttcataggcagtt

SEQ ID NO: 21611 - DNA, 110 bp, synthetic construct; identical to SEQ ID NO: 21610
  source 1..110: mol_type = other DNA

SEQ ID NO: 21612 - DNA, 110 bp, synthetic construct
  source 1..110: mol_type = other DNA
atggcaaaatatttttctgtccccaggaaaggcacagaggggagggagactgtggagtggggaacattagagaagggttttatgagaaggtagcttaggaatccactggt

SEQ ID NO: 21613 - DNA, 110 bp, synthetic construct
  source 1..110: mol_type = other DNA
agtggggaacattagagaagggttttatgagaaggtagcttaggaatccactggtagcttaggaatccacttaggaatctttgtaagattttcacaagtgttggcggagc

SEQ ID NO: 21614 - DNA, 110 bp, synthetic construct; identical to SEQ ID NO: 21612
  source 1..110: mol_type = other DNA

SEQ ID NO: 21615 - DNA, 110 bp, synthetic construct; identical to SEQ ID NO: 21613
  source 1..110: mol_type = other DNA

SEQ ID NO: 21616 - DNA, 110 bp, synthetic construct
  source 1..110: mol_type = other DNA
cacagcctcacagacactgtgtcaccttcttaacctgttgaatcacaatgggaactcctttgctcaatatcttatatagcactgatctaagctgacttaaagctcaacta

SEQ ID NO: 21617 - DNA, 110 bp, synthetic construct
  source 1..110: mol_type = other DNA
tcctttgctcaatatcttatatagcactgatctaagctgacttaaagctcaactatagggaagaggtctaagatggtggagtagcaggatgtaaggctcacctactccca

SEQ ID NO: 21618 - DNA, 110 bp, synthetic construct
  source 1..110: mol_type = other DNA
ggatggtattagaggcgtgtctttgggcagtaactcctccctctaactcgctccatttttggttcctgccagctaatcgggaaacggcattcgtgcatgctatcagttct

SEQ ID NO: 21619 - DNA, 110 bp, synthetic construct
  source 1..110: mol_type = other DNA
aacacatctcctcacattctctcagctgtgccaaggctgctctagataatggttagacctgcttcccatgcaggtgagccagtggcccattgggtaaatgagggaggttt

SEQ ID NO: 21620 - DNA, 110 bp, synthetic construct
  source 1..110: mol_type = other DNA
agaatctcccagtcgttttgagcatccagccccagacaggctctccccttgtgaaaccaagcaggcccctgtgggctccttcacacacaagtctttctgtgtcccccatt

SEQ ID NO: 21621 - DNA, 110 bp, synthetic construct
  source 1..110: mol_type = other DNA
ttttgagcatccagccccagacaggctctccccttgtgaaaccaagcaggcccctgtgggctccttcacacacaagtctttctgtgtcccccatttcttatttttaggga

SEQ ID NO: 21622 - DNA, 110 bp, synthetic construct
  source 1..110: mol_type = other DNA
tataagggatgtgaaacttgccctgtgctttctcccaaagctcaagctaacacgtctttccttcttcctataaatatttattacatgcttactaaagccaaatgaaatat

SEQ ID NO: 21623 - DNA, 110 bp, synthetic construct
  source 1..110: mol_type = other DNA
ccagagtcagtttccaactgagcaccttcttcccacaccctctcttagcctgtttgtctctaagtgagcatatttattctcccagcagtggcagtgctggcttcaagagg

SEQ ID NO: 21624 - DNA, 110 bp, synthetic construct
  source 1..110: mol_type = other DNA
ggaaatggcaccatcttccactcaactgcttaagtcagaatccctctccctcatcccactcagccaatcagactccaaatcctgtcagttcaaactcctggaaacatcgc

SEQ ID NO: 21625 - DNA, 110 bp, synthetic construct
  source 1..110: mol_type = other DNA
atcttccacctgccagctcaggccccaactctcccttcaagcagcaaccccaaatcccagggtcacccccttttccacatcttgcctcagcacccaacctcaaactttcc

SEQ ID NO: 21626 - DNA, 110 bp, synthetic construct
  source 1..110: mol_type = other DNA
cagctggtgctgtggtgctgtggggccgcggagccgcgcatcgcagtctctatggcctgggatctgagcgcaaaggtgagagagccgtggagtgcgggcggcggcagggc

SEQ ID NO: 21627 - DNA, 110 bp, synthetic construct; identical to SEQ ID NO: 21626
  source 1..110: mol_type = other DNA

SEQ ID NO: 21628 - DNA, 110 bp, synthetic construct
  source 1..110: mol_type = other DNA
ttctacagctctactataaaccaggcttggtagagggatgcatacattacctcttctcagtctccaggtgacaaacttctgcacgggccccactccacctgctgtgaaga

SEQ ID NO: 21629 - DNA, 110 bp, synthetic construct
  source 1..110: mol_type = other DNA
agtactagcatacatttcctggattcttccttggtttcagggaaacagctcaggagtcttagacactaatctattgcccaactctccatggaagccaacactatgctgtt

SEQ ID NO: 21630 - DNA, 110 bp, synthetic construct
  source 1..110: mol_type = other DNA
tgaggcctgggcatcgcagcagcaggccccaagtcagctgccttgacttgtacttgcctttcaggaagtctcccctctctcagtttctctaaacaggctgagttggggcg

SEQ ID NO: 21631 - DNA, 110 bp, synthetic construct
  source 1..110: mol_type = other DNA
aatgagatccctgtcccacacctcaaagccctgttctttccatcacacctgcctcctgtcattttaagtcaatgtcattctacgttattgtccccagactctgcccagct

SEQ ID NO: 21632 - DNA, 110 bp, synthetic construct
  source 1..110: mol_type = other DNA
ctgtcattttaagtcaatgtcattctacgttattgtccccagactctgcccagctcactactccctaccccacccccagcctctgccttgaagagaaaccagagacaggt

SEQ ID NO: 21633 - DNA, 110 bp, synthetic construct
  source 1..110: mol_type = other DNA
agtacaatgacagtaagaaagagcacagtgaaggtcagggtcagaaaaggtgtgggtgaccagaactgggcccggggttgggaggaggggagagaatgagactggacagg

SEQ ID NO: 21634 - DNA, 110 bp, synthetic construct
  source 1..110: mol_type = other DNA
tcctcagggctccctttgcaacttgagatatcactgtctttctatgaaaatgtctttcctatcaactataatggaaaaaataaaaatcttaaaaaaaaatgtatttccca

SEQ ID NO: 21635 - DNA, 110 bp, synthetic construct
  source 1..110: mol_type = other DNA
gaagctcagccctgctgctgagtgaatgacccattatgataacagctaggatagttttccagcctcctggcttgtctgagggctttgtgagtacctacagataccacacg

SEQ ID NO: 21636 - DNA, 110 bp, synthetic construct
  source 1..110: mol_type = other DNA
gggtgtggccctaaaaaacaaatttgggcaagtttgaagttctctaaagtgattttcttccttttctaaaataagaaccccttagtcagaatttaatgattcttgtaaac

SEQ ID NO: 21637 - DNA, 110 bp, synthetic construct; identical to SEQ ID NO: 21636
  source 1..110: mol_type = other DNA

SEQ ID NO: 21638 - DNA, 110 bp, synthetic construct; identical to SEQ ID NO: 21636
  source 1..110: mol_type = other DNA

SEQ ID NO: 21639 - DNA, 110 bp, synthetic construct; identical to SEQ ID NO: 21636
  source 1..110: mol_type = other DNA

SEQ ID NO: 21640 - DNA, 110 bp, synthetic construct
  source 1..110: mol_type = other DNA
gcgctccatgaataagtatgttcttagtcatatggtgtaaatagatcacttacaaagcttgtgaaacccgagctctccttttgaacctctcagtacccatgagctcagta

SEQ ID NO: 21641 - DNA, 110 bp, synthetic construct
  source 1..110: mol_type = other DNA
aaacagaaaatggaaataaggtaactggaagtttggtacatagaaaaacttcattggaaaaagttgttacctttgtgtttcatatttatagtgtgccatgtgagcttaag

SEQ ID NO: 21642 - DNA, 110 bp, synthetic construct; identical to SEQ ID NO: 21641
  source 1..110: mol_type = other DNA

SEQ ID NO: 21643 - DNA, 110 bp, synthetic construct
  source 1..110: mol_type = other DNA
atagtttaaaaaaaaaagataaagccagggaagtactgaggaatgttctcatttagcctaaatctaagagagttagccatgagaaattagcgtagtatttggcatgtatc

SEQ ID NO: 21644 - DNA, 110 bp, synthetic construct
  source 1..110: mol_type = other DNA
agaatatgatgagaagacaagtgaactactcggtaagtgacaggggccccagcgggctcttaggaacatttggggtgacctaagcagaggtaaacacacctgctgaggct

SEQ ID NO: 21645 - DNA, 110 bp, synthetic construct
  source 1..110: mol_type = other DNA
taatcccacatgagagcaagatccctgtgggctgagaaagcagacaaagcagcacaggagtttagacccatgagctctggagtcgaatgctgggactcaaaccctgggtg

SEQ ID NO: 21646 - DNA, 110 bp, synthetic construct
  source 1..110: mol_type = other DNA
gttctcagtctatagcgaagataatgcctctgccttactttcgagggataaataagatgatccctgtaaaatgctttgaactcctctaagaaaattctcaataatagtta

SEQ ID NO: 21647 - DNA, 110 bp, synthetic construct
  source 1..110: mol_type = other DNA
actactactgatttcctcactggatttgtgtcacagctggatctcagcaccctgaaggaagggacccggtgttatataatagattttccacaatgcttaacacagtccta

SEQ ID NO: 21648 - DNA, 110 bp, synthetic construct
  source 1..110: mol_type = other DNA
aggaagggacccggtgttatataatagattttccacaatgcttaacacagtcctaaggaacagtaaacattcaacatacttgtggacatatttagtaacattcagaccca

SEQ ID NO: 21649 - DNA, 110 bp, synthetic construct
  source 1..110: mol_type = other DNA
gattagaccctcctgcctgggaatttccatatgccgcaagtgtggccctaaaaaaaaagtctgcatttggcaaatgatgtcagcttttggctgatgaacatagaactcct

SEQ ID NO: 21650 - DNA, 110 bp, synthetic construct
  source 1..110: mol_type = other DNA
aaagtctgcatttggcaaatgatgtcagcttttggctgatgaacatagaactcctcggaataaaatgtttggggtagaaacgtgggagaggaaggtttcaacgatcttga

SEQ ID NO: 21651 - DNA, 110 bp, synthetic construct
  source 1..110: mol_type = other DNA
ctacggctttaatatcagacaaagagtatcccgagatcctatgaacttcagcagacaccatatcaacctgtggaatatcaatctgacagttcacggtggcagctaatttc

SEQ ID NO: 21652 - DNA, 110 bp, synthetic construct
  source 1..110: mol_type = other DNA
caccatatcaacctgtggaatatcaatctgacagttcacggtggcagctaatttcttgggcctcttagcagaggacaaaagaaggcaaaaaacaaaaagacaaaaaatta

SEQ ID NO: 21653 - DNA, 110 bp, synthetic construct
  source 1..110: mol_type = other DNA
ttcagacatgaggggtgggctctgagaaggggaagggcaatatacggagggagtgtggttatggtcagcaggaagcaggcagataggaggtgctgggaaccagactgatg

SEQ ID NO: 21654 - DNA, 110 bp, synthetic construct
  source 1..110: mol_type = other DNA
tgggcagtttgaagagttggggtaaaagagtactggagagtgggtgaacccctcccccaccccacggctgcccaagggagacaaaaccaaaacacacagcgacaaactag

SEQ ID NO: 21655 - DNA, 110 bp, synthetic construct
  source 1..110: mol_type = other DNA
cccaccccacggctgcccaagggagacaaaaccaaaacacacagcgacaaactaggctgcttgcttccttcccaccacgctccctaagggagggagcctcccccgccccc

SEQ ID NO: 21656 - DNA, 110 bp, synthetic construct; identical to SEQ ID NO: 21654
  source 1..110: mol_type = other DNA

SEQ ID NO: 21657 - DNA, 110 bp, synthetic construct; identical to SEQ ID NO: 21655
  source 1..110: mol_type = other DNA

SEQ ID NO: 21658 - DNA, 110 bp, synthetic construct
  source 1..110: mol_type = other DNA
ggcccttgagtggcctatatagcaaactttcttctggtcacacctactttactcccaccagaagctcctctccacttcatcttactgcctttcatgctataaggatctgg

SEQ ID NO: 21659 - DNA, 110 bp, synthetic construct
  source 1..110: mol_type = other DNA
caccagaagctcctctccacttcatcttactgcctttcatgctataaggatctgggcatccttgaaacagtcatagcttttagctagctgtacgaactcagacacattat

SEQ ID NO: 21660 - DNA, 110 bp, synthetic construct
  source 1..110: mol_type = other DNA
gatgtttccaacttggtgaatatgtatatgtgtttaggaatttctcatgttcatttgtaaaattggattgttttagaagtaagaatgggagttcctgttgtggctcagtg

SEQ ID NO: 21661 - DNA, 110 bp, synthetic construct; identical to SEQ ID NO: 21660
  source 1..110: mol_type = other DNA

SEQ ID NO: 21662 - DNA, 110 bp, synthetic construct
  source 1..110: mol_type = other DNA
gtgcatgttgctgggtctggcctctgcaagtgcctcccttgggtgtaaaaaagagcgagctggaaatggaaacagcctgataagagccctgcagctctacacaactttct

SEQ ID NO: 21663 - DNA, 110 bp, synthetic construct
  source 1..110: mol_type = other DNA
cgagctggaaatggaaacagcctgataagagccctgcagctctacacaactttctcctcttccttctcctgcaagtagtccagaccttgcctgctttcaacaccaactag

SEQ ID NO: 21664 - DNA, 110 bp, synthetic construct
  source 1..110: mol_type = other DNA
ccacactccccactctcctgccaggatccaggatctgtactgttgctcccatgcccccaggcttgattctggcctctggcctcactctgtcccctgttctccgttagaac

SEQ ID NO: 21665 - DNA, 110 bp, synthetic construct
  source 1..110: mol_type = other DNA
ctcctcagtgccggctgcctgtgggcataaatgttgacaaaaggcaggacttcttcttttcctgcccccttgctgcctcacgggtacgctcctttaccagtacctcatct

SEQ ID NO: 21666 - DNA, 110 bp, synthetic construct
  source 1..110: mol_type = other DNA
cttttcctgcccccttgctgcctcacgggtacgctcctttaccagtacctcatctggggtgtccccagcagcactaggagaagacctagtctcttctttgaggttttcag

SEQ ID NO: 21667 - DNA, 110 bp, synthetic construct
  source 1..110: mol_type = other DNA
ctccctgctagagacagtgctgctcaagagctacggtgctccaggcagagggttcaaaaggcctggtacccccaacttcagcttccccgtggggagttctgtttgggccc

SEQ ID NO: 21668 - DNA, 110 bp, synthetic construct
  source 1..110: mol_type = other DNA
gctagacagtggtggagctgggctttgtgtcagctcaggtgacctccgctgctgtgttcttgcctttgtcactggactcttctctagcatctcattaggacccaagggtg

SEQ ID NO: 21669 - DNA, 110 bp, synthetic construct
  source 1..110: mol_type = other DNA
attctcttttaattttctgatcagctcattctttcttctcagattgccagtgatggctcccctgccaactccccctcccccgcaccccggattccattagaaagaaatca

SEQ ID NO: 21670 - DNA, 110 bp, synthetic construct
  source 1..110: mol_type = other DNA
aaggcttgtattccaaatccaaacaggttccttttgtcctaccaagtcaggctaggggaacacaagagcctgactgggcaaggaggacattagaattgctttctctgccc

SEQ ID NO: 21671 - DNA, 110 bp, synthetic construct
  source 1..110: mol_type = other DNA
catgtgagcaactggtatagctaggagcacccctatttcatgacctccctcagtgtggaaagaagactggagatcaggcctagttatgtctgaagggctctgcagggtgg

SEQ ID NO: 21672 - DNA, 110 bp, synthetic construct
  source 1..110: mol_type = other DNA
aaatgaaaggagacagccattagaagttaattttacgacggggctgaattttgcagtacaaatacaaggaaatgaatttttagtgtatttttggtcaacatatccatcca

SEQ ID NO: 21673 - DNA, 110 bp, synthetic construct
  source 1..110: mol_type = other DNA
gtccctggcggaatgatcatcacgggcttcatgctccagttctacaggtgcgccccggcagcaaggctgcttggacctgctagacggggaggcgtattaggataatagta

SEQ ID NO: 21674 - DNA, 110 bp, synthetic construct
  source 1..110: mol_type = other DNA
cggcagcaaggctgcttggacctgctagacggggaggcgtattaggataatagtaagagctgtctttattgatccctgaccagataccaggccctgtgttaaattcctgt

SEQ ID NO: 21675 - DNA, 110 bp, synthetic construct
  source 1..110: mol_type = other DNA
aagtccaaatccaggcacagactgttgctagtgttgtctttagtagagggttcggggctggagagagtggctgacacctgctgtttcgggaagggtggccagatgagagc

SEQ ID NO: 21676 - DNA, 110 bp, synthetic construct
  source 1..110: mol_type = other DNA
caccccaccacgaggtcgcagctttcaaaggtcactggggaatgcagtcttccggggaggtaatgagtttgaggaggagggcgtcctgctgccttctttgtctgtgtggc

SEQ ID NO: 21677 - DNA, 110 bp, synthetic construct
  source 1..110: mol_type = other DNA
caacactgacctgttatgtttagtactattttcatgacaaattatagggttccatgtttctgtttttcctttacgttgttgtcgcatcatgcccacctgacagcctttga

SEQ ID NO: 21678 - DNA, 110 bp, synthetic construct
  source 1..110: mol_type = other DNA
agattgctccgtgtctggggtatatatgaagaatatggccctgtccccccaccacccaggatgaacagcaagtacacataggggattgctgaggttatgtgtgaacttga

SEQ ID NO: 21679 - DNA, 110 bp, synthetic construct
  source 1..110: mol_type = other DNA
gagtaccattaagactcatgaattttcacagaattaatggtcaggttgccatttgaccttttaaacgggctcctttctagactttctggcaaaaacaagatgttccagtc

SEQ ID NO: 21680 - DNA, 110 bp, synthetic construct
  source 1..110: mol_type = other DNA
gaactacacgggtgattgccagcctgttccacttggtgcctggtggctccaagggaggagtctgcgaatgtttctttcttgcatcgtcctttctagctgactagcaagtg

SEQ ID NO: 21681 - DNA, 110 bp, synthetic construct
  source 1..110: mol_type = other DNA
aggagtctgcgaatgtttctttcttgcatcgtcctttctagctgactagcaagtgaaaagattcctaggtaggatgatatcaagtaagtcaagagaaaaaaaaaacagaa

SEQ ID NO: 21682 - DNA, 110 bp, synthetic construct
  source 1..110: mol_type = other DNA
tatgaactaaagtcatttgcaagatacagatttgagctttaaaacaagagacatggtctttaggagacagacccaggaacactataaaaccaggcacagatgttagcaca

SEQ ID NO: 21683 - DNA, 110 bp, synthetic construct
  source 1..110: mol_type = other DNA
tctgacaagatgcccatcagtagaggaatggctaaataaaatgcagaatactcatttaatcgaattccctagaaaatttaaaggaagtgaccttggagttcctgtcgtag

SEQ ID NO: 21684 - DNA, 110 bp, synthetic construct
  source 1..110: mol_type = other DNA
ttaatcgaattccctagaaaatttaaaggaagtgaccttggagttcctgtcgtagctcagcagttaatgaacccaactaccatccacgaggttgcaggtttgatccctgg

SEQ ID NO: 21685 - DNA, 110 bp, synthetic construct; identical to SEQ ID NO: 21683
  source 1..110: mol_type = other DNA

SEQ ID NO: 21686 - DNA, 110 bp, synthetic construct
  source 1..110: mol_type = other DNA
gaatactcatttaatcgaattccctagaaaatttaaaggaagtgaccttggagttcctgtcgtagctcagcagttaatgaacccaactaccatccacgaggttgcaggtt

SEQ ID NO: 21687 - DNA, 110 bp, synthetic construct
  source 1..110: mol_type = other DNA
gtgtcacattttggtaattcttgcaatatttcaaacctcccatcagcaaaaaggttgtgattctcagagttcccgtcatggctcagcagtaacaaattcaactagtatcc

SEQ ID NO: 21688 - DNA, 110 bp, synthetic construct
  source 1..110: mol_type = other DNA
atcagcctcagtgctctcttttgagaggttggtcacctctaatttctagctttgcgggactctgtagggtgaattgctcatggtcagtatctcacccttgaaagcatttg

SEQ ID NO: 21689 - DNA, 110 bp, synthetic construct
  source 1..110: mol_type = other DNA
cctcagctcctaggaagtgaatggaatgtaggtcctgttcttaatctctctccatctctccccctgggtctctctctcattctgtccctctctctgtgctgcggcctctt

SEQ ID NO: 21690 - DNA, 110 bp, synthetic construct
  source 1..110: mol_type = other DNA
gagtcacagcgaggcaggtgggaggctttggctttctctgtgctctagctgcaattcagaggtaggctgggctctgtgctgagctctggaactgaagttctcccagggtg

SEQ ID NO: 21691 - DNA, 110 bp, synthetic construct
  source 1..110: mol_type = other DNA
actaatgctccgtggctgagcctgagtgttggagtgtgatgccccagtagggagcagaacctcagcacaggaatcaaggtggtggccacggcagctggttctgggctttg

SEQ ID NO: 21692 - DNA, 110 bp, synthetic construct
  source 1..110: mol_type = other DNA
agaacctcagcacaggaatcaaggtggtggccacggcagctggttctgggctttgccttcccttagtaggctggacctttgaggagcaggaagcaggagcaaggcaggag

SEQ ID NO: 21693 - DNA, 110 bp, synthetic construct
  source 1..110: mol_type = other DNA
acaggcagagaagagaaactggaccacattatcacagctgagctgcttctgaaggacccagaaatatttcctaggagcaaagccccctgggggtgctggctggcctggga

SEQ ID NO: 21694 - DNA, 110 bp, synthetic construct
  source 1..110: mol_type = other DNA
gactaccatctacaatgcaggctagttgagaactggatagatcaagaacaatgcatgggcctggcagacagcgggtgcccactagacggaagctacgagctttactgatg

SEQ ID NO: 21695 - DNA, 110 bp, synthetic construct
  source 1..110: mol_type = other DNA
tgggcctggcagacagcgggtgcccactagacggaagctacgagctttactgatgagggactaaagccgcaggacgtgggaggtaaggtggccggcacttatggatgccc

SEQ ID NO: 21696 - DNA, 110 bp, synthetic construct
  source 1..110: mol_type = other DNA
acagccgagcttcagcatctgccctccctgtcaaccccaaggcccaccggccgtgggaagaagccacactgctgaccagttgctggtgacatgttctctgcccacacaca

SEQ ID NO: 21697 - DNA, 110 bp, synthetic construct
  source 1..110: mol_type = other DNA
ctgtggcctggccctggcaagagctcacttctcccttgtttaggagtgaccctgaagcttctggaagtgaaacctatgctgttaggtgaacctgggaaaatcccagcaga

SEQ ID NO: 21698 - DNA, 110 bp, synthetic construct
  source 1..110: mol_type = other DNA
agcttctggaagtgaaacctatgctgttaggtgaacctgggaaaatcccagcagacccagggaactcctgccaggggtgctgctgggtaggtcacctgccactctctcac

SEQ ID NO: 21699 - DNA, 110 bp, synthetic construct
  source 1..110: mol_type = other DNA
tttttaatctctttagtgctattttccactttgttcatccatcattcccttgaacatctttaagagagttgttttaagactgtgtaatagatctgccatcgggtcttttt

SEQ ID NO: 21700 - DNA, 110 bp, synthetic construct
  source 1..110: mol_type = other DNA
taattgggttgtttggggttttttggttattgtgttgtatgagctgtatatttggtaaattaggcctttattggttgcatcctttgtaaacatttcctcccagtctgtag

SEQ ID NO: 21701 - DNA, 110 bp, synthetic construct
  source 1..110: mol_type = other DNA
taataattccctaatccttgttgttatgtgaaccagcaaacatttgaaaggcagagctgtagaatggaattaagatggtttcctgagtgaggcagaaaggatcagtggga

SEQ ID NO: 21702 - DNA, 110 bp, synthetic construct
  source 1..110: mol_type = other DNA
atatactactaaattttaacctttttattgagaaatatagatacagaaaatcacactaacggttgtgtagcttagtgacttggtagctttgtaaccaccacccaggtaaa

SEQ ID NO: 21703 - DNA, 110 bp, synthetic construct
  source 1..110: mol_type = other DNA
ctaacggttgtgtagcttagtgacttggtagctttgtaaccaccacccaggtaaagaaatagaattatgtcaggcaccctagcagctcaaagtgccccctctcaatcact

SEQ ID NO: 21704 - DNA, 110 bp, synthetic construct
  source 1..110: mol_type = other DNA
ccttttcatgtacttaggtcacaactgttacctgcaagaagggctcagtgctgttattcttaatctcaacaactcatttttggagctagatcctggcaacctgcttacgg

SEQ ID NO: 21705 - DNA, 110 bp, synthetic construct
  source 1..110: mol_type = other DNA
attcttaatctcaacaactcatttttggagctagatcctggcaacctgcttacggtgaattcagtattggacatcacattcagaaggacaaagcaaacagcaaattaaga

SEQ ID NO: 21706 - DNA, 110 bp, synthetic construct; identical to SEQ ID NO: 21704
  source 1..110: mol_type = other DNA

SEQ ID NO: 21707 - DNA, 110 bp, synthetic construct; identical to SEQ ID NO: 21705
  source 1..110: mol_type = other DNA

SEQ ID NO: 21708 - DNA, 110 bp, synthetic construct
  source 1..110: mol_type = other DNA
ctgataggaagaaggatctgctttttgtgggttaattccctagtctgggcctatgggtaggagacctgctgttgctgaaagacccctctgagagctctttgctgggattt

SEQ ID NO: 21709 - DNA, 110 bp, synthetic construct
  source 1..110: mol_type = other DNA
ggtaggagacctgctgttgctgaaagacccctctgagagctctttgctgggattttcctggcttgtcagcattcaagacagatgctgggacaccctattcagcaggcatt

SEQ ID NO: 21710 - DNA, 110 bp, synthetic construct
  source 1..110: mol_type = other DNA
aaaaccaaaccaaacaaaaaaaacttcctgcaaacaaaagtctaggactggatggcttcactggggaattctaccaaacatccaaagaaaaacatatactgactcttctc

SEQ ID NO: 21711 - DNA, 110 bp, synthetic construct
  source 1..110: mol_type = other DNA
cttcactggggaattctaccaaacatccaaagaaaaacatatactgactcttctcaatctctcaaaagattgaagaggaggggatactcccaaagtcattcggtgaagtc

SEQ ID NO: 21712 - DNA, 110 bp, synthetic construct
  source 1..110: mol_type = other DNA
attgctgtatgttcttttcattttaaactgctctaagtctttaaacttagctccgttcgcttcctcaaattctcttgagaatttaagctgaaagaccatcctgaggcaaa

SEQ ID NO: 21713 - DNA, 110 bp, synthetic construct
  source 1..110: mol_type = other DNA
agaaagaatggtatcatgttgtagtagtttagggagaggtttagatgagcagttgtggtgggacatccaatattcatatacatttcttctggaaaatttcttgagtatcc

SEQ ID NO: 21714 - DNA, 110 bp, synthetic construct; identical to SEQ ID NO: 21713
  source 1..110: mol_type = other DNA

SEQ ID NO: 21715 - DNA, 110 bp, synthetic construct
  source 1..110: mol_type = other DNA
atagcctacctgacattgattccatggaaaactcagagagaaatgcacaaaatctatggaatgtacctagaagaaaagctggtttgggggactaaaaataatgtggacca

SEQ ID NO: 21716 - DNA, 110 bp, synthetic construct
  source 1..110: mol_type = other DNA
atggaatgtacctagaagaaaagctggtttgggggactaaaaataatgtggaccaagggtctaaggcaaatttttttctgaaatggaccaggtagagactattttaggct

SEQ ID NO: 21717 - DNA, 110 bp, synthetic construct
  source 1..110: mol_type = other DNA
tttcaggtaaaaaaaaatattggggtagctgtaaaaggtaatgtgtacagaagggaattgtcctttaatggggaatgagagtgccaactgtccaggaaaatgtgaagacg

SEQ ID NO: 21718 - DNA, 110 bp, synthetic construct
  source 1..110: mol_type = other DNA
cagacaggcctgggtttgaaccttgactctgctccttgctgaggagttgtgggtgagtcacttagcttctagggctccactgatctgcctgtgagatgatgttaatagca

SEQ ID NO: 21719 - DNA, 110 bp, synthetic construct
  source 1..110: mol_type = other DNA
agtcacttagcttctagggctccactgatctgcctgtgagatgatgttaatagcaggccttgcttcttggtggggtgacgggggaaggagggttaagcaataccatccat

SEQ ID NO: 21720 - DNA, 110 bp, synthetic construct
  source 1..110: mol_type = other DNA
tgtgcctctcctctcccaggtgggcatggtggttgaagagggcagactttggagtcagaaagatctggtcttgaatcagctcgagcacttttcatttcatgacttgggga

SEQ ID NO: 21721 - DNA, 110 bp, synthetic construct
  source 1..110: mol_type = other DNA
cagaaagatctggtcttgaatcagctcgagcacttttcatttcatgacttggggagaattacatatattctccaaactccagtttctccatctgtcaagtggggctaata

SEQ ID NO: 21722 - DNA, 110 bp, synthetic construct; identical to SEQ ID NO: 21720
  source 1..110: mol_type = other DNA

SEQ ID NO: 21723 - DNA, 110 bp, synthetic construct; identical to SEQ ID NO: 21721
  source 1..110: mol_type = other DNA

SEQ ID NO: 21724 - DNA, 110 bp, synthetic construct
  source 1..110: mol_type = other DNA
tcaatactgtgtaaccctgaacaagctacttagcctccattctttatttcatttaaatgtagttgggagttcccatcgcggcacagtggttaacaaatccgactaggaac

SEQ ID NO: 21725 - DNA, 110 bp, synthetic construct; identical to SEQ ID NO: 21724
  source 1..110: mol_type = other DNA

SEQ ID NO: 21726 - DNA, 110 bp, synthetic construct
  source 1..110: mol_type = other DNA
gccacatggcagagaccctattcaagagcagggaccagcagtacagagatagatacagggagagagaaaaggggaggacacacacacacacacaggggagagggaagctg

SEQ ID NO: 21727 - DNA, 110 bp, synthetic construct
  source 1..110: mol_type = other DNA
ctaccagaatccccaacacagaattccctgtcctcagcatctctttcattgttaatgatctggtacatgtcaaacttgcagtggcctttcgacttggcttcctgcctctg

SEQ ID NO: 21728 - DNA, 110 bp, synthetic construct
  source 1..110: mol_type = other DNA
tggctctcctccaaaggtctgctggtactttgagatgaggtgggtggggattatgtttctctccaggatctctgtgtttgcagtggaagacttggagttccacaaccctc

SEQ ID NO: 21729 - DNA, 110 bp, synthetic construct
  source 1..110: mol_type = other DNA
tttctctccaggatctctgtgtttgcagtggaagacttggagttccacaaccctcatttcaccagtgacaggaatggagtccagaggagttcactgacttttccaagatc

SEQ ID NO: 21730 - DNA, 110 bp, synthetic construct
  source 1..110: mol_type = other DNA
gctatctgcgggcctggatttatggggtttgcttccatgctagcgtccaggagtgctttctttttgttttgttattgtgtgaagttacatgcctgaaatgatctggtgat

SEQ ID NO: 21731 - DNA, 110 bp, synthetic construct
  source 1..110: mol_type = other DNA
ctttctttttgttttgttattgtgtgaagttacatgcctgaaatgatctggtgatgatttttcaaagagccccaagcatagtgctcagtattttttttttctttacagtg

SEQ ID NO: 21732 - DNA, 110 bp, synthetic construct
  source 1..110: mol_type = other DNA
tcttaaatggagagtttttcctgcttctaataagtctattctgaatcccctgtgagccttgtttcttgtgaatttacagttagagcagggcaacccatgggttaacactt

SEQ ID NO: 21733 - DNA, 110 bp, synthetic construct
  source 1..110: mol_type = other DNA
gccttgtttcttgtgaatttacagttagagcagggcaacccatgggttaacacttgggtagaggatgaaactcccagggacagaaggtgatctgaaataccccacagcct

SEQ ID NO: 21734 - DNA, 110 bp, synthetic construct
  source 1..110: mol_type = other DNA
acaatgaacaccaaaggaatcagggaatgattagctacacttagtatttgttatggtttgtttaaaaaagttaaacataaaattagttgtggtttgaggagtgatgtttc

SEQ ID NO: 21735 - DNA, 110 bp, synthetic construct
  source 1..110: mol_type = other DNA
ctctctcactcaataggaggtgtgccaaggacaaactgtaagataggtgttggaatgggagatactgggaaataagttggccacagatggagagataagtgtgggctggg

SEQ ID NO: 21736 - DNA, 110 bp, synthetic construct
  source 1..110: mol_type = other DNA
gtgagggagagtctgtttatgcccctctgctagctcttctggtagtttgctggaagtctggccttatttgcttggagaagcatcacccatctctgccttcatgctcatat

SEQ ID NO: 21737 - DNA, 110 bp, synthetic construct
  source 1..110: mol_type = other DNA
cttttaaaccattttagtcttttattcccctgctactgaggataaaactgagaattaaatgttgaaatcaaatccataaatctccagctaccaccagagcaaagtgacgg

SEQ ID NO: 21738 - DNA, 110 bp, synthetic construct
  source 1..110: mol_type = other DNA
taaatgttgaaatcaaatccataaatctccagctaccaccagagcaaagtgacgggctgagtggttggaccaagagacttatgttctggttgatcccaagaattgagctt

SEQ ID NO: 21739 - DNA, 110 bp, synthetic construct
  source 1..110: mol_type = other DNA
ggttcattcattcttgcatataaagacaaaaccaaacaatacaaaaatcaatacatccagcacttgctttgtatcaggcatggtacaaggcactgggggccatgataaga

SEQ ID NO: 21740 - DNA, 110 bp, synthetic construct
  source 1..110: mol_type = other DNA
taatagtttggatgccgtctgactttctgaccctttccccaagccctctgttcactaatgcaacagggaaatgtaccctctcatttcagccgcaaataccttggcacatc

SEQ ID NO: 21741 - DNA, 110 bp, synthetic construct
  source 1..110: mol_type = other DNA
gatcccgtgagagctgtgtagctgcgatgtgcctttagatatgtccctccttgagccaagggattaggccttcctgtctccacactgagcatctgtaagatgtgagctat

SEQ ID NO: 21742 - DNA, 110 bp, synthetic construct
  source 1..110: mol_type = other DNA
ccaagggattaggccttcctgtctccacactgagcatctgtaagatgtgagctatcactgggcaaggggtgtgaacttggtgaggtgctgttaccagctgtggaaaattc

SEQ ID NO: 21743 - DNA, 110 bp, synthetic construct
  source 1..110: mol_type = other DNA
tatttctttctgaatctcagtgtctgtctgtctgtttttttgtatctctatctcatctcatctcttgaccactatcttcatataaccctttctatccctgtttctctgtt

SEQ ID NO: 21744 - DNA, 110 bp, synthetic construct
  source 1..110: mol_type = other DNA
tctcatctcttgaccactatcttcatataaccctttctatccctgtttctctgttgagctatatatcacaatgtaaagtctcttttctttttcttatgtatatccacatt

SEQ ID NO: 21745 - DNA, 110 bp, synthetic construct; identical to SEQ ID NO: 21743
  source 1..110: mol_type = other DNA

SEQ ID NO: 21746 - DNA, 110 bp, synthetic construct; identical to SEQ ID NO: 21744
  source 1..110: mol_type = other DNA

SEQ ID NO: 21747 - DNA, 110 bp, synthetic construct
  source 1..110: mol_type = other DNA
gaagagttgggtatttattctctgggctagtatttctctatatttttcccttacatctagcaaatgataatcgtatgcatgatgtattccctatgccaagttattttgta

SEQ ID NO: 21748 - DNA, 110 bp, synthetic construct
  source 1..110: mol_type = other DNA
tctagcaaatgataatcgtatgcatgatgtattccctatgccaagttattttgtagctctatattataatgtaacgtatgattacatctgttttcccttagctctatgtt

SEQ ID NO: 21749 - DNA, 110 bp, synthetic construct
  source 1..110: mol_type = other DNA
tgtgtatagacatatgcacacctatgaatgtacatgtatatatataggtgtataaatatagaggaggtttagataacaaagatacagtgagagagagatcccaaggatct

SEQ ID NO: 21750 - DNA, 110 bp, synthetic construct
  source 1..110: mol_type = other DNA
atatagaggaggtttagataacaaagatacagtgagagagagatcccaaggatctaaggtcctggcaagacattggtgaagttatactgtaaaaaaaatgatgctactta

SEQ ID NO: 21751 - DNA, 110 bp, synthetic construct
  source 1..110: mol_type = other DNA
ggagtcttctgggaagtatcttacctctttctggatcatcaagtcccctgagacatccaggatatttacagacaccttctgagctcatggctttggggcagtgatatcct

SEQ ID NO: 21752 - DNA, 110 bp, synthetic construct
  source 1..110: mol_type = other DNA
aagcaatggcaaggactttggagtggcctgcttggcttacaaggtggaggggaacccatctgaaagaggaatgggtgtgtgggaatctcagagctgaaaaaagtacagtt

SEQ ID NO: 21753 - DNA, 110 bp, synthetic construct
  source 1..110: mol_type = other DNA
ccatctgaaagaggaatgggtgtgtgggaatctcagagctgaaaaaagtacagttgtttctctctctgccctcagtattggaggaaccagagcgaaacccagcttctgcc

SEQ ID NO: 21754 - DNA, 110 bp, synthetic construct; identical to SEQ ID NO: 21752
  source 1..110: mol_type = other DNA

SEQ ID NO: 21755 - DNA, 110 bp, synthetic construct; identical to SEQ ID NO: 21753
  source 1..110: mol_type = other DNA

SEQ ID NO: 21756 - DNA, 110 bp, synthetic construct
  source 1..110: mol_type = other DNA
ggaaacagaaggtctatggtggggaaggaaggtcacattcctttatttacttatatattgaaaggataaatacattcatgagcgttcaagataagctttagtggtttcaa

SEQ ID NO: 21757 - DNA, 110 bp, synthetic construct
  source 1..110: mol_type = other DNA
tattgaaaggataaatacattcatgagcgttcaagataagctttagtggtttcaaacagcaatgtgcatataaagaaactggaggaatttgttaaaatgtagattcccag

SEQ ID NO: 21758 - DNA, 110 bp, synthetic construct
  source 1..110: mol_type = other DNA
catagagaacagacttgtggttgccacgggggacagaggagagagtggaatgcattgggagcttggggttagtagatgtaaaatattacatttagaatggacaatcaatc

SEQ ID NO: 21759 - DNA, 110 bp, synthetic construct; identical to SEQ ID NO: 21758
  source 1..110: mol_type = other DNA

SEQ ID NO: 21760 - DNA, 110 bp, synthetic construct
  source 1..110: mol_type = other DNA
ctcactgctccatgtgtcccttgctctgtcccccatattccacacagatacaaggaaaatagctgaaaacacttaattaggtaataatggcatcatgaacagtgtttgct

SEQ ID NO: 21761 - DNA, 110 bp, synthetic construct
  source 1..110: mol_type = other DNA
atgttttcaaaagtccttaaggttcatatttgcagcatcttatgttatagtaaaagactcaggaaaagacattaaaatattgttcatgcattgtcacactcttcattacc

SEQ ID NO: 21762 - DNA, 110 bp, synthetic construct; identical to SEQ ID NO: 21761
  source 1..110: mol_type = other DNA

SEQ ID NO: 21763 - DNA, 110 bp, synthetic construct
  source 1..110: mol_type = other DNA
agtcacacctgttatttctcaatgttggtgtcattggaggaagtccagtctgtgctcagcttgctagacaactttggctaaggtcagcatgaacagtatctctgcagagg

SEQ ID NO: 21764 - DNA, 110 bp, synthetic construct
  source 1..110: mol_type = other DNA
aggacgaataggatattggcaaacaatagtgttgtcgttttattttgtttcctgttgtcaacagcaaggccaattacttcagctgggctgcatcaggaaagtgtgagctg

SEQ ID NO: 21765 - DNA, 110 bp, synthetic construct
  source 1..110: mol_type = other DNA
ataatacggtaatctaaggctgagttattatgaattctgaataagcgttgtctactgtttaaaatttcccatggcttactgtcaaatatattgaaatggatttggaaagt

SEQ ID NO: 21766 - DNA, 110 bp, synthetic construct
  source 1..110: mol_type = other DNA
atgattatttagcagttcactaagggtcaagggccctctcttattttcagggacctaaaagctatagctaccctacaatttttgatctacagataaaaataaaagacaga

SEQ ID NO: 21767 - DNA, 110 bp, synthetic construct
  source 1..110: mol_type = other DNA
tccatctccacagcagggataaccttttgaatagaaatgtaatactcgaatttcactcacctatatttcctccaccctagtgcagcctggagaggctcagccaacttttc

SEQ ID NO: 21768 - DNA, 110 bp, synthetic construct
  source 1..110: mol_type = other DNA
ctcacctatatttcctccaccctagtgcagcctggagaggctcagccaacttttctcttgtgattatgattttcctgtaattgttttctgaccaatctactttctgttgg

SEQ ID NO: 21769 - DNA, 110 bp, synthetic construct
  source 1..110: mol_type = other DNA
atttattatgcaaattgaagccacatgttagctgcttgctagattattcttaccaaaatatgtccttactaacaagagaagttaagatggatggaggagtaagaatcctc

SEQ ID NO: 21770 - DNA, 110 bp, synthetic construct
  source 1..110: mol_type = other DNA
gtaaaataggaaaacaatttattcatgctgaaagcttctcataaatagcttttaactcaaagggaaattatttcattaagcctttagtcaagcataagggtcaggaaggg

SEQ ID NO: 21771 - DNA, 110 bp, synthetic construct
  source 1..110: mol_type = other DNA
gaagcttggatagctggctgtgtatatccagaaatatacactgttgtccttccatgtggcccaggaaagatgaagaccagagaattctaaatgtgagttggtaaaacctg

SEQ ID NO: 21772 - DNA, 110 bp, synthetic construct
  source 1..110: mol_type = other DNA
cactcattggtatgtttaaaatgtgagtaggggaaaaaggtttcagagcataaccacctccagtcacatagcaagttattttttaaccttaacctttaggcatatgattg

SEQ ID NO: 21773 - DNA, 110 bp, synthetic construct
  source 1..110: mol_type = other DNA
tctcactttctgaggaccagctctttctttgcaagtagcctagcatttaaaatcgagggtgtctaggcaaaaatgaatcataaatccttttagaatgcattactcccttt

SEQ ID NO: 21774 - DNA, 110 bp, synthetic construct
  source 1..110: mol_type = other DNA
ggttcaaatcttggccctgctgttcaggagatgcatgactcatatgcaaatcacataaatcagttgtctcacccaaaaccatagctgatactagctatccacctgatgtg

SEQ ID NO: 21775 - DNA, 110 bp, synthetic construct
  source 1..110: mol_type = other DNA
actgccttaatattccctttaccaggtaatcatccatcagacatacatagagataagggactataggttcaaatttgtcaggtatcatctcttaatcataaatctcaagc

SEQ ID NO: 21776 - DNA, 110 bp, synthetic construct
  source 1..110: mol_type = other DNA
tgatgtttaagctcttagcctgcctttagcaagctcctattcgatcagtttggcaagaatgcccctgtcttggatgcctcctcttaataattaagaatctcctaatctct

SEQ ID NO: 21777 - DNA, 110 bp, synthetic construct
  source 1..110: mol_type = other DNA
taagttatatctgacagtatttgtctttgtctgacttatttcgctaagcataggattctctaggcccatccatgttgctacaaatagcagtattttattttttatggctg

SEQ ID NO: 21778 - DNA, 110 bp, synthetic construct
  source 1..110: mol_type = other DNA
agtatttgtctttgtctgacttatttcgctaagcataggattctctaggcccatccatgttgctacaaatagcagtattttattttttatggctgagtaatattccactg

SEQ ID NO: 21779 - DNA, 110 bp, synthetic construct
  source 1..110: mol_type = other DNA
tttaaatttctttccatgtcacgtgactagtgtgacagagccctgactagaacccaagtcttttgactcaatgctgagggcttttttagtactgagaaaactgtcagctc

SEQ ID NO: 21780 - DNA, 110 bp, synthetic construct
  source 1..110: mol_type = other DNA
aagtcttttgactcaatgctgagggcttttttagtactgagaaaactgtcagctccatgctgttttattttacaatacatacccatacatacctctaaaaaacaaagagt

SEQ ID NO: 21781 - DNA, 110 bp, synthetic construct
  source 1..110: mol_type = other DNA
acacaaaacaaaactaagcaagaaaacacacctcttgatcgccagtagtagctcaatcccattatgactcagggagaattttctaaagtacctaaaagcatctcaagtct

SEQ ID NO: 21782 - DNA, 110 bp, synthetic construct
  source 1..110: mol_type = other DNA
atcccattatgactcagggagaattttctaaagtacctaaaagcatctcaagtctcctctaaacaactggtaagcctcctgcagattaattgggtcaattctctacttct

SEQ ID NO: 21783 - DNA, 110 bp, synthetic construct; identical to SEQ ID NO: 21781
  source 1..110: mol_type = other DNA

SEQ ID NO: 21784 - DNA, 110 bp, synthetic construct; identical to SEQ ID NO: 21782
  source 1..110: mol_type = other DNA

SEQ ID NO: 21785 - DNA, 110 bp, synthetic construct
  source 1..110: mol_type = other DNA
ttcccagggcaggttcttcttccatgtcctctgctttagtccctctctgaaatatctagataatagcacctgatgtacatttcctgagatgttttatggatgctaaaacc

SEQ ID NO: 21786 - DNA, 110 bp, synthetic construct
  source 1..110: mol_type = other DNA
ttagtccctctctgaaatatctagataatagcacctgatgtacatttcctgagatgttttatggatgctaaaacccctaccaaatggaagaaattaactacctgatattc

SEQ ID NO: 21787 - DNA, 110 bp, synthetic construct
  source 1..110: mol_type = other DNA
atatgtttcaattttacttctattaatgcttcatggtaaacggataaatataccagggtgtgctggggaagattaatgaagtctcagccacatgagaacttgctaatgta

SEQ ID NO: 21788 - DNA, 110 bp, synthetic construct
  source 1..110: mol_type = other DNA
gggtgtgctggggaagattaatgaagtctcagccacatgagaacttgctaatgtattttgctattaaagctttcctgagaagctgatggagaccactgggggtttctcaa

SEQ ID NO: 21789 - DNA, 110 bp, synthetic construct
  source 1..110: mol_type = other DNA
agacctgcaaatgtctttttttcttctcttgacatttttttttccagtcacacagcctcagccctagcttatcaacagatgaacttcaagccatcagtatcagggagcca

SEQ ID NO: 21790 - DNA, 110 bp, synthetic construct
  source 1..110: mol_type = other DNA
cctcagccctagcttatcaacagatgaacttcaagccatcagtatcagggagccaagatccccaactcaggatggagcagggaagtagccctaaaacaaagatctggttg

SEQ ID NO: 21791 - DNA, 110 bp, synthetic construct
  source 1..110: mol_type = other DNA
aaagaagtgcatattatgacgagccaagtgtcagaccatgaacctcagtaagacgctagaataaaaaaatgaaaagaatgtaagctttcaattttgtgttttcattttct

SEQ ID NO: 21792 - DNA, 110 bp, synthetic construct
  source 1..110: mol_type = other DNA
tcagggaggagatgtagccctgaatcagctgcttaataactatggtcccaggtgagctgcttaaatcctgttgtttttaactagtaaaatggagatgagggtgaatggag

SEQ ID NO: 21793 - DNA, 110 bp, synthetic construct
  source 1..110: mol_type = other DNA
gctgcttaaatcctgttgtttttaactagtaaaatggagatgagggtgaatggagagcctccctgttagggtggcatggatttaatgaaataacacacatttaacattgc

SEQ ID NO: 21794 - DNA, 110 bp, synthetic construct
  source 1..110: mol_type = other DNA
tctagtttcgctgaaactgtgacattgaagtggctatagtttcccacacaatcttatttttcaatgtttttccattccaagacaaggactttaaaacaaaagcaattact

SEQ ID NO: 21795 - DNA, 110 bp, synthetic construct
  source 1..110: mol_type = other DNA
atttttcaatgtttttccattccaagacaaggactttaaaacaaaagcaattactttgcaatgtttcacactgtttaaaggcatatgatctcaggttgtaacaaggctct

SEQ ID NO: 21796 - DNA, 110 bp, synthetic construct
  source 1..110: mol_type = other DNA
ccagatctggaccttgtaatatcatctgaaaccacagtctgtttgaaaggcatatgcatggaaagggtagaactcaaaggctagggaaatgtctcttcagtctctcatga

SEQ ID NO: 21797 - DNA, 110 bp, synthetic construct
  source 1..110: mol_type = other DNA
attcttcacatcatgaccaaagaaactaccaaagctcaaagctacagtcatcatgacaatgtggtattggttgaaagaatatacaaatagagcaaaggaacagagatcag

SEQ ID NO: 21798 - DNA, 110 bp, synthetic construct
  source 1..110: mol_type = other DNA
tgtgtcaaaagtggttacacaagcagtgacccaaatgttgacaaagaaatataaaaccatcttgtgtgtcttatgagcagccgtgttggaaacctctggaacagaccata

SEQ ID NO: 21799 - DNA, 110 bp, synthetic construct
  source 1..110: mol_type = other DNA
accatcttgtgtgtcttatgagcagccgtgttggaaacctctggaacagaccataaggtttgaaagtgatgaggaggtaccatttaccccaaacttgattttacataaaa

SEQ ID NO: 21800 - DNA, 110 bp, synthetic construct
  source 1..110: mol_type = other DNA
agtggatctaaaacacagcatgtggaagctgtacaaggactgtaatccacagtcctgctctcatgagctcctggtcagggaacccatatgtgatcattgtaacctgtttt

SEQ ID NO: 21801 - DNA, 110 bp, synthetic construct
  source 1..110: mol_type = other DNA
tgtttgaggcatataatgtgatgttttatacacgtacacattgtgaaatgatcacagtaatcaagctaattaagatatctatcacatcagagtcatcagagagtcttttc

SEQ ID NO: 21802 - DNA, 110 bp, synthetic construct
  source 1..110: mol_type = other DNA
gcttgtcaatacattcgttgagggctaggattggtcttaaaaatctttatctaccatacaatgtcaagcagagtgccttgctcttagtagatatagaatgtatattttgt

SEQ ID NO: 21803 - DNA, 110 bp, synthetic construct
  source 1..110: mol_type = other DNA
acattattttggattcagtggaaaatatccccttttgctaccaaccaacatctgacattgattgcataaatatcatttattatgctaaccagaactaccatatattttgg

SEQ ID NO: 21804 - DNA, 110 bp, synthetic construct
  source 1..110: mol_type = other DNA
acagtctgtgataagctagagaaacactgaaacaaaacaatgtgatcctaaagaaagctttttggtcaattttatgtcaccaactacttctgttggcagctcaatcttac

SEQ ID NO: 21805 - DNA, 110 bp, synthetic construct
  source 1..110: mol_type = other DNA
agctttttggtcaattttatgtcaccaactacttctgttggcagctcaatcttacaatgcaaactgcaacattcaaattctgtaagtaaatatgcatcaacaaggaagac

SEQ ID NO: 21806 - DNA, 110 bp, synthetic construct
  source 1..110: mol_type = other DNA
ggccaattacctgataacatgtcccagtggcactgttgtgagcaagtgtccatgttgtccacactgcctctccaagggtcagtggccagtggagagaaagcaaatggcag

SEQ ID NO: 21807 - DNA, 110 bp, synthetic construct
  source 1..110: mol_type = other DNA
tgtccacactgcctctccaagggtcagtggccagtggagagaaagcaaatggcagcttctatttctcttccgggataacaagctggagaggagacaagatacacatcagt

SEQ ID NO: 21808 - DNA, 110 bp, synthetic construct
  source 1..110: mol_type = other DNA
atgacaggccatcgcagttctcatccactttaggctaccctctaaaaacgtcatcttggacatactagagctatcagtgagcttgaagccaataaaggggaaatcacttc

SEQ ID NO: 21809 - DNA, 110 bp, synthetic construct
  source 1..110: mol_type = other DNA
atttcttttggtttatttgaaagttctctgtaattatggatatttgttaactaataatgctggacagataagaggaactgccagagtccagctccagcagccagggagct

SEQ ID NO: 21810 - DNA, 110 bp, synthetic construct
  source 1..110: mol_type = other DNA
atggatatttgttaactaataatgctggacagataagaggaactgccagagtccagctccagcagccagggagctcacaccctgttggggatggatggtgttggcagatg

SEQ ID NO: 21811 - DNA, 110 bp, synthetic construct
  source 1..110: mol_type = other DNA
tatagaatggaggagcctgacagaacagggttaaaaatcctttatagctcaaacattctagaattgaatagaggaagatgcaggaatatttaaatcacttagaggctaga

SEQ ID NO: 21812 - DNA, 110 bp, synthetic construct
  source 1..110: mol_type = other DNA
ttctagaattgaatagaggaagatgcaggaatatttaaatcacttagaggctagaacagccccactgatatactgggtaaagccctgggaattttgggatctccttgaat

SEQ ID NO: 21813 - DNA, 110 bp, synthetic construct
  source 1..110: mol_type = other DNA
atatggggaatgaactgggcttggtgtgcttgtcgcaaccctgatatctctgtggcagcaatgaccagaattcattctgtatctaggattgtcattctgcaattggttgc

SEQ ID NO: 21814 - DNA, 110 bp, synthetic construct
  source 1..110: mol_type = other DNA
gggattctcctgcttattgtagccatcagcagacttagatattggtaattttcccaatttaatttttaaacattattttaacaatcataatacttctgtctgtccatata

SEQ ID NO: 21815 - DNA, 110 bp, synthetic construct
  source 1..110: mol_type = other DNA
aactatgtttgcagactaaattctggtagcttcaggtcatgaaataaaagttggggaaaccactgaaagatagtgatctgttttaatttttttggccgttcccactgcat

SEQ ID NO: 21816 - DNA, 110 bp, synthetic construct
  source 1..110: mol_type = other DNA
agtgctttgtacataagcactttgaacactgccagtgcacttgcctcagccaattttaagcatctgagggaatattttcattcatcttgcatcatttaaatctaataact

SEQ ID NO: 21817 - DNA, 110 bp, synthetic construct
  source 1..110: mol_type = other DNA
tgcacttgcctcagccaattttaagcatctgagggaatattttcattcatcttgcatcatttaaatctaataacttgttaattcaatagaaacttattccatgccttcta

SEQ ID NO: 21818 - DNA, 110 bp, synthetic construct
  source 1..110: mol_type = other DNA
agtttgtctgctctttaaatcttctagctctacaaagaatagttgtaggggcaggcactgttctgcagtcactctcctagccctcaaggggatcagcactatcacactaa

SEQ ID NO: 21819 - DNA, 110 bp, synthetic construct
  source 1..110: mol_type = other DNA
tctgagctctcagctcattcctggcccttgataaagtaccataaagaaaagacgtcagcataaaccattctacctatggcagatgcttcatgcatgtcatgtgtctcttt

SEQ ID NO: 21820 - DNA, 110 bp, synthetic construct
  source 1..110: mol_type = other DNA
aaccactgcgccatgacgggaactcctattctggtatattaatcagagctttaaataagattcttggagcattttctcatctgcaaccagaccacacagagacattttat

SEQ ID NO: 21821 - DNA, 110 bp, synthetic construct; identical to SEQ ID NO: 21820
  source 1..110: mol_type = other DNA

SEQ ID NO: 21822 - DNA, 110 bp, synthetic construct; identical to SEQ ID NO: 21820
  source 1..110: mol_type = other DNA

SEQ ID NO: 21823 - DNA, 110 bp, synthetic construct; identical to SEQ ID NO: 21820
  source 1..110: mol_type = other DNA

SEQ ID NO: 21824 - DNA, 110 bp, synthetic construct
  source 1..110: mol_type = other DNA
caatgaggttatcacatcacaccagttagcatggccatcattaagaactcaagaggagttcctgttgtggctcagcaataatgaacctgactgttttccatgaggactcg

SEQ ID NO: 21825 - DNA, 110 bp, synthetic construct
  source 1..110: mol_type = other DNA
atcacaccagttagcatggccatcattaagaactcaagaggagttcctgttgtggctcagcaataatgaacctgactgttttccatgaggactcgggtttgatccctggc

SEQ ID NO: 21826 - DNA, 110 bp, synthetic construct
  source 1..110: mol_type = other DNA
tcacacagtgcccaagatgtagtaaatccaaaccatgtttccgtgttgaatgagtaaattaagctcttcttattccagtttgttgtaacttctgattgtacctttatttt

SEQ ID NO: 21827 - DNA, 110 bp, synthetic construct
  source 1..110: mol_type = other DNA
ttacaatgattattcttcccttcccctgccagagcctctagtgatctttcttgggttatcgccatgagaaattggtgtgattcatataggtaaaacacgcaaaaatataa

SEQ ID NO: 21828 - DNA, 110 bp, synthetic construct
  source 1..110: mol_type = other DNA
tgatattgttatgtgtctcccttgagggggaaccaggacactgccccaaggccgtgttactctttcttgattgctcattccttatcttggcatcccctcccttccctagt

SEQ ID NO: 21829 - DNA, 110 bp, synthetic construct
  source 1..110: mol_type = other DNA
gcacaaggtgatgatcctatattaagtccatcccctgatctcaactctagattattgttggccctctctatgattttttttttttttttggcgtttttgagatgcacctg

SEQ ID NO: 21830 - DNA, 110 bp, synthetic construct
  source 1..110: mol_type = other DNA
tttctctctctttctagcactggccttatgcagattctttcctaaatcattcacagttcttccctttttcccatcttagcaaatattaaaagaagtgttactgttcctac

SEQ ID NO: 21831 - DNA, 110 bp, synthetic construct
  source 1..110: mol_type = other DNA
attaaatccttggcccaggaacaccatatgctgcagttataaccttaaaaaaccaatgaaaaccctcagtcaaggcattttaccgtctgagaggcaacaccctgtggtca

SEQ ID NO: 21832 - DNA, 110 bp, synthetic construct
  source 1..110: mol_type = other DNA
ttaaaattatcacctgtgaaggtataagctactttgaggaaaaactaccttggaatttgcaaatcctattgctgctcttcattttcagaaatcgtcagatgctacaacct

SEQ ID NO: 21833 - DNA, 110 bp, synthetic construct
  source 1..110: mol_type = other DNA
agctactacaggtttattgtgattaatgttagcatagtatatcctttcctatctacttttaagctctttagctactggtgtgttatatttaaattgggctttatacaagc

SEQ ID NO: 21834 - DNA, 110 bp, synthetic construct
  source 1..110: mol_type = other DNA
tgtcaactttccctttaatcaggctgctggaagcacagcaacagtatatctttcgcctctttggaacctaaattggatgaagctgggcttggataattttgccaaactta

SEQ ID NO: 21835 - DNA, 110 bp, synthetic construct
  source 1..110: mol_type = other DNA
tcagcagtcaacaaaccaagatatctctgagtcggtacaaggccttgtgatcccttttaacacatactctgaacagccacttataaacaattccagtcagcacatgagat

SEQ ID NO: 21836 - DNA, 110 bp, synthetic construct
  source 1..110: mol_type = other DNA
agcattgcttcattacagtgtgttttttcttactgtagtttcataaaacaaatattctaaaaagaggcttattaaggatagggaagcattacaatgtcttcacacaaatc

SEQ ID NO: 21837 - DNA, 110 bp, synthetic construct; identical to SEQ ID NO: 21836
  source 1..110: mol_type = other DNA

SEQ ID NO: 21838 - DNA, 110 bp, synthetic construct
  source 1..110: mol_type = other DNA
ccctcagttactgattattaaaaatgaaatacttcacaatttattcaatactcttgaataaatgaaggaggaaggaaaaagccaaatgccccttacttaatgacttctta

SEQ ID NO: 21839 - DNA, 110 bp, synthetic construct
  source 1..110: mol_type = other DNA
atattcatctttattaactttaccatgaatgctcacacgaggtgttctggattagaggcagatttttttttttttattagttgcttcacagtaaataataagtgtgctcg

SEQ ID NO: 21840 - DNA, 110 bp, synthetic construct
  source 1..110: mol_type = other DNA
ggtagcataaaaagcagggcctcattttcccatattttattaagtctgaatagaaatatgaagaagccagtagtggttgattctgcagtggtcccaatggatctgctaag

SEQ ID NO: 21841 - DNA, 110 bp, synthetic construct
  source 1..110: mol_type = other DNA
caaacacattcttggtgttagggtctttctgggccccaggccgccctttgattgtatttgccaggctcaccgattctacagctgttcagaaccattcacaaatggataac

SEQ ID NO: 21842 - DNA, 110 bp, synthetic construct
  source 1..110: mol_type = other DNA
tttaaaaaaatttaaaaaaagaatctcagtgtcaatgtcagctataattgtagaccctaaaacacatctttgaccagagaaaatgacagtcacttgacattgatatggtg

SEQ ID NO: 21843 - DNA, 110 bp, synthetic construct; identical to SEQ ID NO: 21842
  source 1..110: mol_type = other DNA

SEQ ID NO: 21844 - DNA, 110 bp, synthetic construct
  source 1..110: mol_type = other DNA
ttaagtaattcccagatctaaaatctcagagtcaagagctgtattcttgaggcatgatttgcatccatgaatatgcagcaacacaagtctcttgcttgggatttctgccc

SEQ ID NO: 21845 - DNA, 110 bp, synthetic construct
  source 1..110: mol_type = other DNA
gaaattctgaccttttagagatttgtgtctccttaggcctaccttctggactgtttctcgggtatttttctttggaaaaacaaagttgctccattgccactttggtacat

SEQ ID NO: 21846 - DNA, 110 bp, synthetic construct
  source 1..110: mol_type = other DNA
caacagggaagcaaatgagctgagagctgtgtggcattaggtccaccagggtccccaggactccatggcccaaactctggcaatatgagctgcaagtcagaaaagcacag

SEQ ID NO: 21847 - DNA, 110 bp, synthetic construct
  source 1..110: mol_type = other DNA
caggactccatggcccaaactctggcaatatgagctgcaagtcagaaaagcacagaggcgagatgatgggtaacaagtgatgctgggtccttatggagaagcagacttta

SEQ ID NO: 21848 - DNA, 110 bp, synthetic construct
  source 1..110: mol_type = other DNA
ttatctgtgttctgctgcttgaggccataatcttaatcatgttgaggaagagatggtaacattatcagctccatctatctctaaatctggcccctgtaatcaccacagct

SEQ ID NO: 21849 - DNA, 110 bp, synthetic construct
  source 1..110: mol_type = other DNA
tgagtgaactgaggcatcaccagctgaaagatgcggttagctaaccaatggatagactggtccttggctgcaggtctctgacttctaaccctgtgtcccttatcccattc

SEQ ID NO: 21850 - DNA, 110 bp, synthetic construct
  source 1..110: mol_type = other DNA
aggtgagattccagccagactgcaggcaggcctgacaggtgaggaaatgtgcctgggaggtgagtgccggcccaatgcccgggacaagccccacccaccagtcttcaggc

SEQ ID NO: 21851 - DNA, 110 bp, synthetic construct
  source 1..110: mol_type = other DNA
gttcccctgtcctggggctcacccacctgacagaccacagtgacgatgaggcaaggggctggcaaagaaggaactgcaggcaaggtggggaagcctactggggaagccta

SEQ ID NO: 21852 - DNA, 110 bp, synthetic construct
  source 1..110: mol_type = other DNA
gggctggcaaagaaggaactgcaggcaaggtggggaagcctactggggaagcctacagggccccacaaaggtctacctagagttgcccctcagcaaaggcaggagaagag

SEQ ID NO: 21853 - DNA, 110 bp, synthetic construct
  source 1..110: mol_type = other DNA
atcagacctgaacagtggacaagtgctgctggagtgtaaccaacatgtggcacatccccaatttaaaccctgcaagctgttgagacactggtcgcttggagcttcctttg

SEQ ID NO: 21854 - DNA, 110 bp, synthetic construct
  source 1..110: mol_type = other DNA
gatagaaatcagaaacagtttgtgatcctacccttgacaagtcatgggtgagtctaaatgtttttaaatacccagtttcttagagatgataagcaaaaagaaggctctat

SEQ ID NO: 21855 - DNA, 110 bp, synthetic construct
  source 1..110: mol_type = other DNA
ctggcaggattatacagcaaacatccaccaattagtatgtactgattagtatatgtatacttgtacagtaatttttaaatggctatccataattaggggttaattgcaaa

SEQ ID NO: 21856 - DNA, 110 bp, synthetic construct
  source 1..110: mol_type = other DNA
gagggtatggctgaaaacaaaccaacaaaaagtgtttttaataagaaactgcatgtgttatgagtgattcatatattgtgtggccatatcacattttatttttacttgtt

SEQ ID NO: 21857 - DNA, 110 bp, synthetic construct
  source 1..110: mol_type = other DNA
caaaatctaaaatatttgctatctggcttttgaccaaaaaagtttgccatgtcctggtttagcttgcagaacacaagaaactttaagcatgtgtaccaattaactatgtc

SEQ ID NO: 21858 - DNA, 110 bp, synthetic construct
  source 1..110: mol_type = other DNA
ggtttagcttgcagaacacaagaaactttaagcatgtgtaccaattaactatgtctttgtgatttttccaggtgaaagtcaatatcataggagaagtagtggatcaggga

SEQ ID NO: 21859 - DNA, 110 bp, synthetic construct; identical to SEQ ID NO: 21857
  source 1..110: mol_type = other DNA

SEQ ID NO: 21860 - DNA, 110 bp, synthetic construct; identical to SEQ ID NO: 21858
  source 1..110: mol_type = other DNA

SEQ ID NO: 21861 - DNA, 110 bp, synthetic construct
  source 1..110: mol_type = other DNA
gatggaggacacttggatcttttccaaccccaagaagaacccagagttcccctcggtgtagctgttgggagctttggctctggaataagaccgccttggtgccagtcttg

SEQ ID NO: 21862 - DNA, 110 bp, synthetic construct
  source 1..110: mol_type = other DNA
aaccctaaacctcatggttcctagtcgaattcatttctgttgcaccacggcaggagctccttctctattcttttgataaagaatctggactagcgggcaaagtaactttt

SEQ ID NO: 21863 - DNA, 110 bp, synthetic construct; identical to SEQ ID NO: 21862
  source 1..110: mol_type = other DNA

SEQ ID NO: 21864 - DNA, 110 bp, synthetic construct; identical to SEQ ID NO: 21862
  source 1..110: mol_type = other DNA

SEQ ID NO: 21865 - DNA, 110 bp, synthetic construct; identical to SEQ ID NO: 21862
  source 1..110: mol_type = other DNA

SEQ ID NO: 21866 - DNA, 110 bp, synthetic construct
  source 1..110: mol_type = other DNA
gtcctcctgtaagtttcaatttacaaaaaatttaaaattcatgaaatgaaaatgttacctcccccttctaccaaaaatttacaaacacctgtatacaagtggcaaccctt

SEQ ID NO: 21867 - DNA, 110 bp, synthetic construct
  source 1..110: mol_type = other DNA
ctttccccctgcactgaagcccaggaaaagccccagactatgagtcaccaggtagcagctttgatggacttgcctgtgtcctgggacaatcattctgcccatctggggag

SEQ ID NO: 21868 - DNA, 110 bp, synthetic construct
  source 1..110: mol_type = other DNA
gcctggggttgatcttgatctagttgacttctacaggtcacttcacttcagcgctaaggactggtgcctgcagaggatagctgtgtcccctcgtcatccctcccccttgg

SEQ ID NO: 21869 - DNA, 110 bp, synthetic construct
  source 1..110: mol_type = other DNA
gcagtgccccccactccaagtcttgaggtttagaactgtttttccattagttctaggccagaggaaataggattccagaccctaccttccccaggagtaaggaagttatt

SEQ ID NO: 21870 - DNA, 110 bp, synthetic construct
  source 1..110: mol_type = other DNA
ggccagaggaaataggattccagaccctaccttccccaggagtaaggaagttattgattaaaggaatatcccaaacattttacaaggtactttcaagtctattttatttc

SEQ ID NO: 21871 - DNA, 110 bp, synthetic construct
  source 1..110: mol_type = other DNA
ctcctcaagccatgctaagaaaaagttgtgtatagatacaaattgcatttaacacccagctacactccactccagccacaatggctttatgacagtcccttaaacaagcc

SEQ ID NO: 21872 - DNA, 110 bp, synthetic construct
  source 1..110: mol_type = other DNA
tgtgtggttcagactggtgcatgttgattatataatacacacatgtgatacgcctaatgctgattatgtaatacacaagtgtgccgtgataccaagtcatgctttagggt

SEQ ID NO: 21873 - DNA, 110 bp, synthetic construct
  source 1..110: mol_type = other DNA
tgttacacatcaatagaaatataatacagcatctctggccacataggcacttgatattccatggtcagcaaattcagaaattctgtctctaccagggcccagctattttt

SEQ ID NO: 21874 - DNA, 110 bp, synthetic construct
  source 1..110: mol_type = other DNA
attccatggtcagcaaattcagaaattctgtctctaccagggcccagctatttttcatatgaatataattctgtgctgtacatgtcatggctgttctcaggtgtgtacat

SEQ ID NO: 21875 - DNA, 110 bp, synthetic construct
  source 1..110: mol_type = other DNA
gcatgaaataacacagagagacactttatccagttttccccaatggtaacatcttggaaactacagtccagtatcaacaacccagctatcgatattgatacagttgacat

SEQ ID NO: 21876 - DNA, 110 bp, synthetic construct
  source 1..110: mol_type = other DNA
ggaaactacagtccagtatcaacaacccagctatcgatattgatacagttgacatacactgtttccacccctgcaaggagatgtcctccagcccaactcttggacccttg

SEQ ID NO: 21877 - DNA, 110 bp, synthetic construct
  source 1..110: mol_type = other DNA
tttcatggcttttacggatattctgaaacccacccatggacccctgaggggctagagggtaataacacctgtttcagagcttatcgcttgaatgttttcagaatcccagt

SEQ ID NO: 21878 - DNA, 110 bp, synthetic construct
  source 1..110: mol_type = other DNA
agcatcttgtccattgtcatttgttgtcactaccagctcagcctgggtgtggacgttcaggggaggctggggtgaaacaggtgagtgcagtgcggaaagcagatcgagag

SEQ ID NO: 21879 - DNA, 110 bp, synthetic construct
  source 1..110: mol_type = other DNA
aaccattgcatgcagggccctgggctggctgtgccatcagcaaccccatttcctgcctccacagggccatgggatctgatgaaaagcaacttagggggcactgggctaac

SEQ ID NO: 21880 - DNA, 110 bp, synthetic construct
  source 1..110: mol_type = other DNA
cctccacagggccatgggatctgatgaaaagcaacttagggggcactgggctaacagtggaggctgttctgcagctgggaaaacaagaggcagggaaacattagagctaa

SEQ ID NO: 21881 - DNA, 110 bp, synthetic construct
  source 1..110: mol_type = other DNA
aggaaacattgggttaaataccattaaaggagtttacttatgctaggatttctcagaacctttaaaacaccattgtttattacgatcctgcaacaggggagaagttcagg

SEQ ID NO: 21882 - DNA, 110 bp, synthetic construct
  source 1..110: mol_type = other DNA
gaacctttaaaacaccattgtttattacgatcctgcaacaggggagaagttcaggggttttctccaagtttcttcatccttagaccccttttgtggtggagtatctgtgg

SEQ ID NO: 21883 - DNA, 110 bp, synthetic construct
  source 1..110: mol_type = other DNA
aagttcctgggtcagggatcaaacctgcaccacagaagcaacccaagctgcttcagtgacagtgccagatcctcagcctgctgcaccacaagagaactctctaaaattct

SEQ ID NO: 21884 - DNA, 110 bp, synthetic construct
  source 1..110: mol_type = other DNA
gtgacagtgccagatcctcagcctgctgcaccacaagagaactctctaaaattctttttgaattataaatcactttataaacatcagttataatcatttcccctgcagaa

SEQ ID NO: 21885 - DNA, 110 bp, synthetic construct
  source 1..110: mol_type = other DNA
aggagttctgggtggtgctgacttgctggtgggtgagctgggtcttgacatggttggttgtggggctacaatattcctggggctgatgtcaggccactggtgagtggggc

SEQ ID NO: 21886 - DNA, 110 bp, synthetic construct
  source 1..110: mol_type = other DNA
tgagaacacagaggagaatgcactgtagacctctaatgggtagaggggaaaggtgtttggagctttagtgaattgagaatggtgtgagtaaaggctaagtttatttattt

SEQ ID NO: 21887 - DNA, 110 bp, synthetic construct
  source 1..110: mol_type = other DNA
tttggagctttagtgaattgagaatggtgtgagtaaaggctaagtttatttatttgggcctcttttactatctaatatggacaatagagatttgatataatcaatgggaa

SEQ ID NO: 21888 - DNA, 110 bp, synthetic construct
  source 1..110: mol_type = other DNA
taacaagatgtttcctcttctggcaaatttcaaagaccctttggtgaatgctttagctgctttattacaatggaacaactcttccataggaaaagtcagtggtataaagg

SEQ ID NO: 21889 - DNA, 110 bp, synthetic construct
  source 1..110: mol_type = other DNA
gtgtttctcaccagcttatcatgttcagattggtgaacacatgtgtttaagtatggtccatgggtgtaggtgtgtagctggtgtctgtgtttgtgtctgaacttctattt

SEQ ID NO: 21890 - DNA, 110 bp, synthetic construct
  source 1..110: mol_type = other DNA
tacggcagacatcagcctttattttgctctctgggtgactcaactcctccacgtctctctccatggagactgtgagagggggccccccagccagggtcggtctgggcatg

SEQ ID NO: 21891 - DNA, 110 bp, synthetic construct
  source 1..110: mol_type = other DNA
tgaatcagcttcagctgctggaactgcaaggtccccgacttctgcagagctcttgtcttctattatagcacttggaatgggggtggggggacatctcctggccttggcta

SEQ ID NO: 21892 - DNA, 110 bp, synthetic construct
  source 1..110: mol_type = other DNA
tcttctattatagcacttggaatgggggtggggggacatctcctggccttggctactgctccacaggagagggaatgcctggaaactactgcctccaccccaggaatcca

SEQ ID NO: 21893 - DNA, 110 bp, synthetic construct
  source 1..110: mol_type = other DNA
gctgagccatgatgggaacttctgaaagatagtttataaatgggattgatacccttctgttgagcttgaagctggtgatgcaatgctgtggccagcgcttaggttaaatg

SEQ ID NO: 21894 - DNA, 110 bp, synthetic construct
  source 1..110: mol_type = other DNA
tctgttgagcttgaagctggtgatgcaatgctgtggccagcgcttaggttaaatgccctgtggcagaaatttgggggacaggaatgatgggactgtctcacattcctttg

SEQ ID NO: 21895 - DNA, 110 bp, synthetic construct
  source 1..110: mol_type = other DNA
ctttacttatgaagacattagtcatattggattagggtttatgacctcatttatgcttaactaccttttaaaaggctccatctccaaaaaaacattgaggggggtgttag

SEQ ID NO: 21896 - DNA, 110 bp, synthetic construct
  source 1..110: mol_type = other DNA
tttttttttaaagactattttttagggaagttttacgtttcctgcaaaattgagagccaggaacagagatttcctacatatccccatacatgcacagcctccttcatgtg

SEQ ID NO: 21897 - DNA, 110 bp, synthetic construct
  source 1..110: mol_type = other DNA
gccaggaacagagatttcctacatatccccatacatgcacagcctccttcatgtgcttagactttttgagcctcggtcttcttccctttgaatggggatagtgtcatccc

SEQ ID NO: 21898 - DNA, 110 bp, synthetic construct
  source 1..110: mol_type = other DNA
tcttgaggcatttactttagaaaacgtgggagtgcctcctctgtctctctgaagtgtgtgctcatctttgaaagaaggaacaagcctctaacaatatcacagctcagaat

SEQ ID NO: 21899 - DNA, 110 bp, synthetic construct
  source 1..110: mol_type = other DNA
ctgtcgtccacataccctcacattttgatgaagcccctcaacttctaattacttaaccttcccaattacagggtgttctacacgcttctggagctaagaacaccctgtgg

SEQ ID NO: 21900 - DNA, 110 bp, synthetic construct
  source 1..110: mol_type = other DNA
accttcccaattacagggtgttctacacgcttctggagctaagaacaccctgtgggatgtaggactccttggtactagaatgttctagagtggcagtgagaatctggaag

SEQ ID NO: 21901 - DNA, 110 bp, synthetic construct
  source 1..110: mol_type = other DNA
aggtgtaaagtgataccaacttgctgaaaccacagaaagatcaaaagatcaggttattcaggagctcccctgtggcgcatgggttggagatctagtgttgtcacagccgc

SEQ ID NO: 21902 - DNA, 110 bp, synthetic construct
  source 1..110: mol_type = other DNA
aaagatcaaaagatcaggttattcaggagctcccctgtggcgcatgggttggagatctagtgttgtcacagccgcggcttgtgttgctgctgtggtgtgggtttgatccc

SEQ ID NO: 21903 - DNA, 110 bp, synthetic construct
  source 1..110: mol_type = other DNA
tttttttgaggttctaaagtaacttaaaatcatttgaatgtcattggtccagcggaatcttagattttgttggccagaggagattcttgaagacacaagagtgacaaact

SEQ ID NO: 21904 - DNA, 110 bp, synthetic construct
  source 1..110: mol_type = other DNA
catataggcaaaaattaaataaacaaaaagtcaaaaccaagctctatcaatctaaactgaattaaaccaaacccaaacaaacaatggcaacagaagccttgcagcccagt

SEQ ID NO: 21905 - DNA, 110 bp, synthetic construct
  source 1..110: mol_type = other DNA
gttaggggtacaatctgcgactttggagcagttttcctctttatgaagccaacgagcccgtgtaaagaccagctcccaggttttctttattagttacacatgctaaccat

SEQ ID NO: 21906 - DNA, 110 bp, synthetic construct
  source 1..110: mol_type = other DNA
atcttcttacctgggctttactatttttattcctctctatttggtaattatttactaacagctctcttggggagatgggaggtatccctttgtgtatctacaattcacta

SEQ ID NO: 21907 - DNA, 110 bp, synthetic construct
  source 1..110: mol_type = other DNA
taacagctctcttggggagatgggaggtatccctttgtgtatctacaattcactacctattatgaggcattaccaaaaaaaaaaaaaaagtccataaattgtatcacact

SEQ ID NO: 21908 - DNA, 110 bp, synthetic construct
  source 1..110: mol_type = other DNA
agtcaagacacaggtctgcattatctgataccatcccccagattcttttctacagtgcctgtcaacaccttgttttgaaaagaacacattgttttacagcagcccacaga

SEQ ID NO: 21909 - DNA, 110 bp, synthetic construct
  source 1..110: mol_type = other DNA
atttgctgccactgccagatgagaagcaagtgacttacccttaatcatctgctacttactcgcttgcactgcagaggagctaggtaccctacaactagtccaagctggag

SEQ ID NO: 21910 - DNA, 110 bp, synthetic construct
  source 1..110: mol_type = other DNA
gtacgtaaggattaaaattcaccaaaaggaaaaagaagtggccagtgggaaaacgaagcattgtcttatattggggttcccgtattttgtagcattcatgttatttttct

SEQ ID NO: 21911 - DNA, 110 bp, synthetic construct
  source 1..110: mol_type = other DNA
atctgagctgtgtctgtgacctacagctatagtccctggtcaacacaacagccacagcaatgcagggtctgtgctgcatctgaaacctataccacagctcatggcaatgc

SEQ ID NO: 21912 - DNA, 110 bp, synthetic construct; identical to SEQ ID NO: 21911
  source 1..110: mol_type = other DNA

SEQ ID NO: 21913 - DNA, 110 bp, synthetic construct
  source 1..110: mol_type = other DNA
cctgaacaaagcaaaggctaaggcttcccttcagatgttcctaaagatggatgagaagaagctgggacataattttactcttgaccagccacgaaatgctcagccaaata

SEQ ID NO: 21914 - DNA, 110 bp, synthetic construct
  source 1..110: mol_type = other DNA
aagaagctgggacataattttactcttgaccagccacgaaatgctcagccaaataaattactaagaaaagtcaggcaaaagctggaatgtcaagggtatgattatttctc

SEQ ID NO: 21915 - DNA, 110 bp, synthetic construct
  source 1..110: mol_type = other DNA
ttaaatatggaacaagtggatacaatgaaatgagagcaagtgctcagtgctgtggcagaatttagcagtgggacctggcctagttcagggcatcaggaaggtttctagaa

SEQ ID NO: 21916 - DNA, 110 bp, synthetic construct
  source 1..110: mol_type = other DNA
cagaatttagcagtgggacctggcctagttcagggcatcaggaaggtttctagaagaaagtgatgttttaatcgatacctaaagaatagaaaatttagttaaagacaaat

SEQ ID NO: 21917 - DNA, 110 bp, synthetic construct; identical to SEQ ID NO: 21915
  source 1..110: mol_type = other DNA

SEQ ID NO: 21918 - DNA, 110 bp, synthetic construct; identical to SEQ ID NO: 21916
  source 1..110: mol_type = other DNA

SEQ ID NO: 21919 - DNA, 110 bp, synthetic construct
  source 1..110: mol_type = other DNA
ttagtgggatgaggaaatgcttatggtataatgctaagaaaaataaaaggacccaaaattttgaagctaaaacattttcaaatacctgtgtcaaaagaagcaatgaaatc

SEQ ID NO: 21920 - DNA, 110 bp, synthetic construct
  source 1..110: mol_type = other DNA
cagaagatttgtagactaataactgacaaaaaagagtatatgataagggccttgtgagtgacttagtatggcatagatcaggcgatacaaacacaaatggctagaggatc

SEQ ID NO: 21921 - DNA, 110 bp, synthetic construct
  source 1..110: mol_type = other DNA
gagtgacttagtatggcatagatcaggcgatacaaacacaaatggctagaggatccagcaggaaattaaggatagtaaagctggcctgtgaaagaggtaatagggattgg

SEQ ID NO: 21922 - DNA, 110 bp, synthetic construct
  source 1..110: mol_type = other DNA
tttggttaagtatgttgaagtcagcatcctgtgggggtaataccacttccttactttatatttgtgagaaggtggccttctcacagggaggggccaggaagtggcacaca

SEQ ID NO: 21923 - DNA, 110 bp, synthetic construct
  source 1..110: mol_type = other DNA
ttggggtgaggaacctggctgtctcaatgcaaaccatagaaaatacatagtgggttcaaggaatggggaaacctcttttgccgcctccttttaattttccacactcattc

SEQ ID NO: 21924 - DNA, 110 bp, synthetic construct
  source 1..110: mol_type = other DNA
tcaaggaatggggaaacctcttttgccgcctccttttaattttccacactcattctcactcatctctctaaaaatagtagttttcagaaaagaagcagggaattcttgat

SEQ ID NO: 21925 - DNA, 110 bp, synthetic construct
  source 1..110: mol_type = other DNA
acctatactacacaaacctatactgtaactacaacaaaggggaaaagattagctatggtaaaaatgacaatatccttcctcttagagcacctaggtttgaattccaaatc

SEQ ID NO: 21926 - DNA, 110 bp, synthetic construct
  source 1..110: mol_type = other DNA
tggtaaaaatgacaatatccttcctcttagagcacctaggtttgaattccaaatccatttaccatctgtgcgaccttgcacaatttacttcccctccctgaaccctattt

SEQ ID NO: 21927 - DNA, 110 bp, synthetic construct
  source 1..110: mol_type = other DNA
cctaactcaccactttgtatgtgagagcttgggaatcatggagacctaggtttgcatctgaagcacttcactttgtagctacgtgaacaagtcattccacttccctgagc

SEQ ID NO: 21928 - DNA, 110 bp, synthetic construct
  source 1..110: mol_type = other DNA
atctgaagcacttcactttgtagctacgtgaacaagtcattccacttccctgagcccctgctcacctacaacataggaatagcaatgcccacatcctaaagttgccgtga

SEQ ID NO: 21929 - DNA, 110 bp, synthetic construct
  source 1..110: mol_type = other DNA
tcgagagcccagtgtacacatctctccccatttctactgtcagtcatttcattctgacagcttgaaaccagtcagggtgggagtatttaccaaggaaatcagccagtgct

SEQ ID NO: 21930 - DNA, 110 bp, synthetic construct
  source 1..110: mol_type = other DNA
cagaattgctttggataattactgctctatggctcacattttttccacttttgaacaggattgtctggcagttatcctatgcctatctcgcctctgtatgttgagggcac

SEQ ID NO: 21931 - DNA, 110 bp, synthetic construct
  source 1..110: mol_type = other DNA
caggattgtctggcagttatcctatgcctatctcgcctctgtatgttgagggcacggggtgggggtggcaaataactgtccttttagtttcatagatcctcatatggagg

SEQ ID NO: 21932 - DNA, 110 bp, synthetic construct
  source 1..110: mol_type = other DNA
gtttagaccatcctcaagatgcaggtcctccttcttatctcccagtagcctggagcatcccatgcagatgagggtttctctgagggagctcctggccgggaacccatcct

SEQ ID NO: 21933 - DNA, 110 bp, synthetic construct
  source 1..110: mol_type = other DNA
agtttgaatcgcaccatatctttttcatgctaacagattcttacattctctatcgctacttctttgatagcaagcagtcgttttttaattttatttgaaagcagaaacat

SEQ ID NO: 21934 - DNA, 110 bp, synthetic construct
  source 1..110: mol_type = other DNA
aggcgttaactccccagatggggccaaaccacgaatactttcttatatgtgttactcatatttgacatttgagctcagaggaaaataatttctaatccacctggctctgg

SEQ ID NO: 21935 - DNA, 110 bp, synthetic construct
  source 1..110: mol_type = other DNA
aaggggggactatcaagatctaagtcacctgcagccatgcacccttttcacagaagtttgctgctggtctcgtgaaggtgccaactagccagacatcagtcatcacggaa

SEQ ID NO: 21936 - DNA, 110 bp, synthetic construct
  source 1..110: mol_type = other DNA
catgcacccttttcacagaagtttgctgctggtctcgtgaaggtgccaactagccagacatcagtcatcacggaaggattttagtgcttttctagataaaaggagatgca

SEQ ID NO: 21937 - DNA, 110 bp, synthetic construct
  source 1..110: mol_type = other DNA
acttcctggatgctgcaatctaaatgtggcctagaccttgctcctgatttcaagaccatgatattgacaagctctctggacccctcccccggctgcccccacaagctctc

SEQ ID NO: 21938 - DNA, 110 bp, synthetic construct
  source 1..110: mol_type = other DNA
tcaaagtgtccacttctgcttctctacacagtctcctcattcttccaggtctttcctgaatgctaccttttacaagaagtcttctccattgactcaagctccctgaatgc

SEQ ID NO: 21939 - DNA, 110 bp, synthetic construct
  source 1..110: mol_type = other DNA
ctaatatggaaacacatcatttcaaaatcctttatcagaccaagagaaaagttactcaagtgaggaagtgaaagcaaaaacataaatgttcttaataaaggtaacggatt

SEQ ID NO: 21940 - DNA, 110 bp, synthetic construct
  source 1..110: mol_type = other DNA
tcaagtgaggaagtgaaagcaaaaacataaatgttcttaataaaggtaacggattttccaatgtgatgtaagaaacaatagaagagttccggcagtggcgcagcagaaat

SEQ ID NO: 21941 - DNA, 110 bp, synthetic construct
  source 1..110: mol_type = other DNA
gcccctggtaccatatttgttagctaaaattgcattggacgatacgtttaaaatacactcaatatcagatcttctctctcacttagggctctggtccagccctaagtccc

SEQ ID NO: 21942 - DNA, 110 bp, synthetic construct
  source 1..110: mol_type = other DNA
gtgtcaagctgtcctctgttctcctggtgtggagtagaggatagacccagtgacctggaatagctgatggccaccagggagactttccccttcaaagtttcattcatacc

SEQ ID NO: 21943 - DNA, 110 bp, synthetic construct
  source 1..110: mol_type = other DNA
ggccacataccctgcgttctctcctgatcaccaccaaccaaccccctctccccagatgtcacctcctccctgaagtcttcacgatgctgcagcatttaatccctcacctg

SEQ ID NO: 21944 - DNA, 110 bp, synthetic construct
  source 1..110: mol_type = other DNA
atgtcacctcctccctgaagtcttcacgatgctgcagcatttaatccctcacctgcaaggcttctgcttcgccccccagagcgctcacctccctcagaagacatccattt

SEQ ID NO: 21945 - DNA, 110 bp, synthetic construct
  source 1..110: mol_type = other DNA
ctaaaaattcccttgctcacaggcagaattccatggatctggttggcttagatacttactagatgtaagtagctttggacaagtcaaaactgggccttagtttcctcagt

SEQ ID NO: 21946 - DNA, 110 bp, synthetic construct
  source 1..110: mol_type = other DNA
tccttcataatactttttgtgatagcgataagtagctaacacttgttaaaggcatactggtatcagacagtgggttaagcatattacttgctttatagtatctgattttc

SEQ ID NO: 21947 - DNA, 110 bp, synthetic construct
  source 1..110: mol_type = other DNA
agttcctttaataagctaggatatcttggcaaaatatctatttgggaaatgcatagctataagtccccctaataaatataatcagtgttttcaaagcaggatgaagtaat

SEQ ID NO: 21948 - DNA, 110 bp, synthetic construct
  source 1..110: mol_type = other DNA
gctataagtccccctaataaatataatcagtgttttcaaagcaggatgaagtaattaagtctttttcatagtgtcaggggaagattcgcaatagataagccttatggaat

SEQ ID NO: 21949 - DNA, 110 bp, synthetic construct
  source 1..110: mol_type = other DNA
aacagcctcctgttaaccgtcttttttggtgttccattttcttccattttttttcccttcagctctctctagaagcccatgtttcatttggtaaaagtgtgctcatggct

SEQ ID NO: 21950 - DNA, 110 bp, synthetic construct
  source 1..110: mol_type = other DNA
gaaaaaattttgtaagaaaaataggacagatttttttccagtgaataaaattgcaattcaagtggattatggaagacctaggatacaagggtgtcaaggtcataatagtc

SEQ ID NO: 21951 - DNA, 110 bp, synthetic construct
  source 1..110: mol_type = other DNA
tgccctgaggtgggtttcacagagtctctgagctaatgggtttcctgaaaaattttgtgtatgtttgtatatgcagcattctgggagttctccataaatttttctaaaga

SEQ ID NO: 21952 - DNA, 110 bp, synthetic construct
  source 1..110: mol_type = other DNA
tgtgtatgtttgtatatgcagcattctgggagttctccataaatttttctaaagagtccacaaccaactccaaaaaagttgagaaatgaaacattgttacagacctatat

SEQ ID NO: 21953 - DNA, 110 bp, synthetic construct
  source 1..110: mol_type = other DNA
actgagctatggaactttagagccctgtgtttgggagttttgtgccttatattaatgtaagttgtctttgtttagaacctgttttatgcttcaacctcatcttaactgag

SEQ ID NO: 21954 - DNA, 110 bp, synthetic construct
  source 1..110: mol_type = other DNA
atactattttgctcatcagtaaaaagtaccaaagcagttcttaccactgtgcaccagtataatttcgatggctggaataaatgaacagacagactggtgtgtcctcttga

SEQ ID NO: 21955 - DNA, 110 bp, synthetic construct
  source 1..110: mol_type = other DNA
agtataatttcgatggctggaataaatgaacagacagactggtgtgtcctcttgagctcatggccctactgcatttggaggattcctctggtccagacagcctcatgact

SEQ ID NO: 21956 - DNA, 110 bp, synthetic construct
  source 1..110: mol_type = other DNA
gcttggccatattttatgatctgttttatttattcagggcctctattgggtacgcacatctgaaaccaattaaaaaccaagaaataggaaaaaccaaataaacacctgga

SEQ ID NO: 21957 - DNA, 110 bp, synthetic construct
  source 1..110: mol_type = other DNA
cagggccagctgttccgctgaaccccctaccattcctgggcactgtcacaccccaacaggcagctgagctcatcttagaaaatggagcgggcagtgtgacatcctgcaga

SEQ ID NO: 21958 - DNA, 110 bp, synthetic construct
  source 1..110: mol_type = other DNA
acaggcagctgagctcatcttagaaaatggagcgggcagtgtgacatcctgcagaatttagggaatgtgatgcagctctttacccagaagaagccaaagatgctcagact

SEQ ID NO: 21959 - DNA, 110 bp, synthetic construct
  source 1..110: mol_type = other DNA
aacagccccctcccagagttgttgataagcagtgatggcaaaatccctaagggtgtggctgtctccctgcaaatctgctatacgctctatagaacccaggtgggtacttt

SEQ ID NO: 21960 - DNA, 110 bp, synthetic construct
  source 1..110: mol_type = other DNA
tggctgtctccctgcaaatctgctatacgctctatagaacccaggtgggtactttatgaagtccctcatttttggggtttattttttttttttttttttttggctgtccc

SEQ ID NO: 21961 - DNA, 110 bp, synthetic construct
  source 1..110: mol_type = other DNA
gtagacaatcagtgattgattgtctcctacttactggcttgagcttctgattaatgattcctatttacagcgtagccaacctaggttgcttattgctgtgtaacaaattt

SEQ ID NO: 21962 - DNA, 110 bp, synthetic construct
  source 1..110: mol_type = other DNA
tttcatccaggcttgacacctgccccttctcaaaaagtaaacccctatcttatttgtctggtggtttcactgtggatggcactaagggaggcaagctgacgttatgttaa

SEQ ID NO: 21963 - DNA, 110 bp, synthetic construct
  source 1..110: mol_type = other DNA
gtctggtggtttcactgtggatggcactaagggaggcaagctgacgttatgttaaagacttgacaagccagcacccatctgttggtttctttgctctaacctctgagctg

SEQ ID NO: 21964 - DNA, 110 bp, synthetic construct
  source 1..110: mol_type = other DNA
ggtctctacatattaagacttggttatgttattttagaagccctgctttcttgttgtgaataattgctggcaagctgggcatacaggtgtttatttccgtttgatttatt

SEQ ID NO: 21965 - DNA, 110 bp, synthetic construct
  source 1..110: mol_type = other DNA
gtgaataattgctggcaagctgggcatacaggtgtttatttccgtttgatttattgatgattacgacttgaccgtttgatgaaggttgtatccattttcctttgaaagac

SEQ ID NO: 21966 - DNA, 110 bp, synthetic construct
  source 1..110: mol_type = other DNA
ggcgtgagtcacttagccagacggccgcccagccccgtggcctggacggctccaggcgggagctgctggtgcagcgtccagaaaacaaaccacaccccaggcatgatgat

SEQ ID NO: 21967 - DNA, 110 bp, synthetic construct
  source 1..110: mol_type = other DNA
gactttggttttaagtacaaaatagaaaggtgaaaggcagcagtaaaaccttgtccgggattgcctgggccctgtaccctctcttagccaccctcgttgttccagttgtt

SEQ ID NO: 21968 - DNA, 110 bp, synthetic construct
  source 1..110: mol_type = other DNA
ccatctgtgaaatggggatagtaagactcagcccggaaggtagcagggaggagagcatcctccccagcgcccagcaccctgtaggagctcagtgcctgctatacctcgtc

SEQ ID NO: 21969 - DNA, 110 bp, synthetic construct
  source 1..110: mol_type = other DNA
tcagacactcccgtgtctgatttgccttcagagctgtggactgtgggcaacatgaaaggttccgtttgcacgcggatcttcctctttgtttttcttcctcagagtttggc

SEQ ID NO: 21970 - DNA, 110 bp, synthetic construct
  source 1..110: mol_type = other DNA
ggttacgtgaagggtgtccctgcagggagggcccaggatcgtgttcatcgtacaagtcccttctgaagacttgatgaggttgtactgaggagagggtgacactggaacac

SEQ ID NO: 21971 - DNA, 110 bp, synthetic construct
  source 1..110: mol_type = other DNA
gaaatgcggttcagtagtccagtcagcgtggaaaacgctctttcgagagtcttactgcctgacttctgggggccttgcgtctgctaacatgtgaaataaccctcctagga

SEQ ID NO: 21972 - DNA, 110 bp, synthetic construct
  source 1..110: mol_type = other DNA
tgcctgacttctgggggccttgcgtctgctaacatgtgaaataaccctcctaggaggcattgacaacacttcctcaaaagccttgattatggaaccctttttagaagaga

SEQ ID NO: 21973 - DNA, 110 bp, synthetic construct
  source 1..110: mol_type = other DNA
caacgtggaaagggagaaaatactgaattcgtgcttggtagcttaaaaaaaaacaaaacaaaaacgatgattctctgttcttagaaaaccaaaacagcacaacagagaca

SEQ ID NO: 21974 - DNA, 110 bp, synthetic construct
  source 1..110: mol_type = other DNA
aaacaaaaacgatgattctctgttcttagaaaaccaaaacagcacaacagagacatgctctttcccatagactcaaggatgttcaaagctgccaccaaaagttgcacctg

SEQ ID NO: 21975 - DNA, 110 bp, synthetic construct
  source 1..110: mol_type = other DNA
gagggacggaatccatagacctgaacatttcatccagcctctacagctcatcaattgagtgactttgcgcagatttctgaaccattctgagtgtctcttcatcgtgtgtg

SEQ ID NO: 21976 - DNA, 110 bp, synthetic construct
  source 1..110: mol_type = other DNA
cctccttgacttgcatgtaagcgccaacagccagcgccaggcaatgacagtaagctaggggttatctggttccttgtgcctgttctgcatggagaactttccagatttgt

SEQ ID NO: 21977 - DNA, 110 bp, synthetic construct
  source 1..110: mol_type = other DNA
taggggttatctggttccttgtgcctgttctgcatggagaactttccagatttgttcattttctcccaacagtgacctatgaggtaggttctactgttgtccccatttac

SEQ ID NO: 21978 - DNA, 110 bp, synthetic construct; identical to SEQ ID NO: 21976
  source 1..110: mol_type = other DNA

SEQ ID NO: 21979 - DNA, 110 bp, synthetic construct; identical to SEQ ID NO: 21977
  source 1..110: mol_type = other DNA

SEQ ID NO: 21980 - DNA, 110 bp, synthetic construct
  source 1..110: mol_type = other DNA
tccatgtgtcctgggtgtggccctaaaaaaataaaagcaaaaaacaaaattttttttctctaaacccaataataaaatagatgcagaaaggcaaagccaagaaagctgtg

SEQ ID NO: 21981 - DNA, 110 bp, synthetic construct
  source 1..110: mol_type = other DNA
ttctctaaacccaataataaaatagatgcagaaaggcaaagccaagaaagctgtggacttggtctggaacataattattctttcacttgtcaggtaagtttgaagaaaaa

SEQ ID NO: 21982 - DNA, 110 bp, synthetic construct
  source 1..110: mol_type = other DNA
caaagagaaggagagagtgaagtgtgtaaggagctggtatctccagccctggaaacaggcccagattcaatgaagggatcaagatccaccccacttttgccaacacacag

SEQ ID NO: 21983 - DNA, 110 bp, synthetic construct
  source 1..110: mol_type = other DNA
tgcaggcacggcgacagcacacacttcaacactaagcagttcagggaagagggccatcagccaggacaaacaaagaatcgacccttgtagcacggaggtcattgtgcttc

SEQ ID NO: 21984 - DNA, 110 bp, synthetic construct
  source 1..110: mol_type = other DNA
atcagccaggacaaacaaagaatcgacccttgtagcacggaggtcattgtgcttccagaacattccagcccttcatcgccacagggtgaaaaggggaaaaatgaactcta

SEQ ID NO: 21985 - DNA, 110 bp, synthetic construct
  source 1..110: mol_type = other DNA
agctgagaggtcaactagtccagcttctcacttgactgaggggccaagggacccgaccccaccacctagctggttaggacagagcccatatccctaatcacaaggtcacg

SEQ ID NO: 21986 - DNA, 110 bp, synthetic construct
  source 1..110: mol_type = other DNA
cctcccagccatcccaaagctaccactgggcaaaactcaatgcaaacatgcgtcaagtctttctggcttgctttatgggctcctctccaaaaagcaccaatgcttatgca

SEQ ID NO: 21987 - DNA, 110 bp, synthetic construct
  source 1..110: mol_type = other DNA
ccaaacgtcttccacagcccctgactggctttatatttccccagtaagaagaagaaaagtggctcagggagctcagtcaagatcccccgggaccgagagcctacgtttca

SEQ ID NO: 21988 - DNA, 110 bp, synthetic construct
  source 1..110: mol_type = other DNA
aaagtggctcagggagctcagtcaagatcccccgggaccgagagcctacgtttcagtataacatggattttgagaaagtgggcaaatgcatcatcattaacaacaagaac

SEQ ID NO: 21989 - DNA, 110 bp, synthetic construct
  source 1..110: mol_type = other DNA
ccaaatggtgatctcttgtttacctgatggcatttgagaagtcactcttttgtggtttaatttttaaattctattaatcataatcttttggaaatgtgttaacattctct

SEQ ID NO: 21990 - DNA, 110 bp, synthetic construct
  source 1..110: mol_type = other DNA
taatacaacataaacccagtgaaaaaccacatggaagatgatgcagatagcactttctttcaaaatgactggcaggtggaaacgaattgtgcaggagtttcccatatgct

SEQ ID NO: 21991 - DNA, 110 bp, synthetic construct
  source 1..110: mol_type = other DNA
tctttcaaaatgactggcaggtggaaacgaattgtgcaggagtttcccatatgctaactgcttttcatttcaggttggaaataaaacccaacttaatcatgtggcaggac

SEQ ID NO: 21992 - DNA, 110 bp, synthetic construct
  source 1..110: mol_type = other DNA
catattggcatgttatataaccctctttttattttcctatttccatgtcattgaacgttcttctactattgtaacgactgcacagggatttattgatttttaaatctgac

SEQ ID NO: 21993 - DNA, 110 bp, synthetic construct
  source 1..110: mol_type = other DNA
cgttcttctactattgtaacgactgcacagggatttattgatttttaaatctgaccttttccaaagtgatacaagcacacgttaaaaacatcacatagttttaaaaggtt

SEQ ID NO: 21994 - DNA, 110 bp, synthetic construct; identical to SEQ ID NO: 21992
  source 1..110: mol_type = other DNA

SEQ ID NO: 21995 - DNA, 110 bp, synthetic construct; identical to SEQ ID NO: 21993
  source 1..110: mol_type = other DNA

SEQ ID NO: 21996 - DNA, 110 bp, synthetic construct
  source 1..110: mol_type = other DNA
aggtagtattgaagcatttcaggaaataaatatcacgcgcaagaatagagcctgaaagggctttatgaaaaagaatttgatctttataatacggtcatgtaaatcagcta

SEQ ID NO: 21997 - DNA, 110 bp, synthetic construct
  source 1..110: mol_type = other DNA
cgctggagtacgccctgctcgacgccgtcacccaggaggagaaggacagcttggtctaccagtatctgcagaaggtggacggttgggagcaggacttatcagtgcccgag

SEQ ID NO: 21998 - DNA, 110 bp, synthetic construct
  source 1..110: mol_type = other DNA
ctaccagtatctgcagaaggtggacggttgggagcaggacttatcagtgcccgagtttccggaaggtgaggggctggcttcagggtggggacccctcccggaacctcccc

SEQ ID NO: 21999 - DNA, 110 bp, synthetic construct
  source 1..110: mol_type = other DNA
tgtttacttagcaaccaaaatataatagaataaattttaagaaatacaggagttccctggtggctcagcaggttaaggatctggtatttttactgctgtggcgggggttc

SEQ ID NO: 22000 - DNA, 110 bp, synthetic construct; identical to SEQ ID NO: 21999
  source 1..110: mol_type = other DNA

SEQ ID NO: 22001 - DNA, 110 bp, synthetic construct
  source 1..110: mol_type = other DNA
tcccttttctggagctaggtagtgtgcacatggatgtttggttattatttaaactttatataaaaacgcccactcatagtatgtttaattaaaaattaaaccttaaaagg

SEQ ID NO: 22002 - DNA, 110 bp, synthetic construct; identical to SEQ ID NO: 22001
  source 1..110: mol_type = other DNA

SEQ ID NO: 22003 - DNA, 110 bp, synthetic construct
  source 1..110: mol_type = other DNA
ttacccaaactacctaaatctgctccgggcattagactttccccagtggctgcatctccaggacagactcttcagttcaagctaagattagacctcccatcaggaacaaa

SEQ ID NO: 22004 - DNA, 110 bp, synthetic construct
  source 1..110: mol_type = other DNA
tcttttacgctctgttctagggtcactgatgaacaaattagatgaggtccctgctctagagcttgcattgtagttgggaggccagatgagaatgactcagtaaacaagga

SEQ ID NO: 22005 - DNA, 110 bp, synthetic construct
  source 1..110: mol_type = other DNA
ctagagcttgcattgtagttgggaggccagatgagaatgactcagtaaacaaggataattgtaataacaaggtaaatagcatcaaggcctcacaaatttaatgagaagaa

SEQ ID NO: 22006 - DNA, 110 bp, synthetic construct
  source 1..110: mol_type = other DNA
caacacaaatttatggtttcatagtttctagcagctaaaagtccagtaggttatagcagccagaacagatggagacatgaatttaaagcaatttaaaaattgagaaagat

SEQ ID NO: 22007 - DNA, 110 bp, synthetic construct
  source 1..110: mol_type = other DNA
gaaatcacagaaaaggctccacttccacgtgtagacgctacatgactcagaaggcagaatggctgggctgcccatcagagccgcattcaaggcccagcttggcctctgag

SEQ ID NO: 22008 - DNA, 110 bp, synthetic construct
  source 1..110: mol_type = other DNA
agaatggctgggctgcccatcagagccgcattcaaggcccagcttggcctctgaggaggtgtgtgccttgggtaaggccctctgcctcttgggcccctcctcttgggctt

SEQ ID NO: 22009 - DNA, 110 bp, synthetic construct
  source 1..110: mol_type = other DNA
cagagccagctggtaggaaggcacagccactgccatccgacggagctggaatctgaccttctaacccaataagtcatctcatctgggtttccccttggtttcttgcacca

SEQ ID NO: 22010 - DNA, 110 bp, synthetic construct
  source 1..110: mol_type = other DNA
tttctgatcccccctccccaaatttgaactaataaattaggatggaatcgtcccttagtgatggaagccattggtcacagtgtaaaagaggctgagaagatcatgatggg

SEQ ID NO: 22011 - DNA, 110 bp, synthetic construct
  source 1..110: mol_type = other DNA
tagtgatggaagccattggtcacagtgtaaaagaggctgagaagatcatgatgggtcaggtaccatccagagttatgggagaaaaaaacaggtaatcagaggaaccaatg

SEQ ID NO: 22012 - DNA, 110 bp, synthetic construct
  source 1..110: mol_type = other DNA
aaggatcaggaaagcaatttaacttctctgagtctgttttctcagctatagggcggggacagagttctgacttcatagagttgtagtgagaattcatatgagatcatgtg

SEQ ID NO: 22013 - DNA, 110 bp, synthetic construct
  source 1..110: mol_type = other DNA
aggagcaggattgctggatcatagggcaattttatattgagttttttaaggaaccgccatactgttctccacagtgcttgcatcagcttacattcccaccaacagtgtag

SEQ ID NO: 22014 - DNA, 110 bp, synthetic construct; identical to SEQ ID NO: 22013
  source 1..110: mol_type = other DNA

SEQ ID NO: 22015 - DNA, 110 bp, synthetic construct
  source 1..110: mol_type = other DNA
gaacacttcagaactggtgctgtgatacgaataactcaaaatcaggagggaatcaaattgccatttcaacattagtgtcatgtcctacttaagatgatcagggagcaagt

SEQ ID NO: 22016 - DNA, 110 bp, synthetic construct
  source 1..110: mol_type = other DNA
tgtgggttaaggatctggcctttgcgtatgtgttaataagagtgcaatcatatttaccagaattcctcttagggagagcactgtatttggaagaagtcatttgacacact

SEQ ID NO: 22017 - DNA, 110 bp, synthetic construct; identical to SEQ ID NO: 22016
  source 1..110: mol_type = other DNA

SEQ ID NO: 22018 - DNA, 110 bp, synthetic construct
  source 1..110: mol_type = other DNA
gggtgttgctgctaatgtttttaaccaaggatctgaagctgtttgatatttttggcttcatcagccccctttccagtcccgttttggaagtaaagcagaattaaagtcca

SEQ ID NO: 22019 - DNA, 110 bp, synthetic construct
  source 1..110: mol_type = other DNA
aactacgggctctcaggaggaaaaaaaggcgatcacgtgtacttagtttccgcgagcccacagacgcagaggattaatgtcaaaagcttcctataactttaagtggttaa

SEQ ID NO: 22020 - DNA, 110 bp, synthetic construct
  source 1..110: mol_type = other DNA
ttgtattcctgtagtcctgcctatatgaaatccctaaagcttaaattttggtgagacagcactgttgaaaagcctccagtagtttttgccatctggaggagaaaacccag

SEQ ID NO: 22021 - DNA, 110 bp, synthetic construct
  source 1..110: mol_type = other DNA
aatgatcaaattgctctccagtcacttttcctggagggcaatttgctaacgcaccgaaagctttaaattgtacatatacccctatagcctacaaatttaccttcttgccg

SEQ ID NO: 22022 - DNA, 110 bp, synthetic construct
  source 1..110: mol_type = other DNA
gtggatggaatgaaataacgggtcgaggtgcttaaaacagcgcctacctctgggaggcagtcaggaagtgagcagagaccctaaaagcgctcacagctcagtccagagag

SEQ ID NO: 22023 - DNA, 110 bp, synthetic construct
  source 1..110: mol_type = other DNA
ggcagtcaggaagtgagcagagaccctaaaagcgctcacagctcagtccagagagctgtcagaacagaggcccaattgtggagggcagggcagggcagggcagagccggc

SEQ ID NO: 22024 - DNA, 110 bp, synthetic construct
  source 1..110: mol_type = other DNA
ggacatttgtgccaagtatcacacgtgatgctaatatacatctatttccagaaggctaatgatcccggagaggcctggtaacggtgtattttgggtgacacctctctttt

SEQ ID NO: 22025 - DNA, 110 bp, synthetic construct
  source 1..110: mol_type = other DNA
ctaatgatcccggagaggcctggtaacggtgtattttgggtgacacctctcttttgtgaatgatcacatttcaatttcaacagctctaattcatgcatgtaatactaccg

SEQ ID NO: 22026 - DNA, 110 bp, synthetic construct
  source 1..110: mol_type = other DNA
aaagggatccctctgctcctcattctcctgtgccagtttctccaatactctgagccccagtcatggacactttggaactgctgttagcccctttttctctgtgatagcca

SEQ ID NO: 22027 - DNA, 110 bp, synthetic construct
  source 1..110: mol_type = other DNA
cccagtcatggacactttggaactgctgttagcccctttttctctgtgatagccaagttctctaatgcaactctactcactctgaactactattcccttgactctcaaac

SEQ ID NO: 22028 - DNA, 110 bp, synthetic construct
  source 1..110: mol_type = other DNA
caaagatgagcacaatgagacggaaaagagggtgaataactggccctaagacatgcagctgcgggcgcccgctaactgctattcgtaaccacatcttggtgatactgatg

SEQ ID NO: 22029 - DNA, 110 bp, synthetic construct
  source 1..110: mol_type = other DNA
ccaaggctgggactttggtctgagcgtgagtcccatccactctcctgcaaggtacagatgtctgcatcacctgccagaaactggggagctggtcaggctgatgtaggctt

SEQ ID NO: 22030 - DNA, 110 bp, synthetic construct
  source 1..110: mol_type = other DNA
ccaaaataaagatttaagagtttcatagtcagtttttaagagtttcatagtcaggttttttttgttgttgttgttctttttgcttgttttctgctgtgctgtgcagcagc

SEQ ID NO: 22031 - DNA, 110 bp, synthetic construct
  source 1..110: mol_type = other DNA
ttaagagtttcatagtcaggttttttttgttgttgttgttctttttgcttgttttctgctgtgctgtgcagcagcttgatgtgagatctcagttcttggagcagggattg

SEQ ID NO: 22032 - DNA, 110 bp, synthetic construct
  source 1..110: mol_type = other DNA
gggttcctcctccttgtgcacccccccacctccatctccttgacttcacatgccagagcctcctaatggcatggagaccccatccccttggcccttggggagcttggggg

SEQ ID NO: 22033 - DNA, 110 bp, synthetic construct
  source 1..110: mol_type = other DNA
gagcctcctaatggcatggagaccccatccccttggcccttggggagcttggggggcccaaggcatcacctgcagtttcctgcaacctccttcattttcctgaggacacg

SEQ ID NO: 22034 - DNA, 110 bp, synthetic construct
  source 1..110: mol_type = other DNA
gcctccctccccttttgattcccttccctttgggagctatgcaatatctcacaaaagcagaatccactggctgggtctcaacagcttttgtgatatgtctaagatgtggc

SEQ ID NO: 22035 - DNA, 110 bp, synthetic construct
  source 1..110: mol_type = other DNA
tcacggtaacggtttaaaagtttgactatatttacgtagtaagtgctgttcttcttttcagtagatgtcatgattataagacggtgtaacatttgagtcctaagaccaca

SEQ ID NO: 22036 - DNA, 110 bp, synthetic construct
  source 1..110: mol_type = other DNA
tttcagtagatgtcatgattataagacggtgtaacatttgagtcctaagaccacactgaaaactgcctcatcacttcagatgcaaatccaagcctcctatcagagtcagt

SEQ ID NO: 22037 - DNA, 110 bp, synthetic construct
  source 1..110: mol_type = other DNA
acttctagtcactcttggaaattggaaattctggacactcagcccacattccttcatacctacgtctgtaggaaacaggacagagcaacagagtggctccttctttagag

SEQ ID NO: 22038 - DNA, 110 bp, synthetic construct
  source 1..110: mol_type = other DNA
tttctgctgtacagccaagtgacccagttatggtcctccaaatttgacttctgatactttggccaatgattagaatccagaagccagctgcataaaaactgtttaaaatc

SEQ ID NO: 22039 - DNA, 110 bp, synthetic construct
  source 1..110: mol_type = other DNA
actttggccaatgattagaatccagaagccagctgcataaaaactgtttaaaatccacaaccattttccaattaaacagcagtggtactcctccaattcattctaaatct

SEQ ID NO: 22040 - DNA, 110 bp, synthetic construct
  source 1..110: mol_type = other DNA
agcgaggccaaggatcaaatctgcatcctcacagagacaaaggtgggtctttaaccggctgagctacgacaggaactcctggcactgtttttcatctttttttttttttt

SEQ ID NO: 22041 - DNA, 110 bp, synthetic construct; identical to SEQ ID NO: 22040
  source 1..110: mol_type = other DNA

SEQ ID NO: 22042 - DNA, 110 bp, synthetic construct
  source 1..110: mol_type = other DNA
catgagccatggtgtaggttgcagacacaaagaaggttttacctttttagtttttagctcattttctaagttacaccttggtttcagtcatgctctggggaagagcctct

SEQ ID NO: 22043 - DNA, 110 bp, synthetic construct
  source 1..110: mol_type = other DNA
agctcattttctaagttacaccttggtttcagtcatgctctggggaagagcctctggccacacttaactcaaaccagtttagggagactatggccagtctgggtgggggt

SEQ ID NO: 22044 - DNA, 110 bp, synthetic construct; identical to SEQ ID NO: 22042
  source 1..110: mol_type = other DNA

SEQ ID NO: 22045 - DNA, 110 bp, synthetic construct; identical to SEQ ID NO: 22043
  source 1..110: mol_type = other DNA

SEQ ID NO: 22046 - DNA, 110 bp, synthetic construct
  source 1..110: mol_type = other DNA
ccaaaccttggttgctgatttagagcgtgtatactgcctcctggaacacaagcttcggtgttgcaggatgctcacttcactggcactgtaacggagtctttaaaatgcca

SEQ ID NO: 22047 - DNA, 110 bp, synthetic construct
  source 1..110: mol_type = other DNA
cggtgttgcaggatgctcacttcactggcactgtaacggagtctttaaaatgccacactactgtttatcaagcagctgcttcaggacaatgggaaacatggtaagcccag

SEQ ID NO: 22048 - DNA, 110 bp, synthetic construct
  source 1..110: mol_type = other DNA
gctctggtattggcaccacccctcccccaccccgctctttcctaaccttgtcttggcttgatttaccagagagcttgttaatgaaaactatatgcgttagagccagacaa

SEQ ID NO: 22049 - DNA, 110 bp, synthetic construct
  source 1..110: mol_type = other DNA
tctatacatacaaggatggcagatctgtaatgagttgcaagtgaaggtgaagagtcgagcttaggcctggccttatgggtttgtgttaaagcatatggtcttgtccttcc

SEQ ID NO: 22050 - DNA, 110 bp, synthetic construct
  source 1..110: mol_type = other DNA
cgagcttaggcctggccttatgggtttgtgttaaagcatatggtcttgtccttccaagcatggtgatgttgtaatcagagagtgacactaggactctgttccagacatcg

SEQ ID NO: 22051 - DNA, 110 bp, synthetic construct
  source 1..110: mol_type = other DNA
ggataaaagctgtgaagaatcaaaagctgtagttcttcttaatcctcaggctccccaaaattgatcctgctcttaatttcatggtgcacactgactaggattccttttag

SEQ ID NO: 22052 - DNA, 110 bp, synthetic construct
  source 1..110: mol_type = other DNA
tatgtgcatatccagtctattgagtctagctgcagaatattccacaattcttatctcttcattgggtgcttacagtatgcgaggttctgtattaagtgctttaggtgcgt

SEQ ID NO: 22053 - DNA, 110 bp, synthetic construct
  source 1..110: mol_type = other DNA
gactgtataatttctattaaactattatcatcttcactgactgttgcctctgtcatgccatctccattatgcttttttaaaaatttttttttgggaggacttgcccatgg

SEQ ID NO: 22054 - DNA, 110 bp, synthetic construct; identical to SEQ ID NO: 22053
  source 1..110: mol_type = other DNA

SEQ ID NO: 22055 - DNA, 110 bp, synthetic construct
  source 1..110: mol_type = other DNA
ttttcgtaaatgcttgaaaagtaggtacatcctataatttcaaggtatagcattttacgaaattcctagtttctctggaaattttcttttctttttctttaactcccccc

SEQ ID NO: 22056 - DNA, 110 bp, synthetic construct; identical to SEQ ID NO: 22055
  source 1..110: mol_type = other DNA

SEQ ID NO: 22057 - DNA, 110 bp, synthetic construct
  source 1..110: mol_type = other DNA
caagacactgcagatactgttgcaccacagcaggaactcctgtttattgttctattgatgaacacctgggccatttgcaatttggactgttaggaataaaactgcagtga

SEQ ID NO: 22058 - DNA, 110 bp, synthetic construct
  source 1..110: mol_type = other DNA
tttacttggaagaataaacagttctgaatttaaatgtaccttacaaacactgttttaagtagagcaaaaattgacagaatgccgggggaccaatcctagtgtgatatttt

SEQ ID NO: 22059 - DNA, 110 bp, synthetic construct
  source 1..110: mol_type = other DNA
taaatctatttcttgcctatgaaaaaaaaaattcagtacttttcatatgccatgccattgttttctggccttattgtttcaaatgagaagtcagctatttatctcattgg

SEQ ID NO: 22060 - DNA, 110 bp, synthetic construct
  source 1..110: mol_type = other DNA
cattgttttctggccttattgtttcaaatgagaagtcagctatttatctcattgggattcttttatatacaaagaaccttctttctcttgctgctttcaaaatttttatc

SEQ ID NO: 22061 - DNA, 110 bp, synthetic construct
  source 1..110: mol_type = other DNA
tccatttaatagtcttggattgcagttgagcatgggtgaccgaaaccacagaacgtagaagctcagatggagggactgctgcactctttccatttctttagggcttgatt

SEQ ID NO: 22062 - DNA, 110 bp, synthetic construct
  source 1..110: mol_type = other DNA
agggtgtaccacagtttactcaaccattctcttaagtatgaatatttaggtgatttccaataattttcacatgtcaaaaatcaattttctgtgtgcatgtgtatttttgt

SEQ ID NO: 22063 - DNA, 110 bp, synthetic construct; identical to SEQ ID NO: 22062
  source 1..110: mol_type = other DNA

SEQ ID NO: 22064 - DNA, 110 bp, synthetic construct
  source 1..110: mol_type = other DNA
tggaagttcccaagctaggtgtcacatcggagctgcagctgccatagccacagcaatgcaggatccaggcctcatctgtgacctacactatagctcatggcaataccaga

SEQ ID NO: 22065 - DNA, 110 bp, synthetic construct; identical to SEQ ID NO: 22064
  source 1..110: mol_type = other DNA

SEQ ID NO: 22066 - DNA, 110 bp, synthetic construct
  source 1..110: mol_type = other DNA
ttcagccagggtatattctcagcctgtggaagctggctgcccttcccgccacctgaccctctccacttcatggcttggtacttcttcagtgccacttgcagaatctcatt

SEQ ID NO: 22067 - DNA, 110 bp, synthetic construct
  source 1..110: mol_type = other DNA
actttcatttactgtagttgttcacgtttcactgagtagagtgcctattgattaccaatgtgggcatgggatttttttcattttattggtttaatagggcccagtgtatg

SEQ ID NO: 22068 - DNA, 110 bp, synthetic construct
  source 1..110: mol_type = other DNA
tggccaacccagtgatactagcaggaagcagacacttcagctatctaccattgcggtcatgaagactgtagtttttcttgattaaaaacgttgtaagacaggttgtagga

SEQ ID NO: 22069 - DNA, 110 bp, synthetic construct
  source 1..110: mol_type = other DNA
tagttcaaaaacattagggcatgaatttttaaaatgttgctaataccaagtcaggatacaatatcgagaggaattaagaagcactaattgagtcacacagaacattaaag

SEQ ID NO: 22070 - DNA, 110 bp, synthetic construct
  source 1..110: mol_type = other DNA
agtgagagaagtctctatttaaaaggttaattttggtgttatgcgtactcatctctgagaaagacagtgttgccttgcaaaggtaaaaaatttgaaatggtatcagcccc

SEQ ID NO: 22071 - DNA, 110 bp, synthetic construct
  source 1..110: mol_type = other DNA
tgagaaagacagtgttgccttgcaaaggtaaaaaatttgaaatggtatcagccccaagcccatcttattcagatgcctctttccctgggtacatgttcaaaatctctttg

SEQ ID NO: 22072 - DNA, 110 bp, synthetic construct
  source 1..110: mol_type = other DNA
ctgatctgtaaatcatttgattagtgttagtgatcagctgcatcatttttgcccctgttgaaaattgttagggattgtaatttcttcttgttccctttggatttttccat

SEQ ID NO: 22073 - DNA, 110 bp, synthetic construct
  source 1..110: mol_type = other DNA
gacttcagaactgcagcggccccacggagctgggggagaaatgtccacaaaggttaacacatacaggctggcatgaatgcttcaggaaacaccgagcctggcacgaggct

SEQ ID NO: 22074 - DNA, 110 bp, synthetic construct
  source 1..110: mol_type = other DNA
accattccttgactaaaacgatattcctattgtttcaaaggtgacatggtatttaaacctatttttttgtgtttttgtgcacatgtgtgtgcatggattatgtgtgttca

SEQ ID NO: 22075 - DNA, 110 bp, synthetic construct
  source 1..110: mol_type = other DNA
cctattgtttcaaaggtgacatggtatttaaacctatttttttgtgtttttgtgcacatgtgtgtgcatggattatgtgtgttcacacatgtgtacttgcacatgtgttt

SEQ ID NO: 22076 - DNA, 110 bp, synthetic construct
  source 1..110: mol_type = other DNA
cagattttgaaatcgcttctgtctcctaatgatctctcccaatcagcaaccacatgggctttttgtagctcaatttcagcagttcaagagaatgggtattaatctttgaa

SEQ ID NO: 22077 - DNA, 110 bp, synthetic construct
  source 1..110: mol_type = other DNA
gaactcacatagtacattcgtttattgttttataggaccaattaaaaagacaaaggggtctattctccccttgatacacaagggtgacttccattaacattaatggaagg

SEQ ID NO: 22078 - DNA, 110 bp, synthetic construct
  source 1..110: mol_type = other DNA
gggtctattctccccttgatacacaagggtgacttccattaacattaatggaagggaaatacttgcatggaaatgagtgcagccttcggattagaaagtgggggaaaaaa

SEQ ID NO: 22079 - DNA, 110 bp, synthetic construct
  source 1..110: mol_type = other DNA
tgtatttttaaaaataatacacaggagggaactacatagacatgaaatccacatctgtctcacctaaaatgaccttgtccaccagcttgggaacacaaaggcctccttta

SEQ ID NO: 22080 - DNA, 110 bp, synthetic construct
  source 1..110: mol_type = other DNA
tgtctcacctaaaatgaccttgtccaccagcttgggaacacaaaggcctcctttagggggatacggctccaaaaggctggggtagagtgagtttccaagaagggatgttt

SEQ ID NO: 22081 - DNA, 110 bp, synthetic construct
  source 1..110: mol_type = other DNA
cctgcctggatggctctttccccacttccggtgacttcttaacatttaggctttacatctgaggacacctcctcaaacagccatcctctggtcccccagactaaggccac

SEQ ID NO: 22082 - DNA, 110 bp, synthetic construct
  source 1..110: mol_type = other DNA
catctgaggacacctcctcaaacagccatcctctggtcccccagactaaggccacttcccagtgcttttcatcacggcgccctatttctctcacagcagtaacgctttat

SEQ ID NO: 22083 - DNA, 110 bp, synthetic construct
  source 1..110: mol_type = other DNA
ctttgtaaccgcactctttctctctcctacccccaccccccaacaagctataccgctcaccaaagctgacccaagatttcacccctgagacttcaattcgatgacgtgca

SEQ ID NO: 22084 - DNA, 110 bp, synthetic construct
  source 1..110: mol_type = other DNA
gtgtctcagaagtagtcatcagagtctgagtggctcctccttcttccatcacagtcaacaagattactctaaactccttagctgtcgcactgcttttcattaaagaaaaa

SEQ ID NO: 22085 - DNA, 110 bp, synthetic construct
  source 1..110: mol_type = other DNA
ttctggacatcaccctgcctcaatcatctcatctctaaaatggaagtaatatccaagctgcacttcacaatgattccataagttaatgatgtcaagctcttaaacagtgc

SEQ ID NO: 22086 - DNA, 110 bp, synthetic construct
  source 1..110: mol_type = other DNA
gtggccttaaaaagcaaaataatttttaaaaaatggggggcagggggactcaattcaaccgataacaaactttatcatcattccccaacatatttaactatctgaaggcc

SEQ ID NO: 22087 - DNA, 110 bp, synthetic construct
  source 1..110: mol_type = other DNA
caaccgataacaaactttatcatcattccccaacatatttaactatctgaaggcctaactcccactaatgtcccatggaaccagtgtttcccagcatagatcaagaaatg

SEQ ID NO: 22088 - DNA, 110 bp, synthetic construct
  source 1..110: mol_type = other DNA
acttaactttcaaggtttgttatggtttgaattgtgattccccagtaagatatgtgaagccctaatcccccaataactcagaatgtgaccttatttgggaatagggtggt

SEQ ID NO: 22089 - DNA, 110 bp, synthetic construct
  source 1..110: mol_type = other DNA
tgagtttggaaggatgaactggaacccagtcccttcctttgccctgtctctttggagtctggcctgcctcagagaatgtatgttccactctgctcctctgtcctttaagt

SEQ ID NO: 22090 - DNA, 110 bp, synthetic construct
  source 1..110: mol_type = other DNA
agtctggcctgcctcagagaatgtatgttccactctgctcctctgtcctttaagttttacagtgctaagactccatgagggaaaactttttgcatccaattctgccttca

SEQ ID NO: 22091 - DNA, 110 bp, synthetic construct
  source 1..110: mol_type = other DNA
tccctagagaatttataacttcagagtgacctatataaactaaagcaacaatacccaccctccacacatgctttgggaaaagcaccttggttggttcaaattcttagaat

SEQ ID NO: 22092 - DNA, 110 bp, synthetic construct
  source 1..110: mol_type = other DNA
aaggagacaaaacaaagcatggaatgggaatataatgtgttgatgacaatggggttgatgaagggaaaggggatttttgataagatggccaggaagtccttaatgaaaag

SEQ ID NO: 22093 - DNA, 110 bp, synthetic construct
  source 1..110: mol_type = other DNA
tgatgaagggaaaggggatttttgataagatggccaggaagtccttaatgaaaagatggcctaaagagttagccatgcagataccagggaaaggcattccaagccaaggg

SEQ ID NO: 22094 - DNA, 110 bp, synthetic construct
  source 1..110: mol_type = other DNA
tatggtcccacttgtttactttgcttttgttgtctgagcttttggtgtcacattcaaaaaaatcatcaccaaggtcaatgtcaaggagcttttcccttaggttttctggg

SEQ ID NO: 22095 - DNA, 110 bp, synthetic construct; identical to SEQ ID NO: 22094
  source 1..110: mol_type = other DNA

SEQ ID NO: 22096 - DNA, 110 bp, synthetic construct
  source 1..110: mol_type = other DNA
aaatgtggcttatattcctattaggcaatgctgatgtattcctcttaggcaagcagggaaaggaggctgaggtttcaagaccaataacatggccagtctgcattttaagc

SEQ ID NO: 22097 - DNA, 110 bp, synthetic construct; identical to SEQ ID NO: 22096
  source 1..110: mol_type = other DNA

SEQ ID NO: 22098 - DNA, 110 bp, synthetic construct
  source 1..110: mol_type = other DNA
tttcgcaaatgtttttcctttgcaggttggagatataaagtgtctgtcacactgtcaggaaagaaggtcacaggacacatactcgtttctttgtttggaaatgaaggaaa

SEQ ID NO: 22099 - DNA, 110 bp, synthetic construct
  source 1..110: mol_type = other DNA
aaacttgactgctttcagaatggatggtgaaaccaaagcacctatgtgatccagagcccagagtcaggaaagggagatgcccgaggcccagctgatccctccagaaggac

SEQ ID NO: 22100 - DNA, 110 bp, synthetic construct
  source 1..110: mol_type = other DNA
gcccagagtcaggaaagggagatgcccgaggcccagctgatccctccagaaggaccacaggcctctgaaccactgcggccatgtctctcagaggatgtcccatggctaag

SEQ ID NO: 22101 - DNA, 110 bp, synthetic construct
  source 1..110: mol_type = other DNA
catctttccctgacctgggtgagggagctgtagcccagagaggggaagcaaccgccctaggtcacacagcagatagtcacagagttgggcaaaattccaaactcttaggc

SEQ ID NO: 22102 - DNA, 110 bp, synthetic construct
  source 1..110: mol_type = other DNA
atatgttctttagctagtggccaaaagaaagaaaataacaaagggtgagaaagcacaaaagagcaggcagatggtcacctgcggtcagtggcggtaaaagagcacggggg

SEQ ID NO: 22103 - DNA, 110 bp, synthetic construct
  source 1..110: mol_type = other DNA
caaaagagcaggcagatggtcacctgcggtcagtggcggtaaaagagcacgggggcgggggggggggggcggttaggaacagaacactcagtgatacgtgatcaaaatga

SEQ ID NO: 22104 - DNA, 110 bp, synthetic construct
  source 1..110: mol_type = other DNA
gaccactgacaagcatgacaatgggaccctcactttgggccacgcctcaccagccctggctctctgggcaattcacaaaaagcgggcttcatctcagttcgagtgggcac

SEQ ID NO: 22105 - DNA, 110 bp, synthetic construct
  source 1..110: mol_type = other DNA
ctggctctctgggcaattcacaaaaagcgggcttcatctcagttcgagtgggcaccggccagcccaaggcctgacctctgcaccctgcagcctctccctcccccttctta

SEQ ID NO: 22106 - DNA, 110 bp, synthetic construct
  source 1..110: mol_type = other DNA
cacttgccatgtgccaggaaattaggctgtgggcacctgttcctctcagaagtcactggtcaggagctaccatctgaaggttgtggactgctgacctgatgcctggaggt

SEQ ID NO: 22107 - DNA, 110 bp, synthetic construct
  source 1..110: mol_type = other DNA
accactaccctcatcccactacatttttttaaaacattcaccaacagtaatacattgaccatgccaaaaaccaacaatgaatataagcatcaaatatgaccataatttag

SEQ ID NO: 22108 - DNA, 110 bp, synthetic construct
  source 1..110: mol_type = other DNA
gcaggtgccttaaagagcagaggcatgacccctctccacctttttctttctccaccagtgcctgaataaacaagagacagataacctgggggtcccttgttgccacttaa

SEQ ID NO: 22109 - DNA, 110 bp, synthetic construct
  source 1..110: mol_type = other DNA
tccaccttctgggagacggcatacatcttgcgtcggcctattcccttatctgcagcaggtctccaagctgaagggccacatttaggaggtggagcctgggaacctatcct

SEQ ID NO: 22110 - DNA, 110 bp, synthetic construct
  source 1..110: mol_type = other DNA
caggtctccaagctgaagggccacatttaggaggtggagcctgggaacctatcctttatgaatagcatgtgaacagagggggatctggtggcaaatgctagaggcggtcc

SEQ ID NO: 22111 - DNA, 110 bp, synthetic construct
  source 1..110: mol_type = other DNA
agaaagatgctgcagagatccagacagccaagccagtgctcacagcctccacctctggcggcttccagaatatcttctcttactacgacaactccaccatggccactggg

SEQ ID NO: 22112 - DNA, 110 bp, synthetic construct
  source 1..110: mol_type = other DNA
tggcggcttccagaatatcttctcttactacgacaactccaccatggccactgggaaccacactggcgactttcacggggggctgctgccgaaggccaccacgcagcgca

SEQ ID NO: 22113 - DNA, 110 bp, synthetic construct
  source 1..110: mol_type = other DNA
aggcccccattctgggctttttgcttgagaatcgtgaagttggtgtttacgatccgagagtcagctgacccttggacaactcatgagtcagagacgctgaccctccgcac

SEQ ID NO: 22114 - DNA, 110 bp, synthetic construct
  source 1..110: mol_type = other DNA
gagagtcagctgacccttggacaactcatgagtcagagacgctgaccctccgcacagttgaaagtctctgtaacgtctagtcagcccgcagtgtctgcggttccagagcg

SEQ ID NO: 22115 - DNA, 110 bp, synthetic construct
  source 1..110: mol_type = other DNA
tatgttaaaacatttggtctggcccctgatgtttttcctctacttcagaactctcagattcagaggttgcacagctcatttttgtggtgccttcttctcttctccccaaa

SEQ ID NO: 22116 - DNA, 110 bp, synthetic construct
  source 1..110: mol_type = other DNA
agattcagaggttgcacagctcatttttgtggtgccttcttctcttctccccaaatgatctcaggcatttcaggctgcactaagaataaaacagtatttgaagactccag

SEQ ID NO: 22117 - DNA, 110 bp, synthetic construct
  source 1..110: mol_type = other DNA
taactgggtcagcatgctgtacagtagatctacatagctttaaaaacctctagaaggagttcccgttatggctcaatggtaatgaacctgactagtatctgtgaggatgc

SEQ ID NO: 22118 - DNA, 110 bp, synthetic construct
  source 1..110: mol_type = other DNA
aattgctttttattcatttcgtcatccttcagaatttataaacagtctgtgtcatgggctgtgcatcagcttgtcacggacactatgcaaggccagtcaggaatgtttgg

SEQ ID NO: 22119 - DNA, 110 bp, synthetic construct
  source 1..110: mol_type = other DNA
caaaagaaacatttgtttggttaaaaacaaacaaacaacctattgcttgtttctaaaacagagctgtaggcagctttttattgttttgtcttttttttagggctgcacca

SEQ ID NO: 22120 - DNA, 110 bp, synthetic construct
  source 1..110: mol_type = other DNA
caacctattgcttgtttctaaaacagagctgtaggcagctttttattgttttgtcttttttttagggctgcaccatggcatatggaagttcccgggctaggggtcagatt

SEQ ID NO: 22121 - DNA, 110 bp, synthetic construct
  source 1..110: mol_type = other DNA
gctggccatttctgctgccactggccaagtctctacttcttgcccatctgtctctcttctttttcacccgtatcttaagctgtcactcaagcccctgggggctggcctgg

SEQ ID NO: 22122 - DNA, 110 bp, synthetic construct
  source 1..110: mol_type = other DNA
cttctttttcacccgtatcttaagctgtcactcaagcccctgggggctggcctgggaacccagacccttcttactctcagccctgcagagtaggccccttagagggagaa

SEQ ID NO: 22123 - DNA, 110 bp, synthetic construct
  source 1..110: mol_type = other DNA
aaccaatatgcaattgattgcaatgtacgtaattgtcttttaatgatttttaccttttccactatagttgatttacagtgttctgtcaacttctactgtacagcaaaggg

SEQ ID NO: 22124 - DNA, 110 bp, synthetic construct; identical to SEQ ID NO: 22123
  source 1..110: mol_type = other DNA

SEQ ID NO: 22125 - DNA, 110 bp, synthetic construct
  source 1..110: mol_type = other DNA
ttaaactgtatttctgaattcaaaccccaaagtccaaatgtccctgcctcttctcttctccctctttctctgtcttccttcctgttttcttccctccttcccttttttcc

SEQ ID NO: 22126 - DNA, 110 bp, synthetic construct; identical to SEQ ID NO: 22125
  source 1..110: mol_type = other DNA

SEQ ID NO: 22127 - DNA, 110 bp, synthetic construct
  source 1..110: mol_type = other DNA
acctggtgacatgacagtcatttgaaacattgcctcctgcatgccttcttccctccaattattatgaaaaagcacacacttataactctaggagagtggacagtgtaatg

SEQ ID NO: 22128 - DNA, 110 bp, synthetic construct
  source 1..110: mol_type = other DNA
caattattatgaaaaagcacacacttataactctaggagagtggacagtgtaatggacacatttcccattttcaacaacagttacgctcatgtattcagattcatgcatt

SEQ ID NO: 22129 - DNA, 110 bp, synthetic construct
  source 1..110: mol_type = other DNA
catcctcatggacactatgttgggttcttaaccctgagcttcaatgggaactctatggcctcctttctaattctttgttcatcagctttcagagtggatgggaaccctcc

SEQ ID NO: 22130 - DNA, 110 bp, synthetic construct; identical to SEQ ID NO: 22129
  source 1..110: mol_type = other DNA

SEQ ID NO: 22131 - DNA, 110 bp, synthetic construct
  source 1..110: mol_type = other DNA
ccatgtgatatatatatgtgtgtgtgtgtatacagagagaacctttttttattggccatgcccacagcatatggaagttcctaggctagggattgaacctgggctacagc

SEQ ID NO: 22132 - DNA, 110 bp, synthetic construct; identical to SEQ ID NO: 22131
  source 1..110: mol_type = other DNA

SEQ ID NO: 22133 - DNA, 110 bp, synthetic construct
  source 1..110: mol_type = other DNA
tatttatttattaggatctttatcatcaggtaagagtaataagagggttattacaggattctgcccactgagcccagtttgcacatttgctgatgggtgggggaatgggt

SEQ ID NO: 22134 - DNA, 110 bp, synthetic construct
  source 1..110: mol_type = other DNA
ggattctgcccactgagcccagtttgcacatttgctgatgggtgggggaatgggtggggtggagggcaaacggcaagagtttggggtgggattgtgctccgtgcttggga

SEQ ID NO: 22135 - DNA, 110 bp, synthetic construct
  source 1..110: mol_type = other DNA
tggaacatatgtccctttggggtgagaatactgggccttcacctgccaacttctactgggcattggctgaggactgcttctagaagcagtaacttcctggcacttcttgt

SEQ ID NO: 22136 - DNA, 110 bp, synthetic construct
  source 1..110: mol_type = other DNA
ctcaatgagatagttgggcttgtttgagtttcccctccctgtgctagggtctggaaactctctccagcaggaagctgggccaatcacagggcttttttgtctcttccctt

SEQ ID NO: 22137 - DNA, 110 bp, synthetic construct
  source 1..110: mol_type = other DNA
aactctctccagcaggaagctgggccaatcacagggcttttttgtctcttcccttcttcccttctttcagggatcactggctgtgctgcctcttgtccaaggtttgaaaa

SEQ ID NO: 22138 - DNA, 110 bp, synthetic construct
  source 1..110: mol_type = other DNA
aggctttgggctgagcctctttccttgaccactgtttctttcttttgtaaaattgatttcttcagctattaagtgaggatgattccatatgcctctatgagccatccaaa

SEQ ID NO: 22139 - DNA, 110 bp, synthetic construct
  source 1..110: mol_type = other DNA
atttcagccccttggcatgtgggaactggacctggaccagaattagaagttgagatgtggctaaggccaggcctgatccaacgcgtgcaccagcaagatgtctggggacc

SEQ ID NO: 22140 - DNA, 110 bp, synthetic construct
  source 1..110: mol_type = other DNA
tgtggctaaggccaggcctgatccaacgcgtgcaccagcaagatgtctggggacccagctcctcagcccagaaacgagtgaccccgattttctggtggttccagaccctt

SEQ ID NO: 22141 - DNA, 110 bp, synthetic construct
  source 1..110: mol_type = other DNA
ccagaatccagaacagatttaggctctctgttgcccttgctctactctgagtggccactgatagctcccagaaaggccatggcgctgtagatgtccccatcctttcccag

SEQ ID NO: 22142 - DNA, 110 bp, synthetic construct
  source 1..110: mol_type = other DNA
cactgatagctcccagaaaggccatggcgctgtagatgtccccatcctttcccaggtgggaaaaacagactcagcagtccagtcaaggagaaaggagggtgcctctcaag

SEQ ID NO: 22143 - DNA, 110 bp, synthetic construct
  source 1..110: mol_type = other DNA
tttggtccaaaacaaaactgatggggaatccaagtacatgaaacagatcacagcagagctcttgcggctggaatgagggctgaggttgtgggccgagaattctcacctct

SEQ ID NO: 22144 - DNA, 110 bp, synthetic construct
  source 1..110: mol_type = other DNA
gagctcttgcggctggaatgagggctgaggttgtgggccgagaattctcacctctccaaccattccctgccacctactcgtccgctctctcaagcccccaggacacctgg

SEQ ID NO: 22145 - DNA, 110 bp, synthetic construct
  source 1..110: mol_type = other DNA
ctctgtcaccaaatagctttgaggatctttgtggagacacttcatgtctctgggcctcagtgtgcctacctggaagctaaggacactagactagatgaatttcaaagcca

SEQ ID NO: 22146 - DNA, 110 bp, synthetic construct
  source 1..110: mol_type = other DNA
ctcagtgtgcctacctggaagctaaggacactagactagatgaatttcaaagccacactcatctgtgaaattctaattacatttgattaatatttaataaaatattaaca

SEQ ID NO: 22147 - DNA, 110 bp, synthetic construct
  source 1..110: mol_type = other DNA
atgtcccctagtgactccaatgaattggatacacgtcccaggggctcaagctagtcctagcttataacttacacaatggaacaaaaggatgtcaggtgagtcctgcaggg

SEQ ID NO: 22148 - DNA, 110 bp, synthetic construct
  source 1..110: mol_type = other DNA
gggctagagagtgggcagctcagggcaccagttaccggttctccacagaaaacaacgcagtattcctccttccctagatggagagcacatctacttttagctcagaccct

SEQ ID NO: 22149 - DNA, 110 bp, synthetic construct
  source 1..110: mol_type = other DNA
cgcagtattcctccttccctagatggagagcacatctacttttagctcagaccctaagagaagctcagaatggtcccactcatcactacaattgcagggcacttggggac

SEQ ID NO: 22150 - DNA, 110 bp, synthetic construct
  source 1..110: mol_type = other DNA
tgccaacacacctgcactggaaggcttaagatattttccagtttatttttctctttgtggcgtgtccagttgtagttggaaagttcttcgttttcgtctgatgcagaaat

SEQ ID NO: 22151 - DNA, 110 bp, synthetic construct
  source 1..110: mol_type = other DNA
tgtggcgtgtccagttgtagttggaaagttcttcgttttcgtctgatgcagaaataatcaaaagatgccaatttcatgggactgctctctctctctctagatccctggca

SEQ ID NO: 22152 - DNA, 110 bp, synthetic construct
  source 1..110: mol_type = other DNA
aaatctgcatgaataaaacctccagtggggtcctgatcaacacaacttgtcacgtccaaaggaagggtcagcaaagaagggtaccaagagatagaagagattaactaggg

SEQ ID NO: 22153 - DNA, 110 bp, synthetic construct
  source 1..110: mol_type = other DNA
ccaaaggaagggtcagcaaagaagggtaccaagagatagaagagattaactagggaagagctttgctttcagaacttgatttgttgactatttttacaaggaaggtgagc

SEQ ID NO: 22154 - DNA, 110 bp, synthetic construct
  source 1..110: mol_type = other DNA
taattctaacttcttttgcccctccatttctctgttagagtttattgtacttgtttctgttcatgtcttcctaaggaaggtcttagctctttgaattgccttgtgtgtgg

SEQ ID NO: 22155 - DNA, 110 bp, synthetic construct
  source 1..110: mol_type = other DNA
tctgttcatgtcttcctaaggaaggtcttagctctttgaattgccttgtgtgtggtggctcttcctttcgcagtgcttagcaggcaatagacactcactgatccaatggc

SEQ ID NO: 22156 - DNA, 110 bp, synthetic construct
  source 1..110: mol_type = other DNA
agtagtcactcttttccaacctcattcattcattcatttattcttttcctctgtctaatataaacagctttgagtaagcatttgagagttaactggtcaacttgagaaaa

SEQ ID NO: 22157 - DNA, 110 bp, synthetic construct
  source 1..110: mol_type = other DNA
atagttcttgtcatcagaaacctgctcatcagatgagctgaagtcaatgtagctggaagcaaagtccagtgacttaaaatgctcatgctacctgctaagaaaaaggcaag

SEQ ID NO: 22158 - DNA, 110 bp, synthetic construct
  source 1..110: mol_type = other DNA
gaagcaaagtccagtgacttaaaatgctcatgctacctgctaagaaaaaggcaagggggaataaggctccccttgcctgctgttcagttatggctcctcctggggaggcc

SEQ ID NO: 22159 - DNA, 110 bp, synthetic construct
  source 1..110: mol_type = other DNA
gccagccttagatgagtcgatttggggtcctttccaactctagaattccttgtatattctgtaaaacacctaatgtttatatgttaatcctttccatcctcatatcttta

SEQ ID NO: 22160 - DNA, 110 bp, synthetic construct
  source 1..110: mol_type = other DNA
attctgtaaaacacctaatgtttatatgttaatcctttccatcctcatatctttatggagcttctcctaggacgcatgccttgtgctgcttcaaaagatcggtatgctac

SEQ ID NO: 22161 - DNA, 110 bp, synthetic construct
  source 1..110: mol_type = other DNA
gttataagctgcaacttctagaagggttgacagatggaaggaagctaaataactcccaggccgaccccacaaggtcaagggctcttcacacaggacttggtgctatcacc

SEQ ID NO: 22162 - DNA, 110 bp, synthetic construct
  source 1..110: mol_type = other DNA
ccaggccgaccccacaaggtcaagggctcttcacacaggacttggtgctatcaccagcaggaacatgatggctgggacagcagaggcttggaattactctagaaatatgt

SEQ ID NO: 22163 - DNA, 110 bp, synthetic construct
  source 1..110: mol_type = other DNA
tccagagtccagagtgtaatgacttcgctatttttacattggctggtatcagcaacacccctctagatgctctttttctccatagcttgtcaccacatcagagtatggtg

SEQ ID NO: 22164 - DNA, 110 bp, synthetic construct
  source 1..110: mol_type = other DNA
cacccctctagatgctctttttctccatagcttgtcaccacatcagagtatggtggctctcaaacttgaatgtacatcacagtcacctgggctgcggggtggggcttgtt

SEQ ID NO: 22165 - DNA, 110 bp, synthetic construct; identical to SEQ ID NO: 22163
  source 1..110: mol_type = other DNA

SEQ ID NO: 22166 - DNA, 110 bp, synthetic construct; identical to SEQ ID NO: 22164
  source 1..110: mol_type = other DNA

SEQ ID NO: 22167 - DNA, 110 bp, synthetic construct
  source 1..110: mol_type = other DNA
aaaaccaaactcacatttgagattcataaatagaggtgagacaataaggtgaatgtactgtgttccagagaagatgctaaactaaagtacatttggtttttattaactaa

SEQ ID NO: 22168 - DNA, 110 bp, synthetic construct
  source 1..110: mol_type = other DNA
taattcttccttttaggttagtgatccatcttgagttaatttttgtatatagaatgaagtagggacccagcttcattcttttgcatacggattctgttgcccaacagtat

SEQ ID NO: 22169 - DNA, 110 bp, synthetic construct
  source 1..110: mol_type = other DNA
cttcatttgggttgagtcctatagtcctataggccagcaggtctccaagtccttggctttacaatccctgaagagtcttaacgattattgagaaccccaaagagcttttg

SEQ ID NO: 22170 - DNA, 110 bp, synthetic construct
  source 1..110: mol_type = other DNA
gctttacaatccctgaagagtcttaacgattattgagaaccccaaagagcttttgtttatatgggttatatttattgatatttagcatatagaagttaaaaccaaggtat

SEQ ID NO: 22171 - DNA, 110 bp, synthetic construct
  source 1..110: mol_type = other DNA
gcaattaggattttctttgtatgacacttcttcaggccaaagacgccttctattgcttgggccagattgaggagggcaaattctggctccaatcccatcccctgtgatgc

SEQ ID NO: 22172 - DNA, 110 bp, synthetic construct
  source 1..110: mol_type = other DNA
ctcataagtagaagagcttgaggcacatcccagagagccgtgttagggacgatatcatgtgggtgatttcaaatacgaaaggaccccttccagcctggagaggggccggg

SEQ ID NO: 22173 - DNA, 110 bp, synthetic construct
  source 1..110: mol_type = other DNA
tgaactcttcctctatgctggcgacgcgtttgcggagtcgcgtgtctgcctaaaccgaagaaatggttcagcaccacggacagctccttgtgggacgggactgcgctgcg

SEQ ID NO: 22174 - DNA, 110 bp, synthetic construct
  source 1..110: mol_type = other DNA
gagcagaggggtgcgaggaagccagagagaagggcccctttgtgtccagcaatgacccccagcttggatacctggtgctaagaacttcaactgccccttggtcaaaagtt

SEQ ID NO: 22175 - DNA, 110 bp, synthetic construct
  source 1..110: mol_type = other DNA
ccagcaatgacccccagcttggatacctggtgctaagaacttcaactgccccttggtcaaaagttttctcggcgttcccatcgtggctcagtggataacgaatctgacta

SEQ ID NO: 22176 - DNA, 110 bp, synthetic construct; identical to SEQ ID NO: 22174
  source 1..110: mol_type = other DNA

SEQ ID NO: 22177 - DNA, 110 bp, synthetic construct; identical to SEQ ID NO: 22175
  source 1..110: mol_type = other DNA

SEQ ID NO: 22178 - DNA, 110 bp, synthetic construct
  source 1..110: mol_type = other DNA
ggatcttaacccactgagacacaacaggaactcctaagaacactctaaatccatttacccccttccaccttccatgcaactgtcatatgttttgattatttatattatac

SEQ ID NO: 22179 - DNA, 110 bp, synthetic construct
  source 1..110: mol_type = other DNA
aggaactcctaagaacactctaaatccatttacccccttccaccttccatgcaactgtcatatgttttgattatttatattatactctgtaagatattatcattattatt

SEQ ID NO: 22180 - DNA, 110 bp, synthetic construct
  source 1..110: mol_type = other DNA
agaaaaatctggctgtgacgatctattttcacaaccactaccctccaaaaaaccccacttaaaaagcaaaagcactcttttttctagctgtggaagcatacaacaactgt

SEQ ID NO: 22181 - DNA, 110 bp, synthetic construct
  source 1..110: mol_type = other DNA
cacttaaaaagcaaaagcactcttttttctagctgtggaagcatacaacaactgtgaagacagtttcagttacaaaacagagtttggtcctaaatctttctgcctgcaac

SEQ ID NO: 22182 - DNA, 110 bp, synthetic construct
  source 1..110: mol_type = other DNA
ttaaattgtaaggaaaattagaaaacagctcggattttaatcaatatttgccttagccaagaaaaaaaaccagaagttccttcttttgcctgtctctaatcaggagtgtt

SEQ ID NO: 22183 - DNA, 110 bp, synthetic construct; identical to SEQ ID NO: 22182
  source 1..110: mol_type = other DNA

SEQ ID NO: 22184 - DNA, 110 bp, synthetic construct
  source 1..110: mol_type = other DNA
ggagcaggccccttctggatgccccagaccttgtgcaggaaaaagaagacctggccccttccctaaagggactcagagtctaaccagctttactttttatcttctccttc

SEQ ID NO: 22185 - DNA, 110 bp, synthetic construct
  source 1..110: mol_type = other DNA
atgagatgagagatggacttagctgtcggtgaaagggcctgtactgagcctgtgtgcttggcgcctccttggtaccacagaccggatagctttctcattgctttggtcat

SEQ ID NO: 22186 - DNA, 110 bp, synthetic construct
  source 1..110: mol_type = other DNA
gcttggcgcctccttggtaccacagaccggatagctttctcattgctttggtcatggttaagctaccagggtattaccagttcagcctggataatcctttgtccttgggg

SEQ ID NO: 22187 - DNA, 110 bp, synthetic construct
  source 1..110: mol_type = other DNA
tcttttggtaaagttccaactttttacaactgagcctttttctcagacaatgaaggcaaaccatgaaatgtattttcaggacagaaggggccacttcagctttgttggct

SEQ ID NO: 22188 - DNA, 110 bp, synthetic construct
  source 1..110: mol_type = other DNA
gcaaaccatgaaatgtattttcaggacagaaggggccacttcagctttgttggctccacttctgtaggtaagaatcctgccacaggagatgcattctgacttttgtgcta

SEQ ID NO: 22189 - DNA, 110 bp, synthetic construct
  source 1..110: mol_type = other DNA
acacttctcaccctgccccttgcgctgctgctcagataccatctccccagcacgaaaccctccaggtgccagctagccatgtttcctccaccctggcagtatccaggcgc

SEQ ID NO: 22190 - DNA, 110 bp, synthetic construct
  source 1..110: mol_type = other DNA
ctccccacccccaggccaggatctagacatctgaagttcagcaccaattaggacactgacccaaggggctctcttggaaagactttcttctcagggctccgttcctccag

SEQ ID NO: 22191 - DNA, 110 bp, synthetic construct
  source 1..110: mol_type = other DNA
ctgacccaaggggctctcttggaaagactttcttctcagggctccgttcctccagtggcaaataagtgttggggccccatttcagagctcttagcttttggtgcccacag

SEQ ID NO: 22192 - DNA, 110 bp, synthetic construct
  source 1..110: mol_type = other DNA
ttccagttgaaaataacatttcttaacaatcaaaatgtgatgagagctgagttccttgtttgaaaaaacctgctatcctctacagaacagtggaggttagtcagtgtaca

SEQ ID NO: 22193 - DNA, 110 bp, synthetic construct
  source 1..110: mol_type = other DNA
ttgtttgaaaaaacctgctatcctctacagaacagtggaggttagtcagtgtacaatttcactttatacttgtgaacacattaggcagtttctgtaaagcatccattctc

SEQ ID NO: 22194 - DNA, 110 bp, synthetic construct; identical to SEQ ID NO: 22192
  source 1..110: mol_type = other DNA

SEQ ID NO: 22195 - DNA, 110 bp, synthetic construct; identical to SEQ ID NO: 22193
  source 1..110: mol_type = other DNA

SEQ ID NO: 22196 - DNA, 110 bp, synthetic construct
  source 1..110: mol_type = other DNA
aaacttaggctttcatgacactgaaaatggtggttcccttcatataagtctacattcctgtgagtctggcttcatctctgcatccagcctacagtcccttagcgggggca

SEQ ID NO: 22197 - DNA, 110 bp, synthetic construct
  source 1..110: mol_type = other DNA
tcctgtgagtctggcttcatctctgcatccagcctacagtcccttagcgggggcaggtgtagctactgtactaatacacaccctgggggcaggtggatggattgctatgc

SEQ ID NO: 22198 - DNA, 110 bp, synthetic construct
  source 1..110: mol_type = other DNA
gacacccggaaacaagagacatacccttttgtcctccaagtcacctctggatgcgtcttcatttgttaacagaagttgccgagatttttctattttttcctataattaga

SEQ ID NO: 22199 - DNA, 110 bp, synthetic construct
  source 1..110: mol_type = other DNA
gcccgcagtgagttggtcgcaagcaggacacctcagagagctgctctgcaaacacttcagggttcctgccctagtgctcagggaatctggacttgggcagagaaggagaa

SEQ ID NO: 22200 - DNA, 110 bp, synthetic construct
  source 1..110: mol_type = other DNA
catctgtccctgtccaagcagcacatgactgacacttgtaactgacaaatcaggatgagaaagagcagaggagaaggtaagaaggggctggcttaggtctgcccctgcca

SEQ ID NO: 22201 - DNA, 110 bp, synthetic construct
  source 1..110: mol_type = other DNA
tgagaaagagcagaggagaaggtaagaaggggctggcttaggtctgcccctgccaaggggaagctactcatcatctttcagctgtttggcagaaccaacttgaactcatc

SEQ ID NO: 22202 - DNA, 110 bp, synthetic construct
  source 1..110: mol_type = other DNA
cagcaagtccttgtgcaacactgtctcagcttccctgactgcaaaatgggtctgataacccctactttccctgcaagttcaacttagacactgtacactataaaggagaa

SEQ ID NO: 22203 - DNA, 110 bp, synthetic construct
  source 1..110: mol_type = other DNA
aacagccgttatggctttacgttctccgaccggttagaaaccgaggtgtcaccacaatggtattctttgatcatcccaatctttttttggtccttttcccagctagctct

SEQ ID NO: 22204 - DNA, 110 bp, synthetic construct
  source 1..110: mol_type = other DNA
gggatgagggcagctcgtgctgccctgagaccttgctcccaatcaggtgtgcttgcctccagtatctgcaggcgaccagtggacatctcctggggatcagcccagcctcc

SEQ ID NO: 22205 - DNA, 110 bp, synthetic construct
  source 1..110: mol_type = other DNA
cctccagtatctgcaggcgaccagtggacatctcctggggatcagcccagcctccccacaaaggtatcacctgtgtcactttctccagaggcaccacctgcagtggcttc

SEQ ID NO: 22206 - DNA, 110 bp, synthetic construct
  source 1..110: mol_type = other DNA
tgtcatattgagaagctgtttgaactccagataaatttaaaatcatctttactttgggtggacacacctgcactcatggaaacgcatacgtgggcggtatctgctgtgtg

SEQ ID NO: 22207 - DNA, 110 bp, synthetic construct
  source 1..110: mol_type = other DNA
gggtggacacacctgcactcatggaaacgcatacgtgggcggtatctgctgtgtgccaggtgtcacccctgttaccaggcaccatggagaatcatgtggctcacattctg

SEQ ID NO: 22208 - DNA, 110 bp, synthetic construct
  source 1..110: mol_type = other DNA
aaaatatttttctaaaaaatggatttgagcttaatctgtcctcctaaagctgcttagtaggtgtgtctctgctcgtttccccgccccctccttcatggatcctctccgca

SEQ ID NO: 22209 - DNA, 110 bp, synthetic construct
  source 1..110: mol_type = other DNA
agtaggtgtgtctctgctcgtttccccgccccctccttcatggatcctctccgcaggtctgagttcaccattggcttggttttctagtcactcattgcccaaccaaggat

SEQ ID NO: 22210 - DNA, 110 bp, synthetic construct
  source 1..110: mol_type = other DNA
gccccccaaatccttagaagccgtgatgaattttcttttcccagcactgaacttactctctaggagtatttaacccaaaaagtacctgataggccaaagccccagtggcc

SEQ ID NO: 22211 - DNA, 110 bp, synthetic construct
  source 1..110: mol_type = other DNA
ctctctaggagtatttaacccaaaaagtacctgataggccaaagccccagtggcccgagtttgtcccatcaactccttcttgagctgattcaccaagtgaatctgtggac

SEQ ID NO: 22212 - DNA, 110 bp, synthetic construct
  source 1..110: mol_type = other DNA
cccccaggtggtgctaccaggcaccaggactgggggtcgttttcggggaacaagctatgagtgttagtaagatagaaccctcagccacctgccccaaggcctaggtgcag

SEQ ID NO: 22213 - DNA, 110 bp, synthetic construct
  source 1..110: mol_type = other DNA
tatgagtgttagtaagatagaaccctcagccacctgccccaaggcctaggtgcagtcgggccggaaggcgtctgccctcatcagcgaggttggcaaaggcgtccacacct

SEQ ID NO: 22214 - DNA, 110 bp, synthetic construct
  source 1..110: mol_type = other DNA
tgtgaaagacccacgagcgcaccctccccaccagcccatggtggcattcagagttggcaccgggcactcagccggctggtggtctgactgcacctgtatttaaacaatgc

SEQ ID NO: 22215 - DNA, 110 bp, synthetic construct
  source 1..110: mol_type = other DNA
ggcaccgggcactcagccggctggtggtctgactgcacctgtatttaaacaatgcccttcacctctctgcctgctttgatctcctgaaactgcaggccccggggctggtg

SEQ ID NO: 22216 - DNA, 110 bp, synthetic construct
  source 1..110: mol_type = other DNA
attctttaccccaatagcatttaacaacatgtccttcgatcgtagtaccattcactgagacaatggcatgggctgcactttcgtgggtggaaaatctaagagaaagagaa

SEQ ID NO: 22217 - DNA, 110 bp, synthetic construct
  source 1..110: mol_type = other DNA
tgagacaatggcatgggctgcactttcgtgggtggaaaatctaagagaaagagaatgaggtttttttgtttttgattttttaaaagaacttagtaacacagaaactcatt

SEQ ID NO: 22218 - DNA, 110 bp, synthetic construct
  source 1..110: mol_type = other DNA
cttcctgatgtgtcctcgttcctgcttggggttcttcccgtctcgctaggtgactcttgtaggcgtgggaccctctggcctccggctttgttttcttcagcttagcgctc

SEQ ID NO: 22219 - DNA, 110 bp, synthetic construct
  source 1..110: mol_type = other DNA
cttgtaggcgtgggaccctctggcctccggctttgttttcttcagcttagcgctcaacttcagatgccatcccctttcccgctgctggtctgacacccgttccccccctc

SEQ ID NO: 22220 - DNA, 110 bp, synthetic construct; identical to SEQ ID NO: 22218
  source 1..110: mol_type = other DNA

SEQ ID NO: 22221 - DNA, 110 bp, synthetic construct; identical to SEQ ID NO: 22219
  source 1..110: mol_type = other DNA

SEQ ID NO: 22222 - DNA, 110 bp, synthetic construct
  source 1..110: mol_type = other DNA
gacactctctgggtcaccaaaccagcccaggaccaggttatcttcccagcttgggttcctagaagtcactggggttagggatcagctgctctctgaagctgctgagtgga

SEQ ID NO: 22223 - DNA, 110 bp, synthetic construct
  source 1..110: mol_type = other DNA
ttcctagaagtcactggggttagggatcagctgctctctgaagctgctgagtggaagatcttcctgttctcacatttttaaagagcttgggaaggaccacagccccagaa

SEQ ID NO: 22224 - DNA, 110 bp, synthetic construct
  source 1..110: mol_type = other DNA
ctcttttcaattcagcggagagaggggaggactttgtctcccttaggcttagagttaagcatgttcaaattcagcttctattggagctttgcttcaaggttggttttcag

SEQ ID NO: 22225 - DNA, 110 bp, synthetic construct
  source 1..110: mol_type = other DNA
gttgtggacatatccatctccaagccaaatcttcaagtctctctccgctctatcttccttcataccaccttctcctctgtgcgtgtaaaatcgcccttagcctctccttt

SEQ ID NO: 22226 - DNA, 110 bp, synthetic construct
  source 1..110: mol_type = other DNA
tccttcataccaccttctcctctgtgcgtgtaaaatcgcccttagcctctcctttttaaaatattgagatacaaggtgttccccttgtggcacagctggttaaggatcca

SEQ ID NO: 22227 - DNA, 110 bp, synthetic construct
  source 1..110: mol_type = other DNA
tagtgcacccaccatctgagaccaagaggctttcccaagatcacacagctagatcatccctggagtggggcctggaactgggggcccaactcccaagctccattctgtgc

SEQ ID NO: 22228 - DNA, 110 bp, synthetic construct
  source 1..110: mol_type = other DNA
tcacagtatcattatacattgcttttatgccagatataaacattctacttcctatttctggcatagtaaccatcccctctcccaggcaacagctgtggtgggcagaccaa

SEQ ID NO: 22229 - DNA, 110 bp, synthetic construct
  source 1..110: mol_type = other DNA
ttctggcatagtaaccatcccctctcccaggcaacagctgtggtgggcagaccaaagagtttggcagagtttctagttagctcatctccctctgggcatttgtgctcctt

SEQ ID NO: 22230 - DNA, 110 bp, synthetic construct
  source 1..110: mol_type = other DNA
tcaggcttaattgtgtttaagaaaggacattcttggtaaatatagtgagttctcacttacttagacatggccagtatcagctgtccagagcagaacatgatggttattca

SEQ ID NO: 22231 - DNA, 110 bp, synthetic construct
  source 1..110: mol_type = other DNA
ataaagggagagacaggctgcgtggacctgaggaagagcatacattgtttcagaagggagctggtctgctctttccttatgatgatggaggtctagcattgctagatttc

SEQ ID NO: 22232 - DNA, 110 bp, synthetic construct
  source 1..110: mol_type = other DNA
tgtggagctgggcagcttgtttttgtaaagttttacaggaaccaggtctgggattagggtgaggcaaatgagacagggttgtacaagttgcagggtggggtcctatcttt

SEQ ID NO: 22233 - DNA, 110 bp, synthetic construct
  source 1..110: mol_type = other DNA
agggtgaggcaaatgagacagggttgtacaagttgcagggtggggtcctatctttatttggcatgtcgatattttgtttaccatggtatttttgcattgattttgatttt

SEQ ID NO: 22234 - DNA, 110 bp, synthetic construct
  source 1..110: mol_type = other DNA
ctggctcttcttgaagattctagctgctttgctcttagccatcgttctcttgaaagcgttgtctgaccagcactgagagacagaaacctagtttgaaatacagaaatgaa

SEQ ID NO: 22235 - DNA, 110 bp, synthetic construct
  source 1..110: mol_type = other DNA
attcaatcttgtcctactttaagccatcaggggaacagaggaacaaaatatatatatgcttttacactgtcaccaatagcatgaaagggttctgggtgttctagctcacc

SEQ ID NO: 22236 - DNA, 110 bp, synthetic construct
  source 1..110: mol_type = other DNA
atgcttttacactgtcaccaatagcatgaaagggttctgggtgttctagctcaccagtacatggtcttgtcaatctttttaatcccagtcactgtgctgggtgtgcaagt

SEQ ID NO: 22237 - DNA, 110 bp, synthetic construct
  source 1..110: mol_type = other DNA
gcaagagctgtcatactggaggtggttttaagtaaggctggagctggtggcaccctagccctggtcagagccacactggctgtgaagagcagacaacaatgggagagact

SEQ ID NO: 22238 - DNA, 110 bp, synthetic construct
  source 1..110: mol_type = other DNA
agccacattgtcatcgattgctctgcgttttacacagttaacaaggcgctgtcagatcaataacgagctcacacggtgcgtcctgtccactcactgtaactgaaataatg

SEQ ID NO: 22239 - DNA, 110 bp, synthetic construct
  source 1..110: mol_type = other DNA
atatttcactgattgcagtatattttccgcattttagcacctttaaatttgggatgcatcttaaaatcacctgttggcctggatggaagttaagagttgtcttctgccag

SEQ ID NO: 22240 - DNA, 110 bp, synthetic construct; identical to SEQ ID NO: 22239
  source 1..110: mol_type = other DNA

SEQ ID NO: 22241 - DNA, 110 bp, synthetic construct
  source 1..110: mol_type = other DNA
aatatcctaccttttaaaagctgagtaacattccattgtacgtatatactttatctttttatccccagtggacactggggttgcttctaccccgtggctactgtgaatag

SEQ ID NO: 22242 - DNA, 110 bp, synthetic construct; identical to SEQ ID NO: 22241
  source 1..110: mol_type = other DNA

SEQ ID NO: 22243 - DNA, 110 bp, synthetic construct
  source 1..110: mol_type = other DNA
aagtgccgagtcctaaccactaaaccaccagggaactccccagaaatgcgtttttaagctgtagttggaaatccacatttttttgtgtgccttcccaattttgtgattaa

SEQ ID NO: 22244 - DNA, 110 bp, synthetic construct
  source 1..110: mol_type = other DNA
atgcgtttttaagctgtagttggaaatccacatttttttgtgtgccttcccaattttgtgattaaaaaaaagttattaggagttcccattgtggcgcagtggttaacgaa

SEQ ID NO: 22245 - DNA, 110 bp, synthetic construct
  source 1..110: mol_type = other DNA
aggccagggattgaacccgcatcctcatgaatactagccaagttctcaaccctctgaaccacagtgggaactcttccatcctcgtcctttacgagaaatccagccaaaga

SEQ ID NO: 22246 - DNA, 110 bp, synthetic construct
  source 1..110: mol_type = other DNA
gaaccacagtgggaactcttccatcctcgtcctttacgagaaatccagccaaagatgatgacagagtgtgctaatgaagtggccgccgcgcttgcctgcccagccccctt

SEQ ID NO: 22247 - DNA, 110 bp, synthetic construct
  source 1..110: mol_type = other DNA
ttcccctttttatttttatttacttatttggccatgcctgcggcatgcggaaattcctgggccagggactgaacctgcaccatagcagagacaatgcgggatccctaact

SEQ ID NO: 22248 - DNA, 110 bp, synthetic construct
  source 1..110: mol_type = other DNA
cctgggccagggactgaacctgcaccatagcagagacaatgcgggatccctaactgacaggccaccggggaactcctaaatgtcccctttttataagggctccagtcata

SEQ ID NO: 22249 - DNA, 110 bp, synthetic construct
  source 1..110: mol_type = other DNA
tccagcacctcttctaccccgactataggaacaaactcttgtttcctctgcttcactgttgcccccagattattattacaataaggcgcacctctgacaattcttggcag

SEQ ID NO: 22250 - DNA, 110 bp, synthetic construct
  source 1..110: mol_type = other DNA
ctgttgcccccagattattattacaataaggcgcacctctgacaattcttggcagctctgtgcactttttgtagagtcatcctaagcctggagagcacgcagcagatggc

SEQ ID NO: 22251 - DNA, 110 bp, synthetic construct
  source 1..110: mol_type = other DNA
aaaggcaatggtggctaaaactgccggtgtcttagctggaaccaaggcaatggcgccaaactgaagtagtggttgtacttttattgtcatgcatgcacaattctttaaaa

SEQ ID NO: 22252 - DNA, 110 bp, synthetic construct
  source 1..110: mol_type = other DNA
ttcatgaaaccccaagtgaaggggctggtgggatcctctgctagaatcttctccgttcttagaatagagcctgaactcctttccatggcctgcaggccttcctgcctggc

SEQ ID NO: 22253 - DNA, 110 bp, synthetic construct
  source 1..110: mol_type = other DNA
ttcttagaatagagcctgaactcctttccatggcctgcaggccttcctgcctggctcccatacctgctcacaccgcgtcttatttggccgcaccagccttgttatagacc

SEQ ID NO: 22254 - DNA, 110 bp, synthetic construct
  source 1..110: mol_type = other DNA
ttagatattcctaagtgaagtgcacaggatcccatattgttcttacacaagtagactctttctatcacttctggttgcctttctgttcactttaaaaaaatcaaaatata

SEQ ID NO: 22255 - DNA, 110 bp, synthetic construct
  source 1..110: mol_type = other DNA
ctctttctatcacttctggttgcctttctgttcactttaaaaaaatcaaaatatacatattaaaatctcactctggtctcaggagtacaacgcctaacataatagtatac

SEQ ID NO: 22256 - DNA, 110 bp, synthetic construct
  source 1..110: mol_type = other DNA
ccaggttgctgcggaggcatgtgtttgatccctgggctgacactgccacagctgcataggtcacaggtgcagctcagattcagtccctggcttgggaatgtctatatgct

SEQ ID NO: 22257 - DNA, 110 bp, synthetic construct
  source 1..110: mol_type = other DNA
ataggtcacaggtgcagctcagattcagtccctggcttgggaatgtctatatgctgcgtgcgtggccataaaaaaaagaaaaaaattcagaaaataataaacatgtaccc

SEQ ID NO: 22258 - DNA, 110 bp, synthetic construct
  source 1..110: mol_type = other DNA
cctcctctccggcgctactctgtcccacctcctaaccagcctcattaatgctctcctgccagggggtcttagttttaacacctagggccatttttactttctaagtgaaa

SEQ ID NO: 22259 - DNA, 110 bp, synthetic construct
  source 1..110: mol_type = other DNA
ctgccagggggtcttagttttaacacctagggccatttttactttctaagtgaaagctgcttcgtggttgtagttaataagctcagtgtccttcggccatccatctccag

SEQ ID NO: 22260 - DNA, 110 bp, synthetic construct
  source 1..110: mol_type = other DNA
atctttgccttccggtaggaacagtacctgtggtgattttgattaataaaatgacaccagataatgtcccaattaagttttatttgaagcttatagattttccttgacgt

SEQ ID NO: 22261 - DNA, 110 bp, synthetic construct
  source 1..110: mol_type = other DNA
accagataatgtcccaattaagttttatttgaagcttatagattttccttgacgtctaaatccaatttggactccatcatttttgttataaacggcttctatgctcagta

SEQ ID NO: 22262 - DNA, 110 bp, synthetic construct
  source 1..110: mol_type = other DNA
ctccagtgccactgtggatttctttttctgtatccagacactttggttgatttcataaagcacgttggagaggtttgggcagcagggagacatacagcttctattgatgt

SEQ ID NO: 22263 - DNA, 110 bp, synthetic construct
  source 1..110: mol_type = other DNA
taaagcacgttggagaggtttgggcagcagggagacatacagcttctattgatgtgtctctgcaggtgaaattaaaaatctctactaggtgtcaaaaaggcgaaagtttg

SEQ ID NO: 22264 - DNA, 110 bp, synthetic construct
  source 1..110: mol_type = other DNA
agtgtcttcatataattttctgaggtcaggatggccagaatgacatcaaacctctggttgaagggccagctgatgagaccttgatgtagctctagggatgagagtcaagc

SEQ ID NO: 22265 - DNA, 110 bp, synthetic construct
  source 1..110: mol_type = other DNA
ataaataaaaatctaaacattatttcatggtttctgtggttgagaattattgagcagcttagctggatggttatggctcaaggttgaatctcatgagtcataatgcacaa

SEQ ID NO: 22266 - DNA, 110 bp, synthetic construct
  source 1..110: mol_type = other DNA
agcttagctggatggttatggctcaaggttgaatctcatgagtcataatgcacaacctggcaaagtgtcagccagggctgcagtcatctgaaggggctggaggattcagt

SEQ ID NO: 22267 - DNA, 110 bp, synthetic construct
  source 1..110: mol_type = other DNA
ccagccccattcctgctccataagggattgtgcctagacttcggttttggagacatgactctgaaggacttgccgggctcctattctgcatgggtcataggccttgcgga

SEQ ID NO: 22268 - DNA, 110 bp, synthetic construct
  source 1..110: mol_type = other DNA
tgactctgaaggacttgccgggctcctattctgcatgggtcataggccttgcggagatctcagcagtcatctctggggtgggacaaaattccacattttggttgttgatt

SEQ ID NO: 22269 - DNA, 110 bp, synthetic construct
  source 1..110: mol_type = other DNA
tcacctctgcccaaggaagaagctactcctgaattttgtgccaccatcacctcagcgaacaagctctcagatttctctttgagtaatatcaccaattggtatatttttca

SEQ ID NO: 22270 - DNA, 110 bp, synthetic construct
  source 1..110: mol_type = other DNA
cgaacaagctctcagatttctctttgagtaatatcaccaattggtatatttttcatactccacggggaactcaatttaacctttgaaacaaatgcagttttatctggacc

SEQ ID NO: 22271 - DNA, 110 bp, synthetic construct
  source 1..110: mol_type = other DNA
atttctggaccaaggcttttattttttaattgctgcatctgcagcatatggacattccctgccccagcatcaaatcagagctgccgctgaagcctacaccacagccacag

SEQ ID NO: 22272 - DNA, 110 bp, synthetic construct
  source 1..110: mol_type = other DNA
gtgtgtgttgtaaacagcaaactgacatataaaaaagaagatatccttgttaataaacagcctacggaatgactctgcttggaagaatttgtactttaaaaggggatttt

SEQ ID NO: 22273 - DNA, 110 bp, synthetic construct
  source 1..110: mol_type = other DNA
aacagcctacggaatgactctgcttggaagaatttgtactttaaaaggggatttttgaagatgaaagacctacacaagtgaagctgtaaaggtgaaataccaacctttag

SEQ ID NO: 22274 - DNA, 110 bp, synthetic construct
  source 1..110: mol_type = other DNA
gtccgttttgctggtttgtttctgaggtgttttgaaaatcgctctggatttttctgctggctgagctgcaaatcctaagtcactgcttacagtgggaaatcagaaaggag

SEQ ID NO: 22275 - DNA, 110 bp, synthetic construct
  source 1..110: mol_type = other DNA
gctggctgagctgcaaatcctaagtcactgcttacagtgggaaatcagaaaggagggcttgctctggactgagccgggtttgatttcacgctgaaaagagtcaggtccta

SEQ ID NO: 22276 - DNA, 110 bp, synthetic construct
  source 1..110: mol_type = other DNA
tacacatctttaaacaacattgagcagctgaaaccaaacacagccgcagactgcatccagtccaagggcaaccggccaccagcctctgacttaagattccatgtggctca

SEQ ID NO: 22277 - DNA, 110 bp, synthetic construct
  source 1..110: mol_type = other DNA
ggaagctaaatggttttacgcacttgctagtggtcaaacagttgctacactttcttcagccttttcttgaaaactcaaggacgttggtctttatactggtgcttatcctg

SEQ ID NO: 22278 - DNA, 110 bp, synthetic construct
  source 1..110: mol_type = other DNA
tcagccttttcttgaaaactcaaggacgttggtctttatactggtgcttatcctgggatatgctgatgatgctggcaggagttgttacaaccagtggggctattttcttc

SEQ ID NO: 22279 - DNA, 110 bp, synthetic construct
  source 1..110: mol_type = other DNA
tcacctcccctctcggtgcctcagggccctactctgtaaaaggggggcttcaacagcacttgcctccctccccaaggtatggagagcttcaaatgcaatgacagacttgc

SEQ ID NO: 22280 - DNA, 110 bp, synthetic construct
  source 1..110: mol_type = other DNA
ccaccatgccagaatgtttaggcgccttatttaatccacccagtgtatgtcaagtacttggtatcatgcttttaataacccccgtcacccctgttattgtgcatggccag

SEQ ID NO: 22281 - DNA, 110 bp, synthetic construct
  source 1..110: mol_type = other DNA
acttggtatcatgcttttaataacccccgtcacccctgttattgtgcatggccagagctgaggtttccagagtgtccaggtcatgtcttcattcgttccgtcaacattta

SEQ ID NO: 22282 - DNA, 110 bp, synthetic construct
  source 1..110: mol_type = other DNA
gcctgggagcctggtgtgggatgtggggactggggattcctgggaagagggcacaaggagcttctttactccagaactttgatattcctgagtctttttttttttttttt

SEQ ID NO: 22283 - DNA, 110 bp, synthetic construct
  source 1..110: mol_type = other DNA
taaatggagaaatgccatttaaaaaaaaaaaaaaagaaaaaaaagaaaaggaaattgcaccccctgggggtgtttagaacccttagaggtggccgagctcttcttccaga

SEQ ID NO: 22284 - DNA, 110 bp, synthetic construct
  source 1..110: mol_type = other DNA
tgcaccccctgggggtgtttagaacccttagaggtggccgagctcttcttccagagtttagaattgcttttcgaaactcaagaatgcaaatctgagtttgtgccacgccc

SEQ ID NO: 22285 - DNA, 110 bp, synthetic construct
  source 1..110: mol_type = other DNA
ttcattacctagtcaattacttgagttgcctttcaaattagccctgtgctgccagctctggagagctctcagacctattgagatgactttaaatgtcactcagtcccaaa

SEQ ID NO: 22286 - DNA, 110 bp, synthetic construct
  source 1..110: mol_type = other DNA
tctcatctcctgacccctccactacctccactcctcccagctccccacaccggttctttctagacctgcttattcctccccataagaagaaagtcttgtactggctgacc

SEQ ID NO: 22287 - DNA, 110 bp, synthetic construct
  source 1..110: mol_type = other DNA
ctttctagacctgcttattcctccccataagaagaaagtcttgtactggctgacctttgcgatgctcgtagatgtggtcaggggtcccccactgcaacagtttccttttt

SEQ ID NO: 22288 - DNA, 110 bp, synthetic construct
  source 1..110: mol_type = other DNA
ttctatcatggattcgaggatagttacttagtactttgggctataatctaatatgactttatttcactgctcagattgttccagctatggccactgagagctctctcaga

SEQ ID NO: 22289 - DNA, 110 bp, synthetic construct
  source 1..110: mol_type = other DNA
ggggtgatactggcatctagtgagtggagtcagggatgctgttaaacatcctataatgcacaatcagccctacacggtaaaggattttctggtccagatggccataaagc

SEQ ID NO: 22290 - DNA, 110 bp, synthetic construct
  source 1..110: mol_type = other DNA
atgcacaatcagccctacacggtaaaggattttctggtccagatggccataaagctgaggctaaggaacccaattgtaaactactacagaaatctctagaccattacaga

SEQ ID NO: 22291 - DNA, 110 bp, synthetic construct
  source 1..110: mol_type = other DNA
tttcccccgtctttctattgagattgtcttttaaaataagaattgttcattccagttattggtattttgtcagttacttcgactgaaatacctgttcttatcttctcact

SEQ ID NO: 22292 - DNA, 110 bp, synthetic construct
  source 1..110: mol_type = other DNA
ttattggtattttgtcagttacttcgactgaaatacctgttcttatcttctcacttttccctcctcttggcatgaaagtttatcattttaatttgacaatttatcaaact

SEQ ID NO: 22293 - DNA, 110 bp, synthetic construct
  source 1..110: mol_type = other DNA
atatatagatgattagcaatacaaatatctcttcagtgtactgctcctcaatcgatagcattatattcagctcatcaaattataaaatgcccctttctacaattatgcaa

SEQ ID NO: 22294 - DNA, 110 bp, synthetic construct
  source 1..110: mol_type = other DNA
gctttggcagtttttgccatttattttgaagcaggcgttaatatgttaagattatcctacttagactttgcaggtaattccctgaaaaatatatggtaaaatacaaattg

SEQ ID NO: 22295 - DNA, 110 bp, synthetic construct; identical to SEQ ID NO: 22294
  source 1..110: mol_type = other DNA

SEQ ID NO: 22296 - DNA, 110 bp, synthetic construct
  source 1..110: mol_type = other DNA
caaatgtacatagtaccaggaaaggtccgtgtggacttttctaaccaggtgctctgcagtggtgcttgtttgacagctttgagtactaaatgccccgtccacccgcaggc

SEQ ID NO: 22297 - DNA, 110 bp, synthetic construct
  source 1..110: mol_type = other DNA
gcagtggtgcttgtttgacagctttgagtactaaatgccccgtccacccgcaggccgtgttcatcaaggatgagtactaattgtttactttgtagaggacattatgcggt

SEQ ID NO: 22298 - DNA, 110 bp, synthetic construct
  source 1..110: mol_type = other DNA
ggcgagtacgcccagctcttggggaaggaatatttgacaaagaaacagccctcatgggtgtatctgtctttgcttcacaggagtggtcaccgtctcacaacttgaagagc

SEQ ID NO: 22299 - DNA, 110 bp, synthetic construct
  source 1..110: mol_type = other DNA
gattatgaattttaaaaagttatggtagaggaccgtagtcgcatagtcagaagaactgtttctctcattagacagacagagctgtgcagctgctactggaaacaagtgcc

SEQ ID NO: 22300 - DNA, 110 bp, synthetic construct
  source 1..110: mol_type = other DNA
ctgtttctctcattagacagacagagctgtgcagctgctactggaaacaagtgccgagaaccagcattattattgtgactcactgaaagcctgtttggtcacaacggtca

SEQ ID NO: 22301 - DNA, 110 bp, synthetic construct
  source 1..110: mol_type = other DNA
tgggaagatactgtcaaattaggggtctttttgggttggttggagtttcagttctctgtccaccagaagggctttattttctatcttggccaaaggcaggcacagagatg

SEQ ID NO: 22302 - DNA, 110 bp, synthetic construct
  source 1..110: mol_type = other DNA
ctgtccaccagaagggctttattttctatcttggccaaaggcaggcacagagatgctccacacatcccagtgctacctggctctggctccatcatataaactggggaagg

SEQ ID NO: 22303 - DNA, 110 bp, synthetic construct
  source 1..110: mol_type = other DNA
tttgaagggataagaaagatcgctggtgtctccctgtcctacacagtgggtcccccttgatcatcctttctgtatatgagtatgccctggccatacaaggagacctactc

SEQ ID NO: 22304 - DNA, 110 bp, synthetic construct
  source 1..110: mol_type = other DNA
cttgatcatcctttctgtatatgagtatgccctggccatacaaggagacctactcagtgttctgtggtagcctatatcggaatggatatgtgtatacatatggctgaatc

SEQ ID NO: 22305 - DNA, 110 bp, synthetic construct
  source 1..110: mol_type = other DNA
gggaggaagggccccgggaggacacagggagaagcaggccgtctgcacaccaaggagagaggcctcaggagaagccgggcccattgacaacctgttcttggatttccagc

SEQ ID NO: 22306 - DNA, 110 bp, synthetic construct
  source 1..110: mol_type = other DNA
agagaggcctcaggagaagccgggcccattgacaacctgttcttggatttccagcctccctaccagtgagaaatttgccccagtctgtggtattctatcatggcagccct

SEQ ID NO: 22307 - DNA, 110 bp, synthetic construct
  source 1..110: mol_type = other DNA
gttttttagtggattccttgggattttctatttatgaggcttatagaagttccctagacaggaactgaatacaagccactgctgcaaccaatgctgcagctgtggcaatg

SEQ ID NO: 22308 - DNA, 110 bp, synthetic construct; identical to SEQ ID NO: 22307
  source 1..110: mol_type = other DNA

SEQ ID NO: 22309 - DNA, 110 bp, synthetic construct
  source 1..110: mol_type = other DNA
gtgtgcaggttgcacggcaactggggcacacttgcatttggaccacttggtctggatcacaaataatcaggtttttgaccctgtgcttcatggaggtttttgcctcctat

SEQ ID NO: 22310 - DNA, 110 bp, synthetic construct
  source 1..110: mol_type = other DNA
atcacaaataatcaggtttttgaccctgtgcttcatggaggtttttgcctcctatgtaccactggaggcaaactccttggggtctggcatctgttgattcaacagagcct

SEQ ID NO: 22311 - DNA, 110 bp, synthetic construct
  source 1..110: mol_type = other DNA
aggcatccatcaccccaggcttcgggtcatcagtgtctcagtgtgtctccttcgacgcgcctcaaagctctggggtctgcgaggagtgtgagcattaaagcttgataaag

SEQ ID NO: 22312 - DNA, 110 bp, synthetic construct
  source 1..110: mol_type = other DNA
acaggaccacactcctctctgtcctacagagagcccttgggactctaacccacgcctttctcttgagtccacaaaggaagagggccaagagatggatcccatgatccgag

SEQ ID NO: 22313 - DNA, 110 bp, synthetic construct
  source 1..110: mol_type = other DNA
cactctcagcactaagataatgtcttcgcaccacaaagtggggaacggcagtgagtgttctggataattcgaacaacagctgtcctgtggtttcggagctgtggttcact

SEQ ID NO: 22314 - DNA, 110 bp, synthetic construct
  source 1..110: mol_type = other DNA
tgttctggataattcgaacaacagctgtcctgtggtttcggagctgtggttcacttcttaatcaaaaggcactcagcctgcaggagaggattctcataaatcacaggaag

SEQ ID NO: 22315 - DNA, 110 bp, synthetic construct
  source 1..110: mol_type = other DNA
cagctatgtttcacccttcaagctttacttcccttcccccttgcagctgttcccgactccaggagccctggggcagcagacctgctcagccctttcagtcatgtctcttc

SEQ ID NO: 22316 - DNA, 110 bp, synthetic construct
  source 1..110: mol_type = other DNA
agtcagtttactcttcagaacctgagggtctccatctatgatgcaggaggaataccatttcggcaaagggttggcctgggcatcagatgaactaggaggcaggaacgtgc

SEQ ID NO: 22317 - DNA, 110 bp, synthetic construct
  source 1..110: mol_type = other DNA
gacccacatctgctgtccttgggactgtctcactggcgatcacagtgtcagatacacagtaggtcaggggactggtccccgggcttcagagtctcagacatcagtactga

SEQ ID NO: 22318 - DNA, 110 bp, synthetic construct
  source 1..110: mol_type = other DNA
acagtaggtcaggggactggtccccgggcttcagagtctcagacatcagtactgaatgggaccttggagaggggggctgcccctgacggtggacaggaggggtggagcca

SEQ ID NO: 22319 - DNA, 110 bp, synthetic construct
  source 1..110: mol_type = other DNA
tgggtgatggagctgcaaaattgaagctatggtgtacaactggggcacccatatgttgcatgtgacaataaggtaagaggctatctgaacatcacaaatgcaagatttgg

SEQ ID NO: 22320 - DNA, 110 bp, synthetic construct
  source 1..110: mol_type = other DNA
gatcgttccagaagggttgtgggcagagtgacagcaaccccagggaaaatgcagaaacacagcaacagcacggctcttaccaccttcaggccaccttgagaggagcaggg

SEQ ID NO: 22321 - DNA, 110 bp, synthetic construct
  source 1..110: mol_type = other DNA
aacacagcaacagcacggctcttaccaccttcaggccaccttgagaggagcagggacccggggtcaagtggcaatgtcagcctgaggggacttcaccaggaggtagcagg

SEQ ID NO: 22322 - DNA, 110 bp, synthetic construct
  source 1..110: mol_type = other DNA
ggccagggatggaacccatgacctcatggttcctagtcggactcgtttccatcgcaccacgatgggaactccaggatttcttgtaaaaggaaaatctaaattgtttctaa

SEQ ID NO: 22323 - DNA, 110 bp, synthetic construct
  source 1..110: mol_type = other DNA
accacgatgggaactccaggatttcttgtaaaaggaaaatctaaattgtttctaaaaggtggctactaaaattggatcctaaagtcctattaggagaaaacaaggtcagt

SEQ ID NO: 22324 - DNA, 110 bp, synthetic construct
  source 1..110: mol_type = other DNA
gtaggaaggcacttcgctgccggtcagtacattcggggctggtgtagccacctacctaccgaccagcttttgccccctggaacccctgttgtgaaataggtatgaaaagc

SEQ ID NO: 22325 - DNA, 110 bp, synthetic construct
  source 1..110: mol_type = other DNA
ctaccgaccagcttttgccccctggaacccctgttgtgaaataggtatgaaaagccactctggagcaaccaaaaagctcgttaaacagtagctaccaaaggaagttttga

SEQ ID NO: 22326 - DNA, 110 bp, synthetic construct
  source 1..110: mol_type = other DNA
aatcacatttttctctgggcacattttcctctggttcagcccaatacacattatctaaacggagcttccaaattagcaaaccgaaaagtcttcccagataaggcctttgt

SEQ ID NO: 22327 - DNA, 110 bp, synthetic construct
  source 1..110: mol_type = other DNA
taaacggagcttccaaattagcaaaccgaaaagtcttcccagataaggcctttgtgccacagaatagaagggcaaggttgaaataattttaaccacagcaatcgtgacac

SEQ ID NO: 22328 - DNA, 110 bp, synthetic construct
  source 1..110: mol_type = other DNA
gacccttctgcagttacctgcctagtaggacaaaatgctcacctggtgtagccagggcaggctccctgcctgcatcactcggtgccctgtctgcagaggggcacgggtgt

SEQ ID NO: 22329 - DNA, 110 bp, synthetic construct
  source 1..110: mol_type = other DNA
ggcaggctccctgcctgcatcactcggtgccctgtctgcagaggggcacgggtgtcagccgatcgatgcccatcacgaaaggggaggaacaggagagctctgtctgtgtt

SEQ ID NO: 22330 - DNA, 110 bp, synthetic construct
  source 1..110: mol_type = other DNA
aatcagagcttcagctgccagcctatgtaacagccagagcaatgctggatccttaactcactaagcaaagccaggaatcaaacctgtatcctcacagagacaacatcgag

SEQ ID NO: 22331 - DNA, 110 bp, synthetic construct; identical to SEQ ID NO: 22330
  source 1..110: mol_type = other DNA

SEQ ID NO: 22332 - DNA, 110 bp, synthetic construct
  source 1..110: mol_type = other DNA
gtgtgtgtgtgtgtgtgtgtgtgtgtgtgtgtgtgtagagagagagattgagatatttattttaaggaattggcttcacacacctatggaaactggcaagtctaaaatct

SEQ ID NO: 22333 - DNA, 110 bp, synthetic construct
  source 1..110: mol_type = other DNA
tttattttaaggaattggcttcacacacctatggaaactggcaagtctaaaatctgcacagagggcctctgggctggacacccaggatgagccaagattgcagttcggat

SEQ ID NO: 22334 - DNA, 110 bp, synthetic construct
  source 1..110: mol_type = other DNA
atcattaggaattgcccaggtctgaaaaggacgcaggctgaatgtcactgggggaatttctaacgagggaatgaggaagccaggacaatcggccccagctctgcccccag

SEQ ID NO: 22335 - DNA, 110 bp, synthetic construct
  source 1..110: mol_type = other DNA
atttctaacgagggaatgaggaagccaggacaatcggccccagctctgcccccaggaggggaggtgccctgggggaaggtctgctgggggtcgggctgcccctgggctgg

SEQ ID NO: 22336 - DNA, 110 bp, synthetic construct
  source 1..110: mol_type = other DNA
atggttccgaaggctggaagtccaagagaaagtgctggcagctttggtttctttgaggtccttctcctcggcttgcagttggccatgtccctacacggtctttttccact

SEQ ID NO: 22337 - DNA, 110 bp, synthetic construct
  source 1..110: mol_type = other DNA
aggtccttctcctcggcttgcagttggccatgtccctacacggtctttttccactttcaggctgtacacggctggtgcctctttggtacccaaatttcctcttataatga

SEQ ID NO: 22338 - DNA, 110 bp, synthetic construct
  source 1..110: mol_type = other DNA
aaacaaggacaggacgtttcaggtctttagacatttcagacctgcccaggcacagggcacttttggcctgaggttggcgagtcggggtggtgcagccttgtccttggcta

SEQ ID NO: 22339 - DNA, 110 bp, synthetic construct
  source 1..110: mol_type = other DNA
ggcacttttggcctgaggttggcgagtcggggtggtgcagccttgtccttggctaagtgtgagcaggttctctgtgcatcaccccagctgccagcagattcggcgccgag

SEQ ID NO: 22340 - DNA, 110 bp, synthetic construct
  source 1..110: mol_type = other DNA
ccttccacggcctcatcgctttcgcacacacaataaagttcgtggctctccggcacctttcctgagtctgatttacatttattttgcctctccccgagccagcatattga

SEQ ID NO: 22341 - DNA, 110 bp, synthetic construct
  source 1..110: mol_type = other DNA
cctttcctgagtctgatttacatttattttgcctctccccgagccagcatattgagtgcagttttcctctctgcaaggccgttttctgctgactcagcactctgggcggc

SEQ ID NO: 22342 - DNA, 110 bp, synthetic construct
  source 1..110: mol_type = other DNA
aagacagtatggaggtgcctcagaaaactaaatctaggactatcacatgatccagtagtcccactcctggacacacatccaggcaaaactataatgtgaaaagacacatg

SEQ ID NO: 22343 - DNA, 110 bp, synthetic construct
  source 1..110: mol_type = other DNA
tagtcccactcctggacacacatccaggcaaaactataatgtgaaaagacacatgcacccctaggttcacagcggcactatccacaacagctaggacatggaagcaatct

SEQ ID NO: 22344 - DNA, 110 bp, synthetic construct
  source 1..110: mol_type = other DNA
cccgactaggatccacgaggatgcaggtccggttcctggccttgcttggtgggatggggatccagcactgccgtgagctgtgatgtaggaggcagacacactttggatcc

SEQ ID NO: 22345 - DNA, 110 bp, synthetic construct
  source 1..110: mol_type = other DNA
ggtccggttcctggccttgcttggtgggatggggatccagcactgccgtgagctgtgatgtaggaggcagacacactttggatcctgcacgctgtggccgtggtataggc

SEQ ID NO: 22346 - DNA, 110 bp, synthetic construct
  source 1..110: mol_type = other DNA
ctggccttgcttggtgggatggggatccagcactgccgtgagctgtgatgtaggaggcagacacactttggatcctgcacgctgtggccgtggtataggccggcagctac

SEQ ID NO: 22347 - DNA, 110 bp, synthetic construct; identical to SEQ ID NO: 22346
  source 1..110: mol_type = other DNA

SEQ ID NO: 22348 - DNA, 110 bp, synthetic construct
  source 1..110: mol_type = other DNA
gcccggcccgctcaccattggagcggctgcctgtctcgttcttgcaatagccgcagcggtagaagtcctcgccctcgaaatactccacgatgctcggcgaaagccgggcc

SEQ ID NO: 22349 - DNA, 110 bp, synthetic construct
  source 1..110: mol_type = other DNA
gcggtagaagtcctcgccctcgaaatactccacgatgctcggcgaaagccgggcccaggaagccatggccccgaccctccaaacgctgcccagcccgacgtcgccgccgc

SEQ ID NO: 22350 - DNA, 110 bp, synthetic construct
  source 1..110: mol_type = other DNA
acaaagaacgttcgggcacggggtttgcagcaaaggacaccctggggatgaaccgtccggggtaacgtgcagcatcttacctcccactcgcggtaactcaaagctatgac

SEQ ID NO: 22351 - DNA, 110 bp, synthetic construct
  source 1..110: mol_type = other DNA
ctcagaacttccatatgcctctggtgtggctctaaaaagacaaaaacaaacaaacaaactatactttgacagtttatactcataattggttctcaaacgaaagaattcta

SEQ ID NO: 22352 - DNA, 110 bp, synthetic construct; identical to SEQ ID NO: 22351
  source 1..110: mol_type = other DNA

SEQ ID NO: 22353 - DNA, 110 bp, synthetic construct
  source 1..110: mol_type = other DNA
cacaatgtacgagctagtgtgtcctgtctacctcgtagacggggcacaactcctggtttagctgctggccaccgtcctttgcagcgagtgcctgggggctcctcgggggt

SEQ ID NO: 22354 - DNA, 110 bp, synthetic construct
  source 1..110: mol_type = other DNA
aaggatggacaggacatgttggtccaactgtaaacaaataattctagaagaagctaaatgctaaaggcaggctcttggggagcccaggggcaggagggaggggccagtct

SEQ ID NO: 22355 - DNA, 110 bp, synthetic construct
  source 1..110: mol_type = other DNA
aaatgctaaaggcaggctcttggggagcccaggggcaggagggaggggccagtcttgctgaggagcaagaaggaacatccttcagagaaggcggccttgcagctgcttct

SEQ ID NO: 22356 - DNA, 110 bp, synthetic construct
  source 1..110: mol_type = other DNA
ggggagagggttggggtgatgcttcaggctctgtccttgacatccgtgagaactgatgaaaccaatgtttcattgttggcagtgtcattcatggaggttcctgccccgct

SEQ ID NO: 22357 - DNA, 110 bp, synthetic construct
  source 1..110: mol_type = other DNA
atgaaaccaatgtttcattgttggcagtgtcattcatggaggttcctgccccgcttctgagggtgttgcccgcccggatccttgcatcctgtctccagaggtgactgagc

SEQ ID NO: 22358 - DNA, 110 bp, synthetic construct
  source 1..110: mol_type = other DNA
gtgacagagagtctgcacagtgcccggcacacagtagatgctcataaacctcgatcccctttgcttgttgccaggtctcacctgtggtccacgaccccagctgatgcgca

SEQ ID NO: 22359 - DNA, 110 bp, synthetic construct
  source 1..110: mol_type = other DNA
cccctttgcttgttgccaggtctcacctgtggtccacgaccccagctgatgcgcatctggggcctggggtggctgaaggggcagcagagacctgagggcgcacacctggc

SEQ ID NO: 22360 - DNA, 110 bp, synthetic construct
  source 1..110: mol_type = other DNA
tgccacctgtgcctcagcttgcagcagtgagggatcctttaaccacagagcgaagccaggaatccaatctgcatcctcatggggattagtcagttcttaacccgctgagc

SEQ ID NO: 22361 - DNA, 110 bp, synthetic construct
  source 1..110: mol_type = other DNA
ccaggaatccaatctgcatcctcatggggattagtcagttcttaacccgctgagccacaacagtaactccaatattttctgttttttaaaaataaagcagcagagttatt

SEQ ID NO: 22362 - DNA, 110 bp, synthetic construct
  source 1..110: mol_type = other DNA
ctaaggaggccaaagatgaaaaaaacgccggaaaaacttgacaacactcctgcctcgcctaccagatcccctgccgaccccaatgacatccctcttgcgaaaggtaccta

SEQ ID NO: 22363 - DNA, 110 bp, synthetic construct
  source 1..110: mol_type = other DNA
cgcctaccagatcccctgccgaccccaatgacatccctcttgcgaaaggtacctacacctttgatattgacaagtgggatgaccccaattttaaccccttttcttccacc

SEQ ID NO: 22364 - DNA, 110 bp, synthetic construct
  source 1..110: mol_type = other DNA
gtctggtgggtgggtaaggaagctcaactaaaaactgcaagttttttcttttgttttgtctttttgccatttcttcggccgctcccgaggcatacggaggttcccaggct

SEQ ID NO: 22365 - DNA, 110 bp, synthetic construct; identical to SEQ ID NO: 22364
  source 1..110: mol_type = other DNA

SEQ ID NO: 22366 - DNA, 110 bp, synthetic construct
  source 1..110: mol_type = other DNA
cgtgtcagaatgaagaggtgctgaagaaatgtgcacaggagtacctgtcccgggtgaagaaggaggagcagaggtaccaggctctgaaggtgcatgcggaggagaagctg

SEQ ID NO: 22367 - DNA, 110 bp, synthetic construct
  source 1..110: mol_type = other DNA
gaagaaggaggagcagaggtaccaggctctgaaggtgcatgcggaggagaagctggacaggtactgccacgcagggtctgcccccaagggctgctcggcagccccagcat

SEQ ID NO: 22368 - DNA, 110 bp, synthetic construct
  source 1..110: mol_type = other DNA
attcctatggcaacatgttctttaatttttaaacttcagtgcagctgcaataatgtggttagctttctacatgcttacttaatgtgcattggccccacgggtccatcagc

SEQ ID NO: 22369 - DNA, 110 bp, synthetic construct
  source 1..110: mol_type = other DNA
tggttagctttctacatgcttacttaatgtgcattggccccacgggtccatcagctttgtcctttgtatctcaagggcctcgcagggagcctggcacatagctcagtgaa

SEQ ID NO: 22370 - DNA, 110 bp, synthetic construct
  source 1..110: mol_type = other DNA
caccaggaccacgaaagtggtgggtgacgtggctatgatctagtttgatgccaattgcatcccatggtcagagacagaaaacaccaatgggctcaagacacgttaagtga

SEQ ID NO: 22371 - DNA, 110 bp, synthetic construct
  source 1..110: mol_type = other DNA
tgcatcccatggtcagagacagaaaacaccaatgggctcaagacacgttaagtgactccttagataacaagctgccgggggctgtgagaggagcagtttgggagacgtcc

SEQ ID NO: 22372 - DNA, 110 bp, synthetic construct
  source 1..110: mol_type = other DNA
tgtgtgactttgagcaaattgcccaaacttcctgagcctcagtttttttatgcccccagagtcactgaggagacgagataagatgacgaatgcgagtgtgaggcaggcag

SEQ ID NO: 22373 - DNA, 110 bp, synthetic construct
  source 1..110: mol_type = other DNA
ccagagtcactgaggagacgagataagatgacgaatgcgagtgtgaggcaggcagaataacagccccaaagatatccatgttctggaattcccatcatggctcagcgaaa

SEQ ID NO: 22374 - DNA, 110 bp, synthetic construct
  source 1..110: mol_type = other DNA
gccacaacgggaactccgagactgagctttctaggttgcgctgttgggttgccacactggattgagaactttgtcgatggccttatttaaatgacataagtgaaggatga

SEQ ID NO: 22375 - DNA, 110 bp, synthetic construct
  source 1..110: mol_type = other DNA
gcaatctcaaaggacttcttatgtagcttctcactgggtacagtaaatccccctgggaatttgcatgtcaggttcagtacggcgataatgctgttccttatgtcgtcaag

SEQ ID NO: 22376 - DNA, 110 bp, synthetic construct
  source 1..110: mol_type = other DNA
agtacagccactctgaaaagagtttggtagtttttttataaaagtaaacttgcagtcagtacacaacctagctagcatttacactcctaggcgtttatcctagagaaatg

SEQ ID NO: 22377 - DNA, 110 bp, synthetic construct
  source 1..110: mol_type = other DNA
tcagtacacaacctagctagcatttacactcctaggcgtttatcctagagaaatgaagactgctatgttcacatgaaaacctgtacatgaatgttcacagcagctttatt

SEQ ID NO: 22378 - DNA, 110 bp, synthetic construct
  source 1..110: mol_type = other DNA
tagtcttttaaagactagccattcttgtgggtatgtctcattgttatttcaatctgttttttcccaacatcaaggccattgtatattttcttttatgaaatctttggact

SEQ ID NO: 22379 - DNA, 110 bp, synthetic construct
  source 1..110: mol_type = other DNA
agctggattggagaccccgtggcctgtgaaactgaaagcacttactttgtggcctttcagagaaagagctttgccagctccaacggaagatgattagcacgttgttctag

SEQ ID NO: 22380 - DNA, 110 bp, synthetic construct
  source 1..110: mol_type = other DNA
ttcagagaaagagctttgccagctccaacggaagatgattagcacgttgttctagaggagcccagtgtgcttggaacaaaatgtgcttttaagactcgcgtgagggagtt

SEQ ID NO: 22381 - DNA, 110 bp, synthetic construct
  source 1..110: mol_type = other DNA
ttagacctttaaaaggtgattgcctcagtgaggtgcctgccaagaatcagcagacagcaaatgaaattaacacgaacacatgcgtaattgttaaaaaaaattcaaatgaa

SEQ ID NO: 22382 - DNA, 110 bp, synthetic construct
  source 1..110: mol_type = other DNA
agcaaatgaaattaacacgaacacatgcgtaattgttaaaaaaaattcaaatgaaattggctcagactctttatggaaatagttttctgttcagtgtgcttcactgggtc

SEQ ID NO: 22383 - DNA, 110 bp, synthetic construct
  source 1..110: mol_type = other DNA
agtctgtatcatgattttttcccccagcacttctatccaccgccctagccaggatgtaagtttctaaagcctgaaccagcttaattcagtatctgtgttttgagcacttg

SEQ ID NO: 22384 - DNA, 110 bp, synthetic construct
  source 1..110: mol_type = other DNA
ttcctgagccgcttcccctccgtgtacctgcagtgtaagatggtcgtgtgcagggcgttcgactcctcctcccgctgccgcagaggctgcgtggtgaggtccaagaggga

SEQ ID NO: 22385 - DNA, 110 bp, synthetic construct
  source 1..110: mol_type = other DNA
gaagatgctttgctggatggttttcctagttgcactttatggtataaagcttgtccctgtcaaggactggtgtctaagagttttacctaacatgttaaatttgtttcgaa

SEQ ID NO: 22386 - DNA, 110 bp, synthetic construct
  source 1..110: mol_type = other DNA
catccttgccctctctccatggttcttggagtcgtcttccagacatgctcctctccatctcaaacatctctctcccccttggtaacttgcttgtctcttagggcccagct

SEQ ID NO: 22387 - DNA, 110 bp, synthetic construct
  source 1..110: mol_type = other DNA
catctcaaacatctctctcccccttggtaacttgcttgtctcttagggcccagcttaattgttgcctccttgaagatttccttgtggaataaattagcccttggtccaca

SEQ ID NO: 22388 - DNA, 110 bp, synthetic construct
  source 1..110: mol_type = other DNA
ggatgataactatatatttcaaggggctgtcatgccagttaaatcagcgagctggtgtaaagcactcagcagagagcctggctcacaatcatgcgccacgagggtgggtg

SEQ ID NO: 22389 - DNA, 110 bp, synthetic construct
  source 1..110: mol_type = other DNA
tgtaaagcactcagcagagagcctggctcacaatcatgcgccacgagggtgggtggccgtgccttgagccacgtcctggaacagcgctgttcaagggaggtgggattctg

SEQ ID NO: 22390 - DNA, 110 bp, synthetic construct
  source 1..110: mol_type = other DNA
aacctcagaaaatgtttgccttttttcatagttcaaacaagaatggttatcttacttccagtatcacagcaactattgacaaggagagcaaccatcctggaccaggattt

SEQ ID NO: 22391 - DNA, 110 bp, synthetic construct
  source 1..110: mol_type = other DNA
agggaggagtaagagggaggcaggccccacggaggccacagaagagcagatggggcatttccaaatggtgggaccactggagatccacaaaggaactgatcagagaaaga

SEQ ID NO: 22392 - DNA, 110 bp, synthetic construct
  source 1..110: mol_type = other DNA
catttccaaatggtgggaccactggagatccacaaaggaactgatcagagaaagacccttgcctgagtcctcccaagtttcacatagatctcttagaaatagaagcgaat

SEQ ID NO: 22393 - DNA, 110 bp, synthetic construct
  source 1..110: mol_type = other DNA
aatcttgcaagcacaaaaagtcatcacatgtaaggaataatcaataacattatttattagcagatttctgatcagacacttcggaggcccgaagacaccaggtatattca

SEQ ID NO: 22394 - DNA, 110 bp, synthetic construct
  source 1..110: mol_type = other DNA
attagcagatttctgatcagacacttcggaggcccgaagacaccaggtatattcaaaatgcaccagatgtattcaaaatgctaaaaacaaaaacaacaaacctgagaatc

SEQ ID NO: 22395 - DNA, 110 bp, synthetic construct
  source 1..110: mol_type = other DNA
aaagcccaaccctgagaaaaatgcttgggaacacaacagcctcacaattcagagcctggcatgtgctccagaggccaggtagtctgtcaacggtgtccctcaccgggtgc

SEQ ID NO: 22396 - DNA, 110 bp, synthetic construct
  source 1..110: mol_type = other DNA
ctggcatgtgctccagaggccaggtagtctgtcaacggtgtccctcaccgggtgccccgcagagccaggccctgtgctgcgggctttccccatatccatccactcgctta

SEQ ID NO: 22397 - DNA, 110 bp, synthetic construct; identical to SEQ ID NO: 22395
  source 1..110: mol_type = other DNA

SEQ ID NO: 22398 - DNA, 110 bp, synthetic construct; identical to SEQ ID NO: 22396
  source 1..110: mol_type = other DNA

SEQ ID NO: 22399 - DNA, 110 bp, synthetic construct
  source 1..110: mol_type = other DNA
aagcatagcatacacacaaaaaaagcacataaatcctaaggggagagctcagtgaacggtcacaaaatgaacacatccatgaaatcagtacccatgtcaagaaacaaaag

SEQ ID NO: 22400 - DNA, 110 bp, synthetic construct
  source 1..110: mol_type = other DNA
acggtcacaaaatgaacacatccatgaaatcagtacccatgtcaagaaacaaaaggccaccagcctcccaggagctccaccacacaggcttctgaagttgctgggccaca

SEQ ID NO: 22401 - DNA, 110 bp, synthetic construct
  source 1..110: mol_type = other DNA
aagatcttctccggcagccataagattctttctcctttctctcgggatcctggactcctagccctgtttggggctcccattgtctttattccttctttcctaagtgctag

SEQ ID NO: 22402 - DNA, 110 bp, synthetic construct
  source 1..110: mol_type = other DNA
tcctagccctgtttggggctcccattgtctttattccttctttcctaagtgctagaccagggttgctcagtattggcattttcaacctttgaagccaaatatttctcaat

SEQ ID NO: 22403 - DNA, 110 bp, synthetic construct
  source 1..110: mol_type = other DNA
ttgtcctcatggatgctagtcaggttcattaactactgagccatgatgggaactccattggtattttttgattaagttccccgagatgattctcatgtgctgccagggtt

SEQ ID NO: 22404 - DNA, 110 bp, synthetic construct; identical to SEQ ID NO: 22403
  source 1..110: mol_type = other DNA

SEQ ID NO: 22405 - DNA, 110 bp, synthetic construct
  source 1..110: mol_type = other DNA
cccaatattattcaattccagaagacaaaagcccagctagctgccaacacaattagttacggcaggtctagagtcagactgcatgggctcaaatcgcagctcacaattta

SEQ ID NO: 22406 - DNA, 110 bp, synthetic construct
  source 1..110: mol_type = other DNA
gttacggcaggtctagagtcagactgcatgggctcaaatcgcagctcacaatttacacttcgtatgaccagggggaaaataatccgtttcctatgtctttatttcctcaa

SEQ ID NO: 22407 - DNA, 110 bp, synthetic construct
  source 1..110: mol_type = other DNA
cagggattacaactccaggcttttgtctattctgcctacaaatcaaggacctgtagctctggagagctgggtgttcaacctctggcttggttaatcgtggagagcctcca

SEQ ID NO: 22408 - DNA, 110 bp, synthetic construct
  source 1..110: mol_type = other DNA
gctgggtttcctcttgaagttttcaccaagctagtaggagtgtaaccctggagctggggtgctccagccattgctggaggaaaagtgggtcctggtgctgttcctggttt

SEQ ID NO: 22409 - DNA, 110 bp, synthetic construct
  source 1..110: mol_type = other DNA
gccgctgcagtttcttcttagccctccttctggctctgcctctttgctcccctccctcccatcgtgcccttacctgcaatgtcctttctgtctcacctgcagtcacatca

SEQ ID NO: 22410 - DNA, 110 bp, synthetic construct
  source 1..110: mol_type = other DNA
ctcccatcgtgcccttacctgcaatgtcctttctgtctcacctgcagtcacatcagcccttcccataagacagcagttccttcctgccaccccaggccacaaggatctca

SEQ ID NO: 22411 - DNA, 110 bp, synthetic construct
  source 1..110: mol_type = other DNA
taggtaatagttgggttcctaacccactgaaccacaatgggaactcctcatcatttatactctttactaatatttttcaggcatgttcatctctgcacctcgagggtggg

SEQ ID NO: 22412 - DNA, 110 bp, synthetic construct
  source 1..110: mol_type = other DNA
tatactctttactaatatttttcaggcatgttcatctctgcacctcgagggtggggctgcactctctgctcttctgctcggacactggaaggtcgtgtgcgttacctgct

SEQ ID NO: 22413 - DNA, 110 bp, synthetic construct
  source 1..110: mol_type = other DNA
tggttccaagtgcaggctcctacagatggtgcaggaccggtccatctgccctcctgaggactagcatgcatgcatgcacatgtgcgcacacacacacacacacacacaca

SEQ ID NO: 22414 - DNA, 110 bp, synthetic construct
  source 1..110: mol_type = other DNA
gaggactagcatgcatgcatgcacatgtgcgcacacacacacacacacacacacagacacacacacacacacacacagagacacacacggcttttgggtctctcagaaag

SEQ ID NO: 22415 - DNA, 110 bp, synthetic construct
  source 1..110: mol_type = other DNA
aggaagattttaagcagagaccataagttggcaactcaaatatgtgtacgtcgatgtcctcacattttaacatttctgtagagtaagaataattgtgacttagtaagtga

SEQ ID NO: 22416 - DNA, 110 bp, synthetic construct
  source 1..110: mol_type = other DNA
gtacgtcgatgtcctcacattttaacatttctgtagagtaagaataattgtgacttagtaagtgatggctgtaagaatttctgttttgaaatgatctcatttacttttta

SEQ ID NO: 22417 - DNA, 110 bp, synthetic construct
  source 1..110: mol_type = other DNA
ccagcccaacccaaggacagccctgtagctgactaaaccggcacggaatgagcggaaaatgagtttctgagaaatgaggactcaggatgaaaatgagattcacacacgtt

SEQ ID NO: 22418 - DNA, 110 bp, synthetic construct
  source 1..110: mol_type = other DNA
ggaggaaaatctgtccagtaccatcgtgggccacaggccatgccatgcacagcctttggccacctttcacagaggatctacatgcctgccatcctctgctgctccccttg

SEQ ID NO: 22419 - DNA, 110 bp, synthetic construct
  source 1..110: mol_type = other DNA
ttggccacctttcacagaggatctacatgcctgccatcctctgctgctccccttgatctgccaggaacaactacacggccaaggtcatcaccactctgccaggggcgctc

SEQ ID NO: 22420 - DNA, 110 bp, synthetic construct
  source 1..110: mol_type = other DNA
aaactgtaatgtaggattcaaagtgtgtggctccaaagcccaggctctcaattgcaatgctctttggcttcctgacaacggtcgttgctcccttagctcttgctatttca

SEQ ID NO: 22421 - DNA, 110 bp, synthetic construct
  source 1..110: mol_type = other DNA
aatgctctttggcttcctgacaacggtcgttgctcccttagctcttgctatttcatacgtgcaggcagtggcttagcaagtaggtgaaagcactggtttgcaaaattaca

SEQ ID NO: 22422 - DNA, 110 bp, synthetic construct
  source 1..110: mol_type = other DNA
gcctcgcggagttgggggaataaaaacctctccattgtctcttttattacggtgcaaactcagggtaggatttccagctgccgacagagccacagcacagctcctgtttg

SEQ ID NO: 22423 - DNA, 110 bp, synthetic construct
  source 1..110: mol_type = other DNA
aaactcagggtaggatttccagctgccgacagagccacagcacagctcctgtttgcggatgggtgctgcttatcacaacgtggctgtgcccgaagtggcaggcgtgacct

SEQ ID NO: 22424 - DNA, 110 bp, synthetic construct
  source 1..110: mol_type = other DNA
tacaaaaatgaataaaactcaatataactttggtatttgaacagctttccaaacgtctattcaaatggaataatcacctctccttctgcttttcctgtctccatctgagc

SEQ ID NO: 22425 - DNA, 110 bp, synthetic construct
  source 1..110: mol_type = other DNA
tctattcaaatggaataatcacctctccttctgcttttcctgtctccatctgagctgggtgctggttccgtgaagatacgcacttgttcttgggggagctccagagccat

SEQ ID NO: 22426 - DNA, 110 bp, synthetic construct
  source 1..110: mol_type = other DNA
ggacacagcttggtgcggtagaaaggacgaaggagctgcatcgaacagatgcagctggaaactgctttgtcctttcacagcgcaagaacgccagaaccttccattttcgc

SEQ ID NO: 22427 - DNA, 110 bp, synthetic construct
  source 1..110: mol_type = other DNA
tggaaactgctttgtcctttcacagcgcaagaacgccagaaccttccattttcgcatatgtgaaaggggtttacggatgcttccttgtggggatgaggcagggagggccc

SEQ ID NO: 22428 - DNA, 110 bp, synthetic construct; identical to SEQ ID NO: 22426
  source 1..110: mol_type = other DNA

SEQ ID NO: 22429 - DNA, 110 bp, synthetic construct; identical to SEQ ID NO: 22427
  source 1..110: mol_type = other DNA

SEQ ID NO: 22430 - DNA, 110 bp, synthetic construct
  source 1..110: mol_type = other DNA
cccctaacctgggaacttccatatgccacaaatgcaaccctaaaaagaaaaaaaaaaagtattttattgctaaaaaatgctgaccgtcatctgagtctatgaagtgtgca

SEQ ID NO: 22431 - DNA, 110 bp, synthetic construct; identical to SEQ ID NO: 22430
  source 1..110: mol_type = other DNA

SEQ ID NO: 22432 - DNA, 110 bp, synthetic construct
  source 1..110: mol_type = other DNA
ggggcatcgtaaaaagcatgatgggtcatatatggctcataaaggaggttagaatttcctgcagcagtgggaagcccctgaagaattctgaataggtggtcccctgattg

SEQ ID NO: 22433 - DNA, 110 bp, synthetic construct
  source 1..110: mol_type = other DNA
ttcctgcagcagtgggaagcccctgaagaattctgaataggtggtcccctgattggtggggtttctcaggtccaccactgctgtgcagtagggatggatcatggggatgg

SEQ ID NO: 22434 - DNA, 110 bp, synthetic construct
  source 1..110: mol_type = other DNA
accccacctgaccgcttctcactgagtttgctccttggggtgtggtcatagaccaccctcatcagcatcacctaaagaactccggaagaacgcaaatgcccagaccccag

SEQ ID NO: 22435 - DNA, 110 bp, synthetic construct
  source 1..110: mol_type = other DNA
ccctcatcagcatcacctaaagaactccggaagaacgcaaatgcccagaccccagaggtgtgggccaagaatctaactctttaaccagcaccccaagtttaccaggtggt

SEQ ID NO: 22436 - DNA, 110 bp, synthetic construct
  source 1..110: mol_type = other DNA
agcctttgcaccctccagaatccttaacaaggctgctgagttaggaggtggtgaccagcgacagcttgagaagcgttagaaatagcagccgatttagtgaggttgtccac

SEQ ID NO: 22437 - DNA, 110 bp, synthetic construct
  source 1..110: mol_type = other DNA
gccgcctggcgggcaggctgacaggctgcttgccgaacttctccatgatctctctgattcgggccaggttggttttgctgagtgtgaagtcgcaccgcgtggcccccata

SEQ ID NO: 22438 - DNA, 110 bp, synthetic construct
  source 1..110: mol_type = other DNA
gattcgggccaggttggttttgctgagtgtgaagtcgcaccgcgtggcccccatatcatagccgaccatgcagttccgggtagacgaggtgaaaccttctgccttggctg

SEQ ID NO: 22439 - DNA, 110 bp, synthetic construct
  source 1..110: mol_type = other DNA
gtcccttataaggacatttgtcactgatcttagggcccatctgggtgacccacaatgacctcatcttgagacccttaattacaactacagactcatttcccaaacaaggt

SEQ ID NO: 22440 - DNA, 110 bp, synthetic construct
  source 1..110: mol_type = other DNA
ctactggactcctttctactgcatcgcacactacttaccagccagccaaccagctctccctgggcattggggaccggacgaccccaggccctcaggcagagtcaaatatt

SEQ ID NO: 22441 - DNA, 110 bp, synthetic construct
  source 1..110: mol_type = other DNA
ctccctgggcattggggaccggacgaccccaggccctcaggcagagtcaaatatttttaatttatttttattagggtagagttgattggcggtgttgagtcaatttctct

SEQ ID NO: 22442 - DNA, 110 bp, synthetic construct
  source 1..110: mol_type = other DNA
ctttttttacgagattttgagcaaaggaggcgaggacagaagggaatggagacgtggataaagaaaattattgccacctgaacgccttattcgaaatgatgagaaaggag

SEQ ID NO: 22443 - DNA, 110 bp, synthetic construct
  source 1..110: mol_type = other DNA
agggaagcgaccctctccccagcctggagccaccaggctgcccacttttaggacagtgtctggcacacagcctctccgccaccagatcccttggagtcctgactcttgct

SEQ ID NO: 22444 - DNA, 110 bp, synthetic construct
  source 1..110: mol_type = other DNA
gtgtctggcacacagcctctccgccaccagatcccttggagtcctgactcttgctaatgtgagactccaagaagcttgagagtgttggacccacctctgtccgcagagac

SEQ ID NO: 22445 - DNA, 110 bp, synthetic construct
  source 1..110: mol_type = other DNA
ccaggatcagtggggaacatccttgcacttggggcctgtccgcccccaccccaaacagccgaggggccactgcaggcatcccttgacaggcaccgaacctctctgcgccc

SEQ ID NO: 22446 - DNA, 110 bp, synthetic construct
  source 1..110: mol_type = other DNA
cagccgaggggccactgcaggcatcccttgacaggcaccgaacctctctgcgccccgctatggattagggggactctccacccagcctctccactagtttcacacacacc

SEQ ID NO: 22447 - DNA, 110 bp, synthetic construct
  source 1..110: mol_type = other DNA
ccaaaaggagcagggtgtctgtcacccctcacatgggtcctcagaaccctctcacctgctttgatgtgacttcaggaagagtgaaaaggccgccgagcagcaggagatgc

SEQ ID NO: 22448 - DNA, 110 bp, synthetic construct
  source 1..110: mol_type = other DNA
ctgctttgatgtgacttcaggaagagtgaaaaggccgccgagcagcaggagatgcccaagccagatgtcaatcaggacgggcagaggagagagatcttgcctagaagcag

SEQ ID NO: 22449 - DNA, 110 bp, synthetic construct; identical to SEQ ID NO: 22447
  source 1..110: mol_type = other DNA

SEQ ID NO: 22450 - DNA, 110 bp, synthetic construct; identical to SEQ ID NO: 22448
  source 1..110: mol_type = other DNA

SEQ ID NO: 22451 - DNA, 110 bp, synthetic construct
  source 1..110: mol_type = other DNA
ctatgccacgaacagctaacggcatagctttgcaaaacagtttgcaaaacaggttctcctacctcatcccctgacttcgcacaaaaacattgcagggcggtggggaggag

SEQ ID NO: 22452 - DNA, 110 bp, synthetic construct
  source 1..110: mol_type = other DNA
tgccagttggacttgcttccctggccgtttattccagagtgaactcagaacgacaggtgttctggcctctggtccaatatttattatgaaggggtcccaagtgagccaaa

SEQ ID NO: 22453 - DNA, 110 bp, synthetic construct
  source 1..110: mol_type = other DNA
ggtgttctggcctctggtccaatatttattatgaaggggtcccaagtgagccaaatcttggcacctgaatttccttctcttcaacatgaaggtgaaaatctttcctgcct

SEQ ID NO: 22454 - DNA, 110 bp, synthetic construct
  source 1..110: mol_type = other DNA
cggttgccccttgatctggggaagcaggacttgctgtagtataagttgcaggctactgagctgggggagggggctagctttgcagcattttgaggcaaagactaactcag

SEQ ID NO: 22455 - DNA, 110 bp, synthetic construct
  source 1..110: mol_type = other DNA
ctgagctgggggagggggctagctttgcagcattttgaggcaaagactaactcagtaggtatttgagcaccctgagttgtgtcctctgccccggttgccggccacgtttg

SEQ ID NO: 22456 - DNA, 110 bp, synthetic construct
  source 1..110: mol_type = other DNA
actcttattttgcttccaaacccagctccaacctcacaccctctgtgatgccagtcccaacccatgtatgattataattaggtgcagaccaatggtcctcagtcttggct

SEQ ID NO: 22457 - DNA, 110 bp, synthetic construct
  source 1..110: mol_type = other DNA
tggggatagatatttgtcttttctttcaataatcccaactctaacaacggagacattccatgtatatttttctagtgatagttcttctagacacatttatgacagtgata

SEQ ID NO: 22458 - DNA, 110 bp, synthetic construct
  source 1..110: mol_type = other DNA
atatgttcaggcattcgctaaacaaaatccagcacttgccaagactcacccaactatcctttcttcccacagtacagattaattacagattttttcactggagatccagc

SEQ ID NO: 22459 - DNA, 110 bp, synthetic construct
  source 1..110: mol_type = other DNA
cgctaaacaaaatccagcacttgccaagactcacccaactatcctttcttcccacagtacagattaattacagattttttcactggagatccagcgacgtcttcagagcg

SEQ ID NO: 22460 - DNA, 110 bp, synthetic construct
  source 1..110: mol_type = other DNA
tgaattgaggatgccgttgaggccaccactgatcacttcaaggcgtgctctgcgcatctcctgcctcgccagtcaatcacaggaatggcctcagacctggtcactcggat

SEQ ID NO: 22461 - DNA, 110 bp, synthetic construct
  source 1..110: mol_type = other DNA
atctcctgcctcgccagtcaatcacaggaatggcctcagacctggtcactcggatttaaaagccctcgtgttttcacaatttacagtttacaaagcccttcggcttgcgt

SEQ ID NO: 22462 - DNA, 110 bp, synthetic construct
  source 1..110: mol_type = other DNA
agtcagattcgtttccactgagccatggtgggaactcctgagtgctttgattttaaagcctgtgtttggggcgaacttgcgttggtgtttccaaagagagcagtggctga

SEQ ID NO: 22463 - DNA, 110 bp, synthetic construct; identical to SEQ ID NO: 22462
  source 1..110: mol_type = other DNA

SEQ ID NO: 22464 - DNA, 110 bp, synthetic construct
  source 1..110: mol_type = other DNA
actctaacagattggagatgcagacctcttagaggggaccagaacctttctaggattcaataatatggcaaagaataacatatggtaaagagtacttctaggaatacctg

SEQ ID NO: 22465 - DNA, 110 bp, synthetic construct
  source 1..110: mol_type = other DNA
ttcaataatatggcaaagaataacatatggtaaagagtacttctaggaatacctgattctcgtggtttaaggcttctgaattaatgcgtggtcttataccttcctgctaa

SEQ ID NO: 22466 - DNA, 110 bp, synthetic construct
  source 1..110: mol_type = other DNA
ttggggcccagcccggctcccggttcacacccaggtcggtgggtcactggacacaggcctcctcgtaatgcaatttccactctgggcgctccagctcctctgcctccccg

SEQ ID NO: 22467 - DNA, 110 bp, synthetic construct
  source 1..110: mol_type = other DNA
ggcctcctcgtaatgcaatttccactctgggcgctccagctcctctgcctccccgaactgggcaggggtgcagctgcgggcatcatgccgcctctggggtggttcatgca

SEQ ID NO: 22468 - DNA, 110 bp, synthetic construct
  source 1..110: mol_type = other DNA
ggtggacaggccgcctccccctgggactgaggccacacgcgtccaccccgagctgaacaggtaccacacggagtgtctgctcagacgcagaagagactagcaatgaacag

SEQ ID NO: 22469 - DNA, 110 bp, synthetic construct
  source 1..110: mol_type = other DNA
aacaggtaccacacggagtgtctgctcagacgcagaagagactagcaatgaacagatgtggccggtcctgcatttcttaggattgcacacatctgggaacctctgggggt

SEQ ID NO: 22470 - DNA, 110 bp, synthetic construct
  source 1..110: mol_type = other DNA
gaggcttctttttgttcctctgatccaatcagataccaagactaaaagattttggcaaattaatttccggcatgtgaaacccgtagtcagcgtgtatcaggatcccagcc

SEQ ID NO: 22471 - DNA, 110 bp, synthetic construct
  source 1..110: mol_type = other DNA
caaattaatttccggcatgtgaaacccgtagtcagcgtgtatcaggatcccagccaataaaactacattttacttggagtctcagttactccaagttgagaggccactta

SEQ ID NO: 22472 - DNA, 110 bp, synthetic construct
  source 1..110: mol_type = other DNA
gttggattcgtttccgccgcgccaggatgggaactcctgattatttctttaagatagattcccaggagtggagctactgggtccgaggggacggtagtcgaggtcctgat

SEQ ID NO: 22473 - DNA, 110 bp, synthetic construct
  source 1..110: mol_type = other DNA
ctttttaatttcaaaaaaaggagttttgataaatgcacagaaatctacatattggtgggttcttgcttctcaggacttgctgtgacagcaacttgcaggggggtaagtct

SEQ ID NO: 22474 - DNA, 110 bp, synthetic construct; identical to SEQ ID NO: 22473
  source 1..110: mol_type = other DNA

SEQ ID NO: 22475 - DNA, 110 bp, synthetic construct
  source 1..110: mol_type = other DNA
tcacttagattctcagttttaaaaagaggcccccttatccatctccacgttcagtcatttgaatgttcctcccccaaagttcttttcgactttccttctctcctttgggc

SEQ ID NO: 22476 - DNA, 110 bp, synthetic construct
  source 1..110: mol_type = other DNA
ggctgctccctggcaacacgggatcatcccagcccggaggcgagggccgcagcggacagctgccctggtctcagcatcacagcgtttgtccctctcatctggaagctcgg

SEQ ID NO: 22477 - DNA, 110 bp, synthetic construct
  source 1..110: mol_type = other DNA
acagctgccctggtctcagcatcacagcgtttgtccctctcatctggaagctcggttttccttctcttaggcatctgccaggtgccttaaagaatatttccactgtggcg

SEQ ID NO: 22478 - DNA, 110 bp, synthetic construct
  source 1..110: mol_type = other DNA
ctgggaccagacagcctggaagaattcaattctatctgaaacggggccaagaattttgtgataatttgtttttaactatatctgcctttcctagtggatacagtgaaaaa

SEQ ID NO: 22479 - DNA, 110 bp, synthetic construct
  source 1..110: mol_type = other DNA
ttgtgataatttgtttttaactatatctgcctttcctagtggatacagtgaaaaaccagtgctaagctcatatattttctatttgaataagcagtattccttccacctct

SEQ ID NO: 22480 - DNA, 110 bp, synthetic construct
  source 1..110: mol_type = other DNA
cacagccccggacactggcagtggccacttaagttctaggcggtccctgtgactcactgtcaggagcatcgacagtttctctgtgtctcagcttcacgcgtttgatatca

SEQ ID NO: 22481 - DNA, 110 bp, synthetic construct
  source 1..110: mol_type = other DNA
actgtcaggagcatcgacagtttctctgtgtctcagcttcacgcgtttgatatcacacacgggagtggatgcatgtgtgtgtgtggggggggtggtataaacacacacag

SEQ ID NO: 22482 - DNA, 110 bp, synthetic construct
  source 1..110: mol_type = other DNA
gcgctttgggtatgtggagagagaggagcaggaggataaggggctgaaagacagatccacaccagagggaaggctctgaatgccagacagaagggacattaccacgaggc

SEQ ID NO: 22483 - DNA, 110 bp, synthetic construct
  source 1..110: mol_type = other DNA
tccacaccagagggaaggctctgaatgccagacagaagggacattaccacgaggccgtaggaggctccccagggggctggaagttggctgagttgatctgttccaagtga

SEQ ID NO: 22484 - DNA, 110 bp, synthetic construct
  source 1..110: mol_type = other DNA
taccctacaaaattttccactccctaccaccagcagaagttatctacttgatacgtggcagcaagactgcttgtcaagataatttagagattaaatctttgtttaaaaaa

SEQ ID NO: 22485 - DNA, 110 bp, synthetic construct
  source 1..110: mol_type = other DNA
ctgtctctggagcacatacacgctagctcacagtgctaaaaataggaaatcaaacccaagtctcctcatagcaatagaatgcagacctagacagcaactaattcttcaca

SEQ ID NO: 22486 - DNA, 110 bp, synthetic construct
  source 1..110: mol_type = other DNA
ccaagtctcctcatagcaatagaatgcagacctagacagcaactaattcttcacatttatatatattttcattgtaggttactagacacacacacacacagtctataaaa

SEQ ID NO: 22487 - DNA, 110 bp, synthetic construct
  source 1..110: mol_type = other DNA
aaaattgactctttgtgtaaatcaactgtactccaatggaaaaaaaaaaaaaaatttagggagagcccgtcatggctcggtggttaacacacccgactagtatctttgag

SEQ ID NO: 22488 - DNA, 110 bp, synthetic construct; identical to SEQ ID NO: 22487
  source 1..110: mol_type = other DNA

SEQ ID NO: 22489 - DNA, 110 bp, synthetic construct
  source 1..110: mol_type = other DNA
gatcttctgacaaatcctagtgttagttttctgtgtggaggaaagacacttcctaaactgtttgggaatcttgggaataaagattcatttccagtctgaataaccatccc

SEQ ID NO: 22490 - DNA, 110 bp, synthetic construct
  source 1..110: mol_type = other DNA
aactgtttgggaatcttgggaataaagattcatttccagtctgaataaccatccctttctttaagaagtggccatttggaagatagctgcgaatgtatagagactttgtg

SEQ ID NO: 22491 - DNA, 110 bp, synthetic construct
  source 1..110: mol_type = other DNA
attcagtcagtcactcaacaaatgtttatcgattccctgctctcagcaggagggtgctacgcccagagataaatcagccctgtagtcaatgagttcacagcctagtaaac

SEQ ID NO: 22492 - DNA, 110 bp, synthetic construct
  source 1..110: mol_type = other DNA
gctacgcccagagataaatcagccctgtagtcaatgagttcacagcctagtaaacaaattattgtgtttactagtagctttataacacactttaatatctggttgggtta

SEQ ID NO: 22493 - DNA, 110 bp, synthetic construct
  source 1..110: mol_type = other DNA
aagtcctcctcttggctttcctttgtgcctttctttgtgctctattcaaggatcctccctttactttgggccctgtctcttgagaagcctttttagctactttaacccca

SEQ ID NO: 22494 - DNA, 110 bp, synthetic construct
  source 1..110: mol_type = other DNA
tttttgtttattttttttgtcagacgtggacaatttaagtatgttatgctgacgcattaattccacgaagattagctaagataacataaggccacagatggcttagttga

SEQ ID NO: 22495 - DNA, 110 bp, synthetic construct
  source 1..110: mol_type = other DNA
ccctggtttttggtttggacacttggatcggataggagactcatttttcttaaatgtagatgtcatgaggttcagctttagatgtgctgcagtgaagatttctaacaggt

SEQ ID NO: 22496 - DNA, 110 bp, synthetic construct
  source 1..110: mol_type = other DNA
gtagatgtcatgaggttcagctttagatgtgctgcagtgaagatttctaacaggttgttgaagataggtgcctgaaaccttggggaaaaatccactgtgcagttttatgt

SEQ ID NO: 22497 - DNA, 110 bp, synthetic construct
  source 1..110: mol_type = other DNA
aggacatagagaacttgaagaagacggcacaaacagagagctgtgtgccagaatgaacggttccttcacttctgcaggaagaacccgaggtctgaggttttaggcctgag

SEQ ID NO: 22498 - DNA, 110 bp, synthetic construct
  source 1..110: mol_type = other DNA
tcattagtggagaagtgttaatgattttgattttatccaacctcttggctgattttgagtggttttctttttaggttgcgaatcaatagtagacagttgaaatcaactgt

SEQ ID NO: 22499 - DNA, 110 bp, synthetic construct
  source 1..110: mol_type = other DNA
tgagtggttttctttttaggttgcgaatcaatagtagacagttgaaatcaactgttctcatcactagtgtttgaagttttgatgaaaatttggtgggtggtgaatcagat

SEQ ID NO: 22500 - DNA, 110 bp, synthetic construct
  source 1..110: mol_type = other DNA
ctcttggccacgcagaatgttcgctacacagataaaggggaatgctctagaatacctcctagggttgggacttctcagaactatgctgtaagtacagtgtcaggagcaac

SEQ ID NO: 22501 - DNA, 110 bp, synthetic construct
  source 1..110: mol_type = other DNA
ctcctagggttgggacttctcagaactatgctgtaagtacagtgtcaggagcaaccagggacacggggcaagaagggacgagtcgataaagggccagccagcgtctaacc

SEQ ID NO: 22502 - DNA, 110 bp, synthetic construct
  source 1..110: mol_type = other DNA
cacagcgatgcagtcagtcagccccttccccacacctgcagggcaccaaatggttcaggctggggaaggaaaagggcaggtatagtccattagggctgaagtgggggaca

SEQ ID NO: 22503 - DNA, 110 bp, synthetic construct
  source 1..110: mol_type = other DNA
caggctggggaaggaaaagggcaggtatagtccattagggctgaagtgggggacacacatgccccaaccaattcccacacgtccacaggaccagcaaccctttcctacca

SEQ ID NO: 22504 - DNA, 110 bp, synthetic construct
  source 1..110: mol_type = other DNA
agcgtctgctttaacgtggtctggtggggctggtgtggggggcaggtatctgcagggtggtggacggccgaggtgaacccccagtgcacttctaaagcccgacaaaggca

SEQ ID NO: 22505 - DNA, 110 bp, synthetic construct
  source 1..110: mol_type = other DNA
cctgctccctccatccagtcctaagacacacacacatatcaggcgcactttcaccagcctcctgcccacacctggacctacacgacgcatttacagcaccagcaaacctc

SEQ ID NO: 22506 - DNA, 110 bp, synthetic construct
  source 1..110: mol_type = other DNA
agcctcctgcccacacctggacctacacgacgcatttacagcaccagcaaacctcacagaaccaaatgccagccaggtcagcccagctctgggcggcagagagcagagaa

SEQ ID NO: 22507 - DNA, 110 bp, synthetic construct
  source 1..110: mol_type = other DNA
tgcccagaagatgttctcaggtcccttcacctccgcatgttacagccacacgagacctgcccgggatccaaccactcactgctacccaataacgataaaccgtattaact

SEQ ID NO: 22508 - DNA, 110 bp, synthetic construct
  source 1..110: mol_type = other DNA
cctgcccgggatccaaccactcactgctacccaataacgataaaccgtattaactagctctgcaacaacgaccctttggggagggggaggggatcctgaaagcaaattct

SEQ ID NO: 22509 - DNA, 110 bp, synthetic construct
  source 1..110: mol_type = other DNA
ctaggacaaagaccacctaccacctttgcacctagcaagccccagctcccaccagcacaaccaaagcaatcaaggcccagggagccttctggagtgttccctgagggaga

SEQ ID NO: 22510 - DNA, 110 bp, synthetic construct
  source 1..110: mol_type = other DNA
ctgcagtgtaacacaggaagaagtaagccaacatattgagcttttactcctcacccaacattgagagagggcctgggctggatccttgggaatagattaacccgagctgg

SEQ ID NO: 22511 - DNA, 110 bp, synthetic construct
  source 1..110: mol_type = other DNA
caacattgagagagggcctgggctggatccttgggaatagattaacccgagctggctgctacctcacaggagagaggatcctggagaaactgcacctgcacaaatctgat

SEQ ID NO: 22512 - DNA, 110 bp, synthetic construct
  source 1..110: mol_type = other DNA
caaagacaagacaaacgagtgtgcttctgagtactgatgtgagaaccggtctgcctgtccagagcttagatgtccttcaggctgtggtcatgagtccagaagacttgtcc

SEQ ID NO: 22513 - DNA, 110 bp, synthetic construct
  source 1..110: mol_type = other DNA
tgtccagagcttagatgtccttcaggctgtggtcatgagtccagaagacttgtcctggctcctttcccttgattgctgcgcccactcccacagcggtcatctccccaccc

SEQ ID NO: 22514 - DNA, 110 bp, synthetic construct
  source 1..110: mol_type = other DNA
ttccctgtaccctcgtcagcactggaaggcatcaacattttaaaagttttgactctacgatgggttaagaacattattctcgtgtgcatttccctgaccactgatggggt

SEQ ID NO: 22515 - DNA, 110 bp, synthetic construct
  source 1..110: mol_type = other DNA
tacgatgggttaagaacattattctcgtgtgcatttccctgaccactgatggggttgggcatcttttcacgtttactgttgctctgcctctttccttctgtgacttgcct

SEQ ID NO: 22516 - DNA, 110 bp, synthetic construct
  source 1..110: mol_type = other DNA
tctcattaccatctgccaggcctgtgttctctccctccaacctccaacccagggggcacctggcagtctgcaaccatttctaatggggcaccgaggcccaaatccagccc

SEQ ID NO: 22517 - DNA, 110 bp, synthetic construct
  source 1..110: mol_type = other DNA
gcacctggcagtctgcaaccatttctaatggggcaccgaggcccaaatccagcccaaaggactgaagaatgtcatgacagttttgatgtatctctgtccccacgctgctg

SEQ ID NO: 22518 - DNA, 110 bp, synthetic construct
  source 1..110: mol_type = other DNA
actggatgtattttgaagttagaatgtggggattgagagaaatgttttcctccaaggagtttcaactagaaatctgtaagatggattcagtaccaattgaactagggaag

SEQ ID NO: 22519 - DNA, 110 bp, synthetic construct
  source 1..110: mol_type = other DNA
ggagtttcaactagaaatctgtaagatggattcagtaccaattgaactagggaagactgggcataatgcagatttgggagggaagatcagaagtttggttttggacatgt

SEQ ID NO: 22520 - DNA, 110 bp, synthetic construct
  source 1..110: mol_type = other DNA
aaacaaaacaaaacaaaaaaccccccactgcattctgagtttccaaaccagcctaacatatctcatttcttattctaaacaattgaacaaacatttgtctttggggccaa

SEQ ID NO: 22521 - DNA, 110 bp, synthetic construct
  source 1..110: mol_type = other DNA
acatatctcatttcttattctaaacaattgaacaaacatttgtctttggggccaagatgtcagtgtgaaaaaaaaaacaaaccccacctccaagcctgggcaaggctgag

SEQ ID NO: 22522 - DNA, 110 bp, synthetic construct
  source 1..110: mol_type = other DNA
tcagacctttccccagttgaggagaataggtaagactcctctcaccatcaagaccattaagaaagaagcaggccatgctacggtatcaaaagcggttttcatgctcgtct

SEQ ID NO: 22523 - DNA, 110 bp, synthetic construct
  source 1..110: mol_type = other DNA
attaagaaagaagcaggccatgctacggtatcaaaagcggttttcatgctcgtcttaagtgacaaactgaccagcttcgcaagtcagtttgtaagatctgggaattttct

SEQ ID NO: 22524 - DNA, 110 bp, synthetic construct
  source 1..110: mol_type = other DNA
tcacaagaggagatgcactgggctagtgaccagctttgtgtagctaatctctccgtttgggtatctgatgccagtgtctgtctgactctggcaatgcctgctccatattt

SEQ ID NO: 22525 - DNA, 110 bp, synthetic construct
  source 1..110: mol_type = other DNA
gcaaaccagagcacgtaagcctgggacaaagcatctcagacagctctgagagatggctctgaagaggcgatgggggcgccaggatgtataggggtttttgccacaaagat

SEQ ID NO: 22526 - DNA, 110 bp, synthetic construct
  source 1..110: mol_type = other DNA
aatggccactgcctgccagactcctgatttgtctcatcctgactggatatccccaaattccaaaatctgggatgagcaggaacggctgtcccccaagacgtattgtttga

SEQ ID NO: 22527 - DNA, 110 bp, synthetic construct
  source 1..110: mol_type = other DNA
aattccaaaatctgggatgagcaggaacggctgtcccccaagacgtattgtttgaagttgcttggctgttctcttcatgcgtccccccccaactcctcccccaggggtga

SEQ ID NO: 22528 - DNA, 110 bp, synthetic construct
  source 1..110: mol_type = other DNA
gtcttggaataattgagttcggtgttcggtgagattgggtttcatcaaagaaatgtatggtctgggagagccagacagagctctgactgtcaggtgccttctcctggtca

SEQ ID NO: 22529 - DNA, 110 bp, synthetic construct
  source 1..110: mol_type = other DNA
tgcagcagtaactgctgaccccagaattggtgtaggtctccgatttcagctcctttccagggatcaggaggccacactgcagttactggctctagggagtcatcacttag

SEQ ID NO: 22530 - DNA, 110 bp, synthetic construct
  source 1..110: mol_type = other DNA
tgtgttagaagtacaatgagctctatggggtcccagaggccacttcagactttctcccttcaaatgcagtttctctattctcagaccttggattctgcaccctccaagcc

SEQ ID NO: 22531 - DNA, 110 bp, synthetic construct
  source 1..110: mol_type = other DNA
cccttcaaatgcagtttctctattctcagaccttggattctgcaccctccaagccgggattttctattctacattatggaattttaactgattgtacatgactactaccc

SEQ ID NO: 22532 - DNA, 110 bp, synthetic construct
  source 1..110: mol_type = other DNA
gcttttctgactctgtgaggcagcaaaatcagaaacaacagcgaagatggagacagaacggtcctaatttctatcctgttggcatctgtcttccgcttgtccttcagttc

SEQ ID NO: 22533 - DNA, 110 bp, synthetic construct
  source 1..110: mol_type = other DNA
cacttctgagaacacaccctactcccctggccaggcgtggggaaatgacccatcctgggccaattataatcctccatcaccccgactgccccgggatggtcatgtgaccc

SEQ ID NO: 22534 - DNA, 110 bp, synthetic construct
  source 1..110: mol_type = other DNA
tgggccaattataatcctccatcaccccgactgccccgggatggtcatgtgaccctacaaggccagagctaaggctctgggaggtgagctggctgccatctcccctggcc

SEQ ID NO: 22535 - DNA, 110 bp, synthetic construct
  source 1..110: mol_type = other DNA
aaaaccattttaggaatctgatgaatcttgtgtacgcttgagtgcttgggaacttcacatctagatggtgcgattcatgctgtggagcccaggaaggcggttgccagctt

SEQ ID NO: 22536 - DNA, 110 bp, synthetic construct
  source 1..110: mol_type = other DNA
cacatctagatggtgcgattcatgctgtggagcccaggaaggcggttgccagctttctggcatctctttcacgccgagcggaggaggtgatctgacctctgcccgtttct

SEQ ID NO: 22537 - DNA, 110 bp, synthetic construct
  source 1..110: mol_type = other DNA
cggagtttgtagatgggcggcagcttcgcctccactcgccgccgtaaacgtgggctatggggctcctttaacatcgtgcttgtgatggattctggtgtcttttgcatgag

SEQ ID NO: 22538 - DNA, 110 bp, synthetic construct
  source 1..110: mol_type = other DNA
ccccagaggacctgttgtttgtatccctttacccacggggtggccaagggcatttgtcggaagggtcggaggatggaacattttaatagtctccaaaactgtggctgtga

SEQ ID NO: 22539 - DNA, 110 bp, synthetic construct
  source 1..110: mol_type = other DNA
aatactgcaaaccagctataatggaaaaaataacaatcatttagaaaataaagtgaggttggttggcctgcttttgctagattgtaaccatagtcatcacactccttggc

SEQ ID NO: 22540 - DNA, 110 bp, synthetic construct
  source 1..110: mol_type = other DNA
aggttggttggcctgcttttgctagattgtaaccatagtcatcacactccttggctcatcttttttgaaatgatgtgaagaagagcaaagcaaactgtacagtttatgct

SEQ ID NO: 22541 - DNA, 110 bp, synthetic construct
  source 1..110: mol_type = other DNA
caaagggtcttaagaatgattttgttcggaacatcttgtggacctttgaagacattcacatgttggtgggctccaacatgccgatcttcggaggaggcagatacccagca

SEQ ID NO: 22542 - DNA, 110 bp, synthetic construct
  source 1..110: mol_type = other DNA
tcacatgttggtgggctccaacatgccgatcttcggaggaggcagatacccagcagtcagcctgcgtctcaggtaatcagactgcattcctttagaagcagtgttctgct

SEQ ID NO: 22543 - DNA, 110 bp, synthetic construct
  source 1..110: mol_type = other DNA
ggctttaactgcagagcctgaagatgaattgggagggagcaggagggtaaaagtgagaccttttattattatgtcattttccgtgacagggagtaagtgtctccactgct

SEQ ID NO: 22544 - DNA, 110 bp, synthetic construct
  source 1..110: mol_type = other DNA
agaccttttattattatgtcattttccgtgacagggagtaagtgtctccactgctgagtggctttttttttttcttgctgaatctactctcgctcttgttccctgctctg

SEQ ID NO: 22545 - DNA, 110 bp, synthetic construct
  source 1..110: mol_type = other DNA
gacatctgtgttttcattcgtttctgtttatcgactcattgatgagttctaataaaaagtaagaaccagcagcttaccctcttcgacgaagaagtaggcttttcttggtc

SEQ ID NO: 22546 - DNA, 110 bp, synthetic construct
  source 1..110: mol_type = other DNA
gggactttcagggacgcgtactcagagtctgaccttgaggagctcctgttgggccgcagcggaaatgaacccgactaggaaccgtgaggtttcaggttcgatcagtgggt

SEQ ID NO: 22547 - DNA, 110 bp, synthetic construct
  source 1..110: mol_type = other DNA
gcgtactcagagtctgaccttgaggagctcctgttgggccgcagcggaaatgaacccgactaggaaccgtgaggtttcaggttcgatcagtgggttaaggatccagagtt

SEQ ID NO: 22548 - DNA, 110 bp, synthetic construct
  source 1..110: mol_type = other DNA
ctctgccaggaggaaacggtgggtcagtgactcggttaataaagtgcacattccacaccgcacggcttcttaacttaggctaagtctcaggtacgtcacgcttcttcacc

SEQ ID NO: 22549 - DNA, 110 bp, synthetic construct
  source 1..110: mol_type = other DNA
caccgcacggcttcttaacttaggctaagtctcaggtacgtcacgcttcttcacctcaagaacccatccgtttcatgggaaatttcaggacaaaagctagagaaggacaa

SEQ ID NO: 22550 - DNA, 110 bp, synthetic construct
  source 1..110: mol_type = other DNA
taaaaagaatggaatgatgcctcatttctttcatcgaagggtactattagaaaaccatgatcaccatgccagacaagcttgtggctgtgggcatggctttgcttttagat

SEQ ID NO: 22551 - DNA, 110 bp, synthetic construct
  source 1..110: mol_type = other DNA
catgatcaccatgccagacaagcttgtggctgtgggcatggctttgcttttagatcctctcatctagcagagcaaggaaatatgcacccatatagtaatacttgcagatg

SEQ ID NO: 22552 - DNA, 110 bp, synthetic construct
  source 1..110: mol_type = other DNA
tacatttagtccttggggcggagagggtttggagactgatgactcagctcagggatgaggaggaatgaccagggcggccggttggcaggtcagacacacatgggctggag

SEQ ID NO: 22553 - DNA, 110 bp, synthetic construct
  source 1..110: mol_type = other DNA
tgaggaggaatgaccagggcggccggttggcaggtcagacacacatgggctggagctttaacttaaacaccagcaaagaggggagctagctgacacctggcattgcctgt

SEQ ID NO: 22554 - DNA, 110 bp, synthetic construct; identical to SEQ ID NO: 22552
  source 1..110: mol_type = other DNA

SEQ ID NO: 22555 - DNA, 110 bp, synthetic construct; identical to SEQ ID NO: 22553
  source 1..110: mol_type = other DNA

SEQ ID NO: 22556 - DNA, 110 bp, synthetic construct
  source 1..110: mol_type = other DNA
ggcagaaattaccaccacgctgtaaatcgcttatacttcaatacgctttttttttttttttttttttaaaaggagggtcaacccctcttcttgtctgtgtaaagtgatgt

SEQ ID NO: 22557 - DNA, 110 bp, synthetic construct
  source 1..110: mol_type = other DNA
ttttttttttttaaaaggagggtcaacccctcttcttgtctgtgtaaagtgatgttttcttttgaacaagaaaagtcacttcaggatcagcatacaaaccgcagtgaaat

SEQ ID NO: 22558 - DNA, 110 bp, synthetic construct
  source 1..110: mol_type = other DNA
cttcccgctgaaggaggaaaccgggctgggatgtgatgaaaatccataaccagttgttcggttgatgaacacaggaatgtgcaggatgccccagagtctcagcgcaattt

SEQ ID NO: 22559 - DNA, 110 bp, synthetic construct
  source 1..110: mol_type = other DNA
gttcggttgatgaacacaggaatgtgcaggatgccccagagtctcagcgcaatttccctgccatcctcgaatccccctttcagagcagccccccaagacctgctcttcct

SEQ ID NO: 22560 - DNA, 110 bp, synthetic construct
  source 1..110: mol_type = other DNA
tgagacctctgtggaaaaataaaaacaacataaaagatgaaaggcagcacctgaagtacacgtgggccccgccccatgcctctgacacacccaggtgtgcaaatatgcct

SEQ ID NO: 22561 - DNA, 110 bp, synthetic construct
  source 1..110: mol_type = other DNA
gtacacgtgggccccgccccatgcctctgacacacccaggtgtgcaaatatgcctgcacacacgcacgtccttctaccaacagcacacgcggatttctgagttgtgacac

SEQ ID NO: 22562 - DNA, 110 bp, synthetic construct
  source 1..110: mol_type = other DNA
aattctcgtggatactgtgtcaggttcttaacctgctgaaccacaacaggaactcccaaagccaaagatatttaatatctggttctttgcagtaaaagcttgtggaccct

SEQ ID NO: 22563 - DNA, 110 bp, synthetic construct
  source 1..110: mol_type = other DNA
ccaaagccaaagatatttaatatctggttctttgcagtaaaagcttgtggacccttaatctaggggatgctctttgggttgatttactatttgctgttgattaagaacca

SEQ ID NO: 22564 - DNA, 110 bp, synthetic construct; identical to SEQ ID NO: 22562
  source 1..110: mol_type = other DNA

SEQ ID NO: 22565 - DNA, 110 bp, synthetic construct; identical to SEQ ID NO: 22563
  source 1..110: mol_type = other DNA

SEQ ID NO: 22566 - DNA, 110 bp, synthetic construct
  source 1..110: mol_type = other DNA
caacctcaaaatgaccattccagagacaattctcaaagaagagatcaccacacatctgtgaacttgaggtactgttttctcagatttgaaatgttattgatacagaggat

SEQ ID NO: 22567 - DNA, 110 bp, synthetic construct
  source 1..110: mol_type = other DNA
ctgtgaacttgaggtactgttttctcagatttgaaatgttattgatacagaggatttttttctaggccctcgtccaccactaataaactcaatataagctatgattgcct

SEQ ID NO: 22568 - DNA, 110 bp, synthetic construct
  source 1..110: mol_type = other DNA
tttccattctcccgaagtattcagagtccacttactttcctgaaacctcgtcagcactgaagagtagtcttttcaatctttgccagtctgaaaagtgaaacaagcccctc

SEQ ID NO: 22569 - DNA, 110 bp, synthetic construct
  source 1..110: mol_type = other DNA
atcaacagccaagtccactcccattacgatttctaggttgtcctttcaaagacaatggtcagttccgagccaaattcatccatttcaaccatcggtaccagaagctcaga

SEQ ID NO: 22570 - DNA, 110 bp, synthetic construct
  source 1..110: mol_type = other DNA
acttcatacttatcagaaaatgcccaggcttatggagttctcgttatggctcagcaggttaaggacccaatgttgtctctgcaaagatgcgggttcaatgcctggcctca

SEQ ID NO: 22571 - DNA, 110 bp, synthetic construct
  source 1..110: mol_type = other DNA
aggttaaggacccaatgttgtctctgcaaagatgcgggttcaatgcctggcctcactcagaaggttaaggatctggcattgccagaaggatgggagggaggaattgctga

SEQ ID NO: 22572 - DNA, 110 bp, synthetic construct
  source 1..110: mol_type = other DNA
caatacatttaaaatgtgagcaaaaacattttaacccagaaaactggtcaagaaaatgtgctgataattgccggcaatcatgtcactagctggtgatggaaaggcttcag

SEQ ID NO: 22573 - DNA, 110 bp, synthetic construct
  source 1..110: mol_type = other DNA
atgtgctgataattgccggcaatcatgtcactagctggtgatggaaaggcttcagaaaagcaggcggaaagatgcccttctggaagatgcccttctggactatgaccttg

SEQ ID NO: 22574 - DNA, 110 bp, synthetic construct
  source 1..110: mol_type = other DNA
ttgtgaaagtgataagccttttgtaagatggactcttactgattctgtaagtctgagatgattttttaaaagtctacaaggttttttaagtctttacctcactgaacttg

SEQ ID NO: 22575 - DNA, 110 bp, synthetic construct
  source 1..110: mol_type = other DNA
agatgattttttaaaagtctacaaggttttttaagtctttacctcactgaacttggctccccttttcaagggcattttttcattaattaaaaagaaaggtttgcgggagg

SEQ ID NO: 22576 - DNA, 110 bp, synthetic construct
  source 1..110: mol_type = other DNA
ctagttcggccccccttttgcaacactgcagaggagctgctgaaaatctcccaagcttagaatatattgaattttccaggaatttcccagaagtgggatagaggcaggga

SEQ ID NO: 22577 - DNA, 110 bp, synthetic construct
  source 1..110: mol_type = other DNA
agtcgaaggtttgaggccaaaattcacaaaatttgcttagtgtgagcaactatgagctgaaaatttagcatcatgtgagctcacctaagagagcatggaactctctggag

SEQ ID NO: 22578 - DNA, 110 bp, synthetic construct
  source 1..110: mol_type = other DNA
agacagcaagtgcttaagcaccagctccacacagccaaggacctgggagaaactgacactggagcttacgtctcatcacacacagctgaaaataggctaaaacccttcaa

SEQ ID NO: 22579 - DNA, 110 bp, synthetic construct
  source 1..110: mol_type = other DNA
acactggagcttacgtctcatcacacacagctgaaaataggctaaaacccttcaaaacccacacttgggtcaatgcaagtgaaatcagcatcacacagaaatgctgagcg

SEQ ID NO: 22580 - DNA, 110 bp, synthetic construct
  source 1..110: mol_type = other DNA
cccaaattgtgcgcttgagcccccgcaaatgagaaagttaggagcatttcttccagcgtgatctccaagcagggagtgtgatgtgaccagagcttgatccccgttcctct

SEQ ID NO: 22581 - DNA, 110 bp, synthetic construct
  source 1..110: mol_type = other DNA
gcgtgatctccaagcagggagtgtgatgtgaccagagcttgatccccgttcctctccccagggtgccagtgaacagaaggctctgcttgcagatgggcaagaacaagtac

SEQ ID NO: 22582 - DNA, 110 bp, synthetic construct; identical to SEQ ID NO: 22580
  source 1..110: mol_type = other DNA

SEQ ID NO: 22583 - DNA, 110 bp, synthetic construct; identical to SEQ ID NO: 22581
  source 1..110: mol_type = other DNA

SEQ ID NO: 22584 - DNA, 110 bp, synthetic construct
  source 1..110: mol_type = other DNA
gatcctgtactttttaaccaggtaggaagagagggcaagtttccttgatgaaccccaggcccttgcaaatcactcagctgtgccagatgtgagcatcagccctgggaaag

SEQ ID NO: 22585 - DNA, 110 bp, synthetic construct
  source 1..110: mol_type = other DNA
cagctctcttccctccaaaacgtttatcctccaaaatcccaggggctcagggaagaactagaggctggcagggagggagccatggagaggaggggaaaaacgggagagcc

SEQ ID NO: 22586 - DNA, 110 bp, synthetic construct
  source 1..110: mol_type = other DNA
aactagaggctggcagggagggagccatggagaggaggggaaaaacgggagagccttgaggggctcccatcatcccgacatctcaatttcatcgtttggattagtttcag

SEQ ID NO: 22587 - DNA, 110 bp, synthetic construct
  source 1..110: mol_type = other DNA
acgcacagatcattgcccaccagagatgctggcccaaatctggatggtgtccaaatcggcactgggctccatcacgtagatatagcgattgtccatggagctggcctgtc

SEQ ID NO: 22588 - DNA, 110 bp, synthetic construct
  source 1..110: mol_type = other DNA
tcggcactgggctccatcacgtagatatagcgattgtccatggagctggcctgtctccagctcctccggaggtcgaccaagacccctgacccaacgtcctcatcctacgt

SEQ ID NO: 22589 - DNA, 110 bp, synthetic construct; identical to SEQ ID NO: 22587
  source 1..110: mol_type = other DNA

SEQ ID NO: 22590 - DNA, 110 bp, synthetic construct; identical to SEQ ID NO: 22588
  source 1..110: mol_type = other DNA

SEQ ID NO: 22591 - DNA, 110 bp, synthetic construct
  source 1..110: mol_type = other DNA
ttatgggaatatgtgtcatttgcattcacaagatgtggtcaaaaatgttaccatgttatcgtttagtcgtcacagctctggaatccatctcccccagaacttccagggca

SEQ ID NO: 22592 - DNA, 110 bp, synthetic construct
  source 1..110: mol_type = other DNA
tttgtctgtttaggtccgcacccatgacatatgggtgtccccaggccaaggttttaatcagagccacagctgccagccgcagcaacgccaaatctgagctgtgtctgtga

SEQ ID NO: 22593 - DNA, 110 bp, synthetic construct
  source 1..110: mol_type = other DNA
aaggagaattagtaagaggggaccgaacatagttttggaataaaccatcaattcgattatttatctttcatttgaggaattaaaattaagatgatgccatgaagaagagc

SEQ ID NO: 22594 - DNA, 110 bp, synthetic construct
  source 1..110: mol_type = other DNA
tcattgctgtggcgagggttcgatccctggcctgggaacttctgcgtgctgtgagtgtggccaaaacaaccaccaataaccatacaagggcacacgaagagctgccgttt

SEQ ID NO: 22595 - DNA, 110 bp, synthetic construct
  source 1..110: mol_type = other DNA
tgtggccaaaacaaccaccaataaccatacaagggcacacgaagagctgccgttttattgttaagttacgatgggactgagctgagaatcagaaccctctccttccgtct

SEQ ID NO: 22596 - DNA, 110 bp, synthetic construct
  source 1..110: mol_type = other DNA
ctggactcctctgatgtgacccgtattgagggtgagggttaccgcccgggaacagagcagcgattctggctgcagggggcgtgacaggcaaactgctcacctctccttcc

SEQ ID NO: 22597 - DNA, 110 bp, synthetic construct
  source 1..110: mol_type = other DNA
agcagcgattctggctgcagggggcgtgacaggcaaactgctcacctctccttcctcaccttgaatgtggagcatcgaggtttaggggggaggccgagtgtgctggtttc

SEQ ID NO: 22598 - DNA, 110 bp, synthetic construct
  source 1..110: mol_type = other DNA
tgaccccccagggctctctgcccgccagcaaacaggtatgacaaattgcaacatgtggagactggcaggtctgatggccccgcgtgtgcgcccaagctctgggacaacca

SEQ ID NO: 22599 - DNA, 110 bp, synthetic construct
  source 1..110: mol_type = other DNA
agcccccccgcccccaggtagatcctgaggcctccctggtcctgggcacagactcagtcccatcccggctgccttgagtatcgaattgagtatggaccccagacggcgtt

SEQ ID NO: 22600 - DNA, 110 bp, synthetic construct
  source 1..110: mol_type = other DNA
agtcccatcccggctgccttgagtatcgaattgagtatggaccccagacggcgttttccacgaagacctgcctggcctgcgtcgccccagaaccagagactctggttctt

SEQ ID NO: 22601 - DNA, 110 bp, synthetic construct
  source 1..110: mol_type = other DNA
gggataaaaaattgctttcagatttcagtgtctgctctgctcattcactttgctggtgtcaagactgctaatgaccctttcttaggctgtctgcccggtgctcacaaggc

SEQ ID NO: 22602 - DNA, 110 bp, synthetic construct
  source 1..110: mol_type = other DNA
gtgtcaagactgctaatgaccctttcttaggctgtctgcccggtgctcacaaggcctgtggtcagtgaggggagcgcctcggggagcgtgaggtgcctggtacaggtatc

SEQ ID NO: 22603 - DNA, 110 bp, synthetic construct
  source 1..110: mol_type = other DNA
cgccgtgtgtattaggtgattgccacatgcccatggtcagtgctagaggcattcgggtctgcacccagcagccttgttccctagcttcacagaggctttgttacaaccga

SEQ ID NO: 22604 - DNA, 110 bp, synthetic construct
  source 1..110: mol_type = other DNA
ggtctgcacccagcagccttgttccctagcttcacagaggctttgttacaaccgagtgggagctggctggaggagggaataacacgcggacagggagaagcaagagacat

SEQ ID NO: 22605 - DNA, 110 bp, synthetic construct
  source 1..110: mol_type = other DNA
aagccagctcagtcagggcggaaaatgggacagctttactgtcctcacctccttgccatctttcgccaacaatcgcagaagggaagaaagcgaaactctgctgcttcttg

SEQ ID NO: 22606 - DNA, 110 bp, synthetic construct
  source 1..110: mol_type = other DNA
ccatctttcgccaacaatcgcagaagggaagaaagcgaaactctgctgcttcttggcccttggcagtgatctcagatttcccagaaaaagcatgaaaaggcctatctgga

SEQ ID NO: 22607 - DNA, 110 bp, synthetic construct
  source 1..110: mol_type = other DNA
ccgaggctttagaattaaatgactgggatgagtatgtgacaggcactaacggagaaaatagaccttctggaagaacaggtaaaactaacagaaagatgggaactccaaga

SEQ ID NO: 22608 - DNA, 110 bp, synthetic construct
  source 1..110: mol_type = other DNA
ttgagagtcacattcatttcggaattaagaccaagacctggtcttataatacctgccaggtatatgcagggatctgaacaatgacatccttcgtgccttttctggagtga

SEQ ID NO: 22609 - DNA, 110 bp, synthetic construct
  source 1..110: mol_type = other DNA
ccaggtatatgcagggatctgaacaatgacatccttcgtgccttttctggagtgaggccatggcggaggttgttgctgtaaatacggacttgatgttgggaagagccgct

SEQ ID NO: 22610 - DNA, 110 bp, synthetic construct
  source 1..110: mol_type = other DNA
ttcattttcgaggcttggagaggaggttctcccgctcctgctggatgtgagagagaagggttttgcgctccaggatggccacacagggacccggatgcatagctctcttg

SEQ ID NO: 22611 - DNA, 110 bp, synthetic construct
  source 1..110: mol_type = other DNA
aagggttttgcgctccaggatggccacacagggacccggatgcatagctctcttgtgaaccacaggagaaccacccccagcccgatgctgccacaggggtacagatcagc

SEQ ID NO: 22612 - DNA, 110 bp, synthetic construct
  source 1..110: mol_type = other DNA
tttttaaaaagcaattatcagaggtttcccactgcggcgcagcaggattggctgcatctctggagctctgggacacaggttggataccagcctgacgcagtgggtcaggg

SEQ ID NO: 22613 - DNA, 110 bp, synthetic construct
  source 1..110: mol_type = other DNA
ttatggtctaaaaagaacacaaaaggaggatatttcatgatgtgtgaaaagtacatgaaattaaaatttcagtgcccataaatacagatttactgaatacagcctgcacg

SEQ ID NO: 22614 - DNA, 110 bp, synthetic construct
  source 1..110: mol_type = other DNA
tgaaattaaaatttcagtgcccataaatacagatttactgaatacagcctgcacgttgggttgtgtgctgtcccacagctgctctggtcctgcgtcctggaccacagatg

SEQ ID NO: 22615 - DNA, 110 bp, synthetic construct
  source 1..110: mol_type = other DNA
attgtctatataaatgaggagactaaggcacagagagggttgagtcacctgcagatgacacagcaactaagtgttgagctgggatttgaacccaaatagtgtggctcaaa

SEQ ID NO: 22616 - DNA, 110 bp, synthetic construct
  source 1..110: mol_type = other DNA
gtgcatgagtttttggtcaggtcaaaatgtccactgggaaataaccctccagatgctttgagaaatggtccaggcatatccaaggcagttctgcagagaggtgcaagagc

SEQ ID NO: 22617 - DNA, 110 bp, synthetic construct
  source 1..110: mol_type = other DNA
ccctcagtaaaagtttgtggaactcagttgtttgtggaacaacttatcagctgttgcctttcagggaggtttggggccttttagatcaacttgagaatcaaagataaaat

SEQ ID NO: 22618 - DNA, 110 bp, synthetic construct
  source 1..110: mol_type = other DNA
atgcggggtccagggtcctgtaacgaatgatgtcgccccgatgttgtgagaaatagtgtctagtgcctctaacagtgaagtctgtagagtctgtcattctcttatgctcc

SEQ ID NO: 22619 - DNA, 110 bp, synthetic construct
  source 1..110: mol_type = other DNA
gtgtctagtgcctctaacagtgaagtctgtagagtctgtcattctcttatgctccaaggtaaaaaaaaaatgccttgactgtaggagaaagcggaactacaagaacggaa

SEQ ID NO: 22620 - DNA, 110 bp, synthetic construct
  source 1..110: mol_type = other DNA
ggtaccttaggcagagtcccagatggagatgagctgggctctgacactgagaagaggagctgagggctggagccccgggaagaggggctcagagctcaggaggggctgag

SEQ ID NO: 22621 - DNA, 110 bp, synthetic construct
  source 1..110: mol_type = other DNA
ttggggcaagttctgtgttctcaggcctcagtgctgctgtccaggaataataatcctggctaagatgtgatgaagtaacagctaagaagataattagtacgttagaagga

SEQ ID NO: 22622 - DNA, 110 bp, synthetic construct
  source 1..110: mol_type = other DNA
tctgtgacccagcgcactgcctctctggattcagggttaacagcagaagcgcccctcgaataaccattgccgtgtctgttccatgggtggggccagttgcatccatcacc

SEQ ID NO: 22623 - DNA, 110 bp, synthetic construct
  source 1..110: mol_type = other DNA
tcgaataaccattgccgtgtctgttccatgggtggggccagttgcatccatcaccttccctctgggatgaaatctgtccatcagggagtcaatgttgtgtaaacttcact

SEQ ID NO: 22624 - DNA, 110 bp, synthetic construct
  source 1..110: mol_type = other DNA
gtgatctcaagcaaggcggccaagggtcccatgagggaaggcaggggggcctgtgacctgctcccaggtgggcggggcctgcaacgggacagctctgagatgctctcccc

SEQ ID NO: 22625 - DNA, 110 bp, synthetic construct; identical to SEQ ID NO: 22624
  source 1..110: mol_type = other DNA

SEQ ID NO: 22626 - DNA, 110 bp, synthetic construct
  source 1..110: mol_type = other DNA
taagctttttttttttttttttttttttttttttgatagtgggccagagagtatatagtttaggctttgcaggtctctgggacagctcgtcagctctgctgttgcagcat

SEQ ID NO: 22627 - DNA, 110 bp, synthetic construct
  source 1..110: mol_type = other DNA
tagtttaggctttgcaggtctctgggacagctcgtcagctctgctgttgcagcatgaaagcagccacagaagacgcgttggtgactgagcctggctgtgccatattcagt

SEQ ID NO: 22628 - DNA, 110 bp, synthetic construct; identical to SEQ ID NO: 22626
  source 1..110: mol_type = other DNA

SEQ ID NO: 22629 - DNA, 110 bp, synthetic construct; identical to SEQ ID NO: 22627
  source 1..110: mol_type = other DNA

SEQ ID NO: 22630 - DNA, 110 bp, synthetic construct
  source 1..110: mol_type = other DNA
ttatccccagacaggttcgcagagctgtcaccaagccatttgaaattttgcacaaagcacatttatgggtgcatttctagatctatctgtataacgcgtgctttcccccc

SEQ ID NO: 22631 - DNA, 110 bp, synthetic construct
  source 1..110: mol_type = other DNA
gtgtggacaatctggacccacctttcaacaggcatgaaacggaggggccgtgaggtgtgactgagacacagcaggtaaccgccagaggagggatgagatgggggcagctc

SEQ ID NO: 22632 - DNA, 110 bp, synthetic construct
  source 1..110: mol_type = other DNA
tgcttcggtgtggaatgtttatctgcctttcaactcagtcgggctgcagatgatgcaccctgtgcctcttaatcctccttgtggggcaaaatgcagatgaagccggcttt

SEQ ID NO: 22633 - DNA, 110 bp, synthetic construct
  source 1..110: mol_type = other DNA
caccctgtgcctcttaatcctccttgtggggcaaaatgcagatgaagccggctttgatgtcttagaggcctgagagcagtttctgactttcttccctggagccagagtct

SEQ ID NO: 22634 - DNA, 110 bp, synthetic construct
  source 1..110: mol_type = other DNA
ttgggtctctgatggctttatgaagctgtcagactaatcttgaactgctttcctttgagattaaaagagcgatgataaacgcgcatgctgtagccgccaataccacagag

SEQ ID NO: 22635 - DNA, 110 bp, synthetic construct
  source 1..110: mol_type = other DNA
tgagattaaaagagcgatgataaacgcgcatgctgtagccgccaataccacagagtcccttttcactgaagctgaagccagtcctagtcaatacgatcagtccctgggtc

SEQ ID NO: 22636 - DNA, 110 bp, synthetic construct
  source 1..110: mol_type = other DNA
aggacacctgtactttgattcaggaccaaccttaaaccagttcgactgcatctaaacttgattatgtcggcagagaccctgtgtccactaaggccccatacccaggaatc

SEQ ID NO: 22637 - DNA, 110 bp, synthetic construct
  source 1..110: mol_type = other DNA
acttgattatgtcggcagagaccctgtgtccactaaggccccatacccaggaatctggggagaccctggtcaacccagacgctgaggggaccgtgtctcctggggctcct

SEQ ID NO: 22638 - DNA, 110 bp, synthetic construct
  source 1..110: mol_type = other DNA
tagggatgggtggtacctgactgaccctggtttggagatattgagggatgggggcgcggtgattaaagccggtatagagctttgttttctcttccagcaacttgaaatgc

SEQ ID NO: 22639 - DNA, 110 bp, synthetic construct
  source 1..110: mol_type = other DNA
gcggtgattaaagccggtatagagctttgttttctcttccagcaacttgaaatgcaactcgatgcaggaagcccaggagcgggagttccaaatctaccatgtttatcaaa

SEQ ID NO: 22640 - DNA, 110 bp, synthetic construct
  source 1..110: mol_type = other DNA
cagctcagctttaaaagcaccattgtgaaaggaaagagttttattaccactaaagatattgatagtgatacaataatgtcacgagcacttaaggtgacaggccaagctct

SEQ ID NO: 22641 - DNA, 110 bp, synthetic construct
  source 1..110: mol_type = other DNA
atattgatagtgatacaataatgtcacgagcacttaaggtgacaggccaagctcttggcctgcatgatctcgttgaagtgggtattgaaccctggtggtcatgcatacaa

SEQ ID NO: 22642 - DNA, 110 bp, synthetic construct
  source 1..110: mol_type = other DNA
acacggggatatggggaagctgctttggtctccccagcacagtcatagttgaaggaaagtgagttctccagaggacaggccccctctccctagagctcacagccggcgcc

SEQ ID NO: 22643 - DNA, 110 bp, synthetic construct
  source 1..110: mol_type = other DNA
aaagtgagttctccagaggacaggccccctctccctagagctcacagccggcgcctgtcggaggtaccggagtctccccttggctccgttgccgacattcccaactagga

SEQ ID NO: 22644 - DNA, 110 bp, synthetic construct
  source 1..110: mol_type = other DNA
caggctgacgcgagctgcaaaaccaggtatggaaatgtcttttccttatcaacgagctcccacgacaacaagccaacacaggtgaaaaaaaggaaggaggaaaaaagagc

SEQ ID NO: 22645 - DNA, 110 bp, synthetic construct
  source 1..110: mol_type = other DNA
tggcaacactggctctgagccacatctacaaactatgctgtggcttatggcaacaccagttcctcaatcctccgagcaaggccggggatcaaacctcctccctcacagag

SEQ ID NO: 22646 - DNA, 110 bp, synthetic construct
  source 1..110: mol_type = other DNA
ctacaaactatgctgtggcttatggcaacaccagttcctcaatcctccgagcaaggccggggatcaaacctcctccctcacagagtcaacatcaggtccttaacctgctg

SEQ ID NO: 22647 - DNA, 110 bp, synthetic construct
  source 1..110: mol_type = other DNA
acaccaggaacgtctcagctgagttgggctgaacttgtttgaagtgcagagcattggccctccccagtgtgctgagtcttgccccatggctccaggctggccaaccttgg

SEQ ID NO: 22648 - DNA, 110 bp, synthetic construct
  source 1..110: mol_type = other DNA
ttctgccaccaccgcattcaaggcacacaggttacaggttttaatgggctggacatcggctttgacactggccctgcacaccgcatgtataatagagagcatttgtgaat

SEQ ID NO: 22649 - DNA, 110 bp, synthetic construct
  source 1..110: mol_type = other DNA
tcggctttgacactggccctgcacaccgcatgtataatagagagcatttgtgaataattaaatgatgctgtcccaggctctgagtttatccaagggtaagtattaagatt

SEQ ID NO: 22650 - DNA, 110 bp, synthetic construct
  source 1..110: mol_type = other DNA
tgtattacaacctagtgcgtgagacacatttcgaaccttcttgttttagtgccgaaagctcactgaagcatcaggtgctcctgtctggcaaacgatgccagccaggggcc

SEQ ID NO: 22651 - DNA, 110 bp, synthetic construct
  source 1..110: mol_type = other DNA
ggagatagcaatttttgtgtgtagacctagtattgccttatgctagtcttaaatgtcttaagaatacatcaattgtggaaagcggaatattggggcatcaaggtctgggg

SEQ ID NO: 22652 - DNA, 110 bp, synthetic construct
  source 1..110: mol_type = other DNA
ttgttgttcccatttctcaggtaaggcagtggaggttaagggaacaggcacgacgcacagcactgtgcagctgagcatcaggggcctgacccagggggttctccacaccc

SEQ ID NO: 22653 - DNA, 110 bp, synthetic construct
  source 1..110: mol_type = other DNA
tttacaaatgacaccctggagcaaaacctccttggagggaccagcttgtctccatgggggtgattcctgccctttgatcaagggtcatttcctgcggcctgtgacgcagg

SEQ ID NO: 22654 - DNA, 110 bp, synthetic construct
  source 1..110: mol_type = other DNA
gcatccctttgagagaaaagaaagccaaggctcaccaagaagctgataaagaactgcctgtcttggctgggggcactttctaaagatgaaagatgccaaccaagaggtct

SEQ ID NO: 22655 - DNA, 110 bp, synthetic construct
  source 1..110: mol_type = other DNA
acgccctcgggaggagtggccggtggctgctcttacccctggacatcaggacacgttgtatgctccctctggctcttccccaccaaggctttcaggaaaaagcccactgg

SEQ ID NO: 22656 - DNA, 110 bp, synthetic construct
  source 1..110: mol_type = other DNA
ctcccccacgacgagggcgaggccggcacccagagcagaggctgcagcaggtgcgagaacatccaccgcgccccaaagctggtccaacaagagcccttttcacaggcatc

SEQ ID NO: 22657 - DNA, 110 bp, synthetic construct
  source 1..110: mol_type = other DNA
ggaaggaggtcagacgtccacgaggcgctgtctacagcagccagcacccaaaccggaccccggtaccacttcctctctccaccagtggaaaaagttccctctctccgctc

SEQ ID NO: 22658 - DNA, 110 bp, synthetic construct
  source 1..110: mol_type = other DNA
gacgagtgagcgttcctcttgtgtcttttgcgtcgtgattaacgtcttcaggagtcaaaaccagacttgaagctgtcacaccgagcagtgaccgcctgtgccaagaagaa

SEQ ID NO: 22659 - DNA, 110 bp, synthetic construct
  source 1..110: mol_type = other DNA
caaaaccagacttgaagctgtcacaccgagcagtgaccgcctgtgccaagaagaaaacgggaggcctaggacaggccggccaagaggggccctgggcgggcagcacggag

SEQ ID NO: 22660 - DNA, 110 bp, synthetic construct
  source 1..110: mol_type = other DNA
agaatggaatgatgccatagcagagggaaacccacttaaaatgaaccaaaacagatgccaaccacacaatacaaagagaaaatcagctgcccaggtgataccagcaagtt

SEQ ID NO: 22661 - DNA, 110 bp, synthetic construct
  source 1..110: mol_type = other DNA
tgccaaccacacaatacaaagagaaaatcagctgcccaggtgataccagcaagttttaagtgtaactgattcgctggaagaaaattaaaccaggtgatagagttgttact

SEQ ID NO: 22662 - DNA, 110 bp, synthetic construct
  source 1..110: mol_type = other DNA
gagcaggcagagagctaggccgggggctgccccctccgtctccgagcggcctgagcgacatccaagagcagcctgtccatcatgtcatcaccctccatctcgtctttaat

SEQ ID NO: 22663 - DNA, 110 bp, synthetic construct
  source 1..110: mol_type = other DNA
gccactcacactggtgcttcctttttgttatggctgttctccagctacaaggacaggactgagtaactgcagctgagactgtagtcaagaacaaaaacacttactctctg

SEQ ID NO: 22664 - DNA, 110 bp, synthetic construct
  source 1..110: mol_type = other DNA
gcagttttcgaactttttgatctcaaggccccttcatactcttaaaaattagagcttttgtttatatgggttatagctatcggtgtttaccgtatcaaagctaaaattga

SEQ ID NO: 22665 - DNA, 110 bp, synthetic construct
  source 1..110: mol_type = other DNA
ttttgtttatatgggttatagctatcggtgtttaccgtatcaaagctaaaattgatcattttaggaatatttgtccattaattcctctcttaaagagtaatgaagccacg

SEQ ID NO: 22666 - DNA, 110 bp, synthetic construct
  source 1..110: mol_type = other DNA
ctgcagcttcgatccagcccctaccctgggaaccgccacagggggcaggtgcggccctcaaaaaaaaaaggaaaaaaaaaatcttgcccttgttattgaaattaagtccc

SEQ ID NO: 22667 - DNA, 110 bp, synthetic construct
  source 1..110: mol_type = other DNA
cctcaggcagacggaggccgatgtgtccagagcaggggtcaccacagcagtttgctgcagaatatttgaagctgttgaacacaaagagctgagaattagactggctactg

SEQ ID NO: 22668 - DNA, 110 bp, synthetic construct
  source 1..110: mol_type = other DNA
tgcagaatatttgaagctgttgaacacaaagagctgagaattagactggctactgaagcaccagtctgagagcgtctaagccaggccttcctcttcatgtcccatccagg

SEQ ID NO: 22669 - DNA, 110 bp, synthetic construct
  source 1..110: mol_type = other DNA
tgttttattgtgcctcctggacccgacgccgagtgtggcctgttgttgtttaggggacgaggaatgatgagccgggtgggtcgtaggccaggctcaggcggaggtggggc

SEQ ID NO: 22670 - DNA, 110 bp, synthetic construct
  source 1..110: mol_type = other DNA
gacgaggaatgatgagccgggtgggtcgtaggccaggctcaggcggaggtggggctagagggggagcttctcaggggagtttggtggaagaagcagagggcacgcacttg

SEQ ID NO: 22671 - DNA, 110 bp, synthetic construct
  source 1..110: mol_type = other DNA
ctttctataaaatgtttccaaatgggcgaggaattaaaagcagtgagcttcttggtggcccagggcgtgataggatccaaattaattgctcccagcatcacttcggtttt

SEQ ID NO: 22672 - DNA, 110 bp, synthetic construct
  source 1..110: mol_type = other DNA
atctctgcatttgtttaagttcttttcagtttttctctgtagtgctttataggttccagcttttaaagatcttgcatgtcttttgtaaaactgatttctaaatgctttgt

SEQ ID NO: 22673 - DNA, 110 bp, synthetic construct
  source 1..110: mol_type = other DNA
ccagcttttaaagatcttgcatgtcttttgtaaaactgatttctaaatgctttgttttgagtgggttcttttggccatttctcagcatgtggaagttcccaggctaggga

SEQ ID NO: 22674 - DNA, 110 bp, synthetic construct
  source 1..110: mol_type = other DNA
ttctgttgaatttatagtgcatcttgtgggaggcactgtgcctgcctgtaagtcaggccccacaggaacgggagaagagatggctcagcaggtgccgatggccccctgcg

SEQ ID NO: 22675 - DNA, 110 bp, synthetic construct
  source 1..110: mol_type = other DNA
catctgcctctctcctttgctcttaggaaaagtagcccaaacatttttgtgcgcggagagctccagagccccagaagctgcactcattgcaacgtttaaaattcatcctg

SEQ ID NO: 22676 - DNA, 110 bp, synthetic construct
  source 1..110: mol_type = other DNA
ttaacctgattggcttgccgaattgcagcctctgtttacaaacatccgtaggcctgcatgcgccttttctcagcagctgacatgcctcccctgccttggcctgggaagcc

SEQ ID NO: 22677 - DNA, 110 bp, synthetic construct
  source 1..110: mol_type = other DNA
gcatgcgccttttctcagcagctgacatgcctcccctgccttggcctgggaagccagcctgatgctggcagttcccctgtgaactgctgaaggtgcagcatttgacagcg

SEQ ID NO: 22678 - DNA, 110 bp, synthetic construct
  source 1..110: mol_type = other DNA
ttcaagttttcatcaaaacagaggcgtgcaataagaacagtctaaaacttttcgaattggtatcatgtatttgcacgtgtctcaaccagttttgctttaaaggttcagtg

SEQ ID NO: 22679 - DNA, 110 bp, synthetic construct
  source 1..110: mol_type = other DNA
attggtatcatgtatttgcacgtgtctcaaccagttttgctttaaaggttcagtgattatgttttctggagaatgcatgataaagatgataaaaaaaaaatcttagctgg

SEQ ID NO: 22680 - DNA, 110 bp, synthetic construct
  source 1..110: mol_type = other DNA
cactggtcatgaagccacagcagaaatagttttggacccggatgagcagagaccgcagcgtaacaggccgtctttccttggagcttgtaggtcagcccaggaggcggttc

SEQ ID NO: 22681 - DNA, 110 bp, synthetic construct
  source 1..110: mol_type = other DNA
ccagtgcaatagcacctgaattgtaggatcacctcgtcagtttctacaaagaggccagctgtgattctgatggggatcccccggaatctgtagatcaactagggagcatt

SEQ ID NO: 22682 - DNA, 110 bp, synthetic construct
  source 1..110: mol_type = other DNA
cagctgtgattctgatggggatcccccggaatctgtagatcaactagggagcattgtcatcttaacaatactgtcttccagtccatatgcacatggggtgttttccattt

SEQ ID NO: 22683 - DNA, 110 bp, synthetic construct
  source 1..110: mol_type = other DNA
gcgcacagcccatgttcctagtcacctcttattttctgttttggtgacaagcaactagatccaggctgatctccactatctgtttgaagagtattcaggactatttgcat

SEQ ID NO: 22684 - DNA, 110 bp, synthetic construct
  source 1..110: mol_type = other DNA
tattctttgcaccgttcccccaaccccggcccagccccagtcattcgggaaggctaaggttcctgaagcccgatcccgagtaccgagaaaggctgagaatgtgcaggagt

SEQ ID NO: 22685 - DNA, 110 bp, synthetic construct
  source 1..110: mol_type = other DNA
gacccccacccccgcccccgcagcctccagggggaggtcggccccacccgcactttgactttggactccggcctcctgaactgtgagaggacacatttgtcacctgtctg

SEQ ID NO: 22686 - DNA, 110 bp, synthetic construct
  source 1..110: mol_type = other DNA
attaagacagcaaatctaaattaaaaagaactacagaggtttcaaacacagcaaggtgctcttagagcgagctgaaaatgagtaacgaaaggcaccacaacactaaagga

SEQ ID NO: 22687 - DNA, 110 bp, synthetic construct
  source 1..110: mol_type = other DNA
gtgctcttagagcgagctgaaaatgagtaacgaaaggcaccacaacactaaaggagccctttatcacactctgcccgacacaggagacagacctggcgcgggtaacctgc

SEQ ID NO: 22688 - DNA, 110 bp, synthetic construct
  source 1..110: mol_type = other DNA
ccctgatgtcccttcatcctcacggcgtcaggatgttccctgccgcacccagagctgcagaaggttgaggatggacctgaatgcagacccagctctggggcttttccttc

SEQ ID NO: 22689 - DNA, 110 bp, synthetic construct
  source 1..110: mol_type = other DNA
tgcagaaggttgaggatggacctgaatgcagacccagctctggggcttttccttccatcgctcctgcccttggttcctggggagaagcctcctggttaagcttcgggccc

SEQ ID NO: 22690 - DNA, 110 bp, synthetic construct
  source 1..110: mol_type = other DNA
attaaatctttggtaacagaggcagacacctgttgtgttcagtagataatatgcgctctaaagtaatttaaaactgtgtgtgagagagagaaactcagtcctttgttgtc

SEQ ID NO: 22691 - DNA, 110 bp, synthetic construct
  source 1..110: mol_type = other DNA
tgagccgcaaggcctcatgtgctgacctcagccgctgtcacgaagaatgcgcccagggctgggtggtggccgggtgggaaggactccgagctgtcgagtagctcagagtc

SEQ ID NO: 22692 - DNA, 110 bp, synthetic construct
  source 1..110: mol_type = other DNA
gggctgggtggtggccgggtgggaaggactccgagctgtcgagtagctcagagtcgggttgtttatgtggctgttttacgcaggggtgcacgctcagcgctgccccgggg

SEQ ID NO: 22693 - DNA, 110 bp, synthetic construct
  source 1..110: mol_type = other DNA
caaccacacgtctgttccaagggagtgatttattttaacgtctgaagaaagcacttcctggagaagccggttgcactggaggcagcagtgtttgcaggcttacaggtgct

SEQ ID NO: 22694 - DNA, 110 bp, synthetic construct
  source 1..110: mol_type = other DNA
tgcaatttgccaaatgaagattttgatatgttttgagcacatttgtggaaggcgtgtggtgacacccttagcattcagcttgtgagaactactggttgattttagggagg

SEQ ID NO: 22695 - DNA, 110 bp, synthetic construct
  source 1..110: mol_type = other DNA
tctgccagctccctttttgctgcagacagtgccaggtttggaaattatctgtgagacctgtgccttggctcagctggtggcaattcatctccactggccggagcacttga

SEQ ID NO: 22696 - DNA, 110 bp, synthetic construct
  source 1..110: mol_type = other DNA
acctgtgccttggctcagctggtggcaattcatctccactggccggagcacttgaggttagtgggtggctctggaaaaggcagccatggacttgcctcagtgaggagctg

SEQ ID NO: 22697 - DNA, 110 bp, synthetic construct
  source 1..110: mol_type = other DNA
tgtccgtgtgtggaagagatgggggctgggagggaaacccttgttgcatcggagtagagtctagcgtttgtggggaaatggcgaggctgtgggagagccgggaatggcct

SEQ ID NO: 22698 - DNA, 110 bp, synthetic construct
  source 1..110: mol_type = other DNA
agagtctagcgtttgtggggaaatggcgaggctgtgggagagccgggaatggcctcgcttcttctgttattgaagcgtcgctgatgttcagcgtcgggccacctgctgtg

SEQ ID NO: 22699 - DNA, 110 bp, synthetic construct
  source 1..110: mol_type = other DNA
gcaggggcacggggcgtgtggaaaggaacggagtggcaggtggctggtgagctgtgagcgctctcgggggtcaggtgccggcatggtttcctggtgtctgggtttcctga

SEQ ID NO: 22700 - DNA, 110 bp, synthetic construct
  source 1..110: mol_type = other DNA
gagcgctctcgggggtcaggtgccggcatggtttcctggtgtctgggtttcctgagctgaagcactcagagcatccagggcacagcagaggtctggcttctgattggatg

SEQ ID NO: 22701 - DNA, 110 bp, synthetic construct
  source 1..110: mol_type = other DNA
gttgtgtctcagtcacacctccgttgtgttgtgcacgtatgtgtggatctggccccggaatctgctttgttccgttggtctagttgtctgtcgttacgccgatatcacac

SEQ ID NO: 22702 - DNA, 110 bp, synthetic construct
  source 1..110: mol_type = other DNA
cggaatctgctttgttccgttggtctagttgtctgtcgttacgccgatatcacactattttaatgcttgtgactttatgatggcttgaaatcggttaaccggagtctgat

SEQ ID NO: 22703 - DNA, 110 bp, synthetic construct
  source 1..110: mol_type = other DNA
tggaacacagtattatcagctataatctcggtattattaactatataatacagcagatccctagaacttactctgttttccaagtaatgacagcattttgcacccccgcc

SEQ ID NO: 22704 - DNA, 110 bp, synthetic construct
  source 1..110: mol_type = other DNA
gggtcttgattcatctcagatcagctctctagccatgtaggtctgactgaaagcatcatagacagcgttctgttacttccgcactgtcattctcacgggactgatctgtc

SEQ ID NO: 22705 - DNA, 110 bp, synthetic construct
  source 1..110: mol_type = other DNA
tcgattcagggtaattggtgtgcacagagcagggcaccaagagcatttctgatcgccagcatcccgccgggccctggccatggagatgctgtgtgaggctggagctggtc

SEQ ID NO: 22706 - DNA, 110 bp, synthetic construct
  source 1..110: mol_type = other DNA
acgcgccttcgtccgcacagcccggggcaggtaccatcgccagcacctttgtacagatgagaagagcaggctctgagcgcatgaagcgtcttcgcgctgctgacctggga

SEQ ID NO: 22707 - DNA, 110 bp, synthetic construct
  source 1..110: mol_type = other DNA
ttagaggccttcagccatcaatgttcttgctggaaaatgcacctttacctaaatatgaatgcaaggtgaggtcccttctccaaggaagggagcacctagccctaaatcac

SEQ ID NO: 22708 - DNA, 110 bp, synthetic construct
  source 1..110: mol_type = other DNA
tgaatgcaaggtgaggtcccttctccaaggaagggagcacctagccctaaatcacaacagtcacagcatggggtcatctgggtgaaggtttggggagcgtcacaccagac

SEQ ID NO: 22709 - DNA, 110 bp, synthetic construct; identical to SEQ ID NO: 22707
  source 1..110: mol_type = other DNA

SEQ ID NO: 22710 - DNA, 110 bp, synthetic construct; identical to SEQ ID NO: 22708
  source 1..110: mol_type = other DNA

SEQ ID NO: 22711 - DNA, 110 bp, synthetic construct
  source 1..110: mol_type = other DNA
ctctgccatattctcagtacccagaagcacatctggtacatggtaggtacccaataagtgtatgtaaaataataaataaaattcgaaagggtgaaaataaattagtaaca

SEQ ID NO: 22712 - DNA, 110 bp, synthetic construct
  source 1..110: mol_type = other DNA
aagtgtatgtaaaataataaataaaattcgaaagggtgaaaataaattagtaacattctattggattccctccctggatggcttcaaggggcctggaagctattggtccc

SEQ ID NO: 22713 - DNA, 110 bp, synthetic construct
  source 1..110: mol_type = other DNA
tgagacccgagacagatttatttattcaataaaaaatgggtttctagggagttcttttgtggctcagcaggttgagggtctgtcaatgtcactgcagtggcttgggccac

SEQ ID NO: 22714 - DNA, 110 bp, synthetic construct
  source 1..110: mol_type = other DNA
tttgtggctcagcaggttgagggtctgtcaatgtcactgcagtggcttgggccacagctgtgacttgtgtttgatccctggcctggaaacgtcagcataccagggatgtg

SEQ ID NO: 22715 - DNA, 110 bp, synthetic construct
  source 1..110: mol_type = other DNA
gaagctcggcgctccctctcctggcaccccctgcatctcctctccatcatctctctccctctctcttttctgcagtcaccatggcaacacgagctgaagctctcctctcc

SEQ ID NO: 22716 - DNA, 110 bp, synthetic construct
  source 1..110: mol_type = other DNA
tccctctctcttttctgcagtcaccatggcaacacgagctgaagctctcctctcctcctgcacctcaccagagggcttgggtggctgcagctgaacttcttttgatcagt

SEQ ID NO: 22717 - DNA, 110 bp, synthetic construct; identical to SEQ ID NO: 22715
  source 1..110: mol_type = other DNA

SEQ ID NO: 22718 - DNA, 110 bp, synthetic construct; identical to SEQ ID NO: 22716
  source 1..110: mol_type = other DNA

SEQ ID NO: 22719 - DNA, 110 bp, synthetic construct
  source 1..110: mol_type = other DNA
cctttgaaggtatagcttttccattcatatagagatacaaagttgcagaacggagagtaatacttgtcttggagctttgccggaacattgtgacctgacttaggggaaca

SEQ ID NO: 22720 - DNA, 110 bp, synthetic construct
  source 1..110: mol_type = other DNA
agtaatacttgtcttggagctttgccggaacattgtgacctgacttaggggaacagctgcaagaacaaaggattcctgcaccgggaagtttgcaaccacccccgctttta

SEQ ID NO: 22721 - DNA, 110 bp, synthetic construct
  source 1..110: mol_type = other DNA
agactaggtctggaaactccccaccaggagtattttagtctattaatacaccaagagatgcacaaaatgttaggctgtaagatctaagacctaaggaagcggaattttta

SEQ ID NO: 22722 - DNA, 110 bp, synthetic construct
  source 1..110: mol_type = other DNA
agatgcacaaaatgttaggctgtaagatctaagacctaaggaagcggaatttttaattttttttttactgctctctccctagcacatacaccagtacagggtacaaggca

SEQ ID NO: 22723 - DNA, 110 bp, synthetic construct; identical to SEQ ID NO: 22721
  source 1..110: mol_type = other DNA

SEQ ID NO: 22724 - DNA, 110 bp, synthetic construct; identical to SEQ ID NO: 22722
  source 1..110: mol_type = other DNA

SEQ ID NO: 22725 - DNA, 110 bp, synthetic construct
  source 1..110: mol_type = other DNA
cacccacgggatacctctgcccatcgtgatttctaactcagttcagcaaaccacacgctcagtcaaacaaaaccactttctcatgtcccatcatttgcgctcacggttca

SEQ ID NO: 22726 - DNA, 110 bp, synthetic construct
  source 1..110: mol_type = other DNA
cgctcagtcaaacaaaaccactttctcatgtcccatcatttgcgctcacggttcatactgccactgtcaggagtgattattatacaagtgcactgtctgtccaagaaaga

SEQ ID NO: 22727 - DNA, 110 bp, synthetic construct
  source 1..110: mol_type = other DNA
cataggtgcacggcacacagactcactgtgcttgccagaaaccttttcccagtggagtactgagtatgggcaatgaggcagggggccgggccacctgctagtggctccta

SEQ ID NO: 22728 - DNA, 110 bp, synthetic construct
  source 1..110: mol_type = other DNA
agtactgagtatgggcaatgaggcagggggccgggccacctgctagtggctcctagtgtcaccaaggtctccaggtgctgagctaacagactgggatcaattagaaatca

SEQ ID NO: 22729 - DNA, 110 bp, synthetic construct
  source 1..110: mol_type = other DNA
actgattttttacgaggactctaagatggttttcaaatgtttggaatgagagccgggcacatgggtaccctagtcgtgatgcagctctcgagtttgcaggttgtcacctt

SEQ ID NO: 22730 - DNA, 110 bp, synthetic construct
  source 1..110: mol_type = other DNA
gggtctgggcatggattctgggaactggggtctcctggggtcacgttgccacctgctgcttacaaagatagaggcagaccacatttccatccgtcacagctggagcgtgt

SEQ ID NO: 22731 - DNA, 110 bp, synthetic construct
  source 1..110: mol_type = other DNA
ctgcttacaaagatagaggcagaccacatttccatccgtcacagctggagcgtgtaccacacaaaaggcgcaggtgggcgacgggaccatctcaaactggaccacttccc

SEQ ID NO: 22732 - DNA, 110 bp, synthetic construct
  source 1..110: mol_type = other DNA
gtcctctccttaaaccttcatcaagaatctcagctgcccatcgacagacttcaattcccacgcttggggctcgggtgtttggagtcatggcagcttctgagctgatttcc

SEQ ID NO: 22733 - DNA, 110 bp, synthetic construct
  source 1..110: mol_type = other DNA
cgagggacagctgtccgcgctctcgttggagcagaggacacacagaggagggctgtgtccgtcggggaaactggggcaggcacgttggctcccggcctgcggcagaggct

SEQ ID NO: 22734 - DNA, 110 bp, synthetic construct
  source 1..110: mol_type = other DNA
tgtccgtcggggaaactggggcaggcacgttggctcccggcctgcggcagaggctcctagaagtgtgcagagagggcagcctgacacccggccccggtggtgcccagcct

SEQ ID NO: 22735 - DNA, 110 bp, synthetic construct
  source 1..110: mol_type = other DNA
cccgggccaacagaatgacatttggcaaatgtccgtgcaaacctggcccagctagggtgactcagaatgagccatcacagcatccgagggccgagtccacgtccccacgt

SEQ ID NO: 22736 - DNA, 110 bp, synthetic construct
  source 1..110: mol_type = other DNA
ccctcctcctcccaacccccttcgtggtgggcatgaggtttccaccctgagcccccaggttcacggtgggccgtgacgctccggctcgatgcctgcaaggtgctttgtct

SEQ ID NO: 22737 - DNA, 110 bp, synthetic construct
  source 1..110: mol_type = other DNA
caggttcacggtgggccgtgacgctccggctcgatgcctgcaaggtgctttgtctccggatgcaggaggcagtgctgcgcagtctcacggggcttcgcaggagcactgcc

SEQ ID NO: 22738 - DNA, 110 bp, synthetic construct
  source 1..110: mol_type = other DNA
tgagtacccagctgtgtgcttcatcaaagctctttaggctcttctgcgtatattcgactccttagtcatttcagaatcaactcgttactttctatttttttcttttcagg

SEQ ID NO: 22739 - DNA, 110 bp, synthetic construct
  source 1..110: mol_type = other DNA
cgttagtgcccaggggaaaccctgggctccgcgtgccagtaagacagtgatgggccccctttcccgggcccttcgcgcggcttctcataatgaaataaatcttaggtgcc

SEQ ID NO: 22740 - DNA, 110 bp, synthetic construct
  source 1..110: mol_type = other DNA
cccctttcccgggcccttcgcgcggcttctcataatgaaataaatcttaggtgcctttttcaaaatagcatttggggaatttttttctcctttgaaaagagccaaacgcc

SEQ ID NO: 22741 - DNA, 110 bp, synthetic construct
  source 1..110: mol_type = other DNA
gacgacgtgagacgcctcctttgtatgtgttcctttacgtggacagtgtagctatgacaccgattctgggaatcacagattcggagctgagaacacgaagtgatttgtag

SEQ ID NO: 22742 - DNA, 110 bp, synthetic construct
  source 1..110: mol_type = other DNA
gacaccgattctgggaatcacagattcggagctgagaacacgaagtgatttgtagctgcactatttttcaccaggacctgaaaactatttgcactattattactgctctg

SEQ ID NO: 22743 - DNA, 110 bp, synthetic construct
  source 1..110: mol_type = other DNA
atacgagtgagactcaccttcctccgtcaatatgttatggtgtgtgttgctaacacccaaaacggcacaaaatccctcaaaattgtcagtgtccttactgtccgtataat

SEQ ID NO: 22744 - DNA, 110 bp, synthetic construct
  source 1..110: mol_type = other DNA
cccaaaacggcacaaaatccctcaaaattgtcagtgtccttactgtccgtataatgagtcacccttccaatggttatattaaaaccgtgcacgtcgcggaactaacccaa

SEQ ID NO: 22745 - DNA, 110 bp, synthetic construct; identical to SEQ ID NO: 22743
  source 1..110: mol_type = other DNA

SEQ ID NO: 22746 - DNA, 110 bp, synthetic construct; identical to SEQ ID NO: 22744
  source 1..110: mol_type = other DNA

SEQ ID NO: 22747 - DNA, 110 bp, synthetic construct
  source 1..110: mol_type = other DNA
agccccacccccaccgccgcaaggccgcagccggggagtcagagcccagagcacctgggaggcaggggctgcggggctccggtcagcaccagccactcaagataaaagat

SEQ ID NO: 22748 - DNA, 110 bp, synthetic construct
  source 1..110: mol_type = other DNA
tgggaggcaggggctgcggggctccggtcagcaccagccactcaagataaaagatggggtgccgcccacgcccagcctgaccccttggcttgcagggcccagggtgggct

SEQ ID NO: 22749 - DNA, 110 bp, synthetic construct
  source 1..110: mol_type = other DNA
ggaactccccagaagcacctctgatgcgcgccgtacttccaagctgtaagcccgggccgtgtgaggataaggaggttctctgtgaacgcttcaaagagccgacggtttcc

SEQ ID NO: 22750 - DNA, 110 bp, synthetic construct
  source 1..110: mol_type = other DNA
gccgtgtgaggataaggaggttctctgtgaacgcttcaaagagccgacggtttccaccccacgcgtgactgagatggttccctgtgaccccgacagactcaacagtcaca

SEQ ID NO: 22751 - DNA, 110 bp, synthetic construct
  source 1..110: mol_type = other DNA
ggacatggtgctgcctggctcctggggcgggtcacaaagggcttcctgccgattctgccttcagaacacctgccctcgtgtgaaaaccaaaggccactgggaaaatcccc

SEQ ID NO: 22752 - DNA, 110 bp, synthetic construct
  source 1..110: mol_type = other DNA
tgccttcagaacacctgccctcgtgtgaaaaccaaaggccactgggaaaatccccccgagcagacaaaagcagtgagtcacacaagcagggcgtccttcagtttcctctg

SEQ ID NO: 22753 - DNA, 110 bp, synthetic construct
  source 1..110: mol_type = other DNA
tgcatctccaccacaaaaaagaaaaacacaagcaagatgaagatgctcagaaatcattaccagttaaagcaacaggagagcatggctaaagctgtcaacaatgaaacaga

SEQ ID NO: 22754 - DNA, 110 bp, synthetic construct; identical to SEQ ID NO: 22753
  source 1..110: mol_type = other DNA

SEQ ID NO: 22755 - DNA, 110 bp, synthetic construct
  source 1..110: mol_type = other DNA
tgggaggggagcttgatgcacccaagcgcatgggatcatgtgcagagggcatagcaatgtgctccctacggaatcctcagtggggagggtcttccctaggtccctcttgg

SEQ ID NO: 22756 - DNA, 110 bp, synthetic construct
  source 1..110: mol_type = other DNA
aatgtgctccctacggaatcctcagtggggagggtcttccctaggtccctcttggttctcctggtcaacagtagtgactttgggggtcagtttaaagggcatgtttcctc

SEQ ID NO: 22757 - DNA, 110 bp, synthetic construct
  source 1..110: mol_type = other DNA
tcaggaggatgtatgtaataaatttttatttagtaaaccagtcctatgcatggtttcatcactaccccaaccaccaatgcctagctctagaaaaacaggcagttggtacc

SEQ ID NO: 22758 - DNA, 110 bp, synthetic construct
  source 1..110: mol_type = other DNA
tcatcactaccccaaccaccaatgcctagctctagaaaaacaggcagttggtaccctcatgatatcacacagagaagtcacagggcagtacccgagggtctgtaggttgc

SEQ ID NO: 22759 - DNA, 110 bp, synthetic construct
  source 1..110: mol_type = other DNA
ggtattctgacttttagtggaagaggactcaattaagtatgtcacatgttggagtcgagaggttctgcagccagtgcaaaaaatgtcttagctttcaactgaattattca

SEQ ID NO: 22760 - DNA, 110 bp, synthetic construct
  source 1..110: mol_type = other DNA
cgagaggttctgcagccagtgcaaaaaatgtcttagctttcaactgaattattcaatttgcaataatgacacactaaaagacaggtgaaagtcgtgaagctgcatgcccc

SEQ ID NO: 22761 - DNA, 110 bp, synthetic construct
  source 1..110: mol_type = other DNA
cttggaatttcctggatgataggcatatcttttgttctaatgagatgagtctgagtggcttctgtttagcttctggttgggggctggccaccagaaagaataaacggtga

SEQ ID NO: 22762 - DNA, 110 bp, synthetic construct
  source 1..110: mol_type = other DNA
tctgtctcttgggtgcagcctgttttctttcttggactgtacaggggtttcacatctctgacatgaacccacagctcccacaaagccacttttatatagggatgaatgcc

SEQ ID NO: 22763 - DNA, 110 bp, synthetic construct
  source 1..110: mol_type = other DNA
tcaccgttgccactccggctcctagtggctccctgttctgctggtcttcatcttcctgatataaaatgctcagtagctccagcaagaaaaaggaaggacataaatgcagc

SEQ ID NO: 22764 - DNA, 110 bp, synthetic construct
  source 1..110: mol_type = other DNA
ggaacacatagagaggcaggatcccaggggaacagtggaagtgatgcccacaacctcagccccttagctgtggcagctgagcctgcagccacaaagaacccggttctggc

SEQ ID NO: 22765 - DNA, 110 bp, synthetic construct
  source 1..110: mol_type = other DNA
agcactgcctatggtgctgccgagctgtggagcacagcctaccatctcattcctagcagaaactagcctagggccttgcctgattactgaacatagtttgcaacctcgtc

SEQ ID NO: 22766 - DNA, 110 bp, synthetic construct
  source 1..110: mol_type = other DNA
tagagaaagtagcctggttttgaaatccagcttaccactgaaaactaaataccagtaggcaatggcttaacctttctgtgcttctgtttctttacctgttgaaggtagat

SEQ ID NO: 22767 - DNA, 110 bp, synthetic construct
  source 1..110: mol_type = other DNA
tggaagcagagaggccaggtaaggggctattcaaattgtacaggtaagaatagcggatgtttaaatttggcagaagtaagggatatatttcagggagactttggagagaa

SEQ ID NO: 22768 - DNA, 110 bp, synthetic construct
  source 1..110: mol_type = other DNA
ctatcaaaagagtaaatgaaaacacaaacatcctcaaatgtcgctcggctcctgttctgggcagctcctggtgcatacattctttccagtataaataagcacacatgaaa

SEQ ID NO: 22769 - DNA, 110 bp, synthetic construct
  source 1..110: mol_type = other DNA
tccacatgcgcatgagtgagactagaaaacaagctgtctgcttccaaaatccaatttggggacaggtatactataacagttatagcaatgcttattccaaaagaacgaaa

SEQ ID NO: 22770 - DNA, 110 bp, synthetic construct
  source 1..110: mol_type = other DNA
ggcaggctggctctggacctctgtgctcttcaccatgacacgatcttgccgtagacacagacatcatgtgtacagcatggggtcccaggtgcctgaaggctgaacatcct

SEQ ID NO: 22771 - DNA, 110 bp, synthetic construct
  source 1..110: mol_type = other DNA
cacagacatcatgtgtacagcatggggtcccaggtgcctgaaggctgaacatcctggccatccatctgctcactgagccagagtgcgactacatccacctaggtctgccc

SEQ ID NO: 22772 - DNA, 110 bp, synthetic construct
  source 1..110: mol_type = other DNA
gactgattgaggggataatgagcactggactgcaacataaagcaatatcaaggagttccctggtgcttcagagggttgaggacctggggttgtcactactgtgacatgaa

SEQ ID NO: 22773 - DNA, 110 bp, synthetic construct
  source 1..110: mol_type = other DNA
ttccctggtgcttcagagggttgaggacctggggttgtcactactgtgacatgaattccaccttgggctcaggaatttctgcatgctcacaaaaaactaaacaagccaca

SEQ ID NO: 22774 - DNA, 110 bp, synthetic construct
  source 1..110: mol_type = other DNA
cagattccataagttaaggactcagtcctacaagactgcacccattcagacaccaggcaagccccatgttgtcccatgtacttctgacctactagctattagtcagattt

SEQ ID NO: 22775 - DNA, 110 bp, synthetic construct
  source 1..110: mol_type = other DNA
ggcaagccccatgttgtcccatgtacttctgacctactagctattagtcagatttcccatgacacttccttttggcctcaacaatttgctagaatggctcacagaactca

SEQ ID NO: 22776 - DNA, 110 bp, synthetic construct
  source 1..110: mol_type = other DNA
tgccattgcagatggagagttttagtatctgacgttaactagtttcctagcaatgatagctggaagcaaccagtggcaggaagatggagctgaaacaaaatggtgcagag

SEQ ID NO: 22777 - DNA, 110 bp, synthetic construct
  source 1..110: mol_type = other DNA
atatttaactgtctacttgacaacatctgttggaagtccagtagtcaccacaaacttaacacggccaaaatagagccaatggatgatggttccccatttccaacacaaac

SEQ ID NO: 22778 - DNA, 110 bp, synthetic construct
  source 1..110: mol_type = other DNA
ttaacacggccaaaatagagccaatggatgatggttccccatttccaacacaaaccccagaatactcagcttaccaagttttcaacctttaagtaaagggtaatactacc

SEQ ID NO: 22779 - DNA, 110 bp, synthetic construct
  source 1..110: mol_type = other DNA
tcttttccacctatcaagcaattcagtgacatgtatgcatttcaggttgtgagtctatatttatatgttggcatcaagaaatatataaaagggcatagattttatgtcct

SEQ ID NO: 22780 - DNA, 110 bp, synthetic construct; identical to SEQ ID NO: 22779
  source 1..110: mol_type = other DNA

SEQ ID NO: 22781 - DNA, 110 bp, synthetic construct
  source 1..110: mol_type = other DNA
agtttttatatatgaacagtcctctaaaggcctttcagatgtgttacccaattcagatccttaatagagcaggaaatatactacaatgtcatctctatcttccagatgag

SEQ ID NO: 22782 - DNA, 110 bp, synthetic construct
  source 1..110: mol_type = other DNA
gatccttaatagagcaggaaatatactacaatgtcatctctatcttccagatgaggagcttacccctgcaaaattagtgtgtccagcccaagaccagagagatttgaacc

SEQ ID NO: 22783 - DNA, 110 bp, synthetic construct
  source 1..110: mol_type = other DNA
gtgacactctgtctgtgatgatggaaatgttctcagcctgcctcttccaatgtcactcattagctgaatgtggctatcaggcacttgaaaggtggatatagtgtgactga

SEQ ID NO: 22784 - DNA, 110 bp, synthetic construct
  source 1..110: mol_type = other DNA
gaacaggactctttctacattgaggtatatattcattgggaaaagatgagatatgcagccaaatcactgagatctggattcttgtttccattctgtcatgtacatattct

SEQ ID NO: 22785 - DNA, 110 bp, synthetic construct
  source 1..110: mol_type = other DNA
cagccaaatcactgagatctggattcttgtttccattctgtcatgtacatattctatgtctgggaacataccaaaactctcttagcatttatttcctcatctgtaaacca

SEQ ID NO: 22786 - DNA, 110 bp, synthetic construct
  source 1..110: mol_type = other DNA
ctggattcctgtgagtcccatcttccactgatcaagggtgacctttgggaattaacatcccattgtacatgtgtgtgccaggcgaattgccacagtatcccacatcattg

SEQ ID NO: 22787 - DNA, 110 bp, synthetic construct
  source 1..110: mol_type = other DNA
catcccattgtacatgtgtgtgccaggcgaattgccacagtatcccacatcattgtactggagaagctctggagtagaaagtgagatgtaggtaaactgtgtggttctaa

SEQ ID NO: 22788 - DNA, 110 bp, synthetic construct
  source 1..110: mol_type = other DNA
cgatgtgagaactaatgacatttccatggggcctggagatcaggagtccaatccacaggagaaggcatcccaataaggaaagttatttgagcaacaggcacctttggcca

SEQ ID NO: 22789 - DNA, 110 bp, synthetic construct
  source 1..110: mol_type = other DNA
caggagaaggcatcccaataaggaaagttatttgagcaacaggcacctttggccaacttggatccacaaacacagctgcattcatacacccctcagctcagagacttgga

SEQ ID NO: 22790 - DNA, 110 bp, synthetic construct
  source 1..110: mol_type = other DNA
tcagtccactgacccccatcttccatcctcagtggtcatttctcaggtccctgaatgcataactggaatgaatgtggcaggtggcattacccccatattgttgcttttga

SEQ ID NO: 22791 - DNA, 110 bp, synthetic construct
  source 1..110: mol_type = other DNA
tgcataactggaatgaatgtggcaggtggcattacccccatattgttgcttttgagctgaaggattaagacctatagtcatggagaggtctagcagaaaacttgaaaacc

SEQ ID NO: 22792 - DNA, 110 bp, synthetic construct
  source 1..110: mol_type = other DNA
tgcacgtaaaagaatgccattaggacactctctaacaccagacacaaaataaactcaaacgggttaaagacataaacgtaagactaaaactataaaactcctaggagaga

SEQ ID NO: 22793 - DNA, 110 bp, synthetic construct; identical to SEQ ID NO: 22792
  source 1..110: mol_type = other DNA

SEQ ID NO: 22794 - DNA, 110 bp, synthetic construct
  source 1..110: mol_type = other DNA
ggtatgtggagtattttgagctgaagacaatcaagacccagaagattcaaggacaacttttacctctccctgaactgactaaaagaatttagatagagagactggtccag

SEQ ID NO: 22795 - DNA, 110 bp, synthetic construct
  source 1..110: mol_type = other DNA
agcaataatcagtcgttacccacgttagtttctcagccttctgtaagtttactcaaactattgaaaatactggacagcactggatactggctccacttcccattttaaag

SEQ ID NO: 22796 - DNA, 110 bp, synthetic construct
  source 1..110: mol_type = other DNA
aactattgaaaatactggacagcactggatactggctccacttcccattttaaaggtcatctacagtcaactctagagacactcagtccactttttccatgaggttattg

SEQ ID NO: 22797 - DNA, 110 bp, synthetic construct
  source 1..110: mol_type = other DNA
cttgccatatgagtatgattggcaaagtgatttctagtcccaagcacaggctgcagggagctagaacatatgatttttaggtagtattactcagaccagtggaatgtatc

SEQ ID NO: 22798 - DNA, 110 bp, synthetic construct
  source 1..110: mol_type = other DNA
gggagctagaacatatgatttttaggtagtattactcagaccagtggaatgtatcacagagaaaatgacatcacagacgctcccatgtgtcgcacactctggctatttaa

SEQ ID NO: 22799 - DNA, 110 bp, synthetic construct
  source 1..110: mol_type = other DNA
tattacttggtgagtttgattagctatagctgaattgctgttctgatcttctcttttattaaattatcttttcttggcctcagagatggaatttaatcttagttccactg

SEQ ID NO: 22800 - DNA, 110 bp, synthetic construct
  source 1..110: mol_type = other DNA
tgctgttctgatcttctcttttattaaattatcttttcttggcctcagagatggaatttaatcttagttccactgctgctgcaaatgaagttgttcaaaaaaaaaaaaaa

SEQ ID NO: 22801 - DNA, 110 bp, synthetic construct
  source 1..110: mol_type = other DNA
agttataacagatatatacctctccactcaatttttttcttagctacattcagagacagtttagagaaagacatcatctgtcagttaatggattcaacccaggatgaatc

SEQ ID NO: 22802 - DNA, 110 bp, synthetic construct
  source 1..110: mol_type = other DNA
acagtttagagaaagacatcatctgtcagttaatggattcaacccaggatgaatccaccagtatccattttaaaagtaatctattatttattaaccattttttcatgtca

SEQ ID NO: 22803 - DNA, 110 bp, synthetic construct
  source 1..110: mol_type = other DNA
tctggcacgctatacatttcgccaatgaaatagtttccagcagttctcacgctcattgaaaaccctctaatgaagattgagatagcagaagctgaaggtttccactcagg

SEQ ID NO: 22804 - DNA, 110 bp, synthetic construct
  source 1..110: mol_type = other DNA
ttgaaaaccctctaatgaagattgagatagcagaagctgaaggtttccactcaggcctgctcagagtctttctttctttttttttttttttgctatttctttgggccgct

SEQ ID NO: 22805 - DNA, 110 bp, synthetic construct; identical to SEQ ID NO: 22803
  source 1..110: mol_type = other DNA

SEQ ID NO: 22806 - DNA, 110 bp, synthetic construct
  source 1..110: mol_type = other DNA
ctcacgctcattgaaaaccctctaatgaagattgagatagcagaagctgaaggtttccactcaggcctgctcagagtctttctttctttttttttttttttgctatttct

SEQ ID NO: 22807 - DNA, 110 bp, synthetic construct
  source 1..110: mol_type = other DNA
gcaactggtcatctaaccatacttacttgtactaggctttgcttgaactgatcacatttaggatggagcataggaacagttattgttcactatctaatgttttttttagt

SEQ ID NO: 22808 - DNA, 110 bp, synthetic construct
  source 1..110: mol_type = other DNA
atttaggatggagcataggaacagttattgttcactatctaatgttttttttagtaacgttcactaatattcatgcctcctttataaaccttgctctgtttttcaacaaa

SEQ ID NO: 22809 - DNA, 110 bp, synthetic construct
  source 1..110: mol_type = other DNA
gatgtgtactactggcagcaaatatcagtaaggtccttctcacacacaatggaggtcactatcattagaggggcttgtgaaacattttcaaagagttattcaatagtttt

SEQ ID NO: 22810 - DNA, 110 bp, synthetic construct
  source 1..110: mol_type = other DNA
caaggaaagacctgcagtactgtcctctgtccacgtgaactcgggaaaagggcagaggagctcgcaggagcactcacccctgccccagccccctcctcctcccccccccc

SEQ ID NO: 22811 - DNA, 110 bp, synthetic construct
  source 1..110: mol_type = other DNA
tggctacggtccagcttcacagctgcccaccagcttggctttgcctcaaacctggcctctcccaacaataaaacagggctgagtgaccaacaaggggtcacatcacacag

SEQ ID NO: 22812 - DNA, 110 bp, synthetic construct
  source 1..110: mol_type = other DNA
ctccacaaagttagggagtttatttcaagtcagaaggctatgaagcagctgaacaaggtgctgacccaaggtcaggtggattgcaagcattcctcccaccgcctctcatt

SEQ ID NO: 22813 - DNA, 110 bp, synthetic construct
  source 1..110: mol_type = other DNA
aggtgctgacccaaggtcaggtggattgcaagcattcctcccaccgcctctcatttaaccaggacccggagatgttaaatattctaaccatgtggcaccaaaggagtcca

SEQ ID NO: 22814 - DNA, 110 bp, synthetic construct
  source 1..110: mol_type = other DNA
cccttgtcacccatcccatacaagtggccccatctctctcaggcatccataggacagtgtttctgccatcaaagagcttcctcggaaaacgtttagggagattgttatca

SEQ ID NO: 22815 - DNA, 110 bp, synthetic construct
  source 1..110: mol_type = other DNA
ccaaaatggcatttttatcaaatgtgtttatcaagtaggttaagccatgtgtcagacatcacagctagtcagtgacatacccttggtctaggggaaggtggatgatacac

SEQ ID NO: 22816 - DNA, 110 bp, synthetic construct
  source 1..110: mol_type = other DNA
acatcacagctagtcagtgacatacccttggtctaggggaaggtggatgatacacaagcagtcaaatatatcatggtaaagggcagacatatagtgcctgatacatctta

SEQ ID NO: 22817 - DNA, 110 bp, synthetic construct
  source 1..110: mol_type = other DNA
cattattttttgaaattcatttttgttttaattaccactctgcatcaaaaaggaaggcagaggttttgtttcctttataaaacatgaccccacatattacttgccacatg

SEQ ID NO: 22818 - DNA, 110 bp, synthetic construct
  source 1..110: mol_type = other DNA
ggcagaggttttgtttcctttataaaacatgaccccacatattacttgccacatgtaagcattttattatcaggcaagtaaagttgttcaataatttgcctctaggtaac

SEQ ID NO: 22819 - DNA, 110 bp, synthetic construct
  source 1..110: mol_type = other DNA
agacaaaaatccctattctcagggtgttaacattccaatcggagctacattcaggcagtaaacaaactaagctttatataacgtattaaaaatggtaagtgctgggagga

SEQ ID NO: 22820 - DNA, 110 bp, synthetic construct
  source 1..110: mol_type = other DNA
cagtaaacaaactaagctttatataacgtattaaaaatggtaagtgctgggaggaataagattttaaatagtaggtgaaacctcactggtaggatacaatttgatcaatg

SEQ ID NO: 22821 - DNA, 110 bp, synthetic construct
  source 1..110: mol_type = other DNA
agaatccaacccgtgatggcctggaatacagtataagacaaagcaagacgaacacttcaaggcaaaacagcttagtggccttcgcacaaatggcacatcctcaaagaggc

SEQ ID NO: 22822 - DNA, 110 bp, synthetic construct
  source 1..110: mol_type = other DNA
ttcaaggcaaaacagcttagtggccttcgcacaaatggcacatcctcaaagaggccttgatgatccctgtccctaaagtaggtcccctccatcactctctgcaccccttc

SEQ ID NO: 22823 - DNA, 110 bp, synthetic construct; identical to SEQ ID NO: 22821
  source 1..110: mol_type = other DNA

SEQ ID NO: 22824 - DNA, 110 bp, synthetic construct; identical to SEQ ID NO: 22822
  source 1..110: mol_type = other DNA

SEQ ID NO: 22825 - DNA, 110 bp, synthetic construct
  source 1..110: mol_type = other DNA
ttgctgtggacattgtggacaaggcagggaatggattgtggtgagctggctgctggcacagggaggcagtccccactgagtaagcctgggcagccacctcaagtgtccac

SEQ ID NO: 22826 - DNA, 110 bp, synthetic construct
  source 1..110: mol_type = other DNA
gcacagggaggcagtccccactgagtaagcctgggcagccacctcaagtgtccacatcagttgctgtgtgttgtgttgtgttcttcctcttcaagatccttaacctccaa

SEQ ID NO: 22827 - DNA, 110 bp, synthetic construct
  source 1..110: mol_type = other DNA
tcttccaggtggtcctagccccttagctgggaccacttctcacagaccaaaaaagtacggctttctactaaggccctgcattactgtttctaaaatgatgccctttatga

SEQ ID NO: 22828 - DNA, 110 bp, synthetic construct
  source 1..110: mol_type = other DNA
aaaagagtcctccaaacttagcacacttactttgtgggcaccatttgtcttctgcccatcgattgcagttataattatcccccgcattttcacaggtaaaacacttgaag

SEQ ID NO: 22829 - DNA, 110 bp, synthetic construct
  source 1..110: mol_type = other DNA
ccatcgattgcagttataattatcccccgcattttcacaggtaaaacacttgaagctgtttggaaatggtgtagctttaaaaaaaatgcaaagggaaacaatatggttaa

SEQ ID NO: 22830 - DNA, 110 bp, synthetic construct
  source 1..110: mol_type = other DNA
cctggggaaaaagttggcagtgtgggggcacagaagtgagaatggcaagaattaaactaagtagctcagacacttcacattctaagagcttatgggtctggtcatcttca

SEQ ID NO: 22831 - DNA, 110 bp, synthetic construct
  source 1..110: mol_type = other DNA
actaagtagctcagacacttcacattctaagagcttatgggtctggtcatcttcaaaaagtaaattccctgcttaaagcaactcagtgtaagccagctgagcccacaaaa

SEQ ID NO: 22832 - DNA, 110 bp, synthetic construct
  source 1..110: mol_type = other DNA
aatcaagagatttgggggtggctgagaagaggtgatatgaaaggtttatatttgactgggaaaggttagtttcatcctggaatgtttctgttagatgcagtctgacctca

SEQ ID NO: 22833 - DNA, 110 bp, synthetic construct
  source 1..110: mol_type = other DNA
ctgggaaaggttagtttcatcctggaatgtttctgttagatgcagtctgacctcatcaacccacatcaactttcctcataggaaaataaaattcaaagccaagacattcc

SEQ ID NO: 22834 - DNA, 110 bp, synthetic construct; identical to SEQ ID NO: 22832
  source 1..110: mol_type = other DNA

SEQ ID NO: 22835 - DNA, 110 bp, synthetic construct; identical to SEQ ID NO: 22833
  source 1..110: mol_type = other DNA

SEQ ID NO: 22836 - DNA, 110 bp, synthetic construct
  source 1..110: mol_type = other DNA
gtcattagaggcaattatcatccccacttcaaagagtcaaacccacatgagaacattttcccttaaaatgtaccttctccccgaaagatctgagaagcagggcaagaagg

SEQ ID NO: 22837 - DNA, 110 bp, synthetic construct
  source 1..110: mol_type = other DNA
ttttcccttaaaatgtaccttctccccgaaagatctgagaagcagggcaagaaggcattcacagagcctcaaggtcagtgcttggacaaatgcaagaagggcactgagtg

SEQ ID NO: 22838 - DNA, 110 bp, synthetic construct
  source 1..110: mol_type = other DNA
tttaccctcttgaggactgtgaatcagtgtgaatttgcttggctatctaaaacacatcagcttgggataggcttgccctcttttgcttggtttcagagcaagcagtgaag

SEQ ID NO: 22839 - DNA, 110 bp, synthetic construct
  source 1..110: mol_type = other DNA
atcagcttgggataggcttgccctcttttgcttggtttcagagcaagcagtgaagcatggactataaaagtatgggtctgcttataaagttgttggctataaaaatgctc

SEQ ID NO: 22840 - DNA, 110 bp, synthetic construct
  source 1..110: mol_type = other DNA
agaagtgggttcatcttccaggagcaccagtccatctgctggggaggggcaattttgaactcataactctgagaactatgcatcgaggagaatgaagtccagcagccact

SEQ ID NO: 22841 - DNA, 110 bp, synthetic construct
  source 1..110: mol_type = other DNA
tgaactcataactctgagaactatgcatcgaggagaatgaagtccagcagccactgcatgggagaccaagcgaggaattctttctcctaggttctctgcaatgccgccct

SEQ ID NO: 22842 - DNA, 110 bp, synthetic construct
  source 1..110: mol_type = other DNA
ggaggtttaacttctacttaattcctctccaacagcacagaagcattggcaagctaatgggaataagagcgtgccaagcccactcgcttatcttgcaactctgacttgag

SEQ ID NO: 22843 - DNA, 110 bp, synthetic construct
  source 1..110: mol_type = other DNA
aatgggaataagagcgtgccaagcccactcgcttatcttgcaactctgacttgagcccatctctgtaccaccaccctctgattccacatataatgtagtttctccctaaa

SEQ ID NO: 22844 - DNA, 110 bp, synthetic construct
  source 1..110: mol_type = other DNA
aagggaactcccccaactcaaatttaatgcctctgtggccagcaagaggacccggccatgagctcaggaatttctcttaattacacaatgagcacactgtgccagccccc

SEQ ID NO: 22845 - DNA, 110 bp, synthetic construct
  source 1..110: mol_type = other DNA
tcacttccttattctctcttccatggctctctcattcccttaacagaacatgtatccaggactctcctttctcactgaccaaaataggagagacctcggtatcatgatgc

SEQ ID NO: 22846 - DNA, 110 bp, synthetic construct
  source 1..110: mol_type = other DNA
aggactgatgggttcagctcaggtaagctccctctctctgttggacaaatcaactctgcccctggcaatctcctgttcaacaatcatggttgtcagaggtaatcccttaa

SEQ ID NO: 22847 - DNA, 110 bp, synthetic construct
  source 1..110: mol_type = other DNA
ctgcccctggcaatctcctgttcaacaatcatggttgtcagaggtaatcccttaaccaagtggactggaaagtggatggagtgagcaggtcccaggaaggggaagccctg

SEQ ID NO: 22848 - DNA, 110 bp, synthetic construct
  source 1..110: mol_type = other DNA
aatcaaatcacatatccactgagtgggagacccatagcctgaagaataactgtattatagaggttctcccacaggagtgagaattctgggcccatatcaggtcccacagt

SEQ ID NO: 22849 - DNA, 110 bp, synthetic construct
  source 1..110: mol_type = other DNA
gacgtcaattaattttaaatggacactttcccactattagctgaaattctctgaaatggcgatgtaaacctccaaagtctacaaagattcttatttgaattgagttttct

SEQ ID NO: 22850 - DNA, 110 bp, synthetic construct
  source 1..110: mol_type = other DNA
accacctcaatcctgctgcaccaacgcgggccggggtgcgagaattaccttgctaagaggaagacgatgttttgaaagcgttttactttccacaagtcatttcaaaaaga

SEQ ID NO: 22851 - DNA, 110 bp, synthetic construct
  source 1..110: mol_type = other DNA
agaggaagacgatgttttgaaagcgttttactttccacaagtcatttcaaaaagaacccaatgcaaggctgaatccaaaagtgggggaaaaacgttgcctagccaaagca

SEQ ID NO: 22852 - DNA, 110 bp, synthetic construct
  source 1..110: mol_type = other DNA
atcctaattagaaataatttgccattatgtgaaatagtaagaaaagcgggactagcctccaaaatattttgagctaagaatgccaacttcatttccatccacaaaccaag

SEQ ID NO: 22853 - DNA, 110 bp, synthetic construct
  source 1..110: mol_type = other DNA
cctccaaaatattttgagctaagaatgccaacttcatttccatccacaaaccaaggatttgttcgcccccaccctcagaagttgatgcttgctctcaatagtacagctaa

SEQ ID NO: 22854 - DNA, 110 bp, synthetic construct
  source 1..110: mol_type = other DNA
aacagcaacttcttcctatacccaaaaggccatgagcttcagagagctcagctgctaggcaagtgccctagagggacaatgcaaatagtgagaagccacattcagggctc

SEQ ID NO: 22855 - DNA, 110 bp, synthetic construct
  source 1..110: mol_type = other DNA
taggcaagtgccctagagggacaatgcaaatagtgagaagccacattcagggctctcagcactgggaagtgacagagaatgctaggaagtctatgaatggcctctgagag

SEQ ID NO: 22856 - DNA, 110 bp, synthetic construct
  source 1..110: mol_type = other DNA
ttgactacagtggcctcattaagtgccttgcacatagctgatgtcaaccggtattgaaatggttgaatgaatgaattgcaggtcttccattatgtaatcatctgtcccaa

SEQ ID NO: 22857 - DNA, 110 bp, synthetic construct
  source 1..110: mol_type = other DNA
gccccgacctgtccagggtggtacctgctgaagctctccaagctgggtctccccccaggaactgcccttgactcaagttagcttcacctaatgatatcctaggcccaggg

SEQ ID NO: 22858 - DNA, 110 bp, synthetic construct
  source 1..110: mol_type = other DNA
caggaactgcccttgactcaagttagcttcacctaatgatatcctaggcccagggacctctcaaagggggtgggctactaaggcacagccccttgccccagtttgggaca

SEQ ID NO: 22859 - DNA, 110 bp, synthetic construct; identical to SEQ ID NO: 22857
  source 1..110: mol_type = other DNA

SEQ ID NO: 22860 - DNA, 110 bp, synthetic construct; identical to SEQ ID NO: 22858
  source 1..110: mol_type = other DNA

SEQ ID NO: 22861 - DNA, 110 bp, synthetic construct
  source 1..110: mol_type = other DNA
aattactagaaaaagctgaggaggtaaatcttttcaagacaggcttagcatggttttccaagagttaagttctatcctatcatctacatggagattggaaatttgcattt

SEQ ID NO: 22862 - DNA, 110 bp, synthetic construct
  source 1..110: mol_type = other DNA
ggccagggatggaatctgcgttctcacggaagctagtcagattcacctccactgagctacgatggatactctttattcctttatatattgaattagcactgctttgtgct

SEQ ID NO: 22863 - DNA, 110 bp, synthetic construct; identical to SEQ ID NO: 22862
  source 1..110: mol_type = other DNA

SEQ ID NO: 22864 - DNA, 110 bp, synthetic construct
  source 1..110: mol_type = other DNA
ttgatgtgggggaagggcaatggaagcaaagctcttgggaatatttatcaccatacctttctccagaggtagccattttgggaaaatcagtccccacctatcagtgctga

SEQ ID NO: 22865 - DNA, 110 bp, synthetic construct; identical to SEQ ID NO: 22864
  source 1..110: mol_type = other DNA

SEQ ID NO: 22866 - DNA, 110 bp, synthetic construct
  source 1..110: mol_type = other DNA
tccctcttacttttgtttctgatttagactcttggactcaacacttatagcagctgatatctgaatctatgacagtctttgtctctcaattatctattaaatgaaatata

SEQ ID NO: 22867 - DNA, 110 bp, synthetic construct
  source 1..110: mol_type = other DNA
gggtggggaaaagtaagaactgttaaaattctttaactcctaagagttaaactattagaatgaacttgcgacagagttctttaaacagaggaaaaagcaaagatcacctt

SEQ ID NO: 22868 - DNA, 110 bp, synthetic construct
  source 1..110: mol_type = other DNA
actgcctttgcttgatttggatataaaaatcgaaagagaaaagctttcacacttttcttgaaacccttctttcctcatttaccctagtccaagacatcatatggattatc

SEQ ID NO: 22869 - DNA, 110 bp, synthetic construct; identical to SEQ ID NO: 22868
  source 1..110: mol_type = other DNA

SEQ ID NO: 22870 - DNA, 110 bp, synthetic construct
  source 1..110: mol_type = other DNA
ttcccattttgctagtgaggaaagaacgttggagaggtcacataagtggaatcatagcttaagtctgacttccaacctcttgtctccaaaataatataagggtcatttat

SEQ ID NO: 22871 - DNA, 110 bp, synthetic construct
  source 1..110: mol_type = other DNA
agcttaagtctgacttccaacctcttgtctccaaaataatataagggtcatttatcataaacacttaacactggagttcctattgtggtgcagtgaaaaaacgaatccta

SEQ ID NO: 22872 - DNA, 110 bp, synthetic construct
  source 1..110: mol_type = other DNA
tgctcacaggatagaaaaacatggaaatacctcacaaattcataagtttgctcttctcaactcagagctggaacctctggttcacagagtctactgcggtcgtttcctca

SEQ ID NO: 22873 - DNA, 110 bp, synthetic construct
  source 1..110: mol_type = other DNA
tgaacccatctagtatccataaggattcgggatcaatccctggttttgttcaatggattaaggatcccaccatgagctgtgggcagacccagctcagatctgggcgtttc

SEQ ID NO: 22874 - DNA, 110 bp, synthetic construct
  source 1..110: mol_type = other DNA
acacttgattagccaggtccaaaagatccttgatttggagagggccacattcttcatgtacactttttcaaaagtttctttacagagtctgcaacttttctcttagtctc

SEQ ID NO: 22875 - DNA, 110 bp, synthetic construct
  source 1..110: mol_type = other DNA
atgtacactttttcaaaagtttctttacagagtctgcaacttttctcttagtctcaggtccttcatgtctctgctacaggcaatgccgtaagtctcccagagccacattt

SEQ ID NO: 22876 - DNA, 110 bp, synthetic construct
  source 1..110: mol_type = other DNA
tcaaattcagaggtaaaaaaatttacatacttttgaattagcatttaacccctagtaacaaagctggtgtagtcgttatcactgtaaaagcaagcatttgcactgaacaa

SEQ ID NO: 22877 - DNA, 110 bp, synthetic construct
  source 1..110: mol_type = other DNA
ggttccttcatgtatttttacaatttgatagctcatatccttctagtcctgaatacatttcattgtctggatgtatcacagtgtatttacccattagcctattgaaggac

SEQ ID NO: 22878 - DNA, 110 bp, synthetic construct
  source 1..110: mol_type = other DNA
catttcattgtctggatgtatcacagtgtatttacccattagcctattgaaggacatcttggttcttccaagttttggcaattaataataaagctgctgtaaacatcagt

SEQ ID NO: 22879 - DNA, 110 bp, synthetic construct
  source 1..110: mol_type = other DNA
gagaagaataaggatatgggaatggctaagggacaaaacattaaggcagaatactttagcttgggaaagtgagttaaaagagttaagagaaactaactatgatggaaata

SEQ ID NO: 22880 - DNA, 110 bp, synthetic construct
  source 1..110: mol_type = other DNA
gagttaggctgccacaaactgagaacacctaggactgttggcaaccaccagctggaagagcaagagggtttctttcctagagcctttggatggagcagggctcagaaaac

SEQ ID NO: 22881 - DNA, 110 bp, synthetic construct
  source 1..110: mol_type = other DNA
tccttaacttagcatttaagagttcttatccatttatccaaacctaatatttaggccctacctgtgtgctccagccaatcaactttctctgttttaccatctccacttta

SEQ ID NO: 22882 - DNA, 110 bp, synthetic construct
  source 1..110: mol_type = other DNA
ccctacctgtgtgctccagccaatcaactttctctgttttaccatctccactttaacatcccccattactgctataaggtgctaacaaaggttctcagttactgtcaatg

SEQ ID NO: 22883 - DNA, 110 bp, synthetic construct
  source 1..110: mol_type = other DNA
acttaacccgctgagcccccagggagcccccattagcctcattcttccttagacattttaactccagctgttaagacaagtgacttgtacatgtttgaattttgttttct

SEQ ID NO: 22884 - DNA, 110 bp, synthetic construct
  source 1..110: mol_type = other DNA
ttactctgtatgttgcttcctttacctctgcagaaatcagagcctgaatgctttatgctagtgcagaggtggcagtctatggtaggaatgccaactggtgccactggaga

SEQ ID NO: 22885 - DNA, 110 bp, synthetic construct
  source 1..110: mol_type = other DNA
aaaatatgaattctttaagaatggtgcgatggccaattttatgtgccaagttggctgggccatagggtacccatgtatttggttaaacattcttggtgagtgtgcgaggg

SEQ ID NO: 22886 - DNA, 110 bp, synthetic construct; identical to SEQ ID NO: 22885
  source 1..110: mol_type = other DNA

SEQ ID NO: 22887 - DNA, 110 bp, synthetic construct
  source 1..110: mol_type = other DNA
gaggcacacaggcttggcggaaccagatggtcttgttgagatgatttggtgtggttgtgcctcccaagcagtgtgtgccaggggatggcaggcttcaggccagacattgc

SEQ ID NO: 22888 - DNA, 110 bp, synthetic construct
  source 1..110: mol_type = other DNA
tgtgcctcccaagcagtgtgtgccaggggatggcaggcttcaggccagacattgcatctccaaagccacagatctggcccgtacaaaaccaaccccatggattctctttt

SEQ ID NO: 22889 - DNA, 110 bp, synthetic construct
  source 1..110: mol_type = other DNA
cttggctgtccaagggtcttgagaccactgtactcttggtctagtgaaagtcttatactgaggccttctcatccatgtgtggccaagcaatcccaacagatcttctgact

SEQ ID NO: 22890 - DNA, 110 bp, synthetic construct
  source 1..110: mol_type = other DNA
acctgcttttgagaataaatggtgctattatctttctgtgagtttgcccttcctgatgaaattataaatacaaaggcagttttgtggatatatgaggtattctattttac

SEQ ID NO: 22891 - DNA, 110 bp, synthetic construct
  source 1..110: mol_type = other DNA
cagctgtagctctgattcaacccttatcctgggaactgatctgtcgatcaattgatctgtctatctatctatctatctatctatctatctatctatctatccatctatca

SEQ ID NO: 22892 - DNA, 110 bp, synthetic construct; identical to SEQ ID NO: 22891
  source 1..110: mol_type = other DNA

SEQ ID NO: 22893 - DNA, 110 bp, synthetic construct
  source 1..110: mol_type = other DNA
gacccacaaagtggtagcaggtggaaaagctgacattctggtatgaaacagagaaagcttgggcatttttgcctcgctggttcaccagcacaactctacgtggtggtagg

SEQ ID NO: 22894 - DNA, 110 bp, synthetic construct
  source 1..110: mol_type = other DNA
agcttgggcatttttgcctcgctggttcaccagcacaactctacgtggtggtaggtcgtagagatgggcaccagagcaattttatgtaactgtgaggacagtaaaaataa

SEQ ID NO: 22895 - DNA, 110 bp, synthetic construct
  source 1..110: mol_type = other DNA
gccaggattccatgttgccctaaacctacaagttgatatgcctaagccatgaccgatgataagacttttcatctaggtatcctctccctatccatgtcttttcttggcat

SEQ ID NO: 22896 - DNA, 110 bp, synthetic construct
  source 1..110: mol_type = other DNA
ggttctacaccttgatttactagctttccaaaagtttaaatccaaggttgtttctacaatgatgtctccatttcaaagtgttcttattaggagctgagagcacccaaaca

SEQ ID NO: 22897 - DNA, 110 bp, synthetic construct
  source 1..110: mol_type = other DNA
aatgcaacaaatttggtgaggtcctcatagttccagctaatttggggttgctacttcaatgcaaataaatggactcccttcctctggcaacaagatggtctggcccactt

SEQ ID NO: 22898 - DNA, 110 bp, synthetic construct
  source 1..110: mol_type = other DNA
ggggaaggggcaggggcaagtcctcagctgctggggtagaacccctaagagtcacatccaagctggctctgttccctctaagtgtattttctccccactcccaggaccag

SEQ ID NO: 22899 - DNA, 110 bp, synthetic construct
  source 1..110: mol_type = other DNA
atccaagctggctctgttccctctaagtgtattttctccccactcccaggaccagcactctcaccccagaggcgatagtcctggagtaagagcaagaatggctggtgcag

SEQ ID NO: 22900 - DNA, 110 bp, synthetic construct
  source 1..110: mol_type = other DNA
tgtctaaatacagcagcggtactgtgggcatcagaaagaagtgagatttgggtgggataattgtatagtttatctagacaagattgtctggatcttgtaatttaaagttt

SEQ ID NO: 22901 - DNA, 110 bp, synthetic construct
  source 1..110: mol_type = other DNA
gcggtactgtgggcatcagaaagaagtgagatttgggtgggataattgtatagtttatctagacaagattgtctggatcttgtaatttaaagttttgtggtaattttaaa

SEQ ID NO: 22902 - DNA, 110 bp, synthetic construct
  source 1..110: mol_type = other DNA
aaaccttactcattcttcaaggcccagtatgaaatacattctttaccactaaacttttctaattccccagtctagaaaagacgacacagtggagtgggagtgaaaagcca

SEQ ID NO: 22903 - DNA, 110 bp, synthetic construct
  source 1..110: mol_type = other DNA
gattttttccaatattagtgattattcttgtttctcaatgaagatagggaagatgatcaggcagctttttgctctgtcacatagctgcttttccctataatacatacttc

SEQ ID NO: 22904 - DNA, 110 bp, synthetic construct
  source 1..110: mol_type = other DNA
atcaggcagctttttgctctgtcacatagctgcttttccctataatacatacttcttaaggctttttccagtcttttctgagtgcaccacatggagttcacggagagata

SEQ ID NO: 22905 - DNA, 110 bp, synthetic construct
  source 1..110: mol_type = other DNA
ctagcttatataaagttgggaaaaggaagttcagctcttattgaatgatgaagaacaaggatgcctggaggtgcaagagtgtcactgatatgtgggagtttagattcatg

SEQ ID NO: 22906 - DNA, 110 bp, synthetic construct
  source 1..110: mol_type = other DNA
taggggtgtggtgaaagaggcagagaaagctggcaaggctgggtgcccaaaaaatattccaagagactgtactatgacagagatgatggagaagaggaagttttaaaggg

SEQ ID NO: 22907 - DNA, 110 bp, synthetic construct
  source 1..110: mol_type = other DNA
taaagaaaagaagagtgtaatgactttgttaaattaatatttgctaagaagaggcttaggtactcttcagttagagaccataagtgattgaaatagaggttttcactcac

SEQ ID NO: 22908 - DNA, 110 bp, synthetic construct
  source 1..110: mol_type = other DNA
ttaggtactcttcagttagagaccataagtgattgaaatagaggttttcactcacaggtccatgctatgcctcaggcagccacgtggggaggtcaagagaggatacaggc

SEQ ID NO: 22909 - DNA, 110 bp, synthetic construct
  source 1..110: mol_type = other DNA
ttgtttgtttgttttgttttttagggccgtgccctttgagactgctttgagaccttgctctcaacaaagagtaaagtatttagagcttctaattccacttttccttaagg

SEQ ID NO: 22910 - DNA, 110 bp, synthetic construct
  source 1..110: mol_type = other DNA
ggctcagtccaaaagctgggatttactgtggatcctgctctttacttctggctggagctcaatcttcagggtggagcactgtaattttctctgtgtgtcagtcgaaaaga

SEQ ID NO: 22911 - DNA, 110 bp, synthetic construct
  source 1..110: mol_type = other DNA
aaactgcagtatggataaaagaatagagacaacaaaatgacacttaagacaaccagtagagcttgaaggttgattatttggggcacaatcaggcaagggccttatattca

SEQ ID NO: 22912 - DNA, 110 bp, synthetic construct
  source 1..110: mol_type = other DNA
tcacctccaagtctccaacttagattatggagtgttgtgcaggagaagcccgtgtccttcattgtagagcaaaacatgcatctggcccagccctcagtggggctgaggcc

SEQ ID NO: 22913 - DNA, 110 bp, synthetic construct
  source 1..110: mol_type = other DNA
ccttcattgtagagcaaaacatgcatctggcccagccctcagtggggctgaggccaaagatctagtggttgttcctggctgataagaaaagtacaatgtgagtgggtggc

SEQ ID NO: 22914 - DNA, 110 bp, synthetic construct
  source 1..110: mol_type = other DNA
ttaagtatataagatgcctacatcattatgcgtatcccttgagagggatccaggatcctgccccaaagttgtactgttctttattgaactcttcctcccttgtctttgca

SEQ ID NO: 22915 - DNA, 110 bp, synthetic construct
  source 1..110: mol_type = other DNA
tcctgccccaaagttgtactgttctttattgaactcttcctcccttgtctttgcatcccttccttccctgatgagcaaatgtctgagctcatcccttggaactcagagaa

SEQ ID NO: 22916 - DNA, 110 bp, synthetic construct
  source 1..110: mol_type = other DNA
tatactgtacctgcacagtccagctctcagccaaggacctatgtggacatccaatgaagatttctggggactttcctctgcagctcacaactctctggtattctacactc

SEQ ID NO: 22917 - DNA, 110 bp, synthetic construct
  source 1..110: mol_type = other DNA
caagctgtttttaaatttaattttgtcgtagttctatgtgccatctcaggtagagatagtgatagtgttatcatacctctttccacatagtcttgaactagcttgctaaa

SEQ ID NO: 22918 - DNA, 110 bp, synthetic construct
  source 1..110: mol_type = other DNA
atgtgccatctcaggtagagatagtgatagtgttatcatacctctttccacatagtcttgaactagcttgctaaaaattaaagatctatgatataaaaattagtaactta

SEQ ID NO: 22919 - DNA, 110 bp, synthetic construct; identical to SEQ ID NO: 22917
  source 1..110: mol_type = other DNA

SEQ ID NO: 22920 - DNA, 110 bp, synthetic construct; identical to SEQ ID NO: 22918
  source 1..110: mol_type = other DNA

SEQ ID NO: 22921 - DNA, 110 bp, synthetic construct
  source 1..110: mol_type = other DNA
gacataacacatgttgagaatggggtctcatcatgagactagcatccttatgaaaagaggaagagagaccaagactctctaacatttaaagatacaagaagaagacagct

SEQ ID NO: 22922 - DNA, 110 bp, synthetic construct
  source 1..110: mol_type = other DNA
agaggaagagagaccaagactctctaacatttaaagatacaagaagaagacagctgagaaagatggacctcatcaagaactaaattcacttgcattttattttttctaaa

SEQ ID NO: 22923 - DNA, 110 bp, synthetic construct
  source 1..110: mol_type = other DNA
cagccacagctgcaaagtacactgcagttgcagtaattctggaccctttaacacattataccaggctagggattgaacccatgcctccagcaccctgagctgctacagtc

SEQ ID NO: 22924 - DNA, 110 bp, synthetic construct
  source 1..110: mol_type = other DNA
tttgacaactgacattctccttcctcacttggggctcagagtagaagatttaattcttgttagtattgctgattttaccaaacagcactctcaaaacatagtgaaaggca

SEQ ID NO: 22925 - DNA, 110 bp, synthetic construct
  source 1..110: mol_type = other DNA
cttgttagtattgctgattttaccaaacagcactctcaaaacatagtgaaaggcataaagactatggaacatcttgtgcttttgtcctacctccatattagaccttacag

SEQ ID NO: 22926 - DNA, 110 bp, synthetic construct
  source 1..110: mol_type = other DNA
tttggtatagttcagcatcctataaagtgcttgacatggagcctggtaacacacatgtcttagtgccttcaattttaacatgtttaatcatcataccaaccctatgaagt

SEQ ID NO: 22927 - DNA, 110 bp, synthetic construct
  source 1..110: mol_type = other DNA
gctattgattaagtgcataggtctcatcatactggactgccagtcagtcttgaaaggttttgtttttgagctggtatattagctgaggcttcaatatataattttattat

SEQ ID NO: 22928 - DNA, 110 bp, synthetic construct
  source 1..110: mol_type = other DNA
accctggggttctctgagcccttgttctccacctctggacacttctttccgaccgtgattatgtcagtatccttttggcagctctctatggagactattatcaaggaagg

SEQ ID NO: 22929 - DNA, 110 bp, synthetic construct
  source 1..110: mol_type = other DNA
gaggtgaattttctcatttcagatataatagaagattgatttagagatgctagaatatatttgagcatacattcagtatcacacacaggtgacatatttcaggaggaaat

SEQ ID NO: 22930 - DNA, 110 bp, synthetic construct
  source 1..110: mol_type = other DNA
tatatttgagcatacattcagtatcacacacaggtgacatatttcaggaggaaatgatacacaaattatcacttcctacagacaatgagcacactacatgaagtgttaaa

SEQ ID NO: 22931 - DNA, 110 bp, synthetic construct
  source 1..110: mol_type = other DNA
ggccagtttttcacagatctctccttccctgttttcttacacacttatatttcttgtctggtcgtttgaacatactctattataagatatataaagaatttaataaaatg

SEQ ID NO: 22932 - DNA, 110 bp, synthetic construct
  source 1..110: mol_type = other DNA
cttagtcaaaatgttcgttttcatgtcaatatttgtcaaaattcctttagtgacactgtgtgcaaagtgaaatgttaggtttttttctgtggaatgtgtgtgtgtgtgtg

SEQ ID NO: 22933 - DNA, 110 bp, synthetic construct
  source 1..110: mol_type = other DNA
gtgaatggaaacatattaatgagatgtcatactacatagtcatttagtgttttgtttaacttaaacatagcagaaaatgtgtgtctaagtagacacatgtaatgacatcc

SEQ ID NO: 22934 - DNA, 110 bp, synthetic construct; identical to SEQ ID NO: 22933
  source 1..110: mol_type = other DNA

SEQ ID NO: 22935 - DNA, 110 bp, synthetic construct
  source 1..110: mol_type = other DNA
gagaaatagatagatagatgatagatagttgtagcccatctatatcttccatctgtatattttccatcgtattttcatctatatcttacatttcaatctatagcagtggt

SEQ ID NO: 22936 - DNA, 110 bp, synthetic construct; identical to SEQ ID NO: 22935
  source 1..110: mol_type = other DNA

SEQ ID NO: 22937 - DNA, 110 bp, synthetic construct
  source 1..110: mol_type = other DNA
ttttgtttggccgacacggtgtgtttaaaatatgaattactcacaacctataagaatcaggaaattttacacgaaattccagtttctcttaaaggggcctctagtccatg

SEQ ID NO: 22938 - DNA, 110 bp, synthetic construct
  source 1..110: mol_type = other DNA
atcaggaaattttacacgaaattccagtttctcttaaaggggcctctagtccatgacacagggcagaagtggtagtctctcctccagtctatcacagcccctgatctgct

SEQ ID NO: 22939 - DNA, 110 bp, synthetic construct
  source 1..110: mol_type = other DNA
tcagtgaagcctgtagtatagggctaaatttgactcaatattaagctagtatacttaaatagactccctggttttgtgtgtgggggggtgtgaattaccaggttttctat

SEQ ID NO: 22940 - DNA, 110 bp, synthetic construct
  source 1..110: mol_type = other DNA
taaatagactccctggttttgtgtgtgggggggtgtgaattaccaggttttctattccagttgacgaaaaacacaaactagtcctagtctctagtcaactccagagtgtt

SEQ ID NO: 22941 - DNA, 110 bp, synthetic construct
  source 1..110: mol_type = other DNA
aaatactttgggggactttaatttcctataatatttaagatctaaaatccaagtgatggaagagttctcctgtggcacagtgggttaaaaactagcattgtcactgcagc

SEQ ID NO: 22942 - DNA, 110 bp, synthetic construct; identical to SEQ ID NO: 22941
  source 1..110: mol_type = other DNA

SEQ ID NO: 22943 - DNA, 110 bp, synthetic construct
  source 1..110: mol_type = other DNA
gggtaaactgggtgaggcatccaggcaacattggagcttgtgttgcatgcagacttttatggatgagtcttggataagtggcctccagcatccaggcacccaggtatgca

SEQ ID NO: 22944 - DNA, 110 bp, synthetic construct
  source 1..110: mol_type = other DNA
tttatggatgagtcttggataagtggcctccagcatccaggcacccaggtatgcagcccacgtagatcctgtaagatctggcttcctctgagaagtgtgctagggactcc

SEQ ID NO: 22945 - DNA, 110 bp, synthetic construct
  source 1..110: mol_type = other DNA
tgtgactgaaagttcataatcaaaaacacgcaaattttaccagagttatttgactgaatccattgttagcttgaacgcaagtggttatatcatttatctgagccagacac

SEQ ID NO: 22946 - DNA, 110 bp, synthetic construct
  source 1..110: mol_type = other DNA
gaatccattgttagcttgaacgcaagtggttatatcatttatctgagccagacactatcttactggattctaatccattggtcaaatcacatttttctcaatgttaaata

SEQ ID NO: 22947 - DNA, 110 bp, synthetic construct
  source 1..110: mol_type = other DNA
tttgaactgcttccacttatatacatggatacatggatattttcaacaaattcttactaatgtactacacaatccatagttggttgaaaactcatatgccgagctgcaga

SEQ ID NO: 22948 - DNA, 110 bp, synthetic construct
  source 1..110: mol_type = other DNA
actaatgtactacacaatccatagttggttgaaaactcatatgccgagctgcagatacagaggaccaactctaaaattatacatgaatttttggctgcacagagtttccc

SEQ ID NO: 22949 - DNA, 110 bp, synthetic construct; identical to SEQ ID NO: 22947
  source 1..110: mol_type = other DNA

SEQ ID NO: 22950 - DNA, 110 bp, synthetic construct; identical to SEQ ID NO: 22948
  source 1..110: mol_type = other DNA

SEQ ID NO: 22951 - DNA, 110 bp, synthetic construct
  source 1..110: mol_type = other DNA
gtaaaaagtaaaatcattatttctcaaagtacttctggctggtgacagctgatgtgagggtctgatgaccctggttctagtttggttatactagagacataaaaataagg

SEQ ID NO: 22952 - DNA, 110 bp, synthetic construct
  source 1..110: mol_type = other DNA
atcaaatgtttagaggagagttaacacctatctttatgaaattattccaaaaaattgcagaagatcaaacactcccaaattcattttatgaggccaccatgaccctaata

SEQ ID NO: 22953 - DNA, 110 bp, synthetic construct; identical to SEQ ID NO: 22952
  source 1..110: mol_type = other DNA

SEQ ID NO: 22954 - DNA, 110 bp, synthetic construct
  source 1..110: mol_type = other DNA
caatatatacccactttatttatatgaattaatgaaggcataaaataaaagtgcgtctcctcacatgtggactaatttcacttggtctaaatcatctttggaacttgcat

SEQ ID NO: 22955 - DNA, 110 bp, synthetic construct
  source 1..110: mol_type = other DNA
aaacgccaagtggatacatgggagtgaatacagatctaaaaatctttgtattacatatcaatgcttaccattatcaatgctcaccagaaatatttcaaaggaagagtact

SEQ ID NO: 22956 - DNA, 110 bp, synthetic construct
  source 1..110: mol_type = other DNA
tcccttaactagtattgcccttatcagcctccaggtgtcccagtttttaaaatagggagttgtctcattataatcaatataccaacatgtacttataaattcagttatac

SEQ ID NO: 22957 - DNA, 110 bp, synthetic construct
  source 1..110: mol_type = other DNA
ggagttgtctcattataatcaatataccaacatgtacttataaattcagttatacctcatgtctagtcatttttaccttggaaaacccccttacacttacaccctgtttc

SEQ ID NO: 22958 - DNA, 110 bp, synthetic construct
  source 1..110: mol_type = other DNA
tcattccacccttttacctctgagcaaagagaaacactactttattttttaactcttaataatccttcacacattttccctttgttttctatgtttcttttttctcaaag

SEQ ID NO: 22959 - DNA, 110 bp, synthetic construct
  source 1..110: mol_type = other DNA
caggcaagcatttccaccttcctcttctcctccaactgatgcttttagatttgtaaatgactctccttctcttatagtctcagcactcagcatgtatcaaacaaatagtt

SEQ ID NO: 22960 - DNA, 110 bp, synthetic construct
  source 1..110: mol_type = other DNA
ataagagaggaaataaggaaaacaagttaagaggtattttggtatttcagaggagttgatagggctgggatgatagtaacaatggtaagaagggtcaggatttatttttg

SEQ ID NO: 22961 - DNA, 110 bp, synthetic construct
  source 1..110: mol_type = other DNA
ttgatagggctgggatgatagtaacaatggtaagaagggtcaggatttatttttgaggagattccatgacataataataggctgattatagagtatgagataatagatct

SEQ ID NO: 22962 - DNA, 110 bp, synthetic construct
  source 1..110: mol_type = other DNA
gaggtttgggtgagagtcttttagcagacagaatgttaataagaaatgtcctttgaggacatggtctaatcacttattaacatgttcttgaataatatttatgctaaatg

SEQ ID NO: 22963 - DNA, 110 bp, synthetic construct
  source 1..110: mol_type = other DNA
aggacatggtctaatcacttattaacatgttcttgaataatatttatgctaaatgccaccaagaccttctataaagattataaagtacacttttgatggaaaagtgggtc

SEQ ID NO: 22964 - DNA, 110 bp, synthetic construct
  source 1..110: mol_type = other DNA
atattttgaggcatgttagtatctccaataccaaatgagggcatttaaaccacataagataactgacttcaaggtcttacagcttaaaaaaagaagaaaaaggtcttggg

SEQ ID NO: 22965 - DNA, 110 bp, synthetic construct
  source 1..110: mol_type = other DNA
ggtagtgactcctgcatttttcctttcaaacatacagagtcctaaaatttaactctttacccaaatatgttctttccttgggtttacacactaaataatttatctctttc

SEQ ID NO: 22966 - DNA, 110 bp, synthetic construct
  source 1..110: mol_type = other DNA
ttctgaatctttattctaaaatcagtttccctttgtcttactgtaaattgtcattcttacctcatggttttcaatgacttcagtttttcaggctgatacctacattaatc

SEQ ID NO: 22967 - DNA, 110 bp, synthetic construct
  source 1..110: mol_type = other DNA
tgtttgttttagagctttagcatttgtgaattccaaggtagagttgaatttatctgtccaggtctatataattttaagccctgcattgctgatacattccaaaaccttca

SEQ ID NO: 22968 - DNA, 110 bp, synthetic construct
  source 1..110: mol_type = other DNA
aggaaatttaaggagccattatttcaaggagtccatttactttctgccattgtccagagctctttgtgaatcatgtgtgggtttttccaagtttccaaggggaacagatg

SEQ ID NO: 22969 - DNA, 110 bp, synthetic construct
  source 1..110: mol_type = other DNA
gttcagagtgttatgggtacaggaatttaaatggctgcactgctgtcagaaatctgggctgcttctatggtgctgactgagctagcaccaacatttttgccatggccctg

SEQ ID NO: 22970 - DNA, 110 bp, synthetic construct
  source 1..110: mol_type = other DNA
ccatctcaatctcctgatcaaacagttcattaagaacagctcattcatggggaaaaaattctccacctcttagcatttcccaacttctaccatgtattcaagtgccttct

SEQ ID NO: 22971 - DNA, 110 bp, synthetic construct
  source 1..110: mol_type = other DNA
gaaaaatcaggtaagaggaatgggaaactgcacaatattctgacttctcttttcaatctctctcagatatggggtggcttttcatgtttcacccaatcttttcttttcct

SEQ ID NO: 22972 - DNA, 110 bp, synthetic construct
  source 1..110: mol_type = other DNA
taatcctggtttctttattgtattccattgatctatgtctatcttcaccattgccacacagtcttggacactttagctatataataatttttttaattgggtagattgat

SEQ ID NO: 22973 - DNA, 110 bp, synthetic construct
  source 1..110: mol_type = other DNA
ttcatggttcatacttatccccaataccatgtatgcattgactgacttggggtttatctacttgtggctcagtcagagtatcctgtctactttccatgtttaactccaag

SEQ ID NO: 22974 - DNA, 110 bp, synthetic construct
  source 1..110: mol_type = other DNA
aaaggtttttgactagatctctagggtctgtcctgttctaacattctatgattttatatgtgagccagctgaatctgttatcactttttttcttcctgctataattccca

SEQ ID NO: 22975 - DNA, 110 bp, synthetic construct
  source 1..110: mol_type = other DNA
tgatcaataagcaccaggagggcctgtaaatgaagttccatttctaggctttcttcaacttgccaactgtactgtgttactgttaagaaagtcatgcaggaattcccgtc

SEQ ID NO: 22976 - DNA, 110 bp, synthetic construct
  source 1..110: mol_type = other DNA
aaagtttctcttacctcaaaatcgagaatatattttgtggggttatctatgagtactgataagactgcgggaatggagatgtaagaaaaaccaacaaaacaaaaaaaatt

SEQ ID NO: 22977 - DNA, 110 bp, synthetic construct
  source 1..110: mol_type = other DNA
tgtgtaccctcactctactattaaatgattggatgtccttaggcaagtaactccatgtatatgagccttatctttaaatgtaggtaacaatacctactccacagggttga

SEQ ID NO: 22978 - DNA, 110 bp, synthetic construct
  source 1..110: mol_type = other DNA
tgtatatgagccttatctttaaatgtaggtaacaatacctactccacagggttgacgtgtggaataaataaagctactggcacagagctacagcataagaaatatacaaa

SEQ ID NO: 22979 - DNA, 110 bp, synthetic construct
  source 1..110: mol_type = other DNA
agaaactgaatcctgcaaacacctacctaagtaagtttagaagctaatcctcccccagctgagcctttagataagactacaactctggccaacaccttaaccagagccct

SEQ ID NO: 22980 - DNA, 110 bp, synthetic construct
  source 1..110: mol_type = other DNA
aacttcaaagttcaacctccttatttttaaagatgagaattgaagccaagagtgtttgagtgatgtgttatatcatacatttagtaggtgccctgattgcattccatttc

SEQ ID NO: 22981 - DNA, 110 bp, synthetic construct
  source 1..110: mol_type = other DNA
gatgattgaccttcttggggacagagataattgcccctaggaggcagtggagggtaatggctgacatttcagctctggggtctgactcttcgctcacaatcccacctctg

SEQ ID NO: 22982 - DNA, 110 bp, synthetic construct
  source 1..110: mol_type = other DNA
tacaagggactaaatagaccagagctctactttctagctggaaaagacacagacggccacctggatgcctggatgagagccgtcaccaaaagctgaccaagctggtgttc

SEQ ID NO: 22983 - DNA, 110 bp, synthetic construct
  source 1..110: mol_type = other DNA
cttaaccacaaagctcccctgtatcttgatgaattgctatgagtgtagcttcatttcagtgtagattcttcttctacatcatttattacaaactcttatttttcttcctg

SEQ ID NO: 22984 - DNA, 110 bp, synthetic construct
  source 1..110: mol_type = other DNA
tcagtgtagattcttcttctacatcatttattacaaactcttatttttcttcctgataaatgagttccctcttgctttggggatctcctactgcccaatagctcctgaat

SEQ ID NO: 22985 - DNA, 110 bp, synthetic construct
  source 1..110: mol_type = other DNA
acaaatcagtctcatttggaacaaactgtgaaatctgatcataggaggcaggtgtagctcagaaaaggtgaactttaacatagtcacaggaaggcttctgactcctgtct

SEQ ID NO: 22986 - DNA, 110 bp, synthetic construct; identical to SEQ ID NO: 22985
  source 1..110: mol_type = other DNA

SEQ ID NO: 22987 - DNA, 110 bp, synthetic construct
  source 1..110: mol_type = other DNA
tttcaaaatcacctgtaaacggatgctgcaaagtttgcaatttaaataagctgtttaaggcattgccaagcaaggcttctgcgtggcaggttgcttgcaagtcagagggt

SEQ ID NO: 22988 - DNA, 110 bp, synthetic construct
  source 1..110: mol_type = other DNA
taaggcattgccaagcaaggcttctgcgtggcaggttgcttgcaagtcagagggtttgggctctgtatctgatgcacgtgtaatataccgtgaagttgtttgtggatcac

SEQ ID NO: 22989 - DNA, 110 bp, synthetic construct
  source 1..110: mol_type = other DNA
tctcgagtggagcatttgaagaactttcatgatgttctccatatattccactatattaacatgttagtcactcaggcaaaatatgaaacaagtgcataggcttcggaaga

SEQ ID NO: 22990 - DNA, 110 bp, synthetic construct
  source 1..110: mol_type = other DNA
aagttttcatctgcaatttctcttctctctatccagattcattctatccacgtactctggtcccgatgcatgcagctcacttattaagcatatattaatgaacacaaata

SEQ ID NO: 22991 - DNA, 110 bp, synthetic construct
  source 1..110: mol_type = other DNA
tcttgaagatgaggaaaccaagacagaaagtttcaatgatttgctcaagttcagaaacatatttaagcttacattcatcagacgtcaaactgcattcttgctccattttt

SEQ ID NO: 22992 - DNA, 110 bp, synthetic construct
  source 1..110: mol_type = other DNA
aacatatttaagcttacattcatcagacgtcaaactgcattcttgctccattttttcttggttgttaccggataaaacacttctacactctacttgatgtgcgatggtgg

SEQ ID NO: 22993 - DNA, 110 bp, synthetic construct
  source 1..110: mol_type = other DNA
gtaaggtaaagggaacaacgcaagtcaaagacggtcaccagtgctatctctcagctttgtgatttttaaactactggagtgactctcttcaggtaagtgggacagggagc

SEQ ID NO: 22994 - DNA, 110 bp, synthetic construct
  source 1..110: mol_type = other DNA
tttgtgatttttaaactactggagtgactctcttcaggtaagtgggacagggagcatgcaatagttgaactcccaaattgtatcgaaatgtttggactagtgagaacaga

SEQ ID NO: 22995 - DNA, 110 bp, synthetic construct
  source 1..110: mol_type = other DNA
agacatctcttactggagaagagtgggcaaaataccacataatttcattaacctttaagcaatgaaattataaatccctatgcaaattgttaaggttatcattgtctacc

SEQ ID NO: 22996 - DNA, 110 bp, synthetic construct
  source 1..110: mol_type = other DNA
ttgcttctcttccaacttctcttatgttggtagcttttgctgctttaccctaaaatgtaagaaccatcattctcttctcagtgtacactcaggtttttaatcatatatac

SEQ ID NO: 22997 - DNA, 110 bp, synthetic construct
  source 1..110: mol_type = other DNA
tttattgatgccatgtcatgggatagcttttgggagactggacactctattagtctgtaaactacctgccacagggacctaagacattaaatgactacatttctttctct

SEQ ID NO: 22998 - DNA, 110 bp, synthetic construct
  source 1..110: mol_type = other DNA
tgtaaactacctgccacagggacctaagacattaaatgactacatttctttctcttttaggtatcacttccatcttgtatttttaattggtttagcaaatggaaacatta

SEQ ID NO: 22999 - DNA, 110 bp, synthetic construct
  source 1..110: mol_type = other DNA
agcccaccacttactgcaaatgcaatttcagaggtcttgatttttcagctgacagcagattagcagcatcaaattgggggtgtgataaaggcaggctcactgacagcagt

SEQ ID NO: 23000 - DNA, 110 bp, synthetic construct
  source 1..110: mol_type = other DNA
cagattagcagcatcaaattgggggtgtgataaaggcaggctcactgacagcagtaaaaagtgacagctgactgacagcttgacaacaagggaggagagaaataaaccat

SEQ ID NO: 23001 - DNA, 110 bp, synthetic construct
  source 1..110: mol_type = other DNA
ttgtttgttttaattttgcggctgcagctgcagcacagggaatttcccagtaagggattgaatccaagccgcagctgcaaccgtcactgcaggtgtggcaacaccggatc

SEQ ID NO: 23002 - DNA, 110 bp, synthetic construct
  source 1..110: mol_type = other DNA
gattgaatccaagccgcagctgcaaccgtcactgcaggtgtggcaacaccggatccctttgaacccactgtaccaggccagggattgaactgacacctccgcagggacct

SEQ ID NO: 23003 - DNA, 110 bp, synthetic construct
  source 1..110: mol_type = other DNA
tgagtgaggccagggatggaacccgcaacctcatggatattggtcgggtttgttactgctgagccacaataggaacttatataaatgctctttgaaagggattgtctaac

SEQ ID NO: 23004 - DNA, 110 bp, synthetic construct; identical to SEQ ID NO: 23003
  source 1..110: mol_type = other DNA

SEQ ID NO: 23005 - DNA, 110 bp, synthetic construct
  source 1..110: mol_type = other DNA
ggcaggcacaggcaaactcagcaccagcagcccaaagccctgttgagatttctcagaggagggattttggtcttgcactcacagcacacttttcaccttggaggagcacc

SEQ ID NO: 23006 - DNA, 110 bp, synthetic construct
  source 1..110: mol_type = other DNA
gaggagggattttggtcttgcactcacagcacacttttcaccttggaggagcaccttctgctggctctcccagagaatgggagagtacccacattccacttccacctgtt

SEQ ID NO: 23007 - DNA, 110 bp, synthetic construct
  source 1..110: mol_type = other DNA
aggcatgggcaggggagagcagaaaggttgcaaggaaagcaaaaagctgaactgtggtttgggcagacagaagtctttctggttcacctttaacttgaggtgaagaacag

SEQ ID NO: 23008 - DNA, 110 bp, synthetic construct
  source 1..110: mol_type = other DNA
tgccccaagtgaaaatttaacatgtcatcaccacttgactttgcctgctaacttcaaccattttctatgaactccttgtaggcaattgcataaactaccctgttttgtat

SEQ ID NO: 23009 - DNA, 110 bp, synthetic construct
  source 1..110: mol_type = other DNA
gattttactttgggaaaaacatcctgtttcttgggtggctgagatttttgtgcacatttaaacaatggccgtgccagttttaacgttttgtgagtcaactagtaggatgt

SEQ ID NO: 23010 - DNA, 110 bp, synthetic construct
  source 1..110: mol_type = other DNA
ggagatgagattagagatcatgcattgcttcaatccatccccttcctggagaaaacagctcacagcacacaatccacgtgggtggttctgtagcatcaccttgagggtcc

SEQ ID NO: 23011 - DNA, 110 bp, synthetic construct
  source 1..110: mol_type = other DNA
acaggccagttattggtactttctattgtccggtgccaatactacacagtggtgacaactgaggcccaactgtaccaaagtcgcggaattaggatcaatcacatgagaaa

SEQ ID NO: 23012 - DNA, 110 bp, synthetic construct
  source 1..110: mol_type = other DNA
caactgaggcccaactgtaccaaagtcgcggaattaggatcaatcacatgagaaagccttaaaaataatgctaagattcagagtatagcaactttgtactggaaggaaaa

SEQ ID NO: 23013 - DNA, 110 bp, synthetic construct
  source 1..110: mol_type = other DNA
caaatacgatggttcaggtaagagagcttgggggtgacccaacaatgaagggctttgaggagctcacaaagaatctggcttttcttcagaaagaaaagtccagctggttg

SEQ ID NO: 23014 - DNA, 110 bp, synthetic construct
  source 1..110: mol_type = other DNA
cactcaaagcacagattttacaggaggcagtaagagccatgataaagaccagcaccattctgggactggatatgaatgtctttacagttttgaaagattgttttattcaa

SEQ ID NO: 23015 - DNA, 110 bp, synthetic construct
  source 1..110: mol_type = other DNA
cattctgggactggatatgaatgtctttacagttttgaaagattgttttattcaattagtgtgcaatggggtaaaagtacctcctttggtgtggttttgtcatttccaag

SEQ ID NO: 23016 - DNA, 110 bp, synthetic construct
  source 1..110: mol_type = other DNA
tatctttccagataatatgattttacattgagcttcaaggaacatttaatcattatctgttctagcagttcaatgaatcttcagtatagtacatgattctctaagaatgg

SEQ ID NO: 23017 - DNA, 110 bp, synthetic construct
  source 1..110: mol_type = other DNA
acaagagtcagagaaaagaagcagatcctggccctcgggcccttttcttcaaaattttaacagcaagaaagtgttgtggtattcttactctacttactcacagatatgag

SEQ ID NO: 23018 - DNA, 110 bp, synthetic construct
  source 1..110: mol_type = other DNA
ggattctgtttagtagtgttaggatagggctctggatttcctaataagctcctaggtgatattgttgctgctggtccatggaccactgtaaatttcaagaatctggtaag

SEQ ID NO: 23019 - DNA, 110 bp, synthetic construct
  source 1..110: mol_type = other DNA
gtgatattgttgctgctggtccatggaccactgtaaatttcaagaatctggtaagagcccaaaataaatggtaaacaggacacaagttctgatgagctcctaggcatcct

SEQ ID NO: 23020 - DNA, 110 bp, synthetic construct
  source 1..110: mol_type = other DNA
ccactgagcctcattgggaacttctgtttgtcaagatttctatcttgttatctacaatgagtcagcttaggaatgtgacaaattcttactgattattgaaaaattcttaa

SEQ ID NO: 23021 - DNA, 110 bp, synthetic construct
  source 1..110: mol_type = other DNA
agaaattttagaaggtacagagttcagggaaaatgaaaatgtactcacagaactttaacatgaaaagaagccatctcctagatagagagatcatgattaagcttctagct

SEQ ID NO: 23022 - DNA, 110 bp, synthetic construct
  source 1..110: mol_type = other DNA
taacatgaaaagaagccatctcctagatagagagatcatgattaagcttctagctgcttttggaagatatcggtttaagttccctgcaactccaataagaagaacttgta

SEQ ID NO: 23023 - DNA, 110 bp, synthetic construct
  source 1..110: mol_type = other DNA
gattatcttttcttaaatgttatttaagtgtacatgtttaaggaaatgtgtgccttacactgttttcatcaagaacattttacaattgtagctcatttcatgctggtgga

SEQ ID NO: 23024 - DNA, 110 bp, synthetic construct
  source 1..110: mol_type = other DNA
atgtgtgccttacactgttttcatcaagaacattttacaattgtagctcatttcatgctggtggaaagactaaaactgattaaggcatttcaacaagtataagaatccat

SEQ ID NO: 23025 - DNA, 110 bp, synthetic construct
  source 1..110: mol_type = other DNA
tgctcttaacctttccatcattgaccaccagaggaatgacagaaccggaagataggagaagcaaatatagcagaaagctgaccagaaatgtctgtttgggaccaaggtat

SEQ ID NO: 23026 - DNA, 110 bp, synthetic construct
  source 1..110: mol_type = other DNA
tgaagacacttcctctttttctgccttctagcaagggcttaaagcctaagtctctactctcctccgtgggttggagcatgtccacaggccttaaggaggctctgcttatt

SEQ ID NO: 23027 - DNA, 110 bp, synthetic construct
  source 1..110: mol_type = other DNA
gtttattttcccataatcaaaataagaactaggggagtgataagacttgaattttcagtcttgttgcttgtgagtagttgatagccataaaatgagatactttgtgataa

SEQ ID NO: 23028 - DNA, 110 bp, synthetic construct; identical to SEQ ID NO: 23027
  source 1..110: mol_type = other DNA

SEQ ID NO: 23029 - DNA, 110 bp, synthetic construct
  source 1..110: mol_type = other DNA
cccttcttcaggtacatgtggttagtgatcatgagttacattttgaatgagctatagtatgacaaaataccagagttgtatgtatgtagtttaccatcccagtattgtct

SEQ ID NO: 23030 - DNA, 110 bp, synthetic construct
  source 1..110: mol_type = other DNA
ctgattctttccatcccagcccactgctgagtgttgataagggctgaatgttgcttggtctctgaatgggcatatttgatcttctgatcggtttcctgcaggatacctta

SEQ ID NO: 23031 - DNA, 110 bp, synthetic construct
  source 1..110: mol_type = other DNA
tttctataaaatgtttgtagaaaaagagaattaatgaaggagtctgtgacagcaagttcagtacctagaaccatggctatctagcctaaacaactgagctaggacacaat

SEQ ID NO: 23032 - DNA, 110 bp, synthetic construct
  source 1..110: mol_type = other DNA
gttcagtacctagaaccatggctatctagcctaaacaactgagctaggacacaatataattggggtttattctgattatctttcctattgacagcagtcgctgttgttga

SEQ ID NO: 23033 - DNA, 110 bp, synthetic construct
  source 1..110: mol_type = other DNA
cttacagaagagaagagcccttgaagctaaaacatatactggatgcatagtgtagcatactcagagataatgagggagatgtacagccatcaatgtaggtaaatcttagc

SEQ ID NO: 23034 - DNA, 110 bp, synthetic construct
  source 1..110: mol_type = other DNA
aattctatattttattagctggtgatatagaaaggaaggaaaacatacaatctatgtcttttggaagacttcatgatttaaagggggcaggtagtaatcttaaatgagtg

SEQ ID NO: 23035 - DNA, 110 bp, synthetic construct
  source 1..110: mol_type = other DNA
cttaggtcacaaatcaagcacaaatatcctttagatactttaaacttttttttactagatttgcatggcctcccaaatgttacataataccaacacagagaaaataatct

SEQ ID NO: 23036 - DNA, 110 bp, synthetic construct
  source 1..110: mol_type = other DNA
tttaaaattttctgtatctagactatttcacaactctttagggctagaggttaacttatggcaaaacagtagaaatacaaatgtccattgcctataatacatatgagctt

SEQ ID NO: 23037 - DNA, 110 bp, synthetic construct
  source 1..110: mol_type = other DNA
tgggcaaaataaattttcttctgaatttcctttctcccagatgtttttatacaccagcttatattcttaccccactacgtaatcagaaaaagacatacttctttatctta

SEQ ID NO: 23038 - DNA, 110 bp, synthetic construct
  source 1..110: mol_type = other DNA
tcactatgaaccgttgcttcactctgtgagagaattctcttggtgaattcagttccttgtagaatttgaagcattagttcagaagtctacctaacatttgttaaaatgag

SEQ ID NO: 23039 - DNA, 110 bp, synthetic construct
  source 1..110: mol_type = other DNA
tatcacaatctactgtcctgcttttacaatcaccataggatacaaagaatgatttttgctggcctcatgtcatactgggttccggaagagcacacatggtggcagctctg

SEQ ID NO: 23040 - DNA, 110 bp, synthetic construct
  source 1..110: mol_type = other DNA
ttgctggcctcatgtcatactgggttccggaagagcacacatggtggcagctctgagttcaaggcaacactgatcctccagttcccaacagaagctgtggagagactttc

SEQ ID NO: 23041 - DNA, 110 bp, synthetic construct
  source 1..110: mol_type = other DNA
aagcagatagaaaattgattcaatgatgctgggcattttccaaatgtaatgcagtatttccagactgttacataagtaataatggctttggtatttaagtaagcatttca

SEQ ID NO: 23042 - DNA, 110 bp, synthetic construct
  source 1..110: mol_type = other DNA
ttttcattttatttttctcgttgttcttatgggtctcaggtgcaaggtattagattgatcataatccttggttcaggacacacgctaaacagggtccttagctatgaatc

SEQ ID NO: 23043 - DNA, 110 bp, synthetic construct
  source 1..110: mol_type = other DNA
tgatcataatccttggttcaggacacacgctaaacagggtccttagctatgaatctgcctatcaatttgctgtaatgtaacaaatgcttataatccactatcccacacaa

SEQ ID NO: 23044 - DNA, 110 bp, synthetic construct
  source 1..110: mol_type = other DNA
tgtcaccaaaacagtgaggcctaactatgagttacagaaacaaaactcataagcagttgggcttattctgttcacatattaggataaacaaaggagacatcaaaaggaag

SEQ ID NO: 23045 - DNA, 110 bp, synthetic construct
  source 1..110: mol_type = other DNA
gttgggcttattctgttcacatattaggataaacaaaggagacatcaaaaggaaggtcaggatgtcaaggttaagttttgtagtggttcttactgcaagctgtttgtgga

SEQ ID NO: 23046 - DNA, 110 bp, synthetic construct
  source 1..110: mol_type = other DNA
acagagctgtgtctactcagagggaaggttgctcttactatgtagcagaaaaccactgtcttctccttaagcttttagcccataatacagtatatcccttctagaaagtg

SEQ ID NO: 23047 - DNA, 110 bp, synthetic construct
  source 1..110: mol_type = other DNA
ctgtcttctccttaagcttttagcccataatacagtatatcccttctagaaagtgctttgttctcattagcacaaaattctcccatggctcagccagaatcctgtctcac

SEQ ID NO: 23048 - DNA, 110 bp, synthetic construct
  source 1..110: mol_type = other DNA
agcctccataataatctgatagtctctagaaatattaacacaaacaaattaggtgagtggactcaggctgttgcactctgaggctttcataactgccacatggctttgaa

SEQ ID NO: 23049 - DNA, 110 bp, synthetic construct
  source 1..110: mol_type = other DNA
tatctatgttgctgtaaatggcattatttgttcttttaacggctctgtagtatctcattttgtataggtacatcgtctttatccatttttcttttgatggacatttaagt

SEQ ID NO: 23050 - DNA, 110 bp, synthetic construct
  source 1..110: mol_type = other DNA
atttgttcttttaacggctctgtagtatctcattttgtataggtacatcgtctttatccatttttcttttgatggacatttaagttgtttccatgtcttggctgttggga

SEQ ID NO: 23051 - DNA, 110 bp, synthetic construct
  source 1..110: mol_type = other DNA
aaggctgagatcaaggtgttcatagggttgggctcttgtctggagggtctgaggaagaatctgctttcaagcccatttaagctatgcatatgtattaaacacaatttaat

SEQ ID NO: 23052 - DNA, 110 bp, synthetic construct
  source 1..110: mol_type = other DNA
ttattccacttagcataggcctttaaagttcatttgcattgttggaaatggtaggttttccctgtttttttaaattgctgaatgatattccactgtatatatcagctctc

SEQ ID NO: 23053 - DNA, 110 bp, synthetic construct
  source 1..110: mol_type = other DNA
ttttccctgtttttttaaattgctgaatgatattccactgtatatatcagctctctatttgtattaccacaacctgatgccataggttccaatgctttggaacccaagat

SEQ ID NO: 23054 - DNA, 110 bp, synthetic construct
  source 1..110: mol_type = other DNA
gtacccaaaagagtactatgaggggtttaaactcttgcagggcagcattcaaacgtctaatgcttagcagaaaaactgcttccttggtacaccagtcctctacagtcaag

SEQ ID NO: 23055 - DNA, 110 bp, synthetic construct
  source 1..110: mol_type = other DNA
ccaactagagtccagatgagagagctaaagacctgaactaagaactaaggctagcagagaagaactgagtgtccatcttgtatgttaaatgttaagaaagtctgtagggc

SEQ ID NO: 23056 - DNA, 110 bp, synthetic construct
  source 1..110: mol_type = other DNA
aaaattgtatgtgttaggatctcattgctttctctatttaaatgcctttattccgcagagagaatccaggaatgatggttttcaggaaactgaggcatagagaacttcac

SEQ ID NO: 23057 - DNA, 110 bp, synthetic construct
  source 1..110: mol_type = other DNA
tagggcttactgggaactacatttcctactctcctgataatgtgatttttttttaactacttaattactgtttagattgttccatacatttccatgagttctctgcataa

SEQ ID NO: 23058 - DNA, 110 bp, synthetic construct
  source 1..110: mol_type = other DNA
cccaatttgatccttagcctgggaactgcaatatgccacaggtatggccataaaaagcaaaaaaaaaaaaaaaaaaaaaaaaaaggtatttttgttcatgctcagagtat

SEQ ID NO: 23059 - DNA, 110 bp, synthetic construct; identical to SEQ ID NO: 23058
  source 1..110: mol_type = other DNA

SEQ ID NO: 23060 - DNA, 110 bp, synthetic construct
  source 1..110: mol_type = other DNA
actgtcctgttttgttctgttttgctttccaaagactacagtctcaaaccaatcaaatccgccccaaatattttattgtttttgacttttgttttattttgaagtgttga

SEQ ID NO: 23061 - DNA, 110 bp, synthetic construct
  source 1..110: mol_type = other DNA
ttggcttcgtcaaacactgattccaaagaaatgtttctctcacaataacatatttaaatgaatttctgtactccaaacattactcacatctgcatgcagtttcccaaatg

SEQ ID NO: 23062 - DNA, 110 bp, synthetic construct
  source 1..110: mol_type = other DNA
aaatgaatttctgtactccaaacattactcacatctgcatgcagtttcccaaatgccaatttcaatagtcataacattgtaattgaaattatatgctggaaaatgtcata

SEQ ID NO: 23063 - DNA, 110 bp, synthetic construct
  source 1..110: mol_type = other DNA
ttaaatggctcactattctgagtagtgtattgctatccagctccattgaacccagtgtgtgaatcatccctttgtcctgtgtcccctgacctacttagacacttagtagt

SEQ ID NO: 23064 - DNA, 110 bp, synthetic construct
  source 1..110: mol_type = other DNA
gccagggctgtattatgtggagccttgtaaccagggtggcaaattttaagctgagttatcaagatttatgatctagaaagctgtattattataaaatgtgtgtgtctctg

SEQ ID NO: 23065 - DNA, 110 bp, synthetic construct
  source 1..110: mol_type = other DNA
ttatcaagatttatgatctagaaagctgtattattataaaatgtgtgtgtctctgtctgtgtagggggcaaaatgggagttgagagattagtggggaccctgtttcactg

SEQ ID NO: 23066 - DNA, 110 bp, synthetic construct
  source 1..110: mol_type = other DNA
atttccacccttcagcctgaaatgctagggcttcagagcccagtgaaacatagagccatgtgcaggagctgcctgaaaagagctcacccatgggggacagtagcctatgc

SEQ ID NO: 23067 - DNA, 110 bp, synthetic construct
  source 1..110: mol_type = other DNA
ccatgtgcaggagctgcctgaaaagagctcacccatgggggacagtagcctatgctagaaaatgcctcccagagcagagaaggagtgcgaaagaaatgaagcaagtctct

SEQ ID NO: 23068 - DNA, 110 bp, synthetic construct
  source 1..110: mol_type = other DNA
ccctcaaaattcacattacatagaaggtcacattacatagaaggaatttgactcactttaggaagcctagcttgaatgaagagatttttttccctctttatataaaagtc

SEQ ID NO: 23069 - DNA, 110 bp, synthetic construct
  source 1..110: mol_type = other DNA
ctttaggaagcctagcttgaatgaagagatttttttccctctttatataaaagtcttgatggaatggctaagttatcccttcttagttttacttttgttgtctgataggc

SEQ ID NO: 23070 - DNA, 110 bp, synthetic construct
  source 1..110: mol_type = other DNA
gacacatgcctaccagtgcgtgcacacaaacagacacattatttcaatgcatgaaattttacaaaggataaggaagaatatccatttccgccctaattttaaataaagaa

SEQ ID NO: 23071 - DNA, 110 bp, synthetic construct
  source 1..110: mol_type = other DNA
attttacaaaggataaggaagaatatccatttccgccctaattttaaataaagaaactgaaacactgaaagatgtgtggatgaagttgaagaatgagttactctaacggc

SEQ ID NO: 23072 - DNA, 110 bp, synthetic construct
  source 1..110: mol_type = other DNA
taaactttgggtatgtgggattttagatacctctgggacatagttcagggttacaaaggcaagaagaatttgggctgcagttagagcttttgtagtcatgcgattgtagg

SEQ ID NO: 23073 - DNA, 110 bp, synthetic construct
  source 1..110: mol_type = other DNA
gcgttgtcatttcaaacttgtttcaagactgtattttcaaatcatgtgagcaggttgtgtgtatttgtaggtggtcaagtccaataaatctttcaagtcacagagtacta

SEQ ID NO: 23074 - DNA, 110 bp, synthetic construct
  source 1..110: mol_type = other DNA
gtggaagctgagcccaagttagaggcaattgcaactctcaggcaagagttaatgatggcttggattacatggtaagtagagagcataagaggtggtgggatgagggacat

SEQ ID NO: 23075 - DNA, 110 bp, synthetic construct
  source 1..110: mol_type = other DNA
ttctccctctccccccttggcaagcacaagtctgctctccacatccatgatctctgtctgttttatagataggatcatttgcaccatattttagatttcatgcacaagtg

SEQ ID NO: 23076 - DNA, 110 bp, synthetic construct
  source 1..110: mol_type = other DNA
tctccacatccatgatctctgtctgttttatagataggatcatttgcaccatattttagatttcatgcacaagtgatatcatacagtatttgtttttctgacttacttta

SEQ ID NO: 23077 - DNA, 110 bp, synthetic construct
  source 1..110: mol_type = other DNA
ttggcacccatatttcctataccaaatgttagtgagatggccatgtaaaggagaataacatagcatgatgactttctagcaatgctgaaccattccctctttgagtaatg

SEQ ID NO: 23078 - DNA, 110 bp, synthetic construct
  source 1..110: mol_type = other DNA
tgccctgtacttaaattgtcccatgtctgaaaatagaatacagtgtaattgcattcaagtaattaaataaaatgattttcacatggagctttgaaattagccccattgtt

SEQ ID NO: 23079 - DNA, 110 bp, synthetic construct
  source 1..110: mol_type = other DNA
cagtgaatggttgccatcatttggtcttgacaattgagttcaagatccttaggttgcactaaagaaagacattgccctatctcagtgaaactagctactttctgctatag

SEQ ID NO: 23080 - DNA, 110 bp, synthetic construct
  source 1..110: mol_type = other DNA
gcactaaagaaagacattgccctatctcagtgaaactagctactttctgctatagaactctctaccacataattacaaaactatttcaaatttagggcctatagatagat

SEQ ID NO: 23081 - DNA, 110 bp, synthetic construct
  source 1..110: mol_type = other DNA
tttttaaattaccaaagacaagatagaaataatgcaagagtttctgtttttgccttaacagatatgctgcaagatttggctatgttttcttggaattagaattgactttg

SEQ ID NO: 23082 - DNA, 110 bp, synthetic construct
  source 1..110: mol_type = other DNA
aatcagagctgcagctgccagccagcctatgccatagctacagcaacaccaaatcctagttgcatctgcgacctacaacacaaatcacagcaatgctggatcctttaacc

SEQ ID NO: 23083 - DNA, 110 bp, synthetic construct; identical to SEQ ID NO: 23082
  source 1..110: mol_type = other DNA

SEQ ID NO: 23084 - DNA, 110 bp, synthetic construct
  source 1..110: mol_type = other DNA
aaaaagacaatcacctttgcccccctattttgttgaatcaagctaagagccctatgtggtaagtcttcatatttttgtttaatgggtaaagagcatgagcctcaaatttt

SEQ ID NO: 23085 - DNA, 110 bp, synthetic construct
  source 1..110: mol_type = other DNA
ttaatcagaagactgctatggggctttccctgaatagacccatcccccaaatcatttgctttagctactctctgtagtacctaaataacaatatctgaggcacatttcct

SEQ ID NO: 23086 - DNA, 110 bp, synthetic construct
  source 1..110: mol_type = other DNA
gcttgaattttttacatttcacatatgagtgaaatcatactgtatttgtctctttgggtctggctaattttactaagtataatgtcctccagtttcatccatgttgccac

SEQ ID NO: 23087 - DNA, 110 bp, synthetic construct
  source 1..110: mol_type = other DNA
atttcacatatgagtgaaatcatactgtatttgtctctttgggtctggctaattttactaagtataatgtcctccagtttcatccatgttgccacaaatgataggatttc

SEQ ID NO: 23088 - DNA, 110 bp, synthetic construct
  source 1..110: mol_type = other DNA
aatccctggtctcacccagtgggttaagtatccagtgtttctgcaagttgcagcatagattgtttggatccttcattgctgtggctttggcataagccaggagctgcagc

SEQ ID NO: 23089 - DNA, 110 bp, synthetic construct
  source 1..110: mol_type = other DNA
aagtatccagtgtttctgcaagttgcagcatagattgtttggatccttcattgctgtggctttggcataagccaggagctgcagctttgattcaatccctagcctgagaa

SEQ ID NO: 23090 - DNA, 110 bp, synthetic construct
  source 1..110: mol_type = other DNA
ccagagcatgagtctcagcacccagtacctgcctgagcatctcaggctgtggcgtccagggcagtggtgcagatggtctgtgtggctttcactttactttgcctgcctta

SEQ ID NO: 23091 - DNA, 110 bp, synthetic construct
  source 1..110: mol_type = other DNA
gctgtggcgtccagggcagtggtgcagatggtctgtgtggctttcactttactttgcctgccttagtccagctgctgcacatttgtcagctactttgaggtccatttgtc

SEQ ID NO: 23092 - DNA, 110 bp, synthetic construct
  source 1..110: mol_type = other DNA
ataggccagtggctgcagctctgatttcttcagctgtaattttctgttataatagaggagacctattgatgtggtggttaggtatgggggaaggaaactattcaataatc

SEQ ID NO: 23093 - DNA, 110 bp, synthetic construct; identical to SEQ ID NO: 23092
  source 1..110: mol_type = other DNA

SEQ ID NO: 23094 - DNA, 110 bp, synthetic construct
  source 1..110: mol_type = other DNA
ctgttccaccctggtggtgtgtgggcaccaggagtgtgtggcagggcaggttcatctggcagagaaaagtactgggaaagtgtgcggtatggcggtttcacgcaggtggg

SEQ ID NO: 23095 - DNA, 110 bp, synthetic construct
  source 1..110: mol_type = other DNA
caaaaaaaaaaacaaaaaaaaaaaacaagaaaacctaatttctaagaccaaattagagctctctgtggtctagataaaccagctcctcacttcaagattagtcataccct

SEQ ID NO: 23096 - DNA, 110 bp, synthetic construct
  source 1..110: mol_type = other DNA
gagctctctgtggtctagataaaccagctcctcacttcaagattagtcataccctgggctgccagaatggattgagaagataatttaaaaaatgagtgccagagggagtt

SEQ ID NO: 23097 - DNA, 110 bp, synthetic construct
  source 1..110: mol_type = other DNA
attatatatgggccttcaaattagaggataaaaatatttttattacctagcttctcttccattaagtatctccccttatacacctatgaacacatgtattcatctaggac

SEQ ID NO: 23098 - DNA, 110 bp, synthetic construct
  source 1..110: mol_type = other DNA
tctggataaatggtcagggaaagtatgtctcagggctctcataaaaataagctactagctatttgaagaacatagtgcgaaatgtaggacattctccagtcctccttcat

SEQ ID NO: 23099 - DNA, 110 bp, synthetic construct
  source 1..110: mol_type = other DNA
actgtgactgcagttgaggttgacacatgtggtctaagcaatctctaggaagattgtctctgtgtttgaggctgcagctttaagtctgctggacaggtaattgggaaagg

SEQ ID NO: 23100 - DNA, 110 bp, synthetic construct
  source 1..110: mol_type = other DNA
tgaagaaccgttgataaaaatacggacaggagtaaattgccttagtaccttgtgacctgagaggtgcatttgccctgctattttttcctatataaaagagatcatcctta

SEQ ID NO: 23101 - DNA, 110 bp, synthetic construct
  source 1..110: mol_type = other DNA
cctgagaggtgcatttgccctgctattttttcctatataaaagagatcatccttatttcagctaccaaaaagcattctaacattttcttctggagtctcctttcattttt

SEQ ID NO: 23102 - DNA, 110 bp, synthetic construct
  source 1..110: mol_type = other DNA
ctaaatgacaagagctatgcttttacttctttttttcttagagctcaggacaatagaagttgaaacagcccaagaaataaagaaatgttgaaagatgatacattttgaaa

SEQ ID NO: 23103 - DNA, 110 bp, synthetic construct
  source 1..110: mol_type = other DNA
ctgcaacactatttgtattttttcttgttgtttgatatcccttcatttttaagttagagctcactggaaagctttctttgtggccaaaatgatttttttagctattgctc

SEQ ID NO: 23104 - DNA, 110 bp, synthetic construct
  source 1..110: mol_type = other DNA
agagctcactggaaagctttctttgtggccaaaatgatttttttagctattgctccaccttattatcctgtgatcacttgtgattacatcacctgctttctggctctctt

SEQ ID NO: 23105 - DNA, 110 bp, synthetic construct
  source 1..110: mol_type = other DNA
catccaatacaaagcccttttaaaaactaccaatcactggaaattagttgaaacaacacataagcaaaaatttgcacatacctcctgaaactcagttcattgacctaata

SEQ ID NO: 23106 - DNA, 110 bp, synthetic construct
  source 1..110: mol_type = other DNA
atgagtctaattctttgttacaattctctccttaactaatgaaacttaaatgagggtgagagctacccatagcataagtgataggagttgggtgcattgttagcagatcg

SEQ ID NO: 23107 - DNA, 110 bp, synthetic construct
  source 1..110: mol_type = other DNA
aaccagtgatctaataagtaaaatatttctctcaattctgtgagctgctgtaataaattaatcaagcccaaggagggaaacctttggaacctccaatctatagtagattg

SEQ ID NO: 23108 - DNA, 110 bp, synthetic construct
  source 1..110: mol_type = other DNA
gttacacaatgttagctaatatttgtagtacccctcccatattctcagctgatattgtcttcccttcctgctctgctacaatgtagtgctatactattggatagtggaaa

SEQ ID NO: 23109 - DNA, 110 bp, synthetic construct
  source 1..110: mol_type = other DNA
tctgagttttggcttccccctcccattcggtttcccatcccagctcctaagtacgatgggaaacccaaggtattctagggcttccctctgctaggtccttccttcttgca

SEQ ID NO: 23110 - DNA, 110 bp, synthetic construct
  source 1..110: mol_type = other DNA
tgacataaactcttcagcagggcatggaaattaatggaaggaagtggaattgttttgatcaattaccagccatgttagagcataggcaactggcccttaaaagcatggag

SEQ ID NO: 23111 - DNA, 110 bp, synthetic construct
  source 1..110: mol_type = other DNA
tgatcaattaccagccatgttagagcataggcaactggcccttaaaagcatggagctgtgctttacctcactgctgtaacttaactccattctagcctctgggaatagta

SEQ ID NO: 23112 - DNA, 110 bp, synthetic construct
  source 1..110: mol_type = other DNA
agagttgaccacctcattttcaaataatgattcataattcatgttctacttctaagaattttgagtttaaaatacagttctgtaatatgctgcacacagtcactgcaaac

SEQ ID NO: 23113 - DNA, 110 bp, synthetic construct
  source 1..110: mol_type = other DNA
gaattttgagtttaaaatacagttctgtaatatgctgcacacagtcactgcaaactctctttgaatattttaagaatatctctagagtcttcctacaggacaattttctg

SEQ ID NO: 23114 - DNA, 110 bp, synthetic construct
  source 1..110: mol_type = other DNA
ggctggggaatacagtccttatgtagtttatacaattatatttgcttaaaactttacataaaaagttgcacaacacagctcagcctttttagcagagcagttggtaaggt

SEQ ID NO: 23115 - DNA, 110 bp, synthetic construct
  source 1..110: mol_type = other DNA
acataaaaagttgcacaacacagctcagcctttttagcagagcagttggtaaggtatgttcaatacatttaatatgcacacaggtgcacccaaaacacacatacatatca

SEQ ID NO: 23116 - DNA, 110 bp, synthetic construct
  source 1..110: mol_type = other DNA
aagccagatgaggctgtagctgatccctcaggggtacagagctgtttctaggtttacagctgggacaacggtcagcaagtcagctgcctgaatgagaatttctcttctca

SEQ ID NO: 23117 - DNA, 110 bp, synthetic construct
  source 1..110: mol_type = other DNA
acagctgggacaacggtcagcaagtcagctgcctgaatgagaatttctcttctcaaaatgcctctcctccttgcagcctccttgtacagccctgaagtttcacagtctcc

SEQ ID NO: 23118 - DNA, 110 bp, synthetic construct
  source 1..110: mol_type = other DNA
ttttaatagagcttcaagaggcagcaggcacatacaatgcatgccatgtgtgattgataggaaatgtaggtttgcttacctaatgcttgacaatgagaagaaacacccac

SEQ ID NO: 23119 - DNA, 110 bp, synthetic construct
  source 1..110: mol_type = other DNA
gataggaaatgtaggtttgcttacctaatgcttgacaatgagaagaaacacccactctagctttaaaaatttgagcgctgacagtcaaggcaggtagagtctgcctgcag

SEQ ID NO: 23120 - DNA, 110 bp, synthetic construct
  source 1..110: mol_type = other DNA
ccctgcctctgtcgcccaacctgactctccgtcttttggacttctcttcgttttcttctttttctccttctctcagcagcctcccaatctcattttttaaaaaataccca

SEQ ID NO: 23121 - DNA, 110 bp, synthetic construct
  source 1..110: mol_type = other DNA
ttctttttctccttctctcagcagcctcccaatctcattttttaaaaaatacccattatataatcattttcaaatacctgcttttaaaaaaaatcttcgccgcctcctct

SEQ ID NO: 23122 - DNA, 110 bp, synthetic construct
  source 1..110: mol_type = other DNA
acactttctttttgatgccttttaatatatttggatggagctcccttgcaagacttttcattggagcagtttccctgagttttcacctcaaatcccaactgaatgatgac

SEQ ID NO: 23123 - DNA, 110 bp, synthetic construct
  source 1..110: mol_type = other DNA
gagggagaacatttgacctgtgagtgccgaagaaagatcaatgcgtctcgggacccaagagcaactgtggtgaaggtggttgtgttggtagcagcggaggtggtggtggt

SEQ ID NO: 23124 - DNA, 110 bp, synthetic construct
  source 1..110: mol_type = other DNA
tctccatgtgccatgggcctggccaaaaaaaaaaattattttaaaggagcaattgaagagttcgagtaaaataatttgttctttaagagctaaactatgatttcagttga

SEQ ID NO: 23125 - DNA, 110 bp, synthetic construct
  source 1..110: mol_type = other DNA
aagagttcgagtaaaataatttgttctttaagagctaaactatgatttcagttgacaagatagacttgactgagatgcactttagaggaagcaagacaaacctggataag

SEQ ID NO: 23126 - DNA, 110 bp, synthetic construct
  source 1..110: mol_type = other DNA
cttgcttcagtcaggaaagaactgtgtttcaaggcagcgatcttgagagctaagcttcacctgcttaggaaattaaagcatctccttctcccctggcaccaggttaagtg

SEQ ID NO: 23127 - DNA, 110 bp, synthetic construct
  source 1..110: mol_type = other DNA
ctaaaaaatatataaagttactagaggaaaactacagcaacatcctttgcaaacttgtagtgagtcctttttttgtttttgttttttaaagtgccgtacctgcggtttat

SEQ ID NO: 23128 - DNA, 110 bp, synthetic construct
  source 1..110: mol_type = other DNA
tttcactgaaatccaatttatcatttttccttttatgtattatgtttttggtgtcatagctaagaagtctctgcctaatataagatcatgaagacttcctcgtatgtctt

SEQ ID NO: 23129 - DNA, 110 bp, synthetic construct
  source 1..110: mol_type = other DNA
ttaacccactgagcgaggccaagcagaaatcgaacccgcatcctcatgtatactaatcagatttctttctgctgagccactataggaactccatgagaacagctaaataa

SEQ ID NO: 23130 - DNA, 110 bp, synthetic construct; identical to SEQ ID NO: 23129
  source 1..110: mol_type = other DNA

SEQ ID NO: 23131 - DNA, 110 bp, synthetic construct
  source 1..110: mol_type = other DNA
gtatcgatgagaatgtggtttgatcccttgcctcgcttggtgggttaaggattcgacctcacagtgagctgtggtgtaggtcacaggctggctcagatttggctatggca

SEQ ID NO: 23132 - DNA, 110 bp, synthetic construct; identical to SEQ ID NO: 23131
  source 1..110: mol_type = other DNA

SEQ ID NO: 23133 - DNA, 110 bp, synthetic construct
  source 1..110: mol_type = other DNA
gcctaagagggctttaggcagcctgtttgctaatgggtagggctgtgttcccactctgtttgttgtttggcctggggcatctcagccctgatgggtgggccagatttttc

SEQ ID NO: 23134 - DNA, 110 bp, synthetic construct
  source 1..110: mol_type = other DNA
ctgtttgttgtttggcctggggcatctcagccctgatgggtgggccagatttttccaaaatggctttctccaggggccctcttgccaatacttattacctggaacctttg

SEQ ID NO: 23135 - DNA, 110 bp, synthetic construct
  source 1..110: mol_type = other DNA
ttttataaactctctggggaaagctctggtataattaagacataatatcgcttctgtcatcttgaagtgcctagcgtagataactatttccttgaatttgttcatttgtt

SEQ ID NO: 23136 - DNA, 110 bp, synthetic construct
  source 1..110: mol_type = other DNA
ggatctggcattgctgagagctgtgatgtaggttgcaagatcatggtttggttctggcgttactattgctgtggctatggtgtaggccagcagatatagctctgatttga

SEQ ID NO: 23137 - DNA, 110 bp, synthetic construct; identical to SEQ ID NO: 23136
  source 1..110: mol_type = other DNA

SEQ ID NO: 23138 - DNA, 110 bp, synthetic construct
  source 1..110: mol_type = other DNA
catactcagttcatacaacctgaacacctaagcttgtaaatatcccaggagccacattgtctaccttcccaccttctcatggcttctctgagcatcaagaattatcacat

SEQ ID NO: 23139 - DNA, 110 bp, synthetic construct
  source 1..110: mol_type = other DNA
gcagtgctcctccagggcagctgaaactggcaggactatcacacgatggaggcagactccctgtggctgggaaggtcttgccctagcacttctgggactcagagctcttt

SEQ ID NO: 23140 - DNA, 110 bp, synthetic construct
  source 1..110: mol_type = other DNA
actccctgtggctgggaaggtcttgccctagcacttctgggactcagagctctttcagggtgcaggtggtgctgggcagctgctccgcaggagtgcagtgtcttccgagg

SEQ ID NO: 23141 - DNA, 110 bp, synthetic construct
  source 1..110: mol_type = other DNA
caaactttggtctttctaccattattagtaacaaattgcttagaaaagtttttactgcattgaataccagagttgagaattgctactctcactgtataccagaaagccat

SEQ ID NO: 23142 - DNA, 110 bp, synthetic construct
  source 1..110: mol_type = other DNA
tgcattgaataccagagttgagaattgctactctcactgtataccagaaagccatgcctagggtcattcaaaagaagcagtttggagactttaatagttaaactacttta

SEQ ID NO: 23143 - DNA, 110 bp, synthetic construct
  source 1..110: mol_type = other DNA
tcaaagcctttttctgtacatactgagcggatcatatagtttttaattctttagtttgttaataaataacactgattgatttgcagagattgaacaatccttggatccct

SEQ ID NO: 23144 - DNA, 110 bp, synthetic construct; identical to SEQ ID NO: 23143
  source 1..110: mol_type = other DNA

SEQ ID NO: 23145 - DNA, 110 bp, synthetic construct
  source 1..110: mol_type = other DNA
accagaagaaaactccctagaagtcacaattttattcaataaaaaaactttagaaaggaaaagaaacagctacaccagttgctttttacaatgtaaattctaggatagtc

SEQ ID NO: 23146 - DNA, 110 bp, synthetic construct
  source 1..110: mol_type = other DNA
gagcaaataatgacataaaaaactagctatcctatcccactggttatcattgcattaagatgaccacaattcaggagttcccattgtgcctcagtggtaatgaacccgac

SEQ ID NO: 23147 - DNA, 110 bp, synthetic construct; identical to SEQ ID NO: 23146
  source 1..110: mol_type = other DNA

SEQ ID NO: 23148 - DNA, 110 bp, synthetic construct
  source 1..110: mol_type = other DNA
gaagcccaacaaattcctctaattcagttccaaagctgccctccaagcattcagcactcacctcaaccctttcctataagcaattcatggtgtcactactctgagagcca

SEQ ID NO: 23149 - DNA, 110 bp, synthetic construct
  source 1..110: mol_type = other DNA
actcacctcaaccctttcctataagcaattcatggtgtcactactctgagagccagtgcttttattctagaggaaataggaagtctggaaaggcagattaatgtgggtgt

SEQ ID NO: 23150 - DNA, 110 bp, synthetic construct
  source 1..110: mol_type = other DNA
aattcagttggctaatatcctgattactgtcatttaaagtctgttgggtgaattttgttaaggcttcaatatggctgattgctagctccaatcctattgagagtacaaaa

SEQ ID NO: 23151 - DNA, 110 bp, synthetic construct
  source 1..110: mol_type = other DNA
tgttaaggcttcaatatggctgattgctagctccaatcctattgagagtacaaaaatagctgctaaattgtctaaccagcagaatacgggtctcttgactgattaggctc

SEQ ID NO: 23152 - DNA, 110 bp, synthetic construct
  source 1..110: mol_type = other DNA
aggatgaagaacggatatgaaagggcaaatggagaacattcagtctccccccatccccaacgttagaagcctgatgtttgcctagcactccttcttttgagtgactacta

SEQ ID NO: 23153 - DNA, 110 bp, synthetic construct
  source 1..110: mol_type = other DNA
caatgaccatctttctgtgtgtattcttatgcgatatataaatagtccctgaaacattgacataggtatgcatgttctagaaaatgaagactagacaagatgaaggaaac

SEQ ID NO: 23154 - DNA, 110 bp, synthetic construct
  source 1..110: mol_type = other DNA
tgttcctactttggctcatggaagagcttttagcaattgatttccacagaagccgtattttgctcccataccttttgctcaatgcttgcttcctatatttcatattatcc

SEQ ID NO: 23155 - DNA, 110 bp, synthetic construct
  source 1..110: mol_type = other DNA
cacagaacacggctgcttcaggaggctgtcctgaaagggcctctctccacacaatgcatcatccacatgtacagtccagtgggatgtcgagccattgtgcaccacacagg

SEQ ID NO: 23156 - DNA, 110 bp, synthetic construct
  source 1..110: mol_type = other DNA
agaagagctctgcctggccacaagaagtctgcctccatcacggtgtgctcctggcagtcccatctgccctggggaagcactccattgcctcccagcagcccggctagctg

SEQ ID NO: 23157 - DNA, 110 bp, synthetic construct
  source 1..110: mol_type = other DNA
ggccacaagaagtctgcctccatcacggtgtgctcctggcagtcccatctgccctggggaagcactccattgcctcccagcagcccggctagctgctcctgccctcggga

SEQ ID NO: 23158 - DNA, 110 bp, synthetic construct
  source 1..110: mol_type = other DNA
actagagacaactgtcatccttaaagaactctccatctaaagagacttactacggtatatttactcaggcctagcacaaagtgaatcttctttaattgcaacaattgttt

SEQ ID NO: 23159 - DNA, 110 bp, synthetic construct
  source 1..110: mol_type = other DNA
tataggtgatagtaattgaacaggattaaaccacttcccatcttaatcatgggtgttttgagctaattatgaaaagtacaagcttctaaaaggactgacttcttctttcc

SEQ ID NO: 23160 - DNA, 110 bp, synthetic construct
  source 1..110: mol_type = other DNA
ttttgagctaattatgaaaagtacaagcttctaaaaggactgacttcttctttccatgaaggtaagtacaattcaaggtgttcaggactcaccatacctattaactaatg

SEQ ID NO: 23161 - DNA, 110 bp, synthetic construct
  source 1..110: mol_type = other DNA
tattagaaatggcaggtcaagtcaaccaccgagaaaatcttttccagagatgatctcagcagaaattggagcttctggggcgagactctcaattaggcagtgttcaccaa

SEQ ID NO: 23162 - DNA, 110 bp, synthetic construct
  source 1..110: mol_type = other DNA
acagtcccttcctcaaggacccagcacccctccatggcagactagcaataaagtagataaaaatatgggaagcaccaatattggggacctgcatctcgttatgggatata

SEQ ID NO: 23163 - DNA, 110 bp, synthetic construct
  source 1..110: mol_type = other DNA
agacacttgcttaaacacagtatcagcattggaggggactacattaaaggcaccgattaccaacctataagattcattaggagctatcaataaaattctctaccagacac

SEQ ID NO: 23164 - DNA, 110 bp, synthetic construct
  source 1..110: mol_type = other DNA
ctccagaaacactctctgatctcaaaacaacagctcaggggctgaaagtttgactattagcaattctctccctcaggtggggaacttccttcttcagcatactttttaat

SEQ ID NO: 23165 - DNA, 110 bp, synthetic construct
  source 1..110: mol_type = other DNA
attagcaattctctccctcaggtggggaacttccttcttcagcatactttttaatatgcaaccactcttactaaaattgatacatcagtaacatatttctttacggctaa

SEQ ID NO: 23166 - DNA, 110 bp, synthetic construct
  source 1..110: mol_type = other DNA
gctgagagtaaacaagactgcctgcagaagaggctagtgccctcctaatatccccattcatatttgtaaatgaggccaggctcatcgcccctgaggtacaaataaaactt

SEQ ID NO: 23167 - DNA, 110 bp, synthetic construct
  source 1..110: mol_type = other DNA
catagccattaatttaaaaaataccccaaatcctctccctcaaaattaaggaacaaactccctgacttaataaatgccatctaacataaaacaaaaccaaatcacattta

SEQ ID NO: 23168 - DNA, 110 bp, synthetic construct
  source 1..110: mol_type = other DNA
tattactctaaatacaccatgactccccacttgtgtcttaactcacatggtttgcttcacctggattcttcccccttcatataaggacctgtctaaagcatgccctttta

SEQ ID NO: 23169 - DNA, 110 bp, synthetic construct
  source 1..110: mol_type = other DNA
ttcacctggattcttcccccttcatataaggacctgtctaaagcatgcccttttaaggcccatgtaaaagcttttctttttaacaaacacaccctatggggtcttccaca

SEQ ID NO: 23170 - DNA, 110 bp, synthetic construct
  source 1..110: mol_type = other DNA
gtaaaacagccattcttgcatgaaagctgttgccttctggtgatgtggtggaagtcactggtaggtcctctgaagtgtcacttctaagaaagatgttgacattctttttc

SEQ ID NO: 23171 - DNA, 110 bp, synthetic construct
  source 1..110: mol_type = other DNA
gaggactacagcatccagcctgtactcccaggtcccacctctgttcacgtcacccagaccagccgtttgcccaagctctctgccagattaacagatagctgtcctttctc

SEQ ID NO: 23172 - DNA, 110 bp, synthetic construct
  source 1..110: mol_type = other DNA
ttcaaacattccaggctccttcccatctatctctggcaactgctacatgttctgcttggactgtcccatctagcaaatcttcagagggctagatccctgggtgactctgg

SEQ ID NO: 23173 - DNA, 110 bp, synthetic construct
  source 1..110: mol_type = other DNA
ttggactgtcccatctagcaaatcttcagagggctagatccctgggtgactctggtctcagctgaaatatccatcttcttgcagaggttgtctcctgatccctctgtatc

SEQ ID NO: 23174 - DNA, 110 bp, synthetic construct
  source 1..110: mol_type = other DNA
agctaggggtcagataggagctgcagctgcctgtctatgccatagccacagaaattcaagatctgaagcatggctgcgacctatgccatagcttgtggcaacactagatc

SEQ ID NO: 23175 - DNA, 110 bp, synthetic construct
  source 1..110: mol_type = other DNA
ataaattaacgatcaagaacagctctctactgaggccacttctttggtgataggaaatcaccagggtagaggagacaactctgttcaatctcatcagtgggagacagact

SEQ ID NO: 23176 - DNA, 110 bp, synthetic construct
  source 1..110: mol_type = other DNA
ctgaattcagatcatagccttttactataagcctcagggtactagggatagagaatgtgatggcagggaagcttgcacctgatgggaagtagatccttttcctgtttctc

SEQ ID NO: 23177 - DNA, 110 bp, synthetic construct
  source 1..110: mol_type = other DNA
attcaaaagaaggaacttagccagatgtcctctgttaatctagtaaagaaccacgagcaatttcccagggaaatcaatattagaagctatgacacgatagtagattctaa

SEQ ID NO: 23178 - DNA, 110 bp, synthetic construct
  source 1..110: mol_type = other DNA
gacacttcggagagagcctgaggagctggagaaatggttgatattatttaaatataggtaatgccatgtgcatctgaagcaatgattgaaaatttaggctaaatttatat

SEQ ID NO: 23179 - DNA, 110 bp, synthetic construct
  source 1..110: mol_type = other DNA
caagtcaacctctttggaaacctattatgattcccataagaccttccagggctctgtagattcttatgaacatgatccggtgacattagaattaatattattaatgggat

SEQ ID NO: 23180 - DNA, 110 bp, synthetic construct
  source 1..110: mol_type = other DNA
gtagattcttatgaacatgatccggtgacattagaattaatattattaatgggatgtcactggtacctgcaggctgaagaagtctggagcgttcagagttacatatttat

SEQ ID NO: 23181 - DNA, 110 bp, synthetic construct
  source 1..110: mol_type = other DNA
gcaaaaaaaaaaaagtcactgcaaccaagcaccacatgttattgctctcactcccttgtgccctgcagctgccactgccaaacattctgcgcagcacccagttgcttaat

SEQ ID NO: 23182 - DNA, 110 bp, synthetic construct
  source 1..110: mol_type = other DNA
caagcaccacatgttattgctctcactcccttgtgccctgcagctgccactgccaaacattctgcgcagcacccagttgcttaatcactgtcccttcccaaaaccatatg

SEQ ID NO: 23183 - DNA, 110 bp, synthetic construct
  source 1..110: mol_type = other DNA
gcctctctccaggcgccatctgcaaggcccagattcccaagctacttgcacttctgcccagcttgggctcaatcaagctcagggatgttcccattcttccctctgatgtc

SEQ ID NO: 23184 - DNA, 110 bp, synthetic construct
  source 1..110: mol_type = other DNA
gcccagcttgggctcaatcaagctcagggatgttcccattcttccctctgatgtcatgattggtgagaacaactcacatagtataaggtgctgtcctcactattacagtt

SEQ ID NO: 23185 - DNA, 110 bp, synthetic construct
  source 1..110: mol_type = other DNA
cagccttccattaagcacaagcatataaagatattgaccatgccccaaaatgcttgggtcctactagaaggaaagcacagctgattgtaatatagcctgtgaagagcctc

SEQ ID NO: 23186 - DNA, 110 bp, synthetic construct
  source 1..110: mol_type = other DNA
gggtcctactagaaggaaagcacagctgattgtaatatagcctgtgaagagcctcggaagaggtgggcgcccagggccatgggggctccagggataatgagataatcacc

SEQ ID NO: 23187 - DNA, 110 bp, synthetic construct
  source 1..110: mol_type = other DNA
gtcagcatgcctaatgatgaaaatgagcttctgaaatgtgctatgtaccatgtattttgctgggtgctttctttctttctttttttttttttctttctttttgctatttc

SEQ ID NO: 23188 - DNA, 110 bp, synthetic construct
  source 1..110: mol_type = other DNA
gatgaaaatgagcttctgaaatgtgctatgtaccatgtattttgctgggtgctttctttctttctttttttttttttctttctttttgctatttctttgggccactccca

SEQ ID NO: 23189 - DNA, 110 bp, synthetic construct
  source 1..110: mol_type = other DNA
aaaccctcctctctcactgtctatttcccacactggaaatactactacttctatgtccctgttctccaacacagcctggctatacaacagcagctcaatatatgtctaat

SEQ ID NO: 23190 - DNA, 110 bp, synthetic construct
  source 1..110: mol_type = other DNA
tccctgttctccaacacagcctggctatacaacagcagctcaatatatgtctaatgaaagaataagcaaatgagggatttttaattattttttgtcaaaagtaactaatg

SEQ ID NO: 23191 - DNA, 110 bp, synthetic construct
  source 1..110: mol_type = other DNA
ccatgaaagaaactccctcccacacagtcttacaaaccatcatgccactatcttaaaagcaattagaagaaagaggccactgctaccttcccccttagctatacctgggc

SEQ ID NO: 23192 - DNA, 110 bp, synthetic construct
  source 1..110: mol_type = other DNA
aaagcaattagaagaaagaggccactgctaccttcccccttagctatacctgggccaccaaacattgtcctagggaaccctagcataataagtagcaagtctaacagggg

SEQ ID NO: 23193 - DNA, 110 bp, synthetic construct
  source 1..110: mol_type = other DNA
aaaagagcaaagaaatcacaaaaacttctcttcctaatcaagcctctagtcagcccatttccccttgtttatctaaatcctttatttttcagctggttgttctggaaaaa

SEQ ID NO: 23194 - DNA, 110 bp, synthetic construct
  source 1..110: mol_type = other DNA
catttccccttgtttatctaaatcctttatttttcagctggttgttctggaaaaaaaaaaaaaaaaaaaaaaaagacacagcctttgcacccttcctattgcttcactaa

SEQ ID NO: 23195 - DNA, 110 bp, synthetic construct
  source 1..110: mol_type = other DNA
aatattttgaaaaagaacaaaggtaacatggcagctagctgtctgtctcaggatccctactgttcatccatacaccatgaaggaacctacatggccttgagtgagccact

SEQ ID NO: 23196 - DNA, 110 bp, synthetic construct
  source 1..110: mol_type = other DNA
tctctgtttactggtcgatcagaatggatgactgtccctcttcttttctcatctagcattttcctctctgagctctctctgaagccacccaagtcacaatagcatctgtt

SEQ ID NO: 23197 - DNA, 110 bp, synthetic construct
  source 1..110: mol_type = other DNA
ccccccatcattccattttctccatggaaaagcatgggtggagggtgggaaacagatgtatcagcacaggtgggaagaattgtcttattgctaagggagctagcaatagg

SEQ ID NO: 23198 - DNA, 110 bp, synthetic construct
  source 1..110: mol_type = other DNA
atgtatcagcacaggtgggaagaattgtcttattgctaagggagctagcaataggctcctgtctttctatggatctgcggtgaggggagtggggagacccaggaggagaa

SEQ ID NO: 23199 - DNA, 110 bp, synthetic construct
  source 1..110: mol_type = other DNA
aagttttcctcagtgccaagtgaccgggtgcttcctgcatctgatgaccatttagctttgggatttaaccaagattgctcagtgtacaaacatggcctgtaggagtgtgg

SEQ ID NO: 23200 - DNA, 110 bp, synthetic construct
  source 1..110: mol_type = other DNA
tacccctcctcaagagctcgtcacacccagtgttccccggtttcatttgtacactggggctccaactgtcagtccccagccggcacagtggtttcacttccctgggccct

SEQ ID NO: 23201 - DNA, 110 bp, synthetic construct
  source 1..110: mol_type = other DNA
ccatagtgctcaagactgagaacactttttttaaggtgagggccataggatgataataattttcaaaacaaggatacatccagccatgaagttaccattgaacaatgtcc

SEQ ID NO: 23202 - DNA, 110 bp, synthetic construct
  source 1..110: mol_type = other DNA
ataattttcaaaacaaggatacatccagccatgaagttaccattgaacaatgtcccaaggtctccctttagcctcctttacacagtctcaattcaatgcacttttactcc

SEQ ID NO: 23203 - DNA, 110 bp, synthetic construct
  source 1..110: mol_type = other DNA
ctttttaaacgaactttgtaaatatgaatggagctcaagtactacctgcctctactccaacctggcttctgcttagtctagcttcaaagacatcttgaatgaggcagaaa

SEQ ID NO: 23204 - DNA, 110 bp, synthetic construct
  source 1..110: mol_type = other DNA
gccttcaagacaagcagatgaagaaaagaaagaagtgatgtaagaggcacttgggaaagaatcttagccactgatttatgtggaggataagaaatgaaggagtaaaaagt

SEQ ID NO: 23205 - DNA, 110 bp, synthetic construct
  source 1..110: mol_type = other DNA
gttttccacaacaagcaattttccaattccctgcagacaccaattgcgtgtcctgcttttctttctttttttttttttgtcttttgttgtcttttgttgttgttgttgtt

SEQ ID NO: 23206 - DNA, 110 bp, synthetic construct
  source 1..110: mol_type = other DNA
gacaccaattgcgtgtcctgcttttctttctttttttttttttgtcttttgttgtcttttgttgttgttgttgtttgttgttgttgttgttgttgttgctatttcttggg

SEQ ID NO: 23207 - DNA, 110 bp, synthetic construct
  source 1..110: mol_type = other DNA
ttaaccactgtgccacgacgggaactcctaagttaactttaaataaatttttttggagttccctttgtggctcggtgggttatgaatccgactagtatccataaggttgt

SEQ ID NO: 23208 - DNA, 110 bp, synthetic construct; identical to SEQ ID NO: 23207
  source 1..110: mol_type = other DNA

SEQ ID NO: 23209 - DNA, 110 bp, synthetic construct
  source 1..110: mol_type = other DNA
tcagacatatttggggtaactaatagggtaacatgtattttaagagcagctaaaaaaatgcaagctcattctttatgacctaacggcttttttaagaactaaaatgtgca

SEQ ID NO: 23210 - DNA, 110 bp, synthetic construct; identical to SEQ ID NO: 23209
  source 1..110: mol_type = other DNA

SEQ ID NO: 23211 - DNA, 110 bp, synthetic construct; identical to SEQ ID NO: 23209
  source 1..110: mol_type = other DNA

SEQ ID NO: 23212 - DNA, 110 bp, synthetic construct; identical to SEQ ID NO: 23209
  source 1..110: mol_type = other DNA

SEQ ID NO: 23213 - DNA, 110 bp, synthetic construct
  source 1..110: mol_type = other DNA
tggtttcctttaaagcttcccaacctttgtttatggcctctctgcaaaatgtaccatgtttcccatcaagaccctaacctagataccatgtcacactgtttatggaaaat

SEQ ID NO: 23214 - DNA, 110 bp, synthetic construct
  source 1..110: mol_type = other DNA
aggtcctagggcactaggttgttaccagatgccattataagtagtctttgtcctgagagaagagaggaagaaaagacagacaccagtctggtgtggcaggctagaaatgg

SEQ ID NO: 23215 - DNA, 110 bp, synthetic construct
  source 1..110: mol_type = other DNA
agagaagagaggaagaaaagacagacaccagtctggtgtggcaggctagaaatggcctgctgagaagggcggggagggaatcaccatggtatctataggtgtttagatgc

SEQ ID NO: 23216 - DNA, 110 bp, synthetic construct
  source 1..110: mol_type = other DNA
atcctcgctgaggcccatagaaaagcctatgaaatttaccacgaaaaatattcttctcaaggtgagtacacatgaccctggttgctgacccactgccagtcttcatggcc

SEQ ID NO: 23217 - DNA, 110 bp, synthetic construct
  source 1..110: mol_type = other DNA
ctcaaggtgagtacacatgaccctggttgctgacccactgccagtcttcatggcccaccttccccaccctccttaaagcaggactcagcaattcttcccacttaccttca

SEQ ID NO: 23218 - DNA, 110 bp, synthetic construct
  source 1..110: mol_type = other DNA
atcagaaacctcactgcagctccgagtgccttacctgctatttaccattaattagctccctttcctcccccaatttatcagatgttgattttaaaatacacataaacttt

SEQ ID NO: 23219 - DNA, 110 bp, synthetic construct
  source 1..110: mol_type = other DNA
gcagctccgagtgccttacctgctatttaccattaattagctccctttcctcccccaatttatcagatgttgattttaaaatacacataaactttttcaaatatatatat

SEQ ID NO: 23220 - DNA, 110 bp, synthetic construct
  source 1..110: mol_type = other DNA
agaggtaaactatgaaataagttacattctgttctttcctaccaccctacctcattctagaaataaaagacttccaggttcctatcgtggctcagtggttaatgaatctg

SEQ ID NO: 23221 - DNA, 110 bp, synthetic construct; identical to SEQ ID NO: 23220
  source 1..110: mol_type = other DNA

SEQ ID NO: 23222 - DNA, 110 bp, synthetic construct
  source 1..110: mol_type = other DNA
aggtcttagactcgcttttttcccccactgctgatggttagtggagaaccccactctctctgcttcctgaggtagctgtgggtgtggtgacttgcctctgcccaggccac

SEQ ID NO: 23223 - DNA, 110 bp, synthetic construct
  source 1..110: mol_type = other DNA
gaaacactagaaaaatagattgtattgtagtttttctattctatattaaagaatgatttcaggtaatgccccttaggcaacttaaaaattaggaacagaccacagtccta

SEQ ID NO: 23224 - DNA, 110 bp, synthetic construct
  source 1..110: mol_type = other DNA
atcttttaaaatcactgcttatatggctccagttattgacagtaagtcactaagttactacaaaccagttctccaatattccaccttcctaaactagaagtgactcacat

SEQ ID NO: 23225 - DNA, 110 bp, synthetic construct
  source 1..110: mol_type = other DNA
tggtaagtctgactacctgggcctactgtgctaaagggaccacacatggaggtactcccagttccagctgagcctacactctagccattctcaccaaggagccagtatgt

SEQ ID NO: 23226 - DNA, 110 bp, synthetic construct
  source 1..110: mol_type = other DNA
ttagataaagcagtcttttttggattagtatgtaagagatattaaagtcctgtccttgtcaggatattatttttgaatatatactgtatctgtcatccccacactgatag

SEQ ID NO: 23227 - DNA, 110 bp, synthetic construct
  source 1..110: mol_type = other DNA
atattatttcattttatttatgcatacattgttcagcagtttgctgtctttgcctatgatgttttggagattcttgcatattagttgctagaagagctttggcattcttt

SEQ ID NO: 23228 - DNA, 110 bp, synthetic construct
  source 1..110: mol_type = other DNA
atgatgttttggagattcttgcatattagttgctagaagagctttggcattctttttaaatgatgtgtgtattccactgtttagattcactataatttacttatgcagtc

SEQ ID NO: 23229 - DNA, 110 bp, synthetic construct
  source 1..110: mol_type = other DNA
gggttaaagacctggcattgccatgagcagtggtgcaggtcggagatgtgggtaggttctggcatggctgtggctatggctgtggtgtaggccgcagctgcagctcctat

SEQ ID NO: 23230 - DNA, 110 bp, synthetic construct; identical to SEQ ID NO: 23229
  source 1..110: mol_type = other DNA

SEQ ID NO: 23231 - DNA, 110 bp, synthetic construct
  source 1..110: mol_type = other DNA
aatgtttattttatctctgtcctggcactccgatgctgctgcagcaggagtttagagctggggcagaggaggatccccaaggccagaagaatggactgtgtattggtcac

SEQ ID NO: 23232 - DNA, 110 bp, synthetic construct
  source 1..110: mol_type = other DNA
agctggggcagaggaggatccccaaggccagaagaatggactgtgtattggtcactgtgtgactcagcccaggctggcagctctagagaaagggagactgagaggctcaa

SEQ ID NO: 23233 - DNA, 110 bp, synthetic construct
  source 1..110: mol_type = other DNA
gcttttagagacaactgctgtcatcagaggttcatcagagcttttagacagggaagagagaacttcacatagtgaagacttgtgaatttttccccttgtggaatgcaaaa

SEQ ID NO: 23234 - DNA, 110 bp, synthetic construct
  source 1..110: mol_type = other DNA
cagaagacacgcaagaacctgactcaaggacatgctgaaagcactctgtccagaaatgaagaaggaacacagtctccctctaagccagaagtgcttagaggagaaggagc

SEQ ID NO: 23235 - DNA, 110 bp, synthetic construct
  source 1..110: mol_type = other DNA
tagatggttaacctactgtgtcacagcgagaactccctagaactgtgtcttaattcatgctttagctttcatcaaatggaaaattttcagggcatatatgaaacattgct

SEQ ID NO: 23236 - DNA, 110 bp, synthetic construct
  source 1..110: mol_type = other DNA
tccagcatctcagaagaaagtgctgtgaaggtcaggagggaatcagggcctcccatacttcacatatccatatatatatacatatataggtacacatacattcacatttt

SEQ ID NO: 23237 - DNA, 110 bp, synthetic construct
  source 1..110: mol_type = other DNA
gagggaatcagggcctcccatacttcacatatccatatatatatacatatataggtacacatacattcacattttttaatgaaaataatgtaacagggtttacacagttc

SEQ ID NO: 23238 - DNA, 110 bp, synthetic construct; identical to SEQ ID NO: 23236
  source 1..110: mol_type = other DNA

SEQ ID NO: 23239 - DNA, 110 bp, synthetic construct; identical to SEQ ID NO: 23237
  source 1..110: mol_type = other DNA

SEQ ID NO: 23240 - DNA, 110 bp, synthetic construct
  source 1..110: mol_type = other DNA
aggaggggaaaccaatgtctctctcctgctcttttcttcaaaaaaaaaaaaagccaacctacaaaatatatgtgtgtttatcattcctatgtttatattttccattgttc

SEQ ID NO: 23241 - DNA, 110 bp, synthetic construct
  source 1..110: mol_type = other DNA
ttaaacagcaactttgaagagtgtacaacacttgttttccttcctgaatgaaactgtccagctttcaagtctccaagctaaatgcacagtggatggttgcctgggtgaca

SEQ ID NO: 23242 - DNA, 110 bp, synthetic construct
  source 1..110: mol_type = other DNA
gtccagctttcaagtctccaagctaaatgcacagtggatggttgcctgggtgacagcccgtaaactaagcagtctctttgcaactaaactgaagggcttgtgcacacaga

SEQ ID NO: 23243 - DNA, 110 bp, synthetic construct
  source 1..110: mol_type = other DNA
tccttcttgtggcatccaaacacgccttagagttattcatatttaggcttctaaaagatcttagaaaattctgagctgtttctcttatagtcataatttccatgataaca

SEQ ID NO: 23244 - DNA, 110 bp, synthetic construct
  source 1..110: mol_type = other DNA
aaacatctatctaaggatgtggggagcttgtaaaaatctagtatcccctctgaatcaatacaccatttaaagactgtgtccaggaagttcccttgtggcacatcagttta

SEQ ID NO: 23245 - DNA, 110 bp, synthetic construct
  source 1..110: mol_type = other DNA
tcattttcaaagtttatccatgttgtagcctgaaccattatttcattccttttggggccaaataataacctattgtatagacataccatgttttgtttattcattcacca

SEQ ID NO: 23246 - DNA, 110 bp, synthetic construct
  source 1..110: mol_type = other DNA
gttacttcaaatgatgaaatcctagactttaaactgatgcatgagactttgaggtgggtgtaagaggggtaaagatattttgcatttagggagaatataaataatttttt

SEQ ID NO: 23247 - DNA, 110 bp, synthetic construct
  source 1..110: mol_type = other DNA
gggtgtaagaggggtaaagatattttgcatttagggagaatataaataattttttgccagagtgtggaatgtagagtttaaaaatatgccttcaaattcactgatactcc

SEQ ID NO: 23248 - DNA, 110 bp, synthetic construct
  source 1..110: mol_type = other DNA
cacaagagaaagagatgcttttaagctccagcctgcacacagagagcctaagccatctaactacagggtcagtcaggtaacgacttgcctgtaattggaacatttaatcc

SEQ ID NO: 23249 - DNA, 110 bp, synthetic construct
  source 1..110: mol_type = other DNA
tctaactacagggtcagtcaggtaacgacttgcctgtaattggaacatttaatccctctctctgctttgactctgccaggcaaagatatcaaactcaaggagaagcagaa

SEQ ID NO: 23250 - DNA, 110 bp, synthetic construct
  source 1..110: mol_type = other DNA
gagactaagccagcgtccaaggagtggcagcacccaagaggtggcaagagagaaaaccatggtcctgacattacagttgcagccctggatctgtcacgcctgacgcagcc

SEQ ID NO: 23251 - DNA, 110 bp, synthetic construct
  source 1..110: mol_type = other DNA
accatggtcctgacattacagttgcagccctggatctgtcacgcctgacgcagcctgttctttccaagccagggtactccttttagcaatttctgtctgttgcacctgaa

SEQ ID NO: 23252 - DNA, 110 bp, synthetic construct
  source 1..110: mol_type = other DNA
ccaggaaaaaataagagggaagtcagagctcttaatagacaagctaaggccatcctgggttaagagtgaggcttaggaggggcttcagaaactgagatctccaaataaag

SEQ ID NO: 23253 - DNA, 110 bp, synthetic construct
  source 1..110: mol_type = other DNA
gggaagtagaatttttttgggggggggtaagtgcctgtggcatgtggaaatccccaggccaaggatcgaacctgtaccacagttgcaacttgtgccacagctgcagcaat

SEQ ID NO: 23254 - DNA, 110 bp, synthetic construct; identical to SEQ ID NO: 23253
  source 1..110: mol_type = other DNA

SEQ ID NO: 23255 - DNA, 110 bp, synthetic construct
  source 1..110: mol_type = other DNA
atctgtcccatttaactcactcgtaggtgccagggaaagctgaactgcagatgttttccccagctctctgttccagccctagagcaagtctctggtcccctgttttccct

SEQ ID NO: 23256 - DNA, 110 bp, synthetic construct
  source 1..110: mol_type = other DNA
ttccccagctctctgttccagccctagagcaagtctctggtcccctgttttcccttgagtggaggcagcccttttcagaaggggcagcttggagggtatggtacagcact

SEQ ID NO: 23257 - DNA, 110 bp, synthetic construct
  source 1..110: mol_type = other DNA
gatcatttcttttaccaccccatgcactgaggaggcagccacagtccacagaggtggagtcacttgccctaagtcacagctagtgaaggatggaactcgactttgaactc

SEQ ID NO: 23258 - DNA, 110 bp, synthetic construct
  source 1..110: mol_type = other DNA
tttaaatgtgcagggtatggagaacataaattcttctaccagtcagttgtgccagtggaccttgtctatagcctccacaatttacattgaacttgggaattcccgctgtg

SEQ ID NO: 23259 - DNA, 110 bp, synthetic construct
  source 1..110: mol_type = other DNA
gttgtgccagtggaccttgtctatagcctccacaatttacattgaacttgggaattcccgctgtggtgcattgggttaaggatctggcattttctctgcagcagctcagg

SEQ ID NO: 23260 - DNA, 110 bp, synthetic construct
  source 1..110: mol_type = other DNA
tttcagccaatccttttatctttccccctcctactccccaagaacaaagatgcgtcacatcacacttgtgaagctacttgccccacttggggttcggttggctgagattc

SEQ ID NO: 23261 - DNA, 110 bp, synthetic construct
  source 1..110: mol_type = other DNA
ttaactgtgcaaatgggaattaaagctttgatagcaaatgggatccccagaaggaagccgtccgtcagatagagcatcctatctcagggatgagccgaaaacatacaatc

SEQ ID NO: 23262 - DNA, 110 bp, synthetic construct
  source 1..110: mol_type = other DNA
actgcaccaggctgggcatcaaactggtgcctccacagagacaagccaggtcattgacccattgtgctacagcggggactcccttttttcttttttctttttttgtcttt

SEQ ID NO: 23263 - DNA, 110 bp, synthetic construct
  source 1..110: mol_type = other DNA
ggtgcctccacagagacaagccaggtcattgacccattgtgctacagcggggactcccttttttcttttttctttttttgtcttttctagggccgaacccatggcatatg

SEQ ID NO: 23264 - DNA, 110 bp, synthetic construct
  source 1..110: mol_type = other DNA
cccttgcaattgggttggaccttgccagcttgcagcataattgtctgatgtcagaagggctctttcttctccgttatccaaggtcaaatctagcacctgcattaaaggca

SEQ ID NO: 23265 - DNA, 110 bp, synthetic construct
  source 1..110: mol_type = other DNA
agaaaatgtgcagtatctgcagtatccgcagaagaaccattgcaggatgtgaatgacttggtgggagaagttctgggaaagacgaaaagatagttgagctgatactatgg

SEQ ID NO: 23266 - DNA, 110 bp, synthetic construct
  source 1..110: mol_type = other DNA
acttggtgggagaagttctgggaaagacgaaaagatagttgagctgatactatggtctttgttcgtcatcctaggtcttctgactgctttgaaagtcttttttggagttc

SEQ ID NO: 23267 - DNA, 110 bp, synthetic construct
  source 1..110: mol_type = other DNA
tctctgctgagatagtgtcctttggagccagactgcctgtgtgaattagctgcggcactgcaacaaattacttcacctctttggttccagttttctcatctgtaaaataa

SEQ ID NO: 23268 - DNA, 110 bp, synthetic construct
  source 1..110: mol_type = other DNA
ttgctatgtatttaaacagatgaggtgacgtgatggggctttgtaaagtgcctgctggccatcgagttggagaacagacccgagagacctcagggagacctcagggggtg

SEQ ID NO: 23269 - DNA, 110 bp, synthetic construct
  source 1..110: mol_type = other DNA
acccctcagaatactgtgcctggaggacgtgccagcatcagatcctaccccattgcaagccgcacccacactcacaggtaagtgtccaggaccctgcacattcatccttg

SEQ ID NO: 23270 - DNA, 110 bp, synthetic construct
  source 1..110: mol_type = other DNA
gattcaacccctagcctgggacttccatatactgcaggtgcactttgaaaagagaaaaaagaaaaaaagacttgctgaagttaaattttgcttctggtgtggggtttgtc

SEQ ID NO: 23271 - DNA, 110 bp, synthetic construct
  source 1..110: mol_type = other DNA
acagcaagagacagaaatggtggcttctctctaggcctcccttgtgcaaggtcgcaagctcaaatacctctgggggttgagcaggtcatggaggctagaaatggccccgg

SEQ ID NO: 23272 - DNA, 110 bp, synthetic construct
  source 1..110: mol_type = other DNA
ggaggaaggcaactgttaaagggatgagtggtgatgaaagggcttggaaggccttaggtttagcaagctctgaaaggagcacagtggttcagcagtcaagagcacaggat

SEQ ID NO: 23273 - DNA, 110 bp, synthetic construct
  source 1..110: mol_type = other DNA
aggtttagcaagctctgaaaggagcacagtggttcagcagtcaagagcacaggatttgaggtcagacagacagagggctcaaatcctcactcttctacatactctccatg

SEQ ID NO: 23274 - DNA, 110 bp, synthetic construct
  source 1..110: mol_type = other DNA
acagcccagtctgttcccctctcctctccatttactgccaccagaatctgacttttctctcagctctatccttccttcaccgtccgtagaggtagggtggcagtgtctat

SEQ ID NO: 23275 - DNA, 110 bp, synthetic construct
  source 1..110: mol_type = other DNA
aagcatttcccttttgagcaacatagcagtcaactttctaggggcttccaggaattcctaaaatattcacaaaactgccaagacaggcaagcggcagacacggcaattca

SEQ ID NO: 23276 - DNA, 110 bp, synthetic construct
  source 1..110: mol_type = other DNA
tcctaaaatattcacaaaactgccaagacaggcaagcggcagacacggcaattcagaaccaagtgtgtggctaccactgtcatgataaaagtttcaagacagcgggtgac

SEQ ID NO: 23277 - DNA, 110 bp, synthetic construct
  source 1..110: mol_type = other DNA
tcagcttctgcactcaaggcctgtaagtctctgatccacagcctgtcccacccattggcatgtggcaccctagacaaggctgctgcaggttctacataaataaaatggga

SEQ ID NO: 23278 - DNA, 110 bp, synthetic construct
  source 1..110: mol_type = other DNA
tggcatgtggcaccctagacaaggctgctgcaggttctacataaataaaatgggaaaaattgtagaaccacagaacactgttaggctagatgagtaggggatgactgatc

SEQ ID NO: 23279 - DNA, 110 bp, synthetic construct
  source 1..110: mol_type = other DNA
ttccaactgccactctctctcggcttcctgaagcaaggctcatgtggttgtatagaccatttgaacaacaaaataccaactaatatcaaggagaggcataaagcctcaca

SEQ ID NO: 23280 - DNA, 110 bp, synthetic construct
  source 1..110: mol_type = other DNA
gcgcctctaatgggtgtgctgtgggtgccaattcctgtaaggcatcttgagcttagatccaaaggaagagttaagtggctgatcagtcatccatcaaaacagctaaaata

SEQ ID NO: 23281 - DNA, 110 bp, synthetic construct
  source 1..110: mol_type = other DNA
ttagaatggatgtctttatctaccacgaaaaatcacaaatggccatataccccacacagcaccctcaacaaacaggacctgactcacttagagggaaaggcttcctactc

SEQ ID NO: 23282 - DNA, 110 bp, synthetic construct
  source 1..110: mol_type = other DNA
acagcaccctcaacaaacaggacctgactcacttagagggaaaggcttcctactctcatctaaacaagcagaatttcctttaccatgattgccttgtagttcctcagggt

SEQ ID NO: 23283 - DNA, 110 bp, synthetic construct
  source 1..110: mol_type = other DNA
agatgtgggtcaataagcttggaggagcatttctaggagtgtgttaacctggtatgagtggctgagaagagctgataaggctaattcatcattagagtggccttgagccc

SEQ ID NO: 23284 - DNA, 110 bp, synthetic construct
  source 1..110: mol_type = other DNA
gagtggctgagaagagctgataaggctaattcatcattagagtggccttgagcccacctcctaatccaaccagacgacatccatcccaaagtgtaggtttccttaaacct

SEQ ID NO: 23285 - DNA, 110 bp, synthetic construct
  source 1..110: mol_type = other DNA
ggtggccctcgtctgcagccaacaggcccttgcacagcaatctgagaaaccgtatgctgcagaatcatttgccagctcacctaggttgggaactagaagcaaacccagtt

SEQ ID NO: 23286 - DNA, 110 bp, synthetic construct
  source 1..110: mol_type = other DNA
gctgcagaatcatttgccagctcacctaggttgggaactagaagcaaacccagttagcgtttttcatgaaggttggaacaatctctgtgtcagacaagaatcttaaaagc

SEQ ID NO: 23287 - DNA, 110 bp, synthetic construct
  source 1..110: mol_type = other DNA
acgttcccacaccatgacagccaatcatgtctccagacactgctggatgctgcaaaattcagaagctttggtacagagcacttagagctgtgtctggcacatgttgaata

SEQ ID NO: 23288 - DNA, 110 bp, synthetic construct
  source 1..110: mol_type = other DNA
gaaataaaccccacctagaatctcactagctggacccctctccaaatggtctttctatctgtctctttcatcaaaccatccccctgcctccaagccttcaagggtctcca

SEQ ID NO: 23289 - DNA, 110 bp, synthetic construct
  source 1..110: mol_type = other DNA
tatctgtctctttcatcaaaccatccccctgcctccaagccttcaagggtctccactttccacagaataatgtattatctttctcagcctggccctggggctctttgtaa

SEQ ID NO: 23290 - DNA, 110 bp, synthetic construct
  source 1..110: mol_type = other DNA
ttaatctgtaatttggtaatgggtcaagatgggatctgagtataaaaggctgcattccagatgatgtgatctggggcatctctctggttaggagaggcagtaataagacc

SEQ ID NO: 23291 - DNA, 110 bp, synthetic construct
  source 1..110: mol_type = other DNA
tccagatgatgtgatctggggcatctctctggttaggagaggcagtaataagacctaaaaacaacgtttgacctttcctgctaagtccttaaattccaagtgctatcctg

SEQ ID NO: 23292 - DNA, 110 bp, synthetic construct
  source 1..110: mol_type = other DNA
aaatatttaattaaatatttgagggaaccctctcatcccaatcaggggctctgactgattttatgtttaaaattctttgttcttcctcatgcacatgtctaactaaatgg

SEQ ID NO: 23293 - DNA, 110 bp, synthetic construct
  source 1..110: mol_type = other DNA
tggatctggcattgctgtcactgcagtatagactggcagctgcagcttcaattcgatccctagcctgtgaacttccatatgccttaggtgtagccctaaaaagacaaaaa

SEQ ID NO: 23294 - DNA, 110 bp, synthetic construct; identical to SEQ ID NO: 23293
  source 1..110: mol_type = other DNA

SEQ ID NO: 23295 - DNA, 110 bp, synthetic construct
  source 1..110: mol_type = other DNA
tcgaattaaaattttgggtgggggacagatatctgttgaacaatgtaaaaaccgccagtggtagcataagatacacagagtaaaagtaaagttcatggtcctgaccctca

SEQ ID NO: 23296 - DNA, 110 bp, synthetic construct
  source 1..110: mol_type = other DNA
cagatagttagatatttttaaaagattttatgcgctgaattcttgcatcttctcatatctaaagaagcaatgaaatcattagcggatacatctgctcctcatgattagca

SEQ ID NO: 23297 - DNA, 110 bp, synthetic construct
  source 1..110: mol_type = other DNA
tgaattcttgcatcttctcatatctaaagaagcaatgaaatcattagcggatacatctgctcctcatgattagcagtaaccttcacaagactagcagtgaccttctgcaa

SEQ ID NO: 23298 - DNA, 110 bp, synthetic construct
  source 1..110: mol_type = other DNA
gattcctgaagatgtcttcagcaattgttcctgcctgtgggccatgaactctatgagtaggagggagattcagaattactgcaaagggtgtgttcccacaaaccccaagc

SEQ ID NO: 23299 - DNA, 110 bp, synthetic construct
  source 1..110: mol_type = other DNA
agtaggagggagattcagaattactgcaaagggtgtgttcccacaaaccccaagcagctgtatgtgtactatttttcaaagcacatagaagtatatatatatatatttgt

SEQ ID NO: 23300 - DNA, 110 bp, synthetic construct; identical to SEQ ID NO: 23298
  source 1..110: mol_type = other DNA

SEQ ID NO: 23301 - DNA, 110 bp, synthetic construct; identical to SEQ ID NO: 23299
  source 1..110: mol_type = other DNA

SEQ ID NO: 23302 - DNA, 110 bp, synthetic construct
  source 1..110: mol_type = other DNA
tggttacattcttttccacttaaatcatattagaaggatggacaagaagaagagaaagggggagaagatgggaagaaacaggctgttggttgagtttttgaaaaactgat

SEQ ID NO: 23303 - DNA, 110 bp, synthetic construct
  source 1..110: mol_type = other DNA
aagggggagaagatgggaagaaacaggctgttggttgagtttttgaaaaactgattgcaaatgcctgttaatttggaactatttatttccaaaacgtgtggtgtgtgtgt

SEQ ID NO: 23304 - DNA, 110 bp, synthetic construct
  source 1..110: mol_type = other DNA
gcctttttagttgccagaatcctccccaggctgcatgtatagcaatttgacacatgtagctgtgatagcatttagctgatgagaaggccggggagtgaattatctttttt

SEQ ID NO: 23305 - DNA, 110 bp, synthetic construct
  source 1..110: mol_type = other DNA
agatatttgaagagatactaagcaccagtctagctcagtgggtcacgtttgctcattttgaacgttctggtttgtgttacctaaggttgtttgtggtctctgaggacaca

SEQ ID NO: 23306 - DNA, 110 bp, synthetic construct
  source 1..110: mol_type = other DNA
ttttgaacgttctggtttgtgttacctaaggttgtttgtggtctctgaggacacagggataaaatcccctgtggttacctctctattatttaccacagacaaagacgcgt

SEQ ID NO: 23307 - DNA, 110 bp, synthetic construct
  source 1..110: mol_type = other DNA
tctgtcacagaagtggtccttaagtgagaaacagcataaggtaatgatttcagagagtggtaggtgagctaataggaaaggtatcaaatcatatggagttttagttttag

SEQ ID NO: 23308 - DNA, 110 bp, synthetic construct
  source 1..110: mol_type = other DNA
cctttgtttgtttgtttgcttgtttgagtatgctcacagaatgtggaagttccctgggccctggtcaaacccgcaccactgcagggacctgagctactgcagtggcaaca

SEQ ID NO: 23309 - DNA, 110 bp, synthetic construct
  source 1..110: mol_type = other DNA
gggccctggtcaaacccgcaccactgcagggacctgagctactgcagtggcaacaccagattcttaattcactatgccactgagaactccaacagtctttacaatttgtg

SEQ ID NO: 23310 - DNA, 110 bp, synthetic construct
  source 1..110: mol_type = other DNA
aggtgtgctttcattataactcagtagcaagctctgacttcttcagtagatcttgttatcctccaaaaagaacttcagtgtttcctgtgcccagattggctgaggatgtt

SEQ ID NO: 23311 - DNA, 110 bp, synthetic construct
  source 1..110: mol_type = other DNA
acctgtgagagtgctttttaatcagagaagtggtaatcattttatactacaagccatttggggcactttggagaataagctcaaacttcttcacatgtaacatgctgcgg

SEQ ID NO: 23312 - DNA, 110 bp, synthetic construct
  source 1..110: mol_type = other DNA
aaccaaagaagaaagtatggatatagccttataaaaactttctcatgatatttccaggacctgatacttcccgaaaagttagaatgtggaaatatcctttaggctcctgt

SEQ ID NO: 23313 - DNA, 110 bp, synthetic construct
  source 1..110: mol_type = other DNA
aaggtatcaaaagatatctagtatggagctggtgagatggaagagggaaatccaggtaaccggaggttggaagatgaaatagtaaatgaggggcaggatgtctgtgatgg

SEQ ID NO: 23314 - DNA, 110 bp, synthetic construct
  source 1..110: mol_type = other DNA
gaccttgcctcaagttcatgaggctatgtttgccttagagcatgatctttcatttaccgaggatgtttttgtgcctaagaaacgcaaagaccataaagtcccagctctct

SEQ ID NO: 23315 - DNA, 110 bp, synthetic construct
  source 1..110: mol_type = other DNA
accgaggatgtttttgtgcctaagaaacgcaaagaccataaagtcccagctctctgggtcttatagccctactgggctataagaaacaggtaagcaatcaggatacaacc

SEQ ID NO: 23316 - DNA, 110 bp, synthetic construct
  source 1..110: mol_type = other DNA
agttcctattgtggctcagtgagttaagaacctgactaggatccatgaagatgtaggttcaaaccctggcctcaccctggtataggtttcagaagtagctcggatctggc

SEQ ID NO: 23317 - DNA, 110 bp, synthetic construct
  source 1..110: mol_type = other DNA
ggttcaaaccctggcctcaccctggtataggtttcagaagtagctcggatctggcacggctgtggtgtagaccagcagctgtggctcctgtttgacctgtagcctgggaa

SEQ ID NO: 23318 - DNA, 110 bp, synthetic construct; identical to SEQ ID NO: 23316
  source 1..110: mol_type = other DNA

SEQ ID NO: 23319 - DNA, 110 bp, synthetic construct
  source 1..110: mol_type = other DNA
tgaagatgtaggttcaaaccctggcctcaccctggtataggtttcagaagtagctcggatctggcacggctgtggtgtagaccagcagctgtggctcctgtttgacctgt

SEQ ID NO: 23320 - DNA, 110 bp, synthetic construct
  source 1..110: mol_type = other DNA
gattgttgttccgattacctttttggtccataggcagtgcatttaatgaatggcattcccggagagtatatctctgcgtgctactggcaaacacttggaaccgttctttg

SEQ ID NO: 23321 - DNA, 110 bp, synthetic construct
  source 1..110: mol_type = other DNA
ttcccggagagtatatctctgcgtgctactggcaaacacttggaaccgttctttgagatcctttgtttaatttgtgaaaaataattcagtgaagatggttcttgtttata

SEQ ID NO: 23322 - DNA, 110 bp, synthetic construct
  source 1..110: mol_type = other DNA
tccagaatgggaagaaaccatttgtctcccactggagagtgagtgaagctagcgtctgggaagatgtctaataagttgtgccacaagtaattgcccactaagcaggcatt

SEQ ID NO: 23323 - DNA, 110 bp, synthetic construct
  source 1..110: mol_type = other DNA
cccggacaaggacaaagccacaggtgccagagtgctgcgtaatgtgtttgaaaacctgagctgacatttaggctccagcttcacaactactgtgtggaacctggaattat

SEQ ID NO: 23324 - DNA, 110 bp, synthetic construct
  source 1..110: mol_type = other DNA
ctgagctgacatttaggctccagcttcacaactactgtgtggaacctggaattatagatgtgttgaggcacagattcccctaggccctcagcgcctcaaggagcttcttc

SEQ ID NO: 23325 - DNA, 110 bp, synthetic construct
  source 1..110: mol_type = other DNA
ttcacttctggcacttgtggtcatcagatgcctgtgagggtttccccatgccacgcaattctctgtgacactagctgggtgtgggtgttctataattcaactcaattcta

SEQ ID NO: 23326 - DNA, 110 bp, synthetic construct
  source 1..110: mol_type = other DNA
gatgttgttgtctgtgactttagataaccatagtgagaaaaatgtgccattgtgattgaatggatctctggaggtgaagaatgaacttgggtcttttgtagatccggtag

SEQ ID NO: 23327 - DNA, 110 bp, synthetic construct
  source 1..110: mol_type = other DNA
ttgaatggatctctggaggtgaagaatgaacttgggtcttttgtagatccggtagaaatattcttaatatgctgtgctggaaaaacttccgttcccattaatccagggct

SEQ ID NO: 23328 - DNA, 110 bp, synthetic construct
  source 1..110: mol_type = other DNA
gtcagttttcagtttttccaaacagaaatatttctggcagaactgaacaaccccttggactcaagaggcatccccaataaggattcaaaagatattttcttctctttatc

SEQ ID NO: 23329 - DNA, 110 bp, synthetic construct
  source 1..110: mol_type = other DNA
tggctactgtgtacgttaacattcccatcattgaattttcacaagaaccacttgaaggtctccattttacaaaagaggaaactgaggcaccaagaggttaaacagctttc

SEQ ID NO: 23330 - DNA, 110 bp, synthetic construct
  source 1..110: mol_type = other DNA
aggtctccattttacaaaagaggaaactgaggcaccaagaggttaaacagctttcccacagtcacacatcaccagcgttgggtccctcaagcgatgtggcacacttttgg

SEQ ID NO: 23331 - DNA, 110 bp, synthetic construct
  source 1..110: mol_type = other DNA
taaaaagtcatttaaaccaactctgatcctctggatagaagtaacatgttcccctattaaattgaattttttattgtatgtgtgggaaacatcattgaatttactctgtc

SEQ ID NO: 23332 - DNA, 110 bp, synthetic construct
  source 1..110: mol_type = other DNA
atcctctggatagaagtaacatgttcccctattaaattgaattttttattgtatgtgtgggaaacatcattgaatttactctgtccattttgatcaatgccttataactc

SEQ ID NO: 23333 - DNA, 110 bp, synthetic construct
  source 1..110: mol_type = other DNA
ctttgctctctctctcccatcattcttttttgccctcccctctctctttctccagtaatgtttcagtttattactattccctcagctatagaagagactcataagaagca

SEQ ID NO: 23334 - DNA, 110 bp, synthetic construct
  source 1..110: mol_type = other DNA
taatgtttcagtttattactattccctcagctatagaagagactcataagaagcaggtacaaaagaaacattcggacattttccgtagcatcctttgaaagggggccatt

SEQ ID NO: 23335 - DNA, 110 bp, synthetic construct
  source 1..110: mol_type = other DNA
gcgcaagagcttggcatggcaataaaaagaaaactcatttattttagtggagattcaaatgaatgtaaggtccttgcccaataggccagacttcaggtgctggagataaa

SEQ ID NO: 23336 - DNA, 110 bp, synthetic construct
  source 1..110: mol_type = other DNA
caaatgaatgtaaggtccttgcccaataggccagacttcaggtgctggagataaaagacagcactcaggatggctgaattccacccttctgtgttcacatgtgtggaaag

SEQ ID NO: 23337 - DNA, 110 bp, synthetic construct
  source 1..110: mol_type = other DNA
gagcactcccagaacagcattaccttccctccccaagctggggtttagtcatcgtcagctggaattgcatttggagaccagcgataagtactcaggtactaacagcaccc

SEQ ID NO: 23338 - DNA, 110 bp, synthetic construct
  source 1..110: mol_type = other DNA
cagctggaattgcatttggagaccagcgataagtactcaggtactaacagcacccataaagtgtcaataaattgcataagtaagagcctttgccattctggaagtgacac

SEQ ID NO: 23339 - DNA, 110 bp, synthetic construct
  source 1..110: mol_type = other DNA
tcttggttttagcaccgaaagtccagcatcctaggaaacccctcagacctggacgagctgggactgttggtcaccctacctcgagcttggtcttaaggggctacactgtt

SEQ ID NO: 23340 - DNA, 110 bp, synthetic construct
  source 1..110: mol_type = other DNA
agctgggactgttggtcaccctacctcgagcttggtcttaaggggctacactgttgacctggtgaaacactagggccagagcagggtgagaatctaagtcaaaaacacct

SEQ ID NO: 23341 - DNA, 110 bp, synthetic construct
  source 1..110: mol_type = other DNA
ggtcgttaatgactgtcctatttctattataactctagagaaccatgcagagtatatgtaccagtgattctggctggccttctttctttatactgtgtgaagggaatata

SEQ ID NO: 23342 - DNA, 110 bp, synthetic construct
  source 1..110: mol_type = other DNA
atgtaccagtgattctggctggccttctttctttatactgtgtgaagggaatatattcatgttcaatccaatgtctgtttcatgccactcactggaaatttattacacca

SEQ ID NO: 23343 - DNA, 110 bp, synthetic construct
  source 1..110: mol_type = other DNA
ttaaaacccactaacaatatcagcagtatataataaacttccaaaagcatggtgcagacaccacttccccttcccatgcctgcttgtccctctcacaactccttctcagt

SEQ ID NO: 23344 - DNA, 110 bp, synthetic construct
  source 1..110: mol_type = other DNA
ggcctctctttccttgtgtagtaagtaaatggtgtaaccagtggcaccaggtagctagtagagttcttctgtccatccttacagcaaggacaagcactgcatagatgtta

SEQ ID NO: 23345 - DNA, 110 bp, synthetic construct
  source 1..110: mol_type = other DNA
tagtagagttcttctgtccatccttacagcaaggacaagcactgcatagatgttaaataagcagcagctgtccctctaaatgaggccggtgcacttgggttcatcactat

SEQ ID NO: 23346 - DNA, 110 bp, synthetic construct
  source 1..110: mol_type = other DNA
tcaacatgcaccatcctttttgaacacttctttatttttggtactgcaagataaggtactctagactcatcttgaactttccatctcctggccctgtctatcacttctct

SEQ ID NO: 23347 - DNA, 110 bp, synthetic construct
  source 1..110: mol_type = other DNA
gtactctagactcatcttgaactttccatctcctggccctgtctatcacttctctgtgatagctatgccttttaaattgtaaataaataaataaataaataaccttcagg

SEQ ID NO: 23348 - DNA, 110 bp, synthetic construct
  source 1..110: mol_type = other DNA
ctccccaaggacgatccccagctgggaatcctccttgctcccccaccagggaactgaggggccagagagctcatgcgcagttaggtggagaagcagccccctccatgcat

SEQ ID NO: 23349 - DNA, 110 bp, synthetic construct
  source 1..110: mol_type = other DNA
gaggggccagagagctcatgcgcagttaggtggagaagcagccccctccatgcatattctatctccagcctgacctctgtgatgggactgctctaacgtaggtaccaccc

SEQ ID NO: 23350 - DNA, 110 bp, synthetic construct
  source 1..110: mol_type = other DNA
aagatcctgcgttactgcaactgtggcttaggtcacaacctcagctcagctctgatccttggcccaggaatttccatatgctataggatggccagaaaggaaaaagaaaa

SEQ ID NO: 23351 - DNA, 110 bp, synthetic construct
  source 1..110: mol_type = other DNA
tccttggcccaggaatttccatatgctataggatggccagaaaggaaaaagaaaagaaaaagaagtgttctgaataaacagtcttcttttgccatcaatcttcccacctg

SEQ ID NO: 23352 - DNA, 110 bp, synthetic construct
  source 1..110: mol_type = other DNA
aaacttccagctgcattcgccacactaaacatccagcaatgaacacgcccttctccagggggcctgcccagcaaggtcactgagtcttggaggctcctcagctgtgggtg

SEQ ID NO: 23353 - DNA, 110 bp, synthetic construct
  source 1..110: mol_type = other DNA
cagggggcctgcccagcaaggtcactgagtcttggaggctcctcagctgtgggtgggtggctttattagagctgggggtgcttcatactcacagaagtgctgggcatgtg

SEQ ID NO: 23354 - DNA, 110 bp, synthetic construct
  source 1..110: mol_type = other DNA
ataataagaggaagaactctgtttacagaaacacaggtttacatggcagtcagtgaggggcttccaagaggtggggacatagagttgaccatttacatcgcagcgcatgg

SEQ ID NO: 23355 - DNA, 110 bp, synthetic construct
  source 1..110: mol_type = other DNA
aggggcttccaagaggtggggacatagagttgaccatttacatcgcagcgcatggctgacagaacagttacagatgacctctaacaggacagggactctaaatcccgcca

SEQ ID NO: 23356 - DNA, 110 bp, synthetic construct
  source 1..110: mol_type = other DNA
ggtcaggttacttgcccaaagtcacacagctgttaaagaacagtagagattccaacacaattccttagctggagtccccagcctctgctctgcctgaggtagttccacaa

SEQ ID NO: 23357 - DNA, 110 bp, synthetic construct
  source 1..110: mol_type = other DNA
cacaattccttagctggagtccccagcctctgctctgcctgaggtagttccacaaagatgaaccataaccaccaaggacagccagagcaatccatatggagaagactggg

SEQ ID NO: 23358 - DNA, 110 bp, synthetic construct
  source 1..110: mol_type = other DNA
tcactggactaatagcctctggggctggccacttgtctgtagctggtgatcacgagtgaaggggaaactgtaataagaagtagagttgtagctttagagagcggcctaaa

SEQ ID NO: 23359 - DNA, 110 bp, synthetic construct
  source 1..110: mol_type = other DNA
tgccactgggcaagttggccattcttggcatttccatactcccgcaaagctccgtgagcaatctgacttgtcagtgaatcctaccttgtcccattattcacggtggcctg

SEQ ID NO: 23360 - DNA, 110 bp, synthetic construct
  source 1..110: mol_type = other DNA
aacggtgcaggatctagcagaaggcactgacatcttacagagaggtgggtgggagctgcaggtcacaggcatggccatatcccgcttctactaagctgcctgggccactt

SEQ ID NO: 23361 - DNA, 110 bp, synthetic construct
  source 1..110: mol_type = other DNA
ctgcaggtcacaggcatggccatatcccgcttctactaagctgcctgggccacttggaacagggaaaggatgtgacagggaaaacagctgcctgtccctataagacttcc

SEQ ID NO: 23362 - DNA, 110 bp, synthetic construct
  source 1..110: mol_type = other DNA
ctgtacacgacttcaccctggttcttaacagcgcctttctcggcctttctcagcctcaaagtgtgggacttagttgtgttcgatccaccaggatccaacagttaacaacc

SEQ ID NO: 23363 - DNA, 110 bp, synthetic construct
  source 1..110: mol_type = other DNA
ttccttcttcagcccatggaagtgacactcagtcttcagggtttggatcaatgaacaactgtgtaaatccatctcagaccatactaagctaattatctcgctttcctcta

SEQ ID NO: 23364 - DNA, 110 bp, synthetic construct
  source 1..110: mol_type = other DNA
caactgtgtaaatccatctcagaccatactaagctaattatctcgctttcctctaaaatcctatggcaataagtattggtaccacttgtttgaacacataattacatatc

SEQ ID NO: 23365 - DNA, 110 bp, synthetic construct
  source 1..110: mol_type = other DNA
tagggcccactccaatagcgtggagaccaccataagtattcaaattagccagttctaagtgttttccctgccctagcttgcctttcccatggaaaccccagtaaaagtca

SEQ ID NO: 23366 - DNA, 110 bp, synthetic construct
  source 1..110: mol_type = other DNA
aacattagaaatgatttggggtgagcaatttgagaaagtaagacaatgaggggcaagggtcctgtttgtttgtgagaaagcacggctagcgatgtagatgtggccagatg

SEQ ID NO: 23367 - DNA, 110 bp, synthetic construct
  source 1..110: mol_type = other DNA
agggtcctgtttgtttgtgagaaagcacggctagcgatgtagatgtggccagatgggagaaggtggcaagccccgtgctttctagggggccatttgggaagattagagag

SEQ ID NO: 23368 - DNA, 110 bp, synthetic construct
  source 1..110: mol_type = other DNA
gaacccgtgttccatcgctcccaggataccaccaatcccattgtgccacatcaggaactccatctagggtctcaattcttatattcattttgttatattgtttaaaattg

SEQ ID NO: 23369 - DNA, 110 bp, synthetic construct; identical to SEQ ID NO: 23368
  source 1..110: mol_type = other DNA

SEQ ID NO: 23370 - DNA, 110 bp, synthetic construct
  source 1..110: mol_type = other DNA
catgctagcttgacttgcagttctgaaagctctctcacctagtgtttggtccccgatgaacatcagtatgttagattttgagctagtgacaagagtgttcctgtccctac

SEQ ID NO: 23371 - DNA, 110 bp, synthetic construct
  source 1..110: mol_type = other DNA
gtcttgtctgggtggtttaggctcaagcacttgccatcagatgctggtcaggtctgggacagagggcctggggcagctgggtctggctgagcatctgtctgtctttctgt

SEQ ID NO: 23372 - DNA, 110 bp, synthetic construct
  source 1..110: mol_type = other DNA
gggacagagggcctggggcagctgggtctggctgagcatctgtctgtctttctgtagtttcagggcatctcagtgtagactctcctcttgggctcctttgggcttcctca

SEQ ID NO: 23373 - DNA, 110 bp, synthetic construct
  source 1..110: mol_type = other DNA
gtggtgccaggaatattcttctgaccaaatctgaagccctatattttggtgctatttgcgatccccatcactggtccagcattgtcttctcttaaggatgtttgttttaa

SEQ ID NO: 23374 - DNA, 110 bp, synthetic construct
  source 1..110: mol_type = other DNA
cataaaaaccttagccctttaactgtccttttctgtgtctcttgtttagcatctaactcactatattgccattgctaggtgacacagctatttcacgcagtagactagca

SEQ ID NO: 23375 - DNA, 110 bp, synthetic construct
  source 1..110: mol_type = other DNA
ggaggaaattgaagcccagagaggtcaagtgaactaactcaggtcatacagctggtacctagggaaggcaggtcttgaactcagataatcctgcctctgaagtccatgca

SEQ ID NO: 23376 - DNA, 110 bp, synthetic construct
  source 1..110: mol_type = other DNA
cctgagaggaaggtgcagcagctccaggcaaactgtcttcttggctatctcatggctgcctcacaggtcagacttctctgctccccaggggaagcaactcttcaagaggg

SEQ ID NO: 23377 - DNA, 110 bp, synthetic construct
  source 1..110: mol_type = other DNA
atcttggaactttaagatagtgtagtgtggcttgggggaactgttgtcactaaaagctgaactagattaaatagtctgttcctgggtgtctgggaaactatagtgtagtg

SEQ ID NO: 23378 - DNA, 110 bp, synthetic construct
  source 1..110: mol_type = other DNA
gaaaaagcctttctttcactattcaaatgctttgcttgtactttgccaaattacaggaaagcaacaccagtgttggtttctaaaacagtttaaacctgtttaccacatta

SEQ ID NO: 23379 - DNA, 110 bp, synthetic construct
  source 1..110: mol_type = other DNA
ttttatcagtttcaaataaatccctattgctttaattgagtccagacttggagaagcctggagagagctgaaggaaaccctccccagtagtctcttcaacctcatttttc

SEQ ID NO: 23380 - DNA, 110 bp, synthetic construct
  source 1..110: mol_type = other DNA
gttagataacatttaagagcttgaaatttctaacaaacttgacgttcctcaaactgggtaagggaggagataaaaatcacctcttatgatgacagaaagcagtgtcacca

SEQ ID NO: 23381 - DNA, 110 bp, synthetic construct
  source 1..110: mol_type = other DNA
gggtaagggaggagataaaaatcacctcttatgatgacagaaagcagtgtcaccattgaggcctcagtcctgccagcagaagcaaatgtattttactccatttagaagaa

SEQ ID NO: 23382 - DNA, 110 bp, synthetic construct
  source 1..110: mol_type = other DNA
aaaatttcagggtattcaaaaagaatatcaggaaacccacaaacgaggaaccccaaattattatgggacaatgggaagtaagaggcatttctaacctggaaaacattcag

SEQ ID NO: 23383 - DNA, 110 bp, synthetic construct
  source 1..110: mol_type = other DNA
aacacaaaccatgtgatcagaggtgatgccaagatagtgtgcttgttccagtggaggataactgtgactagaggagccatgtagttcaaccaccttcactcacagcaatt

SEQ ID NO: 23384 - DNA, 110 bp, synthetic construct
  source 1..110: mol_type = other DNA
ggataactgtgactagaggagccatgtagttcaaccaccttcactcacagcaattgttctactatattcatctagcaatgcatttaaatactctggtgcacagaatttag

SEQ ID NO: 23385 - DNA, 110 bp, synthetic construct
  source 1..110: mol_type = other DNA
tattagaacaatgatatccagtttgatcacatttataagcttagagaccagagcttttagtacttgcaaaggcagaggtgattctccccctctacccacaactgggatag

SEQ ID NO: 23386 - DNA, 110 bp, synthetic construct
  source 1..110: mol_type = other DNA
tcaaagaatggaggaactaaagccccaaatgagtaagtgatggaatttagacgtagctacacaatttaccaatgaacaatctctcctcaagggagaggagcctgtaggac

SEQ ID NO: 23387 - DNA, 110 bp, synthetic construct
  source 1..110: mol_type = other DNA
gaagaggtgggggttcgatccccatcctggttaccacactgtgccataggttgacagctatagtgtaggtcaaagctgcagctccagttcaatctctgacccaggaaatt

SEQ ID NO: 23388 - DNA, 110 bp, synthetic construct
  source 1..110: mol_type = other DNA
gtcccatgaatggatcagttgattatgtgaatttaaaacttatgaaataaagacggcgggaaactatggatgatgacagcattgccctggagaaagatacaaagggccat

SEQ ID NO: 23389 - DNA, 110 bp, synthetic construct
  source 1..110: mol_type = other DNA
gcgggaaactatggatgatgacagcattgccctggagaaagatacaaagggccatctttgttgaaggtggtcacatctctgcttctttcaaggaggtgattctcaatctt

SEQ ID NO: 23390 - DNA, 110 bp, synthetic construct
  source 1..110: mol_type = other DNA
cccttcagcatttatagcctgccaaggactgagtcaagggctgggaatacaagtaaaggtaggaactgggccctgttctcaaggatgtctgtcatacactggccaggtag

SEQ ID NO: 23391 - DNA, 110 bp, synthetic construct
  source 1..110: mol_type = other DNA
atgaatccagtgcggcttccttctgagtatgggtggggacatttgagatggcagtagtcataagcccataaagctgtccctgttatcactggataattcttttggtgggg

SEQ ID NO: 23392 - DNA, 110 bp, synthetic construct
  source 1..110: mol_type = other DNA
tgatgggatacagtagtggtgagctgatacaactttgtaaattagctatactccaattaaaaaataaagaccaggagttcccattggggctcagcaataacaaaccagac

SEQ ID NO: 23393 - DNA, 110 bp, synthetic construct
  source 1..110: mol_type = other DNA
gctgcatttttcacatccttctgatagaatatgtatgttttatttaaaatacagaccctgggttgtggagtggggtgagcccggtacacatttgtgactgcttcctttgg

SEQ ID NO: 23394 - DNA, 110 bp, synthetic construct
  source 1..110: mol_type = other DNA
tgttatttcagaatatagcctcacaattcttagaattccattgtcattgaaaatctttcgacatatagtccttggctggaggtagcttgaaagaaactgccattttttct

SEQ ID NO: 23395 - DNA, 110 bp, synthetic construct
  source 1..110: mol_type = other DNA
tttcgacatatagtccttggctggaggtagcttgaaagaaactgccattttttctcagtttatgcatttcttatttggaagtgatctaagcaacatgcagcaaactactt

SEQ ID NO: 23396 - DNA, 110 bp, synthetic construct
  source 1..110: mol_type = other DNA
catggcagaggtgatgagatgtcaaactctttcatatatattgcatggtattagcatcctgttgagtaaaccagagtgagctattcaccttctgaccttggagaagcaag

SEQ ID NO: 23397 - DNA, 110 bp, synthetic construct
  source 1..110: mol_type = other DNA
acatttccctcttttattaatgatgaattagagctctgtgtgctccataaactgataaccaatcttggtgtgtgtgtgcctgtgtgtttatacatacagaaaataagaaa

SEQ ID NO: 23398 - DNA, 110 bp, synthetic construct
  source 1..110: mol_type = other DNA
ttctgagcacaggacctaaccactaccaagcttaaagtgtgttaacttttttcaaaggctccgtaccccaagggaaattttagaatcttaattctcaataggcattttct

SEQ ID NO: 23399 - DNA, 110 bp, synthetic construct
  source 1..110: mol_type = other DNA
gcacacacacacatacatacatgctaccattattaaatacattagctggcagttaataagtctacatccatttttaaattttgatggttgttttatgtctgagtgctagt

SEQ ID NO: 23400 - DNA, 110 bp, synthetic construct
  source 1..110: mol_type = other DNA
tatagtaagtcatttcaagcataagcatttaatcaattgaaatgctccatcctattcacagtggtttggtatcatgtgtgcttacaaagacacccgcaacagtatagtat

SEQ ID NO: 23401 - DNA, 110 bp, synthetic construct
  source 1..110: mol_type = other DNA
catatgatgtttgctgttctctgtattacttacttaatttactatgataatctctaggttcacccatgttgctgcatatggcattatttcatcctttttttaatggctga

SEQ ID NO: 23402 - DNA, 110 bp, synthetic construct; identical to SEQ ID NO: 23401
  source 1..110: mol_type = other DNA

SEQ ID NO: 23403 - DNA, 110 bp, synthetic construct
  source 1..110: mol_type = other DNA
ttttctgaaaatgagacagaataaagagtaatctctactgcattcaccataaacccaacagagaaagagcctgagctataacaaatataggagaagaagccatcagtatt

SEQ ID NO: 23404 - DNA, 110 bp, synthetic construct
  source 1..110: mol_type = other DNA
cttcttaaaatgtatgtaaatatttagcagtttaattagtgaaggagttctttcgttacttgagaataagctgtatgtgtgctttaaattctgtaggtcttctttctaga

SEQ ID NO: 23405 - DNA, 110 bp, synthetic construct
  source 1..110: mol_type = other DNA
cacatagcttggagaaaaataatttcattgaaatgtttcatactcatctctttccttaacccatcttttgcaaatttcctcattttctctgtattctattatttcaccct

SEQ ID NO: 23406 - DNA, 110 bp, synthetic construct; identical to SEQ ID NO: 23405
  source 1..110: mol_type = other DNA

SEQ ID NO: 23407 - DNA, 110 bp, synthetic construct; identical to SEQ ID NO: 23405
  source 1..110: mol_type = other DNA

SEQ ID NO: 23408 - DNA, 110 bp, synthetic construct; identical to SEQ ID NO: 23405
  source 1..110: mol_type = other DNA

SEQ ID NO: 23409 - DNA, 110 bp, synthetic construct
  source 1..110: mol_type = other DNA
tgtcatatagcttttgtgggacctgagacaagttagtatctcactgaatcagttttctcatatgaaaattacaaaatgacttttctgtgaagatgagttatatttgcaac

SEQ ID NO: 23410 - DNA, 110 bp, synthetic construct
  source 1..110: mol_type = other DNA
tttcaagggcagcttaaggagatgacattggaacagcacactcagagacaatgaaactagactttgaatacagaagtccatgtctactgtgttgccaagggtgcagaacc

SEQ ID NO: 23411 - DNA, 110 bp, synthetic construct
  source 1..110: mol_type = other DNA
agtaataagtaccataagaatagatggaataattttgtactcagaggagagagaacacactcaactctgatgattggagaagctttcctgcattaaatgacttattagaa

SEQ ID NO: 23412 - DNA, 110 bp, synthetic construct
  source 1..110: mol_type = other DNA
cacactcaactctgatgattggagaagctttcctgcattaaatgacttattagaaaaagacaagagacaaataagatttaaacagagagtgtcacagccaataagaacaa

SEQ ID NO: 23413 - DNA, 110 bp, synthetic construct
  source 1..110: mol_type = other DNA
tttgtgactggaggatgtttttggttgtagaaagtatataatatggagaaaggcaatcaaaaatttcatgcttaatgacaaatcttctcagtgaaatgatctaatgatat

SEQ ID NO: 23414 - DNA, 110 bp, synthetic construct
  source 1..110: mol_type = other DNA
tgccattttccccattaatttttattttacttctacgatggaaaacattatctggcctttatttggaaagcagttgcggggaagtggtagtgatgcaatattgaaggaga

SEQ ID NO: 23415 - DNA, 110 bp, synthetic construct
  source 1..110: mol_type = other DNA
cctttatttggaaagcagttgcggggaagtggtagtgatgcaatattgaaggagaattgattagcaggtcagatttcattacctgtcctgtgattcaagctacgcaaatt

SEQ ID NO: 23416 - DNA, 110 bp, synthetic construct
  source 1..110: mol_type = other DNA
tttcactctgagttctgttttatatactttttttgtcatgagctctctttgacgcacaggtattcagtacaaccagaagaatgtcagaggactggaaggtaactgttaaa

SEQ ID NO: 23417 - DNA, 110 bp, synthetic construct
  source 1..110: mol_type = other DNA
actagttaagtgagtggtcatctatccttggcatcttggatcaaaaaataaagctattaatttaaaagtacagaggaacagataaaaatatctgtagaagactctgttat

SEQ ID NO: 23418 - DNA, 110 bp, synthetic construct
  source 1..110: mol_type = other DNA
tctaagtggttctgctatcaccactaccaccagtaacagtaacaaaactctaataaatgggattttaaattagcttaaacacagtatctaagattgcctcttatcatctt

SEQ ID NO: 23419 - DNA, 110 bp, synthetic construct
  source 1..110: mol_type = other DNA
aagattcagaccaaaatcagtttaaagacaacccctgagcatttcacattggtgtagtccaggaacataggacaatttcctgagaaaatatactcagttatccccatact

SEQ ID NO: 23420 - DNA, 110 bp, synthetic construct
  source 1..110: mol_type = other DNA
agtccaggaacataggacaatttcctgagaaaatatactcagttatccccatactattgacattgcctgcacttctcaagttcacaattgctggctctgatcagagaggt

SEQ ID NO: 23421 - DNA, 110 bp, synthetic construct
  source 1..110: mol_type = other DNA
ttttctgtctcacatggagactctcactggattgagggcccattctaatccagtatgatccaattttaatcctgcccaattatatctgtaaaatttctatttccaaataa

SEQ ID NO: 23422 - DNA, 110 bp, synthetic construct
  source 1..110: mol_type = other DNA
tgatccaattttaatcctgcccaattatatctgtaaaatttctatttccaaataagttcataatccgaggttctggtggatgtgaattttgaggagacactattcaacct

SEQ ID NO: 23423 - DNA, 110 bp, synthetic construct
  source 1..110: mol_type = other DNA
ttctggatcacttctctttctctgaaaacatacaatctatttttcagaaaccaatcacctgagagcctcaccaggccttctagctgacctgtggcactggtagatattct

SEQ ID NO: 23424 - DNA, 110 bp, synthetic construct
  source 1..110: mol_type = other DNA
tacttttggtcaggtgtcatgatgtagctatcattttctgcacaagaaatgtgtaatggtatttgccagtcatatataagaaacttggaagaaaatcctagagaaattat

SEQ ID NO: 23425 - DNA, 110 bp, synthetic construct; identical to SEQ ID NO: 23424
  source 1..110: mol_type = other DNA

SEQ ID NO: 23426 - DNA, 110 bp, synthetic construct
  source 1..110: mol_type = other DNA
ttccccatcaggggcagagaagcatcccagtgtgcaaagttggtctacaaaatgtactcaatctgtctccatttgattcctgctgaagataaaatctgataatcttattt

SEQ ID NO: 23427 - DNA, 110 bp, synthetic construct
  source 1..110: mol_type = other DNA
ataagcagtagctctagtacccatgagaaagcataggagcaagagaaaagatatgggatttgagccaaatgaaatacagacatgtgagcataggtttttttgtttgtttg

SEQ ID NO: 23428 - DNA, 110 bp, synthetic construct
  source 1..110: mol_type = other DNA
gcatcaattcacattatttttttcatgagagaattgagtcatagagaagattgatgatggtcagataactaacagctattgaagacttacaaacatggcccttttatagg

SEQ ID NO: 23429 - DNA, 110 bp, synthetic construct
  source 1..110: mol_type = other DNA
tgacaggcctttagctatgcagcttcaaatgtcaccaagggatagagctgatcaggtgagacttcacagtggcctggtggaagatgaatcatgaaatgtaaattaccttg

SEQ ID NO: 23430 - DNA, 110 bp, synthetic construct
  source 1..110: mol_type = other DNA
gtgagacttcacagtggcctggtggaagatgaatcatgaaatgtaaattaccttgttttataacaaaaaaattaaatggagtgaacgattatgcagatttgtcacttttt

SEQ ID NO: 23431 - DNA, 110 bp, synthetic construct
  source 1..110: mol_type = other DNA
gcaacacttgctttctcatatgctaacaaaatattggagctgagtagcagctgtcaaatttagatggggtagatgctttccatgccacagtccccacctctccctaatgt

SEQ ID NO: 23432 - DNA, 110 bp, synthetic construct
  source 1..110: mol_type = other DNA
gccctgctgcatgtctcctactgtatcatcaataatatctgggtagagccatctagcaatgcacaagctgacctcacacagcaatttgtgtcttgttatgcctctgagca

SEQ ID NO: 23433 - DNA, 110 bp, synthetic construct
  source 1..110: mol_type = other DNA
actgaaacattaatgaccctcacaacacagcagatacagggacctaacaggacagggtaagagttaaaaagccaaaccctacaatgtttgcaccccaataagcctgagat

SEQ ID NO: 23434 - DNA, 110 bp, synthetic construct; identical to SEQ ID NO: 23433
  source 1..110: mol_type = other DNA

SEQ ID NO: 23435 - DNA, 110 bp, synthetic construct; identical to SEQ ID NO: 23433
  source 1..110: mol_type = other DNA

SEQ ID NO: 23436 - DNA, 110 bp, synthetic construct; identical to SEQ ID NO: 23433
  source 1..110: mol_type = other DNA

SEQ ID NO: 23437 - DNA, 110 bp, synthetic construct
  source 1..110: mol_type = other DNA
tgaggactgctggttctcttaactgggaccttccagctgcttcatttccttgcatccacagagatctttagaggaaaaggcttcagtgcctcctggtctctgtctagttc

SEQ ID NO: 23438 - DNA, 110 bp, synthetic construct
  source 1..110: mol_type = other DNA
ttctagttgaattctgggtgggagccttagaggaagagtctaggctggtcaggggagggaggtggtgaaattttttggtttactctatccttgttttcatttggcctgtg

SEQ ID NO: 23439 - DNA, 110 bp, synthetic construct
  source 1..110: mol_type = other DNA
aagccctgagattggaagaaaagctcgggactgaacagagaggtccctggttgttgacagaatcccccctcaacttcagatgagactaaccaaggagtctgtcagttcac

SEQ ID NO: 23440 - DNA, 110 bp, synthetic construct
  source 1..110: mol_type = other DNA
gatcaccgtgcagaagtggagggtggtaaggggaggcctgtcctgagctgtcagcagtttcctctgcttatgtcttttgaaaataccaccatccattaagcaggtggtct

SEQ ID NO: 23441 - DNA, 110 bp, synthetic construct
  source 1..110: mol_type = other DNA
gcaagttcaatccctggcctgggaacttctgcctgctgccaggggaaaaaaaaaaatcctgtctttccctgagatggtataggatgaaggggactaaaggaggatcattt

SEQ ID NO: 23442 - DNA, 110 bp, synthetic construct; identical to SEQ ID NO: 23441
  source 1..110: mol_type = other DNA

SEQ ID NO: 23443 - DNA, 110 bp, synthetic construct
  source 1..110: mol_type = other DNA
ctcttagtggatggaaacttggttaagtgacttaacctttctttgcttttttgcctcacctttaaaatggatgtatttgcacttaccttttagggttatcatgagagtta

SEQ ID NO: 23444 - DNA, 110 bp, synthetic construct
  source 1..110: mol_type = other DNA
gggatttatggagcccttgggccccacgtggtcatggccatgcagcctggcactgaattttaatgggatatctgttttgccagaatgatcacagtggctgataatctctg

SEQ ID NO: 23445 - DNA, 110 bp, synthetic construct
  source 1..110: mol_type = other DNA
aactttggagactaggttataaaaggtactacggcttcctggttgatctcttggatcactcactctgcagaagccagctgtcgtatcatgaagtcaggctcacaaatgag

SEQ ID NO: 23446 - DNA, 110 bp, synthetic construct
  source 1..110: mol_type = other DNA
tcactcactctgcagaagccagctgtcgtatcatgaagtcaggctcacaaatgagaaaactaggcctccaaccaacagccagagggcaaccaatttctcatgcaaaaggc

SEQ ID NO: 23447 - DNA, 110 bp, synthetic construct
  source 1..110: mol_type = other DNA
ttattgttattccttttcacaggcaaagaaagagagatggaataatttcctgaaggttaaaaagttctgtggtgggcagcttctgacatgcatcctggtctttaagctct

SEQ ID NO: 23448 - DNA, 110 bp, synthetic construct
  source 1..110: mol_type = other DNA
ggttcatacaatgcccaggggaagagaccccaagcctgttcctctttggagtcggagtttcaaatccttagtcctggaatggtactcagtgaatatagaacagtcaggtt

SEQ ID NO: 23449 - DNA, 110 bp, synthetic construct
  source 1..110: mol_type = other DNA
gtccgagaaatatgcatctatagcaatagaggaagaagaaaactgaaggcaaatacctggatgtttgggaagtaaaattctgcaaattatgaaaggagtgaggtaagaaa

SEQ ID NO: 23450 - DNA, 110 bp, synthetic construct
  source 1..110: mol_type = other DNA
cctggatgtttgggaagtaaaattctgcaaattatgaaaggagtgaggtaagaaaataattttgactgatttgagttttggtcaaaaatccaaaataagttggtaacata

SEQ ID NO: 23451 - DNA, 110 bp, synthetic construct; identical to SEQ ID NO: 23449
  source 1..110: mol_type = other DNA

SEQ ID NO: 23452 - DNA, 110 bp, synthetic construct; identical to SEQ ID NO: 23450
  source 1..110: mol_type = other DNA

SEQ ID NO: 23453 - DNA, 110 bp, synthetic construct
  source 1..110: mol_type = other DNA
tttattttgcttggttctgtggatggtggagtgtggagtgaaatatggagctaggtttctgcaataggcagagggagacgatgatgatggcaaagttgatgatagtgaag

SEQ ID NO: 23454 - DNA, 110 bp, synthetic construct
  source 1..110: mol_type = other DNA
tttctgcaataggcagagggagacgatgatgatggcaaagttgatgatagtgaagttgatgaagagtatacagggcatccacttgttggtgcacagggatggatgagatg

SEQ ID NO: 23455 - DNA, 110 bp, synthetic construct
  source 1..110: mol_type = other DNA
cctccctctggcttctcctcactcatgtctctgcccatgtgaggtcatctcagacactcacccttctcccctctcttcctacctctctctgtaggatctcctcactactt

SEQ ID NO: 23456 - DNA, 110 bp, synthetic construct
  source 1..110: mol_type = other DNA
actcacccttctcccctctcttcctacctctctctgtaggatctcctcactactttcctcaagctctctatctagttaaaaattcagggctctgaggccctcagcacata

SEQ ID NO: 23457 - DNA, 110 bp, synthetic construct
  source 1..110: mol_type = other DNA
ttccaggttcatctatttttgcaaatgttagaatttctttcttttgaaaggctgaataatattccgtcatttgtatagaccatatcatctttatccatctacctgtcaat

SEQ ID NO: 23458 - DNA, 110 bp, synthetic construct
  source 1..110: mol_type = other DNA
ataatattccgtcatttgtatagaccatatcatctttatccatctacctgtcaatgaacacatgggctgttctcaatgtcttggttgttatgaataacactgtaatgaac

SEQ ID NO: 23459 - DNA, 110 bp, synthetic construct
  source 1..110: mol_type = other DNA
ttctctccactccacagccctgttgtccttggcatgcagtattttgcagagaggctttctgtattagggcctaactggcttctggagaccccaagcccacatcattccta

SEQ ID NO: 23460 - DNA, 110 bp, synthetic construct
  source 1..110: mol_type = other DNA
catgtgacacagcaggtggcctcttccctagagcctggtcccctggtttccagtacagcttctctacctgagccagccactctatccctgctctccatcacagcttcttg

SEQ ID NO: 23461 - DNA, 110 bp, synthetic construct
  source 1..110: mol_type = other DNA
gtcagtcccaatttggttgaaggttcagcttttactgctgtgtggtgacacactcctcaactgggaagagaatagctgaccttttttctattcaaaagaagcaaattctt

SEQ ID NO: 23462 - DNA, 110 bp, synthetic construct
  source 1..110: mol_type = other DNA
aagtcttctcaacaggagccagacctgttactctctcactctctctttctctcagaattccttcaacatatgacaccaagctcagactatcctgctgaaggatgagtgag

SEQ ID NO: 23463 - DNA, 110 bp, synthetic construct
  source 1..110: mol_type = other DNA
gttagatgggggtgggggtgggttaagagtgttactcagccccagggtatctccaagctctccctcctgcccaacccctgaggcaggccctcactgagtgacttcctatg

SEQ ID NO: 23464 - DNA, 110 bp, synthetic construct
  source 1..110: mol_type = other DNA
agctctccctcctgcccaacccctgaggcaggccctcactgagtgacttcctatgtggatgtgttgaatgaataaatgaataaatgagtgagaatattaggtgttctctg

SEQ ID NO: 23465 - DNA, 110 bp, synthetic construct
  source 1..110: mol_type = other DNA
atcaaaggacacctcctctggcaggaagaagttgactaagtaagggttaattgtccctgcatggtccgacggccagaaacagcattttctcaatgttatcctcctctctg

SEQ ID NO: 23466 - DNA, 110 bp, synthetic construct
  source 1..110: mol_type = other DNA
ttactcatccatgcagcaagagtttactgagtgcctattatgtgtgaggaaggggggatccagttgaaagcagaaacttctttcccttgctgagtaagcttacacagatt

SEQ ID NO: 23467 - DNA, 110 bp, synthetic construct
  source 1..110: mol_type = other DNA
ggatccagttgaaagcagaaacttctttcccttgctgagtaagcttacacagattcctttccaacctccattcttgccttcccagtaatatccaacaacatggaccttgc

SEQ ID NO: 23468 - DNA, 110 bp, synthetic construct
  source 1..110: mol_type = other DNA
tgtttgattgaataactgggaactatagccaggccagtttgtcacagaaaactgagcgcacaccacccaaggagaggtcgggagtgccagagatttccccctggagggaa

SEQ ID NO: 23469 - DNA, 110 bp, synthetic construct
  source 1..110: mol_type = other DNA
ctttcacagcaacgatggagtcctaaagcctcgcgctctctctctctttctctgagagggattctgccttcctcctagtccaggatgctcaaattgtagcctgtctttaa

SEQ ID NO: 23470 - DNA, 110 bp, synthetic construct
  source 1..110: mol_type = other DNA
gagggattctgccttcctcctagtccaggatgctcaaattgtagcctgtctttaaaaataatataattctgggagttcccattgtggtgcagcagaaacgagtcttacta

SEQ ID NO: 23471 - DNA, 110 bp, synthetic construct
  source 1..110: mol_type = other DNA
ctctagttgtgcgcttgtgctgccacagttaaatctcttgtggatatggcagcctctcatcccgctgagctcagagagcttttcctctggagagagctcacgtttcaaca

SEQ ID NO: 23472 - DNA, 110 bp, synthetic construct
  source 1..110: mol_type = other DNA
aggggcaagcggagggcaacttgcattcagcagtgtctgggggcctcaccctgccctcccgttcattggtttacagaatgtgttcactggactcagtgcagaaacctcct

SEQ ID NO: 23473 - DNA, 110 bp, synthetic construct
  source 1..110: mol_type = other DNA
ctcccgttcattggtttacagaatgtgttcactggactcagtgcagaaacctcctctcccaacattcctgggtgtccagcccagggtctgccctggtcctttctcctccc

SEQ ID NO: 23474 - DNA, 110 bp, synthetic construct
  source 1..110: mol_type = other DNA
taaccacaagagcattttaagagtaaaatgaaggaaaactgctcataaccactaatcagagccccttccccaacctacatgcatgtctacacagtgaagaaagataacca

SEQ ID NO: 23475 - DNA, 110 bp, synthetic construct
  source 1..110: mol_type = other DNA
tcagagccccttccccaacctacatgcatgtctacacagtgaagaaagataaccagaatctggatcctcggacactgtcattcttggacttccccatgctctaaagatgt

SEQ ID NO: 23476 - DNA, 110 bp, synthetic construct
  source 1..110: mol_type = other DNA
gttgaacttggttgagtcccctgcagcctccaacgatgcatagtacagctatgactaaagtatgtgtaggttgatgggtggcaggatttgggtacaagtttgtcatgtta

SEQ ID NO: 23477 - DNA, 110 bp, synthetic construct
  source 1..110: mol_type = other DNA
taaagtatgtgtaggttgatgggtggcaggatttgggtacaagtttgtcatgttaatagcatcaattctgctgttcatggaccgctttgtgttacttcaggcactcagaa

SEQ ID NO: 23478 - DNA, 110 bp, synthetic construct
  source 1..110: mol_type = other DNA
catggcagtcccgaacaccagaccagtttccagatgccaaacccaaggcaaagctgattctaggcaactatcatttcaagattcaaggcaggtatttctgggtccagagt

SEQ ID NO: 23479 - DNA, 110 bp, synthetic construct
  source 1..110: mol_type = other DNA
agtgatggacatttgagtttcaggtttggggctattactcttaaaagttgatacgagagagttcccgtcgtggcttagcagaatcaagtcccgactaggaaccacggagt

SEQ ID NO: 23480 - DNA, 110 bp, synthetic construct
  source 1..110: mol_type = other DNA
cgtctttagctctgctttgacttctaccacagtctggacaggatgctgtggcaggtgtggaagtacctgggccaaccatctctctgcactcatctgtcagagctgagggc

SEQ ID NO: 23481 - DNA, 110 bp, synthetic construct
  source 1..110: mol_type = other DNA
ataccaaacacttgctgtattttcatgtctgtccttctgctcactgttttcttattctctacctgtctatggatagtggctaaattttacccaagcctgttggtcctgga

SEQ ID NO: 23482 - DNA, 110 bp, synthetic construct
  source 1..110: mol_type = other DNA
ttgtagatgaagtggttgaggctcagagaagttgggtactttgcccagggtcatccagctttgggagtggaccagacctagacttatctggctgcaaagactgttagggg

SEQ ID NO: 23483 - DNA, 110 bp, synthetic construct
  source 1..110: mol_type = other DNA
cagctttgggagtggaccagacctagacttatctggctgcaaagactgttaggggcttaagggcatccttagcaattcctccttggggtgcagtgggaggtcaggggctg

SEQ ID NO: 23484 - DNA, 110 bp, synthetic construct
  source 1..110: mol_type = other DNA
ttgctggtggcccccatgctcattggcttctcctccctgaccaaactctgattttgttcaggtaccaagaacttcactgaggccactcagctttcttgcagtgtggtggc

SEQ ID NO: 23485 - DNA, 110 bp, synthetic construct
  source 1..110: mol_type = other DNA
gttcaggtaccaagaacttcactgaggccactcagctttcttgcagtgtggtggctttgtgatatagagatgagggacaaagaggtggccttttggcacaaagatgaggg

SEQ ID NO: 23486 - DNA, 110 bp, synthetic construct
  source 1..110: mol_type = other DNA
cagataccaggtgagtaattctaatttaaaactgtggatttggagttcccgtcatggctctaaattggaaccatgaggttaacgaatctgaccaggaaccatgaggttgt

SEQ ID NO: 23487 - DNA, 110 bp, synthetic construct; identical to SEQ ID NO: 23486
  source 1..110: mol_type = other DNA

SEQ ID NO: 23488 - DNA, 110 bp, synthetic construct
  source 1..110: mol_type = other DNA
ccgagggttccctcccctccctagacaccccgctttgccccactgctcagaacggaacctagctagggcaccctgggcagaccagtcctttctgcagcagctccagtccc

SEQ ID NO: 23489 - DNA, 110 bp, synthetic construct
  source 1..110: mol_type = other DNA
gcctggtcaagccagagggtcttcagtagctaccctaccagagtataggcagagtgtagacagttccagccagtacctggaagttcagaaagaaaccgtctctggagcag

SEQ ID NO: 23490 - DNA, 110 bp, synthetic construct
  source 1..110: mol_type = other DNA
atgccgtgtttctaagctgctggtgagcgtggatgacatacttatttatgtccataaagaaaaaaagaccccaagctcttcaaattgattgtttatctgagcctgcaaga

SEQ ID NO: 23491 - DNA, 110 bp, synthetic construct
  source 1..110: mol_type = other DNA
aaagaaaaaaagaccccaagctcttcaaattgattgtttatctgagcctgcaagactgaagacagttgagcacatcttctgtgagcgtgtggcattgtctctatagaagc

SEQ ID NO: 23492 - DNA, 110 bp, synthetic construct
  source 1..110: mol_type = other DNA
aagtcaggtcaccagcaaactctcctctcaccctcatttgtcctgagtacctactatgggctgggcactcagcaggctctgggggcatgcccagcagctgtgtcataagg

SEQ ID NO: 23493 - DNA, 110 bp, synthetic construct
  source 1..110: mol_type = other DNA
atgggctgggcactcagcaggctctgggggcatgcccagcagctgtgtcataaggagagaaacactggaggtgatgaggtaacgcagatgagagggggcaccccagtagg

SEQ ID NO: 23494 - DNA, 110 bp, synthetic construct
  source 1..110: mol_type = other DNA
aggctcaggataagggttccaagtggcatctctgtccaccaatgacccttcaagcatgactgatccactggttcacatggcctgagtggcaggcagcttgcagggcaggc

SEQ ID NO: 23495 - DNA, 110 bp, synthetic construct
  source 1..110: mol_type = other DNA
atgactgatccactggttcacatggcctgagtggcaggcagcttgcagggcaggcctctgtgttcagaactctacccaaaccactctttgagtcactcagtaactaaact

SEQ ID NO: 23496 - DNA, 110 bp, synthetic construct
  source 1..110: mol_type = other DNA
tgcacacagggccaggctataggaggtcctctgcacacatcctgtaacttggaatgaaggcacttctcctgccctctctgagccccacaggatctgctttgctgtggtca

SEQ ID NO: 23497 - DNA, 110 bp, synthetic construct
  source 1..110: mol_type = other DNA
gaaggcacttctcctgccctctctgagccccacaggatctgctttgctgtggtcagtgcagcctatctcctgggcaacatcctcccttgaggtttcctgctaccctgaga

SEQ ID NO: 23498 - DNA, 110 bp, synthetic construct
  source 1..110: mol_type = other DNA
gctcagagagaaggtgtctgtaattccaggttgtgctttcacccctccaggtcataggctcacatgtgcatgcacagaggccagcttttggaagcctctgaaatcatggg

SEQ ID NO: 23499 - DNA, 110 bp, synthetic construct
  source 1..110: mol_type = other DNA
aggctcacatgtgcatgcacagaggccagcttttggaagcctctgaaatcatgggatgcaatttctggtgaagccttggggtgaggctgagcatgatgtggggtctcttt

SEQ ID NO: 23500 - DNA, 110 bp, synthetic construct
  source 1..110: mol_type = other DNA
aactcacacacccgcccacttctgaaagcttctgggctcggacttcccagctcaagattcacatttttctaactctgtttctttttccatctgcagctaccagatacgga

SEQ ID NO: 23501 - DNA, 110 bp, synthetic construct
  source 1..110: mol_type = other DNA
gattcacatttttctaactctgtttctttttccatctgcagctaccagatacggaggttgtggttgagaattaccctgggctgagaaactcccagatgtgacacgctgcc

SEQ ID NO: 23502 - DNA, 110 bp, synthetic construct
  source 1..110: mol_type = other DNA
atatacataaggcactcagaacagaatctggcaaatagtgaggatgctattattagctaatatatcttttcccccaaacgtagtagaagtttatttctctctcacctact

SEQ ID NO: 23503 - DNA, 110 bp, synthetic construct
  source 1..110: mol_type = other DNA
gctaatatatcttttcccccaaacgtagtagaagtttatttctctctcacctactacccagagcaaggctggcaagtgactttcttccatgtgaggagtcagcaattcaa

SEQ ID NO: 23504 - DNA, 110 bp, synthetic construct
  source 1..110: mol_type = other DNA
atctgcaactttcttagtgctgctggacatgctctggagagggagtcatcatacgctcctggctgtaggacgtttattttcacagctgagcagtgttacctgggccaagg

SEQ ID NO: 23505 - DNA, 110 bp, synthetic construct
  source 1..110: mol_type = other DNA
aaaaggctaaagtaaagcaccagatcctgcaccagcaatagacagagatggtttgaactcatgcctacctgaatcctttccattgtggctcttaacgccaaaccagagct

SEQ ID NO: 23506 - DNA, 110 bp, synthetic construct
  source 1..110: mol_type = other DNA
aactcatgcctacctgaatcctttccattgtggctcttaacgccaaaccagagcttctctgtgtcttgtttttctgcagcactaggggttctgatgcaggaagtcaggat

SEQ ID NO: 23507 - DNA, 110 bp, synthetic construct
  source 1..110: mol_type = other DNA
cctgaccctaaggcataatttaatcctcacaacagctatcctttacacacaccatgcacatttcagagctgggcaggctgaggtccagagctagcctttcccatcctgat

SEQ ID NO: 23508 - DNA, 110 bp, synthetic construct
  source 1..110: mol_type = other DNA
gatgaaggctgcaagaacacacttgcagacacaacctatgagccaaaagtatggatatatcatgaggctctaaatattcagaggtttgtttgagctcaattccaggcctc

SEQ ID NO: 23509 - DNA, 110 bp, synthetic construct
  source 1..110: mol_type = other DNA
tatatcatgaggctctaaatattcagaggtttgtttgagctcaattccaggcctcagaattctgagtatttcagatggaggagtatcatttgcataaactgaaaggcaga

SEQ ID NO: 23510 - DNA, 110 bp, synthetic construct
  source 1..110: mol_type = other DNA
tcttcatgttttgttcagcatggttttgtctccacttggcattgatgaggtctaacacttgtattatttttcagagagtcaatgagctccagaggatgtgctaaggtgga

SEQ ID NO: 23511 - DNA, 110 bp, synthetic construct
  source 1..110: mol_type = other DNA
aatgaggaaaaaatataatgcacttacaagggcccataccttgggctttgatttcacactcctgggtctcaaagccccttaagcctctcagaggtccacccttacccagt

SEQ ID NO: 23512 - DNA, 110 bp, synthetic construct
  source 1..110: mol_type = other DNA
aaatagcaaggataaattcaaagcactatctgttatgttttattatgaacagtgagaactgcagtgaaatgtagtctacaatgacattcactttttagcatacggtttcc

SEQ ID NO: 23513 - DNA, 110 bp, synthetic construct; identical to SEQ ID NO: 23512
  source 1..110: mol_type = other DNA

SEQ ID NO: 23514 - DNA, 110 bp, synthetic construct
  source 1..110: mol_type = other DNA
cctccagagattcactttctattttgggcagttttcctaaagagttttctgaaagatattttcttaaaagagttaatttcttctgttaaaaatgatgcaaatgagcttat

SEQ ID NO: 23515 - DNA, 110 bp, synthetic construct
  source 1..110: mol_type = other DNA
tgcacaggatgggaagcagtgatgagcctaccttgaggcagggctatgccctatggactccagtccccaggaagatcatggtatagctcagagtgtgagaggggaacaca

SEQ ID NO: 23516 - DNA, 110 bp, synthetic construct
  source 1..110: mol_type = other DNA
gactccagtccccaggaagatcatggtatagctcagagtgtgagaggggaacacatgcacagggccttgtagtaactaaagagactttgacagccactctatggcacaag

SEQ ID NO: 23517 - DNA, 110 bp, synthetic construct; identical to SEQ ID NO: 23515
  source 1..110: mol_type = other DNA

SEQ ID NO: 23518 - DNA, 110 bp, synthetic construct; identical to SEQ ID NO: 23516
  source 1..110: mol_type = other DNA

SEQ ID NO: 23519 - DNA, 110 bp, synthetic construct
  source 1..110: mol_type = other DNA
cataaaagggctctgagaaaaacaaagtcattcagacttgagaaacttcaggccccaactgttctggagatattcaaaaatacctatattttacttgaggttaatcatta

SEQ ID NO: 23520 - DNA, 110 bp, synthetic construct; identical to SEQ ID NO: 23519
  source 1..110: mol_type = other DNA

SEQ ID NO: 23521 - DNA, 110 bp, synthetic construct
  source 1..110: mol_type = other DNA
gggcagagcgagggtccctggctgcagcaggaagcttcctttgtccacctgagcaggtgttgtggtttctcttcctcttagcagtacctgagctggtgaggttgcccctg

SEQ ID NO: 23522 - DNA, 110 bp, synthetic construct
  source 1..110: mol_type = other DNA
ggtgttgtggtttctcttcctcttagcagtacctgagctggtgaggttgcccctggtgcagaaagcaaatgaaagatgacaacatgaaggcttccaccgtcctttctctc

SEQ ID NO: 23523 - DNA, 110 bp, synthetic construct
  source 1..110: mol_type = other DNA
agatcctttgaagttgcttttgtgtgatttggagaacaagtaggctccctgcttactgactagaaaggttctgtcagctttgtggtccttcaaatcctcagagaacagac

SEQ ID NO: 23524 - DNA, 110 bp, synthetic construct
  source 1..110: mol_type = other DNA
ccaccttcaagtttctgttagactttgtttataagacagaccaaccttgactatcttaattagtatgacaacttgcctccccacgatcactcacaatttctgatccccct

SEQ ID NO: 23525 - DNA, 110 bp, synthetic construct
  source 1..110: mol_type = other DNA
tcctgagctgcatagggaggatggagacaatgcttagagcccaggggaactacggctcctcttggactggttgatttcttctgttttcttatcttcccctagaatatcta

SEQ ID NO: 23526 - DNA, 110 bp, synthetic construct
  source 1..110: mol_type = other DNA
ccctataattgctttctgcttactcccaacttccactgaagtttaaaatcgacaagctccatcccacaacccttttcctgaacgttctaggagttctcatgccctttggg

SEQ ID NO: 23527 - DNA, 110 bp, synthetic construct
  source 1..110: mol_type = other DNA
gctccatcccacaacccttttcctgaacgttctaggagttctcatgccctttgggtgcctcagactcaagcactaaaaggagaatcccaagggaatgatttaaattggtg

SEQ ID NO: 23528 - DNA, 110 bp, synthetic construct
  source 1..110: mol_type = other DNA
tgtgtgtgtgactcactctccaaactttattgaatgaaacagtgaatgaaagaagatgtgaaagtgagccatgataaagctaataagactggaaaaagcagtgtgatgga

SEQ ID NO: 23529 - DNA, 110 bp, synthetic construct
  source 1..110: mol_type = other DNA
atgtgaaagtgagccatgataaagctaataagactggaaaaagcagtgtgatggaaagtgagttttaactcagttagcagcatcctgaacccaagccccacatagcacaa

SEQ ID NO: 23530 - DNA, 110 bp, synthetic construct
  source 1..110: mol_type = other DNA
aaccaggggtatgtctgtgtcactgttctgcttatcccaaagctagcaccacgtcagctcccagtgtggtcccagatatcgtgatagagatttacctatattaattttca

SEQ ID NO: 23531 - DNA, 110 bp, synthetic construct
  source 1..110: mol_type = other DNA
aaatttgcatttgcacctatgctgcagtcatgagcaggtgatcaagaaacactatgaggatgtaattgttagatgattaggagaaagctgcaacagataggctgactgct

SEQ ID NO: 23532 - DNA, 110 bp, synthetic construct
  source 1..110: mol_type = other DNA
gaggatgtaattgttagatgattaggagaaagctgcaacagataggctgactgctcacctcaaaactttctaatactttaaaagaataaatcttttaattgtttaagcca

SEQ ID NO: 23533 - DNA, 110 bp, synthetic construct
  source 1..110: mol_type = other DNA
ttctttacattctgtcaggggtagaatgtcagaaatgccaagtgaaccatgtctggagaccagaaataacctggtaaggaaacgtcaggcctatgccttggtttgccaaa

SEQ ID NO: 23534 - DNA, 110 bp, synthetic construct
  source 1..110: mol_type = other DNA
gagaccagaaataacctggtaaggaaacgtcaggcctatgccttggtttgccaaaagcaaatatgcagctcgtatttgtaggagaacaaaataaaaatggctccttagtg

SEQ ID NO: 23535 - DNA, 110 bp, synthetic construct
  source 1..110: mol_type = other DNA
tgtgtgtatgtgaattatagagctgattgcccctctgtcataacaggcagccagcactgactgtgttaataacaaattaagaaattatggtagaagtacagcatttggag

SEQ ID NO: 23536 - DNA, 110 bp, synthetic construct
  source 1..110: mol_type = other DNA
actgagccaatgacaggaactccttttgaggttattttaaatcagcattattgcggcaaggcctcacagctaaagtgtctctcatcagttgagaacgtaaggttgctact

SEQ ID NO: 23537 - DNA, 110 bp, synthetic construct
  source 1..110: mol_type = other DNA
gacagtcatctaatgcgtgcaacatggcaaaaataatgggaggtcactttcagtttttggttgtacacgactgtcacttccatattgcttgtcctctcttcttctctagc

SEQ ID NO: 23538 - DNA, 110 bp, synthetic construct
  source 1..110: mol_type = other DNA
tttggttgtacacgactgtcacttccatattgcttgtcctctcttcttctctagccagtttgctgaaaggaagccagctacaaaatgcgccagactatgatgagtcacac

SEQ ID NO: 23539 - DNA, 110 bp, synthetic construct
  source 1..110: mol_type = other DNA
gattgagcctgcatcctcatagatgctagtcagatccatttctgttgaaacacaacaggatctcctgtctctctttctaattgtatcagttttaattaatacattttgaa

SEQ ID NO: 23540 - DNA, 110 bp, synthetic construct
  source 1..110: mol_type = other DNA
caggatctcctgtctctctttctaattgtatcagttttaattaatacattttgaagctctgtgctatatacatacacatttatgttggatgtcttcattaaataaagcct

SEQ ID NO: 23541 - DNA, 110 bp, synthetic construct
  source 1..110: mol_type = other DNA
ctaggagatgaatcagagctgcagctataggcctatgcgatagccacagcaatgccagatttgagccacatctatgacctgtgcagcagcttatggcaatgctagatcct

SEQ ID NO: 23542 - DNA, 110 bp, synthetic construct; identical to SEQ ID NO: 23541
  source 1..110: mol_type = other DNA

SEQ ID NO: 23543 - DNA, 110 bp, synthetic construct
  source 1..110: mol_type = other DNA
atgccacctctgtctcaaattatggctgttatctgtattcacctcttgatatcattttatgtgtctctatcctgttgtgttctattataacctctttactctgttaggag

SEQ ID NO: 23544 - DNA, 110 bp, synthetic construct
  source 1..110: mol_type = other DNA
cacatttttctgggaaatttctctggctccatggtgcttcaccttcttctctgtattagaatgtcctattctgtttcttaccgtatcattctcattgaatttaggaccct

SEQ ID NO: 23545 - DNA, 110 bp, synthetic construct
  source 1..110: mol_type = other DNA
ttagaatgtcctattctgtttcttaccgtatcattctcattgaatttaggaccctccctaacctgctataatctcatcttgatcttttactacatatcaaagacctaatt

SEQ ID NO: 23546 - DNA, 110 bp, synthetic construct
  source 1..110: mol_type = other DNA
ctcttgttttggcagtttctttttcagtcttctctgctttctttgttcaagagggttttgctttgtaactagacatcactgctcttccttaacagatatctttcttcata

SEQ ID NO: 23547 - DNA, 110 bp, synthetic construct
  source 1..110: mol_type = other DNA
ctgacttgcgaacactctcaattccactccttgttactgacttaaggatagccatgtttctaggaatggcaataagcttctatgagatgatttttatctcacagaaacaa

SEQ ID NO: 23548 - DNA, 110 bp, synthetic construct
  source 1..110: mol_type = other DNA
ggaggaggacatgcagagtagagagtgtgggtgcactggggcctagaaaaacatttgaatacaggaccacagtctgtttgattgtgagtagaatatctcagtttcctgag

SEQ ID NO: 23549 - DNA, 110 bp, synthetic construct
  source 1..110: mol_type = other DNA
ggcttaggagaggatggtagtcttccaacatcagatctgaccaacgcttgcttggacatgataaaaacttaaatataattccatttcactttggcacatcccccgtttgg

SEQ ID NO: 23550 - DNA, 110 bp, synthetic construct
  source 1..110: mol_type = other DNA
acatgataaaaacttaaatataattccatttcactttggcacatcccccgtttggtcacctttgctttccttctccctctgcaggaactgcgatgtaaaaagtcattctc

SEQ ID NO: 23551 - DNA, 110 bp, synthetic construct
  source 1..110: mol_type = other DNA
tcagggcactttcccagacaggacagactgacacaaagtgtttcaacagctacatcagaagttggaagagaagagtctggtgatgtgttggtgggggttaacctggctgt

SEQ ID NO: 23552 - DNA, 110 bp, synthetic construct
  source 1..110: mol_type = other DNA
atgatggtcaattagagatgatttcctaaagcattttactcaaatcattaacagataacataactagctcatgaataacttcaggccttttcaccatgcaaagtcatcat

SEQ ID NO: 23553 - DNA, 110 bp, synthetic construct
  source 1..110: mol_type = other DNA
taacataactagctcatgaataacttcaggccttttcaccatgcaaagtcatcatgacataaccatagaatccagtttaatggcacaaagaccaaccaatgcaggttctt

SEQ ID NO: 23554 - DNA, 110 bp, synthetic construct
  source 1..110: mol_type = other DNA
gagagattatggggggattattacttgatcaaaaaaaatatttcagctatgaaaccagtgcctatttctccagtaccattggctgtgtgctaattttatctcccaccttg

SEQ ID NO: 23555 - DNA, 110 bp, synthetic construct
  source 1..110: mol_type = other DNA
actggacaataagtatatcacagaggttttcccactggagtgagagtttctagccacatgtaaggtttgccagcctgggacctggcattggaaggaggagccctgtagca

SEQ ID NO: 23556 - DNA, 110 bp, synthetic construct
  source 1..110: mol_type = other DNA
acatgtaaggtttgccagcctgggacctggcattggaaggaggagccctgtagcatttggcattgagggctggtggggcatgtgtgtgaagccccacaggactgagggga

SEQ ID NO: 23557 - DNA, 110 bp, synthetic construct
  source 1..110: mol_type = other DNA
gaaaggctcaattcacaaatgatgaacgagatgtatcaagaaccaaattgtaattttctggaacaaaatcttaatctggaaattaaaagaaaaaatgtatggtgtgtgca

SEQ ID NO: 23558 - DNA, 110 bp, synthetic construct; identical to SEQ ID NO: 23557
  source 1..110: mol_type = other DNA

SEQ ID NO: 23559 - DNA, 110 bp, synthetic construct
  source 1..110: mol_type = other DNA
attattttctataactcctggagcctctagatcctagctattcacttaaaccacccaagctttaaagctctactgtttcacatatccacatctgcttaaccaaccatgcc

SEQ ID NO: 23560 - DNA, 110 bp, synthetic construct
  source 1..110: mol_type = other DNA
caagctttaaagctctactgtttcacatatccacatctgcttaaccaaccatgccaacgtactgtggccttaaacaattatttatcatttcccacaattatgtgggttga

SEQ ID NO: 23561 - DNA, 110 bp, synthetic construct
  source 1..110: mol_type = other DNA
caggaggttgggttttcctaccagctgtacactttctggtgaagcagcctccggcaaacccattacttctcaaaagttctgtttcctcatcagcaatacttaaaaggggc

SEQ ID NO: 23562 - DNA, 110 bp, synthetic construct
  source 1..110: mol_type = other DNA
cctaaagaaatttatggtctcaataggagagtcaacaggaataaaagtaatgacggcaccaaaggccctgttgagtgtcataaaatgaagcagggtgtggatttgacaat

SEQ ID NO: 23563 - DNA, 110 bp, synthetic construct
  source 1..110: mol_type = other DNA
ccatggagcctgaactctgccttggaatccctcagaacaccgtctgaagccgcatttgctagcatcatgctgggcaccaaaattgaagcctattccccacctctagagct

SEQ ID NO: 23564 - DNA, 110 bp, synthetic construct
  source 1..110: mol_type = other DNA
ttgctagcatcatgctgggcaccaaaattgaagcctattccccacctctagagcttaaagaaataaaccatacattttgttcattcccttttcttcttgaatttcccctg

SEQ ID NO: 23565 - DNA, 110 bp, synthetic construct
  source 1..110: mol_type = other DNA
ggcaaacctgcagacaggtttgcctacaagctctaaggagttattaattaccatgttcctgtaaattcagggtctgcacctgcatgaacctggaaataaagaccacctta

SEQ ID NO: 23566 - DNA, 110 bp, synthetic construct
  source 1..110: mol_type = other DNA
cacatttagtggcaagatctgaaagggaacagtatgtcagccttgttcagatacacccacaagcttgttttccattcctgttttacagattgcagtgctatctataaaga

SEQ ID NO: 23567 - DNA, 110 bp, synthetic construct
  source 1..110: mol_type = other DNA
agcttctggttgaaccggtacagaagggagctccggccatcaaagtcggcaacatctgattctgcgcacagagaaggggcagagagaaatcagtgcactgcctcatagtc

SEQ ID NO: 23568 - DNA, 110 bp, synthetic construct
  source 1..110: mol_type = other DNA
gaagttgaaggttcaatccctggcctccctccttaaggatctggagttgtgtgagctgtggtgtaggtcacagtcacagctacgcacttgcctgagggagtctctgcttt

SEQ ID NO: 23569 - DNA, 110 bp, synthetic construct
  source 1..110: mol_type = other DNA
ctgtggtgtaggtcacagtcacagctacgcacttgcctgagggagtctctgcttttgatggaagggctagagtgcaaggcaggctctccttggtctaatggtttgttggt

SEQ ID NO: 23570 - DNA, 110 bp, synthetic construct
  source 1..110: mol_type = other DNA
aataaggtgagctcaacaagatgactttatcatttccttcctttttttttttttttctttttacagccaacctgtggcatatagaagttactaagctagggggtcaaatc

SEQ ID NO: 23571 - DNA, 110 bp, synthetic construct
  source 1..110: mol_type = other DNA
tctttttacagccaacctgtggcatatagaagttactaagctagggggtcaaatcggaggtatagctgctggcctaccgcagccctggcaacttgggatcagagcagtat

SEQ ID NO: 23572 - DNA, 110 bp, synthetic construct
  source 1..110: mol_type = other DNA
agatgccatcatttctcttccctcaatttcctcttctctaattaaatcagcatgtcttcacactaccagctatctagccattcaattttgttcagtggtcttaaacagaa

SEQ ID NO: 23573 - DNA, 110 bp, synthetic construct
  source 1..110: mol_type = other DNA
ggtggcagcaagccagacactctgtgtggcatttgtcagcttcccactttttccctctctgagtagcaattgtgattaatttgttcttgtttcgcctttgcatattggat

SEQ ID NO: 23574 - DNA, 110 bp, synthetic construct
  source 1..110: mol_type = other DNA
ccactacttattattgtcatcacaatcattccatcagtcatgaccgacatgcttacacaagccctgcttctctcaaagctcacgcttgaggtggggagagagacaggtta

SEQ ID NO: 23575 - DNA, 110 bp, synthetic construct
  source 1..110: mol_type = other DNA
cacaagccctgcttctctcaaagctcacgcttgaggtggggagagagacaggttaaaaatattagaataagatgtgatacgtcctcttcaaaaggcaattgtaggaaact

SEQ ID NO: 23576 - DNA, 110 bp, synthetic construct; identical to SEQ ID NO: 23574
  source 1..110: mol_type = other DNA

SEQ ID NO: 23577 - DNA, 110 bp, synthetic construct; identical to SEQ ID NO: 23575
  source 1..110: mol_type = other DNA

SEQ ID NO: 23578 - DNA, 110 bp, synthetic construct
  source 1..110: mol_type = other DNA
gctggtagccctaggaaggcttcccacctcatttggagtgttggttagtaggacctgtggctgggtcaggacgtttgaggctagaagcctgtcagctggaacactgggca

SEQ ID NO: 23579 - DNA, 110 bp, synthetic construct
  source 1..110: mol_type = other DNA
tgtggctgggtcaggacgtttgaggctagaagcctgtcagctggaacactgggcatcatttattgccactgggcacgtgtcataggaccttggtattgctatgttgctga

SEQ ID NO: 23580 - DNA, 110 bp, synthetic construct
  source 1..110: mol_type = other DNA
aaccatgcaagggtattttgcagttggcgaattgagatactatggtgtgtgagttcagtaaatcacagacatgatgcttctgtccctctttctaaccttgcttaaggaga

SEQ ID NO: 23581 - DNA, 110 bp, synthetic construct
  source 1..110: mol_type = other DNA
tctcagccacactggaaagagacagacatcaaggcagaacaggcaagaaatccaggagcattaagtacctcccttgtgcagagcttttagtaatttgaattaaaacatta

SEQ ID NO: 23582 - DNA, 110 bp, synthetic construct
  source 1..110: mol_type = other DNA
tttgcgctttcctgatggacttgatctggaggtggacaaagctgcagtcgacagtgggcacactagcgagacttccagagatcaagataaaccccattattttcaaagcc

SEQ ID NO: 23583 - DNA, 110 bp, synthetic construct
  source 1..110: mol_type = other DNA
aagaggagtatgggagcgaaatcatatttacagaaatatctccttcaaaacccaatgcagggaataatggtcaacacatatagctgtgaactagtcaacaagatctgact

SEQ ID NO: 23584 - DNA, 110 bp, synthetic construct
  source 1..110: mol_type = other DNA
tgcagggaataatggtcaacacatatagctgtgaactagtcaacaagatctgactagtttgctccagattccagtatcaccatgaagagagtgcttactgcttaaaaagg

SEQ ID NO: 23585 - DNA, 110 bp, synthetic construct
  source 1..110: mol_type = other DNA
ctaaaactatctcaagttaaggaatttagcagttttctgtgtatgggaagatgcaaggcctggcatactgaagtcattcctttgatgtgcacctcagctccctggagcca

SEQ ID NO: 23586 - DNA, 110 bp, synthetic construct
  source 1..110: mol_type = other DNA
aggcctggcatactgaagtcattcctttgatgtgcacctcagctccctggagccaatatcctgtgttttcacattctgagggctcatcatagggggtggctgcagtgtga

SEQ ID NO: 23587 - DNA, 110 bp, synthetic construct
  source 1..110: mol_type = other DNA
gcttctctcttccttcccaaagagcttatcaaggtatttccccaaacaaaaccatttccttttccaagataaattatacttcctgcagataagagaactttacaaaattc

SEQ ID NO: 23588 - DNA, 110 bp, synthetic construct
  source 1..110: mol_type = other DNA
aggctctgccagaccaggctgttgttttctgaggacaaggacagtatcttagttattgctgaatcctaactgccaaaaaggagaatggcaggtgtctggcagaaaagccc

SEQ ID NO: 23589 - DNA, 110 bp, synthetic construct
  source 1..110: mol_type = other DNA
ctgagggcttgatggtgggcagcccttttgtctctatcctgagctccttcagcattcaccatcagggtggcagtagtggcttgatggctgcaacatcatcctttgttgat

SEQ ID NO: 23590 - DNA, 110 bp, synthetic construct
  source 1..110: mol_type = other DNA
ctcatagacagaggagtgtataaagaagatgtggtgcatatacttgatggaatattactcagctatgaaaaggagttcctgtcattaaataggagttcctgtcgtggctc

SEQ ID NO: 23591 - DNA, 110 bp, synthetic construct
  source 1..110: mol_type = other DNA
gaagcacatcagtgtgccaagaacaagctgctagatccccttaaagctgctgagccttggttagagaaggagatggtgatcaggctgaggacaaagtcaagatgtgtgct

SEQ ID NO: 23592 - DNA, 110 bp, synthetic construct
  source 1..110: mol_type = other DNA
gaggatttacaggcttgacttggctgcagggctataagataaagctggcttaggtatctgacacaggcattttatctttatttgttctggttacccagggaccataagaa

SEQ ID NO: 23593 - DNA, 110 bp, synthetic construct
  source 1..110: mol_type = other DNA
tttaattagattaccaaagaatggaagagataagacatgaggatcaattgagatggtgaagcaagaggactcagagttcatggagattttcccaagaaaacatcaaaaat

SEQ ID NO: 23594 - DNA, 110 bp, synthetic construct
  source 1..110: mol_type = other DNA
aaaaaaaggaaaggaaaaaacacaccttgaccaaaaatgttgtgttcccacttttagcttagttttgcaacagtgtggcagtcagcttggcacttggtcttccctctttc

SEQ ID NO: 23595 - DNA, 110 bp, synthetic construct
  source 1..110: mol_type = other DNA
ctaatccactgtgccgccagaaaactcctggaacaattccatttgaaagaaactcaaactgtttaaatgacttgtgtacatcaagtggatgagaaaaaaatccaagctga

SEQ ID NO: 23596 - DNA, 110 bp, synthetic construct
  source 1..110: mol_type = other DNA
tactagtttatttacagtgtcatgtcaatttctgctgtacagcatagtgactcggccacacatatatatgtacaccaccccaaaccaaggggcttttagatggatgtttt

SEQ ID NO: 23597 - DNA, 110 bp, synthetic construct
  source 1..110: mol_type = other DNA
aaaatacatttctcactacagcagtgacttcatcaacaacttcacacatctccgagaagagcacctgatgggagttctttccaaatgtatttaattactgaagtgagttt

SEQ ID NO: 23598 - DNA, 110 bp, synthetic construct
  source 1..110: mol_type = other DNA
gttaatcataggcctggctattggcccttggcttctcattcttttcttgcttttcacaagggccacaagggcagagaaaaaaagagagagagagagagacttcaatgagc

SEQ ID NO: 23599 - DNA, 110 bp, synthetic construct
  source 1..110: mol_type = other DNA
cttttttattcctccaaaccaggcagtaaacacagcatcacttaaaactttctttaagccagtgggacacctgtttatgtcttttctctcgctcaacccccacagcaatt

SEQ ID NO: 23600 - DNA, 110 bp, synthetic construct
  source 1..110: mol_type = other DNA
gatggtgttatcatcatggtgccactcaggccaaaatttcctccttatcctctcatagcacatggccagattgatcagctcaacctttatcagcccttcaggtctcatca

SEQ ID NO: 23601 - DNA, 110 bp, synthetic construct
  source 1..110: mol_type = other DNA
tagcacatggccagattgatcagctcaacctttatcagcccttcaggtctcatcacaggtaaggttcacatttcttggccaagtgtccaaaaacagtggcctcgagagtg

SEQ ID NO: 23602 - DNA, 110 bp, synthetic construct
  source 1..110: mol_type = other DNA
attttcaggcatattctagccctcattctttgtcaaaagattatattttctacgttgctcgcttgcacctgggaatatatttggctccttatttcaatgagacaaaactc

SEQ ID NO: 23603 - DNA, 110 bp, synthetic construct
  source 1..110: mol_type = other DNA
aaattcatgcctagaacacagcaaggaggcttaagatactaatagctcatggtaaatttctcagattctatcctgttgtatcaggatggcctaggatacagtgacagggg

SEQ ID NO: 23604 - DNA, 110 bp, synthetic construct
  source 1..110: mol_type = other DNA
tttaatttaacttgactaattatactcacagccaacctcatgcacacgtacttggctgacatgtcctttatctgatgtgctgcttcagctgtaataacgtacattagcta

SEQ ID NO: 23605 - DNA, 110 bp, synthetic construct
  source 1..110: mol_type = other DNA
actctgggattcacctgtaaggcctcagacatctgtgcatcagtgagaagagactgagtatgtccaaatagccaaccaggcagctgggccttgcctgcagctgacacatt

SEQ ID NO: 23606 - DNA, 110 bp, synthetic construct
  source 1..110: mol_type = other DNA
ctgcatcctggtgctgcagagggactgttgatcatgttgcaccacaaccggaactcctcccacgtgcttaaaaaatagtcatcattgcattatatttttaaatatattta

SEQ ID NO: 23607 - DNA, 110 bp, synthetic construct
  source 1..110: mol_type = other DNA
aaccggaactcctcccacgtgcttaaaaaatagtcatcattgcattatatttttaaatatatttactatttatgaagactttgtctctcatcagcaaaatctcaagtcaa

SEQ ID NO: 23608 - DNA, 110 bp, synthetic construct
  source 1..110: mol_type = other DNA
cccccgagcagcatggtcacaccatctgcacttactttgttttccaatgttcattgcagcactattttcaatagtcaagacacggaaacaaatgaaatgtctattgacag

SEQ ID NO: 23609 - DNA, 110 bp, synthetic construct; identical to SEQ ID NO: 23608
  source 1..110: mol_type = other DNA

SEQ ID NO: 23610 - DNA, 110 bp, synthetic construct
  source 1..110: mol_type = other DNA
aaggacctttgatgccagagaccaaagcaatttattagatcagggaaagaggacctagaaaaaggcaagctttattcatgctcacagagaagtgcacagccacttccagt

SEQ ID NO: 23611 - DNA, 110 bp, synthetic construct
  source 1..110: mol_type = other DNA
gcatcttctataatgagtgtgatcccttgtctttttatccgttttaaaatgagacagtgtaagtgctatgaagaaggaattgttgtctctctttacttgctattgcaact

SEQ ID NO: 23612 - DNA, 110 bp, synthetic construct
  source 1..110: mol_type = other DNA
agtgtaagtgctatgaagaaggaattgttgtctctctttacttgctattgcaactcttgaggcttgcataaatttgggctgtagatgtattacctaaaggaatggacagg

SEQ ID NO: 23613 - DNA, 110 bp, synthetic construct
  source 1..110: mol_type = other DNA
ctgagctgctgcagtgacaacttgggtctttagcctgctaagctaccagggaacgcctgttgttactttttaaagaacaactaccataggtcaggcattattctagaagt

SEQ ID NO: 23614 - DNA, 110 bp, synthetic construct
  source 1..110: mol_type = other DNA
gggggcgtcccatcctggtaacctagagagggcttctgtgcccatggtacagagagccaagctctgatagtggaagtctgcagcaaagtaagggtttatttgcagggagc

SEQ ID NO: 23615 - DNA, 110 bp, synthetic construct
  source 1..110: mol_type = other DNA
caacttaccagaagatacagcaattacagatactttgtaccaaacatcagagctccagaatcatcaaacttttacaagattgaaataaacttttaaaatattgaagagag

SEQ ID NO: 23616 - DNA, 110 bp, synthetic construct
  source 1..110: mol_type = other DNA
cagaagtaatttatggaagtacttttcttaacaaagaatgagctgctgaacagccttgattctctggtagctgagaaacatctgacagtggatgccagagtctattccta

SEQ ID NO: 23617 - DNA, 110 bp, synthetic construct
  source 1..110: mol_type = other DNA
aagggacaattcttatgtctcgcacagcacctaccacaatggtaaccacatagcattgtttttcctccagcttgtttgtggactgggctctgtggcagatggtactttta

SEQ ID NO: 23618 - DNA, 110 bp, synthetic construct
  source 1..110: mol_type = other DNA
ttgtttttcctccagcttgtttgtggactgggctctgtggcagatggtacttttaaagatagtcctcaaatatctcccatcacatatattcttttttttttaatggctgc

SEQ ID NO: 23619 - DNA, 110 bp, synthetic construct
  source 1..110: mol_type = other DNA
tctccctggtcaggacacattctctccaaccgccagccccaccacactgtcaagagctgtcatgctttgaaactaaaacagaagttttccaacaacagaagagaacaaat

SEQ ID NO: 23620 - DNA, 110 bp, synthetic construct
  source 1..110: mol_type = other DNA
actgtggctcaaaacttctccctattctagtagaccgtgttctccaggggaaaattaatacagtatagtcatccagccttagcgctgacagtcccttactggaattctgc

SEQ ID NO: 23621 - DNA, 110 bp, synthetic construct
  source 1..110: mol_type = other DNA
taatacagtatagtcatccagccttagcgctgacagtcccttactggaattctgctatgctgaatcacgttcagttaactgttccccacaatggaacacacacattattt

SEQ ID NO: 23622 - DNA, 110 bp, synthetic construct
  source 1..110: mol_type = other DNA
cactgtactttcctcaaaggagaaaaatctgtctgaatcagattatgcaacttttggaaagcagctggttcttgtttaagcgcacacaaattttctaaagatatgagtcc

SEQ ID NO: 23623 - DNA, 110 bp, synthetic construct
  source 1..110: mol_type = other DNA
ggaaagcagctggttcttgtttaagcgcacacaaattttctaaagatatgagtcctaagaggaaactaaattttattttggagataaaaaaatgtatatccagacctaaa

SEQ ID NO: 23624 - DNA, 110 bp, synthetic construct
  source 1..110: mol_type = other DNA
atttcagtcattttaaattaattaagataggagttcctattgtgtctaagtggttaacaaacctgactagcatccatgagaatgctggttcagccttgctcagtgggtta

SEQ ID NO: 23625 - DNA, 110 bp, synthetic construct; identical to SEQ ID NO: 23624
  source 1..110: mol_type = other DNA

SEQ ID NO: 23626 - DNA, 110 bp, synthetic construct
  source 1..110: mol_type = other DNA
gtttctccaacacctggtaaaattaaaatgcctaaagacgagggaaggatatgtctcaagagctgtcataaaactaattaacagaagagtctgaaattctcttgccgtca

SEQ ID NO: 23627 - DNA, 110 bp, synthetic construct
  source 1..110: mol_type = other DNA
tcaagagctgtcataaaactaattaacagaagagtctgaaattctcttgccgtcagaagtggtgtgatctagcctaggaagcggatttccttggttctgtaaagggagaa

SEQ ID NO: 23628 - DNA, 110 bp, synthetic construct; identical to SEQ ID NO: 23626
  source 1..110: mol_type = other DNA

SEQ ID NO: 23629 - DNA, 110 bp, synthetic construct; identical to SEQ ID NO: 23627
  source 1..110: mol_type = other DNA

SEQ ID NO: 23630 - DNA, 110 bp, synthetic construct
  source 1..110: mol_type = other DNA
cttcactctgtctctcaaattcattcttccagagttttagctggaaagtatcctattaaatccactgctgaatgcagccatagtagtttctgttcaagtatagacatctg

SEQ ID NO: 23631 - DNA, 110 bp, synthetic construct
  source 1..110: mol_type = other DNA
gacattggtttgccacctacttctgccacttactggccctggatcttgggtgaatgacctaaatcctctgggtttcctcatctgttaaatacagaagagcaagactagct

SEQ ID NO: 23632 - DNA, 110 bp, synthetic construct
  source 1..110: mol_type = other DNA
gacctaaatcctctgggtttcctcatctgttaaatacagaagagcaagactagctcaagatgtcttgtgagacagcaaaattatttgctaaatagcaaagtgttatataa

SEQ ID NO: 23633 - DNA, 110 bp, synthetic construct
  source 1..110: mol_type = other DNA
gctaaagccaccattatgtttcctaagactgttgtaagtttcctcactgagctctgatttctcttgtctcctacaatccactctccattgttgtacaaggggtttttcaa

SEQ ID NO: 23634 - DNA, 110 bp, synthetic construct
  source 1..110: mol_type = other DNA
gtctccttgaagaggccttaaaatcccacaataagttctggagcacttgatttgaatatggacctgctgggctccaagctttttcatgttctcctctgaatcatcagagg

SEQ ID NO: 23635 - DNA, 110 bp, synthetic construct
  source 1..110: mol_type = other DNA
atatggacctgctgggctccaagctttttcatgttctcctctgaatcatcagaggagacattactgacccactggaacacctccgggagcatcagttgtgcaggtgagtc

SEQ ID NO: 23636 - DNA, 110 bp, synthetic construct
  source 1..110: mol_type = other DNA
aggggcccaagtaaagccttgcctgaatttttgcctggccccttatcaatttctaatggttaaggaggccaagaacccacgtcggtaacattagctccaggaaacttgct

SEQ ID NO: 23637 - DNA, 110 bp, synthetic construct
  source 1..110: mol_type = other DNA
atggttaaggaggccaagaacccacgtcggtaacattagctccaggaaacttgctaccttcaggaaacaaaccttacaaatatttgggagcttaagctcagattctcaga

SEQ ID NO: 23638 - DNA, 110 bp, synthetic construct
  source 1..110: mol_type = other DNA
atctctcttttgaattccatgtctgtcagactgcagagttatgtttcattgttgactgcttgaggtgagttctcctgttggtataacggggaatggtttctgagcttctt

SEQ ID NO: 23639 - DNA, 110 bp, synthetic construct; identical to SEQ ID NO: 23638
  source 1..110: mol_type = other DNA

SEQ ID NO: 23640 - DNA, 110 bp, synthetic construct
  source 1..110: mol_type = other DNA
tcctcctcttagtctttgcacctctcatcatcagaagccaaactctaggcctattcacccatgccctgggcccaagagctggccaggtgttctttgttttctaatctcaa

SEQ ID NO: 23641 - DNA, 110 bp, synthetic construct
  source 1..110: mol_type = other DNA
tggcagctgcagctccagttttacccctagcctgggaacttccatatactgcaggtttggcagtaaaaaacgaagattaccactgtgttcttttcaaaaactaagcacca

SEQ ID NO: 23642 - DNA, 110 bp, synthetic construct
  source 1..110: mol_type = other DNA
tttggcagtaaaaaacgaagattaccactgtgttcttttcaaaaactaagcaccacaggaaatgcacaaaaagctaaaaaacaacagggtgggtgagggaacagtgtgga

SEQ ID NO: 23643 - DNA, 110 bp, synthetic construct
  source 1..110: mol_type = other DNA
cagtatttatcaattcttcaggtggagaaatcaaagctcagaaatgttcttacactttggcctcatgtgctgcatcaagttcaggtgtccagagcttggcaaaaaggaac

SEQ ID NO: 23644 - DNA, 110 bp, synthetic construct
  source 1..110: mol_type = other DNA
tatgtaacagcgctctgaaagaaaaacggggtccaggctaaaggagcatttgagcagcagacttcaaaagcccagaatcagtgttgtgctctccttgtaaggctgctcca

SEQ ID NO: 23645 - DNA, 110 bp, synthetic construct
  source 1..110: mol_type = other DNA
gaagttcccaggccagggatcgagcctgtgttgtcacagcaatgaaaacaaatgcaggaaacttaagcagctaggccatcaggggactcccgagattgcctctcaaaatc

SEQ ID NO: 23646 - DNA, 110 bp, synthetic construct
  source 1..110: mol_type = other DNA
aggaaacttaagcagctaggccatcaggggactcccgagattgcctctcaaaatcactaatcccaactgcaaagaagagtgtgctgccacttcaccatctttcaaggtgg

SEQ ID NO: 23647 - DNA, 110 bp, synthetic construct
  source 1..110: mol_type = other DNA
ctttgaactgtaccaggccaaggacactaccagccatattcagaacagcaccttccagctgtaaccttatggtctcaaggtctccctggtaactatgtaactattttgaa

SEQ ID NO: 23648 - DNA, 110 bp, synthetic construct
  source 1..110: mol_type = other DNA
ctctcatccatgcgccacacaaggctagcaacacaagcagtcacagctcctgggttcacagtctgctgaaaactccttaacagcagctgaagcctgaacacacccccaca

SEQ ID NO: 23649 - DNA, 110 bp, synthetic construct
  source 1..110: mol_type = other DNA
gagcaaatgttggccacaaaggtgaaattttgtttttttcacgtgctcccttctgtggttagcttcggatttggcagagtggacagcagcttccaaatcgtgacctctgg

SEQ ID NO: 23650 - DNA, 110 bp, synthetic construct
  source 1..110: mol_type = other DNA
tcacatcatacttgaggccgtcgtagcgcttccgcagggagtcatttttgaggttgagaaggcggaagccggaatccagctcattgatgaaggtggagatgtgcaggggc

SEQ ID NO: 23651 - DNA, 110 bp, synthetic construct
  source 1..110: mol_type = other DNA
gagaaggcggaagccggaatccagctcattgatgaaggtggagatgtgcaggggcctcgcgtaatctcctgcagtcacgctgttgaccgacagcctcgactgcacggaga

SEQ ID NO: 23652 - DNA, 110 bp, synthetic construct
  source 1..110: mol_type = other DNA
tgtccttcacactgctctgtgaattctgtcgctggcccctagggcagcttgggacacagactgtctgacaaacagttgtgggctctgtgatttgcccttaagtacctgtt

SEQ ID NO: 23653 - DNA, 110 bp, synthetic construct
  source 1..110: mol_type = other DNA
gtaaatctcaacacttgggattatttttcaattgatacgtaggtgacatatttctggccattttctgctcagaaacaaaaaatataattgtttgggaagttagggcttca

SEQ ID NO: 23654 - DNA, 110 bp, synthetic construct
  source 1..110: mol_type = other DNA
ggccattttctgctcagaaacaaaaaatataattgtttgggaagttagggcttcacttgggtggagagttactgtcccattgatgcagtaacagaagatttcacatgctg

SEQ ID NO: 23655 - DNA, 110 bp, synthetic construct
  source 1..110: mol_type = other DNA
ctaggcagcattcttttacaaaaggcacagagccagcatgactcagcactggcagcagagcgcaagggtcagaactcagggaatagatccaatatggagtcaggtttgtt

SEQ ID NO: 23656 - DNA, 110 bp, synthetic construct
  source 1..110: mol_type = other DNA
cagagcgcaagggtcagaactcagggaatagatccaatatggagtcaggtttgttctctgtaacatctccagtcctgggaactgcctcaggggcttcacagatgccaaga

SEQ ID NO: 23657 - DNA, 110 bp, synthetic construct
  source 1..110: mol_type = other DNA
atacatcaagtaatgtgaggaattacagttactgggatttgaacccatgtatctacgcagcagctgaagtaacaaactcagcgctgaccctgtgccgggtgctgcacggg

SEQ ID NO: 23658 - DNA, 110 bp, synthetic construct
  source 1..110: mol_type = other DNA
cgcagcagctgaagtaacaaactcagcgctgaccctgtgccgggtgctgcacgggcgtcggggtgggaggctgtgtatcccttggggaagagagggacccggcccttccc

SEQ ID NO: 23659 - DNA, 110 bp, synthetic construct
  source 1..110: mol_type = other DNA
gtgaactttcatcttcatcccgtgccctgtctgctttgtgtcccccaagtgtggtcccgcctacatctacaagttgaactaggtttgaaggcgatttgagtaggagctgg

SEQ ID NO: 23660 - DNA, 110 bp, synthetic construct
  source 1..110: mol_type = other DNA
cccgcctacatctacaagttgaactaggtttgaaggcgatttgagtaggagctggtgcaaaagaagccaactgccccggggctgagggttcatcccctgctcccaggcct

SEQ ID NO: 23661 - DNA, 110 bp, synthetic construct
  source 1..110: mol_type = other DNA
gatcacagctccccgagcaaaccacctgctcctcgttttctggggctttgaaggtcgcaaagagaccgctcagtgttacccagaaggccacgcgccggtattgagcttat

SEQ ID NO: 23662 - DNA, 110 bp, synthetic construct
  source 1..110: mol_type = other DNA
cgcaaagagaccgctcagtgttacccagaaggccacgcgccggtattgagcttatttgcatacgtgctcctgccggggcggggctgacagggggcagggccgcgcgcgct

SEQ ID NO: 23663 - DNA, 110 bp, synthetic construct
  source 1..110: mol_type = other DNA
ttcagtgaacccaggggtggacagagggtcccaacatagagagttggctttaagtgaggtcccggaactgggcttggaaccttctcttccagactcttagctacaatttt

SEQ ID NO: 23664 - DNA, 110 bp, synthetic construct
  source 1..110: mol_type = other DNA
taaacaggggaaagaggcagatccccatacagagtgagtctaaatcattcacatggctgccatcccccctcaccacacctccaagggcgtgacacccagctctgcatgct

SEQ ID NO: 23665 - DNA, 110 bp, synthetic construct
  source 1..110: mol_type = other DNA
gctgccatcccccctcaccacacctccaagggcgtgacacccagctctgcatgcttcgcggtgtggggaaagggggaagggtcactctatggtgcagacatctgacagat

SEQ ID NO: 23666 - DNA, 110 bp, synthetic construct
  source 1..110: mol_type = other DNA
gcactaatgatggaactaccagtacctagtatgtgctgtgcactttatatttttcttgtgttatttcattcaaatttcagattggtcttatgatttcttagctttaaacc

SEQ ID NO: 23667 - DNA, 110 bp, synthetic construct
  source 1..110: mol_type = other DNA
ttgtgttatttcattcaaatttcagattggtcttatgatttcttagctttaaacctacaccccttttctttcaactgtccttcggtacattgagaatagtctcaaaggga

SEQ ID NO: 23668 - DNA, 110 bp, synthetic construct
  source 1..110: mol_type = other DNA
ttacctagaaaattcgttcttttttttgtatcctcaacgtagtgaaactgtacatagtaagcaggtcagctaggtgtttacacagtgtcttgcttttgaaagtcttagag

SEQ ID NO: 23669 - DNA, 110 bp, synthetic construct
  source 1..110: mol_type = other DNA
agtaagcaggtcagctaggtgtttacacagtgtcttgcttttgaaagtcttagagctggagatgtaacttccgcggcgtgcagggcctctcttggtgcaaggtcagggca

SEQ ID NO: 23670 - DNA, 110 bp, synthetic construct
  source 1..110: mol_type = other DNA
ttatatataaagagggcccagaccacgaacagcaacagcagctcctcctccgatgtctccacacacagctaatggcagcgccagtctctctatagccctggaagcaatcg

SEQ ID NO: 23671 - DNA, 110 bp, synthetic construct
  source 1..110: mol_type = other DNA
aaatgcagtatctgagaagcatgataaagcgaattgcaataatatgaagcctgcctggactttgcccaagctttgtgttccaattgtcatgtgtgttacatctacctatg

SEQ ID NO: 23672 - DNA, 110 bp, synthetic construct
  source 1..110: mol_type = other DNA
tggactttgcccaagctttgtgttccaattgtcatgtgtgttacatctacctatgttataaaccccacataaacaatgttatgctttttgctctaagcaaccaagtgcat

SEQ ID NO: 23673 - DNA, 110 bp, synthetic construct
  source 1..110: mol_type = other DNA
atgggtggggggtgtcttctctgaaagccctgcttctgtagttgaagccttgctcactgggtaccatggtgccacctggatctgctccttctgaccactcttctgcctcc

SEQ ID NO: 23674 - DNA, 110 bp, synthetic construct
  source 1..110: mol_type = other DNA
actgggtaccatggtgccacctggatctgctccttctgaccactcttctgcctccagaggaagccctgcctcccccagaccgttgccttctttggtaacctgctccgtga

SEQ ID NO: 23675 - DNA, 110 bp, synthetic construct; identical to SEQ ID NO: 23673
  source 1..110: mol_type = other DNA

SEQ ID NO: 23676 - DNA, 110 bp, synthetic construct; identical to SEQ ID NO: 23674
  source 1..110: mol_type = other DNA

SEQ ID NO: 23677 - DNA, 110 bp, synthetic construct
  source 1..110: mol_type = other DNA
taagtttcacaatacaatagattttaaaaagagaaagaaatgctcagtgggtgaaacatgtcattctgcaaagaagagacctgtctcctggagtgctcctagtcagagtg

SEQ ID NO: 23678 - DNA, 110 bp, synthetic construct
  source 1..110: mol_type = other DNA
acatgtcattctgcaaagaagagacctgtctcctggagtgctcctagtcagagtgggcagttcccgtggagccaaagaatcttctactatcttttccgtttttttttttt

SEQ ID NO: 23679 - DNA, 110 bp, synthetic construct
  source 1..110: mol_type = other DNA
ggtcagagttttacctctgaggtcaggctcctagtgacataactaaactttggccaagagcaggttgcagaatttgggagtttggcttcagcctgcagggccctttgtag

SEQ ID NO: 23680 - DNA, 110 bp, synthetic construct
  source 1..110: mol_type = other DNA
aagagcaggttgcagaatttgggagtttggcttcagcctgcagggccctttgtagctttgctccacctggtaaggatcccacactttccagggttgtcataagccttggg

SEQ ID NO: 23681 - DNA, 110 bp, synthetic construct
  source 1..110: mol_type = other DNA
ggctctgctcagtgggttcaaggatccatggttgccgtgagctatggtgtgagtcacagatgaaaagaaacttggcgtaggccggcagctgcagctcctattcgacccct

SEQ ID NO: 23682 - DNA, 110 bp, synthetic construct
  source 1..110: mol_type = other DNA
cgtgagctatggtgtgagtcacagatgaaaagaaacttggcgtaggccggcagctgcagctcctattcgacccctagactgggagtttccatctgctgcaggtgcggccg

SEQ ID NO: 23683 - DNA, 110 bp, synthetic construct
  source 1..110: mol_type = other DNA
tggacaaatgaccaaaaacccaactgccacttaagagctgggagcaaaaacggtgtcgggagcaaaattggggaattaccatgcccccggcacacaacaccaccaaaggg

SEQ ID NO: 23684 - DNA, 110 bp, synthetic construct
  source 1..110: mol_type = other DNA
gataatatctctcaaagacgcactggtgtcctaatccccacaacttgtgaaattactttatttggaaaaaaggatctggcagatgtgattaaggtaaggaggctgagagg

SEQ ID NO: 23685 - DNA, 110 bp, synthetic construct
  source 1..110: mol_type = other DNA
ctttatttggaaaaaaggatctggcagatgtgattaaggtaaggaggctgagaggaggagatgacggggtagatgaggattatctggggtggatgcacaagtgtcttgtg

SEQ ID NO: 23686 - DNA, 110 bp, synthetic construct
  source 1..110: mol_type = other DNA
agtcaggccaatgccaaggcaaacaggggcctcgcacggacccactgagggctcacagactgagctctgttggcctgaggggcggttctggaaaagaggcccctgtgtgg

SEQ ID NO: 23687 - DNA, 110 bp, synthetic construct
  source 1..110: mol_type = other DNA
cagactgagctctgttggcctgaggggcggttctggaaaagaggcccctgtgtggttcaaggccgtcactccagcagggaccaaggcctgaggccagaagccctctggga

SEQ ID NO: 23688 - DNA, 110 bp, synthetic construct
  source 1..110: mol_type = other DNA
gggagagaggtaaggggacagggctggggtggggcggggaatggggggggggttgaggggaggcctgggcacagtctccagccccacaaagaccccacagggaatgtctc

SEQ ID NO: 23689 - DNA, 110 bp, synthetic construct
  source 1..110: mol_type = other DNA
aggggaggcctgggcacagtctccagccccacaaagaccccacagggaatgtctcatctccatttccaggagccagcccctcctgtgcatctggaatgcaaatgctcaca

SEQ ID NO: 23690 - DNA, 110 bp, synthetic construct
  source 1..110: mol_type = other DNA
gtaactggctttccttaaggagctcagtagaacacgctcccaccaccaggagtggaggggggctccccctgctcttcctcctcctggccatccctctttctgcactcaat

SEQ ID NO: 23691 - DNA, 110 bp, synthetic construct
  source 1..110: mol_type = other DNA
aggggggctccccctgctcttcctcctcctggccatccctctttctgcactcaatctgccctcgcaagagtctggcctatctttgcacacccagagcaggtacagcaccc

SEQ ID NO: 23692 - DNA, 110 bp, synthetic construct
  source 1..110: mol_type = other DNA
aaatctgccacaattatcatgcaaagcacttctgctcaaaagctgccccttatacacacgcatgtgtgcacgtgggcacacatgggcaggcctcacccttccccacgtgc

SEQ ID NO: 23693 - DNA, 110 bp, synthetic construct
  source 1..110: mol_type = other DNA
gacacctaggacaccagggcctccacatctgtaatggccctcagatcccagcacgcctgtctgtggggaactccttcctcatacccggagaggcagagtgagtggcagcc

SEQ ID NO: 23694 - DNA, 110 bp, synthetic construct
  source 1..110: mol_type = other DNA
gcaaatatggtactgtggctactttggggaacacagatctgccacacagatctaactggaatcagaaaagactagaaaaaggctcagagatagcccaccaggtgtattct

SEQ ID NO: 23695 - DNA, 110 bp, synthetic construct
  source 1..110: mol_type = other DNA
gtccagcccacgtggaaggggagaagactctgaaagtgggtgaattccaggaggtccggctcattggagaccctctttggagtctggttaccagccccagaaggaggaca

SEQ ID NO: 23696 - DNA, 110 bp, synthetic construct
  source 1..110: mol_type = other DNA
ccggctcattggagaccctctttggagtctggttaccagccccagaaggaggacagcataggcctgatcctcctgcacctctacagccctgcctgaagctggatttgggg

SEQ ID NO: 23697 - DNA, 110 bp, synthetic construct
  source 1..110: mol_type = other DNA
gtcttcgtaactacccagtggaggggctgccagcatgatcccacttcacagatgcacagacagaaaatggtgaggggacaagttggacccagcaggtgtgacttctagtc

SEQ ID NO: 23698 - DNA, 110 bp, synthetic construct
  source 1..110: mol_type = other DNA
caatgatcaccctgtatcccacacagaagctctgtaagtggggggttgaggggtgatcatttcagcagtgtggggaagacacagagtgggggcagacaggctcatcaggg

SEQ ID NO: 23699 - DNA, 110 bp, synthetic construct
  source 1..110: mol_type = other DNA
atcatttcagcagtgtggggaagacacagagtgggggcagacaggctcatcagggagctactggaaccccatgactctggccttcacccctagctccctcaggcccttgg

SEQ ID NO: 23700 - DNA, 110 bp, synthetic construct
  source 1..110: mol_type = other DNA
cacgctgcgcccgagcacgggcctgctggagaaaatgtgatttcacacccaggccctcggccaagcattcatggccatccagggctggggccacttccggctggctggtc

SEQ ID NO: 23701 - DNA, 110 bp, synthetic construct
  source 1..110: mol_type = other DNA
ctcggccaagcattcatggccatccagggctggggccacttccggctggctggtcacggggtgtctccccagacaccctctctccttcctcttcccaccaccaaggctct

SEQ ID NO: 23702 - DNA, 110 bp, synthetic construct
  source 1..110: mol_type = other DNA
tgtctatgcaggtgagactgggagccgggctcctcctccagagccctgaagggcaaagcatgattaaccaagtaaaggagaggataaagcttgttctggccaaggaagag

SEQ ID NO: 23703 - DNA, 110 bp, synthetic construct
  source 1..110: mol_type = other DNA
aagcatgattaaccaagtaaaggagaggataaagcttgttctggccaaggaagagcactggggaggtacagaggcgagagcgtgggctgcggatgggaccctcagtccag

SEQ ID NO: 23704 - DNA, 110 bp, synthetic construct
  source 1..110: mol_type = other DNA
cctaacaagttgttatgggtatctgcgaaatctgaaaaacaaaaccaggatctgactgaggatttgggagtgggttgttttcagagttttggttcttctttttttttttt

SEQ ID NO: 23705 - DNA, 110 bp, synthetic construct
  source 1..110: mol_type = other DNA
ctgaggatttgggagtgggttgttttcagagttttggttcttcttttttttttttttttttttggttaacttagggcattgcaaaatccagctgagccacctaccgcctc

SEQ ID NO: 23706 - DNA, 110 bp, synthetic construct
  source 1..110: mol_type = other DNA
agaggaaggcccgagtgctcttgaccaggagctttgagacacacctggggaccgaccaatcagtccttccatgacctcagagggacaaagtcactgcacagtactgctct

SEQ ID NO: 23707 - DNA, 110 bp, synthetic construct
  source 1..110: mol_type = other DNA
cttttggcctaatttctggtccacaactgttcaccatggggctaagatcagtgcatgatgttagaaactctataccatcgacgatttctctgaagcaacattgcttccat

SEQ ID NO: 23708 - DNA, 110 bp, synthetic construct
  source 1..110: mol_type = other DNA
atggggctaagatcagtgcatgatgttagaaactctataccatcgacgatttctctgaagcaacattgcttccatgagttatgatattatattataattgtattaaaatg

SEQ ID NO: 23709 - DNA, 110 bp, synthetic construct
  source 1..110: mol_type = other DNA
gtggatgttggaaggttgttctgggggtccaagcaaagtggggcccacaggggtagagcctggcagtgttgtaatctgcccttgattaattggagatctggggagattgc

SEQ ID NO: 23710 - DNA, 110 bp, synthetic construct
  source 1..110: mol_type = other DNA
tacttatttacggtcaacaggtagtcaccatccccgacctctgcagaacaactcaaagatatgcatgactgttatctacattccttcaggaggagcaggagtcctatgac

SEQ ID NO: 23711 - DNA, 110 bp, synthetic construct
  source 1..110: mol_type = other DNA
cactaggactaggtcaggtatggcattgggagagctcatagcaaaacatgatgcaggaacctctacgtttgatattatatgtaactacatttcccatgtagggaaaagca

SEQ ID NO: 23712 - DNA, 110 bp, synthetic construct
  source 1..110: mol_type = other DNA
aactgtcacaacttgaatggggtctaaggattagatggtgctaaacatcacaataacaactttctggtttttatgctgtattgagttatgcaggagaacatgtttgtttg

SEQ ID NO: 23713 - DNA, 110 bp, synthetic construct
  source 1..110: mol_type = other DNA
tagctgaaagtaggggtaatttgctaccacattacaatttggcgcaagataactgatacagagattactgtcagagtggcttttggaaacatacactcccccttggtaga

SEQ ID NO: 23714 - DNA, 110 bp, synthetic construct
  source 1..110: mol_type = other DNA
aagcaatgaaaagcaggcagaagaaataggagctaagtctactcttgaaaacaggaaaacttcaatgggtgagatttatacatttgtagttttttgcctaagggcaatct

SEQ ID NO: 23715 - DNA, 110 bp, synthetic construct
  source 1..110: mol_type = other DNA
catgaaagaattaccaattacaaaaagaaaaatgattactttataacagagaaacccaacagacatgaacttgacaaggtttcaaggttaaacacaggcacactaagagc

SEQ ID NO: 23716 - DNA, 110 bp, synthetic construct
  source 1..110: mol_type = other DNA
tcctgctcccgccccaaggccttttctcctctcctgccctctgccgtgaacgcgctcccccaagtttgctcattccattcagctctttctccaaggtcaccttctccgca

SEQ ID NO: 23717 - DNA, 110 bp, synthetic construct
  source 1..110: mol_type = other DNA
aagaggccctgcagctctggggagaggggggccggccggccctgaggccagtactggtacagccactggaccacaggatctgggaagaggtggtacgagatctgcgcccc

SEQ ID NO: 23718 - DNA, 110 bp, synthetic construct
  source 1..110: mol_type = other DNA
atttgtcagttcatatcaattcctgacacagtatcattttggttaagactcagtctcattgttgttttgaagcttcaacctcgtctttcctccaaaacagcctctaccat

SEQ ID NO: 23719 - DNA, 110 bp, synthetic construct
  source 1..110: mol_type = other DNA
tcattgttgttttgaagcttcaacctcgtctttcctccaaaacagcctctaccatgtcaaccttcaatgtagactagatgttcggcttccatgacttggggtggggggta

SEQ ID NO: 23720 - DNA, 110 bp, synthetic construct
  source 1..110: mol_type = other DNA
caaaggtcagaagacagagcaagtgccccagcctgggcagaccaggtcctctgcgcctaattatatccagagacgtccagaagaggatcgaggaccttagccccagccaa

SEQ ID NO: 23721 - DNA, 110 bp, synthetic construct
  source 1..110: mol_type = other DNA
gtctgccaagatttaagctcctcagagctgattatctgggtttagcaaaggatgtgatccctcccctttccaggagctggagattgggagtccgtcccctcctagggtta

SEQ ID NO: 23722 - DNA, 110 bp, synthetic construct
  source 1..110: mol_type = other DNA
gatccctcccctttccaggagctggagattgggagtccgtcccctcctagggttaagtgtcccccaggtgctcccctcccccactgcctgcttccgtgatgcccctgaac

SEQ ID NO: 23723 - DNA, 110 bp, synthetic construct
  source 1..110: mol_type = other DNA
tattacaagatgaatgaggtctgggggcttgggcagatgggaacctaagcaagcagtgtctctggccctgccccagctctcagcaactggaggtttcccaacagagacca

SEQ ID NO: 23724 - DNA, 110 bp, synthetic construct
  source 1..110: mol_type = other DNA
aggtagggctctttaagccaaagcacctggcaaactgccaacccgataaccttagtgggttaagtggggcacagggctgctttttccttcaagcaggatttcttagcttt

SEQ ID NO: 23725 - DNA, 110 bp, synthetic construct
  source 1..110: mol_type = other DNA
tgggttaagtggggcacagggctgctttttccttcaagcaggatttcttagctttgacactaattctgaatcttaatcccaggctttccacaaggggtgacaggaagaga

SEQ ID NO: 23726 - DNA, 110 bp, synthetic construct
  source 1..110: mol_type = other DNA
cagacaagccccacccaccaaagagacaagacaaagttccactgaccagtgtgtaggcactagtccctcccatcacaaaaccggccataaacccctctgtcgaccttacc

SEQ ID NO: 23727 - DNA, 110 bp, synthetic construct
  source 1..110: mol_type = other DNA
cttccaggagtttgagtccccttcctgggggcaaaagaatcacctagtggcctcattaaaacaaccactgggtcctaccttatttctaaatcagctgaaacggattcttc

SEQ ID NO: 23728 - DNA, 110 bp, synthetic construct
  source 1..110: mol_type = other DNA
ctcctctgtgatggcttataaatcttgatgtgcatggactggatttgcacaaatgaaagcagagcttaatttctccataatccagtctggggtagcgcggagatgatgtt

SEQ ID NO: 23729 - DNA, 110 bp, synthetic construct
  source 1..110: mol_type = other DNA
gtgggacaactcgctttccttacacgtgctgtaatgtgggccatgtagtgtggcctatgcaagcaaaacggaactgaaagatagctggagaaatggaaggttggagaagg

SEQ ID NO: 23730 - DNA, 110 bp, synthetic construct
  source 1..110: mol_type = other DNA
tatgcaagcaaaacggaactgaaagatagctggagaaatggaaggttggagaaggatggacaactaacgggtcatgggatctgcaaatacaggtgcaaacagataccctg

SEQ ID NO: 23731 - DNA, 110 bp, synthetic construct
  source 1..110: mol_type = other DNA
tttttcagcttgacaacacatcacataccacatgtatttatagaaataattgaggacttgaatttattcatctaaactaggcagcatcaagaattgtgcagtttttatga

SEQ ID NO: 23732 - DNA, 110 bp, synthetic construct
  source 1..110: mol_type = other DNA
gcagcatgtccagcatcatccaccaggtggcagtagctcctttctctccaactcgaattagccaaagtcctcaagggcaagaccacctgtcctatccagagcctggcttg

SEQ ID NO: 23733 - DNA, 110 bp, synthetic construct
  source 1..110: mol_type = other DNA
aggggtctccactggttacttcttttcttgctgctggaactggattcacttccactttgtcaaaatgtcaagatttgagtagtcaggaaacatgtgttgtcagagaggcc

SEQ ID NO: 23734 - DNA, 110 bp, synthetic construct
  source 1..110: mol_type = other DNA
tttgtcaaaatgtcaagatttgagtagtcaggaaacatgtgttgtcagagaggcctgttttacaataaacgtttacccccatgtgctctttgataggtcagctcagacct

SEQ ID NO: 23735 - DNA, 110 bp, synthetic construct
  source 1..110: mol_type = other DNA
ggtcaacactgaggcctgggaccagggctgcagttctggccctgaggagaggaaggagaggggcactagggcttactgctctctgttgagaggctgaattcttggttcgg

SEQ ID NO: 23736 - DNA, 110 bp, synthetic construct
  source 1..110: mol_type = other DNA
cggggcagaggacactctcagtcatgactggtgggaaacaggagctgaccagaaatagaattgggccctgagatgttggaccatacagttccttgagtgcattcacttct

SEQ ID NO: 23737 - DNA, 110 bp, synthetic construct
  source 1..110: mol_type = other DNA
cacactggactggccagtgtgcagcagtaggcccgcacttcccagagtcacccaggtcaagctgcaagtgcacacgtgctttacttaaagctcagctgcctttcaaggtg

SEQ ID NO: 23738 - DNA, 110 bp, synthetic construct
  source 1..110: mol_type = other DNA
tccacgcaggtgcctgcgcggatcagagcggtgcatgtcagctccagcaaaaaactgaatgtttagggagcacgagctcccatgtttcccttgcttgaggctgtttatgc

SEQ ID NO: 23739 - DNA, 110 bp, synthetic construct
  source 1..110: mol_type = other DNA
tgaatgtttagggagcacgagctcccatgtttcccttgcttgaggctgtttatgcataaatgagggcaactaacctgacacaggtcaacagagaacagtgctgggtctcc

SEQ ID NO: 23740 - DNA, 110 bp, synthetic construct
  source 1..110: mol_type = other DNA
cctgaagcttcttatccacttgatgcccttcagtgttcagaccacgtaggtactaaatcaccttcaagtgcataatagagttttataatcatgtgtatttaaaaagaata

SEQ ID NO: 23741 - DNA, 110 bp, synthetic construct
  source 1..110: mol_type = other DNA
agacagtgtctcgcaggtggagttggcttgtgggcatgtcactttgcaatgcccgggccccttctgggcccccagttgggcctctggtttctcagggctgcagatatggg

SEQ ID NO: 23742 - DNA, 110 bp, synthetic construct
  source 1..110: mol_type = other DNA
ggccccttctgggcccccagttgggcctctggtttctcagggctgcagatatggggggcgtgtcagtgcctttctacagggctagccttcacggctgcagcctcctcttc

SEQ ID NO: 23743 - DNA, 110 bp, synthetic construct
  source 1..110: mol_type = other DNA
atggtgtctggtcaagactcagccgggaccctgctgccgcgattgctgctgcttctgcattcagcttaagtcctcgagctgaatcctttctcttccaggaggggttatgt

SEQ ID NO: 23744 - DNA, 110 bp, synthetic construct
  source 1..110: mol_type = other DNA
aatatttctccaaagaatatacacaaatgaccaataagcacatgattagctgttctgcctcattgctcgttagggaaatgcaatcaaaaccacagtgagataccacttca

SEQ ID NO: 23745 - DNA, 110 bp, synthetic construct
  source 1..110: mol_type = other DNA
tgcctcattgctcgttagggaaatgcaatcaaaaccacagtgagataccacttcatatgaccaggatgactgtaattaaaaacaataagaacaatagcaactaagaattc

SEQ ID NO: 23746 - DNA, 110 bp, synthetic construct; identical to SEQ ID NO: 23744
  source 1..110: mol_type = other DNA

SEQ ID NO: 23747 - DNA, 110 bp, synthetic construct; identical to SEQ ID NO: 23745
  source 1..110: mol_type = other DNA

SEQ ID NO: 23748 - DNA, 110 bp, synthetic construct
  source 1..110: mol_type = other DNA
acaacagaggcaagtcaggatgtttaacggtgggggaagcctgggaaatgcagcagcacatcttcggcctcaacactcacggcttcttagcctggaatgatgcccccatt

SEQ ID NO: 23749 - DNA, 110 bp, synthetic construct
  source 1..110: mol_type = other DNA
acatcggccctgagagaagtcaaatctattttcttttcctgtatattttaattcgtgaagctaaagccttcgtttcaagaacagcactgacttcttttaatgacattcat

SEQ ID NO: 23750 - DNA, 110 bp, synthetic construct
  source 1..110: mol_type = other DNA
gagtgcgcttgtgtccatagcgataggtgtacttggtgagaaagccccagctgctggggctgcaggacacggggctgtgggtgcagcagatgcatcctcctgcccccacc

SEQ ID NO: 23751 - DNA, 110 bp, synthetic construct
  source 1..110: mol_type = other DNA
ggggctgcaggacacggggctgtgggtgcagcagatgcatcctcctgcccccacccaagcaccacccgaaggaaactggcggaggcagtggggagaccaggggtgctggg

SEQ ID NO: 23752 - DNA, 110 bp, synthetic construct
  source 1..110: mol_type = other DNA
ttctcagccaggtgggagaacaggttagtaaggtgccaaaggcaggccctggcgatggcagatccaggctgagctgggccatttggctctagcctctgctcccagctgct

SEQ ID NO: 23753 - DNA, 110 bp, synthetic construct
  source 1..110: mol_type = other DNA
ctgcctagagtcacaggctggaggtggcagaactgggaccctaactactctgtatccaaaggcccccattccaacccctgagctcaactgccttccttctgggaggccca

SEQ ID NO: 23754 - DNA, 110 bp, synthetic construct
  source 1..110: mol_type = other DNA
ctgttcctacatcagctaccacctgtgcagctttcacctgtccttgtcgccttcacaggaaaactcgacagtgaagacctttgagctccttggagtcagtatcagttctt

SEQ ID NO: 23755 - DNA, 110 bp, synthetic construct
  source 1..110: mol_type = other DNA
cggaggatcttcctgaccttttccagtgatggcagggggagctaatttagctcgctggttcagggttcagtcccccatctttcgcggcccttcctcgatctggagggcga

SEQ ID NO: 23756 - DNA, 110 bp, synthetic construct
  source 1..110: mol_type = other DNA
cctggatccagaagttccttttctgatgccctcctgtcctggtaacttgccagatggggtgttgacctgagctgttcccagcaactctgccccccaccagcctcagtttt

SEQ ID NO: 23757 - DNA, 110 bp, synthetic construct
  source 1..110: mol_type = other DNA
atgccagctctgctgtccacaccatcggcgttaggaatatcactggctctgtgctcagtccccagctgtaagtgtggacaaccgttggcctgtcccccaggctccatgtg

SEQ ID NO: 23758 - DNA, 110 bp, synthetic construct
  source 1..110: mol_type = other DNA
cagtccccagctgtaagtgtggacaaccgttggcctgtcccccaggctccatgtggaagcttggtgttcccactatgagcacagacaggtgcccaggtcagggtctggaa

SEQ ID NO: 23759 - DNA, 110 bp, synthetic construct
  source 1..110: mol_type = other DNA
tagtgctcataagggctcacggaatgtaatatctattctcccagcccaggtggctgtgctgtctaaatgggacttcatcttccatcactttaacttacaaacagctcggc

SEQ ID NO: 23760 - DNA, 110 bp, synthetic construct
  source 1..110: mol_type = other DNA
gcaaattaagagttaggcaaatgtggcctgaacccttgtttctccaactgtaagataaagctgaagccagatctaatgactgtgttttggctgattttcaaaggttgggt

SEQ ID NO: 23761 - DNA, 110 bp, synthetic construct
  source 1..110: mol_type = other DNA
taaagctgaagccagatctaatgactgtgttttggctgattttcaaaggttgggtttagtacagaaactgtgacatagtgtaagtggtatatgctaagatattatgatac

SEQ ID NO: 23762 - DNA, 110 bp, synthetic construct
  source 1..110: mol_type = other DNA
gtcttgaggctgtttgagttgatttgcaaaaactaaacaaaaggtaacatttcttgttcatccaatgatggaaaccatttctttaaccctaattatctagttttattttc

SEQ ID NO: 23763 - DNA, 110 bp, synthetic construct
  source 1..110: mol_type = other DNA
gtatgtcctgaacaactgagtgagtggtagcaactaagagtcttaacttggtggcacaggcctgccttggtatttttaccatcagaaagactgggtgggagctgagatga

SEQ ID NO: 23764 - DNA, 110 bp, synthetic construct
  source 1..110: mol_type = other DNA
acaggcctgccttggtatttttaccatcagaaagactgggtgggagctgagatgagaatctagtcttcaggacagggtcctgtaagcctctgctgcctctctgtgctgcg

SEQ ID NO: 23765 - DNA, 110 bp, synthetic construct
  source 1..110: mol_type = other DNA
gagtctgagtgtggctccttctctgctgtcccctgcacccagtgaagatggtgaagccatgctttctgagcttcttcccagcgacatgtctgggcctctgatgctgaggc

SEQ ID NO: 23766 - DNA, 110 bp, synthetic construct
  source 1..110: mol_type = other DNA
gccatgctttctgagcttcttcccagcgacatgtctgggcctctgatgctgaggccctatcacccaggggtccttcaactgctaccctcagacccttgaggatggtccag

SEQ ID NO: 23767 - DNA, 110 bp, synthetic construct
  source 1..110: mol_type = other DNA
gcattaaacaaagtaacaaagattttaatgcatctttattattattattattattttgtctttttagggagggccacacccacgacatatggaagttcccaggctaggtg

SEQ ID NO: 23768 - DNA, 110 bp, synthetic construct
  source 1..110: mol_type = other DNA
ttattattattattattattttgtctttttagggagggccacacccacgacatatggaagttcccaggctaggtgttgaaacagagctggagcttccggcttataccaca

SEQ ID NO: 23769 - DNA, 110 bp, synthetic construct
  source 1..110: mol_type = other DNA
ctaacagggtgcttatttgcccgtgaatagctttggctttttatttccttctcctttcttctttacacttagaagtacccctgcgttacttctcttattcattgtgctgt

SEQ ID NO: 23770 - DNA, 110 bp, synthetic construct
  source 1..110: mol_type = other DNA
tggtttacactgatgctgcagtagggttgggttatcttgtttctgctgaataatgataaaagtcctgagtctacactgagccctttcagtggaggggggagtagcttctt

SEQ ID NO: 23771 - DNA, 110 bp, synthetic construct
  source 1..110: mol_type = other DNA
ataaaagtcctgagtctacactgagccctttcagtggaggggggagtagcttcttgttactgccaggtgggctggaattccaggtgctcatgtgctttttctaactctgt

SEQ ID NO: 23772 - DNA, 110 bp, synthetic construct
  source 1..110: mol_type = other DNA
gtgggtgagagtgataaattctgtagatttcagaaaatgaaccaggtccttcaaagttcaaccataagctcctttgaaacaattttctacttgacatcttcaaggaaatg

SEQ ID NO: 23773 - DNA, 110 bp, synthetic construct
  source 1..110: mol_type = other DNA
ccatcgtaagctagaagtcacgtctctgtaggtacacaataacctcatttctttccccacctacctaggaacatttccaatcacattttataatgtatgagagagagaga

SEQ ID NO: 23774 - DNA, 110 bp, synthetic construct
  source 1..110: mol_type = other DNA
tttggagaaatgtctatttaggtgttctgcccatttttaaattggattttttttttcctgttgcattgtatgagttatttatgtattttggagattaagccctcgtcatt

SEQ ID NO: 23775 - DNA, 110 bp, synthetic construct
  source 1..110: mol_type = other DNA
tcctgttgcattgtatgagttatttatgtattttggagattaagccctcgtcatttggttacatcatttggtaatcactatatgcagatgacatgatactatatatagaa

SEQ ID NO: 23776 - DNA, 110 bp, synthetic construct
  source 1..110: mol_type = other DNA
ttttttccaattaggtttttgggtgagatgaatgttttccaggctgtgttctcaggagctctagggactctgcagaagaccccaggtctccttggatgcagtggggcttc

SEQ ID NO: 23777 - DNA, 110 bp, synthetic construct
  source 1..110: mol_type = other DNA
acataggcatctgacttgaacactctgggtcgggttcccatggggactctccatacaatctgccttttggagaagtgaattcaaaagaaagagagcactacgaagtttat

SEQ ID NO: 23778 - DNA, 110 bp, synthetic construct
  source 1..110: mol_type = other DNA
tgatgcagttttacgtatctctgccatttatgatgggaagaacagagagcatccgggaagtttaaaaacatatgtattctcaagtaaaagactgaacctggttcagatgt

SEQ ID NO: 23779 - DNA, 110 bp, synthetic construct
  source 1..110: mol_type = other DNA
aactctgctctccagggtgaccagaattaggatcagccactggctagagcagaatgaccagctgggaggtgacagctggagcagggcaccactaacagtaataataataa

SEQ ID NO: 23780 - DNA, 110 bp, synthetic construct
  source 1..110: mol_type = other DNA
tgggctctaattttctcttccacagattatgttgtgggttgtgaatcagtgttagggccaaattgcccacctccacctgtcaccaacttcagaagacagagtggatgagg

SEQ ID NO: 23781 - DNA, 110 bp, synthetic construct
  source 1..110: mol_type = other DNA
gtgtttggttacaatggaagaataaaattataataacaaataatagcaatcagctgaaccatgtttataaggtatctttcaccgttctacaggcttgaaatcagtaatgc

SEQ ID NO: 23782 - DNA, 110 bp, synthetic construct
  source 1..110: mol_type = other DNA
gaaccatgtttataaggtatctttcaccgttctacaggcttgaaatcagtaatgcattcaatcttctcaacaaccccatgaagaagatcctactagaatccccactttac

SEQ ID NO: 23783 - DNA, 110 bp, synthetic construct
  source 1..110: mol_type = other DNA
ggcagcaaaatgctcacagtgcccttcaggacatacaatgacattttatcttcacaggagaggtaggctccaagacagttcacaaagtcaacctgtgtgcaatcaaaatt

SEQ ID NO: 23784 - DNA, 110 bp, synthetic construct
  source 1..110: mol_type = other DNA
aggagaggtaggctccaagacagttcacaaagtcaacctgtgtgcaatcaaaattggcctggaatccagagcgagtttagtgaaataaatgaccagccaggaggataggg

SEQ ID NO: 23785 - DNA, 110 bp, synthetic construct; identical to SEQ ID NO: 23783
  source 1..110: mol_type = other DNA

SEQ ID NO: 23786 - DNA, 110 bp, synthetic construct; identical to SEQ ID NO: 23784
  source 1..110: mol_type = other DNA

SEQ ID NO: 23787 - DNA, 110 bp, synthetic construct
  source 1..110: mol_type = other DNA
ttcccttatgtcacaattagtagagcttacttgattccacatgaaaatgtctaatcaaccacaggataatgaatgagaacattttattagttactttgccttgtaaactg

SEQ ID NO: 23788 - DNA, 110 bp, synthetic construct; identical to SEQ ID NO: 23787
  source 1..110: mol_type = other DNA

SEQ ID NO: 23789 - DNA, 110 bp, synthetic construct
  source 1..110: mol_type = other DNA
taaactggggaaagatcagcctgaagatacaactaaaaagctggaaatggatggactgtcttcactagcagttgtcaaagagtgttgcacatgcccagggaccccaagac

SEQ ID NO: 23790 - DNA, 110 bp, synthetic construct
  source 1..110: mol_type = other DNA
aagcctggctgtgtgctggtgccatgagctaatgtcacaggagcttggaggaaagtgggccaggctgtggggtgccatgtggactaggtcaaggatctctatcctctctt

SEQ ID NO: 23791 - DNA, 110 bp, synthetic construct
  source 1..110: mol_type = other DNA
ctcagagcagagagggaaatagtgtgagctttacagctacaaaagggtttcccttactttgggagttcttactcagagacatcgggccccaggaagttcagggcatctgc

SEQ ID NO: 23792 - DNA, 110 bp, synthetic construct
  source 1..110: mol_type = other DNA
actttgggagttcttactcagagacatcgggccccaggaagttcagggcatctgcaaaccccagaaaccacgtgcagacttttctacctctgttccataggggaggttcc

SEQ ID NO: 23793 - DNA, 110 bp, synthetic construct
  source 1..110: mol_type = other DNA
cagtctggatgttctgtgaataacatacattcactggatgggaatctaatggacgcatatccttagcacttacagctgcttctgctgaaccccagctagtgtggtccatc

SEQ ID NO: 23794 - DNA, 110 bp, synthetic construct
  source 1..110: mol_type = other DNA
cttactgacatcctcagcatcagctgccctgggtggtcccttgaggtgagctgaggtgtattctgccaccaggttcccactgttagcacccatcacctgagattctctta

SEQ ID NO: 23795 - DNA, 110 bp, synthetic construct
  source 1..110: mol_type = other DNA
ggggctatgggttctcattgcgtttttcagttcaacacagtattggaaacaatctcctccttctgctaattttcttctgtttaccactccccagggataccttctgctca

SEQ ID NO: 23796 - DNA, 110 bp, synthetic construct
  source 1..110: mol_type = other DNA
cctccttctgctaattttcttctgtttaccactccccagggataccttctgctcaactatgcctgtgctatccgtggttttttttttttttttttttttttttgaataaa

SEQ ID NO: 23797 - DNA, 110 bp, synthetic construct
  source 1..110: mol_type = other DNA
ttagatgctacttctaagtccacatctccctgtgtgctcctcctgtacagttctgtcctgactttctactgagctgcgtgttgagatgatggtctatgtttctgtattct

SEQ ID NO: 23798 - DNA, 110 bp, synthetic construct
  source 1..110: mol_type = other DNA
aggtgatgtggtgtgtggtatgtattttaactgcaagctaacttcagaaaaagatgtggattatatatacaatatacataccacacacatagaaaaatgtatctgtatgt

SEQ ID NO: 23799 - DNA, 110 bp, synthetic construct
  source 1..110: mol_type = other DNA
tttatacagaaacacagtagctgaaagaattggagtcagaatgccagcatccttccacagaagactttaaataaaagcataagttactctgcatatattgctgtgcaaag

SEQ ID NO: 23800 - DNA, 110 bp, synthetic construct
  source 1..110: mol_type = other DNA
cacagaagactttaaataaaagcataagttactctgcatatattgctgtgcaaagagaacagtcttcccttatattacctgataatttcatactagctaagtttagttgc

SEQ ID NO: 23801 - DNA, 110 bp, synthetic construct
  source 1..110: mol_type = other DNA
gttaaggatcctgcgttgccctgagctatgtcgtaggtcacagacaaagctcatatcctgcattgctctggctgtgggctaatgccagcagctgaagctctgattcgacc

SEQ ID NO: 23802 - DNA, 110 bp, synthetic construct; identical to SEQ ID NO: 23801
  source 1..110: mol_type = other DNA

SEQ ID NO: 23803 - DNA, 110 bp, synthetic construct
  source 1..110: mol_type = other DNA
atggactaagaatctctatctcctccataagaaactgctatttccatggcaacattatttataatgtgctaatgagcatcacaaagcttcagacacacacgagtcagtat

SEQ ID NO: 23804 - DNA, 110 bp, synthetic construct
  source 1..110: mol_type = other DNA
tgctgccatttcttatttttttaaatgtattctattatcctgaaatttcttacttacccacttatcgcctttttttaattccttttggcctcacctgcagcatatagaag

SEQ ID NO: 23805 - DNA, 110 bp, synthetic construct
  source 1..110: mol_type = other DNA
tatcctgaaatttcttacttacccacttatcgcctttttttaattccttttggcctcacctgcagcatatagaagttcttgggccagggatcgaacctgtgccacagcag

SEQ ID NO: 23806 - DNA, 110 bp, synthetic construct
  source 1..110: mol_type = other DNA
caagtgtacaggagaatgtggaaattgataaaatgtactagctgtccccaggtgcactgataataacatttatcatattaatgactttggacacatgtagatcctggttg

SEQ ID NO: 23807 - DNA, 110 bp, synthetic construct
  source 1..110: mol_type = other DNA
aaattaataactcatatttatgtaacttagagctgaaggtcagtaaaatttaaagagcgaagatactgagcagggatttccaccagacttcttggtctttcacaagcgtc

SEQ ID NO: 23808 - DNA, 110 bp, synthetic construct
  source 1..110: mol_type = other DNA
agcgaagatactgagcagggatttccaccagacttcttggtctttcacaagcgtccactcagcccttgtggtcagggcacaatttcagaaagccacgcccttggacacca

SEQ ID NO: 23809 - DNA, 110 bp, synthetic construct
  source 1..110: mol_type = other DNA
atttcccactgtctcttagaggcttgtccaagatgacattgtattgcagctgtcttacatacaggtctgtcttgctgcagtactatggcaaggttttcaactttgtttat

SEQ ID NO: 23810 - DNA, 110 bp, synthetic construct
  source 1..110: mol_type = other DNA
agtgatcatatcaaatattagctacgatgtagggaaaatagatcactcatacatggctgatggaacatggtacagccagagtgaaaaccagtttgcaggtgtgttttttt

SEQ ID NO: 23811 - DNA, 110 bp, synthetic construct
  source 1..110: mol_type = other DNA
ttacagggtctcctaaaacatcctgccccagggagaggtagggatgcagggaggtgacaatgatggagaccagcagagaggcgagaggatgtgtctgttccccagctcct

SEQ ID NO: 23812 - DNA, 110 bp, synthetic construct
  source 1..110: mol_type = other DNA
gacaatgatggagaccagcagagaggcgagaggatgtgtctgttccccagctcctgagtttgccttcctcttccaatttccatcacatttctttgaaaaataaaataaat

SEQ ID NO: 23813 - DNA, 110 bp, synthetic construct
  source 1..110: mol_type = other DNA
cgagattgtaagtaacgtatgcagtgaatccctgaaagtgacttccacactaatttaaaaaccatcacaacaaaaatgaaacgagataaggagctggagctaggcagcca

SEQ ID NO: 23814 - DNA, 110 bp, synthetic construct
  source 1..110: mol_type = other DNA
taaaaaccatcacaacaaaaatgaaacgagataaggagctggagctaggcagccaaagagtcacctgagtttcaggactattagaactgaggcttttctgaaaggtgaaa

SEQ ID NO: 23815 - DNA, 110 bp, synthetic construct
  source 1..110: mol_type = other DNA
ctggttattagaagttttcttaaaggtagatttgacatgatgaagttttccaatggttacagcacttttgtgaaaatgcctcgttgaaagaaagattctgataaatctca

SEQ ID NO: 23816 - DNA, 110 bp, synthetic construct
  source 1..110: mol_type = other DNA
gttacagcacttttgtgaaaatgcctcgttgaaagaaagattctgataaatctcagaaagactctgagattttaaagattatagagataaggatatcaacctaggtctgt

SEQ ID NO: 23817 - DNA, 110 bp, synthetic construct; identical to SEQ ID NO: 23815
  source 1..110: mol_type = other DNA

SEQ ID NO: 23818 - DNA, 110 bp, synthetic construct; identical to SEQ ID NO: 23816
  source 1..110: mol_type = other DNA

SEQ ID NO: 23819 - DNA, 110 bp, synthetic construct
  source 1..110: mol_type = other DNA
aagcagggtataacagaatgggttattccattctggacgtgttatctgtcattttttttttttttttgtgctcatgcctctctatgaagagaaaaaaagttgtttatata

SEQ ID NO: 23820 - DNA, 110 bp, synthetic construct; identical to SEQ ID NO: 23819
  source 1..110: mol_type = other DNA

SEQ ID NO: 23821 - DNA, 110 bp, synthetic construct
  source 1..110: mol_type = other DNA
gagccaatgctttaaccgaccagatgattatattcagagcccctcccaggcctggagaactgggtatgaaatgaatgagttaagatttgacttttgataggacaactgga

SEQ ID NO: 23822 - DNA, 110 bp, synthetic construct
  source 1..110: mol_type = other DNA
tttctcctgacggatggggaactccctggattgctcctccccaactccctttccttcagagaagtggtgcttacaaatcccatagctccattaattctgcgcagaatgca

SEQ ID NO: 23823 - DNA, 110 bp, synthetic construct
  source 1..110: mol_type = other DNA
tcagagaagtggtgcttacaaatcccatagctccattaattctgcgcagaatgcaactgccttccagatgtactcatccgttctctggaaaccctttctcctccatcctc

SEQ ID NO: 23824 - DNA, 110 bp, synthetic construct
  source 1..110: mol_type = other DNA
gtaatcttttcatgttcccacaacctattctttgttgcaaaaacccctccatatcctagcttctcccttcctcatggagtcatccctcagagtgatctgagacactgtgt

SEQ ID NO: 23825 - DNA, 110 bp, synthetic construct
  source 1..110: mol_type = other DNA
tattgcttttacatttacatttttgatagtaattgccagccctcagagcttgtggtcaagttttatgaaaattttattgatatgctctgcctgtagtcttcagttgtgct

SEQ ID NO: 23826 - DNA, 110 bp, synthetic construct
  source 1..110: mol_type = other DNA
ctctgaaggtggccccaacctccctcttaaaagagcaaagaaactccatgagaaacaacaatctcatcttcccagtaacttacgttttctgcatctacctgtctcctctc

SEQ ID NO: 23827 - DNA, 110 bp, synthetic construct
  source 1..110: mol_type = other DNA
caacaatctcatcttcccagtaacttacgttttctgcatctacctgtctcctctcctgttgccataccagggctaagccttccaccaagactcatttttcactcatgctt

SEQ ID NO: 23828 - DNA, 110 bp, synthetic construct
  source 1..110: mol_type = other DNA
atagtggaatgaaaatgtctccctggacacctggaggcctggtctcagcctctgctctgtcatcagctactttgtgacgttttcacattacttccccctcagagtttgag

SEQ ID NO: 23829 - DNA, 110 bp, synthetic construct
  source 1..110: mol_type = other DNA
cagattctttggaactttattttggggatcagcctgtatatccctcattctcattgtctgcattttgatggcaaatgtgattcaaatgtcagtatctccaaactctatcc

SEQ ID NO: 23830 - DNA, 110 bp, synthetic construct; identical to SEQ ID NO: 23829
  source 1..110: mol_type = other DNA

SEQ ID NO: 23831 - DNA, 110 bp, synthetic construct
  source 1..110: mol_type = other DNA
tcatgaaggttatcctgttgtattaacattcatgttaaagagtgacctgcacaatctcagggcagcttcttcaaaattaattatctttctacacattctgaaatcatgaa

SEQ ID NO: 23832 - DNA, 110 bp, synthetic construct
  source 1..110: mol_type = other DNA
ctcagggcagcttcttcaaaattaattatctttctacacattctgaaatcatgaagtgctttttggaccaactggtcaattaggtattcaatacaagaatccaagtattt

SEQ ID NO: 23833 - DNA, 110 bp, synthetic construct
  source 1..110: mol_type = other DNA
gagctgagttgtacaatttccacaataaccttcacttccagcatcagaactcatcctgttcagttcatcttctgcaagtcacctacctctcctctctatcaagttactag

SEQ ID NO: 23834 - DNA, 110 bp, synthetic construct
  source 1..110: mol_type = other DNA
ctgttcagttcatcttctgcaagtcacctacctctcctctctatcaagttactagctcttcttcagtgccttttttacaatggagttaaaagcccagctgcattgttagg

SEQ ID NO: 23835 - DNA, 110 bp, synthetic construct
  source 1..110: mol_type = other DNA
acccacaggctctgagtgtctgcagaagagaaagaggctgcttaccgcctatgtcctgcgtaccaagggaaagctggggctctccttaactccattttctatgtgtggaa

SEQ ID NO: 23836 - DNA, 110 bp, synthetic construct
  source 1..110: mol_type = other DNA
ctggagatagtttaaatattcaagggaaagacaataatactcaacatctgtccgttactggaagaattagtacctcaaagtagctcagtttcaacactattagattgtgc

SEQ ID NO: 23837 - DNA, 110 bp, synthetic construct
  source 1..110: mol_type = other DNA
tggcagctgtgtaccccctcaactacgttctccttcatcggcagctcacattgagctctgtaggatttttaaaggacgtggatctttttttaactccccaggggtgctgc

SEQ ID NO: 23838 - DNA, 110 bp, synthetic construct
  source 1..110: mol_type = other DNA
cagtgctgaaaaaaatagcagaatcttctggttggtgaacacatggaggtgctaagagggtggtacccctagaaagggcgtgcaagctctacactccctcccccagacct

SEQ ID NO: 23839 - DNA, 110 bp, synthetic construct
  source 1..110: mol_type = other DNA
ttcctctactgttagggctcaggggttttccatagttctctagaggcaggggcgcagtgtgatgtcagtgtgacgggcacaagctgagcaggtgattgtggattcctgtt

SEQ ID NO: 23840 - DNA, 110 bp, synthetic construct
  source 1..110: mol_type = other DNA
aacctagaatgcagacagttgagtctgaatcaaagtgtattaatcatatgaccatgctaaaagctgtggggaagaaaggactaagccaagtaactcagaaaaactgtttt

SEQ ID NO: 23841 - DNA, 110 bp, synthetic construct
  source 1..110: mol_type = other DNA
gctaaaagctgtggggaagaaaggactaagccaagtaactcagaaaaactgttttggctggatagtccaagactaaagacaaaaaggccttaccagaaattgtactctag

SEQ ID NO: 23842 - DNA, 110 bp, synthetic construct
  source 1..110: mol_type = other DNA
cctgggaacctccaaatgctgtgggtgcagcccttaaaaaaaaaagacctagagtagctgagtgaataaaaaaatttatgctgcctataggaaactaactttagctttaa

SEQ ID NO: 23843 - DNA, 110 bp, synthetic construct; identical to SEQ ID NO: 23842
  source 1..110: mol_type = other DNA

SEQ ID NO: 23844 - DNA, 110 bp, synthetic construct
  source 1..110: mol_type = other DNA
gacagagagcagatggggtgagcacatttccacacacagctctgaggagcagcagagaacagatttcacggccattttgttttcaatctgccttcacactgtgtttagga

SEQ ID NO: 23845 - DNA, 110 bp, synthetic construct
  source 1..110: mol_type = other DNA
tctgtaactaatttagcgacagtgtgtttacattaacatcttaagtttccacccggcttagctgaaacctctttttattgttatttcaagtatttatacttattgtataa

SEQ ID NO: 23846 - DNA, 110 bp, synthetic construct
  source 1..110: mol_type = other DNA
tctaagataccacagactacagacatgaacaaaatggggagtctgcttgggaggttcaagtggatatcacatttgtcaggagcttaagggttacagcatttggtttggca

SEQ ID NO: 23847 - DNA, 110 bp, synthetic construct
  source 1..110: mol_type = other DNA
tggtgcataattctttgtccctcaagggcacacacagccttgtaaatgtagataatataaaaaagaaccacccaggacagaatggcctcagctcgtgggtgatgaggttc

SEQ ID NO: 23848 - DNA, 110 bp, synthetic construct
  source 1..110: mol_type = other DNA
gtgaatctggaactggacccctactgagcacagggtgctgagctggaaggcctgctgggttgaaccatctcctttgtaatcctaattccatcattgaaatgctgagtgat

SEQ ID NO: 23849 - DNA, 110 bp, synthetic construct
  source 1..110: mol_type = other DNA
atggaaatgggggaagaggaaaatctgtttggctttcttcagtgggcattaatcttttcaattaatccagaagcatggcactcgcaaagaattagaaagaaagatgcagg

SEQ ID NO: 23850 - DNA, 110 bp, synthetic construct
  source 1..110: mol_type = other DNA
tttcaattaatccagaagcatggcactcgcaaagaattagaaagaaagatgcaggatcactgagccattgttgcttcctacactgtattctttcctgcttcttaacagca

SEQ ID NO: 23851 - DNA, 110 bp, synthetic construct
  source 1..110: mol_type = other DNA
cagggcttgggaacactgcctcaacatgcatttttccacccttatcccccttggtatagagcttttattctgctttgtttcactacttagtgagacacagggatagggac

SEQ ID NO: 23852 - DNA, 110 bp, synthetic construct
  source 1..110: mol_type = other DNA
atagagcttttattctgctttgtttcactacttagtgagacacagggatagggactggagggcagtggtggcagaccaagattcaaggtgtctgattctcagattctaac

SEQ ID NO: 23853 - DNA, 110 bp, synthetic construct
  source 1..110: mol_type = other DNA
tcaaagtcatcagagatgtaaagggctgagctgtgcgtctgggttattaccctacctggaaacctagaaaaatcacttggaccacttaggaggatgattatccacttgta

SEQ ID NO: 23854 - DNA, 110 bp, synthetic construct
  source 1..110: mol_type = other DNA
aaatcccagagcatattataataattgtttcagacaatcagtattcagttggatttaccacataatcaccctttgaattgttctgcattccttctttcatccccttgttg

SEQ ID NO: 23855 - DNA, 110 bp, synthetic construct
  source 1..110: mol_type = other DNA
gagagatggagcccagcccttctggcaggaccagggtctgcagcgagggccccaccctcactcttgtcttggcgccgatggcagcaggctggctgcaccatggtggctca

SEQ ID NO: 23856 - DNA, 110 bp, synthetic construct
  source 1..110: mol_type = other DNA
ccagccacctctctgggccctccactcgcataacttactttcctatagagttaacaactttctatggaaaacggagaagaaacgttttctcccagagaacttacactcag

SEQ ID NO: 23857 - DNA, 110 bp, synthetic construct
  source 1..110: mol_type = other DNA
aactttctatggaaaacggagaagaaacgttttctcccagagaacttacactcagctcattttggatccaatgcatacaaggtgaaacacgatcccaccctctgcacagg

SEQ ID NO: 23858 - DNA, 110 bp, synthetic construct; identical to SEQ ID NO: 23856
  source 1..110: mol_type = other DNA

SEQ ID NO: 23859 - DNA, 110 bp, synthetic construct; identical to SEQ ID NO: 23857
  source 1..110: mol_type = other DNA

SEQ ID NO: 23860 - DNA, 110 bp, synthetic construct
  source 1..110: mol_type = other DNA
gcagccatgcacaaatgatttttttaaacacataaatgtaagagcccagatatctaagagtatagggtgatcatagttgagtgtaactttggaaggaggcagagcaagga

SEQ ID NO: 23861 - DNA, 110 bp, synthetic construct
  source 1..110: mol_type = other DNA
aagagtatagggtgatcatagttgagtgtaactttggaaggaggcagagcaaggagatctgcttaccttcctcttctcccagggttactgccaaagggtctttctaggtt

SEQ ID NO: 23862 - DNA, 110 bp, synthetic construct
  source 1..110: mol_type = other DNA
aaagttctggcttagtagcatcgcagagtatttgcagtacttttgccagcttttcttgcccaggcaaaactgcacagtcatcatgctggtggtatccagttaatacctgt

SEQ ID NO: 23863 - DNA, 110 bp, synthetic construct
  source 1..110: mol_type = other DNA
ttgcccaggcaaaactgcacagtcatcatgctggtggtatccagttaatacctgttaataacctacacactctttcggcttgaaaaagccagaccttttttgtaactgag

SEQ ID NO: 23864 - DNA, 110 bp, synthetic construct
  source 1..110: mol_type = other DNA
atgctctgaatgaacatgccaagtctgtagacctcagatcaatatcaaatttctactttttatgatttttttttcagcaaaagaaagtttaccagggaaaaacaaaacag

SEQ ID NO: 23865 - DNA, 110 bp, synthetic construct
  source 1..110: mol_type = other DNA
tatgtacaaaactaactaatctatggttttagaaaccaagattatgtttacccttaggggattggtggaagtgcagtgggacactggcagtttcttaagtgatggtaaag

SEQ ID NO: 23866 - DNA, 110 bp, synthetic construct
  source 1..110: mol_type = other DNA
aggggattggtggaagtgcagtgggacactggcagtttcttaagtgatggtaaagttttgttatttgacctgagcactaattacatgggtacatttttgccaaacttctc

SEQ ID NO: 23867 - DNA, 110 bp, synthetic construct
  source 1..110: mol_type = other DNA
taaaaaccaactaaaaatatgagaggataataggccactcaaaaacatcagtctgaactatgaaagacctaggaattagatcaatgaagaaagcacaatatcttcacaga

SEQ ID NO: 23868 - DNA, 110 bp, synthetic construct
  source 1..110: mol_type = other DNA
ctcatctctctctgtcccagataaattcatttagagaaccctgatgaatccagcttgactcaggtgtccatttctgaatcagctgtgtcaaaggcatgggatctgaggag

SEQ ID NO: 23869 - DNA, 110 bp, synthetic construct
  source 1..110: mol_type = other DNA
tgactcaggtgtccatttctgaatcagctgtgtcaaaggcatgggatctgaggagggatagagatcactgaaggctgcgcctaatgcccactgttggcaggcagggtcat

SEQ ID NO: 23870 - DNA, 110 bp, synthetic construct
  source 1..110: mol_type = other DNA
aggaatctcatggcaaaaccccacaaatccaacttgtaggccacagggtaccaaccctcaagcatggttgataaaactattcacaaaatatcattggaacagttgaagag

SEQ ID NO: 23871 - DNA, 110 bp, synthetic construct
  source 1..110: mol_type = other DNA
tactggtctgccttcaaagcattttggtaaaggagagttcatttagttctcaaggtctgatcaacaattttaaagcagctggtgtcagatgaggggttataattgcatga

SEQ ID NO: 23872 - DNA, 110 bp, synthetic construct
  source 1..110: mol_type = other DNA
tctgatcaacaattttaaagcagctggtgtcagatgaggggttataattgcatgaattaaatagccagaaattaggcgacccacaggcatcgaaaatggaaacctatatt

SEQ ID NO: 23873 - DNA, 110 bp, synthetic construct; identical to SEQ ID NO: 23871
  source 1..110: mol_type = other DNA

SEQ ID NO: 23874 - DNA, 110 bp, synthetic construct; identical to SEQ ID NO: 23872
  source 1..110: mol_type = other DNA

SEQ ID NO: 23875 - DNA, 110 bp, synthetic construct
  source 1..110: mol_type = other DNA
cctctgagcccttttctctcctgagctgttacttgtttattaaatcctaatgtgcatgctctcagcttcttgctgaggatagtgggctcactaaaatatgcaaaaaccat

SEQ ID NO: 23876 - DNA, 110 bp, synthetic construct
  source 1..110: mol_type = other DNA
atgctctcagcttcttgctgaggatagtgggctcactaaaatatgcaaaaaccattttacaggagcacccagcccatgaactctcagaaactgtcttaatcatggtagat

SEQ ID NO: 23877 - DNA, 110 bp, synthetic construct
  source 1..110: mol_type = other DNA
ccagtttaccaatttgaattcttcactttcccactccatgagcagtcagttttagtggtagaatgattataaaatgaccccataacattggaactacagctatcaaggaa

SEQ ID NO: 23878 - DNA, 110 bp, synthetic construct
  source 1..110: mol_type = other DNA
tggtagaatgattataaaatgaccccataacattggaactacagctatcaaggaagtaagtgaaacttactaagatcaaatattcttgctaaagaaaaacaaactacaag

SEQ ID NO: 23879 - DNA, 110 bp, synthetic construct
  source 1..110: mol_type = other DNA
tccctgttctctaaaaggttatatatgtattttttaaataaaaacatgccatacccttttcactttggccctaaattaacgatattgtctagatcgtttgcgcaaagtaa

SEQ ID NO: 23880 - DNA, 110 bp, synthetic construct
  source 1..110: mol_type = other DNA
gtgatgaagtcctcaaagtactttagctaattctgatgtcattaagggataatttttaaaaatttaacagtgcatttttggaagaattcagggacaggagaagaaaatat

SEQ ID NO: 23881 - DNA, 110 bp, synthetic construct; identical to SEQ ID NO: 23880
  source 1..110: mol_type = other DNA

SEQ ID NO: 23882 - DNA, 110 bp, synthetic construct
  source 1..110: mol_type = other DNA
atatcatatctgctctcttgtattagctgaggcaagtcacacaagcgagttcaatatcaggctggagagaagcaacctctttccccaaggagggcactgggtaaggcccc

SEQ ID NO: 23883 - DNA, 110 bp, synthetic construct
  source 1..110: mol_type = other DNA
taggacaaaatttatggtcaaaattgggctcattgttgtctctacaatcagccatgggtcacctaggccaattctgctgattttggctcagctcccttgtaagttatgtg

SEQ ID NO: 23884 - DNA, 110 bp, synthetic construct
  source 1..110: mol_type = other DNA
ttcccaattggattcacttccacagccacacaacgggaactcctaggtaaataagcttttaagtgatggtctgtcttaaactgggaaattacagaattctagatatataa

SEQ ID NO: 23885 - DNA, 110 bp, synthetic construct; identical to SEQ ID NO: 23884
  source 1..110: mol_type = other DNA

SEQ ID NO: 23886 - DNA, 110 bp, synthetic construct; identical to SEQ ID NO: 23884
  source 1..110: mol_type = other DNA

SEQ ID NO: 23887 - DNA, 110 bp, synthetic construct; identical to SEQ ID NO: 23884
  source 1..110: mol_type = other DNA

SEQ ID NO: 23888 - DNA, 110 bp, synthetic construct
  source 1..110: mol_type = other DNA
aatgtttgacttcctgtttctagacttggaaaagatcactgagaatctcaggaagatattgagcttgattgtaatgcagtaaacaataacaacaacaacaacaacaaaaa

SEQ ID NO: 23889 - DNA, 110 bp, synthetic construct
  source 1..110: mol_type = other DNA
cccttcctcttcatttagagtcacacaaaactcaatagatttttcaaatacagtttttttccactataaaacattcctttgtaagtagtcattccaaacgtgcttttaat

SEQ ID NO: 23890 - DNA, 110 bp, synthetic construct
  source 1..110: mol_type = other DNA
tctcaaaaatttattatctcatagcctcgtctagacaatatatttggatagcccaacccttcttcagtgttttaaattcccagtggtgtgaaatgtacagcttctataac

SEQ ID NO: 23891 - DNA, 110 bp, synthetic construct
  source 1..110: mol_type = other DNA
acccttcttcagtgttttaaattcccagtggtgtgaaatgtacagcttctataactttctcacctacttaaagaactactataattacaacatattatggtctacttcta

SEQ ID NO: 23892 - DNA, 110 bp, synthetic construct
  source 1..110: mol_type = other DNA
gaaataatttaatactcctgggaatcttgcaggttagcacgtggaagtcaatacttgacaaaataaattgtgacatggagggtctgaggtttgggaggaatcaagaaaac

SEQ ID NO: 23893 - DNA, 110 bp, synthetic construct
  source 1..110: mol_type = other DNA
tttgtgacaacctgcaatctaatcagcacatggcaagaatggctacttcctcacatattttctagtgcttgatactgttaatttatgtgaattcagtagctatgcaatca

SEQ ID NO: 23894 - DNA, 110 bp, synthetic construct
  source 1..110: mol_type = other DNA
gtccggggaggtggtgctgatgatctgttcagctctcactctgctttgccctcgtctgtcctccatcttggctcatttcctggtcagctaggtggcttcccaggatgtgg

SEQ ID NO: 23895 - DNA, 110 bp, synthetic construct
  source 1..110: mol_type = other DNA
ttctaattttcttgcatttatgtctgctttgatctttgttatttccttctttctgctaaccttctgttcagtttcatctcttcctcattcttcaaagtgtaaaagtagtt

SEQ ID NO: 23896 - DNA, 110 bp, synthetic construct
  source 1..110: mol_type = other DNA
aaaatgtcaagcagggagttccagccttggttcagtggattaagaatcctactgcagcagctcgggtccctgtgaaggtgcaggtaccatcttcagcctagtataataga

SEQ ID NO: 23897 - DNA, 110 bp, synthetic construct
  source 1..110: mol_type = other DNA
agcagctcgggtccctgtgaaggtgcaggtaccatcttcagcctagtataatagatgaaagcatccagccttgccacagttgcagctgggattcaatccctagcccagga

SEQ ID NO: 23898 - DNA, 110 bp, synthetic construct
  source 1..110: mol_type = other DNA
aggcatataacaccagtaccttatttctgtggggaacagttctatcagtcaccgttttatctaagcactaaaagaaactgttctgccagaactagagttaacttcataga

SEQ ID NO: 23899 - DNA, 110 bp, synthetic construct
  source 1..110: mol_type = other DNA
ttccaggcttggagaagatgaaccactggaaactgtgcagtggctgggatgtgatggtataggaagtgatgagggttcatcagcagaacagctgcaatgtacatggatgt

SEQ ID NO: 23900 - DNA, 110 bp, synthetic construct
  source 1..110: mol_type = other DNA
ttctgaatcagcacagcagttaaaaatgtatcttggagtatgtcttcacaaaaatgagaatctaaagatttgtttcaaatgatatctccacacttgggtattactcagat

SEQ ID NO: 23901 - DNA, 110 bp, synthetic construct; identical to SEQ ID NO: 23900
  source 1..110: mol_type = other DNA

SEQ ID NO: 23902 - DNA, 110 bp, synthetic construct
  source 1..110: mol_type = other DNA
atgttccttctgtcttgaaggtttttatacacatatttgcttatccaaatcctattcatcttttaaggttcagctgaaatggcatctgcaccaagctttacgaatccatc

SEQ ID NO: 23903 - DNA, 110 bp, synthetic construct
  source 1..110: mol_type = other DNA
attttatcagactcaaactagtcagtaattaattgaaaaacataatccttcatgttgcagctataagcaaaacccatacaagtagttatttgctggctcagaggattatg

SEQ ID NO: 23904 - DNA, 110 bp, synthetic construct; identical to SEQ ID NO: 23903
  source 1..110: mol_type = other DNA

SEQ ID NO: 23905 - DNA, 110 bp, synthetic construct
  source 1..110: mol_type = other DNA
gctccctattctctggtcaatgctcataggagagctgtcacataactcctggctttgtggcactgggcattccagcttctacccacctgctcagctgtttaccatcattc

SEQ ID NO: 23906 - DNA, 110 bp, synthetic construct
  source 1..110: mol_type = other DNA
ttggcaagtaaaacaagatattttaaagctctaatataatgctcttctactaattcgtctgatagtgtcctagaatgtcctttgatgaggattataagtgacggtttgga

SEQ ID NO: 23907 - DNA, 110 bp, synthetic construct
  source 1..110: mol_type = other DNA
cttctatgaatgaatatgaaatagatccggagtctatcagaaaaatggagttgccactgtggctcaagggtaacaaaactattatccataatgatggggtttgatccctg

SEQ ID NO: 23908 - DNA, 110 bp, synthetic construct; identical to SEQ ID NO: 23907
  source 1..110: mol_type = other DNA

SEQ ID NO: 23909 - DNA, 110 bp, synthetic construct
  source 1..110: mol_type = other DNA
tgattttggcaatgaacagggatttccactccaactgctgtgagtcctccgaaaataaaaactaacaaggttctttctctcacgatccaacatgataagctttttttaaa

SEQ ID NO: 23910 - DNA, 110 bp, synthetic construct
  source 1..110: mol_type = other DNA
taaaaactaacaaggttctttctctcacgatccaacatgataagctttttttaaaagctgtcataggaaaaataagacagatcctgaataatagtaaagggagatttgtg

SEQ ID NO: 23911 - DNA, 110 bp, synthetic construct; identical to SEQ ID NO: 23909
  source 1..110: mol_type = other DNA

SEQ ID NO: 23912 - DNA, 110 bp, synthetic construct; identical to SEQ ID NO: 23910
  source 1..110: mol_type = other DNA

SEQ ID NO: 23913 - DNA, 110 bp, synthetic construct
  source 1..110: mol_type = other DNA
ctatctgcttccactctaggcctcagtttccccttccttcatgggtcactaataacaaggagctaaccttgcccatacccttctccccacctcccctccaagtttctggc

SEQ ID NO: 23914 - DNA, 110 bp, synthetic construct
  source 1..110: mol_type = other DNA
aaaggacctccttcctggaccctgacctgagatgctgtttccagttcccttctacgaggttgcagtaggcctccaccaaagctattcttctcatctgctgctcacccact

SEQ ID NO: 23915 - DNA, 110 bp, synthetic construct
  source 1..110: mol_type = other DNA
attatgaatcatgttactttattctacaagagcattttaaatcattatactttgggccaaaaccaggaaaatgcaaattccacaatgaaacctcttcttttccttggtat

SEQ ID NO: 23916 - DNA, 110 bp, synthetic construct
  source 1..110: mol_type = other DNA
acctggcagttgataattcccaggtatgaagagattcaaggactattcacatacattaactgtcagagaaataacagagtgatctgctaatggtacaaataacctcattt

SEQ ID NO: 23917 - DNA, 110 bp, synthetic construct
  source 1..110: mol_type = other DNA
ccaggagtggaaaaaaaaaaaaaaaaaaagcaaatatgctctttgacttcatggcccaaattagtagcaatggcataattaaagaagcaaatataatacagtgtgataag

SEQ ID NO: 23918 - DNA, 110 bp, synthetic construct
  source 1..110: mol_type = other DNA
ttcttattatgttaagaatgctctaggggaatggtgactacagtggacctccccactaatacccatgatgtttgtagtggccattgaaatatcagaacacagaatattcc

SEQ ID NO: 23919 - DNA, 110 bp, synthetic construct
  source 1..110: mol_type = other DNA
aagtatgtggcacagaggagggggtgctgggcccctggtgatcactaaagaggagctcatgctcctcaccagcctaagaaaacatgactctgtccagtagaatgtagggg

SEQ ID NO: 23920 - DNA, 110 bp, synthetic construct
  source 1..110: mol_type = other DNA
ctcatgctcctcaccagcctaagaaaacatgactctgtccagtagaatgtaggggaaatacatcatttatggatggtgcttattattttcattttgtctctgggacagat

SEQ ID NO: 23921 - DNA, 110 bp, synthetic construct
  source 1..110: mol_type = other DNA
gggccttcgctgctgcttggagatcagccttcctccctgggcaacttcagggcgattgggatcagctggggttctgctgccagtatctcccacccccatctatagggaag

SEQ ID NO: 23922 - DNA, 110 bp, synthetic construct
  source 1..110: mol_type = other DNA
atcatgtaggctgccaggacttctgcttttataagcaaaacaaaactggcgattaaacgtacaaaagctccttcctaaagagctttctttcaaagagatacctaggagag

SEQ ID NO: 23923 - DNA, 110 bp, synthetic construct
  source 1..110: mol_type = other DNA
ttcttcctgctctcagtatttccgaccatgccaaagccccttcagtgacaatggtactagaaaagctcacattgatttcatcacattcacttggtagccggaaggtaccc

SEQ ID NO: 23924 - DNA, 110 bp, synthetic construct
  source 1..110: mol_type = other DNA
acaataggaattccagatccattttatatttgatttttttttttaagttgtatgatggcaagcagctcattgacatggctggccgatgactgattaaactaattaaattg

SEQ ID NO: 23925 - DNA, 110 bp, synthetic construct
  source 1..110: mol_type = other DNA
aagaatgacatacattctttttgatagttcagtcctttgctgcatggccaaggacaaggctgagagctgggagtttaaggtacggtccttgtctgtgatatcatggccaa

SEQ ID NO: 23926 - DNA, 110 bp, synthetic construct
  source 1..110: mol_type = other DNA
aaggctgagagctgggagtttaaggtacggtccttgtctgtgatatcatggccaaataagcacccacaaagagcaaccaaatagacatggcttgtatagataaattttat

SEQ ID NO: 23927 - DNA, 110 bp, synthetic construct
  source 1..110: mol_type = other DNA
agcacagccagctgccttcatcactggtgacaagggcagggctgcctcttgctagagaggggtgtgagggtgttgtgactaggggtcccttcctaccacactgttctcat

SEQ ID NO: 23928 - DNA, 110 bp, synthetic construct
  source 1..110: mol_type = other DNA
agaggggtgtgagggtgttgtgactaggggtcccttcctaccacactgttctcattgcttcaacgaggcccagcttccagggatggccagatccatgtgatgccttgttt

SEQ ID NO: 23929 - DNA, 110 bp, synthetic construct
  source 1..110: mol_type = other DNA
catagagtgtttacctgggaaatacactttcaattccaaacaacccacttaatgtgttaagacctcagcccactcttcagccggggaaagcttacagcactgtgtatatt

SEQ ID NO: 23930 - DNA, 110 bp, synthetic construct
  source 1..110: mol_type = other DNA
gttaagacctcagcccactcttcagccggggaaagcttacagcactgtgtatatttcagaccgctgtccccaagaattaagaaatcaagatttcccctaagcagaaaagt

SEQ ID NO: 23931 - DNA, 110 bp, synthetic construct
  source 1..110: mol_type = other DNA
ctgatgggagatgtgtttggaagtcttaagtggccaggggcagcctcctggctgcatggtcccagggtgtcccaactctgatttcacctcttctctcagcttagctctca

SEQ ID NO: 23932 - DNA, 110 bp, synthetic construct
  source 1..110: mol_type = other DNA
atggtcccagggtgtcccaactctgatttcacctcttctctcagcttagctctcaggagtatacagtgttttatctccagctactggcttctgaggcctacttgacccac

SEQ ID NO: 23933 - DNA, 110 bp, synthetic construct; identical to SEQ ID NO: 23931
  source 1..110: mol_type = other DNA

SEQ ID NO: 23934 - DNA, 110 bp, synthetic construct; identical to SEQ ID NO: 23932
  source 1..110: mol_type = other DNA

SEQ ID NO: 23935 - DNA, 110 bp, synthetic construct
  source 1..110: mol_type = other DNA
gcatattattctcagtctccactgtgcctacatcgaccctcatatagttctctgttatttttaaagtaactttgtatttgaaaattttatttacataactgtctttttct

SEQ ID NO: 23936 - DNA, 110 bp, synthetic construct
  source 1..110: mol_type = other DNA
attaatattctaaaataagctaaaaatatgccacttctatgctccacatctttttctgattctctcctgtcttcagaaaaaataatccaaactcataacccagacatttc

SEQ ID NO: 23937 - DNA, 110 bp, synthetic construct
  source 1..110: mol_type = other DNA
ttaacctcagggatggctaggttaagtgctatagttcattttgcaagttgatgttcaaaagccagctacagaaagaagctgtgtgtaccttctcagggtccaactaacag

SEQ ID NO: 23938 - DNA, 110 bp, synthetic construct
  source 1..110: mol_type = other DNA
caaaagccagctacagaaagaagctgtgtgtaccttctcagggtccaactaacagcctgggcacattaatagcctcgtaagcctgggcgcattagagaacaccagcttcc

SEQ ID NO: 23939 - DNA, 110 bp, synthetic construct
  source 1..110: mol_type = other DNA
gtctattaggagtcagaaattcaaaagccctcaggagctggcagataatgccaatggtggagcaggctgtggagacacacaaactggaaagcagttgcccaggaaaaagg

SEQ ID NO: 23940 - DNA, 110 bp, synthetic construct
  source 1..110: mol_type = other DNA
ctactctattaagcaaaatgacagctgaaatgaaaattaagttttgttcatggtagtaaaaataggagctgccctcctgttccctaggtcctgtatcccaaggtatagcc

SEQ ID NO: 23941 - DNA, 110 bp, synthetic construct
  source 1..110: mol_type = other DNA
tcgatggcctccttgctttcttttgtcaactctattttgatagagatctgggtgcagatagatattcttcttccttaaaaaaggcagtcaggaattcatgatgctgcttc

SEQ ID NO: 23942 - DNA, 110 bp, synthetic construct
  source 1..110: mol_type = other DNA
aagaccatcctgtttctgtcggatcacagtgaatgtgactcttgatcattagcatagattaattaatctcattaggggaattgatcatttggaaaaatggagagacactt

SEQ ID NO: 23943 - DNA, 110 bp, synthetic construct
  source 1..110: mol_type = other DNA
caaggaaagcacaccagaaagatgtgtcctcaaaaaagatcaaatcagcagcctactattttaaaacaagctaagaaacattaagaaaacatttaagaaaatgatacaat

SEQ ID NO: 23944 - DNA, 110 bp, synthetic construct
  source 1..110: mol_type = other DNA
ccctgcatgagacgatgaatttcatgttttttaaaattcatccaggaaattctaaatattgtatgtgattcattatcttgatgggataaaggaaacatattgacagctct

SEQ ID NO: 23945 - DNA, 110 bp, synthetic construct
  source 1..110: mol_type = other DNA
agcaaaagacctctccattgggggttaagaatatttaatcctttaaagctgacatatataacgtgtagctatgtcagctacagctgtttctaaacatcagtaacaaaatt

SEQ ID NO: 23946 - DNA, 110 bp, synthetic construct
  source 1..110: mol_type = other DNA
ttactgggtggtatgcggcctctccccacaatttctgaagatctggatgtgagatgaatctgcaggagaaaaaatagtagctggaaagcaccttagagatggaattggcc

SEQ ID NO: 23947 - DNA, 110 bp, synthetic construct
  source 1..110: mol_type = other DNA
tgataaaccataatggaaaagaatatgaaaaagaattcatggcatttccattgtggctcagcagattacaaatccaactaggatcaatgaggatgcagattcaatccctg

SEQ ID NO: 23948 - DNA, 110 bp, synthetic construct; identical to SEQ ID NO: 23947
  source 1..110: mol_type = other DNA

SEQ ID NO: 23949 - DNA, 110 bp, synthetic construct
  source 1..110: mol_type = other DNA
ctgacgtggtcccagaaggacatgtgtgtcctctccagctatctcagggcctcgccatgctggacccaggcatgagagcaggtgcttttgacagctaggaaagaactggt

SEQ ID NO: 23950 - DNA, 110 bp, synthetic construct
  source 1..110: mol_type = other DNA
tgtatactcactggctagtgttacagtgaagacagagttggtgcagctcttcaaagcactgtacttttgtactgacattagtacagtcgtctgttttctgggccgacata

SEQ ID NO: 23951 - DNA, 110 bp, synthetic construct
  source 1..110: mol_type = other DNA
cagtgaaataaactgagttagaaatcagcaacacacaagaggacaataccactgcaaaatactcttgttttctgaaatatatgcaaagcttcatatgttattactgcaaa

SEQ ID NO: 23952 - DNA, 110 bp, synthetic construct
  source 1..110: mol_type = other DNA
gccacaatgggaactctccaaaattttgattaaaaatatttcctatagccacaaagttctaagagctagaaacaaaatttctgctctgagtttttagtataattgtaatc

SEQ ID NO: 23953 - DNA, 110 bp, synthetic construct
  source 1..110: mol_type = other DNA
tttgaactgtgagaaataaacttgtcttttcagttaagatcatctcctgatctgtcagctttcctctacctcaaaatttttattagtactctgtattttaagacaagatg

SEQ ID NO: 23954 - DNA, 110 bp, synthetic construct
  source 1..110: mol_type = other DNA
ttgctaatactataaaatgcagatttctgtagtcactacataaggcagagcctatccaagtctttttcctccctgtccttccaacttcctttgtcggtctcatgtgctgt

SEQ ID NO: 23955 - DNA, 110 bp, synthetic construct
  source 1..110: mol_type = other DNA
tcatgttctttttaaggcccatggaaacttagtaaactgaggtcacatgactaactaatagtggtcctctagatctcaggttccaaattcgaaattcgttgtcttttctt

SEQ ID NO: 23956 - DNA, 110 bp, synthetic construct
  source 1..110: mol_type = other DNA
gactctctcctctgtcattaaaataaaatagttcacaactctctgatttgaaattagggcctctaaaaagtttgaattaactgctaaggaggctgttgtataacagatat

SEQ ID NO: 23957 - DNA, 110 bp, synthetic construct; identical to SEQ ID NO: 23956
  source 1..110: mol_type = other DNA

SEQ ID NO: 23958 - DNA, 110 bp, synthetic construct; identical to SEQ ID NO: 23956
  source 1..110: mol_type = other DNA

SEQ ID NO: 23959 - DNA, 110 bp, synthetic construct; identical to SEQ ID NO: 23956
  source 1..110: mol_type = other DNA

SEQ ID NO: 23960 - DNA, 110 bp, synthetic construct
  source 1..110: mol_type = other DNA
tgtaccaatttcaacataaaaggacataaagccatgggctgaatttagctgcaacctgtgctgccaaaaaatagcagatctgaactaaaggaatcttttcactcagtgct

SEQ ID NO: 23961 - DNA, 110 bp, synthetic construct
  source 1..110: mol_type = other DNA
tactgtacaagggaaatggggagaatcagtttatctcccagcagcccccagtcgtgagtagcatcatgggcaatggacgaagacgcagcatctcatgcccaagttgcaat

SEQ ID NO: 23962 - DNA, 110 bp, synthetic construct
  source 1..110: mol_type = other DNA
acatgtataatgataggcagaatcatgactgtgctgtcggcacttaggcctaagtgataatcaatttgcctaaatgactgcaattagtacagctttcccacgacacttgg

SEQ ID NO: 23963 - DNA, 110 bp, synthetic construct
  source 1..110: mol_type = other DNA
gataatcaatttgcctaaatgactgcaattagtacagctttcccacgacacttggagcatttctggggtctggtggagggaaccccatccagcagcatcaccacttgtct

SEQ ID NO: 23964 - DNA, 110 bp, synthetic construct
  source 1..110: mol_type = other DNA
agaatcactgtaaatgaaagctgctgttaaattgtactgggaagttaatggctgccataatcctcctgacgtgctctcccttccatctgctaaccggagcgctcatggga

SEQ ID NO: 23965 - DNA, 110 bp, synthetic construct
  source 1..110: mol_type = other DNA
atcgaggtacctcaaggggaatcatatagtatttgttctttatcaataggcttgcttcaggtagctatcatattgtcctcaaggtccatccatgttgtagcatgtgtcag

SEQ ID NO: 23966 - DNA, 110 bp, synthetic construct
  source 1..110: mol_type = other DNA
ctgattttctgagttaaagccagatccttattataactcatattatttgccatacaagtaactggacaacagagtaaatgtttgggcagcggagagagccatcacagctg

SEQ ID NO: 23967 - DNA, 110 bp, synthetic construct
  source 1..110: mol_type = other DNA
gaatcctgctcagtgctatcactctcgcctccctagacatggaaaaatcattacccaaaagaagaggaatccacctgcttggggagaaaaccacctgcgtgtcagccgcc

SEQ ID NO: 23968 - DNA, 110 bp, synthetic construct
  source 1..110: mol_type = other DNA
ttcagcaccaccaactcaattctcatttctcagataccagctgggcgtcctagaattcaactcagttatgaccctacatacatgatgatggtatcagatcccacaggtta

SEQ ID NO: 23969 - DNA, 110 bp, synthetic construct
  source 1..110: mol_type = other DNA
gcagtttcttgattacaaccaggaaatggcagttcctgtggcctgtttttgtaccccagaggtggcagcttagcagaaacactttttaaagtgtctctctctctctctct

SEQ ID NO: 23970 - DNA, 110 bp, synthetic construct
  source 1..110: mol_type = other DNA
aggcagaagaagagaatgagagctgtgaatgcaggagatagggagacggagggaagaggcttgttggaatcttggagaacagtgttcaccagccctgaaaacaccactta

SEQ ID NO: 23971 - DNA, 110 bp, synthetic construct
  source 1..110: mol_type = other DNA
gaggcttgttggaatcttggagaacagtgttcaccagccctgaaaacaccacttaaatacaatcaagtcagggtggaaggaacatgaatctgggaaaaacagtcctctta

SEQ ID NO: 23972 - DNA, 110 bp, synthetic construct
  source 1..110: mol_type = other DNA
ctttgagcagctcctggaaggtaaggcatatttagtttctttagtatttgtcaagtgaaatggccaactggcagattctagatgtagtaatcttcgagaaataggacaga

SEQ ID NO: 23973 - DNA, 110 bp, synthetic construct; identical to SEQ ID NO: 23972
  source 1..110: mol_type = other DNA

SEQ ID NO: 23974 - DNA, 110 bp, synthetic construct
  source 1..110: mol_type = other DNA
tagaaactgtctttccatttgatgttgcagtgaaatttgtttctacgaaggtatgttccgtgaagcttattggaagtcatctgggctatagaaagtaacagaaaaaagaa

SEQ ID NO: 23975 - DNA, 110 bp, synthetic construct
  source 1..110: mol_type = other DNA
ttccgtgaagcttattggaagtcatctgggctatagaaagtaacagaaaaaagaaaatggattagtgtacttcctgatagacctttgtctccatctgccacagtttgaac

SEQ ID NO: 23976 - DNA, 110 bp, synthetic construct
  source 1..110: mol_type = other DNA
tgcccactaccaatccaggcattcactaaaaaagggaccaatgcgaatgacaacgaaaaccacaggccaccgccatgcctgatccctggaagctttcaagtcccatcaca

SEQ ID NO: 23977 - DNA, 110 bp, synthetic construct
  source 1..110: mol_type = other DNA
tgttaaccactgagccacgacgggaactcctacatatgttttcttacttactcgtcacacaacagtcagagaaagctgtttttctcccttttttaccttgtaggaaaaga

SEQ ID NO: 23978 - DNA, 110 bp, synthetic construct
  source 1..110: mol_type = other DNA
gagtctgtttatatgtctttctgcccgttagtctgtaatgagcttcgggggtggggatggctgtgcctttgttggcttttctgtgctgacacatagatatttatgaatga

SEQ ID NO: 23979 - DNA, 110 bp, synthetic construct
  source 1..110: mol_type = other DNA
tttttttttaatcaggtgagtaatgtgatcgtcgttgcttttcctgagagagaaggaaacagatgaggcaaagagcagacaggagtggggacagcaaaaggccaagagtg

SEQ ID NO: 23980 - DNA, 110 bp, synthetic construct
  source 1..110: mol_type = other DNA
gaaacagatgaggcaaagagcagacaggagtggggacagcaaaaggccaagagtgagatcccaaaggaggcagcgaatgggctccctgcctccagctcctctgctctaga

SEQ ID NO: 23981 - DNA, 110 bp, synthetic construct
  source 1..110: mol_type = other DNA
tgaagcttccagacctcgctggagctgagggcaggagccccaggctggagatcctcaagctccaggcggaggagcccgggtactgccacagagcgccacctagtgacatc

SEQ ID NO: 23982 - DNA, 110 bp, synthetic construct
  source 1..110: mol_type = other DNA
caagctccaggcggaggagcccgggtactgccacagagcgccacctagtgacatcctggggaggagtcactgaaaggagtagaggggtgtgtgtgtgagagagagatgcg

SEQ ID NO: 23983 - DNA, 110 bp, synthetic construct
  source 1..110: mol_type = other DNA
ggcccaaacatttgaagcaagaaaaaaagaagaggtggagcctattggattacattcaatttagctttcgaagacttctatcaattgcatgtctttaaaaaaacaaaaca

SEQ ID NO: 23984 - DNA, 110 bp, synthetic construct
  source 1..110: mol_type = other DNA
cattccaatacctcctcatcaaacctcttccctaaagctaaacggttaggttgcttccagtttcctctaacacaatggaaggctgcgtgaataactttgtataataatct

SEQ ID NO: 23985 - DNA, 110 bp, synthetic construct
  source 1..110: mol_type = other DNA
tctcttgcagaagcatcttccactaatgcaaataggagctggtttcctaacttcggaagaaatgggactttccgatagatctgggatgaaggatttgcaaagacagttgc

SEQ ID NO: 23986 - DNA, 110 bp, synthetic construct
  source 1..110: mol_type = other DNA
cccaccattcatccattccttcacaaaatggtattgcccagtgcctcccaaggactgggcagcgggcctggctcggagcttgcagcaacaatcaagacagccagggcgcc

SEQ ID NO: 23987 - DNA, 110 bp, synthetic construct
  source 1..110: mol_type = other DNA
ctgggctacctggaactgggtgaggcagggggctctttcttccacagccactgtagaactagctcacgtgcaaggtcggtaatctttctcacccctccccacccactcat

SEQ ID NO: 23988 - DNA, 110 bp, synthetic construct
  source 1..110: mol_type = other DNA
gaactagctcacgtgcaaggtcggtaatctttctcacccctccccacccactcatacctgtcctctccttcctggatggatccttgccaagctgcctgtcccaccccagt

SEQ ID NO: 23989 - DNA, 110 bp, synthetic construct
  source 1..110: mol_type = other DNA
ctggcttgacacattgcgagggaactggcaccaaagatgagatgtccttgatcatggactccataaaatcctttcccaaccatctcagtgcagaaggtagaactccacct

SEQ ID NO: 23990 - DNA, 110 bp, synthetic construct
  source 1..110: mol_type = other DNA
ggactccataaaatcctttcccaaccatctcagtgcagaaggtagaactccacctcctgggaggcctcagggagagaggcagttgtcagtgaactcatactcatcaactg

SEQ ID NO: 23991 - DNA, 110 bp, synthetic construct
  source 1..110: mol_type = other DNA
tccactcctctttcgatggacatttggttgtttccatgtcttagctatttgagcaactttttttaaaagatggaagtgattttgaaccatttaaaaagacagaatccaga

SEQ ID NO: 23992 - DNA, 110 bp, synthetic construct
  source 1..110: mol_type = other DNA
tctctgctggtttaatttttcttcttacatcactttcttcagtgctttcagattcatcactaatgggcttaagttttcttcctggctatgtcaagaaaacagcattactg

SEQ ID NO: 23993 - DNA, 110 bp, synthetic construct
  source 1..110: mol_type = other DNA
atcactaatgggcttaagttttcttcctggctatgtcaagaaaacagcattactgtttagaaaatacaaatgctatcattcttactgtgttaaaagataaccataaagtc

SEQ ID NO: 23994 - DNA, 110 bp, synthetic construct; identical to SEQ ID NO: 23992
  source 1..110: mol_type = other DNA

SEQ ID NO: 23995 - DNA, 110 bp, synthetic construct; identical to SEQ ID NO: 23993
  source 1..110: mol_type = other DNA

SEQ ID NO: 23996 - DNA, 110 bp, synthetic construct
  source 1..110: mol_type = other DNA
ctggtgcaggaaccccagcaggaacattctagcaaaattcaggatttcactagccaagaaaaactgacttctaacccgtggagtaaccttatagctcaaatttctacaag

SEQ ID NO: 23997 - DNA, 110 bp, synthetic construct
  source 1..110: mol_type = other DNA
aagaaaaactgacttctaacccgtggagtaaccttatagctcaaatttctacaaggaccaaaggggcacagaagctgaggaagagaaaagaaaatgaaagaacactccag

SEQ ID NO: 23998 - DNA, 110 bp, synthetic construct
  source 1..110: mol_type = other DNA
ttgtttaagacaattaacccaattccaataattccaacatgaagagtaaggccaacaaggagagccgccactgcctacctgcagtccagtccccaggcaccgtcaggctg

SEQ ID NO: 23999 - DNA, 110 bp, synthetic construct
  source 1..110: mol_type = other DNA
caaggagagccgccactgcctacctgcagtccagtccccaggcaccgtcaggctgcacccggctgtgcactccgtctgtccgtagccttcgtagaactgggtcaccagag

SEQ ID NO: 24000 - DNA, 110 bp, synthetic construct
  source 1..110: mol_type = other DNA
ctatgtggattttccatccactctcctcctcctctccatttattttccctttgctctgatttctttccttcctttgaaaaatcttattgaaatattcattttggtacacc

SEQ ID NO: 24001 - DNA, 110 bp, synthetic construct
  source 1..110: mol_type = other DNA
tactgggcattttctccctgccaagcagtgtgccagatgttaggggacacacaaatgaataagccaaggccctaggctcagagaggtcacccacaagtggagacagactt

SEQ ID NO: 24002 - DNA, 110 bp, synthetic construct
  source 1..110: mol_type = other DNA
tggggcatgtagttttccatgacagtgggatctgcttcatacccacaaaacagcgaaacatttaaaacagcaaacaaatcaaattattccaggacccaaagagaaaaatg

SEQ ID NO: 24003 - DNA, 110 bp, synthetic construct
  source 1..110: mol_type = other DNA
aaacatttaaaacagcaaacaaatcaaattattccaggacccaaagagaaaaatgagcttcactgttgttttatgttaaatggtaaaatgaacaaggtatccaactcgtt

SEQ ID NO: 24004 - DNA, 110 bp, synthetic construct
  source 1..110: mol_type = other DNA
gtgtcctacacaaattgagaagcaaagaacccatctttacctctcacacgtgcctcagcagaaaaacaaataatcattctgtgtacagcaacctggtttgtaccagaaac

SEQ ID NO: 24005 - DNA, 110 bp, synthetic construct
  source 1..110: mol_type = other DNA
agcactacctgctctcacaaagtgctcagtcctacatcctcacagctgtccaaccacaggccagaggtttccacagtggaaccagcaggcagcagtaccaaaatgctgaa

SEQ ID NO: 24006 - DNA, 110 bp, synthetic construct
  source 1..110: mol_type = other DNA
acaggccagaggtttccacagtggaaccagcaggcagcagtaccaaaatgctgaaggtcttcttttaaatgtattgggtcactggatagcaggagttctcaactgggggc

SEQ ID NO: 24007 - DNA, 110 bp, synthetic construct
  source 1..110: mol_type = other DNA
ttatgctgaattcttgaccttctgcctgctctgaccttggtaaatttgcacttcgataagctttcatacagttcactggatttctgaactctagcctgctccaatctcgg

SEQ ID NO: 24008 - DNA, 110 bp, synthetic construct
  source 1..110: mol_type = other DNA
gattctcatcatgcagttgagaaggaagcgacttgccctggacaacatagctaataagtgtagggctaggatttcaactccagtctgtctgacttcaaaccctgtatgta

SEQ ID NO: 24009 - DNA, 110 bp, synthetic construct
  source 1..110: mol_type = other DNA
taattaaaatagcccacgtggctcgtggccacctttttggacggtgcacacctgggaggtggaatcaagaggctctggttacggatcaggagaggagggcagaggtgaag

SEQ ID NO: 24010 - DNA, 110 bp, synthetic construct
  source 1..110: mol_type = other DNA
gaggtggaatcaagaggctctggttacggatcaggagaggagggcagaggtgaagggtgaaggatagagagtagttgattgtaacctcagagtttgtgtcttcagtgagg

SEQ ID NO: 24011 - DNA, 110 bp, synthetic construct
  source 1..110: mol_type = other DNA
agcagggttaaacaagtatttgggcaaaggacaaaggcctgtgtttaatgtcactgttcttgtctttgccattgtccaatagttagttttaaaaagtagtgttcatataa

SEQ ID NO: 24012 - DNA, 110 bp, synthetic construct
  source 1..110: mol_type = other DNA
gcatacgtcatggacgtaccactccaccacatctcgcggatggataaagaggcgggaaagagaagactcactttcggacagttgtgttgactgcgtcattcgtatcctac

SEQ ID NO: 24013 - DNA, 110 bp, synthetic construct
  source 1..110: mol_type = other DNA
gaaagagaagactcactttcggacagttgtgttgactgcgtcattcgtatcctacagacactctcacgtctttctgtgaggttctccaatggggattctaacctttacac

SEQ ID NO: 24014 - DNA, 110 bp, synthetic construct
  source 1..110: mol_type = other DNA
tgctccgctgacctaagatttaagctttgggatagagagtgactgtgtcatagccctctgggggcctcatgcgggctcgggcatgagtttcgcagtacagctccccctcc

SEQ ID NO: 24015 - DNA, 110 bp, synthetic construct
  source 1..110: mol_type = other DNA
ctctgggggcctcatgcgggctcgggcatgagtttcgcagtacagctccccctccacgaagaagtagcccttttgtttgaggttaaggttgcagtcagcacatacgaagc

SEQ ID NO: 24016 - DNA, 110 bp, synthetic construct; identical to SEQ ID NO: 24014
  source 1..110: mol_type = other DNA

SEQ ID NO: 24017 - DNA, 110 bp, synthetic construct; identical to SEQ ID NO: 24015
  source 1..110: mol_type = other DNA

SEQ ID NO: 24018 - DNA, 110 bp, synthetic construct
  source 1..110: mol_type = other DNA
tcagacactgttagaacgatcattaaagttttgttatttacacttatctgagattcattattttgcatgcttgttttgctaactttcaattttatgcaatggtgatacca

SEQ ID NO: 24019 - DNA, 110 bp, synthetic construct
  source 1..110: mol_type = other DNA
cctctggaagtggtgctgaggacattgaaatatccagctttctcagaggtggaaccactcctgaccatctgaggaggagagaaacattgaaacagtcagtatgagttgct

SEQ ID NO: 24020 - DNA, 110 bp, synthetic construct
  source 1..110: mol_type = other DNA
aataatgatcctctcaattgtcacaagaacaggtgaggacaggggtggctggagcttctggaccagtcacctctggcgattagcaaccacatctatttacctcagtgtgc

SEQ ID NO: 24021 - DNA, 110 bp, synthetic construct
  source 1..110: mol_type = other DNA
aataacattgtaacataacattccattttaggttcgcatttttattatttgtcggagagctcttttaaatgtacatggattaaatttcatcatctatccctctgggcatg

SEQ ID NO: 24022 - DNA, 110 bp, synthetic construct
  source 1..110: mol_type = other DNA
cctttttctctgttaatgttttaaacaacgcagatacagaaagaataaatgtagaagtcatctcttggcttttgcctttacctcttctctctccagacaaatactatgaa

SEQ ID NO: 24023 - DNA, 110 bp, synthetic construct; identical to SEQ ID NO: 24022
  source 1..110: mol_type = other DNA

SEQ ID NO: 24024 - DNA, 110 bp, synthetic construct
  source 1..110: mol_type = other DNA
aaatatcagttacaaatcgccttctaacttaattcctcaaatatggcaactaacaacccatagggaaagggccctgatctcaaggctttcaaggatgctctcagtatatg

SEQ ID NO: 24025 - DNA, 110 bp, synthetic construct
  source 1..110: mol_type = other DNA
ataaaggcacctattttgatgatatttaaaacagtgatttcatgtgtaaacactcttaatctcagtggcttaatgatgagtctttgagaaaggttggagaagcaatagtt

SEQ ID NO: 24026 - DNA, 110 bp, synthetic construct; identical to SEQ ID NO: 24025
  source 1..110: mol_type = other DNA

SEQ ID NO: 24027 - DNA, 110 bp, synthetic construct
  source 1..110: mol_type = other DNA
gtcctcctggatactaattagttttgttaccacagagctaaaacaggaacccttagccagctttttagagcaaatacacccattgaagactttcacagaggtaccagaaa

SEQ ID NO: 24028 - DNA, 110 bp, synthetic construct
  source 1..110: mol_type = other DNA
tcagagaggtaaagccacctcctagtagaacctcttcccagtaggtgttatttatgttacttatttatgtttcttcctgcagtgaatccaggccatcattttcatcaagt

SEQ ID NO: 24029 - DNA, 110 bp, synthetic construct
  source 1..110: mol_type = other DNA
gttacttatttatgtttcttcctgcagtgaatccaggccatcattttcatcaagtggaagccccacgcccactgaggcccccaactcttggtccgggtctgggacacaga

SEQ ID NO: 24030 - DNA, 110 bp, synthetic construct
  source 1..110: mol_type = other DNA
acttttcttagtccctcagtgtcaggcaatacttaggttaacagttgctggtgtttgctgattgctttcatgtttccagcaccagctaagtggatcgcattcattctttt

SEQ ID NO: 24031 - DNA, 110 bp, synthetic construct
  source 1..110: mol_type = other DNA
tgctgattgctttcatgtttccagcaccagctaagtggatcgcattcattcttttatttatgagttaccacaaacctttaagctggtacattatcccaaatctaagatga

SEQ ID NO: 24032 - DNA, 110 bp, synthetic construct
  source 1..110: mol_type = other DNA
tcaccttattatcgtccccagtccaccccctaacgtgccttcgttcacattggtgcagaccatagagagctgaagttgttttccggactttcattttctgctggaagcaa

SEQ ID NO: 24033 - DNA, 110 bp, synthetic construct
  source 1..110: mol_type = other DNA
gcctgggtgatattttcttgcttcaatggctcctctcttcatcccctacttactgagaccggtttgcttctgcacacctcaaagtatctatggattagggacccatcagc

SEQ ID NO: 24034 - DNA, 110 bp, synthetic construct
  source 1..110: mol_type = other DNA
tggaaaaaaatgtgcactaacctctaaagtgccacaatcacattgttcaccttgctccagaattccattgccacatatcctcctcctctgtttgtaaactggttcatcca

SEQ ID NO: 24035 - DNA, 110 bp, synthetic construct; identical to SEQ ID NO: 24034
  source 1..110: mol_type = other DNA

SEQ ID NO: 24036 - DNA, 110 bp, synthetic construct
  source 1..110: mol_type = other DNA
agacgctatgcaaattggttcacactcggtttattgttttcttcagctgtgaccagggaaggacaggctgaatttttatgtctcagtgagacaccaggtaatatccatcg

SEQ ID NO: 24037 - DNA, 110 bp, synthetic construct
  source 1..110: mol_type = other DNA
tatgtggtcaggtaaaggagaagcagcagcacttgtgggaaagacagagaatacagtaaagcttacacacacttaaacaaatttctttagaatttaaatttaaatttttt

SEQ ID NO: 24038 - DNA, 110 bp, synthetic construct
  source 1..110: mol_type = other DNA
ggttccaggtaaaggactctgaaggtgcttccagctcctcccaggggagaatcggagctgatctgcaagtggatggatggtcaaacatgagccttagaggatgggactgc

SEQ ID NO: 24039 - DNA, 110 bp, synthetic construct
  source 1..110: mol_type = other DNA
ccaggaacatttgcggcacttgaccctcccagggtgtcattagcacgaattcgaagctacctaaaaaatagctaagtatgtgtgtgagagctgcagaaagcgtggaacag

SEQ ID NO: 24040 - DNA, 110 bp, synthetic construct
  source 1..110: mol_type = other DNA
gctacctaaaaaatagctaagtatgtgtgtgagagctgcagaaagcgtggaacaggcaagaaagggcaactggctgaagaaagagtcaactgaagtcagacccccaaaag

SEQ ID NO: 24041 - DNA, 110 bp, synthetic construct; identical to SEQ ID NO: 24039
  source 1..110: mol_type = other DNA

SEQ ID NO: 24042 - DNA, 110 bp, synthetic construct; identical to SEQ ID NO: 24040
  source 1..110: mol_type = other DNA

SEQ ID NO: 24043 - DNA, 110 bp, synthetic construct
  source 1..110: mol_type = other DNA
ggacccgggtgcccccaacagctcctccggcgtcgggagcggggaagatccgtctttcttggtcagtgcacgctaaactatgcctcttccctttttatttttatcctttc

SEQ ID NO: 24044 - DNA, 110 bp, synthetic construct
  source 1..110: mol_type = other DNA
catccctcatacctctgccaaatgaggccacaaaaaatattcgaggctggagttcccattgtggctcagtggtaatgagcctgacgagcatccatgtggatacaggtttg

SEQ ID NO: 24045 - DNA, 110 bp, synthetic construct
  source 1..110: mol_type = other DNA
tgggaatcaccgccatactggtttgtcccgagaatggcatcacagaatctgggagaatgatacagtgacttatttgctatcgggtttttatttgtttggggagggggttg

SEQ ID NO: 24046 - DNA, 110 bp, synthetic construct
  source 1..110: mol_type = other DNA
gatgagccactgcgtcaagtattgggaaagattgggcatcccatccacagatggagcctcctgaggtcttggtgcattgacaaggatgcaaaacatctagccttgctgta

SEQ ID NO: 24047 - DNA, 110 bp, synthetic construct
  source 1..110: mol_type = other DNA
atccatcctccttgtgggttcctcctgtctttaaagacccgggtgctgtgaacggattatgtgaagcagcacagaccagcaccaggctcctcctactaccacacacacac

SEQ ID NO: 24048 - DNA, 110 bp, synthetic construct
  source 1..110: mol_type = other DNA
atgatggatgctatggccccacccatctcaagggagaggataagaacatctccagacagctctaagcccaggcacagctttagtcccggtggatgctagaggcaaggaaa

SEQ ID NO: 24049 - DNA, 110 bp, synthetic construct
  source 1..110: mol_type = other DNA
acagctctaagcccaggcacagctttagtcccggtggatgctagaggcaaggaaaatggagttgagcatcgagtgggtagcattatgttctactccaagccatggagacc

SEQ ID NO: 24050 - DNA, 110 bp, synthetic construct
  source 1..110: mol_type = other DNA
gtagttgagaagccccaggtcctagaggagggggactcaaaccaggctctgggggagtgtctgggatggatgcaggtgcctgcgaggagagggggagcttgagcgctggg

SEQ ID NO: 24051 - DNA, 110 bp, synthetic construct
  source 1..110: mol_type = other DNA
agtgtctgggatggatgcaggtgcctgcgaggagagggggagcttgagcgctgggacagtcaggatgtgtgatcaggagagtggtccaagagctgagttgagagctcctt

SEQ ID NO: 24052 - DNA, 110 bp, synthetic construct
  source 1..110: mol_type = other DNA
tggatgaaaggctgatgggcagttcggctgtccccggggatgggtgtttgacatgttgctcaggccctgcaaagcagggccatgtttccatggggacacagaagaacata

SEQ ID NO: 24053 - DNA, 110 bp, synthetic construct
  source 1..110: mol_type = other DNA
ttgctcaggccctgcaaagcagggccatgtttccatggggacacagaagaacatatccagcacaagtgagtccttggctgtccctggcagggatctggtacccatccagc

SEQ ID NO: 24054 - DNA, 110 bp, synthetic construct
  source 1..110: mol_type = other DNA
actgactaggataggagtacttcttgcttccacagttcttcacatatgttttatttaaatgggaatctggcaagtgaagaaatgcaagtgatggggagtaagaagagctg

SEQ ID NO: 24055 - DNA, 110 bp, synthetic construct
  source 1..110: mol_type = other DNA
taaatgggaatctggcaagtgaagaaatgcaagtgatggggagtaagaagagctggtaggatggacaaaatggctagggaatctggaataaagagcaacatcctctgagt

SEQ ID NO: 24056 - DNA, 110 bp, synthetic construct
  source 1..110: mol_type = other DNA
atatagattaattttttagtgattttcaccatctggccttagcaagtagttactttccccacatgatctcattgtacattttagaatacatcctgatgacttaataaaat

SEQ ID NO: 24057 - DNA, 110 bp, synthetic construct
  source 1..110: mol_type = other DNA
gggccatgggtctagtagtagagaattttcaccagctgttctgatccggcgtctgtaagcttccagacctggtaggaccacatcccagtccagtcactggaaaagtacac

SEQ ID NO: 24058 - DNA, 110 bp, synthetic construct
  source 1..110: mol_type = other DNA
aggagaagtttctcctttctcctgccccctttagggcctcagctccacccatccacccctgccagccttgagtctgttcagacctgggaagcaaaacccatagtttccat

SEQ ID NO: 24059 - DNA, 110 bp, synthetic construct
  source 1..110: mol_type = other DNA
cccctgccagccttgagtctgttcagacctgggaagcaaaacccatagtttccatcataggagcactgtgcacagaaaatacctttccttgaggctgggccagctcatct

SEQ ID NO: 24060 - DNA, 110 bp, synthetic construct
  source 1..110: mol_type = other DNA
gggccagctgggtgggacacggtctcgggaccacgggggacttgttgtttgtccttcgtcgcattttaaacataaagctctttatagcagtcaccttacagtcaaggtgc

SEQ ID NO: 24061 - DNA, 110 bp, synthetic construct
  source 1..110: mol_type = other DNA
tcgtcgcattttaaacataaagctctttatagcagtcaccttacagtcaaggtgctgccgcatgccttgtcctgccaggatgagagccagtcaccacggagtccttacag

SEQ ID NO: 24062 - DNA, 110 bp, synthetic construct
  source 1..110: mol_type = other DNA
gatggctttgcaaagcaaataaatactcattaaaactttcaatgggcttctcctgcagcacatagtcaatgcgctggcctccgttcagcattcccacgtggatggggggc

SEQ ID NO: 24063 - DNA, 110 bp, synthetic construct
  source 1..110: mol_type = other DNA
cagcacatagtcaatgcgctggcctccgttcagcattcccacgtggatggggggcatgtcttctttaactgccacagggttctcatctgtgttaacatctggttacagag

SEQ ID NO: 24064 - DNA, 110 bp, synthetic construct
  source 1..110: mol_type = other DNA
acttcatactaaaggagtcgtggacgaagattttaattaaactaaatccccaccttgttcaaaggaaaaactgctggggactgtggtcatttaattacatagaatctgtt

SEQ ID NO: 24065 - DNA, 110 bp, synthetic construct
  source 1..110: mol_type = other DNA
tgttcaaaggaaaaactgctggggactgtggtcatttaattacatagaatctgttatcagaatcttccgtaaaatctaatttgcacaagcccaaatctgttcttaaaaga

SEQ ID NO: 24066 - DNA, 110 bp, synthetic construct
  source 1..110: mol_type = other DNA
gtggtgtagctcacagatgtggctcagatccagtgttagtgttgctgtggctgtggtataggctggcagctgcaggtgcagctcctatttgccccctagcctgggaacat

SEQ ID NO: 24067 - DNA, 110 bp, synthetic construct; identical to SEQ ID NO: 24066
  source 1..110: mol_type = other DNA

SEQ ID NO: 24068 - DNA, 110 bp, synthetic construct
  source 1..110: mol_type = other DNA
gccttgtacagaatgagccctgtggagattctcagctggaaaactctgctctccaaaacctgaagtctgggcatgggaggggaagggggaattccttaccaagtggcttt

SEQ ID NO: 24069 - DNA, 110 bp, synthetic construct
  source 1..110: mol_type = other DNA
aaacctgaagtctgggcatgggaggggaagggggaattccttaccaagtggcttttcaccaacctttccctctctttctctgagagaagttgtctaaaccccacccttga

SEQ ID NO: 24070 - DNA, 110 bp, synthetic construct; identical to SEQ ID NO: 24068
  source 1..110: mol_type = other DNA

SEQ ID NO: 24071 - DNA, 110 bp, synthetic construct; identical to SEQ ID NO: 24069
  source 1..110: mol_type = other DNA

SEQ ID NO: 24072 - DNA, 110 bp, synthetic construct
  source 1..110: mol_type = other DNA
tacaagctgttgccaaaaccatgtaccgcctatgttttagtccaagttaaagatggaccgtaacctcactggctcagcttggttggctttgggcttatacagacaggcag

SEQ ID NO: 24073 - DNA, 110 bp, synthetic construct
  source 1..110: mol_type = other DNA
gaccgtaacctcactggctcagcttggttggctttgggcttatacagacaggcagcacctatcttcctggagttaatgagatttaccaggaaattgggcaaaagaatagc

SEQ ID NO: 24074 - DNA, 110 bp, synthetic construct
  source 1..110: mol_type = other DNA
attttttaagtggaggcaaccagggactcgcagaggaaaagtgatgcgccgggtggatactccttaggtggtttctggcgcgctcttcaatgtacttgagtcaggtgacc

SEQ ID NO: 24075 - DNA, 110 bp, synthetic construct
  source 1..110: mol_type = other DNA
gatactccttaggtggtttctggcgcgctcttcaatgtacttgagtcaggtgaccttttagagctaggaggtgcagcttctgctccatttcagaggatggagggagaagg

SEQ ID NO: 24076 - DNA, 110 bp, synthetic construct; identical to SEQ ID NO: 24074
  source 1..110: mol_type = other DNA

SEQ ID NO: 24077 - DNA, 110 bp, synthetic construct; identical to SEQ ID NO: 24075
  source 1..110: mol_type = other DNA

SEQ ID NO: 24078 - DNA, 110 bp, synthetic construct
  source 1..110: mol_type = other DNA
gtggggtggggtggagtggtgggatgggaaggatataagctacattcagactgacccgggtttgaatttcagctttgatgcctactagatttttaccaaggatgacattt

SEQ ID NO: 24079 - DNA, 110 bp, synthetic construct; identical to SEQ ID NO: 24078
  source 1..110: mol_type = other DNA

SEQ ID NO: 24080 - DNA, 110 bp, synthetic construct
  source 1..110: mol_type = other DNA
ttaatcgctctgtattagtggatatttattgcacagtatcttctgctttatggcttgctttttcactctttcatggtatgttactatgaacagaagcttctaatttttgt

SEQ ID NO: 24081 - DNA, 110 bp, synthetic construct
  source 1..110: mol_type = other DNA
tgctttttcactctttcatggtatgttactatgaacagaagcttctaatttttgttttgttataaccgtacccatggcacatgggatttcccaggtcagggattgaaacc

SEQ ID NO: 24082 - DNA, 110 bp, synthetic construct
  source 1..110: mol_type = other DNA
cccggaggccaagtacagggcgagaggaagagccacaggcattctgtggccacgtggagattgttctgccttctgtcctttctgaaaggaggtggggatgaaagctaatc

SEQ ID NO: 24083 - DNA, 110 bp, synthetic construct
  source 1..110: mol_type = other DNA
agtcaggtttgttctttgttacaccactattccctttgtaccaaagagaagctgaaacagagatcaggagtggttggatgcccaaggtaacactgaacatcagaacagaa

SEQ ID NO: 24084 - DNA, 110 bp, synthetic construct
  source 1..110: mol_type = other DNA
gccgcaacaggaagtaagcacccatctttttgatggtatttgtcagaggagatgggggacaatgacaagcttggaggacaaggtcatctatggaataaactacctatttt

SEQ ID NO: 24085 - DNA, 110 bp, synthetic construct
  source 1..110: mol_type = other DNA
gggacaatgacaagcttggaggacaaggtcatctatggaataaactacctattttgcgcttttaacgtatggtgtaataagcgtgcaacatagcaacagtactcagaacc

SEQ ID NO: 24086 - DNA, 110 bp, synthetic construct
  source 1..110: mol_type = other DNA
cagggaagcagattttgaggggaaattattcccaggtgagggcctcatggaagctgaccgtgaatgggcgacagtggcaccactttccaagtaagtaaaccatggtttta

SEQ ID NO: 24087 - DNA, 110 bp, synthetic construct
  source 1..110: mol_type = other DNA
gaccgtgaatgggcgacagtggcaccactttccaagtaagtaaaccatggttttaatggtggttctgaatatgtgagtatatccacagaccgtcttctaagctaggtcta

SEQ ID NO: 24088 - DNA, 110 bp, synthetic construct
  source 1..110: mol_type = other DNA
aggcaaaaaagggtcctggagcaacaccccaaggggagaacagagagactaccggttacaggaggaattgatgtcagattgtctcatcagttgtcagggaaaccagaagg

SEQ ID NO: 24089 - DNA, 110 bp, synthetic construct
  source 1..110: mol_type = other DNA
tcttcctgtggtactcactccattctggccactctggctgccttcttttttttcccaaaactctaatattttttctgtcccaaagactgactttcattttgttttagttt

SEQ ID NO: 24090 - DNA, 110 bp, synthetic construct
  source 1..110: mol_type = other DNA
gaagacagagcagttaacataaaagtagaggagctatttggatttaatttggaaacaacaaagaactacagctgggaaaaaactggtaggtaaaggagaggaaagagatg

SEQ ID NO: 24091 - DNA, 110 bp, synthetic construct
  source 1..110: mol_type = other DNA
caacaaagaactacagctgggaaaaaactggtaggtaaaggagaggaaagagatgtgaatggaggaaagaagaatgataatactatctgtttagtctaggatttggggag

SEQ ID NO: 24092 - DNA, 110 bp, synthetic construct; identical to SEQ ID NO: 24090
  source 1..110: mol_type = other DNA

SEQ ID NO: 24093 - DNA, 110 bp, synthetic construct; identical to SEQ ID NO: 24091
  source 1..110: mol_type = other DNA

SEQ ID NO: 24094 - DNA, 110 bp, synthetic construct
  source 1..110: mol_type = other DNA
ttttttttttctcttactgcttttaaaattatctctttgcctttgttttagagagtttcattttagtgaggcttggagaagtgagttttggattgaaattttggggtacc

SEQ ID NO: 24095 - DNA, 110 bp, synthetic construct
  source 1..110: mol_type = other DNA
tttcattttagtgaggcttggagaagtgagttttggattgaaattttggggtaccaattagttttacaaacttggttacccaaatacattcccaggtttgggatgttctc

SEQ ID NO: 24096 - DNA, 110 bp, synthetic construct
  source 1..110: mol_type = other DNA
tattatcctggaagtgtagtgtatttcatgccacattctattttttcttggccagaactggaccttgagcccatagctataatgatcactggcaccagggaatgggattg

SEQ ID NO: 24097 - DNA, 110 bp, synthetic construct
  source 1..110: mol_type = other DNA
aggagtaggagaatttatggctgtcccactattcagtatagttactgtcactcgctgttctaagcatggtgcacagtcctttctgtagctgtacctgaactttttctcta

SEQ ID NO: 24098 - DNA, 110 bp, synthetic construct
  source 1..110: mol_type = other DNA
ttctgaacatcagcagctgtttacatagtacttacattgtatttacaacgatttgcaagtgtttattacacagccaaccctctaacaatatggggcttagggactcagtt

SEQ ID NO: 24099 - DNA, 110 bp, synthetic construct; identical to SEQ ID NO: 24098
  source 1..110: mol_type = other DNA

SEQ ID NO: 24100 - DNA, 110 bp, synthetic construct
  source 1..110: mol_type = other DNA
accgaaaacctcttcgagaagaagcatgaaggaatatgacggatgtgaagctgaacataaccaaatctctgaagttcccattgtggctgagaggtaatgaacctgattag

SEQ ID NO: 24101 - DNA, 110 bp, synthetic construct
  source 1..110: mol_type = other DNA
tggtcctgtttttcttggtccatagtactgactgtacatttgacacctagtgaactgaactgagttcataatactaactgtgaaaaatattccaaaggatttcacaactc

SEQ ID NO: 24102 - DNA, 110 bp, synthetic construct
  source 1..110: mol_type = other DNA
tcatgcatttttccaaaaggtcacgtcctaattatcccccaatctgatcatcctttccttttttataacctcaggtaacatctgggtcctctcagagcaccaatgtatct

SEQ ID NO: 24103 - DNA, 110 bp, synthetic construct
  source 1..110: mol_type = other DNA
catgtgttagaggaaatgacaaaggtattaaaagattttatatgggcatcaaacagctcacaccctacgggggcttgagctctgtccaaagtaattcattgttgcagaaa

SEQ ID NO: 24104 - DNA, 110 bp, synthetic construct
  source 1..110: mol_type = other DNA
aaagttacaaagcaccatactgtttaagggtatgaagtactaaaactccacaatagttagattcagattcttagctcaactacctatgtgagcatggcacattaccttgg

SEQ ID NO: 24105 - DNA, 110 bp, synthetic construct
  source 1..110: mol_type = other DNA
atttcttcttgcatgtttaacattgattatttccaattataaaatacatgctgccagtgccaggttagctttctatgcaacttaaagtcagtgggtcaaatcccacacaa

SEQ ID NO: 24106 - DNA, 110 bp, synthetic construct
  source 1..110: mol_type = other DNA
acactgctctgacactgcagggaccctcttggctcatggctagggatgcgtgtttgctgcaagactgtacctcagctttacctggagatgctagatgacttcaatgttta

SEQ ID NO: 24107 - DNA, 110 bp, synthetic construct
  source 1..110: mol_type = other DNA
tccactcttcttgcagctcaataaaatgtttgggacccggtcaggaaaaccaagctctggggaatgaaggcttcaaagcaaagactgatgggggcctggctagggactta

SEQ ID NO: 24108 - DNA, 110 bp, synthetic construct
  source 1..110: mol_type = other DNA
cctttgatatgctggggcatatagagatcaactatctctctctcagtacatatatctatttgcagaatgatacaagctatagattgaatgtatacgtgcaccccaaattc

SEQ ID NO: 24109 - DNA, 110 bp, synthetic construct
  source 1..110: mol_type = other DNA
ctatttgcagaatgatacaagctatagattgaatgtatacgtgcaccccaaattcctgtgttcaagctctaatctcagtgtggctatacttggagatagggccaatcggg

SEQ ID NO: 24110 - DNA, 110 bp, synthetic construct
  source 1..110: mol_type = other DNA
agaagtaaaactgcaacaattttgtatggtgtggtacatagttcagctcaatcgctacagaaagtaagactgtgtggctgtttctaatatttaggtatttttttaaatta

SEQ ID NO: 24111 - DNA, 110 bp, synthetic construct
  source 1..110: mol_type = other DNA
ttattttagattgccaaggaaaggaacatgtaggagctggtggttaataagaagggaaacatcttcctcaattcacagaggccactgggggctggaacattaactaatta

SEQ ID NO: 24112 - DNA, 110 bp, synthetic construct
  source 1..110: mol_type = other DNA
gcactgggttaatgatctagcttgtctctgtggagccctggtttggttcccagactcgcacagtgggttaagtttttggtattgctgcagctgtggtgtaggtcacagct

SEQ ID NO: 24113 - DNA, 110 bp, synthetic construct
  source 1..110: mol_type = other DNA
tacaagtgaaggcaaatttatcaatttttccagccctgtcattctcaggaagcgtttgcttttttaattgctcagctagggttcattggacataattgaacagttacctg

SEQ ID NO: 24114 - DNA, 110 bp, synthetic construct
  source 1..110: mol_type = other DNA
aactgaaaatcttttctacagtaaattattaaaaaccccatgctatgcctgccgtgatagtacatgtaatataaaactaaattgcctggaaataatgaagcacatctaaa

SEQ ID NO: 24115 - DNA, 110 bp, synthetic construct
  source 1..110: mol_type = other DNA
agtagatggctattaatacatattaccagctcatcaatttttgtaggagaaaggaagcagagattaaataacatctcaagactcataaagaagatagtcatggaattctt

SEQ ID NO: 24116 - DNA, 110 bp, synthetic construct
  source 1..110: mol_type = other DNA
ttctcctcctcaaactaggagaaatatgaggaatgacaccttttcccaagtgcaaaaatagctgtgagtctggattaccaaagcagaaggggaagagaagtacagacaaa

SEQ ID NO: 24117 - DNA, 110 bp, synthetic construct
  source 1..110: mol_type = other DNA
gaaagagaaagaagatagagatttgagaagaatattgcatgataaacaaggcccatttctggggaaagactatgttgtctaatgaaggtctgcaaccacgtgaaaggaga

SEQ ID NO: 24118 - DNA, 110 bp, synthetic construct
  source 1..110: mol_type = other DNA
tttctggggaaagactatgttgtctaatgaaggtctgcaaccacgtgaaaggagaagttaccattcattcataagtatcatattacattgtctcccactgaccttaacat

SEQ ID NO: 24119 - DNA, 110 bp, synthetic construct
  source 1..110: mol_type = other DNA
tttactatatgttaaaataaaactgaataaagttaagcttaaaatattaaagaaggttgcactgtgccttaaaattgagttgcggtagagttcccgttgtggtgcagcag

SEQ ID NO: 24120 - DNA, 110 bp, synthetic construct
  source 1..110: mol_type = other DNA
aataaaactgaataaagttaagcttaaaatattaaagaaggttgcactgtgccttaaaattgagttgcggtagagttcccgttgtggtgcagcagaaacaaatctgacta

SEQ ID NO: 24121 - DNA, 110 bp, synthetic construct
  source 1..110: mol_type = other DNA
aattgggcaaagaaaaagtagaggaaaaaacacttttcagttctgttactttcccttacacatacatattaatccccgcatagaaacaccatatgttaccacagttagcc

SEQ ID NO: 24122 - DNA, 110 bp, synthetic construct
  source 1..110: mol_type = other DNA
ttacacatacatattaatccccgcatagaaacaccatatgttaccacagttagccttttcttagaatgtgtatgccaagttacccaacagtgaagtgattgtgaccacag

SEQ ID NO: 24123 - DNA, 110 bp, synthetic construct
  source 1..110: mol_type = other DNA
agcactttgttttttctgtgaaggagaggccttcctattgacaaaaatagaatttaatctcttattcatcgttcttatttgtacctgagttaaagttttaaaatggacta

SEQ ID NO: 24124 - DNA, 110 bp, synthetic construct
  source 1..110: mol_type = other DNA
ccctacttcataatgttccagtgactagaaaacatcagaaattatttaagaactgagtttcaagatgtcttacctttaaatcgccccttgaaggccagcaagaattgtat

SEQ ID NO: 24125 - DNA, 110 bp, synthetic construct
  source 1..110: mol_type = other DNA
agtttcaagatgtcttacctttaaatcgccccttgaaggccagcaagaattgtatttctatttattctgttgtctctgtcttctttcccacccacctccccttcatctct

SEQ ID NO: 24126 - DNA, 110 bp, synthetic construct
  source 1..110: mol_type = other DNA
tcagctaacaaactgggcagctcttcagagagcctggatctttgcaagtgtctgtcttcagcaatcagtctcccgtggtcttacagctacatctcttattctttacagac

SEQ ID NO: 24127 - DNA, 110 bp, synthetic construct
  source 1..110: mol_type = other DNA
tcgatcattttgcaacctaccacaggtgagctgaatgatacctataaccagacttcaagggacccgcggtaccagaaaagctatgttgagtcctggacagccagtggtcc

SEQ ID NO: 24128 - DNA, 110 bp, synthetic construct
  source 1..110: mol_type = other DNA
tccaagctgatactcagcaaaggagctcatcagggagaaaagagtgatatcttatatctgttttcagagatgagggagagagagagaggcaggggacctaacccctttga

SEQ ID NO: 24129 - DNA, 110 bp, synthetic construct
  source 1..110: mol_type = other DNA
aaaataatggcggcagtacagctcagcatgcatatgaaatcatgaaaggacagcagaaccaaaactgatgtgcctgactggtggtagacacttgattttttcgttttctt

SEQ ID NO: 24130 - DNA, 110 bp, synthetic construct
  source 1..110: mol_type = other DNA
ccagataggcagtgtctctggaggtctgggaagaggtttcatccctgctcagcacagcagcttaatgatcccttgctacaggtcatcacaactgtggctcagatctgttc

SEQ ID NO: 24131 - DNA, 110 bp, synthetic construct
  source 1..110: mol_type = other DNA
taccttcccttgctgcttccccatcttctgaaccagtatctcttgatgtagtcggtgctttatgtacctaccagctcatatgagtcaaggagaatgatgggtagaagacc

SEQ ID NO: 24132 - DNA, 110 bp, synthetic construct
  source 1..110: mol_type = other DNA
ggtctaggagagtcccaagctaggagctcctgtcccatgggtttggggtgtggtaccttccaggtgtgcttgtgtttgccaacctggaatctcccagaactcccaactgt

SEQ ID NO: 24133 - DNA, 110 bp, synthetic construct
  source 1..110: mol_type = other DNA
catggctatggagtcaatgtctgtattccatgcagatgtgttaccatgaggctctagggagggagaaaattggaccagctctgttcatgctacgtaaagtgctgatctga

SEQ ID NO: 24134 - DNA, 110 bp, synthetic construct
  source 1..110: mol_type = other DNA
ttttgctggggatcattttttgtttgttttttgtttttttgcttttctggactatgtaatatagcagtcccagacctgctggcctcattagcttgaatagtgggatatta

SEQ ID NO: 24135 - DNA, 110 bp, synthetic construct
  source 1..110: mol_type = other DNA
agagaaagtgatcaataatgatctggggaccagctaaagcaatagggactgtagatggttccactaattattttattatgtgcacattttcttgaataaattttgtctgg

SEQ ID NO: 24136 - DNA, 110 bp, synthetic construct
  source 1..110: mol_type = other DNA
cacatctctccagctttcgggaactttaggaaggttctgtaattaattacagctgaacagtaatcctgactgacctctctcccctgcaactgcccaaggcttccgcaagc

SEQ ID NO: 24137 - DNA, 110 bp, synthetic construct
  source 1..110: mol_type = other DNA
tgagaagcccggaactatggactagctgccatttataccacatagctttcccacgagcttctggccactccggtcagccactcaggagtgcatccagtgtcaaataaggg

SEQ ID NO: 24138 - DNA, 110 bp, synthetic construct
  source 1..110: mol_type = other DNA
aagtcttgggattttttattttgttttgtttttaaatttctgggccttgatactcaaactgaacagacacctgtttttctactgttggcattaaactttgtggctcaata

SEQ ID NO: 24139 - DNA, 110 bp, synthetic construct
  source 1..110: mol_type = other DNA
ctgactcctccctaccctgctccctgccaagcaggcaattctttctctccagtctctaccctgaaatatagctgttgctcagtaaaagatggaccaaatttactatagct

SEQ ID NO: 24140 - DNA, 110 bp, synthetic construct
  source 1..110: mol_type = other DNA
gtgtgccatataagaacaacaggaagtcagactttaataaggctaatgtaggacaggtatgcaaatgaggctggctaactggatgaccccaaatagggtttgtcacatac

SEQ ID NO: 24141 - DNA, 110 bp, synthetic construct
  source 1..110: mol_type = other DNA
aaagaaagtgaatgaaaggttgcaacaccaaatgtcacacaattcaatggaaaataattctacgggaactcaacctcttaatccaaagcttggctgaataactaacttcc

SEQ ID NO: 24142 - DNA, 110 bp, synthetic construct
  source 1..110: mol_type = other DNA
ttaaaggttcacccaccaatgacttgattttatgtcccacatggttaagcttctacaattagagaaaagcccatttgggaatgactggccctgggttctcgtttcttctg

SEQ ID NO: 24143 - DNA, 110 bp, synthetic construct
  source 1..110: mol_type = other DNA
tagcctttccaggagagaaatccctgtgaggtccagcctgagccatgggctgactagcccctactacttctgagccaaagaattcctcctaactttccctattagtacca

SEQ ID NO: 24144 - DNA, 110 bp, synthetic construct
  source 1..110: mol_type = other DNA
tataatccatcagggagtcagatactcatcaaatgctcatgtaattcacaaccatggtgatgagggctatgaggcacagggtaaggatcatatgcgactcatggttttgt

SEQ ID NO: 24145 - DNA, 110 bp, synthetic construct
  source 1..110: mol_type = other DNA
accactctgtactaaaataatgttcagagtttatagctcatcagttttcacccatcccccgaggcttatatttccttgtgctatttactaactctgcaatgtaaagtgtc

SEQ ID NO: 24146 - DNA, 110 bp, synthetic construct
  source 1..110: mol_type = other DNA
agttggagctattacaaataaaacagctatgaacatttatgtacaagttgtttcgttgttgttgttttgtgtgggggtgttgttttgtttttttgtttgtttgtttttgc

SEQ ID NO: 24147 - DNA, 110 bp, synthetic construct
  source 1..110: mol_type = other DNA
ttgtagaaggttgcaatggtttttttccctcagaataagaatggtctgtaatactcttggtagaaaaccagctttagaaacacagaatccagtgatcccattccaaacac

SEQ ID NO: 24148 - DNA, 110 bp, synthetic construct
  source 1..110: mol_type = other DNA
cagttagctcctggcttggaaactcaaacatgaatgtgcaaggatgctgtacagctcaggtttgctaaactggctggcatcacgagccaatctcactaatctttaaatgt

SEQ ID NO: 24149 - DNA, 110 bp, synthetic construct
  source 1..110: mol_type = other DNA
tcaggtttgctaaactggctggcatcacgagccaatctcactaatctttaaatgttgatagtcctagtttgaaaaataccggcaaataccacaatacacaaaagaaaaat

SEQ ID NO: 24150 - DNA, 110 bp, synthetic construct
  source 1..110: mol_type = other DNA
tcccttttttttttttctcacttatgaggagagaggaaaagtccctaagaaggctgaatgtagatataagtggattcattgatgagagtcttccttagtattgagatatt

SEQ ID NO: 24151 - DNA, 110 bp, synthetic construct
  source 1..110: mol_type = other DNA
gaatgtagatataagtggattcattgatgagagtcttccttagtattgagatattccaagctcactgaagatatcagtgatgtaatgctcttatttaacacacgtgaatg

SEQ ID NO: 24152 - DNA, 110 bp, synthetic construct
  source 1..110: mol_type = other DNA
tggaatgaataataaagctctttctcaaccaaagattgtttaaagagagaagttctactttgcaggaaaggtgagagagagtgatgcttccctgtattcttcactcttat

SEQ ID NO: 24153 - DNA, 110 bp, synthetic construct
  source 1..110: mol_type = other DNA
atttcgattaagagcctgaaaagtttccaactggattttgggtcagaatttccataaacaatttttctgcttttctctcactggaaaacattgtgagtctacttactata

SEQ ID NO: 24154 - DNA, 110 bp, synthetic construct
  source 1..110: mol_type = other DNA
tctctctcccatcatctctcccatctgttttataggagctaatttgttttggggtgggttattgctggtggtggtgggtgtgtgggggtgggggtatgttttctgaagga

SEQ ID NO: 24155 - DNA, 110 bp, synthetic construct
  source 1..110: mol_type = other DNA
tgcagttatactctcaacctagtgggaaattctaggcagaaagaatgatcctaagtgctcatttgcagtcattcttttggaaggctgtggccccagagggaattgatacc

SEQ ID NO: 24156 - DNA, 110 bp, synthetic construct
  source 1..110: mol_type = other DNA
tgctcatttgcagtcattcttttggaaggctgtggccccagagggaattgatacccctcccctcgcccgtggctctccaccctctcctctttctctagaaaagtggggtc

SEQ ID NO: 24157 - DNA, 110 bp, synthetic construct
  source 1..110: mol_type = other DNA
cttcattgcttcttagtgtggattcttgagtaagcattatatacaccaagggtgagcaaatgagaattaaggaaagaaaggatatgaagcaatgaacactgatgtattat

SEQ ID NO: 24158 - DNA, 110 bp, synthetic construct
  source 1..110: mol_type = other DNA
aaaaaaaaaagaaaagaaaaaaaacctatgatgctaacccttcaccaaataattccaagcaccaattctgtgctatacaaggctagaggctttgcaggcatctgcccatt

SEQ ID NO: 24159 - DNA, 110 bp, synthetic construct
  source 1..110: mol_type = other DNA
agccagttcctccacagctagaggcaccaatcacgggttggcatgctggggtacatgggccaaatctgtctattctggtaaggtctatagctaagaacggctttttcccc

SEQ ID NO: 24160 - DNA, 110 bp, synthetic construct
  source 1..110: mol_type = other DNA
tgggccaaatctgtctattctggtaaggtctatagctaagaacggctttttccccccattttttaacagttaaaaaaaaaatcaaaaaaagaacagtttttgacatgtga

SEQ ID NO: 24161 - DNA, 110 bp, synthetic construct
  source 1..110: mol_type = other DNA
gcatttcattcactcattcatccatttatccacagacatttttggtaaaagccatttaggtgtaagctatagtactgggcactattaaaaaccaaggataagtgagatat

SEQ ID NO: 24162 - DNA, 110 bp, synthetic construct
  source 1..110: mol_type = other DNA
gaaatttttatgcttttttttcttctagttccatggcaacaagaaccctttcagcgaggacattgaaaatggtcttctatctactgaaataaaggagatttaacaagttt

SEQ ID NO: 24163 - DNA, 110 bp, synthetic construct
  source 1..110: mol_type = other DNA
gcaacaagaaccctttcagcgaggacattgaaaatggtcttctatctactgaaataaaggagatttaacaagtttttccaagtgttttttacttacatatttttttaact

SEQ ID NO: 24164 - DNA, 110 bp, synthetic construct
  source 1..110: mol_type = other DNA
aaaccctttgcaatggtcaacattatcctaactgtcctgggacctttgttcctattgaccttgcagtttgcagaaatggggttttatggcactacctacccccttcagga

SEQ ID NO: 24165 - DNA, 110 bp, synthetic construct
  source 1..110: mol_type = other DNA
tgactctagtgtccagtgctcggtttttaagttcaaaatgaaagtaggaacgaggaaagaaaagactgttaattatcaacttaacaccttgacactttagacagactctt

SEQ ID NO: 24166 - DNA, 110 bp, synthetic construct
  source 1..110: mol_type = other DNA
aaagaaaagactgttaattatcaacttaacaccttgacactttagacagactcttagaagtctgtctctgcagaaggcaggtggagggataccactaagtgtgccccacc

SEQ ID NO: 24167 - DNA, 110 bp, synthetic construct
  source 1..110: mol_type = other DNA
gattaggtaaaggctgttatttccattcaaaagattttgagtaatgctgttgtaaacagctttgtatcctgagttttcttttgaactaacttctaagaataaatttccag

SEQ ID NO: 24168 - DNA, 110 bp, synthetic construct; identical to SEQ ID NO: 24167
  source 1..110: mol_type = other DNA

SEQ ID NO: 24169 - DNA, 110 bp, synthetic construct
  source 1..110: mol_type = other DNA
actagtcaggtttgttaacgctgagtcaccactggaactccgacatgctgatatttagatgaatgagatactacatgctgctctgatacttttattcttagctctatttt

SEQ ID NO: 24170 - DNA, 110 bp, synthetic construct
  source 1..110: mol_type = other DNA
aactccgacatgctgatatttagatgaatgagatactacatgctgctctgatacttttattcttagctctatttttagtatatcaataaatgtacagcagaaagcaaata

SEQ ID NO: 24171 - DNA, 110 bp, synthetic construct
  source 1..110: mol_type = other DNA
agccctggaatccctctggcctcaagagtttgtagcagcactttatggctacaacttttgacagagaaagtatgttcacggcatagcttcacgtttagaacagttgcaac

SEQ ID NO: 24172 - DNA, 110 bp, synthetic construct
  source 1..110: mol_type = other DNA
tgtgtgagcttagccaaactagctgccctctctgtgcttcttcacctataaaatggggctcataattgtacctcctcagagaattattaagaactcaataaattaatgtt

SEQ ID NO: 24173 - DNA, 110 bp, synthetic construct
  source 1..110: mol_type = other DNA
gagctggctacctgttgactcagtgcatggattgccaaaaataaacagctctgctctgggctccgtagaggacatgggaatatacatgatgggctccaagggcatctgag

SEQ ID NO: 24174 - DNA, 110 bp, synthetic construct
  source 1..110: mol_type = other DNA
acctatccacctaaacaaagcaaatacaaatacaaattctcctgaagggaaccttcctcttaggccactgagcatctccacaaataattttctaagagcagtgagcagcg

SEQ ID NO: 24175 - DNA, 110 bp, synthetic construct
  source 1..110: mol_type = other DNA
cctcttaggccactgagcatctccacaaataattttctaagagcagtgagcagcgcagaatttaaaatatccaagtgtacaaggaaatcgacagaaactatgaagaacca

SEQ ID NO: 24176 - DNA, 110 bp, synthetic construct
  source 1..110: mol_type = other DNA
aatcagagagggcagagcagacgcgccccgcctcccctcccccgagtgccttggtggtcacaacgtagggtcttttgctctttgcagtttagtaagtccggttacttctc

SEQ ID NO: 24177 - DNA, 110 bp, synthetic construct
  source 1..110: mol_type = other DNA
ggtcacaacgtagggtcttttgctctttgcagtttagtaagtccggttacttctctatgggcctaattgaacacttagacgtgtatgaggggttaagttgtgctattagg

SEQ ID NO: 24178 - DNA, 110 bp, synthetic construct
  source 1..110: mol_type = other DNA
gcgagcttcggcggcggccacgtggctgggggccaggcggcggagctgtgttctctctctctctctctagcatcctggcttcacggaaggtgcggtgtcaaaatactagt

SEQ ID NO: 24179 - DNA, 110 bp, synthetic construct
  source 1..110: mol_type = other DNA
aacctgtcaagacttaactttgccttcattaagtcattttaaaggttttaagacagcgttgatataggatacagctataggatatattagagtttgccctttcaattaat

SEQ ID NO: 24180 - DNA, 110 bp, synthetic construct
  source 1..110: mol_type = other DNA
tgactaggtcatgtaccccagtgtttggtccagctccagtctagatgttgttgtgaaggtatcttttagatgaaattaatttttaagcagtaggctgtgagcaatgcaga

SEQ ID NO: 24181 - DNA, 110 bp, synthetic construct
  source 1..110: mol_type = other DNA
gacgttcctgggccagcgatcaaatgtgcaccacacagtgacaacactggatccttaaccttctgagccacgagggaactctaattaaaagctttttaaaagagaggatt

SEQ ID NO: 24182 - DNA, 110 bp, synthetic construct
  source 1..110: mol_type = other DNA
taaccttctgagccacgagggaactctaattaaaagctttttaaaagagaggattttgggatcggacttgaaggcaaggttatttatccatatataaataaaaagggctg

SEQ ID NO: 24183 - DNA, 110 bp, synthetic construct
  source 1..110: mol_type = other DNA
cacggcagtgagttaacttggtgaatgatggtgtgttctatgcttcctaccctgagcatctgcatacggagctagcccaacaaggtggtggctatcgttatattgtcatt

SEQ ID NO: 24184 - DNA, 110 bp, synthetic construct
  source 1..110: mol_type = other DNA
cttttcactttggcctgcaaatttcctggtaagtttttatctcaggagaagccgccacaagggcaagggaagctggttctcactatccaatccctcaggacccagcttgg

SEQ ID NO: 24185 - DNA, 110 bp, synthetic construct
  source 1..110: mol_type = other DNA
cttatagatgccaaacccacacatctcatgcagtggagtgagcttaggatggacgacaaacagaaagttaagaaccttaaagacacatttgggaatgtagaaaattgaac

SEQ ID NO: 24186 - DNA, 110 bp, synthetic construct
  source 1..110: mol_type = other DNA
gggtgtgcccatcgcatgtggaagttcccaggccaggaagcaaacctgcgccacggcagtgacaacactggaaacttaacccactgcctcaccagggaactccgggaagg

SEQ ID NO: 24187 - DNA, 110 bp, synthetic construct
  source 1..110: mol_type = other DNA
gcagtgacaacactggaaacttaacccactgcctcaccagggaactccgggaaggatgacttttaatcatactgtcttatgactataaaataataaggaaaagtgaatca

SEQ ID NO: 24188 - DNA, 110 bp, synthetic construct
  source 1..110: mol_type = other DNA
ctgcctggtactgaattttttctcttttcctttctcccattcctttgagggcccatgtcactttcttctctccctcaaaagacagaaacacagagctacacatgtgcaca

SEQ ID NO: 24189 - DNA, 110 bp, synthetic construct
  source 1..110: mol_type = other DNA
tgtcactttcttctctccctcaaaagacagaaacacagagctacacatgtgcacatgcacacacaccttattaactactgctcatcattcaaggtctctattcaggtact

SEQ ID NO: 24190 - DNA, 110 bp, synthetic construct
  source 1..110: mol_type = other DNA
aacgatggactaattatcacagaaagctcataggaatacagtgtagaaatggcaagcaggaatacagtatagaatccttatggggtaatggactaggttaactaaccttt

SEQ ID NO: 24191 - DNA, 110 bp, synthetic construct
  source 1..110: mol_type = other DNA
aatggctctgaggcatcagattccttaggaccagagaccagaccattctagtcactcagttcttagtcctttgcttctttagaaagcagaattaaaacatacacgttcca

SEQ ID NO: 24192 - DNA, 110 bp, synthetic construct
  source 1..110: mol_type = other DNA
tctttggacttggaaaattcagtcaatcaaaatattcatttccaacttttgttttggtcacagcttaatttgaacatgatactgtgtgtagtgaatcacagcactgggac

SEQ ID NO: 24193 - DNA, 110 bp, synthetic construct
  source 1..110: mol_type = other DNA
attggtattggcaggtggctctgagctgagtccctccctgggaattgctgtcagcagaggagagcagcctcacccaggtcctgctctagggacagcctacctccactgac

SEQ ID NO: 24194 - DNA, 110 bp, synthetic construct
  source 1..110: mol_type = other DNA
ccgcgggctggcgcctacgcacctccgggcttacgagctgtaccaggtacgtcctctccatgcccgcgaggaatggtgttgagagtcgcgcagagtggactctcaccggt

SEQ ID NO: 24195 - DNA, 110 bp, synthetic construct; identical to SEQ ID NO: 24194
  source 1..110: mol_type = other DNA

SEQ ID NO: 24196 - DNA, 110 bp, synthetic construct
  source 1..110: mol_type = other DNA
tctgtgaccataagaacacaactgatttcttcaatctcactagagaaattccatggtgcaggagaaggggcctaggcttgagccagacccagctccataaaaagtataca

SEQ ID NO: 24197 - DNA, 110 bp, synthetic construct
  source 1..110: mol_type = other DNA
gtgcaggagaaggggcctaggcttgagccagacccagctccataaaaagtatacagtaggaccaaaggatgttacaggtcaaagtgttacccacctgggttcttggatcc

SEQ ID NO: 24198 - DNA, 110 bp, synthetic construct
  source 1..110: mol_type = other DNA
aattctactacagcaccacgacattgcagacaccagatgtgtggtagttttactacaggaagcaattctgcaacaccagctgggtgccctacaatttaactcaagtctgg

SEQ ID NO: 24199 - DNA, 110 bp, synthetic construct
  source 1..110: mol_type = other DNA
tttggcaccggtggacagaggctgagttttggcaacaaagcctccaatcagcaactcagctgctcagaaggtaacaaataccagtctgtggatggggaaggctggaaggg

SEQ ID NO: 24200 - DNA, 110 bp, synthetic construct
  source 1..110: mol_type = other DNA
tcagctgctcagaaggtaacaaataccagtctgtggatggggaaggctggaagggggaggccatggaagcagggagatccctcctttcccaccctggttccttagccccc

SEQ ID NO: 24201 - DNA, 110 bp, synthetic construct
  source 1..110: mol_type = other DNA
actagggatgaagcaagttcctggcaaacgtataaagctgagaatgcaacaaggaacaactctgtccttaatactgagcaccttcctttgggtgacttagattctcctca

SEQ ID NO: 24202 - DNA, 110 bp, synthetic construct
  source 1..110: mol_type = other DNA
ggccacttgactaacatattagcaggatttttgtattccatggagattactcctcccaaacttcagagtagctgggaggttctccagtcctggcttataaatgttaatca

SEQ ID NO: 24203 - DNA, 110 bp, synthetic construct
  source 1..110: mol_type = other DNA
ccaaacttcagagtagctgggaggttctccagtcctggcttataaatgttaatcagaatatccacatcctaaaaaaatcccaaagttaaattggaggattttcagctgaa

SEQ ID NO: 24204 - DNA, 110 bp, synthetic construct; identical to SEQ ID NO: 24202
  source 1..110: mol_type = other DNA

SEQ ID NO: 24205 - DNA, 110 bp, synthetic construct; identical to SEQ ID NO: 24203
  source 1..110: mol_type = other DNA

SEQ ID NO: 24206 - DNA, 110 bp, synthetic construct
  source 1..110: mol_type = other DNA
ggtttgacatttaatgagagatagcttccaaattatggccttgacagccatcactcatgttttttatgctggaacaattgatttgcttgtgctaaggtaagaaggcagac

SEQ ID NO: 24207 - DNA, 110 bp, synthetic construct
  source 1..110: mol_type = other DNA
catgttttttgtgtgttgcaagttagttgagctcacagtaaatcagaaaaagccgagcatatggcagctgagccattgtaacccttgttataactgagtggcctaggtgg

SEQ ID NO: 24208 - DNA, 110 bp, synthetic construct
  source 1..110: mol_type = other DNA
aacggtgtgcaggtgacaggtagcagcacaagttgggtagaccagccctcaggaagatggactgcttgagtacccagctgcatctaaatccaaggggtgtgcctgatgca

SEQ ID NO: 24209 - DNA, 110 bp, synthetic construct
  source 1..110: mol_type = other DNA
tttggggtaacttgagattcaagagcaattttaggattcaatttttgttttatgtattttgaagctcttttgtttgatgcatacccctttgagactattttgttgtcttg

SEQ ID NO: 24210 - DNA, 110 bp, synthetic construct
  source 1..110: mol_type = other DNA
ggcaatgctgtgcatgtgtgcaaacaggagactttgtaataactatttgacatatataggccctttgctgggctgctaggtatatactcagtatactgtaagcctacata

SEQ ID NO: 24211 - DNA, 110 bp, synthetic construct
  source 1..110: mol_type = other DNA
gtgggaggggcatgttacagcactaaggacctacgagtctgcatttgattttttctctttctgaggtcactgtgatctgggccaagaggcagaaagaagctgctctggcc

SEQ ID NO: 24212 - DNA, 110 bp, synthetic construct
  source 1..110: mol_type = other DNA
tttagcctgtatccagatcaaggaaagttctggcagttgttggctgtgtcaccgctggaaagctattgtatccaaacctgtgctgagaccgacagtcaccgcgactgagt

SEQ ID NO: 24213 - DNA, 110 bp, synthetic construct
  source 1..110: mol_type = other DNA
ggggtttcctcaactgagagcagctcctactgctggggattgaggtccgatcatcttttttgggtacacttctgtccctggttctcatacactactcccttcttagcttc

SEQ ID NO: 24214 - DNA, 110 bp, synthetic construct
  source 1..110: mol_type = other DNA
ttttttgggtacacttctgtccctggttctcatacactactcccttcttagcttctacagggctctgcagaccagtccccctcagatgagctgctggccgtgctctgaac

SEQ ID NO: 24215 - DNA, 110 bp, synthetic construct
  source 1..110: mol_type = other DNA
atcactgacttcttcaggccagcagtgaaaattcctttagcgttctgtgtcatgctggaagctctcacgattgctgagagcactagccgtaccacgtctccgcagtcggg

SEQ ID NO: 24216 - DNA, 110 bp, synthetic construct
  source 1..110: mol_type = other DNA
tgtgtcatgctggaagctctcacgattgctgagagcactagccgtaccacgtctccgcagtcgggatcatgagcaacttgtaataaggtttattccacatctctgttttt

SEQ ID NO: 24217 - DNA, 110 bp, synthetic construct
  source 1..110: mol_type = other DNA
aactaaattctccatcacacagcttcttttacctaattggagagggaggagatggagctgaaaagatgagctgataggaaaggttaaaaaagaaaggcagggagttccct

SEQ ID NO: 24218 - DNA, 110 bp, synthetic construct
  source 1..110: mol_type = other DNA
tcttttgctcttgcacctagcatctgcttgcgggtgtttgacttacaggctcccctgtacttcattgttcggtgctggaagacaacagtgtctcatttcaaagtctcacg

SEQ ID NO: 24219 - DNA, 110 bp, synthetic construct
  source 1..110: mol_type = other DNA
tgtacttcattgttcggtgctggaagacaacagtgtctcatttcaaagtctcacgtatgaggtcttcatcgacattcctgctgccactcagaaaggggcttaagatttca

SEQ ID NO: 24220 - DNA, 110 bp, synthetic construct
  source 1..110: mol_type = other DNA
gccccctgccccaagctcctggggcccagcttgcagcaggctcccactgtgaacgcctctctcaaagcctccactcttcccttctttgagggtatagatgtctggggacc

SEQ ID NO: 24221 - DNA, 110 bp, synthetic construct
  source 1..110: mol_type = other DNA
gagacagaagaatgacaggcagatgagaagccacaggctgactctgttcctttctctagactaaaccagagtggaaactaggggagggttctgtggtccactcctggagg

SEQ ID NO: 24222 - DNA, 110 bp, synthetic construct
  source 1..110: mol_type = other DNA
ctagactaaaccagagtggaaactaggggagggttctgtggtccactcctggagggtggggggtggtgtacagacaacaggactgatgggctctgtgtttgactgctagg

SEQ ID NO: 24223 - DNA, 110 bp, synthetic construct
  source 1..110: mol_type = other DNA
taggaattatcagtaaaagatccttaggaaaatctaagaattattgctgtgatttttgtgctagagtatattgctaaacattctaaaagttgtgatcaggatccagaaag

SEQ ID NO: 24224 - DNA, 110 bp, synthetic construct
  source 1..110: mol_type = other DNA
ttgtgctagagtatattgctaaacattctaaaagttgtgatcaggatccagaaaggctagaacttgaggctgggatcacaggtaaccttcatggcagaccattagccagg

SEQ ID NO: 24225 - DNA, 110 bp, synthetic construct
  source 1..110: mol_type = other DNA
atagacacacacataacacacacacacacacagaagagtctaatgccccaaagtcacacagtcctacataacagagcaggtgtgcaaacaaatccagatccagctgcacc

SEQ ID NO: 24226 - DNA, 110 bp, synthetic construct
  source 1..110: mol_type = other DNA
acacagtcctacataacagagcaggtgtgcaaacaaatccagatccagctgcaccaagccctgactcctctgcccacacctggtaattcccaagctcatctagtatctgc

SEQ ID NO: 24227 - DNA, 110 bp, synthetic construct
  source 1..110: mol_type = other DNA
tgaacaaatacaatcatgattttatcccttcctctgaatttatcacccaatgtattcttaaaggatgagcttcattaagactatttagtactctttatctagcaggtcag

SEQ ID NO: 24228 - DNA, 110 bp, synthetic construct
  source 1..110: mol_type = other DNA
tcttaaaggatgagcttcattaagactatttagtactctttatctagcaggtcagccactgctatatgtggtagtaagaattaaggggatgggagtttctggcatggtgc

SEQ ID NO: 24229 - DNA, 110 bp, synthetic construct
  source 1..110: mol_type = other DNA
gccaaggccgtgttctcatacaccatcagggagcttttccaagctcatccaggatgttggcagaattcagtccttgtggttgtaggactaaggggactgtttcttgctgc

SEQ ID NO: 24230 - DNA, 110 bp, synthetic construct
  source 1..110: mol_type = other DNA
atcctgaatatgcctcaaacagcctcctaggtattgaagccccacagggcaccgtccatcctctgcctccacatcattttgcgcacaattccaacggcatttcctatgaa

SEQ ID NO: 24231 - DNA, 110 bp, synthetic construct
  source 1..110: mol_type = other DNA
ccatcctctgcctccacatcattttgcgcacaattccaacggcatttcctatgaaaggacctctttgagtgcctccccaatcccaatgcagacttaatttcccctaattt

SEQ ID NO: 24232 - DNA, 110 bp, synthetic construct
  source 1..110: mol_type = other DNA
aggggaggaaaggaaggccccagcaggtcagggaggcctgaggcttccctctggtcagtagcagagccaggctttgatataatggcacatctctgatctaaatgccctgc

SEQ ID NO: 24233 - DNA, 110 bp, synthetic construct
  source 1..110: mol_type = other DNA
cagtagcagagccaggctttgatataatggcacatctctgatctaaatgccctgctctttcctagaatcaatgtgagtgaaggttcactggtcaaagctaggtgtccgat

SEQ ID NO: 24234 - DNA, 110 bp, synthetic construct
  source 1..110: mol_type = other DNA
tgataaatatctataaatttgatgatggacagcccatagggtggagaaggagaaggctaatttaaaataggatctcaaggagttcctgttgtggcaccgtggaaatgaat

SEQ ID NO: 24235 - DNA, 110 bp, synthetic construct
  source 1..110: mol_type = other DNA
ttttattacatttgatttacaaagttcttgtcaatttctgctatacagcactattttgcctatagctcactgttagatcccacactcgttgtaggtacagatgctctaca

SEQ ID NO: 24236 - DNA, 110 bp, synthetic construct
  source 1..110: mol_type = other DNA
ttgcctatagctcactgttagatcccacactcgttgtaggtacagatgctctacagatagcaccaacaatatatagttaggtaaccactccaaacaggagtgccaccctc

SEQ ID NO: 24237 - DNA, 110 bp, synthetic construct
  source 1..110: mol_type = other DNA
aaaatgcaattacatccatgcatttatggtgaccagttaatcaaggaaggataaatatggcagaggagtaagatttggcactcactttctcacacaaacacatcaaaaaa

SEQ ID NO: 24238 - DNA, 110 bp, synthetic construct; identical to SEQ ID NO: 24237
  source 1..110: mol_type = other DNA

SEQ ID NO: 24239 - DNA, 110 bp, synthetic construct
  source 1..110: mol_type = other DNA
cctatcagtttcctgcttaaattgagagctatgtggtcatgtgaacaacaacaacaaaacagttaatttagcaagaattagaattgcaaaggagtggttgcacagcacat

SEQ ID NO: 24240 - DNA, 110 bp, synthetic construct
  source 1..110: mol_type = other DNA
aaaacagttaatttagcaagaattagaattgcaaaggagtggttgcacagcacatgggctaatgctctaatctgagctctgccacacattgatcatgtgaccttgagcaa

SEQ ID NO: 24241 - DNA, 110 bp, synthetic construct
  source 1..110: mol_type = other DNA
ctcctcttatctgcctgttcccacaattaaccatcacctctgcactcccaaatacatgcgtgcatgcacacacgtgtgtgtatgcacacacacaccaaaaccaatatttc

SEQ ID NO: 24242 - DNA, 110 bp, synthetic construct
  source 1..110: mol_type = other DNA
atgcgtgcatgcacacacgtgtgtgtatgcacacacacaccaaaaccaatatttcaggtggacatccaccatgcccagtaaaagccaactcttatgaatatacttttact

SEQ ID NO: 24243 - DNA, 110 bp, synthetic construct
  source 1..110: mol_type = other DNA
caccaacatcagccttgtcttacccccctacatcattcttgagcgggggctaagttatccctatggtgcaggtgctctgaagtgaagacctctgttttacttatgttctg

SEQ ID NO: 24244 - DNA, 110 bp, synthetic construct
  source 1..110: mol_type = other DNA
tgacgggaactcctatcactgttttttaaactgctctaatagatataaattgacatgtcagtgtgatcttaatttccatttccctagtggctagtgatgttgaacatatc

SEQ ID NO: 24245 - DNA, 110 bp, synthetic construct
  source 1..110: mol_type = other DNA
atatggaagtatctgtaggactcagattgtgttgtcttccccttcagcacatactattatttcatctgagaagcttccccagcacttggaaaacatttcactcctcacat

SEQ ID NO: 24246 - DNA, 110 bp, synthetic construct
  source 1..110: mol_type = other DNA
attatttcatctgagaagcttccccagcacttggaaaacatttcactcctcacatcccagagatggctcattagcatcttcccctggatatccgatgcttctattgccct

SEQ ID NO: 24247 - DNA, 110 bp, synthetic construct
  source 1..110: mol_type = other DNA
tgtgactgcgatgaggcactttcagtgtcttcaaggtaataagaatgggtccggacaaagggtcccaggactcaagaatgaacacaagccaccaactccaggaaatgaca

SEQ ID NO: 24248 - DNA, 110 bp, synthetic construct
  source 1..110: mol_type = other DNA
caaagggtcccaggactcaagaatgaacacaagccaccaactccaggaaatgacatgggtcagggctaggtcagagttttctggttcaggtagtgggaacagacaccact

SEQ ID NO: 24249 - DNA, 110 bp, synthetic construct
  source 1..110: mol_type = other DNA
tcacaaccacacagattcccccccccaccccccgctgtatgctgctcctctgtaaagcacagtactctgtgaagcactcttcactcagtagccaaagtcagcttttaaaa

SEQ ID NO: 24250 - DNA, 110 bp, synthetic construct
  source 1..110: mol_type = other DNA
agcacagtactctgtgaagcactcttcactcagtagccaaagtcagcttttaaaagttgcaccagatgatgtctttccttgctcaatattttgagcaatggctttaattc

SEQ ID NO: 24251 - DNA, 110 bp, synthetic construct
  source 1..110: mol_type = other DNA
gaagggattctgccgtatagcattggctttgctctggttctccagccttctgatccaccctgcagagctggagcttgacagccttcataactgcatgagccaactcttta

SEQ ID NO: 24252 - DNA, 110 bp, synthetic construct
  source 1..110: mol_type = other DNA
tccacttttcccagagcacagaccacctcactcctgatctccactataagctctttctgaaggtgttgagggtcggcatctgcagaggctcatgatgcagtccctgtaga

SEQ ID NO: 24253 - DNA, 110 bp, synthetic construct
  source 1..110: mol_type = other DNA
ttcttctgcttcctcaaaactgtttttaaatacccctggcaattttttcattttacttgtatcagctccggaatttctttttgttcctttttgtatttccttatttattt

SEQ ID NO: 24254 - DNA, 110 bp, synthetic construct
  source 1..110: mol_type = other DNA
cttaggatagaagggaaagaatggcatttactggcaatgttctaacctgtctagggactgcccaagggagagtgtttctgtcttgacttaccagggaagttgatgggaat

SEQ ID NO: 24255 - DNA, 110 bp, synthetic construct
  source 1..110: mol_type = other DNA
aaacagaagtcacacgtactccctagagacaccactcaggacctcctgacacagtggaatacttcctacagtctggggtcggagctcatggcccctccttccctcaccca

SEQ ID NO: 24256 - DNA, 110 bp, synthetic construct
  source 1..110: mol_type = other DNA
ggaatacttcctacagtctggggtcggagctcatggcccctccttccctcacccacttcctgacttggtccactgcctcattcattcatttacagagaggtccagacttt

SEQ ID NO: 24257 - DNA, 110 bp, synthetic construct
  source 1..110: mol_type = other DNA
acattacccatcatctgctgggaactgagtttagtgcaagcttccagggctggtgttaaatgacggtaagagataccaaaggccagggtgagtggaaaggtgcacaggcg

SEQ ID NO: 24258 - DNA, 110 bp, synthetic construct
  source 1..110: mol_type = other DNA
gtccccaccacagatgatatgttagagctcaaggtcaaggaattgaagagtgtagcttaataatgtgcaggactatgaactttcccctcaaccccaaaaagaccttgtct

SEQ ID NO: 24259 - DNA, 110 bp, synthetic construct
  source 1..110: mol_type = other DNA
accatagcaagaccaccaaccaagcaaccaccatttactgaaatgtgtgctccctgctcagaaagccatgggcctttggcctttctcaactgcaacacaaattcacagca

SEQ ID NO: 24260 - DNA, 110 bp, synthetic construct
  source 1..110: mol_type = other DNA
gtattgcaagacctctcctctctctcctttttctctgagctataaaaacacaaaatcatgcactctccctgatcatcaggaagtccgctgatgtgttaacagcatctctt

SEQ ID NO: 24261 - DNA, 110 bp, synthetic construct
  source 1..110: mol_type = other DNA
tgtgccctgatgaagagcccaaagcctcatgcatggagatgaccacagagctgggaggccgatccactgtctttcagccactttgcagttggctgaaacaggtctgtcat

SEQ ID NO: 24262 - DNA, 110 bp, synthetic construct
  source 1..110: mol_type = other DNA
aggccgatccactgtctttcagccactttgcagttggctgaaacaggtctgtcatcttctagtttacacatcatctctcaccaaagaatatttgctttaagaaatattaa

SEQ ID NO: 24263 - DNA, 110 bp, synthetic construct
  source 1..110: mol_type = other DNA
tctttttagcatgtataagatagttaatttaaagtctttgtctagttagttcaatgcttgggctttcatgggaatggcacctatcaatttcttttttcctattgagaatt

SEQ ID NO: 24264 - DNA, 110 bp, synthetic construct
  source 1..110: mol_type = other DNA
agcatcctcaccagggagttgccagctatcatgacattggggctcggagagctcccttcctgagatggctgcaccctgaagcaaggtgtgaccctcctctgtgaggaagg

SEQ ID NO: 24265 - DNA, 110 bp, synthetic construct
  source 1..110: mol_type = other DNA
cctgggccacaaggaaggggatggcctagaagagctgtgtagggtcggaggcaccccccaacttctgagaaggaacaaagtctcatgctgtagcccaaatgtcctgggtc

SEQ ID NO: 24266 - DNA, 110 bp, synthetic construct
  source 1..110: mol_type = other DNA
tgtgagggaaacaagggcccaggggcacattcagtagggtcccaaagtgggaacatggttctgaatccttccaagctgaggaaaattgggccatcccagggggagatggg

SEQ ID NO: 24267 - DNA, 110 bp, synthetic construct
  source 1..110: mol_type = other DNA
tggttctgaatccttccaagctgaggaaaattgggccatcccagggggagatgggaggcctagacccctccccagaacccagtttttagattccttcagggctgggcagc

SEQ ID NO: 24268 - DNA, 110 bp, synthetic construct
  source 1..110: mol_type = other DNA
ctcataaattctttttttgttttgttttgttttgttttgtttttaggaccgcacccacagcctatggagtttcccaggctacgggtccaatttggagctatggctgtgag

SEQ ID NO: 24269 - DNA, 110 bp, synthetic construct
  source 1..110: mol_type = other DNA
tttgtttttaggaccgcacccacagcctatggagtttcccaggctacgggtccaatttggagctatggctgtgagcctataccatcgctacagcaatgtgggatccgagc

SEQ ID NO: 24270 - DNA, 110 bp, synthetic construct
  source 1..110: mol_type = other DNA
cactgaactgaccacaccatctagtcagctcccttagacaataaaggtactcagcacattagtgaaggtgaagtcacctggatatttcagtattttagtgagtctccatg

SEQ ID NO: 24271 - DNA, 110 bp, synthetic construct
  source 1..110: mol_type = other DNA
ccctgtcttcaacctacactgcagtttaccttacctccagatccttaacccactgagctgagccagggattgaactcccatccacatggatattagttggtttcattacc

SEQ ID NO: 24272 - DNA, 110 bp, synthetic construct
  source 1..110: mol_type = other DNA
aaactccagcttatttctctgctccctgggcccctgcctttccacttagcaccctctttcatgatctggaatgctttcccccctagattgcaccatccttggcagctcaa

SEQ ID NO: 24273 - DNA, 110 bp, synthetic construct
  source 1..110: mol_type = other DNA
ctttcatgatctggaatgctttcccccctagattgcaccatccttggcagctcaaatagcacctcctccaagagaccatcaccaagcaccatacctaacccaattcattt

SEQ ID NO: 24274 - DNA, 110 bp, synthetic construct
  source 1..110: mol_type = other DNA
ggctttcctgaatgctgctgagggctgccctcactcatccttgttgcagattctcgggttgagtcaagtctgtcccagagctaaagtaagtaaaatgcattttcctcttc

SEQ ID NO: 24275 - DNA, 110 bp, synthetic construct
  source 1..110: mol_type = other DNA
actttatttacttctttccaagtagcaaaccagttgtggattgtttttgaacactcagtttgtactgggttcccagctatgcttggggtggttttgacctcagccttgcc

SEQ ID NO: 24276 - DNA, 110 bp, synthetic construct
  source 1..110: mol_type = other DNA
cacctttgaagtagaggtaattgaggggctccaggcttttgtggggagtctctagttatggaggtagaagctgttgcacacggagggcatcacaatattcaaaacacacc

SEQ ID NO: 24277 - DNA, 110 bp, synthetic construct
  source 1..110: mol_type = other DNA
attgctacatggcaagcactgtcatggttcagtatttacttagaacaacatcagatgataaactttattagtatggcctccttccttacaaatgcaattaaaacacttca

SEQ ID NO: 24278 - DNA, 110 bp, synthetic construct
  source 1..110: mol_type = other DNA
cagaagacattgagctgtgcctattttggagaatggagaaaggagctgaggcaaaacgaagtaatctgaattacataaaatgtcttcacaacattcctagggaataaaaa

SEQ ID NO: 24279 - DNA, 110 bp, synthetic construct
  source 1..110: mol_type = other DNA
acgaagtaatctgaattacataaaatgtcttcacaacattcctagggaataaaaattcccatgttttatgtacatgtcagttgattcacagaaacatcttatttgcttac

SEQ ID NO: 24280 - DNA, 110 bp, synthetic construct
  source 1..110: mol_type = other DNA
gggtctttccataagacctcagttgttatgcaggaggagaaaggcaatccatgataactaaagtcacaaatgtgatttttaactaatatttcttaaatgttattaatctc

SEQ ID NO: 24281 - DNA, 110 bp, synthetic construct
  source 1..110: mol_type = other DNA
ggagaaaggcaatccatgataactaaagtcacaaatgtgatttttaactaatatttcttaaatgttattaatctccctcactgtaaaactggcaaacaataaggaagcat

SEQ ID NO: 24282 - DNA, 110 bp, synthetic construct
  source 1..110: mol_type = other DNA
aatagctgagtaagaaagggcagcactgttttttccatgctataggtgaaggtctggaagctcacagaggaaaggtgacttgttgaaatcagacttagcaagtgtcagaa

SEQ ID NO: 24283 - DNA, 110 bp, synthetic construct
  source 1..110: mol_type = other DNA
ggcacctcaatcacctttgtctccactattcatttccatcttctttgatcatcacaatagctgagtaagaaagggcagcactgttttttccatgctataggtgaaggtct

SEQ ID NO: 24284 - DNA, 110 bp, synthetic construct
  source 1..110: mol_type = other DNA
accacaacattctctagccaatttcatgttccttctaacaagcagaagtgggtagagagagtagctgtaaaggagaagatgtttacagtgggagagttctgcagagaact

SEQ ID NO: 24285 - DNA, 110 bp, synthetic construct
  source 1..110: mol_type = other DNA
caaagaaggtaaccagagttaattatttcttaagtacctcttcctgaaatttcatatgtaaataacatttagccatggttccccccaaagggaggaaggaacaaaggaaa

SEQ ID NO: 24286 - DNA, 110 bp, synthetic construct
  source 1..110: mol_type = other DNA
aaatccagtttttattgctccctatgttaactgttccagtctaattagggatagtttatttcaaaccccttggacctaccatagataagagttgctcatatctactattt

SEQ ID NO: 24287 - DNA, 110 bp, synthetic construct
  source 1..110: mol_type = other DNA
ggatcaccagaaaagttacttgacttgctgataatatttttcctgaactctactttccaagaatttttaaatctaagctgctgctataaaaattaatcttgggcttttaa

SEQ ID NO: 24288 - DNA, 110 bp, synthetic construct; identical to SEQ ID NO: 24287
  source 1..110: mol_type = other DNA

SEQ ID NO: 24289 - DNA, 110 bp, synthetic construct
  source 1..110: mol_type = other DNA
gatgctaagtatcaccttaagacctattatccttctcatctttctaagccatttccagattggatttttgggaagggatagtgtagccccagcttatttaccatcttttt

SEQ ID NO: 24290 - DNA, 110 bp, synthetic construct
  source 1..110: mol_type = other DNA
cagattggatttttgggaagggatagtgtagccccagcttatttaccatctttttttccattagcaaaattaaaagagtttaaacccttcatgacttcctggaagatata

SEQ ID NO: 24291 - DNA, 110 bp, synthetic construct
  source 1..110: mol_type = other DNA
ccacatttggatataggaaaattcaaatgaagtccttaagtcttctgcttatttattgtctgttgtatctttgttagaagagcttcctctttcccacaaacaactttgat

SEQ ID NO: 24292 - DNA, 110 bp, synthetic construct
  source 1..110: mol_type = other DNA
cctcaggtcatgaaagatgttttcctggtaaaatctttgcacagtgtgcctaaacctgcaggtcctgaccatccataattagctaacagtaagaggggaatgtcaggaga

SEQ ID NO: 24293 - DNA, 110 bp, synthetic construct
  source 1..110: mol_type = other DNA
ctgcaggtcctgaccatccataattagctaacagtaagaggggaatgtcaggagaacaccagttcattttctgcagtacacactcgtaactaatatattttgaccacccc

SEQ ID NO: 24294 - DNA, 110 bp, synthetic construct
  source 1..110: mol_type = other DNA
tggcccatctcatgaagatttcttgttatgctacataaaatgaaaccacaatagcaataattacagaaaacatatgatacgtggctagaaatacataatgtatgctaaat

SEQ ID NO: 24295 - DNA, 110 bp, synthetic construct; identical to SEQ ID NO: 24294
  source 1..110: mol_type = other DNA

SEQ ID NO: 24296 - DNA, 110 bp, synthetic construct
  source 1..110: mol_type = other DNA
ccagctggtagcctccctcactggcctgctcagcgcgcgcgacccggccctggatgccaccgcctgagccccctccgaacagggaagttgggtatggtagaggacctctg

SEQ ID NO: 24297 - DNA, 110 bp, synthetic construct
  source 1..110: mol_type = other DNA
cacatatctgtgtccctgaataaccatgttctctttatcttgatttaaatgtcacataattgtggatttcttcctttcccctatttccccactaaaatgttgttcataca

SEQ ID NO: 24298 - DNA, 110 bp, synthetic construct
  source 1..110: mol_type = other DNA
gactgttgatctgatggtctccaaagtgtggtgtacatacttgagtgtacaaatgattctttaaaataagagaagaacaatggggaatttctttttctttcttttctgtg

SEQ ID NO: 24299 - DNA, 110 bp, synthetic construct
  source 1..110: mol_type = other DNA
gtaagtgcttgggagaagtaactctatggaaaagactgattggggagaaggagcgcaaatttcttgagctctagccaaatttgttccccaaatctttgaattttgaatgg

SEQ ID NO: 24300 - DNA, 110 bp, synthetic construct
  source 1..110: mol_type = other DNA
caccagcacacaagagatgggtgatgataaatgtggcacaaccagcaacacagcagtacagtagaattttgcagccctgtccataagcctaccactaccttcatatggag

SEQ ID NO: 24301 - DNA, 110 bp, synthetic construct
  source 1..110: mol_type = other DNA
ccgaattcttttatcttagtctctgaaccattcctttaatgaacaagagaagtcttgttaatagcttgagtatttcaataacagtcaaataagcttataagcagagacat

SEQ ID NO: 24302 - DNA, 110 bp, synthetic construct
  source 1..110: mol_type = other DNA
agcccacaggaaaaaactttttaccaggagttctaaagtagttctctgtaactttgcaggttttgactttcttaaatttggctgtgattatgtgggattgattgacatga

SEQ ID NO: 24303 - DNA, 110 bp, synthetic construct
  source 1..110: mol_type = other DNA
tctgtgtcacatattttgtctcattcacacacctggcaaaaattgtgtacatgttacacatcaatacagaaccaaatagggaatgtttccttcccacttgactctagaaa

SEQ ID NO: 24304 - DNA, 110 bp, synthetic construct
  source 1..110: mol_type = other DNA
acacatcaatacagaaccaaatagggaatgtttccttcccacttgactctagaaaatagacccaagatttcactctcagaaccaaggttgtaaggtgatttttgtttatt

SEQ ID NO: 24305 - DNA, 110 bp, synthetic construct
  source 1..110: mol_type = other DNA
aagaaatctcaaaagctgtgggcatggtccctgagcacagtctcttagcttgtttccctcgaaagccttatgtacataattagattagttactgccagtgcccaaatctc

SEQ ID NO: 24306 - DNA, 110 bp, synthetic construct
  source 1..110: mol_type = other DNA
aaactgggtttcttccaattagcagcttttatcattacatactacttggagagcggatgtctagaaagttgattttcatgttaaaccaagattaatgagttctgaaggat

SEQ ID NO: 24307 - DNA, 110 bp, synthetic construct
  source 1..110: mol_type = other DNA
aagtagtccccaaatattaatactgatatccaagaaaatgttggagcaacttttttaaaaattcggctttgcatttcacacagcaactatctatttttaaggataaagtc

SEQ ID NO: 24308 - DNA, 110 bp, synthetic construct
  source 1..110: mol_type = other DNA
gccactgcagttcctaaggcaagacccgctcctgggctcctattcacatgaatcaatccattcttttttctgcctaagctagttggggtgagttttctctcagttgcttc

SEQ ID NO: 24309 - DNA, 110 bp, synthetic construct
  source 1..110: mol_type = other DNA
aaccatgcaatgggccacagctataccttctacaatgaggtctgaatctcaacagagaaggtggccccacttccaaatttgtttcttccatgaggaccctccttcaaccc

SEQ ID NO: 24310 - DNA, 110 bp, synthetic construct
  source 1..110: mol_type = other DNA
tcacattccagtggaagctcctagaacataagctgcttggcatcttcagatgagaagtgaaaaggaatgagatggagtcatttgtgggcacagtgcttacagacacattg

SEQ ID NO: 24311 - DNA, 110 bp, synthetic construct
  source 1..110: mol_type = other DNA
agtgaaaaggaatgagatggagtcatttgtgggcacagtgcttacagacacattgtagacattcagtaaaagttggagaaatgtttctaggaataggtgattggaaggag

SEQ ID NO: 24312 - DNA, 110 bp, synthetic construct; identical to SEQ ID NO: 24310
  source 1..110: mol_type = other DNA

SEQ ID NO: 24313 - DNA, 110 bp, synthetic construct; identical to SEQ ID NO: 24311
  source 1..110: mol_type = other DNA

SEQ ID NO: 24314 - DNA, 110 bp, synthetic construct
  source 1..110: mol_type = other DNA
gcccaccatgtgcagcatctatggccagctgggtcttgagttccacacagccttttcctggctgggcagtttccttcccttagttccccctgagccctcactgctgctgc

SEQ ID NO: 24315 - DNA, 110 bp, synthetic construct
  source 1..110: mol_type = other DNA
cagcctctactgattattcaacacagtatggactgaaatcgactacaaattacatagacttttattccactaaacgaccttcttacagagcagaacagtacccagggtcc

SEQ ID NO: 24316 - DNA, 110 bp, synthetic construct
  source 1..110: mol_type = other DNA
tgcaggtgtgaagatgctaaatcagtggttctcaagtttgagccaagttaggctttcctgggggacttggtgaaagagtttcacaagatcagcttccaaagatgctgctt

SEQ ID NO: 24317 - DNA, 110 bp, synthetic construct
  source 1..110: mol_type = other DNA
tcctgggggacttggtgaaagagtttcacaagatcagcttccaaagatgctgcttcagtaggctggaggaactcagcctcaggcatcttccacaagtgctcaggtgattt

SEQ ID NO: 24318 - DNA, 110 bp, synthetic construct
  source 1..110: mol_type = other DNA
ctagaatttaggtgtccttgcccacagcttaaattggacttttctttttgttgtcgttttggttcatttttctctccctaactaaccttgttcactcaaaaaaattgggt

SEQ ID NO: 24319 - DNA, 110 bp, synthetic construct
  source 1..110: mol_type = other DNA
gaaaattgggagaattaaatgtgatgtgtgaaatacttagcccagcccctggcacagagtgaatctcgatgagagtttctcagaggtggagaatgttatagatggagtga

SEQ ID NO: 24320 - DNA, 110 bp, synthetic construct
  source 1..110: mol_type = other DNA
agagtgaatctcgatgagagtttctcagaggtggagaatgttatagatggagtgaaatcggaaatgaatcacttacctatctggagcctgcacgttagagaacatgcttc

SEQ ID NO: 24321 - DNA, 110 bp, synthetic construct
  source 1..110: mol_type = other DNA
aacctaactgatacaggtactcagtaaatattctcaaatgagtaagtgtttatgagctgaacatactaaagagggagaagagagaagagaacgagaaagttcaccatcca

SEQ ID NO: 24322 - DNA, 110 bp, synthetic construct
  source 1..110: mol_type = other DNA
attgtggaaattatagaagtaacatacctgtactatagaaaacgaaaacaaaaaaccttcatctataataccatcaccataacacaaccaaggccattttggtgtgtttc

SEQ ID NO: 24323 - DNA, 110 bp, synthetic construct
  source 1..110: mol_type = other DNA
ccttcatctataataccatcaccataacacaaccaaggccattttggtgtgtttcctgctagtacttttttttttttttttttgacctcaccaagggcatatggaaattc

SEQ ID NO: 24324 - DNA, 110 bp, synthetic construct
  source 1..110: mol_type = other DNA
cacgactaggatgtggacgtatttggggcccttactgggagtggactgggagatggaaacatggcttccacaagctctcctgttgccgcggatgagcagggtgggtgctg

SEQ ID NO: 24325 - DNA, 110 bp, synthetic construct
  source 1..110: mol_type = other DNA
ggtattttctaaagtcatatgctgtggaactcttttttaaaaggagcatctcagcctttgtaaaacattgctgagattaaaattcacaaagtctagagtaaaattcacct

SEQ ID NO: 24326 - DNA, 110 bp, synthetic construct
  source 1..110: mol_type = other DNA
tactgctttatttctgtcagcagatgccctagtctcacccaaccactagccactaagtccaaagatcatttgggaataacattctccattatgctctgcataggtacaac

SEQ ID NO: 24327 - DNA, 110 bp, synthetic construct
  source 1..110: mol_type = other DNA
tctagactctctctaagccttggggattacaaacactggtataaggtacattctgttcacttggtacttaagacctgctacttcctgctgctattttttctgtaggtaca

SEQ ID NO: 24328 - DNA, 110 bp, synthetic construct
  source 1..110: mol_type = other DNA
caccctccctttttgctcctagttttatcactcagattaaaactgtctccctttacatcagatggtgagactccactgtgggcatctacagaccacgttcagctcctcga

SEQ ID NO: 24329 - DNA, 110 bp, synthetic construct
  source 1..110: mol_type = other DNA
catcagatggtgagactccactgtgggcatctacagaccacgttcagctcctcgaggcactctctgtggaggcatcctacagtcaatacagctttgttgccgtcaccacc

SEQ ID NO: 24330 - DNA, 110 bp, synthetic construct
  source 1..110: mol_type = other DNA
actttgccatgtcaatggcttggtttttagccattcacctgattgcttgttattgccaccggggataaggattctgccatctagctaaagaaacatattttctgatgtca

SEQ ID NO: 24331 - DNA, 110 bp, synthetic construct
  source 1..110: mol_type = other DNA
aggaatttctgatgtttgcagcacgtgcatcgtacttgaaaggacagaaccgaatgaaatgtatgtctgtctttcctggccctctctgtgtgaatattttcattttatcc

SEQ ID NO: 24332 - DNA, 110 bp, synthetic construct
  source 1..110: mol_type = other DNA
tgtctttccaagaagatagcacaggaattaagctactctaattatgtctatacagcaaagtaaagcttagaccctgaattaatcttgtgctgaaaatcactttacaaaca

SEQ ID NO: 24333 - DNA, 110 bp, synthetic construct
  source 1..110: mol_type = other DNA
tgagtactaaaaaaagcatttaagtgaaaattccagaagtcaatcttgttagactgacttttcatctcatgtctctggcatccaactaacattgacttcttcaaggagtc

SEQ ID NO: 24334 - DNA, 110 bp, synthetic construct
  source 1..110: mol_type = other DNA
gacacgtgagcagtgaaaactccaatctctatctaggtctgaccgagtcccacgtcttaaaaacaagccctccttaaaagtgatgttcttaatgtaatacggagctttca

SEQ ID NO: 24335 - DNA, 110 bp, synthetic construct
  source 1..110: mol_type = other DNA
acatcaggattctgctctaatgtaatcgcaggaactgcagaaaagggagaccatggaaatcatcttcctggaagaggcagaccttgaacttcaacttccaacagagagga

SEQ ID NO: 24336 - DNA, 110 bp, synthetic construct
  source 1..110: mol_type = other DNA
tttactacattgtgattcaattggataatctagtaatgcactttcttatgctgaataaactgtgtgctctacccagctcttacagtccaccctactttgacggtagtatc

SEQ ID NO: 24337 - DNA, 110 bp, synthetic construct
  source 1..110: mol_type = other DNA
taaactgtgtgctctacccagctcttacagtccaccctactttgacggtagtatcatgttctatgactataaaaaagaacaattgatttatcagtatctttaacttgtgt

SEQ ID NO: 24338 - DNA, 110 bp, synthetic construct
  source 1..110: mol_type = other DNA
ttgccattttgcaacctgcaatggaataattgtttcaggcaaagaacattcaatggttgttaaaaccatcagatgtcgggttgttgagaaacaggatatgtggtcaattc

SEQ ID NO: 24339 - DNA, 110 bp, synthetic construct
  source 1..110: mol_type = other DNA
gctcgccccctgcctgcctctacttgttctgaaaactggtccaaatcttcacatttccaagagaaatgccccctcttgtggtggcttctgagtactgcaggcttagcttc

SEQ ID NO: 24340 - DNA, 110 bp, synthetic construct
  source 1..110: mol_type = other DNA
tccaagagaaatgccccctcttgtggtggcttctgagtactgcaggcttagcttccagcgggaaagctgtaaacagcctgtggggatactaggtaggaatttgtatctag

SEQ ID NO: 24341 - DNA, 110 bp, synthetic construct
  source 1..110: mol_type = other DNA
aaagtatatgggcaggcagactaatggaacagaatagacaacccagaaatacagagttcccattgtagctcagcagttagggaacccaacaagcatcaatgaggatgtgg

SEQ ID NO: 24342 - DNA, 110 bp, synthetic construct
  source 1..110: mol_type = other DNA
tgatctatagggacctacgtattaaatcctatggttttgccagtaaaaattctcctacctaacaatgagtttcttcccagaatttatcaatatttatttccttcattggt

SEQ ID NO: 24343 - DNA, 110 bp, synthetic construct
  source 1..110: mol_type = other DNA
ccacaagagtgagtaaaaatgaaaaaagacacaattgctcttctggccttttatttagagcaatagcagacccatataattgagagtatactgtttcttcctgtagaagt

SEQ ID NO: 24344 - DNA, 110 bp, synthetic construct; identical to SEQ ID NO: 24343
  source 1..110: mol_type = other DNA

SEQ ID NO: 24345 - DNA, 110 bp, synthetic construct
  source 1..110: mol_type = other DNA
gtggtgccttgcatgacaatcattaactttttattgggttaattaagcattgtgcataatgcctatatgactaacctttcaacggattcttttttctgtgttattacaca

SEQ ID NO: 24346 - DNA, 110 bp, synthetic construct
  source 1..110: mol_type = other DNA
ataatgcctatatgactaacctttcaacggattcttttttctgtgttattacacacatagaacaaagtgtagtgtaacctggattctcctaaaagcatagactaagacag

SEQ ID NO: 24347 - DNA, 110 bp, synthetic construct
  source 1..110: mol_type = other DNA
ccaggcaatgagagaaaataaatatgtttgttcagtcttctttcttaagccagaagctaaatctgattcttaagtttagaaaatattcagtgatttagtggttttagtgt

SEQ ID NO: 24348 - DNA, 110 bp, synthetic construct; identical to SEQ ID NO: 24347
  source 1..110: mol_type = other DNA

SEQ ID NO: 24349 - DNA, 110 bp, synthetic construct
  source 1..110: mol_type = other DNA
atgagtggccagggtaatccttcacttattaatcctgtttttctctttttctactcagtattgacttcttttgaaagccttccttccctcgagggaagacttccttcctt

SEQ ID NO: 24350 - DNA, 110 bp, synthetic construct
  source 1..110: mol_type = other DNA
ttgtactctcttccatagagtagagttgttgctagaatgtgtctgtccagccaagaatacatgactcagccccatctgcatctagctatggccatgtgtctgatgggtgg

SEQ ID NO: 24351 - DNA, 110 bp, synthetic construct
  source 1..110: mol_type = other DNA
acaccacaaactatacacactaaagattaagacatgtaaatgtttaatacagtgcagatgttactgctcgagagagcttcagctgtatgttacgacttttcattagtcat

SEQ ID NO: 24352 - DNA, 110 bp, synthetic construct
  source 1..110: mol_type = other DNA
agatgttactgctcgagagagcttcagctgtatgttacgacttttcattagtcattcttcagtttgacagaagagcctgtctcaactcattatttcagggtttaatagtc

SEQ ID NO: 24353 - DNA, 110 bp, synthetic construct
  source 1..110: mol_type = other DNA
tcacataatagccccagttcttcagcttttctgatattcatgcccattgccatgactttgctgctttttatagcaaaaatttgcactatattccactgcccaatattctg

SEQ ID NO: 24354 - DNA, 110 bp, synthetic construct
  source 1..110: mol_type = other DNA
ctttgctgctttttatagcaaaaatttgcactatattccactgcccaatattctgagttcagccatgttatttgctttggccaacagtttgttattagttgcgacacaac

SEQ ID NO: 24355 - DNA, 110 bp, synthetic construct
  source 1..110: mol_type = other DNA
ccttacagttcttgaatcctgttttcaagacccacactttttttttccttttcttttttcttttactttttagggccccactagcgaaatatagaggttcccaggctagg

SEQ ID NO: 24356 - DNA, 110 bp, synthetic construct
  source 1..110: mol_type = other DNA
tctgcttctgaatccacagtctccctaactgggtagcaaagttttagcttttccttaagagctaccacagtatggggggagtgggaaaggacagatggcagtgagagaaa

SEQ ID NO: 24357 - DNA, 110 bp, synthetic construct
  source 1..110: mol_type = other DNA
aaattgtttgtctccaaaatgtttatgttgaagcccaacccttagtacttcagaaagtgactggtatctagaaataagacacattgatcttggacacttggtctgcagaa

SEQ ID NO: 24358 - DNA, 110 bp, synthetic construct
  source 1..110: mol_type = other DNA
agtgactggtatctagaaataagacacattgatcttggacacttggtctgcagaacagtgaagcaataaatttctgttgtttaagctaaccattctatggtagtttgtta

SEQ ID NO: 24359 - DNA, 110 bp, synthetic construct
  source 1..110: mol_type = other DNA
tcagacccgtcaaattttctttctcagcagtacatgttttagacagtagagggcactttgaatttagacaaagcccaagaaatctctgaatcttcattcagagagctttt

SEQ ID NO: 24360 - DNA, 110 bp, synthetic construct
  source 1..110: mol_type = other DNA
gtagagggcactttgaatttagacaaagcccaagaaatctctgaatcttcattcagagagcttttgtttgactataaagaaataaaatgcaattttagtgtacatttaaa

SEQ ID NO: 24361 - DNA, 110 bp, synthetic construct
  source 1..110: mol_type = other DNA
agcttcctccaacctttccacttctacctgaacggaaaaacaaaacaacaacaacaaaaaaactaaaattaagcttctcaagagtaactctgataatttgataattcaca

SEQ ID NO: 24362 - DNA, 110 bp, synthetic construct; identical to SEQ ID NO: 24361
  source 1..110: mol_type = other DNA

SEQ ID NO: 24363 - DNA, 110 bp, synthetic construct
  source 1..110: mol_type = other DNA
ttaaccaaccataacattaagatcagaccggaataggaactgagagatcacacaatgactcacattatctacccagctggcatgacttggcaaacagtattttacaagat

SEQ ID NO: 24364 - DNA, 110 bp, synthetic construct
  source 1..110: mol_type = other DNA
gaagaaaagacccacatatctctgtgtaggtcaagagaacagaactatagtaacataaagagaagttagatatacaactcctgtgaactcttggggacaaatctgccaac

SEQ ID NO: 24365 - DNA, 110 bp, synthetic construct
  source 1..110: mol_type = other DNA
taaagagaagttagatatacaactcctgtgaactcttggggacaaatctgccaactaagatgctcaatgagagtgaatcccgcttctcccttatttatccttgtaaaccc

SEQ ID NO: 24366 - DNA, 110 bp, synthetic construct
  source 1..110: mol_type = other DNA
tatttcttgatatagactgcaggaagatgtaagtaagtttaacagtgaagctggagatggaaaatatattgatttaacataataaaggaagatttccatgaaggtagcag

SEQ ID NO: 24367 - DNA, 110 bp, synthetic construct
  source 1..110: mol_type = other DNA
agccaagcagggactattgaatggcttcagtagatggaataagagctgtcttgttaaataatgagtgagaaaggaaaggaggtgaagggtgagttaaaaagaaaatgggc

SEQ ID NO: 24368 - DNA, 110 bp, synthetic construct
  source 1..110: mol_type = other DNA
aaataatgagtgagaaaggaaaggaggtgaagggtgagttaaaaagaaaatgggccatggattttcaggagaaatctgttaaataaagaattgagaatttagaaattaag

SEQ ID NO: 24369 - DNA, 110 bp, synthetic construct
  source 1..110: mol_type = other DNA
tcatgaactttactagaccctgggcctgaatttaatggaagaaaaaggattatgtaagaaattttcattaaacaaaatttatgaggtgccactatagtcagagcgatcaa

SEQ ID NO: 24370 - DNA, 110 bp, synthetic construct
  source 1..110: mol_type = other DNA
tctacaaagcagcatgctccaggaaaatttggaattagacgtaacagtgagaatgtttggtaaaaagggacatctagaactgtcttgaacatataagtatatgatagtaa

SEQ ID NO: 24371 - DNA, 110 bp, synthetic construct
  source 1..110: mol_type = other DNA
gctccaggaaaatttggaattagacgtaacagtgagaatgtttggtaaaaagggacatctagaactgtcttgaacatataagtatatgatagtaactgcaatatattctg

SEQ ID NO: 24372 - DNA, 110 bp, synthetic construct
  source 1..110: mol_type = other DNA
tgttattatatctgcattccatgtccaaaatcctgatttttaaggacaccattataattactcatttgccttgagtggtaataatacatgtaacagactcacagtaacaa

SEQ ID NO: 24373 - DNA, 110 bp, synthetic construct
  source 1..110: mol_type = other DNA
cctggcccaggaacttccatatgcatgagtgcagccaaaaacttcaaaaaatacagcattcctgaaaaagataagcaatatgtgtatgcttggttaacttaaagggagca

SEQ ID NO: 24374 - DNA, 110 bp, synthetic construct
  source 1..110: mol_type = other DNA
agaggagcctagctgcagcctagctttgcagtagtggtctgctggagctccaattgcctcgaacattggacactccttggcccaaggaggcctgctttggggtttctgcc

SEQ ID NO: 24375 - DNA, 110 bp, synthetic construct
  source 1..110: mol_type = other DNA
tgttagttggagacattaatcttaataaatgtgaattaaaaaataaaatccactttttatagcattggtcattttgaaggaagaaaaaaggggaaggagggaggaaagac

SEQ ID NO: 24376 - DNA, 110 bp, synthetic construct
  source 1..110: mol_type = other DNA
agctctgtcctttttttgtcctgtatgcttgaataaccagggactcatggacagtattaatcaaatcctgaaaaaagttatatgacttgatcttgtgcacaagggggtcc

SEQ ID NO: 24377 - DNA, 110 bp, synthetic construct
  source 1..110: mol_type = other DNA
ccttttcaaagagctctacaaaatgttagcagagggaagctccagatgtgtaagcacacacatgcccagactgagcgagagagagaagaaaacgacagattataatctgt

SEQ ID NO: 24378 - DNA, 110 bp, synthetic construct
  source 1..110: mol_type = other DNA
acacacatgcccagactgagcgagagagagaagaaaacgacagattataatctgttcctcttccccaggctacgggagttccttgctttatatttgcattactgaagggg

SEQ ID NO: 24379 - DNA, 110 bp, synthetic construct
  source 1..110: mol_type = other DNA
gagagtagtgaccctcaagaggaaaagggggagccttccctgtcaccccccccgtgacctccatggggacttgctgacctctgctgctgatgggatgtatatgagccaca

SEQ ID NO: 24380 - DNA, 110 bp, synthetic construct
  source 1..110: mol_type = other DNA
cccaagatccttggctgtgtgtttatatttaagaatgaggaactagaaagctggctggaaattctgtgtgcctcagggcctctgaattgccctgttgtaaatttgattct

SEQ ID NO: 24381 - DNA, 110 bp, synthetic construct
  source 1..110: mol_type = other DNA
acagacatttcatgtttcgtaggtagtatttcttcttgggagagtctcagagctttgtccagaataagagtttctcaatatcatgagcaacaaataataacatatttgag

SEQ ID NO: 24382 - DNA, 110 bp, synthetic construct
  source 1..110: mol_type = other DNA
ggatcttgaaagcataatgctaagtgaaataagtcagagaaagaaagactaatgctgtgtgctctcacttatatgtgaattctgaaaacattgaactcatagaaatagaa

SEQ ID NO: 24383 - DNA, 110 bp, synthetic construct
  source 1..110: mol_type = other DNA
ctccccttctgttatggcagatctccatgcctgttaggtggccttctggtgtgtggattcctttccttttcacagctgggaccatcctgattcatttattctcttttttc

SEQ ID NO: 24384 - DNA, 110 bp, synthetic construct
  source 1..110: mol_type = other DNA
aattattcataatcaaaacaatgtctaaagcaaagcaacatgtttatgtaatttctcttcaggagacagctacattttgttgggcttacaggaagagccgaaattcaaga

SEQ ID NO: 24385 - DNA, 110 bp, synthetic construct; identical to SEQ ID NO: 24384
  source 1..110: mol_type = other DNA

SEQ ID NO: 24386 - DNA, 110 bp, synthetic construct
  source 1..110: mol_type = other DNA
gcaatgagacttggtgccaaagaataacagattacccattatattcacatgagatatgtaccaagatatttgcgaattttcaaactgatgatgcagttttaatatacttt

SEQ ID NO: 24387 - DNA, 110 bp, synthetic construct
  source 1..110: mol_type = other DNA
atcgaactatcttaaaaactgtggtattccatagtttgtagaagaagatatttttaagcacttttggggtgccaagcactacacttaaatactggtaataaaagccaata

SEQ ID NO: 24388 - DNA, 110 bp, synthetic construct
  source 1..110: mol_type = other DNA
aagcacttttggggtgccaagcactacacttaaatactggtaataaaagccaatatccactgaacacttactccataatagaaactatattaagttcttaataaacatta

SEQ ID NO: 24389 - DNA, 110 bp, synthetic construct
  source 1..110: mol_type = other DNA
acacagtaagactgcaacaggtagaaaggaatgataaagaaaacactttctttgaagacttctcatcaagctagaagattaaaatataaaaacctaagtacaagattatg

SEQ ID NO: 24390 - DNA, 110 bp, synthetic construct
  source 1..110: mol_type = other DNA
gtaaaacattttggcattgaacactattttaaaatacatttattgcctcactcgagagagtcttccattacagagaattcacccttccttcttgatggcagatagaacag

SEQ ID NO: 24391 - DNA, 110 bp, synthetic construct
  source 1..110: mol_type = other DNA
ccactgtgtgggcttgggcaacttacataaattgcttaagctctctaacattagtttctttgctgtaaaataaaagtaactacctcaaagtattatttagtggattaaat

SEQ ID NO: 24392 - DNA, 110 bp, synthetic construct
  source 1..110: mol_type = other DNA
gtgtctgtgaatatcatgaaattggaaaatcctgtggtcataagaagtagcttcatatttttgtcccatcttttctctgatagtgtttgaatcctgacaccctaagtgtg

SEQ ID NO: 24393 - DNA, 110 bp, synthetic construct
  source 1..110: mol_type = other DNA
tatttttgtcccatcttttctctgatagtgtttgaatcctgacaccctaagtgtgaagcaggttgagtgaaaaatgcaatccgtatccaggggatgagcaacgttgctat

SEQ ID NO: 24394 - DNA, 110 bp, synthetic construct
  source 1..110: mol_type = other DNA
ttcttagttgagcatatccttatttctggtacaagacgctccaggatcatcttaccttttccttgcccagggctagatcagccatttcttcaaggactctccattctttc

SEQ ID NO: 24395 - DNA, 110 bp, synthetic construct
  source 1..110: mol_type = other DNA
tcatttttttaatccaataaaaatcttacatgagaacacactatatgaaagaggtaaaagcagttctgctctgcttaaaactagggaggggacttgacaccatacccacc

SEQ ID NO: 24396 - DNA, 110 bp, synthetic construct
  source 1..110: mol_type = other DNA
caaaagctcattgaccagcacaaagcatctgtacttttttgagcttaagagatgtcattaacaacacaaagccccacagccagagtgaaggaaagttttgcaagtgatag

SEQ ID NO: 24397 - DNA, 110 bp, synthetic construct
  source 1..110: mol_type = other DNA
tgaatgaggctgagggaccacaaatactcattccataacaggttagagctaattgaagctgcatgtcagattagcttgaggacgagttctctgctagagcaatcaaatgg

SEQ ID NO: 24398 - DNA, 110 bp, synthetic construct
  source 1..110: mol_type = other DNA
aagctgcatgtcagattagcttgaggacgagttctctgctagagcaatcaaatggtggcaggtgtgcttcagacttaatccatcactacaattcccagcatgggtcagaa

SEQ ID NO: 24399 - DNA, 110 bp, synthetic construct
  source 1..110: mol_type = other DNA
agattcctttgaatcttgaaataaccttgagcacatggagccacaaataaatgcttttcaacacaaagccattttgcaaagtcttcgcacacacttttttgtatttccaa

SEQ ID NO: 24400 - DNA, 110 bp, synthetic construct
  source 1..110: mol_type = other DNA
gtccttgttcaatcaaagagaagtatttatcttagatattttccatcttttacccaaattatttatcatcacgcccctgaaggcatttggcagcagaattgtaatgttca

SEQ ID NO: 24401 - DNA, 110 bp, synthetic construct
  source 1..110: mol_type = other DNA
gcacctggatttctaaaataaaaacgctccttacctggaacgtgagctgagaggaagggctggctagggctagttgttaccttagagcttctcaagtagtgctgacagct

SEQ ID NO: 24402 - DNA, 110 bp, synthetic construct
  source 1..110: mol_type = other DNA
taagattgcaccaactctatacttagatcctctggcagactgaatgaagctaaaagaaagcatttatttgccctccctcttttataagacagaggcaggaaaggcacaag

SEQ ID NO: 24403 - DNA, 110 bp, synthetic construct
  source 1..110: mol_type = other DNA
gaaagcatttatttgccctccctcttttataagacagaggcaggaaaggcacaagatttctacttcacttattagagacttaattgaaagtgaataactagaagtcggca

SEQ ID NO: 24404 - DNA, 110 bp, synthetic construct
  source 1..110: mol_type = other DNA
tctgtctgtgcctcagcaaactgctctccttcagcctgttgatgcggccattaataaaacatttaaaaatgacctgaaaggcgttttaggaactagagcctgaatctggc

SEQ ID NO: 24405 - DNA, 110 bp, synthetic construct
  source 1..110: mol_type = other DNA
aaaacatttaaaaatgacctgaaaggcgttttaggaactagagcctgaatctggctgcctaacagctgtgtacttgaaagacgtggagctggtatcaaagttggctgttg

SEQ ID NO: 24406 - DNA, 110 bp, synthetic construct
  source 1..110: mol_type = other DNA
gtgagaggagcaacccctggtcccaggaacccctatgtcaaagagtgtggtttgcctttttacccagggcagaagctctccagcccatcctgaaaaagagatagctttcc

SEQ ID NO: 24407 - DNA, 110 bp, synthetic construct
  source 1..110: mol_type = other DNA
cccattttcccagggctgcccccctgaccagcagctttctctaaatgtcaggatccaggatctccatataacatctctggttgcctccaggccccagacatcagaataag

SEQ ID NO: 24408 - DNA, 110 bp, synthetic construct
  source 1..110: mol_type = other DNA
gctaccagtcttgcctctggaccaccatccacactgcggccagggcggtcttccttaaagcaagctagatcattgcacatctctgctaaattcagatcacagttccactt

SEQ ID NO: 24409 - DNA, 110 bp, synthetic construct
  source 1..110: mol_type = other DNA
taaagcaagctagatcattgcacatctctgctaaattcagatcacagttccacttagttaactgtcaggaaaaacaaaagcaaaaacaaaacaaatttaataacctaaaa

SEQ ID NO: 24410 - DNA, 110 bp, synthetic construct
  source 1..110: mol_type = other DNA
tatgccgcgggtgcagccctaaaaagcgaaagggtaaaataaaagctgaagcttatccaaactaagtggcactgttgtttgactgtagatgctgggcatgcccaatccct

SEQ ID NO: 24411 - DNA, 110 bp, synthetic construct; identical to SEQ ID NO: 24410
  source 1..110: mol_type = other DNA

SEQ ID NO: 24412 - DNA, 110 bp, synthetic construct
  source 1..110: mol_type = other DNA
tttgtcaaaaccatagtcaaggatataacacagtggttcccttggcaatctagcgaaataaaactcatgacatcaagtgcccaaccaagctatgacacagtatttaagcc

SEQ ID NO: 24413 - DNA, 110 bp, synthetic construct
  source 1..110: mol_type = other DNA
cacttgatcaacaggacttttctgactttctcgacagtggcaacagccaaccttaaactttcttagggcagcacaatacagcttatgttgtggagtaagctacctgcaga

SEQ ID NO: 24414 - DNA, 110 bp, synthetic construct
  source 1..110: mol_type = other DNA
aactttcttagggcagcacaatacagcttatgttgtggagtaagctacctgcagagaaaccatcacagagagctacaccttctttaagtgtaaactctcccttatgaact

SEQ ID NO: 24415 - DNA, 110 bp, synthetic construct; identical to SEQ ID NO: 24413
  source 1..110: mol_type = other DNA

SEQ ID NO: 24416 - DNA, 110 bp, synthetic construct; identical to SEQ ID NO: 24414
  source 1..110: mol_type = other DNA

SEQ ID NO: 24417 - DNA, 110 bp, synthetic construct
  source 1..110: mol_type = other DNA
agcattcctaagagaggttccaaatgaattttataggtaaatcactaagaaactaatcaaagattcagaaacagctaattgtcctcgcccacagagggaaaaattgcatt

SEQ ID NO: 24418 - DNA, 110 bp, synthetic construct
  source 1..110: mol_type = other DNA
atcaaagattcagaaacagctaattgtcctcgcccacagagggaaaaattgcattgcaatgcagaggataaaacagcgattgttttgggtttagaaatgagtaggcaagt

SEQ ID NO: 24419 - DNA, 110 bp, synthetic construct
  source 1..110: mol_type = other DNA
gtttaaaactagcaggctcctgggagctcagttcggtagcaacttaactgagcgtagagggcatatggaaacccaacctactccctactcttaaccaccccttgtgaggg

SEQ ID NO: 24420 - DNA, 110 bp, synthetic construct
  source 1..110: mol_type = other DNA
ctttctgtggctcaggtgatgtaatcatatcgcaggaaaatgggctcagggtgatgaaatgatggagccaactatctcacagctagttagtggtccaatcaggatttgaa

SEQ ID NO: 24421 - DNA, 110 bp, synthetic construct
  source 1..110: mol_type = other DNA
tggcagatgctttcctagactcagtttaattcagagaagtaggtgaagtacacagaacaccacgtggaaggcacatgttcactacaccatgtacctaagaggaagctaat

SEQ ID NO: 24422 - DNA, 110 bp, synthetic construct
  source 1..110: mol_type = other DNA
aacaccacgtggaaggcacatgttcactacaccatgtacctaagaggaagctaatctgcaaaagcatcctccctgctcctgtactcccaggacctggtcaagaaaatcca

SEQ ID NO: 24423 - DNA, 110 bp, synthetic construct
  source 1..110: mol_type = other DNA
acgcaactttcccacttcacggaggacctctcccctaacatagagttctaagagtgcttcagtttattccagtgattttattaaaacaggcaatgatgtgataccactta

SEQ ID NO: 24424 - DNA, 110 bp, synthetic construct
  source 1..110: mol_type = other DNA
gcttcagtttattccagtgattttattaaaacaggcaatgatgtgataccacttacttaagcttagataatactgtttgaattaaaacctattcacatacttcaaggcat

SEQ ID NO: 24425 - DNA, 110 bp, synthetic construct
  source 1..110: mol_type = other DNA
tgttgtttcaggaccctattcctgttagtccaaaacatttgtagtgaacagctgatgttgggtgttggtgcaactttttgtttatttgatttttgctcaaataggaaatt

SEQ ID NO: 24426 - DNA, 110 bp, synthetic construct
  source 1..110: mol_type = other DNA
ttactcgttgcttgtacacccagagtatcttgggaaatggaagaattttgctgacctgagtttgtatcccagcttttctacttaccagctgggtagccttcatctaatta

SEQ ID NO: 24427 - DNA, 110 bp, synthetic construct
  source 1..110: mol_type = other DNA
ctaaattattcatagtagatgagattatgagttcttgatcttaaaatggaaccataaacatcacactggagaaagactgggtaaacactgcttatacagcagttctttat

SEQ ID NO: 24428 - DNA, 110 bp, synthetic construct
  source 1..110: mol_type = other DNA
aaacatcacactggagaaagactgggtaaacactgcttatacagcagttctttatttcatttgcgtatgtacccagaagctctgaagtcatggtatgcatagaagtacag

SEQ ID NO: 24429 - DNA, 110 bp, synthetic construct
  source 1..110: mol_type = other DNA
gtgcctgacacatagataatgctcagtaaatattagctagcgtaagttttctcttctgtggcgatctcacagaggtgttgaaaggcttaagttaaacaatgtatatgacg

SEQ ID NO: 24430 - DNA, 110 bp, synthetic construct
  source 1..110: mol_type = other DNA
aaggccacacagttcaggacttgtattctgacccctgaatatttgcagaagtccttctcgcagtctcactccagctctcttgacccggagccattctttgctttttcagg

SEQ ID NO: 24431 - DNA, 110 bp, synthetic construct
  source 1..110: mol_type = other DNA
cagtattctgaggtcagttcagaacagcctgaaacccaggaagaaatctttacggacctgatttacccaacctaaaagtcccatggagcaccagccctccgagcagcctg

SEQ ID NO: 24432 - DNA, 110 bp, synthetic construct
  source 1..110: mol_type = other DNA
aactctttgatttgctaaccattctatgggttaagaacttccaggggctcagctgggggcctcagtggggtcatggacatgattgcagtcatccggcaactgatgggctg

SEQ ID NO: 24433 - DNA, 110 bp, synthetic construct
  source 1..110: mol_type = other DNA
ggggcctcagtggggtcatggacatgattgcagtcatccggcaactgatgggctgatgggctgagacagcctcactcacatgtttggtggtttagtgccagcagagagct

SEQ ID NO: 24434 - DNA, 110 bp, synthetic construct
  source 1..110: mol_type = other DNA
caactcaaggttttgtgggactgcaatgtagctaacccatgcttgtaattaaccaacgaagagagtttatttctaagtcttggaactggtattagaaatgtattgtgggg

SEQ ID NO: 24435 - DNA, 110 bp, synthetic construct
  source 1..110: mol_type = other DNA
cagcctgctgcggcgggattagtttcctctgctggactctgaggtcccaagggggtggcacaaactctggagatggagctgggtttaaattccagctgtgtgaccttggg

SEQ ID NO: 24436 - DNA, 110 bp, synthetic construct
  source 1..110: mol_type = other DNA
ccacagtcattgttttggtcacagatccatcgggaaggaatgcaggtctgatcgtcacatcgaaactcgctctctgagcactgccggggaactgaaaagaaaagccacac

SEQ ID NO: 24437 - DNA, 110 bp, synthetic construct
  source 1..110: mol_type = other DNA
ttatgttactctaatatcttctacaagcttaaaagctcaagcaacttggttactgcttctccttggcatgtattctgcagctataggcagctagttcagtgtggggagaa

SEQ ID NO: 24438 - DNA, 110 bp, synthetic construct
  source 1..110: mol_type = other DNA
cttctccttggcatgtattctgcagctataggcagctagttcagtgtggggagaaccattgtcacttaatagacgctaaatgaatacatatatgcagtagcttaaatgtg

SEQ ID NO: 24439 - DNA, 110 bp, synthetic construct
  source 1..110: mol_type = other DNA
aggggaactctgggaacattcagttttgtttctagtcctcgtggctacacttgctccagatagctgctccacctcggcattccacatccactctctccctggggttccca

SEQ ID NO: 24440 - DNA, 110 bp, synthetic construct
  source 1..110: mol_type = other DNA
cctttgctatacagactaggcactgtctttcactaggctctgatgttgttatatgtttcccccatcaagggccttaactttgttttcaggataagaatgaatggggggtg

SEQ ID NO: 24441 - DNA, 110 bp, synthetic construct
  source 1..110: mol_type = other DNA
ttttgtccctgaataaactcttattattcaagaaaggggaaaaaacccttctccttctcctctctcttctaccatatagtcctctgtttccactcaggttaatacgagtg

SEQ ID NO: 24442 - DNA, 110 bp, synthetic construct
  source 1..110: mol_type = other DNA
caggatccctgcgtcctcctggatccctagttggattcattaacttctgaaccacgaagggaactcctgtatgctagctaaattgtaaagcattattccatcaccaccct

SEQ ID NO: 24443 - DNA, 110 bp, synthetic construct
  source 1..110: mol_type = other DNA
caagaactagatttggattctgttttacctgatcaggaaatgttaatgaaactaatgattcatccactccaaattcaggtacgtattcaggcttttaaaaggttttgaat

SEQ ID NO: 24444 - DNA, 110 bp, synthetic construct
  source 1..110: mol_type = other DNA
tgattcatccactccaaattcaggtacgtattcaggcttttaaaaggttttgaattgagttccttggttaagtgattcttcctttattttatctggtgcctttatcattg

SEQ ID NO: 24445 - DNA, 110 bp, synthetic construct; identical to SEQ ID NO: 24443
  source 1..110: mol_type = other DNA

SEQ ID NO: 24446 - DNA, 110 bp, synthetic construct; identical to SEQ ID NO: 24444
  source 1..110: mol_type = other DNA

SEQ ID NO: 24447 - DNA, 110 bp, synthetic construct
  source 1..110: mol_type = other DNA
tattgccagagtaggggtagaagggaaaatataccttggccaagcgtgaaggaactgaagcatagtcggagtttttatgtggttgtatataactaggtggccaccgtgat

SEQ ID NO: 24448 - DNA, 110 bp, synthetic construct
  source 1..110: mol_type = other DNA
tgaagcatagtcggagtttttatgtggttgtatataactaggtggccaccgtgataggcttttagcagtctttcttttttttttttttttttttttttaatgtagagatt

SEQ ID NO: 24449 - DNA, 110 bp, synthetic construct
  source 1..110: mol_type = other DNA
gttgtgatgaaggaaaattcagtgttatttgcagggtgccaagcaagcagaacgggcagctagtgctcaaaatccttgaactcgctgatagctttcaggtgagggttttt

SEQ ID NO: 24450 - DNA, 110 bp, synthetic construct
  source 1..110: mol_type = other DNA
tctgcaactgtacttagcaaccacggtaagaacagttcccactttgtgatctgattggggacacagcacacctactctgtattcagctcttacaacttacttctaatggg

SEQ ID NO: 24451 - DNA, 110 bp, synthetic construct
  source 1..110: mol_type = other DNA
tagaggaaaggagacaagttagagggcttctgtaagcatcctttgtaagctgcgtagaggtggcagcagtggggatggaaaggagggacagacaagaacaaagaatggac

SEQ ID NO: 24452 - DNA, 110 bp, synthetic construct
  source 1..110: mol_type = other DNA
aatatgggcactgccttccaccaggcttcctccaggttgtgttctttagcctcacatgtagtttgtgggcagctcagggaatgatgagaagtactggatggatgggagta

SEQ ID NO: 24453 - DNA, 110 bp, synthetic construct
  source 1..110: mol_type = other DNA
atgtagtttgtgggcagctcagggaatgatgagaagtactggatggatgggagtagggggtgtctcttcctggatcctgtggctgtgttgcttcctgtgcacccagatcc

SEQ ID NO: 24454 - DNA, 110 bp, synthetic construct
  source 1..110: mol_type = other DNA
attgagctaaattatagctttccatttttaaaacagtggtagtctaaagctgcagagtgcgaaattcagagattgccatagtaactctgcttttctcaggaagtaattga

SEQ ID NO: 24455 - DNA, 110 bp, synthetic construct
  source 1..110: mol_type = other DNA
ttgtctttcccctccttccaccttaaccagtttttagtgatccagatctatctgtccttatccagaggaagctagaaacaaagcaagaataaatagttcttggtcaggtc

SEQ ID NO: 24456 - DNA, 110 bp, synthetic construct
  source 1..110: mol_type = other DNA
cagatcaagatagagcccatgtagttaaggttatcaaggtgataacttcattcatatttgtctctcagcaggctgttgttacacctggatggtctgccattatttttctc

SEQ ID NO: 24457 - DNA, 110 bp, synthetic construct
  source 1..110: mol_type = other DNA
ttgaggggaatggaaattttcaggctttggaaatagcttagcagttacttacactcagaattagtgcattttgagactaagagcgaatttatgacatatttttacaggtg

SEQ ID NO: 24458 - DNA, 110 bp, synthetic construct
  source 1..110: mol_type = other DNA
cagaattagtgcattttgagactaagagcgaatttatgacatatttttacaggtgaggtttattgactgttataacagaggattgagaaaagcgatgggatttctctatt

SEQ ID NO: 24459 - DNA, 110 bp, synthetic construct
  source 1..110: mol_type = other DNA
tctctgggtgcattctgcaagcctcacactgtattgatcaaggtaatgaggggctgcatgttaaatccaggctagtcccagaaaactcatttggtaggtgttctccttag

SEQ ID NO: 24460 - DNA, 110 bp, synthetic construct
  source 1..110: mol_type = other DNA
tagcatttgtcactaccttacatactatatatactttgcttatttattatctatcttcctctaccataatgtaagctccatgatggcagggatttttttctggtttgtcc

SEQ ID NO: 24461 - DNA, 110 bp, synthetic construct
  source 1..110: mol_type = other DNA
ttcctctaccataatgtaagctccatgatggcagggatttttttctggtttgtccattactgtatcctcaaaatagtgaataatacctgcagagagtagccactctctat

SEQ ID NO: 24462 - DNA, 110 bp, synthetic construct
  source 1..110: mol_type = other DNA
accgtgggaacagccatttttggtggctcatggtgatcagctatgaggagagtgttggcaaatgaactatccaggcctctgtcaaatcattatttgcttcctccatttat

SEQ ID NO: 24463 - DNA, 110 bp, synthetic construct
  source 1..110: mol_type = other DNA
gtgatacattggggaacaacacagtcccaaagtcctgtccccatgaagctacattctagcagagggacaataagcaataagcataatacatgagtcagttgtatgagatg

SEQ ID NO: 24464 - DNA, 110 bp, synthetic construct
  source 1..110: mol_type = other DNA
ctagcagagggacaataagcaataagcataatacatgagtcagttgtatgagatgctagaagggcaaagagttatgagggagaaaatacagcaagggagaccaatcttgg

SEQ ID NO: 24465 - DNA, 110 bp, synthetic construct
  source 1..110: mol_type = other DNA
tacgttgaaataaaaccctgttcacatggaggtagagcctctgtgtcccacaatttgactggactacccctacccagtccccatggctgggggagtggctcagggaatgc

SEQ ID NO: 24466 - DNA, 110 bp, synthetic construct
  source 1..110: mol_type = other DNA
tgactggactacccctacccagtccccatggctgggggagtggctcagggaatgctctgagctgactggctgatgccgggttgtgtgcaccaatgagtacaaggaaggga

SEQ ID NO: 24467 - DNA, 110 bp, synthetic construct
  source 1..110: mol_type = other DNA
tttgggtcaggttgacagtgtaggagccatattggcaacaattaacgaagctgcacttttaaagacaggattcaggagtttctgttgtggctcagtaggttaaggacccg

SEQ ID NO: 24468 - DNA, 110 bp, synthetic construct
  source 1..110: mol_type = other DNA
caggtattaactttttagtggccccaaaggacccagagacctaatccatggtagactacacccattggagaagcttagacgttgctgacaaggaccctggtgggctccac

SEQ ID NO: 24469 - DNA, 110 bp, synthetic construct
  source 1..110: mol_type = other DNA
ctacacccattggagaagcttagacgttgctgacaaggaccctggtgggctccacattgggtgaggttgcggagcggccacgctggtgatacgcaggaaggggcttgact

SEQ ID NO: 24470 - DNA, 110 bp, synthetic construct
  source 1..110: mol_type = other DNA
attgtaaggatggctctggctttcaaacacctgtccactaggagctggacttatacccccaactcctttcatgcggccacaagacagacatcagatggcagcaacttctg

SEQ ID NO: 24471 - DNA, 110 bp, synthetic construct
  source 1..110: mol_type = other DNA
taatggagtttatgaaacagttgttgtggggggattcaatatttgtataaatgcgtttggctttccccttcactttgttaaaataaacccttaccagacttttttttttt

SEQ ID NO: 24472 - DNA, 110 bp, synthetic construct
  source 1..110: mol_type = other DNA
gcccttggcttcccggtaggaggccttctcttaaattctcaggctacattccagttccctttgcagctccctctctccccacccccatgcaagctacaattacccacaac

SEQ ID NO: 24473 - DNA, 110 bp, synthetic construct
  source 1..110: mol_type = other DNA
tatagttatttggtttttgtttcttcaaaaggattccattttcagcattcaacagactaggggtatttcatttgaaatagaatggatagttaggacactaaatgggatag

SEQ ID NO: 24474 - DNA, 110 bp, synthetic construct; identical to SEQ ID NO: 24473
  source 1..110: mol_type = other DNA

SEQ ID NO: 24475 - DNA, 110 bp, synthetic construct; identical to SEQ ID NO: 24473
  source 1..110: mol_type = other DNA

SEQ ID NO: 24476 - DNA, 110 bp, synthetic construct; identical to SEQ ID NO: 24473
  source 1..110: mol_type = other DNA

SEQ ID NO: 24477 - DNA, 110 bp, synthetic construct
  source 1..110: mol_type = other DNA
ccctttccccagattaacagacagacccagatccctgagggtttcgccaggccccagcttgccctgaatctgttgtacaacctgcctttcctttgtttcttaaagaagta

SEQ ID NO: 24478 - DNA, 110 bp, synthetic construct
  source 1..110: mol_type = other DNA
ctcaagagtaaatagtatgcaatacacaatctgtagttggttgaactgcagatgtggaggaaccatgcatacaaaggacaaccctaagctatctccagattttgactgtg

SEQ ID NO: 24479 - DNA, 110 bp, synthetic construct
  source 1..110: mol_type = other DNA
ggaggaaccatgcatacaaaggacaaccctaagctatctccagattttgactgtgcagaggggtggtacccttaacccctgcattattgaagggtccactatatatgtat

SEQ ID NO: 24480 - DNA, 110 bp, synthetic construct
  source 1..110: mol_type = other DNA
gtctgatttaaaggcaacaataatacctctcttagacataactggttttgaaatggacacaggccccaattctggccaagaagaggatgggaaaggtttgctatggactt

SEQ ID NO: 24481 - DNA, 110 bp, synthetic construct
  source 1..110: mol_type = other DNA
aacccaggaattcctaggatgagctgaaccttaccttatgcattgctggtgtatgagatgaattcttcaaataacaatttggcaatagttatcaaaatacatgcccatct

SEQ ID NO: 24482 - DNA, 110 bp, synthetic construct
  source 1..110: mol_type = other DNA
gagtcacatctgcgacctacaccagcattccttttctttttaacaacaacaataaaaaaaaaaatcaaaaatgtcaccactccaaacaagtgaatcttttggccattgct

SEQ ID NO: 24483 - DNA, 110 bp, synthetic construct
  source 1..110: mol_type = other DNA
aaaaaaaaatcaaaaatgtcaccactccaaacaagtgaatcttttggccattgctaatcactatacctacttctgtggtcgcagagctgagcaggttatccagaatgggc

SEQ ID NO: 24484 - DNA, 110 bp, synthetic construct
  source 1..110: mol_type = other DNA
ggggaaaggagccccctctgagtttttctttggtgtgctccaaatttagagctgtatctccacctctctgagtttggttcaatcccatgatccaaatttgggtgaaagtg

SEQ ID NO: 24485 - DNA, 110 bp, synthetic construct
  source 1..110: mol_type = other DNA
aaaaaaaaaaagtatcaagaacaaaatgtcttaagggccatttctgtgatccagttcagatacacagaaacaagagctcatggcctctgcaaccttcctattcccaagac

SEQ ID NO: 24486 - DNA, 110 bp, synthetic construct
  source 1..110: mol_type = other DNA
gtcagtaaggacatggatgcccttgattcaaggggaaacaatccacggactgaaggaatataaagcctcacaagtagtgaggcgcaactcccaaggggtctgggccaaga

SEQ ID NO: 24487 - DNA, 110 bp, synthetic construct
  source 1..110: mol_type = other DNA
gaatataaagcctcacaagtagtgaggcgcaactcccaaggggtctgggccaagagtgggttttatagtatcttagaagagcaatgggaactcaggacatgattgcctag

SEQ ID NO: 24488 - DNA, 110 bp, synthetic construct
  source 1..110: mol_type = other DNA
agccagaagggagagatacataggacaaggtatatggaaaggagcacagagctttgatcaggctctgcgttcaggccactctccctaaatcttcctgtgtttactaacct

SEQ ID NO: 24489 - DNA, 110 bp, synthetic construct
  source 1..110: mol_type = other DNA
ccattcaggctactgctggagagggcaagctagtgtgcaatcaatttgaaaaacctttgagtaaatgtgaaagatttaaaaatcaagttttggcactcaaggggggaaga

SEQ ID NO: 24490 - DNA, 110 bp, synthetic construct
  source 1..110: mol_type = other DNA
cctgttgtgttggaaattccggtgcaatactgttgaccacaactgccaaatctgaaagcccaaaggaagaagtaaagctttatgctaattgtattgcagcatgatgggat

SEQ ID NO: 24491 - DNA, 110 bp, synthetic construct
  source 1..110: mol_type = other DNA
tgttaggtgcagatactaaggatttaggagaatatctcacaatttgtcttagaagttctcttctgtttcaagtaaattccagcatggcataagcttgttttgctatgatt

SEQ ID NO: 24492 - DNA, 110 bp, synthetic construct
  source 1..110: mol_type = other DNA
agagggaagcagaaagcgtttgtggtgaagaattgcagacaacctaatcattccgcctagcgcccaacccaactacttttcacgctgtaggtttctagctagacaatcca

SEQ ID NO: 24493 - DNA, 110 bp, synthetic construct
  source 1..110: mol_type = other DNA
caatgattttatggtccacagtaactcagcagttgatacgactttttttgagactaggctcaaaaagtatacaaattcgctagtatcattatcattgataaattatataa

SEQ ID NO: 24494 - DNA, 110 bp, synthetic construct
  source 1..110: mol_type = other DNA
ggttcattaccactgaaccatgatgggaactccattttttttttttttttaagtacataatttaaacactgcaaatacaagaatatgtgtgggaagtaacagctattaag

SEQ ID NO: 24495 - DNA, 110 bp, synthetic construct
  source 1..110: mol_type = other DNA
tttttaagtacataatttaaacactgcaaatacaagaatatgtgtgggaagtaacagctattaagaatacaggccctgggagttcccttgtggctcagagggttaaggat

SEQ ID NO: 24496 - DNA, 110 bp, synthetic construct; identical to SEQ ID NO: 24494
  source 1..110: mol_type = other DNA

SEQ ID NO: 24497 - DNA, 110 bp, synthetic construct; identical to SEQ ID NO: 24495
  source 1..110: mol_type = other DNA

SEQ ID NO: 24498 - DNA, 110 bp, synthetic construct
  source 1..110: mol_type = other DNA
atgtttgcatgaagttttctcagctccagtttttcaggtagcaggtgaattagctctacttcttacccactatggtgtttgctcatgtgcatagttcttttgacaagaaa

SEQ ID NO: 24499 - DNA, 110 bp, synthetic construct
  source 1..110: mol_type = other DNA
ctacttcttacccactatggtgtttgctcatgtgcatagttcttttgacaagaaagtgaaatctgaattgtgaaaattagactccgagaaaaaaatctagctgcaaatcc

SEQ ID NO: 24500 - DNA, 110 bp, synthetic construct
  source 1..110: mol_type = other DNA
ctctgcttcaagcaaaccacaacatgcatttgtccgagaataaaatgaaaagcatctctcataagataaggaatttttttctgtagacacactgtaacagggaccaagct

SEQ ID NO: 24501 - DNA, 110 bp, synthetic construct
  source 1..110: mol_type = other DNA
ctctcataagataaggaatttttttctgtagacacactgtaacagggaccaagctttaattagctaagatatttaaacattctagcaatataaaaatccatctgcttttc

SEQ ID NO: 24502 - DNA, 110 bp, synthetic construct
  source 1..110: mol_type = other DNA
cgaggtcgtcgtccgtccgcgtcagctgtcctcgttcttccgcctctgaaaaatagtcaccggcttcgaggaggcttggttcactgggccgcccagttccggatactgga

SEQ ID NO: 24503 - DNA, 110 bp, synthetic construct
  source 1..110: mol_type = other DNA
gcaggttctaggaggccaaggagagggtgtggccctactttcttctccagtgcggaatcaagccttctcttggtggggagctgagggcagaagaggcctgccgcctgcct

SEQ ID NO: 24504 - DNA, 110 bp, synthetic construct
  source 1..110: mol_type = other DNA
tactttgggagaaagcaaaaccctttaacatgcttgagctttgtagaacaaacctaaacgcagcttaggcatccctataaacctaaacttttccacattttaaataagtg

SEQ ID NO: 24505 - DNA, 110 bp, synthetic construct
  source 1..110: mol_type = other DNA
gggcctttaaaggtacctcccaaatcttgaggtgttcagctggtctagtctgtaggagtgatgggggtcgggggaagaggcgatgcttcctcatcccacgaggaccagag

SEQ ID NO: 24506 - DNA, 110 bp, synthetic construct
  source 1..110: mol_type = other DNA
ctttggaggtgatatgaggcaccctaaaacatgcatgccaaatcccacgtgagtcatttcctttgcctctcggaaagcccaacgccatcctttcacactttattggccgt

SEQ ID NO: 24507 - DNA, 110 bp, synthetic construct
  source 1..110: mol_type = other DNA
atttcctttgcctctcggaaagcccaacgccatcctttcacactttattggccgtgatgtgtgttcaccctcatgtaaaatgatgggctgggaagaggggccacatcagg

SEQ ID NO: 24508 - DNA, 110 bp, synthetic construct
  source 1..110: mol_type = other DNA
gctgggttgggcagtgcccacaggatcttaagatgaaggcatttattgaaccctgcagctatttatcaaaagtactcactgcgccttagccctgccttgcgggatgcctc

SEQ ID NO: 24509 - DNA, 110 bp, synthetic construct
  source 1..110: mol_type = other DNA
ctgaccagaataaatttccaatctaaaatgtccagtctattaggtaatagttttccactttacttgctgttacatattaagctttagccttcttagttctttgaagatca

SEQ ID NO: 24510 - DNA, 110 bp, synthetic construct
  source 1..110: mol_type = other DNA
gtcaccacagaaatcagtgaagccattgtgtgtgtgaggttcaccacgaggatactgggaagctattagacacaaacaaaaaaactttcctctaaatttaagtacttttg

SEQ ID NO: 24511 - DNA, 110 bp, synthetic construct
  source 1..110: mol_type = other DNA
ggactcagggtcaatctctggtctcgctaactgggttaaggatttggtgttgctgtgggttacagtgtaggttgcaatctcagctcagatctggcgttgctgtgggcata

SEQ ID NO: 24512 - DNA, 110 bp, synthetic construct
  source 1..110: mol_type = other DNA
ataataataataatataaccagaatttgaatactgttatccataggcttgctgcgaagactgcatgcactagtgtgctacagtcagctcccactgtctctatctagtcac

SEQ ID NO: 24513 - DNA, 110 bp, synthetic construct
  source 1..110: mol_type = other DNA
tattctctcagaaactataagcaatttctgcattttcttggttggttttgtttttgattgtcctgctcttagccaagtctgctgtctttagctgcaaaacttctggcaac

SEQ ID NO: 24514 - DNA, 110 bp, synthetic construct
  source 1..110: mol_type = other DNA
gattgtcctgctcttagccaagtctgctgtctttagctgcaaaacttctggcaactctccttccaaaatgtgcataattggctgttgggtgtagttttgtatagatatag

SEQ ID NO: 24515 - DNA, 110 bp, synthetic construct
  source 1..110: mol_type = other DNA
tggtgcacacggcttctacccatactctctctcttcggcatacagctgagtaagggctgaaaggaaaaggactacaggttgccctagctttcctttctctctgtcattat

SEQ ID NO: 24516 - DNA, 110 bp, synthetic construct
  source 1..110: mol_type = other DNA
cttggacctttccatctaatatgtttctagagaagcctgtgctcttcctttgttgagcttttcatatttgggacagtaacatatcttcaatgatgtattcaatacctctc

SEQ ID NO: 24517 - DNA, 110 bp, synthetic construct
  source 1..110: mol_type = other DNA
cctttcgggttggtttcctcgctttgatcatttcattaatatcaccaagctccttctttcccgctaggggttaacctgatcacttataaaatgaaattcttttcctcatt

SEQ ID NO: 24518 - DNA, 110 bp, synthetic construct
  source 1..110: mol_type = other DNA
ctttcccgctaggggttaacctgatcacttataaaatgaaattcttttcctcatttctcagatttaccgttggagggagactggatgtgggaggtctcgctgccccctca

SEQ ID NO: 24519 - DNA, 110 bp, synthetic construct
  source 1..110: mol_type = other DNA
gagggcgatgactttggcaagttagccctggtgaacgatgccccaagagctgcctccatgtcttgcgagaagataactgccatttcctaagagtagacaaggaggatttc

SEQ ID NO: 24520 - DNA, 110 bp, synthetic construct
  source 1..110: mol_type = other DNA
acttaaggaataaaggaatttgtcagaaggatatggggtaactcagggaatgaaggaatccttaaagagcccaggtcttagaagtgacctggtggagcagctagctacta

SEQ ID NO: 24521 - DNA, 110 bp, synthetic construct
  source 1..110: mol_type = other DNA
ggcctcctacacctacctctctctaggcttctgtttccaccgtgaggatgtagttctggagaggccttgagccacctttcccatgaattggccgaagagaagcacaagga

SEQ ID NO: 24522 - DNA, 110 bp, synthetic construct
  source 1..110: mol_type = other DNA
catcctcccaacagccttttagagctggggactgatagcctcggtttgcaggtcatagatcatttggtgatccatcttcactcctggaaaactaagtcaaaaatattttt

SEQ ID NO: 24523 - DNA, 110 bp, synthetic construct
  source 1..110: mol_type = other DNA
aagccctccgtctcatatgtaagcaaagaattttcctctgagcttgttgcctcatcatatgtctaagtatttagaaagcacagcgaaaccatatcttctgagacaaaaga

SEQ ID NO: 24524 - DNA, 110 bp, synthetic construct
  source 1..110: mol_type = other DNA
catatgtctaagtatttagaaagcacagcgaaaccatatcttctgagacaaaagacagttaccagacatgtctctgtatatactccgtgttaggaaacgctggcctctgt

SEQ ID NO: 24525 - DNA, 110 bp, synthetic construct
  source 1..110: mol_type = other DNA
agacccaggggaacctaccgtgggaagagaaacttttgatgaatcgaatccgttgagtttttcttagccgggttttcgggggtgttttggtgttcgtttgtgttttaatg

SEQ ID NO: 24526 - DNA, 110 bp, synthetic construct
  source 1..110: mol_type = other DNA
acctgctgaagggctgcctcattgctcctacctcaagagcacttcaaaggctggcagagacttcattttgtgtgagtgggttgtgaacatatttataaagggttgacctg

SEQ ID NO: 24527 - DNA, 110 bp, synthetic construct
  source 1..110: mol_type = other DNA
agagacttcattttgtgtgagtgggttgtgaacatatttataaagggttgacctgggcccatcaggaaaacaatttggttatacattttattccacttgtctttatttat

SEQ ID NO: 24528 - DNA, 110 bp, synthetic construct; identical to SEQ ID NO: 24526
  source 1..110: mol_type = other DNA

SEQ ID NO: 24529 - DNA, 110 bp, synthetic construct; identical to SEQ ID NO: 24527
  source 1..110: mol_type = other DNA

SEQ ID NO: 24530 - DNA, 110 bp, synthetic construct
  source 1..110: mol_type = other DNA
ttacctcttagcttctgttaactttcctctccctcactttggccacagtgatggcctctgcccgactttggcctcacagctggctagctctgggcatcagtgtgcattct

SEQ ID NO: 24531 - DNA, 110 bp, synthetic construct
  source 1..110: mol_type = other DNA
caggcaaaatatacaacatacacattgaaagacaatgcttagagggaggagagagatcaaacccatagctacagaaaaataaatctttcctagtgctgtaactggcagca

SEQ ID NO: 24532 - DNA, 110 bp, synthetic construct
  source 1..110: mol_type = other DNA
atcaaacccatagctacagaaaaataaatctttcctagtgctgtaactggcagcaatgtctgacaaagagcatgacatagactgatgttttgtctccccaaaatgcatat

SEQ ID NO: 24533 - DNA, 110 bp, synthetic construct
  source 1..110: mol_type = other DNA
tttggcatgactcaactaccttgcactgagggtaataaaatcataaagtttattatccccagaatttgcacagacgcaaaatgttaatggagcttttaaaggctcagatt

SEQ ID NO: 24534 - DNA, 110 bp, synthetic construct
  source 1..110: mol_type = other DNA
tccccagaatttgcacagacgcaaaatgttaatggagcttttaaaggctcagattaattaataaatgacgtgcgtgaccagttactaatggaaacaggaatatttggatg

SEQ ID NO: 24535 - DNA, 110 bp, synthetic construct; identical to SEQ ID NO: 24533
  source 1..110: mol_type = other DNA

SEQ ID NO: 24536 - DNA, 110 bp, synthetic construct; identical to SEQ ID NO: 24534
  source 1..110: mol_type = other DNA

SEQ ID NO: 24537 - DNA, 110 bp, synthetic construct
  source 1..110: mol_type = other DNA
cagcagtaacaactgcaagacagactgatctttcagtgacttcaatcgctaatctacgagcagcttctccacacaccctctgacctggtcctgtttctgggctctgtcca

SEQ ID NO: 24538 - DNA, 110 bp, synthetic construct
  source 1..110: mol_type = other DNA
aaatgcattagggtaattgctctgcagcaaatcaccttctctgctctaagctcgactgccacactcctcacatgtccatcaattgtgcacattgtcatgatctcctgatg

SEQ ID NO: 24539 - DNA, 110 bp, synthetic construct
  source 1..110: mol_type = other DNA
cagcattagagttcagattgcagcaaaacatgtattctaatttgaggttgtcggatggcttaaaagagtaatcatggtatcttatgattttgtggattggaaatttggac

SEQ ID NO: 24540 - DNA, 110 bp, synthetic construct
  source 1..110: mol_type = other DNA
tggcttaaaagagtaatcatggtatcttatgattttgtggattggaaatttggactgagctcagctgagccagcagggggtctcgtctactggactctagatgctttacc

SEQ ID NO: 24541 - DNA, 110 bp, synthetic construct
  source 1..110: mol_type = other DNA
ggtccctctgtttagtttcccaagcatgtgaatctgcccttactagcatgtggataaccagcactccagctttgccagagaaccaagcttagactggccacgcccaaccc

SEQ ID NO: 24542 - DNA, 110 bp, synthetic construct
  source 1..110: mol_type = other DNA
tatatataactctctctagtcctttcacactaggccatttaatcaatgttcttcattggacaaatgacaaatctacgacagggaaagtaatttgcaagaaggtgctatct

SEQ ID NO: 24543 - DNA, 110 bp, synthetic construct
  source 1..110: mol_type = other DNA
gctaaattttagcattgctaagctcagtcaggtttataaaatattactctccatatattctaagtggattaaaaaattttacaggagttcccgtggtggcgcagtggtta

SEQ ID NO: 24544 - DNA, 110 bp, synthetic construct
  source 1..110: mol_type = other DNA
gtggaatctcaccacatatctccactcattaacacagacttcaggacctggtcgctacctgaagctgctctctcccctgaagtctttcattagaaacctctttgttttca

SEQ ID NO: 24545 - DNA, 110 bp, synthetic construct
  source 1..110: mol_type = other DNA
actatatttattatgtttgagaggatgtggaggatacttcaaactgggctttggaacaaagtacatttgggctaggtcccggcttgtcaaaatttctatggcaaatctgg

SEQ ID NO: 24546 - DNA, 110 bp, synthetic construct
  source 1..110: mol_type = other DNA
aaatctcttgctgctttataagtggattggtttacagaagtcacactgagacacctgctatggagctgtaattttacctctgcatagtcacagaactgcatgcagtgtcc

SEQ ID NO: 24547 - DNA, 110 bp, synthetic construct
  source 1..110: mol_type = other DNA
tgctatggagctgtaattttacctctgcatagtcacagaactgcatgcagtgtcctttaaaacattttacatgtatatgaacatggtgtcccttgacatggcagttttcc

SEQ ID NO: 24548 - DNA, 110 bp, synthetic construct
  source 1..110: mol_type = other DNA
acatgctagagatttggtgctaacagtctgccagctcgttccatacattatttgttcagtatgatttgcacgtataggttactcatcaaggacctaggagggtcatgtag

SEQ ID NO: 24549 - DNA, 110 bp, synthetic construct
  source 1..110: mol_type = other DNA
ctctgtctctatgaatttaggtgaaacagttgcttattgtaagctttgaagaggtgttcttatgggggagcatccctatgtagactacatgtgcctagagcctttggtga

SEQ ID NO: 24550 - DNA, 110 bp, synthetic construct
  source 1..110: mol_type = other DNA
gaggctccttagcagagaaggcttcacatgctgggggacgtcttcgccctgggctgtgtctgggagcctttccggatcaccacgcagagagctgctggcttcctggaaga

SEQ ID NO: 24551 - DNA, 110 bp, synthetic construct
  source 1..110: mol_type = other DNA
gtgtctgggagcctttccggatcaccacgcagagagctgctggcttcctggaagagggtgcactaacttctgaggacagactgtcaggggccaggagagccctgagaaga

SEQ ID NO: 24552 - DNA, 110 bp, synthetic construct
  source 1..110: mol_type = other DNA
gtgcagtgcaagtgttaacagagcagcctcaccaaggtcactgccaggggaagggctaattcaggcagactctcatgtaaacgtacagggcaccaaagtcctggcataat

SEQ ID NO: 24553 - DNA, 110 bp, synthetic construct
  source 1..110: mol_type = other DNA
ctaattcaggcagactctcatgtaaacgtacagggcaccaaagtcctggcataatcatttcaatctgagaaccatctgcatgcaaacatacttgagggcatgctgccaag

SEQ ID NO: 24554 - DNA, 110 bp, synthetic construct
  source 1..110: mol_type = other DNA
tagccagcgcatctgcttttgagattaaaagtttctttgtagtcagtttttgtaaatgacccatggtcttttttaaaaaataaatgtagatttacttgttgagttaggtt

SEQ ID NO: 24555 - DNA, 110 bp, synthetic construct
  source 1..110: mol_type = other DNA
caggaagtctgacaagagcaaactcctgcaacctgatttcccatcaataatagatctgtgtaaagttagctccacttgcccatggtccccttgaacagtgctcagaaggc

SEQ ID NO: 24556 - DNA, 110 bp, synthetic construct
  source 1..110: mol_type = other DNA
ctgtgtaaagttagctccacttgcccatggtccccttgaacagtgctcagaaggcattccaaggagcggcctctctctgtggcctgggggtagggcgagccacatcctgg

SEQ ID NO: 24557 - DNA, 110 bp, synthetic construct
  source 1..110: mol_type = other DNA
taacaagcctctagaagaggctggaaaacacaaagccagtgttagttcctattggctttgcttagcaagtctgcgcaaggaagagtcaagctcaaacaacaagtggctgg

SEQ ID NO: 24558 - DNA, 110 bp, synthetic construct
  source 1..110: mol_type = other DNA
gcagcaagacaaagaaagcatggggggaagagagaagtggggagaaagggagagagagcatcggtgtctccgggaacccaggcggccacctagcccaagcgggtttaggt

SEQ ID NO: 24559 - DNA, 110 bp, synthetic construct
  source 1..110: mol_type = other DNA
gagcatcggtgtctccgggaacccaggcggccacctagcccaagcgggtttaggtaacacctgtctttccctccctccttctttctccacctgatgaagcttcttccctt

SEQ ID NO: 24560 - DNA, 110 bp, synthetic construct
  source 1..110: mol_type = other DNA
ggtaccggagggtttcgcagtgagctggcggcagcagtttcagtgcttcatggagggtttctaattgctcatcaggatccatgatttctacaatagcaagaggaatacca

SEQ ID NO: 24561 - DNA, 110 bp, synthetic construct
  source 1..110: mol_type = other DNA
ggtttctaattgctcatcaggatccatgatttctacaatagcaagaggaataccacggagagaaaaattggtacaaatggtccatttaattctattcttgtggtgatctc

SEQ ID NO: 24562 - DNA, 110 bp, synthetic construct
  source 1..110: mol_type = other DNA
tgaaacagaggagggacagcccctctgggcagcagcacagaatcaggggcgttccgtgtgtatgggggcagtggacagctggcgaagtggccgagatgctaccagtttct

SEQ ID NO: 24563 - DNA, 110 bp, synthetic construct
  source 1..110: mol_type = other DNA
gtgtgtatgggggcagtggacagctggcgaagtggccgagatgctaccagtttctacaactggccactacacgtgatcattcaggggctgtgaggcgcaccctcaccaca

SEQ ID NO: 24564 - DNA, 110 bp, synthetic construct
  source 1..110: mol_type = other DNA
tttattgaatatctactatgctccagatattagtataactgggaaataccagagaagtgggccctatgctatattcaaaaggaacagatatgaagcaaatagatgtatat

SEQ ID NO: 24565 - DNA, 110 bp, synthetic construct; identical to SEQ ID NO: 24564
  source 1..110: mol_type = other DNA

SEQ ID NO: 24566 - DNA, 110 bp, synthetic construct
  source 1..110: mol_type = other DNA
aaggagttccctgttaatttttcttctaaatgccactgagtaaatttaaactatgtggttaagtgggtggaactacaacacagtgcaaagaggggaggagagaagaggag

SEQ ID NO: 24567 - DNA, 110 bp, synthetic construct
  source 1..110: mol_type = other DNA
agggctgccttgcaaagtgataagcccctgacccctgagaggatctgggtaaacatgagtttagggacatattagcaaagaacgctaaatgtggggagtgggggattatc

SEQ ID NO: 24568 - DNA, 110 bp, synthetic construct
  source 1..110: mol_type = other DNA
tgagtttagggacatattagcaaagaacgctaaatgtggggagtgggggattatccatgactgctctgtttcatttcatattccgaaaacaaacaaacaactgtttaaaa

SEQ ID NO: 24569 - DNA, 110 bp, synthetic construct
  source 1..110: mol_type = other DNA
actctgggattcgatgctgggattgggactctgcaaactacgtttcttctttgtcagccaacgtcatgagaagttccaccgagaggatgccatggagggaagctgtaagg

SEQ ID NO: 24570 - DNA, 110 bp, synthetic construct
  source 1..110: mol_type = other DNA
agccaacgtcatgagaagttccaccgagaggatgccatggagggaagctgtaaggtaggagaagcgaagagccgaatgctgcttccttatttgctggctatccttttcat

SEQ ID NO: 24571 - DNA, 110 bp, synthetic construct
  source 1..110: mol_type = other DNA
aagccatccaccaccgtggccttccctggcccagcctgcctgcacagaggaaacgccctacacctgtggagcaagctgcccagcaccacttgccctcgggaagagtgtgg

SEQ ID NO: 24572 - DNA, 110 bp, synthetic construct
  source 1..110: mol_type = other DNA
aatactacttcagtgatatacatataataataaacttacacatgggtactataagaacacaggggaataaggagtatactggagctagtcatctctcctcagcactcata

SEQ ID NO: 24573 - DNA, 110 bp, synthetic construct
  source 1..110: mol_type = other DNA
ctactgtggacactactgcttttcctagcttgcacactcaagatttaaattcacattgaatattccttttgtactcaatagggtgattagctgtcctgatctgcctggga

SEQ ID NO: 24574 - DNA, 110 bp, synthetic construct
  source 1..110: mol_type = other DNA
cccagcaagatctacactctgccaagccacagtgggtctcactttcagtctcagatcctgaaaggccagctttggccaaaaacccagctcttctgtctttggaggggagg

SEQ ID NO: 24575 - DNA, 110 bp, synthetic construct
  source 1..110: mol_type = other DNA
tcctgaaaggccagctttggccaaaaacccagctcttctgtctttggaggggaggtcagacttggttcccagttccctcaagaagatgtaacttgctcgtctgcaaggtc

SEQ ID NO: 24576 - DNA, 110 bp, synthetic construct
  source 1..110: mol_type = other DNA
caaaaacttgtcttttgtgggccccctggaccattgccagggggctttggggaagttaaggagccagccccacactagcttattttctgggagtatcacaggctctgcag

SEQ ID NO: 24577 - DNA, 110 bp, synthetic construct
  source 1..110: mol_type = other DNA
ttaaggagccagccccacactagcttattttctgggagtatcacaggctctgcagccttctcttccagccctaaatctaatcatcctacccatctctctatgacagaatt

SEQ ID NO: 24578 - DNA, 110 bp, synthetic construct
  source 1..110: mol_type = other DNA
gtaaattaacacagagatagtcttccaggatttttaggcttgaaaaatcctagctctacttgtaggttaaagggctttatttttagttaagaagttcaagaattggaccc

SEQ ID NO: 24579 - DNA, 110 bp, synthetic construct
  source 1..110: mol_type = other DNA
ctacttgtaggttaaagggctttatttttagttaagaagttcaagaattggacccagcaggtaagggctggtatgtcaggctgaggggggctgttggaggcttctgggag

SEQ ID NO: 24580 - DNA, 110 bp, synthetic construct
  source 1..110: mol_type = other DNA
aaagccctttactaataaatgaagatatttctgcagtttggggggttagacctatttttgtagaaggcaacatattcaaaatgccttcctcgttattcatttatctattt

SEQ ID NO: 24581 - DNA, 110 bp, synthetic construct
  source 1..110: mol_type = other DNA
agcaggagagaatgtgtgggtaaatcctttcatctgctggaattattaacaagagtttacctgtcttttcaaatgttctttcattagagcttctgagttttctattcagg

SEQ ID NO: 24582 - DNA, 110 bp, synthetic construct
  source 1..110: mol_type = other DNA
tttacctgtcttttcaaatgttctttcattagagcttctgagttttctattcaggtaaaataagatgaacgaataggccatgactgaactttgactttctagttacgaat

SEQ ID NO: 24583 - DNA, 110 bp, synthetic construct
  source 1..110: mol_type = other DNA
ttactcttggcactcccaattcactttctaccttccagtgtttaagtgaaatcgcttagcttacactaataagagaaggcagcacaacccaatggtgttaggttagagat

SEQ ID NO: 24584 - DNA, 110 bp, synthetic construct
  source 1..110: mol_type = other DNA
ttctcctcctttgcatttactcccccactgtcaggacagcctggtgttcacctatagactcacccagatctcggctttctcctgtcagctcaggttctgtcctttccacg

SEQ ID NO: 24585 - DNA, 110 bp, synthetic construct
  source 1..110: mol_type = other DNA
tacttaagaagcttaagaagcccttcctgaagcaaagccagagccatgcatgtccaaggcttccccaggacacagtaaagagcttaggaaagtaatccagctgttttcat

SEQ ID NO: 24586 - DNA, 110 bp, synthetic construct
  source 1..110: mol_type = other DNA
tggatttgggcggcaggacaaatgaaagtctgttaccagttgtagtgtttctacggaaaaaaaaaaaaaaatctatggagactttttaagttaacacagaatgactttta

SEQ ID NO: 24587 - DNA, 110 bp, synthetic construct
  source 1..110: mol_type = other DNA
agccacctggcaaatgtaggtgttattcagaggaaaaactggtggcggaattcagcaggaaacaattccgaatatcaatgcacaccctctgggaggctggctcagctatc

SEQ ID NO: 24588 - DNA, 110 bp, synthetic construct
  source 1..110: mol_type = other DNA
caggaaacaattccgaatatcaatgcacaccctctgggaggctggctcagctatcctctgtagaaaagaggatgcccctcgcaggttagacaattgccttccaaataaaa

SEQ ID NO: 24589 - DNA, 110 bp, synthetic construct
  source 1..110: mol_type = other DNA
acactacatgattcattatgagtcatagtcatgaatgaactagatcttaaatctctgcacttttcctttaaaattttgtcatccaaattcctgtcataactgtcataact

SEQ ID NO: 24590 - DNA, 110 bp, synthetic construct
  source 1..110: mol_type = other DNA
tgcacttttcctttaaaattttgtcatccaaattcctgtcataactgtcataactgtcatagtctggggttagtagatgaaaactgttacatttagaacggacaaccaac

SEQ ID NO: 24591 - DNA, 110 bp, synthetic construct
  source 1..110: mol_type = other DNA
gtctctcatcacctccaacctcaaagaagctggtatccttcactgctggtcccaggactcagagctcaaggaagacatctgggaggagctgtgaactcattcttaatgcc

SEQ ID NO: 24592 - DNA, 110 bp, synthetic construct
  source 1..110: mol_type = other DNA
gactcagagctcaaggaagacatctgggaggagctgtgaactcattcttaatgccaatcagacgaggcagcagctagatctgcaataacggtcataagctgcaagggagc

SEQ ID NO: 24593 - DNA, 110 bp, synthetic construct
  source 1..110: mol_type = other DNA
gggggcgggggttcagtcctcagataatacattctactcctggccatatgcattgtcctctgtagcaaacatggtataccaagctcagagaatcataaatctagaagctg

SEQ ID NO: 24594 - DNA, 110 bp, synthetic construct
  source 1..110: mol_type = other DNA
ttattagatccctagcctgggaacttccatctgccacgtgtgcaaacctaaaaagacaaaaataaaatatctaagacttacctacttttagctacatgccatttacaaat

SEQ ID NO: 24595 - DNA, 110 bp, synthetic construct
  source 1..110: mol_type = other DNA
aaacctgaggccttgaggtatggaagtggaaaggaatttttcccaaatcggtttgacaaaagccagcctggtgtttttaaacacactggcttacctttgcgcacccactc

SEQ ID NO: 24596 - DNA, 110 bp, synthetic construct
  source 1..110: mol_type = other DNA
tttgtgcttggatttctgcttccacctcattggtctccccttccctttccagtcggctcagcatctagcggttacctaactagagctcagagtggaactgaatttaggaa

SEQ ID NO: 24597 - DNA, 110 bp, synthetic construct
  source 1..110: mol_type = other DNA
ttcagaaaatatctattgagccctgattaggtcccagacattgtttcaaacactatctcctcagcttggtcttctccttacacctccccccccataaaaagctcatcaca

SEQ ID NO: 24598 - DNA, 110 bp, synthetic construct
  source 1..110: mol_type = other DNA
attagggagagtcctggctggagatggggacaaactatgtaacttccgaggtcccttctagtgatgaaaatgcaccagaaaacaattcagtgacttctgcccatttaagg

SEQ ID NO: 24599 - DNA, 110 bp, synthetic construct
  source 1..110: mol_type = other DNA
ttctagtgatgaaaatgcaccagaaaacaattcagtgacttctgcccatttaaggcctatcactggaagagagttctgttctaagaaagcaaatgcagcccctaggatta

SEQ ID NO: 24600 - DNA, 110 bp, synthetic construct
  source 1..110: mol_type = other DNA
ataatgccattagtcaaaaagaataaagctgttgataactatgaaaactcaaagtttatttcacatggctgtgggtagaaaaaggtttgatggttactttagatacacac

SEQ ID NO: 24601 - DNA, 110 bp, synthetic construct
  source 1..110: mol_type = other DNA
tcttagtcagagggacatttatttcccattgtctaggattagattcagagaactgttgaatcttgaaggttaactttgttaacagtgctaagtgaggtatgatacttgtg

SEQ ID NO: 24602 - DNA, 110 bp, synthetic construct
  source 1..110: mol_type = other DNA
ctacctggttcttgtcgtttcagcctgtttccactgtgtttcttttaaaattacagttgatttacagtgttgaaccaatccgctctacagcaaagtgacccagtcatata

SEQ ID NO: 24603 - DNA, 110 bp, synthetic construct
  source 1..110: mol_type = other DNA
gggaaagagaggacttgagagtaactcaaagatttttggcttgaacagctgatagatggtggtgacttttatttggggaagaagaggggacaagcaggtttgaaatgcta

SEQ ID NO: 24604 - DNA, 110 bp, synthetic construct
  source 1..110: mol_type = other DNA
atggtggtgacttttatttggggaagaagaggggacaagcaggtttgaaatgctatttaagtagagatgttatgtaggcttttaaatgtacgattgcgaactttagagga

SEQ ID NO: 24605 - DNA, 110 bp, synthetic construct
  source 1..110: mol_type = other DNA
ttacagagccatttactagccgagtttgtacacagctaaggattcttccttattaacattacatagcatggtggttaaatacttggaatttggctcctcacctcttgggt

SEQ ID NO: 24606 - DNA, 110 bp, synthetic construct
  source 1..110: mol_type = other DNA
cacatgggcagtgcatgccctgttgttgcctcctgccatcccagagagagccatcagttcctcttttatggggtcagcagggtgtagctctgacttatagagagtggtga

SEQ ID NO: 24607 - DNA, 110 bp, synthetic construct
  source 1..110: mol_type = other DNA
ctaggacctaaagtaacaggaatttagggggaacattgccctcatggagcttaaagccaggtggaggagacagcaaagcaaaaggcaattcaaaactctgttaggagggg

SEQ ID NO: 24608 - DNA, 110 bp, synthetic construct
  source 1..110: mol_type = other DNA
aaaaggccatttcatagtcgtggacttgacctgaaatagagcaaaggattacactgattctaaagtcaatttattctcctggagctcattatcataataataaattagta

SEQ ID NO: 24609 - DNA, 110 bp, synthetic construct
  source 1..110: mol_type = other DNA
ttgctaatttatgcaaatgatccttaacctgtaactgcctggaatctattttaccatttctgtcttttggcagctagaagacgagatgcaggaaagaaatccattaacac

SEQ ID NO: 24610 - DNA, 110 bp, synthetic construct
  source 1..110: mol_type = other DNA
ttctttgtcaagatcccatatagccagggaacccagatgcttgtacacatgccttcacttcccctcatgggagcaattatgggccacaaatttctctcttggcaccgagc

SEQ ID NO: 24611 - DNA, 110 bp, synthetic construct
  source 1..110: mol_type = other DNA
ccaccaggtaagtccctaaggcaatttcttttcttttacacaaatgacttgtgttcagctgtattccatgcttttgcccaatttgatctgttcagttcatcctttcccca

SEQ ID NO: 24612 - DNA, 110 bp, synthetic construct
  source 1..110: mol_type = other DNA
ttccaaactctggaaaattgacctcatccttcccagaagtttgttcttcttcccttcacctctggtctctagcttcttagaagcaacactattcaaggagtatttaaata

SEQ ID NO: 24613 - DNA, 110 bp, synthetic construct
  source 1..110: mol_type = other DNA
atctcctttcattttcaagtagaacaccttactttctggttatatagcattggaaattaggtatttgtccaaaagctccagaacatcattaaagatgtcctgagctctgc

SEQ ID NO: 24614 - DNA, 110 bp, synthetic construct
  source 1..110: mol_type = other DNA
agcattggaaattaggtatttgtccaaaagctccagaacatcattaaagatgtcctgagctctgcctcaatcttctcacggtactctttgcccatctgctgctgctcctg

SEQ ID NO: 24615 - DNA, 110 bp, synthetic construct
  source 1..110: mol_type = other DNA
tgtattgaaatgggcatatatcagtaatacttgttgcctgaattttaacttggcactaattttaaagctgaacaaatgggtattgtaaattgaatctgcagacatgttgg

SEQ ID NO: 24616 - DNA, 110 bp, synthetic construct
  source 1..110: mol_type = other DNA
ctaattttaaagctgaacaaatgggtattgtaaattgaatctgcagacatgttggaatgaataggatgtcatgggggtctaggtgacaaaaatgctttgactcttaatat

SEQ ID NO: 24617 - DNA, 110 bp, synthetic construct
  source 1..110: mol_type = other DNA
ttagataactgattaactaagaggcattttcccagctatacatcagccatctatgcatccatagacccaatgagaataacaatcacagacaggagttcccgtcgtggctc

SEQ ID NO: 24618 - DNA, 110 bp, synthetic construct
  source 1..110: mol_type = other DNA
gggaaccactactgcagtcatcctgaccacataaagagtcagaactggactaaccttggtagtaattcatcacaagctaaccgagggaaataaaggggccattatgagtg

SEQ ID NO: 24619 - DNA, 110 bp, synthetic construct
  source 1..110: mol_type = other DNA
ttggtagtaattcatcacaagctaaccgagggaaataaaggggccattatgagtgccttcaaactgaataaaggtaaccaagtgttaggccaagaaacaaagcagaataa

SEQ ID NO: 24620 - DNA, 110 bp, synthetic construct
  source 1..110: mol_type = other DNA
cttttcccctctccttgtctatggaatgctctagtagaacttatttgaatggcatgggattgaacttagagctcaaattctcaggatttggatgtctttaacttttaaag

SEQ ID NO: 24621 - DNA, 110 bp, synthetic construct
  source 1..110: mol_type = other DNA
acttgggtcactgcagaggtgctggttcagtccctggcccagtgcagtggattaaaggatatggtagtgccacaactgaggtataggccacagctgcaatttgggttcag

SEQ ID NO: 24622 - DNA, 110 bp, synthetic construct
  source 1..110: mol_type = other DNA
aggatatggtagtgccacaactgaggtataggccacagctgcaatttgggttcagtcccggcctgggaacttacatatgccatgtgtatggccattttaaaaagtaaaaa

SEQ ID NO: 24623 - DNA, 110 bp, synthetic construct
  source 1..110: mol_type = other DNA
ttcccaccagttactaagtaagagtaatgttgaggagggggacatgtggaagaataatcatgttaaagagaagctgtaaaaccctgtctcttatccttggtccagtgtgt

SEQ ID NO: 24624 - DNA, 110 bp, synthetic construct
  source 1..110: mol_type = other DNA
aatcatgttaaagagaagctgtaaaaccctgtctcttatccttggtccagtgtgtagctgtgtgtggaaaagagcttcagtttatttgggtgcctatctgtaacatattt

SEQ ID NO: 24625 - DNA, 110 bp, synthetic construct
  source 1..110: mol_type = other DNA
accactttatactggtatattctgtaccagtgtatacattcaatgacattgtagagctatgctacacagatcaacttatcttaagcactgctgagagatgcatttaagat

SEQ ID NO: 24626 - DNA, 110 bp, synthetic construct
  source 1..110: mol_type = other DNA
gctatgctacacagatcaacttatcttaagcactgctgagagatgcatttaagatgcaagaacattcagaattaaataagaaaagatgcacaaccctaaattacctggga

SEQ ID NO: 24627 - DNA, 110 bp, synthetic construct; identical to SEQ ID NO: 24625
  source 1..110: mol_type = other DNA

SEQ ID NO: 24628 - DNA, 110 bp, synthetic construct; identical to SEQ ID NO: 24626
  source 1..110: mol_type = other DNA

SEQ ID NO: 24629 - DNA, 110 bp, synthetic construct
  source 1..110: mol_type = other DNA
agaattccagagccacagatgctgggatgctggtttctgtcagagttactgagagcctaacccttgatgtttcattcctgaccgaaaatacatcacccccagcggggtct

SEQ ID NO: 24630 - DNA, 110 bp, synthetic construct
  source 1..110: mol_type = other DNA
cctaacccttgatgtttcattcctgaccgaaaatacatcacccccagcggggtctccttctgcggccgtgttcaggttccagagggctgactctcctttatggggtcaaa

SEQ ID NO: 24631 - DNA, 110 bp, synthetic construct
  source 1..110: mol_type = other DNA
ttgcacggttgtgattggcagaggtggatttaaacctgaggaacctggttctatagcctggttcctaatcactgtactgccaagccaaaggattttcctttcttgcatca

SEQ ID NO: 24632 - DNA, 110 bp, synthetic construct
  source 1..110: mol_type = other DNA
ccagtggtcctgtactagcactgaccagtaggcacaatcgcctctaccaactctgggataaccatagtccctagctaaactctcctaggaaatctgaagcagctaaagga

SEQ ID NO: 24633 - DNA, 110 bp, synthetic construct
  source 1..110: mol_type = other DNA
taatcttgtggattcccaaagctactttaagagcagtttttgcaaaggggccttgttcttaaactacaagggagaaatgaccaaacagctaagtataaatgatcactgtt

SEQ ID NO: 24634 - DNA, 110 bp, synthetic construct
  source 1..110: mol_type = other DNA
tgttacagctttctaaatggtgtagatttaagcaaatccctctttacctttatgtttccagatcagagcatggccagcttcctgggcacgtgacctctgcaatcacacag

SEQ ID NO: 24635 - DNA, 110 bp, synthetic construct
  source 1..110: mol_type = other DNA
tatcccagtatcacaaggacaggagctctccctgtggtaaggcctgattctggcctgggacttatggaggccattctaaaccctacgttagggagaggagagtcctaaag

SEQ ID NO: 24636 - DNA, 110 bp, synthetic construct
  source 1..110: mol_type = other DNA
ctcagagatacttgggtctaaatcttgggctctttgcaccacactctgcaactctgaagttagccatttttgctcggggccactgcccatgctgttgttaaatgcacctc

SEQ ID NO: 24637 - DNA, 110 bp, synthetic construct
  source 1..110: mol_type = other DNA
aaacacaaaccaaaactacaaggagacaccacttcacacccgttggaaagctactgtcaacaaagaaataaacaaaaaacaaaataacaagtgttgtctggaatgtgcag

SEQ ID NO: 24638 - DNA, 110 bp, synthetic construct
  source 1..110: mol_type = other DNA
acaaatactaaaatgcatttcttaaacttggagatattggagctttgtcgctgtgtctttttggtttaaaacggtttgtttgacatttctctgcaaagcaataacttatg

SEQ ID NO: 24639 - DNA, 110 bp, synthetic construct
  source 1..110: mol_type = other DNA
cttttgctctcatatatcagtgcgtaaactcagatctgagagaggagctcaaggtctttgttaaacaaacagctatgactgagttagacgctgtctgtatagcagataac

SEQ ID NO: 24640 - DNA, 110 bp, synthetic construct
  source 1..110: mol_type = other DNA
cttcgcaaacactctttgacatcttaggctcggtgagtttggtcttcccagtttagacatatccctcccagttttacaaagctttctactttcttgagacccccagagtg

SEQ ID NO: 24641 - DNA, 110 bp, synthetic construct
  source 1..110: mol_type = other DNA
ctattccagtggtagtcacaaagcagcaggaggtgagttgcaccgtgcagatgcagaggaatttttacagctatcgttagataacatgggtgtgaacagttagccagttg

SEQ ID NO: 24642 - DNA, 110 bp, synthetic construct
  source 1..110: mol_type = other DNA
gaggaatttttacagctatcgttagataacatgggtgtgaacagttagccagttgctaaatattcatcatctagaatgattctcttaaaatttgtcatctttacctgaaa

SEQ ID NO: 24643 - DNA, 110 bp, synthetic construct
  source 1..110: mol_type = other DNA
actgcagttccacagcagtggtcatggtcacggagaagcatttggcagtaagttgccctcctgtctccacaagtcatccctgtttccctgtgcctggagaatcgatcagc

SEQ ID NO: 24644 - DNA, 110 bp, synthetic construct
  source 1..110: mol_type = other DNA
taaattctctcatgcaccttcagtgactactgggcatggcagatgatgttttcctatggagcagcctcctattatactatagctctcatagatttaagtggggaaaaaaa

SEQ ID NO: 24645 - DNA, 110 bp, synthetic construct
  source 1..110: mol_type = other DNA
tctatgatctgagcaggttctgtagtaaagaacgaaaacgtggatgagttgtgctgatgattccacggaaataaggaatggcttatgaaactgtctccacagaataactt

SEQ ID NO: 24646 - DNA, 110 bp, synthetic construct
  source 1..110: mol_type = other DNA
gatgattccacggaaataaggaatggcttatgaaactgtctccacagaataactttgaaagggactagcttacacaccttgtactaacaggaaagcataacacctctcaa

SEQ ID NO: 24647 - DNA, 110 bp, synthetic construct
  source 1..110: mol_type = other DNA
ctaacggtgcacaacagtcggaaatgcctttaataaacctgggaggcccttccatcacctgaaattcaaagaagctatctgcgtattttctcttcaagactaattcttcc

SEQ ID NO: 24648 - DNA, 110 bp, synthetic construct
  source 1..110: mol_type = other DNA
cacctgaaattcaaagaagctatctgcgtattttctcttcaagactaattcttccttcaaactgcttagagtcactttgcttttctttgccatcagagccaacatttcag

SEQ ID NO: 24649 - DNA, 110 bp, synthetic construct
  source 1..110: mol_type = other DNA
tagggccaagggcagagaactagaacagctgagcgctgtacctagaaatccatttgagctccactataactgtcacacactggagtcaacagtgttgaccaactaaaacc

SEQ ID NO: 24650 - DNA, 110 bp, synthetic construct
  source 1..110: mol_type = other DNA
gcccagatgtcaccaacctgaagttattgcatacaagtcttgaactctttaaaaaccaaggtattctccaaaacaatgtttctcaagctttaatgtgcataaaaatgacc

SEQ ID NO: 24651 - DNA, 110 bp, synthetic construct
  source 1..110: mol_type = other DNA
ccaaggtattctccaaaacaatgtttctcaagctttaatgtgcataaaaatgacctgagaatcttgctaagatgccagttctgattcagtaggtctggggcagagtctga

SEQ ID NO: 24652 - DNA, 110 bp, synthetic construct; identical to SEQ ID NO: 24650
  source 1..110: mol_type = other DNA

SEQ ID NO: 24653 - DNA, 110 bp, synthetic construct; identical to SEQ ID NO: 24651
  source 1..110: mol_type = other DNA

SEQ ID NO: 24654 - DNA, 110 bp, synthetic construct
  source 1..110: mol_type = other DNA
ataatcactaccaaggtaccaccaggcatgcagactcctgagccaaagttgacctgcaaaatgcaggccaactacctaccctcagtctattacctgctaccactatggtc

SEQ ID NO: 24655 - DNA, 110 bp, synthetic construct
  source 1..110: mol_type = other DNA
gagaaattggaacacttgtgtgttgttggtgggaatgtaatatggtacagctactatgaaaaacattttggtgtttccttaaagagttagaagaaaaatgccctatggga

SEQ ID NO: 24656 - DNA, 110 bp, synthetic construct
  source 1..110: mol_type = other DNA
ctgtcaaacccacagccaatatttttggtggggagaggaattttatttattttcaattccatgtggcatgtaaataaaattcaaaacagagtatgatttagtcatttttc

SEQ ID NO: 24657 - DNA, 110 bp, synthetic construct
  source 1..110: mol_type = other DNA
gattcagcagttgatttccaaccctacttctgagttggatccatccaggtcagaactagacagcagggattctatagatgaattccaggtctgggtggtgtttggaataa

SEQ ID NO: 24658 - DNA, 110 bp, synthetic construct
  source 1..110: mol_type = other DNA
atataggttgcatgtgtgtcttagtgtgctcaatctgccataataaaataccacaggctgagtagcttaaacaacagaagtaaatgtatcacaactatggaggctggaag

SEQ ID NO: 24659 - DNA, 110 bp, synthetic construct
  source 1..110: mol_type = other DNA
ttccttctcattataacagcagtacagctttatcacagacattctgagaagcacaggaaatgataaaaattaaaatgaaaatctatacttccattgcgtggggataacta

SEQ ID NO: 24660 - DNA, 110 bp, synthetic construct
  source 1..110: mol_type = other DNA
tcaacctgctagtcctccagtgtctttatagtgattagctctatatctaaaatgtatatttaaaaaaaaaaaaaagaaatcggagttcctgtcatggcgcagtggaaaca

SEQ ID NO: 24661 - DNA, 110 bp, synthetic construct
  source 1..110: mol_type = other DNA
ccttattaacaactaggagggatctctgggtaggcccgcatttcactcatagcacatgggaaatattctcctgccaccactccaatccaggctgcaggaaaacctgtttc

SEQ ID NO: 24662 - DNA, 110 bp, synthetic construct
  source 1..110: mol_type = other DNA
gtagacttgaatcatatggtagctcttatttttaatttttttaggaacttccatactgttttccatagtagctacaccaatttccactcctgcaaacagtgcaagaggat

SEQ ID NO: 24663 - DNA, 110 bp, synthetic construct
  source 1..110: mol_type = other DNA
ctgttttccatagtagctacaccaatttccactcctgcaaacagtgcaagaggattcccttttctccacagcctctccagtatgtattatttgcagagcttttgacgatg

SEQ ID NO: 24664 - DNA, 110 bp, synthetic construct
  source 1..110: mol_type = other DNA
cgagtgtgtctgtgatatttttcttaacaactctttctcttcgttcctggcttggattgtttttcttgcattttttacttgtcatcctgtctctagctccgtaagccaat

SEQ ID NO: 24665 - DNA, 110 bp, synthetic construct
  source 1..110: mol_type = other DNA
attgtttttcttgcattttttacttgtcatcctgtctctagctccgtaagccaatacccagtcttgaagaccttcctccatcaatcgaagaagtaacatgccggtcttct

SEQ ID NO: 24666 - DNA, 110 bp, synthetic construct
  source 1..110: mol_type = other DNA
tggaaatgccaccatcaaacagctgcaggaggtatcctttgggcatgagctccgtgaccctgcgacagcatctctgtgaccctgccaggagccctggtcctaggagaagc

SEQ ID NO: 24667 - DNA, 110 bp, synthetic construct
  source 1..110: mol_type = other DNA
atgaggggaggggcaaataacttgaacagctatttacaaacagaaaatatccaatggtcactcatatataaaatgatgctcaacttcactaagtgatcaaggtatgcaaa

SEQ ID NO: 24668 - DNA, 110 bp, synthetic construct
  source 1..110: mol_type = other DNA
ctccttactctttaacagaaaagcattctttggtagctgagtaccaataaatcttaaggaacatctctactctcaatcatttgtacttgaatgctcccaagtctacttcc

SEQ ID NO: 24669 - DNA, 110 bp, synthetic construct
  source 1..110: mol_type = other DNA
aatattgatcatagaagtaaaaataatccttaaagctttgttcctgaagctccgaactctgctagattatgttatctcactctggaggtgccaaggaatgaaagaccagg

SEQ ID NO: 24670 - DNA, 110 bp, synthetic construct
  source 1..110: mol_type = other DNA
tccagttacctatatttaggaggcacttgggagaagtttgggttagaaagagaatggggccagatatttatggacatctaaggaagtgcttaacttttaagcaactctct

SEQ ID NO: 24671 - DNA, 110 bp, synthetic construct
  source 1..110: mol_type = other DNA
tgcaagtcccaatgtaatctagtttatattcctctctctcttttttaaggccgcacctgctactgatggaagttcccaggctaggggttaaatcaaccctataactgtca

SEQ ID NO: 24672 - DNA, 110 bp, synthetic construct
  source 1..110: mol_type = other DNA
aaggtccctcctggccacaggagacctttcaggacagtgagcttcccctagcaaagggcaatgtctgtagatggagctggagcttttgctttgcctgctgcttagatgga

SEQ ID NO: 24673 - DNA, 110 bp, synthetic construct
  source 1..110: mol_type = other DNA
cctcctcaagattttcttgctacattgcatttgctcattcccaatttacttttatcctcacttgattttgcttcaacacttaatagcttcaacagatattctctggctga

SEQ ID NO: 24674 - DNA, 110 bp, synthetic construct
  source 1..110: mol_type = other DNA
ccctgaagggtaccatttttttttctttttcaaatcttacttagctatttatggacttttattcatctacataaattgtagcaagttttccacatgcctcttcaaaaatc

SEQ ID NO: 24675 - DNA, 110 bp, synthetic construct; identical to SEQ ID NO: 24674
  source 1..110: mol_type = other DNA

SEQ ID NO: 24676 - DNA, 110 bp, synthetic construct
  source 1..110: mol_type = other DNA
acttagacaattacatcttgttcatataaactgactttatatctcaactggaaggagcacacttccatttaatttgtcttgctatcctaattggctttgcaggctttcta

SEQ ID NO: 24677 - DNA, 110 bp, synthetic construct
  source 1..110: mol_type = other DNA
tcgcagtgtaaaaatgtggtttcatattatttctagctcttaaaatgttaatgtaatacatagctgtgtaattttacaggacggtttaattcccttgaaaatatggagct

SEQ ID NO: 24678 - DNA, 110 bp, synthetic construct
  source 1..110: mol_type = other DNA
gtggtttcatattatttctagctcttaaaatgttaatgtaatacatagctgtgtaattttacaggacggtttaattcccttgaaaatatggagctcagtgaagagtccaa

SEQ ID NO: 24679 - DNA, 110 bp, synthetic construct; identical to SEQ ID NO: 24677
  source 1..110: mol_type = other DNA

SEQ ID NO: 24680 - DNA, 110 bp, synthetic construct; identical to SEQ ID NO: 24678
  source 1..110: mol_type = other DNA

SEQ ID NO: 24681 - DNA, 110 bp, synthetic construct
  source 1..110: mol_type = other DNA
tcatatgctgtgggtgtggccctaaaaggacaaaaaaaaaaaaaaaagcaatttgaaaaagtagtgaataactacagctctttgtattatatgtatgttcccttcttacc

SEQ ID NO: 24682 - DNA, 110 bp, synthetic construct
  source 1..110: mol_type = other DNA
aaaaagtagtgaataactacagctctttgtattatatgtatgttcccttcttaccccagagttataatataattcaaatgcatctcagagttcccattatgctcagcaag

SEQ ID NO: 24683 - DNA, 110 bp, synthetic construct
  source 1..110: mol_type = other DNA
tctagaaaatctgaataaagcagaagaatgaagtggctaatgtgacttagaggtttaccaggttcactttcaagaacaactagttgtgaattcctggcttgggaaatcac

SEQ ID NO: 24684 - DNA, 110 bp, synthetic construct
  source 1..110: mol_type = other DNA
taccaggttcactttcaagaacaactagttgtgaattcctggcttgggaaatcacttttaactgggataagaggcacaagatgggataggagaggaactgttgcaatgtt

SEQ ID NO: 24685 - DNA, 110 bp, synthetic construct
  source 1..110: mol_type = other DNA
atttatcagatggttagaaaaagaaatttagtcagttcccattatttgtagtgcttatgtctttaacattgccacggacattaaattagtgaataccgagacattgttcc

SEQ ID NO: 24686 - DNA, 110 bp, synthetic construct
  source 1..110: mol_type = other DNA
tatgtctttaacattgccacggacattaaattagtgaataccgagacattgttcctaaggaaaacacaggattaggttcctgtaggtctctggttacatcttcatcaaca

SEQ ID NO: 24687 - DNA, 110 bp, synthetic construct
  source 1..110: mol_type = other DNA
aacagtctgtttgggtcttttgcccatttttctttttctttttttgtccccccactctcaccccagttaacatatatcttagcgatctttccagatcatttttcttacca

SEQ ID NO: 24688 - DNA, 110 bp, synthetic construct
  source 1..110: mol_type = other DNA
gcccagagcagtgtcccaaacaaagtttaccttacaaagctcagagagaaccatttgaaaattctcattgctgatgtttcagatgtattagcatagttgtgagaagttat

SEQ ID NO: 24689 - DNA, 110 bp, synthetic construct
  source 1..110: mol_type = other DNA
tgaaaattctcattgctgatgtttcagatgtattagcatagttgtgagaagttattcttttctctgaagagaatatctcaaggcaacctcatcgataagtccagattgaa

SEQ ID NO: 24690 - DNA, 110 bp, synthetic construct
  source 1..110: mol_type = other DNA
tttctgctttctagcttccaaaccttgtcaagaataaaattatctttaaaataaactgttccacaccatccagtgggggctcagatgtcaataacatgtctaaagacaga

SEQ ID NO: 24691 - DNA, 110 bp, synthetic construct
  source 1..110: mol_type = other DNA
ctgttccacaccatccagtgggggctcagatgtcaataacatgtctaaagacagaatgaaacaatcagaagagaagagggatcagcagagaaaacaagggtgggaaagtg

SEQ ID NO: 24692 - DNA, 110 bp, synthetic construct; identical to SEQ ID NO: 24690
  source 1..110: mol_type = other DNA

SEQ ID NO: 24693 - DNA, 110 bp, synthetic construct; identical to SEQ ID NO: 24691
  source 1..110: mol_type = other DNA

SEQ ID NO: 24694 - DNA, 110 bp, synthetic construct
  source 1..110: mol_type = other DNA
aattagcaaaatctgcatttatttggtattatcaaaaccacccacatttaacacagttatttagcaaaagatttaggaactgcttctcattagctgagataaattagcag

SEQ ID NO: 24695 - DNA, 110 bp, synthetic construct
  source 1..110: mol_type = other DNA
gttatttagcaaaagatttaggaactgcttctcattagctgagataaattagcaggatatttatggatgatattaaactgttactttcctgatcattttatagaggtctc

SEQ ID NO: 24696 - DNA, 110 bp, synthetic construct
  source 1..110: mol_type = other DNA
cactgatgagttcataaagaaaatgtgatatagctacaccatggaatattcttcagccacaaaaatgaatgatatcactgactcatgccatgacaagatgaaccttgaaa

SEQ ID NO: 24697 - DNA, 110 bp, synthetic construct
  source 1..110: mol_type = other DNA
tcaaaggcatagttttgaagagcagtcaagacaattccaagtccttgctttttctgttataaatccccacctagctgaaacacacattgccagttattgcattagctttc

SEQ ID NO: 24698 - DNA, 110 bp, synthetic construct
  source 1..110: mol_type = other DNA
acctgtagaacacatcaagcatttatgcgggtaacataaactcatttttgttaacagctatgtaaacttcaatattattagcacatttaaaatcttctgcattggtatct

SEQ ID NO: 24699 - DNA, 110 bp, synthetic construct
  source 1..110: mol_type = other DNA
cttaacacaaccagcaactttgctcagcaccacctccccaaacctgctaaaatgtccttactcccatgagtaaggacagaagtagcagctcatgtaaagcatgactggtg

SEQ ID NO: 24700 - DNA, 110 bp, synthetic construct
  source 1..110: mol_type = other DNA
tttctggaacagccaggcactggccaaggagcaacagacatggtctcccccaccatgtcatcccaatatggtaaccttggtgcaacttttcctccttttcatccattttc

SEQ ID NO: 24701 - DNA, 110 bp, synthetic construct
  source 1..110: mol_type = other DNA
tatacagagatttctgaagtctaatacatatatgcatccaggaaaatagcaacaaattttagtaatcagctaagttcctaattctgcttctctatgtatccttgaatatc

SEQ ID NO: 24702 - DNA, 110 bp, synthetic construct; identical to SEQ ID NO: 24701
  source 1..110: mol_type = other DNA

SEQ ID NO: 24703 - DNA, 110 bp, synthetic construct
  source 1..110: mol_type = other DNA
tggtgaaaatgttggatccttaacccactgtaccacaagggaacttccaacaggaggtgtttctgaaagggctataacatttgccctgtggaaagtagaaaattgaagac

SEQ ID NO: 24704 - DNA, 110 bp, synthetic construct
  source 1..110: mol_type = other DNA
cacagcagaaaatggaactttaagagcattcacaaattgatttggccctttgacaagtctttagaaatggatagaaaatttgaagcttttggtgcttctagggtcgcaaa

SEQ ID NO: 24705 - DNA, 110 bp, synthetic construct
  source 1..110: mol_type = other DNA
attcaacaacatttctctactctgatgctaactcaagtgatttccaggttcaccggggtggggacagttcaatttatagctccctagtaacaatcttctcccagctgttg

SEQ ID NO: 24706 - DNA, 110 bp, synthetic construct
  source 1..110: mol_type = other DNA
atcctaaattattcataccctaacaatgaaaggaattaggtttattaggtcaaaatgacatagagcacactgctgagaacataagtgcttgttaaataattaactggttg

SEQ ID NO: 24707 - DNA, 110 bp, synthetic construct; identical to SEQ ID NO: 24706
  source 1..110: mol_type = other DNA

SEQ ID NO: 24708 - DNA, 110 bp, synthetic construct
  source 1..110: mol_type = other DNA
ggtcatttgcaattttacaatacaattagtgcaggaagtatttcaggaggtgtgagaattcctgggacatttccataatttatgggaaaagtacttcagaatgtttgaaa

SEQ ID NO: 24709 - DNA, 110 bp, synthetic construct
  source 1..110: mol_type = other DNA
gaattcctgggacatttccataatttatgggaaaagtacttcagaatgtttgaaacttgtacggtcaaagaaaaatatctgccttatttctaagtagcatcagccttaca

SEQ ID NO: 24710 - DNA, 110 bp, synthetic construct
  source 1..110: mol_type = other DNA
tgggggggctctctcaaaagagagccatctttgagcatcctaatgaggggaaaatggccagggaagatgttccgctggccctgggctaagagtggtactggactcatatt

SEQ ID NO: 24711 - DNA, 110 bp, synthetic construct
  source 1..110: mol_type = other DNA
tctgacacttaaaaacctgggccttaggatggtgagagtagaggaaaaggagactttatttattatacaactttattgactactttttgatattcacatttggattaaaa

SEQ ID NO: 24712 - DNA, 110 bp, synthetic construct; identical to SEQ ID NO: 24711
  source 1..110: mol_type = other DNA

SEQ ID NO: 24713 - DNA, 110 bp, synthetic construct
  source 1..110: mol_type = other DNA
gtttaggaattcaataggcagtaaggtaagaagttagctgaaatggaagaacctggggatgtgctactggcaggaagggttaaagtcccaccaaagaaccactacctata

SEQ ID NO: 24714 - DNA, 110 bp, synthetic construct
  source 1..110: mol_type = other DNA
agaaatatcacacaaggaataagatgttattgatggtataccttctcctccttactaaccagtgtaacagtaggaccaacttagagtaataaagcctatttatgctaggc

SEQ ID NO: 24715 - DNA, 110 bp, synthetic construct
  source 1..110: mol_type = other DNA
taaccagtgtaacagtaggaccaacttagagtaataaagcctatttatgctaggcttactagctgtggaaccatggacaagtcaaacagacctttctaggccttagaatc

SEQ ID NO: 24716 - DNA, 110 bp, synthetic construct
  source 1..110: mol_type = other DNA
tatttaggagttagaccaacatggagctgatattatttagcactgctgacacactgtaataataaaaagcagtctgagttttagcaggttattattatttttaaattctc

SEQ ID NO: 24717 - DNA, 110 bp, synthetic construct
  source 1..110: mol_type = other DNA
aggcaccttattattcttttaaaatattaaaagttatgagttcaggtcacattttggcccaagagtttctgataagggaccatagacccggtttttcaggatcacacaca

SEQ ID NO: 24718 - DNA, 110 bp, synthetic construct
  source 1..110: mol_type = other DNA
ggcccaagagtttctgataagggaccatagacccggtttttcaggatcacacacatgcgcacacacgtacacacaacaaggcattacacctcgttctttcaatctttaca

SEQ ID NO: 24719 - DNA, 110 bp, synthetic construct
  source 1..110: mol_type = other DNA
ctcctttttaggtgggcataattctcattttatatggattaaaaagtactacccagagaagttaattaattaattgcttaaactggcacaggaaagtattaatccaggtc

SEQ ID NO: 24720 - DNA, 110 bp, synthetic construct
  source 1..110: mol_type = other DNA
gattggagagtttgacaaggggcagctaccagtgcaaagctctctccaccatgattgttggtaagccagcacacatgcactcctcatgagtagaatctgggcttctctag

SEQ ID NO: 24721 - DNA, 110 bp, synthetic construct
  source 1..110: mol_type = other DNA
tcaagagattgggtcaaaccctcactgctttgtcctccgcagcttgacccctggtgcagaagtagtaacaggaagtacatcacagagcaggataaataaagccccaactt

SEQ ID NO: 24722 - DNA, 110 bp, synthetic construct
  source 1..110: mol_type = other DNA
gaagttatgctaattcccgcccaagagataccagtgagcatttcaaatacttgtagcttaggagggaaaaagtcttccttctagatcaattcaaagttcagttatcacac

SEQ ID NO: 24723 - DNA, 110 bp, synthetic construct
  source 1..110: mol_type = other DNA
aggaaagatatagtgtttagtctgcctacaagaacactagagacttttagaaactcagctgtataaggaactacagcacaactaactataacaaatagctaagttagtac

SEQ ID NO: 24724 - DNA, 110 bp, synthetic construct
  source 1..110: mol_type = other DNA
cgctcttttttttcaggttactttcagtaatgagatgtatttgtacagctctactaaaaaacctaaaatactaggcggggggcgggaggggggtaatgacataatgaagt

SEQ ID NO: 24725 - DNA, 110 bp, synthetic construct
  source 1..110: mol_type = other DNA
aaaaaacctaaaatactaggcggggggcgggaggggggtaatgacataatgaagttctttaaaagtgttgataaatttggatcctgacataaatctaagagaatgtttga

SEQ ID NO: 24726 - DNA, 110 bp, synthetic construct; identical to SEQ ID NO: 24724
  source 1..110: mol_type = other DNA

SEQ ID NO: 24727 - DNA, 110 bp, synthetic construct; identical to SEQ ID NO: 24725
  source 1..110: mol_type = other DNA

SEQ ID NO: 24728 - DNA, 110 bp, synthetic construct
  source 1..110: mol_type = other DNA
gacataggaagcgaaaaataactttcaacgcctgctgcagcccctctggattatcctagaagcagatgggcaggcagctttggactgtgactccgcagcctcactagagc

SEQ ID NO: 24729 - DNA, 110 bp, synthetic construct
  source 1..110: mol_type = other DNA
ctagaagcagatgggcaggcagctttggactgtgactccgcagcctcactagagcaggagggacactcaggtcgccaccacaagtgacaccaatcgaacacatcgagaaa

SEQ ID NO: 24730 - DNA, 110 bp, synthetic construct
  source 1..110: mol_type = other DNA
gtggatccctaatgtatcgtaaaacccccttttataaaatactttagagaattgcttgctagatttggaaatcagcattgttaagctcctaataatgtgaaatatttcca

SEQ ID NO: 24731 - DNA, 110 bp, synthetic construct
  source 1..110: mol_type = other DNA
agagaattgcttgctagatttggaaatcagcattgttaagctcctaataatgtgaaatatttccattatactaatatttaaatggaataattgggaaagggtgggtagaa

SEQ ID NO: 24732 - DNA, 110 bp, synthetic construct
  source 1..110: mol_type = other DNA
agccctgtctgtagtgttaagaagtggtgcactgcagagatgctttttggcagcggtccaactttcctttgatcataaagtgaaagagaaaatggaattttcttgtgcca

SEQ ID NO: 24733 - DNA, 110 bp, synthetic construct
  source 1..110: mol_type = other DNA
gatgatagtgaaatcattacagcccattctgggcagccaggtggattatttttgggtcccctcaacttatccttcattgtcctgctagctcctttaaggtaactcttcaa

SEQ ID NO: 24734 - DNA, 110 bp, synthetic construct
  source 1..110: mol_type = other DNA
tccacacagatttttatactatttgacacataaacacgttcagaaaaccacagcttggtattggggatctcggcataaatcacaaattctaacatgggcatccagtttat

SEQ ID NO: 24735 - DNA, 110 bp, synthetic construct
  source 1..110: mol_type = other DNA
tggtattggggatctcggcataaatcacaaattctaacatgggcatccagtttatctacttgtcccagaattttccagtggagattaaaaataccattgattttaaatag

SEQ ID NO: 24736 - DNA, 110 bp, synthetic construct
  source 1..110: mol_type = other DNA
ctgaataatttttaagcaaaaatctgagtgccctggagttcctgttgtggctcggtagtaatgaactcgctggtatccatgaacatataggttcaattcctgaccttgct

SEQ ID NO: 24737 - DNA, 110 bp, synthetic construct
  source 1..110: mol_type = other DNA
gaatcagactagtttccctttcattctctttctcttgccatcatttcttcatcagagttacctgaatacaatttaataaagagtcattccctaaaactcttcaatggttt

SEQ ID NO: 24738 - DNA, 110 bp, synthetic construct
  source 1..110: mol_type = other DNA
agttacctgaatacaatttaataaagagtcattccctaaaactcttcaatggtttcccactgcaaatgaaacagatcaaactccttactatgtactataaattccttcat

SEQ ID NO: 24739 - DNA, 110 bp, synthetic construct
  source 1..110: mol_type = other DNA
catgggtgcggccctaaaaagacaaaaagacaagaaaaaaaaatttagctgcagtctctccatttttaaccactgtgtggtattgctgccatattacacttaggctgaca

SEQ ID NO: 24740 - DNA, 110 bp, synthetic construct
  source 1..110: mol_type = other DNA
aagttaataggagaaaaatggatacctccaactacttatttttattagaatggcaggtattttttttctctgatacatacctcctccttccatactatgtcagtggagct

SEQ ID NO: 24741 - DNA, 110 bp, synthetic construct
  source 1..110: mol_type = other DNA
gaagagaaaagcaattatttagaacattttttaaaacttctaagaagttttgaggactaaaattgtaaagtttatccactttagggctctggaagcctggaacttatata

SEQ ID NO: 24742 - DNA, 110 bp, synthetic construct
  source 1..110: mol_type = other DNA
tttcccatttgccatttgttgaaaagactgtcctttctctatggtatgttctcaactctcttgtcaaattttagttctgagctctctattatgttccactggtctgagta

SEQ ID NO: 24743 - DNA, 110 bp, synthetic construct
  source 1..110: mol_type = other DNA
ttccatggtgtctacttgactaaaaggaaacttatcctgcattgctgttcccagtagtaagcttgtaaactacatcaattcttccccctgtctatcctgctacctctctt

SEQ ID NO: 24744 - DNA, 110 bp, synthetic construct
  source 1..110: mol_type = other DNA
ttgcaggaaatttagttgctagaagcaacaggagctactcagaaggtttgaagaatcatgaactattgctattttgggtacttgaaaaaaggaaaaatatttgtttcagg

SEQ ID NO: 24745 - DNA, 110 bp, synthetic construct
  source 1..110: mol_type = other DNA
ttacctttacttgcccaaactcctgaaactcttgatatcaagattcagttacacttcagaaattatttcagtgcttcattttaagaagtttatagtttcagaagtttaaa

SEQ ID NO: 24746 - DNA, 110 bp, synthetic construct
  source 1..110: mol_type = other DNA
aggtaggaatatgagtggagtgaaaaacagatttagaaaactggcaagaatgaaggaagaatgaaccacataaaacagcctaagttacatgcctaaatattataaggcta

SEQ ID NO: 24747 - DNA, 110 bp, synthetic construct
  source 1..110: mol_type = other DNA
gaagaatgaaccacataaaacagcctaagttacatgcctaaatattataaggctacacatggccatgctgccaagaagcttttggatggtacagctgcaagacacttgac

SEQ ID NO: 24748 - DNA, 110 bp, synthetic construct
  source 1..110: mol_type = other DNA
tgaagctgcaaatggaagctgtataggcaggttttccagctatggacatgacagcctgtgtggttctgaagtcagactggcctttcatctgtggctactgagccacagat

SEQ ID NO: 24749 - DNA, 110 bp, synthetic construct
  source 1..110: mol_type = other DNA
tcttccatgcaggagattatggtatctttgctcttacactttgcctttaactatttgttaatgtctctcagtttgtctttatccctctgtagaatttcaatataacttag

SEQ ID NO: 24750 - DNA, 110 bp, synthetic construct
  source 1..110: mol_type = other DNA
tgttaatgtctctcagtttgtctttatccctctgtagaatttcaatataacttagttacaactagcaatgatggtatccttgtagggattattcactctgtatcttcaaa

SEQ ID NO: 24751 - DNA, 110 bp, synthetic construct
  source 1..110: mol_type = other DNA
gtctaaagttcaaaagagatatatacttaaaaagttatctggaaatcatcaccttcaccatttaaattaaagtagtaggaggcttgagattagcatcaagggaggatgta

SEQ ID NO: 24752 - DNA, 110 bp, synthetic construct
  source 1..110: mol_type = other DNA
caccatttaaattaaagtagtaggaggcttgagattagcatcaagggaggatgtataaagagagaaatggatcctgaaattacaatgaatgtttaagcctggggagagga

SEQ ID NO: 24753 - DNA, 110 bp, synthetic construct
  source 1..110: mol_type = other DNA
ttcttacttcccttgtccacattgtatgaatttgatttttttttctttttcttttaacagcttccaaaaatttatatggaacgacaaaggacccagaattgccaaagcaa

SEQ ID NO: 24754 - DNA, 110 bp, synthetic construct; identical to SEQ ID NO: 24753
  source 1..110: mol_type = other DNA

SEQ ID NO: 24755 - DNA, 110 bp, synthetic construct
  source 1..110: mol_type = other DNA
gaaagaatggcaaggagagaaaagccactttattgattgttgagctttgagtctaatgtcccaacccagaaatctgataaaaataggttgaagaataacaataatgagat

SEQ ID NO: 24756 - DNA, 110 bp, synthetic construct
  source 1..110: mol_type = other DNA
gaatacttctagaaatatagaataaccctcagagataaacatatcagtaaaaacatagaataaaaaacagaaattggtgttctcattgttgcgcagcagaaatgaatccg

SEQ ID NO: 24757 - DNA, 110 bp, synthetic construct
  source 1..110: mol_type = other DNA
agaatccgagctgcagctgtgacctataccacagctgcagaaacgtgggatcctcaacccactatgcctggctgaggaacgtgctacagcagagacaaggctggatcctt

SEQ ID NO: 24758 - DNA, 110 bp, synthetic construct
  source 1..110: mol_type = other DNA
cctcagagaaaagcacaagagctagactgaaaagggcaaagcagagagagccctatgaaccattggtacaacaaaagaataaacatgaagatgtaaaaaaggacatcaaa

SEQ ID NO: 24759 - DNA, 110 bp, synthetic construct
  source 1..110: mol_type = other DNA
ttcaacaatttcactgtcaccttttgacattgtctatgttctactttcatcagcgagtaattgggtcctcgctgcagctacagaggcctacggcaacactgaaccatgcc

SEQ ID NO: 24760 - DNA, 110 bp, synthetic construct
  source 1..110: mol_type = other DNA
agtaattgggtcctcgctgcagctacagaggcctacggcaacactgaaccatgccaaatcccaagaacagaagacatacttggaaatataaagtatgtactctaaagtat

SEQ ID NO: 24761 - DNA, 110 bp, synthetic construct
  source 1..110: mol_type = other DNA
acagatagattaaaaatatcatgaagctaaagagtggttgagtcaggtttaaaccttgtttccacaaagcccatgtgttctttctcttaatgttcttcatacctctattc

SEQ ID NO: 24762 - DNA, 110 bp, synthetic construct
  source 1..110: mol_type = other DNA
aaaggattctttgaaaagattctctcttctgttttactggtctccttgtccttataagaatacagtattttcttaactatcgggctttataataagtcttgaaatttggc

SEQ ID NO: 24763 - DNA, 110 bp, synthetic construct
  source 1..110: mol_type = other DNA
aagaatacagtattttcttaactatcgggctttataataagtcttgaaatttggcagtttaagatctccaacatttgttgttcttctgggttggcttatttgttctgtgc

SEQ ID NO: 24764 - DNA, 110 bp, synthetic construct
  source 1..110: mol_type = other DNA
atattgttatgtctcattgctgaaggcaatcacataaaatgcatttggaggcattcaaaagggcctccctgaagttttggtttcagccctacctcagctttataatcctg

SEQ ID NO: 24765 - DNA, 110 bp, synthetic construct
  source 1..110: mol_type = other DNA
aagtttccattcctgcctggaaaaagtcacttctcttgagaacctttcccattcccttctgttgacttcctgggtagcttttgctttgtttcccaaaagtttctgctatt

SEQ ID NO: 24766 - DNA, 110 bp, synthetic construct
  source 1..110: mol_type = other DNA
cttgagaaagtcctaaaattgttgtggttgttaggcttgctaatacattcaatgatacatttttgataatttcttgggtacccagacttttatctgtgaacatgaaatgt

SEQ ID NO: 24767 - DNA, 110 bp, synthetic construct
  source 1..110: mol_type = other DNA
tactatgatttatttagaatatctgagtctgttcagctactcactaatgagcagtggatctgcaagatgaattaattgggccaaggcacagtggaatcattcagaatgaa

SEQ ID NO: 24768 - DNA, 110 bp, synthetic construct
  source 1..110: mol_type = other DNA
atcaatcccaggtgaatcctgacaagattagcaacagcattcagccaatgaagtcttccattattcagattctgctacagctctcttcatttcctccctaattattctac

SEQ ID NO: 24769 - DNA, 110 bp, synthetic construct
  source 1..110: mol_type = other DNA
acttggaaggggagtcggccccctcccccatcactcgcatccaccctgcgattacccaccgggagagatctctgcgagagaccctggcgtttatctatccgtttcctcta

SEQ ID NO: 24770 - DNA, 110 bp, synthetic construct
  source 1..110: mol_type = other DNA
tcgctcgcactctcgctcactctctcacatacacacaccattttcctgacttagtttagttcaaacttaagatcttagtttaagtactacttctttgaaacaggtttttt

SEQ ID NO: 24771 - DNA, 110 bp, synthetic construct
  source 1..110: mol_type = other DNA
cttcatgccagtggctcaataaattttgtccaggggattaggggcaggtggcttgggaattactttgaattgagtggcagctgcttgtcctgtacacacaaatggtcttt

SEQ ID NO: 24772 - DNA, 110 bp, synthetic construct
  source 1..110: mol_type = other DNA
tattgagttcaattctactgccaaatatagatttcccatgaaaatcagacaaaggagaaggaaccagacaaggaacaaacttaatttccttgttgaagcatactgatttc

SEQ ID NO: 24773 - DNA, 110 bp, synthetic construct
  source 1..110: mol_type = other DNA
agaaggaaccagacaaggaacaaacttaatttccttgttgaagcatactgatttcatttgtagggattagtgttagaataaataaaggttgtttttacttaatccagtgg

SEQ ID NO: 24774 - DNA, 110 bp, synthetic construct
  source 1..110: mol_type = other DNA
gctccatacttgatatttcctaattttatccaggtctctccttgctgttacatcctcaggataataatttgaccttccccttaaaccttagctttctttttttctttttt

SEQ ID NO: 24775 - DNA, 110 bp, synthetic construct
  source 1..110: mol_type = other DNA
ttatccaggtctctccttgctgttacatcctcaggataataatttgaccttccccttaaaccttagctttctttttttctttttttttttttttttttttttgccatgta

SEQ ID NO: 24776 - DNA, 110 bp, synthetic construct
  source 1..110: mol_type = other DNA
gagaagtagaggacatttttaaagcatgtaaaagtatggagaaggatcttccttgagatcaacatagctcataaacaagatgcatatgccatttacccagatgtaggatg

SEQ ID NO: 24777 - DNA, 110 bp, synthetic construct
  source 1..110: mol_type = other DNA
agatcaacatagctcataaacaagatgcatatgccatttacccagatgtaggatgaggagactagaaggagaattgagagagcagctgaaataaacttttctttgggctg

SEQ ID NO: 24778 - DNA, 110 bp, synthetic construct
  source 1..110: mol_type = other DNA
ataatcattcaaataatatacattcacaattcatagcagctgttccaaatttggaagaattatttttcttaaaacatggcggcacaggaattactttggtacaggtagac

SEQ ID NO: 24779 - DNA, 110 bp, synthetic construct
  source 1..110: mol_type = other DNA
agaattatttttcttaaaacatggcggcacaggaattactttggtacaggtagacatatgtggggacaggactttgcctttacaaggactctgaataaatttcttctgtt

SEQ ID NO: 24780 - DNA, 110 bp, synthetic construct
  source 1..110: mol_type = other DNA
cagaatatcatgggggtatttggggaaaatcctattctcagaagaaggcagggggcatattatctaaaaatctatgcccttacttttggacttttatgtgaagaaactca

SEQ ID NO: 24781 - DNA, 110 bp, synthetic construct
  source 1..110: mol_type = other DNA
catattatctaaaaatctatgcccttacttttggacttttatgtgaagaaactcagtgtgtgcatatttctggttctggtggatggatactatgatatttctggagatgc

SEQ ID NO: 24782 - DNA, 110 bp, synthetic construct
  source 1..110: mol_type = other DNA
acaagtacaagtgttaatccccgataaacattctgtacacaaacctttgcctaagagtatgttttctggaaaacacagtttacgtcatgctatgaactagacttatacca

SEQ ID NO: 24783 - DNA, 110 bp, synthetic construct
  source 1..110: mol_type = other DNA
agtatgttttctggaaaacacagtttacgtcatgctatgaactagacttataccataccaaggatattttcttacctggagggcaagacaaataaggtgcaaaaggttta

SEQ ID NO: 24784 - DNA, 110 bp, synthetic construct
  source 1..110: mol_type = other DNA
tcttctgacataaattcaggctggctagatgaaattctatattcatattgtttttccttgcatatttcaaatacatttcctctgttggcttctggcataacctacaactg

SEQ ID NO: 24785 - DNA, 110 bp, synthetic construct
  source 1..110: mol_type = other DNA
ccttgcatatttcaaatacatttcctctgttggcttctggcataacctacaactgttaaacaggataatgtatttatgattttctttcccttttaagtgagttggacatt

SEQ ID NO: 24786 - DNA, 110 bp, synthetic construct
  source 1..110: mol_type = other DNA
agtagcacttcctagagaaaatagtttgccaaggaagctggtaaaatcagagccggtatctacacaaacactggacatctgagatacatttatctgtatatcatatacct

SEQ ID NO: 24787 - DNA, 110 bp, synthetic construct
  source 1..110: mol_type = other DNA
tcttctacttctcagagaaagctggacttacaactggtatataagcagagacagggagagcaggggtctgctttctggtttcctgtttccctgtatttatccctggtgct

SEQ ID NO: 24788 - DNA, 110 bp, synthetic construct
  source 1..110: mol_type = other DNA
gataagaatatttactgtatatatgtaaggtgcttaacacatttctacattagagggaaggcactgtcagtgatgagcgccagtgtggatagtgccagtagaattagtaa

SEQ ID NO: 24789 - DNA, 110 bp, synthetic construct
  source 1..110: mol_type = other DNA
ggaaggcactgtcagtgatgagcgccagtgtggatagtgccagtagaattagtaactccagtagacatatgaagacaagaatcagtttttactaagatgtcttaaatggc

SEQ ID NO: 24790 - DNA, 110 bp, synthetic construct
  source 1..110: mol_type = other DNA
attttcattagcatctgtttaaacacttgctatttgccaggcactatggtaggaactgtagaaaaaagataaagaagacattgtcttttctcctgaggctcttatagtgt

SEQ ID NO: 24791 - DNA, 110 bp, synthetic construct
  source 1..110: mol_type = other DNA
ctgtagaaaaaagataaagaagacattgtcttttctcctgaggctcttatagtgtagtgagtaagacgtgcatggcaaacaaatgaatataatacatcatgacagtgtaa

SEQ ID NO: 24792 - DNA, 110 bp, synthetic construct
  source 1..110: mol_type = other DNA
aatgctctcaaaagctccctaggcatatgtgacaattgattttttttaaaggtcaaggaaaaatcaaagaaaatcagcatatagtagagttcgagaaaaaccaattaagc

SEQ ID NO: 24793 - DNA, 110 bp, synthetic construct
  source 1..110: mol_type = other DNA
caggtagaattgacacaagaagcaatcaggaaatctgaaaatgaaatatagaatcatcgaaacttaacaataacactaactggtaaatgcagtggtggtactgaagaagt

SEQ ID NO: 24794 - DNA, 110 bp, synthetic construct; identical to SEQ ID NO: 24793
  source 1..110: mol_type = other DNA

SEQ ID NO: 24795 - DNA, 110 bp, synthetic construct
  source 1..110: mol_type = other DNA
aactcgcagagtgactttcgaatctttgttttgtatggagtggtactttatcttggtttggttgggttgcacggaaatacagggaatttggcttagtatataaaatttat

SEQ ID NO: 24796 - DNA, 110 bp, synthetic construct
  source 1..110: mol_type = other DNA
gtttggttgggttgcacggaaatacagggaatttggcttagtatataaaatttataaatagtagtcaaactcaagaagctacagattgtaaagtttacgtatttttacta

SEQ ID NO: 24797 - DNA, 110 bp, synthetic construct
  source 1..110: mol_type = other DNA
ttttcttctgttcatgaaagatgaccagagaaggcatgtttttgggaacaatttaaaattgtccaattctccatgttctctttagctagcaggggggaaccctaaagtct

SEQ ID NO: 24798 - DNA, 110 bp, synthetic construct
  source 1..110: mol_type = other DNA
aaattgtccaattctccatgttctctttagctagcaggggggaaccctaaagtctcttgctaacatgacagcagaggcttcatcaatctgattccttgagtgaccatact

SEQ ID NO: 24799 - DNA, 110 bp, synthetic construct
  source 1..110: mol_type = other DNA
gaaatggatttgagggtttatttgaaatggtagttagtatgagacaatggggagattaaaggaaaaggaaatcgtgtttcaccatgatccccatgtttcttgatctgcgt

SEQ ID NO: 24800 - DNA, 110 bp, synthetic construct
  source 1..110: mol_type = other DNA
attctgataagtatttagccagtctaatcgatttcaggttcaaatcgtttcatctgaattcctctgacaattagagcatgccaaacagctgaataagacctaaaagtccc

SEQ ID NO: 24801 - DNA, 110 bp, synthetic construct
  source 1..110: mol_type = other DNA
cagcagaattcatatattcaacatcattctacctcatctcataaagttaagaggctttttatctcttatgggccccctaggctttgaagttcttaaactgtccattaagt

SEQ ID NO: 24802 - DNA, 110 bp, synthetic construct
  source 1..110: mol_type = other DNA
tttttatctcttatgggccccctaggctttgaagttcttaaactgtccattaagtaaatgaagagattacccaggactcacaggaatacaaaacgtgcagtgataaccct

SEQ ID NO: 24803 - DNA, 110 bp, synthetic construct
  source 1..110: mol_type = other DNA
aataattctggtcccaggaccactgaaagagcaatacgcagtttctgaatcaaaccctactttcaaaatgagtaaaaagagagacataatgttaggattatttttcattt

SEQ ID NO: 24804 - DNA, 110 bp, synthetic construct
  source 1..110: mol_type = other DNA
cctactttcaaaatgagtaaaaagagagacataatgttaggattatttttcatttatattgggattttattccttccacctgaaagaggaagaggagggaactgttgcag

SEQ ID NO: 24805 - DNA, 110 bp, synthetic construct
  source 1..110: mol_type = other DNA
ataacagttcagacattcaaaattcccatatcaagaggaaaatcaagcccatccctttaaaaaaaaataagaaaacaaaaagcactggtttaaatactactcagccttca

SEQ ID NO: 24806 - DNA, 110 bp, synthetic construct; identical to SEQ ID NO: 24805
  source 1..110: mol_type = other DNA

SEQ ID NO: 24807 - DNA, 110 bp, synthetic construct
  source 1..110: mol_type = other DNA
cattggttccaaatatcttctcccattccggaggctacatttttgttttgttgctggtttctgttgctgcgaaaaagcttttaagttttattaggtcctatatttttatt

SEQ ID NO: 24808 - DNA, 110 bp, synthetic construct
  source 1..110: mol_type = other DNA
gtgactggagccgtaggctgtgccctcccctggagcccaagttggcttcagcagtttgcggccacccctgtagcccttcaagaggcctcctgccgcctgagagccctcgc

SEQ ID NO: 24809 - DNA, 110 bp, synthetic construct
  source 1..110: mol_type = other DNA
attctgagatctgaaggataattctgaataaaaattgctttgaggcacattctacaggagaggaccacatagctgtttatcacttggctaagcacagattaaccaagacc

SEQ ID NO: 24810 - DNA, 110 bp, synthetic construct
  source 1..110: mol_type = other DNA
acagctgagccacattcctccaacacctgcttggagctgcgggtctccactgcattggttcaactcaccacagcatcctccctggcggttttgctctcttgccctggtca

SEQ ID NO: 24811 - DNA, 110 bp, synthetic construct
  source 1..110: mol_type = other DNA
acttttttccttaaagccgacccaggcgcgccagcagctcccagtgccacaggcagcagcacagcctcggcggccgttcattcccactcacccgccgcactcttgggcgg

SEQ ID NO: 24812 - DNA, 110 bp, synthetic construct
  source 1..110: mol_type = other DNA
ttgcccagttaactgcttatcctgaggagtcccgatactgatgatgaaaggctggtgcacagggctgaatctcaaggttaataagctagaggtaggattccataatgaca

SEQ ID NO: 24813 - DNA, 110 bp, synthetic construct
  source 1..110: mol_type = other DNA
gtggattctgctctctacctgcttctccatgtcctgttcaccctatttcccatgtgcatctaatacactttttaccaccatttatgccccagtagtggataagagtgaag

SEQ ID NO: 24814 - DNA, 110 bp, synthetic construct
  source 1..110: mol_type = other DNA
ttagctaaggaaaacaataatacagcagctttcagtctcattagtttatttctcatgaaatcttgaaaaaagaaactcttttccctcctacttacgtacaagccaacagc

SEQ ID NO: 24815 - DNA, 110 bp, synthetic construct
  source 1..110: mol_type = other DNA
tgaaatcttgaaaaaagaaactcttttccctcctacttacgtacaagccaacagcttgttaaaagagcctgaaaatagatctgtttctcataaacactggaacaacagtc

SEQ ID NO: 24816 - DNA, 110 bp, synthetic construct
  source 1..110: mol_type = other DNA
gggatcaaatccgcatcctcatggattctaattgggttcattgctgctaagccacattgggaagtcctcctttgtgtttttattgtacttctcagttctagaatttctct

SEQ ID NO: 24817 - DNA, 110 bp, synthetic construct
  source 1..110: mol_type = other DNA
attgggaagtcctcctttgtgtttttattgtacttctcagttctagaatttctcttcagctcttttgtatagttcttatcgtttgtgtagttccctgtcaagattctgaa

SEQ ID NO: 24818 - DNA, 110 bp, synthetic construct
  source 1..110: mol_type = other DNA
taaactgggggccaccctacacgaggtatcttatatgccagtaagctcttctgaccacattttctatcttcctagttcctaccacacctatacatgtctagaaccccagg

SEQ ID NO: 24819 - DNA, 110 bp, synthetic construct
  source 1..110: mol_type = other DNA
gtaccaggcaaaacagccctggatccagatataattatctccattttgcatataaggaaactggggatctttaggcaccttccccaatgccacccagctttaacagcaga

SEQ ID NO: 24820 - DNA, 110 bp, synthetic construct
  source 1..110: mol_type = other DNA
agacgaatagcgagggcaaataattctgaccatagtagccaccaacaagttgcagaagaaaaggtaatgtttgagctgggccatgatgtatgccaagaaaaataggggtg

SEQ ID NO: 24821 - DNA, 110 bp, synthetic construct
  source 1..110: mol_type = other DNA
gagtagttttcagcctccaggagccaaagtttccacccagacacccagaaactgaagcaatcagatctggcctgcataaaggaactcttctctgggtcagagaattacaa

SEQ ID NO: 24822 - DNA, 110 bp, synthetic construct
  source 1..110: mol_type = other DNA
accagcatgggagacaggtcattacaatagtatttaagtgctgtgatagagaaggtatctggtacttgaagcggtggaaggtcagcaagcttcgtctgtgcaggacatag

SEQ ID NO: 24823 - DNA, 110 bp, synthetic construct
  source 1..110: mol_type = other DNA
tcccctgaaaattcatatgttaaagtcctgactcccagggcctcagaatatgacggcattgggaaatagggtctttaaagaggtaaattaaaatgaggctctcagggtag

SEQ ID NO: 24824 - DNA, 110 bp, synthetic construct
  source 1..110: mol_type = other DNA
agtggtgggtgtgggagcattgattgccatgtgtctcatataaagtctctttcgtgagacacacagaaggctcatgaagctgctgctaggtccatcactctttgttaggt

SEQ ID NO: 24825 - DNA, 110 bp, synthetic construct
  source 1..110: mol_type = other DNA
agccttgtggaaattttgtcttcttttaggcttcacactggcctgtcatccctctgaaaatattttgtgtggtatatacttaggaatttgttctcttcaactcttaggtg

SEQ ID NO: 24826 - DNA, 110 bp, synthetic construct
  source 1..110: mol_type = other DNA
cgatacacagaaatctgaaaactcctgctccttctaggttggcccccatgagcttattcctgccaattgtgacaattccaattgtgacaattccacaattgttcctccat

SEQ ID NO: 24827 - DNA, 110 bp, synthetic construct
  source 1..110: mol_type = other DNA
tctctcctctcctatttgggttcccacttgacaatgttcattgcaactaaagcttccttaaggaacctgctgccaccacagctaacacttaagcatgatgcatgtcaggg

SEQ ID NO: 24828 - DNA, 110 bp, synthetic construct
  source 1..110: mol_type = other DNA
aatgagtcaccagtcacaagcttggcattgaaaagtggagccgtgccagagttcagtgctaacctctgtgacacagacattttcacagcagcagaagagaaatacagtcg

SEQ ID NO: 24829 - DNA, 110 bp, synthetic construct
  source 1..110: mol_type = other DNA
agccccaatcctaagaacctaagacagacgacacaggtgtagattttgtcattgtagaaggtcagtttagcagctgacatgttgctaaacccaggggacacttttctgtc

SEQ ID NO: 24830 - DNA, 110 bp, synthetic construct
  source 1..110: mol_type = other DNA
ttgaagagcttcataaaaataagacattatagattatttcctagaaaaatcctttagagaaaacatttcctacctcatttcctttgtttccagcactagacttcatttcc

SEQ ID NO: 24831 - DNA, 110 bp, synthetic construct
  source 1..110: mol_type = other DNA
accaggaaacaaatgtttcttggatacaggaactcctaaatgttctttaacaggaactcctaaatgtttctttaaataaacttaaaaaaaaaaagttttttggggttccc

SEQ ID NO: 24832 - DNA, 110 bp, synthetic construct
  source 1..110: mol_type = other DNA
tgttactgaagtataaagttgttaggacataaattataaaatggacacatgtaactatttaagattacacgatacggttgagtcacagctatctggttactcattacctg

SEQ ID NO: 24833 - DNA, 110 bp, synthetic construct
  source 1..110: mol_type = other DNA
atccctggtggcctggtggtgaaggatacagtgctgtcactgctgtgatgcaggtttgattcctggcctgggaacatccatggtgcctttcgcagagtctgtgacatcat

SEQ ID NO: 24834 - DNA, 110 bp, synthetic construct
  source 1..110: mol_type = other DNA
ttgattcctggcctgggaacatccatggtgcctttcgcagagtctgtgacatcatcctgttttcatcttttaggcgttctccagtctctggagttactgtgctcacttcc

SEQ ID NO: 24835 - DNA, 110 bp, synthetic construct
  source 1..110: mol_type = other DNA
atttaagcaaaatgtttcaaagtcatgggtaggggtgcccgtgatgcatttttgccaagtggacagactagtgttgtaaacaacatgcagttcggtgaccaagtgaccaa

SEQ ID NO: 24836 - DNA, 110 bp, synthetic construct
  source 1..110: mol_type = other DNA
caagtggacagactagtgttgtaaacaacatgcagttcggtgaccaagtgaccaagaccttcgtcactgcatccttttcagaagtcggagtagttattctagcaaaccca

SEQ ID NO: 24837 - DNA, 110 bp, synthetic construct
  source 1..110: mol_type = other DNA
tgctttacacagcaccgtattcactgaaactcatgcaaataagaagggattgtatgcccactttcatggttccatagtaactgacaccttttagcaaggacacggttttg

SEQ ID NO: 24838 - DNA, 110 bp, synthetic construct
  source 1..110: mol_type = other DNA
tcacaactgggatttgtctgattgtttcttcatgttagattcaggtgaaatgtttttggccagaatagtacataagcaatgtcgtgctcttttcatacccaaacactggc

SEQ ID NO: 24839 - DNA, 110 bp, synthetic construct
  source 1..110: mol_type = other DNA
ttggccagaatagtacataagcaatgtcgtgctcttttcatacccaaacactggcgagatctggtggaatgcaggttatacgcaaatagggaaatgtgttgtgatcctgg

SEQ ID NO: 24840 - DNA, 110 bp, synthetic construct
  source 1..110: mol_type = other DNA
gtttctaaaacctctttttcctctctaccaaagagagaaaatggttaaaggtttttatccattgctgtttgtagcatacaaacctataattctcctgccagtggaactaa

SEQ ID NO: 24841 - DNA, 110 bp, synthetic construct
  source 1..110: mol_type = other DNA
agctgagatcagtttgaatcttttttatttattttttattgtgcccacagcatgtgtaagttcccagggcagcagctgaacccgaaccatagcagtgacaacaccaagtc

SEQ ID NO: 24842 - DNA, 110 bp, synthetic construct
  source 1..110: mol_type = other DNA
gaatcttttttatttattttttattgtgcccacagcatgtgtaagttcccagggcagcagctgaacccgaaccatagcagtgacaacaccaagtccttaactgctaggcc

SEQ ID NO: 24843 - DNA, 110 bp, synthetic construct
  source 1..110: mol_type = other DNA
cctcatgcatgtggccagacatagctcaggttttacccacctgcatctcaggactcacttgaggattcagggggttgccagctggtggaatattcacttttgggctcaag

SEQ ID NO: 24844 - DNA, 110 bp, synthetic construct
  source 1..110: mol_type = other DNA
cacttgaggattcagggggttgccagctggtggaatattcacttttgggctcaaggtttagtggggaagcagatgcacactcagaggagtgggctgggggagggatctga

SEQ ID NO: 24845 - DNA, 110 bp, synthetic construct
  source 1..110: mol_type = other DNA
agttggattagttaaccactgagccacgatggaaactccagaatcctgatattcttggtcttcctcctgtggcagtcataggagacctggagtgatgagcccacagaaaa

SEQ ID NO: 24846 - DNA, 110 bp, synthetic construct; identical to SEQ ID NO: 24845
  source 1..110: mol_type = other DNA

SEQ ID NO: 24847 - DNA, 110 bp, synthetic construct
  source 1..110: mol_type = other DNA
gtcctgcatttgagttggagcattgaggaggtatggtcacatgatatattttatcctttcttcaaactacatgtttcctagctttgttccctgcaaaggcctagatcagt

SEQ ID NO: 24848 - DNA, 110 bp, synthetic construct
  source 1..110: mol_type = other DNA
tgtagtaggtattgaaaggacagaatgagagacagggaaagagaacagcttttacaaatgaatcttagagttcgagtgtctttcagaagccacaaatcattttaaatccg

SEQ ID NO: 24849 - DNA, 110 bp, synthetic construct
  source 1..110: mol_type = other DNA
gagatccagtgttgctgtgagctgttgtatagattgcagatgcgactcggcttctgagttgctctggctgtggtataggccagcagctgcaattctgattcagcccctag

SEQ ID NO: 24850 - DNA, 110 bp, synthetic construct; identical to SEQ ID NO: 24849
  source 1..110: mol_type = other DNA

SEQ ID NO: 24851 - DNA, 110 bp, synthetic construct
  source 1..110: mol_type = other DNA
cttctacttgtgttttagttgaatgtgtgtagtttcttgttcctttcccactaagactgtaaatgtctttaaatcaagaaccatttcttgttcagctttctatatttata

SEQ ID NO: 24852 - DNA, 110 bp, synthetic construct
  source 1..110: mol_type = other DNA
tgggtataagagaatggtatgtttagttaactatttattataaaaaggaaaaacatgatttgtgtgcaaacataagtaaaagcaggagttctcttgtagcacagatggtt

SEQ ID NO: 24853 - DNA, 110 bp, synthetic construct
  source 1..110: mol_type = other DNA
aggaaaaacatgatttgtgtgcaaacataagtaaaagcaggagttctcttgtagcacagatggttaaaaatccagggttgtcacagcagtggcttgggttgctgctgtgg

SEQ ID NO: 24854 - DNA, 110 bp, synthetic construct; identical to SEQ ID NO: 24852
  source 1..110: mol_type = other DNA

SEQ ID NO: 24855 - DNA, 110 bp, synthetic construct
  source 1..110: mol_type = other DNA
tattataaaaaggaaaaacatgatttgtgtgcaaacataagtaaaagcaggagttctcttgtagcacagatggttaaaaatccagggttgtcacagcagtggcttgggtt

SEQ ID NO: 24856 - DNA, 110 bp, synthetic construct
  source 1..110: mol_type = other DNA
ttaactatgtactcttggaaagttacttgcctatttctgtgagtgtctgtatcttataaatcgatgggacagtagattaacagtagatgactattgtgatgattatgtga

SEQ ID NO: 24857 - DNA, 110 bp, synthetic construct
  source 1..110: mol_type = other DNA
ataaatcgatgggacagtagattaacagtagatgactattgtgatgattatgtgacaacatgcaaaatagactcaacatgtgtttgataatgaatacgtataatttcctt

SEQ ID NO: 24858 - DNA, 110 bp, synthetic construct
  source 1..110: mol_type = other DNA
acaagcacagcaaattatcttttttatccccggtttttatttccaagccagcgtttaacaatggacttttacaaagggacatgttaaaacatcaccccatcatctcaggt

SEQ ID NO: 24859 - DNA, 110 bp, synthetic construct
  source 1..110: mol_type = other DNA
taacaatggacttttacaaagggacatgttaaaacatcaccccatcatctcaggttttagttgtccaatggtgaaactgaaagagtgcacacacagggggaggacaccgt

SEQ ID NO: 24860 - DNA, 110 bp, synthetic construct
  source 1..110: mol_type = other DNA
atttcagagcaagtatggaaacatctttaaagattccctggtggcacaattagcacttccaaatcttcttattaattgacagagatgcttgactaatttagatttaactc

SEQ ID NO: 24861 - DNA, 110 bp, synthetic construct
  source 1..110: mol_type = other DNA
tcctaaaagtgagaggcgactatatcattactaatggtaaaactgtgagaaatgtataaatgggcattgcgctgggtaagctagaatagtttggagcgatactggaagta

SEQ ID NO: 24862 - DNA, 110 bp, synthetic construct
  source 1..110: mol_type = other DNA
gtgacactcagtggatctctgccccacaggtgggtggcctcaatgcaatttccataggtgctccagctgggttctcagtggtgagttcaacagcactcacctatcctacc

SEQ ID NO: 24863 - DNA, 110 bp, synthetic construct
  source 1..110: mol_type = other DNA
ccagttggcaatcaagaattttgtctactgttctccaccaagtgcaactattttccaccatgagggatttttagttaaagtataatttacatatgacattctcttagttt

SEQ ID NO: 24864 - DNA, 110 bp, synthetic construct
  source 1..110: mol_type = other DNA
tatttcaaaaaaccaaaagttggaggaagcgtatggaggagccatcatttatgactggctgatgttctaattaaatttcgccacaaaccaccatcctcacaaattattat

SEQ ID NO: 24865 - DNA, 110 bp, synthetic construct
  source 1..110: mol_type = other DNA
tctctttctattatacctcaaactgcactgtaactgccaatagttataataatccaatgtctattgcttttcctaaggaatcttcctgagacatttcttaatcaaaatat

SEQ ID NO: 24866 - DNA, 110 bp, synthetic construct
  source 1..110: mol_type = other DNA
atactgaactcttcatagactattgtatttatctttgtagctccaatgacaagaacagtattagcatatactaagtaatcaaaccattcagtcaactgactttctgtaac

SEQ ID NO: 24867 - DNA, 110 bp, synthetic construct
  source 1..110: mol_type = other DNA
accccctgtgccatggtggggacccctgaggttaccttctaaatgaaattgctattgtttaataaacttatctagcttggaatcaaaaactttggcattaaaattgattt

SEQ ID NO: 24868 - DNA, 110 bp, synthetic construct
  source 1..110: mol_type = other DNA
ttaatggattaagaaaatgaggaatctatatctatagctatagtatatctatacccaggccaagctttcatgaagattatgttctttgtgataggtggtgtgcgccagat

SEQ ID NO: 24869 - DNA, 110 bp, synthetic construct
  source 1..110: mol_type = other DNA
cataaaactatgatgccacttagggcacagtttaccaatgcttcatcacccacgtaaattacctacaaactcctcaaatatgttaccaaatcaatttcaaaattccattt

SEQ ID NO: 24870 - DNA, 110 bp, synthetic construct
  source 1..110: mol_type = other DNA
attcagagggaacactcctgtctacaactcagactgtcagcacatgtccctccctagctcctcacttttcagaaccccagacctccattagtttatgtttagtgttaggt

SEQ ID NO: 24871 - DNA, 110 bp, synthetic construct
  source 1..110: mol_type = other DNA
ctgttccaaataaaggcatcccccttttcgaccaagctataaaattctctgatttttaaagtctgcttcttccactaggtagagcctctgagccactgcattggggctga

SEQ ID NO: 24872 - DNA, 110 bp, synthetic construct
  source 1..110: mol_type = other DNA
agaaaagaggggaaaatgaagtgaatattgtcaaacaataatctaatcaagaggaggggcaattctatatttcatttgagccaggattatagcttggtgaaagggacaaa

SEQ ID NO: 24873 - DNA, 110 bp, synthetic construct
  source 1..110: mol_type = other DNA
ggggcaattctatatttcatttgagccaggattatagcttggtgaaagggacaaacatggaaagaactataagattaagaagatttacaaggtaacataaatagaccata

SEQ ID NO: 24874 - DNA, 110 bp, synthetic construct
  source 1..110: mol_type = other DNA
tttgcttcctgatcttggtgttaaatgtaaacaacagttgatttaaaaagctaactggttgagagatcttgaaccagacttaagatgaatggctggactggatgatttta

SEQ ID NO: 24875 - DNA, 110 bp, synthetic construct
  source 1..110: mol_type = other DNA
acctttcttgatagattttgagcctgttgaagctaaacacagtgtctagcacattgtagaacccaatacttaattattaaatgaatgagaaagagagagagtaatagaat

SEQ ID NO: 24876 - DNA, 110 bp, synthetic construct
  source 1..110: mol_type = other DNA
agagagctgctagaagggatctcaagggatcaatatcagaagtactcacaggtaatgctatgttattggtcagacaacaggaattacctatttgtagcaagaaagctgaa

SEQ ID NO: 24877 - DNA, 110 bp, synthetic construct
  source 1..110: mol_type = other DNA
tgctatgttattggtcagacaacaggaattacctatttgtagcaagaaagctgaaacaacaagctggttaaaatcatagatcacaagggtaaactctatgaaatggaatt

SEQ ID NO: 24878 - DNA, 110 bp, synthetic construct
  source 1..110: mol_type = other DNA
taataaaaatattttctcattagatatccaggttagagagatgtcaagaagaattgcatggtgtagagcaaagtcaacaagacctgagttttattctgacttggacattt

SEQ ID NO: 24879 - DNA, 110 bp, synthetic construct; identical to SEQ ID NO: 24878
  source 1..110: mol_type = other DNA

SEQ ID NO: 24880 - DNA, 110 bp, synthetic construct; identical to SEQ ID NO: 24878
  source 1..110: mol_type = other DNA

SEQ ID NO: 24881 - DNA, 110 bp, synthetic construct; identical to SEQ ID NO: 24878
  source 1..110: mol_type = other DNA

SEQ ID NO: 24882 - DNA, 110 bp, synthetic construct
  source 1..110: mol_type = other DNA
cttcatcataattctatgagtaactattattatgaccattttcatggaaaactgaagcccagaaggtacacagctgaaaatgttaggcctgaacctctgaattataagca

SEQ ID NO: 24883 - DNA, 110 bp, synthetic construct
  source 1..110: mol_type = other DNA
cttttctcctggaaaatctgtatggtgtaactagtaccaaagaaactgagggaaatttttaagaaagtttaaacctattccttgcagatttgatttataaagtactttca

SEQ ID NO: 24884 - DNA, 110 bp, synthetic construct
  source 1..110: mol_type = other DNA
ttctgtgaggaattgatgtgataagactttacctggtcataccaagccaaagcatagctgcagaagcaaacttctttagcatggtttgggtcagttaggttatcctgcaa

SEQ ID NO: 24885 - DNA, 110 bp, synthetic construct
  source 1..110: mol_type = other DNA
taattagcagtcaattgaaaaagaatattgtacttgtcttcctttatatatgtcaaggacatgtttcagactagagctccccccaaaaagcagccaagatctagaatact

SEQ ID NO: 24886 - DNA, 110 bp, synthetic construct
  source 1..110: mol_type = other DNA
gaattaccaaataattaagtcaatattttgacaaattgtgcatagcaccattgagctcgtttgtcagcatgcacaaaaactaaccactcagcattttaggcctttaaatg

SEQ ID NO: 24887 - DNA, 110 bp, synthetic construct
  source 1..110: mol_type = other DNA
ctcgtttgtcagcatgcacaaaaactaaccactcagcattttaggcctttaaatgaacactccccactccccttatgtcccaccagttttaaaacacagaaggccaaggt

SEQ ID NO: 24888 - DNA, 110 bp, synthetic construct
  source 1..110: mol_type = other DNA
tcttataaacacgatttctccatatatgtcattcatttcttcctatccttttcttaatagagatatgaaagaaatttcgttgaatagttcagctcatggacatgtttgga

SEQ ID NO: 24889 - DNA, 110 bp, synthetic construct
  source 1..110: mol_type = other DNA
tttgggatcttagggtgttgaagagtgctaccagaatgtcttttcaaaaggaggtgcaatgaacattcctcacacctgaagtgcaggtgagatggccatttccttcctca

SEQ ID NO: 24890 - DNA, 110 bp, synthetic construct
  source 1..110: mol_type = other DNA
ctttaagagctccccttcccaccccacccacttctctaaacatgggcacacacacacacacgcgtgcgcgcacataagcacacactcacactactttatgggccaatgtt

SEQ ID NO: 24891 - DNA, 110 bp, synthetic construct
  source 1..110: mol_type = other DNA
acacacgcgtgcgcgcacataagcacacactcacactactttatgggccaatgttttccaaacctatatcattccagttttattgtcaccattttaagcatatccagata

SEQ ID NO: 24892 - DNA, 110 bp, synthetic construct
  source 1..110: mol_type = other DNA
cacacagtgctagaggccaaaagtccatcaagggaaggtgctggctggttccttctaagggctgtgaggagctcccgttcctggcctctctccttggcttgtagctggct

SEQ ID NO: 24893 - DNA, 110 bp, synthetic construct
  source 1..110: mol_type = other DNA
tagacttgatcccaggttgctcagtcgtacttctaacccaacagcccttatcaaactactgttaatacataattgtaaaagcaattccagatctcactatcaagaaggca

SEQ ID NO: 24894 - DNA, 110 bp, synthetic construct
  source 1..110: mol_type = other DNA
ccctatcaaatgactttggcatctcaacttttaatattacttccaacactcaggaagaacagaaaatgatgacaaagacatttcaagaacaaaacttactgctggatgca

SEQ ID NO: 24895 - DNA, 110 bp, synthetic construct
  source 1..110: mol_type = other DNA
agaacagaaaatgatgacaaagacatttcaagaacaaaacttactgctggatgcagcccatgccagtatcacaagtgagctacagactgttcagaatgagaaaacacaac

SEQ ID NO: 24896 - DNA, 110 bp, synthetic construct
  source 1..110: mol_type = other DNA
tatgctttgtctctgcagcagcacaggttcagtccccggcttggtgcagtgggttaaggatccagtattgccacagctgtggagtagtcacagctatggctcagatttga

SEQ ID NO: 24897 - DNA, 110 bp, synthetic construct
  source 1..110: mol_type = other DNA
aaggatccagtattgccacagctgtggagtagtcacagctatggctcagatttgatctctggcctgaggatttccatatgctgcagtgtggccaaaaaaaaaaaaaaagt

SEQ ID NO: 24898 - DNA, 110 bp, synthetic construct
  source 1..110: mol_type = other DNA
aggatccagatatctttatcttgttctactttctattaggtggggaactttcagcgacaattggcagaggctaaagaagacaactgcaaagttacaatcatgttggagaa

SEQ ID NO: 24899 - DNA, 110 bp, synthetic construct
  source 1..110: mol_type = other DNA
taaccagtacaacagccagagagctgaataaaagaaagtaacctggaaagatcttcaatgagcatcatatacatcagggatcaatttagagttgcaccgcctcaacagat

SEQ ID NO: 24900 - DNA, 110 bp, synthetic construct
  source 1..110: mol_type = other DNA
aatgctgacaggcccatttgagagactgcttaacagtttccataagtttagacgtatcaacaaataagccacaagtatttgattgtgttataacttaaaatgtgagacat

SEQ ID NO: 24901 - DNA, 110 bp, synthetic construct
  source 1..110: mol_type = other DNA
attcatataaaaattaagagagaacagtaacatgttaaaacctcttccttcaagagcatctgatatcaaatgcttccacttccttataagcactgatgcgaaaccaaggt

SEQ ID NO: 24902 - DNA, 110 bp, synthetic construct
  source 1..110: mol_type = other DNA
ccactctctcccagaacagatgcctttggtccctcagccacgatggaagatattcagccagtctgaaaacaccatgctggagaaaacgacatacagaaacctcatggaga

SEQ ID NO: 24903 - DNA, 110 bp, synthetic construct
  source 1..110: mol_type = other DNA
acccggcaaagaggccagacaaggatgccagcatagtcctcagcagggagtggtgtgcagagcttcccgaactcctctgggcccagtccctgagcctgtgtgcaaagttc

SEQ ID NO: 24904 - DNA, 110 bp, synthetic construct
  source 1..110: mol_type = other DNA
tgcagagcttcccgaactcctctgggcccagtccctgagcctgtgtgcaaagttcccagcagagaatggcatgcatgcttccccaacacctgcaggcctcactctgctca

SEQ ID NO: 24905 - DNA, 110 bp, synthetic construct
  source 1..110: mol_type = other DNA
aaatgatgaatgtttggtccttgatgattaataggcagctgacatgggtccagcaaagtgtgcctcatcctccagcacccaacccaaggaacacaccagtggaatccaaa

SEQ ID NO: 24906 - DNA, 110 bp, synthetic construct
  source 1..110: mol_type = other DNA
agtagtcctagtggagaaatgggcataatgatatgcccagaatgttggggcaacggaataaaagcaagcatggcctggcctaggaaaaacacctcaagatgttctatccc

SEQ ID NO: 24907 - DNA, 110 bp, synthetic construct
  source 1..110: mol_type = other DNA
ggacatgaccgtgttctgataaaacttttttttacaaagccaagcattggaccgtgttaggcccctcatctaggggtatatacaacagagtatagagactctgcagttcc

SEQ ID NO: 24908 - DNA, 110 bp, synthetic construct
  source 1..110: mol_type = other DNA
actccaagacaagcagaccattctgacttgatgcataacatttaagtgtagttctatgaaatctggtgtcatatgtctttgttttgaaaaacttttttaagctttccagt

SEQ ID NO: 24909 - DNA, 110 bp, synthetic construct
  source 1..110: mol_type = other DNA
tgctgttgctcctggtagtctacgtttccttctgtctgaagaaacttcctgtagcagttcttttcgagctgtctgctgtggtctgctggctaggaattctccttaatttg

SEQ ID NO: 24910 - DNA, 110 bp, synthetic construct
  source 1..110: mol_type = other DNA
aggttttgcttttctttgcaacaagaccagaggtcagcagtgctgggctggttcagcagctccagggtactttgtgggtatcccagcttcctcctgactttccaatccat

SEQ ID NO: 24911 - DNA, 110 bp, synthetic construct
  source 1..110: mol_type = other DNA
ctttttaaaagtcaaattatagaattcaattttaacttgcacccgtgtagctacgtgcttagtcacaaagttcctttgccttacgaccttcatttgtttctcagatatca

SEQ ID NO: 24912 - DNA, 110 bp, synthetic construct
  source 1..110: mol_type = other DNA
tacagaaaactagaatccatgtcctatgatttcaaccccaagcatttttttccgttgtaaaagtcaaaattccccaaaaggctacataccaaaattaattttctaagtta

SEQ ID NO: 24913 - DNA, 110 bp, synthetic construct
  source 1..110: mol_type = other DNA
tcctttatggaaggcctcctgctatgcagtagtatgttaaagagggaaagagatcctgagagactggagaaagaagtataggctggggttgcctggcactctgtcacgag

SEQ ID NO: 24914 - DNA, 110 bp, synthetic construct
  source 1..110: mol_type = other DNA
ggctatagtataagttcctcattcaagagtattttggctaatttaagaaatatatatgatatgttttaaggcgtgtgtatgcctttacagacctcagtgattctgtcaat

SEQ ID NO: 24915 - DNA, 110 bp, synthetic construct
  source 1..110: mol_type = other DNA
tcataatactagttatttaaacaaaatggatttcatatgcaggactattagccacttatgaaattgcattagatgatgaggcgtgaacacacgcaggtaagatagagcag

SEQ ID NO: 24916 - DNA, 110 bp, synthetic construct
  source 1..110: mol_type = other DNA
ttatgaaattgcattagatgatgaggcgtgaacacacgcaggtaagatagagcagcaactacaggaagcagctcccatcccagagctgggggaactaagggaagaagctt

SEQ ID NO: 24917 - DNA, 110 bp, synthetic construct
  source 1..110: mol_type = other DNA
aatgttctggagagaagagagcagcagagtgtgagaaaaagagagagagagacagagagagagggagagagggagagatatgcagtgttgatcagctgtgtgttgatcac

SEQ ID NO: 24918 - DNA, 110 bp, synthetic construct
  source 1..110: mol_type = other DNA
agagagagggagagagggagagatatgcagtgttgatcagctgtgtgttgatcaccaaatgaatgtgaagaaagtgtatgaggctaggaaaagacccagaaaatatagat

SEQ ID NO: 24919 - DNA, 110 bp, synthetic construct
  source 1..110: mol_type = other DNA
aatttaagtatgcttgatttgatttaaggtccatttgggtgctggttctataatgtagctatcaatttttcccaggggtcttagctcaggctgctataacaaatgccata

SEQ ID NO: 24920 - DNA, 110 bp, synthetic construct
  source 1..110: mol_type = other DNA
atggcatttccctcaattgttagttgtaaggaatactttggtggcaatgaaatcgcgttgtactcataaaataggctgactcagcagtaaaagatacatgcaaagcaatg

SEQ ID NO: 24921 - DNA, 110 bp, synthetic construct
  source 1..110: mol_type = other DNA
agacagaactccttgagcaataatactatctcttttccattaatctgaatcccatagagaagcttcaattgcatttcaaaaaattctgttcgggagtccccgtcatggcg

SEQ ID NO: 24922 - DNA, 110 bp, synthetic construct
  source 1..110: mol_type = other DNA
agcaataatactatctcttttccattaatctgaatcccatagagaagcttcaattgcatttcaaaaaattctgttcgggagtccccgtcatggcgcagtggttaacgaat

SEQ ID NO: 24923 - DNA, 110 bp, synthetic construct
  source 1..110: mol_type = other DNA
ttgggtagatctcagcttatggtagatctcagcttatgactgggtcactcacctggtcctgttctacttatggtgaggtccctacagacattttcctgaccagagccaat

SEQ ID NO: 24924 - DNA, 110 bp, synthetic construct
  source 1..110: mol_type = other DNA
atgttttcctttgaaaaacagctaggtcacatggcatcctctaacaatgtaataaaggctatagatattgcctgaagagaaataaacaaacccacatacacagtctatat

SEQ ID NO: 24925 - DNA, 110 bp, synthetic construct
  source 1..110: mol_type = other DNA
ggatcacaatgaaataccacgtagcccagcatgcttcacatttcaaaggttgtgggttgttaacaatatacttttattaaaattcctattaattttcactgtcaatctga

SEQ ID NO: 24926 - DNA, 110 bp, synthetic construct
  source 1..110: mol_type = other DNA
cctcttactcaggcctcctgagccctaatctccctagtatctttccttcctgttctctgataaaccagtcaggccatttgtctctactcataagttctctttagctactg

SEQ ID NO: 24927 - DNA, 110 bp, synthetic construct
  source 1..110: mol_type = other DNA
tagtgtattcattgtttaaatacagccaacggaccattattcaatgcacgtcaggtgtcaggaaggtagaaactgacttccttttcgatgctgtttttggatccttaaaa

SEQ ID NO: 24928 - DNA, 110 bp, synthetic construct
  source 1..110: mol_type = other DNA
gggatctgcctcttgttggccatagctctgtacctatgggcaactcacctcaccactccaggcccctattttctcttctataaaatgggaattgaaaatcaaaaccagaa

SEQ ID NO: 24929 - DNA, 110 bp, synthetic construct
  source 1..110: mol_type = other DNA
gccagaccccgtgcaacctcccagagctctctgtgcaaaaggagaagtgatttatctgtttatagcaggtttaattaagatagttatgtgccatgaactctttgggcccc

SEQ ID NO: 24930 - DNA, 110 bp, synthetic construct
  source 1..110: mol_type = other DNA
ggagagaaacaaaacggccaggagtcggggccaggaatcggattctaaatttcgggttcttaattccattaaaaaaatctcaagttaaactctttctgagacacaataag

SEQ ID NO: 24931 - DNA, 110 bp, synthetic construct
  source 1..110: mol_type = other DNA
gtagaacacaaggagctcaggttagaagtaggaggttggagaggagaagccgggggagaatttttcttcatttggtccataaggcgatttttctcatcttaataacaaag

SEQ ID NO: 24932 - DNA, 110 bp, synthetic construct
  source 1..110: mol_type = other DNA
actgggtgacttaaagtatgtcacccaacatctgagaacctcaatttcattacgtgcaaaatgagaggcttaattagaagagctctaagatgcttgcaatttctcaaagt

SEQ ID NO: 24933 - DNA, 110 bp, synthetic construct
  source 1..110: mol_type = other DNA
gtgactagcatgaagtaagtgttcaacagatagcttgttgaatgaataaatgtgtgtaagttgctttgaataatgcattaggtgcttgataagccttggctattattata

SEQ ID NO: 24934 - DNA, 110 bp, synthetic construct
  source 1..110: mol_type = other DNA
acacgatttcttggccactttggaaaatcagggcgcttgagttgccaacatgatacctatatcagttggcagttggcatttttagctgttgcaatcacagtaattctaca

SEQ ID NO: 24935 - DNA, 110 bp, synthetic construct
  source 1..110: mol_type = other DNA
tttctaccactcagcaaattccaaggtttttagaagctccacaccaggaacgtggggcaaagaccagagaaatcctttattataagataagagccttctgaactgggaag

SEQ ID NO: 24936 - DNA, 110 bp, synthetic construct
  source 1..110: mol_type = other DNA
gtacatgtccaaatgtacattgggaagagctgtgttccttacaggaaaacacaaaagacaggcattttggttgccaagagcaggagaaaagaggtctatggtaaatcacg

SEQ ID NO: 24937 - DNA, 110 bp, synthetic construct
  source 1..110: mol_type = other DNA
gtcatggctttttaattttttttctccttcactcaaaccaccagatcccttacggctttctagctccatctctcttctttgggctgttagaaagaggggtcgacggctat

SEQ ID NO: 24938 - DNA, 110 bp, synthetic construct
  source 1..110: mol_type = other DNA
aaaaccctctccagctcatgggcatcataaaagaccaaaaaggtgactgtaccatggaaactgagggcagccttagtcctgatacaaagcagctgcctcggtttgaatgt

SEQ ID NO: 24939 - DNA, 110 bp, synthetic construct
  source 1..110: mol_type = other DNA
tcttagctccagcctacctcagctcgtgtctagctagcgaatatgaaatgtgtatgggctgtctgaggcaacacatgtgaacaaagaaagattagcttttctgtaacaat

SEQ ID NO: 24940 - DNA, 110 bp, synthetic construct
  source 1..110: mol_type = other DNA
ctgttgtaatacgctttcctagaatagaattttggcctttgacagtcagtgagtagcagtaattaagaaatgcatcctcaaaaactgttagaggtaaaactgtctcattt

SEQ ID NO: 24941 - DNA, 110 bp, synthetic construct
  source 1..110: mol_type = other DNA
aaagctcactggtaaaggcaaagacaatataaaaggaggaaatcaccccttgacagatatgatattaaaactagcaaccatgagaagaggagaggacaactgcagaacat

SEQ ID NO: 24942 - DNA, 110 bp, synthetic construct; identical to SEQ ID NO: 24941
  source 1..110: mol_type = other DNA

SEQ ID NO: 24943 - DNA, 110 bp, synthetic construct
  source 1..110: mol_type = other DNA
gagtggtgtggacccttttgagattctgctaaaaggccataagccctctcaagtagagcttctaaaaagtcatgaacactatagatggaatacagagcatagaatgttac

SEQ ID NO: 24944 - DNA, 110 bp, synthetic construct
  source 1..110: mol_type = other DNA
attgccacaactgtggtgtagagagcaactctggtttggattcgatccctggctggggaacttcaatatgctgcaggtgcagccgaagaaacaaaacaaaacaaaacctt

SEQ ID NO: 24945 - DNA, 110 bp, synthetic construct
  source 1..110: mol_type = other DNA
agcatcttcctccaggcctgggacattgctgaagcagctggtagcctttgggccctgatgatttttctgtcctccgaccttgactgtctctctctgtcacattctgtact

SEQ ID NO: 24946 - DNA, 110 bp, synthetic construct
  source 1..110: mol_type = other DNA
taacattttattgtacaaataatactttggcaattaatttaaaatacatgttggctgctgatgtgcacacagaagtggggacagtgccaattaccaactccagcagcagt

SEQ ID NO: 24947 - DNA, 110 bp, synthetic construct
  source 1..110: mol_type = other DNA
ttccctgggctgtacagtagggtaaaggacagtgaaggttcctggaggtgtaatttaatgcaatcagacataaatcacaccatttcttagaatcattttgttatcttgaa

SEQ ID NO: 24948 - DNA, 110 bp, synthetic construct
  source 1..110: mol_type = other DNA
agaaaggcctggctttccttcctctgaagagaggaacaggcttcaaaggatgaaatacttgcttagaatccacaaaaaagttttgatgcagggttagaaaagtgacactc

SEQ ID NO: 24949 - DNA, 110 bp, synthetic construct
  source 1..110: mol_type = other DNA
attctccctactcccatccctacctcacagctcttgcttcccccaagcttctatggctcccaggtttctgcttgttcctttcttattgaatacttctcagcttcttgaca

SEQ ID NO: 24950 - DNA, 110 bp, synthetic construct
  source 1..110: mol_type = other DNA
aaggattccagtgtggctgggggtctacttcacttcggaaggaacttctatggagctcaagcccatcccttttgctgtccagattcctttaaaatgctttacgcctgcaa

SEQ ID NO: 24951 - DNA, 110 bp, synthetic construct
  source 1..110: mol_type = other DNA
ctcaagcccatcccttttgctgtccagattcctttaaaatgctttacgcctgcaaatctctttatgtggcatcagttcagcttgcagtaaaagaagcagcctctgagaga

SEQ ID NO: 24952 - DNA, 110 bp, synthetic construct
  source 1..110: mol_type = other DNA
tcccactatatggcaggcatggagcactgctcagatagatgagacaagcctcccacagaggaggacagctaagttttcaaggccactgctaagcccacttggcccttcag

SEQ ID NO: 24953 - DNA, 110 bp, synthetic construct
  source 1..110: mol_type = other DNA
cagaggaggacagctaagttttcaaggccactgctaagcccacttggcccttcagccccttcccactggcagcagacttcttgggcatttaagttaacatagttgataaa

SEQ ID NO: 24954 - DNA, 110 bp, synthetic construct; identical to SEQ ID NO: 24952
  source 1..110: mol_type = other DNA

SEQ ID NO: 24955 - DNA, 110 bp, synthetic construct; identical to SEQ ID NO: 24953
  source 1..110: mol_type = other DNA

SEQ ID NO: 24956 - DNA, 110 bp, synthetic construct
  source 1..110: mol_type = other DNA
tactcccaagtggtttgggtgatatatatatacacacacaaatatagaggggagggaaataataaagcataggtagcaaaaggttaaaaactggtgaatctagctggaag

SEQ ID NO: 24957 - DNA, 110 bp, synthetic construct
  source 1..110: mol_type = other DNA
agaggggagggaaataataaagcataggtagcaaaaggttaaaaactggtgaatctagctggaagagggtacaattttttgtactattcttgtaacttttctataagctg

SEQ ID NO: 24958 - DNA, 110 bp, synthetic construct; identical to SEQ ID NO: 24956
  source 1..110: mol_type = other DNA

SEQ ID NO: 24959 - DNA, 110 bp, synthetic construct; identical to SEQ ID NO: 24957
  source 1..110: mol_type = other DNA

SEQ ID NO: 24960 - DNA, 110 bp, synthetic construct
  source 1..110: mol_type = other DNA
aacattcccattcagaacaaggaaaaactgttgggtcatagcaattctgaaattccactaggtaaatactgtgaaggtgtccttttatggggtaggtctacccctctggt

SEQ ID NO: 24961 - DNA, 110 bp, synthetic construct
  source 1..110: mol_type = other DNA
tcttcagttactgtggttttcttggtaaccccccataactgattctccacatcctcaacatcctcttttgtctttagctgaggatggtatttaatgtgagggctttggcc

SEQ ID NO: 24962 - DNA, 110 bp, synthetic construct
  source 1..110: mol_type = other DNA
caacatcctcttttgtctttagctgaggatggtatttaatgtgagggctttggccattttagatagttactcatttttttggggggggggtctcatgattatgtgttatc

SEQ ID NO: 24963 - DNA, 110 bp, synthetic construct
  source 1..110: mol_type = other DNA
tataattgatttacagtattgtgccaatttcttctgtacagcataagtaacccagtcatacatatacgtaaattttgtttctaatgctaacctccatcatgttctatccc

SEQ ID NO: 24964 - DNA, 110 bp, synthetic construct; identical to SEQ ID NO: 24963
  source 1..110: mol_type = other DNA

SEQ ID NO: 24965 - DNA, 110 bp, synthetic construct
  source 1..110: mol_type = other DNA
gttcttttgattcccacttcattgctttctctgtagcaccatgttttattgagataataagctctctccacccaatttaatttttttttggaatagatcatattatgaaa

SEQ ID NO: 24966 - DNA, 110 bp, synthetic construct
  source 1..110: mol_type = other DNA
tttagaagctggggtaattaagatatggtgagtcatttgacttataagggagcgggggagccaagatgacgtccaggcattttgagttagaccactgagtgacatcattt

SEQ ID NO: 24967 - DNA, 110 bp, synthetic construct
  source 1..110: mol_type = other DNA
ctagttgatctcctaaaatctgagacaaatcttacttcttctctggagctgcacagactgaaaataatccttcaccccttgttcctttactgaatattgatgaagcacca

SEQ ID NO: 24968 - DNA, 110 bp, synthetic construct
  source 1..110: mol_type = other DNA
aaagtgccaaagattttctttctatatttaaatacccttcttattttgttccccttagggtagatgatgtgcctccaggaatatctctgcttcctgataatattctgcag

SEQ ID NO: 24969 - DNA, 110 bp, synthetic construct
  source 1..110: mol_type = other DNA
tccctactccttttggttgttgatgttacgaaattacattcatgcattgtttgccccaaaacattagctaataattactttaagtgcattagtctcttaaattatgtatt

SEQ ID NO: 24970 - DNA, 110 bp, synthetic construct
  source 1..110: mol_type = other DNA
atcttggagaactattttaaattgctaaattcagatcattcagctttacctaatcaaaggaggtccagacagtgggaaagccggttcatagcactacagatcaaaatgct

SEQ ID NO: 24971 - DNA, 110 bp, synthetic construct
  source 1..110: mol_type = other DNA
aaaggaggtccagacagtgggaaagccggttcatagcactacagatcaaaatgctgagtgagtattagataaagtgtattatattcagttttctctgagtctgttttttt

SEQ ID NO: 24972 - DNA, 110 bp, synthetic construct
  source 1..110: mol_type = other DNA
agtagtaaactgggacattaaggtaagttaatgatgaatgacaggcaacatattattcatgtttactgatcctttaaaaacatttgtcttttgagcaccaccagattgat

SEQ ID NO: 24973 - DNA, 110 bp, synthetic construct
  source 1..110: mol_type = other DNA
aggtgattttgctttaagtatgatgtggcaatgttatctccatttacactctcaggtactgtgatgaggctgtagtttcagtcgctcttgaaacatcacattttacagtt

SEQ ID NO: 24974 - DNA, 110 bp, synthetic construct
  source 1..110: mol_type = other DNA
tttgcttgaaggacttgcaggattcaacatatagttgtattcacagctaagctttgttgcagtgaaaggatgtaaagcaacatcagcagagcacatggggtgaagtctgg

SEQ ID NO: 24975 - DNA, 110 bp, synthetic construct
  source 1..110: mol_type = other DNA
ttcccaccagctaagttgcagttgctcttccttgtcagcacctggttttgtcaggtttttaaattttagctatgttttagtgatattgcccagattttattttgcattcc

SEQ ID NO: 24976 - DNA, 110 bp, synthetic construct
  source 1..110: mol_type = other DNA
tttttaaattttagctatgttttagtgatattgcccagattttattttgcattcccccatcccatgactaatgatgctaagcatttttttcacttgcttatgtttcatct

SEQ ID NO: 24977 - DNA, 110 bp, synthetic construct
  source 1..110: mol_type = other DNA
atgtaaaaggcattcttagcattcttagctgtgggcatttataaaagcaggccatggaccagttttgttatgtggtccaatctcttgctctaaaatactggttttcaaat

SEQ ID NO: 24978 - DNA, 110 bp, synthetic construct
  source 1..110: mol_type = other DNA
ttctgttaaaagcaaaagaatgggagccacctaacttacaacaagattgggctagtcagaggcgtgatcctcttaatgtcacactggtatttggaattgtctctttggca

SEQ ID NO: 24979 - DNA, 110 bp, synthetic construct
  source 1..110: mol_type = other DNA
caacctaggcaaattttagtttattcttctcctgtttattagtaaggataatcaatcctttccaagcagctttttgaagaaacacttgctcaaaataccactaactttta

SEQ ID NO: 24980 - DNA, 110 bp, synthetic construct
  source 1..110: mol_type = other DNA
ggataatcaatcctttccaagcagctttttgaagaaacacttgctcaaaataccactaacttttatagtctgaatatcactagagcaaaactggaaataaaaatatttgt

SEQ ID NO: 24981 - DNA, 110 bp, synthetic construct
  source 1..110: mol_type = other DNA
tggattcgttaaccactgagccacgacaggaactccttattttccatttcttattacaatattcggttatgttctgtctgctatttgtcataacatgttttaattctgct

SEQ ID NO: 24982 - DNA, 110 bp, synthetic construct; identical to SEQ ID NO: 24981
  source 1..110: mol_type = other DNA

SEQ ID NO: 24983 - DNA, 110 bp, synthetic construct
  source 1..110: mol_type = other DNA
tcaaaactgcttcttcaagttccactgtatccttagctctgtcgaatcactttaaggagtaccagagaaatacaagaaagggtctatgattttctaatatgaccccaccc

SEQ ID NO: 24984 - DNA, 110 bp, synthetic construct
  source 1..110: mol_type = other DNA
atttcccaggctgatacagcagaggttgtagttccatgcatggcactttgattcgtgggattagaaatataaaagctgatctgcggggggaaggagagttttcaggaggc

SEQ ID NO: 24985 - DNA, 110 bp, synthetic construct
  source 1..110: mol_type = other DNA
aggatcctgagcctgactagcagcaacggaaacatgagtgaaccccatagagtgtgacttggggtgcaaagcaggagcctgggttaagactgaagctctcatcacgggcc

SEQ ID NO: 24986 - DNA, 110 bp, synthetic construct
  source 1..110: mol_type = other DNA
gtagttattatgattatctcatctataagatgggaaaactgaagcacagagcaattaacttgcctgtggtcatacagctagtaagtgagtaaatccagggttccagggtt

SEQ ID NO: 24987 - DNA, 110 bp, synthetic construct
  source 1..110: mol_type = other DNA
aggtaagcagcaaagtcatttttactcagataagaatggcactgactgggcggtccttgctgtctggcccccacctccattccccactcctctctacagctgttggtcac

SEQ ID NO: 24988 - DNA, 110 bp, synthetic construct
  source 1..110: mol_type = other DNA
ccatgcatcgacctaatattgcagaacttccaggaatggtgcatcccctgtgggggaaatagaatctaaggtttaaagaacagcaaatagtggagttcccttcgtggctc

SEQ ID NO: 24989 - DNA, 110 bp, synthetic construct
  source 1..110: mol_type = other DNA
tgactgaaatgtgatcatatgccctgttctaaagcagtgactgacaaggggaatgaagctatttttctgggctagacaaggagttggcaaacaataccctatgagtcaca

SEQ ID NO: 24990 - DNA, 110 bp, synthetic construct
  source 1..110: mol_type = other DNA
aagctatttttctgggctagacaaggagttggcaaacaataccctatgagtcacatccagcctgtggcctatgtttgaatgacgcatgacctaaaaagttttttacattt

SEQ ID NO: 24991 - DNA, 110 bp, synthetic construct
  source 1..110: mol_type = other DNA
aataagacctgatgtgtcattatgcatacttatattattttaagcatgtgtaataccggatgtgtacagtacagtactgaatatgtaatttgaatcaagtacggtgttct

SEQ ID NO: 24992 - DNA, 110 bp, synthetic construct
  source 1..110: mol_type = other DNA
ccggatgtgtacagtacagtactgaatatgtaatttgaatcaagtacggtgttctgttttcagctgacttggacaaactggctggctctgcagaggtgttctctgggttg

SEQ ID NO: 24993 - DNA, 110 bp, synthetic construct
  source 1..110: mol_type = other DNA
taaactgtccattccttcttcctgcctctatctctgaattatgggtatgcatgctcagcaggggaacaagattgttaaaacactgatgctggcctaacctggtagagctg

SEQ ID NO: 24994 - DNA, 110 bp, synthetic construct
  source 1..110: mol_type = other DNA
acactcttgggctcaagtcctggggtttatttatgagtctctcagtccagctttacaattaatgcttcccataatctcttagaaggctcttggtgacctatggttttgat

SEQ ID NO: 24995 - DNA, 110 bp, synthetic construct
  source 1..110: mol_type = other DNA
attagaatggggtcaaataaacctgaaaatagaatcaggaggaaatggaagctggtttaatgctatgagttggaggtaaaatgggttgtagaaccatggaaaagtttgtg

SEQ ID NO: 24996 - DNA, 110 bp, synthetic construct
  source 1..110: mol_type = other DNA
tttaaacaaacccagtggccatggacatgtcgaggcagagtcccagggctgttactaatgtgcatgctcaaaggatctcccccaaaccaaaattgcattccgaccttgac

SEQ ID NO: 24997 - DNA, 110 bp, synthetic construct
  source 1..110: mol_type = other DNA
taatgtgcatgctcaaaggatctcccccaaaccaaaattgcattccgaccttgactagaatctaagcattgtagttttggagttttgtttatagtcagattcatttcagt

SEQ ID NO: 24998 - DNA, 110 bp, synthetic construct
  source 1..110: mol_type = other DNA
ccatatagtggtatttagtgctgtgtttttcttttcttgcacctcactcactttataacaaggtagagacagcagctatcctcagccttacaaaacagatgcagatgtaa

SEQ ID NO: 24999 - DNA, 110 bp, synthetic construct
  source 1..110: mol_type = other DNA
aggctttgctgcttttaatttttccccattaagacttgccaaaatcattaagcgatttcttaattgcaaccacattcactgacacagacttttaaagcttgggacacttt

SEQ ID NO: 25000 - DNA, 110 bp, synthetic construct
  source 1..110: mol_type = other DNA
tttcttaattgcaaccacattcactgacacagacttttaaagcttgggacactttccactgccacgggggctgtctgggtgatcttgtcgcactgtatcttctgtggaca

SEQ ID NO: 25001 - DNA, 110 bp, synthetic construct
  source 1..110: mol_type = other DNA
tttctgttcagttggtcactgggccagccacacacagacttcgggtagcaggcatgggaaatgtagctgggaccacggcaaagagaggctgataactatatcctccagga

SEQ ID NO: 25002 - DNA, 110 bp, synthetic construct
  source 1..110: mol_type = other DNA
atttaatttttttacaatggaggaaaaagggaaataaatggcctataactgatatgactataagtagaatggccccatcagagggaagtttaggttgattttgagggtca

SEQ ID NO: 25003 - DNA, 110 bp, synthetic construct
  source 1..110: mol_type = other DNA
ctgctatgtcaagttatacttcctgtggcatcatagcacctctccttggaagggaatagccttcccttcaattaatggactctgggtctgaggacagtgtgcgggacatg

SEQ ID NO: 25004 - DNA, 110 bp, synthetic construct
  source 1..110: mol_type = other DNA
cactgggttcccaaaatgcttttcaatttattgggcattgaccaactcgagtgctttattttctgtttggtttttcctctcccagtgtgtggactagatgctctatccag

SEQ ID NO: 25005 - DNA, 110 bp, synthetic construct
  source 1..110: mol_type = other DNA
gcaactgatgctgaaaacgtcgttctgacactgccctttgagcttttccaaaccgcttccagaatgccatccctccaacagcagtcagagggtacagtaacagcaccctg

SEQ ID NO: 25006 - DNA, 110 bp, synthetic construct
  source 1..110: mol_type = other DNA
ctttataccacgggcattcggcatgccagtgtttctgaatgaacgtggtcgtgcgcagataaagaacttggggagctgggacctagtgctgcagtgtggtgaattgattt

SEQ ID NO: 25007 - DNA, 110 bp, synthetic construct
  source 1..110: mol_type = other DNA
ccatttcatgagggacttttctccctaaatagatggtaagctcttagatgacatggactggaagattctctggaaaatttatcttttgtggttccttgtattaataataa

SEQ ID NO: 25008 - DNA, 110 bp, synthetic construct
  source 1..110: mol_type = other DNA
aagaaaataagaatgtcttgcctctcccctccatttaagactttcaaattaaaacaattagtagaagcctgaaaacacattaattagtaacaccctcatttttgtctcat

SEQ ID NO: 25009 - DNA, 110 bp, synthetic construct
  source 1..110: mol_type = other DNA
taaagtaagtttaaaacaggtggtcattgtcctgtagaaacctaaagtccaaaatggatagtactagtcatggagagaaagaaatattcaaaatgtaagcattgaacaac

SEQ ID NO: 25010 - DNA, 110 bp, synthetic construct; identical to SEQ ID NO: 25009
  source 1..110: mol_type = other DNA

SEQ ID NO: 25011 - DNA, 110 bp, synthetic construct
  source 1..110: mol_type = other DNA
tcttaagaccttaagattgtacaccctaagttagtgctaggtaaggggaggctttgcgtagaaggctgtagttgaatcagatattgagtcaaataagaatgtatcctcag

SEQ ID NO: 25012 - DNA, 110 bp, synthetic construct
  source 1..110: mol_type = other DNA
gcgtagaaggctgtagttgaatcagatattgagtcaaataagaatgtatcctcagagaaacagagggaagggcacactgtgcagacgtagcgttactgaccaggaactaa

SEQ ID NO: 25013 - DNA, 110 bp, synthetic construct
  source 1..110: mol_type = other DNA
aagagaaaagccttgctgtctatgttctttgagaaaggttggaggagttgtcttggctttaacatcatttagcttgttggagttatcagctagtctccatctctgacttt

SEQ ID NO: 25014 - DNA, 110 bp, synthetic construct
  source 1..110: mol_type = other DNA
tgaagtgtccactgaattagcagatgtgtctttatgctcaattatccaaatgtatagtcagggttttgaggcttggtaaatatatatttaaaacctgccttttaaaatgt

SEQ ID NO: 25015 - DNA, 110 bp, synthetic construct
  source 1..110: mol_type = other DNA
gctcaattatccaaatgtatagtcagggttttgaggcttggtaaatatatatttaaaacctgccttttaaaatgtagataaaacctcaacctcttagccatgccattttt

SEQ ID NO: 25016 - DNA, 110 bp, synthetic construct
  source 1..110: mol_type = other DNA
aggtgccattgctgactgaaaggtaacttcagagccttaaggtatataagtcagcatagtgcacagggaataatggtctcaaaataagcttttgaatcatcattctataa

SEQ ID NO: 25017 - DNA, 110 bp, synthetic construct
  source 1..110: mol_type = other DNA
cgcagggtagaactaccttcttatctgtagttctcaggtacagagcacgaagggagggttgtgacaaagggagtgatagctaattcacagactgggaggctccagtctgc

SEQ ID NO: 25018 - DNA, 110 bp, synthetic construct
  source 1..110: mol_type = other DNA
cctttcatttagtccagtgactgataggtaccaagcatgttacatggaataagctttaaaaaaaataagtgatcagggagttcccatcgtgtctcagcagaaactaatct

SEQ ID NO: 25019 - DNA, 110 bp, synthetic construct
  source 1..110: mol_type = other DNA
acaggtagaggggcgatgagcagctagctgattgaaagcctgacacatcagacagccctttgcttgtggggaaggtgtgaggtcgagttatgatttactgagaaatcaat

SEQ ID NO: 25020 - DNA, 110 bp, synthetic construct
  source 1..110: mol_type = other DNA
ctctcacattaggttaggtaagttggagagtacactcttctatagcaggatgcatattggtcagggatgtaagattcagctattggcccaggacttctgatgggtagttg

SEQ ID NO: 25021 - DNA, 110 bp, synthetic construct
  source 1..110: mol_type = other DNA
gatcgataagtttatctggatcttagagaacatggtcactaaacacagaagtcctaagttaaaaaaaaatatacagccttgctgttaaagtttgggaaaagatttatttc

SEQ ID NO: 25022 - DNA, 110 bp, synthetic construct
  source 1..110: mol_type = other DNA
aagttaaaaaaaaatatacagccttgctgttaaagtttgggaaaagatttatttcttggcatttacaactaaccgtaactggcctggatgtattgaaaagtcatgttcat

SEQ ID NO: 25023 - DNA, 110 bp, synthetic construct
  source 1..110: mol_type = other DNA
ggttagaattcagatgtgtgacctccaacctctcactacttcttcatcccccccaaaaaaacccaacccaggccttttctaaataaatggattttcagtatctttttcca

SEQ ID NO: 25024 - DNA, 110 bp, synthetic construct
  source 1..110: mol_type = other DNA
accataatccatctgacatgatagctcgccccatgttaaccaaagcacacaggtttcacctggccacagtctctaccctgcagctgaggcaaggtgacaggtgttatttt

SEQ ID NO: 25025 - DNA, 110 bp, synthetic construct
  source 1..110: mol_type = other DNA
aatggtttgaaacttatagtctttaatcacatggttttgtgtagactgcacaatcagtagatgaatagaaaaaaggaaagacagaaaagagaaaaggaaggggacttcag

SEQ ID NO: 25026 - DNA, 110 bp, synthetic construct
  source 1..110: mol_type = other DNA
agtagatgaatagaaaaaaggaaagacagaaaagagaaaaggaaggggacttcagtagctgtactatttttctgttctcagtatcttcttttacttccatttttttctta

SEQ ID NO: 25027 - DNA, 110 bp, synthetic construct
  source 1..110: mol_type = other DNA
cagctgctgcccagtgaggtaacctcaaaatgggttgagctagacaaggtgctggtgtaattacatcccaggtctgtccttgctttacctggaaggaagagagaaccaac

SEQ ID NO: 25028 - DNA, 110 bp, synthetic construct
  source 1..110: mol_type = other DNA
caagtttcctgttttccatacaattcccttcacagtaatttcccaggtttaaactgtcagcagcaacgtgctctgtgtctatgtggttataagggaatcagaaactcaca

SEQ ID NO: 25029 - DNA, 110 bp, synthetic construct
  source 1..110: mol_type = other DNA
atgcctggtatgtgagggcttccccagcacaagagcaaatacacaggtggccacaaaaccacacgtgttgatgtgaacagatgaggaatcaatcagtcaacaagtacttt

SEQ ID NO: 25030 - DNA, 110 bp, synthetic construct
  source 1..110: mol_type = other DNA
aatccccaaaaatgcataataacgaatgtgcaacaccataaaagatagtttaattggaccctaacaacctctgattttgtagctcttctgcctggtcattctaataagaa

SEQ ID NO: 25031 - DNA, 110 bp, synthetic construct
  source 1..110: mol_type = other DNA
cactccggttccaaccagccacttctgctggcccccagctcccacggaccctgtgtgtgtgtggccagagccggcaggcacttcccaggcagggtagcctttccagtccc

SEQ ID NO: 25032 - DNA, 110 bp, synthetic construct
  source 1..110: mol_type = other DNA
tgtgtgtggccagagccggcaggcacttcccaggcagggtagcctttccagtccctctctttacccaaaagaagagatttcatgcatgtttggtttaacaggttgatgca

SEQ ID NO: 25033 - DNA, 110 bp, synthetic construct
  source 1..110: mol_type = other DNA
tcgaagtctacggctgccgttccaggtggtcccacctactccttctctcaaccgagacgaaaggcagctggggagggcatcgcatgaagagatgggtcgtgtccaattca

SEQ ID NO: 25034 - DNA, 110 bp, synthetic construct
  source 1..110: mol_type = other DNA
catttccactgagccacgacgtgaagtccctcacacagtaattctatattcagctttttgagggatctgtagtttgttttgtatgaagctctagcaaaagctgcctgtcg

SEQ ID NO: 25035 - DNA, 110 bp, synthetic construct
  source 1..110: mol_type = other DNA
tgttatcagttgcgcgtgggcttgtataactgggttggtgggtgtggtgtgatgtttctgagctgagcctgccgtcaggagctggaacatgcacccgcactgtctttgac

SEQ ID NO: 25036 - DNA, 110 bp, synthetic construct
  source 1..110: mol_type = other DNA
gttcccattgtggctcagccgtaatgaacccgaccagcatccatgagcctacgggtcgatccctggcctagatcagtgggttgaggatccggcattatcatgagctgtgc

SEQ ID NO: 25037 - DNA, 110 bp, synthetic construct
  source 1..110: mol_type = other DNA
cagccgtaatgaacccgaccagcatccatgagcctacgggtcgatccctggcctagatcagtgggttgaggatccggcattatcatgagctgtgctgtaggtcacagata

SEQ ID NO: 25038 - DNA, 110 bp, synthetic construct
  source 1..110: mol_type = other DNA
taaaaggaattcaataaaagtgaaatacataaaagccggggcttatagatttttattacgattcttttcagccaagctttgaaaagttctgtatgttgggagtatgactc

SEQ ID NO: 25039 - DNA, 110 bp, synthetic construct
  source 1..110: mol_type = other DNA
cgcggtgactactgtggggacgaatgtatgctttcacattaaagtccctgaaatggaaaacacagccatcggttcagctgtgagaccagaggctgcacaggagcccccgc

SEQ ID NO: 25040 - DNA, 110 bp, synthetic construct
  source 1..110: mol_type = other DNA
actatgatgatgtattatccaaataattccaacaaaacaaatgttttgatcttgctaatatgaagatagctatccactacaatgtccaatgcccactgaatctcgactag

SEQ ID NO: 25041 - DNA, 110 bp, synthetic construct
  source 1..110: mol_type = other DNA
taatatgaagatagctatccactacaatgtccaatgcccactgaatctcgactagcctctcaaaaaatagagcagacagatggaggggagttcttggacacagatggctg

SEQ ID NO: 25042 - DNA, 110 bp, synthetic construct
  source 1..110: mol_type = other DNA
gcaccactacaggaacttggggagttagaatctaacactgtctttattttgctgttcaaattgttccaacttcagctgctgggagctctttcaggttagcggctgtgtgc

SEQ ID NO: 25043 - DNA, 110 bp, synthetic construct
  source 1..110: mol_type = other DNA
cagctggcaagagttgcacgtttatagcttcagttagagtccgtgagccttctccaaatggacacaaatttatggcattcgaaagcataattttattttattttattttt

SEQ ID NO: 25044 - DNA, 110 bp, synthetic construct
  source 1..110: mol_type = other DNA
tacggagcagttcctcagcctttttattttataacttgacattttgaagtgtataaaccaggttctttgtggcttgtccctcagtttgagtttgtgtgatgtttctttat

SEQ ID NO: 25045 - DNA, 110 bp, synthetic construct
  source 1..110: mol_type = other DNA
agtgaaaagcaaacccaattatgtcattgagtcttttaatatgtatgaacagaatagcagaaaatggagttagccatggcaaatacaaggtttgcatagaagaagaaaca

SEQ ID NO: 25046 - DNA, 110 bp, synthetic construct
  source 1..110: mol_type = other DNA
aggggctgggtttccagctgtccttacacacagcctgggacttgacacctgtgcgtggaatgagagaataaaataaacgaaggaaaatcacaatattgacattatttgct

SEQ ID NO: 25047 - DNA, 110 bp, synthetic construct
  source 1..110: mol_type = other DNA
tttacaacagaatactgtagaaatgtagctatcaatttgatatgtaatttgtagttcgtagagtcacagagtttgcaccagatttcaccatctacaaatgaagaccctga

SEQ ID NO: 25048 - DNA, 110 bp, synthetic construct
  source 1..110: mol_type = other DNA
taacatgctttgctgccagtcttactgaaacagatgtatagcttgggatgtttgttgtttgtttgttttaatctagaagagggtgaagaggatggtgaatcttagtcaca

SEQ ID NO: 25049 - DNA, 110 bp, synthetic construct
  source 1..110: mol_type = other DNA
cacatattttggtaagtgtcagtagtttcagattgtgcctaatgacatttgaatttggttgatacaagtcaatttcataagcataagagtctgcaattttgttctaataa

SEQ ID NO: 25050 - DNA, 110 bp, synthetic construct
  source 1..110: mol_type = other DNA
tggttgatacaagtcaatttcataagcataagagtctgcaattttgttctaataagcactgacgcaatctcaaagcttgcatggactgaagattgtaaaaacttagaggg

SEQ ID NO: 25051 - DNA, 110 bp, synthetic construct
  source 1..110: mol_type = other DNA
aactccccagaccccacttttagtcaccctggtctctttgctgttctttggatctgcgaagcacacgcccactttgagctggctgtctcgattagcagtatgctttctag

SEQ ID NO: 25052 - DNA, 110 bp, synthetic construct
  source 1..110: mol_type = other DNA
gggctctctttcctacctgggaacaaataatggcccacactaccttgggctgcgagtgatcctagtgagcttcctctgagcccaacgaactgaggaatgcccctaggagg

SEQ ID NO: 25053 - DNA, 110 bp, synthetic construct
  source 1..110: mol_type = other DNA
gaaagtgatgaaataaaatggaaatgacagaactgtcatggaagaccatggaacaaagaatccaaaagcttagaaaaatgggtaccaaactggagtggatatgctctgat

SEQ ID NO: 25054 - DNA, 110 bp, synthetic construct
  source 1..110: mol_type = other DNA
aagaatccaaaagcttagaaaaatgggtaccaaactggagtggatatgctctgatggaaggctgggaaactgttagtcaactaggttctccagagggtctggaggacact

SEQ ID NO: 25055 - DNA, 110 bp, synthetic construct
  source 1..110: mol_type = other DNA
cagagagcacaaatgactcatcccaagttacacagctgggagatggccatgctaatacctgaacccactgtgattatgtgggtagccgcatctttcatgataagcattta

SEQ ID NO: 25056 - DNA, 110 bp, synthetic construct
  source 1..110: mol_type = other DNA
ctatgagtaggcatcagcaggggttcctctttttggagatagttatctagaacgagtctgtattagtcagggtcagataagctgctgtaacaaagagagctcagtgttca

SEQ ID NO: 25057 - DNA, 110 bp, synthetic construct
  source 1..110: mol_type = other DNA
cccccgtccccacctctgtgtctccatcacactttgagctcacgtcctccttcgtgctgtcaggtgttccactggactctcctgtttttattcgatgtgcctgttctggg

SEQ ID NO: 25058 - DNA, 110 bp, synthetic construct
  source 1..110: mol_type = other DNA
agttgaagtcagtgtgaagctggaggactgacgctcttcaacttcaagacttattataaagcttcttggttaccactgaaatcaagacagtatgcactgatgaaaaaata

SEQ ID NO: 25059 - DNA, 110 bp, synthetic construct
  source 1..110: mol_type = other DNA
acaagaaaacaatgtgaaaatgaatgatttcttcccagagacaactgaggtaaagatgcaatgaaatacaatgaaatggcatgtggtagaaacaataatagctacaactc

SEQ ID NO: 25060 - DNA, 110 bp, synthetic construct
  source 1..110: mol_type = other DNA
atgcaatgaaatacaatgaaatggcatgtggtagaaacaataatagctacaactctctaccagaagtctatatgcaataaaaataatctttaaaaatgagggtggtggga

SEQ ID NO: 25061 - DNA, 110 bp, synthetic construct
  source 1..110: mol_type = other DNA
tgcagtctggatccacctggaacctccttggaaggcatgcattggaggtggccgctgaatggcagttagaacagagcccacccttcctctgtttctgtccttccaggcat

SEQ ID NO: 25062 - DNA, 110 bp, synthetic construct
  source 1..110: mol_type = other DNA
tcaaataggttgaatcctctgtgtacttgaatttattcatattgattttctgatactctctcctgaacactaggaacataaaatgtcttattacctatatcagagaaggg

SEQ ID NO: 25063 - DNA, 110 bp, synthetic construct
  source 1..110: mol_type = other DNA
gtgtccctgcttgacactgtgctccatactgtgggattagaggaaagtttcccgtccatgggactccaggctagcagtggtcttggcgcaaattaaggatgcacagtatg

SEQ ID NO: 25064 - DNA, 110 bp, synthetic construct
  source 1..110: mol_type = other DNA
gatgtgttcttgattgtgtataaccaccaaatataatactgcacttataattaacagaaattttctttcagtcatagttgatgggtacccatcacagtgaaaattaggca

SEQ ID NO: 25065 - DNA, 110 bp, synthetic construct
  source 1..110: mol_type = other DNA
agaaattttctttcagtcatagttgatgggtacccatcacagtgaaaattaggcattattctaacaggtttcagaaatactgtcagaactcaaaatagtaactctgtgag

SEQ ID NO: 25066 - DNA, 110 bp, synthetic construct
  source 1..110: mol_type = other DNA
aattagctcgacccaaaccggcaccacggcttgttgaataaatgaatggatgttgaataaatgggccctttacatctagagacctaaagactgttgattccattaatcca

SEQ ID NO: 25067 - DNA, 110 bp, synthetic construct
  source 1..110: mol_type = other DNA
aataacacaaggccttgaagttatatacccctttgctctagctcagagaatggtgatacacaaatttattctttagtgaccgtagtgctcagcaaatttaaacagccctc

SEQ ID NO: 25068 - DNA, 110 bp, synthetic construct
  source 1..110: mol_type = other DNA
atacacaaatttattctttagtgaccgtagtgctcagcaaatttaaacagccctccaacgtgagggagggaaaagcaacatttacaagcactaattctgatttctctctt

SEQ ID NO: 25069 - DNA, 110 bp, synthetic construct
  source 1..110: mol_type = other DNA
agcctgaccatgaaatgtcatcagtgcttactatgataacatggtacactgagacagaaatgagctttgataaaaaattttttgcaaagtgtattacctatagagttgga

SEQ ID NO: 25070 - DNA, 110 bp, synthetic construct
  source 1..110: mol_type = other DNA
tggagaagcctaaggaacaaagctcacgttggtgccacagaaagatacccacgtgtggggtcctggcctgaccatattctccaccatctttcaagagcccctctggctcc

SEQ ID NO: 25071 - DNA, 110 bp, synthetic construct
  source 1..110: mol_type = other DNA
gcaggagaaatgtgtatttgcttatttaagaacaaaagtgaggatataggcaatttagaataaatgaaatgcattactgaaggttaagagtgttaaaattatgctgtcat

SEQ ID NO: 25072 - DNA, 110 bp, synthetic construct
  source 1..110: mol_type = other DNA
tttaatgtgtgaagccctgatgaaagtcatcatctgagctgccatcaaaggactgggcaggggaaagagttaagggagattcaaatcgccgtttccatcaccatctcctg

SEQ ID NO: 25073 - DNA, 110 bp, synthetic construct
  source 1..110: mol_type = other DNA
aattcaagctacctttgagggaaatttctcgtgacaactttatggagtttagtaaaaggtaaataatttgattttgtttacagtagattcatagacttgatttagtgagg

SEQ ID NO: 25074 - DNA, 110 bp, synthetic construct
  source 1..110: mol_type = other DNA
taatttcttacacttacatgtgtacaatcatttaaagattacaaagtgtgctcacaatctttccccatctttttatcataattatcctggaaactagtgaggcaggaatt

SEQ ID NO: 25075 - DNA, 110 bp, synthetic construct
  source 1..110: mol_type = other DNA
aaaggacagacaacatgagttaaacaataaaagaagttgtgttctatttacagacaggacgtttcatagccacctcagctgggacacttctagatttgacctcggtcctt

SEQ ID NO: 25076 - DNA, 110 bp, synthetic construct
  source 1..110: mol_type = other DNA
aggacgtttcatagccacctcagctgggacacttctagatttgacctcggtcctttattcaaacggcgcacatatttattgagcatttatatcatgtccagcattgtgaa

SEQ ID NO: 25077 - DNA, 110 bp, synthetic construct
  source 1..110: mol_type = other DNA
atgggccaactttggacaccagggttcaagattgccaatcttgctttagataacccaaaggagacattccctaggtttaaagctgtcagattttagcttggaaaatacaa

SEQ ID NO: 25078 - DNA, 110 bp, synthetic construct
  source 1..110: mol_type = other DNA
caaaggagacattccctaggtttaaagctgtcagattttagcttggaaaatacaaaaattattctgaagagaggatatacaggtggtaaagaggcaattaggctcaagcc

SEQ ID NO: 25079 - DNA, 110 bp, synthetic construct
  source 1..110: mol_type = other DNA
ccagtatgaatttgaaaaaaaagtggtaagagagaggacatccttgccttgttaatgcctgagcagttgaaaggactgagttgctatttattgagatcggggagattgga

SEQ ID NO: 25080 - DNA, 110 bp, synthetic construct
  source 1..110: mol_type = other DNA
ctcacagatgaggtataactgtacagccacttctgaggggtctttccctggccttgcatagtttctccacatgtcggattagtgctctgcagatctctggggctctctat

SEQ ID NO: 25081 - DNA, 110 bp, synthetic construct
  source 1..110: mol_type = other DNA
agtcaagactgatgttaagcagctgacatcccgcattttattctaggaattttatggtttcaggtcctgctttcaagactttaatccattttgaatttattttttatgtg

SEQ ID NO: 25082 - DNA, 110 bp, synthetic construct
  source 1..110: mol_type = other DNA
ttttaagggctgcatccatggcatatggaagttcctaggctaggggtcaaaatggaactatagctgctggcctccgataggacctcctaatcttgttacttttaagatga

SEQ ID NO: 25083 - DNA, 110 bp, synthetic construct
  source 1..110: mol_type = other DNA
gtcaaaatggaactatagctgctggcctccgataggacctcctaatcttgttacttttaagatgagtaattataggagttcccattgtggctcagtggctaacgaatccg

SEQ ID NO: 25084 - DNA, 110 bp, synthetic construct
  source 1..110: mol_type = other DNA
taggcagagaatggataaacatttcctagtcagctgtgcagtttaaggaaggctcagttagccttctgaaagtccttgagttaagtcgaggtgcaaagaagttctgtgtc

SEQ ID NO: 25085 - DNA, 110 bp, synthetic construct
  source 1..110: mol_type = other DNA
atatgtaatcaagacatctaggttcaagtcccagttcagctactaccaccttgtagaatacttgaactgagctttggattactattaatgcagcaaactcagtttatgct

SEQ ID NO: 25086 - DNA, 110 bp, synthetic construct
  source 1..110: mol_type = other DNA
gcttatttttgtgcctctttattgtaagtccttttttacaatgttgagcatttacatatgatacaaagatttctacactttgcattcattcctgtacattcattcacatg

SEQ ID NO: 25087 - DNA, 110 bp, synthetic construct
  source 1..110: mol_type = other DNA
atatgatacaaagatttctacactttgcattcattcctgtacattcattcacatgcctttgcccccaaatttccaaagtggtgttgttgtcgttgctactaactagctga

SEQ ID NO: 25088 - DNA, 110 bp, synthetic construct
  source 1..110: mol_type = other DNA
ttttcatactttcctccagtaagaaacctcccttaggagtttacctctccagtaactcaggttttgtccatactttagggaataggactaatccgcacaatttaaactta

SEQ ID NO: 25089 - DNA, 110 bp, synthetic construct
  source 1..110: mol_type = other DNA
ctcaggttttgtccatactttagggaataggactaatccgcacaatttaaacttatcccacttgttccttactcagtctttagagtttgtggaggagctgggatttgaaa

SEQ ID NO: 25090 - DNA, 110 bp, synthetic construct
  source 1..110: mol_type = other DNA
tgtatgtttgactataatcttgattaataacttttaaattattaccatagcctgcctctggaaacaaactgtcttctgctactccccctttcatttgttctgattttgca

SEQ ID NO: 25091 - DNA, 110 bp, synthetic construct
  source 1..110: mol_type = other DNA
tgtctcattgttgctaagtgtctcaagtcagtttcataagagtgataatgacagacggccagctcccccaataagttcacgacgccaccaagttttaaaccagaataaag

SEQ ID NO: 25092 - DNA, 110 bp, synthetic construct
  source 1..110: mol_type = other DNA
cggccagctcccccaataagttcacgacgccaccaagttttaaaccagaataaagtaaaaagccaaattattttaagaagtgatttcatttctaatgggttagcattttg

SEQ ID NO: 25093 - DNA, 110 bp, synthetic construct
  source 1..110: mol_type = other DNA
aaaaatcaaactcaccttggaagtctagtagggcagaggagcttattcaataataacatgagatgaaagttgggcctgtaaccaatatcatatgcttgcattttaatatt

SEQ ID NO: 25094 - DNA, 110 bp, synthetic construct
  source 1..110: mol_type = other DNA
agcaggaaggcaggaaagtacagaaatgtaccaaggaatggggtgccaatattatctgatgcaattattcatcagctcattatcctagactcagaatgcattcatgtata

SEQ ID NO: 25095 - DNA, 110 bp, synthetic construct
  source 1..110: mol_type = other DNA
ctgatgcaattattcatcagctcattatcctagactcagaatgcattcatgtataatctgtgtatacatccaaggctagaactttttcctagttgttaccatactttaca

SEQ ID NO: 25096 - DNA, 110 bp, synthetic construct
  source 1..110: mol_type = other DNA
aacaaagccgtactttgacatctagaagctctcttgtgaatgttatgcactagatgtggtatcttgaattattgcacctgatttctcacccttccttataccatcctctt

SEQ ID NO: 25097 - DNA, 110 bp, synthetic construct
  source 1..110: mol_type = other DNA
tacttatgcatttttgtgaaattctgtggaaattaagacaaagagctcaggatttcctttttcagtcgatcgttaaatttatgttgtggattcaggggaaatttttaaac

SEQ ID NO: 25098 - DNA, 110 bp, synthetic construct
  source 1..110: mol_type = other DNA
cctttttcagtcgatcgttaaatttatgttgtggattcaggggaaatttttaaacaatttgatttccattaatatacaccagaggggacaattctgttcttttggggttt

SEQ ID NO: 25099 - DNA, 110 bp, synthetic construct
  source 1..110: mol_type = other DNA
ttagctttacccaggttatcatcccatcaggaaacttggttttagacctgagcgtgtttgtgaccattcagatgaccttaggacattcctttaatcttcttaagcttgat

SEQ ID NO: 25100 - DNA, 110 bp, synthetic construct
  source 1..110: mol_type = other DNA
gtttgtgaccattcagatgaccttaggacattcctttaatcttcttaagcttgattctctttttcaaaaataagagtaagagcccttagaccctctaatccatctgagga

SEQ ID NO: 25101 - DNA, 110 bp, synthetic construct; identical to SEQ ID NO: 25099
  source 1..110: mol_type = other DNA

SEQ ID NO: 25102 - DNA, 110 bp, synthetic construct; identical to SEQ ID NO: 25100
  source 1..110: mol_type = other DNA

SEQ ID NO: 25103 - DNA, 110 bp, synthetic construct
  source 1..110: mol_type = other DNA
ccttttctttttttctcttctccctgttttttttctccttgtcctccaccccaacagtttcaagacaatcttaaaaatgacaagaataaccaagtggcaatgagagaagt

SEQ ID NO: 25104 - DNA, 110 bp, synthetic construct
  source 1..110: mol_type = other DNA
ggaaggcctctgagagggacagggttgcaattttctttatggtagctaggaaagccctggctgggaaaatgaggcatgaccaaaggcttcaaggaagtaaggaagaaata

SEQ ID NO: 25105 - DNA, 110 bp, synthetic construct
  source 1..110: mol_type = other DNA
atcaacaggtgaaaagcagcaaggcaaaaggtggaactgtgttaaatcaaccaaggtcaccagaaaagcctggaaattatatccaggctaaattacacctcctgaggcca

SEQ ID NO: 25106 - DNA, 110 bp, synthetic construct
  source 1..110: mol_type = other DNA
gtcaccagaaaagcctggaaattatatccaggctaaattacacctcctgaggccactctgctcttaggagaaaatctggcttggggagatgttaagaggtccagctatct

SEQ ID NO: 25107 - DNA, 110 bp, synthetic construct
  source 1..110: mol_type = other DNA
aaagtgtattatcgatggtgtatatataactattgcacaaattacaaacaaaaatcagccccagtaaaaagacgtgtgctcaaatctcagatacagtcttttaaaatgct

SEQ ID NO: 25108 - DNA, 110 bp, synthetic construct
  source 1..110: mol_type = other DNA
cagccccagtaaaaagacgtgtgctcaaatctcagatacagtcttttaaaatgctatcctctgatgatggagataacggatatgacctggcattgcattttgaggagatt

SEQ ID NO: 25109 - DNA, 110 bp, synthetic construct
  source 1..110: mol_type = other DNA
aaagaagaaaaagaacagatagaaggagaaaaagctactggagaggaaagtactcaagtagagacaacatgtgagtcacctttcctagccaaagattattacaaaaatgg

SEQ ID NO: 25110 - DNA, 110 bp, synthetic construct
  source 1..110: mol_type = other DNA
acactgtgtggtactctcacaaaagcaatctcagtcctggtaaataatttcagagtatcagaggatggacccagctatcctctagcagagatgccgctataatcaaaaca

SEQ ID NO: 25111 - DNA, 110 bp, synthetic construct
  source 1..110: mol_type = other DNA
ggctgcccctgtgtcatgtggatccgccaagccagggattgaacctgcactgcagttgcgacctgagccacaactgcagcaagccagatcattaacctgctgagccacac

SEQ ID NO: 25112 - DNA, 110 bp, synthetic construct
  source 1..110: mol_type = other DNA
ttgcgacctgagccacaactgcagcaagccagatcattaacctgctgagccacacaggaacttccaacaggatttaaagagataaattatgtgggtaatctacagaagca

SEQ ID NO: 25113 - DNA, 110 bp, synthetic construct
  source 1..110: mol_type = other DNA
gggtccttttgtcagacttttgaaagactttcttggaacacacatatactttcaaatctgccttttctttcaaaatatctccgcctataacactgtgaagctctgttcaa

SEQ ID NO: 25114 - DNA, 110 bp, synthetic construct
  source 1..110: mol_type = other DNA
atctgccttttctttcaaaatatctccgcctataacactgtgaagctctgttcaacaattgttaaggagttcggttttttcccttagcattgagggagaaagtgtttcat

SEQ ID NO: 25115 - DNA, 110 bp, synthetic construct
  source 1..110: mol_type = other DNA
ggcatagatgatacagaggcaaagtttatctaatatttaaagtgaacactgcggatgtgaaatgaggtgattcaaatctatttcttagcatctaaattacggacgtagaa

SEQ ID NO: 25116 - DNA, 110 bp, synthetic construct
  source 1..110: mol_type = other DNA
ggataccaccacacactcagtagaagagctaaaattaaaagaactgaaaatattgtgctttatataacaagaaagggaacaattggagttctcatacatttctggtagta

SEQ ID NO: 25117 - DNA, 110 bp, synthetic construct
  source 1..110: mol_type = other DNA
tgctttatataacaagaaagggaacaattggagttctcatacatttctggtagtaatgtaaaacgtttccatccaaaaaaaatgacacaaacattgtgtatttatagcag

SEQ ID NO: 25118 - DNA, 110 bp, synthetic construct
  source 1..110: mol_type = other DNA
aatataaattaagtactttttcaatacaaaaagtacttaattagttaagaagctaaaaaaactcttcgaaaccatataacatccttctccagggctaggctgctctgcta

SEQ ID NO: 25119 - DNA, 110 bp, synthetic construct
  source 1..110: mol_type = other DNA
aaaaaactcttcgaaaccatataacatccttctccagggctaggctgctctgctacagaataagggaatggagaaaaacaaagggaaggggccatgttttacttgtcaat

SEQ ID NO: 25120 - DNA, 110 bp, synthetic construct
  source 1..110: mol_type = other DNA
aaaagtaatgagaaagagttcacactggtatagagtcctcaaaaatataggaattactggatatatgaagacaaaatacactgtcctgcttcaagatttctttatttcac

SEQ ID NO: 25121 - DNA, 110 bp, synthetic construct
  source 1..110: mol_type = other DNA
actggatatatgaagacaaaatacactgtcctgcttcaagatttctttatttcacaaatgggcattctcattttacagcaaagtacactgtagtaattggcatgaccaag

SEQ ID NO: 25122 - DNA, 110 bp, synthetic construct
  source 1..110: mol_type = other DNA
attaagtccaggttgtgtttttgttccttccttcctcttttttatctgctttttcctacttacctggaatagaattccttttgtgacaacaggaatatatgaataatggc

SEQ ID NO: 25123 - DNA, 110 bp, synthetic construct
  source 1..110: mol_type = other DNA
tttctatttgccataagaggcgagagttcaaatggggagaaactatgtgagtaggttagtttataacaagagctgggagaactcttatttcagggcaataggaacttagc

SEQ ID NO: 25124 - DNA, 110 bp, synthetic construct
  source 1..110: mol_type = other DNA
agatatatttgcacttactctttatacgggcatcctatcttaaaaatagttaaaatcattaggatatgattatatatggtcagtgaagggcagtgagaacagtcactaaa

SEQ ID NO: 25125 - DNA, 110 bp, synthetic construct; identical to SEQ ID NO: 25124
  source 1..110: mol_type = other DNA

SEQ ID NO: 25126 - DNA, 110 bp, synthetic construct
  source 1..110: mol_type = other DNA
tcttgctcactaagctgagctcctggccctggagagctaaattgattaacttttcccaaatatgttcagtgagatcttgttcccttcccctcttcccagtgctttgtggt

SEQ ID NO: 25127 - DNA, 110 bp, synthetic construct
  source 1..110: mol_type = other DNA
gctgttaacactttggtaaggagaggaacatgtgtctgtttttaatgttcccctttgaatgttaacgaccgcagatgttaaccacagggcagacagaatacactgtgctt

SEQ ID NO: 25128 - DNA, 110 bp, synthetic construct
  source 1..110: mol_type = other DNA
tgaatgttaacgaccgcagatgttaaccacagggcagacagaatacactgtgcttagtgaatttactttaaagtcgctgtatttccatgattgccattaaacactggtta

SEQ ID NO: 25129 - DNA, 110 bp, synthetic construct
  source 1..110: mol_type = other DNA
gtacatagcaggtatattaagaacaaattgctgatttctgggggtcagcttaaccctttgtgaatagacaggtaattaaatccataacatcctcgttaatacactttcaa

SEQ ID NO: 25130 - DNA, 110 bp, synthetic construct
  source 1..110: mol_type = other DNA
atagcaaagaaataaacagttcatatgttgccccctaaatgcttgagttagcagctgacaataactgatattaactaaaaatgtatcacatattatgttgaagattcact

SEQ ID NO: 25131 - DNA, 110 bp, synthetic construct
  source 1..110: mol_type = other DNA
tgttgccccctaaatgcttgagttagcagctgacaataactgatattaactaaaaatgtatcacatattatgttgaagattcactattttctcatctcaaactgtggtga

SEQ ID NO: 25132 - DNA, 110 bp, synthetic construct
  source 1..110: mol_type = other DNA
gtagaagcagtgagattattgggattgaggaaatgaatcacaaagggaaaaaacacacttattaataaaaattcattgctttatgtcatagccctgacacttgtcaaata

SEQ ID NO: 25133 - DNA, 110 bp, synthetic construct; identical to SEQ ID NO: 25132
  source 1..110: mol_type = other DNA

SEQ ID NO: 25134 - DNA, 110 bp, synthetic construct
  source 1..110: mol_type = other DNA
tcacaatatatttaaaaaaatgtgtactcttcccatgcatttccactaacatctctgtggttcagagctatgttgatttatgcctgaaattgtgtcacagccacactgtc

SEQ ID NO: 25135 - DNA, 110 bp, synthetic construct; identical to SEQ ID NO: 25134
  source 1..110: mol_type = other DNA

SEQ ID NO: 25136 - DNA, 110 bp, synthetic construct
  source 1..110: mol_type = other DNA
tagtctggtccccctgatttgtcccttggctctaagcattctaagtcaccacaccacagtcagaatcatccttttaaatgaatcatctcatgagcctattctccagaacc

SEQ ID NO: 25137 - DNA, 110 bp, synthetic construct
  source 1..110: mol_type = other DNA
accactactgtacacagtactgaagtagaataggacactcaaaatggacttctattttgttccttttgaccttgaagtttaaatgataaaagtaaaaggaaagtttaaat

SEQ ID NO: 25138 - DNA, 110 bp, synthetic construct
  source 1..110: mol_type = other DNA
gttataatcagtaagttcagggaagaacaataccaaaaatatttattattaaccagcatctttgtttctcacatgttcttaccttcacggccagggggctcagagttaag

SEQ ID NO: 25139 - DNA, 110 bp, synthetic construct; identical to SEQ ID NO: 25138
  source 1..110: mol_type = other DNA

SEQ ID NO: 25140 - DNA, 110 bp, synthetic construct
  source 1..110: mol_type = other DNA
ccactggagcagcagcttcacttgcagatatggcagcaggagctcaaccagccatcagggcacctgggctgcagcaagtgcagtgtgcctagatgaaggagcagccaggg

SEQ ID NO: 25141 - DNA, 110 bp, synthetic construct
  source 1..110: mol_type = other DNA
tctttacatttaaggaaaacctaaaaactatgattactgtctaattctctcagtaatgcagtgagaagtatcatgctctctatattatcttcactttctagataatgcag

SEQ ID NO: 25142 - DNA, 110 bp, synthetic construct; identical to SEQ ID NO: 25141
  source 1..110: mol_type = other DNA

SEQ ID NO: 25143 - DNA, 110 bp, synthetic construct
  source 1..110: mol_type = other DNA
cttcccatctaattacttaagtacacacttcaaggttaatttcctctagcacatagctctctctagaggcacttgcagaagctaggaaacaagctggtccaagttcgccc

SEQ ID NO: 25144 - DNA, 110 bp, synthetic construct
  source 1..110: mol_type = other DNA
gaaaaaagtaaaatgcaaagtgattggtaatgtttgttcagcaatagccattaacttatcttagtactagccttcccagcataaaaatactatcagcaatttttaaggta

SEQ ID NO: 25145 - DNA, 110 bp, synthetic construct
  source 1..110: mol_type = other DNA
aatgtaggactttcccagtggtaattaattacttgtgcaaaaacatggttaatatattttgcaccactgttctgttccctagctgttccattttccttgaaattacacag

SEQ ID NO: 25146 - DNA, 110 bp, synthetic construct
  source 1..110: mol_type = other DNA
acagtaagtagaagattataaaacctcttcaaagatgtagcttctgaattgtgcaatttaaatatgttgtagcagacagcctgttcactgccattcattttcaaataatg

SEQ ID NO: 25147 - DNA, 110 bp, synthetic construct
  source 1..110: mol_type = other DNA
gcaggtccttcccctgctgaagcgacgacaggacaggcactggtctggcccaggtccccaacacccatcatttgaacagagatggttgcataccattccttcagcagctg

SEQ ID NO: 25148 - DNA, 110 bp, synthetic construct
  source 1..110: mol_type = other DNA
ccccaacacccatcatttgaacagagatggttgcataccattccttcagcagctgaaaaacacacccaaaatcaaggggaaataaaacagaaagcctgtgtcaaaattta

SEQ ID NO: 25149 - DNA, 110 bp, synthetic construct
  source 1..110: mol_type = other DNA
ataggaagcagttgtaggcattagttcagttgctctgcaggagtcacaacctgatatgtacattcgctttattcattccaggcttaagatggctgccacgtctatatgtg

SEQ ID NO: 25150 - DNA, 110 bp, synthetic construct
  source 1..110: mol_type = other DNA
aggttggctttgtggttatcatattctcaccagaaaacaaactcaattctcaagcaaggaagctacgcagactcttccactaccaccacgttttcttctagagcccatga

SEQ ID NO: 25151 - DNA, 110 bp, synthetic construct
  source 1..110: mol_type = other DNA
aaggaagctacgcagactcttccactaccaccacgttttcttctagagcccatgatctacggtgcactcctacgatgagtgtttctatgagaaacaattgccatggaggt

SEQ ID NO: 25152 - DNA, 110 bp, synthetic construct
  source 1..110: mol_type = other DNA
cataaaaatgtccgtgggattaacatagttagggctgtaggagttcctacaacttcaatgtattatgcaaactgtaagcatcctacttctttttaacaaagccctataaa

SEQ ID NO: 25153 - DNA, 110 bp, synthetic construct
  source 1..110: mol_type = other DNA
cctacaacttcaatgtattatgcaaactgtaagcatcctacttctttttaacaaagccctataaatgttcctggaaggttatcttaatattcagactacgttgaaataac

SEQ ID NO: 25154 - DNA, 110 bp, synthetic construct
  source 1..110: mol_type = other DNA
cctttaaaaatactaccataccttcaccatttcttcagcaagttcttccttcacagtaagaagatgcagctctctgccttccccaaaccaatctttcccctactgttctg

SEQ ID NO: 25155 - DNA, 110 bp, synthetic construct
  source 1..110: mol_type = other DNA
tcttgggccaactcttttcaatgtcccttgacttttgtatctaatccctagatgctaacttgtcacttgagtgctgatgtctcctagatatctatctacagtataaggct

SEQ ID NO: 25156 - DNA, 110 bp, synthetic construct
  source 1..110: mol_type = other DNA
agagcaggggagtgggaggtaaggaaaatgggtgaaggtgatcaaaggtacaaacttccagttataaataaatcctggggatataatgtatagctagatgactagctaac

SEQ ID NO: 25157 - DNA, 110 bp, synthetic construct
  source 1..110: mol_type = other DNA
gaggtaaggaaaatgggtgaaggtgatcaaaggtacaaacttccagttataaataaatcctggggatataatgtatagctagatgactagctaacaatattgtattgtat

SEQ ID NO: 25158 - DNA, 110 bp, synthetic construct
  source 1..110: mol_type = other DNA
ctaataaggctgctgcctactgactagatatgtcacaaatctgatttctgaaacatggagcaagcatatttttttaaactaaatgaatgatccattaagtaaaatatcag

SEQ ID NO: 25159 - DNA, 110 bp, synthetic construct
  source 1..110: mol_type = other DNA
gaggcttcattcggtctacctaataatgccctgaggaagctattgttatcctcgcattgtaggtgaaaacaaaaacagagaaagtaaataatcagcctaataatttctgg

SEQ ID NO: 25160 - DNA, 110 bp, synthetic construct
  source 1..110: mol_type = other DNA
tccagcccataacacaacagtgacataatgaacatgcacaataaacatttttgaaaagagaaggatctggcagggaaaattatgaaagttttctgtacagctggtagggg

SEQ ID NO: 25161 - DNA, 110 bp, synthetic construct
  source 1..110: mol_type = other DNA
attcccactaaattgcttgacttcgttataaagcaaaatatgaaactatatatagcccaagttgatttgattcaaggtatagaacctctactgacactagacaaagaact

SEQ ID NO: 25162 - DNA, 110 bp, synthetic construct
  source 1..110: mol_type = other DNA
cccaagttgatttgattcaaggtatagaacctctactgacactagacaaagaactccatgttaaccttgaatgctatagagagccaagttttctttgcctggttttcaag

SEQ ID NO: 25163 - DNA, 110 bp, synthetic construct; identical to SEQ ID NO: 25161
  source 1..110: mol_type = other DNA

SEQ ID NO: 25164 - DNA, 110 bp, synthetic construct; identical to SEQ ID NO: 25162
  source 1..110: mol_type = other DNA

SEQ ID NO: 25165 - DNA, 110 bp, synthetic construct
  source 1..110: mol_type = other DNA
ccacgacgggaactccagaactgattttataagtagatattgatttaaatgtaactgaaaatggtatggatattcttcacatgtaaaaatcctaaaccatgagcgaaatg

SEQ ID NO: 25166 - DNA, 110 bp, synthetic construct; identical to SEQ ID NO: 25165
  source 1..110: mol_type = other DNA

SEQ ID NO: 25167 - DNA, 110 bp, synthetic construct
  source 1..110: mol_type = other DNA
aaagcgactcaaatgcctttgtttccagagcaagcctggaccaagtctgcatcataagatttgactctgatgactactaaacactgacaatctctccaacatcccttaat

SEQ ID NO: 25168 - DNA, 110 bp, synthetic construct
  source 1..110: mol_type = other DNA
gattgggttaaatttttgtggtgattaggactgatttcagattctctcttagacttgcttaaatttcatggatgataactgcgcaagaagcaggcaaatgtataaaacta

SEQ ID NO: 25169 - DNA, 110 bp, synthetic construct
  source 1..110: mol_type = other DNA
ctcttagacttgcttaaatttcatggatgataactgcgcaagaagcaggcaaatgtataaaactaaagctttcttagcatttgagccaatttaccttttatagtctaaaa

SEQ ID NO: 25170 - DNA, 110 bp, synthetic construct
  source 1..110: mol_type = other DNA
aattcatggatggcctttaaagaaagtggtgaaggcaaatcaaacagtacacctagtcatcagcttcacatggagggagaatcaaaaactcagactgcccagggatgaag

SEQ ID NO: 25171 - DNA, 110 bp, synthetic construct
  source 1..110: mol_type = other DNA
gtcatcagcttcacatggagggagaatcaaaaactcagactgcccagggatgaaggggagaagttctgggtaatcccaccagacaggcaatttagaatagcagaagtttt

SEQ ID NO: 25172 - DNA, 110 bp, synthetic construct
  source 1..110: mol_type = other DNA
gtcttgagccccctgttgaccccgacaactcacattgcaatgagagttacccctgccttttctaggctaaaggaaagcaggacaaacttagatctccagatgcatgggat

SEQ ID NO: 25173 - DNA, 110 bp, synthetic construct
  source 1..110: mol_type = other DNA
ccttttctaggctaaaggaaagcaggacaaacttagatctccagatgcatgggataaagtatcatagctataaactcagcaaagttaaactcctccattaaaactgggtt

SEQ ID NO: 25174 - DNA, 110 bp, synthetic construct
  source 1..110: mol_type = other DNA
ccaggaacttcatgccattaaaaattactccacttcaacatcctgtttcccaactccactatcattttggttggctgtttatgtgaacgcttgagttcaccttatttgaa

SEQ ID NO: 25175 - DNA, 110 bp, synthetic construct
  source 1..110: mol_type = other DNA
ccactatcattttggttggctgtttatgtgaacgcttgagttcaccttatttgaagtgactttccacctagaccaatttaccagggatccaaagcactcatcttgtggtg

SEQ ID NO: 25176 - DNA, 110 bp, synthetic construct
  source 1..110: mol_type = other DNA
aaagtggagtgtggggaccagtcttttactattttaacgtttggccttagtgattgattagcaacaaaatcccggggagaaaaggtaacattgcaattgcatcacataat

SEQ ID NO: 25177 - DNA, 110 bp, synthetic construct
  source 1..110: mol_type = other DNA
ttacaattttatttaaaggttcacaaaatgcagggccagagagacaggtatggttccagatcataaaacagcagtgtgttttcttaaaactaacttttagtgatttcaga

SEQ ID NO: 25178 - DNA, 110 bp, synthetic construct
  source 1..110: mol_type = other DNA
tctctagtagatctactaacaggagtcacctctgtgccttatccctcacttccagattcgtcacttgtattcttcttgagctagctagctctcttctctgttttctatac

SEQ ID NO: 25179 - DNA, 110 bp, synthetic construct
  source 1..110: mol_type = other DNA
gcttgattgcctaaaactgattcacacacttgttttctgtttctaagccatacacatgtttaatatattcctattaggttacattgtttcattgcctgagaaaactctaa

SEQ ID NO: 25180 - DNA, 110 bp, synthetic construct; identical to SEQ ID NO: 25179
  source 1..110: mol_type = other DNA

SEQ ID NO: 25181 - DNA, 110 bp, synthetic construct
  source 1..110: mol_type = other DNA
caagcgttctgtttctccccttcttaagctgccattcctcttgtgcctctcgccgtgtcgaatgactctgagctcagccttccaaatagttgtaaaaagagaggaccaga

SEQ ID NO: 25182 - DNA, 110 bp, synthetic construct
  source 1..110: mol_type = other DNA
cttaagaactactgtgtaagttttttttaaatctctaactctgatgtactctattctactgtttcaatattattcctgctctttactgaggctcaaaactctgtgtgaat

SEQ ID NO: 25183 - DNA, 110 bp, synthetic construct
  source 1..110: mol_type = other DNA
ctgctatcaggaattactttgattcaggtttgcacatgcaaagaatacatgacaaagatggccttctttggggcatgtaaacaggaataagtatttatgtactacctttt

SEQ ID NO: 25184 - DNA, 110 bp, synthetic construct
  source 1..110: mol_type = other DNA
ataaccctctgtcacactcaataacttgggtctagtttgccagcacagtgtgcggcatagctctagcagacctgcagcctagagcttgaggtttttcctattcagttttt

SEQ ID NO: 25185 - DNA, 110 bp, synthetic construct
  source 1..110: mol_type = other DNA
atcttattcctcatgctgtccctctgcccactttggggctgggcagaacatcttccattagttaattcggtataaagcttgggtccctttgtcactgttgcttcagattc

SEQ ID NO: 25186 - DNA, 110 bp, synthetic construct
  source 1..110: mol_type = other DNA
agtaggggatggaacaagcactgccacagagactgccagatcattaacctactaccacagtgagaactccctaagcagcttttaacgccaaaaaatgggcattatagaaa

SEQ ID NO: 25187 - DNA, 110 bp, synthetic construct
  source 1..110: mol_type = other DNA
ttagaatttttggttatagctgtgaatattgaatctatcttgtggaaacaggacattgccccttatggtcaacttccaaatctctgatatgcattttatctgcagttaca

SEQ ID NO: 25188 - DNA, 110 bp, synthetic construct
  source 1..110: mol_type = other DNA
tgccccattcaactctaaattaatgagagccttgcctatatttatttcttcattgactattgccttaagattcttttcttgctaatttttttttgctattgcctagagta

SEQ ID NO: 25189 - DNA, 110 bp, synthetic construct
  source 1..110: mol_type = other DNA
ttcttcattgactattgccttaagattcttttcttgctaatttttttttgctattgcctagagtaaaatctctcttctgtgagaagagcatgtttttcatttgatatgag

SEQ ID NO: 25190 - DNA, 110 bp, synthetic construct
  source 1..110: mol_type = other DNA
aattgaggaggaagtaaaagcaaaagaggattcacaggctgggagaataggaatggctttcaaactggaggtcattgcacttggactcaggaagttgtgaacaaaaagct

SEQ ID NO: 25191 - DNA, 110 bp, synthetic construct
  source 1..110: mol_type = other DNA
cttctgtggatgaaggtttacttatctgattggtaattcaaacttcttctctgtttttaattttataatcagatgagctttctggactactctctcttatctaagaagcc

SEQ ID NO: 25192 - DNA, 110 bp, synthetic construct
  source 1..110: mol_type = other DNA
ggcaatattttacaattagagaaggaatctttaatttttgattttaaaggcatcgacactgtaattggggagggattcactaggctgagtaaaatttccaaacttcagaa

SEQ ID NO: 25193 - DNA, 110 bp, synthetic construct
  source 1..110: mol_type = other DNA
actcagtgggataaggatctggcattcccttgagctatggtgtaggctgcagatggaactcatatctggcattgctatgactgtggcatacgccagtggctatagctctg

SEQ ID NO: 25194 - DNA, 110 bp, synthetic construct; identical to SEQ ID NO: 25193
  source 1..110: mol_type = other DNA

SEQ ID NO: 25195 - DNA, 110 bp, synthetic construct
  source 1..110: mol_type = other DNA
ctacagcctcatggatactagtcagcttccttaaccattgagccacaatgggaactgctgtttttgttttaataaattgaattaaaaataaactttggtcagcaaaaaca

SEQ ID NO: 25196 - DNA, 110 bp, synthetic construct; identical to SEQ ID NO: 25195
  source 1..110: mol_type = other DNA

SEQ ID NO: 25197 - DNA, 110 bp, synthetic construct
  source 1..110: mol_type = other DNA
ccagccctgctttctctcctttctgctctatgtgctgggatccccgttcctataaccatacttctgtggctagagagcttgccttttgtcattaccttttcccatttttg

SEQ ID NO: 25198 - DNA, 110 bp, synthetic construct
  source 1..110: mol_type = other DNA
gggaaggcattgacaaacttaatcattgtgtttaaattcctaataacattcaaacaatatcctgaatcaagcaatccctagttgaaatgccagtgcttaaaacaaaatgg

SEQ ID NO: 25199 - DNA, 110 bp, synthetic construct
  source 1..110: mol_type = other DNA
tatgttaggaatttccatttctccttaaataaaacgttagtttcaaaaattgtccttagaatagaaagactttcagtgatttgttaaaccttcttctcccctgtaccttc

SEQ ID NO: 25200 - DNA, 110 bp, synthetic construct
  source 1..110: mol_type = other DNA
ttagaatagaaagactttcagtgatttgttaaaccttcttctcccctgtaccttcagaaatccacaaattttgcaccatatctggcagaaaggaggttgtgccaatctat

SEQ ID NO: 25201 - DNA, 110 bp, synthetic construct
  source 1..110: mol_type = other DNA
agagtataggataggagacagcaatgcagaaggagagctctggagatttacagaggatccttgccagtttttagctgagtagggtttagtataggaaagccacaagccgt

SEQ ID NO: 25202 - DNA, 110 bp, synthetic construct
  source 1..110: mol_type = other DNA
gatccttgccagtttttagctgagtagggtttagtataggaaagccacaagccgtgaaaaaatcctcagagatcacagaaacctaggcatactttgttctctcaccaacc

SEQ ID NO: 25203 - DNA, 110 bp, synthetic construct
  source 1..110: mol_type = other DNA
gattcaggagagaaatcagcagttcaaatttacagttgataggttagagatccttcacatgaagattcaagtagaaaagtagttacgtgtgtctaaattctgaagacaag

SEQ ID NO: 25204 - DNA, 110 bp, synthetic construct
  source 1..110: mol_type = other DNA
cacatgaagattcaagtagaaaagtagttacgtgtgtctaaattctgaagacaaggttcaaacaagccacaattatgagtttgaagtcaccaacattaagactgtattta

SEQ ID NO: 25205 - DNA, 110 bp, synthetic construct
  source 1..110: mol_type = other DNA
tggtttagatgatgtctccctacaagactcatagaagccaggtaattccaccttagtagtgaacttttggaacctcagaggctgaagaggaagttgttgactgccagcag

SEQ ID NO: 25206 - DNA, 110 bp, synthetic construct
  source 1..110: mol_type = other DNA
gtagtgaacttttggaacctcagaggctgaagaggaagttgttgactgccagcaggagtaaaggcaatatcagatcaatggatcttcaatcagcattcacctcagcaccc

SEQ ID NO: 25207 - DNA, 110 bp, synthetic construct
  source 1..110: mol_type = other DNA
atctcaggaaaacttcaaatagttgaattaaggggcttttaggtcatgtggttaatgttgatttgggcccagattcttgggtgtgtgattttatggttagcaattttcag

SEQ ID NO: 25208 - DNA, 110 bp, synthetic construct
  source 1..110: mol_type = other DNA
tgttgatttgggcccagattcttgggtgtgtgattttatggttagcaattttcagaagattttaaaaaagaaaaattgtatcttctttatgctgagtcatgactggaaca

SEQ ID NO: 25209 - DNA, 110 bp, synthetic construct
  source 1..110: mol_type = other DNA
tttaaatagtaagcaagaacactggtttgcaaatgaggaggtctgttagacggctagtggctttctgcattgtctcggtaatgtcatcaatgatgcaatctaattcagct

SEQ ID NO: 25210 - DNA, 110 bp, synthetic construct
  source 1..110: mol_type = other DNA
agtggctttctgcattgtctcggtaatgtcatcaatgatgcaatctaattcagctctgtatctctaccctgtaggtatttttgttttatttacttcatcctaagaccagt

SEQ ID NO: 25211 - DNA, 110 bp, synthetic construct
  source 1..110: mol_type = other DNA
tacctgagtccaggagcattgatactacccaagttgtcaggtcatgaagagacgagagctggaaggcattatgtatggacagtagttactgagacaaaggctgagggctt

SEQ ID NO: 25212 - DNA, 110 bp, synthetic construct
  source 1..110: mol_type = other DNA
gagctggaaggcattatgtatggacagtagttactgagacaaaggctgagggctttaattaacacagtttggaagtgagaaactttggcaccatgacaggaattcaaggc

SEQ ID NO: 25213 - DNA, 110 bp, synthetic construct
  source 1..110: mol_type = other DNA
ctaagcctaagagacctcacaagcttctgttttcatcctcttgcaacacttttaccatccatggcgatgcccagctaggttagtgaattatgagtgaccattgagaaaca

SEQ ID NO: 25214 - DNA, 110 bp, synthetic construct
  source 1..110: mol_type = other DNA
catccatggcgatgcccagctaggttagtgaattatgagtgaccattgagaaacaggcccagatagccagcaccaggatcttgggcttaaaatacggtcatttttagacc

SEQ ID NO: 25215 - DNA, 110 bp, synthetic construct; identical to SEQ ID NO: 25213
  source 1..110: mol_type = other DNA

SEQ ID NO: 25216 - DNA, 110 bp, synthetic construct; identical to SEQ ID NO: 25214
  source 1..110: mol_type = other DNA

SEQ ID NO: 25217 - DNA, 110 bp, synthetic construct
  source 1..110: mol_type = other DNA
aattctgaagtttaagaactactgctctctgctcagccagctctctctaaggatggtaagttcataacctccattaaaagctgtagcatttgtgtactagctgaggtagt

SEQ ID NO: 25218 - DNA, 110 bp, synthetic construct
  source 1..110: mol_type = other DNA
gtaagttcataacctccattaaaagctgtagcatttgtgtactagctgaggtagtgcccggtgctataacatagtagaaataaaaattgccaacgtaagagttccatcat

SEQ ID NO: 25219 - DNA, 110 bp, synthetic construct
  source 1..110: mol_type = other DNA
cccatttcactcattacatttttttttcttttttaaagaactttcccatttcacaaaaattcagaacatcaagtatcgcacacaggatctgcttcaagcttaaattctca

SEQ ID NO: 25220 - DNA, 110 bp, synthetic construct; identical to SEQ ID NO: 25219
  source 1..110: mol_type = other DNA

SEQ ID NO: 25221 - DNA, 110 bp, synthetic construct
  source 1..110: mol_type = other DNA
gagtatgtaatattttcaagacacagtagtggggctggcccataggaaataacaaatattcagttcctgttttcaaggagctgacaatatccatctacctgtcaggtgag

SEQ ID NO: 25222 - DNA, 110 bp, synthetic construct
  source 1..110: mol_type = other DNA
atattcagttcctgttttcaaggagctgacaatatccatctacctgtcaggtgagacctcttatgttcttaaagatctctgagaaagaagacctcaccatactattggca

SEQ ID NO: 25223 - DNA, 110 bp, synthetic construct
  source 1..110: mol_type = other DNA
gacaataagccactgtcaatgagcttctgagcacattgctacctgagacaatgggccacttcagtgttggcagcaacaccaaaaagatgaataggtaacaaaaagcaatc

SEQ ID NO: 25224 - DNA, 110 bp, synthetic construct
  source 1..110: mol_type = other DNA
tggatggtgtttgaaggttcccccaaaatagaagtagcatccatcaaacagctttggcaactgaaataacaagaaaaatctcgttaaaaagcagaccaaaatattttaaa

SEQ ID NO: 25225 - DNA, 110 bp, synthetic construct
  source 1..110: mol_type = other DNA
aaacagctttggcaactgaaataacaagaaaaatctcgttaaaaagcagaccaaaatattttaaaacacagcatatgaatgagggcaataaaagtaatagttgcaagcag

SEQ ID NO: 25226 - DNA, 110 bp, synthetic construct
  source 1..110: mol_type = other DNA
acatcttgatccttccagattctggcggtgctcaggatgagtgccaaacatacagaggcttgtcacctctcacagggcccccgagctcttaaactaggtaaagacgtgtt

SEQ ID NO: 25227 - DNA, 110 bp, synthetic construct
  source 1..110: mol_type = other DNA
aggcttgtcacctctcacagggcccccgagctcttaaactaggtaaagacgtgttgccagcagtaacttggcaattgtctgtcaacatacataaagcatgagaagaacgg

SEQ ID NO: 25228 - DNA, 110 bp, synthetic construct
  source 1..110: mol_type = other DNA
aaaaagaatatggtgataaaaatatgacttgtaggagttctcttgcagtgcagcgggtttaaggatccggtgttgtcactgcagtggctcagctttaatctctggccagg

SEQ ID NO: 25229 - DNA, 110 bp, synthetic construct
  source 1..110: mol_type = other DNA
aacctttctccctgccttctcccacataggggtggtaaaagctaattcaccccacttccaagagaggatggtcaataagacatacgagaaatctctggctttcttaataa

SEQ ID NO: 25230 - DNA, 110 bp, synthetic construct
  source 1..110: mol_type = other DNA
ttctcttgtggcacagcgggttgaggatctggcgatgtcactgccgggggtctggttacagctggggtgcgggtttgaccccgggccctggaacttcctcaggtgcatat

SEQ ID NO: 25231 - DNA, 110 bp, synthetic construct
  source 1..110: mol_type = other DNA
ttacagctggggtgcgggtttgaccccgggccctggaacttcctcaggtgcatatggccaaaaaccccccaaaaaagtaagcaatcagaaaaatttgagaacaactcaca

SEQ ID NO: 25232 - DNA, 110 bp, synthetic construct
  source 1..110: mol_type = other DNA
ctaaaaataaaatggcaaaaacatcagaaaggttattttatggttgacattattcattgtttggaaggtatatataggcgacagtcaaacaggcaaatgagttagtaatg

SEQ ID NO: 25233 - DNA, 110 bp, synthetic construct
  source 1..110: mol_type = other DNA
attgtttggaaggtatatataggcgacagtcaaacaggcaaatgagttagtaatgtgaccgttaagttcagaaaagatggctaattcaaagtgacaacatcagaggttca

SEQ ID NO: 25234 - DNA, 110 bp, synthetic construct
  source 1..110: mol_type = other DNA
gtcctaattaaagattgcattctatcctctaagtggcccataggcatgactccggggataactaaaagttaatatccagaccaactggtactgttttcttaggatttcat

SEQ ID NO: 25235 - DNA, 110 bp, synthetic construct
  source 1..110: mol_type = other DNA
aagtacacactctataatgggaaaaaaatgaggtaatgaggaaatcagaataacacaaaacataggtaagaaaaaaacagagccatcacaataataggtgccaaaggtct

SEQ ID NO: 25236 - DNA, 110 bp, synthetic construct
  source 1..110: mol_type = other DNA
caaaacataggtaagaaaaaaacagagccatcacaataataggtgccaaaggtctgtgtgttatttgaatctgaatggcctaagaaattaaagaaatgatcatttatcca

SEQ ID NO: 25237 - DNA, 110 bp, synthetic construct
  source 1..110: mol_type = other DNA
tcccttgttttactcaccggctgcctcttgacacctagccaatttttccagacaaggacccgaagctgatgaaactgggaagccatccttcaaatgccaggaacaagaga

SEQ ID NO: 25238 - DNA, 110 bp, synthetic construct
  source 1..110: mol_type = other DNA
agtaaaaattgaggtcagggaggtagctcacacttagaataatttcagggaacggcccaacaagtctaaaacattatacatgacttctgtccaactttatgtgctccagg

SEQ ID NO: 25239 - DNA, 110 bp, synthetic construct
  source 1..110: mol_type = other DNA
tcatggttactagtcggatttgtttccgctgtgccacaacaagaactcccaaggactttaagtaaggctccagctggacatgcagagttctttaaggagagaggaggggg

SEQ ID NO: 25240 - DNA, 110 bp, synthetic construct; identical to SEQ ID NO: 25239
  source 1..110: mol_type = other DNA

SEQ ID NO: 25241 - DNA, 110 bp, synthetic construct
  source 1..110: mol_type = other DNA
tttctattttttttcttgggttcatatgaaaatatctatcttttaaaagcatttgctcatttcaaagagaacttgcccttataaaaaactcccagagagtcagatgctgt

SEQ ID NO: 25242 - DNA, 110 bp, synthetic construct
  source 1..110: mol_type = other DNA
gttttatttcctgagttccaggaaagggaattttgagttagacactatgccacctgtttctcagtttatgttggaactatgtacccttggtcaaacaccagtcatttgca

SEQ ID NO: 25243 - DNA, 110 bp, synthetic construct
  source 1..110: mol_type = other DNA
gtttctcagtttatgttggaactatgtacccttggtcaaacaccagtcatttgcaaatgactttgctgaagagaacctactcaggaaattctatatcctcttggtgaatt

SEQ ID NO: 25244 - DNA, 110 bp, synthetic construct
  source 1..110: mol_type = other DNA
attatatattgcctaattgtttcttctttgcctctcccataagctccgttagaacagtgatttttgttgaatgagggaatttttttctccaggtaattttattaaaagac

SEQ ID NO: 25245 - DNA, 110 bp, synthetic construct; identical to SEQ ID NO: 25244
  source 1..110: mol_type = other DNA

SEQ ID NO: 25246 - DNA, 110 bp, synthetic construct
  source 1..110: mol_type = other DNA
tattatggaatatagtggaagatgatgtattattgacagtttacataatccagatgtaagcatcattgtggtggatcatgtcgtgccttacaagatcaaaaagggatgtt

SEQ ID NO: 25247 - DNA, 110 bp, synthetic construct
  source 1..110: mol_type = other DNA
gtaagcatcattgtggtggatcatgtcgtgccttacaagatcaaaaagggatgttatcttgtaaagagttgtctcattgacaccaggagaatgctacccttaatggtaga

SEQ ID NO: 25248 - DNA, 110 bp, synthetic construct
  source 1..110: mol_type = other DNA
taaaccgatttcttttctttgagttctgaaagatggaagcaattaatgaaccactctgagtagagagttgcctagcatgtctgtgtcttttaagaacttcagagaatgtc

SEQ ID NO: 25249 - DNA, 110 bp, synthetic construct
  source 1..110: mol_type = other DNA
aactctctgccttaaaagcctatagtgtcttttactatttcatggtcttctaagcctaggttgaatggagataaattacagtagttttgtttcttaacttgattatattt

SEQ ID NO: 25250 - DNA, 110 bp, synthetic construct
  source 1..110: mol_type = other DNA
tcttctaagcctaggttgaatggagataaattacagtagttttgtttcttaacttgattatatttttttggcatgaaatccttcccatctttccttaaaaatgttgaagc

SEQ ID NO: 25251 - DNA, 110 bp, synthetic construct
  source 1..110: mol_type = other DNA
cttatgccgtgagtgcagctagaaaaaataaataaaataaaatagcttaagttaatcactgggaatgatggtgaatggggtcattcctacttctacctcttgggtactgg

SEQ ID NO: 25252 - DNA, 110 bp, synthetic construct
  source 1..110: mol_type = other DNA
ggaatgggggtcgtgtaggagatggcttgtgagagcgaatcaggaaaagaccacagcttttcaatccaaggaggcgaaaactgagaaaagacatgctggaagtccttaaa

SEQ ID NO: 25253 - DNA, 110 bp, synthetic construct
  source 1..110: mol_type = other DNA
tccagcactctcatttaatagcatagctcataagggcaatgaaagctgctagcactgtgaagaaatgcacatccccagagactgacataatcagacaagccttctgtgga

SEQ ID NO: 25254 - DNA, 110 bp, synthetic construct
  source 1..110: mol_type = other DNA
attgagtaatagctgaggcatagagagattacctaagtaacttgcccaaagctgtagcgctggtaaactgtgattctggaactaaacacctaggcaggttaggcatcaac

SEQ ID NO: 25255 - DNA, 110 bp, synthetic construct
  source 1..110: mol_type = other DNA
cattgacattgctggtgaacattagttatctggcagctctccctctgctgcacccactcttgggtgttgggaaagaaaaagatactcaggaacaaaataacatgtgaaaa

SEQ ID NO: 25256 - DNA, 110 bp, synthetic construct
  source 1..110: mol_type = other DNA
gtaacttgcccaaggtcactttaccttgttagtgacagagctgagttctgaatatcaaagcctgtgcttttaacacttaaggtgtctgtcactgtccccttggctaccta

SEQ ID NO: 25257 - DNA, 110 bp, synthetic construct
  source 1..110: mol_type = other DNA
tgctgttattataacatcttaagaatgaggaaacgaggctcagggaggtgaagtacttgtccaagtgtgcacacctgcaacttaggagctgggatttcggacccaggcag

SEQ ID NO: 25258 - DNA, 110 bp, synthetic construct
  source 1..110: mol_type = other DNA
cttgtccaagtgtgcacacctgcaacttaggagctgggatttcggacccaggcaggtggttgtagggcaacacacttagccagtgtccacactgcctctgcaatcaggac

SEQ ID NO: 25259 - DNA, 110 bp, synthetic construct
  source 1..110: mol_type = other DNA
agatcccagagagcacccttactcctctgccatgtgaggacacagagagaagatagctgtgtatgaaccaggaagaagaccctcaccagacattgaatctactggtgcct

SEQ ID NO: 25260 - DNA, 110 bp, synthetic construct
  source 1..110: mol_type = other DNA
cctttcgaggcacacccaaaacatctcattagccttgtcctagtccccacctacttgggaggctgataaaatggcagattctgggattcccaccctagagctttgcaaat

SEQ ID NO: 25261 - DNA, 110 bp, synthetic construct
  source 1..110: mol_type = other DNA
tgggaggctgataaaatggcagattctgggattcccaccctagagctttgcaaatcttatacttcaaactgagtattactgacaaagaaagaaacgacttgactttaaga

SEQ ID NO: 25262 - DNA, 110 bp, synthetic construct
  source 1..110: mol_type = other DNA
agaaaagggacagtcaaaatcgtttgatgtgaaaggcaacacaatagtcaccactttaaaaagtatgcctcaaaagtcaacttcatgccaaaaaaagagtagccttctca

SEQ ID NO: 25263 - DNA, 110 bp, synthetic construct
  source 1..110: mol_type = other DNA
tggacgaattagacatggtggccgtagttcgatacgcctatgacaaaaaagctaatccccaagttggcgtggcttttccctatatcaaggatgcctatgaggtaaaacct

SEQ ID NO: 25264 - DNA, 110 bp, synthetic construct
  source 1..110: mol_type = other DNA
tccccaagttggcgtggcttttccctatatcaaggatgcctatgaggtaaaacctgcaggtcttttattcatactaattgtccccccttctgttcctttatactaaacag

SEQ ID NO: 25265 - DNA, 110 bp, synthetic construct
  source 1..110: mol_type = other DNA
ataccattagtgaggtatttgtcatttaaggattgtaaaatgcttttcatacagtccttaagtcaagctttcggatagctcttaagtttttttctcacatcagattctgt

SEQ ID NO: 25266 - DNA, 110 bp, synthetic construct
  source 1..110: mol_type = other DNA
tttggggggaaagagtggcaggaagagtgacatacagataaataatggggggaattagattctggttccttgtgcttttactcggagaaacatgcttcagctttttctct

SEQ ID NO: 25267 - DNA, 110 bp, synthetic construct
  source 1..110: mol_type = other DNA
tagattctggttccttgtgcttttactcggagaaacatgcttcagctttttctcttacccaggttacagaagcttaatcacttttttgaccacacattgccttcagagta

SEQ ID NO: 25268 - DNA, 110 bp, synthetic construct
  source 1..110: mol_type = other DNA
gggcctgagatagatgaacctttccctgcctctctccacctgatacctgggtgtcctcctgatcctcctgaggaaatccaaagagctgctcagtcaagaggcctgggctc

SEQ ID NO: 25269 - DNA, 110 bp, synthetic construct
  source 1..110: mol_type = other DNA
ctcctgatcctcctgaggaaatccaaagagctgctcagtcaagaggcctgggctctgtgtcactttttagggaatgcatttatcatttcctccctagctatgtctgtgtg

SEQ ID NO: 25270 - DNA, 110 bp, synthetic construct
  source 1..110: mol_type = other DNA
gatgcccaccttgccatgcactcagcatacctgtcaaggcctatggacccttggtgttgagtagctgctgtgtggttctgagaaagaaataggaggggaacagtggggag

SEQ ID NO: 25271 - DNA, 110 bp, synthetic construct
  source 1..110: mol_type = other DNA
cattaactgatgaatctgaatagaggcaacaggatggggaacctccatttcctaatttaaaggtggccttgggggtaggatacgtatcctggcttcctcttagctaatca

SEQ ID NO: 25272 - DNA, 110 bp, synthetic construct
  source 1..110: mol_type = other DNA
tttaaaggtggccttgggggtaggatacgtatcctggcttcctcttagctaatcaggttccagaagagacattaattgcagccagtccatcctgctggggagacccaagc

SEQ ID NO: 25273 - DNA, 110 bp, synthetic construct
  source 1..110: mol_type = other DNA
actatcccccaaatctaccccaatcttaagatttgttcagggtatctctttttggggtttgacctgggggcacagataggggcagggagatagaaaaaatattgcggatg

SEQ ID NO: 25274 - DNA, 110 bp, synthetic construct
  source 1..110: mol_type = other DNA
gtctcctttttttttttttttttttttttatcttaccctctttctcatctgagtaagaggaaggatatgagggtctgatctcgggtcagcttggtgtcaggataatgagg

SEQ ID NO: 25275 - DNA, 110 bp, synthetic construct
  source 1..110: mol_type = other DNA
agaggaaggatatgagggtctgatctcgggtcagcttggtgtcaggataatgaggaacctggagtccgtcattggaacccaccaactattcatgttcatcttgccctggc

SEQ ID NO: 25276 - DNA, 110 bp, synthetic construct
  source 1..110: mol_type = other DNA
caggacagggctgacggcagcatccaccatagggctcccactccatgttgtcaggggctccatcaggcctgcatcacagttcgtttccctctgcctgccctgtttcctcc

SEQ ID NO: 25277 - DNA, 110 bp, synthetic construct
  source 1..110: mol_type = other DNA
ggctccatcaggcctgcatcacagttcgtttccctctgcctgccctgtttcctcctccttccctttacaggtgatctccagtcagcttcttgcaccccaaactctatctc

SEQ ID NO: 25278 - DNA, 110 bp, synthetic construct
  source 1..110: mol_type = other DNA
ttgtgtggtcagtctcgtctcgtctcccacagacacactagtttgactcttccctcaacacctgggcctgaaatgccagcttcctttctgctccaaactaccagttcttc

SEQ ID NO: 25279 - DNA, 110 bp, synthetic construct
  source 1..110: mol_type = other DNA
gaagagccatcagtcaagtcctaagcaatgttagcatttgtcctctgtaccagcgttatgcacagtcttgtattcttacagcctggttctctcatgagtattagtcttat

SEQ ID NO: 25280 - DNA, 110 bp, synthetic construct
  source 1..110: mol_type = other DNA
ttatgcacagtcttgtattcttacagcctggttctctcatgagtattagtcttatctcttgaacctctgctccataattagaacttcccccatgcctcttgtgctctgtt

SEQ ID NO: 25281 - DNA, 110 bp, synthetic construct
  source 1..110: mol_type = other DNA
ctgctctcaacctgagagccaggtggagaacagggatgggggaagggctttgctaaagaaggcgctggacgtctgcaggggcccagcctggacagcaggctttatcatgc

SEQ ID NO: 25282 - DNA, 110 bp, synthetic construct
  source 1..110: mol_type = other DNA
aagaaggcgctggacgtctgcaggggcccagcctggacagcaggctttatcatgcaaagtgggcgtccctcagccctgtcagaccaaaagcgggattgaacaaagctgca

SEQ ID NO: 25283 - DNA, 110 bp, synthetic construct
  source 1..110: mol_type = other DNA
acttgcccttttaactcttccccttttgggatgttgggggtcagcattattatcaacacacctcttgtctgggaccacacaacgtgaactttttgaggggtcatcgatgg

SEQ ID NO: 25284 - DNA, 110 bp, synthetic construct
  source 1..110: mol_type = other DNA
acacacctcttgtctgggaccacacaacgtgaactttttgaggggtcatcgatggcagtggagttgtttgccaggcactgaacgtccccagggttcttctgtttggtttt

SEQ ID NO: 25285 - DNA, 110 bp, synthetic construct
  source 1..110: mol_type = other DNA
aatcccaggtcccagaccagtcctcctggaacacaaggcccccaggtgaatgtgtggtcactaaagagctgggtgtcctggatgatgaatggtgcagggaggggtgggac

SEQ ID NO: 25286 - DNA, 110 bp, synthetic construct
  source 1..110: mol_type = other DNA
ggtcactaaagagctgggtgtcctggatgatgaatggtgcagggaggggtgggacaaaggccagatcctaaacgacttgggtaggtgaacgggaggttggtaggtgaagg

SEQ ID NO: 25287 - DNA, 110 bp, synthetic construct
  source 1..110: mol_type = other DNA
aagatgtttctaatagtaagagaaagaaagaagattgagattaacctctctgccctcttccttatcagctatgtcatcttgaacccataacctagtttctctattaatgt

SEQ ID NO: 25288 - DNA, 110 bp, synthetic construct
  source 1..110: mol_type = other DNA
acaaagttgtgttagtttcagctgtaacggcgaagtgaatcatttatgcatatacatgtatccattcctttcccatggcctagctatgtgataagttctcactgtcctgt

SEQ ID NO: 25289 - DNA, 110 bp, synthetic construct
  source 1..110: mol_type = other DNA
tctcctactccatttactgaatccaatcagaagtcagaggacaaggatgcctgattgctccagtctacaaatgtcagcctccaggggcacagagcaggttggagaatgga

SEQ ID NO: 25290 - DNA, 110 bp, synthetic construct
  source 1..110: mol_type = other DNA
tgctccagtctacaaatgtcagcctccaggggcacagagcaggttggagaatggagctggtgaggcaaatggagactctctcctctagtgggaaagaagcatgtgtctca

SEQ ID NO: 25291 - DNA, 110 bp, synthetic construct
  source 1..110: mol_type = other DNA
acaggaaataactagccccaagtcacacagcttgtgtgtagcagtgctaggattgcctgtaaatcttcaatgccaggaatattttctccccagaaggctgtctccccagg

SEQ ID NO: 25292 - DNA, 110 bp, synthetic construct
  source 1..110: mol_type = other DNA
tcccttgctttcaggaaggtgacaaatgttgacagcttccaaggcacactagggtctcctcccctgtctgcatctccattgtctctgtttcaaccacatggactttcttc

SEQ ID NO: 25293 - DNA, 110 bp, synthetic construct
  source 1..110: mol_type = other DNA
ctcccttcctgctggcggatgctgacctacctactgctatacaagtcaaattgtgactttagctagaccccagggaactggaacccatgcttgcccacacagaatgagag

SEQ ID NO: 25294 - DNA, 110 bp, synthetic construct
  source 1..110: mol_type = other DNA
actttagctagaccccagggaactggaacccatgcttgcccacacagaatgagagatccttgagaacttcatacctgccaggcactgtgtccagctctgtggacagatta

SEQ ID NO: 25295 - DNA, 110 bp, synthetic construct
  source 1..110: mol_type = other DNA
cctgtgatttaacactagatggggtgggcagtgctaagcctgtcacctccctctcacatacaatcacacttttattaatgctgcctgggactggattttcattctaggag

SEQ ID NO: 25296 - DNA, 110 bp, synthetic construct
  source 1..110: mol_type = other DNA
caaggcatagaccatcagtacgaataggcagaaagctggctttggatggcctggcagggcctaagttagaggtcagaagtagggcagcccagctgctaatgagactgggc

SEQ ID NO: 25297 - DNA, 110 bp, synthetic construct
  source 1..110: mol_type = other DNA
tcaccccttctatgctgagcgaccaagcctgacttctgggcacctgtgctgcattagctaatggagggagtggcttttttccaccatcagttttgctgataattacaggt

SEQ ID NO: 25298 - DNA, 110 bp, synthetic construct
  source 1..110: mol_type = other DNA
ctcagaggaaagaggatcaagaggatgacttttagctcctctcttccttttccgtcaatgcacgccacttaggtgtccaagttatttcagcaatagatccttcctcttta

SEQ ID NO: 25299 - DNA, 110 bp, synthetic construct
  source 1..110: mol_type = other DNA
ctctgattcccaagacccttaatgataaactgtaaaattttaacccggccatataaagctccataccttttggcctcttttatttttctggcctcactaggcctttattt

SEQ ID NO: 25300 - DNA, 110 bp, synthetic construct
  source 1..110: mol_type = other DNA
gtggcggtctcttacggattttcagcttgcactgagcatccagtccctaaagagtcctttgtctcatgaagagtgcattttcctcctacttcaagccacaaagtcatgtg

SEQ ID NO: 25301 - DNA, 110 bp, synthetic construct
  source 1..110: mol_type = other DNA
gcaagagatgtttgagctagtactgatgtgtaggtttagtatcaattttagctatgctcaccaactggctatgcagaaaatctacttccaaaagtctacctccatgaggg

SEQ ID NO: 25302 - DNA, 110 bp, synthetic construct
  source 1..110: mol_type = other DNA
ccagtcagaatggccataatttaaaaatctgcaaataataaatgctgaagaaagtgtggagaaacaggaaccaccctactctgttggagggaatgtaaattggtgcaacc

SEQ ID NO: 25303 - DNA, 110 bp, synthetic construct; identical to SEQ ID NO: 25302
  source 1..110: mol_type = other DNA

SEQ ID NO: 25304 - DNA, 110 bp, synthetic construct
  source 1..110: mol_type = other DNA
atcaccaatggctacctacagctaaatcttccaagttctcccactgacctcataggagacaagacaagcagcatttttttctgatagcatgtgtaatgagaagacttaat

SEQ ID NO: 25305 - DNA, 110 bp, synthetic construct
  source 1..110: mol_type = other DNA
acctgcacagatctctacagttaggagctggcaccagaaagtgaatttacaagaggcagttggtccttcagcccagggacgtccctttacggcctggcatccaagttcat

SEQ ID NO: 25306 - DNA, 110 bp, synthetic construct
  source 1..110: mol_type = other DNA
aaaaggtcaatcggtcttacaaagagaggccatgtgattccaagccattatcagtcattctcagatgaactcctataaagcagactcatccttgaagctggagaagatgc

SEQ ID NO: 25307 - DNA, 110 bp, synthetic construct
  source 1..110: mol_type = other DNA
cattctcagatgaactcctataaagcagactcatccttgaagctggagaagatgcatggaaaaggagataccgactgaactggaagaagttttaggcattatttagctca

SEQ ID NO: 25308 - DNA, 110 bp, synthetic construct
  source 1..110: mol_type = other DNA
gtatgaatgttctatcttgatttcctgcctttatcttctgtctctttctaaaggtggtagagtatttattttgctgctgttattttggaataagagacttagtattatgc

SEQ ID NO: 25309 - DNA, 110 bp, synthetic construct
  source 1..110: mol_type = other DNA
caagcaggtggctgccccaggaaaggaagaggacttatttctttcctgtttgaatccaaatgctgtcatttgtagaaaaggcagctggtgaagagaggctgcaggacata

SEQ ID NO: 25310 - DNA, 110 bp, synthetic construct
  source 1..110: mol_type = other DNA
agatctctgaatacaagaaaaatggtggaggctatagaatcactgactatggaagctggacaggatctccaagttcatcaagcccgaccccctgtgggaagtttgcaacc

SEQ ID NO: 25311 - DNA, 110 bp, synthetic construct
  source 1..110: mol_type = other DNA
ctggacaggatctccaagttcatcaagcccgaccccctgtgggaagtttgcaacccagggagcgaaaatctcccccaagtaggcttgtggaagaaggtggatactccagt

SEQ ID NO: 25312 - DNA, 110 bp, synthetic construct
  source 1..110: mol_type = other DNA
tcaaggccctcgtatgacacggatcatacctagttggagggatgggtgtcaggggagagatggaaaagaggaaggggggagtcgggagggaagagaagaagggaacaagg

SEQ ID NO: 25313 - DNA, 110 bp, synthetic construct; identical to SEQ ID NO: 25312
  source 1..110: mol_type = other DNA

SEQ ID NO: 25314 - DNA, 110 bp, synthetic construct
  source 1..110: mol_type = other DNA
ggaagtgatgcttatttcaaagaaaaatcatatcatgagattaaagcatcagcgagcatcagggccgggcctcagaaatcttaggcatgatttatgcaaaagatccagct

SEQ ID NO: 25315 - DNA, 110 bp, synthetic construct
  source 1..110: mol_type = other DNA
ctccatcaccgcttgccagggcctcctccagctcctcgtcacatctcctctactataggaaggaacactgcccctctcctgggctcatcctggggcttctctttgggtgg

SEQ ID NO: 25316 - DNA, 110 bp, synthetic construct
  source 1..110: mol_type = other DNA
tttctttatctataaaatgggtaattcagagggcattgcaaagactgatacaatgcatgtaaagcactcagcacagcacacagaggtgctctaaatgaggcagccacgta

SEQ ID NO: 25317 - DNA, 110 bp, synthetic construct
  source 1..110: mol_type = other DNA
catgtaaagcactcagcacagcacacagaggtgctctaaatgaggcagccacgtatatacagccaccaccactgtgacatccatttccccctcctccttccctaccaggc

SEQ ID NO: 25318 - DNA, 110 bp, synthetic construct
  source 1..110: mol_type = other DNA
gaccacctcctccacctggatcaggtgagtctcctgagccaggtacaacccaggtgtcagcagcacaaggtccctcaagatgtactctgccacactctgcctgagacttc

SEQ ID NO: 25319 - DNA, 110 bp, synthetic construct
  source 1..110: mol_type = other DNA
gtcagcagcacaaggtccctcaagatgtactctgccacactctgcctgagacttctcagagatgctgacagggtgacatgtctgccacttcctgacactgtgaccctggg

SEQ ID NO: 25320 - DNA, 110 bp, synthetic construct
  source 1..110: mol_type = other DNA
agcacgttattccgggctcactcgtttccaaaatagaacccgaagcagaagaagagcgggattgaaagctaaagggaagcgcaggaaagcgccatttaccgggcacttag

SEQ ID NO: 25321 - DNA, 110 bp, synthetic construct
  source 1..110: mol_type = other DNA
gcgggattgaaagctaaagggaagcgcaggaaagcgccatttaccgggcacttagagggggcgtggccaggagggccattacgaccccacagccagtcggggaccagcaa

SEQ ID NO: 25322 - DNA, 110 bp, synthetic construct
  source 1..110: mol_type = other DNA
ccatggcctaagcttcaattatctgaaaattggaaaactagctcccttctaccagagccagatgcaactcctgcaccctccatgcctctgcgccttcatttgcagggctg

SEQ ID NO: 25323 - DNA, 110 bp, synthetic construct
  source 1..110: mol_type = other DNA
gggagtctagtgtcaccatagggaggaattcaatagagtcaagtgtagaagcaggtgtccagctccaaacccagggctcagctcagcccccagaagagccagtgggatga

SEQ ID NO: 25324 - DNA, 110 bp, synthetic construct
  source 1..110: mol_type = other DNA
tgtccagctccaaacccagggctcagctcagcccccagaagagccagtgggatgaaagcaggagcctgtccacttaaacatgaggagggaaagagtggcttgggccccca

SEQ ID NO: 25325 - DNA, 110 bp, synthetic construct
  source 1..110: mol_type = other DNA
aaaccattagagttaataaacgagttcacaaaggctgcagggtaaatcttcagcataaaaacattacttgtatttctacgcaatggcaatgaacaatctgaataaagcac

SEQ ID NO: 25326 - DNA, 110 bp, synthetic construct
  source 1..110: mol_type = other DNA
ggaaaaaaaaaaagaatgaatgagtgcactgaaggctcagagaaatcaagcaatctcctcctggtcacacagccagtaagggcagagcctgggcctgaagctgggtctgt

SEQ ID NO: 25327 - DNA, 110 bp, synthetic construct
  source 1..110: mol_type = other DNA
gaagaaaagaacaagccttggacaagactggagaagtttcaacctttgtgcaccctgggtggttatgcaagatagtctggccactttggaaatcagtatggcagttcgta

SEQ ID NO: 25328 - DNA, 110 bp, synthetic construct; identical to SEQ ID NO: 25327
  source 1..110: mol_type = other DNA

SEQ ID NO: 25329 - DNA, 110 bp, synthetic construct
  source 1..110: mol_type = other DNA
tgggacgcttagatactcacgctgtgcctcagttttctcttctgtagtaataaagtaggaggtagctcatgggattggcatggtgatcggtgtttatacatgcaagagtg

SEQ ID NO: 25330 - DNA, 110 bp, synthetic construct
  source 1..110: mol_type = other DNA
taggaggtagctcatgggattggcatggtgatcggtgtttatacatgcaagagtgcttagcgcaggatctggcagataatagcgttccatgattttagctgtccacatac

SEQ ID NO: 25331 - DNA, 110 bp, synthetic construct
  source 1..110: mol_type = other DNA
gctcttttaaccgatttgtagttacatatctgaaagtttgttgtctgtttcctttgccagactataagctccacgagggcggaacctcatctgtttcaggcgtcactgta

SEQ ID NO: 25332 - DNA, 110 bp, synthetic construct
  source 1..110: mol_type = other DNA
gccagactataagctccacgagggcggaacctcatctgtttcaggcgtcactgtatccccagcacagaacaggagcccacttaacatttgctgagcaaattaaggcacga

SEQ ID NO: 25333 - DNA, 110 bp, synthetic construct
  source 1..110: mol_type = other DNA
ggccgcagagccagccacacagccccacaggtcctttttagccacagggaaccgcctctggagctaaaagacactgatgccgccgtgggcgacaacatcggctacattac

SEQ ID NO: 25334 - DNA, 110 bp, synthetic construct
  source 1..110: mol_type = other DNA
tagccagcccagaggttctggaagccagagcctgcccaaggcctgtggggcccgccacaccacacaagatatggaaaatctgtcctgagcactgggttccctgaccccag

SEQ ID NO: 25335 - DNA, 110 bp, synthetic construct
  source 1..110: mol_type = other DNA
cacaccacacaagatatggaaaatctgtcctgagcactgggttccctgaccccagctctcccgggacactcacatatttgaaggacagcacaatggcagtgacaatccca

SEQ ID NO: 25336 - DNA, 110 bp, synthetic construct
  source 1..110: mol_type = other DNA
cagtggctgggttactgaggagtggagagagatttttaaatgaggcgggaggaacaatgatcttgacctggactagcaaaggcaggagactgaaggttccccctgagaag

SEQ ID NO: 25337 - DNA, 110 bp, synthetic construct
  source 1..110: mol_type = other DNA
aatgatcttgacctggactagcaaaggcaggagactgaaggttccccctgagaaggcaggacagcaggagggaggaaggagatggaagatggagatcatactcagtcagg

SEQ ID NO: 25338 - DNA, 110 bp, synthetic construct
  source 1..110: mol_type = other DNA
gcaagaatgagccaagattggaacccaggaatttctactgtggcgcaatgggattggcggtgtcttggaagctctgggacatgggttcgatccctgggtcggcacagtgg

SEQ ID NO: 25339 - DNA, 110 bp, synthetic construct
  source 1..110: mol_type = other DNA
ggcggtgtcttggaagctctgggacatgggttcgatccctgggtcggcacagtgggttaaggatccagtgtcactgcagctgaggattaggtggcaactacagctcagat

SEQ ID NO: 25340 - DNA, 110 bp, synthetic construct
  source 1..110: mol_type = other DNA
cctggtccaggcactgagaacacataacattctaaaggcattagtattttctccacttgccaaaggagaaaatgatggctcagagaggtgccatgacttgactgaggcca

SEQ ID NO: 25341 - DNA, 110 bp, synthetic construct
  source 1..110: mol_type = other DNA
cttgccaaaggagaaaatgatggctcagagaggtgccatgacttgactgaggccacacagctgggcggaggcagactcagggctcgaatgcagctctcctggcttcaggt

SEQ ID NO: 25342 - DNA, 110 bp, synthetic construct
  source 1..110: mol_type = other DNA
caggccaggagcctggacgggggaccatatggactggaccatatgctcatcacctggctggcccaaccctctccccactttccggctcaaggtccctgacccagatttgt

SEQ ID NO: 25343 - DNA, 110 bp, synthetic construct
  source 1..110: mol_type = other DNA
ggctggcccaaccctctccccactttccggctcaaggtccctgacccagatttgtcctgaacaggaagtgaagactaaagtgatcgtgttcccctggcactccattgcgg

SEQ ID NO: 25344 - DNA, 110 bp, synthetic construct
  source 1..110: mol_type = other DNA
aacctaggcagcttcagtctctcgtgagacagtatttgctgagggcaagctccgtgccaggcccctgggggaggaaaaaagtcttgtccctcccttggctcccttgggaa

SEQ ID NO: 25345 - DNA, 110 bp, synthetic construct
  source 1..110: mol_type = other DNA
gttttgttattgtctttataaagcaagtactctactgaatgcatgcagacataacaatgaatacatgtttttgacaacagagcatatgaggactaatttttgctctttaa

SEQ ID NO: 25346 - DNA, 110 bp, synthetic construct
  source 1..110: mol_type = other DNA
ttataaagcaagtactctactgaatgcatgcagacataacaatgaatacatgtttttgacaacagagcatatgaggactaatttttgctctttaaaattctgatctatgt

SEQ ID NO: 25347 - DNA, 110 bp, synthetic construct
  source 1..110: mol_type = other DNA
aacattagtatatcttgcagtttcttttttatccttaaataattcctgccgactaggcatccttattctctaacattctccttcagcaggcatatacaaaggtttctaaa

SEQ ID NO: 25348 - DNA, 110 bp, synthetic construct
  source 1..110: mol_type = other DNA
tccccatttccctccccctggcaaccaccattctactttctgtctctaattttgactattcttagtaccttgtataaatggaatcttatagtatttgtctttttgtggtt

SEQ ID NO: 25349 - DNA, 110 bp, synthetic construct
  source 1..110: mol_type = other DNA
caccattctactttctgtctctaattttgactattcttagtaccttgtataaatggaatcttatagtatttgtctttttgtggttggcttattttgcttaatacctcaag

SEQ ID NO: 25350 - DNA, 110 bp, synthetic construct
  source 1..110: mol_type = other DNA
tcaaatgatggacccaggattaggcaagtttgggatctggaggctgggagtggacaccacctgaaaggctgggccctggagagggtggagtgggaggtggtcggtagcct

SEQ ID NO: 25351 - DNA, 110 bp, synthetic construct
  source 1..110: mol_type = other DNA
accacctgaaaggctgggccctggagagggtggagtgggaggtggtcggtagcctgggtgctcccaccaaagcgtcttactctagctacccacaccctaggcaaactgcg

SEQ ID NO: 25352 - DNA, 110 bp, synthetic construct
  source 1..110: mol_type = other DNA
agaaccacaacgcgcccggacaaaacatggatcacatggccttacaccctgctctgcagaaaccaaacaatagcatctcaaacgctgcggtctcagaggagaaacaaggc

SEQ ID NO: 25353 - DNA, 110 bp, synthetic construct
  source 1..110: mol_type = other DNA
gcagaaaccaaacaatagcatctcaaacgctgcggtctcagaggagaaacaaggcgtttaagtactcagagaaacaaaatcacaaggactcctcagatcttgctgtggcc

SEQ ID NO: 25354 - DNA, 110 bp, synthetic construct
  source 1..110: mol_type = other DNA
agctggctcacccgccacagtgcccgcactcagcacctcagtgtcgagacttcataccttcagcacgagagtggtcgcatctccactaagtttgaatttgtccctagccc

SEQ ID NO: 25355 - DNA, 110 bp, synthetic construct
  source 1..110: mol_type = other DNA
tagatccttgttatgttccactaagtaaacgaactgagaagaggagtatgaggaaagagggaagaaagcatggtctagacatagggggaaatgtcccagaaacctccaga

SEQ ID NO: 25356 - DNA, 110 bp, synthetic construct
  source 1..110: mol_type = other DNA
ggtagcaaagaaaacttttgtatgttggtaagttggtgaccactgatatgttataggaaaacgtatggcatatctgtcatctacgatgccttgaaaggtaatcaggtgct

SEQ ID NO: 25357 - DNA, 110 bp, synthetic construct
  source 1..110: mol_type = other DNA
ggaaaacgtatggcatatctgtcatctacgatgccttgaaaggtaatcaggtgctaacagaaactaactcatggaaactggtttgtattggctgccgattattgctccta

SEQ ID NO: 25358 - DNA, 110 bp, synthetic construct
  source 1..110: mol_type = other DNA
tcaagccaaagggagttaatgaatggattttacacctaaaagtccaggtgaatttaggcacagctgaacccaggggcccaaacgattgatgtcattgggtgtcccccccg

SEQ ID NO: 25359 - DNA, 110 bp, synthetic construct
  source 1..110: mol_type = other DNA
aggcacagctgaacccaggggcccaaacgattgatgtcattgggtgtcccccccgccacttctctctcatctctttctctaagccccacccccacatctcttgtttctgc

SEQ ID NO: 25360 - DNA, 110 bp, synthetic construct
  source 1..110: mol_type = other DNA
gtaaggtatgatcctatgcatttgaaatgtattaacttatttaattcttggaacaacgagacaggtaataataacactgtttcacagatgcaaaagctgagacacagcag

SEQ ID NO: 25361 - DNA, 110 bp, synthetic construct
  source 1..110: mol_type = other DNA
acgagacaggtaataataacactgtttcacagatgcaaaagctgagacacagcagtcaagtcacttggccaaggttacatagctgttaacagctagtaaatggaagagtc

SEQ ID NO: 25362 - DNA, 110 bp, synthetic construct; identical to SEQ ID NO: 25360
  source 1..110: mol_type = other DNA

SEQ ID NO: 25363 - DNA, 110 bp, synthetic construct; identical to SEQ ID NO: 25361
  source 1..110: mol_type = other DNA

SEQ ID NO: 25364 - DNA, 110 bp, synthetic construct
  source 1..110: mol_type = other DNA
tcttgaaaacaagacaacaggcccaaaatggagttacttaggctaagccccacatcaccaaattcacctcgatttgacttaacttatttacagttttggctctcctagaa

SEQ ID NO: 25365 - DNA, 110 bp, synthetic construct
  source 1..110: mol_type = other DNA
caccaaattcacctcgatttgacttaacttatttacagttttggctctcctagaaatggagtcttaaagccagtcaatcagaattgcctaatcagccctagttagatgac

SEQ ID NO: 25366 - DNA, 110 bp, synthetic construct
  source 1..110: mol_type = other DNA
aggagtcgtttagtagggtctgtggcccgctatctagcgatgatctccacccgcgtcccagtgtctagttcttgacccttcgcacgtgcctcgatttcccttccttccca

SEQ ID NO: 25367 - DNA, 110 bp, synthetic construct
  source 1..110: mol_type = other DNA
aatcaaaccctcatcttcacagaccctagtcggattccttaccactgagccacaacaggaacttccccttttacttgtcacagtgtttacaaggtttgcccacgtggtaa

SEQ ID NO: 25368 - DNA, 110 bp, synthetic construct
  source 1..110: mol_type = other DNA
caggaacttccccttttacttgtcacagtgtttacaaggtttgcccacgtggtaacatgtgtcagtacttaagtatttttgcctgtacaccgttatcatcctgattttac

SEQ ID NO: 25369 - DNA, 110 bp, synthetic construct
  source 1..110: mol_type = other DNA
tcgatgacctgaaaggccctcagcctgtctggctcacgatcgaggaaaatgagtacgtcgctgaaggtggggttcccgtcctcccccatagccagcactcggtctcctgg

SEQ ID NO: 25370 - DNA, 110 bp, synthetic construct
  source 1..110: mol_type = other DNA
tctgaaaggaggttttgctagacaaggtggaacttctcaaggtgacaagcaaatggtacagcctaagctgtgaccctttgctcgctccataaccaccccctcccctttgg

SEQ ID NO: 25371 - DNA, 110 bp, synthetic construct
  source 1..110: mol_type = other DNA
gtacagcctaagctgtgaccctttgctcgctccataaccaccccctcccctttggaaagccagagcctaaactgtcccccaagccccacccagccccagcacaaaccatg

SEQ ID NO: 25372 - DNA, 110 bp, synthetic construct; identical to SEQ ID NO: 25370
  source 1..110: mol_type = other DNA

SEQ ID NO: 25373 - DNA, 110 bp, synthetic construct; identical to SEQ ID NO: 25371
  source 1..110: mol_type = other DNA

SEQ ID NO: 25374 - DNA, 110 bp, synthetic construct
  source 1..110: mol_type = other DNA
gaaggagaaagaattgctcagagaagagactgaagacaaagaagattctgctggtgatgtaccattaatgcccgaaggcacaatgggagggttcaggaactggggaaatg

SEQ ID NO: 25375 - DNA, 110 bp, synthetic construct
  source 1..110: mol_type = other DNA
gatgtaccattaatgcccgaaggcacaatgggagggttcaggaactggggaaatgcaagatgtgctcctcaaattggaaggtgaagtccagcagttagtccactaagggc

SEQ ID NO: 25376 - DNA, 110 bp, synthetic construct
  source 1..110: mol_type = other DNA
aaagtcacaaatggactgatgtctctaagtcagggatgaaggcctctaggcatcagcagtgagctgccttcttgcctgagcttagctggataataacacagagatgcgca

SEQ ID NO: 25377 - DNA, 110 bp, synthetic construct
  source 1..110: mol_type = other DNA
gcagtgagctgccttcttgcctgagcttagctggataataacacagagatgcgcacgcagacgggccaatcctttccagggcacagccaagcatcctggggccctgggag

SEQ ID NO: 25378 - DNA, 110 bp, synthetic construct
  source 1..110: mol_type = other DNA
tgccagccttcgccacagccacagcagcgccttgtctaaaacctacgccacagctcaccagacccttaacccactgagcgagaccaggaatcaaactgcatcctcacgga

SEQ ID NO: 25379 - DNA, 110 bp, synthetic construct
  source 1..110: mol_type = other DNA
cagccacagcagcgccttgtctaaaacctacgccacagctcaccagacccttaacccactgagcgagaccaggaatcaaactgcatcctcacggagactatgttgggttc

SEQ ID NO: 25380 - DNA, 110 bp, synthetic construct
  source 1..110: mol_type = other DNA
tcagatttgttaaccactgagccactacgggaactccctacatttcatttaaatcagggtttctcagctattgagtacatggtggtaggggctatcctgttcattgtcaa

SEQ ID NO: 25381 - DNA, 110 bp, synthetic construct; identical to SEQ ID NO: 25380
  source 1..110: mol_type = other DNA

SEQ ID NO: 25382 - DNA, 110 bp, synthetic construct
  source 1..110: mol_type = other DNA
aaggctcagtggctgtgaaagacaggggtgggcagagttcacagggcagagggaggcctctgggtccccggtatcctgcacacgacgacccaatagcacagacagagcag

SEQ ID NO: 25383 - DNA, 110 bp, synthetic construct
  source 1..110: mol_type = other DNA
gcctctgggtccccggtatcctgcacacgacgacccaatagcacagacagagcagacaaggaaactgacagggttagcccttccaccccatgcccagtctgaaagtccta

SEQ ID NO: 25384 - DNA, 110 bp, synthetic construct
  source 1..110: mol_type = other DNA
accttcccatcccttctagcccaagcctgaggttcttgttcgttcaaccagatgattttatagcccttggactgcagtccaatggcattttcattgagagaaaccctggc

SEQ ID NO: 25385 - DNA, 110 bp, synthetic construct
  source 1..110: mol_type = other DNA
cactggcacatttaagaacttcttcttaaacaccaggacactgctgccctccccttcccacccttgtccacgctttggaggaaagatcttcctggggccaagaccaaact

SEQ ID NO: 25386 - DNA, 110 bp, synthetic construct
  source 1..110: mol_type = other DNA
agaattctgaggaaacagaacaattaggagcaagccagagggcactgagaaaggtgtgggaagacatctgggaagtctgatcatggaggggagatggaggatcacagctc

SEQ ID NO: 25387 - DNA, 110 bp, synthetic construct
  source 1..110: mol_type = other DNA
gtgggaagacatctgggaagtctgatcatggaggggagatggaggatcacagctcaaggaggtggcagagtcccagtgacaatgcactcatcactcacgcagctcttcct

SEQ ID NO: 25388 - DNA, 110 bp, synthetic construct
  source 1..110: mol_type = other DNA
tgtccatcaaatggccataataatagcagtactagtaacaacaatggtgatagcactaataagatatgtattgagcacctagtatgtgccaggctcagtgctaagtacct

SEQ ID NO: 25389 - DNA, 110 bp, synthetic construct
  source 1..110: mol_type = other DNA
cggctgctgctcttgcttctgctaccactgcagtcgctctcagccccatgctccctaagatcccctcactgtcacccaatcagtcactcaatcaacacagagttctgagc

SEQ ID NO: 25390 - DNA, 110 bp, synthetic construct
  source 1..110: mol_type = other DNA
tggcagccgccaatagctctgggcccctgctggacctgctggcactatcatccaggggtcctgtggctgtgcccatgtcactgggccaggcgccccctcgctgggctgtg

SEQ ID NO: 25391 - DNA, 110 bp, synthetic construct
  source 1..110: mol_type = other DNA
gggtcctgtggctgtgcccatgtcactgggccaggcgccccctcgctgggctgtgctgcacctggccgcctctgccctccctttgttgacccacccagtcctggtgctgc

SEQ ID NO: 25392 - DNA, 110 bp, synthetic construct
  source 1..110: mol_type = other DNA
agtatgtcaagttgccaaccctggctttggcaattaccagaggtccctcttcagtcaataattctaaaatgactggagttgctgcctcctctttaatcaggtctcaagct

SEQ ID NO: 25393 - DNA, 110 bp, synthetic construct
  source 1..110: mol_type = other DNA
caataattctaaaatgactggagttgctgcctcctctttaatcaggtctcaagctgggggatgcagagaggctcatttttttctacctcctttatgttttcttgaaagaa

SEQ ID NO: 25394 - DNA, 110 bp, synthetic construct
  source 1..110: mol_type = other DNA
gattgattagtgctagaaattatggtccagcttgtagatatttgctcacaacatgggacaaatggattgattcaataacgatcctccttggcctcgagtgaggtgaggga

SEQ ID NO: 25395 - DNA, 110 bp, synthetic construct
  source 1..110: mol_type = other DNA
actctaaccataaacctggatctctagcctgccagcctggcctgaagattttcagcctgctagcccctaccatcacatgagccgattcctttttaaaaaatttttaggac

SEQ ID NO: 25396 - DNA, 110 bp, synthetic construct
  source 1..110: mol_type = other DNA
agattttcagcctgctagcccctaccatcacatgagccgattcctttttaaaaaatttttaggacttgtggctgtctgatgggagggggagggagtgggaaggatcggga

SEQ ID NO: 25397 - DNA, 110 bp, synthetic construct
  source 1..110: mol_type = other DNA
aagggatggttgagcgttttcatgccacgtggaaaaaggagggcgaacacgctttttgcttctgtgcctgggcctggccagctttcaagatatttgcttcctttcatttg

SEQ ID NO: 25398 - DNA, 110 bp, synthetic construct
  source 1..110: mol_type = other DNA
ttgcttctgtgcctgggcctggccagctttcaagatatttgcttcctttcatttgcaaccagatagagaaaagtggatcatgaaagcagaactccaatgagcttgattct

SEQ ID NO: 25399 - DNA, 110 bp, synthetic construct
  source 1..110: mol_type = other DNA
cagcagtgtggatttactccatggagcaggctttttaagcagctgcatgtctgttttcttccagcttcccatgtgcctttccatttttctgcattagaacgggagctcct

SEQ ID NO: 25400 - DNA, 110 bp, synthetic construct
  source 1..110: mol_type = other DNA
ttcttccagcttcccatgtgcctttccatttttctgcattagaacgggagctccttctggcaggagggggtcctgcttcctcgttgggtaccttttagtgcggcggttcc

SEQ ID NO: 25401 - DNA, 110 bp, synthetic construct
  source 1..110: mol_type = other DNA
gaacccacatggggtcgagaacatggggcacaacatctctttgctttttccatcacttggatttttggttcctatgggtttaccttggctgagcatctggagtctgctct

SEQ ID NO: 25402 - DNA, 110 bp, synthetic construct
  source 1..110: mol_type = other DNA
cttggatttttggttcctatgggtttaccttggctgagcatctggagtctgctctctctggtctccctgcctttcttccctgcttccctcctgcccacccccaattctct

SEQ ID NO: 25403 - DNA, 110 bp, synthetic construct
  source 1..110: mol_type = other DNA
tgattaaactttgctatgtgctgaagggatgggtggttttgagagccatcggggaaagaaaacaatgaacttatcatgttgcctgactccacgagccctgggatttagaa

SEQ ID NO: 25404 - DNA, 110 bp, synthetic construct
  source 1..110: mol_type = other DNA
aagaaaacaatgaacttatcatgttgcctgactccacgagccctgggatttagaaactgaatctgagccatttgtttgcggctttattttttaacaggaaaatgttccac

SEQ ID NO: 25405 - DNA, 110 bp, synthetic construct
  source 1..110: mol_type = other DNA
cagcattcatccctccctgtttgtttgcatccctaaaggacttcagcttctgccttaattctatttaaacaggtatatgatgcctccagactcctctttttctctccgta

SEQ ID NO: 25406 - DNA, 110 bp, synthetic construct
  source 1..110: mol_type = other DNA
taattctatttaaacaggtatatgatgcctccagactcctctttttctctccgtactacttaagtcaattctgattatttcataaaattcttatggaaaggaaaccggat

SEQ ID NO: 25407 - DNA, 110 bp, synthetic construct
  source 1..110: mol_type = other DNA
ttagtggtcatgattcataggataagactggagaggtgcaaatgggaagatactgacctcagctttttccttggtctgtcggcgcaggagaggaaaggaagtcatactcg

SEQ ID NO: 25408 - DNA, 110 bp, synthetic construct
  source 1..110: mol_type = other DNA
ttgagtcccatggcagttaatgtaggtggtgaatctatgcaggcggctgttttccgcaggccagtgtttcttgcagcccaacttgagcatccgggagagggtgcttgtgc

SEQ ID NO: 25409 - DNA, 110 bp, synthetic construct
  source 1..110: mol_type = other DNA
gcaggccagtgtttcttgcagcccaacttgagcatccgggagagggtgcttgtgctgggatgtacccatgtcttcagcaggtctccaaggtcagtagccacatttgaggg

SEQ ID NO: 25410 - DNA, 110 bp, synthetic construct
  source 1..110: mol_type = other DNA
catgatgttggaaagtgtctttaaaattagagctggaaattcccttagtttactttcaagtcccttgtcccttggaaatttatgtaaaatttcccatccctcccattctt

SEQ ID NO: 25411 - DNA, 110 bp, synthetic construct
  source 1..110: mol_type = other DNA
tcaagtcccttgtcccttggaaatttatgtaaaatttcccatccctcccattcttctgctttatgctcccttcggaagcagttaattaatttcatttctcaaagatgctt

SEQ ID NO: 25412 - DNA, 110 bp, synthetic construct
  source 1..110: mol_type = other DNA
gactttgtttccttgaagcaaacatataaacaagcaaataaccccttcacaactcagccatcaattattattttacccatggcaatttgctcactgcagcctttaaaaaa

SEQ ID NO: 25413 - DNA, 110 bp, synthetic construct
  source 1..110: mol_type = other DNA
tttaaaattatttccccattagatagcaatggctgataccattattttcccaaatctgttttgttgtttctgcctataactggccatcatttccagctgttctatgtcct

SEQ ID NO: 25414 - DNA, 110 bp, synthetic construct
  source 1..110: mol_type = other DNA
ctgttttgttgtttctgcctataactggccatcatttccagctgttctatgtcctatgttcacgatccttgcctcaccccagcttctctcacctgtctctcgcacctcca

SEQ ID NO: 25415 - DNA, 110 bp, synthetic construct
  source 1..110: mol_type = other DNA
ttcacgaatatctccccaatagtaaggaaaacagttattctcatttccaaagtgggtcttaatttaaacaccaaggatagtgacttttgctgaaggtctaaattgtgaat

SEQ ID NO: 25416 - DNA, 110 bp, synthetic construct
  source 1..110: mol_type = other DNA
gtcttaatttaaacaccaaggatagtgacttttgctgaaggtctaaattgtgaatacctggcagatacgccagaaagtctccacccacggaagccccaagccacgccccc

SEQ ID NO: 25417 - DNA, 110 bp, synthetic construct
  source 1..110: mol_type = other DNA
gggatgcatgtcacagaggaaaggccatgtgaggacatgtggagaagtcagccgtctgtaagccaaggagaaatgaaccttgctggcaccttgatcttgaacgtccagcc

SEQ ID NO: 25418 - DNA, 110 bp, synthetic construct
  source 1..110: mol_type = other DNA
caatcaattatacatttacgtatatctgctcttttcccatataggtcattacacagtattgagtagattaccctgtgctgtaacaggaacatctatatctatgtctatgt

SEQ ID NO: 25419 - DNA, 110 bp, synthetic construct
  source 1..110: mol_type = other DNA
gtattgagtagattaccctgtgctgtaacaggaacatctatatctatgtctatgtctatgtctgaatgtgtatatattgtatatatacatgagttatcattgagctgaaa

SEQ ID NO: 25420 - DNA, 110 bp, synthetic construct
  source 1..110: mol_type = other DNA
aagaatagtccagatatggaatagatcccaaggaacaggtctgggcagtggataggctttcttgtgtattatcaggtggagtaatatactcccttggcagctgtagatga

SEQ ID NO: 25421 - DNA, 110 bp, synthetic construct
  source 1..110: mol_type = other DNA
gctttcttgtgtattatcaggtggagtaatatactcccttggcagctgtagatgacttgtttcattaaaagctatcactggcccacctgagaaggaatgctgatggccgc

SEQ ID NO: 25422 - DNA, 110 bp, synthetic construct
  source 1..110: mol_type = other DNA
ggagcagctcaagaaatggaaaacaaacaaacaaacaaacaaacaccacagccacagcaacgtgggatccaagctgcctctgtgacctacacgatagatcacggcaatac

SEQ ID NO: 25423 - DNA, 110 bp, synthetic construct; identical to SEQ ID NO: 25422
  source 1..110: mol_type = other DNA

SEQ ID NO: 25424 - DNA, 110 bp, synthetic construct
  source 1..110: mol_type = other DNA
ataagttcccctttcagagtgggcatgtgcttcccacagctccttagccaacatgaggtctaggcatcagctactggtcatcgttctgtacgtgtttccattcattcatt

SEQ ID NO: 25425 - DNA, 110 bp, synthetic construct
  source 1..110: mol_type = other DNA
ttcactgcaagagtgagatagaggcacgcggcttctggattttcttccagtgccttgatccccctgctgctgggtatcattccgggaaagagtttggggagctctagagc

SEQ ID NO: 25426 - DNA, 110 bp, synthetic construct
  source 1..110: mol_type = other DNA
tgatccccctgctgctgggtatcattccgggaaagagtttggggagctctagagcacctcatgctgcctttgttctttcagatatcaccctattatgcttttgttgagtg

SEQ ID NO: 25427 - DNA, 110 bp, synthetic construct
  source 1..110: mol_type = other DNA
caagttcaatgggaggtgattacccaaagccctgagtagaaggaggtgtggtttactaggggctgtctttgtggattgcctgccaccatcaccaagctgtggatgcgtct

SEQ ID NO: 25428 - DNA, 110 bp, synthetic construct
  source 1..110: mol_type = other DNA
ctaggggctgtctttgtggattgcctgccaccatcaccaagctgtggatgcgtctgcctgctcagatgctttaatgggtgaaatgatgagtgtattctgcagattttgag

SEQ ID NO: 25429 - DNA, 110 bp, synthetic construct; identical to SEQ ID NO: 25427
  source 1..110: mol_type = other DNA

SEQ ID NO: 25430 - DNA, 110 bp, synthetic construct; identical to SEQ ID NO: 25428
  source 1..110: mol_type = other DNA

SEQ ID NO: 25431 - DNA, 110 bp, synthetic construct
  source 1..110: mol_type = other DNA
gtattggattcctgtcctatgacattaactgtaccttcgaatgttgatgttttgtccttccagcttaatcaggagctcttggagggggatcatttcttgggctttctttg

SEQ ID NO: 25432 - DNA, 110 bp, synthetic construct
  source 1..110: mol_type = other DNA
tccttaacccgcagggccaggggtcgaacccgtgtcctcatactaatcaggttcgttaaccgctgtgccatgacagaaactctaagaatttagagaaaagaaagatgttt

SEQ ID NO: 25433 - DNA, 110 bp, synthetic construct
  source 1..110: mol_type = other DNA
ttaaccgctgtgccatgacagaaactctaagaatttagagaaaagaaagatgtttggaaccaggaaccagggaaaggttcatggaagagatgatgtgctgaatcttgaaa

SEQ ID NO: 25434 - DNA, 110 bp, synthetic construct
  source 1..110: mol_type = other DNA
tagataaaatcttttaaaatgttacacatgtgtagttgagttcacaagaaagaaagggcaacgttcgtgtacttgaaagcactaataaattatgtgaaccgattttgatg

SEQ ID NO: 25435 - DNA, 110 bp, synthetic construct; identical to SEQ ID NO: 25434
  source 1..110: mol_type = other DNA

SEQ ID NO: 25436 - DNA, 110 bp, synthetic construct
  source 1..110: mol_type = other DNA
ttttgagtttgattttaatatatggtgggtggtactgattatggttcatttttttgcatatgtttatccccttgtttcagcactatttgttgaaaagactatccagtctc

SEQ ID NO: 25437 - DNA, 110 bp, synthetic construct; identical to SEQ ID NO: 25436
  source 1..110: mol_type = other DNA

SEQ ID NO: 25438 - DNA, 110 bp, synthetic construct
  source 1..110: mol_type = other DNA
ggagtgtcccaggtatgtgctagtaaaatatggggacaggttccaaacagaatattctagctgtaacagatgatggagtgccaatgattctctaggaggttacacatgac

SEQ ID NO: 25439 - DNA, 110 bp, synthetic construct
  source 1..110: mol_type = other DNA
tctagctgtaacagatgatggagtgccaatgattctctaggaggttacacatgacacatataggggttttgaccctaacttaaaaatagaattcccattatggctcagtg

SEQ ID NO: 25440 - DNA, 110 bp, synthetic construct
  source 1..110: mol_type = other DNA
caagccctggttgtctcctgcacttttcacctaccagctagtttcagaggtactaccatgccttccttgggttcagtaattttctagaatggctcatagatctcagagaa

SEQ ID NO: 25441 - DNA, 110 bp, synthetic construct
  source 1..110: mol_type = other DNA
gcttggtcatagatttttactttatggatgctgacctgaggaatggctgcctagagcatgtactcaattgaccattgaaaagtagaacatagctaatatagaagccatca

SEQ ID NO: 25442 - DNA, 110 bp, synthetic construct
  source 1..110: mol_type = other DNA
gcatgtactcaattgaccattgaaaagtagaacatagctaatatagaagccatcatcagcatttcaatgcctttaccattatccatagttttttttccttgctgaccatg

SEQ ID NO: 25443 - DNA, 110 bp, synthetic construct
  source 1..110: mol_type = other DNA
ccccttcttctttcatccccccttttttcctctttttttttcctcattcagtcctacatgctcttgtctttactccttgtttgtttactcaaattgatgaatgaacgctt

SEQ ID NO: 25444 - DNA, 110 bp, synthetic construct
  source 1..110: mol_type = other DNA
acatgctcttgtctttactccttgtttgtttactcaaattgatgaatgaacgcttctgaaaacagcttaaaaacaaaatagtgtttcaatatcgctcttaccaacttagt

SEQ ID NO: 25445 - DNA, 110 bp, synthetic construct
  source 1..110: mol_type = other DNA
ggtaatataacaacctttagagagaaatatgatgacaaactgtggctacagttgtccatagactcttctatcatttttcttataggaacaacaaaatcaaaagatgaaat

SEQ ID NO: 25446 - DNA, 110 bp, synthetic construct
  source 1..110: mol_type = other DNA
ccatagactcttctatcatttttcttataggaacaacaaaatcaaaagatgaaatgtagctctttcaaaccccagttctgccacttcccaatcatgtgcatgtgagaaat

SEQ ID NO: 25447 - DNA, 110 bp, synthetic construct
  source 1..110: mol_type = other DNA
tcctcagaaaacttagagtctagtgggagtaatttttgaaaaacacaaaaaattttctattttcaatggaggagatgtacatgagaccatgacaacttttaatagggcaa

SEQ ID NO: 25448 - DNA, 110 bp, synthetic construct
  source 1..110: mol_type = other DNA
tctattttcaatggaggagatgtacatgagaccatgacaacttttaatagggcaagttgacctagtagggacaggcaaggaagcctatcccaaggaaattatgacagagc

SEQ ID NO: 25449 - DNA, 110 bp, synthetic construct
  source 1..110: mol_type = other DNA
gctgggaacatgcacaagagatgctaagtaaaagaaaaggaaggaggtggtgaagctgcctactgagataggatctggcaaattctaaggcagagtgggagacagagttt

SEQ ID NO: 25450 - DNA, 110 bp, synthetic construct
  source 1..110: mol_type = other DNA
ctgcctactgagataggatctggcaaattctaaggcagagtgggagacagagtttgcattatgtggcagttttgagcaactatgatacaattcattgtactaggaaaact

SEQ ID NO: 25451 - DNA, 110 bp, synthetic construct
  source 1..110: mol_type = other DNA
aaccctggtttgtagaaacttcctgcatggtcattttcaaatcagtttactgctctgggcctcaatttttacagctgtaaaatgaagagaatcaattctaggtgattcca

SEQ ID NO: 25452 - DNA, 110 bp, synthetic construct
  source 1..110: mol_type = other DNA
ccttgtgaaacatgacaaacaagtcttttgaaccacatcactgtagtcaacagaataacaagcttcatgggtttggtctcacgttatttcttaatgggggctgatggcat

SEQ ID NO: 25453 - DNA, 110 bp, synthetic construct
  source 1..110: mol_type = other DNA
taacaagcttcatgggtttggtctcacgttatttcttaatgggggctgatggcatagcgtccatgccaagttcagtaaaagaaattccatgttgtcaagtatacagttga

SEQ ID NO: 25454 - DNA, 110 bp, synthetic construct
  source 1..110: mol_type = other DNA
tggagatcatataaacttcaagcagaggggttagaacttgaaccacatttaattacatttttaaaattctgcttttgtatctattcaacttgtccaaaaagaggaaggca

SEQ ID NO: 25455 - DNA, 110 bp, synthetic construct
  source 1..110: mol_type = other DNA
tgacccacctacacattaaggtttgaaaagctctgttccagaaaaatgtagatgggcaaataatttgattttcaacacatgtctattctgtatactagagcattctgagt

SEQ ID NO: 25456 - DNA, 110 bp, synthetic construct
  source 1..110: mol_type = other DNA
tgtggttctcctttcctagttcctcatgcccttcttgctccaagtctcccttctccatgatccctaccaggagcatgcttgagagctgtcaagcggggcccagaaaaggc

SEQ ID NO: 25457 - DNA, 110 bp, synthetic construct
  source 1..110: mol_type = other DNA
catgatccctaccaggagcatgcttgagagctgtcaagcggggcccagaaaaggcataagccagcagcctgtcttctccaaactgccaatccatgaaggtaaagagtagc

SEQ ID NO: 25458 - DNA, 110 bp, synthetic construct
  source 1..110: mol_type = other DNA
gtcttttgagtttgcctttctagttctctcattctaagcaaacctatttccttcttcaaacagatcaaagagctctttaagggtagaagaatcacgtcttatttcccttt

SEQ ID NO: 25459 - DNA, 110 bp, synthetic construct
  source 1..110: mol_type = other DNA
agaccagagcggggaaattggattccagggtaccacacaacattgccacgaaagctctgctgaaaccagacagccttgttcctgtgccagatggattcacctccccgaag

SEQ ID NO: 25460 - DNA, 110 bp, synthetic construct
  source 1..110: mol_type = other DNA
tctgctgaaaccagacagccttgttcctgtgccagatggattcacctccccgaagccttccttcccactagacttaattactcatggctggaaccatgtacattcaagag

SEQ ID NO: 25461 - DNA, 110 bp, synthetic construct
  source 1..110: mol_type = other DNA
catataatactccccaggactgtttaaaagaagattcctcagtctttcttggaaaaaaagagtctttgggggacttcctgggctgaaggataatttgcttgtccaactta

SEQ ID NO: 25462 - DNA, 110 bp, synthetic construct
  source 1..110: mol_type = other DNA
aaaagagtctttgggggacttcctgggctgaaggataatttgcttgtccaacttacctctcttagttcagaaggtagaaatatgtaaataagatgatatttactaggatg

SEQ ID NO: 25463 - DNA, 110 bp, synthetic construct
  source 1..110: mol_type = other DNA
atccatctctctcttcgtcattggcatctgtaatgtaggatagactataattgtattcaattcagtgatgctgaattcagtcttaagtccagggtcattagctgaccact

SEQ ID NO: 25464 - DNA, 110 bp, synthetic construct
  source 1..110: mol_type = other DNA
ttcagtttcaagtcaacttccatctagatgctgattgcaatactctcttcaggacattgatgtgtttaccacactctcagctattgggagtcattgaaaacaatgaagga

SEQ ID NO: 25465 - DNA, 110 bp, synthetic construct
  source 1..110: mol_type = other DNA
attgatgtgtttaccacactctcagctattgggagtcattgaaaacaatgaaggaagcttggccaatgcaaaagtttgagagaaagggagttcccatgtggcacagcaaa

SEQ ID NO: 25466 - DNA, 110 bp, synthetic construct
  source 1..110: mol_type = other DNA
atttgcactgtctggcattcaatcaaaattaccatacataacaatgaacagcacctccatatccaaatcaagagacagcagagctgcaagtgaagtagatactagggttt

SEQ ID NO: 25467 - DNA, 110 bp, synthetic construct
  source 1..110: mol_type = other DNA
cagtgaggtgttttactagtggagactatctgacccctgtatgtttatatgatagaattcacttagcagtgctcttgagaataacaagaggccactgagcctgatctggg

SEQ ID NO: 25468 - DNA, 110 bp, synthetic construct
  source 1..110: mol_type = other DNA
aattcacttagcagtgctcttgagaataacaagaggccactgagcctgatctggggtcttggaagaagtcagggaaggccaggcccagcagtgcaatgatagtagtgagg

SEQ ID NO: 25469 - DNA, 110 bp, synthetic construct
  source 1..110: mol_type = other DNA
taacaaatcttctttatctattcctctatcaatggaaatttaggttgcttccaaggctttgctattgtcaatagtgctgctatgaagattgtagtgaatgtatgttttgg

SEQ ID NO: 25470 - DNA, 110 bp, synthetic construct; identical to SEQ ID NO: 25469
  source 1..110: mol_type = other DNA

SEQ ID NO: 25471 - DNA, 110 bp, synthetic construct
  source 1..110: mol_type = other DNA
tgtttccagccttcctctttcacctgaccactaaaatgaactttcaataaaccccattgtacaaaaagcatcaatagagcacttaatgcatgaaagcatcccattttttt

SEQ ID NO: 25472 - DNA, 110 bp, synthetic construct
  source 1..110: mol_type = other DNA
attgtacaaaaagcatcaatagagcacttaatgcatgaaagcatcccattttttttaataaaggcaaaaaataaacagagggagggaaagtggacctgttgactgggaag

SEQ ID NO: 25473 - DNA, 110 bp, synthetic construct
  source 1..110: mol_type = other DNA
gacaacatctggcgaggaggcggtgaatgttaagaagacaaatgaacatggagaaaaggctcaggagactctctagatctgatagggtcttgcggttcatgacaagaagt

SEQ ID NO: 25474 - DNA, 110 bp, synthetic construct
  source 1..110: mol_type = other DNA
gtccataaatagagcgtcactggaacacagccatgcttgttcccttctgtggttgctttctggccacaatggcagagctgtacggatcagatggcatacaaagtctaaag

SEQ ID NO: 25475 - DNA, 110 bp, synthetic construct
  source 1..110: mol_type = other DNA
ctttctggccacaatggcagagctgtacggatcagatggcatacaaagtctaaagcactatctcactatttctagaagatatttgctgactcagttctagacggtccctt

SEQ ID NO: 25476 - DNA, 110 bp, synthetic construct
  source 1..110: mol_type = other DNA
ctttctagtgaccagtcttagtcagtctcaactaaaccatttccccaacaaatatattttttctttcttttttctttctctctctctttgttttttgctttttggctgca

SEQ ID NO: 25477 - DNA, 110 bp, synthetic construct
  source 1..110: mol_type = other DNA
caacaaatatattttttctttcttttttctttctctctctctttgttttttgctttttggctgcaccatggtgtgcagaatttcccaggccagggatcaaacccacagca

SEQ ID NO: 25478 - DNA, 110 bp, synthetic construct
  source 1..110: mol_type = other DNA
tggactgcatggctcttcaccccagctctgtggcagaagtatgacctggtccacgaacattcccagaaaggtgtctctaccctcatttgtctgatagagacatgctggta

SEQ ID NO: 25479 - DNA, 110 bp, synthetic construct
  source 1..110: mol_type = other DNA
ctcactcgaaaacagtcttgcttgatcctggaatgcttgtaattcattctgctgtaattttctagaatttaggccaggggtgattacaagttcactcaaaaagttcaaga

SEQ ID NO: 25480 - DNA, 110 bp, synthetic construct
  source 1..110: mol_type = other DNA
tttttggtcacatctgcagcatgtgaaggtttccaggcctcttgtcctgagccacaacaatgacaagctggatccttaacccactgagtcaccagggaactccctcacct

SEQ ID NO: 25481 - DNA, 110 bp, synthetic construct
  source 1..110: mol_type = other DNA
aacaatgacaagctggatccttaacccactgagtcaccagggaactccctcacctttcaataataacttgctattaaatagctcacattaatgtatcaaaagatcagctc

SEQ ID NO: 25482 - DNA, 110 bp, synthetic construct
  source 1..110: mol_type = other DNA
acttattaaatgctaatccgcacatggtggtgtgtaaggatcaagctcaagggagtgaaacagacatggtccctgccctgcaggaactgacaacccagaatgctggagtt

SEQ ID NO: 25483 - DNA, 110 bp, synthetic construct
  source 1..110: mol_type = other DNA
aataagcatctgtgttattaactatttttctaatttccatgttttgagcctcttgcttcaatgatccctttgtaaactttggagtatgaccactctgctaaattataggt

SEQ ID NO: 25484 - DNA, 110 bp, synthetic construct
  source 1..110: mol_type = other DNA
cttcaatgatccctttgtaaactttggagtatgaccactctgctaaattataggtattaaggaaaacagaaccatttctcacatgtctcctgtagatcagagagaccata

SEQ ID NO: 25485 - DNA, 110 bp, synthetic construct
  source 1..110: mol_type = other DNA
atctatggcaatctgatacctgcaggcctctcagaatcaatagccaaatactctttatatccagagggattacacctgcctatttctacctgagtgctcaacatgtaaaa

SEQ ID NO: 25486 - DNA, 110 bp, synthetic construct
  source 1..110: mol_type = other DNA
ctcgtggggaaggtcaaggagatgcacagtgcaaggaagcctccaagtatttcccccacttgcactctacatccaacctcacatttcctgtctccaaagagtctcaccag

SEQ ID NO: 25487 - DNA, 110 bp, synthetic construct
  source 1..110: mol_type = other DNA
tcaaaagattaactgttttttatccaccagtgactgtccctctttagctggtcctgaaacctatttaaattttgctactcacctgtctggggtttgataccaaatcaaga

SEQ ID NO: 25488 - DNA, 110 bp, synthetic construct
  source 1..110: mol_type = other DNA
gaaacctatttaaattttgctactcacctgtctggggtttgataccaaatcaagacaggccaatggacactgatttggagttaatacaaagtggaagagggtggaagttt

SEQ ID NO: 25489 - DNA, 110 bp, synthetic construct
  source 1..110: mol_type = other DNA
aagttctaggggacggtactcccggagagtcatcaaccactgttcatttgagtcttctactttgctctagtcattcagagccaattctccgaatgtaatttttgcccccc

SEQ ID NO: 25490 - DNA, 110 bp, synthetic construct
  source 1..110: mol_type = other DNA
tctactttgctctagtcattcagagccaattctccgaatgtaatttttgccccccctttgaaacatcagaataactaaaattcactaacaaaatcttgccaatcctgaat

SEQ ID NO: 25491 - DNA, 110 bp, synthetic construct
  source 1..110: mol_type = other DNA
gagaatcacacctaacagaggcagccgcgttgtagtgaatatagagaatagccttccctgggaggagagcttcttaacttctctggccagaagaccagtttgggaaaaag

SEQ ID NO: 25492 - DNA, 110 bp, synthetic construct
  source 1..110: mol_type = other DNA
aaaggcatcccaatttttgcttatatgtaatgattgctactaggatctatagacctgctatttgcctaagctgttcagtccactttgaagctgaataatttggaaggctc

SEQ ID NO: 25493 - DNA, 110 bp, synthetic construct; identical to SEQ ID NO: 25492
  source 1..110: mol_type = other DNA

SEQ ID NO: 25494 - DNA, 110 bp, synthetic construct
  source 1..110: mol_type = other DNA
aagacctttcacactagaatcactgaccatcgacaactgaatgactaaggcattgaaggtgtgccaggactgcggatggccagactatatccctggccacaaagaagggg

SEQ ID NO: 25495 - DNA, 110 bp, synthetic construct
  source 1..110: mol_type = other DNA
agagaagagaaaggtttcactagttaattcaaagaaaagaaatcctggcccaattgatttgtacacatttttcctccaagtgacagcaaaacaaaggtttgtaagcatgt

SEQ ID NO: 25496 - DNA, 110 bp, synthetic construct
  source 1..110: mol_type = other DNA
accatagtaatgacgacattgggaatgtccatgaggtgagcttaatcttaacaacgggatgaaataatgaaagagattcacattaacaataatgattaggggaaaagatt

SEQ ID NO: 25497 - DNA, 110 bp, synthetic construct
  source 1..110: mol_type = other DNA
tctgcatcttccacttctgggtcagcatctgttctgtgttgctgcattcaaattccaaatgtatatcttatcagctcggtgatgcttccaaattgtttgacatctctgag

SEQ ID NO: 25498 - DNA, 110 bp, synthetic construct
  source 1..110: mol_type = other DNA
caaatgtatatcttatcagctcggtgatgcttccaaattgtttgacatctctgagcacaatctttacgtctggcaggcagagtaggcagagaagtgcaaagaacttgtaa

SEQ ID NO: 25499 - DNA, 110 bp, synthetic construct
  source 1..110: mol_type = other DNA
acagcagtgtctgttgttagtgccctagtgttggtgtatggtacagcacatggcttatcctggtgtggtcttgactcaaaagcgtttactaatgctgctggtgcccttag

SEQ ID NO: 25500 - DNA, 110 bp, synthetic construct
  source 1..110: mol_type = other DNA
tatcctggtgtggtcttgactcaaaagcgtttactaatgctgctggtgcccttaggcttattgctgtcctccatccgaacactagcagtggactggccactggccacctc

SEQ ID NO: 25501 - DNA, 110 bp, synthetic construct
  source 1..110: mol_type = other DNA
cccattccctccagcaggtgcaatttcagtagagcatgaaattgcaaggtcttctcttgagctgcacacacagacattgtccacatgcacgcccaccttgactctgatga

SEQ ID NO: 25502 - DNA, 110 bp, synthetic construct
  source 1..110: mol_type = other DNA
tattttaaataataaaattaatagtatattcaggtcaagatatttcaacagtacaagagataaagcaggagagccaaatccctcttcctcattccttacctcccaacacc

SEQ ID NO: 25503 - DNA, 110 bp, synthetic construct
  source 1..110: mol_type = other DNA
aggggtcaaattggagctgaagcttccagccacaacacagccacagcaatgtcgtatctgagtcctgagtcaagtctgcaaactatactgcagctcacagcaatgccaga

SEQ ID NO: 25504 - DNA, 110 bp, synthetic construct; identical to SEQ ID NO: 25503
  source 1..110: mol_type = other DNA

SEQ ID NO: 25505 - DNA, 110 bp, synthetic construct
  source 1..110: mol_type = other DNA
tctggccaaggagggtaggtttctgcagtgacttctcattttattgaagtagtggcccccacagaggatcccctcagtaaactctggaatgttctcagcacaagagagaa

SEQ ID NO: 25506 - DNA, 110 bp, synthetic construct
  source 1..110: mol_type = other DNA
tttaaggtcatcattctaatgaccgccgataaggctgcttatgaacgaatctttgtgtagttttaatactaattctctcactttattttacagtgcttttataaatctaa

SEQ ID NO: 25507 - DNA, 110 bp, synthetic construct; identical to SEQ ID NO: 25506
  source 1..110: mol_type = other DNA

SEQ ID NO: 25508 - DNA, 110 bp, synthetic construct
  source 1..110: mol_type = other DNA
cataagacaactatggcttggtttgaaataagaatggtaaatgatgttgaattcgaggtatatttttgaggtagagtcaaacgaatttcaatagcatgcatgtgggatgt

SEQ ID NO: 25509 - DNA, 110 bp, synthetic construct
  source 1..110: mol_type = other DNA
taatggttcttagatttttcagctgtttctaggagaaaagtcatttcctgtggatgacaatgctggtaaggtatgtcgccagaagatattagtagcagccgtggttctag

SEQ ID NO: 25510 - DNA, 110 bp, synthetic construct
  source 1..110: mol_type = other DNA
gacaatgctggtaaggtatgtcgccagaagatattagtagcagccgtggttctagcttcatagagaaagctggtctacagaaagaaatgaaggtgaggcaggaagtccta

SEQ ID NO: 25511 - DNA, 110 bp, synthetic construct
  source 1..110: mol_type = other DNA
ctagatagataacgtactagagagattataaagttgttttctgccttagcattttatctaaaacaagaaaacaggctttgtcccagaataaccttgacctgcgtggaggt

SEQ ID NO: 25512 - DNA, 110 bp, synthetic construct
  source 1..110: mol_type = other DNA
atctaaaacaagaaaacaggctttgtcccagaataaccttgacctgcgtggaggtgtgtgtcactgaattaaggaagatcatgacatctgagatgctaatgacacggagc

SEQ ID NO: 25513 - DNA, 110 bp, synthetic construct
  source 1..110: mol_type = other DNA
tcatcctaatagccatttgtaaatgcacaacttattgaatcataactgcccagctctgtctgagatttcaccaaaaaacttacaagaacctagctgtcctgttgcctttt

SEQ ID NO: 25514 - DNA, 110 bp, synthetic construct
  source 1..110: mol_type = other DNA
ctgtctgagatttcaccaaaaaacttacaagaacctagctgtcctgttgccttttagaccgaaaggccttgactctgcccctgtgaagcagaggggtactgggccatgct

SEQ ID NO: 25515 - DNA, 110 bp, synthetic construct
  source 1..110: mol_type = other DNA
ctggatttctgtggacattatgtgcacagttcctggagagtcacagaaattgaccagaaggataaatggagctactttaccaccccttccaaagtgtgagacactgtgct

SEQ ID NO: 25516 - DNA, 110 bp, synthetic construct
  source 1..110: mol_type = other DNA
agaaggataaatggagctactttaccaccccttccaaagtgtgagacactgtgctgatcttgatggaaatagatgctgaagaagtatttcaagaaatgaaagcattttat

SEQ ID NO: 25517 - DNA, 110 bp, synthetic construct; identical to SEQ ID NO: 25515
  source 1..110: mol_type = other DNA

SEQ ID NO: 25518 - DNA, 110 bp, synthetic construct; identical to SEQ ID NO: 25516
  source 1..110: mol_type = other DNA

SEQ ID NO: 25519 - DNA, 110 bp, synthetic construct
  source 1..110: mol_type = other DNA
acgtcgcagcaaggaccagcccggtcacattctccacttgcgtcctgagagcctaccttgaaaatgagcaacctcttccctgtggcttgtgccagacctgagcttggaag

SEQ ID NO: 25520 - DNA, 110 bp, synthetic construct
  source 1..110: mol_type = other DNA
tgtgcccctgtgtattctcttacatagtttttatcactattttataaggcaactactgctattggccccacttcatagacctaccagctgcagagctgctaggcacactc

SEQ ID NO: 25521 - DNA, 110 bp, synthetic construct
  source 1..110: mol_type = other DNA
ctgctattggccccacttcatagacctaccagctgcagagctgctaggcacactctctgaaaacagatcctcttctcaatactttcttaatatcacttgccttcctggaa

SEQ ID NO: 25522 - DNA, 110 bp, synthetic construct
  source 1..110: mol_type = other DNA
gtgtgactcggtgcgtgtgtgtgagagagagagagtgagacctgtaagagacgagagcaacgatcaaatagttatccaaattggggccacttccaaattgtgggcattgg

SEQ ID NO: 25523 - DNA, 110 bp, synthetic construct
  source 1..110: mol_type = other DNA
agcaacgatcaaatagttatccaaattggggccacttccaaattgtgggcattggtccaccgtcgcccggtttctaagaaacctggcagcgttggttcattaaagtaaga

SEQ ID NO: 25524 - DNA, 110 bp, synthetic construct
  source 1..110: mol_type = other DNA
ggaggctcagtcagacgatttatacaaggtcatacagctagtaaatggcaatgccatttcaaaattctgttccatcagatccctacaccaaacatgttcctaagaggggg

SEQ ID NO: 25525 - DNA, 110 bp, synthetic construct
  source 1..110: mol_type = other DNA
atttcaaaattctgttccatcagatccctacaccaaacatgttcctaagagggggcaaaagctgatacaaagtatgaatgatgccaacagaggcaatttctggacataaa

SEQ ID NO: 25526 - DNA, 110 bp, synthetic construct
  source 1..110: mol_type = other DNA
ctgcttttctgcttgggtgatttccatttttctatcttccagatcacttattcattcttctgcattattctttagctcagcttcatctcagcaaatgagttttctaattt

SEQ ID NO: 25527 - DNA, 110 bp, synthetic construct
  source 1..110: mol_type = other DNA
tctaaatccatacaagtaaaaatgttgagaaggtagctctcaagtctaaaacagtagcagcaggctccaggagagtctaactgatgttgatgacttattgaaagaaagac

SEQ ID NO: 25528 - DNA, 110 bp, synthetic construct
  source 1..110: mol_type = other DNA
gagtatgtatttaggtcattttattgtttatgctatagactttagaaaatgtgtagtgtaagagctgtaagttttattgggggcaaaatgaggactatgttccaggaggc

SEQ ID NO: 25529 - DNA, 110 bp, synthetic construct
  source 1..110: mol_type = other DNA
gagaagcccttcaccccagaagtctagtacatgagatgagctttttctttttttttcctttaaatatatgtcttggtatctcataaaatatagcagtcagctcacctctt

SEQ ID NO: 25530 - DNA, 110 bp, synthetic construct
  source 1..110: mol_type = other DNA
tcctttaaatatatgtcttggtatctcataaaatatagcagtcagctcacctcttcatgaatgtttcactaaaatggagtgagccaatttgaagaccagtgttggagaga

SEQ ID NO: 25531 - DNA, 110 bp, synthetic construct
  source 1..110: mol_type = other DNA
agacagttcaagctttatcatcacagtgatggggaagtggctggtggactttgaaattatagcactgtccatccaccttgccacttggaaatattggctatttcacaagt

SEQ ID NO: 25532 - DNA, 110 bp, synthetic construct
  source 1..110: mol_type = other DNA
attatagcactgtccatccaccttgccacttggaaatattggctatttcacaagttttagtctaagaatgggtagaaataaaaaatgacttactccagagttcccatcat

SEQ ID NO: 25533 - DNA, 110 bp, synthetic construct
  source 1..110: mol_type = other DNA
cagtctgcagagcaagactgatattttgcaagtctccaataatctccagctccgagtgtgacacacaggctgcaaaggattccctcggggacttctgtttttgcacagga

SEQ ID NO: 25534 - DNA, 110 bp, synthetic construct
  source 1..110: mol_type = other DNA
cagtttcttgagagtaattgttagtaagacattctgtctgtccttcaaattaatctgagatttttcatagctagaaggcaggggttcaaatgaccttttcttagatcgtg

SEQ ID NO: 25535 - DNA, 110 bp, synthetic construct
  source 1..110: mol_type = other DNA
tgagatttttcatagctagaaggcaggggttcaaatgaccttttcttagatcgtgccctgagcaatatttgtggccccttgatgggtggagtgtgcagagagtcacagct

SEQ ID NO: 25536 - DNA, 110 bp, synthetic construct
  source 1..110: mol_type = other DNA
tctgtaactgccctccatatcaagggctcaactgccaagtcagtttaagaggtgacttgcatgtgcaaggagctaccattggctgccttgtggatgctttatgtttagtc

SEQ ID NO: 25537 - DNA, 110 bp, synthetic construct
  source 1..110: mol_type = other DNA
cagtaggcaagctatttaacatctcaaggtctccctatctactaaatgttatattaacattacagggttaatgtgaggatgaaatccatgtaacgcacacagtaaagtgc

SEQ ID NO: 25538 - DNA, 110 bp, synthetic construct
  source 1..110: mol_type = other DNA
aacattacagggttaatgtgaggatgaaatccatgtaacgcacacagtaaagtgcctggcctgtagctggagggatggatagatagaaagatcacaagtatgctgaggct

SEQ ID NO: 25539 - DNA, 110 bp, synthetic construct
  source 1..110: mol_type = other DNA
actactattacttacaaaatgcaacaactgagttgtgactatataagcttcaaagcttactatctggctctttacagaaaaaatttgcccctccttgatctaaaagaaaa

SEQ ID NO: 25540 - DNA, 110 bp, synthetic construct
  source 1..110: mol_type = other DNA
ttgaagttccaatgaaaattctgccaaacgtccggagttcttctgagatctatggcctaatgaaagctggggccttggaaggcgtgccaatatctgggtgtttgggagac

SEQ ID NO: 25541 - DNA, 110 bp, synthetic construct
  source 1..110: mol_type = other DNA
cctaatgaaagctggggccttggaaggcgtgccaatatctgggtgtttgggagaccagtctgctgcattggtgggacagatgtgcttccaggatggacaggccaaaaaca

SEQ ID NO: 25542 - DNA, 110 bp, synthetic construct
  source 1..110: mol_type = other DNA
tagattattgcaaagtgatgacatgctcaatctatcaagccaactttaatttccctgagagcaataagaaacgcctgctttccggtcacgttctttgtcatgaacaaaat

SEQ ID NO: 25543 - DNA, 110 bp, synthetic construct
  source 1..110: mol_type = other DNA
tgagagcaataagaaacgcctgctttccggtcacgttctttgtcatgaacaaaataaagttgaccagatacctttaactcagaaaatctgtactgctgctctcctgggtc

SEQ ID NO: 25544 - DNA, 110 bp, synthetic construct
  source 1..110: mol_type = other DNA
tgcactggatcctttaatccaccgtgccggccagagatggaacccagtcctggtgctgcagaggtgcagctgatctgttgcaccgtagtaggaactcccgggctctgttc

SEQ ID NO: 25545 - DNA, 110 bp, synthetic construct
  source 1..110: mol_type = other DNA
agtgggttaaggatccgatgtttctgcaagctgcctgttaagtcacagatatgattcggaacccacatggctgtggccatggctgtggctatggcataggctgaccccta

SEQ ID NO: 25546 - DNA, 110 bp, synthetic construct
  source 1..110: mol_type = other DNA
aagaggaggaaaaatccttgttccaagaggaagccgtttttcctgtggcccagcccagaactctttaaacacatttttcttatttttcaagctgcctcgtcctctcctct

SEQ ID NO: 25547 - DNA, 110 bp, synthetic construct
  source 1..110: mol_type = other DNA
cagaactctttaaacacatttttcttatttttcaagctgcctcgtcctctcctctcttcctcctagttacctatcctaatatcattagttcctgaagttctgcgcccaat

SEQ ID NO: 25548 - DNA, 110 bp, synthetic construct
  source 1..110: mol_type = other DNA
ttttccaccttctctccttattccttcaccagtcattttcatcctccaagtcccgggccctcagctctgtctagagaccttctgggtaaaaatcaaagatcaagcaacac

SEQ ID NO: 25549 - DNA, 110 bp, synthetic construct
  source 1..110: mol_type = other DNA
tgggcccatcacaatgcttttgcatgcagtaggtgctcactaatgaatgaatatagtggaaacctctctgggttggaagctaggaatttaagacctgatcatctaatcct

SEQ ID NO: 25550 - DNA, 110 bp, synthetic construct
  source 1..110: mol_type = other DNA
gtggaaacctctctgggttggaagctaggaatttaagacctgatcatctaatcctagtgaatgtaatcaagaatgtgtgactgagcacacatcactcacttgtatggacc

SEQ ID NO: 25551 - DNA, 110 bp, synthetic construct
  source 1..110: mol_type = other DNA
aatatttgttctgtgatattgcaaagccccaaattcttcatcaaaataggaatgaaaaacttgccactgtcttgtccaaaaaatttgctgccccaggtttcaagattttg

SEQ ID NO: 25552 - DNA, 110 bp, synthetic construct
  source 1..110: mol_type = other DNA
aaaacttgccactgtcttgtccaaaaaatttgctgccccaggtttcaagattttgttcataaaagcctgtggctcccatgcccttcctagctgccctgcttcgtcaacct

SEQ ID NO: 25553 - DNA, 110 bp, synthetic construct
  source 1..110: mol_type = other DNA
gttgccgagcagatgcgcctcatatgatctgtactgtggactgggatcctcacaccaggacgtgggctccttgagctgagctatagagaatatagaatcttcgcttttac

SEQ ID NO: 25554 - DNA, 110 bp, synthetic construct
  source 1..110: mol_type = other DNA
caggacgtgggctccttgagctgagctatagagaatatagaatcttcgcttttacttggtgctttgtccacagtaatcctttcaccatttgtttgggtacttcactcacc

SEQ ID NO: 25555 - DNA, 110 bp, synthetic construct; identical to SEQ ID NO: 25553
  source 1..110: mol_type = other DNA

SEQ ID NO: 25556 - DNA, 110 bp, synthetic construct; identical to SEQ ID NO: 25554
  source 1..110: mol_type = other DNA

SEQ ID NO: 25557 - DNA, 110 bp, synthetic construct
  source 1..110: mol_type = other DNA
gcatgaaggagggagtgtagtaggatgtgagtcagagagatgctcttgggggtagattaggggattttgaagcagatggatcatgtaaaaccttgtatgaaattctagga

SEQ ID NO: 25558 - DNA, 110 bp, synthetic construct
  source 1..110: mol_type = other DNA
attaggggattttgaagcagatggatcatgtaaaaccttgtatgaaattctaggaacttggggttttactttggccctgagaggagccattgaggattctggacagaagt

SEQ ID NO: 25559 - DNA, 110 bp, synthetic construct
  source 1..110: mol_type = other DNA
tgctgaaaggttctgctcaccaccatactgtctacctttgtctcatacaggagcgtggcattggccttgaggataagaatgtgtgtttgggagtcaagacacctggaagg

SEQ ID NO: 25560 - DNA, 110 bp, synthetic construct
  source 1..110: mol_type = other DNA
ttttgcatcagttctctaatgaataattggcagttattcaggcacttaaaaggccagggaggtttaaagaggcagagctgatgtttgcaggagtgtctcattgatgcctc

SEQ ID NO: 25561 - DNA, 110 bp, synthetic construct
  source 1..110: mol_type = other DNA
agggaggtttaaagaggcagagctgatgtttgcaggagtgtctcattgatgcctctctcctcggttgacaggggctcatgtagcagccggggcccaggaaatgagatctt

SEQ ID NO: 25562 - DNA, 110 bp, synthetic construct
  source 1..110: mol_type = other DNA
tttgctttggttcatgtaagcactttcaaggtcaaaattttctggaagcatagccctcctccaaattttgtgacagaaggatgacacccacttgtcgtttgagaggcaca

SEQ ID NO: 25563 - DNA, 110 bp, synthetic construct
  source 1..110: mol_type = other DNA
tgcattgctagtttccatttgagagctccttgtttaaaacctgaaaattgtgccgaagactagggtcattttatatttgagaaaatggaagaaattttgtctttcttcag

SEQ ID NO: 25564 - DNA, 110 bp, synthetic construct
  source 1..110: mol_type = other DNA
tcgttaaccactgagccacaacgggaactccaacctgctcttctttacacagcagccaagtgatctttttattgttttgtttttttgttttttaattggccttttgtttg

SEQ ID NO: 25565 - DNA, 110 bp, synthetic construct
  source 1..110: mol_type = other DNA
ccaagtgatctttttattgttttgtttttttgttttttaattggccttttgtttgggttttttcggttggtcttgcccaaagcatagggaagttccccaggccagtgtga

SEQ ID NO: 25566 - DNA, 110 bp, synthetic construct
  source 1..110: mol_type = other DNA
tctctagaatgctggcatccaaactggaacttataatataggctcacctagttttcagaccttcctactcagattataactacaccatgggctctcctgggtctccagct

SEQ ID NO: 25567 - DNA, 110 bp, synthetic construct
  source 1..110: mol_type = other DNA
ggaacttataatataggctcacctagttttcagaccttcctactcagattataactacaccatgggctctcctgggtctccagcttgctgactgcaaatcttgggactcc

SEQ ID NO: 25568 - DNA, 110 bp, synthetic construct
  source 1..110: mol_type = other DNA
tcatggaggccaaacccctattccacagatggggaaactgtcaaggcccacatcttcaagcgacgcattcaaagtcagagagggcagaatgatggagaagcagctaaaac

SEQ ID NO: 25569 - DNA, 110 bp, synthetic construct
  source 1..110: mol_type = other DNA
tcaagcgacgcattcaaagtcagagagggcagaatgatggagaagcagctaaaactcgtatctaatctcccgatcccagatattagtgctctcgtcatcctggtatcata

SEQ ID NO: 25570 - DNA, 110 bp, synthetic construct
  source 1..110: mol_type = other DNA
caagagatgtaaatgaggatccaaggatctgtgtttgaaaccagaccctcaagcgactctaaggtgggtgtttcttggatcatattttgagtaactttgcttgaggaatt

SEQ ID NO: 25571 - DNA, 110 bp, synthetic construct
  source 1..110: mol_type = other DNA
actctaaggtgggtgtttcttggatcatattttgagtaactttgcttgaggaattttccctggaaaatcagatatccattgtgttttagcttccagttcatcctcaaaat

SEQ ID NO: 25572 - DNA, 110 bp, synthetic construct
  source 1..110: mol_type = other DNA
aaatggtgccttttgcttgtttgtctaggccaatcaaattgtactaagatctttctataacactttattttccttcatagatttaatgtcatcattcaaatgtagtcact

SEQ ID NO: 25573 - DNA, 110 bp, synthetic construct; identical to SEQ ID NO: 25572
  source 1..110: mol_type = other DNA

SEQ ID NO: 25574 - DNA, 110 bp, synthetic construct
  source 1..110: mol_type = other DNA
ctgtccctttcaataataaaggcaattatatgtgggcataccttgaagatattgcaggtttggttccaagatatggccacaaagcaaataatgtgataaagtgagacaca

SEQ ID NO: 25575 - DNA, 110 bp, synthetic construct
  source 1..110: mol_type = other DNA
aggtttggttccaagatatggccacaaagcaaataatgtgataaagtgagacacaaaattttggggttttccagtgcatataaaagttacatttatattatactctagtc

SEQ ID NO: 25576 - DNA, 110 bp, synthetic construct
  source 1..110: mol_type = other DNA
caaaatccaattatggtataaataactgctcatcttactatcaagatcagctaggattggactttcgaggtgacagatgattcaagtgtccccaaattaccctcaaaaca

SEQ ID NO: 25577 - DNA, 110 bp, synthetic construct
  source 1..110: mol_type = other DNA
attggactttcgaggtgacagatgattcaagtgtccccaaattaccctcaaaacagggcctatctttctggattacttttaggcaaattttgaataattattccaaagac

SEQ ID NO: 25578 - DNA, 110 bp, synthetic construct; identical to SEQ ID NO: 25576
  source 1..110: mol_type = other DNA

SEQ ID NO: 25579 - DNA, 110 bp, synthetic construct; identical to SEQ ID NO: 25577
  source 1..110: mol_type = other DNA

SEQ ID NO: 25580 - DNA, 110 bp, synthetic construct
  source 1..110: mol_type = other DNA
ggaaccattgatactgatatccagctgattccatattgaagcaaatgtcctaaagactgttgcctcagaacaggacaagttgaccaaactatgcttctgtcagcctcctt

SEQ ID NO: 25581 - DNA, 110 bp, synthetic construct
  source 1..110: mol_type = other DNA
actgttgcctcagaacaggacaagttgaccaaactatgcttctgtcagcctccttcccatcaatctccctaaggtttggattagcaggaaactagctaaggcaaactatg

SEQ ID NO: 25582 - DNA, 110 bp, synthetic construct
  source 1..110: mol_type = other DNA
ctctaataacaaagcagcaacacctccaggctctcaattccagctctgcgggagagtgggctgggcggtttacttggtgagattggtagtctgtcctgccccgcagatgg

SEQ ID NO: 25583 - DNA, 110 bp, synthetic construct
  source 1..110: mol_type = other DNA
aagcgaaagagaccatttccaggttactctgctaccactgtaatgcatcccaagcgtaggaaaatgattgcctattattgcaatagttcacataacagttcacaaggtgc

SEQ ID NO: 25584 - DNA, 110 bp, synthetic construct
  source 1..110: mol_type = other DNA
gtaggaaaatgattgcctattattgcaatagttcacataacagttcacaaggtgctataaggattaagagtccaccaatttttgtatgactatagatttagccatttggc

SEQ ID NO: 25585 - DNA, 110 bp, synthetic construct
  source 1..110: mol_type = other DNA
gtcaacacactaaagagaaatgttggggtttgcttggggtgggcggatggaaagtagggcaattaatgaaagctgcttacatattttccattgctctcttagcaatatgc

SEQ ID NO: 25586 - DNA, 110 bp, synthetic construct
  source 1..110: mol_type = other DNA
agggcaattaatgaaagctgcttacatattttccattgctctcttagcaatatgctcccttcccttttctgccttttcttggttgaggtattccagcactttcattaaca

SEQ ID NO: 25587 - DNA, 110 bp, synthetic construct
  source 1..110: mol_type = other DNA
tgccctcctgagtctgtgtgggtcacaatggcttcttcccctgcctgacaacggggatttcaacccaaagaaagctgaaagtgtgaaaactccaatttcattgtcaaatc

SEQ ID NO: 25588 - DNA, 110 bp, synthetic construct
  source 1..110: mol_type = other DNA
tctagcatctgcttttaaatatgagtggaagccaaggttaccagacatttgagaatagtctctaatgccaaagaacaaggccaaaaaggacaaagagaaaaaagtaagca

SEQ ID NO: 25589 - DNA, 110 bp, synthetic construct
  source 1..110: mol_type = other DNA
tagtctctaatgccaaagaacaaggccaaaaaggacaaagagaaaaaagtaagcactggatacagtaagaaaacaaggaggaggacaaacttacgcagacacacacacac

SEQ ID NO: 25590 - DNA, 110 bp, synthetic construct
  source 1..110: mol_type = other DNA
cgcgtctgcaacctacgccacagctcacagatcctttaatccactgagatcatgcatagatcaaacctgagattcacgcatcctcatggatcctagttgggttggttacg

SEQ ID NO: 25591 - DNA, 110 bp, synthetic construct; identical to SEQ ID NO: 25590
  source 1..110: mol_type = other DNA

SEQ ID NO: 25592 - DNA, 110 bp, synthetic construct
  source 1..110: mol_type = other DNA
cttgacagattctaactgatgtgagatgcagcaaaagacatctgatctcgtgtatgtccaaacaaaatacaagcattcccaccgtggctcagcagtaacgaatccaacta

SEQ ID NO: 25593 - DNA, 110 bp, synthetic construct
  source 1..110: mol_type = other DNA
atgcagcaaaagacatctgatctcgtgtatgtccaaacaaaatacaagcattcccaccgtggctcagcagtaacgaatccaactagtattcatgaggatgtgggttagat

SEQ ID NO: 25594 - DNA, 110 bp, synthetic construct
  source 1..110: mol_type = other DNA
acgctttccttggctacttttccacccgattcagctgacagctgacagcacagtctagtcgccaccaaggagaaaagggttccctgtccttccaaagcctgagtaccaaa

SEQ ID NO: 25595 - DNA, 110 bp, synthetic construct
  source 1..110: mol_type = other DNA
tcacttcagaggcacagatctgatccccagtctggcagagtgggttaatgtatccagtgttgccacagctgtggcacaggtcacagctgcagctcagagtcaatccctgg

SEQ ID NO: 25596 - DNA, 110 bp, synthetic construct
  source 1..110: mol_type = other DNA
agtgttgccacagctgtggcacaggtcacagctgcagctcagagtcaatccctggcctggaaacgtcatatgccatgaatatgaccttaaaccacaaacccaccgccccc

SEQ ID NO: 25597 - DNA, 110 bp, synthetic construct
  source 1..110: mol_type = other DNA
catggatgcttagttgggttcgttaactgctgagtcacaatgggaattccagaaaaacatcttattgactagattcctggtttcttataaaagggtgtagctcgggaaca

SEQ ID NO: 25598 - DNA, 110 bp, synthetic construct; identical to SEQ ID NO: 25597
  source 1..110: mol_type = other DNA

SEQ ID NO: 25599 - DNA, 110 bp, synthetic construct
  source 1..110: mol_type = other DNA
atcctccttgtgcttctgatcacaggaggtgatgacacaagtcagctgggctgactctgtacacaccttccatgcttattttgactcaaggggccagaagacaagctagc

SEQ ID NO: 25600 - DNA, 110 bp, synthetic construct
  source 1..110: mol_type = other DNA
tctgtacacaccttccatgcttattttgactcaaggggccagaagacaagctagcacctttccttctccacctgcctgatcaccaaagtactgctttcatagcatagttt

SEQ ID NO: 25601 - DNA, 110 bp, synthetic construct
  source 1..110: mol_type = other DNA
acacagcctgtcatgtgcccacctttcccaccctcctggagcctctgagttcctcatccgcaggaggacctctggcctgccaagtgacctaagtcacagtacttcctagt

SEQ ID NO: 25602 - DNA, 110 bp, synthetic construct
  source 1..110: mol_type = other DNA
atccgcaggaggacctctggcctgccaagtgacctaagtcacagtacttcctagtcccctgtctggaacatggggaccacacggtctctctctgtgggaaaaagagagag

SEQ ID NO: 25603 - DNA, 110 bp, synthetic construct
  source 1..110: mol_type = other DNA
tgagattgtttgtgaattcttcccacatgggtctctagaactgccttagttcctgtctgttctgatagaagtccgttgggctcttttctacccagatttggtttctgttg

SEQ ID NO: 25604 - DNA, 110 bp, synthetic construct
  source 1..110: mol_type = other DNA
tctgttctgatagaagtccgttgggctcttttctacccagatttggtttctgttgcttgcagctaagaacccgtagcaggtacatcctagatgcacataactttgcctag

SEQ ID NO: 25605 - DNA, 110 bp, synthetic construct
  source 1..110: mol_type = other DNA
tttgtccacttaacctagaacttatctatgtatacagatcaagtaagaatttagtaggcttcctatatacttcacttctaggaatgccatgatcaactagccaacaccat

SEQ ID NO: 25606 - DNA, 110 bp, synthetic construct
  source 1..110: mol_type = other DNA
aggcttcctatatacttcacttctaggaatgccatgatcaactagccaacaccataggtctgcaagagtcggattattctgaatgctgttttcacgttgctgtcaataca

SEQ ID NO: 25607 - DNA, 110 bp, synthetic construct
  source 1..110: mol_type = other DNA
ttgacgtgcatgtccctggtggttagtgatattgagcactttttcatgtccccgttggccatttataggtcttctttggtctgtgcaggtcctttgcccattttcaaatt

SEQ ID NO: 25608 - DNA, 110 bp, synthetic construct
  source 1..110: mol_type = other DNA
caaggcctgagattgaaccccagccacagcagtgacccaatgcatgcagtgacaacaccagatcctacgccaccagggaactcctacacattttcattttgtctggctca

SEQ ID NO: 25609 - DNA, 110 bp, synthetic construct
  source 1..110: mol_type = other DNA
caccagatcctacgccaccagggaactcctacacattttcattttgtctggctcatctctgctcctcctctcaaattcatctcaggaatgcagtttacaagagggcactg

SEQ ID NO: 25610 - DNA, 110 bp, synthetic construct
  source 1..110: mol_type = other DNA
ggcctgcagtaagagagggaggcaggatgtttagcattcttccttctcctgtaccagggctatttggatttattactaaagttcatgtgtaaagaatggctttggctttt

SEQ ID NO: 25611 - DNA, 110 bp, synthetic construct
  source 1..110: mol_type = other DNA
agggctatttggatttattactaaagttcatgtgtaaagaatggctttggcttttccagggatcctgggtacatttgcctttggaatagaggccaaggttaatccagaag

SEQ ID NO: 25612 - DNA, 110 bp, synthetic construct
  source 1..110: mol_type = other DNA
attgcccatcctttccaaatataacagtttgcatccactcaaccctccccctgctccccgccccaaatgcccatccacctcattccctccaccttccccccagaaaccct

SEQ ID NO: 25613 - DNA, 110 bp, synthetic construct
  source 1..110: mol_type = other DNA
ccccgccccaaatgcccatccacctcattccctccaccttccccccagaaaccctggagctctttgaaaacaaaccagtgtctgagctctgtccttcagaaattctgact

SEQ ID NO: 25614 - DNA, 110 bp, synthetic construct
  source 1..110: mol_type = other DNA
cagtgacagctagaattgtgagttaaagcttctggaaggagggagaaattgagatggatctgtaaggttgtatacgatttaaatatatataagaggtgtgcattttaggc

SEQ ID NO: 25615 - DNA, 110 bp, synthetic construct
  source 1..110: mol_type = other DNA
cgtttcaaggaatgtgggttgattgctttctccatacacaggagagacagctactgcgattgtggaccacttttaagagaagttctggttagatgcttctttcctccaca

SEQ ID NO: 25616 - DNA, 110 bp, synthetic construct
  source 1..110: mol_type = other DNA
gcgattgtggaccacttttaagagaagttctggttagatgcttctttcctccacaactgttctttctgtgaaaggatcataagatcactcactcctactcccttcattca

SEQ ID NO: 25617 - DNA, 110 bp, synthetic construct
  source 1..110: mol_type = other DNA
tttctcatggagaaatctcttaaatatgctaaattatgagttccttgctgcatatctaaacatagtgtgatacagcaatatcgcttttcatttgacctgtgcatagattt

SEQ ID NO: 25618 - DNA, 110 bp, synthetic construct
  source 1..110: mol_type = other DNA
ctaaacatagtgtgatacagcaatatcgcttttcatttgacctgtgcatagatttacacaagaatctttatatacataatattcattcctactcagctaaaagcctgcac

SEQ ID NO: 25619 - DNA, 110 bp, synthetic construct
  source 1..110: mol_type = other DNA
gtttgggggtaaaaaaaaaaaccctatcattgttgacctaaaataaatagactgccaataatttcaccagaaaactggatttattggggatcggcaatttggggtctgag

SEQ ID NO: 25620 - DNA, 110 bp, synthetic construct; identical to SEQ ID NO: 25619
  source 1..110: mol_type = other DNA

SEQ ID NO: 25621 - DNA, 110 bp, synthetic construct
  source 1..110: mol_type = other DNA
aactgctccacacctcctccatcaaaaaggactgggcccctttgtggttcttgagagccagaatgtctgggctgggaaacctaatttagaaatttaccagcagaataccc

SEQ ID NO: 25622 - DNA, 110 bp, synthetic construct
  source 1..110: mol_type = other DNA
gcttccctctgcaggatcatctcatacagccggatggcatcctcgtagttatcaaagctgcaatagagcgtcactctcaggatctcggtgtcaccgtgcacctgcctcac

SEQ ID NO: 25623 - DNA, 110 bp, synthetic construct
  source 1..110: mol_type = other DNA
gatattagaagaactttaaaatatttaagtaaaagtaatagatgaaataaattagctagtttctactctactccttggctactcaaagagaccttgagattcccataggg

SEQ ID NO: 25624 - DNA, 110 bp, synthetic construct
  source 1..110: mol_type = other DNA
ctagtttctactctactccttggctactcaaagagaccttgagattcccatagggaaagagcagacatcctctagacacccttgaatgatttatcatgtctgtccatttc

SEQ ID NO: 25625 - DNA, 110 bp, synthetic construct
  source 1..110: mol_type = other DNA
ccccaacaacctttccaacgcagctgttacagttcccaagaggaggagttttgctccccgagctgtttgtggcttcctcaataatctgccttctttctgcctttacaagg

SEQ ID NO: 25626 - DNA, 110 bp, synthetic construct
  source 1..110: mol_type = other DNA
ataaagtgttaatcaagatctatctaactgctaattttacaaatactctacattcttcctgccaagtgtatccatgcaactcctttgtttagcaacatctttcatagaaa

SEQ ID NO: 25627 - DNA, 110 bp, synthetic construct
  source 1..110: mol_type = other DNA
ttcctgccaagtgtatccatgcaactcctttgtttagcaacatctttcatagaaagaagcaaagtaagcctgagccaaggccttttattgtcctgtcaaaatttacgatc

SEQ ID NO: 25628 - DNA, 110 bp, synthetic construct
  source 1..110: mol_type = other DNA
ttttgatgtgaattgacatccacattcagtctgtgaaaaaaaacaaagacacaaataaacgatggattttcctatgagaaaatgtactttctgaaactcttccacattat

SEQ ID NO: 25629 - DNA, 110 bp, synthetic construct
  source 1..110: mol_type = other DNA
taaacgatggattttcctatgagaaaatgtactttctgaaactcttccacattattgccatcatttctacatcttttcagtagttgtgctgtgtctgtgggtaccaactt

SEQ ID NO: 25630 - DNA, 110 bp, synthetic construct
  source 1..110: mol_type = other DNA
aaagattacatggtgaataatggcagcacaggaatataaacgttgaaaagcccatttgcctgattcaaatcacagacccaacgtttagtagatgtgtgaacttcagcaat

SEQ ID NO: 25631 - DNA, 110 bp, synthetic construct
  source 1..110: mol_type = other DNA
ttgcctgattcaaatcacagacccaacgtttagtagatgtgtgaacttcagcaatttaatttctttgtgtattcgtttttgtgaaatacgaacagtttattggtttttat

SEQ ID NO: 25632 - DNA, 110 bp, synthetic construct
  source 1..110: mol_type = other DNA
ccctagcctgggaacctctatatgccataggtatggccctaagaaggaaaaaaaaaaaaaatcaaaagatgaatatgatcaaagcccttagaatcccgaggggtttgacg

SEQ ID NO: 25633 - DNA, 110 bp, synthetic construct; identical to SEQ ID NO: 25632
  source 1..110: mol_type = other DNA

SEQ ID NO: 25634 - DNA, 110 bp, synthetic construct
  source 1..110: mol_type = other DNA
tatatatataatatatatatatattccttttctcatatcatccctcatcatgttctatcacaagaaattagatatagttccccgtgctttgtacagcaggatctcattgc

SEQ ID NO: 25635 - DNA, 110 bp, synthetic construct; identical to SEQ ID NO: 25634
  source 1..110: mol_type = other DNA

SEQ ID NO: 25636 - DNA, 110 bp, synthetic construct
  source 1..110: mol_type = other DNA
acacagatgaatctgttcttaggctgcataatggttttgcatattgcattacactttatatagattttgcatatgtccttcagctaagtcaaaacataagcttggatatg

SEQ ID NO: 25637 - DNA, 110 bp, synthetic construct
  source 1..110: mol_type = other DNA
catgcggtctcccctcagtagctgtctttcattcctttcttttgttactagaacgttggtttcccaagtagccattcctgttgcactcagcctagtgagtctcaaaatgc

SEQ ID NO: 25638 - DNA, 110 bp, synthetic construct
  source 1..110: mol_type = other DNA
aggatttcattgattacagttgatgtttgatcactactggcgtttcattactctggaaatgaatacgtcagggacgctttgggagatgtttttatataggcggctctgcg

SEQ ID NO: 25639 - DNA, 110 bp, synthetic construct
  source 1..110: mol_type = other DNA
gaaatgaatacgtcagggacgctttgggagatgtttttatataggcggctctgcgtaaaatttccatagtcaaggatggcaggtgctgcattagaaaattcatgctaggc

SEQ ID NO: 25640 - DNA, 110 bp, synthetic construct; identical to SEQ ID NO: 25638
  source 1..110: mol_type = other DNA

SEQ ID NO: 25641 - DNA, 110 bp, synthetic construct; identical to SEQ ID NO: 25639
  source 1..110: mol_type = other DNA

SEQ ID NO: 25642 - DNA, 110 bp, synthetic construct
  source 1..110: mol_type = other DNA
tttcgagaggtaattaaggtagtgagggtggccctaacccaccgggactgatgtccttacaagagagtcaaggtggacgtgcacctgcagagaagagccaagcagagagg

SEQ ID NO: 25643 - DNA, 110 bp, synthetic construct
  source 1..110: mol_type = other DNA
aaataacttgtagctcaaggctcaatgtccctctgctgaggtcacctgtctctctgagtaatgctttcgaatgtaatgaatcggaggtcccatgttcctgtgggtattcc

SEQ ID NO: 25644 - DNA, 110 bp, synthetic construct
  source 1..110: mol_type = other DNA
gagtaatgctttcgaatgtaatgaatcggaggtcccatgttcctgtgggtattcctcttttctagaattttccccatacacaatgcactagcaggcctggtgcgtttgca

SEQ ID NO: 25645 - DNA, 110 bp, synthetic construct
  source 1..110: mol_type = other DNA
tgcccctgtattgactcaagatgtaacctcagccatgtaccaagctatgtgaatgcccatggctgcacaaagaattgttcctagtggcctgtgacctaaaacagagtcct

SEQ ID NO: 25646 - DNA, 110 bp, synthetic construct
  source 1..110: mol_type = other DNA
gacaaagtcatactttgtggccaactagttctcggctgaacattctcagagaactatagaaataaagggaccaatctggcccgttgaagttgtggtgcagcagctcatga

SEQ ID NO: 25647 - DNA, 110 bp, synthetic construct
  source 1..110: mol_type = other DNA
atagaaataaagggaccaatctggcccgttgaagttgtggtgcagcagctcatgaaagtacaaacaaaactaaagatctctgagaactcggaaatacacacagaagtctc

SEQ ID NO: 25648 - DNA, 110 bp, synthetic construct
  source 1..110: mol_type = other DNA
ataaataaataaatactttggacttattttaagtttcaatctcctattttcccaggcaaagactgattccaaggagcacaaactgctagctcaagaggcaaatgcaggtt

SEQ ID NO: 25649 - DNA, 110 bp, synthetic construct
  source 1..110: mol_type = other DNA
gcaaagactgattccaaggagcacaaactgctagctcaagaggcaaatgcaggttccagatgtttgagttggctcaaacactcaatatatttttagttggctttgactgt

SEQ ID NO: 25650 - DNA, 110 bp, synthetic construct
  source 1..110: mol_type = other DNA
aagtccaggttatctatagtcaagggttgagtgagagaggagaagtagaaactgttgcaaatagaggccaaggccagtcgtgaagggctttgaatgccaagttaatggga

SEQ ID NO: 25651 - DNA, 110 bp, synthetic construct
  source 1..110: mol_type = other DNA
tgcaaatagaggccaaggccagtcgtgaagggctttgaatgccaagttaatgggagtctctactgtatcctaagtaaaagccatgggaaaccactgaaggatttctgaac

SEQ ID NO: 25652 - DNA, 110 bp, synthetic construct
  source 1..110: mol_type = other DNA
tttttgctttttgggtgttgttttgttttgttttgtttttttactttttagggctgcacctgcggcatatggacatctctagcctaggagtcgaattagagttgcagcgc

SEQ ID NO: 25653 - DNA, 110 bp, synthetic construct
  source 1..110: mol_type = other DNA
gcacctgcggcatatggacatctctagcctaggagtcgaattagagttgcagcgcctggcctacagcacagccatagtaacaccaattttgagcctcctctgagaactac

SEQ ID NO: 25654 - DNA, 110 bp, synthetic construct
  source 1..110: mol_type = other DNA
ttctcagttaccctcatccccacaaactcacagcctcctcagttgtcaccatcctgcaccacaatgatacgttggttacaactgctgagtctatattatagtgtcaaaca

SEQ ID NO: 25655 - DNA, 110 bp, synthetic construct
  source 1..110: mol_type = other DNA
gcaccacaatgatacgttggttacaactgctgagtctatattatagtgtcaaacagaatagccctattcagattgtctatttcttttcttagtttcaaattatgtgtcac

SEQ ID NO: 25656 - DNA, 110 bp, synthetic construct
  source 1..110: mol_type = other DNA
cattttatagggttttttttgggggggggcacacctgcagcctatgaaagttccctggctagggttggaatggagctgccactgccaccgataccacagccacagcaatg

SEQ ID NO: 25657 - DNA, 110 bp, synthetic construct; identical to SEQ ID NO: 25656
  source 1..110: mol_type = other DNA

SEQ ID NO: 25658 - DNA, 110 bp, synthetic construct
  source 1..110: mol_type = other DNA
atatgccatgtggcggccaaaaaagagtgtgtggaatagaaaggaaccatcctctctgagcctcactaaaatttcagaatcatagcaaatgaatggtgttgttgatttaa

SEQ ID NO: 25659 - DNA, 110 bp, synthetic construct
  source 1..110: mol_type = other DNA
ctgagcctcactaaaatttcagaatcatagcaaatgaatggtgttgttgatttaagccagagttggagtggctgctacatggaggtagataattaatgcactagggcttt

SEQ ID NO: 25660 - DNA, 110 bp, synthetic construct
  source 1..110: mol_type = other DNA
ctcacaattggcagtgacactgcagttgagaaaaaaatgtcatataagtgctgagagttttggttaactgtttattggtgagggtttaggaaatattgaaaacaaatgtg

SEQ ID NO: 25661 - DNA, 110 bp, synthetic construct
  source 1..110: mol_type = other DNA
gacactgcagttgagaaaaaaatgtcatataagtgctgagagttttggttaactgtttattggtgagggtttaggaaatattgaaaacaaatgtgtttagattacgaaaa

SEQ ID NO: 25662 - DNA, 110 bp, synthetic construct
  source 1..110: mol_type = other DNA
atatttttccttttctgacttatttcacataacatactggccttgatatccttttattttgttgcaaaggggcagaattttactcctttttatggctgaataatattcca

SEQ ID NO: 25663 - DNA, 110 bp, synthetic construct
  source 1..110: mol_type = other DNA
tgacttatttcacataacatactggccttgatatccttttattttgttgcaaaggggcagaattttactcctttttatggctgaataatattccattgtgtatatatgcc

SEQ ID NO: 25664 - DNA, 110 bp, synthetic construct
  source 1..110: mol_type = other DNA
ttcatgcctcctgacactctgaatggattatgctctgagcctagtttttcacatgtctttctggatctcactcttcatagcttagctcaaatttattcttgaatagcctg

SEQ ID NO: 25665 - DNA, 110 bp, synthetic construct
  source 1..110: mol_type = other DNA
aatatccaacctacatctgccccaaactactgttctgattactttttaccatagatttggttcaggccatcttgtgaatggactcatacaatatgtgtgcttttttgtaa

SEQ ID NO: 25666 - DNA, 110 bp, synthetic construct
  source 1..110: mol_type = other DNA
tttggttcaggccatcttgtgaatggactcatacaatatgtgtgcttttttgtaaggtttcttttactcagcatggtgattttgactcatccttgttgtatgtatcagaa

SEQ ID NO: 25667 - DNA, 110 bp, synthetic construct
  source 1..110: mol_type = other DNA
ctctgaaccaagatgggaactccagctcttcaaggaaattaaaccccaaatcctctggccatgtctctttgtagtgctccttgccccaccttgaccagtctgggctgcta

SEQ ID NO: 25668 - DNA, 110 bp, synthetic construct
  source 1..110: mol_type = other DNA
ctcttcaaggaaattaaaccccaaatcctctggccatgtctctttgtagtgctccttgccccaccttgaccagtctgggctgctaacttcctactagagaaggaatgtca

SEQ ID NO: 25669 - DNA, 110 bp, synthetic construct
  source 1..110: mol_type = other DNA
tgttttctgtatatgtggcttctatacatgaggggtgtctaaaatgagtatggaaaaagttacaacaaagcctaactcccaacgtttctggttattatattacttgctca

SEQ ID NO: 25670 - DNA, 110 bp, synthetic construct
  source 1..110: mol_type = other DNA
aaagttacaacaaagcctaactcccaacgtttctggttattatattacttgctcagctaaaaatattgataagcaagagaacaatcatcaggttgatacatcagtctcct

SEQ ID NO: 25671 - DNA, 110 bp, synthetic construct
  source 1..110: mol_type = other DNA
ctgggtaactataattaaactattgttaagcatcagaaacatccaaggaaagaggaactgataacatggttgggagaggacagaagacagatgaataatgaagcttagca

SEQ ID NO: 25672 - DNA, 110 bp, synthetic construct
  source 1..110: mol_type = other DNA
aactgataacatggttgggagaggacagaagacagatgaataatgaagcttagcagataagaagtaatattgccaccttcattttttgttactatttttacatgggcaaa

SEQ ID NO: 25673 - DNA, 110 bp, synthetic construct
  source 1..110: mol_type = other DNA
aaaagggtacttttaaaactcctctgagcaaagagttcagagcgttaacatcctgagggcctgttttaggggacttgaagtctttcctctccctatgtgccttctcctcc

SEQ ID NO: 25674 - DNA, 110 bp, synthetic construct
  source 1..110: mol_type = other DNA
cctgatctgcaaggcatggacacgagtcacctggattaaaagcataatctgccctcacctctctccaaatttccaaagaggaacaataggaagcaatttcttgaaagaaa

SEQ ID NO: 25675 - DNA, 110 bp, synthetic construct
  source 1..110: mol_type = other DNA
cacctctctccaaatttccaaagaggaacaataggaagcaatttcttgaaagaaaaccaggatggatctgaaattgtttaaggaaaggttatcgctaaaggtgaatgaga

SEQ ID NO: 25676 - DNA, 110 bp, synthetic construct
  source 1..110: mol_type = other DNA
tatttcatttaaattgaagttacattcactttgaagccagtttagttagaagtaattatttacgcaattgattcttcctgttccagaaggaatacctcttttcctgtgtt

SEQ ID NO: 25677 - DNA, 110 bp, synthetic construct
  source 1..110: mol_type = other DNA
ttatttacgcaattgattcttcctgttccagaaggaatacctcttttcctgtgttgtccatgtcactgctagagactgaatgtttgcgtcacttcaaaatttgtactgga

SEQ ID NO: 25678 - DNA, 110 bp, synthetic construct
  source 1..110: mol_type = other DNA
ttacatacacttatttctcaaaaatgtgactttaaagtcatgtagtgtttcagcgtcttgagttacttgaatgcaagcagtggctccacagagaaaaaaaaaggtcattt

SEQ ID NO: 25679 - DNA, 110 bp, synthetic construct
  source 1..110: mol_type = other DNA
cgatttctagggagaaggaacatccagaggaaaggccctagataggagctttcttgacatgttggaggaaccacaaggaagtcagtgtggctggagcaaagcaagcaagg

SEQ ID NO: 25680 - DNA, 110 bp, synthetic construct
  source 1..110: mol_type = other DNA
tcagttattaaactgaaatttatgatagagcactatatcatagtgataaagaccatggaccctggaaaaagacagaatctgcgttccacctttggccccatcactcattc

SEQ ID NO: 25681 - DNA, 110 bp, synthetic construct
  source 1..110: mol_type = other DNA
tggaccctggaaaaagacagaatctgcgttccacctttggccccatcactcattccttttgagcatcaatttgcttattgataaaagggagctacttgatatcacctccc

SEQ ID NO: 25682 - DNA, 110 bp, synthetic construct
  source 1..110: mol_type = other DNA
aaaacctcccagatggggatcataaagtgggcatgtcttcctccaggacatggctctgacatgtcttccttaaaccaagcaatatggccagaaaccccccatgttctgac

SEQ ID NO: 25683 - DNA, 110 bp, synthetic construct
  source 1..110: mol_type = other DNA
gagcctttgagctgggaatacatgaatgaatcaacttcaaagaaggatcagacaagggcacttcactttttattctcaggaatataaccattgtttttaaaggttaaaat

SEQ ID NO: 25684 - DNA, 110 bp, synthetic construct
  source 1..110: mol_type = other DNA
gatcagacaagggcacttcactttttattctcaggaatataaccattgtttttaaaggttaaaatagcaaaaagtgtctatgcctcccatttttgtctttataatgaggt

SEQ ID NO: 25685 - DNA, 110 bp, synthetic construct; identical to SEQ ID NO: 25683
  source 1..110: mol_type = other DNA

SEQ ID NO: 25686 - DNA, 110 bp, synthetic construct; identical to SEQ ID NO: 25684
  source 1..110: mol_type = other DNA

SEQ ID NO: 25687 - DNA, 110 bp, synthetic construct
  source 1..110: mol_type = other DNA
tcccctcccttcaaactgcaattatagagaaacttgttattttctcatacttttaatcctataagctctactctcaacttacgttatatgccaccatttaccacaagcga

SEQ ID NO: 25688 - DNA, 110 bp, synthetic construct
  source 1..110: mol_type = other DNA
atcctataagctctactctcaacttacgttatatgccaccatttaccacaagcgactatgttctgccacactgcataagtgatgatcatatatcaacacaataagataat

SEQ ID NO: 25689 - DNA, 110 bp, synthetic construct
  source 1..110: mol_type = other DNA
tttcccagctactccataaagcaaagccttagatccctgcctacagtctacttcttcatcaagtttttcttatgcgattgtccacaaataatctctccttcaaactccag

SEQ ID NO: 25690 - DNA, 110 bp, synthetic construct
  source 1..110: mol_type = other DNA
tcatcaagtttttcttatgcgattgtccacaaataatctctccttcaaactccaggagcagttggtacttctataatggtgtgtcttattctgatgtattacaaagtttt

SEQ ID NO: 25691 - DNA, 110 bp, synthetic construct
  source 1..110: mol_type = other DNA
agaagttcaataacttgcatacatggcagaaacccaggaaaagtgagcaactcaccaaaatggccgaaaccctcatcttaatatcatcttcaggtaaagacaggagagag

SEQ ID NO: 25692 - DNA, 110 bp, synthetic construct
  source 1..110: mol_type = other DNA
caaaatggccgaaaccctcatcttaatatcatcttcaggtaaagacaggagagagtgttgggtgcagtggtttgggacttcaaagaggaggcaggcaattcttgcagaga

SEQ ID NO: 25693 - DNA, 110 bp, synthetic construct
  source 1..110: mol_type = other DNA
gccaccccaagtacagggccatgcagtataaaacttgaaaaggggagctgtggagttcgtttccctgagtgaagattctagttccacctacctatcggctcagtgatttg

SEQ ID NO: 25694 - DNA, 110 bp, synthetic construct
  source 1..110: mol_type = other DNA
acacattattattaaaacccatgccttatttggatttcctcgggtttttatctatcaatttcaggagctcttccagggtaccacattaattaatttcagtcatcatgtct

SEQ ID NO: 25695 - DNA, 110 bp, synthetic construct
  source 1..110: mol_type = other DNA
caatttcaggagctcttccagggtaccacattaattaatttcagtcatcatgtctcctttatcctctctagactgtgagcgtttctcagactttccttacttcgtacgac

SEQ ID NO: 25696 - DNA, 110 bp, synthetic construct
  source 1..110: mol_type = other DNA
aaaacaatatgcataactaaaactttgagggaaacactctctattgctaaaaaatgtgaaggacgggagatattttctaggggttgataacagaccctgtaaaatacctg

SEQ ID NO: 25697 - DNA, 110 bp, synthetic construct
  source 1..110: mol_type = other DNA
gtgaaggacgggagatattttctaggggttgataacagaccctgtaaaatacctgcctccatacacccaagaacctgtgtgagtcttcctcccacaccagcattcgctta

SEQ ID NO: 25698 - DNA, 110 bp, synthetic construct
  source 1..110: mol_type = other DNA
catagaattgaggttttctttgaaatgactttagtgagacttattttaagcatcagcatgcaagttagtgccattgtcaacaaaggaatttttctgtttttctcgaaaaa

SEQ ID NO: 25699 - DNA, 110 bp, synthetic construct
  source 1..110: mol_type = other DNA
gcatgcaagttagtgccattgtcaacaaaggaatttttctgtttttctcgaaaaaatgatgtgttcatgtgagcatagctggaaagttcagaatgagccactattaattt

SEQ ID NO: 25700 - DNA, 110 bp, synthetic construct
  source 1..110: mol_type = other DNA
gtgtttttttctaagggacttataaaatgtgatcatagataatacaatgtccatagtgaggaagctctattcccataataaatcaatctcttgcatttagccataagaaa

SEQ ID NO: 25701 - DNA, 110 bp, synthetic construct; identical to SEQ ID NO: 25700
  source 1..110: mol_type = other DNA

SEQ ID NO: 25702 - DNA, 110 bp, synthetic construct
  source 1..110: mol_type = other DNA
ttgcagggaaaaggtagcattttggaaatgaatggtaatggtaaaacaaagacaaaaggaactgtatttaagctctgaacttcgtttggtaaggttgtttcccatgaggg

SEQ ID NO: 25703 - DNA, 110 bp, synthetic construct
  source 1..110: mol_type = other DNA
aaggaactgtatttaagctctgaacttcgtttggtaaggttgtttcccatgagggtaccagttaattttttgaaactactgtatgtgtatactgtaattgaacaatgaac

SEQ ID NO: 25704 - DNA, 110 bp, synthetic construct
  source 1..110: mol_type = other DNA
tccgggcatgaataaggagccccaagcatttaggagaagatacattggcaaaaataacatacttcaataataaaaatgatacagatttaattataggaaatggtgaatta

SEQ ID NO: 25705 - DNA, 110 bp, synthetic construct; identical to SEQ ID NO: 25704
  source 1..110: mol_type = other DNA

SEQ ID NO: 25706 - DNA, 110 bp, synthetic construct
  source 1..110: mol_type = other DNA
gaacaaagaaagtttttgatcaatctactcctcgcaactacaactctacctgtaggtcctagcataagcagtacgcctgtgtttgttaaaatgcagattcccaggccttg

SEQ ID NO: 25707 - DNA, 110 bp, synthetic construct
  source 1..110: mol_type = other DNA
gtcctagcataagcagtacgcctgtgtttgttaaaatgcagattcccaggccttgactcctgagacctagcaattgtgggcctgagatctctcattttcctgggaatccc

SEQ ID NO: 25708 - DNA, 110 bp, synthetic construct
  source 1..110: mol_type = other DNA
tttgggaagatgtccagaatctgcagcatgctcttttaaggaatcctgatgatagcgagggggaccagctggctgggttgatgagccacaaggaagactgtgttgataaa

SEQ ID NO: 25709 - DNA, 110 bp, synthetic construct
  source 1..110: mol_type = other DNA
catttagattggtttccagttcagtctgttacaaacagtgctgctgtcaatcaactgctctcttgctctctctatctctctgtctctccccccccatatatatattcaca

SEQ ID NO: 25710 - DNA, 110 bp, synthetic construct
  source 1..110: mol_type = other DNA
tgctctcttgctctctctatctctctgtctctccccccccatatatatattcacaaacacacattatttggactacgtactatacattgtgtaaagttatttagaagaat

SEQ ID NO: 25711 - DNA, 110 bp, synthetic construct
  source 1..110: mol_type = other DNA
aagagagggaagggtacagaggtcttcctattttgctcttgagatggtgcttgaaaactttgaactggtcacttctttaagttaaggcattatattaaaatataaatatt

SEQ ID NO: 25712 - DNA, 110 bp, synthetic construct
  source 1..110: mol_type = other DNA
acagaggtcttcctattttgctcttgagatggtgcttgaaaactttgaactggtcacttctttaagttaaggcattatattaaaatataaatattatactgggatgctat

SEQ ID NO: 25713 - DNA, 110 bp, synthetic construct
  source 1..110: mol_type = other DNA
caagacttccagataattttgaatgttttcttttcaccaatacaacattgccttaaaactccttttatccatggatcgagagatcaaccaagatatatttctagttactt

SEQ ID NO: 25714 - DNA, 110 bp, synthetic construct
  source 1..110: mol_type = other DNA
aaactccttttatccatggatcgagagatcaaccaagatatatttctagttacttagagagatgctcaaagaaatgcatggatttctgtcttgttcaccaacacgtcaaa

SEQ ID NO: 25715 - DNA, 110 bp, synthetic construct
  source 1..110: mol_type = other DNA
atcattacaaccttggaaggagggtattttttctgtctttcatagatgaaaagcttgagcataacccgattggattcaagacccaaggtcttcatgctctttctatagtt

SEQ ID NO: 25716 - DNA, 110 bp, synthetic construct
  source 1..110: mol_type = other DNA
tgagcataacccgattggattcaagacccaaggtcttcatgctctttctatagttccacattagaagagaaaaccaagcgaaatgggccaaatgtaatgacttactgtta

SEQ ID NO: 25717 - DNA, 110 bp, synthetic construct
  source 1..110: mol_type = other DNA
ataatgctgaattgaacatgacagtgcagctatctattgacatagtgagtttcctgcttcagaaatacatccaggagtccctgctgtggtgcagtggttaagaatccaac

SEQ ID NO: 25718 - DNA, 110 bp, synthetic construct
  source 1..110: mol_type = other DNA
gtgacaggcaagaaatagatttatcaagataaggatgcttgtgagtgttattagtgggcaggcaaagaagctctgccccatgaaagaggtgggctacatttttataatcc

SEQ ID NO: 25719 - DNA, 110 bp, synthetic construct; identical to SEQ ID NO: 25718
  source 1..110: mol_type = other DNA

SEQ ID NO: 25720 - DNA, 110 bp, synthetic construct
  source 1..110: mol_type = other DNA
tataccttttaaaggcagaagattggcaggaaacataaacctcatgtaagcactagcttagaattctttacttaggtgacgattgtaaattggaccatcgctcccggtag

SEQ ID NO: 25721 - DNA, 110 bp, synthetic construct
  source 1..110: mol_type = other DNA
gcttagaattctttacttaggtgacgattgtaaattggaccatcgctcccggtagcaagtattttatttgtcataggatggaagctgcctagccagagcaaagccagttt

SEQ ID NO: 25722 - DNA, 110 bp, synthetic construct
  source 1..110: mol_type = other DNA
acattttgaggagctagagagacaaggcagataggacaagtggagcaaacaagggccagaccaagaaggaccacataaatcattttttaaagtttagatattattcaaag

SEQ ID NO: 25723 - DNA, 110 bp, synthetic construct
  source 1..110: mol_type = other DNA
ttgcccaagcagtgaatgacactgttcacacaaaggcaaaagctcttaaatgctaggatattctgcatgagcacagaggcggagcagtcattctccatgttgatttcttt

SEQ ID NO: 25724 - DNA, 110 bp, synthetic construct
  source 1..110: mol_type = other DNA
gccaaaaaaacagagctgtaaaatatgtgaaacaaaaacttatagaacagaaatagacaaatcttatacctgaaaacaccaactctcatctcccagcaattgctagaata

SEQ ID NO: 25725 - DNA, 110 bp, synthetic construct
  source 1..110: mol_type = other DNA
gacaaatcttatacctgaaaacaccaactctcatctcccagcaattgctagaataattagagaaatattcagcatggatacacaacctagcaacaccatcaaccaactgg

SEQ ID NO: 25726 - DNA, 110 bp, synthetic construct
  source 1..110: mol_type = other DNA
tgagtggataaggaaggagtgtgaactagagtgtggctatagtacttttcttttgctatgtaacaaactaccagctcggaataataaccacttaatatctcaaacttctg

SEQ ID NO: 25727 - DNA, 110 bp, synthetic construct
  source 1..110: mol_type = other DNA
ctatgtaacaaactaccagctcggaataataaccacttaatatctcaaacttctgtaggtcagaactcaggcacagaggggctggattctctaatcagggtctcagaaac

SEQ ID NO: 25728 - DNA, 110 bp, synthetic construct
  source 1..110: mol_type = other DNA
gccctcaaaacgatggggccatatagatgggctttatacatcctcccctgaaagtgttttggcacagctaaggtcagattcctgggcaaacactgtgaggtggacattgg

SEQ ID NO: 25729 - DNA, 110 bp, synthetic construct
  source 1..110: mol_type = other DNA
gttttggcacagctaaggtcagattcctgggcaaacactgtgaggtggacattggtgcagcagccttatgaagaagaatattctcctaatagaaaagtgaaggaagtaaa

SEQ ID NO: 25730 - DNA, 110 bp, synthetic construct
  source 1..110: mol_type = other DNA
aggatatgttcacagagataatttacctgtgaaatattacccagcagtcttttgaacctgttaccatcacttttctttgaggggcactgtgtcttttctgattagacggt

SEQ ID NO: 25731 - DNA, 110 bp, synthetic construct
  source 1..110: mol_type = other DNA
acctgttaccatcacttttctttgaggggcactgtgtcttttctgattagacggtgtgtgtaaataaaatatctccatgtgtaaaccagataagggccttttgctaagac

SEQ ID NO: 25732 - DNA, 110 bp, synthetic construct
  source 1..110: mol_type = other DNA
aagcaaagggttgggaacataatcccagcggtaggctggggtacacactaaaaacagctcatcttaaacattaaatgtcttttaggttttgtgtttgtcctaaaacatca

SEQ ID NO: 25733 - DNA, 110 bp, synthetic construct
  source 1..110: mol_type = other DNA
cagcggtaggctggggtacacactaaaaacagctcatcttaaacattaaatgtcttttaggttttgtgtttgtcctaaaacatcatggtagttttgcattatttgttaat

SEQ ID NO: 25734 - DNA, 110 bp, synthetic construct; identical to SEQ ID NO: 25732
  source 1..110: mol_type = other DNA

SEQ ID NO: 25735 - DNA, 110 bp, synthetic construct; identical to SEQ ID NO: 25733
  source 1..110: mol_type = other DNA

SEQ ID NO: 25736 - DNA, 110 bp, synthetic construct
  source 1..110: mol_type = other DNA
atagaattccttagctaagaataagctgcttagcatttacatctcaagcttccataccattccaccacttctatgaagagcttttcattaagtgcttccacagacaggcc

SEQ ID NO: 25737 - DNA, 110 bp, synthetic construct
  source 1..110: mol_type = other DNA
accattccaccacttctatgaagagcttttcattaagtgcttccacagacaggccaagctatgtacaggcttgaggatcagcatggaggccatcaaagtctccatagagc

SEQ ID NO: 25738 - DNA, 110 bp, synthetic construct
  source 1..110: mol_type = other DNA
atgtctgggaacttccacatgttgtgggtgcagccacaaaaggaaaaaacaaaaaccaaacaaaacactgactctaaggcctcgttcactctagcttgttgcgaccttgc

SEQ ID NO: 25739 - DNA, 110 bp, synthetic construct
  source 1..110: mol_type = other DNA
ccaaacaaaacactgactctaaggcctcgttcactctagcttgttgcgaccttgccaatatacccttcaccaccaccaacctccatgagtagtgatcatcattttccttt

SEQ ID NO: 25740 - DNA, 110 bp, synthetic construct
  source 1..110: mol_type = other DNA
ctagttacatgctataaattggacctttagcagagagctataaacatctattctattcagggatataatagcaaataagggcaaaggtgcttcagaaataaagatgagac

SEQ ID NO: 25741 - DNA, 110 bp, synthetic construct
  source 1..110: mol_type = other DNA
aaggctttgcctccatctctgacccatgttaattaaccatcagtttcagtccaggtcttttctggatctacttttacccaaatgctaacttctaaaatgaacctccaata

SEQ ID NO: 25742 - DNA, 110 bp, synthetic construct
  source 1..110: mol_type = other DNA
tcttttctggatctacttttacccaaatgctaacttctaaaatgaacctccaatatggggagagagagaaaatagttgtaacaagtgaaaaaaaaaatacctctatttcc

SEQ ID NO: 25743 - DNA, 110 bp, synthetic construct
  source 1..110: mol_type = other DNA
tcatccagacatttaactgagaagagaaattaaaccaaggagaaaggaagatgaagctgactttcagctaaagaagttaggtggacagagcatgtaaaggaaaataggat

SEQ ID NO: 25744 - DNA, 110 bp, synthetic construct
  source 1..110: mol_type = other DNA
gctgactttcagctaaagaagttaggtggacagagcatgtaaaggaaaataggattagaagacataatttgggagttcccattgtggcttggcaggttaacaacctgaca

SEQ ID NO: 25745 - DNA, 110 bp, synthetic construct
  source 1..110: mol_type = other DNA
ataacaaatcaagagagggaaggatttccttgagggtggaaaggtctcctgagctgagctaagagtaagaaagattaagtgcgtcatcctccatggggctcagaaggaac

SEQ ID NO: 25746 - DNA, 110 bp, synthetic construct
  source 1..110: mol_type = other DNA
gagctaagagtaagaaagattaagtgcgtcatcctccatggggctcagaaggaacacacacacacacacacacacacacacacacacacacacacacgtgttttctcttc

SEQ ID NO: 25747 - DNA, 110 bp, synthetic construct
  source 1..110: mol_type = other DNA
ataaggattggatgatccttggactggacagtgtcatgaaacactcaagttctttctatctctcttttctgctcaatgcagtgtcagctccatctgaatgttttcccctg

SEQ ID NO: 25748 - DNA, 110 bp, synthetic construct
  source 1..110: mol_type = other DNA
ctatctctcttttctgctcaatgcagtgtcagctccatctgaatgttttcccctgaggttataggatggctacatgaatcagttagggccctatgcttccatgtttgcat

SEQ ID NO: 25749 - DNA, 110 bp, synthetic construct
  source 1..110: mol_type = other DNA
ttctaaaaggcaccaagtaaatttggcagcccaataagtgttttatggaatgtgtgttgagttggctttaactctaccatcagcttattcaatgaaaaccacaacaacaa

SEQ ID NO: 25750 - DNA, 110 bp, synthetic construct
  source 1..110: mol_type = other DNA
gttgagttggctttaactctaccatcagcttattcaatgaaaaccacaacaacaaccctctaagaagatcaaagttccctcttttaattcctttagatcatttggggaaa

SEQ ID NO: 25751 - DNA, 110 bp, synthetic construct
  source 1..110: mol_type = other DNA
aaggaacaaagctaggggccaaatggacttagccaccgtaactcaattcttaatgtttgggccaagccgactttcaataaaattctggggcaattattcaagatatttaa

SEQ ID NO: 25752 - DNA, 110 bp, synthetic construct
  source 1..110: mol_type = other DNA
tttgggccaagccgactttcaataaaattctggggcaattattcaagatatttaataaacagttttgaccacattccaggcacttccaatcttctggcagcactgggtgg

SEQ ID NO: 25753 - DNA, 110 bp, synthetic construct
  source 1..110: mol_type = other DNA
ctccaggacaaaggaggttctgtagccaatgtcatgtagacagtatctccctctggacatcagagccttcacatttttggaaccatgtgcttcctaaacttctgatcaga

SEQ ID NO: 25754 - DNA, 110 bp, synthetic construct
  source 1..110: mol_type = other DNA
gacatcagagccttcacatttttggaaccatgtgcttcctaaacttctgatcagaaaacatatagatgttatttcatactaataactccaacatcctgtgaaacacactt

SEQ ID NO: 25755 - DNA, 110 bp, synthetic construct
  source 1..110: mol_type = other DNA
tttcccaaataacacataatagctttcccctttatcttgaattatttttaaagatcgatggaggagtttcctaatggatcagcaggttagggatcctgtgggtgttttca

SEQ ID NO: 25756 - DNA, 110 bp, synthetic construct; identical to SEQ ID NO: 25755
  source 1..110: mol_type = other DNA

SEQ ID NO: 25757 - DNA, 110 bp, synthetic construct
  source 1..110: mol_type = other DNA
aaatgaagacatatactgagaagctataaactgcaagttaatgaggaagacatttgtcatgatgaagtatcaacctgtaactgtggaatcaaatgaccccaaagcacaga

SEQ ID NO: 25758 - DNA, 110 bp, synthetic construct
  source 1..110: mol_type = other DNA
gtcatgatgaagtatcaacctgtaactgtggaatcaaatgaccccaaagcacagatgtgctttgggtcacccagccaagcagacatctaaaggatctgaaacctaaccct

SEQ ID NO: 25759 - DNA, 110 bp, synthetic construct
  source 1..110: mol_type = other DNA
cattggcagaaatacccacttaaccttaaagagcaacattctcctagaaccagccagacagtccttaaaagataatattcccacttgatcttgtaaggggccatgatggt

SEQ ID NO: 25760 - DNA, 110 bp, synthetic construct
  source 1..110: mol_type = other DNA
agacagtccttaaaagataatattcccacttgatcttgtaaggggccatgatggtccatcactttctcctggatctggattgtgcaaacaatctacatcgtttaatgtac

SEQ ID NO: 25761 - DNA, 110 bp, synthetic construct
  source 1..110: mol_type = other DNA
ccaaatgaggtttcgttatctccttgttcaggtgagaaaccagcagttaaataactttgctgaggcccacagctggtgtgtattatgatgctcttacaaaagaccatgcc

SEQ ID NO: 25762 - DNA, 110 bp, synthetic construct
  source 1..110: mol_type = other DNA
tttgctgaggcccacagctggtgtgtattatgatgctcttacaaaagaccatgcccttaactgctgtcccacacgccacactttaatatttgctggccctgaatatcatt

SEQ ID NO: 25763 - DNA, 110 bp, synthetic construct
  source 1..110: mol_type = other DNA
tccacgaagaaagcctaacaaaatcttcaaagttctctttgcaaaagggtccagtaatgtctgtcccttgtccgaacagccccctctgtctcttgtcactcacagctccc

SEQ ID NO: 25764 - DNA, 110 bp, synthetic construct
  source 1..110: mol_type = other DNA
aatgtctgtcccttgtccgaacagccccctctgtctcttgtcactcacagctccctgacttgcttgatgtgacttggttctctgtgtggaccagagactctggtgtgtga

SEQ ID NO: 25765 - DNA, 110 bp, synthetic construct
  source 1..110: mol_type = other DNA
tccggctaccctggggccgtgggattcccggttaggacactgcttctgcaaacaccttcaagaggctgagctcacagaaaacttctgtttgcttcataacagtagcacat

SEQ ID NO: 25766 - DNA, 110 bp, synthetic construct
  source 1..110: mol_type = other DNA
cttcaagaggctgagctcacagaaaacttctgtttgcttcataacagtagcacatgttaaagccaggctgtaaacaatccaacttctctttcattttacatttactttct

SEQ ID NO: 25767 - DNA, 110 bp, synthetic construct
  source 1..110: mol_type = other DNA
gaagggtttctcccaggtcctgctcagcagctctggagcctcactgtcttacagaactttcggcagtgatggacatgatctttatcttcagtgtccaccatgagccgcta

SEQ ID NO: 25768 - DNA, 110 bp, synthetic construct
  source 1..110: mol_type = other DNA
taaatcttatgatctccctcctggtgctataattgagctaaatcttcttaaaccgagcactgttcctgaggttctttgaagcatgctcagtgtttctttgagtaaaattg

SEQ ID NO: 25769 - DNA, 110 bp, synthetic construct
  source 1..110: mol_type = other DNA
caagcgtgtcttctctcattgttggatctctcaactctcattccagaaagttcagtttatggaaacgtgagctatttttcaggagcgggtgatgatgaaagtttatccgt

SEQ ID NO: 25770 - DNA, 110 bp, synthetic construct
  source 1..110: mol_type = other DNA
tttatggaaacgtgagctatttttcaggagcgggtgatgatgaaagtttatccgttggcttcccatcactaatagtcagaggagattgtaagtgtgctgtttgacggcca

SEQ ID NO: 25771 - DNA, 110 bp, synthetic construct
  source 1..110: mol_type = other DNA
cttccttcttggaggctgtttctgctccaccaaaccccagttcaattgtttttaattcaaaatcaaattaacatcttttaacaactattcatagagcgtctacactgtgg

SEQ ID NO: 25772 - DNA, 110 bp, synthetic construct
  source 1..110: mol_type = other DNA
ttcaaaatcaaattaacatcttttaacaactattcatagagcgtctacactgtggcactaagaggtttcgaaatctcatgtccacaaactgcccaagtataaaagattaa

SEQ ID NO: 25773 - DNA, 110 bp, synthetic construct
  source 1..110: mol_type = other DNA
agcacaggaagagactgcttctctgtgtgtgtgtcaggctgggtcctgccactctgggccgaagcagcacttaatgtgcagatgctgagaccaacatgagagtgcctccc

SEQ ID NO: 25774 - DNA, 110 bp, synthetic construct
  source 1..110: mol_type = other DNA
gggccgaagcagcacttaatgtgcagatgctgagaccaacatgagagtgcctcccgctaggtgcttctgcaccctgatgctcagcaacaagctggcgatgggagaggctt

SEQ ID NO: 25775 - DNA, 110 bp, synthetic construct
  source 1..110: mol_type = other DNA
gtcactgtgctgctcattttaataccagccactgaaaccaggaatacttcaaacctggaaccagtgttccatgtatctgtccggactgatcctagtttggatcacccaaa

SEQ ID NO: 25776 - DNA, 110 bp, synthetic construct
  source 1..110: mol_type = other DNA
tggaaccagtgttccatgtatctgtccggactgatcctagtttggatcacccaaatctacaaatacataggatctatagttaagttctagtatgaaaaaaataagtacca

SEQ ID NO: 25777 - DNA, 110 bp, synthetic construct
  source 1..110: mol_type = other DNA
aaaataaagacaatcacgcaaaagtcagaggggagattgacaattgccagacccattgaatctcttatttgggagctgttcctttccccattcagacaaggaggttgtgt

SEQ ID NO: 25778 - DNA, 110 bp, synthetic construct
  source 1..110: mol_type = other DNA
ttgaatctcttatttgggagctgttcctttccccattcagacaaggaggttgtgtgtggaggtgccagtcacaacagcatcttcctcggcttgtatgatgccaaatacgg

SEQ ID NO: 25779 - DNA, 110 bp, synthetic construct
  source 1..110: mol_type = other DNA
agccttggcacgcccctcgcaagaggtggagtgctcccttccctttagcgcgctggctttttgtgattgcaccagaggagtatggctggagggacactctgtggctttca

SEQ ID NO: 25780 - DNA, 110 bp, synthetic construct
  source 1..110: mol_type = other DNA
gctttttgtgattgcaccagaggagtatggctggagggacactctgtggctttcaaggctggattattaaagatgattcagcttctgccttgtgagccaaaatgcttggg

SEQ ID NO: 25781 - DNA, 110 bp, synthetic construct
  source 1..110: mol_type = other DNA
atgggtacaaccatggactcggggttggttctccctgatcatcaggaagtcatcctgctgtgctagcagcatctctcatctcgataaactcttctttctttcaccttgct

SEQ ID NO: 25782 - DNA, 110 bp, synthetic construct
  source 1..110: mol_type = other DNA
tgctgtgctagcagcatctctcatctcgataaactcttctttctttcaccttgctatgctggaaatttcttcttccaacccgcatgcatggaccacaacactgccaaccc

SEQ ID NO: 25783 - DNA, 110 bp, synthetic construct
  source 1..110: mol_type = other DNA
agccgccctccttctgccctgtaaggatatgagaagctggcaccccttctccccacccttctcttggaattcatggaaagttgagtcaaggccaggttggcatctcagtg

SEQ ID NO: 25784 - DNA, 110 bp, synthetic construct
  source 1..110: mol_type = other DNA
cccttctcttggaattcatggaaagttgagtcaaggccaggttggcatctcagtgcagtaacagcgtaaattaagaaaattttaaagagggaccttaaatacagggaata

SEQ ID NO: 25785 - DNA, 110 bp, synthetic construct
  source 1..110: mol_type = other DNA
tctcgtggtagttttgatttgcattctgcatagctctcagcataactactcggcgttgcttctgcattgctattttaatcttttataaataattttggtcctgtcgagac

SEQ ID NO: 25786 - DNA, 110 bp, synthetic construct
  source 1..110: mol_type = other DNA
agaaaatctaaatgagctaataatcttgaaagatacaagaaagttctctaatagttactcttctaggaaactttatccacaatgttgtcacaagtgacttttccaccatt

SEQ ID NO: 25787 - DNA, 110 bp, synthetic construct
  source 1..110: mol_type = other DNA
tactcttctaggaaactttatccacaatgttgtcacaagtgacttttccaccatttcaggaaatcattcagcttcaggctattaaacagttccatgaatagagaaaagta

SEQ ID NO: 25788 - DNA, 110 bp, synthetic construct
  source 1..110: mol_type = other DNA
ctttctcctaaagaatagtttgctttctgatcggtatgtatgcagcctgagggtgatctggagtagacacaaagaaacagctgtctggaggaggggaggcaggctgtgtg

SEQ ID NO: 25789 - DNA, 110 bp, synthetic construct
  source 1..110: mol_type = other DNA
atctggagtagacacaaagaaacagctgtctggaggaggggaggcaggctgtgtgtgctttactttgtgattcaaaaggacctttctgtaaacctaagtcacacgtactg

SEQ ID NO: 25790 - DNA, 110 bp, synthetic construct
  source 1..110: mol_type = other DNA
gctgtagagaagaaaacctttgaccaatcaggcctggcccaaggtaatcctgtgcccttgagtcgactagaagggcattggtagaggtcaacggggcacctgctccagct

SEQ ID NO: 25791 - DNA, 110 bp, synthetic construct
  source 1..110: mol_type = other DNA
ccttgagtcgactagaagggcattggtagaggtcaacggggcacctgctccagctggcaaccttatgacagccttgcactttgaggctgcagaagctcagccatgggttt

SEQ ID NO: 25792 - DNA, 110 bp, synthetic construct
  source 1..110: mol_type = other DNA
tgcctccaccccttagtcctcacctcagcctgcgaggtaagtggcatctgtcgtgaactccatttgacaggtgaggaagtgggggcataaggtcccatagctaatgagtg

SEQ ID NO: 25793 - DNA, 110 bp, synthetic construct
  source 1..110: mol_type = other DNA
aactccatttgacaggtgaggaagtgggggcataaggtcccatagctaatgagtgatagagcctggatgtcagggcagacactcccctccaggggcacacgctcgccttc

SEQ ID NO: 25794 - DNA, 110 bp, synthetic construct
  source 1..110: mol_type = other DNA
gagtcaaggtcttcgggaattaaaattcagattgatatgtgggagggaagggggcaatcacagtcagctggttaggatgctctgtgtatagaaattatccatatatttgt

SEQ ID NO: 25795 - DNA, 110 bp, synthetic construct
  source 1..110: mol_type = other DNA
gacagtgtcaggtgctttgatgtactacattcttgattaatttaacagaatcaaatgatgcaggaagattaagggtgatcaatattaagggaggaaactttggattcggt

SEQ ID NO: 25796 - DNA, 110 bp, synthetic construct
  source 1..110: mol_type = other DNA
tgatgcaggaagattaagggtgatcaatattaagggaggaaactttggattcggtaattggatcacaatcttcatttgaaagttatttcaacttccctggggaagcacag

SEQ ID NO: 25797 - DNA, 110 bp, synthetic construct
  source 1..110: mol_type = other DNA
gttggcaggctaaaaagagagcgctctatgagtgaaaatgctgttcgccagaacggacagctagtcagaactgactccatgtgagtagaagcactaagcattatatctcc

SEQ ID NO: 25798 - DNA, 110 bp, synthetic construct
  source 1..110: mol_type = other DNA
ctggaagaggagaacaaagaacgcgctaaaagagaaatggtcatgtattcaatcaccgtagcattctggctgcttaatagctggctctggtttcgccgctagaggtaacc

SEQ ID NO: 25799 - DNA, 110 bp, synthetic construct
  source 1..110: mol_type = other DNA
taatcagttggcgagtacccaaccgatacttgcctccttctgtaaaaacatcccctgcaacttacatgactagaccttctgcatctcatttgcattacagaattacgctc

SEQ ID NO: 25800 - DNA, 110 bp, synthetic construct
  source 1..110: mol_type = other DNA
tgcaacttacatgactagaccttctgcatctcatttgcattacagaattacgctcctctggccattgctaactggaatacaggtagatacagaaagtaggattttctatc

SEQ ID NO: 25801 - DNA, 110 bp, synthetic construct
  source 1..110: mol_type = other DNA
caaagaaggagccagcatggtggaccccccacccccgcccccgcctcccagaagagggaggactctgagtgcctcccgctgcgttctttggagaacttggtttggacagg

SEQ ID NO: 25802 - DNA, 110 bp, synthetic construct
  source 1..110: mol_type = other DNA
gggaggactctgagtgcctcccgctgcgttctttggagaacttggtttggacaggggctcacgtgtggaagttttgcctgtgtttgtggtggctgagggtcccacagggt

SEQ ID NO: 25803 - DNA, 110 bp, synthetic construct
  source 1..110: mol_type = other DNA
gctttcgctctcagaatgagtacagttccatcaaagctacaaaaactggaccccagacccgttgcattgagaaggccgatgacggagatgcctagaacaactgccctgta

SEQ ID NO: 25804 - DNA, 110 bp, synthetic construct
  source 1..110: mol_type = other DNA
gacccgttgcattgagaaggccgatgacggagatgcctagaacaactgccctgtaacctccccaccagctaagcagagaacagatacacaccctgcaaacctccccccaa

SEQ ID NO: 25805 - DNA, 110 bp, synthetic construct
  source 1..110: mol_type = other DNA
ttatgagtaatgtttgatgaacatcttgtacatagttaagtttcagattccttctttagaatagattcctaagagattattagtaggtcagctggcaggaatgaggttct

SEQ ID NO: 25806 - DNA, 110 bp, synthetic construct
  source 1..110: mol_type = other DNA
ttagaatagattcctaagagattattagtaggtcagctggcaggaatgaggttcttgaatcaggatggtgagtttggagttcatgtcatggctcaggggttaacaaaccc

SEQ ID NO: 25807 - DNA, 110 bp, synthetic construct
  source 1..110: mol_type = other DNA
gtctggcctcatttcgaaagaaaggtgaggtgtcaggattctttaaaattcttttaaatcagtagtaaaagtagtctttgaaatattcaaagtgcattatttgatattag

SEQ ID NO: 25808 - DNA, 110 bp, synthetic construct; identical to SEQ ID NO: 25807
  source 1..110: mol_type = other DNA

SEQ ID NO: 25809 - DNA, 110 bp, synthetic construct
  source 1..110: mol_type = other DNA
ggaagagagttcttgaaaacatgcagaataacttcacagcactgcatcttgtgtctccttggtccttgtggactttccagtgtgtgttctctccatcgtgtgtggtctat

SEQ ID NO: 25810 - DNA, 110 bp, synthetic construct
  source 1..110: mol_type = other DNA
tcatttttttaaataagtcattatcgggtcaatttgataaacttttacctatttggatattgttcactggatcactgagtgtctaaattaacagattcagagtctagcgg

SEQ ID NO: 25811 - DNA, 110 bp, synthetic construct
  source 1..110: mol_type = other DNA
gatattgttcactggatcactgagtgtctaaattaacagattcagagtctagcgggtgaattttttctctggaaaactcacaaattatttcctttcatggttgaaataat

SEQ ID NO: 25812 - DNA, 110 bp, synthetic construct
  source 1..110: mol_type = other DNA
tggattcagtccctggtctggggacttccatgtgccgtgggtgtggccattcaaattaaaaaaaaaaaaaaaaaaaaaaaagataagtcaatgcttacttacctccaaag

SEQ ID NO: 25813 - DNA, 110 bp, synthetic construct
  source 1..110: mol_type = other DNA
ttaaaaaaaaaaaaaaaaaaaaaaaagataagtcaatgcttacttacctccaaaggttgcaacagcttccactgctccattatatactgcagaactctgggacggtgcct

SEQ ID NO: 25814 - DNA, 110 bp, synthetic construct
  source 1..110: mol_type = other DNA
ctttaatttttctttgataattttgtgatgtagatagaggggatagcatcgtccttgttttatggataaggaaactgatggctagaggcaataagatggatgctggtttt

SEQ ID NO: 25815 - DNA, 110 bp, synthetic construct
  source 1..110: mol_type = other DNA
tgttttatggataaggaaactgatggctagaggcaataagatggatgctggttttcatgtttaaccaacaacaaaacctggatttagactcagtttttctagttacaagt

SEQ ID NO: 25816 - DNA, 110 bp, synthetic construct
  source 1..110: mol_type = other DNA
cttcctaaaacctccccagaattaatccagaacccccagtggacctttgtgaactgggtggaggaggtcagactttaccctctgggcaagggtgaaccagataggacatt

SEQ ID NO: 25817 - DNA, 110 bp, synthetic construct
  source 1..110: mol_type = other DNA
gggtggaggaggtcagactttaccctctgggcaagggtgaaccagataggacattgaagcaggggagtggcatgattagaactcttctcaaaaagtcccctctgatgagg

SEQ ID NO: 25818 - DNA, 110 bp, synthetic construct
  source 1..110: mol_type = other DNA
agattgcttgtcattccctgggatactccagtgactttcatgctttgtgtcctaacaacaccctcttctgcctggattatctaccctttgcgctgctcccagtgtctgta

SEQ ID NO: 25819 - DNA, 110 bp, synthetic construct
  source 1..110: mol_type = other DNA
cttctctcccccactgaatggtcttgacatcctcataaatgatgtgttgaccatgcaaatgaagctatatctggggtctcaactctattccattgatctatgtctgcact

SEQ ID NO: 25820 - DNA, 110 bp, synthetic construct
  source 1..110: mol_type = other DNA
caaatgaagctatatctggggtctcaactctattccattgatctatgtctgcacttatgagcatgtcaaatgtctgataaatgtaggtttccagcaagttttggaatcag

SEQ ID NO: 25821 - DNA, 110 bp, synthetic construct; identical to SEQ ID NO: 25819
  source 1..110: mol_type = other DNA

SEQ ID NO: 25822 - DNA, 110 bp, synthetic construct; identical to SEQ ID NO: 25820
  source 1..110: mol_type = other DNA

SEQ ID NO: 25823 - DNA, 110 bp, synthetic construct
  source 1..110: mol_type = other DNA
gaccaacgcattatgtccttattaagctgaccctatgaataacctctgcctttaggtctttgttctgaagtttgagtcatttgccagcattgtgactgtttttcaagcag

SEQ ID NO: 25824 - DNA, 110 bp, synthetic construct; identical to SEQ ID NO: 25823
  source 1..110: mol_type = other DNA

SEQ ID NO: 25825 - DNA, 110 bp, synthetic construct
  source 1..110: mol_type = other DNA
ttcctatggccttatttttaatcgcatgagcataagctataacacaggtgaccaaaaaaatctactaaagaatccctcatttctacagatgccctctttgcctccctcta

SEQ ID NO: 25826 - DNA, 110 bp, synthetic construct
  source 1..110: mol_type = other DNA
aaaaatctactaaagaatccctcatttctacagatgccctctttgcctccctctacataaaccctttccagaatcttaaccatgaacagaaagcttgaggtagaaggtat

SEQ ID NO: 25827 - DNA, 110 bp, synthetic construct
  source 1..110: mol_type = other DNA
gaatgcattgaaggtttctgttgattgaatgtagcctgggtaaggaatactattatcttttgaagcttaaccttttagtacattggagaattttgggaatagcggcttct

SEQ ID NO: 25828 - DNA, 110 bp, synthetic construct
  source 1..110: mol_type = other DNA
tcttttgaagcttaaccttttagtacattggagaattttgggaatagcggcttcttacccatgtattctggaaataataacctattattgcatgatagttcacagccaga

SEQ ID NO: 25829 - DNA, 110 bp, synthetic construct
  source 1..110: mol_type = other DNA
ctgcgttagctttatcacagggagctatgatcggacatgcaaactctgggacatggcctctggagaggaacttcacaccctggaaggtcacaggaatgtggtttatgcca

SEQ ID NO: 25830 - DNA, 110 bp, synthetic construct
  source 1..110: mol_type = other DNA
agttgtttgtgccttgttttagtgctggcccctgaaaatgtctttgctcttttaagatattgatttatttagtgttttccaaggctccaaagtgctaaatactgtcttgc

SEQ ID NO: 25831 - DNA, 110 bp, synthetic construct
  source 1..110: mol_type = other DNA
gatattgatttatttagtgttttccaaggctccaaagtgctaaatactgtcttgctccaagaaggtgcctctgagaatgggggccggaggttgggggtggtggcgacacg

SEQ ID NO: 25832 - DNA, 110 bp, synthetic construct
  source 1..110: mol_type = other DNA
cacagcagtacagacaggatggaaccagtggccaggcacaacctgaatgatcaaaatggagagccagatggaattggagtagcggtcttacaatcattgtatcttggtag

SEQ ID NO: 25833 - DNA, 110 bp, synthetic construct
  source 1..110: mol_type = other DNA
atggagagccagatggaattggagtagcggtcttacaatcattgtatcttggtagctacttacttaatcatgggagaagatggcatgctttcctgataaatgtccaggtc

SEQ ID NO: 25834 - DNA, 110 bp, synthetic construct
  source 1..110: mol_type = other DNA
tatgtggatattcttttccttgggctaaactttctccataaaaacatggtagtagggaatggtagcatgcagccatgacttattcttctggttgcaggtatgtatgcctg

SEQ ID NO: 25835 - DNA, 110 bp, synthetic construct
  source 1..110: mol_type = other DNA
ggaatggtagcatgcagccatgacttattcttctggttgcaggtatgtatgcctgagaatagcaaaaccagggataagtaagaacttaagtcatttagctttgttattgt

SEQ ID NO: 25836 - DNA, 110 bp, synthetic construct
  source 1..110: mol_type = other DNA
ttgcatgaatgtgtgttgaagatgaagaaagaaaaagcaaggggagctataaaataaaggaagcaagataagcccattgcaagagtcctaagcatcactcagagaagaat

SEQ ID NO: 25837 - DNA, 110 bp, synthetic construct
  source 1..110: mol_type = other DNA
agatacaattttaagccaattataccagcatctctgtttgactagtgaatactcttttcgcgcactcagcagtagctatttctgagataaaatttgataagagtaaaaat

SEQ ID NO: 25838 - DNA, 110 bp, synthetic construct
  source 1..110: mol_type = other DNA
gggttttttcttatgatgagaacacttaggatcgactctcagctttcacatataactgacagcggtgttaattatattaatcatgttgtacattatagggctagtactta

SEQ ID NO: 25839 - DNA, 110 bp, synthetic construct
  source 1..110: mol_type = other DNA
ctgacagcggtgttaattatattaatcatgttgtacattatagggctagtacttattcatctaacagctgaaaggctacactccttgaagtccttcgtccggttttccct

SEQ ID NO: 25840 - DNA, 110 bp, synthetic construct
  source 1..110: mol_type = other DNA
aatttgtatgcatcatggatagagaatgcatcaggatacccagtgctcctttgcaaggtgaatccctgatgactcaaaggaactgaatgagatctgctcaaacctatact

SEQ ID NO: 25841 - DNA, 110 bp, synthetic construct
  source 1..110: mol_type = other DNA
aggtgaatccctgatgactcaaaggaactgaatgagatctgctcaaacctatacttgtaactcttcctggcttttcctgccaggcttttagcacaaacacccagaactta

SEQ ID NO: 25842 - DNA, 110 bp, synthetic construct; identical to SEQ ID NO: 25840
  source 1..110: mol_type = other DNA

SEQ ID NO: 25843 - DNA, 110 bp, synthetic construct; identical to SEQ ID NO: 25841
  source 1..110: mol_type = other DNA

SEQ ID NO: 25844 - DNA, 110 bp, synthetic construct
  source 1..110: mol_type = other DNA
gggactgggatgggccatgtctctctgaatcacagaaacaaaatcaggattccgtaaaacaaacaagcaaataaaaaaacatttgggggagaataagcagtctctaccac

SEQ ID NO: 25845 - DNA, 110 bp, synthetic construct
  source 1..110: mol_type = other DNA
gggcataatacaaggaattgtttatgcaggtgtcagaagagttggaagagtggacagggaagagaagcccaagaaaggaagggcttagccagagaggtgcaagctgtaac

SEQ ID NO: 25846 - DNA, 110 bp, synthetic construct
  source 1..110: mol_type = other DNA
actgagaccttctgtggcgatattacttagataaaactacctatgtcaacaaaacatgtatttacccaggaaaaattaaggctgtgttctttggaaaagccccacaaatc

SEQ ID NO: 25847 - DNA, 110 bp, synthetic construct
  source 1..110: mol_type = other DNA
atgtatttacccaggaaaaattaaggctgtgttctttggaaaagccccacaaatcaatttatggcagagagtgtactgttcacctgtacaaacaacttgcttatccacca

SEQ ID NO: 25848 - DNA, 110 bp, synthetic construct
  source 1..110: mol_type = other DNA
ctagaaacttgaaatgttaccaatggcacataaccgagctcctctggcacttgttggtgaaatgcatacacacactccctcagacacatttcacttgcaccttaaaaact

SEQ ID NO: 25849 - DNA, 110 bp, synthetic construct
  source 1..110: mol_type = other DNA
tggccattccacactccggagcatggcctggatgaggaagacactcccacagctcaagcacacttcttcagttcaggaaaagggaggagaaattattattttttcatttg

SEQ ID NO: 25850 - DNA, 110 bp, synthetic construct
  source 1..110: mol_type = other DNA
aagcacacttcttcagttcaggaaaagggaggagaaattattattttttcatttgttttctgcctaggaagcaatgatggtcaaaatagtgctgatgtgggtgtgcacag

SEQ ID NO: 25851 - DNA, 110 bp, synthetic construct
  source 1..110: mol_type = other DNA
gaaatgatctatttccccatggcaattgggcactgtttttttttcccagctttattgtgatataattaaccaataaatttgtgtattgttaaggtgtacaatgtggttat

SEQ ID NO: 25852 - DNA, 110 bp, synthetic construct
  source 1..110: mol_type = other DNA
cccatggcaattgggcactgtttttttttcccagctttattgtgatataattaaccaataaatttgtgtattgttaaggtgtacaatgtggttatctgatacagatatac

SEQ ID NO: 25853 - DNA, 110 bp, synthetic construct
  source 1..110: mol_type = other DNA
ggggaggtttggagaaccagagagagtggagagtttgttgttgtcttgttttcttcaagaatgtgagaaagttgagacagaaaggaagattgtaagaaagtttattatgc

SEQ ID NO: 25854 - DNA, 110 bp, synthetic construct
  source 1..110: mol_type = other DNA
gctttctgatttatttcacctaatatgagaatcaccagacttttgagaaatacgaagggagcaccagaatctatgaaatcttttgagtgaatggtgtctttaagctggga

SEQ ID NO: 25855 - DNA, 110 bp, synthetic construct
  source 1..110: mol_type = other DNA
ataaatgcaaacacatcttccaaacacaaacaccaagggaacttaactttaggaattggtcccagcctttatgtaagttcccaggcagctctgcagagacccaggggcca

SEQ ID NO: 25856 - DNA, 110 bp, synthetic construct
  source 1..110: mol_type = other DNA
atttcctcaataccctatataagttttgattttctgaagaattacagaggtcccagctgtgtgtgtatgtgtctattgttgttggtggcattataagttaataagaaaac

SEQ ID NO: 25857 - DNA, 110 bp, synthetic construct
  source 1..110: mol_type = other DNA
tatctttctgacaccccatcgtactaaataatggaattactgagtaaataagggtccagatgactcaaagtgttttatagttaggggacatcatgtcatatcatggaggt

SEQ ID NO: 25858 - DNA, 110 bp, synthetic construct
  source 1..110: mol_type = other DNA
ccagatgactcaaagtgttttatagttaggggacatcatgtcatatcatggaggtagagaaagctaactttatgtaagtttgggatttctcctccttaagatattacctt

SEQ ID NO: 25859 - DNA, 110 bp, synthetic construct
  source 1..110: mol_type = other DNA
tcacagacatggcccagacctgatgttactgtggcataggctggcagcccagctcggattcgacccttagcctgggaacatccctccatatgccaagagtgtggccatga

SEQ ID NO: 25860 - DNA, 110 bp, synthetic construct; identical to SEQ ID NO: 25859
  source 1..110: mol_type = other DNA

SEQ ID NO: 25861 - DNA, 110 bp, synthetic construct
  source 1..110: mol_type = other DNA
atcagtacattcaaatcagtttagccagtgttttctgagtatgtaccacatggcagatctacgcaaaccctgaaattataaagggaggtaggatgggattgctatgctta

SEQ ID NO: 25862 - DNA, 110 bp, synthetic construct
  source 1..110: mol_type = other DNA
gatctacgcaaaccctgaaattataaagggaggtaggatgggattgctatgcttaagaatcttccagtcttgcagggaagacaaatatgtaaagtgtaattaaaatgcaa

SEQ ID NO: 25863 - DNA, 110 bp, synthetic construct
  source 1..110: mol_type = other DNA
tttgctacctcattctggggtggaagctgatgatcggattgcatgtgaaagatcagccgaatgatacctgaaatcatcaaccccattggaaatttgtttttacatctatg

SEQ ID NO: 25864 - DNA, 110 bp, synthetic construct
  source 1..110: mol_type = other DNA
taatcactcaccagtctcatcacaaacctttatccccatgtagccagcactgtaagaggcacagctgggacagaaataaaatacgagcctctgctggaaaggtttctcat

SEQ ID NO: 25865 - DNA, 110 bp, synthetic construct
  source 1..110: mol_type = other DNA
cacactaagaaaggaatctcagcttttcaaacaaatatttcttagaaactatttgcacaaatcctttccaaatttattgtccttcccattgtactaggaagatacagcat

SEQ ID NO: 25866 - DNA, 110 bp, synthetic construct
  source 1..110: mol_type = other DNA
cacaaatcctttccaaatttattgtccttcccattgtactaggaagatacagcataaaacacatgatgtttctttcatgaaattttcctaatttctaagggaattatgta

SEQ ID NO: 25867 - DNA, 110 bp, synthetic construct
  source 1..110: mol_type = other DNA
ccttgtgggttcttgtggctttagctccaaagtgacagggtgagaaagcaacacggggcacttagaaaggagactatcctaccaccaaatgaccagcatctacataatca

SEQ ID NO: 25868 - DNA, 110 bp, synthetic construct
  source 1..110: mol_type = other DNA
gtaacggcagtgtttaatcttgaccttggaaaaggtaccaccaatctaaaagagaggaatcatttctgacacacagtaaaggggttctagatgtacctgcaggtaaacta

SEQ ID NO: 25869 - DNA, 110 bp, synthetic construct
  source 1..110: mol_type = other DNA
ggaatcatttctgacacacagtaaaggggttctagatgtacctgcaggtaaactaaggtgtttggaattgtaatttggtgcaaaaggcaggtattctgctgcactcaacc

SEQ ID NO: 25870 - DNA, 110 bp, synthetic construct
  source 1..110: mol_type = other DNA
ccctcgctcccatgatacgaggctcacttaagccaggggattatgtaagtcatttttctcaagcatctctctcgacattctggttttaggtttgttaggtgtttcctttg

SEQ ID NO: 25871 - DNA, 110 bp, synthetic construct
  source 1..110: mol_type = other DNA
ttctcaagcatctctctcgacattctggttttaggtttgttaggtgtttcctttggagttttgtttgttttgttgtgcagaccaaagtgtgatagaaataaatggtttgt

SEQ ID NO: 25872 - DNA, 110 bp, synthetic construct
  source 1..110: mol_type = other DNA
agaatggcaaggccaagatgaattagaaacataacattttgtccagaaaaagaatttcaaccatctctggaaaatttgtaagccagatttaatcaagttcatcgctctgg

SEQ ID NO: 25873 - DNA, 110 bp, synthetic construct
  source 1..110: mol_type = other DNA
ttcaaccatctctggaaaatttgtaagccagatttaatcaagttcatcgctctgggccctaaggtgaataacccagaatggtgaattaaattatggtccagtatatcaca

SEQ ID NO: 25874 - DNA, 110 bp, synthetic construct
  source 1..110: mol_type = other DNA
gaaaggtcaatattttacctcgtccattctttcgcttcagacgccactggtaatgtgtctacagaattccatttccagaattagctgcaatttacatgtgctctctcttt

SEQ ID NO: 25875 - DNA, 110 bp, synthetic construct
  source 1..110: mol_type = other DNA
atctacgcagaaaaatttcaaatgatttctgcagctactccacccttgaaggattggactataaatctactccttaagcgtggccgcacatggtgacttctcaaagaggg

SEQ ID NO: 25876 - DNA, 110 bp, synthetic construct
  source 1..110: mol_type = other DNA
atgtggaatagaggatgccttctctactaacaccctcacctcctcccccacccccaggccagcatttctacttcaggactccggctgcctggaaatgggattcaggagtg

SEQ ID NO: 25877 - DNA, 110 bp, synthetic construct
  source 1..110: mol_type = other DNA
aggccagcatttctacttcaggactccggctgcctggaaatgggattcaggagtgagtgggaaaatggtcctgaattccagtgaaatcctcggggctctttacactgttc

SEQ ID NO: 25878 - DNA, 110 bp, synthetic construct
  source 1..110: mol_type = other DNA
agtcctggagctgtcagtccaggccgcccagtcctgctctggcccagagcttccctagggaggtaaatgccaaattcagggtccagagtggctctaatgcaggttttgct

SEQ ID NO: 25879 - DNA, 110 bp, synthetic construct
  source 1..110: mol_type = other DNA
tagggaggtaaatgccaaattcagggtccagagtggctctaatgcaggttttgctcttaaacgtctaagtggctctaagaaaggtgagagaggtccaagattcttagatt

SEQ ID NO: 25880 - DNA, 110 bp, synthetic construct
  source 1..110: mol_type = other DNA
tggggaggccgatggaagggctttgggggccatgctggcctggctcccgagggccaacattcccacctcctgggttactgtgaggctttttttatgagctcatgcacgta

SEQ ID NO: 25881 - DNA, 110 bp, synthetic construct
  source 1..110: mol_type = other DNA
aacattcccacctcctgggttactgtgaggctttttttatgagctcatgcacgtaagccctcagaacagggtctgaacgtcaacgtcggctgtttatccagagtgacttt

SEQ ID NO: 25882 - DNA, 110 bp, synthetic construct
  source 1..110: mol_type = other DNA
tgtgaatcatcttgatctgtttagtgtttctataaagtacacctaaagacccagcagctcagaacatgcattattttcacacgtacacgaaagaagtcaatcatttcaac

SEQ ID NO: 25883 - DNA, 110 bp, synthetic construct
  source 1..110: mol_type = other DNA
agctcagaacatgcattattttcacacgtacacgaaagaagtcaatcatttcaacagatgtgaaaaaatcattcgaaaaaaatcaacatccaggagttcctgtcacagca

SEQ ID NO: 25884 - DNA, 110 bp, synthetic construct
  source 1..110: mol_type = other DNA
aattgtttagaatcagacccaggactgttccacaaggtattttggtccaagttagacaaaaatttcaccctagctgcctccaattgttgtggcctagggagggatatgta

SEQ ID NO: 25885 - DNA, 110 bp, synthetic construct
  source 1..110: mol_type = other DNA
acaaaaatttcaccctagctgcctccaattgttgtggcctagggagggatatgtataagaagataaaatctgctgcaggaaaaaattaaaactctatttatttctaggat

SEQ ID NO: 25886 - DNA, 110 bp, synthetic construct
  source 1..110: mol_type = other DNA
acatatagtcttttagagagacctcaaagcttcgggggcgccctcattacatcagtgtaaacaggaggccaccaatgccttgggcaaagctattgccaaagtcaataacc

SEQ ID NO: 25887 - DNA, 110 bp, synthetic construct
  source 1..110: mol_type = other DNA
tgtaaacaggaggccaccaatgccttgggcaaagctattgccaaagtcaataacctcctcttaggttctcctgcggcatttggtgctagtgacaattccctgctttttga

SEQ ID NO: 25888 - DNA, 110 bp, synthetic construct
  source 1..110: mol_type = other DNA
acagatgtagacctaaactcacatgcatgattactcttggaaagtagaagtgatctctataagctgctaggggtatttcttctgttcatgttctccttttcctccagttt

SEQ ID NO: 25889 - DNA, 110 bp, synthetic construct
  source 1..110: mol_type = other DNA
gaatacgcagaacgagtgcggggaagacccgtgtgcctccactgtgccgccccacttggaaggtctgacacttttccacctccggcagttggctgtcctcagcctctcac

SEQ ID NO: 25890 - DNA, 110 bp, synthetic construct
  source 1..110: mol_type = other DNA
ttggaaggtctgacacttttccacctccggcagttggctgtcctcagcctctcacgttcatcccttctagaacctccttatgaaacatgctccccactgcttccaccatt

SEQ ID NO: 25891 - DNA, 110 bp, synthetic construct
  source 1..110: mol_type = other DNA
ctggttccggaaaatcgtcaggcagcaaccctgttttactggttcagagctaggatgcaaatactcatccctacgctaatggacctaaaaatatcataatcaatgaagat

SEQ ID NO: 25892 - DNA, 110 bp, synthetic construct
  source 1..110: mol_type = other DNA
tgcaaatactcatccctacgctaatggacctaaaaatatcataatcaatgaagatattatcaaggtctagcaaagaacattctgaaattttaagtgccctaatcaatata

SEQ ID NO: 25893 - DNA, 110 bp, synthetic construct
  source 1..110: mol_type = other DNA
accgctgagccacaaagggaactcctgaccccttctttaaaataatcatgtcatattcacggtaccttcttgggttttctgctagttgcctcacttacaatgacagctaa

SEQ ID NO: 25894 - DNA, 110 bp, synthetic construct
  source 1..110: mol_type = other DNA
ttcacggtaccttcttgggttttctgctagttgcctcacttacaatgacagctaactgcctttttagtctctaacacttcagactagtttcatttaaaaaaaaaaacaaa

SEQ ID NO: 25895 - DNA, 110 bp, synthetic construct
  source 1..110: mol_type = other DNA
taaatatataaaactaaaaatcagcttttaaggctttatatttacatctggaaagtgaccaaaagcaaagttctaaaaaggccgggacttcgggctcaatacacacagaa

SEQ ID NO: 25896 - DNA, 110 bp, synthetic construct
  source 1..110: mol_type = other DNA
tgaccaaaagcaaagttctaaaaaggccgggacttcgggctcaatacacacagaactcaagctatgggccactgaaggatggagccaggaagcgaggacgggggctgaaa

SEQ ID NO: 25897 - DNA, 110 bp, synthetic construct
  source 1..110: mol_type = other DNA
agatcactatgtgaaataaaaacaaattaagagaaaatacgtaacaagctagcatggggacgctgctggaaaccctaacaattctgttcctgcttttctccaacccacaa

SEQ ID NO: 25898 - DNA, 110 bp, synthetic construct
  source 1..110: mol_type = other DNA
taaaccattttaagacataaggccattttaagccactgagccccagccatgtgaaatagctccaggtcacacacaggtaaatggcaaggcaaggctggcagttccaaatg

SEQ ID NO: 25899 - DNA, 110 bp, synthetic construct
  source 1..110: mol_type = other DNA
atagctccaggtcacacacaggtaaatggcaaggcaaggctggcagttccaaatgaacagtgcagcatgactggctacgtcgggtgtggtatttctgccaggtggaaggc

SEQ ID NO: 25900 - DNA, 110 bp, synthetic construct
  source 1..110: mol_type = other DNA
tcacacaggagggaggctctcgcttgaccatgaaatccacacgctcaagatacactgacagcttgcaccgggtatctgtttcggttaccatcaaaagccaccgggccaca

SEQ ID NO: 25901 - DNA, 110 bp, synthetic construct
  source 1..110: mol_type = other DNA
tgacagcttgcaccgggtatctgtttcggttaccatcaaaagccaccgggccacacggaggcaactgtctttatgctgtgctcatgcttttaaaacagagtgccaactca

SEQ ID NO: 25902 - DNA, 110 bp, synthetic construct
  source 1..110: mol_type = other DNA
caaaatagtagcgagtagcttcattttatttttgttgcaaattattttaatatcaagttgaattaaaaaaacagctgtacactcacctctgctttaactctcagtctgtg

SEQ ID NO: 25903 - DNA, 110 bp, synthetic construct
  source 1..110: mol_type = other DNA
agttgaattaaaaaaacagctgtacactcacctctgctttaactctcagtctgtgatacgatgttatctgagatgtgtgtgaaaaaaaatgggtcctactttgtcacaaa

SEQ ID NO: 25904 - DNA, 110 bp, synthetic construct
  source 1..110: mol_type = other DNA
gcaaagggctgggaataaggtatagtttattaacaagatcctataggaggaaaagaaagaattaagagtaaaagctttaggagttcctgttctggcgcagcacaaaccaa

SEQ ID NO: 25905 - DNA, 110 bp, synthetic construct
  source 1..110: mol_type = other DNA
cttattctttcctcatccttagtggagctttcccactgatggagcttcacagccatgatgcctattttgcccagtgaccacccgccacaaccaaaacatttctacacaga

SEQ ID NO: 25906 - DNA, 110 bp, synthetic construct
  source 1..110: mol_type = other DNA
tgatgcctattttgcccagtgaccacccgccacaaccaaaacatttctacacagaaagaatagctgctcttggagttcccatcatggcgcagcagaaaggaatcccacta

SEQ ID NO: 25907 - DNA, 110 bp, synthetic construct
  source 1..110: mol_type = other DNA
tttgtccaaattcttcccaagcaccttataattttttgcagctaagaatagaaacttaggagctcccacggagttcccattgtgactcagcagttaatgaacccgactag

SEQ ID NO: 25908 - DNA, 110 bp, synthetic construct; identical to SEQ ID NO: 25907
  source 1..110: mol_type = other DNA

SEQ ID NO: 25909 - DNA, 110 bp, synthetic construct
  source 1..110: mol_type = other DNA
tcatagctcaggtctcttaagttcatgcaccaccaccagggggagctacatccatgattagctgtgtttgggatcagagtagctggaaccattctctggataggtacctt

SEQ ID NO: 25910 - DNA, 110 bp, synthetic construct
  source 1..110: mol_type = other DNA
gattagctgtgtttgggatcagagtagctggaaccattctctggataggtaccttgggtttcccaccccggcatccaccaagcgaaagagcctcagggtttgagagtcct

SEQ ID NO: 25911 - DNA, 110 bp, synthetic construct
  source 1..110: mol_type = other DNA
aaccatgaacacagtggcttctaccgtccatggcggatcaaattcaagtacagactccacctctaggaaggaacatgaagcctgcagaggtcagccctgaagactgaggg

SEQ ID NO: 25912 - DNA, 110 bp, synthetic construct
  source 1..110: mol_type = other DNA
tccacctctaggaaggaacatgaagcctgcagaggtcagccctgaagactgagggttgggaatatctccctgtctttgaggtatacatcctttctcttccactcaagaaa

SEQ ID NO: 25913 - DNA, 110 bp, synthetic construct
  source 1..110: mol_type = other DNA
tcatggccactagttgggttcttaacccgctgagccataatgggaactccagtaacttctcaataaaggagagccgttcttgctgggttctggcttggcaaatacccaac

SEQ ID NO: 25914 - DNA, 110 bp, synthetic construct; identical to SEQ ID NO: 25913
  source 1..110: mol_type = other DNA

SEQ ID NO: 25915 - DNA, 110 bp, synthetic construct
  source 1..110: mol_type = other DNA
ggaatgcttggttcatcagagttgtattgttggataatataaattattttcaattttttttttttttttgtctttttagggcagcacacgtggcatatgatttccaggct

SEQ ID NO: 25916 - DNA, 110 bp, synthetic construct
  source 1..110: mol_type = other DNA
tcagagttgtattgttggataatataaattattttcaattttttttttttttttgtctttttagggcagcacacgtggcatatgatttccaggctagctgtcaaatcgga

SEQ ID NO: 25917 - DNA, 110 bp, synthetic construct
  source 1..110: mol_type = other DNA
gggtgcttcactggtcttgtatgtacccaaccagtcctcccacacatgtacttctcacgggatttgtgtagggagtggtggtggctgattctgatttttttggggacaat

SEQ ID NO: 25918 - DNA, 110 bp, synthetic construct
  source 1..110: mol_type = other DNA
cccactcagatgagaccctgccagctcggcaaagttctgggcatcgtttggtcatttgagggttgtcccatccctgacactgtccggaaacaattattgaccctggcaac

SEQ ID NO: 25919 - DNA, 110 bp, synthetic construct
  source 1..110: mol_type = other DNA
ttgagggttgtcccatccctgacactgtccggaaacaattattgaccctggcaacactcaatcccacaatggctgcccagcatcctttcagcctttggcgttctgaaggt

SEQ ID NO: 25920 - DNA, 110 bp, synthetic construct
  source 1..110: mol_type = other DNA
aaggaaatgcaggcttgcacatcggcttctctgcccaaactcagcactcattctggttgcaggagttgagaggattttctggcctctggctcttttccagaaacgtgaag

SEQ ID NO: 25921 - DNA, 110 bp, synthetic construct
  source 1..110: mol_type = other DNA
gtggcatctaacttaattctcataatgatcataaaggggaactgcagctgccagcctccaccgcagccacagcaatgccagagctagctttgtctgcaacctgcaccaca

SEQ ID NO: 25922 - DNA, 110 bp, synthetic construct; identical to SEQ ID NO: 25921
  source 1..110: mol_type = other DNA

SEQ ID NO: 25923 - DNA, 110 bp, synthetic construct
  source 1..110: mol_type = other DNA
tacctccatgggtcctctgtgccactcagaatatctcttgtcccttggcttttggaatcttcagtgtcactctcagtaccacccatgacagcttcctgcctcctgacaaa

SEQ ID NO: 25924 - DNA, 110 bp, synthetic construct
  source 1..110: mol_type = other DNA
aatcttcagtgtcactctcagtaccacccatgacagcttcctgcctcctgacaaagctcactaacaccttttgatgacagctgctgtgttgtaaaataatccaacatatt

SEQ ID NO: 25925 - DNA, 110 bp, synthetic construct
  source 1..110: mol_type = other DNA
gaatgtaatgggagtgcaattttaaacactaggagggctttctaagaagtaaatatttaatgagagtcatgaatgtattgaggaaaagtcccatgtaaatttctgaagaa

SEQ ID NO: 25926 - DNA, 110 bp, synthetic construct
  source 1..110: mol_type = other DNA
agttactaataaccctgactctttagattcaagtgagagaggggaggtccaaggagctatctgctcatgggcccagatggcttatgtgagcagataaggattgcagccca

SEQ ID NO: 25927 - DNA, 110 bp, synthetic construct
  source 1..110: mol_type = other DNA
gctatctgctcatgggcccagatggcttatgtgagcagataaggattgcagcccagcgtgacagatatccacagtataaattcagagctttgtttgcctgatgaatctta

SEQ ID NO: 25928 - DNA, 110 bp, synthetic construct
  source 1..110: mol_type = other DNA
gccatttgcaacaacatggatggacctagacattatcatgctgagtgaagtcagtaagacagagaaatatcatatatcacttgtatgtgtattttaataagaaatgatac

SEQ ID NO: 25929 - DNA, 110 bp, synthetic construct
  source 1..110: mol_type = other DNA
tcatgctgagtgaagtcagtaagacagagaaatatcatatatcacttgtatgtgtattttaataagaaatgatacaaaagaacttatttcaggggttttgggatggaaat

SEQ ID NO: 25930 - DNA, 110 bp, synthetic construct
  source 1..110: mol_type = other DNA
gctggattaccatggggagatttaattaacttcacttacattatggagttttttggcaatgaaggacctgtctttgaggctctcaaggaaaggaaatggctttgttattg

SEQ ID NO: 25931 - DNA, 110 bp, synthetic construct
  source 1..110: mol_type = other DNA
gctatcttcctaggtccctgagaccttctttgggcctaagagaccttaagaaccgggcatctctgccttctggatttccctttaggctgggaatgctctgaaccaagctc

SEQ ID NO: 25932 - DNA, 110 bp, synthetic construct
  source 1..110: mol_type = other DNA
aagaaggcctattttagggagacccgtgtagccctgcatccggagctttcctcgcatggggcagatcatctgaatcaatgaggataataataaatccctgattcggagtt

SEQ ID NO: 25933 - DNA, 110 bp, synthetic construct
  source 1..110: mol_type = other DNA
ctacagagcatgtaggtcaattaaattgctcggtagagagctgccatgtaatgcatcacaactagtaatggagtttaagaccacatttatgccgtctatggataggtagt

SEQ ID NO: 25934 - DNA, 110 bp, synthetic construct
  source 1..110: mol_type = other DNA
agtgcgaatacactgtatttatggagacacagtctgcagtgccccgtacccttcctcaaaaggataaaatgaaaaaaggctgataagctctttgtccagctttttgcttc

SEQ ID NO: 25935 - DNA, 110 bp, synthetic construct
  source 1..110: mol_type = other DNA
tcaaaaggataaaatgaaaaaaggctgataagctctttgtccagctttttgcttcagtttcctcacctgtggagtagagctatctgcttactggagatgaagtgtggtga

SEQ ID NO: 25936 - DNA, 110 bp, synthetic construct
  source 1..110: mol_type = other DNA
ggttaattggatctcaaccctcttggatttcaacacattacaatctcatggtcccaaccctactaggatgcttctcaaccttctaagctcatatttacaaatatttctta

SEQ ID NO: 25937 - DNA, 110 bp, synthetic construct
  source 1..110: mol_type = other DNA
ttctcatttgtgctcacaacatctggatgtacaagtacagtctgtggctcgaaaaaatccaacattaatattagacaatcccaagctcatactccatccagatggttctc

SEQ ID NO: 25938 - DNA, 110 bp, synthetic construct
  source 1..110: mol_type = other DNA
aatccaacattaatattagacaatcccaagctcatactccatccagatggttctcgcatgattggtccttttggcgtttgcctctgatgttgtagggatgtggcaaagag

SEQ ID NO: 25939 - DNA, 110 bp, synthetic construct
  source 1..110: mol_type = other DNA
tgatgttctgcctagtcctgcattccatgataaaaccgttcctcaccaggaactgcaagaagaagctcaggtggactgggaggaaggagaccacaaagacaaccaggttg

SEQ ID NO: 25940 - DNA, 110 bp, synthetic construct
  source 1..110: mol_type = other DNA
caagaagaagctcaggtggactgggaggaaggagaccacaaagacaaccaggttggccgcaattgtccagatgcaggtcttctgctggacccagtcctgggtgtggttcc

SEQ ID NO: 25941 - DNA, 110 bp, synthetic construct
  source 1..110: mol_type = other DNA
atgagccgcgcctcagctcctgctcactacaccgtcctccctgcagctgctgatggccctaatgggaggggcaggactcagacaaggtcctcttcaagccagatgcccaa

SEQ ID NO: 25942 - DNA, 110 bp, synthetic construct
  source 1..110: mol_type = other DNA
tagccagcattcttctgtgacgacaagctggaacatgagtcttagctgttataaatcacatgtaaaacagcaggaactctttcactggaaggacaatggtgagcacaacg

SEQ ID NO: 25943 - DNA, 110 bp, synthetic construct
  source 1..110: mol_type = other DNA
attccctgaagaaagtaaagcctttataaggatgatgctgcatactctcttctgtcatgtctcgagccctccttgtcagctaaacctgattgtgaacaagttgggcttca

SEQ ID NO: 25944 - DNA, 110 bp, synthetic construct
  source 1..110: mol_type = other DNA
catgtctcgagccctccttgtcagctaaacctgattgtgaacaagttgggcttcatgcacaaacagattacccaggttaaaaaaaaaaaggaaaaagaaaaagattacac

SEQ ID NO: 25945 - DNA, 110 bp, synthetic construct
  source 1..110: mol_type = other DNA
tgtggcatagacatgcagctatagctctgattccacacctagcctgggaacttccttatgcctcaagtgcggctgtaaaaaccaacaaaaaagacttcagtgattttcaa

SEQ ID NO: 25946 - DNA, 110 bp, synthetic construct
  source 1..110: mol_type = other DNA
gggaacttccttatgcctcaagtgcggctgtaaaaaccaacaaaaaagacttcagtgattttcaaataagtagattcagaaaagttctttagaaatatatataagttgat

SEQ ID NO: 25947 - DNA, 110 bp, synthetic construct
  source 1..110: mol_type = other DNA
ttgatttctcccagtgaaacaagattcctgtccagtttttatgcctttgttgtggaacagagttaatttgttctggagttcctgtcgtggctcagtgtttaacgaacctg

SEQ ID NO: 25948 - DNA, 110 bp, synthetic construct
  source 1..110: mol_type = other DNA
tcctgtccagtttttatgcctttgttgtggaacagagttaatttgttctggagttcctgtcgtggctcagtgtttaacgaacctgacttgtatccatgaggatgtgggtt

SEQ ID NO: 25949 - DNA, 110 bp, synthetic construct
  source 1..110: mol_type = other DNA
aattgcatccgggagataattaccttcaaagatcttgggcatttcacagagctggggcttggcaaatagctagacagagagagtttcccatcaagtcctattcccacgac

SEQ ID NO: 25950 - DNA, 110 bp, synthetic construct
  source 1..110: mol_type = other DNA
ggcttggcaaatagctagacagagagagtttcccatcaagtcctattcccacgacctgctgtgagcagcctctgactcgtgccatgatctctcagaagccctgattcatg

SEQ ID NO: 25951 - DNA, 110 bp, synthetic construct
  source 1..110: mol_type = other DNA
gctctttgctttctagggagttgacggatgagcagagctccaggtttgggtcatgcgagggcctcagtagcttcagctcagaagagtgggagtgtctgttcccgcccctt

SEQ ID NO: 25952 - DNA, 110 bp, synthetic construct
  source 1..110: mol_type = other DNA
tgaaatctagtccaaagtaaagattgttcagcagatcagagcagcccccttcgtgttccaaggttcttcttaacacctccacatcgggggaagggagcggtagctgtcgc

SEQ ID NO: 25953 - DNA, 110 bp, synthetic construct
  source 1..110: mol_type = other DNA
ttccaaggttcttcttaacacctccacatcgggggaagggagcggtagctgtcgcctgccctgagttctccattccgtggaccagttaatacctggatgtcaatgtgaag

SEQ ID NO: 25954 - DNA, 110 bp, synthetic construct
  source 1..110: mol_type = other DNA
ccactgagccgccatgggaattccaatagactcgatttgatcacttactgggagtgtgaccataaaaaagtcctttctcctctttgcctccatttgctgtgtgctataaa

SEQ ID NO: 25955 - DNA, 110 bp, synthetic construct
  source 1..110: mol_type = other DNA
aactgtatttagtttaatgtgatattttgaagcaggaatctcagaaggacacagatctatgactctgtgaccaagctttaagttcccccaaactctggtgctgcgatggt

SEQ ID NO: 25956 - DNA, 110 bp, synthetic construct
  source 1..110: mol_type = other DNA
tctatgactctgtgaccaagctttaagttcccccaaactctggtgctgcgatggtcagccacatgttagaaggctggattgagtcagaaatgtgcgactaggtggagttc

SEQ ID NO: 25957 - DNA, 110 bp, synthetic construct
  source 1..110: mol_type = other DNA
aggttgctttttctatttgtgtgaaaaataccattggaattttgagagtagaaccctggggaattggctaagaactgtttattgagctcccgttgtggctcagcaggtta

SEQ ID NO: 25958 - DNA, 110 bp, synthetic construct
  source 1..110: mol_type = other DNA
tttgtgtgaaaaataccattggaattttgagagtagaaccctggggaattggctaagaactgtttattgagctcccgttgtggctcagcaggttaagaacccgactagca

SEQ ID NO: 25959 - DNA, 110 bp, synthetic construct
  source 1..110: mol_type = other DNA
caagcgcatcaaccacttcctgcagctttgggatcttccgttttgtaagagtccggggacatcgtgcttgtagggcaggtgttgcaattgcattggtggcagtggtaccc

SEQ ID NO: 25960 - DNA, 110 bp, synthetic construct
  source 1..110: mol_type = other DNA
attctgtgaatgacgcccacatacttagagctgttggaggatcttcaggattagccacacaaggactcaggaattcgaatggatgttccagacattggagggcccagata

SEQ ID NO: 25961 - DNA, 110 bp, synthetic construct
  source 1..110: mol_type = other DNA
cacacaaggactcaggaattcgaatggatgttccagacattggagggcccagataactccagggaataaggcagctgctctaaccccagcccatggccaccttgcctgag

SEQ ID NO: 25962 - DNA, 110 bp, synthetic construct
  source 1..110: mol_type = other DNA
gctggttggtcatcctgactgttctcttcctcatggcctttgccatcaccctcgtgacactgctcccctccctctgaccccggtggaaaggcttttctcccgctgcccca

SEQ ID NO: 25963 - DNA, 110 bp, synthetic construct
  source 1..110: mol_type = other DNA
atccacgtggactcacacatcacccaggataatggcgggagtggagtcgacactagggcccaaattctggaacatgggaagaaaagggatgcgggtcactctagccagga

SEQ ID NO: 25964 - DNA, 110 bp, synthetic construct
  source 1..110: mol_type = other DNA
gggcccaaattctggaacatgggaagaaaagggatgcgggtcactctagccaggatgggaggtgaccggaaccccagatgaaccagatccttacgaagagttgaggactc

SEQ ID NO: 25965 - DNA, 110 bp, synthetic construct
  source 1..110: mol_type = other DNA
ggcccagattgggaaacaggtgcccggaattttattctttcccaaattcaggcatcagtcactcgccctcatcttcaagcaaaggatagttggcggatgttaacgctccc

SEQ ID NO: 25966 - DNA, 110 bp, synthetic construct
  source 1..110: mol_type = other DNA
caccctcgaaacgcatacgtgtgacaaactcaagagccaccctttactgacactgcctgtgcccttgatcacttaatccccccagagaggtgggtaccgttgtcctagtc

SEQ ID NO: 25967 - DNA, 110 bp, synthetic construct
  source 1..110: mol_type = other DNA
cctgtgcccttgatcacttaatccccccagagaggtgggtaccgttgtcctagtctacacagctcaggaaacatgaactgggtccacccggttactccctccctagagag

SEQ ID NO: 25968 - DNA, 110 bp, synthetic construct
  source 1..110: mol_type = other DNA
gtaagtacgagagtttaaaagcgttccatggaaacaagagccaggagttcagagctgggtggtcaataccatttgttgctaccgctgccagtgacagtgaggtgtgtgtg

SEQ ID NO: 25969 - DNA, 110 bp, synthetic construct
  source 1..110: mol_type = other DNA
tgggtggtcaataccatttgttgctaccgctgccagtgacagtgaggtgtgtgtggatttctaaccctctgaaaggcattttaaaactaagggctttaccagaagtcccc

SEQ ID NO: 25970 - DNA, 110 bp, synthetic construct
  source 1..110: mol_type = other DNA
tattagcatttcggggggaggcctgttttgttaggaagtgaggacctgaactttttttggtcctgatcgtggatttctcaagtgtagcaaagagcaggagagactttccc

SEQ ID NO: 25971 - DNA, 110 bp, synthetic construct
  source 1..110: mol_type = other DNA
tttggtcctgatcgtggatttctcaagtgtagcaaagagcaggagagactttccccctcctttctgcagcctgtcattgtaggtccatgtgctaccacagggttccagac

SEQ ID NO: 25972 - DNA, 110 bp, synthetic construct
  source 1..110: mol_type = other DNA
ggaaaaaggagcactccacggatgtaccgaaatctcttggtaagagatactaaaatacttcctagagctacgacactcaaaatggtgtaaaatagttaacaaagggccag

SEQ ID NO: 25973 - DNA, 110 bp, synthetic construct
  source 1..110: mol_type = other DNA
tacttcctagagctacgacactcaaaatggtgtaaaatagttaacaaagggccagtgccaatagatgaggtttttctgaataaacttgaggttgcctaggaggtcgatat

SEQ ID NO: 25974 - DNA, 110 bp, synthetic construct
  source 1..110: mol_type = other DNA
cctgatgctgcggctccacgtttcacctgctggccgggacagtagttcagacgccaccgacgccttggatcggggaagcaaaagatgggggccagaggtccgggaggaag

SEQ ID NO: 25975 - DNA, 110 bp, synthetic construct
  source 1..110: mol_type = other DNA
accgacgccttggatcggggaagcaaaagatgggggccagaggtccgggaggaaggcgcagagagagcgaggtttgcccagggccgcaggggggagcgcaagtcctacac

SEQ ID NO: 25976 - DNA, 110 bp, synthetic construct
  source 1..110: mol_type = other DNA
tgtgtgtacctgtgtgcacgctcattggctgttcatatatgtttagtcttctgagaggtctgtgcaaggctttacccatattgaaattgtttttttatattaatgaattg

SEQ ID NO: 25977 - DNA, 110 bp, synthetic construct
  source 1..110: mol_type = other DNA
aggtctgtgcaaggctttacccatattgaaattgtttttttatattaatgaattgtaagacttcatgtaatatggataaagacctgagatacacacacacacacacacac

SEQ ID NO: 25978 - DNA, 110 bp, synthetic construct
  source 1..110: mol_type = other DNA
tagtatttctgtgccctggaaccaaccataccatgtcagtgtgtattgaatatatgatgtgaacggtcctgagatttgatttcgggtagtaagagcttggtgttttctgt

SEQ ID NO: 25979 - DNA, 110 bp, synthetic construct
  source 1..110: mol_type = other DNA
gatgtgaacggtcctgagatttgatttcgggtagtaagagcttggtgttttctgtttcagagtcaagggaagaaaagggaattttgcttctcatggaatatactttaaaa

SEQ ID NO: 25980 - DNA, 110 bp, synthetic construct
  source 1..110: mol_type = other DNA
agaatacactatgagattgcaagctaaatattcagaacgtattggctagctctcatggtgtgtgactatgtttgagatgtcctttctgagttattctgagcaaacttctt

SEQ ID NO: 25981 - DNA, 110 bp, synthetic construct
  source 1..110: mol_type = other DNA
tggtgtgtgactatgtttgagatgtcctttctgagttattctgagcaaacttcttgattttgaaagaaaatggaattccattgctgacgatctgccgcatttatctgaca

SEQ ID NO: 25982 - DNA, 110 bp, synthetic construct
  source 1..110: mol_type = other DNA
gagtaacttagttagtccgtactctccctttctagagttcagatggacccccaggacttgaaacctgtgtctcccataggtgggagattgagacgttacagccggcagac

SEQ ID NO: 25983 - DNA, 110 bp, synthetic construct
  source 1..110: mol_type = other DNA
acttgaaacctgtgtctcccataggtgggagattgagacgttacagccggcagacaaattccatggaaatgcggtgacacctgttccccagtaggtcacgattaggttgg

SEQ ID NO: 25984 - DNA, 110 bp, synthetic construct; identical to SEQ ID NO: 25982
  source 1..110: mol_type = other DNA

SEQ ID NO: 25985 - DNA, 110 bp, synthetic construct; identical to SEQ ID NO: 25983
  source 1..110: mol_type = other DNA

SEQ ID NO: 25986 - DNA, 110 bp, synthetic construct
  source 1..110: mol_type = other DNA
cactggctcagcaccactcccaaccttgcacgggctgttttaccccatctcgccatccttagctcaggttgggccccaccttatgccccatgtcctcaccaaccacccat

SEQ ID NO: 25987 - DNA, 110 bp, synthetic construct
  source 1..110: mol_type = other DNA
tccttagctcaggttgggccccaccttatgccccatgtcctcaccaaccacccatcgaccagggatagaaggactgaatcctaggctcgtgtcacttatgttgtcaggtg

SEQ ID NO: 25988 - DNA, 110 bp, synthetic construct
  source 1..110: mol_type = other DNA
tgtcccctcccgggtccttgccatccttccgcggtatgtttgggagagactgttcacggcctcttcattctagttccccagtggtgttagatgactttctggaagccgaa

SEQ ID NO: 25989 - DNA, 110 bp, synthetic construct
  source 1..110: mol_type = other DNA
aagggaggctagcagggtgctaaatagaacccccaaaccaaaacatcttaggggatattgaccattttcagaaaactccacctggagctctctggcactttctctgcagc

SEQ ID NO: 25990 - DNA, 110 bp, synthetic construct
  source 1..110: mol_type = other DNA
agctgtgggcgactccagtccctgaagagggcttgccctgagccccagagctttgcgcctctagagttggttctgatctggtgttgtcccaaggcaagtcactctccttg

SEQ ID NO: 25991 - DNA, 110 bp, synthetic construct
  source 1..110: mol_type = other DNA
gaggtaggcggtggggatggggggctttcctcctggccaggctgcttgggttgctgggtagagctctgtatttgtaagccccctagagtctcggctgtcccaatttgagg

SEQ ID NO: 25992 - DNA, 110 bp, synthetic construct
  source 1..110: mol_type = other DNA
gtacagcagaacacacacagacacacacacacaagatccatgacttgttcagggacctacacccaaaacatggttgggccaggacgcaggttgcacctcaggagattctg

SEQ ID NO: 25993 - DNA, 110 bp, synthetic construct
  source 1..110: mol_type = other DNA
cctacacccaaaacatggttgggccaggacgcaggttgcacctcaggagattctgtgactagttcaagttcttgaactcaagggttttcagcaggaagtgctgtgctcaa

SEQ ID NO: 25994 - DNA, 110 bp, synthetic construct
  source 1..110: mol_type = other DNA
tgttacaccatccgcaggtagagacatagctgtaatatatatacgatatgcaagtaaggaattcccgccatggctcagggtaaaagaatctgactagtatccatgagaac

SEQ ID NO: 25995 - DNA, 110 bp, synthetic construct
  source 1..110: mol_type = other DNA
atctcaaggcacccagagcaagcttcaccaagcagcaagcagcttcgggagacagagacaaaggctcagagagctactgggacctgatggggcccccaagcatgaggagc

SEQ ID NO: 25996 - DNA, 110 bp, synthetic construct
  source 1..110: mol_type = other DNA
tcgcagctccaggctggaggggacgcctaacgtcatgtgtcctgcatcactggtcctccttctccaagaagctgaactaaggccgggcccaggcttgatgatttgctagg

SEQ ID NO: 25997 - DNA, 110 bp, synthetic construct
  source 1..110: mol_type = other DNA
ctccttctccaagaagctgaactaaggccgggcccaggcttgatgatttgctaggggacactcagaaactcctgcaggggtggggggggcacccttctggacattgagga

SEQ ID NO: 25998 - DNA, 110 bp, synthetic construct
  source 1..110: mol_type = other DNA
ccccctgccccccaatctggaaggccccccacagcatggtggagcccccacagtaacatgtacggagcaggtcctaagcacatgctctgtccaagctctctgcctgctcc

SEQ ID NO: 25999 - DNA, 110 bp, synthetic construct
  source 1..110: mol_type = other DNA
acatgtacggagcaggtcctaagcacatgctctgtccaagctctctgcctgctccactgcactgagtctccctgtaaccccacgaggggggccctctcagtggccccagg

SEQ ID NO: 26000 - DNA, 110 bp, synthetic construct
  source 1..110: mol_type = other DNA
aggcggggtggggggaggcactacagaaagtaagttccaactccaagttcatgcgctgcttaaggagcccctccctcattgaatcctcgctgtaccagagccagtctcca

SEQ ID NO: 26001 - DNA, 110 bp, synthetic construct
  source 1..110: mol_type = other DNA
ctgcttaaggagcccctccctcattgaatcctcgctgtaccagagccagtctccaggggcctcggaggggaagaatgtgcggccatgtccagagcaggacttagagacag

SEQ ID NO: 26002 - DNA, 110 bp, synthetic construct
  source 1..110: mol_type = other DNA
aacatctgcaaaatgccgacctagagcgatggtgagaatctccgccggccttttgcaagaagcctaacaggtgtccattaatcctctgagcaagatggatgttattagcc

SEQ ID NO: 26003 - DNA, 110 bp, synthetic construct
  source 1..110: mol_type = other DNA
agcgaccctgctgctccgcacgccccaggcacccctctcccaggccagtgttatctgaaagaaaccaaacgctaggagctcccgctgtggcgtaaaggggtcggtgatgt

SEQ ID NO: 26004 - DNA, 110 bp, synthetic construct
  source 1..110: mol_type = other DNA
tgaaagaaaccaaacgctaggagctcccgctgtggcgtaaaggggtcggtgatgtctctgcagcgccaggacgcagattcgatccccaggccctcactgtggtttaaagg

SEQ ID NO: 26005 - DNA, 110 bp, synthetic construct
  source 1..110: mol_type = other DNA
aaatattctcttaattgatagtaatcattgctaaaactcaatctacactttgttttatttggccaccctacagaacttggagttcctgggccagggatcagatccaaggc

SEQ ID NO: 26006 - DNA, 110 bp, synthetic construct
  source 1..110: mol_type = other DNA
tgatagtaatcattgctaaaactcaatctacactttgttttatttggccaccctacagaacttggagttcctgggccagggatcagatccaaggcacaggttcaatctaa

SEQ ID NO: 26007 - DNA, 110 bp, synthetic construct
  source 1..110: mol_type = other DNA
tctggtccaccttggggcctggatctgaggtttaaaaggctccacagcttttctgcctgattctctgccaggaatgtccctgcagctcagcggggccaggtgtggttcgg

SEQ ID NO: 26008 - DNA, 110 bp, synthetic construct
  source 1..110: mol_type = other DNA
gccccgccatttgcttcgcagctctgatagcctcacacaggatgggctgggcgatgagaatcactgaggaagggctccatggaaattcagcacagggggccatggcaggc

SEQ ID NO: 26009 - DNA, 110 bp, synthetic construct
  source 1..110: mol_type = other DNA
ttgcctgcacttcccagcctccacttccatatccaggcccctcgttggttctttccgaggtctcgaccatgacctcctaaccagcttccctgccctcatgctgccctgag

SEQ ID NO: 26010 - DNA, 110 bp, synthetic construct
  source 1..110: mol_type = other DNA
cgaggtctcgaccatgacctcctaaccagcttccctgccctcatgctgccctgagggtcccccctgcagtaaggatagtctttattagcggagagctgctgctaacatct

SEQ ID NO: 26011 - DNA, 110 bp, synthetic construct
  source 1..110: mol_type = other DNA
gaagatgggggcagattcaggttgcttggtgctcattctttgtgggtcttttggcagtctatacatagtaccggctagactttatcccagatttgccagtttctttctgg

SEQ ID NO: 26012 - DNA, 110 bp, synthetic construct
  source 1..110: mol_type = other DNA
agtctatacatagtaccggctagactttatcccagatttgccagtttctttctgggtaatttttacatacccaggtggtggagatttgcggtagcagatttttttttttt

SEQ ID NO: 26013 - DNA, 110 bp, synthetic construct
  source 1..110: mol_type = other DNA
tcttatcatcacttatgaaagaaaaggctttttttttttttttttttttttttttttagggccacacttgtggcctgtggagtttcccaggctagggattgaattggagc

SEQ ID NO: 26014 - DNA, 110 bp, synthetic construct; identical to SEQ ID NO: 26013
  source 1..110: mol_type = other DNA

SEQ ID NO: 26015 - DNA, 110 bp, synthetic construct
  source 1..110: mol_type = other DNA
gcggaaaggagctggacttgattctgtttgttttcaagaggtgcatccacaactatggggtagatgctctagtgacacaggctagcactgtagagggccttctggatacc

SEQ ID NO: 26016 - DNA, 110 bp, synthetic construct
  source 1..110: mol_type = other DNA
tggttggtgtaatacacagaagacttaagcgacagaactaaaatgcagactttttgacttaaggtctgtaagtttttttgtgataacatgctgcctctgtgactcttaac

SEQ ID NO: 26017 - DNA, 110 bp, synthetic construct
  source 1..110: mol_type = other DNA
aactaaaatgcagactttttgacttaaggtctgtaagtttttttgtgataacatgctgcctctgtgactcttaactgagatattctggatatttttcttggctttttttt

SEQ ID NO: 26018 - DNA, 110 bp, synthetic construct
  source 1..110: mol_type = other DNA
ttcctcattaaccagcaaatcgtttgcaaagctcagacatgtcatgtcctccatggggcactaagctggcactgggcgtgaagggcagttgaagcaggcttccccgagac

SEQ ID NO: 26019 - DNA, 110 bp, synthetic construct
  source 1..110: mol_type = other DNA
ggttccggccatcgcgtaaccccgttttactgcccccagccagggccacttcctggctgtgtgtttgtccatctctggccccaagatggtggcttcctggcacacggtag

SEQ ID NO: 26020 - DNA, 110 bp, synthetic construct
  source 1..110: mol_type = other DNA
gctgtgtgtttgtccatctctggccccaagatggtggcttcctggcacacggtaggagctgaattaggatctttggaacaaatgaactgcttagaaagccagcagagacc

SEQ ID NO: 26021 - DNA, 110 bp, synthetic construct
  source 1..110: mol_type = other DNA
caccagctttaacagagactcatggcttatcttctcccatttctgctcctgcctacgccttcctgggcctggattatttggaagcaaattccagacatcctatgatttca

SEQ ID NO: 26022 - DNA, 110 bp, synthetic construct
  source 1..110: mol_type = other DNA
tctgtttagaaacagatggcaaccagttattaagatgacccaccgaacaccccaggttcatagagcttgaagtggcttctgcagcaaaaggagctccccttaaagggagg

SEQ ID NO: 26023 - DNA, 110 bp, synthetic construct
  source 1..110: mol_type = other DNA
tctctgctgcaaacgcacagccctgctccagacctggcctgtgctgtgaccccttcgctggggcctgccgggaactcacatgacatctttccaccacaaatacctccccc

SEQ ID NO: 26024 - DNA, 110 bp, synthetic construct
  source 1..110: mol_type = other DNA
cgctggggcctgccgggaactcacatgacatctttccaccacaaatacctccccctccgtgcagtccatcgactcagatggtccaagcggaggagctgccagccctgcag

SEQ ID NO: 26025 - DNA, 110 bp, synthetic construct; identical to SEQ ID NO: 26023
  source 1..110: mol_type = other DNA

SEQ ID NO: 26026 - DNA, 110 bp, synthetic construct; identical to SEQ ID NO: 26024
  source 1..110: mol_type = other DNA

SEQ ID NO: 26027 - DNA, 110 bp, synthetic construct
  source 1..110: mol_type = other DNA
acacaaaaggctcggccagagaagtggcaggaagcaaaagcctggggttgcgacaccctccgagctgggccgagaatgggcacggttctgatagcaaatgtgactgagat

SEQ ID NO: 26028 - DNA, 110 bp, synthetic construct
  source 1..110: mol_type = other DNA
ccctccgagctgggccgagaatgggcacggttctgatagcaaatgtgactgagatccaaccaaagacagtgtcctgtgagcggagggacctgcggaccatctgtggatgt

SEQ ID NO: 26029 - DNA, 110 bp, synthetic construct
  source 1..110: mol_type = other DNA
tcaaagatttctctgtgcgggcatttgtccaaatatctgtttgcataacttcctgtaaggaaatctgctggttctgcaaatttgtgaacatgcttaatcataatcttgtc

SEQ ID NO: 26030 - DNA, 110 bp, synthetic construct
  source 1..110: mol_type = other DNA
taaggaaatctgctggttctgcaaatttgtgaacatgcttaatcataatcttgtctggggaattagcatagtcaactctcaagacctgatgcaaggctcttttgaggatg

SEQ ID NO: 26031 - DNA, 110 bp, synthetic construct
  source 1..110: mol_type = other DNA
ttaccttctgtgatggtctctcccaagagagtggatctagttccctatgctatacaataggggctcattgcctatctattctaaatgtactggtttgcatctactaactc

SEQ ID NO: 26032 - DNA, 110 bp, synthetic construct
  source 1..110: mol_type = other DNA
aataggggctcattgcctatctattctaaatgtactggtttgcatctactaactcagactccgggtccatcccactccctgccctctccccctggcaaccccacgtctct

SEQ ID NO: 26033 - DNA, 110 bp, synthetic construct
  source 1..110: mol_type = other DNA
actccttgcagtcaggttcttaaccccctgcaccacagcaggaactcccagaaattgttttttaaagtgtccccaacttgagctgttgccagctattacacttttacaat

SEQ ID NO: 26034 - DNA, 110 bp, synthetic construct
  source 1..110: mol_type = other DNA
ggggtgggggtgggggagcccgcccgggcccttagctgggggcctgctgcaggcagaatagcgaatagttaaggcaccaacgtttgagaaccactggcttctttcgtaac

SEQ ID NO: 26035 - DNA, 110 bp, synthetic construct
  source 1..110: mol_type = other DNA
gaatagcgaatagttaaggcaccaacgtttgagaaccactggcttctttcgtaacttggagcccgtaagggtgcccctcagaacatggcaaaatgggcttgcattccact

SEQ ID NO: 26036 - DNA, 110 bp, synthetic construct
  source 1..110: mol_type = other DNA
ggcagggctcctgggaagagctctctgtttgccctccgtggcccccgtggttcagacatgaatggtgggaccagcaaacactgggccagaagcaggatcctgaacgtcac

SEQ ID NO: 26037 - DNA, 110 bp, synthetic construct
  source 1..110: mol_type = other DNA
gtgcagtttgctccaaaccgagttcatgccccgcatctgggaggcaccctggcgcatcctgctccctaatctcctgaccaggagcagctggtccctttgcttccctctgc

SEQ ID NO: 26038 - DNA, 110 bp, synthetic construct
  source 1..110: mol_type = other DNA
ggatgctggctgacccacgtggtgagagatgatggtaccaggggttgtggtggcggcgatggagagggttagctggattcagtgttgcgagaactcggtgatggttttgg

SEQ ID NO: 26039 - DNA, 110 bp, synthetic construct
  source 1..110: mol_type = other DNA
ccagatgcttcatgtggctggctgccctcttaggagagtttctggagtgttctgcctgcctctaggtttcacccctccccctctcctccgcattgtggctcaaatcatct

SEQ ID NO: 26040 - DNA, 110 bp, synthetic construct
  source 1..110: mol_type = other DNA
ctgcctctaggtttcacccctccccctctcctccgcattgtggctcaaatcatctttctaaaatgtacatcctgagatacttccctggtttggggcccctgggacccaca

SEQ ID NO: 26041 - DNA, 110 bp, synthetic construct
  source 1..110: mol_type = other DNA
ggatatgtagggggttgggggtgctcggggacgccgggagccgaggtcagctccagcactggcccttgcagaccttcgcggccccgtcattcgatgataagatcctggag

SEQ ID NO: 26042 - DNA, 110 bp, synthetic construct
  source 1..110: mol_type = other DNA
tgaggacaaagggccgagtgctaccgtcaatcggtgtgatgagagacggtctgtaggcactgctcagagctggggaggggcaccccgcatacactccaagatcactatgg

SEQ ID NO: 26043 - DNA, 110 bp, synthetic construct
  source 1..110: mol_type = other DNA
cctgggaggtgcacgtctggaaggaaagaggtagcttagggagctgctagaataatcccgatgggggagacagcagtggtgggagtgagatgcggtcagatcccggatgg

SEQ ID NO: 26044 - DNA, 110 bp, synthetic construct
  source 1..110: mol_type = other DNA
gcatacacagagagcacaaccatttaaacaacaatcatttctacttagtttatgggacaaccacttttattagaaggaaaagtgatttgtgtgccagcgtaggaacccct

SEQ ID NO: 26045 - DNA, 110 bp, synthetic construct
  source 1..110: mol_type = other DNA
gacaaccacttttattagaaggaaaagtgatttgtgtgccagcgtaggaacccctgcccagaagaacaaaaataatgtgtttacaattaccactattcaggaaaaagcat

SEQ ID NO: 26046 - DNA, 110 bp, synthetic construct
  source 1..110: mol_type = other DNA
attagagagccttaataacaatgcgtggaatgaagaaatggactccccacaccaccatctttcccatcatccggcatcagtcttggagctgtatttgaaactttctttcc

SEQ ID NO: 26047 - DNA, 110 bp, synthetic construct
  source 1..110: mol_type = other DNA
aaaactgaaataaaattcctattttatggcaagacgagaaagctttaaatccaaaaaactttctctgctcttttgcatcctctccccgctaccatgcctcctgtatctgt

SEQ ID NO: 26048 - DNA, 110 bp, synthetic construct
  source 1..110: mol_type = other DNA
acaaaactcgtcaagtggctgccccaaaatgatctgcttggtacgtgaggagggtttgatgtatagctcaaaccggagttcaattaagaaagtggcttaggcagggctgt

SEQ ID NO: 26049 - DNA, 110 bp, synthetic construct
  source 1..110: mol_type = other DNA
ttgatgtatagctcaaaccggagttcaattaagaaagtggcttaggcagggctgttctaaaggatcgtttagctggaaaacatcatggccaatgtgtcccacacggcttt

SEQ ID NO: 26050 - DNA, 110 bp, synthetic construct
  source 1..110: mol_type = other DNA
gctcagctggccaggcatcccccgctgccctgtctttccaaaagcccagaggccacagtctgctgattcctcctgccaggccgggaatgggcgggtcaagaagacctgca

SEQ ID NO: 26051 - DNA, 110 bp, synthetic construct
  source 1..110: mol_type = other DNA
cagtctgctgattcctcctgccaggccgggaatgggcgggtcaagaagacctgcaaaccggcttaatgaggagtctcggctctgtgggggaaacgcagcttaatttcctt

SEQ ID NO: 26052 - DNA, 110 bp, synthetic construct
  source 1..110: mol_type = other DNA
tataatgtaagcaaagaaggaaaatacagaaaagggttaggtgtgtttatgccatagctccagaagaagctggctaaacccaacgggatcagaccccatcagcctgcgga

SEQ ID NO: 26053 - DNA, 110 bp, synthetic construct
  source 1..110: mol_type = other DNA
aacagacttaaagaggtgttgtatctttatactattgtgcagtttatagaatgaaagctctttgcattattcatgatcacgtcagtactacaaagggatcaggaaagcct

SEQ ID NO: 26054 - DNA, 110 bp, synthetic construct
  source 1..110: mol_type = other DNA
agctctttgcattattcatgatcacgtcagtactacaaagggatcaggaaagcctttgcaaggatggcaaaagacaaaaggtaaagaaaagcatattttattttattact

SEQ ID NO: 26055 - DNA, 110 bp, synthetic construct
  source 1..110: mol_type = other DNA
ttcctaagatgcccatcatgttgggtcaccaaggatattcttaagaatagcatcatccctgtaatcggagaagctagtggcaaaaaatgttgcaaaaatgctcatcgtaa

SEQ ID NO: 26056 - DNA, 110 bp, synthetic construct
  source 1..110: mol_type = other DNA
tctcttaaaaccttggcgatcccttcctcttcctttcatgtggattaggtcatggtagtttaaaatgtggccatcgatgctgatgtgtctgctgcgtcctggtgcccacg

SEQ ID NO: 26057 - DNA, 110 bp, synthetic construct
  source 1..110: mol_type = other DNA
tagtttaaaatgtggccatcgatgctgatgtgtctgctgcgtcctggtgcccacgggtggggcttctttaggggtctgtgagtgcaggatgagaaaattactcggagtca

SEQ ID NO: 26058 - DNA, 110 bp, synthetic construct
  source 1..110: mol_type = other DNA
gtgaataaagactagtgtgggtggtccccagctccccaaacttaggagacacggaacttctatcaggcgacaggtgagctgtccagctcccctccaggcacgatttctca

SEQ ID NO: 26059 - DNA, 110 bp, synthetic construct
  source 1..110: mol_type = other DNA
gaattttcaacatttctcagcgagagaatttcacttttgatttaccatggcaactagaatactgtcttttctgaagccaccaagaagaggcttccgttatctccacggtg

SEQ ID NO: 26060 - DNA, 110 bp, synthetic construct
  source 1..110: mol_type = other DNA
agaatactgtcttttctgaagccaccaagaagaggcttccgttatctccacggtgcctggatacaaacaaaggatgtggcactgtatctatgagtgtatgacaacagccc

SEQ ID NO: 26061 - DNA, 110 bp, synthetic construct
  source 1..110: mol_type = other DNA
ttacctttcctcttctttgccttttttctttttggctttctccatgattctaggtagctatacctgagctttatttttttgtccaaaataagggcttgttttgaaaaacc

SEQ ID NO: 26062 - DNA, 110 bp, synthetic construct
  source 1..110: mol_type = other DNA
tcttttgcatgtgaatatcccagcaccacttgttgaaaagactattctttcccccactgaactgtgccccctctagaataaacaatcactgtgatgggggctggcaggct

SEQ ID NO: 26063 - DNA, 110 bp, synthetic construct
  source 1..110: mol_type = other DNA
actgaactgtgccccctctagaataaacaatcactgtgatgggggctggcaggctaaccagctgttcaggaaggagggagtgataggaaggtagcccaacacctggcaga

SEQ ID NO: 26064 - DNA, 110 bp, synthetic construct
  source 1..110: mol_type = other DNA
ttcctcctgctccagaaaaggagtgatgtttgccagggctccagcttcagctctccctcaactcgctcttccccctctcccacgccatccgagacagcccagggctttgt

SEQ ID NO: 26065 - DNA, 110 bp, synthetic construct
  source 1..110: mol_type = other DNA
cctcaactcgctcttccccctctcccacgccatccgagacagcccagggctttgttgcccacttgtccaggggttattacaacctctgtttacacactgtccctccagcc

SEQ ID NO: 26066 - DNA, 110 bp, synthetic construct
  source 1..110: mol_type = other DNA
acaatgggaactcccacttctgctgttgtcaaccatttaatttgtggagcttttttatgggagccctcgaaaatgaatacagtatttaagaaattagggagaagaagagc

SEQ ID NO: 26067 - DNA, 110 bp, synthetic construct; identical to SEQ ID NO: 26066
  source 1..110: mol_type = other DNA

SEQ ID NO: 26068 - DNA, 110 bp, synthetic construct
  source 1..110: mol_type = other DNA
tttttgtggcacatgtgaagttcccaggctaggcgtccaattggagctgcagctgctggctaaaaccttagtcagggcaacatcagatctaaccacatcttcaactatgc

SEQ ID NO: 26069 - DNA, 110 bp, synthetic construct
  source 1..110: mol_type = other DNA
gctgcagctgctggctaaaaccttagtcagggcaacatcagatctaaccacatcttcaactatgctgcagcttgcagcaatgtgggatgcttaacccactgagcgaggcc

SEQ ID NO: 26070 - DNA, 110 bp, synthetic construct
  source 1..110: mol_type = other DNA
ggggatcctatggtcaatcttcacaattttcttggctctttaaagtaagaaggaaagcttatttatgtgtagaaaaaaattatggcatgtctataactttcttactaatt

SEQ ID NO: 26071 - DNA, 110 bp, synthetic construct; identical to SEQ ID NO: 26070
  source 1..110: mol_type = other DNA

SEQ ID NO: 26072 - DNA, 110 bp, synthetic construct
  source 1..110: mol_type = other DNA
aactaacaaggacctgctgggaactctactcagtagtctgtaatagcttgtatggtaaaagaatctgaaaaagaatggatatgtgtataagcgtaattaattccctttgc

SEQ ID NO: 26073 - DNA, 110 bp, synthetic construct
  source 1..110: mol_type = other DNA
taaaagaatctgaaaaagaatggatatgtgtataagcgtaattaattccctttgctgtacccctgaaactaacgcagccttgtaagtcaactagagtcagctatactcca

SEQ ID NO: 26074 - DNA, 110 bp, synthetic construct
  source 1..110: mol_type = other DNA
gactcagaaggacccaaagaatggcatctgagtgggcatcagaaagatggtcaaggagttcccgttgtggctcagtggaaacgaatatgactagcatccaggaggatgca

SEQ ID NO: 26075 - DNA, 110 bp, synthetic construct
  source 1..110: mol_type = other DNA
aaagaatggcatctgagtgggcatcagaaagatggtcaaggagttcccgttgtggctcagtggaaacgaatatgactagcatccaggaggatgcaggtttgatccccggc

SEQ ID NO: 26076 - DNA, 110 bp, synthetic construct
  source 1..110: mol_type = other DNA
atggggaaagagcaggtgcgctgtgacacgtacaaggatgttggccatgaccgtcttgtcctcctgctcagtgggacagttcggctggtctttccaacctgctctatcaa

SEQ ID NO: 26077 - DNA, 110 bp, synthetic construct
  source 1..110: mol_type = other DNA
ttgtcctcctgctcagtgggacagttcggctggtctttccaacctgctctatcaaatgtaaaaccaaacaatcacaggagttcctgtcgtggctcagcagaaacgaatct

SEQ ID NO: 26078 - DNA, 110 bp, synthetic construct
  source 1..110: mol_type = other DNA
gactctcctaagagagtctgcttaacatccacgtgggagaaccacaggcgaggtccccattcctacatgcgaagccaggatgggaagggagctcggacacgttctcacac

SEQ ID NO: 26079 - DNA, 110 bp, synthetic construct
  source 1..110: mol_type = other DNA
tgtgtgtgtgtgtgtgtgtgtatgtgtaatttgttaaaaacttctctggttgactttttactcccctaaggaggtctggaaagatgacagtgctgtctgaggctcacctg

SEQ ID NO: 26080 - DNA, 110 bp, synthetic construct
  source 1..110: mol_type = other DNA
ttttactcccctaaggaggtctggaaagatgacagtgctgtctgaggctcacctgtgcttctctttgacaaacatgaagccatttgagttggccgttccttctcctctga

SEQ ID NO: 26081 - DNA, 110 bp, synthetic construct
  source 1..110: mol_type = other DNA
aaaccgattccgaaagagcaggattcaggcttagagtgaatttcaggaggaagtggtcattttcagtacctctgcaggaactgcctatctctatggcagcaccggattcc

SEQ ID NO: 26082 - DNA, 110 bp, synthetic construct
  source 1..110: mol_type = other DNA
gtcattttcagtacctctgcaggaactgcctatctctatggcagcaccggattccgagacagatcacacatctgcttttaggttcctgggggtctacactaggattcaaa

SEQ ID NO: 26083 - DNA, 110 bp, synthetic construct
  source 1..110: mol_type = other DNA
gtctgagaaagccccatctgcctcgccatgcctggatacgaggaggtgcaaatgtgcgcccagcgagctttccttcaccccttagccccatcgttctgcttccttgagag

SEQ ID NO: 26084 - DNA, 110 bp, synthetic construct
  source 1..110: mol_type = other DNA
gcgcccagcgagctttccttcaccccttagccccatcgttctgcttccttgagagagctgtgctcgagaccaggaaataactgcgatggagtcctggcttgactgtccac

SEQ ID NO: 26085 - DNA, 110 bp, synthetic construct
  source 1..110: mol_type = other DNA
ctgtgtacacccacagctcagggctccactgtggtcctctgcccagcttattataatagccaccaaatgtccacctacctccgtactttaagctccagcaacacaaagcc

SEQ ID NO: 26086 - DNA, 110 bp, synthetic construct
  source 1..110: mol_type = other DNA
atagccaccaaatgtccacctacctccgtactttaagctccagcaacacaaagccccttctcacttgtggtctacactgcatcctgttcaagataaagcccaggcaaaga

SEQ ID NO: 26087 - DNA, 110 bp, synthetic construct
  source 1..110: mol_type = other DNA
tgtgtcaggcaccatgtaggtattgggaattcagtagcaaataaaatacacaaagttcctgctttcatggctcttataggcccgcagagctcatctctgatgcctgacgc

SEQ ID NO: 26088 - DNA, 110 bp, synthetic construct
  source 1..110: mol_type = other DNA
ttcctgctttcatggctcttataggcccgcagagctcatctctgatgcctgacgcacatggtctctggaatcaagcctcactcagccacgagcccaaagctgaaaggagg

SEQ ID NO: 26089 - DNA, 110 bp, synthetic construct
  source 1..110: mol_type = other DNA
tcaggctttatgtaagttttcccagccccactgagacgtccttactgaaaaagagcagcttgttcctaagccagaagaggacagtgcacagaagagaaagatatcccaga

SEQ ID NO: 26090 - DNA, 110 bp, synthetic construct
  source 1..110: mol_type = other DNA
cagcttgttcctaagccagaagaggacagtgcacagaagagaaagatatcccagaggaaactggagaaacaaagacgtgccctgggaattaatactgcaaaatgtaaatg

SEQ ID NO: 26091 - DNA, 110 bp, synthetic construct
  source 1..110: mol_type = other DNA
gaacagcaggggtgattcagggtaaaatgtactcttatccgtgtcgttgtgccacaaagatgtcagattgtagatgcagcctctgcaggtgcttgatgcactagccagct

SEQ ID NO: 26092 - DNA, 110 bp, synthetic construct
  source 1..110: mol_type = other DNA
aaagatgtcagattgtagatgcagcctctgcaggtgcttgatgcactagccagctgatgaaacggaacagcttttcgcttcatgccagcccattttctacatgcaaccct

SEQ ID NO: 26093 - DNA, 110 bp, synthetic construct
  source 1..110: mol_type = other DNA
aatggtatccggcaatgagaattatataaccacacttttgccttagctcctaagcctgcaagtcttgtgtcttccccagatacgttaataacacagggcaccttcaaact

SEQ ID NO: 26094 - DNA, 110 bp, synthetic construct
  source 1..110: mol_type = other DNA
ctgcaagtcttgtgtcttccccagatacgttaataacacagggcaccttcaaactgatagaaaatctctgttagtgcttttcacgagtgaaagactacttttcttccttt

SEQ ID NO: 26095 - DNA, 110 bp, synthetic construct
  source 1..110: mol_type = other DNA
agaaacttccatacgctgcaggtatggccataaaaaataaaataaaaatcgttaccctagtggtttcctagagctgggaagcagcaagaggttggaagtaataggtgaag

SEQ ID NO: 26096 - DNA, 110 bp, synthetic construct
  source 1..110: mol_type = other DNA
cctagtggtttcctagagctgggaagcagcaagaggttggaagtaataggtgaagagcatgaggtttctctttggggtgacagaaataccctgaatttttggcgatggtt

SEQ ID NO: 26097 - DNA, 110 bp, synthetic construct
  source 1..110: mol_type = other DNA
cgggacaaggagtcaggctgaattacgatgcagccctcacagtcttagaacaccatgagcttaattctattatcatttgagccttcccagccagacaccaaagtttgcat

SEQ ID NO: 26098 - DNA, 110 bp, synthetic construct
  source 1..110: mol_type = other DNA
aatttcctgcaaccaataagcaaactaggagtctgagaataagagttgagttgagggttttcctttagaaaaagcactggctttctctcctgaccaggctggaggaggag

SEQ ID NO: 26099 - DNA, 110 bp, synthetic construct
  source 1..110: mol_type = other DNA
ggttttcctttagaaaaagcactggctttctctcctgaccaggctggaggaggagctggaggggcggagggcgccgctgttttcagtgataacacacagcagggatctga

SEQ ID NO: 26100 - DNA, 110 bp, synthetic construct
  source 1..110: mol_type = other DNA
acttcctatcactctctccaaacaggtaatctctgttatcaatcccttagatactttcctgagatttttgaatatatatctagagtcaattaaattatctccaagcacta

SEQ ID NO: 26101 - DNA, 110 bp, synthetic construct
  source 1..110: mol_type = other DNA
ttaattttgttaattgttacatcctaggtttttttttaaatgcatttaaaatgcattcttacctttagggaacccccgccattgacatcagcagggaagcaaacactgaa

SEQ ID NO: 26102 - DNA, 110 bp, synthetic construct
  source 1..110: mol_type = other DNA
ttcttacctttagggaacccccgccattgacatcagcagggaagcaaacactgaaatcgcctttgagaaacacagtgggtttgctctacaacctttatttccgcgtattt

SEQ ID NO: 26103 - DNA, 110 bp, synthetic construct
  source 1..110: mol_type = other DNA
cattattcggatcacagagtttaaaaattatggaacttggaactcacaggagagtcaaaattttaattaatgtcatgcgttatcctttgggaagtagccactgagctgcc

SEQ ID NO: 26104 - DNA, 110 bp, synthetic construct
  source 1..110: mol_type = other DNA
caaaattttaattaatgtcatgcgttatcctttgggaagtagccactgagctgccaacatgcagtcaggacagtttgtaaatcaaaccgccacagcgtctccagaagaag

SEQ ID NO: 26105 - DNA, 110 bp, synthetic construct
  source 1..110: mol_type = other DNA
aggtcgaaccaggatggcctcagtgcctattcagatcagcagaagggtgggaaacctctgctaataaaacactgaatcatctcaggtttccctttaatgagcctctccta

SEQ ID NO: 26106 - DNA, 110 bp, synthetic construct
  source 1..110: mol_type = other DNA
ggagaaacttgaaaaaaactatctcagcaggtgatcaaggttaatgtcattcacgataagtcaggttgatgggatgtccccttttttccttttttaaagttttattgaag

SEQ ID NO: 26107 - DNA, 110 bp, synthetic construct
  source 1..110: mol_type = other DNA
ctgagttgggcttggaaatcagaagtgcctggtccactccctgcttcttccagctgcaccactcaagtaagctgcacacacactgtacctatggcttaggatttttatga

SEQ ID NO: 26108 - DNA, 110 bp, synthetic construct
  source 1..110: mol_type = other DNA
gcaccactcaagtaagctgcacacacactgtacctatggcttaggatttttatgaggactaaacaagaaaatgtctacagagtccacagaactatggttgacatttaata

SEQ ID NO: 26109 - DNA, 110 bp, synthetic construct
  source 1..110: mol_type = other DNA
acagaggtcaaggtccatcagaggccgcctctgggttggccgccctgaccttctggagaagcctcgtaactgttctctccccaccatgtgtgcttgtggcagttacggtc

SEQ ID NO: 26110 - DNA, 110 bp, synthetic construct
  source 1..110: mol_type = other DNA
gagaagcctcgtaactgttctctccccaccatgtgtgcttgtggcagttacggtcgagtttcctttttccttttctttctttttgtctttttacagccacacctgcagca

SEQ ID NO: 26111 - DNA, 110 bp, synthetic construct
  source 1..110: mol_type = other DNA
cagagtgagaaagttcactgccatcctgagggtcgaagtttgcttgttgcttcattaggctgagaatagttggatgcgtaggaagcccgaaggtaacggaacactggttg

SEQ ID NO: 26112 - DNA, 110 bp, synthetic construct
  source 1..110: mol_type = other DNA
cctcaggatgtcccgctggtgttggttaacgaaggtataccctggagttatctgtggcccgccttgccctagtttaacctgcagcaggtatcttttgttttaagctgcct

SEQ ID NO: 26113 - DNA, 110 bp, synthetic construct
  source 1..110: mol_type = other DNA
ggcccgccttgccctagtttaacctgcagcaggtatcttttgttttaagctgcctcggacgcctcactttgaagcccagcccttgtgccacccctccccccatgccctta

SEQ ID NO: 26114 - DNA, 110 bp, synthetic construct
  source 1..110: mol_type = other DNA
tggatttgagtcgttgtgatgatacccgggcgtccttgagagctgttctctcggggtttctggttattcccggggcgagcgaacgatggtgtgggttgatgacaccggct

SEQ ID NO: 26115 - DNA, 110 bp, synthetic construct
  source 1..110: mol_type = other DNA
gtttctggttattcccggggcgagcgaacgatggtgtgggttgatgacaccggctgctgctggaccgagaacctgattgcgagtgaggcctcggcctcaagttcctggcg

SEQ ID NO: 26116 - DNA, 110 bp, synthetic construct
  source 1..110: mol_type = other DNA
tgcgaaatgcttccaccggttcccgagggatgagacctttccaaagagggttccccccgaccccacgccccgcgaaacccctgtctgcccaggaaatggaagctgacagt

SEQ ID NO: 26117 - DNA, 110 bp, synthetic construct
  source 1..110: mol_type = other DNA
cccgaccccacgccccgcgaaacccctgtctgcccaggaaatggaagctgacagtcccacagtgagtgccttgtgtccctgtgacctctgcagaaatagcacaggtgagc

SEQ ID NO: 26118 - DNA, 110 bp, synthetic construct
  source 1..110: mol_type = other DNA
cagggacagaaggctggtcttgagactcacctccctagacccctaaacatctcaagtgccccctcctgctcacagcatcttaggttgggcaggtgacactcctgggctgg

SEQ ID NO: 26119 - DNA, 110 bp, synthetic construct
  source 1..110: mol_type = other DNA
ggggagtagttgttacacatgaactaataccttcgggtacttaaccttttcatacagttatgtgtgcagctcggaaatactccgcagcctgaaagaaaggacagcgcgga

SEQ ID NO: 26120 - DNA, 110 bp, synthetic construct
  source 1..110: mol_type = other DNA
ggtgccgtcacttccacatccctcttactctgcggcccccatgttcccagatcgtcctagtttttcaaagaagccaggaactggggtttgcagatccagtgttgtcattt

SEQ ID NO: 26121 - DNA, 110 bp, synthetic construct
  source 1..110: mol_type = other DNA
gaacttgcgaactaacacaggagcattgggatcagcccagctcgcgtccaacatgagcaacgccttgctgctgacgaactttgaccgtttcgtgaagggtggtggtgaag

SEQ ID NO: 26122 - DNA, 110 bp, synthetic construct
  source 1..110: mol_type = other DNA
gggcagcgtgggaggcaggcacctcgggccaagggacatgtccaagaagagctggccgtggcatccccaccaccagcaccacggggaaatcctggggagggaatcctgat

SEQ ID NO: 26123 - DNA, 110 bp, synthetic construct
  source 1..110: mol_type = other DNA
ccgtggcatccccaccaccagcaccacggggaaatcctggggagggaatcctgatgtgggtgctgatgcttagaagagaagggtgcagatggggaagcccagacttctgc

SEQ ID NO: 26124 - DNA, 110 bp, synthetic construct
  source 1..110: mol_type = other DNA
agggcggagctgtcggcgtctttgccggtgccgttcaggacgtgtgcgcgtcacgattctcatggcttgtgtcgtttttatgctctgaccttgctgactgcgttttatcg

SEQ ID NO: 26125 - DNA, 110 bp, synthetic construct
  source 1..110: mol_type = other DNA
attctcatggcttgtgtcgtttttatgctctgaccttgctgactgcgttttatcgcagaagatacagggatgcaaatggaaactgtaatgcccagtagagagatgcggtg

SEQ ID NO: 26126 - DNA, 110 bp, synthetic construct
  source 1..110: mol_type = other DNA
gacattaatacacgtctgtggtctcctggtccaatgatggaggaagagcttcggaggagctcgtttgagcatgccagcagactgcggagggtttttattccacttgcaag

SEQ ID NO: 26127 - DNA, 110 bp, synthetic construct
  source 1..110: mol_type = other DNA
ggagctcgtttgagcatgccagcagactgcggagggtttttattccacttgcaaggagcgcgtcgaaggattctcatcgcggaggtctgtgtgattagttctcaggcgtt

SEQ ID NO: 26128 - DNA, 110 bp, synthetic construct
  source 1..110: mol_type = other DNA
gtttgagaattcagcgcctctctgtgcctttggtagctctcccaggagttttgtttttcacgaattcagcgaacactcattgagtgacctcccgtggaagagagatgatc

SEQ ID NO: 26129 - DNA, 110 bp, synthetic construct
  source 1..110: mol_type = other DNA
gtctttggccctgtctgaagtgcagcaacatatgtttaatacattttaaagaaagttcttaaatgccacgaaaaacacagcccgtctgcgctcatccggtggttccgaga

SEQ ID NO: 26130 - DNA, 110 bp, synthetic construct
  source 1..110: mol_type = other DNA
gatataatttgggcacatcatgaatatgaacatttaaaataaaatgcagtaccttttcattttttgagacaagttcgatttcattgtattccaaaggccctcgatttaac

SEQ ID NO: 26131 - DNA, 110 bp, synthetic construct
  source 1..110: mol_type = other DNA
caggtcacaaaacagcattgaacactcccatttgaaagaagagcagaagtgtcatacgcacagaaagaaagcttagaaatacgtgggtcaatgtgcgtggacctctgggt

SEQ ID NO: 26132 - DNA, 110 bp, synthetic construct
  source 1..110: mol_type = other DNA
acgcacagaaagaaagcttagaaatacgtgggtcaatgtgcgtggacctctgggtgacggggtgatgggtgcttgtatctcctttttgccggcctgtattttcaagtttt

SEQ ID NO: 26133 - DNA, 110 bp, synthetic construct
  source 1..110: mol_type = other DNA
gggttgtggttctcaaccttctcttcatgggggcgtctgtacagaccgtgtcaatgctttgaaaaccgtccttccttattcgtggtctgccagagctcacgagtcagggg

SEQ ID NO: 26134 - DNA, 110 bp, synthetic construct
  source 1..110: mol_type = other DNA
caagagtgtcccccgaggtctcataattaccccgagaaagagcccacttactcccacactcagaagaaaggaagcctcgctctgttttaagcttgaggccgtgagactct

SEQ ID NO: 26135 - DNA, 110 bp, synthetic construct
  source 1..110: mol_type = other DNA
acactcagaagaaaggaagcctcgctctgttttaagcttgaggccgtgagactctgggatcatggcctcagaggagcctggagatgaaaggacctcagcagtgatccaac

SEQ ID NO: 26136 - DNA, 110 bp, synthetic construct
  source 1..110: mol_type = other DNA
cagagtcctggcttctgcaggcctcacctggcttctcatggaccatttgctccaggcctggggtgcaggaggaccttcccagctctcctccccctgcccccggctttgtc

SEQ ID NO: 26137 - DNA, 110 bp, synthetic construct
  source 1..110: mol_type = other DNA
agctgctgtccacgcgtaaccaccttcagagcccctgggagcagatgcagagctaacctccagccccaggtctgggacagtcgttgcttcctgtgtgttctgacagtcaa

SEQ ID NO: 26138 - DNA, 110 bp, synthetic construct
  source 1..110: mol_type = other DNA
acctccagccccaggtctgggacagtcgttgcttcctgtgtgttctgacagtcaaagctggcttatgtaggagttcccattgtggctcagcaataacaaacatgaacagc

SEQ ID NO: 26139 - DNA, 110 bp, synthetic construct
  source 1..110: mol_type = other DNA
gtccagtaggcccgagactcagctcctcagtatggctttgaaaggaactgaacacaatgcaccagggcgggggatcgggggtgtctgtggacaaagaggcaccagcaata

SEQ ID NO: 26140 - DNA, 110 bp, synthetic construct
  source 1..110: mol_type = other DNA
aatgcaccagggcgggggatcgggggtgtctgtggacaaagaggcaccagcaataaggatgctaggagattacaagctacgtgtgccatctgtcaatggggccaccatga

SEQ ID NO: 26141 - DNA, 110 bp, synthetic construct
  source 1..110: mol_type = other DNA
cctgggaggttggcgccttcgggacggcagggcgtttatgtctattcctctccatgagcccgctttcttctctttctttctctctcaagagcaccttcctgcttccgagc

SEQ ID NO: 26142 - DNA, 110 bp, synthetic construct
  source 1..110: mol_type = other DNA
gctcagatacaggagctctgaagaagcagtccattcacttgggtcaagctgggaagacaaagccaggggagcagaggcagctgcaagtcaggaaggaacgtggggtatca

SEQ ID NO: 26143 - DNA, 110 bp, synthetic construct
  source 1..110: mol_type = other DNA
gacaaagccaggggagcagaggcagctgcaagtcaggaaggaacgtggggtatcactttcactgttggtgtcagtggccgacgtggcttatccacctgggttcacttccc

SEQ ID NO: 26144 - DNA, 110 bp, synthetic construct
  source 1..110: mol_type = other DNA
tttttcctgtcttgttacataagcgtacttacatgagaaaatacgggacacgtattcttttgtgaatcccagccaggaaaaatttggtctcaattcaaggcccactgtgc

SEQ ID NO: 26145 - DNA, 110 bp, synthetic construct
  source 1..110: mol_type = other DNA
tcttttgtgaatcccagccaggaaaaatttggtctcaattcaaggcccactgtgcttccttccacctgtcagtggaaacctgtcctgtttccctttttgcattgtcttcc

SEQ ID NO: 26146 - DNA, 110 bp, synthetic construct
  source 1..110: mol_type = other DNA
aaaaggagaagagtcaagcaagacagaatactgatagtttagtcattcaacaatgctaagtcctttcagtcagctcttcttcaaagactgtggacgatactctgagccct

SEQ ID NO: 26147 - DNA, 110 bp, synthetic construct
  source 1..110: mol_type = other DNA
tggatgtgtctgggatgccgatttcacgcacttctccccgggtcctcaccacgctgctaagatggagtaactgcgtcacccacgtagcagagggggcagttctggctctg

SEQ ID NO: 26148 - DNA, 110 bp, synthetic construct
  source 1..110: mol_type = other DNA
gctaagatggagtaactgcgtcacccacgtagcagagggggcagttctggctctgagcagaaaaggctggaaacgtatctggaggcagagctcttgcaagtggcagagtc

SEQ ID NO: 26149 - DNA, 110 bp, synthetic construct
  source 1..110: mol_type = other DNA
cgatgagccacaggggaactgggagaagtgtctgttgaaggtcaatgtgcatatgcaccacgggagaattgcggaagaatccatatgaatctgaagttctagggtgcggc

SEQ ID NO: 26150 - DNA, 110 bp, synthetic construct
  source 1..110: mol_type = other DNA
caccacgggagaattgcggaagaatccatatgaatctgaagttctagggtgcggctacgctgggcttcaggtcacgagactgctgccggtctgggaaccccaccttcgcc

SEQ ID NO: 26151 - DNA, 110 bp, synthetic construct
  source 1..110: mol_type = other DNA
gctgcacatgagctattttcttcacgttccaccatttattttgtgcacaaacttgggtgctaggcaccggtaggatgggcatcattataaatgatgaaagcctttcccgg

SEQ ID NO: 26152 - DNA, 110 bp, synthetic construct
  source 1..110: mol_type = other DNA
cagggacttgagttagaggcaaagactcaagaacctgcagatctgaggagttcctcttgtggctcagtgggttaagaactggtcatagcgtccatgaggatgcaggtacg

SEQ ID NO: 26153 - DNA, 110 bp, synthetic construct
  source 1..110: mol_type = other DNA
gaggcaaagactcaagaacctgcagatctgaggagttcctcttgtggctcagtgggttaagaactggtcatagcgtccatgaggatgcaggtacgatccctggcctcact

SEQ ID NO: 26154 - DNA, 110 bp, synthetic construct
  source 1..110: mol_type = other DNA
aaacagaagcacgatttgcaatatttttccccctattcgtatctcagcagctccgatcgcatgaataaggtgtgaatgcatttgcagatttcccttcctgcctcacataa

SEQ ID NO: 26155 - DNA, 110 bp, synthetic construct
  source 1..110: mol_type = other DNA
gtgggaaagtgatacatggagagacccacgcggcacttgtttgcgcagtggaatgatgggaagtacaacatataaacaacattgtaaatcaaccatacttcaataaatat

SEQ ID NO: 26156 - DNA, 110 bp, synthetic construct
  source 1..110: mol_type = other DNA
ccacgcggcacttgtttgcgcagtggaatgatgggaagtacaacatataaacaacattgtaaatcaaccatacttcaataaatatgtaactttaaaaataaaaaaagaac

SEQ ID NO: 26157 - DNA, 110 bp, synthetic construct
  source 1..110: mol_type = other DNA
agattaagttcattgaggcccttttcccctccttttcatgacgaaagccctctctgcttcacgctgcacaggtaagctacgtacagggtcactgttgctgtcgggttttt

SEQ ID NO: 26158 - DNA, 110 bp, synthetic construct
  source 1..110: mol_type = other DNA
gcttcacgctgcacaggtaagctacgtacagggtcactgttgctgtcgggtttttgtccatggagggtttgggaaaatgcacactcaccccgagcactaagggtcagacg

SEQ ID NO: 26159 - DNA, 110 bp, synthetic construct
  source 1..110: mol_type = other DNA
aaagccttaatgtggttgtaaagtgttctaaattaaaaccaggcggaaaatgggctcttgagagaatgtgatgtatactattgcgggatgtttatttatcctgctgccag

SEQ ID NO: 26160 - DNA, 110 bp, synthetic construct
  source 1..110: mol_type = other DNA
tcttgagagaatgtgatgtatactattgcgggatgtttatttatcctgctgccagtgcctctgggcccccatataaggaactggcttctctcctgaatccctctgcagca

SEQ ID NO: 26161 - DNA, 110 bp, synthetic construct
  source 1..110: mol_type = other DNA
ttgcaagttcagagcagacccgaaagtcaggaagagagctccaggtgtacggcttgtcctgcagctccctttgtggtcctgcagcagagacgacgctgaggaagggcagc

SEQ ID NO: 26162 - DNA, 110 bp, synthetic construct
  source 1..110: mol_type = other DNA
gtcctgcagctccctttgtggtcctgcagcagagacgacgctgaggaagggcagctagttacaggagtagtcgtttctgctccgttcatgccagtgtttagaagtgggat

SEQ ID NO: 26163 - DNA, 110 bp, synthetic construct
  source 1..110: mol_type = other DNA
agctttccccagcagtttgttgatccagagcgcatgttttctccaccaccacaatgcagccctggttgtcacactagctctctgctaacgaggcccgagcctccggacgt

SEQ ID NO: 26164 - DNA, 110 bp, synthetic construct
  source 1..110: mol_type = other DNA
cgccgtttccctgtaaagagtctgtatctatggaaatagctctttcatagagcagtctggctgcccaggtccaatgccacttctagacttgatgccctttttggatctgt

SEQ ID NO: 26165 - DNA, 110 bp, synthetic construct
  source 1..110: mol_type = other DNA
cttcaggtcccgggggttcggtgcgctctcaaagacgttctcaacggtgtagtagatggcgctgcccaaggccctggtcccctgcagctgtgtcatccggctgctgagga

SEQ ID NO: 26166 - DNA, 110 bp, synthetic construct
  source 1..110: mol_type = other DNA
cctcggctttacaccagctgctgtcccgcggcttctcagacccgcctccccagtcactgtaccttcagctcccatccccccaacttctttccatgacaggcccctctggt

SEQ ID NO: 26167 - DNA, 110 bp, synthetic construct
  source 1..110: mol_type = other DNA
ttggtcttggtcttcccggcctccagaactgtaagaaatgaatgtctgtggtttataagccacccagttagtggcattttgttacagtagctcgaaaagactaaaacagt

SEQ ID NO: 26168 - DNA, 110 bp, synthetic construct
  source 1..110: mol_type = other DNA
taagccacccagttagtggcattttgttacagtagctcgaaaagactaaaacagtgattattaagaagtgtggctcatcaggccatctttgaaggttggcgaccacactc

SEQ ID NO: 26169 - DNA, 110 bp, synthetic construct
  source 1..110: mol_type = other DNA
tcaggaatgtgcccacacctctatcagcaagcgtcgcccacctgattctgagtcggggagattcctggcactgttttgaggcatttaaccaggaactttgaagagctctg

SEQ ID NO: 26170 - DNA, 110 bp, synthetic construct
  source 1..110: mol_type = other DNA
gggagattcctggcactgttttgaggcatttaaccaggaactttgaagagctctgatggcaatctgctcagacggtgactcctcgtcactgccattgttcccaggctcag

SEQ ID NO: 26171 - DNA, 110 bp, synthetic construct
  source 1..110: mol_type = other DNA
ccacccccctggctgctctctgctgtcgcccctgctggccctgtgctgactgctgtgaccaatagctttgcgctaaggacctctctggaggggacgcgtcctacaccctt

SEQ ID NO: 26172 - DNA, 110 bp, synthetic construct
  source 1..110: mol_type = other DNA
tgaccaatagctttgcgctaaggacctctctggaggggacgcgtcctacacccttgcaggctggggtccccagtctaacccagcccacagccttgcccaaaagttcctct

SEQ ID NO: 26173 - DNA, 110 bp, synthetic construct
  source 1..110: mol_type = other DNA
ggttgtgctgggattggcggaaaaggtggatctgatgctgcttagaatgaaagccggttgacacacgcagctcctaattctacgcctaaaacgatgacaagcttcctgtt

SEQ ID NO: 26174 - DNA, 110 bp, synthetic construct
  source 1..110: mol_type = other DNA
ggttgacacacgcagctcctaattctacgcctaaaacgatgacaagcttcctgttaagtgtccgtctttttggcgtaacctctccttgttcagaacgtgaagtccacgtg

SEQ ID NO: 26175 - DNA, 110 bp, synthetic construct
  source 1..110: mol_type = other DNA
ggagcggacaaggcgcacccaggcctggcccccaagcagacacccccacctcatcccaagtccatgcaacttcccaaccctcacagaacccctgaaagagggcggggtga

SEQ ID NO: 26176 - DNA, 110 bp, synthetic construct
  source 1..110: mol_type = other DNA
aaatattagtcaaaaggagaaagtaatagcatagatgcaagctcattgtttgtcgaagtgatacagagatgtttattcggccgcaatccttacggccagtgattcatgtt

SEQ ID NO: 26177 - DNA, 110 bp, synthetic construct
  source 1..110: mol_type = other DNA
ggcagggtttcattcatttttacgcccgaggcgtatcccgttgtttgtatgtacctcatcttctttatccagtcatctgtccatggacatttaggttgttcccgtgtctt

SEQ ID NO: 26178 - DNA, 110 bp, synthetic construct; identical to SEQ ID NO: 26177
  source 1..110: mol_type = other DNA

SEQ ID NO: 26179 - DNA, 110 bp, synthetic construct
  source 1..110: mol_type = other DNA
aaagtgacagcagggggaagccggcttgccttctcttgcgaaatcctcagcctgggcggtcagtgtccttatttcgtggtgctgatgacaggctacgtaacccgaaccag

SEQ ID NO: 26180 - DNA, 110 bp, synthetic construct
  source 1..110: mol_type = other DNA
gcggtcagtgtccttatttcgtggtgctgatgacaggctacgtaacccgaaccaggtctcgtggccgataagaggcggaccctggactcagacctttctacctcccgtca

SEQ ID NO: 26181 - DNA, 110 bp, synthetic construct
  source 1..110: mol_type = other DNA
cttttacagggagtcacagggcgtcttctagaaagtccagagaaatgaggtcgcgtaattaaaaaggccttgcaagctgtggcgacgtggtactgggtggtttggtccag

SEQ ID NO: 26182 - DNA, 110 bp, synthetic construct
  source 1..110: mol_type = other DNA
agctgttgaaggtaccacgtgctcttttaagctccctaatgaaaacgtgggctttcactccctccccctgaatctgggctgacctttccatcttctttgacaagttgcgc

SEQ ID NO: 26183 - DNA, 110 bp, synthetic construct
  source 1..110: mol_type = other DNA
gggccagccaggcacccggcaggcagggaccggggagctggggcttccaggaaatcacaggacccctggtcaaattcagggtcggataaacgacacactgtcttcgtctc

SEQ ID NO: 26184 - DNA, 110 bp, synthetic construct
  source 1..110: mol_type = other DNA
cacaggacccctggtcaaattcagggtcggataaacgacacactgtcttcgtctcaagcagggtctgggacagacttatatcaacaaatttttctgttagtctgacattc

SEQ ID NO: 26185 - DNA, 110 bp, synthetic construct
  source 1..110: mol_type = other DNA
ctaagtggctcccagagttgcagacgcatcagcctcatcatgcattggccatcatgcgctgagccttactgtgcacctgcgcctactgtgcacccgagccctactgtgca

SEQ ID NO: 26186 - DNA, 110 bp, synthetic construct
  source 1..110: mol_type = other DNA
atgacctgtgtgtgaaagtgtgcaaaaactgggtcttgactttaaaagcaaaaccctcttttgctggatgaggtgttcttgtggctgtgtgaacatctgacacgaggtct

SEQ ID NO: 26187 - DNA, 110 bp, synthetic construct
  source 1..110: mol_type = other DNA
atggtggcttttgccccagccaagttccagatcaggagaaatgaagataagtcgttggagctggtctttcggaagcagttgccagacaggtcaaataatgacggttcttt

SEQ ID NO: 26188 - DNA, 110 bp, synthetic construct
  source 1..110: mol_type = other DNA
cttttaaaaaacatcttgtaaatgtctgccccttaagtatagaaactttaaaaaactgcagacttcagttccagattttaagcggttgctggtccagccttgtctcccca

SEQ ID NO: 26189 - DNA, 110 bp, synthetic construct
  source 1..110: mol_type = other DNA
ctgcagacttcagttccagattttaagcggttgctggtccagccttgtctccccaggctctcacctgcacgcacctcttctcctgcgggctcgtggctccgcctcctgtc

SEQ ID NO: 26190 - DNA, 110 bp, synthetic construct
  source 1..110: mol_type = other DNA
actatcatatgatccagcagtcctattccagggcatatgtccaggagaaaggaaaacactgattcgaagagacacatgctcctcagtggtcatagcagcactgtttacag

SEQ ID NO: 26191 - DNA, 110 bp, synthetic construct
  source 1..110: mol_type = other DNA
ttccagggcatatgtccaggagaaaggaaaacactgattcgaagagacacatgctcctcagtggtcatagcagcactgtttacagaagccaagacagggaaacaacctaa

SEQ ID NO: 26192 - DNA, 110 bp, synthetic construct
  source 1..110: mol_type = other DNA
agcactcggtctagagcagctctgtcaatgcagtaatgccgagggggctatttcatttaggcgaaataaaagtaaccccccatgggagttccctggtggtctagtggtta

SEQ ID NO: 26193 - DNA, 110 bp, synthetic construct
  source 1..110: mol_type = other DNA
aggaaacgtgcccgctgcccaggccccagctgcagaccgaggcacgcggggacacctggcgaaggccgagtacatgtgggacgtcacacgcctaacagcacttaattatt

SEQ ID NO: 26194 - DNA, 110 bp, synthetic construct
  source 1..110: mol_type = other DNA
ctggcgaaggccgagtacatgtgggacgtcacacgcctaacagcacttaattattctaatgattaccgagaccctaagtaacaactaaccctaattctttctttcttagg

SEQ ID NO: 26195 - DNA, 110 bp, synthetic construct
  source 1..110: mol_type = other DNA
gaacacggaacacctgcttagagagcatgtggtcaccggccggggctctgcggaggggggagcttctgagaggggtttgctacgaaattcaaatcttctcctccctgtcg

SEQ ID NO: 26196 - DNA, 110 bp, synthetic construct
  source 1..110: mol_type = other DNA
gggggagcttctgagaggggtttgctacgaaattcaaatcttctcctccctgtcgggcaaaatttatttttaaaaaatattttcttgacagccacttaatatggacattt

SEQ ID NO: 26197 - DNA, 110 bp, synthetic construct
  source 1..110: mol_type = other DNA
ctccctgtcctcccgcagaaccgtgtccacgtttcttcgcaaaacattgagaaataggtgagcttcaggacgctgcctttctaccaacccttccagtgttaatcgtggga

SEQ ID NO: 26198 - DNA, 110 bp, synthetic construct
  source 1..110: mol_type = other DNA
ccaaggaattgaggtttccatccagttaaggtttcatcagcttctctaacttcttttcactatttcaggatggagttttagaaaatcaacacaatctagcctctaatttg

SEQ ID NO: 26199 - DNA, 110 bp, synthetic construct
  source 1..110: mol_type = other DNA
gaccgtctcatgaaaagggaacttaatgaaatgcacaactgggcaatatggacggtaagttaaccagggctagagctatgcccggcggctccatggaggaggcagcacct

SEQ ID NO: 26200 - DNA, 110 bp, synthetic construct
  source 1..110: mol_type = other DNA
taagttaaccagggctagagctatgcccggcggctccatggaggaggcagcacctgaagactgggaaaggtgttggggacctaggctgtggccatttgttctttcagtaa

SEQ ID NO: 26201 - DNA, 110 bp, synthetic construct
  source 1..110: mol_type = other DNA
tgacgcagggtggacagcaggagcgtcctgccctgagacagggacggcctcgcacttaaaccgagtggagctcatcagggacggtacgaaaagtggaagctgcagccgaa

SEQ ID NO: 26202 - DNA, 110 bp, synthetic construct
  source 1..110: mol_type = other DNA
ttattcttcttaaatgcgccgtaatttaagatacggtgttggtttggagaacgttggaggcagtgcttttctaccctacctccatcctttcatccgtgctattggctgga

SEQ ID NO: 26203 - DNA, 110 bp, synthetic construct
  source 1..110: mol_type = other DNA
ttggttaatttagctctgatgctggtgcgtgcagcgtgccacggatgaccagcgtctcatttcccactgccgggagctcagccctgtgtacacttgatgtcacaacaggt

SEQ ID NO: 26204 - DNA, 110 bp, synthetic construct
  source 1..110: mol_type = other DNA
tccacccagctctggagactcctgggaaagaaatcccatcttgtcagaggttcaggaaggacccatgggcatcaaccgatggtccctcagaaccctgcagggcgccagtg

SEQ ID NO: 26205 - DNA, 110 bp, synthetic construct
  source 1..110: mol_type = other DNA
gaaggacccatgggcatcaaccgatggtccctcagaaccctgcagggcgccagtgagtctcatggccttgaaaaccctcttagactcaggagactttggtggcgcgtctg

SEQ ID NO: 26206 - DNA, 110 bp, synthetic construct
  source 1..110: mol_type = other DNA
agtttctttttatgtttagcttttccatctatttggaatttatttggggatatggtttggagtgaggctctaagtgaatttttttcccgaaaagtcagattttcaaacac

SEQ ID NO: 26207 - DNA, 110 bp, synthetic construct
  source 1..110: mol_type = other DNA
tttggagtgaggctctaagtgaatttttttcccgaaaagtcagattttcaaacaccacgaagtgcattagtgggacaggccatcatctctggcgccatcgctagtgttct

SEQ ID NO: 26208 - DNA, 110 bp, synthetic construct
  source 1..110: mol_type = other DNA
gcaggtagtggccttggtgtatcgaggcctgaccgcaggtgctaggttctaccagaactggcagggtttggccccttcctgctgccttgttcactttgtttccaatatta

SEQ ID NO: 26209 - DNA, 110 bp, synthetic construct
  source 1..110: mol_type = other DNA
aactggcagggtttggccccttcctgctgccttgttcactttgtttccaatattagcagtggaacaggaggtctgttataaaaacccttgctgagcctctggtgcctggg

SEQ ID NO: 26210 - DNA, 110 bp, synthetic construct
  source 1..110: mol_type = other DNA
acaattgttcgtagttatgctctttctatattccttttgtgttcctatatttctgttttctctctctcatctagctggacatttattttacaattctgctttttcttgac

SEQ ID NO: 26211 - DNA, 110 bp, synthetic construct; identical to SEQ ID NO: 26210
  source 1..110: mol_type = other DNA

SEQ ID NO: 26212 - DNA, 110 bp, synthetic construct
  source 1..110: mol_type = other DNA
tcaatccgtccttcacggtcagggctttgcgtgggctgtgtgggaaacatttgccggctacagtctcacgccaccttctctttggagctgcctgaaggcttgtcgggttt

SEQ ID NO: 26213 - DNA, 110 bp, synthetic construct
  source 1..110: mol_type = other DNA
ggctacagtctcacgccaccttctctttggagctgcctgaaggcttgtcgggtttcacaggttcatctcccacctctccagaccatgtcccagtatgatgggaggttcag

SEQ ID NO: 26214 - DNA, 110 bp, synthetic construct
  source 1..110: mol_type = other DNA
ctacatccttatcagctctgagtgccatgcctacatccttatcagttctgagtgccgtgcctacatccttatcagctctgataagaaatgacctactcagtgtgaaagtc

SEQ ID NO: 26215 - DNA, 110 bp, synthetic construct
  source 1..110: mol_type = other DNA
cgtgcctacatccttatcagctctgataagaaatgacctactcagtgtgaaagtcgggggacgccctctaccttgcctttcacagaaaaggtggagaagaggctcatccc

SEQ ID NO: 26216 - DNA, 110 bp, synthetic construct
  source 1..110: mol_type = other DNA
gaactggactttgtttttgagtttttcattttaaaatattttccttctaattcatgagttatgccattttaacttattgctacgactgaactctgaactctccaactgtc

SEQ ID NO: 26217 - DNA, 110 bp, synthetic construct
  source 1..110: mol_type = other DNA
gagttatgccattttaacttattgctacgactgaactctgaactctccaactgtcacagtatttagtgtatatttatcatattaagtatgttatttttacttgagttcct

SEQ ID NO: 26218 - DNA, 110 bp, synthetic construct
  source 1..110: mol_type = other DNA
ggctggatttttcattcttcagcgtcctgtcctcccgcgccctctcgatgggcctctcctggaagctcacggtacgggagcttctctttgtatgcgcatagttctttcag

SEQ ID NO: 26219 - DNA, 110 bp, synthetic construct
  source 1..110: mol_type = other DNA
tggtggtgaaacccgcagagcgtggctcaggccccaccccgccccatgccagctgtgaattcctgggcacgcagctgtctccgggcatcagttttctcctgcggagaatg

SEQ ID NO: 26220 - DNA, 110 bp, synthetic construct
  source 1..110: mol_type = other DNA
tgaattcctgggcacgcagctgtctccgggcatcagttttctcctgcggagaatggagaccagttcacgcaacacacacgtggatgaagtgagtcaaccaatgcgaaaca

SEQ ID NO: 26221 - DNA, 110 bp, synthetic construct
  source 1..110: mol_type = other DNA
gaaggtgtccagctccggggactgccttcgcgctgtcctgtgggttggtgccagtcagcaggggccgttccagtttgatgctattgagggtgatacgaattcaccatcga

SEQ ID NO: 26222 - DNA, 110 bp, synthetic construct
  source 1..110: mol_type = other DNA
cagcaggggccgttccagtttgatgctattgagggtgatacgaattcaccatcgaggtctccaaggatcctgcaaaccatgtcgaatgccctgctgcgtagccgtgggga

SEQ ID NO: 26223 - DNA, 110 bp, synthetic construct
  source 1..110: mol_type = other DNA
tgttgggttttacaacagttttgtagtccaggatgtggccacctgtctcctttactctgctaatgaatttctacattaaactctacctcattgagataaacctacgtggt

SEQ ID NO: 26224 - DNA, 110 bp, synthetic construct
  source 1..110: mol_type = other DNA
tctgctaatgaatttctacattaaactctacctcattgagataaacctacgtggtcttcctgctttagaacagtgactcctaatgaccctgtccagacctgggggtctct

SEQ ID NO: 26225 - DNA, 110 bp, synthetic construct
  source 1..110: mol_type = other DNA
tggtcccgccaacgcaggttagttaatcttgaatcattttaatctgctcagcgaaacatttccacctttgggatttggatgattcataaaagagacagagctcccccctc

SEQ ID NO: 26226 - DNA, 110 bp, synthetic construct
  source 1..110: mol_type = other DNA
acctggggcgcctccaggccccggcgcacgtgccctcatggttccgcagagacgggctttcaattgttttaatgacgttcttgtcacaaaaacgctgtcttcgggcagga

SEQ ID NO: 26227 - DNA, 110 bp, synthetic construct
  source 1..110: mol_type = other DNA
gcagcccgcgggcgggttatttccagtcccatccgtccatccattcgtccaaacactgaatcaaacacaccagatgcctttagcgagctttctgtggatggacggttaga

SEQ ID NO: 26228 - DNA, 110 bp, synthetic construct
  source 1..110: mol_type = other DNA
taatggtagaaacacagaattggtgccctcacactacaaacatcactgagcagtataaaatccagcttccaggagtttccgctacggcacagcagattaaggatctggcg

SEQ ID NO: 26229 - DNA, 110 bp, synthetic construct
  source 1..110: mol_type = other DNA
taaaatccagcttccaggagtttccgctacggcacagcagattaaggatctggcgttgcagcagctgtggcgcaggtcgcggctccagcctggcttcagttgctggcctg

SEQ ID NO: 26230 - DNA, 110 bp, synthetic construct
  source 1..110: mol_type = other DNA
atcctccctcacattctatcataagaggctggatgtagttccctgggctgtcccgtagaacacgttgggtttttggtttttttttttcctgaagaggggaaggaggcggg

SEQ ID NO: 26231 - DNA, 110 bp, synthetic construct
  source 1..110: mol_type = other DNA
gcacaccagcaaacagaaacaagctttgaaagaagctgccgtttacagtaacacccaacactggcagatacccagggctaaagctaccaaaagagaactttacacattaa

SEQ ID NO: 26232 - DNA, 110 bp, synthetic construct
  source 1..110: mol_type = other DNA
caacactggcagatacccagggctaaagctaccaaaagagaactttacacattaaactatgaaacgtcataaggaaaggtaaagatggaaacgaacggaggaatgagtca

SEQ ID NO: 26233 - DNA, 110 bp, synthetic construct
  source 1..110: mol_type = other DNA
ggtcggcgggctgggctcggctccggctgctttggggcccacatctcacctcctccgaggcagaatttttttggcagcacccggagcccatggacgtttccaggccaggg

SEQ ID NO: 26234 - DNA, 110 bp, synthetic construct
  source 1..110: mol_type = other DNA
cgaggcagaatttttttggcagcacccggagcccatggacgtttccaggccagggactgaacccgtgccacaacggcaacccaagctgctgcaatgatgccagatcctta

SEQ ID NO: 26235 - DNA, 110 bp, synthetic construct
  source 1..110: mol_type = other DNA
ctggccccgggagcgtccatatgccatgggtgtggccgtgcaaagaaaaaagacatctcggatgcaaagaggcgcctgtgccataagaggggacgcatctaaagggaact

SEQ ID NO: 26236 - DNA, 110 bp, synthetic construct
  source 1..110: mol_type = other DNA
tctcggatgcaaagaggcgcctgtgccataagaggggacgcatctaaagggaacttgtccttggtcccaggcctgggtgttaagaggggcttctgctgtgctgcgtatct

SEQ ID NO: 26237 - DNA, 110 bp, synthetic construct
  source 1..110: mol_type = other DNA
gaggctttgacgagccctgagatggggcagaaagcaccagcctgtaaaccacagcagctccttcagaagaagcaaaatggcatagagctcacagagcaccgttaaaaggg

SEQ ID NO: 26238 - DNA, 110 bp, synthetic construct
  source 1..110: mol_type = other DNA
agctccttcagaagaagcaaaatggcatagagctcacagagcaccgttaaaagggcttttctggagttgcaaaaataacccagatgggaaaaagcagggtccctctttta

SEQ ID NO: 26239 - DNA, 110 bp, synthetic construct
  source 1..110: mol_type = other DNA
cccgtcatgtcttgaaccggaattacggcaaagccgacccagctctgccctgcctcacctataccccgtcactctcctttccatagaatcacaccgttcacatgggaagg

SEQ ID NO: 26240 - DNA, 110 bp, synthetic construct
  source 1..110: mol_type = other DNA
ctcattgctccgaaaactgggaaatccaggataaaaacaaagcatccacctgccttctcccggcaaaccagccctcagggcaaccaaccagttattgaagggacgtttgt

SEQ ID NO: 26241 - DNA, 110 bp, synthetic construct
  source 1..110: mol_type = other DNA
tctcccggcaaaccagccctcagggcaaccaaccagttattgaagggacgtttgtctttgtggacatgagcagctgataaataaagacgtagaggtggaattgaaacttt

SEQ ID NO: 26242 - DNA, 110 bp, synthetic construct
  source 1..110: mol_type = other DNA
gccaccccaagcccggaggaccagccgtgcaggggtacaaacgcctacatgtatcccccaatctcacttgggtttaaaaatacagaaacgcggagctccctggtggtgca

SEQ ID NO: 26243 - DNA, 110 bp, synthetic construct
  source 1..110: mol_type = other DNA
ccccaatctcacttgggtttaaaaatacagaaacgcggagctccctggtggtgcagtgggttaaggatccagtgttgttgctgctgtggctcatgttccatccctggccc

SEQ ID NO: 26244 - DNA, 110 bp, synthetic construct
  source 1..110: mol_type = other DNA
acccggccccctgcccagctggcaccagactccactttagggctgccctgtcacggctgctttgagctcccgaggtctctggcaaacacaggaacctctgagacacttgg

SEQ ID NO: 26245 - DNA, 110 bp, synthetic construct
  source 1..110: mol_type = other DNA
gctgctttgagctcccgaggtctctggcaaacacaggaacctctgagacacttggggccttctttgcgagtgcacactagccacacaagtcatagcggcttgcgactttc

SEQ ID NO: 26246 - DNA, 110 bp, synthetic construct
  source 1..110: mol_type = other DNA
gtgccgcggtgtataaaaggaacacacgagacactgaggacacgtcccagcacgtgtccccgggccctcggaggaattcccggtgaaaaggagagaggccacagctgtgg

SEQ ID NO: 26247 - DNA, 110 bp, synthetic construct
  source 1..110: mol_type = other DNA
ggggtgaacagctacacaaagtgtggggcgttcataccacggaacactggtcagcagtaaaagctgatgaactgttgatccatgcagcagcctggcggacctccgaagaa

SEQ ID NO: 26248 - DNA, 110 bp, synthetic construct
  source 1..110: mol_type = other DNA
agtaaaagctgatgaactgttgatccatgcagcagcctggcggacctccgaagaattacgctgaatggaaaaagccaacctcaaaagattgcatacagtctaattctgct

SEQ ID NO: 26249 - DNA, 110 bp, synthetic construct
  source 1..110: mol_type = other DNA
catgacacgtgatctctgacttcagccaacagcctgtgacagctgtgtccttcgtactggagccgctcccatcccactgagactgggacaaagaccagtcctctttaaaa

SEQ ID NO: 26250 - DNA, 110 bp, synthetic construct
  source 1..110: mol_type = other DNA
actggagccgctcccatcccactgagactgggacaaagaccagtcctctttaaaaccacccctgtctactgctgactacagacacggataaggaggcagaccaaagggtc

SEQ ID NO: 26251 - DNA, 110 bp, synthetic construct
  source 1..110: mol_type = other DNA
ggagcagcattacagagctccagggacctgagatctgagctgcttcttgagatgcctgggagatgccctcatcctttgcaccacagcgtgcaggtctctgggtaactgag

SEQ ID NO: 26252 - DNA, 110 bp, synthetic construct
  source 1..110: mol_type = other DNA
ctgggagatgccctcatcctttgcaccacagcgtgcaggtctctgggtaactgagggttttcctcgctttccatccacagtcctattttctgtgccacaagagttccctt

SEQ ID NO: 26253 - DNA, 110 bp, synthetic construct
  source 1..110: mol_type = other DNA
tgtctaaccttccttcggagttgtcccggccaagcatgcaccctgagtgtcatggttgtttctccagctcttttcaaggttgtctaagtaggatcctctagtacatgttc

SEQ ID NO: 26254 - DNA, 110 bp, synthetic construct
  source 1..110: mol_type = other DNA
tctgggggatacttctgagggttacttatgagaatccagtcaaagtactgactgcagctgcagtcaatggaaagatccatttctaagctctccgtgtggctgtggacaga

SEQ ID NO: 26255 - DNA, 110 bp, synthetic construct
  source 1..110: mol_type = other DNA
tgcagggggtgggggagacggcacttgcaggaattactgtgaagggctgctcagtcttcgttcctaggttcccccctccccttttcaataaacacctgccactgccccca

SEQ ID NO: 26256 - DNA, 110 bp, synthetic construct
  source 1..110: mol_type = other DNA
cttcgttcctaggttcccccctccccttttcaataaacacctgccactgcccccagtggcaccacttctgtgtaaacctcgagaagagggctcagcgccctactggccgt

SEQ ID NO: 26257 - DNA, 110 bp, synthetic construct
  source 1..110: mol_type = other DNA
cactccagttttgattctctcttcctctatttacactgagtgagttcactcttttcctcagatggaagctgcagccattgctatgaggcctttctgcttttctctttagt

SEQ ID NO: 26258 - DNA, 110 bp, synthetic construct
  source 1..110: mol_type = other DNA
cctcagatggaagctgcagccattgctatgaggcctttctgcttttctctttagttctaaagaggtactgttctcttccaccctacaacttaacccactgtgccacagcg

SEQ ID NO: 26259 - DNA, 110 bp, synthetic construct
  source 1..110: mol_type = other DNA
gaaaagggctcatgactttgccttgttccagagccagagctaagaaggatcccagcctgtttttaccagcccagggctaccaggagtgctgagtggaggcagcattttca

SEQ ID NO: 26260 - DNA, 110 bp, synthetic construct
  source 1..110: mol_type = other DNA
cctgtttttaccagcccagggctaccaggagtgctgagtggaggcagcattttcagaactggaattgattggtgatgccctgggttgatgagtgatgtctggcacaggca

SEQ ID NO: 26261 - DNA, 110 bp, synthetic construct
  source 1..110: mol_type = other DNA
caggaaatgcccaccgtttctgggcctccagccttcgtgtggtccctggtgctcggggtttccatgtccgggaccgatggactgggagggtggtgtgaaacgaaatctgt

SEQ ID NO: 26262 - DNA, 110 bp, synthetic construct
  source 1..110: mol_type = other DNA
gacacagtggggaaagaatccgtctccatcagctctcgtgttcaaattgattcgttgtagaaatgatggtctcgggggcatgttcagttcaataaaacattaaaatcgga

SEQ ID NO: 26263 - DNA, 110 bp, synthetic construct
  source 1..110: mol_type = other DNA
atctgtttgaaaagaaaaagggatgagattgtcctgacatgattcaagcctaatagtaaggatttttgatcaatctcttttcgatctgcattcctgtcttttatgctaaa

SEQ ID NO: 26264 - DNA, 110 bp, synthetic construct
  source 1..110: mol_type = other DNA
gtaaggatttttgatcaatctcttttcgatctgcattcctgtcttttatgctaaaaatctcggctcctatttactaagctactgtttgtgtttttctacaagagaaatat

SEQ ID NO: 26265 - DNA, 110 bp, synthetic construct
  source 1..110: mol_type = other DNA
tccgccagggagcccccgagacgagacgaatgtgcttggccgggggcagggggctcaggcaggcttctccccacaccccgcgtgaaagggcggcccgatttagctgcaaa

SEQ ID NO: 26266 - DNA, 110 bp, synthetic construct
  source 1..110: mol_type = other DNA
caggcaggcttctccccacaccccgcgtgaaagggcggcccgatttagctgcaaaaccactggtgacccagttaaattggcatttcagatacttaataattgtgtagcat

SEQ ID NO: 26267 - DNA, 110 bp, synthetic construct
  source 1..110: mol_type = other DNA
tgacgtctgacgagggacgcagcaggacacagagctgggatgagggccgaatcctcgcccttggctgcagttaacagctcgcatcatgctcactgcatccacgctccact

SEQ ID NO: 26268 - DNA, 110 bp, synthetic construct
  source 1..110: mol_type = other DNA
cgcccttggctgcagttaacagctcgcatcatgctcactgcatccacgctccactgcggtggggcctgcgtgggctcctgtccgctcctgaagaccaccgggggtctcca

SEQ ID NO: 26269 - DNA, 110 bp, synthetic construct
  source 1..110: mol_type = other DNA
cactggtgctctttgtgggcccaccctgctggaagatgcctggggacccggtggctagagctgggccacctgggggacagccgccacggggtcaccgcgatcgtcccatt

SEQ ID NO: 26270 - DNA, 110 bp, synthetic construct
  source 1..110: mol_type = other DNA
tagagctgggccacctgggggacagccgccacggggtcaccgcgatcgtcccattaaacctccactctgcaaactacctgccggcctctccgcccgcctctcgtcctttg

SEQ ID NO: 26271 - DNA, 110 bp, synthetic construct
  source 1..110: mol_type = other DNA
gcaggattgagaagtttgaaaacagcccgcaggcctgccaagcctgagatgttggctctctggggcaccaagaaaaacgtcacggcccctgagctcagcaagaggcactg

SEQ ID NO: 26272 - DNA, 110 bp, synthetic construct
  source 1..110: mol_type = other DNA
ctctctggggcaccaagaaaaacgtcacggcccctgagctcagcaagaggcactgggctgggcatccacctgggacggcaacacggagccaggaggagggggcgaagggc

SEQ ID NO: 26273 - DNA, 110 bp, synthetic construct
  source 1..110: mol_type = other DNA
ctggggcgtaagggttagtctgcccgctgggggttgcagggcagagcctcgagcaggtgtgcggtgcaggtgtttgccgatattccagccacccagggagagggggcgtg

SEQ ID NO: 26274 - DNA, 110 bp, synthetic construct
  source 1..110: mol_type = other DNA
gctgggggttgcagggcagagcctcgagcaggtgtgcggtgcaggtgtttgccgatattccagccacccagggagagggggcgtggggtcgacctgcgtggtcagcggga

SEQ ID NO: 26275 - DNA, 110 bp, synthetic construct
  source 1..110: mol_type = other DNA
cagccgcctggactgccctcggaccaactcacggccaacttgcagagccgtccttagcctgccaacccctcccccaaggactttcccgaaaccacaggacaacgtcaggg

SEQ ID NO: 26276 - DNA, 110 bp, synthetic construct
  source 1..110: mol_type = other DNA
agcctgccaacccctcccccaaggactttcccgaaaccacaggacaacgtcaggggccgaaggtcacaagccgtctctgcactcagcccatcccagctgcacgtgcagcg

SEQ ID NO: 26277 - DNA, 110 bp, synthetic construct
  source 1..110: mol_type = other DNA
tgctcgggggccggggggggcggtaccaagaccctcacgactgcagctcagtccagcctctagacgagggaaaagccaacaaaaacttgtggggggcccgagagcccggc

SEQ ID NO: 26278 - DNA, 110 bp, synthetic construct
  source 1..110: mol_type = other DNA
gcctctagacgagggaaaagccaacaaaaacttgtggggggcccgagagcccggcgtgaggaaccaagacctgggccgcgggcacgcgggagggccccggctccccgaag

SEQ ID NO: 26279 - DNA, 110 bp, synthetic construct
  source 1..110: mol_type = other DNA
ctgtgttttgctcgtttattttagtttctggccacaatcgcagcagggaagtttcctggaccagggatcaaaccctcgccacacaagtgaccacgctgggtacttaaccc

SEQ ID NO: 26280 - DNA, 110 bp, synthetic construct
  source 1..110: mol_type = other DNA
ccagaggaaaatccccagtgcattattttgcctccccaaaataatgagtgcatgctgcagagaagagattaccaactataagtcagtttacaaacacgtaaaattttaaa

SEQ ID NO: 26281 - DNA, 110 bp, synthetic construct
  source 1..110: mol_type = other DNA
tgcagagaagagattaccaactataagtcagtttacaaacacgtaaaattttaaacaaaatatcagcacgggagttccgtcacagcacagcagaaacaaatccgacaagg

SEQ ID NO: 26282 - DNA, 110 bp, synthetic construct
  source 1..110: mol_type = other DNA
gttttctgcccactgagtgacttgaagttgctggaccggacaccccgccaatcatgtatatcagggtctgtgtcttcacttctgactctgttccgctgattggcctgcgt

SEQ ID NO: 26283 - DNA, 110 bp, synthetic construct
  source 1..110: mol_type = other DNA
aacagaggcctgtggggcctcacagcacctggtcccggccgtggagggagcaaagcatgtccacacacgtgactgcatgttcgtgttcacgtgcttggtgtgtccgtgtg

SEQ ID NO: 26284 - DNA, 110 bp, synthetic construct
  source 1..110: mol_type = other DNA
catgtccacacacgtgactgcatgttcgtgttcacgtgcttggtgtgtccgtgtgcaggggtgcatgagcacacaggtgtgcatctgaaggtggctgctcacacaccctg

SEQ ID NO: 26285 - DNA, 110 bp, synthetic construct
  source 1..110: mol_type = other DNA
gccctgctgctccggttcccgctgtgtgttcacgaggcgcttccaaaccctcacacatgctcccccgggtcagcagtccctcatcacgctgcctgcagcttggtttaagc

SEQ ID NO: 26286 - DNA, 110 bp, synthetic construct
  source 1..110: mol_type = other DNA
catgctcccccgggtcagcagtccctcatcacgctgcctgcagcttggtttaagctggaactccatccagatggggactgtgtgtgtctcacttccagaacggcgtctgg

SEQ ID NO: 26287 - DNA, 110 bp, synthetic construct
  source 1..110: mol_type = other DNA
gttgagagcttttgagagctggtgataaacacttagaaaagagagcccaagtggtctgtttcggtgaagggatccttgaattgttaattcctaaaataacacattgcctg

SEQ ID NO: 26288 - DNA, 110 bp, synthetic construct
  source 1..110: mol_type = other DNA
ctgtttcggtgaagggatccttgaattgttaattcctaaaataacacattgcctgtatattcagttgcttcctttctgttcaccaggagaatggaattctagttattttc

SEQ ID NO: 26289 - DNA, 110 bp, synthetic construct
  source 1..110: mol_type = other DNA
cgtggtggcagcctagccagcagccgactcttaccttccttattgcaagctgatatcaaggaaagacttcttgcatttcaccagttctgattggacaacatggtcatctc

SEQ ID NO: 26290 - DNA, 110 bp, synthetic construct
  source 1..110: mol_type = other DNA
tcaaggaaagacttcttgcatttcaccagttctgattggacaacatggtcatctcccaaacaatcatagtgcctagggagatactatactctgattggtcagatctgaga

SEQ ID NO: 26291 - DNA, 110 bp, synthetic construct
  source 1..110: mol_type = other DNA
tctgtgctaggtaaacaagaggcaggcgacacatgttcattaaatcactattgctaaatgaaataagcctctaaggttcaggggagcttttagcaatgctgctatggttt

SEQ ID NO: 26292 - DNA, 110 bp, synthetic construct
  source 1..110: mol_type = other DNA
aaatgaaataagcctctaaggttcaggggagcttttagcaatgctgctatggttttctttggctgctgtgaacaaaatgctatgacctcacacttccatttgcttcaggc

SEQ ID NO: 26293 - DNA, 110 bp, synthetic construct
  source 1..110: mol_type = other DNA
gacgacaggactctggccaccgaacccctttccccagcctgggtctacctagctctgtcggttccctgacctaaaggcttccttctctctcaccaaagcaaaccataagt

SEQ ID NO: 26294 - DNA, 110 bp, synthetic construct
  source 1..110: mol_type = other DNA
tgtcggttccctgacctaaaggcttccttctctctcaccaaagcaaaccataagtgcagtattcttgctaaaagttcagcagattactgaaagacatactcagtctatag

SEQ ID NO: 26295 - DNA, 110 bp, synthetic construct
  source 1..110: mol_type = other DNA
aagtcatggcttctaagtccctaattagaaaacacgaatgttttgtagatatagatttagaatggacaagcaacgaggtcctgttgtacagcacagggaactatatccag

SEQ ID NO: 26296 - DNA, 110 bp, synthetic construct
  source 1..110: mol_type = other DNA
agtccctaattagaaaacacgaatgttttgtagatatagatttagaatggacaagcaacgaggtcctgttgtacagcacagggaactatatccagcctcttgggatagaa

SEQ ID NO: 26297 - DNA, 110 bp, synthetic construct
  source 1..110: mol_type = other DNA
gttgattttctgccccacacctgcccagggggctttaaggctatgagagcagctatcttgtctgatttgttcaaaactgaatccccagggctgagaggatacctggcaca

SEQ ID NO: 26298 - DNA, 110 bp, synthetic construct
  source 1..110: mol_type = other DNA
tcttgtctgatttgttcaaaactgaatccccagggctgagaggatacctggcacatgatccatattattttttgacagaatgcaattttgaccatgaactctgaaatttt

SEQ ID NO: 26299 - DNA, 110 bp, synthetic construct
  source 1..110: mol_type = other DNA
cacgaccgagtttggggcccatcccacaaaggattttatgttgaaaattctcctcttttatttgcaagcgaattcacaaggcagcaatggctcttgagtggtagaaaagt

SEQ ID NO: 26300 - DNA, 110 bp, synthetic construct
  source 1..110: mol_type = other DNA
ttttatttgcaagcgaattcacaaggcagcaatggctcttgagtggtagaaaagtaacacgtggtttcaggcttctacattgccacttagatgtgaagagcgcctggcac

SEQ ID NO: 26301 - DNA, 110 bp, synthetic construct
  source 1..110: mol_type = other DNA
gaataaataagtgaagcattttcttttcttttcttttaaccttatggccatacccatggcatataaaagtacctgggccaggaactgaatcagagttacagctgtgacct

SEQ ID NO: 26302 - DNA, 110 bp, synthetic construct
  source 1..110: mol_type = other DNA
gcattttcttttcttttcttttaaccttatggccatacccatggcatataaaagtacctgggccaggaactgaatcagagttacagctgtgacctacaccacagctgcag

SEQ ID NO: 26303 - DNA, 110 bp, synthetic construct
  source 1..110: mol_type = other DNA
ctcagaattaagaagaggcagagctggggttccaactcaagccgcttggtgtgggggggatcttcttaagtgtcccctgcctccctggaagacggaaacactgaccatcc

SEQ ID NO: 26304 - DNA, 110 bp, synthetic construct
  source 1..110: mol_type = other DNA
cactaagacgcttgagtgcttcaaggatagaaaccacttaaattttcattgtacgccttctacttcttaaatgtttgtggaacgaacagacctaaaaagaatcaagggtt

SEQ ID NO: 26305 - DNA, 110 bp, synthetic construct
  source 1..110: mol_type = other DNA
ccttctacttcttaaatgtttgtggaacgaacagacctaaaaagaatcaagggtttgattccacctaaatgacaaccctccaagttggaaagtaactgctcattctttat

SEQ ID NO: 26306 - DNA, 110 bp, synthetic construct
  source 1..110: mol_type = other DNA
ctggataggcaagagataaaatcgactggcctctgtaggacttggaaaaacatatatacacctcctctaattgtgctcaagggttacaaagaggtattgcaaacacatgg

SEQ ID NO: 26307 - DNA, 110 bp, synthetic construct
  source 1..110: mol_type = other DNA
ttctccccttgaagcttattaacccgagttgtgccagttccccccctcttctgcatgcagtcttattctcctgtcccctgatctctgaactttccaagtcttcagttttc

SEQ ID NO: 26308 - DNA, 110 bp, synthetic construct
  source 1..110: mol_type = other DNA
tgagccatgatgggaacttccaggcttattttgtttcgatctctacacagtctccttcacgcaacaaaagagaacatgataagaagtctaactcagaccaggaagcagct

SEQ ID NO: 26309 - DNA, 110 bp, synthetic construct
  source 1..110: mol_type = other DNA
ttcacgcaacaaaagagaacatgataagaagtctaactcagaccaggaagcagcttcaatattaacgttgtggaaagattctactaaaattgttctgcgaggtttcccat

SEQ ID NO: 26310 - DNA, 110 bp, synthetic construct
  source 1..110: mol_type = other DNA
cccctttacatcaacaaccaaagcgcttctgctcatttccagtcttctagaaacgtgttcaaattcttcctgttccaagtcactatcgtcaccaagagtttaatccccat

SEQ ID NO: 26311 - DNA, 110 bp, synthetic construct
  source 1..110: mol_type = other DNA
aactccttcctccaagctcatcgactcttgctaattgatgccaatgaagccactgatccatccatttttcagagaagaggaggaaaagactcatctgccttcagctttac

SEQ ID NO: 26312 - DNA, 110 bp, synthetic construct
  source 1..110: mol_type = other DNA
atccatccatttttcagagaagaggaggaaaagactcatctgccttcagctttacactctgctccattctggaaggttccccccccccatgattattcttcccaagttta

SEQ ID NO: 26313 - DNA, 110 bp, synthetic construct
  source 1..110: mol_type = other DNA
tatccaccacatgatttctatccactattttgtctttctatgaatgccttgtacgtggaatcacatatcatgtagccttttatgtctcttcgttaacttaacataatgct

SEQ ID NO: 26314 - DNA, 110 bp, synthetic construct
  source 1..110: mol_type = other DNA
tggaatcacatatcatgtagccttttatgtctcttcgttaacttaacataatgcttttgaggctgtttcatggattagtaactagctcctttttaattctgaacttgctc

SEQ ID NO: 26315 - DNA, 110 bp, synthetic construct
  source 1..110: mol_type = other DNA
ggggctggacagtgaagtgctctgggcagtttcggacggatgcctcactgctgtcacccttagtaaatgtgccccctggatcatctcccatgtctcagctctgggctgca

SEQ ID NO: 26316 - DNA, 110 bp, synthetic construct
  source 1..110: mol_type = other DNA
acccttagtaaatgtgccccctggatcatctcccatgtctcagctctgggctgcatgcctgcgccacccactccacttaaccaggacccactggaagtgttgatgagcac

SEQ ID NO: 26317 - DNA, 110 bp, synthetic construct
  source 1..110: mol_type = other DNA
tacctttaaggcatgaatctagtaaatggtaaagagcaagccctggaagaaattcacagctgtgccggagaaaggaataaccgactcagagtagattcacaggtctccaa

SEQ ID NO: 26318 - DNA, 110 bp, synthetic construct
  source 1..110: mol_type = other DNA
acagctgtgccggagaaaggaataaccgactcagagtagattcacaggtctccaaaatcaaatcgcacttcctcgccatcaccaaatattgacttatcacaggtgtacac

SEQ ID NO: 26319 - DNA, 110 bp, synthetic construct
  source 1..110: mol_type = other DNA
gtataattggtccccctgactccagtttctcacgatgctaggacattttaacacacagcttccattctaaaaataccacttgtgttcttcatgcttactttcccttttat

SEQ ID NO: 26320 - DNA, 110 bp, synthetic construct
  source 1..110: mol_type = other DNA
cagcttccattctaaaaataccacttgtgttcttcatgcttactttcccttttatccccatgtcccctcctttgaaaacctgtcctttccaacatcccagacagtctcat

SEQ ID NO: 26321 - DNA, 110 bp, synthetic construct
  source 1..110: mol_type = other DNA
gcatcccctcttgatgtccttttccagtttgttgatgtggtcaaatgaatagagtttttgcttagtccttactctggaaatgattaacttacttcgtctgactctgcaac

SEQ ID NO: 26322 - DNA, 110 bp, synthetic construct
  source 1..110: mol_type = other DNA
ttttgcttagtccttactctggaaatgattaacttacttcgtctgactctgcaaccactaatgtgccccctaggcagttgtattcctattttttctgttttttttttttt

SEQ ID NO: 26323 - DNA, 110 bp, synthetic construct
  source 1..110: mol_type = other DNA
caatgggttaagggccctgccttgcctcaaactgttttttaggttgaagataaagtttggatcccatgttactgtgggtgtggtgtaagcctcagcagcagctctgattc

SEQ ID NO: 26324 - DNA, 110 bp, synthetic construct
  source 1..110: mol_type = other DNA
ctgtctcaggtcccttaacagcaggtgtaaggcttggctggcaaagagcaagctggatgctggattgtcgtgaccagcaaccattcacatggtcactttctgatggctcc

SEQ ID NO: 26325 - DNA, 110 bp, synthetic construct
  source 1..110: mol_type = other DNA
gatgctggattgtcgtgaccagcaaccattcacatggtcactttctgatggctccaatctgtacaagctttgagcagtgcctagcacagattaagagtcagctcttggct

SEQ ID NO: 26326 - DNA, 110 bp, synthetic construct
  source 1..110: mol_type = other DNA
gccccctgttatatatttttataattcataagttttctcaacatgagctcatgccagatggatggtttaacggagccaagtggccaagcctcgtttacactgaagggcta

SEQ ID NO: 26327 - DNA, 110 bp, synthetic construct; identical to SEQ ID NO: 26326
  source 1..110: mol_type = other DNA

SEQ ID NO: 26328 - DNA, 110 bp, synthetic construct
  source 1..110: mol_type = other DNA
tcaaatatttcaaagaggaacaggatttttatctacatttgtgcctgtggctgtacttctcaaactttaatgattataggaatagccttgggatcatgtctctgattgaa

SEQ ID NO: 26329 - DNA, 110 bp, synthetic construct
  source 1..110: mol_type = other DNA
cttctcaaactttaatgattataggaatagccttgggatcatgtctctgattgaatcagcctgggttaggccccaagatcctgcagttctaaatgctgttactgactcac

SEQ ID NO: 26330 - DNA, 110 bp, synthetic construct
  source 1..110: mol_type = other DNA
ttgctctgggaagttctttttcccctcattgttttccttggtcaaaaatgttgtgactgttgatgaatatgcacaagtttcttagctgcctttctattgagtaaagtggg

SEQ ID NO: 26331 - DNA, 110 bp, synthetic construct
  source 1..110: mol_type = other DNA
ataagaggcagtgcacaaacaaaatgcacatgatttatgtattttaaaattgatgtatggagcaagaaaatcataccgaaaacgtccagaataaatataagaacacttcc

SEQ ID NO: 26332 - DNA, 110 bp, synthetic construct
  source 1..110: mol_type = other DNA
taaatccaggctgctttatttttgctgctgctctttctggttgcaattcctggttctgtcactgagctaccaggatatgggataaactgcttcagtcattttcccttttc

SEQ ID NO: 26333 - DNA, 110 bp, synthetic construct
  source 1..110: mol_type = other DNA
ggcatacgatactatagtgcagggtcagattctgggtgaaagatagcagaagattgccgtctatccatctatagcatgtttctctcagatgttttcttttattaacaata

SEQ ID NO: 26334 - DNA, 110 bp, synthetic construct
  source 1..110: mol_type = other DNA
gcagaagattgccgtctatccatctatagcatgtttctctcagatgttttcttttattaacaataatggaggataaaattatatgttctcagtaatgggatacattttta

SEQ ID NO: 26335 - DNA, 110 bp, synthetic construct
  source 1..110: mol_type = other DNA
tagggctgcacttgcgccatatggaagttcccaggctagggattgaatccacacagcctatgccacagccctagcaatgcaggatcaaagccctgtctgcatcttacact

SEQ ID NO: 26336 - DNA, 110 bp, synthetic construct
  source 1..110: mol_type = other DNA
gcctatgccacagccctagcaatgcaggatcaaagccctgtctgcatcttacactgcagctcacagcaactccagatttcccacccactaagcgaggccagaaatctaac

SEQ ID NO: 26337 - DNA, 110 bp, synthetic construct
  source 1..110: mol_type = other DNA
gcctaagactctgatgaaaaatcaaagatgacacaaacagatgaaggatataccatgtcttagattgaaggaataatattgtcaaatgactacactacccaaggcaatct

SEQ ID NO: 26338 - DNA, 110 bp, synthetic construct; identical to SEQ ID NO: 26337
  source 1..110: mol_type = other DNA

SEQ ID NO: 26339 - DNA, 110 bp, synthetic construct
  source 1..110: mol_type = other DNA
tgacaacccaaagtgtctttagatattttcaaatgttccctgttgaacaaaatcaccctggttgagaaacactggaatatgcataagaatacatcttctttcaaaagtat

SEQ ID NO: 26340 - DNA, 110 bp, synthetic construct
  source 1..110: mol_type = other DNA
ttccctgttgaacaaaatcaccctggttgagaaacactggaatatgcataagaatacatcttctttcaaaagtatatcttctttcatttccatcttatgaaatacagtat

SEQ ID NO: 26341 - DNA, 110 bp, synthetic construct
  source 1..110: mol_type = other DNA
agaaacaaaaccacttgttacagaaaataagaatacttcagtagaccattctgcagactgcacacagctgaggaaagaacaggtgacattgaaaatatatcaatagaaat

SEQ ID NO: 26342 - DNA, 110 bp, synthetic construct
  source 1..110: mol_type = other DNA
tttatgattcttttaaacatgtgtttacttctcttgagaatttcaggaagaggagagctgggtcctagattatgaatagttcagctttagtggaaactggtgaacagttt

SEQ ID NO: 26343 - DNA, 110 bp, synthetic construct
  source 1..110: mol_type = other DNA
agctgggtcctagattatgaatagttcagctttagtggaaactggtgaacagttttcaaagagattgtcacaatttacatcctcactagctgagtattctggtggcttca

SEQ ID NO: 26344 - DNA, 110 bp, synthetic construct
  source 1..110: mol_type = other DNA
ctcaaccaaataatattttcttatcagctgtactggtaataaagatactattttgttcaatattcaattctggtctctacttctcaattggttcaaaatctagacaggaa

SEQ ID NO: 26345 - DNA, 110 bp, synthetic construct
  source 1..110: mol_type = other DNA
attgtgaaatacacctcccaagccttcttcatagttaaggtgtactttccagggaagaggactttatcagagcacaaatctgaaacattatcactgcaaagggaaggaaa

SEQ ID NO: 26346 - DNA, 110 bp, synthetic construct
  source 1..110: mol_type = other DNA
ccatgatttttagtgtttattaatttctcacaccataattgatttcaagttaccactatgatattgtggaatgtggaactgggttgaggtgcacatggcaggttctactg

SEQ ID NO: 26347 - DNA, 110 bp, synthetic construct
  source 1..110: mol_type = other DNA
gcccatcattctagagtgaagaaaattatctttcaaaaataaagcaaaaattatgtattcttataaaacaatctgtgagaatgcattactaaagacctgcccagtaagac

SEQ ID NO: 26348 - DNA, 110 bp, synthetic construct; identical to SEQ ID NO: 26347
  source 1..110: mol_type = other DNA

SEQ ID NO: 26349 - DNA, 110 bp, synthetic construct
  source 1..110: mol_type = other DNA
tgcatctccacttaaaacactaaagcaactccagtgagtaccttgaatttccttttttcttcaaggaaatgagtctttagaatcactctaattttatcccctcattttcc

SEQ ID NO: 26350 - DNA, 110 bp, synthetic construct
  source 1..110: mol_type = other DNA
gagtaccttgaatttccttttttcttcaaggaaatgagtctttagaatcactctaattttatcccctcattttcctggagaaataccactttatacactgaattaaaaat

SEQ ID NO: 26351 - DNA, 110 bp, synthetic construct
  source 1..110: mol_type = other DNA
ctcacccatctccaccttgctgccagagaatgatcttaaccagatctttttaagtgcagtttgactacagtgctatagaggtacatttctctcaacctctagtgtaactg

SEQ ID NO: 26352 - DNA, 110 bp, synthetic construct
  source 1..110: mol_type = other DNA
gcagtttgactacagtgctatagaggtacatttctctcaacctctagtgtaactgtgtcttcacaatctccttgattgatccaaatcaacgtctctatccaagccaatct

SEQ ID NO: 26353 - DNA, 110 bp, synthetic construct
  source 1..110: mol_type = other DNA
tttaaaataaaaatctacaaaacccctatggttatgtgccttgttaagattttttttttcctcattactcaggagcaaaattaccttcaggtcactggaaaatggagggg

SEQ ID NO: 26354 - DNA, 110 bp, synthetic construct; identical to SEQ ID NO: 26353
  source 1..110: mol_type = other DNA

SEQ ID NO: 26355 - DNA, 110 bp, synthetic construct
  source 1..110: mol_type = other DNA
agcacctaccatttactcagggattcccatcccgaatattgtctgggaggtttaataaaagttggggaacagcagctctaatgtcagagtcaaaaatgtctacgttatag

SEQ ID NO: 26356 - DNA, 110 bp, synthetic construct
  source 1..110: mol_type = other DNA
attcagtaggtttagggtggaacctgagaatatgcatttctaccaaattgtaggtgattgttgatactgcttatccaggcttcaaactttaaaaacactggactattaga

SEQ ID NO: 26357 - DNA, 110 bp, synthetic construct
  source 1..110: mol_type = other DNA
ggtggaacctgagaatatgcatttctaccaaattgtaggtgattgttgatactgcttatccaggcttcaaactttaaaaacactggactattagaattaaaagtttatct

SEQ ID NO: 26358 - DNA, 110 bp, synthetic construct
  source 1..110: mol_type = other DNA
caagaatttttaaggataaaataaatatatctgggaaaaggtgcattttaataacatccttaaaatgctgcatttgtggctagagagcccttaatgtgacaaatataggt

SEQ ID NO: 26359 - DNA, 110 bp, synthetic construct; identical to SEQ ID NO: 26358
  source 1..110: mol_type = other DNA

SEQ ID NO: 26360 - DNA, 110 bp, synthetic construct
  source 1..110: mol_type = other DNA
tacctgtgaactttcttcatatcaatcatgtactgggattcattaaatttataagaaaaaagctatatttcacgaatgacattcatgttggtaactccaatgatcagtcc

SEQ ID NO: 26361 - DNA, 110 bp, synthetic construct
  source 1..110: mol_type = other DNA
aaaaaagctatatttcacgaatgacattcatgttggtaactccaatgatcagtcctcaccttgttgatcctgtcctagcaaaaattgcagcaaaaaaaagttagacaagc

SEQ ID NO: 26362 - DNA, 110 bp, synthetic construct
  source 1..110: mol_type = other DNA
tgcagttttaacatgtatggatccattttttttaaatgtataagatattttaccagtggctcagaggttttcttctttgtggtcaatgcaagcatgtcctcaaaatggca

SEQ ID NO: 26363 - DNA, 110 bp, synthetic construct
  source 1..110: mol_type = other DNA
tggagcagaaaaaggtttattgcaggccatgaaaggagggtggtgctcatgcccccacaaaagcctaaactccaggaacaaaattgtgaagcattttgaaaagccaagtg

SEQ ID NO: 26364 - DNA, 110 bp, synthetic construct
  source 1..110: mol_type = other DNA
aaaaatgtgactgaggagatggaaggcagcagaagcctggttagaaagcccttggacaaaaagagaaaaaaaaatgtgctgatgtcacccaacagcacagagataccttc

SEQ ID NO: 26365 - DNA, 110 bp, synthetic construct
  source 1..110: mol_type = other DNA
gcatgctggagaactgacagttgattgaggaccaaagctccatcactgccagactgacaaatgtccaaacttggcatcctccattagaaaccatttaacccataagtctg

SEQ ID NO: 26366 - DNA, 110 bp, synthetic construct
  source 1..110: mol_type = other DNA
aatcccatctcaggctctgcttctggggaacccagtctaagaaaagcctcagttcaggaatatagaaaaagtactccccccaaactcaaccaggataaaagaagcaaata

SEQ ID NO: 26367 - DNA, 110 bp, synthetic construct
  source 1..110: mol_type = other DNA
gtttcgtattctgaccttttctcagattgtggatctcttgtgatgttaggcaggtacagcaagcttcagcgtctttactcagccctgtgaccacaagtatatacaaccaa

SEQ ID NO: 26368 - DNA, 110 bp, synthetic construct
  source 1..110: mol_type = other DNA
tggcaacattggatcctttaacccactgagcaaggacagggatctaaaccacatcctcacagatattagttgagttcattaatgctgagccacaataggaattcccaagc

SEQ ID NO: 26369 - DNA, 110 bp, synthetic construct
  source 1..110: mol_type = other DNA
ctcacagatattagttgagttcattaatgctgagccacaataggaattcccaagcctcctctggaatagttgtctgtactgagtgagctacatgcagataggaactgtat

SEQ ID NO: 26370 - DNA, 110 bp, synthetic construct
  source 1..110: mol_type = other DNA
gtccaggagacaccctgggaaaatggatagaatgattgtgcacaactgactactgttccatccccattttccctgtcaagtaacacccatgtgctccttgtcaccaatgt

SEQ ID NO: 26371 - DNA, 110 bp, synthetic construct
  source 1..110: mol_type = other DNA
ttccatccccattttccctgtcaagtaacacccatgtgctccttgtcaccaatgtcatttacccattcgttcatgcattccctggcaatgtgaaacatgcagaaagaaaa

SEQ ID NO: 26372 - DNA, 110 bp, synthetic construct
  source 1..110: mol_type = other DNA
ttccatgattatagcttagtgaaggaacatacatcattaatatctatgaactgggaattcaaaacaactatggtccacgtgtcaatgtccacccaccttgtcggctttat

SEQ ID NO: 26373 - DNA, 110 bp, synthetic construct
  source 1..110: mol_type = other DNA
aattcaaaacaactatggtccacgtgtcaatgtccacccaccttgtcggctttatcattggccacttgtagctccttttctttcacttccagttctttgctcagggctgc

SEQ ID NO: 26374 - DNA, 110 bp, synthetic construct
  source 1..110: mol_type = other DNA
cccatggctctaagcatcaacttcaaatattgcagacaccgcacaacatggctcagctcaaaggagagaaatttctagaaagtggaatgattcaccttgggaggatgagg

SEQ ID NO: 26375 - DNA, 110 bp, synthetic construct
  source 1..110: mol_type = other DNA
gctcaaaggagagaaatttctagaaagtggaatgattcaccttgggaggatgaggccttgaagcatgttgatgctctgcatgaccaccaaggcctccagcatctccattt

SEQ ID NO: 26376 - DNA, 110 bp, synthetic construct
  source 1..110: mol_type = other DNA
gagttctcactaaaaaactacatggatcagagagcagggcggggggaggggggaaatgccctcaagaacaggtgtggcaaacacatattcagtcaactgccaggaatgtg

SEQ ID NO: 26377 - DNA, 110 bp, synthetic construct
  source 1..110: mol_type = other DNA
atgccctcaagaacaggtgtggcaaacacatattcagtcaactgccaggaatgtgtgtttgttgccccagatgtccaggatggggccaagagccaaattcctcaagacaa

SEQ ID NO: 26378 - DNA, 110 bp, synthetic construct
  source 1..110: mol_type = other DNA
ttgcatctcagactgctcggcatgttggctgtagcaatctggctgccttcttccctcaaaaatttgtcctcagctgatcagagcctcctcgtggggaaattatagtcaat

SEQ ID NO: 26379 - DNA, 110 bp, synthetic construct
  source 1..110: mol_type = other DNA
atgatggaaaaaataaaaatatttttttagaaaaagaaaatgaaaagcattggtttcctactgtacagcacagggaactacacccaatctcttggggtagaacatgctag

SEQ ID NO: 26380 - DNA, 110 bp, synthetic construct
  source 1..110: mol_type = other DNA
tttagaaaaagaaaatgaaaagcattggtttcctactgtacagcacagggaactacacccaatctcttggggtagaacatgctagaagatagtatcagaaaaagaatgtc

SEQ ID NO: 26381 - DNA, 110 bp, synthetic construct
  source 1..110: mol_type = other DNA
ctgtgcctcttaatcatgcttatcaaccaaagcaacagaaccactcggttgcaacacaacctctgatgtccatgtcattctacactctgcccaacagtaagcctgccatc

SEQ ID NO: 26382 - DNA, 110 bp, synthetic construct
  source 1..110: mol_type = other DNA
acaacctctgatgtccatgtcattctacactctgcccaacagtaagcctgccatcaacagagatatttgaaccatttctttgaacagtgagtaactttaaaccatatcaa

SEQ ID NO: 26383 - DNA, 110 bp, synthetic construct
  source 1..110: mol_type = other DNA
tgagagagatgcccgtccagtcccaggcattctagccccccatcaccatagaagaggccctcaagaagaactacccagctgagaacattcctggcttcctgacccacaga

SEQ ID NO: 26384 - DNA, 110 bp, synthetic construct
  source 1..110: mol_type = other DNA
ggccctcaagaagaactacccagctgagaacattcctggcttcctgacccacagaaactggaagaaataacacaatgattgttgctatttgaagtccctaagttcgcggg

SEQ ID NO: 26385 - DNA, 110 bp, synthetic construct; identical to SEQ ID NO: 26383
  source 1..110: mol_type = other DNA

SEQ ID NO: 26386 - DNA, 110 bp, synthetic construct; identical to SEQ ID NO: 26384
  source 1..110: mol_type = other DNA

SEQ ID NO: 26387 - DNA, 110 bp, synthetic construct
  source 1..110: mol_type = other DNA
aagttcccaggccatgggtcaaatcagagctgaatgcttgattcagcagcctatgctagagcttgtggcaatgctatatccttaatgctctgagtgaagccacggttgga

SEQ ID NO: 26388 - DNA, 110 bp, synthetic construct
  source 1..110: mol_type = other DNA
agagctgaatgcttgattcagcagcctatgctagagcttgtggcaatgctatatccttaatgctctgagtgaagccacggttggaacctgcatcctcatagaaacaacgt

SEQ ID NO: 26389 - DNA, 110 bp, synthetic construct
  source 1..110: mol_type = other DNA
gtggagacttataagggttaaataagagaatgtattgaaagtatggaacataaagctttacataggataagttctccaaaatggtataaccatcccaactaagtagttaa

SEQ ID NO: 26390 - DNA, 110 bp, synthetic construct
  source 1..110: mol_type = other DNA
ctttacataggataagttctccaaaatggtataaccatcccaactaagtagttaaatccaaaacaaatgtactttctgaaggcctcatacccacctgatctaagaacaat

SEQ ID NO: 26391 - DNA, 110 bp, synthetic construct
  source 1..110: mol_type = other DNA
agctttatttctcattcacaataagcctgaagcaggccagacagctttctccacccagaaaccactctgtgtagctcactctattagtctgccaggactgcctataaaag

SEQ ID NO: 26392 - DNA, 110 bp, synthetic construct
  source 1..110: mol_type = other DNA
cagaaaccactctgtgtagctcactctattagtctgccaggactgcctataaaagcatcaggaaatgagttccctggtggctcagtggtagcaaacccaactagtaacta

SEQ ID NO: 26393 - DNA, 110 bp, synthetic construct
  source 1..110: mol_type = other DNA
ccacgggccctcctgaagctccagcccttgagcaaccagcctgaggccttgggaggtggaaagcaggctgtgggatacaggagaactgggaggagaggaccacttccctg

SEQ ID NO: 26394 - DNA, 110 bp, synthetic construct
  source 1..110: mol_type = other DNA
gtggaaagcaggctgtgggatacaggagaactgggaggagaggaccacttccctgggcatgaaggggtcccagagccacgcattaattgaatccaatgtgcaatagattt

SEQ ID NO: 26395 - DNA, 110 bp, synthetic construct
  source 1..110: mol_type = other DNA
acggttggaatgaaccctgttttgttcctctcagtgaacccactggcgttgatgtgcttgtcttttccctctaataagcctccccactcattctcttgttggttggttac

SEQ ID NO: 26396 - DNA, 110 bp, synthetic construct
  source 1..110: mol_type = other DNA
gcttgtcttttccctctaataagcctccccactcattctcttgttggttggttacctctgcgggaggagtttgttcattgagtgtctgcacgtttagctcaaatccagcc

SEQ ID NO: 26397 - DNA, 110 bp, synthetic construct
  source 1..110: mol_type = other DNA
ctcaagtgtactggtggccccttgaggctgtgccagaaagggaataggcagagcttttgagggctcctcacatggttgaccactgaacaacacacttttgaacagcccag

SEQ ID NO: 26398 - DNA, 110 bp, synthetic construct
  source 1..110: mol_type = other DNA
tttgagggctcctcacatggttgaccactgaacaacacacttttgaacagcccaggtccacttatgtatagattttttttcaataaagatagtacctatattttcatctt

SEQ ID NO: 26399 - DNA, 110 bp, synthetic construct; identical to SEQ ID NO: 26397
  source 1..110: mol_type = other DNA

SEQ ID NO: 26400 - DNA, 110 bp, synthetic construct; identical to SEQ ID NO: 26398
  source 1..110: mol_type = other DNA

SEQ ID NO: 26401 - DNA, 110 bp, synthetic construct
  source 1..110: mol_type = other DNA
aagctctttagaatgaaatccatccctgctttatcaccacttgtatttacagagctcttttgactttagaggaatttacttgatagaaaagttttctctcctattaatgt

SEQ ID NO: 26402 - DNA, 110 bp, synthetic construct
  source 1..110: mol_type = other DNA
tcttttgactttagaggaatttacttgatagaaaagttttctctcctattaatgtttgaatgtatcaaattataattgatggggtcagaccattctgattgcaggctgtg

SEQ ID NO: 26403 - DNA, 110 bp, synthetic construct
  source 1..110: mol_type = other DNA
atattttggaaactgcctggactgatttcatatcctgttttttggggaccaaatatagaaatgaccgagagcctgctgggtacgggagactctgggtctgggtctgtagc

SEQ ID NO: 26404 - DNA, 110 bp, synthetic construct
  source 1..110: mol_type = other DNA
tagaaatgaccgagagcctgctgggtacgggagactctgggtctgggtctgtagctcattcttgagcattacaatagaagtggtcttgtgatcagagactttccttcaaa

SEQ ID NO: 26405 - DNA, 110 bp, synthetic construct
  source 1..110: mol_type = other DNA
gaggatttagcgtctgcatcagtttctctgtttaacagctgtgctgacttacagcacactgctacagggccttgtggaaatgactgatttgctgcctgcccagctggttg

SEQ ID NO: 26406 - DNA, 110 bp, synthetic construct
  source 1..110: mol_type = other DNA
acactgctacagggccttgtggaaatgactgatttgctgcctgcccagctggttgagctccttttttaaggtgccttccaagtggatgatggcatgatgagcattattag

SEQ ID NO: 26407 - DNA, 110 bp, synthetic construct
  source 1..110: mol_type = other DNA
aggtgtagacaccctctgtggctctgccctcctcgagtttggccctcagctgggcgggctatccccaggtgtggtgtgtacaatacacaccacctaacatgctgaaatgc

SEQ ID NO: 26408 - DNA, 110 bp, synthetic construct
  source 1..110: mol_type = other DNA
gggctatccccaggtgtggtgtgtacaatacacaccacctaacatgctgaaatgctagttgactgcactgtccacaggcgtggagctgctttgcgacagagacgtggaca

SEQ ID NO: 26409 - DNA, 110 bp, synthetic construct; identical to SEQ ID NO: 26407
  source 1..110: mol_type = other DNA

SEQ ID NO: 26410 - DNA, 110 bp, synthetic construct; identical to SEQ ID NO: 26408
  source 1..110: mol_type = other DNA

SEQ ID NO: 26411 - DNA, 110 bp, synthetic construct
  source 1..110: mol_type = other DNA
ttctctttcctctcgccttatcgctcgctgttggtgtctcccatccctgacctgcatttctggcctccagatttacaagtccttgctcccgcccagcatctctccacttt

SEQ ID NO: 26412 - DNA, 110 bp, synthetic construct
  source 1..110: mol_type = other DNA
atttctggcctccagatttacaagtccttgctcccgcccagcatctctccacttttgccttaacggaagcagaactggactcggggaccccgccccatccaccatgtccc

SEQ ID NO: 26413 - DNA, 110 bp, synthetic construct
  source 1..110: mol_type = other DNA
tgagatgctttggtgcttcagccttgtaatggggactgaccagcggtggctggatacttggcacatttcagtcattccacaagctgactattcaagggggtcatggtttc

SEQ ID NO: 26414 - DNA, 110 bp, synthetic construct
  source 1..110: mol_type = other DNA
catacacttattaagttctaaggatgtgccagctgggtacagagctgtaaacagcaagacccagcgcccacccacgtgcagcctggagtctgtggtcatggtggcttcct

SEQ ID NO: 26415 - DNA, 110 bp, synthetic construct
  source 1..110: mol_type = other DNA
ggccaacagctgcagctccactgattcaacccctagccctggaacattcatttgctgcaggtaaggccctaaaaagaccaaaaaaaaaaaaagaaagaatcaacttgtga

SEQ ID NO: 26416 - DNA, 110 bp, synthetic construct; identical to SEQ ID NO: 26415
  source 1..110: mol_type = other DNA

SEQ ID NO: 26417 - DNA, 110 bp, synthetic construct
  source 1..110: mol_type = other DNA
ggatgtttgggggggtcctgttcagccctgtctctaagatgtgctgagctgtgggacagcgcagggagcaggcgggcccttctgggggaggctggtcagcgtgtcccagg

SEQ ID NO: 26418 - DNA, 110 bp, synthetic construct
  source 1..110: mol_type = other DNA
cactatgggcgtggccctaaaaagaaaaagtttaaaaaattaaaagcagctgccaggaccaggaattaccaagaatgcccttccctcagactcagcagctggaagtccct

SEQ ID NO: 26419 - DNA, 110 bp, synthetic construct
  source 1..110: mol_type = other DNA
ggaccaggaattaccaagaatgcccttccctcagactcagcagctggaagtccctccccttcccccctggaggctccctgcaaagcccaggccagccccttctcccaccc

SEQ ID NO: 26420 - DNA, 110 bp, synthetic construct; identical to SEQ ID NO: 26418
  source 1..110: mol_type = other DNA

SEQ ID NO: 26421 - DNA, 110 bp, synthetic construct; identical to SEQ ID NO: 26419
  source 1..110: mol_type = other DNA

SEQ ID NO: 26422 - DNA, 110 bp, synthetic construct
  source 1..110: mol_type = other DNA
gtttctaacttataaagcctcagatggaacatctagacagaaccaagtagaggctagtagttaaaactaagtattggcacagcattttataattctgttttgctcaccct

SEQ ID NO: 26423 - DNA, 110 bp, synthetic construct
  source 1..110: mol_type = other DNA
ctgcctctggaaagatggcatggtggtggagctgtccctggtgctgaacctgcagcagtgaggctaataggtcagaggacagccttcattaattttggtatatattttct

SEQ ID NO: 26424 - DNA, 110 bp, synthetic construct
  source 1..110: mol_type = other DNA
cccattagcacttagtctccctaacactggtccgtcttgctctttcccaatcttttctctaactgtagtgatctttcaaggaagatcaaggtctttaattaactgcaggt

SEQ ID NO: 26425 - DNA, 110 bp, synthetic construct
  source 1..110: mol_type = other DNA
tctctaactgtagtgatctttcaaggaagatcaaggtctttaattaactgcaggtgactttttgagatctggtctccagcacccttctcccagtttcatctttcaataaa

SEQ ID NO: 26426 - DNA, 110 bp, synthetic construct
  source 1..110: mol_type = other DNA
agggagcccacgcctagggttgctccgtgtaccctggggatgagaacacaagaggccatgtgtctgtgaaagtcgtgtggagacacagagagattcaaaacgcagcagcc

SEQ ID NO: 26427 - DNA, 110 bp, synthetic construct
  source 1..110: mol_type = other DNA
ccatgtgtctgtgaaagtcgtgtggagacacagagagattcaaaacgcagcagccaaaacccaggaaaggtgccaagaacaggaggactggacaatcgcagcgagatctg

SEQ ID NO: 26428 - DNA, 110 bp, synthetic construct
  source 1..110: mol_type = other DNA
agactgacttgagggctttttggtggtaaagtaaatgggtcagatgatggactgcgtggtaggcatgagcaaaagcgagaaatccaagctgtcagtggaatactattcag

SEQ ID NO: 26429 - DNA, 110 bp, synthetic construct
  source 1..110: mol_type = other DNA
agatgcctcgcatacaaaggtgttcattaaagcatcctttgcaagggcaggcagctgacaacaatctgtctgtctgccagcatggaacatgtgaagtaatgatggttatt

SEQ ID NO: 26430 - DNA, 110 bp, synthetic construct
  source 1..110: mol_type = other DNA
tgacaacaatctgtctgtctgccagcatggaacatgtgaagtaatgatggttattatttggtgtgtatacagtacatgcacgtgggggagttctggccagcaatcacaga

SEQ ID NO: 26431 - DNA, 110 bp, synthetic construct
  source 1..110: mol_type = other DNA
aatggcatctgcacccaagcgaggggtcaccttggagccacagctcttggcttacaccacagccacagcaatgccaggtccgagctgcatttgtgaccagttcatggcag

SEQ ID NO: 26432 - DNA, 110 bp, synthetic construct
  source 1..110: mol_type = other DNA
accacagccacagcaatgccaggtccgagctgcatttgtgaccagttcatggcagcactggatccacacccaccgagctgcagggatcaaacccgcctcctcatggatac

SEQ ID NO: 26433 - DNA, 110 bp, synthetic construct
  source 1..110: mol_type = other DNA
tggtgggggttttagcatctgtaaaacagctccggcaatgtgcatcaaatactgtcatctaggtgctacggagaggagttaaagtagaggacactggggtggggtgtctt

SEQ ID NO: 26434 - DNA, 110 bp, synthetic construct
  source 1..110: mol_type = other DNA
ttctcagaaatctgattattcaagctgccactgctataagctttcctgtaatgccacaaaagcatatctgctacttccacagaattgtttaactcttctctcaggtagtt

SEQ ID NO: 26435 - DNA, 110 bp, synthetic construct
  source 1..110: mol_type = other DNA
gtgtgtgtgtgtgtgtgtgtgtgtgtgtgtgtttactcccagatttagggacgggaacgttgaagctgtgaatcaacagaatgttcatgtttatgttgacctgtctgtca

SEQ ID NO: 26436 - DNA, 110 bp, synthetic construct
  source 1..110: mol_type = other DNA
aacgttgaagctgtgaatcaacagaatgttcatgtttatgttgacctgtctgtcatctgcaggaataacaccctaggggccatctggccagcacatccctgtgtctgcct

SEQ ID NO: 26437 - DNA, 110 bp, synthetic construct
  source 1..110: mol_type = other DNA
cccagagccacttatatgctctaaatgtgttttctacattggggcacagccggaacaattctccccgagcttgtgtgtgggggcagttggatccatccttcactggccta

SEQ ID NO: 26438 - DNA, 110 bp, synthetic construct
  source 1..110: mol_type = other DNA
caattctccccgagcttgtgtgtgggggcagttggatccatccttcactggcctagtggttggtagggtactctgaccacttttctgaggcatgacaaggccatccattc

SEQ ID NO: 26439 - DNA, 110 bp, synthetic construct
  source 1..110: mol_type = other DNA
ctattttatatatcatagtgtgtatctgctaatgccaaactctgaatttatccctctcttcctttcccccttggaaagcataagttagttttctatgtcagtgggtccat

SEQ ID NO: 26440 - DNA, 110 bp, synthetic construct; identical to SEQ ID NO: 26439
  source 1..110: mol_type = other DNA

SEQ ID NO: 26441 - DNA, 110 bp, synthetic construct
  source 1..110: mol_type = other DNA
ttcagtaaaacgaagtccaatatagtggccaactttcaatgaagtcccaagccaaagtacaactttccctgggtttccattatgcatttctgacaaattcaggctaaaca

SEQ ID NO: 26442 - DNA, 110 bp, synthetic construct
  source 1..110: mol_type = other DNA
tggccttgctcagtgtgttaagtatcccatgttgctgtggctgtagtaaagactggcagctgcagctccaatttggtcgctagcctggaaacctgcatatgtcacccatg

SEQ ID NO: 26443 - DNA, 110 bp, synthetic construct
  source 1..110: mol_type = other DNA
gcagctgcagctccaatttggtcgctagcctggaaacctgcatatgtcacccatgtggccttaaaaagcaaagaaactaaaaattaaaacttaaaaatcctggaatgttc

SEQ ID NO: 26444 - DNA, 110 bp, synthetic construct
  source 1..110: mol_type = other DNA
aattgcacatgaaaaaacatgagaagtgtgttctgaacctgaggatcaccaagaaatttgagaaaaggaaagcaggactgaacagcccttaagagcacaggtttgttgca

SEQ ID NO: 26445 - DNA, 110 bp, synthetic construct
  source 1..110: mol_type = other DNA
atttgagaaaaggaaagcaggactgaacagcccttaagagcacaggtttgttgcaagatagactgggatctgagtcccaactctttgtcactgctaaatggatgtgatgt

SEQ ID NO: 26446 - DNA, 110 bp, synthetic construct; identical to SEQ ID NO: 26444
  source 1..110: mol_type = other DNA

SEQ ID NO: 26447 - DNA, 110 bp, synthetic construct; identical to SEQ ID NO: 26445
  source 1..110: mol_type = other DNA

SEQ ID NO: 26448 - DNA, 110 bp, synthetic construct
  source 1..110: mol_type = other DNA
tccactgcttaaaggaacccctcctatctaggactctccattcctcagacagcgtgctctctgaataagagagctagtgatatggtagtggggtcttcatgctcccctca

SEQ ID NO: 26449 - DNA, 110 bp, synthetic construct
  source 1..110: mol_type = other DNA
tgactttggagtgatttgattgctcctttttgcagaggagagctttcagtcaaatagtgacaagtttatggttcagagaagcgcagagcttctataactctaaagatatt

SEQ ID NO: 26450 - DNA, 110 bp, synthetic construct
  source 1..110: mol_type = other DNA
agtgacaagtttatggttcagagaagcgcagagcttctataactctaaagatatttcttagctcttacagtcataggatcaaggtatccaaaaaaccagactcagtattt

SEQ ID NO: 26451 - DNA, 110 bp, synthetic construct
  source 1..110: mol_type = other DNA
tgaacaaagcaggtatatctaaagggagaagtgacgttagaacggtgaggcacagggccattgtcaaaactgctcacaggacaaaacagctcaggagagagactgcttcc

SEQ ID NO: 26452 - DNA, 110 bp, synthetic construct
  source 1..110: mol_type = other DNA
ggccattgtcaaaactgctcacaggacaaaacagctcaggagagagactgcttccatggtaattttgcatgaattacatgacatcttaagtgttcctggggtacccagga

SEQ ID NO: 26453 - DNA, 110 bp, synthetic construct
  source 1..110: mol_type = other DNA
tcagatgtcaagaaactgaacactgatgcattctcctagagaactgtggtccagccaggaattcaggccatctcggaagagctgtcagcaagaacagaaatgaggttaga

SEQ ID NO: 26454 - DNA, 110 bp, synthetic construct
  source 1..110: mol_type = other DNA
caggaattcaggccatctcggaagagctgtcagcaagaacagaaatgaggttagaaagaactgggcctggggaagtgggatgaacccatggagtgagttactatatcccc

SEQ ID NO: 26455 - DNA, 110 bp, synthetic construct
  source 1..110: mol_type = other DNA
acctaatcaccatcgtgggaagtgattatgtttctactctcagaatgagattcatgcccttatgaatgagacccaaaggagctcccttgccctttctgatgtgtgaggac

SEQ ID NO: 26456 - DNA, 110 bp, synthetic construct
  source 1..110: mol_type = other DNA
taacccaatgtttatccaagaatattttatcaccaagatcctttctcttctctcaaacacctgctaatatcccatggcttcaccttggcaagtgcttgaaagcaatttgt

SEQ ID NO: 26457 - DNA, 110 bp, synthetic construct
  source 1..110: mol_type = other DNA
tgctttcttctctctgctccactgtggcattttatttgtatggatacattttttatgtcctcctttgcatttagctccttatgtctctctaatccaataactctaccaga

SEQ ID NO: 26458 - DNA, 110 bp, synthetic construct
  source 1..110: mol_type = other DNA
tgtcctcctttgcatttagctccttatgtctctctaatccaataactctaccagaatctgtgctaggtattgaggggttaaaaatatatgccattgttcttgatttaggg

SEQ ID NO: 26459 - DNA, 110 bp, synthetic construct
  source 1..110: mol_type = other DNA
ttgccatataccttataaaattcctatgtcctctctctccttcatcataatgtaagtcataaagtgcatttttgtcatattaatgcaaaacaatagaacagtttggtttt

SEQ ID NO: 26460 - DNA, 110 bp, synthetic construct
  source 1..110: mol_type = other DNA
agcaatcaatactcattaggtaggttttaaggcatttgtgtccatctctacactgtacagtgaacgtaaaacatcatgaagccgagatggccaaacaggaggtttcttac

SEQ ID NO: 26461 - DNA, 110 bp, synthetic construct
  source 1..110: mol_type = other DNA
tacagtgaacgtaaaacatcatgaagccgagatggccaaacaggaggtttcttacacaacagcaggttgtatatgaagggaggatatatggtgggttaaggaggtcaaga

SEQ ID NO: 26462 - DNA, 110 bp, synthetic construct
  source 1..110: mol_type = other DNA
gtggtgagtgcatgcagtgggtggtggtagtggtgaggggggctggacagtgtgtccccaccagtcaggctgacttctgactatatccccaggacagggatgacctgttc

SEQ ID NO: 26463 - DNA, 110 bp, synthetic construct
  source 1..110: mol_type = other DNA
ccccaccagtcaggctgacttctgactatatccccaggacagggatgacctgttccaaaatcctagtgcagctcttcaagcagtttgccagtccttgccagtcatcagtc

SEQ ID NO: 26464 - DNA, 110 bp, synthetic construct
  source 1..110: mol_type = other DNA
taatcaaaagtataaagatttaatgtttttaaactgagcctacttaggatgaacacatcacatgcttgttgctgacacctactctgtgttgggatgttgtcatttggctc

SEQ ID NO: 26465 - DNA, 110 bp, synthetic construct
  source 1..110: mol_type = other DNA
catcacatgcttgttgctgacacctactctgtgttgggatgttgtcatttggctctattgctgtacaaagactccaggacaaaagaaggttgagcagattttttgcactt

SEQ ID NO: 26466 - DNA, 110 bp, synthetic construct
  source 1..110: mol_type = other DNA
aaataaataaatgaaaatagaaatatgatgctaagcggtagctttaaacactatctaatattgggtcttcacagttatacagacacatttggagccagttgatatacatt

SEQ ID NO: 26467 - DNA, 110 bp, synthetic construct
  source 1..110: mol_type = other DNA
acagggacttatttttgcctcaaatccctgcttttctttaacatttctggaaatggtgtcatcagttgagcttccagattcataagatcctttccagaaacaactcccac

SEQ ID NO: 26468 - DNA, 110 bp, synthetic construct
  source 1..110: mol_type = other DNA
tgaaggacttaagttatagaagtagaattcgttagagccagaggggattggagcccttgtcaacttcagttgtcccttgagggatgaggaaaaggagaaactccaatttg

SEQ ID NO: 26469 - DNA, 110 bp, synthetic construct
  source 1..110: mol_type = other DNA
cttgtcaacttcagttgtcccttgagggatgaggaaaaggagaaactccaatttgatgacctgcccaagtcacaaacaaagccaagagcaaacacaggttctgttgattc

SEQ ID NO: 26470 - DNA, 110 bp, synthetic construct
  source 1..110: mol_type = other DNA
aatatttccttaggttctgttcccaagcctaatacactacagaccctttttaaaatgacatctgttatcttcagctcagggggaactagtgttctctggaagtcccatcc

SEQ ID NO: 26471 - DNA, 110 bp, synthetic construct
  source 1..110: mol_type = other DNA
tgacatctgttatcttcagctcagggggaactagtgttctctggaagtcccatcccatcctgctgatgccgcacaaatttgttaaagggacatttagatagagtttgaat

SEQ ID NO: 26472 - DNA, 110 bp, synthetic construct
  source 1..110: mol_type = other DNA
ctaaggggccaggttgcattccacctgctacgaacacaaactgacaatatgtgatcagccagacttcatttaattattaattaaacaatgtttatggagcatctactact

SEQ ID NO: 26473 - DNA, 110 bp, synthetic construct
  source 1..110: mol_type = other DNA
cagccagacttcatttaattattaattaaacaatgtttatggagcatctactactgaccaggcataagataacatggcgaactaaacttatggatagagctaaccctgac

SEQ ID NO: 26474 - DNA, 110 bp, synthetic construct
  source 1..110: mol_type = other DNA
gtgaaaaataaataaataaagtgtggtcttgggaaatgtttgctctgtatgaccaggaatgaaaccagctcccccctccttcacacgcagccaagattgctataaagccc

SEQ ID NO: 26475 - DNA, 110 bp, synthetic construct
  source 1..110: mol_type = other DNA
ggaatgaaaccagctcccccctccttcacacgcagccaagattgctataaagcccatattttggagttcctgttgtggttcagcagtaatgatccaactagcatccgtga

SEQ ID NO: 26476 - DNA, 110 bp, synthetic construct
  source 1..110: mol_type = other DNA
gagataaatttaagtctgcttcaagttagcatcaagcagttaggatttatgcacatctgaacacctaagccttaaaaaacttcttttacccaccatccttctgatttagc

SEQ ID NO: 26477 - DNA, 110 bp, synthetic construct
  source 1..110: mol_type = other DNA
tctgaacacctaagccttaaaaaacttcttttacccaccatccttctgatttagctgaatcagaataaagagtaaaagtgcttataggcccttttcccaactttcttaaa

SEQ ID NO: 26478 - DNA, 110 bp, synthetic construct
  source 1..110: mol_type = other DNA
ctcaggacctttgaaccatcagatgaaaatctccatctcagacagacacatcctacagtttctggaagctcagctaccttgcatgagagacacggctaaaaatgcctcag

SEQ ID NO: 26479 - DNA, 110 bp, synthetic construct
  source 1..110: mol_type = other DNA
cagtttctggaagctcagctaccttgcatgagagacacggctaaaaatgcctcaggagtgaaaaccaccatgggaaccagtgccagggaaggaagacttgaacgataatt

SEQ ID NO: 26480 - DNA, 110 bp, synthetic construct; identical to SEQ ID NO: 26478
  source 1..110: mol_type = other DNA

SEQ ID NO: 26481 - DNA, 110 bp, synthetic construct; identical to SEQ ID NO: 26479
  source 1..110: mol_type = other DNA

SEQ ID NO: 26482 - DNA, 110 bp, synthetic construct
  source 1..110: mol_type = other DNA
agatttatgagcccacttgcatctcctcatatctagaaaaaccactaaattccttcaatgatggttgacgtctgtgactagtagtaaccttcgcaaggccagcagcaaac

SEQ ID NO: 26483 - DNA, 110 bp, synthetic construct
  source 1..110: mol_type = other DNA
caatgatggttgacgtctgtgactagtagtaaccttcgcaaggccagcagcaaacttttgtgaaatgggtacatggttgcatgccccttcacctttacaacttatatctt

SEQ ID NO: 26484 - DNA, 110 bp, synthetic construct
  source 1..110: mol_type = other DNA
aaggagtccgtgagggacgaagcagcaggaatggagaccccgagtcctctaatgggacaaggtgagagaagcacttttcataaccaagccaagcaaggtaaagctacagg

SEQ ID NO: 26485 - DNA, 110 bp, synthetic construct
  source 1..110: mol_type = other DNA
gacaaggtgagagaagcacttttcataaccaagccaagcaaggtaaagctacaggggtgagcgcttcccccaagcccatcaaatgcctctcagagatgcaagtggtgagg

SEQ ID NO: 26486 - DNA, 110 bp, synthetic construct
  source 1..110: mol_type = other DNA
cagagaccttgctctttgctgctatacagtgaattgatgattacacatttttgagacagactctcaggggataaacaagataataaaggaagcttggacaccacaagctg

SEQ ID NO: 26487 - DNA, 110 bp, synthetic construct
  source 1..110: mol_type = other DNA
acagactctcaggggataaacaagataataaaggaagcttggacaccacaagctggccatccataggctggctgtggtacattgatacatggctccaactccacctccca

SEQ ID NO: 26488 - DNA, 110 bp, synthetic construct
  source 1..110: mol_type = other DNA
agagctctgatgtaaagggacccacaaggaccatgccagtccgaaggcagctcaaatgtgggcccaagaggctgtggctgggtacttctgggaagccttgcaaattgctg

SEQ ID NO: 26489 - DNA, 110 bp, synthetic construct
  source 1..110: mol_type = other DNA
acagctgacaaaatgagaaaaaaaagatagtacctggagattgtggaacaattacgagacaaaagtcttcccattaagttcatattgtggtacagcggaaacaaatcgga

SEQ ID NO: 26490 - DNA, 110 bp, synthetic construct
  source 1..110: mol_type = other DNA
gaacaattacgagacaaaagtcttcccattaagttcatattgtggtacagcggaaacaaatcggactaggaaccaagaggttgcgggtctgatccctggcatcactcagt

SEQ ID NO: 26491 - DNA, 110 bp, synthetic construct
  source 1..110: mol_type = other DNA
gcccatgaaatgaccatcacttttctcctgaataaaagattgttaataacccacttatgcttatgtctttgaaagctagggggggttaggttacagctgactatcccttc

SEQ ID NO: 26492 - DNA, 110 bp, synthetic construct
  source 1..110: mol_type = other DNA
ttcaacccctgggtccaggaatttctgcatgccatgcaagcagcaaaagctcagcccagttgtcaactctttgggtggcctttcctgatgctcccacagtaggatacggt

SEQ ID NO: 26493 - DNA, 110 bp, synthetic construct
  source 1..110: mol_type = other DNA
ccagttgtcaactctttgggtggcctttcctgatgctcccacagtaggatacggtaggatcaccttccctgtgagtcagcatacccctgagtttttctctgtgatagtat

SEQ ID NO: 26494 - DNA, 110 bp, synthetic construct
  source 1..110: mol_type = other DNA
agtgaaccctaatataaactctggactttggatgattatggtacatcagtgtagtttcttcaattgtaacaaatgtaccactctaatgcagaatttagtaataagggaag

SEQ ID NO: 26495 - DNA, 110 bp, synthetic construct
  source 1..110: mol_type = other DNA
ttcttcaattgtaacaaatgtaccactctaatgcagaatttagtaataagggaagactgtacacgtgtacctcagctgaactttgctgtgaatctgctctaaaaattaaa

SEQ ID NO: 26496 - DNA, 110 bp, synthetic construct
  source 1..110: mol_type = other DNA
tttccagcactaacaaggcaacagaggttcagattttaaaaaaggtcccttatggactggtgcaccttatgacaaattctccagaatttgtgtctcctgacacagccaga

SEQ ID NO: 26497 - DNA, 110 bp, synthetic construct
  source 1..110: mol_type = other DNA
actggtgcaccttatgacaaattctccagaatttgtgtctcctgacacagccagacagagaagtactgcttgtgactttgtgtctcagaactccagtctctttggccacc

SEQ ID NO: 26498 - DNA, 110 bp, synthetic construct; identical to SEQ ID NO: 26496
  source 1..110: mol_type = other DNA

SEQ ID NO: 26499 - DNA, 110 bp, synthetic construct; identical to SEQ ID NO: 26497
  source 1..110: mol_type = other DNA

SEQ ID NO: 26500 - DNA, 110 bp, synthetic construct
  source 1..110: mol_type = other DNA
tcctttgaaaaccattgaaactgaaagtcaagtaaaatcatgagttttgccatgaaagaatccactcatacttttctgtacacaatcagaactaaaagttctggaactag

SEQ ID NO: 26501 - DNA, 110 bp, synthetic construct
  source 1..110: mol_type = other DNA
aagaatccactcatacttttctgtacacaatcagaactaaaagttctggaactaggactctcaggataaaacttctgttttattctttattatgttccgggaacatcagt

SEQ ID NO: 26502 - DNA, 110 bp, synthetic construct
  source 1..110: mol_type = other DNA
ttgactagaactcagacctcttgcttcccagaccacttatctatctatggcaccgattcatttatcaatttgtttattgacatgtgtatacctaaagctcattaatgatg

SEQ ID NO: 26503 - DNA, 110 bp, synthetic construct
  source 1..110: mol_type = other DNA
gagcttcagctaccggcccacaccacagccacagcagtgacagatccgagcctagtccacgccctccaccacagctcacagccacaccaggtccttaactcactaagtga

SEQ ID NO: 26504 - DNA, 110 bp, synthetic construct
  source 1..110: mol_type = other DNA
gcccacaccacagccacagcagtgacagatccgagcctagtccacgccctccaccacagctcacagccacaccaggtccttaactcactaagtgaggccagggatcaaat

SEQ ID NO: 26505 - DNA, 110 bp, synthetic construct
  source 1..110: mol_type = other DNA
gacaactggcgggatctttgccagccaaagctggccccacaggtctctagcaggtgagggcctctgagtacagataccacagcctatccttgacccacacgggtgcaggt

SEQ ID NO: 26506 - DNA, 110 bp, synthetic construct
  source 1..110: mol_type = other DNA
ggaaaattatctactcttactcgcagggctgttttaaccccaaagttataacaactgggaaaacgtgttttgaagacgcctaaaccagagcccagacttaggctcctggg

SEQ ID NO: 26507 - DNA, 110 bp, synthetic construct
  source 1..110: mol_type = other DNA
tgggaaaacgtgttttgaagacgcctaaaccagagcccagacttaggctcctgggaaccagcttctgagatgaaagatcacaggtagggcttccagaaactcccctgtga

SEQ ID NO: 26508 - DNA, 110 bp, synthetic construct
  source 1..110: mol_type = other DNA
ctcaggcaccacaaggagtttgacacaagagccccagttttaagtggaatcttctggataaccttggcattcatctagcctcctagctcagcttcaatcaccttaaccac

SEQ ID NO: 26509 - DNA, 110 bp, synthetic construct
  source 1..110: mol_type = other DNA
tttcagaaaggctacaggagacattactgagatccctttaggaatacagcctggaagctctgcataaaacttgaaacctcttttttttttttcctgattgggaatgtcaa

SEQ ID NO: 26510 - DNA, 110 bp, synthetic construct
  source 1..110: mol_type = other DNA
gcgggcttcctgtgtgctaattctcaccttgacccctgaatgaaatagcatctcccacgaatcaaaggcaaagaaatgagctctgaggtttgggaacttgcccagggtca

SEQ ID NO: 26511 - DNA, 110 bp, synthetic construct
  source 1..110: mol_type = other DNA
cacgaatcaaaggcaaagaaatgagctctgaggtttgggaacttgcccagggtcaggtgcctgtgaagagagctgggttgaaaccccaggcattgagtcaaggggcctgt

SEQ ID NO: 26512 - DNA, 110 bp, synthetic construct
  source 1..110: mol_type = other DNA
gtttcttcttacccgggggtgggagctatgtaattttctaggcccagtgtgagatgaaaatgcagagaccttgctaggggtagaaaagtcaacatcccctaaccagcaga

SEQ ID NO: 26513 - DNA, 110 bp, synthetic construct
  source 1..110: mol_type = other DNA
aatggtgatggcacaagccagcctcattctccctcagcctcctcactcgcaggaatcctcctccttcaaagaggagttagccgccaccagcaggtgactcctggccacct

SEQ ID NO: 26514 - DNA, 110 bp, synthetic construct
  source 1..110: mol_type = other DNA
tcctcctccttcaaagaggagttagccgccaccagcaggtgactcctggccacctgccctccaggtgtgcccacatctccccctggtcgtcagtgtccgaagcccacccc

SEQ ID NO: 26515 - DNA, 110 bp, synthetic construct
  source 1..110: mol_type = other DNA
caggtagcatcttacaaaccagagctgtgtgtctgacttgacgacaaaagtgacttttcagagttcccgctgtggcacaatgagattggtggtgtcgggagccctgggac

SEQ ID NO: 26516 - DNA, 110 bp, synthetic construct
  source 1..110: mol_type = other DNA
aagtctacaaacaaaccatatgatagaatcacagtgtcttagagatgcgagagcagtaaatgttaactattttaatcaggcatgtgcattgattatgaaccttccaggga

SEQ ID NO: 26517 - DNA, 110 bp, synthetic construct
  source 1..110: mol_type = other DNA
gtaaatgttaactattttaatcaggcatgtgcattgattatgaaccttccagggaccaagaaaccacagaagtagttgtgtgggatgcaccagagcaaacctggtccctg

SEQ ID NO: 26518 - DNA, 110 bp, synthetic construct
  source 1..110: mol_type = other DNA
aacttccacatgccacaggtgcggccttaaaaaaattaataaacaaaaacctcacgccatagcaatgaccctagtcacagcagtgacaatgctggatcctaacctgcaga

SEQ ID NO: 26519 - DNA, 110 bp, synthetic construct
  source 1..110: mol_type = other DNA
gccatagcaatgaccctagtcacagcagtgacaatgctggatcctaacctgcagagccaccagagaactcctacacacaggaatgatacagcaagcagcactgtttacaa

SEQ ID NO: 26520 - DNA, 110 bp, synthetic construct
  source 1..110: mol_type = other DNA
ttctcagcacttgctgaaatgggtttacaatgtccattttgagggacagagcccacagctggttgtccaggcacaggatgctacacagagtcaaggagaccttgacagct

SEQ ID NO: 26521 - DNA, 110 bp, synthetic construct
  source 1..110: mol_type = other DNA
cagctggttgtccaggcacaggatgctacacagagtcaaggagaccttgacagctgggctctgcacacatcagcttatacacacaagccaagggttgctcagaaaaaggc

SEQ ID NO: 26522 - DNA, 110 bp, synthetic construct
  source 1..110: mol_type = other DNA
ttaaaaggccatatatactgaaaagactataatagactaaactctgcctgcccgcagttgaaattaacttaaaacatactagcttaaccaagatcttgtcagattaaaaa

SEQ ID NO: 26523 - DNA, 110 bp, synthetic construct
  source 1..110: mol_type = other DNA
aatgtccagcaggaacagttaagacgctggctgacccagctttcagaaagtaatctgatttcaccagagagtatacttcaaggaccatatgatattacttcaacacttcc

SEQ ID NO: 26524 - DNA, 110 bp, synthetic construct
  source 1..110: mol_type = other DNA
tgatttcaccagagagtatacttcaaggaccatatgatattacttcaacacttcctaatataagtgttacagcagttcactgtatagtctatatgcttgttcagagacta

SEQ ID NO: 26525 - DNA, 110 bp, synthetic construct
  source 1..110: mol_type = other DNA
aagatgaagcaaggagctcgaggtgcacaagggtgaaccaattctggggctcccgcaaatgctacttcagcatctgcaatgaccccgagtgatgcttctccacgtgtgca

SEQ ID NO: 26526 - DNA, 110 bp, synthetic construct
  source 1..110: mol_type = other DNA
ttctagatgaatctgagcaacctttcaaggagcctaaattcatcaactgtacttccttgggtcctctggtgccccaccccactccctttcaaggcatggtctcaccttta

SEQ ID NO: 26527 - DNA, 110 bp, synthetic construct
  source 1..110: mol_type = other DNA
cttgggtcctctggtgccccaccccactccctttcaaggcatggtctcacctttagcacccagacccttcacaggtccctgcttgcacaactgaatcataacacaacttc

SEQ ID NO: 26528 - DNA, 110 bp, synthetic construct
  source 1..110: mol_type = other DNA
gctccaacataacagcatgtagggccagcttcctgggcaggtgacctgtgccatttcacagggccccatgctcagaagagcccatactcagaatggcctctgctgagaag

SEQ ID NO: 26529 - DNA, 110 bp, synthetic construct
  source 1..110: mol_type = other DNA
acaggaagaagaaagtccttcaggaggctagtgaactgagcttcagtctgtgatgccagtgtccctgggaccccctcactgcaccagagtggttttcatgggaaaccttc

SEQ ID NO: 26530 - DNA, 110 bp, synthetic construct
  source 1..110: mol_type = other DNA
tgagttataagtcagaatcaggggcagaaacttatctttaaaatgtaaaatacactagggagtatagtgattactactttcatacactaaatagctagctaggtagatac

SEQ ID NO: 26531 - DNA, 110 bp, synthetic construct
  source 1..110: mol_type = other DNA
aactaaagttcatgcgtgttgttaaagacatagctcattcactttgtgtctgtgtgatattccatgctatgactggaccatttgttcattctctggtcagtggacatttg

SEQ ID NO: 26532 - DNA, 110 bp, synthetic construct
  source 1..110: mol_type = other DNA
gatattccatgctatgactggaccatttgttcattctctggtcagtggacatttgggaggtgttaaattttcactcttatacagtaataaatagacacacacatcacctg

SEQ ID NO: 26533 - DNA, 110 bp, synthetic construct
  source 1..110: mol_type = other DNA
tgagaggctgtagcatagttgaaaagctttcgttgttctttcttatgtggagatctgatgggtacaggtattacttcttgcagaggagacacctgaataatgctggagac

SEQ ID NO: 26534 - DNA, 110 bp, synthetic construct
  source 1..110: mol_type = other DNA
aatggaaaagtatcaggggacagagaatgccactaggatccaaaactgggttgctgttcttttttgcttttgggggccagacctgcagcatatagacgttcccaggccag

SEQ ID NO: 26535 - DNA, 110 bp, synthetic construct
  source 1..110: mol_type = other DNA
aatacacaatggctctgcaggcagactttctctagaattttctgtgacaatagtagggagactctaaatgcagcatgagctacactgacccagcttccagggagagggct

SEQ ID NO: 26536 - DNA, 110 bp, synthetic construct
  source 1..110: mol_type = other DNA
atactttcaaatgtattggcgtagcctgcaagtccccacctgattgtatctccggcttcacctccagctgtgtctcccattatcccctctgctctagatatttcccattc

SEQ ID NO: 26537 - DNA, 110 bp, synthetic construct
  source 1..110: mol_type = other DNA
ttatgagtgcaaaaggattaggaacctgccttaagaaagctaatcaggggcaatgagggcctggaggcctggagaacaggttaggtagggccaagcagaaaagttatgcg

SEQ ID NO: 26538 - DNA, 110 bp, synthetic construct
  source 1..110: mol_type = other DNA
aaagctaatcaggggcaatgagggcctggaggcctggagaacaggttaggtagggccaagcagaaaagttatgcgggtttggagttcccattgtggctcagtggtttaag

SEQ ID NO: 26539 - DNA, 110 bp, synthetic construct
  source 1..110: mol_type = other DNA
ctttctagaattgctctggaattttctagaatcgttggagaaggctttggggtagagctccagcatactcaaaggcaggtgaaggaagtttttcagcaggacttgtccca

SEQ ID NO: 26540 - DNA, 110 bp, synthetic construct
  source 1..110: mol_type = other DNA
agaaaacctgcagtcttgtcactctgtttctccaaatatttcctaaaatctagtctaaatggacttttttaagcttctgtgctctatatctcactcactagtctgtgagt

SEQ ID NO: 26541 - DNA, 110 bp, synthetic construct
  source 1..110: mol_type = other DNA
catacaaaggactaaagtcaatgtgttaattagtgttgggttttggccttataagatgtctctccacagcttatgtgattatagcttatgtggtttatgcacctttctgt

SEQ ID NO: 26542 - DNA, 110 bp, synthetic construct
  source 1..110: mol_type = other DNA
tggaagcttcaataccgctgtttttacttgcaggtcagggagctcttttttgtgggaagagtgagaaagtggcaggaagtcttttgccctgaggttctgtttacatggaa

SEQ ID NO: 26543 - DNA, 110 bp, synthetic construct
  source 1..110: mol_type = other DNA
gcaatgctggatcctttgacccactgcatcaggctggggattgaacccgtgcctccacagtgacctgagctgctgcaatgcaacacagtgggaactctagtctatttaaa

SEQ ID NO: 26544 - DNA, 110 bp, synthetic construct
  source 1..110: mol_type = other DNA
cacagtgacctgagctgctgcaatgcaacacagtgggaactctagtctatttaaaaaattgaatagaaacctaccatttcttctttcaaagagagccctgtatataaata

SEQ ID NO: 26545 - DNA, 110 bp, synthetic construct
  source 1..110: mol_type = other DNA
cactctggtttccccctctaacaattagcctctatggtactacaaatgaaattttattttttaattaaaaaatcagctagatcagcttttctatttcatgactgagtatt

SEQ ID NO: 26546 - DNA, 110 bp, synthetic construct
  source 1..110: mol_type = other DNA
gtacagaatattttcaggcccaaatggtgctgacaacccaagttgcatcatcattagacaaagcagggtgtctttggcagcattttataagcaaagttttggtaccctaa

SEQ ID NO: 26547 - DNA, 110 bp, synthetic construct
  source 1..110: mol_type = other DNA
agacaaagcagggtgtctttggcagcattttataagcaaagttttggtaccctaatatcaaacacatcctgcgtttagaaatctattaccactcctccccaacccccttc

SEQ ID NO: 26548 - DNA, 110 bp, synthetic construct; identical to SEQ ID NO: 26546
  source 1..110: mol_type = other DNA

SEQ ID NO: 26549 - DNA, 110 bp, synthetic construct; identical to SEQ ID NO: 26547
  source 1..110: mol_type = other DNA

SEQ ID NO: 26550 - DNA, 110 bp, synthetic construct
  source 1..110: mol_type = other DNA
taaggcctggtactggctgtcataggaatcacacactttgataagacacagtcctgggtcttcataaatttactatcattcgttggggagctaaggaaggtaaacagaaa

SEQ ID NO: 26551 - DNA, 110 bp, synthetic construct
  source 1..110: mol_type = other DNA
gggtcttcataaatttactatcattcgttggggagctaaggaaggtaaacagaaacaaaacacaaggtggcaagtctatgatatcggtaccctctaaatcctagtgtttg

SEQ ID NO: 26552 - DNA, 110 bp, synthetic construct
  source 1..110: mol_type = other DNA
tcattgaaatctctctgccatctatcagtcatgtaactgaccaaatcagttgaacacagtattaatgcatcatcaatctggattatcctgattatcaaggaaagcataat

SEQ ID NO: 26553 - DNA, 110 bp, synthetic construct; identical to SEQ ID NO: 26552
  source 1..110: mol_type = other DNA

SEQ ID NO: 26554 - DNA, 110 bp, synthetic construct
  source 1..110: mol_type = other DNA
ccaggctagtggtcaaatcatagctgtagctgtcggcctacactacagccccagtaaagcgggatccttaacccgctgagcgacaccagggatggatcctgcatcctcat

SEQ ID NO: 26555 - DNA, 110 bp, synthetic construct; identical to SEQ ID NO: 26554
  source 1..110: mol_type = other DNA

SEQ ID NO: 26556 - DNA, 110 bp, synthetic construct
  source 1..110: mol_type = other DNA
cagacccaagtcaggactctgaactaccagaaaatatagatcacctctcctcactagccagtgcccacactggtctccaatattagaacactgtgtatggtgtttttcac

SEQ ID NO: 26557 - DNA, 110 bp, synthetic construct
  source 1..110: mol_type = other DNA
atttataatagcttcaaaatattatgtccataaggatacatcaaataatggctgtgccaatctacactgaaaactataaaacatttagagttcctgtcatggctcagtgg

SEQ ID NO: 26558 - DNA, 110 bp, synthetic construct; identical to SEQ ID NO: 26557
  source 1..110: mol_type = other DNA

SEQ ID NO: 26559 - DNA, 110 bp, synthetic construct
  source 1..110: mol_type = other DNA
aaaatattagattatattgcttttctgctttaaaaatgtgttcatgctttctcatctagaatacaatacagtattccagcaaaacccattgctaactggaacttcccaac

SEQ ID NO: 26560 - DNA, 110 bp, synthetic construct
  source 1..110: mol_type = other DNA
caggaatcctacttgcaataggcttatagaaaaagctgtctatccaactgccacggattgagtttccctcaagcagcccttaaataagagtttatgtaaagataacttac

SEQ ID NO: 26561 - DNA, 110 bp, synthetic construct
  source 1..110: mol_type = other DNA
taaggcaaacttaggcaacaaatgcattttggaaacttcatagtgaagacaggggtcccaaaagatgtagagaactgggcctttgaatcattacttccaagagagcagcc

SEQ ID NO: 26562 - DNA, 110 bp, synthetic construct
  source 1..110: mol_type = other DNA
tgaaaactgaacagagggaatcctagggagagctattcttggtgatcctgcttatagtcctcatctttctctttgtgtgtgtgtgtgtgctcatttctactcttttcgta

SEQ ID NO: 26563 - DNA, 110 bp, synthetic construct
  source 1..110: mol_type = other DNA
tttaacagtattttcctgagccctcaataatcaagaccaagatgaggaccacagtttcatggttcccagaaagctgagcttgtctgtgggaagaaaatgcagctccttcc

SEQ ID NO: 26564 - DNA, 110 bp, synthetic construct
  source 1..110: mol_type = other DNA
caataggaagagataaataaattctaaggtcacatacacattagctacttttgctgcagtggggctattaccactgggctttgggccagatgagatatacagaggaggtt

SEQ ID NO: 26565 - DNA, 110 bp, synthetic construct
  source 1..110: mol_type = other DNA
cagggccaaatacttcactttaaagcaggaaaacatgaggtattgtaatagagaacaaatctgactccatattggatctggttcttttcctttaaacttcttactctgtt

SEQ ID NO: 26566 - DNA, 110 bp, synthetic construct
  source 1..110: mol_type = other DNA
taatagagaacaaatctgactccatattggatctggttcttttcctttaaacttcttactctgttgctttggctacaagctttaatcactaacagaatgctgcctatagc

SEQ ID NO: 26567 - DNA, 110 bp, synthetic construct
  source 1..110: mol_type = other DNA
tcttggtgtttgctgtacacccagtgcttatcccatgtatggtatgtagaaggcatcaatacatatttattgaatgctaaatgaataaagagaaaagaaaaatataattt

SEQ ID NO: 26568 - DNA, 110 bp, synthetic construct
  source 1..110: mol_type = other DNA
ccatgtgcgactggcttagtaaggcagccctgtactagggtgcagtgtaaggaagttcttgttgctaagcaccaaggccaacaattctatcagttgtaaagcttacattt

SEQ ID NO: 26569 - DNA, 110 bp, synthetic construct
  source 1..110: mol_type = other DNA
ttcttgttgctaagcaccaaggccaacaattctatcagttgtaaagcttacattttgatttcattatgcctactatgtttctcttgaatggttcaagatgcagatgggga

SEQ ID NO: 26570 - DNA, 110 bp, synthetic construct
  source 1..110: mol_type = other DNA
ttgcacattttacagtgtattggtggatttttaggactgcaactgtggcatatggagtcaatttggagctgtagctgcctgcttgtgccacagccacagcaacactaggt

SEQ ID NO: 26571 - DNA, 110 bp, synthetic construct
  source 1..110: mol_type = other DNA
tgtattggtggatttttaggactgcaactgtggcatatggagtcaatttggagctgtagctgcctgcttgtgccacagccacagcaacactaggtctgagccacatctgc

SEQ ID NO: 26572 - DNA, 110 bp, synthetic construct
  source 1..110: mol_type = other DNA
aggaggacgaaagcatctggtgacaaaaatagcaggcagggtagagaggaacttaccttagagctttaagtaatgtggattatattaaggacactactgagaaaaaatat

SEQ ID NO: 26573 - DNA, 110 bp, synthetic construct
  source 1..110: mol_type = other DNA
aaaatagcaggcagggtagagaggaacttaccttagagctttaagtaatgtggattatattaaggacactactgagaaaaaatattctatacataatttttagtttacag

SEQ ID NO: 26574 - DNA, 110 bp, synthetic construct
  source 1..110: mol_type = other DNA
ctattcttatgtcttcagctaggtcccattccatttactacctcatatataaaaacatttcctacgtccagctataacatgtgtcttggttaaatgttttagttcatgtg

SEQ ID NO: 26575 - DNA, 110 bp, synthetic construct
  source 1..110: mol_type = other DNA
catttcctacgtccagctataacatgtgtcttggttaaatgttttagttcatgtggaggtttctaagggaagcatttatttacagagtgcttaaatctcagttctgcata

SEQ ID NO: 26576 - DNA, 110 bp, synthetic construct
  source 1..110: mol_type = other DNA
ctgagaaggaagaacataatagagaatacagattcattgataaatctggtgggaggaacctgaagaaaattttacttgagctttcattttctctgtaaggagttaaatga

SEQ ID NO: 26577 - DNA, 110 bp, synthetic construct
  source 1..110: mol_type = other DNA
catttatgagcacagttccccaaacttcaggctgtcatcttagcaattgatgcgctctatatataaagatccatttgcaaatttttatagactcttaagctattgccaat

SEQ ID NO: 26578 - DNA, 110 bp, synthetic construct
  source 1..110: mol_type = other DNA
agacatttcaaagtcattctaatttaaaaggaaaacgttggccagctgggtacagggacctcgcagttggaataaatcacgtcggctgctctatggagaacttggcactc

SEQ ID NO: 26579 - DNA, 110 bp, synthetic construct
  source 1..110: mol_type = other DNA
ctttcaaaaagttttgcaaaagagttaagtacttgccttaatatgttctgcttactgaaacaatagttcttctaaacacttttcttacattttcttctcggttattatcc

SEQ ID NO: 26580 - DNA, 110 bp, synthetic construct
  source 1..110: mol_type = other DNA
cctagttggattcatatctgctgagccacaatgggaactgccaggtttatatttcagttcacataagcttgtgcgtctttattacatgaaccataattatcatctaaact

SEQ ID NO: 26581 - DNA, 110 bp, synthetic construct
  source 1..110: mol_type = other DNA
atctgctgagccacaatgggaactgccaggtttatatttcagttcacataagcttgtgcgtctttattacatgaaccataattatcatctaaactaacatttaatatatt

SEQ ID NO: 26582 - DNA, 110 bp, synthetic construct
  source 1..110: mol_type = other DNA
agtggcaaaagaattgttttataaattgtttccaggtccttagatagatagataatggttaaaaattatgctggtccactctaggaattcatgcataatcagccaaatat

SEQ ID NO: 26583 - DNA, 110 bp, synthetic construct
  source 1..110: mol_type = other DNA
tactagatgttcatgaattcccagaactactggtgcctaaggattgataatgtaaccccatgacatcactctgttaaccaaccatcagctaatcagagttgtgcattaat

SEQ ID NO: 26584 - DNA, 110 bp, synthetic construct
  source 1..110: mol_type = other DNA
acaaatctattgctataggctgaatgtttatgtctccccaaaattcagagtgaaacattcatgagtgaaatttgtgcccttatgggagttgtcatcatggctcagtggtt

SEQ ID NO: 26585 - DNA, 110 bp, synthetic construct
  source 1..110: mol_type = other DNA
taggctgaatgtttatgtctccccaaaattcagagtgaaacattcatgagtgaaatttgtgcccttatgggagttgtcatcatggctcagtggttaaccaatccgactag

SEQ ID NO: 26586 - DNA, 110 bp, synthetic construct
  source 1..110: mol_type = other DNA
ccctgtgctatacagtaggacctcattgcttatccattgtttgtatctagcaaccccaaactcctagcccacccactccttccccctctcccttggcaaccacaagtctg

SEQ ID NO: 26587 - DNA, 110 bp, synthetic construct; identical to SEQ ID NO: 26586
  source 1..110: mol_type = other DNA

SEQ ID NO: 26588 - DNA, 110 bp, synthetic construct
  source 1..110: mol_type = other DNA
catgcatgatgtatctcttcacatctgctagaatggctatcttctaaaagacaagagtaacaagtactagtgaaggtttgaaaaaaaagggaaatcttatgcactgttgt

SEQ ID NO: 26589 - DNA, 110 bp, synthetic construct
  source 1..110: mol_type = other DNA
gctatcttctaaaagacaagagtaacaagtactagtgaaggtttgaaaaaaaagggaaatcttatgcactgttgttggaaatatacagccattatggatcaatatgattc

SEQ ID NO: 26590 - DNA, 110 bp, synthetic construct
  source 1..110: mol_type = other DNA
tatctttccatttatttgatctccttcgagttctttcctcaatgtcttacagctttcagttttcttttaattacagctctttcactaccctggttaaatttatttctaag

SEQ ID NO: 26591 - DNA, 110 bp, synthetic construct; identical to SEQ ID NO: 26590
  source 1..110: mol_type = other DNA

SEQ ID NO: 26592 - DNA, 110 bp, synthetic construct
  source 1..110: mol_type = other DNA
caggtgaaatacctctccatccagctcctgtctgtgtgtcgaacttgatcttttcacacttcaccaaacactaaatttcagccaaactaaactggataatctggtgccaa

SEQ ID NO: 26593 - DNA, 110 bp, synthetic construct
  source 1..110: mol_type = other DNA
tggagatcccttgattttaaccgtactcaatttttcccttttcaagatttttacaaaataaaatctttattttaggttgggatggttccttgcagaatgtctgctcctta

SEQ ID NO: 26594 - DNA, 110 bp, synthetic construct; identical to SEQ ID NO: 26593
  source 1..110: mol_type = other DNA

SEQ ID NO: 26595 - DNA, 110 bp, synthetic construct
  source 1..110: mol_type = other DNA
acaaattataaacgaaataataactaacataggacaaaggaagctacattcttaaacatgtgtggaacagctccaccatgcaggattttgtcctcccttgaatatttcct

SEQ ID NO: 26596 - DNA, 110 bp, synthetic construct
  source 1..110: mol_type = other DNA
acatgtgtggaacagctccaccatgcaggattttgtcctcccttgaatatttccttaaaagcttaagagtcaaaaatgtcaaaaacaatgggagtatgggggtgagatag

SEQ ID NO: 26597 - DNA, 110 bp, synthetic construct
  source 1..110: mol_type = other DNA
aatatacaaacaactcacacaattcaacaacacaaaagcaaacaaacaacccaatcaaaaaaatgggcagaggactcaaacaaatatttcttcaaagaagacatgaatgg

SEQ ID NO: 26598 - DNA, 110 bp, synthetic construct
  source 1..110: mol_type = other DNA
caaaaaaatgggcagaggactcaaacaaatatttcttcaaagaagacatgaatggccagcaggcatatgaaaaaattttcaacattgtgaattatcagagaactacaaat

SEQ ID NO: 26599 - DNA, 110 bp, synthetic construct
  source 1..110: mol_type = other DNA
ctggccacgatgaccaactctagatgacaagctttgactggctttccttcttgtcctgtgtcctagatctcactgctcacgtgcattccttagcactacattacaaaacc

SEQ ID NO: 26600 - DNA, 110 bp, synthetic construct
  source 1..110: mol_type = other DNA
tattcttatcaaaaaaaaaaaaaaaaaaagaactgttctcttgtagtgagagacagggaattctgagtccagataaagcaggatggtgacttgaacaagggtggtgatgg

SEQ ID NO: 26601 - DNA, 110 bp, synthetic construct
  source 1..110: mol_type = other DNA
tcccaacagtcagccacactcactaagaacataaagtatccccgtttaaaatactgtagtaaacaagtgtaggagtttatctatattgaatggctactccaaggatcatt

SEQ ID NO: 26602 - DNA, 110 bp, synthetic construct
  source 1..110: mol_type = other DNA
caaattaacagatacaaaacaacacatttgcatttaaaataaactttaaatgatgggagagatctgcagagtaagaatcaatgaagagtcatgctttcatttctcttcgg

SEQ ID NO: 26603 - DNA, 110 bp, synthetic construct
  source 1..110: mol_type = other DNA
cccacccttgggagtgactgcactgacagatgaccatgatatcttttgttttgtccaattaactacagcccaggaagctgtacttcagatagctttgaaatactgtccca

SEQ ID NO: 26604 - DNA, 110 bp, synthetic construct
  source 1..110: mol_type = other DNA
caattaactacagcccaggaagctgtacttcagatagctttgaaatactgtcccaaagagaaaagcagaaatatcatcatctatttctctcagagcacaattgagtcatt

SEQ ID NO: 26605 - DNA, 110 bp, synthetic construct
  source 1..110: mol_type = other DNA
tggaatgccactgaaaattcacagaggggagcaccctaggatattttaaattttaagagaaacacaggggcatctgtaaggaatccagcaatctactgctcttggaatat

SEQ ID NO: 26606 - DNA, 110 bp, synthetic construct
  source 1..110: mol_type = other DNA
cagcatttgctcactttgtgtctctgtgtcaccatttggtgattatttcaatattttaaacattgcattgtttttacatttgttatggtaatctgtgatgagtaagtttg

SEQ ID NO: 26607 - DNA, 110 bp, synthetic construct
  source 1..110: mol_type = other DNA
aaaaattcagaaaataccacaagtcctatatcacaagctattggcattaataagccagagaattcttatagatccattgtgttatggacaaacttgacagagggaacaaa

SEQ ID NO: 26608 - DNA, 110 bp, synthetic construct
  source 1..110: mol_type = other DNA
tgaatataaaattgacaaatagaatcaacacccaacatgtaaatggagaccctctagggagtaaaaactactaaggcagtcacgttgaataattaattatttctcttttg

SEQ ID NO: 26609 - DNA, 110 bp, synthetic construct
  source 1..110: mol_type = other DNA
caacacccaacatgtaaatggagaccctctagggagtaaaaactactaaggcagtcacgttgaataattaattatttctcttttggtttccaacaattttaacacttttt

SEQ ID NO: 26610 - DNA, 110 bp, synthetic construct
  source 1..110: mol_type = other DNA
tcctcacccattttcactgccatcatgccacagcagcccaagccaccatcctgttgaacttgaattctggcagtggcttctcagctggtctctctgtttctaaccatgcc

SEQ ID NO: 26611 - DNA, 110 bp, synthetic construct
  source 1..110: mol_type = other DNA
tagtacttaatagcattaatgcttagcagataatcttgcacagagtaggaatttaacaaaaaggcctgaaatttaaagtatactttatattccctgagcataagaaaagg

SEQ ID NO: 26612 - DNA, 110 bp, synthetic construct; identical to SEQ ID NO: 26611
  source 1..110: mol_type = other DNA

SEQ ID NO: 26613 - DNA, 110 bp, synthetic construct; identical to SEQ ID NO: 26611
  source 1..110: mol_type = other DNA

SEQ ID NO: 26614 - DNA, 110 bp, synthetic construct; identical to SEQ ID NO: 26611
  source 1..110: mol_type = other DNA

SEQ ID NO: 26615 - DNA, 110 bp, synthetic construct
  source 1..110: mol_type = other DNA
cttgctcaattacctacatcagtctgtccaataggggtcttaagggtggaagtgctctgtaaagctcatagtttctttacctttttcttccagtaaatggagtcacaggg

SEQ ID NO: 26616 - DNA, 110 bp, synthetic construct
  source 1..110: mol_type = other DNA
tgtcaggtggttgacaatgctaagaaaatatggaaggaattagctatacatgtcagtcttagaaaataatttatagttgggaggtggaattgtagccacatctatatgat

SEQ ID NO: 26617 - DNA, 110 bp, synthetic construct
  source 1..110: mol_type = other DNA
gttgtcggcctattcctataaactcacagctcttccatgtaatttacaaattgttctatctcactagagttgtagttgttctacattagtttgcctgacaacagtttctt

SEQ ID NO: 26618 - DNA, 110 bp, synthetic construct
  source 1..110: mol_type = other DNA
atggaggtatttcacttgttttgaccaatggcagttgggtacaaggttcctaaggaggcatttaacagctgttctggtatgagtcatgatggagctttcctcagctgcct

SEQ ID NO: 26619 - DNA, 110 bp, synthetic construct
  source 1..110: mol_type = other DNA
atgaggatgactggctctgaattcactctgacagaagaagaagggaggcagccctcaggagaattcagagcgattcggccgagcagccggatacctcccggcgtggtgtg

SEQ ID NO: 26620 - DNA, 110 bp, synthetic construct
  source 1..110: mol_type = other DNA
tagaatatgaaacaataatcagtgaattcagatagaaaaggatcttttgtctcaagtttctatttgggataaggagagaagataaccttgtagagtattcccctaacaac

SEQ ID NO: 26621 - DNA, 110 bp, synthetic construct
  source 1..110: mol_type = other DNA
gcagaaagctgacttattaagtatcctcacaggttggacagcacagagctgaaagctattaatcctataatcttatataatcttattcatgagggctctactttgacttt

SEQ ID NO: 26622 - DNA, 110 bp, synthetic construct
  source 1..110: mol_type = other DNA
ctattaatcctataatcttatataatcttattcatgagggctctactttgactttatctaatcctaatcactcccaataccttcacctcctaaaagcatcacagagtagg

SEQ ID NO: 26623 - DNA, 110 bp, synthetic construct
  source 1..110: mol_type = other DNA
gtaagaaggtgatgaaaatattatgtaaactattaagaagatacctatatgagctcccctgtagtgtagtaggttaatgataaggcattgttacctcagtagctcaagtc

SEQ ID NO: 26624 - DNA, 110 bp, synthetic construct
  source 1..110: mol_type = other DNA
cactgtaggaatagaaaagagtattaacaacagagagtatataagaaattctttggagcatctggtatgttcaacatctcagttgtggtgatggttttataactctttaa

SEQ ID NO: 26625 - DNA, 110 bp, synthetic construct
  source 1..110: mol_type = other DNA
gagcatctggtatgttcaacatctcagttgtggtgatggttttataactctttaaaattgtccaaactcaggaaactgaataccttaaagggagattttttttttttttt

SEQ ID NO: 26626 - DNA, 110 bp, synthetic construct
  source 1..110: mol_type = other DNA
aaataaaaacgatgttcaaaggattagctaagtctctgaattaaatgtctggctcagaaaataacccaatgacattcattctgacacagacatcaccttcttaaatccag

SEQ ID NO: 26627 - DNA, 110 bp, synthetic construct
  source 1..110: mol_type = other DNA
attttgctgttgttcctgttacctatactctgtgtgtctataagatgccattattgaaagctcattccttgtgtattttctgtcaatcaccactgccccatgctgagtca

SEQ ID NO: 26628 - DNA, 110 bp, synthetic construct
  source 1..110: mol_type = other DNA
actgatgagtgcacacaaagaaaaatcaatttgtgggagtttatttcattggtgttgaaattgtatcttccctgataagcttggaacaaagtgcctagtttgtcttctaa

SEQ ID NO: 26629 - DNA, 110 bp, synthetic construct
  source 1..110: mol_type = other DNA
atccagactttcaattgacacaaacgtgaggtaatggattggtgatgttttaaactcctaacattgtcataactttttacagcaaaataaaattcacacattatttgtca

SEQ ID NO: 26630 - DNA, 110 bp, synthetic construct; identical to SEQ ID NO: 26629
  source 1..110: mol_type = other DNA

SEQ ID NO: 26631 - DNA, 110 bp, synthetic construct
  source 1..110: mol_type = other DNA
gtatatgttagctacaagggtcatgaaaaagagacttatcaagaatttgtcaatatttaaccttcatgtgaatttggatactacagcgtgtcactgacaagttgcctgtt

SEQ ID NO: 26632 - DNA, 110 bp, synthetic construct
  source 1..110: mol_type = other DNA
cataaactttgaagacaaaactcaaagtattctgaaaatttagtttcagagtattaggatggagtttcaagggtcacccctacaattcaggctgtgcaactgagtatata

SEQ ID NO: 26633 - DNA, 110 bp, synthetic construct
  source 1..110: mol_type = other DNA
tcatcaagtagagcattatgtatagtttcttttgtctttagtcttatagattctacttgttaaacatatacagctgacctttgaaaaacacagggattggggcactgccc

SEQ ID NO: 26634 - DNA, 110 bp, synthetic construct
  source 1..110: mol_type = other DNA
tggagatagacctcatttcttcttgaaagtaatgtcagcctcattgtcaaaagaacgaaaaggatgggacagataaaaaggtatggccatctttgtaacttagaatcaga

SEQ ID NO: 26635 - DNA, 110 bp, synthetic construct
  source 1..110: mol_type = other DNA
cgaaaaggatgggacagataaaaaggtatggccatctttgtaacttagaatcagaaatctcttttagaagtggctttgctagttagttattagcattgtaacctttgata

SEQ ID NO: 26636 - DNA, 110 bp, synthetic construct
  source 1..110: mol_type = other DNA
tgccacaaatgcggccataaaaaaaagaagacatgaagcagcagataaatgaggcattttccaaattgagccagacaggggagtgagtgaggatgtatgcacacttgcga

SEQ ID NO: 26637 - DNA, 110 bp, synthetic construct
  source 1..110: mol_type = other DNA
aaaaaaaaatcagagaatctcaaaataaaaataatttagctacaagggggaaaaaaaataaagcatggctttgttctgatattttcccgtttcgtcactcattggtgaga

SEQ ID NO: 26638 - DNA, 110 bp, synthetic construct
  source 1..110: mol_type = other DNA
taatattggtgtgtataaaataaaatatgaacctaagttttaaactattaaaattaggacttaaacaaaacaccctagccaatgccagcacacaaaaggatcatctgggg

SEQ ID NO: 26639 - DNA, 110 bp, synthetic construct; identical to SEQ ID NO: 26638
  source 1..110: mol_type = other DNA

SEQ ID NO: 26640 - DNA, 110 bp, synthetic construct
  source 1..110: mol_type = other DNA
taaatgtaattcaaaaaacaaaataagctccacgatgatataccagtttggtttgctgtgaactgcacacatgttagcactcaatatttttactgaataaatgaatgaat

SEQ ID NO: 26641 - DNA, 110 bp, synthetic construct
  source 1..110: mol_type = other DNA
atgctgcagatcttctcagatatgtaagtgaggcaggagtcaagaggatacataagatttttaaatcttgtatgaagattgaggtggtattatgaaccttgaatctcaaa

SEQ ID NO: 26642 - DNA, 110 bp, synthetic construct
  source 1..110: mol_type = other DNA
taaaagtcatcatgctcttacagcaggtgaaaaatcctttaacattgaactttaggagatgatgaaggtagctttcattcttccatctaactatccagatgatggtgtgt

SEQ ID NO: 26643 - DNA, 110 bp, synthetic construct
  source 1..110: mol_type = other DNA
aaatctgcaagaccctgggtaatgttcttattccagtcacaggtttcagctggagtaactagggtcctggccacattgattgttttccagttagattatgtaaatgtgcc

SEQ ID NO: 26644 - DNA, 110 bp, synthetic construct
  source 1..110: mol_type = other DNA
ataaaagaaactgaaagagtgaagctattctaaagagagaggaattgtttggggggttattttaattgtctagtctcttgcctagacagaggatattgactagggcaata

SEQ ID NO: 26645 - DNA, 110 bp, synthetic construct
  source 1..110: mol_type = other DNA
atttctaaatttctcaacttatgtttctgtccaacaactactgattatccacaatgaatttatatttaaggtcaccaatcagctatatgctatacaacatgcagcatcct

SEQ ID NO: 26646 - DNA, 110 bp, synthetic construct
  source 1..110: mol_type = other DNA
ttcattcttttatgaaaaaagaacagtagtgggggtgaataaaagctgaagggaatgacatttagatgaaagtgaaattactccacacaaaaaaagcattgtctaaaatg

SEQ ID NO: 26647 - DNA, 110 bp, synthetic construct
  source 1..110: mol_type = other DNA
ccagcacagtgagttaaaggatctggccacaactgtggtataggttgaagctacagctcagattcagtccctggtctgggaactcttccatatgctgcaggtgcagccat

SEQ ID NO: 26648 - DNA, 110 bp, synthetic construct
  source 1..110: mol_type = other DNA
gctcagattcagtccctggtctgggaactcttccatatgctgcaggtgcagccataaaataaacatacaaaccaaacaaacaaacgaacaaacaaatatttaaatgggaa

SEQ ID NO: 26649 - DNA, 110 bp, synthetic construct
  source 1..110: mol_type = other DNA
tcaataggcttcacaaataatatatcaaaaacattcaaaatatatagttgagagcagagcaaagataagaaatgacgtgccagaaacatgagatggagaaaagagagagg

SEQ ID NO: 26650 - DNA, 110 bp, synthetic construct
  source 1..110: mol_type = other DNA
agagcaaagataagaaatgacgtgccagaaacatgagatggagaaaagagagaggttaaaagtagcagttgatgattcactcatgtgagctgatgttgtatgtctgtgaa

SEQ ID NO: 26651 - DNA, 110 bp, synthetic construct
  source 1..110: mol_type = other DNA
ttcacctcagagatagtttctctgaccacccatcagcagtgaactcccagtgttttcctaatatatcagcttgcttgcttgactttattgtactttacgaatctgtaatc

SEQ ID NO: 26652 - DNA, 110 bp, synthetic construct
  source 1..110: mol_type = other DNA
tcacagaaccataccagtattaagcaattaaatcagaagtactatctctcctcgtgatttaaatacaagaaaactccatatttatttattccttctacagaagcatttgg

SEQ ID NO: 26653 - DNA, 110 bp, synthetic construct
  source 1..110: mol_type = other DNA
attagcctaatctttatatggacagaaatgaattgcctactgcatcttgatatttgaagctcattttagggatgcattggtgcaaaaataaaacaaacaaaaaaaaggga

SEQ ID NO: 26654 - DNA, 110 bp, synthetic construct
  source 1..110: mol_type = other DNA
gaagctcattttagggatgcattggtgcaaaaataaaacaaacaaaaaaaagggaactggctcttctttactgtctctaactgctttttaaatttaatgcaaaattatgt

SEQ ID NO: 26655 - DNA, 110 bp, synthetic construct
  source 1..110: mol_type = other DNA
gaaggtttgattcctgccctagcacagtaagttaaaaggatctggtgttaccaaaggcagctgtggcataggtcacaattgtggcttgggtcttatccctggcccaagaa

SEQ ID NO: 26656 - DNA, 110 bp, synthetic construct
  source 1..110: mol_type = other DNA
ggaaacttaactcactagtgaggccaaaaatagaacctgcatcctcatggatgctagtcaagctcttactgttgcaccacagtgggtactcccaagaataatattctaaa

SEQ ID NO: 26657 - DNA, 110 bp, synthetic construct; identical to SEQ ID NO: 26656
  source 1..110: mol_type = other DNA

SEQ ID NO: 26658 - DNA, 110 bp, synthetic construct
  source 1..110: mol_type = other DNA
tattatcattttaaatgctgttcagagtcatcagagccagagaagctgaggttttaatttctttgtaatgtgtggttacactacgtccctttgtttttcatcactaatct

SEQ ID NO: 26659 - DNA, 110 bp, synthetic construct
  source 1..110: mol_type = other DNA
aatttctttgtaatgtgtggttacactacgtccctttgtttttcatcactaatctgaagggggaagaaatctcattttaataccccattacactctacataacaaaatga

SEQ ID NO: 26660 - DNA, 110 bp, synthetic construct
  source 1..110: mol_type = other DNA
gccaagctaggagtcagttcagagctacagctgctggcctatacagctgccacgacaacactagattaaagccttgtctgtgacctacactacagctcaccacaatgcca

SEQ ID NO: 26661 - DNA, 110 bp, synthetic construct
  source 1..110: mol_type = other DNA
cagcctatttaaaagcttggggatttgttaatgttccaaggacctggagtctattagatcagatggcctgagcatgaacaaaactgtaggcactctgggtagttgatata

SEQ ID NO: 26662 - DNA, 110 bp, synthetic construct
  source 1..110: mol_type = other DNA
ttcttacacaaatgaggaagattgtttttggcatcctttcctttccaggtaccattttattattctatgactctctctagtagccagaaaactatacgctgcccaggttg

SEQ ID NO: 26663 - DNA, 110 bp, synthetic construct
  source 1..110: mol_type = other DNA
cttaaaaagggctacaaaaattgtaagtcccacaaaacctaaatccactcatgacaaatgttagactttacctcactatagagagatttctcccattagcttagacatct

SEQ ID NO: 26664 - DNA, 110 bp, synthetic construct
  source 1..110: mol_type = other DNA
aaatgttagactttacctcactatagagagatttctcccattagcttagacatcttctctcccaatttttctagtctgggcaggatattttttgttccagatacattttt

SEQ ID NO: 26665 - DNA, 110 bp, synthetic construct; identical to SEQ ID NO: 26663
  source 1..110: mol_type = other DNA

SEQ ID NO: 26666 - DNA, 110 bp, synthetic construct; identical to SEQ ID NO: 26664
  source 1..110: mol_type = other DNA

SEQ ID NO: 26667 - DNA, 110 bp, synthetic construct
  source 1..110: mol_type = other DNA
tgatacgtatgttatattagggtcacaccaaaatgctccagaagttctttgcttagcttgactcagaagaatatacctgatctatattttaagaacaaattggaataata

SEQ ID NO: 26668 - DNA, 110 bp, synthetic construct
  source 1..110: mol_type = other DNA
atgtttcaattcaagtccaaaggctggaagagatcattatcccggccatgcagtgggacaggaagagtcccctcttattagagagtcagcctttttattctactcaactg

SEQ ID NO: 26669 - DNA, 110 bp, synthetic construct
  source 1..110: mol_type = other DNA
acttctctaagttgaatatacaattcaatacacaaacttctattgtctagacacactttaaaacagcaaagaaaaagctgtgtggtatgtgttctaggttccaagtaaga

SEQ ID NO: 26670 - DNA, 110 bp, synthetic construct; identical to SEQ ID NO: 26669
  source 1..110: mol_type = other DNA

SEQ ID NO: 26671 - DNA, 110 bp, synthetic construct
  source 1..110: mol_type = other DNA
gtcacattcctccaacattaattttctttttaactctttcacttattaggagtgatgtgattatttagctcatgcaggatcatctttcttagaaaattcttatcgccaag

SEQ ID NO: 26672 - DNA, 110 bp, synthetic construct
  source 1..110: mol_type = other DNA
tcagtatatatataaaaaaaatcgatttgcagttctgttaattgtctgtaccaattgaaagtaccgcagtgagaaaaatgttctatatctgcactgttctacactatagt

SEQ ID NO: 26673 - DNA, 110 bp, synthetic construct; identical to SEQ ID NO: 26672
  source 1..110: mol_type = other DNA

SEQ ID NO: 26674 - DNA, 110 bp, synthetic construct
  source 1..110: mol_type = other DNA
aaattatttctgaacactggccagcttttcttttttattgtatgccttatccttccttttcaattattcatagtctcctaagcaccactttcagtataaaatagtatcta

SEQ ID NO: 26675 - DNA, 110 bp, synthetic construct
  source 1..110: mol_type = other DNA
cttttcaattattcatagtctcctaagcaccactttcagtataaaatagtatctatgggaggtaaaaacagcaagaaatgtatttctgaatggattacagggaaaagatc

SEQ ID NO: 26676 - DNA, 110 bp, synthetic construct
  source 1..110: mol_type = other DNA
gtttgttgctatttgaaccaaggaaatggagaaaggaagccatatttatgatacatcttagatacaagatcagcaggacttggtgttttaatagatatgagtaaggacaa

SEQ ID NO: 26677 - DNA, 110 bp, synthetic construct
  source 1..110: mol_type = other DNA
agctggcagagttgtggatgcacagaagactgtcactcagtcttctctaacctcagttcttgttccaaatttctaacacaagcttcagcctctggggatccgtggccaga

SEQ ID NO: 26678 - DNA, 110 bp, synthetic construct
  source 1..110: mol_type = other DNA
gttcttgttccaaatttctaacacaagcttcagcctctggggatccgtggccagatttactgcccatagcagagccaaggccaccatgcagtccttcatttcctctcttt

SEQ ID NO: 26679 - DNA, 110 bp, synthetic construct
  source 1..110: mol_type = other DNA
gacatattgctgcccttgtgtattactttatatctcgttttgatatttagctcactttttccatctgaattggagggactctggtctctgcagacccaaagggatttaga

SEQ ID NO: 26680 - DNA, 110 bp, synthetic construct
  source 1..110: mol_type = other DNA
gtttgcatgaataagctgccatgggggagaggataatgtggcaagaaactgactctggcccatggccagtagccatcaaaaaactgtgacctcagttcaacaacctgtaa

SEQ ID NO: 26681 - DNA, 110 bp, synthetic construct
  source 1..110: mol_type = other DNA
caaatttgagtctgtgttgccagatgacagctggcacctctgaagtgcaaacatagatcaccaaccaagatggctgcaccaactcagaatctgaggctacacaaaaatgc

SEQ ID NO: 26682 - DNA, 110 bp, synthetic construct
  source 1..110: mol_type = other DNA
gtactagaaatgggaggtgtaggtttgtatatttcatattaaacagtgaatttgtaaccaaacagaaccctatggggctttcgaggggcaggccctttcccccatcctct

SEQ ID NO: 26683 - DNA, 110 bp, synthetic construct
  source 1..110: mol_type = other DNA
atattaaacagtgaatttgtaaccaaacagaaccctatggggctttcgaggggcaggccctttcccccatcctctgctttacctcctctctgaagtataacatgtatctt

SEQ ID NO: 26684 - DNA, 110 bp, synthetic construct
  source 1..110: mol_type = other DNA
ctcctcttgttcatatagttgaacatactcacaaaagctttttaaagtccttgtctgcaaattccaggatcaaacagtttgaattttgaattgactgtaattttcctatt

SEQ ID NO: 26685 - DNA, 110 bp, synthetic construct
  source 1..110: mol_type = other DNA
agctatgacacaggttcaattcctggccatggaatttctgcatgccacaggagctgccaaaaaaatgtttgaagttactgtccaggtatagagcatagttttaaaaacaa

SEQ ID NO: 26686 - DNA, 110 bp, synthetic construct
  source 1..110: mol_type = other DNA
ttctgcatgccacaggagctgccaaaaaaatgtttgaagttactgtccaggtatagagcatagttttaaaaacaatttaattttgaaaatggtttctaattttcataaag

SEQ ID NO: 26687 - DNA, 110 bp, synthetic construct
  source 1..110: mol_type = other DNA
caatctttccaaatttaaaaatctgcaggccctgctcctttgatttctgcatccatttcttgctaaggacatagctgaaaaatggtatgacattacgttttgctttatag

SEQ ID NO: 26688 - DNA, 110 bp, synthetic construct
  source 1..110: mol_type = other DNA
tatatcctcaggggcaaagacaacagtctcctaaggatactacttagtctgcttaaacagctcctaatgtttttaaaggccaagttccgaaaccaatccaaatatgtgta

SEQ ID NO: 26689 - DNA, 110 bp, synthetic construct
  source 1..110: mol_type = other DNA
aacagctcctaatgtttttaaaggccaagttccgaaaccaatccaaatatgtgtatgtctaactactagtaggtgtgcttctctgtttgaaacctatcagaatattcagg

SEQ ID NO: 26690 - DNA, 110 bp, synthetic construct
  source 1..110: mol_type = other DNA
tcagcagttggtctctggaatttgagctctaaacccaagtgctctgctgtatccccaagtgaaatgcaccacaattaaccaaattagttacaaagactattactgttgtg

SEQ ID NO: 26691 - DNA, 110 bp, synthetic construct
  source 1..110: mol_type = other DNA
actcgaagtgcctcggaagaagctataatctcgggctgtttcctaccagcctccatcagcttcatctgtttacccaggtatatagtataaatattattattttctgtaca

SEQ ID NO: 26692 - DNA, 110 bp, synthetic construct
  source 1..110: mol_type = other DNA
agactttaccgggcatcaactgcattctgtagcccttcctgtaggactgtagtcctgtagtggtgtggtgtctcctgcttatgctaaagctcaagtttcattttcttttc

SEQ ID NO: 26693 - DNA, 110 bp, synthetic construct
  source 1..110: mol_type = other DNA
tgtagtggtgtggtgtctcctgcttatgctaaagctcaagtttcattttcttttctggttgccaccgcatcatttatttgacttatacaatacaaaagagtcatgttttt

SEQ ID NO: 26694 - DNA, 110 bp, synthetic construct
  source 1..110: mol_type = other DNA
aagatggtcacagttaattacctttgccaatattgtagctttcttctggaccagctgatcaactgatataaagagcccaaaggcaccaggcagtagttatagctttaagt

SEQ ID NO: 26695 - DNA, 110 bp, synthetic construct
  source 1..110: mol_type = other DNA
tgatcaactgatataaagagcccaaaggcaccaggcagtagttatagctttaagtatagtgatagtctaactccatggggaaatgacccattctatactcaaagagtcag

SEQ ID NO: 26696 - DNA, 110 bp, synthetic construct
  source 1..110: mol_type = other DNA
aataacgtgtttgctttgagaatccattcacccaaaattaaacactgctgaacgtacttttattttccctgaacccactgcatgtggaagtgcctgtgcaaaggattgaa

SEQ ID NO: 26697 - DNA, 110 bp, synthetic construct
  source 1..110: mol_type = other DNA
ctcttcagtgttcagctaaccatggtgagttgcccagaggacccaattcactttcacttctatggcaaattattcctcagggactgtacttgccctttcctttaaatcac

SEQ ID NO: 26698 - DNA, 110 bp, synthetic construct
  source 1..110: mol_type = other DNA
gccaaattttcccaaaagggccgcctccagagaaaggcaagctgatgaatatttctgaaagttttgcttctaatgtcctgccatcacaacaagccacattcactcctgtt

SEQ ID NO: 26699 - DNA, 110 bp, synthetic construct; identical to SEQ ID NO: 26698
  source 1..110: mol_type = other DNA

SEQ ID NO: 26700 - DNA, 110 bp, synthetic construct
  source 1..110: mol_type = other DNA
ggctgttcatgtgctgaatcttcttcccattgggctctagtgaggcatggcataagagttctcctttctggtctcccaactgtatttcattgaggtttctacttattact

SEQ ID NO: 26701 - DNA, 110 bp, synthetic construct
  source 1..110: mol_type = other DNA
gtggagtgccacagctaagggaacgctggaagaggtctgggcccccaaaaaggcaagccaccattgttagggagggcaagaggaggaggagcagaccaccataggattat

SEQ ID NO: 26702 - DNA, 110 bp, synthetic construct
  source 1..110: mol_type = other DNA
ctggaagaggtctgggcccccaaaaaggcaagccaccattgttagggagggcaagaggaggaggagcagaccaccataggattatctttccctgggcacacatggattct

SEQ ID NO: 26703 - DNA, 110 bp, synthetic construct
  source 1..110: mol_type = other DNA
aagtacccactgctgtcactacaatggctctgattacagcctggtgcaagattgatccctagctcaggaatttccacatgccatgggagcagccaacaaaaatgatataa

SEQ ID NO: 26704 - DNA, 110 bp, synthetic construct
  source 1..110: mol_type = other DNA
ataataaaatacctaagcataaatctaactaaggaagtgaaagacttgtactcagaaaatgaaaagtcactggtgaaagaaattgaagacagtacaaacagatggagagt

SEQ ID NO: 26705 - DNA, 110 bp, synthetic construct
  source 1..110: mol_type = other DNA
aaaatgaaaagtcactggtgaaagaaattgaagacagtacaaacagatggagagttgtaccaaccttaaggaatggaagctgtgatattgttaaaatgaccatagtaccc

SEQ ID NO: 26706 - DNA, 110 bp, synthetic construct
  source 1..110: mol_type = other DNA
gcatttttctatttcttttcagaatcttccctttacctatatcacccaattgaatattatacatcatccaatctagctgctgtcctttccagggggaattgttttatcat

SEQ ID NO: 26707 - DNA, 110 bp, synthetic construct
  source 1..110: mol_type = other DNA
gggtcatttaacgttgaagatacatcaaagatgacatcacatccattcatagcctatactcagtcacgtttttctttaattttatctctacagtccaaggctctcaaatt

SEQ ID NO: 26708 - DNA, 110 bp, synthetic construct
  source 1..110: mol_type = other DNA
tgatcaatgaatatgaaaatactgttgtgctgactttccatatttatttactatttgagacctcagtttccctggtattgatatatttaaaggatgattgtgagactttg

SEQ ID NO: 26709 - DNA, 110 bp, synthetic construct
  source 1..110: mol_type = other DNA
tgagacctcagtttccctggtattgatatatttaaaggatgattgtgagactttgtgagctttatgtaaagtgtttactcagcaagagttgtctcaaactcaaatattat

SEQ ID NO: 26710 - DNA, 110 bp, synthetic construct
  source 1..110: mol_type = other DNA
ggacataatgcttaatttaccttttaaatggaatgtgcaaggtgaccatgggagaaaatctgcggcaaaggagggcatagaggtctgcagtcggtctcattccaataagc

SEQ ID NO: 26711 - DNA, 110 bp, synthetic construct
  source 1..110: mol_type = other DNA
gttcctcaggtagagtctccagtccttgtgtcagttagctctatgagttgaaagagcacatgcaaagaatggggaaaggaacttgtctggatctgctccctgttggaaac

SEQ ID NO: 26712 - DNA, 110 bp, synthetic construct
  source 1..110: mol_type = other DNA
cagttctaaagtttgtcctgaaaatgtccaatcttttgataactttccaaaattcttcagcttacagcaggttattacagccttgtaaattaatgatacttcaataaaac

SEQ ID NO: 26713 - DNA, 110 bp, synthetic construct
  source 1..110: mol_type = other DNA
gtggaaatgtcctctacattgcagtttccctttttcctgttctctgtcttcttagtgccacacagaaatcaactaatccaagctgaatggcagaggaattacaaagaaaa

SEQ ID NO: 26714 - DNA, 110 bp, synthetic construct
  source 1..110: mol_type = other DNA
taggaaggcaacaccacaatctcttcatggttttcttgactgtcctttcatagtagctgtccaggctcatagatacctcccacacttgatggtacagcataaattacatg

SEQ ID NO: 26715 - DNA, 110 bp, synthetic construct
  source 1..110: mol_type = other DNA
gctgtccaggctcatagatacctcccacacttgatggtacagcataaattacatgctcatctctgcactgctcacccccgaaagaaagaatgaatggattgggattgact

SEQ ID NO: 26716 - DNA, 110 bp, synthetic construct
  source 1..110: mol_type = other DNA
gatattgccatgcaaggtggtagaattgctgtcagcctggatgcctgagtgtcttaaaaaaaacagagccctatgctatagagctctgtaggttgcctgtcactgaagca

SEQ ID NO: 26717 - DNA, 110 bp, synthetic construct
  source 1..110: mol_type = other DNA
ccaaaacaggaagtccccttcagctgttttcaagcgtgttggctatagtattgcggtacgctggtacaaaatattgccactagaggatccaggaagaaaaaaaaaaaaga

SEQ ID NO: 26718 - DNA, 110 bp, synthetic construct
  source 1..110: mol_type = other DNA
tttgtaccatagtactcgtgctcaaacagtcaacccaaatcattgcaatactgcgttatctgagaacttaacaagctgtaataacagtctctggtaataaagatgagagt

SEQ ID NO: 26719 - DNA, 110 bp, synthetic construct
  source 1..110: mol_type = other DNA
aggtgcacacagaacaagacaagaccaaggctaaagcctagctgatttgactggtaaataaaatgttaagtcaacaatttttaaataagaaggtttactgcttccttaga

SEQ ID NO: 26720 - DNA, 110 bp, synthetic construct
  source 1..110: mol_type = other DNA
tctcatagcatttataggtgtataactggagcttgttttgttatggtgctcttcctatttacagcatggtaaacccaggcaggcaatgtagccaccaattccctcagttc

SEQ ID NO: 26721 - DNA, 110 bp, synthetic construct
  source 1..110: mol_type = other DNA
ctaatgctcattgaattaatccaaaatatctccattcctaaggaacaagtagtttaagggaagaacaaagttgaatagtgaagctattctcaaaacagtgaaggaaaata

SEQ ID NO: 26722 - DNA, 110 bp, synthetic construct; identical to SEQ ID NO: 26721
  source 1..110: mol_type = other DNA

SEQ ID NO: 26723 - DNA, 110 bp, synthetic construct
  source 1..110: mol_type = other DNA
gttgggagaagtggaacataggagaagagtttctaaaatcgtccatgaatttattgaccaatttttattagctccacatctaaggagttcctcatattagaaagctacat

SEQ ID NO: 26724 - DNA, 110 bp, synthetic construct
  source 1..110: mol_type = other DNA
gtgctaaaaataccccttacatattttcaattcattcctcagtcagagacccagtgtaaaggagtgacatgtatgcttggatagatgtttttctggtagagatctatgca

SEQ ID NO: 26725 - DNA, 110 bp, synthetic construct
  source 1..110: mol_type = other DNA
agtattagagccaatgttaaaagttttgagctctgaggggaagaaggaggaaacgaactaggaagtatagagatcagtaatagtgttagtgggtcagataatctgataat

SEQ ID NO: 26726 - DNA, 110 bp, synthetic construct
  source 1..110: mol_type = other DNA
atttttccaagagagaataaacataaatttcctgttaactcatagttctgacaaaccattgctccagctgaatattttaggaagctacagtttggcttgttaggagtctc

SEQ ID NO: 26727 - DNA, 110 bp, synthetic construct
  source 1..110: mol_type = other DNA
ccattgctccagctgaatattttaggaagctacagtttggcttgttaggagtctcaaaggaaaaataagatcaatacttgtcacagcaggagatactttactgtcagtgg

SEQ ID NO: 26728 - DNA, 110 bp, synthetic construct
  source 1..110: mol_type = other DNA
caaccaacgtgcaggccataaagtgattaatatcactcttcttgatttaagccactgaactcagggctctaaattttgccacagctattactgtggaaataactcactga

SEQ ID NO: 26729 - DNA, 110 bp, synthetic construct
  source 1..110: mol_type = other DNA
caatttattggaaaacctctcagagtcctgtccattctggaaaggactcatatgggggcccttgagcttaaaaatttgcatacaatctttaagaacaatcttctttccat

SEQ ID NO: 26730 - DNA, 110 bp, synthetic construct
  source 1..110: mol_type = other DNA
caatctcaccgaggatgcggtgacgcacttggtcctgggcctctggcacctcctccataagctcaacatctgctacggattcctcagcaggttcatgtgtgcccagttgc

SEQ ID NO: 26731 - DNA, 110 bp, synthetic construct
  source 1..110: mol_type = other DNA
cataagctcaacatctgctacggattcctcagcaggttcatgtgtgcccagttgctcaacccaatcctgtctggagagaaatagcaccgcgggagaggttatgactttgt

SEQ ID NO: 26732 - DNA, 110 bp, synthetic construct
  source 1..110: mol_type = other DNA
cctgttgcttccatgaggtgaaagctgaaattctagcttaaactgaaagcaaacggcagttcttatttgcttctcagccaatctggctacagactacattttaatataca

SEQ ID NO: 26733 - DNA, 110 bp, synthetic construct
  source 1..110: mol_type = other DNA
atttaatataatgaaagaagacagatgcattttaaaataagctaaattccctttgaatagtttctacccttgtgtataatgttaacgactgtaccatcgcacttgatagt

SEQ ID NO: 26734 - DNA, 110 bp, synthetic construct
  source 1..110: mol_type = other DNA
gatcatatatatatattatccccaagacatagcttctggggccagatattataacagatatgtaaggaaactctctaaactaaggggggacatctcactgataagtaaac

SEQ ID NO: 26735 - DNA, 110 bp, synthetic construct
  source 1..110: mol_type = other DNA
ctttagttagtaatttaccaaatttttgtgtcttaagtctcctttcttattttcataaaatcagaatgatgtggtccaattctttgttggtaacagagtttctgccaaga

SEQ ID NO: 26736 - DNA, 110 bp, synthetic construct
  source 1..110: mol_type = other DNA
cagactgaattttcaataatctggaatgtggaggtgtagagttaccccacaacaaatactcttctacagagaaattagagcactgtctttttttgactagtctaggcttt

SEQ ID NO: 26737 - DNA, 110 bp, synthetic construct
  source 1..110: mol_type = other DNA
gcaataagtgcaggctgtgaaagtgatatttcaaatgtggatattgttatacttaggagctaactcctcttcaacacaagaatctgaaagtgtcagttagaatctttatg

SEQ ID NO: 26738 - DNA, 110 bp, synthetic construct
  source 1..110: mol_type = other DNA
agaaacactagatcagagccatatctgcaacttacgccttagcttgagacaatactggacccttaacgcactgagtgaatacagggattgaacccacattcttacggaga

SEQ ID NO: 26739 - DNA, 110 bp, synthetic construct
  source 1..110: mol_type = other DNA
taatttatttcacatactcatgagattagttcacaatttggggtcattgtgagatggcataatttggtagagctctagaaacagtgacctgttggaaacttgactggacc

SEQ ID NO: 26740 - DNA, 110 bp, synthetic construct
  source 1..110: mol_type = other DNA
ggcataatttggtagagctctagaaacagtgacctgttggaaacttgactggaccagtattattattgcctaagggttccatctttctattcccattcttctaaagggga

SEQ ID NO: 26741 - DNA, 110 bp, synthetic construct
  source 1..110: mol_type = other DNA
gtgaagtaagttagaaagagaaaaacacatactattgtgtatttgatatcacctatatgtggaatctaaaatacagcacaaaggagcctatctaccaaacaaacagactc

SEQ ID NO: 26742 - DNA, 110 bp, synthetic construct; identical to SEQ ID NO: 26741
  source 1..110: mol_type = other DNA

SEQ ID NO: 26743 - DNA, 110 bp, synthetic construct
  source 1..110: mol_type = other DNA
aaagtctattttgtatgatataaacatagccatccctgcttcctcttgttactattttcatgggatatcttttcatcactttactttcaaactttgtgtctccttaaaga

SEQ ID NO: 26744 - DNA, 110 bp, synthetic construct
  source 1..110: mol_type = other DNA
tctggtgtttttgggctttggggtttgtcgaggggaatggcggtgctggacagcttttccacaggagtgtagctctccctgattatgggagtggctaactgggccactga

SEQ ID NO: 26745 - DNA, 110 bp, synthetic construct
  source 1..110: mol_type = other DNA
gcctcttgatatctaaaataattttctctattaagaaacactagtcaggggagttcctgccttggctcagtggtaaacgaacctgactggtatccatgaggacttgggtt

SEQ ID NO: 26746 - DNA, 110 bp, synthetic construct; identical to SEQ ID NO: 26745
  source 1..110: mol_type = other DNA

SEQ ID NO: 26747 - DNA, 110 bp, synthetic construct
  source 1..110: mol_type = other DNA
ttttactaaggcctcttgatatctaaaataattttctctattaagaaacactagtcaggggagttcctgccttggctcagtggtaaacgaacctgactggtatccatgag

SEQ ID NO: 26748 - DNA, 110 bp, synthetic construct; identical to SEQ ID NO: 26747
  source 1..110: mol_type = other DNA

SEQ ID NO: 26749 - DNA, 110 bp, synthetic construct
  source 1..110: mol_type = other DNA
gagaaaactcagaagccattgtgtccaaatgtcctcacctagttaccttatgtacaatagagcaaaccattaaatctgacctcatgtaacgttctaagagttgtataaat

SEQ ID NO: 26750 - DNA, 110 bp, synthetic construct
  source 1..110: mol_type = other DNA
caaatgtcctcacctagttaccttatgtacaatagagcaaaccattaaatctgacctcatgtaacgttctaagagttgtataaatataatactccattgagaatgaaaaa

SEQ ID NO: 26751 - DNA, 110 bp, synthetic construct
  source 1..110: mol_type = other DNA
agagtcttcctattcataaacatggagtatcactcttgaactcttagtttttccactgatttcaatagtttcacacttctcagtagagcttaatgtattaatttctatat

SEQ ID NO: 26752 - DNA, 110 bp, synthetic construct
  source 1..110: mol_type = other DNA
ttgaactcttagtttttccactgatttcaatagtttcacacttctcagtagagcttaatgtattaatttctatataagtatttcatttgagggggtgctgatataaatgg

SEQ ID NO: 26753 - DNA, 110 bp, synthetic construct
  source 1..110: mol_type = other DNA
tcagtgaccctcaggtaggtgagggcagctcccagagcattgctaatgacagggtgtgtacattcccagaggttgagggcaacaggtggtcctcagttgcagggctttcc

SEQ ID NO: 26754 - DNA, 110 bp, synthetic construct
  source 1..110: mol_type = other DNA
taatcctaaaatttttatggaacaaaaaagagctcaaataactaatgcaatatggagaaaaagaaattggagttcccactgtggcttagcaggttaagacccaatgttgt

SEQ ID NO: 26755 - DNA, 110 bp, synthetic construct
  source 1..110: mol_type = other DNA
tttatgtctatgtgaaaacctgcatacaaatgtttatagaaactttacttaagattgccaaaatgttcctcagtgaatggataaacaaactgtggtaaatccattcaata

SEQ ID NO: 26756 - DNA, 110 bp, synthetic construct
  source 1..110: mol_type = other DNA
gaggcagtggaacaggagcaatctggaagtttgactgagtaccaggaccatccaagcttgtgccccatccatgtgaagtgccagctgtggaggctttagttacagtataa

SEQ ID NO: 26757 - DNA, 110 bp, synthetic construct
  source 1..110: mol_type = other DNA
ttacttggtcaaacaccagttgatatgttgctctgaaggtattcttttaatgtaattaacatttaaatgaataggctttgaataaaataaatcactccccacccccaata

SEQ ID NO: 26758 - DNA, 110 bp, synthetic construct
  source 1..110: mol_type = other DNA
tcattatcagtgcattcctcagaatacctcctgtctgtaaggactgggatatggtcttctatgaagttcctttgactatattgtataaatagttttaagaaattctctgg

SEQ ID NO: 26759 - DNA, 110 bp, synthetic construct
  source 1..110: mol_type = other DNA
ccaccatagaaaactccttgagtcccagcaagcatgcttgccagacagatgcagggagtggacagttcatggtgcaactgcccccatgcagccagaagccacttgccatc

SEQ ID NO: 26760 - DNA, 110 bp, synthetic construct
  source 1..110: mol_type = other DNA
gagtggacagttcatggtgcaactgcccccatgcagccagaagccacttgccatccaccacagaacgccacccccctgcccatgggaaaccgccccactggcctgctctg

SEQ ID NO: 26761 - DNA, 110 bp, synthetic construct
  source 1..110: mol_type = other DNA
ccttgttagtaagaatcattgaggaattggggtgcaaggactattgttttctttgtggttttgtattaattgaaacctactacatttctcaatttagaaaaattttctct

SEQ ID NO: 26762 - DNA, 110 bp, synthetic construct
  source 1..110: mol_type = other DNA
attggggtgcaaggactattgttttctttgtggttttgtattaattgaaacctactacatttctcaatttagaaaaattttctctttattccttatggcataacctgatc

SEQ ID NO: 26763 - DNA, 110 bp, synthetic construct
  source 1..110: mol_type = other DNA
tcagcaactagatttgttggtgatgatctgcctctaaggtttgctctgttcctgtatgattctgttccataatgtatactctccagagtaatgtttagcattatagtttg

SEQ ID NO: 26764 - DNA, 110 bp, synthetic construct
  source 1..110: mol_type = other DNA
ctggcctgtttgatggcaactttccctcgcatcctggctttacaacttcccagcagaggggatttcaggcagatctcatatctcaaaagttttgtcagataaaggaagct

SEQ ID NO: 26765 - DNA, 110 bp, synthetic construct
  source 1..110: mol_type = other DNA
ttataaagaattcattaccaagtatatgaagacaaactcttttatatcccattggttcatggtcacaatagtaggtgactgtcagagaagataaatgtctctagtgagaa

SEQ ID NO: 26766 - DNA, 110 bp, synthetic construct
  source 1..110: mol_type = other DNA
atggcaactgttgtaaggcaaagagcatggcctctcacaggagacacaattagtttaaaaccttttaaaatgtcaattcttaaaaaaaaaaaatcaccctgtccagaatt

SEQ ID NO: 26767 - DNA, 110 bp, synthetic construct
  source 1..110: mol_type = other DNA
ttgtggattctgggttctaagaatcactgaagatttttatgctctggctttaaagtgcatttgtaaatcagtatacctgatgcgagcaaaataaatgagcttaaaattgt

SEQ ID NO: 26768 - DNA, 110 bp, synthetic construct
  source 1..110: mol_type = other DNA
tgcatttgtaaatcagtatacctgatgcgagcaaaataaatgagcttaaaattgtattagctcttctaatagtgagacagtgtctaaatcgatctcaaaaatgctcaatt

SEQ ID NO: 26769 - DNA, 110 bp, synthetic construct
  source 1..110: mol_type = other DNA
aaccactgcgccacgacgggaactcctgaggatgtttcttacattaactcatctaatcttcagaactggcaagcaaaggtggagatatcatgatgcccattttacacaga

SEQ ID NO: 26770 - DNA, 110 bp, synthetic construct; identical to SEQ ID NO: 26769
  source 1..110: mol_type = other DNA

SEQ ID NO: 26771 - DNA, 110 bp, synthetic construct
  source 1..110: mol_type = other DNA
atcacactggtattgtgtcagagatggtgacaatgcagctgtgctgacacctaagttctttctctctggcaagaaaaactagggaatgggatcctgtgctctgcagagta

SEQ ID NO: 26772 - DNA, 110 bp, synthetic construct
  source 1..110: mol_type = other DNA
actgtaggaaaacctaagaattttttcgttccccaaaaatgggtcagcaaacaaaatttaccttttagtagaaatgagtgctggagctgttcccacttgagtgacattag

SEQ ID NO: 26773 - DNA, 110 bp, synthetic construct
  source 1..110: mol_type = other DNA
ctatgacaggaactcctgacatgattattgttttcttggtttgaaaatgaattaactgtatgagcctcaagtctgtagatttccaaggtaggacaaattcctgtttagct

SEQ ID NO: 26774 - DNA, 110 bp, synthetic construct
  source 1..110: mol_type = other DNA
ctgtatgagcctcaagtctgtagatttccaaggtaggacaaattcctgtttagcttgagttcactggggctgacaaagatcaggtctgattttacaacccttcctctcca

SEQ ID NO: 26775 - DNA, 110 bp, synthetic construct
  source 1..110: mol_type = other DNA
cttgttagtaatagtcaaagcttacagaaacagaatgatccaagaattcagtgactcaagtaaaacagaactttatttcaatcttgtataccagtacggagaggagttga

SEQ ID NO: 26776 - DNA, 110 bp, synthetic construct
  source 1..110: mol_type = other DNA
atataggttaagaacattaagagtataaatgactaagaataccaaaatttggtgaaaatgttcagcagctagaattctcatatatcagtggcaaaatgggaccagcattt

SEQ ID NO: 26777 - DNA, 110 bp, synthetic construct
  source 1..110: mol_type = other DNA
taaatgactaagaataccaaaatttggtgaaaatgttcagcagctagaattctcatatatcagtggcaaaatgggaccagcattttataaaaacatagttactaaagcta

SEQ ID NO: 26778 - DNA, 110 bp, synthetic construct
  source 1..110: mol_type = other DNA
aaagttgctttctgttcactcctaacagactccatcttgctctacaaaccagttccaccagccagtaattacatgaaaatctgtaggatccagttcctaccacagtaaag

SEQ ID NO: 26779 - DNA, 110 bp, synthetic construct
  source 1..110: mol_type = other DNA
caccagccagtaattacatgaaaatctgtaggatccagttcctaccacagtaaagaaaacttttttttttttttgtctttttgccttttctagggcctcaggcctctggc

SEQ ID NO: 26780 - DNA, 110 bp, synthetic construct
  source 1..110: mol_type = other DNA
aaaactaattatatcttagagtaaaaatttagctgtttatgtggtcaaaatccacaagacacaatgatctctaccacttaattggaaattaaacgtccagtagaaaaccc

SEQ ID NO: 26781 - DNA, 110 bp, synthetic construct
  source 1..110: mol_type = other DNA
gaattaaggaagagtgtacctatgtctttcttactgaaatatgatttttttttccagctggcgatatggaattagggagaattgctcaatgaaattattgtggcagtatt

SEQ ID NO: 26782 - DNA, 110 bp, synthetic construct
  source 1..110: mol_type = other DNA
cctttttcttttctgctactgtaacccttaatatttaacacatgtaagtaaatctctcaaatacatcagaacctactaacacaagagatcatctaatatttcagtaactt

SEQ ID NO: 26783 - DNA, 110 bp, synthetic construct
  source 1..110: mol_type = other DNA
cattctatctgtgaaattcatatccaggatgctgagcatagcagcaatgcctccatcgacattactgtttggcatcactttgtgtgaatatgccacaactgctttggtca

SEQ ID NO: 26784 - DNA, 110 bp, synthetic construct
  source 1..110: mol_type = other DNA
ccatctcagctgggtcattttttaaaggtgaccaagttaaaaagaaggtcctattgcttatataaaaaagaaaacaaagacggaaaaaaagaaaaacaagcccaaaacta

SEQ ID NO: 26785 - DNA, 110 bp, synthetic construct
  source 1..110: mol_type = other DNA
tagctgaatatggacagatattccccaatacccaacagagcttctcttttcagagctacagttctgctccaaaaggggccacaatgcatgagggggcataatgtatttca

SEQ ID NO: 26786 - DNA, 110 bp, synthetic construct
  source 1..110: mol_type = other DNA
ctacagttctgctccaaaaggggccacaatgcatgagggggcataatgtatttcaaacatcgcagcatatccccgtgaaaccttaataaggtcaaatgaaggaccctcta

SEQ ID NO: 26787 - DNA, 110 bp, synthetic construct
  source 1..110: mol_type = other DNA
cactacttgctttgctggcaatggtctagggctccaggccactatgaactcactcttctggacacaaatattgggacaaaaatttggacacaatgatatagaactcaggt

SEQ ID NO: 26788 - DNA, 110 bp, synthetic construct
  source 1..110: mol_type = other DNA
ttctggacacaaatattgggacaaaaatttggacacaatgatatagaactcaggtatgagagaaacacataggcacacactctccactgtgctcttttcatttagctgtt

SEQ ID NO: 26789 - DNA, 110 bp, synthetic construct
  source 1..110: mol_type = other DNA
cagtgacagcacaggtccagagtgtgagtacagcactggctctggaaaatgagcctgctacggtctggcatgagctaatgctgcctatatcattcaaaatgactggctca

SEQ ID NO: 26790 - DNA, 110 bp, synthetic construct
  source 1..110: mol_type = other DNA
tgctacggtctggcatgagctaatgctgcctatatcattcaaaatgactggctcacagtcatggatgtgttggctccaattaacctgttccataaatacattttagtgaa

SEQ ID NO: 26791 - DNA, 110 bp, synthetic construct
  source 1..110: mol_type = other DNA
gaagagaaataaattgtcatatatttatgacatttggcaggccagacatgctacttacatgagcaggccaagaaattctatttgaatgaatttagctgaaaaatagactc

SEQ ID NO: 26792 - DNA, 110 bp, synthetic construct
  source 1..110: mol_type = other DNA
tacatgagcaggccaagaaattctatttgaatgaatttagctgaaaaatagactctaacagaaatgaaaccctttgatgtgcctcctggaaagtccatttatagtgcttc

SEQ ID NO: 26793 - DNA, 110 bp, synthetic construct; identical to SEQ ID NO: 26791
  source 1..110: mol_type = other DNA

SEQ ID NO: 26794 - DNA, 110 bp, synthetic construct; identical to SEQ ID NO: 26792
  source 1..110: mol_type = other DNA

SEQ ID NO: 26795 - DNA, 110 bp, synthetic construct
  source 1..110: mol_type = other DNA
attctccttcctgggaagaatgccatagaaaaagaatcaatatacaatctcctctcaggagaaagaatatgataatgccctctcttttgtgacactagccaccaatcttt

SEQ ID NO: 26796 - DNA, 110 bp, synthetic construct
  source 1..110: mol_type = other DNA
gccctcccatctttaaagcaatcctccaaactgtacttattcagttcataaggctttgctcaattaagtagatcaggacctaggactgcagacattcccttctgagaaca

SEQ ID NO: 26797 - DNA, 110 bp, synthetic construct
  source 1..110: mol_type = other DNA
ttgctcaattaagtagatcaggacctaggactgcagacattcccttctgagaacaaccagagcctctgggaactacactttcacctttgaatcaagtgggatggtggttc

SEQ ID NO: 26798 - DNA, 110 bp, synthetic construct; identical to SEQ ID NO: 26796
  source 1..110: mol_type = other DNA

SEQ ID NO: 26799 - DNA, 110 bp, synthetic construct; identical to SEQ ID NO: 26797
  source 1..110: mol_type = other DNA

SEQ ID NO: 26800 - DNA, 110 bp, synthetic construct
  source 1..110: mol_type = other DNA
agaatgttgctgagtacccactaagaccagctcactttcagattcttatccgaaaatctcagcaagaacctagttcatagctactattaatattagagcattaaatttta

SEQ ID NO: 26801 - DNA, 110 bp, synthetic construct
  source 1..110: mol_type = other DNA
atctcagcaagaacctagttcatagctactattaatattagagcattaaattttaataagtggaaaatggaattcataagttttctcagttgcatccaatagggagttga

SEQ ID NO: 26802 - DNA, 110 bp, synthetic construct
  source 1..110: mol_type = other DNA
aatccaggttctacacacaaaaaaactcatctgtaaaatttaaaccagaacaggtttactcacgctgcttcataagcttcagtggttcccactgtacttacctgccctca

SEQ ID NO: 26803 - DNA, 110 bp, synthetic construct
  source 1..110: mol_type = other DNA
tcaatgcctgaggtatcttgaccatcactcagagacaaagcgtggtaggacacagccagatcacttgggtcattcttggagcagaaactaggacacgggataattgactt

SEQ ID NO: 26804 - DNA, 110 bp, synthetic construct
  source 1..110: mol_type = other DNA
ccagatcacttgggtcattcttggagcagaaactaggacacgggataattgacttcatcaccttaatcccatgagtggcaggtccatcaagaattcctccatccctccct

SEQ ID NO: 26805 - DNA, 110 bp, synthetic construct
  source 1..110: mol_type = other DNA
tgtacaccctcaaagtggaagcctccaatcctcacgttgaaccccgctttctctacctgggtccattcaaagattcagccacagttagaattatggtggaagatgtagac

SEQ ID NO: 26806 - DNA, 110 bp, synthetic construct
  source 1..110: mol_type = other DNA
cctgggtccattcaaagattcagccacagttagaattatggtggaagatgtagacgagccccctgtcttcagcaaactggcctacatcctacaaataagagaagatgctc

SEQ ID NO: 26807 - DNA, 110 bp, synthetic construct
  source 1..110: mol_type = other DNA
aaagatggttccatagagtcataaaagaggggaactgagcccagcaaatatacgttttttataagagctttcttagctttacagtttaggtgcataaagggtaggtgggg

SEQ ID NO: 26808 - DNA, 110 bp, synthetic construct
  source 1..110: mol_type = other DNA
agaaaatgataaaaagtggttgttcggagtccaaacagtaggcaatggtcaactcccagaggactctgctcaaacaccaccactcaggtagtagaaggaagtctgtcctg

SEQ ID NO: 26809 - DNA, 110 bp, synthetic construct
  source 1..110: mol_type = other DNA
ccagaggactctgctcaaacaccaccactcaggtagtagaaggaagtctgtcctgtcaccctagctccaacacagaggaaatgctctgactgaagagcagaagctggaag

SEQ ID NO: 26810 - DNA, 110 bp, synthetic construct
  source 1..110: mol_type = other DNA
gtccagggaccaggaattttataccttcatctcagtgttcatcgtaaatggttttgtgaggagctgccttccccactaccctgtagagtccacacagacagtttatgact

SEQ ID NO: 26811 - DNA, 110 bp, synthetic construct
  source 1..110: mol_type = other DNA
gtgaggagctgccttccccactaccctgtagagtccacacagacagtttatgactgttctcctccccatggagcaatgcctttcccatagcaaatgcccagtaagcatgc

SEQ ID NO: 26812 - DNA, 110 bp, synthetic construct
  source 1..110: mol_type = other DNA
gtgccaagttcattcctgagcccaaggacagcaaactgcctcttcgtccatatgaagtctatccaaaggctggtgcagcttgtccagcactgaggcaatgggagggttta

SEQ ID NO: 26813 - DNA, 110 bp, synthetic construct
  source 1..110: mol_type = other DNA
agtctatccaaaggctggtgcagcttgtccagcactgaggcaatgggagggtttacttctgcttctttggccttgacatgtagttttgtcctgaatcatacactgggcag

SEQ ID NO: 26814 - DNA, 110 bp, synthetic construct
  source 1..110: mol_type = other DNA
agttttttggaaaaagagtaaaaaaaaaaaaaagatcagatggacaaaggtaggccacatcccaagtcgttatttctgaaaactcaatttgtgacgtttaccatgagaag

SEQ ID NO: 26815 - DNA, 110 bp, synthetic construct
  source 1..110: mol_type = other DNA
cacatcccaagtcgttatttctgaaaactcaatttgtgacgtttaccatgagaagctcgaagctacactgacaacagcaattcaaggggagcccttgcacttggtgagag

SEQ ID NO: 26816 - DNA, 110 bp, synthetic construct
  source 1..110: mol_type = other DNA
atttccatatttcaacttcaagaattccaaacaaaaatttcttttaggaatttcagtcagctaggagtcctctaaggactctcccaagtagcaacatcaaacagtgcatg

SEQ ID NO: 26817 - DNA, 110 bp, synthetic construct
  source 1..110: mol_type = other DNA
gtcagctaggagtcctctaaggactctcccaagtagcaacatcaaacagtgcatgaaaattgggcaaccagtccattgtagaggtgcccataaaacaggcgtgggttagg

SEQ ID NO: 26818 - DNA, 110 bp, synthetic construct
  source 1..110: mol_type = other DNA
ggcccaaagtatgtgattcgggggagggttaaaggaaacagaactttgctctggatgtgatgcagccgagctcaggatattaagatcctaacaacaactctgtgaagcaa

SEQ ID NO: 26819 - DNA, 110 bp, synthetic construct
  source 1..110: mol_type = other DNA
gcatgaaggcctttccagccccatgcaagacagttcggacaagcccagcttcaaaggtccatcacaggtggacttctacctctgctcaatccctactccacactcttctc

SEQ ID NO: 26820 - DNA, 110 bp, synthetic construct
  source 1..110: mol_type = other DNA
ccccagtctgggacgtgagatctcacatcaagttactgcagtccatggcaaaaaaaatatataaccctcctctccaatggctatataccatacccagccagccagcactc

SEQ ID NO: 26821 - DNA, 110 bp, synthetic construct
  source 1..110: mol_type = other DNA
aatatataaccctcctctccaatggctatataccatacccagccagccagcactcgggattattgtgctgtaacatggctcaccagggggaagccactgcactgctctta

SEQ ID NO: 26822 - DNA, 110 bp, synthetic construct
  source 1..110: mol_type = other DNA
gagccaccttccactggaacccaccatgcctgcaaagtatgcccagttagctctccaccacctacatggagacagtgctgtcgcagacgtgaagaaacaacaaggctcta

SEQ ID NO: 26823 - DNA, 110 bp, synthetic construct
  source 1..110: mol_type = other DNA
caccacctacatggagacagtgctgtcgcagacgtgaagaaacaacaaggctctagcagtggtgagtgtagacttcgattggaattggaggaaaaaaagaatagcacaaa

SEQ ID NO: 26824 - DNA, 110 bp, synthetic construct
  source 1..110: mol_type = other DNA
gtgacttccttccaagaattcagaataaaaaggagtgggagacaaatagcttcctagtagagacacctgacgaacacttcctcagccaggtgaccaaggtcaacttgacc

SEQ ID NO: 26825 - DNA, 110 bp, synthetic construct
  source 1..110: mol_type = other DNA
ttagagagctgtgcgttctaatatagtagcttccagccatgtgcagctacttacatttaaattaattaaaatataaaattcaggttcttagttgcactgaccacatttcc

SEQ ID NO: 26826 - DNA, 110 bp, synthetic construct
  source 1..110: mol_type = other DNA
tttaaattaattaaaatataaaattcaggttcttagttgcactgaccacatttccagtgcttagtagccacctgtggcttgtgactcctgtgtcagacagtgcagctatg

SEQ ID NO: 26827 - DNA, 110 bp, synthetic construct
  source 1..110: mol_type = other DNA
aggaggggatttgtcagtgctatggattgaatttttgtgtctcccactcccaattcatgtactaaaactttaatccctattgtgatggtattcaaggtgaggcctttggg

SEQ ID NO: 26828 - DNA, 110 bp, synthetic construct
  source 1..110: mol_type = other DNA
ttgggtgtggtcaggggcatctctacatggtaaatggctgagcagtcatcccatagaacagacctcagggatcaacctgggccctcaaaatgagaaagtcaccagctttg

SEQ ID NO: 26829 - DNA, 110 bp, synthetic construct
  source 1..110: mol_type = other DNA
gaacagacctcagggatcaacctgggccctcaaaatgagaaagtcaccagctttgacatggatggactgtgaagattgcttggttattgggttacattgatgtgttcttg

SEQ ID NO: 26830 - DNA, 110 bp, synthetic construct
  source 1..110: mol_type = other DNA
gcagcctccccaccagaggccttttaaaaacaataaagtgcatttttgcctctttaagcaagtgttgcatgttcatttactcatcaaaaatgaagtgaaaggaaataaaa

SEQ ID NO: 26831 - DNA, 110 bp, synthetic construct
  source 1..110: mol_type = other DNA
aagcaagtgttgcatgttcatttactcatcaaaaatgaagtgaaaggaaataaaagcttcatggggaagaacacagctgcagttattgcctaaatattgtttaacgatac

SEQ ID NO: 26832 - DNA, 110 bp, synthetic construct
  source 1..110: mol_type = other DNA
tgggtggaaaaagtagttggtgccaaaggtctcccacactgaaattttaattgccttcaaagaggctttgtgagctcctgataacaaacctggctctccagacccagtga

SEQ ID NO: 26833 - DNA, 110 bp, synthetic construct
  source 1..110: mol_type = other DNA
gttgaactccaaaccttctgctcccaggagagcttcttcccgccttttccacaccatctctaaaggggatggaaggcagggcgtggcctcccttggcggctccctgatca

SEQ ID NO: 26834 - DNA, 110 bp, synthetic construct
  source 1..110: mol_type = other DNA
atctctaaaggggatggaaggcagggcgtggcctcccttggcggctccctgatcacatgacctggggactccgtggagctctcaccgggactggccccagctctggaggt

SEQ ID NO: 26835 - DNA, 110 bp, synthetic construct
  source 1..110: mol_type = other DNA
ccagggcactggctgtcccagcccagcaagcaaacctgtgagctaggtgtggcgctcctgtaccttctgataccttctcatgtcctaattcaggtgcgtctatttttaga

SEQ ID NO: 26836 - DNA, 110 bp, synthetic construct
  source 1..110: mol_type = other DNA
tctggacccgccagccgcagggtaaagccctcccatcccgcttactccagttggcctcactcctctttcgctcaatttgaacagagccctctccccaccctccccagctc

SEQ ID NO: 26837 - DNA, 110 bp, synthetic construct
  source 1..110: mol_type = other DNA
ctcactcctctttcgctcaatttgaacagagccctctccccaccctccccagctccaggaagatggcccttctcaagcccagaatgtcttgacaagggatttttttttcc

SEQ ID NO: 26838 - DNA, 110 bp, synthetic construct
  source 1..110: mol_type = other DNA
gcgtgtacggcgtgtccagtaacagtatgttctagatcacgggtcagcaaactaccgcccacagaggtatttgtatggcctgcggacagaaatgctttctacatttttgg

SEQ ID NO: 26839 - DNA, 110 bp, synthetic construct
  source 1..110: mol_type = other DNA
gtgtaggtcgctatgatcagatctggggggacacaggctggtgccaagaatggtttctaaagtgtccctgtccctgccaccatcctggttcatcttatcttcctcgtggt

SEQ ID NO: 26840 - DNA, 110 bp, synthetic construct
  source 1..110: mol_type = other DNA
tctaaagtgtccctgtccctgccaccatcctggttcatcttatcttcctcgtggttctggagctacaggatggaccctcaaaactccacataagcaccacccaggaggga

SEQ ID NO: 26841 - DNA, 110 bp, synthetic construct
  source 1..110: mol_type = other DNA
tctagaccatgcttttagtagaaagtcagagagaatgagaagaaaaggagaactctggcagaaaatgttgtatgtctagatgctgtggctataccatttcttaacttcct

SEQ ID NO: 26842 - DNA, 110 bp, synthetic construct
  source 1..110: mol_type = other DNA
aatcttgatgggaggaagaacagattaatggattctttgaagaatggaggacagagaaataggaaggcctagatccttggtcctagtactttcttgaggtcagttttagt

SEQ ID NO: 26843 - DNA, 110 bp, synthetic construct
  source 1..110: mol_type = other DNA
gaaataggaaggcctagatccttggtcctagtactttcttgaggtcagttttagtactttgccaggtcacactggtcagcttgtacttcggagaaagactgaccatcagg

SEQ ID NO: 26844 - DNA, 110 bp, synthetic construct
  source 1..110: mol_type = other DNA
ttcctggtcggatttgttcaccactgagccacgacaggaaacttctccagttgctactttaaaatgtccatgaggacgatagtgccggcaggagttagagaagcttcaga

SEQ ID NO: 26845 - DNA, 110 bp, synthetic construct; identical to SEQ ID NO: 26844
  source 1..110: mol_type = other DNA

SEQ ID NO: 26846 - DNA, 110 bp, synthetic construct
  source 1..110: mol_type = other DNA
acctcaagccattaaaacttagaagatttatttgacttgtgaggttctgaagtgcttggaatattttcttgcatgtctcctcgggtgcgtgagcttactatcccttcttc

SEQ ID NO: 26847 - DNA, 110 bp, synthetic construct
  source 1..110: mol_type = other DNA
ttggaatattttcttgcatgtctcctcgggtgcgtgagcttactatcccttcttcagggttgtcactgaagtaaaggccacttcacagaccactggctctcaaactcagg

SEQ ID NO: 26848 - DNA, 110 bp, synthetic construct
  source 1..110: mol_type = other DNA
cgagcaactgagaagctgggaaaagagagagtggggctgcaagggcaccgctcccctgaactcagccaaacgcagctcatacgtacatcattatccaatgcggattcatc

SEQ ID NO: 26849 - DNA, 110 bp, synthetic construct
  source 1..110: mol_type = other DNA
ctgaactcagccaaacgcagctcatacgtacatcattatccaatgcggattcatcgtcgcccaagaaagagatcttgaagtctgtgcagaccagccttccatagatccca

SEQ ID NO: 26850 - DNA, 110 bp, synthetic construct
  source 1..110: mol_type = other DNA
aattacagtgtttacagcatagtatcaaggttcaaattctagctctgctactttactaatgatgcgaagatgggcaaactgtttaacttctctatacaatgaggatagta

SEQ ID NO: 26851 - DNA, 110 bp, synthetic construct
  source 1..110: mol_type = other DNA
agagttcagcccagattggaagaaagtgttttactttgtcgacacctgaggggagctgtaccttgcctctgaccccagagacatggcacctattacaggggattatgagg

SEQ ID NO: 26852 - DNA, 110 bp, synthetic construct
  source 1..110: mol_type = other DNA
ctgtaccttgcctctgaccccagagacatggcacctattacaggggattatgaggggcaccaggcacagtggggagactggagacccaggctcaagagtcacagttcatg

SEQ ID NO: 26853 - DNA, 110 bp, synthetic construct
  source 1..110: mol_type = other DNA
taaagcttccagaaggaaccaggtctctctcttggtgcaaagtcgtccccccactccccgacaaatcttagggcccaagattatcaattcataacaataaaaatgacaac

SEQ ID NO: 26854 - DNA, 110 bp, synthetic construct
  source 1..110: mol_type = other DNA
gacgacaagctggagcggaactgcttcttcaccctcgagggggtccatgaggtcttccaggaggagggcttgcacacgtccgtctacaatttcgatgagaccaaaggctt

SEQ ID NO: 26855 - DNA, 110 bp, synthetic construct
  source 1..110: mol_type = other DNA
tccaggaggagggcttgcacacgtccgtctacaatttcgatgagaccaaaggcttggatctggacgacatcgtgcgttacatccaggccaatgagcgaggtgagcagaag

SEQ ID NO: 26856 - DNA, 110 bp, synthetic construct
  source 1..110: mol_type = other DNA
cagattttcagttagcgcttcagtaaaaccaatgaaagagaaaaaaaaaatgcaaccaatgcaagcagtatttgccccactccggcgacagtgtacacaggcaggctttt

SEQ ID NO: 26857 - DNA, 110 bp, synthetic construct
  source 1..110: mol_type = other DNA
ccaatgcaagcagtatttgccccactccggcgacagtgtacacaggcaggcttttgtgtctgcaagagctgcatcagaataagaggaccccccccccccgccgccctcca

SEQ ID NO: 26858 - DNA, 110 bp, synthetic construct; identical to SEQ ID NO: 26856
  source 1..110: mol_type = other DNA

SEQ ID NO: 26859 - DNA, 110 bp, synthetic construct; identical to SEQ ID NO: 26857
  source 1..110: mol_type = other DNA

SEQ ID NO: 26860 - DNA, 110 bp, synthetic construct
  source 1..110: mol_type = other DNA
tcatttctccttgatggctttagtggatgccacatcttactcaaaactagagtgacagctgctttaactttagacagactgggcagactgtaggatgcaaacaaataaac

SEQ ID NO: 26861 - DNA, 110 bp, synthetic construct
  source 1..110: mol_type = other DNA
cagctgctttaactttagacagactgggcagactgtaggatgcaaacaaataaacctccagattgtcttgctcggcctctgactgcttcatctgcttcatctggaatccc

SEQ ID NO: 26862 - DNA, 110 bp, synthetic construct
  source 1..110: mol_type = other DNA
acacacacaccctatatttagtctgtactatatgtatcttactatttctgtgggtcaagaacatggtcaaggcttagctggattctctgggttcaggctgcaataatcta

SEQ ID NO: 26863 - DNA, 110 bp, synthetic construct
  source 1..110: mol_type = other DNA
caagaacatggtcaaggcttagctggattctctgggttcaggctgcaataatctaactatcagacaggctgtgttttcatctggaggcctgactggagaagtatcctttt

SEQ ID NO: 26864 - DNA, 110 bp, synthetic construct; identical to SEQ ID NO: 26862
  source 1..110: mol_type = other DNA

SEQ ID NO: 26865 - DNA, 110 bp, synthetic construct; identical to SEQ ID NO: 26863
  source 1..110: mol_type = other DNA

SEQ ID NO: 26866 - DNA, 110 bp, synthetic construct
  source 1..110: mol_type = other DNA
attattagcggcggtctggtagaggggatggtgggaatgcagcagagccaagagcttggaggaaaaacttggtgtgatgctgaagagttttttactcacaacagtaaatc

SEQ ID NO: 26867 - DNA, 110 bp, synthetic construct
  source 1..110: mol_type = other DNA
ttggaggaaaaacttggtgtgatgctgaagagttttttactcacaacagtaaatcacagtgaaaaatgcttaagagtcagaacgtgagttcaactccaaagatattaatc

SEQ ID NO: 26868 - DNA, 110 bp, synthetic construct
  source 1..110: mol_type = other DNA
tgtatgccacgaagactaaagggccttaatgctttctggcaagcaaatgaatacatatcacttatatatgtgacttagtaacggagttaagagaattaaataagttattc

SEQ ID NO: 26869 - DNA, 110 bp, synthetic construct
  source 1..110: mol_type = other DNA
tatcacttatatatgtgacttagtaacggagttaagagaattaaataagttattccacaggtaataagtgaactgtcaagatgctggtgtgttcattaccacttaaggga

SEQ ID NO: 26870 - DNA, 110 bp, synthetic construct
  source 1..110: mol_type = other DNA
agtgcagtttagaatccaactgctgcagcagctggggtcactgcaggggtatagttctccccctgacctgggacagtggcttcaaggatccagcattgccactgctatgg

SEQ ID NO: 26871 - DNA, 110 bp, synthetic construct
  source 1..110: mol_type = other DNA
cagcagctggggtcactgcaggggtatagttctccccctgacctgggacagtggcttcaaggatccagcattgccactgctatggtgtaggtcacagctgtggctcagat

SEQ ID NO: 26872 - DNA, 110 bp, synthetic construct
  source 1..110: mol_type = other DNA
ttgaaagatttgggaatttgcagaattctattcaatttcagcagaaaaacaatgtcacttatgagagttggggttgggagggaatgaggatgaacttttcctcctctgta

SEQ ID NO: 26873 - DNA, 110 bp, synthetic construct
  source 1..110: mol_type = other DNA
agaaaaactgctaaattattacatctggacttgactaaattattacatctggacttgacttctttggttttagtgcttggtagaaggcagctacctttcaaaaaagttta

SEQ ID NO: 26874 - DNA, 110 bp, synthetic construct
  source 1..110: mol_type = other DNA
tgacttctttggttttagtgcttggtagaaggcagctacctttcaaaaaagtttaggccatttaatctccatttatatcaaccttcaccccaggtccattcttaactttt

SEQ ID NO: 26875 - DNA, 110 bp, synthetic construct
  source 1..110: mol_type = other DNA
agtagctcccagtgagccatgacctttaataacttacaacatgaaactgaagtgcagattattctgcaattgagctgtttcctgcatgggcctttctttatgtttaatgc

SEQ ID NO: 26876 - DNA, 110 bp, synthetic construct
  source 1..110: mol_type = other DNA
agattattctgcaattgagctgtttcctgcatgggcctttctttatgtttaatgcagagactttctcacaggacccccagatagtatggagacaaaagtggcatctagag

SEQ ID NO: 26877 - DNA, 110 bp, synthetic construct
  source 1..110: mol_type = other DNA
gagaaaggatggctagcagtcagatcctagtggtggtggtggtggcggggtggggatttgcccctccttaccctgcggtcagcctgaatgaagggaaggctgggccatag

SEQ ID NO: 26878 - DNA, 110 bp, synthetic construct
  source 1..110: mol_type = other DNA
atttgcccctccttaccctgcggtcagcctgaatgaagggaaggctgggccatagaaacatgttggaagggcatttcaagaagaagaacaaatgcagagtcccttagatg

SEQ ID NO: 26879 - DNA, 110 bp, synthetic construct
  source 1..110: mol_type = other DNA
tgcacccaagctcctcaagctgttttgtacttgcaacaatcctagcttgcccaattaagtccaaataaaatgaggcaaagatcataaaacatttaaagggggggaaatta

SEQ ID NO: 26880 - DNA, 110 bp, synthetic construct
  source 1..110: mol_type = other DNA
agccatgtggttagttatgtgcacatctcccctaactaccgctgactcagcacacactctatcatagggacagtcacagctccactcacatctcacggtccagagtgaat

SEQ ID NO: 26881 - DNA, 110 bp, synthetic construct
  source 1..110: mol_type = other DNA
actctatcatagggacagtcacagctccactcacatctcacggtccagagtgaatgtctggtagaaacctctcacctgagcaatccagctggtgcagaatgggatcaaga

SEQ ID NO: 26882 - DNA, 110 bp, synthetic construct
  source 1..110: mol_type = other DNA
tttcaacacctcgccctgtcactccccagtagaggcacaaatctatctggggagaccaaacaccaggtaccagagaggtcttttctgaccaccttctataagtggtagct

SEQ ID NO: 26883 - DNA, 110 bp, synthetic construct
  source 1..110: mol_type = other DNA
tggtaaggtcctctgtgcccagctagatcctcagatctgaggtcattcaagaacggcactgggataataacagtgaacaggcgaatacagaacaagggagactgaatgtg

SEQ ID NO: 26884 - DNA, 110 bp, synthetic construct
  source 1..110: mol_type = other DNA
acgaggcagaggatacttgcttccttgactagttggttcacaaagtgatggacacaagtggctctttcacctactagataacttgtccccttagtcggggagtggggagt

SEQ ID NO: 26885 - DNA, 110 bp, synthetic construct
  source 1..110: mol_type = other DNA
aagtggctctttcacctactagataacttgtccccttagtcggggagtggggagtgaagacagctgaggagagggacctgggggctgaatctaaataggagcagagaatt

SEQ ID NO: 26886 - DNA, 110 bp, synthetic construct; identical to SEQ ID NO: 26884
  source 1..110: mol_type = other DNA

SEQ ID NO: 26887 - DNA, 110 bp, synthetic construct; identical to SEQ ID NO: 26885
  source 1..110: mol_type = other DNA

SEQ ID NO: 26888 - DNA, 110 bp, synthetic construct
  source 1..110: mol_type = other DNA
ccatttttgacccatggaaatgggagtttcatatggttcaacctaatacatttagaaagctgtaatgaaaagtaaatgtaaaatgcaggcacgccccctggagttcccat

SEQ ID NO: 26889 - DNA, 110 bp, synthetic construct
  source 1..110: mol_type = other DNA
aggacctgcaggaaggtggtgcaggcttctcctagttgcagggccctggaaagtgacagtgatcaggcaggtgtaggtggtgccaggagtctttggcaggggcagctgca

SEQ ID NO: 26890 - DNA, 110 bp, synthetic construct; identical to SEQ ID NO: 26889
  source 1..110: mol_type = other DNA

SEQ ID NO: 26891 - DNA, 110 bp, synthetic construct
  source 1..110: mol_type = other DNA
cttgatccactggtggtgaataaattgatcaacttttgccatatgtacagcccattcctcatgagatgttttcatttatttaaacatctaatccttaaatagctcaggct

SEQ ID NO: 26892 - DNA, 110 bp, synthetic construct
  source 1..110: mol_type = other DNA
tcctcatgagatgttttcatttatttaaacatctaatccttaaatagctcaggcttaacatggcatcactttgcaaactacataaacttccttccataatttcttcattc

SEQ ID NO: 26893 - DNA, 110 bp, synthetic construct
  source 1..110: mol_type = other DNA
ttcaaccttccctcatgctcaaaccactctccacctacagataaggtgtaggtagtgagtccagtctagtccacctcctaagtatctccacacttggataatgtgccacc

SEQ ID NO: 26894 - DNA, 110 bp, synthetic construct
  source 1..110: mol_type = other DNA
tgagtccagtctagtccacctcctaagtatctccacacttggataatgtgccaccttaattttagttcaagccactgttattacttccctagaccacgcccaagatcttc

SEQ ID NO: 26895 - DNA, 110 bp, synthetic construct
  source 1..110: mol_type = other DNA
atttaacccactgagtagggtcagagaaccagcttacatcctcatggacactagctgagttcacaacccactgagccaccacaggaactccctctaggaaaatatttgtc

SEQ ID NO: 26896 - DNA, 110 bp, synthetic construct
  source 1..110: mol_type = other DNA
tgagttcacaacccactgagccaccacaggaactccctctaggaaaatatttgtcacatgaggcaaatgcaaatgtttaaaatgcctctggagccttgctttctgcagcc

SEQ ID NO: 26897 - DNA, 110 bp, synthetic construct
  source 1..110: mol_type = other DNA
ctctgggatcacccctaagatgccttccaaggtccccccaagaatgctctccactggcgactgcttatcggacacttacaagctagagatgtcggctcaactctccaaat

SEQ ID NO: 26898 - DNA, 110 bp, synthetic construct
  source 1..110: mol_type = other DNA
tccagccactatggaaaacagcagcttcttaaaaaactaaatatacaaccaccataggacccagtaagtgcattcctggacacttgtcccagaggaatgaagacttatgc

SEQ ID NO: 26899 - DNA, 110 bp, synthetic construct
  source 1..110: mol_type = other DNA
aggacccagtaagtgcattcctggacacttgtcccagaggaatgaagacttatgctcgtacaaaatcctgtggtggaatgtttacagccgcttcatgcatgatagcaaaa

SEQ ID NO: 26900 - DNA, 110 bp, synthetic construct
  source 1..110: mol_type = other DNA
cccaaatcctgatgtttcctgggctcccctatgtgtcacagcctcccttgcaggctggttggggacaatggcctgtgcacggatgtgatctctgttttcagctgcctgta

SEQ ID NO: 26901 - DNA, 110 bp, synthetic construct
  source 1..110: mol_type = other DNA
gtctcctccaggtcctgcgactgtccacacagcgctctccactcccaggagcctgggagctccctccggctgggctctcagatcgaagtcccaggctccagcagtcactg

SEQ ID NO: 26902 - DNA, 110 bp, synthetic construct
  source 1..110: mol_type = other DNA
ggagctccctccggctgggctctcagatcgaagtcccaggctccagcagtcactgtgattcagggtggagaaacctgactcaagcagagagggactctcgggatgcaggg

SEQ ID NO: 26903 - DNA, 110 bp, synthetic construct
  source 1..110: mol_type = other DNA
gaaaaaaatcagtgcacatgtaaccctttgtttctctctatccactgacctgcattttcttgccttccaaaagagttgcctatggtcggagcttaatttcctcctattca

SEQ ID NO: 26904 - DNA, 110 bp, synthetic construct
  source 1..110: mol_type = other DNA
tttcttgccttccaaaagagttgcctatggtcggagcttaatttcctcctattcaatcttctgtgtgatacactgcggtttctgcccttcctgctcaccatgacaatcca

SEQ ID NO: 26905 - DNA, 110 bp, synthetic construct
  source 1..110: mol_type = other DNA
cttttgtttattatattatttattcccaaaccctttggagaccagaatcttgaatcttacacattccaggtgcccaattcatatgtgtggatgtagcagcgaatgtgtct

SEQ ID NO: 26906 - DNA, 110 bp, synthetic construct
  source 1..110: mol_type = other DNA
cttacacattccaggtgcccaattcatatgtgtggatgtagcagcgaatgtgtctgtagctggctaatcaaaagaactggacttgacagattgcaaattatcaaagaggt

SEQ ID NO: 26907 - DNA, 110 bp, synthetic construct
  source 1..110: mol_type = other DNA
aaggggtaaatcccccagcatgagatgttccagccttctgtcagggatagtattaattaacaggaactagttaggagccatgcaaatatgaattaaatatgagtaaatta

SEQ ID NO: 26908 - DNA, 110 bp, synthetic construct
  source 1..110: mol_type = other DNA
tgttccagccttctgtcagggatagtattaattaacaggaactagttaggagccatgcaaatatgaattaaatatgagtaaattaatatcctaaaataaatcaccggcaa

SEQ ID NO: 26909 - DNA, 110 bp, synthetic construct
  source 1..110: mol_type = other DNA
atattagcagtcaagcacattctggctaatatccattcactttaaaatagcatcgcatgtggattcaggaagagttccaaaatatttgtagatcaaaaggtaagggtcaa

SEQ ID NO: 26910 - DNA, 110 bp, synthetic construct
  source 1..110: mol_type = other DNA
cctactcatcacacctgctacctgctggctttcatgttcagtgatatagattccaagctggaaatcattatttgacccctaacggagcacttgctcattctcaatttggt

SEQ ID NO: 26911 - DNA, 110 bp, synthetic construct
  source 1..110: mol_type = other DNA
agctggaaatcattatttgacccctaacggagcacttgctcattctcaatttggttccatttgagaagccactcaaaagtatctttaaaaattaaacctcatgataataa

SEQ ID NO: 26912 - DNA, 110 bp, synthetic construct
  source 1..110: mol_type = other DNA
gtctggccagaggctctaagttgaaagatatttcaggcaaggaagaagggagagagctgtcctatccatcgtagaccaacccggaacactcctctatagccgatggtata

SEQ ID NO: 26913 - DNA, 110 bp, synthetic construct
  source 1..110: mol_type = other DNA
gctgtcctatccatcgtagaccaacccggaacactcctctatagccgatggtataggacgttaagcatgacggatcctatggtctcagtgttttcagcagtggcctccaa

SEQ ID NO: 26914 - DNA, 110 bp, synthetic construct
  source 1..110: mol_type = other DNA
cgccctcagaggtctgagccccagctctgtggggatctttcctcaagcgtaggttgccgttgactggcagcccctgactttctgctctgtggggtcctcatatgttttaa

SEQ ID NO: 26915 - DNA, 110 bp, synthetic construct
  source 1..110: mol_type = other DNA
tccacaagctgcggtacaggttacagacgagcctcgggtctttcattgctgtggctgtgacacaggacagcaactgaagctccaatccaacccctagcctgggaatttcc

SEQ ID NO: 26916 - DNA, 110 bp, synthetic construct; identical to SEQ ID NO: 26915
  source 1..110: mol_type = other DNA

SEQ ID NO: 26917 - DNA, 110 bp, synthetic construct
  source 1..110: mol_type = other DNA
atcctctcttcctgcctcaattttcctccctttgcccagcctcccacacaagggcaataactctgcagtcatccattttttatcagtatagatcctagatgagggggagg

SEQ ID NO: 26918 - DNA, 110 bp, synthetic construct
  source 1..110: mol_type = other DNA
acaacatgtcatcatggatgggtctttggattatcttaaaatgctccttctgaaaaaggagaggccaacaagactgaaacatttattgcctgtttcaaggtgatgacact

SEQ ID NO: 26919 - DNA, 110 bp, synthetic construct
  source 1..110: mol_type = other DNA
atccatcagaaccattgtggtcgtcgtaagtgacatgtcctccattccagaatgtggagagtccacggtaccccatttaaaaccaagtcaaagaaccagtgacatcacag

SEQ ID NO: 26920 - DNA, 110 bp, synthetic construct
  source 1..110: mol_type = other DNA
ggagagtccacggtaccccatttaaaaccaagtcaaagaaccagtgacatcacagtaagccagcagttggtgatttcatctttctagagtaaagccaagaattgaataaa

SEQ ID NO: 26921 - DNA, 110 bp, synthetic construct
  source 1..110: mol_type = other DNA
tgccctatcagttccagggtttgttcatcacagcaagtttgtccttggggccctcttagttccagaactgctaggatggtagaatacatggtcctcatacattaatttga

SEQ ID NO: 26922 - DNA, 110 bp, synthetic construct
  source 1..110: mol_type = other DNA
ctggcagttccagccctagaatctcctggggtgcttttttaaaaaaattggtgcccacctcagatattttgaatcttttggtctagggagaggcccaggaatcagtattt

SEQ ID NO: 26923 - DNA, 110 bp, synthetic construct
  source 1..110: mol_type = other DNA
cacctcagatattttgaatcttttggtctagggagaggcccaggaatcagtattttttaatgtatcccatgggggttcaaccagagagaaccattatctggaaactaggt

SEQ ID NO: 26924 - DNA, 110 bp, synthetic construct
  source 1..110: mol_type = other DNA
ttcttgacctgtttaaatgaagagataagccagagagtccctcataaaatacatgcccgtagcctctggagtgacacttcttatctttaaaaggagaggccacccttttt

SEQ ID NO: 26925 - DNA, 110 bp, synthetic construct
  source 1..110: mol_type = other DNA
cccgtagcctctggagtgacacttcttatctttaaaaggagaggccaccctttttaatgaggagtaaaaacctgcagagacaaagctgacggatgttcagactttggttt

SEQ ID NO: 26926 - DNA, 110 bp, synthetic construct
  source 1..110: mol_type = other DNA
tccacctctaatcaaaattggtggaatccacagcactttgtcgccccagaccatggtccaaacattccatgagttgcaaatatcccacatctgccagtcacttctctctc

SEQ ID NO: 26927 - DNA, 110 bp, synthetic construct
  source 1..110: mol_type = other DNA
agagattcatgagcctctgaaggtttcaggtgatgtgtgatacagatttttttacttgggggatccaaaggaacattcatccattttatttatcaccattggattttacc

SEQ ID NO: 26928 - DNA, 110 bp, synthetic construct
  source 1..110: mol_type = other DNA
ttgggggatccaaaggaacattcatccattttatttatcaccattggattttaccgcctgccacacagcttaaagtgacaaaacatggatattgaactgtgggaggattc

SEQ ID NO: 26929 - DNA, 110 bp, synthetic construct
  source 1..110: mol_type = other DNA
gaagggagatcacagagcaagctgatgcccctgaaattagacaggcaaatgcagaggatcccaatttaccagaacagatacatatcttcatagggatgaggactggggta

SEQ ID NO: 26930 - DNA, 110 bp, synthetic construct
  source 1..110: mol_type = other DNA
ggatcccaatttaccagaacagatacatatcttcatagggatgaggactggggtaggaaaaccggaactgcaactgataaacttctggaagctcagtgtgggcaagtctg

SEQ ID NO: 26931 - DNA, 110 bp, synthetic construct
  source 1..110: mol_type = other DNA
attacaggaggaagtcattagctatatccaaaattaataagtccaaaaatagtgtaggagcatattgttagagtaataagggctatctttagaaatcaagttaggaattc

SEQ ID NO: 26932 - DNA, 110 bp, synthetic construct
  source 1..110: mol_type = other DNA
gtctgtgctgtggagattttggaagaatactgacttttaaaatgtttttttgaagagactatctctccttttgggtttgtccgttgcctcatgattagattcaggttata

SEQ ID NO: 26933 - DNA, 110 bp, synthetic construct
  source 1..110: mol_type = other DNA
agactatctctccttttgggtttgtccgttgcctcatgattagattcaggttatagattcctagctggaataccatgtaaacgtgtattgctctcagggcttctatcggg

SEQ ID NO: 26934 - DNA, 110 bp, synthetic construct
  source 1..110: mol_type = other DNA
ggtttgctagttcttcaccagacattctgatggacgatcttatacttgactttgtatgaggcctcttgtattttattttctcacttaggatacatttctagaagggggag

SEQ ID NO: 26935 - DNA, 110 bp, synthetic construct
  source 1..110: mol_type = other DNA
agcagtccatttatgtcatgggtattttaccacaattccagaaaactagggaggcacttttgggtcccttcaagtgcaggtctgtaagcgcctcctcttactgagagtga

SEQ ID NO: 26936 - DNA, 110 bp, synthetic construct
  source 1..110: mol_type = other DNA
agagacagggggtggggagggaggagaaccccccccccacccccatgggaagcatctaggtccttggtgaagctgtgagctcataaatcaaacctgggactggtatcctc

SEQ ID NO: 26937 - DNA, 110 bp, synthetic construct
  source 1..110: mol_type = other DNA
ctaggtccttggtgaagctgtgagctcataaatcaaacctgggactggtatcctcagggattcttcagtgagtgttacatacccactgttttgtttgctttccactaggc

SEQ ID NO: 26938 - DNA, 110 bp, synthetic construct
  source 1..110: mol_type = other DNA
ttcttttgtgaatgggacgcctggtcaaaataattggctgtcacttatccagtgagtcttgtgcatcaagaaaaatcctgggcatttaattctaacatttatccaacctt

SEQ ID NO: 26939 - DNA, 110 bp, synthetic construct
  source 1..110: mol_type = other DNA
gtcttgtgcatcaagaaaaatcctgggcatttaattctaacatttatccaaccttttacccttcccaataacaaaaggcttgttaacaattgtggtgagggaagttctgg

SEQ ID NO: 26940 - DNA, 110 bp, synthetic construct
  source 1..110: mol_type = other DNA
gctgccggatttgtttaaccatccacacaatcaacacaccttatttattttctaaagggctgattctaacgtgcactgaggcgagcaaacacttttattcacgtcagcag

SEQ ID NO: 26941 - DNA, 110 bp, synthetic construct
  source 1..110: mol_type = other DNA
agggctgattctaacgtgcactgaggcgagcaaacacttttattcacgtcagcagctcccccggcagcctgtggtcagcccatcttcagcacgcttcatctccaaggccc

SEQ ID NO: 26942 - DNA, 110 bp, synthetic construct
  source 1..110: mol_type = other DNA
tcactgaaaagctgctgatttgggttagaaaatctctcacttggcctgtagtcacagcagctctaacttgtggtgtcctcagggaactgcagacactctctccagggaac

SEQ ID NO: 26943 - DNA, 110 bp, synthetic construct
  source 1..110: mol_type = other DNA
agcagctctaacttgtggtgtcctcagggaactgcagacactctctccagggaacctgttagtccggtgacgatctgcttaagacaagaagcctgacaccttccctgcag

SEQ ID NO: 26944 - DNA, 110 bp, synthetic construct
  source 1..110: mol_type = other DNA
agtatggtgattccttaaaaaactaaaaataaaactacactctaggacatatgtctggagaaaactataataaaagatacatgcaccccaatgttcattgcagcactgtt

SEQ ID NO: 26945 - DNA, 110 bp, synthetic construct; identical to SEQ ID NO: 26944
  source 1..110: mol_type = other DNA

SEQ ID NO: 26946 - DNA, 110 bp, synthetic construct
  source 1..110: mol_type = other DNA
agtgtgtatacatatatatatgtattcctcaccccaagaacatttaataggaagttgtaggtagcacaagactccatccctaaaactttagcatgcagcatcttagaaca

SEQ ID NO: 26947 - DNA, 110 bp, synthetic construct; identical to SEQ ID NO: 26946
  source 1..110: mol_type = other DNA

SEQ ID NO: 26948 - DNA, 110 bp, synthetic construct
  source 1..110: mol_type = other DNA
acgggaactcccaagatggtattttgtaaaatgactttttaaattgtctttctaagcagttgccaatgtttaaccaagctgcagctaacagacttttaagttaagacaca

SEQ ID NO: 26949 - DNA, 110 bp, synthetic construct
  source 1..110: mol_type = other DNA
gcagttgccaatgtttaaccaagctgcagctaacagacttttaagttaagacacatggctctgctgtggctaattgttagaatgtgctgatctgggagcgtctgactaca

SEQ ID NO: 26950 - DNA, 110 bp, synthetic construct
  source 1..110: mol_type = other DNA
atagacatattttgtaatgaaaatcagtctttccttccagggcaaatctgttacagctccatcatccaatgaccatagctatgcccaataaatatgtgttaactggatta

SEQ ID NO: 26951 - DNA, 110 bp, synthetic construct
  source 1..110: mol_type = other DNA
agctgtggtgaaggttgcagatgaggccccggtctggcatcgctgtggccatggcgtagggcagcagctgcatttctgattcgacccctacccggggaattccatatact

SEQ ID NO: 26952 - DNA, 110 bp, synthetic construct
  source 1..110: mol_type = other DNA
tgcagatgaggccccggtctggcatcgctgtggccatggcgtagggcagcagctgcatttctgattcgacccctacccggggaattccatatactgcaggtgagacccta

SEQ ID NO: 26953 - DNA, 110 bp, synthetic construct
  source 1..110: mol_type = other DNA
agtaggcatcatttcttcattttagaagtacctggagttccgagtgactgagtgaggtagctaagatcttacatctaaaacgcattagagtttactagttttcaagaaag

SEQ ID NO: 26954 - DNA, 110 bp, synthetic construct
  source 1..110: mol_type = other DNA
cattaaagtctaggttacaactcaggctctttatctttagccatttatctgtcaatgggcattaggttattttcatattgtgactattgtaagtagcgctgcaatgaacg

SEQ ID NO: 26955 - DNA, 110 bp, synthetic construct
  source 1..110: mol_type = other DNA
tgggcattaggttattttcatattgtgactattgtaagtagcgctgcaatgaacgtgggggtgcatacatttttttgagtcagtatttttgttttccttatataaatacc

SEQ ID NO: 26956 - DNA, 110 bp, synthetic construct
  source 1..110: mol_type = other DNA
acctgtgatacttggaagtggtatatgagagactgaggagcttgactgtaatattccagaaaaagtttatgtccttaagtcattcctcaagaccttattatcctgcccat

SEQ ID NO: 26957 - DNA, 110 bp, synthetic construct
  source 1..110: mol_type = other DNA
tttgacctactcttctccatgcctagggaaatattgtctgtatcctgaatgttaagctgagaccagagcttcacgtccttctccccaaaaggagggttacttggccaccc

SEQ ID NO: 26958 - DNA, 110 bp, synthetic construct
  source 1..110: mol_type = other DNA
caacttagcctagcctgccttagatgtgctaagagcacttacaattcacttacagttgggcagatcatataacacaaagcttgttttataatagagtgtcaaatatctaa

SEQ ID NO: 26959 - DNA, 110 bp, synthetic construct
  source 1..110: mol_type = other DNA
ttgggcagatcatataacacaaagcttgttttataatagagtgtcaaatatctaatgtgatgtattgaacaccacagtggaagtgaaaacagaggggtagcatgggttca

SEQ ID NO: 26960 - DNA, 110 bp, synthetic construct
  source 1..110: mol_type = other DNA
gttaatatttccacctatcgctataaaagacattccctcaacatttagcatctcataataaacatttcatttggcccaaaattttgtggtcaagaattcaggaagagctc

SEQ ID NO: 26961 - DNA, 110 bp, synthetic construct
  source 1..110: mol_type = other DNA
taataaacatttcatttggcccaaaattttgtggtcaagaattcaggaagagctcagcgggtggttctcacttgtggccgcgtaacggcatgcgtggtcagatgctggct

SEQ ID NO: 26962 - DNA, 110 bp, synthetic construct
  source 1..110: mol_type = other DNA
ggttgaaattgtgtctccccaaaaagaaagtatatgttaaagttctacccccttaacctcagagtataagcttatttggaaagagtcattgccaattgattggttaagat

SEQ ID NO: 26963 - DNA, 110 bp, synthetic construct
  source 1..110: mol_type = other DNA
acctcagagtataagcttatttggaaagagtcattgccaattgattggttaagatgaggtccgcttgtgtagggagggaccttaattaaatatgactggtgtccgtataa

SEQ ID NO: 26964 - DNA, 110 bp, synthetic construct; identical to SEQ ID NO: 26962
  source 1..110: mol_type = other DNA

SEQ ID NO: 26965 - DNA, 110 bp, synthetic construct; identical to SEQ ID NO: 26963
  source 1..110: mol_type = other DNA

SEQ ID NO: 26966 - DNA, 110 bp, synthetic construct
  source 1..110: mol_type = other DNA
ttggtgctttcttcttcttttctttttccgggagaacctggggcatatggaagttcctgggccagagctgcagctggggcctgctccacagccatggcaataccagatcc

SEQ ID NO: 26967 - DNA, 110 bp, synthetic construct
  source 1..110: mol_type = other DNA
ggggatttgttttcccacccagaccagggccaaaagaacgtcgggtggaatccgtcacacactttcatggtaactgcctcggaggaaggggaaacatttctgacgtgaga

SEQ ID NO: 26968 - DNA, 110 bp, synthetic construct
  source 1..110: mol_type = other DNA
tccacgtgggtggggactttagttcctgcacaacaactcgaagatatattgttgtgtacattcctggaggaggaactaggactcagctttaccattgcactgttgttgga

SEQ ID NO: 26969 - DNA, 110 bp, synthetic construct
  source 1..110: mol_type = other DNA
ggcccatctccaggacctataaaagggaaatttcggtcaaggaggcttttgagtgacactgctgagaaccggatctagaacaagagaaaaagtggggttgagcgtcgcca

SEQ ID NO: 26970 - DNA, 110 bp, synthetic construct
  source 1..110: mol_type = other DNA
agcccagttttattcatggtcatacaggccagttaccacaattcacccaaacatgtcacactcgagtagccagtacatgatgactgcccagtgatgtttatttccctcct

SEQ ID NO: 26971 - DNA, 110 bp, synthetic construct
  source 1..110: mol_type = other DNA
ctgactctctctctggacttctgtggctccctcaacctcagctcctagagcttcaccctattgggttgattccattgagcgtaacactgcctgatttaccatctcagagg

SEQ ID NO: 26972 - DNA, 110 bp, synthetic construct
  source 1..110: mol_type = other DNA
atttgtttcccgtgcaccaggacaggaactccatatatcaaaactttatatctcattccttattctcatcatggaattttaaatattttttctggtttattctttttcct

SEQ ID NO: 26973 - DNA, 110 bp, synthetic construct
  source 1..110: mol_type = other DNA
ttatatctcattccttattctcatcatggaattttaaatattttttctggtttattctttttcctcttttagcttatgagccctctctgttcactttcccaaaggagaca

SEQ ID NO: 26974 - DNA, 110 bp, synthetic construct
  source 1..110: mol_type = other DNA
aagagttgtgacgcagatcttccagtctcaatcttgtcttcagatactgctgtcccggccaacagcttgactgtcacctcctgagagaccctaaacccgaactaacaaac

SEQ ID NO: 26975 - DNA, 110 bp, synthetic construct
  source 1..110: mol_type = other DNA
aacgggattaacccaaagaggatcatacacatcacaattaaaatggtgaaacttaaatatgaagagagaatatcaaaattagcaagggaaaaaggaacaagttacataca

SEQ ID NO: 26976 - DNA, 110 bp, synthetic construct
  source 1..110: mol_type = other DNA
aatatgaagagagaatatcaaaattagcaagggaaaaaggaacaagttacatacaagggaacttccttacagctatcggctgactttctaacagaaactctacaggtgag

SEQ ID NO: 26977 - DNA, 110 bp, synthetic construct
  source 1..110: mol_type = other DNA
ctccaacaactaagggttcctggctttggcagtaattgatgtaaaataattttaaaaaacaccattttgctggcttataattaagctgaataacttggtgcaaaagtcct

SEQ ID NO: 26978 - DNA, 110 bp, synthetic construct
  source 1..110: mol_type = other DNA
ttgaaaggaaagagtctttgtgaatgtgcagcagaatacttatgaggtggaataataaatgggcctcttctaaattggagtgaagatagtcatccttaaaatagtatgac

SEQ ID NO: 26979 - DNA, 110 bp, synthetic construct
  source 1..110: mol_type = other DNA
taaatgggcctcttctaaattggagtgaagatagtcatccttaaaatagtatgacttgaccttcccctagacaaataacatgttgaccttccctctattgaaccatagag

SEQ ID NO: 26980 - DNA, 110 bp, synthetic construct
  source 1..110: mol_type = other DNA
cagctgaattcctttcttggcctggtttctgtctatgcaaatcttggagcctagaagtctcattttattttgtagtgtccctatcccttttagtccaaattggtggtact

SEQ ID NO: 26981 - DNA, 110 bp, synthetic construct
  source 1..110: mol_type = other DNA
agtctcattttattttgtagtgtccctatcccttttagtccaaattggtggtacttttgccaatacgattctctttgaaattttgtttgtttgttatgcatcaaattaaa

SEQ ID NO: 26982 - DNA, 110 bp, synthetic construct
  source 1..110: mol_type = other DNA
aaaaaaaaattcaccccccaccagcagccaggaaccggaaatctctcccagtctagagccatttcctggggttatgtttatcgcaaatttccagaggaaactactggagc

SEQ ID NO: 26983 - DNA, 110 bp, synthetic construct
  source 1..110: mol_type = other DNA
gagccatttcctggggttatgtttatcgcaaatttccagaggaaactactggagctcagaggagttaagtgaccctgagataatcaagctctcgatctggattttcaaac

SEQ ID NO: 26984 - DNA, 110 bp, synthetic construct
  source 1..110: mol_type = other DNA
gctctaatttagcttctttattctccattgctgtgtctagaacaaagctacttagttacctgaaccaaagaaatggaatggttgaaagactggattcaggtttgttcact

SEQ ID NO: 26985 - DNA, 110 bp, synthetic construct
  source 1..110: mol_type = other DNA
aggccgagacctggagagagggttgagggggtaggtgcaggggccagtaggccttcctctcatcgcgactctaaccgacggcgtgaccttggataaatcatttcacttct

SEQ ID NO: 26986 - DNA, 110 bp, synthetic construct
  source 1..110: mol_type = other DNA
cctctcatcgcgactctaaccgacggcgtgaccttggataaatcatttcacttctctgctccttgcactaatcatctataggaaaagttcactgaatgagatgattatct

SEQ ID NO: 26987 - DNA, 110 bp, synthetic construct
  source 1..110: mol_type = other DNA
gggtgtgtgtgtgtgtgtgtgtgtgtgtctacatgtacacacaccccagaggcatgaaagctaagctgaatccctctctccccggagttcgtttcctgactgtagacttt

SEQ ID NO: 26988 - DNA, 110 bp, synthetic construct
  source 1..110: mol_type = other DNA
tagtttttggaactctttctacacaaacctcagtatgtgcctgctgtctctgagcctcagtttccttatctgattaaagcctacttgtagcatgttgtataaagaaatgt

SEQ ID NO: 26989 - DNA, 110 bp, synthetic construct
  source 1..110: mol_type = other DNA
gtctctgagcctcagtttccttatctgattaaagcctacttgtagcatgttgtataaagaaatgtgtgaattacataaatataatataaatgagatgtgtgtcttaaaag

SEQ ID NO: 26990 - DNA, 110 bp, synthetic construct
  source 1..110: mol_type = other DNA
tgcagctagcagctaccatacaggacaacacagctttaataacattgggtttgaaagtatctgcctcataagtgaatcaagtatcaccaggtttcgttctacgtgtcttt

SEQ ID NO: 26991 - DNA, 110 bp, synthetic construct
  source 1..110: mol_type = other DNA
agtatctgcctcataagtgaatcaagtatcaccaggtttcgttctacgtgtctttgaaaatgatcacggctgggggtgtgaacaccaggtttgggtgctgacattgacat

SEQ ID NO: 26992 - DNA, 110 bp, synthetic construct
  source 1..110: mol_type = other DNA
gcgtcagtgctctcacaagggcacagagcttattccccagaccaggaatagtgccaacatgacgctcagtcaaaagatgcccttagaggagttcccgtcgtggcgcagtg

SEQ ID NO: 26993 - DNA, 110 bp, synthetic construct
  source 1..110: mol_type = other DNA
tggaaagacttgtgttcagatgccaccaggagccacttactagctgtgtgtcccgaatttatgattttgccttcctgtttcctaatcgggaaatggcatttgttaaatcc

SEQ ID NO: 26994 - DNA, 110 bp, synthetic construct
  source 1..110: mol_type = other DNA
actaacagcagtaggaagctgttctgttaccacctggagctctgacgggcaaaggatgagtgctgttactggaactggatggagccctgaggacagaagctctagctgta

SEQ ID NO: 26995 - DNA, 110 bp, synthetic construct
  source 1..110: mol_type = other DNA
agcctccagcccctcatctgccaaatgatgctactttgtcgtggtagctgggagggtagggatcatgcacacgtagagcaaggggttttattttcataaaaacaaatttt

SEQ ID NO: 26996 - DNA, 110 bp, synthetic construct
  source 1..110: mol_type = other DNA
cgtcagccaagactgtttacacaaacacattagcctgctgctgctctccccctgagggaacataacacacagccgagcgtactgttgcagtttggggttgagctgcaggt

SEQ ID NO: 26997 - DNA, 110 bp, synthetic construct
  source 1..110: mol_type = other DNA
gggaacataacacacagccgagcgtactgttgcagtttggggttgagctgcaggtgaattcgacccggcatttggggtcctgcacaggaagaaggcgaagccataaaggc

SEQ ID NO: 26998 - DNA, 110 bp, synthetic construct
  source 1..110: mol_type = other DNA
acctcatggttcttagtcggattcgtttccgctgagccacatgggaactccacatacggttactttcactggtaccgtttattttaaaatatggggactcttgatgctga

SEQ ID NO: 26999 - DNA, 110 bp, synthetic construct
  source 1..110: mol_type = other DNA
cttacatatgccacaggtgaggccctaaaaaaaaaccacacatagaaattcttcattccatgaaagtttgatgaaatgatctgtcaggactcagtagtatttcagtgtaa

SEQ ID NO: 27000 - DNA, 110 bp, synthetic construct
  source 1..110: mol_type = other DNA
tcctttaaatcctttgagcagcccattgtaataaaaatccatgacgttggatactacttcgacgtttggataataaacagcagcttgacaaataacctcctctagtatat

SEQ ID NO: 27001 - DNA, 110 bp, synthetic construct
  source 1..110: mol_type = other DNA
acttcgacgtttggataataaacagcagcttgacaaataacctcctctagtatattaccagtaccagctgaaaatatgaacacagagatgctgtattgtcagagcttatc

SEQ ID NO: 27002 - DNA, 110 bp, synthetic construct
  source 1..110: mol_type = other DNA
tcatttggttctctctgttgagcagttcacaataaggcagctgatttaccttagagtaagagaggatactcataacaaaagcaatagcctatttgtaacttgaccccaga

SEQ ID NO: 27003 - DNA, 110 bp, synthetic construct
  source 1..110: mol_type = other DNA
gtaagagaggatactcataacaaaagcaatagcctatttgtaacttgaccccagaaggacatgtcgtcacttttgctgttctgtttgttagaaccaaatccctaggttca

SEQ ID NO: 27004 - DNA, 110 bp, synthetic construct
  source 1..110: mol_type = other DNA
tagtggtttccaaagtggtgaatgtgtactggaaaagataaagtaaggtgggactggggatatacaaaataagttaagcttgttgtatgaaggaaattagaacctatgga

SEQ ID NO: 27005 - DNA, 110 bp, synthetic construct
  source 1..110: mol_type = other DNA
atcttgttgttttgtattcagtttctgtgttgtgcgatgagatagtgttttatatatataagcagttctcttgacattttgtgaagattaaaggtttggtatgttgctct

SEQ ID NO: 27006 - DNA, 110 bp, synthetic construct
  source 1..110: mol_type = other DNA
ctaatagatagctccgtatcatagagctttatggccatcttctatttacattatccattctaaaagggacataataatttctggagagctctacaaccacatttcaagtg

SEQ ID NO: 27007 - DNA, 110 bp, synthetic construct
  source 1..110: mol_type = other DNA
gagtgggtacagaatgagtttctttttgggatgatgaaaaagttttggaaatgacagttgtggtggttgcacaatattgtgaatatacttaatgaattaaataaacgctt

SEQ ID NO: 27008 - DNA, 110 bp, synthetic construct
  source 1..110: mol_type = other DNA
aaacctgcaacctcatggcactaagccacgacaagaactcctgcagtcatattcttaactcactgcaccacagtgggaactcctattctatttgaatctaaaagtcaaac

SEQ ID NO: 27009 - DNA, 110 bp, synthetic construct
  source 1..110: mol_type = other DNA
ataaaatcttaatcccatggcatgcaaagtgtgttcctttatcatctgttttccacctctcactttagctctcacctccttatcgtcaatatttcaaataatgtagtcct

SEQ ID NO: 27010 - DNA, 110 bp, synthetic construct
  source 1..110: mol_type = other DNA
aaaaaaaaaaagctaacaggaaggaagagttctcttgtggggcagtgggttcagaacttggtgttgtcactgcagtggcttgggtcgatactggggtgtgggtttgatcc

SEQ ID NO: 27011 - DNA, 110 bp, synthetic construct
  source 1..110: mol_type = other DNA
acttggtgttgtcactgcagtggcttgggtcgatactggggtgtgggtttgatccctggccctggaattctgcatgtgatgggtgctaggtgtgcccatcccccaaaaaa

SEQ ID NO: 27012 - DNA, 110 bp, synthetic construct
  source 1..110: mol_type = other DNA
aactggtttttggttaattggtaagtatttattatgtatctaaagtttggccagtttagttcaagaagatcacagtctgctactcattcctgtttcagggaaaaaagctc

SEQ ID NO: 27013 - DNA, 110 bp, synthetic construct; identical to SEQ ID NO: 27012
  source 1..110: mol_type = other DNA

SEQ ID NO: 27014 - DNA, 110 bp, synthetic construct; identical to SEQ ID NO: 27012
  source 1..110: mol_type = other DNA

SEQ ID NO: 27015 - DNA, 110 bp, synthetic construct; identical to SEQ ID NO: 27012
  source 1..110: mol_type = other DNA

SEQ ID NO: 27016 - DNA, 110 bp, synthetic construct
  source 1..110: mol_type = other DNA
aacctccactttccttcagtaagaaacctccttcctactacccatccatttgtgtatttgtttaaccccagtatgcatgtaaagtagatttatttatttatttatttatt

SEQ ID NO: 27017 - DNA, 110 bp, synthetic construct
  source 1..110: mol_type = other DNA
aatgagaattgactgtaatctatattaggtgctccagttgagctattggaatagattaatagagtatgcttcaaactaccctctgctgaaagcctagtgaaaggcctctc

SEQ ID NO: 27018 - DNA, 110 bp, synthetic construct
  source 1..110: mol_type = other DNA
tgtacagagtttgtattaagcagattccagctcagcacacagctctgtgtgtagatgctggtgagtgaatcagatacttccattctatatgtatatatagaaagagagat

SEQ ID NO: 27019 - DNA, 110 bp, synthetic construct
  source 1..110: mol_type = other DNA
gagtgagattaaccagaaggaggaggacaacagagaatccagggtcttggaacaagggaaatgtgtcaaggatgtgagactggtcatcagtttcaaaagctgctctaaga

SEQ ID NO: 27020 - DNA, 110 bp, synthetic construct
  source 1..110: mol_type = other DNA
gttccctcacaccctctcctattttctgctcctattttgaggaggaaaagaaattgtcctttataattccctccaccgcacatccacccactctttttcttatgctatct

SEQ ID NO: 27021 - DNA, 110 bp, synthetic construct
  source 1..110: mol_type = other DNA
gtcctttataattccctccaccgcacatccacccactctttttcttatgctatcttgaaacagccgcacttccttcagaacttctttgagggctttcagaatatcaatca

SEQ ID NO: 27022 - DNA, 110 bp, synthetic construct
  source 1..110: mol_type = other DNA
tatatagaagtggctggagctggttggaaacagactacagctacctagagaccatggttgtctcaagcaaccccagcaaggattaagaaacattgctaggagttctcatg

SEQ ID NO: 27023 - DNA, 110 bp, synthetic construct
  source 1..110: mol_type = other DNA
gggaagtcctcctgagacagcctcaccaccccccatcctatgatctcctgaaacacagctgtgctctacctccttgcatgtgtcataactccaactaagtaattaactgg

SEQ ID NO: 27024 - DNA, 110 bp, synthetic construct
  source 1..110: mol_type = other DNA
cttgaaagaagatttatttgcctgattacaaccttcacatgactgcagaaaaggtgaaaaagtctaaaacttttcaaaattccgaacacctaaaatcctataattgatac

SEQ ID NO: 27025 - DNA, 110 bp, synthetic construct
  source 1..110: mol_type = other DNA
gaaaaagtctaaaacttttcaaaattccgaacacctaaaatcctataattgatactgacaaaaatctcctcagacctttatgaacaacgaaaaataaagctgcttccaga

SEQ ID NO: 27026 - DNA, 110 bp, synthetic construct
  source 1..110: mol_type = other DNA
tgagtgtacacacacacacacacacacacacacacacacacaattcctattgccatgcattgagctaggtagaacctctgatggaaaaaggacgggtaaaacgacccttt

SEQ ID NO: 27027 - DNA, 110 bp, synthetic construct
  source 1..110: mol_type = other DNA
tgcattgagctaggtagaacctctgatggaaaaaggacgggtaaaacgaccctttagaataaaattgtcactgacgtggactaaattaaatgtcttacaggtttcagggt

SEQ ID NO: 27028 - DNA, 110 bp, synthetic construct
  source 1..110: mol_type = other DNA
tcttcttgtatttagcatgtttttctgtttgtctggaaaactcacttatccaacatgtgggaagcttacttgtcctccgacagtcctggaaagattgaggacaagttgaa

SEQ ID NO: 27029 - DNA, 110 bp, synthetic construct
  source 1..110: mol_type = other DNA
gtttaataatcctctctgacttgaatccaagtctcagcctggaaaccgttggttgaaactggccccttctgtgaaagataaagttggtgaaatagaaatatccttctgag

SEQ ID NO: 27030 - DNA, 110 bp, synthetic construct
  source 1..110: mol_type = other DNA
ggtccatagagaacctgaaacagaatgtaagctgcaagttgggatggtggaggaaatgcaaaacaggggagctggtagacccgtgatgacttggtttcttagattccaca

SEQ ID NO: 27031 - DNA, 110 bp, synthetic construct
  source 1..110: mol_type = other DNA
atgcaaaacaggggagctggtagacccgtgatgacttggtttcttagattccacagggcaccaatgtcaatatttgtccagtggatgagggcccatgtcaggcatggggc

SEQ ID NO: 27032 - DNA, 110 bp, synthetic construct
  source 1..110: mol_type = other DNA
cagctgtttataatacaaaagcctcaggctttctcacaacctgcttttttgaaaaccctgcaaaggtgtttaaaggataaccgcctaaagccattacctccctgcctaaa

SEQ ID NO: 27033 - DNA, 110 bp, synthetic construct
  source 1..110: mol_type = other DNA
ccctgcaaaggtgtttaaaggataaccgcctaaagccattacctccctgcctaaaattgccctggcttctgccgtcttcctctctcttctgaggactgggtggtggtggt

SEQ ID NO: 27034 - DNA, 110 bp, synthetic construct
  source 1..110: mol_type = other DNA
cctagattgagtctctgtttctctctttgcccacaaggatactttccagcttttctgtgttggtaacacactagtgacttaacattttgccatctatttgttttgaatgc

SEQ ID NO: 27035 - DNA, 110 bp, synthetic construct
  source 1..110: mol_type = other DNA
tgtgttggtaacacactagtgacttaacattttgccatctatttgttttgaatgctatgtgaaagcaggattgttgaaaatatactatttgcttaaatgactgcccagag

SEQ ID NO: 27036 - DNA, 110 bp, synthetic construct
  source 1..110: mol_type = other DNA
tccacctccaataaaagtcttttggcgttaggagtgaatttaaaaaggagcttccagggactaggacacattcattaccggtattccaaatgaagaccctgagctgggag

SEQ ID NO: 27037 - DNA, 110 bp, synthetic construct
  source 1..110: mol_type = other DNA
tggtgattttgcttttgtttgactaatttgcttcttcatagtcaaatagtcatgtaaaacagaatgaatgttttggccatatttggttgtcttcatgagtcaagtctacc

SEQ ID NO: 27038 - DNA, 110 bp, synthetic construct
  source 1..110: mol_type = other DNA
cacaaactctttcattcagcaaaatcctggcatagcgtttcattcgttcacgactcctagagaggagaatgctgagaaagggcgtgccctggggaagcttaattggcata

SEQ ID NO: 27039 - DNA, 110 bp, synthetic construct
  source 1..110: mol_type = other DNA
cctagagaggagaatgctgagaaagggcgtgccctggggaagcttaattggcatattaacctgtaaactgtttcctattgggcagaaaaggaggcagttcgaggagcaag

SEQ ID NO: 27040 - DNA, 110 bp, synthetic construct
  source 1..110: mol_type = other DNA
ttttgtgagtcgtggttgaaagcgcttgaagcagcctgatgtaacccagccttttcaggttgccttctgccctggatgttggacagttaggctcttgcagcttatagact

SEQ ID NO: 27041 - DNA, 110 bp, synthetic construct
  source 1..110: mol_type = other DNA
caggttgccttctgccctggatgttggacagttaggctcttgcagcttatagactaaacacagcatttctgagcctccaatgtcaccccatttcctgatgaggcatgact

SEQ ID NO: 27042 - DNA, 110 bp, synthetic construct
  source 1..110: mol_type = other DNA
gtggttcaatggggtagtctaggggagttgctggggtgttggtttggtgtaaggctgtgttcaggcctcaattagtagtagtgatgatggtaaagcaactacagtagtga

SEQ ID NO: 27043 - DNA, 110 bp, synthetic construct
  source 1..110: mol_type = other DNA
tgtgttcaggcctcaattagtagtagtgatgatggtaaagcaactacagtagtgacagtaaactgatttttacagagtttctaagtcccaagtatggtcttggtgcttta

SEQ ID NO: 27044 - DNA, 110 bp, synthetic construct
  source 1..110: mol_type = other DNA
cttctgtaaatcagggttctccagcgaacaaaaccaacaggatatacgtacttaccattgacgcttaaacaatgccaggattggaggtgacaaccctccacatagcttaa

SEQ ID NO: 27045 - DNA, 110 bp, synthetic construct
  source 1..110: mol_type = other DNA
cattgacgcttaaacaatgccaggattggaggtgacaaccctccacatagcttaaaatcagcatgcattatttataactttatggttggtcctctatatctgcagtcctg

SEQ ID NO: 27046 - DNA, 110 bp, synthetic construct
  source 1..110: mol_type = other DNA
atactgtaggatcattatagtagtttctcaggctagcaactgctggatggttctttcagccactactctgtatatttcaatactaaagagagggctactttcaactgggg

SEQ ID NO: 27047 - DNA, 110 bp, synthetic construct
  source 1..110: mol_type = other DNA
tcagccactactctgtatatttcaatactaaagagagggctactttcaactggggtgtttaatactgtcgctagccatttgtgcacagcagaatataattcaggcacaca

SEQ ID NO: 27048 - DNA, 110 bp, synthetic construct
  source 1..110: mol_type = other DNA
attctcacacacagttcttgtgggagtataacatagttcaacccttttggaaaacagtttctcactcttgaagaaagctaaactgatatctattctatgatccagtattt

SEQ ID NO: 27049 - DNA, 110 bp, synthetic construct
  source 1..110: mol_type = other DNA
agtttctcactcttgaagaaagctaaactgatatctattctatgatccagtatttccattccaaactgtattgccaaaagaaaggaatgtatctatcctactagacttac

SEQ ID NO: 27050 - DNA, 110 bp, synthetic construct
  source 1..110: mol_type = other DNA
agtcatgggactctgatgacccaggcattgctgtggaggacaaacgggagtcaggctgtccccgtagctcagataagaaacaacaggatgtgactgggtcagcggcagag

SEQ ID NO: 27051 - DNA, 110 bp, synthetic construct
  source 1..110: mol_type = other DNA
ctgtccccgtagctcagataagaaacaacaggatgtgactgggtcagcggcagagagaaggaagaggagatgcagtggagaggtggatacaaagagggagactccatacg

SEQ ID NO: 27052 - DNA, 110 bp, synthetic construct
  source 1..110: mol_type = other DNA
acctgttgtgccacagcgagaattccaagagtcatcaacatctttttaaatcaataacaacagtaaacttgccggttaactatttttgcgccaagctcagtggtaaactt

SEQ ID NO: 27053 - DNA, 110 bp, synthetic construct
  source 1..110: mol_type = other DNA
cctcaagtcttctttgccatcccagcaataatccactagtgcttctggactttcactccagagaggatttagcctgtctccgtgataaacacgagagggatggaatggaa

SEQ ID NO: 27054 - DNA, 110 bp, synthetic construct
  source 1..110: mol_type = other DNA
aattatccagactgacctgtgactgggtgtccttgaaaatctcagtgaagctaggaaatggtcaggttttgctcattgattagatttggagtaatttataagccactgct

SEQ ID NO: 27055 - DNA, 110 bp, synthetic construct
  source 1..110: mol_type = other DNA
taattgttaagacactttagggagtttaccatgtctacttctagttatacccggcactcctggccatgcaattctttctttctttctttctttctttcttttagggcccc

SEQ ID NO: 27056 - DNA, 110 bp, synthetic construct
  source 1..110: mol_type = other DNA
ccacgatgccagccctgctaacccacgctcagtttccttccttcaacaggagtgaagagcccctcagcctcggccactggcacgacctgcatgtgtctcgaacagcgagg

SEQ ID NO: 27057 - DNA, 110 bp, synthetic construct
  source 1..110: mol_type = other DNA
agagcccctcagcctcggccactggcacgacctgcatgtgtctcgaacagcgaggaacggcatcttacaggtggataagcagaaggtggtggaggggatggcggaggtaa

SEQ ID NO: 27058 - DNA, 110 bp, synthetic construct
  source 1..110: mol_type = other DNA
gttccctatctcttcctcaatgaccggtggacaataggatacaaccacatggttttcgggttctgcatcagagctctcttccagacgctcagctactggagagattattt

SEQ ID NO: 27059 - DNA, 110 bp, synthetic construct
  source 1..110: mol_type = other DNA
tcgggttctgcatcagagctctcttccagacgctcagctactggagagattatttctgtatcttctattttaggaactgctgatcgagtttccagaacctcaacattatt

SEQ ID NO: 27060 - DNA, 110 bp, synthetic construct
  source 1..110: mol_type = other DNA
agagtttgcctctgtctggatcctggctacgctcccgagttggaagtacgtacggtcactgggtaaaggagtgtattagtgtgacaacacatgtaaaagaatggcaaatt

SEQ ID NO: 27061 - DNA, 110 bp, synthetic construct
  source 1..110: mol_type = other DNA
gactgatcacatgggtcagtcaatcctcttcatcatcttccatgagcaaccaggatgaaaagaagaccaagccaagtgtagcgtcactgtcagctgcttatccaacatcc

SEQ ID NO: 27062 - DNA, 110 bp, synthetic construct
  source 1..110: mol_type = other DNA
tgaaaagaagaccaagccaagtgtagcgtcactgtcagctgcttatccaacatccacataggtcagtcaatcctcttcatcgtcttccatcagcaaccaggataaaatga

SEQ ID NO: 27063 - DNA, 110 bp, synthetic construct
  source 1..110: mol_type = other DNA
caataaagaaaagacttaaggtacatgttagaccagatggacttaacattcatagactattccatcccaaagtaacagaatacgcattcttctcaataacacaccaacat

SEQ ID NO: 27064 - DNA, 110 bp, synthetic construct
  source 1..110: mol_type = other DNA
actattccatcccaaagtaacagaatacgcattcttctcaataacacaccaacattctccaggatagatcatatgatctgccagaacagaagtctttaacttaactttac

SEQ ID NO: 27065 - DNA, 110 bp, synthetic construct
  source 1..110: mol_type = other DNA
tctgcaggtacaatcagtaatgctttgcctaggggtctgcaccatatatacctgatttcctgcaatgcagcttctcttacttggtattcccatggaaaactcatgcacgc

SEQ ID NO: 27066 - DNA, 110 bp, synthetic construct
  source 1..110: mol_type = other DNA
tttcctgcaatgcagcttctcttacttggtattcccatggaaaactcatgcacgcatgacctagaagaataagaggatttttactagtgggaccatccttggacaatggg

SEQ ID NO: 27067 - DNA, 110 bp, synthetic construct
  source 1..110: mol_type = other DNA
gtgccccctagggttaacaagctgggaccttaacagaagtccttgagtgtgttttacagaacagcaggtaggagaacaacttatcaaaaaccttttgcttgtaacctgcc

SEQ ID NO: 27068 - DNA, 110 bp, synthetic construct
  source 1..110: mol_type = other DNA
acagaacagcaggtaggagaacaacttatcaaaaaccttttgcttgtaacctgcctttactaatcaagcctgctttagctgtttttctttttctttttcctttctttaat

SEQ ID NO: 27069 - DNA, 110 bp, synthetic construct
  source 1..110: mol_type = other DNA
attggaaggccatggtcatcttttttttttttttttttttttttttttgtagagctgcacccatggcatatggaagcattcaattggagccacagctgctggtctacacc

SEQ ID NO: 27070 - DNA, 110 bp, synthetic construct
  source 1..110: mol_type = other DNA
tttttttttttttgtagagctgcacccatggcatatggaagcattcaattggagccacagctgctggtctacaccatagccacagcaaagcaggatccaagctgtgtctg

SEQ ID NO: 27071 - DNA, 110 bp, synthetic construct
  source 1..110: mol_type = other DNA
gtgctggacacagctccacgcccgtggtggtttcctcttaaaccctcccaacatgcagtagggcctgttagtatccatacttgatcgatgaggccctgaaggcacagaaa

SEQ ID NO: 27072 - DNA, 110 bp, synthetic construct
  source 1..110: mol_type = other DNA
catttggcattgaaagccagcaggctcaaaggcaggagctccacaggattgggaaaaacaagagactccactcttggggggcacaacagggtttcacgtacactgggtcc

SEQ ID NO: 27073 - DNA, 110 bp, synthetic construct
  source 1..110: mol_type = other DNA
aaacaagagactccactcttggggggcacaacagggtttcacgtacactgggtcccagggacaagcagggactccataagaatctggtcggacctacctgcaggtcttgg

SEQ ID NO: 27074 - DNA, 110 bp, synthetic construct
  source 1..110: mol_type = other DNA
ttggtccccaaccacaaccaaggcaaccaatattctcatttctacctaaagattagtgttccttcttaaaaatcaattaaacaaactgaaaagtaccctgaaaaaacata

SEQ ID NO: 27075 - DNA, 110 bp, synthetic construct
  source 1..110: mol_type = other DNA
acaatttcaggatagtttcgattgtctattgagaagcctgatctcagtcttactattgaatgtcatagccttttttccagactcaagattttttttttaatctttgattt

SEQ ID NO: 27076 - DNA, 110 bp, synthetic construct; identical to SEQ ID NO: 27075
  source 1..110: mol_type = other DNA

SEQ ID NO: 27077 - DNA, 110 bp, synthetic construct
  source 1..110: mol_type = other DNA
ctgcattaaaggaaaaagagaggaaaaaaaaactgtggctaggaaaaagagaaaaaaaaaattgtggctagcaaatgatgacagccaactattcaaatgcaaggaagcaa

SEQ ID NO: 27078 - DNA, 110 bp, synthetic construct
  source 1..110: mol_type = other DNA
aaaaaattgtggctagcaaatgatgacagccaactattcaaatgcaaggaagcaaaacacaaaagaactactagaactacagtggctcttttcctcttattgtgtaagtc

SEQ ID NO: 27079 - DNA, 110 bp, synthetic construct
  source 1..110: mol_type = other DNA
ttgccagcatcacctcccatatgggggagccaaattaaagcaaagtccagccctcaaaagtctttaaataaaaataacaggtatgcaagtgctgtaaatataaccatctg

SEQ ID NO: 27080 - DNA, 110 bp, synthetic construct
  source 1..110: mol_type = other DNA
gatctctgccagcagcagctgtagtttcaaacaaagcttgcgtagaagtgatgtctcttctttcgttttcttattaattatgtataagggaggaacagaagctaggaaat

SEQ ID NO: 27081 - DNA, 110 bp, synthetic construct
  source 1..110: mol_type = other DNA
tcttctttcgttttcttattaattatgtataagggaggaacagaagctaggaaatattgtggtgctttacttgtttaagatattgagcattaaaacgcacacttcctcca

SEQ ID NO: 27082 - DNA, 110 bp, synthetic construct
  source 1..110: mol_type = other DNA
ctctttaatcttggaagccaggaaacagcctcgcacaagtcctatgtgcctgatcagacacgcctggacgggtggaacagcagggacatttcaccagaaggaaatgacca

SEQ ID NO: 27083 - DNA, 110 bp, synthetic construct
  source 1..110: mol_type = other DNA
agacacgcctggacgggtggaacagcagggacatttcaccagaaggaaatgaccaggaggggcctccatgagtcagcggtgcccaggggttgtctggccctgccctgaag

SEQ ID NO: 27084 - DNA, 110 bp, synthetic construct
  source 1..110: mol_type = other DNA
gggaagaaatggtaggaaataggcctgaggaagaatgatgatggattgtaactctatatatgtacactttattcttttcatgatagaaaatacttcaaggaaatgtgaca

SEQ ID NO: 27085 - DNA, 110 bp, synthetic construct
  source 1..110: mol_type = other DNA
cacttgtcatggggacaggtatctttttatttctatttagggcagggctgtgaatcgagctgatttacctaaggttgcagatgaatttctgcaaggccagatgttggaga

SEQ ID NO: 27086 - DNA, 110 bp, synthetic construct
  source 1..110: mol_type = other DNA
cgagctgatttacctaaggttgcagatgaatttctgcaaggccagatgttggagaagtagaatcctactgtcgtttctttttgcttctaaaatgtggaatcatatgataa

SEQ ID NO: 27087 - DNA, 110 bp, synthetic construct
  source 1..110: mol_type = other DNA
gttttcttgacactttataattttaggcctgaatcctgaagctttatgcccagagaagatggtgaaataaataagcagtttgtcacctataactctcaaagcagtgggga

SEQ ID NO: 27088 - DNA, 110 bp, synthetic construct
  source 1..110: mol_type = other DNA
caacccaggctgtctggccccaagccagagttcctcaaacactgcactaatgagtctcatatgggaaacctcctgctagctacagagatgctctattacatacctacaga

SEQ ID NO: 27089 - DNA, 110 bp, synthetic construct
  source 1..110: mol_type = other DNA
aattgtggagcatatgagttaagtatatgtatgacatgtacactacgtttgtgaagggctatatagagtatgggggacaaggactataagcacttagagctaccaaactt

SEQ ID NO: 27090 - DNA, 110 bp, synthetic construct
  source 1..110: mol_type = other DNA
gggctatatagagtatgggggacaaggactataagcacttagagctaccaaactttgttggctcagagacagaagaggaaagagagctgtggaagaagaatgagagcagt

SEQ ID NO: 27091 - DNA, 110 bp, synthetic construct
  source 1..110: mol_type = other DNA
aactactatagggagtgtagctgacggagggtctcagcttccaaccctctggatccatcactgtgtgtgtgtttcccaagagttgctcctagctatgactgagcataggg

SEQ ID NO: 27092 - DNA, 110 bp, synthetic construct
  source 1..110: mol_type = other DNA
catcactgtgtgtgtgtttcccaagagttgctcctagctatgactgagcatagggtagcaggtggggatggtggagactaatataggctagttgctgtgaggtgcaggac

SEQ ID NO: 27093 - DNA, 110 bp, synthetic construct
  source 1..110: mol_type = other DNA
acttcactgacaagtcatagagcacattctttgttctaggtttaaaggaaaattcatctgtacttttccaagtcaaaaatgaaatatcaaatacaagttgtgattttcaa

SEQ ID NO: 27094 - DNA, 110 bp, synthetic construct
  source 1..110: mol_type = other DNA
attcatttctgctgttcacaacgggaactccaaaatactcattttcttctgatatcaaatgttcacatagcttattacatcttttgtcagtgtagacagaatattgtacc

SEQ ID NO: 27095 - DNA, 110 bp, synthetic construct
  source 1..110: mol_type = other DNA
ggaaagatgggtgctacttcaaggcctgggctataaaatctttctgtgcattagtctttctctctccatctgctagcaagcttctgagaacctggcagagaatttcaaag

SEQ ID NO: 27096 - DNA, 110 bp, synthetic construct
  source 1..110: mol_type = other DNA
tttatatgtaacaagaagaacttcatagcttctaaagacaaaattgacttatgctggtttcaacaataagattatcattgacggggcatttgaatgatatcttctctaca

SEQ ID NO: 27097 - DNA, 110 bp, synthetic construct
  source 1..110: mol_type = other DNA
tctgaaaagttactccaaatactggctcagggcttcctgggcatgttaccccttatatcagctggggttcaaatggagaagcagaacgagtaggagatgcatattaagaa

SEQ ID NO: 27098 - DNA, 110 bp, synthetic construct
  source 1..110: mol_type = other DNA
tatcagctggggttcaaatggagaagcagaacgagtaggagatgcatattaagaagtttatcatggggctgccaagtccacagtttgaaggaatggctattgggaagggc

SEQ ID NO: 27099 - DNA, 110 bp, synthetic construct
  source 1..110: mol_type = other DNA
ttaggacattttacacctgttcactttccccacagcctgggacgttgtagctccctctccgtcctaaactaaccattgtctttacacatctcttttctatgaagtctcct

SEQ ID NO: 27100 - DNA, 110 bp, synthetic construct
  source 1..110: mol_type = other DNA
taggagtcttgtttctgaaattccacgacagctgcatcagaatattagttgcacgtaaagccattgatccccatgctgtgccccaaagcacattaaacttctttatacaa

SEQ ID NO: 27101 - DNA, 110 bp, synthetic construct
  source 1..110: mol_type = other DNA
aagtgggatgggacaccggtaaacactgggtccacactgtggggaagtaatcctcatatagcttcgtataatgtgccttgtgcgatgtggcacggtaccctaagtacagc

SEQ ID NO: 27102 - DNA, 110 bp, synthetic construct
  source 1..110: mol_type = other DNA
atatagcttcgtataatgtgccttgtgcgatgtggcacggtaccctaagtacagcatatgaagagggggatggttggataattaaagatgtggcaaatttctatttcccc

SEQ ID NO: 27103 - DNA, 110 bp, synthetic construct
  source 1..110: mol_type = other DNA
ataactaatcagcaatttgcattcattcagtacgtgcggtaaagatgttagctgtccacacagaaaattatgttccctattctagaatacagtaggtatttcccagaggc

SEQ ID NO: 27104 - DNA, 110 bp, synthetic construct
  source 1..110: mol_type = other DNA
gttctagaggcaggaggtgggtaaaagaacaagagctatttatttgactgttgaaaataattacctttatatatccttagctatagaaagtcaactcaaaagtgttgttg

SEQ ID NO: 27105 - DNA, 110 bp, synthetic construct
  source 1..110: mol_type = other DNA
aataattacctttatatatccttagctatagaaagtcaactcaaaagtgttgttgagaaatatagtgaatatagaaagtgagagccctagagaaaaaggatggaaaagga

SEQ ID NO: 27106 - DNA, 110 bp, synthetic construct
  source 1..110: mol_type = other DNA
gtcaccaccacaacaactgtcatggcctggcctgctggacgatgagagataacgagcagagctgagtcaccccagacattttggctgaaaccagcaaaatcagcaaagcc

SEQ ID NO: 27107 - DNA, 110 bp, synthetic construct
  source 1..110: mol_type = other DNA
aaacttcaacttcttaagaaaggttgggccagtgtccccagttaagctgctcctagattactgactcacaaaagctgcaagataataaatttctgttggggacaatttat

SEQ ID NO: 27108 - DNA, 110 bp, synthetic construct
  source 1..110: mol_type = other DNA
aaaataaaggaaaaaggaagctacatgcagcagttttctgtggcctatatagtcaattaattaccaaaaaccaggcagcttaagcaaacagctatttattctctcataat

SEQ ID NO: 27109 - DNA, 110 bp, synthetic construct
  source 1..110: mol_type = other DNA
ttttcagatatgattaacaaacttgagatgttttatcctggattacccaggtgaactgtagctacaatcataggcatccttataagagggaggcagatggatatgagaca

SEQ ID NO: 27110 - DNA, 110 bp, synthetic construct
  source 1..110: mol_type = other DNA
ctgtagctacaatcataggcatccttataagagggaggcagatggatatgagacacagaggacaaggcaatgtagacacatatagaggagaaggtcactgaagatactgg

SEQ ID NO: 27111 - DNA, 110 bp, synthetic construct
  source 1..110: mol_type = other DNA
tccccaactacctaagacctgtccttgttaatctcacctagtttatgcatgtcatctcactacattcctcagcacatgtgttatggccttttaccaagcttatactccaa

SEQ ID NO: 27112 - DNA, 110 bp, synthetic construct
  source 1..110: mol_type = other DNA
ctcactacattcctcagcacatgtgttatggccttttaccaagcttatactccaatcatgattgtagacaatatcttagaatgatggtcttttgatggttttattactga

SEQ ID NO: 27113 - DNA, 110 bp, synthetic construct
  source 1..110: mol_type = other DNA
taaatgagtttcccagaaaaccagacctttactggcagcccagcgcagtggtggaggccctgcccccatgtagactactcagtttcacactcatcctgtttcccataagc

SEQ ID NO: 27114 - DNA, 110 bp, synthetic construct
  source 1..110: mol_type = other DNA
ggccctgcccccatgtagactactcagtttcacactcatcctgtttcccataagcaatataaagcactacctggtgtaatgtaccactgactactcttgtactttgtcac

SEQ ID NO: 27115 - DNA, 110 bp, synthetic construct
  source 1..110: mol_type = other DNA
tcactgctactaataaagttttgaatttcaaaatcgaaatagcttaattttctttaagttacttgcttctacaaaggcacaacgctcttggatttaacagagaattcatc

SEQ ID NO: 27116 - DNA, 110 bp, synthetic construct
  source 1..110: mol_type = other DNA
tctgaggcattagacagaatggatggggtgctctggaccagaattgcttgaagcttcctgtacttggagtcgaagataacctttgctaactagagagccattaataccct

SEQ ID NO: 27117 - DNA, 110 bp, synthetic construct
  source 1..110: mol_type = other DNA
gtgtttattaaaggcaaattacattagaaaccattgatcatgtctgtagattattgagagcaagcattatgatgagtagtaaagggaaagacccacgtgtattatttttt

SEQ ID NO: 27118 - DNA, 110 bp, synthetic construct
  source 1..110: mol_type = other DNA
catctacgttgttttgtgtgatgtacataccatcaatactacggaaatccaataagtacgtcctactatccacttggtataattgtagactcattttggagtatgtactt

SEQ ID NO: 27119 - DNA, 110 bp, synthetic construct
  source 1..110: mol_type = other DNA
gtacgtcctactatccacttggtataattgtagactcattttggagtatgtacttgtcacaggattcttccttcgaacacgcaaataatatggatttacaacctagcata

SEQ ID NO: 27120 - DNA, 110 bp, synthetic construct
  source 1..110: mol_type = other DNA
atggccctataaacttttgttgttgactcatacctagcaggttgctttattttgcacttagctgaccaccttaaactgtacgcacagtatacaagctaggtgccaagcaa

SEQ ID NO: 27121 - DNA, 110 bp, synthetic construct
  source 1..110: mol_type = other DNA
gaccaccgggacaaaggggtgtccagtgttataaagggcaagggcagcttgtcaaaaaggcaagtgtgaagccctgtacatatttcttaatctattcaaaccttaagcca

SEQ ID NO: 27122 - DNA, 110 bp, synthetic construct
  source 1..110: mol_type = other DNA
ttcttgctgttttatgtatactgtgcatggcaacagcttctgactccattaagaatttaatgaaagccattacccagaaaacacacctaggcaattatacacagaaattt

SEQ ID NO: 27123 - DNA, 110 bp, synthetic construct
  source 1..110: mol_type = other DNA
ggttagacacatactgatttaacctggatttgatctggaagctctgagtgtgggttttgggctgaggctgaggttttaaactcccttacatttacaaacattgacattta

SEQ ID NO: 27124 - DNA, 110 bp, synthetic construct
  source 1..110: mol_type = other DNA
tttgggctgaggctgaggttttaaactcccttacatttacaaacattgacatttattcaaatgtcctcacagagctgacagaggccccgctccgcaagctggaaaacctc

SEQ ID NO: 27125 - DNA, 110 bp, synthetic construct
  source 1..110: mol_type = other DNA
ggaaagaactctaaacacctcagcatttctaagaaggaggtataacaaaacacgctacaacaatttatttttttactagctgggaggtttttgtaaaatagacatctttt

SEQ ID NO: 27126 - DNA, 110 bp, synthetic construct
  source 1..110: mol_type = other DNA
tggcacgaaccaatatgtagaaattggagttgctgattatttaaacatttctcagccaaaaacttacaagcggatgaagtaaagtaatgattggagtctgtatcaagcac

SEQ ID NO: 27127 - DNA, 110 bp, synthetic construct
  source 1..110: mol_type = other DNA
cttggatcagtgttgccatggctgtgatgcaggcctatagctgtagctccaatttgattcctagtccaggaacttccatatgccgtaggtgcatctgtaaaaagaaaaaa

SEQ ID NO: 27128 - DNA, 110 bp, synthetic construct; identical to SEQ ID NO: 27127
  source 1..110: mol_type = other DNA

SEQ ID NO: 27129 - DNA, 110 bp, synthetic construct
  source 1..110: mol_type = other DNA
gcagacatactcatctttagaggtggagaagagtgatgctgaggccagggctgattctgtattaactttactacgtagctggtttaccagatccctagggtacatgatta

SEQ ID NO: 27130 - DNA, 110 bp, synthetic construct
  source 1..110: mol_type = other DNA
tctgtattaactttactacgtagctggtttaccagatccctagggtacatgattatgggaggttcctgagtaaccaagttcccatcttagaatcatgatcatcacagaaa

SEQ ID NO: 27131 - DNA, 110 bp, synthetic construct
  source 1..110: mol_type = other DNA
ccttagttaaactcaggtagctctatctttttctaccctgggttcctgggctcctacccatttaccaggcttcttgaggtatgagtatgtggagactacctaatacacca

SEQ ID NO: 27132 - DNA, 110 bp, synthetic construct
  source 1..110: mol_type = other DNA
aaactctctgagcatcagactaatgaatcataacctctgagggcggcataagcacagtccagtttgccaaaccctgggctagaataaacattgctttctagagcttccat

SEQ ID NO: 27133 - DNA, 110 bp, synthetic construct
  source 1..110: mol_type = other DNA
agtccagtttgccaaaccctgggctagaataaacattgctttctagagcttccatctgatttataagccagactccttgttctagtggttcaaaagatctagattctttt

SEQ ID NO: 27134 - DNA, 110 bp, synthetic construct
  source 1..110: mol_type = other DNA
ggaactaaactccagaagacagaagtggatacacatctctttgtgggtttaaatgcagctctcctaaacctcactacagcagagacccagagataataattaatcttaca

SEQ ID NO: 27135 - DNA, 110 bp, synthetic construct
  source 1..110: mol_type = other DNA
ttgccctataaccagtggtcttaattagaagtcaacagtgatgacaaccatattactcatgtaacactcatgtggttatttgcctggtattttaaatattatattcccaa

SEQ ID NO: 27136 - DNA, 110 bp, synthetic construct
  source 1..110: mol_type = other DNA
ctcatgtaacactcatgtggttatttgcctggtattttaaatattatattcccaaggctacccatgggtatcaccatcaggttaggatttttttcctacatacccccatg

SEQ ID NO: 27137 - DNA, 110 bp, synthetic construct
  source 1..110: mol_type = other DNA
tgggatgggcaggctacccagggaaagctactatcacaacgatggcagaaatacaagagggagacctctttaaggctcagaacaggcatactgtaccttctgtcctattc

SEQ ID NO: 27138 - DNA, 110 bp, synthetic construct
  source 1..110: mol_type = other DNA
tgtgtgtgtgtgtttcattagagtcatttctatacttattgagtattgagagactgcttttttaaatattacctgactggatttttgcatttaaaatgccacattacagc

SEQ ID NO: 27139 - DNA, 110 bp, synthetic construct
  source 1..110: mol_type = other DNA
ccctctaaatccaactgcaactgatcagttgtgtctgttcatctctgaagccccattcaaaattccatgctgaggagcttcttagaccctccacaaggaaatcaatgcat

SEQ ID NO: 27140 - DNA, 110 bp, synthetic construct
  source 1..110: mol_type = other DNA
attaacttatgaaaaaaaaatctcatggtataaacatctctcctttgaatttccaagcctgaatgatgtaggcaacaagcaccttgccatggacctcacctggagtttct

SEQ ID NO: 27141 - DNA, 110 bp, synthetic construct
  source 1..110: mol_type = other DNA
ctcagaaagagccttaaaaatgtttacttcagtttagctggcacacggctatatagcccatttggagggttcttttaataatagcgggctggatgttccaattcccaaca

SEQ ID NO: 27142 - DNA, 110 bp, synthetic construct
  source 1..110: mol_type = other DNA
agtctacccttttgaggaacacagcctcaaaatggttattacatgagaggaactttttgaattaatcactgctaaaaaatgtactctcctaaagtagaaaccgtactctt

SEQ ID NO: 27143 - DNA, 110 bp, synthetic construct
  source 1..110: mol_type = other DNA
tttgaattaatcactgctaaaaaatgtactctcctaaagtagaaaccgtactcttcaggttctcacactgaaccttattgattgttatttaaggtcggaattgttaatga

SEQ ID NO: 27144 - DNA, 110 bp, synthetic construct
  source 1..110: mol_type = other DNA
tttctctgcatcaggcaagtccatgtccatttgaatctgtgcaattttacaatactggctctataccttaggctctgtctatgtgatgccccattgccaaccacagtttc

SEQ ID NO: 27145 - DNA, 110 bp, synthetic construct
  source 1..110: mol_type = other DNA
tggctctataccttaggctctgtctatgtgatgccccattgccaaccacagtttcagacccagaactactcccctagactcttacaccacttgattagcctttaacttca

SEQ ID NO: 27146 - DNA, 110 bp, synthetic construct
  source 1..110: mol_type = other DNA
tcaattggatgaattatactttaaatctcttgtttatatacaatgttacaatgacagatttgtcaggcatcattccatcaatttcctatatttccatcaactcctttcct

SEQ ID NO: 27147 - DNA, 110 bp, synthetic construct
  source 1..110: mol_type = other DNA
gctttgcttggcgggcaggcaagctgggtgaattttgccctctccctcactctgttcaccacatttggccagagtgacctctcgtctaaatttagacctcattagttcat

SEQ ID NO: 27148 - DNA, 110 bp, synthetic construct
  source 1..110: mol_type = other DNA
tcaccacatttggccagagtgacctctcgtctaaatttagacctcattagttcattatctgcataaaattctttagttgtttcccagtgttcttataataaatctttatc

SEQ ID NO: 27149 - DNA, 110 bp, synthetic construct
  source 1..110: mol_type = other DNA
atcatgaaatacagcaccaataagaccattaccaaccagatgacaaaattgctaccagtcaacgcagctgacctaccctaatgccagattcccagatgtggtttcttgaa

SEQ ID NO: 27150 - DNA, 110 bp, synthetic construct
  source 1..110: mol_type = other DNA
cagtcaacgcagctgacctaccctaatgccagattcccagatgtggtttcttgaaacagtgggccagtttgttccttactcttccatgatgctcacatgtcaactggagt

SEQ ID NO: 27151 - DNA, 110 bp, synthetic construct
  source 1..110: mol_type = other DNA
tatatacagactgattgggggaaaaaaacccataatagtagatgatgtgtttgtacatctcttacatggtttttaaatgagacccatagctctagtaaacatcatggtct

SEQ ID NO: 27152 - DNA, 110 bp, synthetic construct
  source 1..110: mol_type = other DNA
cctgattttaagtcaatgggttcctttcccagagctggtttagtttaagaccctaaccttaaacatggtatgataaagaattctaggcctctcagagccatctgcagaaa

SEQ ID NO: 27153 - DNA, 110 bp, synthetic construct
  source 1..110: mol_type = other DNA
ctaggggaacgtgcatcttaagagggggccatgattcatccagatgaataaatctctaatggtacagttgctgttctcctgcatcagctgatgtggacattttggtgacc

SEQ ID NO: 27154 - DNA, 110 bp, synthetic construct
  source 1..110: mol_type = other DNA
ctaatggtacagttgctgttctcctgcatcagctgatgtggacattttggtgacccaaggtcatgctccctcaggtcatgctcagagagtgaactcataatccagctccc

SEQ ID NO: 27155 - DNA, 110 bp, synthetic construct
  source 1..110: mol_type = other DNA
atgggctcaccattgggagtggctgcacttacagatgactgtgacatcgtttttttggtcaacttaactgcagccagggaggtagtacttcaaacagctctgaaatacag

SEQ ID NO: 27156 - DNA, 110 bp, synthetic construct
  source 1..110: mol_type = other DNA
tggtcaacttaactgcagccagggaggtagtacttcaaacagctctgaaatacagccccaaagaggaaaggggaaataccaagatttatgtgaagaaggtggtgcatgca

SEQ ID NO: 27157 - DNA, 110 bp, synthetic construct
  source 1..110: mol_type = other DNA
gtctttcattgcagggttctggacagcgcattacagtggtacccatgaccagcagctggaccagtgaccacaaatgaatatcgcctctgcctctaggcactgggtgggga

SEQ ID NO: 27158 - DNA, 110 bp, synthetic construct
  source 1..110: mol_type = other DNA
ctggaccagtgaccacaaatgaatatcgcctctgcctctaggcactgggtggggactctgtcctacatgttacccaaggctgggcctaagttctttggaccaattcagaa

SEQ ID NO: 27159 - DNA, 110 bp, synthetic construct; identical to SEQ ID NO: 27157
  source 1..110: mol_type = other DNA

SEQ ID NO: 27160 - DNA, 110 bp, synthetic construct; identical to SEQ ID NO: 27158
  source 1..110: mol_type = other DNA

SEQ ID NO: 27161 - DNA, 110 bp, synthetic construct
  source 1..110: mol_type = other DNA
cagagcttactgcattgagttgttgactctctaaccagtaagttttatattttgtgttgaaagatggaccctgtattgtcaacatcagttccggtgtactccttgagact

SEQ ID NO: 27162 - DNA, 110 bp, synthetic construct
  source 1..110: mol_type = other DNA
tcctgattttatattttcttttacgtgggtcacactgcatttatgatccaagactaattcatattggtaacatacaaacaaacctaagacagaaagagagagagagatcc

SEQ ID NO: 27163 - DNA, 110 bp, synthetic construct
  source 1..110: mol_type = other DNA
aattcatattggtaacatacaaacaaacctaagacagaaagagagagagagatccttaagattactgagcacaaagtgagcagaatagaaaggggttgttgaaaagaatg

SEQ ID NO: 27164 - DNA, 110 bp, synthetic construct
  source 1..110: mol_type = other DNA
ccagaatcagtgaaagacttaaatgttcagactgaagaatcacaatgaatactaagctaaataagtaaaatttaatccacacggagattcatcagagtacaactacagag

SEQ ID NO: 27165 - DNA, 110 bp, synthetic construct
  source 1..110: mol_type = other DNA
gctaaataagtaaaatttaatccacacggagattcatcagagtacaactacagagccctattgataataagaattttagtactcagagcaagaacagagattacctacaa

SEQ ID NO: 27166 - DNA, 110 bp, synthetic construct
  source 1..110: mol_type = other DNA
gacatttaaggctgtattacctccaccaatccaaatgagcagattccctcaaggaatttcaggttccaaggtcaggcccaggctagaactagcacctgcagcttgcctct

SEQ ID NO: 27167 - DNA, 110 bp, synthetic construct
  source 1..110: mol_type = other DNA
atttcaggttccaaggtcaggcccaggctagaactagcacctgcagcttgcctctgtcctgtgcattgcctaggctcagcctgccctcgctctaggacttaccacaggca

SEQ ID NO: 27168 - DNA, 110 bp, synthetic construct
  source 1..110: mol_type = other DNA
aaaaacagttttcaaaggcatgtgtaagaaatagcctacattaaatttccgtaagttttgaaataaactcgatttagttttgccttaaacggctcacactgttttgtctg

SEQ ID NO: 27169 - DNA, 110 bp, synthetic construct
  source 1..110: mol_type = other DNA
ttttgaaataaactcgatttagttttgccttaaacggctcacactgttttgtctgctgggggcattttcaagctggtctgtattttattttgaaattttaatcccactcc

SEQ ID NO: 27170 - DNA, 110 bp, synthetic construct
  source 1..110: mol_type = other DNA
acatgagatctgggtgctcagggagactgaccctctgaatggggcaagcttggaggaaacttcggatttctaagcagtcctgtagcaattcttagatgggtggtggaatt

SEQ ID NO: 27171 - DNA, 110 bp, synthetic construct
  source 1..110: mol_type = other DNA
aagagacctgggttcacatcccactctggccattcgctagctgtctgtcaccaggtgaactatataatcttcctgtgtgacatgaagataatctatgccttcctcacagc

SEQ ID NO: 27172 - DNA, 110 bp, synthetic construct
  source 1..110: mol_type = other DNA
gttgatgtggcatatggaactaaaagcattaaagcttgcacttgtgaaattatcgccagtagaatggcaaccttggagcaaggcattaagtcagcgtggtattaaaagca

SEQ ID NO: 27173 - DNA, 110 bp, synthetic construct
  source 1..110: mol_type = other DNA
tgaatcacaaaaattccacctgtgaaggacaaaatacaagctattgattctggctgcccaacatgagtacctttagaagttaacaaaatagttctattgtagtaagattc

SEQ ID NO: 27174 - DNA, 110 bp, synthetic construct
  source 1..110: mol_type = other DNA
ttttttttttgtgtctcagtattagttagggtggtccaggggtgactgagttcaccccagagctcagatatcatagaaacttacttcttgctcagttcctggttataggt

SEQ ID NO: 27175 - DNA, 110 bp, synthetic construct
  source 1..110: mol_type = other DNA
agtcagtggaagaagttagagtaccttttcctaatgtgcaaaaacaacctggcgttaatttagaatgttgacatgaagttgatgcagtcaattaatgttgaatgaaaatc

SEQ ID NO: 27176 - DNA, 110 bp, synthetic construct
  source 1..110: mol_type = other DNA
gtgcaaaaacaacctggcgttaatttagaatgttgacatgaagttgatgcagtcaattaatgttgaatgaaaatcagatgattaataatgcaatttgataagttcactgt

SEQ ID NO: 27177 - DNA, 110 bp, synthetic construct
  source 1..110: mol_type = other DNA
tctcgcgggacaaagcaaaacagcgcgagactttcttcacgctactccaaacaacgggcaatctaaagcttaggaattatttccgggatgttctgcttaatatttttgga

SEQ ID NO: 27178 - DNA, 110 bp, synthetic construct
  source 1..110: mol_type = other DNA
tgtgattttccaggggccctctgggaaatctcatgtactttgagatcaaaacagctccatttagaatttgatttggagagttatcataatgaaaagtgtttgaacatttg

SEQ ID NO: 27179 - DNA, 110 bp, synthetic construct
  source 1..110: mol_type = other DNA
gccctctgggaaatctcatgtactttgagatcaaaacagctccatttagaatttgatttggagagttatcataatgaaaagtgtttgaacatttgattaaataggatctc

SEQ ID NO: 27180 - DNA, 110 bp, synthetic construct
  source 1..110: mol_type = other DNA
tatgtgacctattcagacttgagaaatatgggcttctactgtattcaataaattctgctgggtagtcttcatttatctttctagatccattctttagtcttctccattct

SEQ ID NO: 27181 - DNA, 110 bp, synthetic construct
  source 1..110: mol_type = other DNA
tgcgcagttcaaacctgtgttgttggatggtcaattgcaattattgctcatacatgggacaaaggtggctgaaggcccaataatcttcactacacactgtgggctaaaag

SEQ ID NO: 27182 - DNA, 110 bp, synthetic construct
  source 1..110: mol_type = other DNA
cttttcattttacagtagtgggctgtggtagtaacctgcaaagttgttttgtcggtgggatacaagcagcattgaacagtgagatgaatacagatgcctaaaagcttaat

SEQ ID NO: 27183 - DNA, 110 bp, synthetic construct
  source 1..110: mol_type = other DNA
aaatatagagtagctaaaatacagtgttaaagactcagtggctcagtggtgcatatctgattgaataacgaatcaacaaaatacagtgttttattttccctgaaactgca

SEQ ID NO: 27184 - DNA, 110 bp, synthetic construct
  source 1..110: mol_type = other DNA
tctgattgaataacgaatcaacaaaatacagtgttttattttccctgaaactgcaggccttatttttgcaaagatagatcatggaagcaaaaaataggtctgatctgatt

SEQ ID NO: 27185 - DNA, 110 bp, synthetic construct
  source 1..110: mol_type = other DNA
aaatattaactttattttgtagtatctagtggttaaagatttggtgttgtggcataggattaaggattttgtgttgtcactggtggcctagtggttaaagatttggtgtt

SEQ ID NO: 27186 - DNA, 110 bp, synthetic construct
  source 1..110: mol_type = other DNA
tcaagatttggatattctgaggcctgccaatgatgaaaacatcatgaattcctgatttttctcatttgaacctccagccttttctgaatgaatgtcctcctagttatctc

SEQ ID NO: 27187 - DNA, 110 bp, synthetic construct
  source 1..110: mol_type = other DNA
gcattcccttctgggagcagctttgggtcaaaggggattccccttaaaggacacatcttgggtcacatagctcttgttagtgtgatttttaagtgggccattcctgaaaa

SEQ ID NO: 27188 - DNA, 110 bp, synthetic construct
  source 1..110: mol_type = other DNA
attgcagcctgcctctttattaagccattccgggagaagatggtccagtccagtctttgcataaaagttcttgttaagaggaggttcgccacacttcgaggccatcctct

SEQ ID NO: 27189 - DNA, 110 bp, synthetic construct
  source 1..110: mol_type = other DNA
aagcaaccactgtggtcaaactaaagcttgctggctgaataccagcttggcaaatggcacttcattttgtttcactgttttacactcttccaagcaaacgaaaaagaaat

SEQ ID NO: 27190 - DNA, 110 bp, synthetic construct
  source 1..110: mol_type = other DNA
gatattggaaatactattgagtgttcttactttaaaaaatttcatttaacttctaccacctttttcccaaccagctgcgcaaaatgaaagtttattatttctgatgatgg

SEQ ID NO: 27191 - DNA, 110 bp, synthetic construct
  source 1..110: mol_type = other DNA
tgaacgtctcaattagataacaaccaaacgatatgctcaagctgctgtaatttgacaatatagaaataaagggctttaatctctcttattttctcctacaatcctcctcc

SEQ ID NO: 27192 - DNA, 110 bp, synthetic construct
  source 1..110: mol_type = other DNA
gagggaagcagggcacctgatcagcttgtggacttctgattgggtcatggtgaggtaaccaggtggtattttgggagtcaacatcatcagccttctgattctaaccgatc

SEQ ID NO: 27193 - DNA, 110 bp, synthetic construct
  source 1..110: mol_type = other DNA
ccagatttgaaaggaaggaagtagattccagctcttaatggaacaagtaacaaaagtttacagatttggaaggaattgcaggcaaccatttagcagatgatccagcacaa

SEQ ID NO: 27194 - DNA, 110 bp, synthetic construct
  source 1..110: mol_type = other DNA
cacataataatgcccaaacctcatgtttctgtacttcctcttctcaaagagcttaatggcctgctctatcctgccatctccactcaaaacacattatctaattaactcat

SEQ ID NO: 27195 - DNA, 110 bp, synthetic construct
  source 1..110: mol_type = other DNA
acccagacacccaatggcaggggataactgtcctcatgctatgaaatgaaccatgcggagattactcagctgttcaccgaagtggattgttcctacatgtctgggaatgg

SEQ ID NO: 27196 - DNA, 110 bp, synthetic construct
  source 1..110: mol_type = other DNA
ctgatttttagagcctcctagattggcaggaggcaactgggacataccctgagaacaaaggtgctggtggtagccagttttaggagctcattataccaggagaacacagg

SEQ ID NO: 27197 - DNA, 110 bp, synthetic construct
  source 1..110: mol_type = other DNA
tgtttccattcactatctccatcccaacttttacttggctcagcacactattgtccaggttttagaactcagctcagaaagtatttcattcatccattcaagaaattggt

SEQ ID NO: 27198 - DNA, 110 bp, synthetic construct
  source 1..110: mol_type = other DNA
atgtctgttgtatggtcagggcctcagctagggacatgcaggaaagggactcaatggggtttacctaaaatgcccaaagaatctctcaaagtgccagctttaatcatcca

SEQ ID NO: 27199 - DNA, 110 bp, synthetic construct
  source 1..110: mol_type = other DNA
aaagagaaatggtttgaaagctgctttaacttggttgacataaaaaagaattagtgctaagtgtatcagtaatctatggttgcacagcaaactctcctaaaacttaacat

SEQ ID NO: 27200 - DNA, 110 bp, synthetic construct
  source 1..110: mol_type = other DNA
tagtctgagtccctgaggaccacagagcagccatgtcatccttggactctagtgtcatcttggatctccaataataacagctttacttattcctaactgattcagagctt

SEQ ID NO: 27201 - DNA, 110 bp, synthetic construct
  source 1..110: mol_type = other DNA
cttccatattgtttcttaataatatgaacaggagtatctcattctgtaagtaacacttagcctttctctgcatctaatggaagctcagagatggggatggagatctggca

SEQ ID NO: 27202 - DNA, 110 bp, synthetic construct
  source 1..110: mol_type = other DNA
ctaccctctgcaaacttagtgccaacacatagcatagggcagcatatatttaatttgtgatgcatctgttcttgattagatatgaaatgggaaaaatacacacagttcta

SEQ ID NO: 27203 - DNA, 110 bp, synthetic construct
  source 1..110: mol_type = other DNA
ctatgttaagttgttcccggaccttaacatatttcctgctccaaacctgggaatagcatttctcctcttcaaatggctacagacttgctgctactggactgtgtgaatct

SEQ ID NO: 27204 - DNA, 110 bp, synthetic construct
  source 1..110: mol_type = other DNA
ccccagaaaagacaaaaaaaaaaaaaaaaaaaaaaaaaaagtctccattatgttatgtcttgccttggcccactaacttatccctaatggctactttctaattagagtta

SEQ ID NO: 27205 - DNA, 110 bp, synthetic construct
  source 1..110: mol_type = other DNA
cattatgttatgtcttgccttggcccactaacttatccctaatggctactttctaattagagttatattgcacctggtgttttcttttcctttgaaacacttcctaacac

SEQ ID NO: 27206 - DNA, 110 bp, synthetic construct; identical to SEQ ID NO: 27204
  source 1..110: mol_type = other DNA

SEQ ID NO: 27207 - DNA, 110 bp, synthetic construct; identical to SEQ ID NO: 27204
  source 1..110: mol_type = other DNA

SEQ ID NO: 27208 - DNA, 110 bp, synthetic construct
  source 1..110: mol_type = other DNA
aatcagaaggatttgttgctaatatttcccagggagaagcatattaatcctttctaggaagttctaatgtgtatttatgactggtaagaattcagtttaagctccaaaat

SEQ ID NO: 27209 - DNA, 110 bp, synthetic construct
  source 1..110: mol_type = other DNA
aggaagttctaatgtgtatttatgactggtaagaattcagtttaagctccaaaatgtgtagtatttgtttcataggccattggtgtctatagactgggacacaaatcatg

SEQ ID NO: 27210 - DNA, 110 bp, synthetic construct; identical to SEQ ID NO: 27208
  source 1..110: mol_type = other DNA

SEQ ID NO: 27211 - DNA, 110 bp, synthetic construct; identical to SEQ ID NO: 27209
  source 1..110: mol_type = other DNA

SEQ ID NO: 27212 - DNA, 110 bp, synthetic construct
  source 1..110: mol_type = other DNA
caaccatgaatttgaagaaatagaataggtaggctaaggttctactgtacataaaggtgcaacaggtatggctctcagccttgccacctgatcatattagaggtggagct

SEQ ID NO: 27213 - DNA, 110 bp, synthetic construct
  source 1..110: mol_type = other DNA
ggtgcaacaggtatggctctcagccttgccacctgatcatattagaggtggagctggtattccttggaccacataacctaaaagcctcataccctaattggcagaatccc

SEQ ID NO: 27214 - DNA, 110 bp, synthetic construct
  source 1..110: mol_type = other DNA
ctgcattagtgccttggtcacacacacaaaaaatgcaactgaaatttaaaaagcaagtgcatgtttttaatacgtgctgtaacactaagaaacctatcatattaaccaaa

SEQ ID NO: 27215 - DNA, 110 bp, synthetic construct
  source 1..110: mol_type = other DNA
tgagccataatgggaactcccccattttttcaaatagtccatatcctttaaaaccagtttatatgctactttccatgtacagctttttctgatctttctggtccagctca

SEQ ID NO: 27216 - DNA, 110 bp, synthetic construct
  source 1..110: mol_type = other DNA
tagattattcctgttgtgcagatgagtaaattaaggcacacagaggttaagtaatttctccaaagtcatggaactggcaaaccgggaagcttggatttgaacctaggtaa

SEQ ID NO: 27217 - DNA, 110 bp, synthetic construct
  source 1..110: mol_type = other DNA
ttctccaaagtcatggaactggcaaaccgggaagcttggatttgaacctaggtaatgcggctcaacatggctctttcttctgctcaaaacactacaaaacatacaaaagg

SEQ ID NO: 27218 - DNA, 110 bp, synthetic construct
  source 1..110: mol_type = other DNA
tctgccaatctgtttgcctgtgctgaattttgacttcggaactcatagaaaagcaacagattcagttaagcttcctctctttccagtggaggcaacacagcagctgctaa

SEQ ID NO: 27219 - DNA, 110 bp, synthetic construct
  source 1..110: mol_type = other DNA
tcgcctcctaccccgccaggcctccccttggctccatcagatagggggtccaagtcataaccagggttaaaaatccactcaaggtgtagcttttcttaacaagactctcc

SEQ ID NO: 27220 - DNA, 110 bp, synthetic construct
  source 1..110: mol_type = other DNA
cataaccagggttaaaaatccactcaaggtgtagcttttcttaacaagactctccgtttcagatttcagatactcagactccacctttactttcacctacattggcggcc

SEQ ID NO: 27221 - DNA, 110 bp, synthetic construct; identical to SEQ ID NO: 27219
  source 1..110: mol_type = other DNA

SEQ ID NO: 27222 - DNA, 110 bp, synthetic construct; identical to SEQ ID NO: 27220
  source 1..110: mol_type = other DNA

SEQ ID NO: 27223 - DNA, 110 bp, synthetic construct
  source 1..110: mol_type = other DNA
atccttgttgagaagatggtttacttagaagtctaaacgtttggcctataatacggtatttaaagcatagaaagttgctgactcagccacttccctaaaatcaaacaaaa

SEQ ID NO: 27224 - DNA, 110 bp, synthetic construct
  source 1..110: mol_type = other DNA
taatttatcattgctgtttcattttatctgcagaaacagaaactcacagctacctgcagcctagatgagctgaggttgtatacttggaccctctttctcctcctcatgga

SEQ ID NO: 27225 - DNA, 110 bp, synthetic construct
  source 1..110: mol_type = other DNA
gcagcctagatgagctgaggttgtatacttggaccctctttctcctcctcatggaggtgtatgaggctgcaattgagtgagcatgattggaattatacttggaaaagcaa

SEQ ID NO: 27226 - DNA, 110 bp, synthetic construct; identical to SEQ ID NO: 27224
  source 1..110: mol_type = other DNA

SEQ ID NO: 27227 - DNA, 110 bp, synthetic construct; identical to SEQ ID NO: 27225
  source 1..110: mol_type = other DNA

SEQ ID NO: 27228 - DNA, 110 bp, synthetic construct
  source 1..110: mol_type = other DNA
cgaatgaactgtttccatctttttctctgttacctagatttaaggtatatatttcttagaacatttcaagaaattcagaaatgtaagagcagaaaggaccaaataaaaca

SEQ ID NO: 27229 - DNA, 110 bp, synthetic construct
  source 1..110: mol_type = other DNA
tgtcttggctcttgaccagcagccactctgactgccagcctgtgctgagtctctagcatctcttgttcttttcttggcaattcttagctaaatccttcaccagctaggta

SEQ ID NO: 27230 - DNA, 110 bp, synthetic construct
  source 1..110: mol_type = other DNA
atggacatatcttgcctttgctggtggaaggaaaggtttaggttatgttgcagggcggggtatgtaagtagtccatcatctgagctcaaaatatcactgttctgtttggg

SEQ ID NO: 27231 - DNA, 110 bp, synthetic construct
  source 1..110: mol_type = other DNA
aatgggctctgaaaacatagctgctttggctattttaactgagctagtaatggatcagtttgctaaaaatgactcaaattggaagtatagacataactacagtaagagtg

SEQ ID NO: 27232 - DNA, 110 bp, synthetic construct
  source 1..110: mol_type = other DNA
agattcaagaatatgtctctgcatgtttttgtaacccttttgccacataaccccctcccttaaatgctcagcaaattctagctgcttctttactcagggaggtctccagg

SEQ ID NO: 27233 - DNA, 110 bp, synthetic construct
  source 1..110: mol_type = other DNA
acatcaaaattaaaatgacgccctccttctccccagtgtgcccagaggccatcaactagaaggaatcattgttaatattttggctccttttcttctgactctctgtccat

SEQ ID NO: 27234 - DNA, 110 bp, synthetic construct
  source 1..110: mol_type = other DNA
ttagcatcctcgcttctctctcgccctcctttccttcagtttttcctctactgccacaaatctatcagctttaaaaacgctcatctctccaactttaatcaataacaata

SEQ ID NO: 27235 - DNA, 110 bp, synthetic construct
  source 1..110: mol_type = other DNA
gaggaaatgtagtcattaaggtcaaacaacccagatatttccagctttaaggtacatgctcttaagtgcagctcacacggctcctaaatagtctccttgggaagctggtg

SEQ ID NO: 27236 - DNA, 110 bp, synthetic construct
  source 1..110: mol_type = other DNA
aaaagaattaccggtgagttgcagccaacattcttcttcaggttgtttcccaagagaaaatgatcagataaaacaccccaggtgaagtgaaataggtatttcgcagttct

SEQ ID NO: 27237 - DNA, 110 bp, synthetic construct
  source 1..110: mol_type = other DNA
agggagctgaagcattacatcgaaactgatataaagctgagcaaggggggaaaccaagttcacaggaggaagggatgacttcagctgaagggattaggctttgtggatgg

SEQ ID NO: 27238 - DNA, 110 bp, synthetic construct
  source 1..110: mol_type = other DNA
aagttcacaggaggaagggatgacttcagctgaagggattaggctttgtggatgggtgagttttgaacttggttatagagtagggtaggacttggatggagataagagaa

SEQ ID NO: 27239 - DNA, 110 bp, synthetic construct
  source 1..110: mol_type = other DNA
tattggaaaaaaaattttttttaccaacatagatcagcagcttcagatccataagatgaaaggttttataaaatggtatgtcaagtactgcagaggaaaacaggaataaa

SEQ ID NO: 27240 - DNA, 110 bp, synthetic construct
  source 1..110: mol_type = other DNA
tagaaactgttctcttcctacgaaaattcaggaaagcttaagaacccatcatgtttcagttgcaaaagtcccaagtttatgttttcctaatctgttttctaaatggcaat

SEQ ID NO: 27241 - DNA, 110 bp, synthetic construct
  source 1..110: mol_type = other DNA
atcaataaataaacaaatagataaatatttccatgctgtactcttttgatggagtcactgaacttagcttacatttaagagtggggagttatgcttagcctctttgatag

SEQ ID NO: 27242 - DNA, 110 bp, synthetic construct
  source 1..110: mol_type = other DNA
gtcaaactgtagatttcttgatggtaaagagacactacttttgtctctttaaacacataattcagcagcagggatgtaaagatccttgaaaagattttgcatgctttctc

SEQ ID NO: 27243 - DNA, 110 bp, synthetic construct
  source 1..110: mol_type = other DNA
agttataggcatttccaatttcaaacactcataacaagtatttgaggatcacagataaatcctgttgttggccttttatttagtatggggtgaggaacatttctgagatg

SEQ ID NO: 27244 - DNA, 110 bp, synthetic construct
  source 1..110: mol_type = other DNA
atgtctagagttgagcttttctgcctgccctggattggattcagtggcttccagagattcaccttgattctagctacttatgtctaactagaaagcaccagcactcaagt

SEQ ID NO: 27245 - DNA, 110 bp, synthetic construct
  source 1..110: mol_type = other DNA
gattcaccttgattctagctacttatgtctaactagaaagcaccagcactcaagtcaaatatagactaaggggagttcccctcgtggtgcagtggaaatgaatctgaata

SEQ ID NO: 27246 - DNA, 110 bp, synthetic construct
  source 1..110: mol_type = other DNA
tagcctttctaacagcaatgacctatcatttcttaaatgcctgaagcatggtcgagaattctgggagctgtgaagacttgctttgtatagtcagtttcagggtccaagag

SEQ ID NO: 27247 - DNA, 110 bp, synthetic construct
  source 1..110: mol_type = other DNA
gagccaccagagaactcctatagtgccctttaaatttttaaattatgtcaagttgaaaaagtaagaaaataaaacttcacaagcccggtacataagacttatcaaaaaag

SEQ ID NO: 27248 - DNA, 110 bp, synthetic construct
  source 1..110: mol_type = other DNA
ttggtcccaggcagcctaaaagcaatacactgcaactatggtgaccttttgctggtcaaagatcatttaaaatctcagatcagatgatcaatggagagattcttaaccaa

SEQ ID NO: 27249 - DNA, 110 bp, synthetic construct
  source 1..110: mol_type = other DNA
tatatatgtgcattcttttggatgcaataaccatgactgcatacctactataaagtacatttaaagataagtttttggtttttgttttgtcttttgccttttttagggct

SEQ ID NO: 27250 - DNA, 110 bp, synthetic construct
  source 1..110: mol_type = other DNA
aacactggtactgagacagctggatatctacatgcacagaatgaagctgcattcttaccacacaccatatgtaaaattaacaaaatatgaatcagaatccaaaagtaagg

SEQ ID NO: 27251 - DNA, 110 bp, synthetic construct
  source 1..110: mol_type = other DNA
acagaatgaagctgcattcttaccacacaccatatgtaaaattaacaaaatatgaatcagaatccaaaagtaagggctaaaactgtaaaacttgtagaagaaaacataag

SEQ ID NO: 27252 - DNA, 110 bp, synthetic construct
  source 1..110: mol_type = other DNA
aactaatatatttggaacatgaagcatgattgaggcagtcagatttatcttctcttgcttatcaattgataaaggcagatggagtgagaaggagagattatatgggagtt

SEQ ID NO: 27253 - DNA, 110 bp, synthetic construct; identical to SEQ ID NO: 27252
  source 1..110: mol_type = other DNA

SEQ ID NO: 27254 - DNA, 110 bp, synthetic construct
  source 1..110: mol_type = other DNA
ttattcagcagttttatggaatttagtaaatttctgtgggaagctgcatacagcatacttaaggggactgaggcagagaaaaggttaagaaatcacctcggatagaaaat

SEQ ID NO: 27255 - DNA, 110 bp, synthetic construct
  source 1..110: mol_type = other DNA
gagatatcccagtgaagacgtaatagccaggtggatagaagtagagcattccgagaactcagagctagaaacggaagtttcaaaatcattgtcctagagacaggaattga

SEQ ID NO: 27256 - DNA, 110 bp, synthetic construct
  source 1..110: mol_type = other DNA
aactcagagctagaaacggaagtttcaaaatcattgtcctagagacaggaattgaagcagaaagaagatattctaaagagagagtaaaacatgaaagaagagtaaaaatg

SEQ ID NO: 27257 - DNA, 110 bp, synthetic construct
  source 1..110: mol_type = other DNA
tgaccctgtttactcacagatcaattcttcacagttcagctgatctgctccacgtggtaggagggctagcttttgtaggctccctagttgcctgcattgcagactgctag

SEQ ID NO: 27258 - DNA, 110 bp, synthetic construct
  source 1..110: mol_type = other DNA
gtttcactagaatcctaaaaattgagcatcagctcatggaaagagcatgtctggtaaaactaggtaaagaaggtaagagtacagatgataaggcaaaaggcaaatcaaac

SEQ ID NO: 27259 - DNA, 110 bp, synthetic construct
  source 1..110: mol_type = other DNA
accttcagttagctaaatgatttccacggtggcagctccaggccaaatgtatccagaccttaaaagttcagcacttcaccctgaccaggaaaagagctagccaaaaatta

SEQ ID NO: 27260 - DNA, 110 bp, synthetic construct
  source 1..110: mol_type = other DNA
aaacgtgcgccagagaagcaaccagagccatagcagtaacatcagatctttgacatattaagctaccagggaattcccaaattcatatgctatatcccaaaaccccaaaa

SEQ ID NO: 27261 - DNA, 110 bp, synthetic construct
  source 1..110: mol_type = other DNA
cgaatactgccaaggggatagccaaccataccacactgtaacacttgtcttgtgtgctaaaaagaagagggggaagtaagcatttatctaagctaatccttagtgtagtt

SEQ ID NO: 27262 - DNA, 110 bp, synthetic construct
  source 1..110: mol_type = other DNA
gctaaaaagaagagggggaagtaagcatttatctaagctaatccttagtgtagttcagccagaacactgtacagaggagttggaggaaagtttgtcttttgcagcagcaa

SEQ ID NO: 27263 - DNA, 110 bp, synthetic construct
  source 1..110: mol_type = other DNA
ttttgctagcaatttcataatcaggaattcaagcagatccattgggtgattcttctgtttggtgctgacagaggccagttggcagcatatgcagttggtggattgcctgc

SEQ ID NO: 27264 - DNA, 110 bp, synthetic construct
  source 1..110: mol_type = other DNA
tgtttggtgctgacagaggccagttggcagcatatgcagttggtggattgcctgctttacagggtacaggaatgctccacttttcatgctagacgattcagcaagaatgg

SEQ ID NO: 27265 - DNA, 110 bp, synthetic construct
  source 1..110: mol_type = other DNA
ttcacaggcatcaccccctttcatggaataacacataggagagggattcaaatcccccacattccctacacggcagacatcagaactacacgctgggatctcttaacagt

SEQ ID NO: 27266 - DNA, 110 bp, synthetic construct
  source 1..110: mol_type = other DNA
gtcctttttttcctctgccatgcccaccacatgaggaagttgccaggccagggactgaaccacagcagcgacaacaccgactccttaacctctagggcactggggaattc

SEQ ID NO: 27267 - DNA, 110 bp, synthetic construct
  source 1..110: mol_type = other DNA
tgaaccacagcagcgacaacaccgactccttaacctctagggcactggggaattccatgcacttttaatataaaaaggctctctcgtttgattggagtataaatgtcttc

SEQ ID NO: 27268 - DNA, 110 bp, synthetic construct
  source 1..110: mol_type = other DNA
gtcctcatggatggtagtcagattcgtttctactaagccatgacaggaactccgaggaatgtattctaaaccatgagctctcttaggcacagggcccctccttcccgggt

SEQ ID NO: 27269 - DNA, 110 bp, synthetic construct
  source 1..110: mol_type = other DNA
agctcagccagttgactgggatagctgctattctgcgcttccccgttccagaactctcggaccaagaggatgattccagttctgaagaagattgatgattggaatttata

SEQ ID NO: 27270 - DNA, 110 bp, synthetic construct
  source 1..110: mol_type = other DNA
ctcggaccaagaggatgattccagttctgaagaagattgatgattggaatttataatccataattgagacaacctgtgtccttcactgcttcactgttacattttctcag

SEQ ID NO: 27271 - DNA, 110 bp, synthetic construct; identical to SEQ ID NO: 27269
  source 1..110: mol_type = other DNA

SEQ ID NO: 27272 - DNA, 110 bp, synthetic construct; identical to SEQ ID NO: 27270
  source 1..110: mol_type = other DNA

SEQ ID NO: 27273 - DNA, 110 bp, synthetic construct
  source 1..110: mol_type = other DNA
ctgttcgtaggaaggaaattggtacagccactagggaaaatagtatagaagctcctcaaaaagttaaaaatagaactatccatttctgggtaaatatccaaaggaactga

SEQ ID NO: 27274 - DNA, 110 bp, synthetic construct
  source 1..110: mol_type = other DNA
tcaaaaagttaaaaatagaactatccatttctgggtaaatatccaaaggaactgaaatcaagatcttgaaaagaaggagttcccattgtggctcagcaggttaaagacct

SEQ ID NO: 27275 - DNA, 110 bp, synthetic construct
  source 1..110: mol_type = other DNA
cctagtgaggcgaggcgaccagctatttgcccaataaaatcagaaaatgatccaatgtctccctttcccatcaagcactgggagaaatgctgaaattcctaatcagaggc

SEQ ID NO: 27276 - DNA, 110 bp, synthetic construct
  source 1..110: mol_type = other DNA
cttagaaacatctctaaagagtccatgggttaatgatttctccgactgtgctctatgttttctagtgacagtgaagagcctcctgaagccctttttgataatgaagtaaa

SEQ ID NO: 27277 - DNA, 110 bp, synthetic construct
  source 1..110: mol_type = other DNA
tgttttctagtgacagtgaagagcctcctgaagccctttttgataatgaagtaaacatttctgttcctgtgaaatatgaagctgggctacagttttacaggtaggcgcac

SEQ ID NO: 27278 - DNA, 110 bp, synthetic construct
  source 1..110: mol_type = other DNA
ctcccgtagaccacttcattctggccacagtaccaacacatgtacttcacacaagtaaattattaattaaataagagtaaaaatatattcttgcctgtctattaactagg

SEQ ID NO: 27279 - DNA, 110 bp, synthetic construct
  source 1..110: mol_type = other DNA
tcattctggccacagtaccaacacatgtacttcacacaagtaaattattaattaaataagagtaaaaatatattcttgcctgtctattaactaggactaatttcctggtg

SEQ ID NO: 27280 - DNA, 110 bp, synthetic construct
  source 1..110: mol_type = other DNA
aactggttttcctgtgtttggctcttagccttccattctcctctttgacaccaatgttagctttctaagcacttaactatatccattcacccccttgcctcaaacgtttg

SEQ ID NO: 27281 - DNA, 110 bp, synthetic construct
  source 1..110: mol_type = other DNA
gagtttctaaagattgggctgttacatggactctctatttttctgtgggcagaaatgtccggtgaatggttctgcagggaaatgcctggtctctagttagaggagctctg

SEQ ID NO: 27282 - DNA, 110 bp, synthetic construct
  source 1..110: mol_type = other DNA
tgtccggtgaatggttctgcagggaaatgcctggtctctagttagaggagctctgtaggaagtgaaactaaccaaagggaagatgttaacacccatctctgacctctgcg

SEQ ID NO: 27283 - DNA, 110 bp, synthetic construct
  source 1..110: mol_type = other DNA
gcctttcatccgggaaggttttattcagctgcaaataagtgcaccctgaaaaatttacctggtgcaagtcatttcaactctgggtattcatctcctcgctgaagggctga

SEQ ID NO: 27284 - DNA, 110 bp, synthetic construct
  source 1..110: mol_type = other DNA
gttatgtggatataaattggcggcccttggagctcacagttctggaggtgagatagtcataagccagcgatggtaactcagtacaccaaatgtaacactaggggtacatg

SEQ ID NO: 27285 - DNA, 110 bp, synthetic construct
  source 1..110: mol_type = other DNA
aagatatttattagttcactagccttctgaagtatagagtgggcctccatacagatcaaccagtaacttcctgttcataaatcattccctggtagacacttaggcaattt

SEQ ID NO: 27286 - DNA, 110 bp, synthetic construct
  source 1..110: mol_type = other DNA
tgcaatgcagttttaactaagacctatgagaagctctgaagccagcaaggctcatcagagttgtctcgaaccgagacaatcattttgggcttaaatactcagacactgat

SEQ ID NO: 27287 - DNA, 110 bp, synthetic construct
  source 1..110: mol_type = other DNA
tttacccagaaatgtttttaaatgtaaacatgtgacagctgaatgaactatagctagcagggaaaagtaacctcaccattcctgaattatgtgttgattattgttacgtt

SEQ ID NO: 27288 - DNA, 110 bp, synthetic construct
  source 1..110: mol_type = other DNA
agaaagtccccctatgagacatagctggtcagtagccaagtcaggattagagttgaagtctcctgatttcctgttttccccccagtataccatattatctcttggacacc

SEQ ID NO: 27289 - DNA, 110 bp, synthetic construct
  source 1..110: mol_type = other DNA
tggggcagtggccagaaacacagggacagagctgctaatgatggacaagatgatataaaaaagaagttcaagtggggcatagtccaaaaatggatgaaaagagtctagaa

SEQ ID NO: 27290 - DNA, 110 bp, synthetic construct
  source 1..110: mol_type = other DNA
cattttttaacttaaagtcttgcactgcaggttgttgagcacttccacatggagactggcacaggaccaaactcaagacacacaactcatagcggttgatgaaaaattgg

SEQ ID NO: 27291 - DNA, 110 bp, synthetic construct
  source 1..110: mol_type = other DNA
tctctggccttgttttgtgatggaatattatgtcatgatagtagctgcttgaccctcccaaaggggctaattttatttggagatgaacactgaacaagccatacccagga

SEQ ID NO: 27292 - DNA, 110 bp, synthetic construct
  source 1..110: mol_type = other DNA
aagcatatctccccaacagacagtttattaatacgaactatcagtacacactccaattctagctacatagttccaaccaagtaccattctggtcctagaacaaataaact

SEQ ID NO: 27293 - DNA, 110 bp, synthetic construct
  source 1..110: mol_type = other DNA
agattcctccaaccgccctgcctgacatttcccacccagaactgcaggctcacctctgcaaagcaaagaccggccccaggaagtttctggagtatagagaaaactcgagt

SEQ ID NO: 27294 - DNA, 110 bp, synthetic construct
  source 1..110: mol_type = other DNA
ctgcaaagcaaagaccggccccaggaagtttctggagtatagagaaaactcgagtcttgaagaggcttttgagaaggtgagcggaaaagaggttgcagtacacaggtcct

SEQ ID NO: 27295 - DNA, 110 bp, synthetic construct
  source 1..110: mol_type = other DNA
agccctagcaaggcacaagtgtgaaatgaaagcatgcacatggaaatgaaaagccacagcagagcttgtatccttctattgcaggagaagaaaaaagcacaggatagttt

SEQ ID NO: 27296 - DNA, 110 bp, synthetic construct
  source 1..110: mol_type = other DNA
agaaatacctaacagttcatttattaagtagctagactcaaatagcctactgcatagtcacatcctaacaatgtggtagcagtttgagaagataacaactcatgaagtga

SEQ ID NO: 27297 - DNA, 110 bp, synthetic construct
  source 1..110: mol_type = other DNA
tatggctggcccctgcttagagcagtaaacactacgaccgtcagaaaaagcaagtggaaaaagtccgatggcgtctacttataaaaggaaaggaccagtgactctgtgat

SEQ ID NO: 27298 - DNA, 110 bp, synthetic construct
  source 1..110: mol_type = other DNA
gagtatttgagacttactttaaatcccaggaaagtatacactctacatgtgttggccttctttccaggcattcttgggtgagacgtgacctaaggcccagtcttacagca

SEQ ID NO: 27299 - DNA, 110 bp, synthetic construct
  source 1..110: mol_type = other DNA
ggagctgcaacctatgccacagctgtggcaatgcaaatcctcaaccggctgtgctgggcccagatggaaccggtgcctccaccgagacgagctggatgattaatccactg

SEQ ID NO: 27300 - DNA, 110 bp, synthetic construct
  source 1..110: mol_type = other DNA
gggcccagatggaaccggtgcctccaccgagacgagctggatgattaatccactgcaccacagtgggaacatcttcaaagaaccagtttttgatctcatgagttttgtct

SEQ ID NO: 27301 - DNA, 110 bp, synthetic construct; identical to SEQ ID NO: 27299
  source 1..110: mol_type = other DNA

SEQ ID NO: 27302 - DNA, 110 bp, synthetic construct; identical to SEQ ID NO: 27300
  source 1..110: mol_type = other DNA

SEQ ID NO: 27303 - DNA, 110 bp, synthetic construct
  source 1..110: mol_type = other DNA
cccagctctcagggggcacagtaaaactggatgggagtgtgtaagaagctggaagcaagccaatgaccactgctaaggtgaagggccactgctgaggtgaccaagtggaa

SEQ ID NO: 27304 - DNA, 110 bp, synthetic construct
  source 1..110: mol_type = other DNA
caaagggacactccctgctcagctcttcatttttttatgtccacccaagggaagggtaattgctagatttatgagccttaatcccttaactcataacaatgccccagaaa

SEQ ID NO: 27305 - DNA, 110 bp, synthetic construct
  source 1..110: mol_type = other DNA
tgtgaacttggggaaattgtacaacctctctgagcctgggtttaatgcagtaccagtcgaaaacacattatctagcacacagtaagtgctcagtaagtgttaattgattc

SEQ ID NO: 27306 - DNA, 110 bp, synthetic construct
  source 1..110: mol_type = other DNA
gacaaatgagcaaccagatgcactggtcaaagctctgaccactaggagttggactttccttagctatttatttatttatttatttatttgggggggcctcacctgcggca

SEQ ID NO: 27307 - DNA, 110 bp, synthetic construct
  source 1..110: mol_type = other DNA
acatctcttctttggctgtggcatcttcctccaatataaggctctttgtctataagcctacagtgaaaatctgttgtttagggttggcccttcaccaataatcttagctc

SEQ ID NO: 27308 - DNA, 110 bp, synthetic construct
  source 1..110: mol_type = other DNA
ttcctccaatataaggctctttgtctataagcctacagtgaaaatctgttgtttagggttggcccttcaccaataatcttagctctatcttctagataacttgctgtagc

SEQ ID NO: 27309 - DNA, 110 bp, synthetic construct
  source 1..110: mol_type = other DNA
cagcatgaaaatgagcaccccttctcctaattacctcctcatatccgatggcagggcctcagataaaaatgtgcttttgaagcgcctgtccctttgccagctcctagtgc

SEQ ID NO: 27310 - DNA, 110 bp, synthetic construct
  source 1..110: mol_type = other DNA
gcctcagataaaaatgtgcttttgaagcgcctgtccctttgccagctcctagtgccagacgtgaggcaaccctggctggtaccatgaaatggacagaaagggggttgcta

SEQ ID NO: 27311 - DNA, 110 bp, synthetic construct
  source 1..110: mol_type = other DNA
gacatagtaaagagccttctgttcagacacagatctgtccttgaatccagaccttctattaaatctcagctacaaagcttcccgcaagtggtcaaaagcagttttgagga

SEQ ID NO: 27312 - DNA, 110 bp, synthetic construct
  source 1..110: mol_type = other DNA
ctattaaatctcagctacaaagcttcccgcaagtggtcaaaagcagttttgaggagccagcagggggcagacctatgactcagacagtggaatttctcagggcagctgag

SEQ ID NO: 27313 - DNA, 110 bp, synthetic construct; identical to SEQ ID NO: 27311
  source 1..110: mol_type = other DNA

SEQ ID NO: 27314 - DNA, 110 bp, synthetic construct; identical to SEQ ID NO: 27312
  source 1..110: mol_type = other DNA

SEQ ID NO: 27315 - DNA, 110 bp, synthetic construct
  source 1..110: mol_type = other DNA
tctcagtgaattatttaaatgtaaggacccattgccttaccctgtcaacaagttttggtccaagctatcatagtccatccagcatcttttaataattttgagtgtcaaaa

SEQ ID NO: 27316 - DNA, 110 bp, synthetic construct
  source 1..110: mol_type = other DNA
tggtccaagctatcatagtccatccagcatcttttaataattttgagtgtcaaaaaaaagcagggaagaattcctcttgtggctcagaggattacaaacccaactagaat

SEQ ID NO: 27317 - DNA, 110 bp, synthetic construct
  source 1..110: mol_type = other DNA
acctcatggttcccagctggattcgtttccactgcactgagatgggaactccaacacttttgtggatttgttcaatttcattcattatgtgtaagtttttcaggtctaag

SEQ ID NO: 27318 - DNA, 110 bp, synthetic construct
  source 1..110: mol_type = other DNA
ttgcgatatatgcatcttaaatgtacatggtgcaatgatgagtcaaagttttttttaatgtttttctcactagaattgtgggcttattgattccagagagaaagccagct

SEQ ID NO: 27319 - DNA, 110 bp, synthetic construct
  source 1..110: mol_type = other DNA
taatgtttttctcactagaattgtgggcttattgattccagagagaaagccagctgaatgaatgaagcaaaagaaaggaggaaagaaagaccatttgctcatgtgtgttg

SEQ ID NO: 27320 - DNA, 110 bp, synthetic construct
  source 1..110: mol_type = other DNA
cttgctccgtcctttagtaatcccaatggggagatgaccaactccgctgagattctttccagaaactgagctaactgaggtgtttgaagagcttgtggattaacttctca

SEQ ID NO: 27321 - DNA, 110 bp, synthetic construct
  source 1..110: mol_type = other DNA
atgacctaaaacacaaatccttcatcccagtgtattgtaggacaagagctggaatgcctctccactggggcaaaataccaaaaagcaggttgctgctggggttgtgatgg

SEQ ID NO: 27322 - DNA, 110 bp, synthetic construct
  source 1..110: mol_type = other DNA
gaaactaaggttcttgtcctggactcgccttcttaccacctggtccaagactatgttgttactctaaaaagtcactcagcttttctcttccatagtctatgttgccattg

SEQ ID NO: 27323 - DNA, 110 bp, synthetic construct
  source 1..110: mol_type = other DNA
atagctattttgttctcctctcactcactgttttcccctccagtgattgaatgctttatacgttttaaaagatttttaaacaccttacccttaagtttcctgccagaagt

SEQ ID NO: 27324 - DNA, 110 bp, synthetic construct
  source 1..110: mol_type = other DNA
tggatgctagtcagatttgttgctgctgagccacaacagaaactccaaaggattagattttcaaatcaaacttatacgaatccgagatcttacccaatactgagctttaa

SEQ ID NO: 27325 - DNA, 110 bp, synthetic construct
  source 1..110: mol_type = other DNA
gattttcaaatcaaacttatacgaatccgagatcttacccaatactgagctttaatttaattcaaggatacaacattcaggaagcacagacaagcaaagggaggtctggg

SEQ ID NO: 27326 - DNA, 110 bp, synthetic construct
  source 1..110: mol_type = other DNA
gaaagttagagagtccacttttggacaacaacaaatggagacaggaaaccaggaggcccatttgccaagaatgttgtgaccagtgggtggaaagttagggaagacaacct

SEQ ID NO: 27327 - DNA, 110 bp, synthetic construct
  source 1..110: mol_type = other DNA
gcccatttgccaagaatgttgtgaccagtgggtggaaagttagggaagacaacctcatgcaataactgtatgaaaggcacctccaaagtctctgtgcagaggaaccttgg

SEQ ID NO: 27328 - DNA, 110 bp, synthetic construct
  source 1..110: mol_type = other DNA
agatacatttgatttgggacatatcacagtatctgagatgttcaaatataaatgcaagtgtttcgttttaagtcctcctatcctccactggctgtttctttcttctacca

SEQ ID NO: 27329 - DNA, 110 bp, synthetic construct
  source 1..110: mol_type = other DNA
aagtgtttcgttttaagtcctcctatcctccactggctgtttctttcttctaccatgtttatttttcttcctttcccttcctgcttccacctttcttctagtctctatca

SEQ ID NO: 27330 - DNA, 110 bp, synthetic construct
  source 1..110: mol_type = other DNA
tagacttagagaaggctccacagaggaagaagctagtgaactagattaaggaacgagtaggaactttccaggtggatgagagggaaaagtcattacaggcaaaataaaca

SEQ ID NO: 27331 - DNA, 110 bp, synthetic construct
  source 1..110: mol_type = other DNA
aggccagagaatttaagttacttcgcggtgtttgggtgtaatataaacacagggattttgactttttccataactcagcttaagaataccaaattaaaattactacagtt

SEQ ID NO: 27332 - DNA, 110 bp, synthetic construct
  source 1..110: mol_type = other DNA
ctggcttccaatgaagcactggaaaggggaaagaagtctctcaaggggcatggtgtgaggccaatatgcccatcagaaattacctatcctggagctcccgctgtgctgca

SEQ ID NO: 27333 - DNA, 110 bp, synthetic construct
  source 1..110: mol_type = other DNA
tgaggccaatatgcccatcagaaattacctatcctggagctcccgctgtgctgcaatggaatcagcggagtcttgggagtacttggacacaggtttgatgcctggcatcg

SEQ ID NO: 27334 - DNA, 110 bp, synthetic construct
  source 1..110: mol_type = other DNA
gggaaccatgtgggcctatgggagaagggcatcctaaccagtgaaaatagccagtgcaaaggccctgagacatgagcaggcctagcatgaggaggaatggggaggagccc

SEQ ID NO: 27335 - DNA, 110 bp, synthetic construct
  source 1..110: mol_type = other DNA
gcaaaggccctgagacatgagcaggcctagcatgaggaggaatggggaggagcccagtgtagctggagcaggagtaaaggacttagcagatgaggtaaaaaaggtaatgg

SEQ ID NO: 27336 - DNA, 110 bp, synthetic construct
  source 1..110: mol_type = other DNA
tttggggatttagttatgttgtgagtgctctccagatcctaaccttcactggaggaaaatcagtttcctgttccaggaagtagtatcattttattacccatagttttctt

SEQ ID NO: 27337 - DNA, 110 bp, synthetic construct
  source 1..110: mol_type = other DNA
ttttctgcatccattgagatgactgtgtgacttttatgcttcagttcgttaatatggtgcatcaataattggtttatggaaattgagctgtctttgcatcctgggataaa

SEQ ID NO: 27338 - DNA, 110 bp, synthetic construct
  source 1..110: mol_type = other DNA
ttagaccttcctagtaataatagaaatcgcagtagcaggaggaggagattattgagcaccagctaggtacctgacactttgaacattctattctacctcatttagtcttt

SEQ ID NO: 27339 - DNA, 110 bp, synthetic construct
  source 1..110: mol_type = other DNA
gcaccagctaggtacctgacactttgaacattctattctacctcatttagtctttcccacagtttgctagtagttcctcaagtagtacatagggcagcgaaagtgtaatc

SEQ ID NO: 27340 - DNA, 110 bp, synthetic construct
  source 1..110: mol_type = other DNA
aggagaaattgttttggaatacagatagacttcattaaaatacctacttctctccccttacaggttcttggggatggagatgatgactctgtctcacccactcttagtaa

SEQ ID NO: 27341 - DNA, 110 bp, synthetic construct
  source 1..110: mol_type = other DNA
tctgttcacaactcccagcttgtgctctgttgaatctcctccctgtattgatatgactggttaactcaccttatttatttaatatgggctcacttgcaacatatggaagt

SEQ ID NO: 27342 - DNA, 110 bp, synthetic construct
  source 1..110: mol_type = other DNA
aataagcttattgagttgaaagagcttgaagtgatcgggacagatctttgcatgcagaatgaccaatataagcatgcagatggcctactggagtcttagcagagtaaact

SEQ ID NO: 27343 - DNA, 110 bp, synthetic construct
  source 1..110: mol_type = other DNA
acttttttaaacttaaggaatttagcaatagaggagacctgacagaaagagctccgatcagttattaaaaagaaatatagcagctgacagtttttaacaatcaaacttaa

SEQ ID NO: 27344 - DNA, 110 bp, synthetic construct
  source 1..110: mol_type = other DNA
agcatatggaagttcctgggctagaggttgaattggagctgaggctgcagctgcaggactacaccactgctatagcaacactggatcagagcagcatctatgacctatgc

SEQ ID NO: 27345 - DNA, 110 bp, synthetic construct; identical to SEQ ID NO: 27344
  source 1..110: mol_type = other DNA

SEQ ID NO: 27346 - DNA, 110 bp, synthetic construct
  source 1..110: mol_type = other DNA
ctgtgccacaacaggaactcccaatgatttttttccccattttggccgtccaatggcatatggagctctgggccaggggtcagatctgaggtacagtcatgacctgagct

SEQ ID NO: 27347 - DNA, 110 bp, synthetic construct
  source 1..110: mol_type = other DNA
taatcagaagcttggcattttgcaatttcaggcacatgtcagaggattcaactatgaatttccagggatccacttcttgccaaagctccctgagacatgatatttgaaag

SEQ ID NO: 27348 - DNA, 110 bp, synthetic construct
  source 1..110: mol_type = other DNA
cttcctggaaggcgtatgggtgaggagggagtagtgagagcggccaagctgagcgatgaatttagaaagaccagtcattttgctgctttctcatgggtggccccacatca

SEQ ID NO: 27349 - DNA, 110 bp, synthetic construct
  source 1..110: mol_type = other DNA
acctgcatcctcatgaatgccagtcagatttgtttccactgagccgtgacggggattctacatacatagctgtcgatgtctattttacttaatgtccttaacagtaaaat

SEQ ID NO: 27350 - DNA, 110 bp, synthetic construct
  source 1..110: mol_type = other DNA
aactccaagtttcccaaattttagattaactttcagaggtctactggatttgccagaagagctttggagaatgctttaagaattcctgcctccctgtgtaccagagctac

SEQ ID NO: 27351 - DNA, 110 bp, synthetic construct
  source 1..110: mol_type = other DNA
gaagagctttggagaatgctttaagaattcctgcctccctgtgtaccagagctactcgtatctgcttgacccagtgttgatgagacaaaagcacttggttaaaaaacata

SEQ ID NO: 27352 - DNA, 110 bp, synthetic construct
  source 1..110: mol_type = other DNA
cagtgattccctccaggtccctggaaggtggcctgggatggaaaagtaggtgagtgtgagtgcccaggggaggcccggctctgggtcaaggctgcaaagccaagcctggg

SEQ ID NO: 27353 - DNA, 110 bp, synthetic construct
  source 1..110: mol_type = other DNA
gaggccattgtctggagctgtgcatgtgtaaagccttacatcttcaaaccctgagagctgtgatgagtgtgtgggaattttcttggagaaatctcttgggcaatatgcat

SEQ ID NO: 27354 - DNA, 110 bp, synthetic construct
  source 1..110: mol_type = other DNA
agctgtgatgagtgtgtgggaattttcttggagaaatctcttgggcaatatgcattgatagaacccaggagtccagcctctcaatggcctggagattgaagccttcttga

SEQ ID NO: 27355 - DNA, 110 bp, synthetic construct
  source 1..110: mol_type = other DNA
tctataactgagcgctggggaacggacacatggaggctactttaactcaggctacccttccagacagctcagtctttgctccccgggcaataggggttgattttgcaaac

SEQ ID NO: 27356 - DNA, 110 bp, synthetic construct
  source 1..110: mol_type = other DNA
ccttctgtctactcacttatggggtaagtactatattattcctactttctagattagaaagctaactgaaccttgacatgttgactttctcaaaacccagtctgtaagag

SEQ ID NO: 27357 - DNA, 110 bp, synthetic construct
  source 1..110: mol_type = other DNA
agaaagctaactgaaccttgacatgttgactttctcaaaacccagtctgtaagagatagagccagactcatcctcagtcagtgtaactcctggcctccctttaactcaat

SEQ ID NO: 27358 - DNA, 110 bp, synthetic construct
  source 1..110: mol_type = other DNA
tgatctgaggatacagaggtattttaatgttgtaacaaccagggagtaatagttctgatcatagcgttggagttacattttacaaaaaagaaataatgctgtacataaaa

SEQ ID NO: 27359 - DNA, 110 bp, synthetic construct
  source 1..110: mol_type = other DNA
ctgcaagattacagatataaaaatcatccgattttgacagaaaacagctgcagcgtttctcattgagtccacaatcacgtgtggataaagatagggaatgtgactggtaa

SEQ ID NO: 27360 - DNA, 110 bp, synthetic construct
  source 1..110: mol_type = other DNA
gaaatacctagtaacatgcattatttttaaataagaatttaaatcaaaaagatgcaaaggagcaatggaaatacaatcttccggggaggtttgggggaaggaagaaatta

SEQ ID NO: 27361 - DNA, 110 bp, synthetic construct
  source 1..110: mol_type = other DNA
aaaggagcaatggaaatacaatcttccggggaggtttgggggaaggaagaaattagtggagtaaaaactaaaatagagaatgtccttgtacaaaactgaaaatctttagg

SEQ ID NO: 27362 - DNA, 110 bp, synthetic construct
  source 1..110: mol_type = other DNA
aagtgaaagggccattaggtactacctcctcgttagcaaaggttttcagtactttaataaaagtttctgtgggaatgttttacacatttcaaacttgatattcaaattca

SEQ ID NO: 27363 - DNA, 110 bp, synthetic construct
  source 1..110: mol_type = other DNA
aataaaagtttctgtgggaatgttttacacatttcaaacttgatattcaaattcaaatatattcaacccagcaaagagacggaaaatgtcactacctctcttcatctggt

SEQ ID NO: 27364 - DNA, 110 bp, synthetic construct
  source 1..110: mol_type = other DNA
atgggcaagagaaacagattttcgatacaagaaacataaaggctaagaagctgaatcaatttgtcatagttgaggggagtgccaggaaccagacctcaacacaggacaag

SEQ ID NO: 27365 - DNA, 110 bp, synthetic construct
  source 1..110: mol_type = other DNA
tcaatttgtcatagttgaggggagtgccaggaaccagacctcaacacaggacaagtggaacagtagcagagtaagacagggtagtggttgtctacccttgaaacaaatgc

SEQ ID NO: 27366 - DNA, 110 bp, synthetic construct
  source 1..110: mol_type = other DNA
cctgtgagctaggcacttttattatccccatttcatagatgaagaaactgaggaacagagagaggacaattgtcatctaagaccccacagcatctgcactgacaatcaaa

SEQ ID NO: 27367 - DNA, 110 bp, synthetic construct
  source 1..110: mol_type = other DNA
cagagagaggacaattgtcatctaagaccccacagcatctgcactgacaatcaaagagaaggttgtttgctacggagcctctgtaagagtttgctttgtgggtacctgag

SEQ ID NO: 27368 - DNA, 110 bp, synthetic construct
  source 1..110: mol_type = other DNA
gaatgttatgccttggcattcagttacagcaattcactcaaagaaaatccttttggcatctcttcagagttatccagtaaaaagtcagcttgtgaagtgatcataaagat

SEQ ID NO: 27369 - DNA, 110 bp, synthetic construct
  source 1..110: mol_type = other DNA
tgttagcgacttttctggcactttagcagatgttaagggacagaaaagttaacgttattatccctgccctccacagcttatattttgcttggaggtagaaaagcattcca

SEQ ID NO: 27370 - DNA, 110 bp, synthetic construct
  source 1..110: mol_type = other DNA
cctcccaatccattattcagtcacttttaaatcataccccaaatttcaatgattttacactcgatgaagcctgaatttgttagctcttaatgaagtccattaaggtgtac

SEQ ID NO: 27371 - DNA, 110 bp, synthetic construct
  source 1..110: mol_type = other DNA
ttataagcttttgcagagcaaaagaaaccataatcaaggtgaaaagacaacctacagactggaagaaaatatttgcaggaattcccatcgtggctcagcagaaacaaatc

SEQ ID NO: 27372 - DNA, 110 bp, synthetic construct; identical to SEQ ID NO: 27371
  source 1..110: mol_type = other DNA

SEQ ID NO: 27373 - DNA, 110 bp, synthetic construct
  source 1..110: mol_type = other DNA
agggagctgcctttctgccagacaagatgataatcagtaactgtcacatgaataggcagagctgggtctgggcctgaatctgcagtgaggaacaccagttccagccaaca

SEQ ID NO: 27374 - DNA, 110 bp, synthetic construct
  source 1..110: mol_type = other DNA
gcagagctgggtctgggcctgaatctgcagtgaggaacaccagttccagccaacatgcctgcaaagatgttggaaaattaaaaaatgcaaatgtcctgggtctcctcagc

SEQ ID NO: 27375 - DNA, 110 bp, synthetic construct
  source 1..110: mol_type = other DNA
tttattgttagtaacagcaatggtgctagttaagaaaccaacattgggaaatgtaaaatatgctgtagggtataagataagatttctttgtcttcgtttactctgtggca

SEQ ID NO: 27376 - DNA, 110 bp, synthetic construct
  source 1..110: mol_type = other DNA
cagaattgtgtctcccctccccctacaccctcttaggtatatatgctagacagagttatcccctcattctttataacagctactaggattcattatctagataaatcatg

SEQ ID NO: 27377 - DNA, 110 bp, synthetic construct
  source 1..110: mol_type = other DNA
ccacctagagcttctgtttcatctaccaaacgatccatatagtccctaaaaaaacacaccccgataattttatgactgcatatcacagttaaaaacaaaagtcccggaag

SEQ ID NO: 27378 - DNA, 110 bp, synthetic construct
  source 1..110: mol_type = other DNA
acaccccgataattttatgactgcatatcacagttaaaaacaaaagtcccggaagtcaagcctatagtacttacgtaactccagggtgatggttataccgtttctttcca

SEQ ID NO: 27379 - DNA, 110 bp, synthetic construct; identical to SEQ ID NO: 27377
  source 1..110: mol_type = other DNA

SEQ ID NO: 27380 - DNA, 110 bp, synthetic construct; identical to SEQ ID NO: 27378
  source 1..110: mol_type = other DNA

SEQ ID NO: 27381 - DNA, 110 bp, synthetic construct
  source 1..110: mol_type = other DNA
aatccacagattggggaaaaaaaaaaaaaaaacacccacaaatgctcatgtccattatgtaaaactgtgtaatacagtctgccctccatactggtgggtccacatccacg

SEQ ID NO: 27382 - DNA, 110 bp, synthetic construct
  source 1..110: mol_type = other DNA
gacaatgctggtttccattctcctaggaatgcaagtgcacggcagttgatgttcctaacggggtcagctggacctccttatagtctctactgaaccccttaggtatagcc

SEQ ID NO: 27383 - DNA, 110 bp, synthetic construct
  source 1..110: mol_type = other DNA
taacggggtcagctggacctccttatagtctctactgaaccccttaggtatagccccaagacttcccgattaccaaatatttccatctaccttacaatgagcatctggct

SEQ ID NO: 27384 - DNA, 110 bp, synthetic construct
  source 1..110: mol_type = other DNA
catttcatcattcacattcagtcagccatcatttttcagctctattctgagaccatggcagaagcaaaggtcataagaggaggctcattcattagacagaggtaaacaca

SEQ ID NO: 27385 - DNA, 110 bp, synthetic construct
  source 1..110: mol_type = other DNA
gccctttgctgaaattgatgacagttttgtaggataaacagagcaaatgagtttttcaagtatgtgttgtgtgtgaggttagttaaggacagggtaagaggctttccaga

SEQ ID NO: 27386 - DNA, 110 bp, synthetic construct
  source 1..110: mol_type = other DNA
ggccccttcacaggacgtgaactccggcactaacagtgtatcctgctgaacacagatgggaagtcaaggtcgttctcatcagggctgaacttgtggctctctgagctttg

SEQ ID NO: 27387 - DNA, 110 bp, synthetic construct
  source 1..110: mol_type = other DNA
atgggaagtcaaggtcgttctcatcagggctgaacttgtggctctctgagctttgggatcagcttccttatactctgtgtggtgaagaacctggtttttaaaaattccaa

SEQ ID NO: 27388 - DNA, 110 bp, synthetic construct
  source 1..110: mol_type = other DNA
gctaaggagagactgccagttcttagtgatagcaaggactcagctgagagcatgcccttgataagcagagccaggccactagggactaccctgtagtaacaagcctgcag

SEQ ID NO: 27389 - DNA, 110 bp, synthetic construct
  source 1..110: mol_type = other DNA
gttaagagcatggactccgaagccaaattgtttgagtttgactctgttgctttctagttgagtgacttggataagctatgagacctctctgtgcctcagcttcttcatca

SEQ ID NO: 27390 - DNA, 110 bp, synthetic construct
  source 1..110: mol_type = other DNA
tcgatttttcaccttggatgggcaggttttcaagagagtaagtctaagcctgcaaggactcttgaggcctagactgggaaatgacagtgtctctgccacacattcagctg

SEQ ID NO: 27391 - DNA, 110 bp, synthetic construct
  source 1..110: mol_type = other DNA
ggactcttgaggcctagactgggaaatgacagtgtctctgccacacattcagctggacaaagcaagtcacaagggcagctcaaattcaaggcgaggagagataagagtct

SEQ ID NO: 27392 - DNA, 110 bp, synthetic construct
  source 1..110: mol_type = other DNA
cacattgagttatgtaggaaaaaggttgttactggtgagagtaaagaaatttcacaagaactccatctaatcaggaatcaagcagaggtgaatacctctccccaaagcaa

SEQ ID NO: 27393 - DNA, 110 bp, synthetic construct
  source 1..110: mol_type = other DNA
aagaactccatctaatcaggaatcaagcagaggtgaatacctctccccaaagcaagaaaatagttcatctgagaaaatatttcacataatcaagttattacatattctta

SEQ ID NO: 27394 - DNA, 110 bp, synthetic construct
  source 1..110: mol_type = other DNA
taccagagaacatcacgtgaagattaaagcagagggggcaatgctttgaaagctgaggagcaccaaagattgccagattctcccttacacctctcagaaggaaccaacct

SEQ ID NO: 27395 - DNA, 110 bp, synthetic construct
  source 1..110: mol_type = other DNA
aggagcaccaaagattgccagattctcccttacacctctcagaaggaaccaaccttggccagatcttgattttgaccttctacccccaaaactgtgagatgataaacttc

SEQ ID NO: 27396 - DNA, 110 bp, synthetic construct
  source 1..110: mol_type = other DNA
gcccagagtctagttagagagttagttagcaagcaaaaataaatggaagaagaaagctcaagtgtctcagtatattgggagggggagtcatttataacatgaggtagtag

SEQ ID NO: 27397 - DNA, 110 bp, synthetic construct
  source 1..110: mol_type = other DNA
gctcaagtgtctcagtatattgggagggggagtcatttataacatgaggtagtaggatttattagtattttattactgccataacaccttactacaaacttagtgactta

SEQ ID NO: 27398 - DNA, 110 bp, synthetic construct
  source 1..110: mol_type = other DNA
gtgggctctggtcgtcctgagcgtgtttccacagtgatggaccttgcttgtccggtgaaacgagctctgcacttgacaattcttgaaaacctctgcatgaggtttttcaa

SEQ ID NO: 27399 - DNA, 110 bp, synthetic construct
  source 1..110: mol_type = other DNA
tgctaaagttgccatcaagagctacattcaattcctagctcttagaatctggagctgaattgctgctcaagattccatgcaggacttgcaggaaatacatgacacaaatc

SEQ ID NO: 27400 - DNA, 110 bp, synthetic construct
  source 1..110: mol_type = other DNA
tgaattgctgctcaagattccatgcaggacttgcaggaaatacatgacacaaatctgatccacaatgattctgctcttgtttcctattttgctctggagaggtgtcccag

SEQ ID NO: 27401 - DNA, 110 bp, synthetic construct
  source 1..110: mol_type = other DNA
ttgaaatattgccaccattacaaagggccactaacttaggctatgggctgtcttctgctgacagctaagccaaggtacagatgcctttactttgctgttactagttgccc

SEQ ID NO: 27402 - DNA, 110 bp, synthetic construct
  source 1..110: mol_type = other DNA
tgctgacagctaagccaaggtacagatgcctttactttgctgttactagttgcccattgctaccatgcactgcatcaattccagttaggaatagctgggagagcttgatt

SEQ ID NO: 27403 - DNA, 110 bp, synthetic construct
  source 1..110: mol_type = other DNA
caaccacccaaaatcccattggcaactggccaagtctgtggatgcagaacctgcagacaccacaggtcgactatatttgagcatgtgtgcactgcttcataggcaattca

SEQ ID NO: 27404 - DNA, 110 bp, synthetic construct
  source 1..110: mol_type = other DNA
gacaccacaggtcgactatatttgagcatgtgtgcactgcttcataggcaattcatccagcttgctcctggaaaaccattccaaagggtactgcagaataaaaccacttc

SEQ ID NO: 27405 - DNA, 110 bp, synthetic construct
  source 1..110: mol_type = other DNA
attactattaaaacaaatacaaacactaaacaagcacaaccatgttttattaaaataaataatggagcttacgggatcagtctggggcatttaaatgccatcccatcttc

SEQ ID NO: 27406 - DNA, 110 bp, synthetic construct
  source 1..110: mol_type = other DNA
taaataatggagcttacgggatcagtctggggcatttaaatgccatcccatcttctgtttcccatggggtaattacatgactcagcccaccagacacccagctgagctga

SEQ ID NO: 27407 - DNA, 110 bp, synthetic construct
  source 1..110: mol_type = other DNA
acaatccttaaaactgtggtggtgaataatgagtgtaattttaggaaattcttcgacttcttgacctgcattgaatttcttcttctgaactgagatccatcgcgtgcctt

SEQ ID NO: 27408 - DNA, 110 bp, synthetic construct
  source 1..110: mol_type = other DNA
gtacttctggagggcgacttgaaggccagaagcaggatttcaatcctgagctgtgattcagtaaatgaagatcaactcagtgaggttggtcaagcctgtgaaattgcttg

SEQ ID NO: 27409 - DNA, 110 bp, synthetic construct
  source 1..110: mol_type = other DNA
agcacctataaagatgtccccttctaaaaaacacccttctatctctttaagagagcttatggctctaaatgttatcgaaataatttaaaaccctactgcataaatattat

SEQ ID NO: 27410 - DNA, 110 bp, synthetic construct; identical to SEQ ID NO: 27409
  source 1..110: mol_type = other DNA

SEQ ID NO: 27411 - DNA, 110 bp, synthetic construct
  source 1..110: mol_type = other DNA
aactgcattttggaaattttttctgctctggtttgcaaatacttgatataaatagtggttctgggccactacctgtctgtacactgtagccttttagttaccatagctct

SEQ ID NO: 27412 - DNA, 110 bp, synthetic construct
  source 1..110: mol_type = other DNA
aatgtcaattacattcatggaagaatttgttcaactgagtttaaagaaactaggttcaatttcctctatccctcagatttaatgagatataattgacaaaagtgtgcagt

SEQ ID NO: 27413 - DNA, 110 bp, synthetic construct
  source 1..110: mol_type = other DNA
gagaaaatcctcatattggactggcctctccaaattacacaccctgtacagtcaccaagatttgagttacaatgcccctgatgtaggttccattttagcttgtccttagt

SEQ ID NO: 27414 - DNA, 110 bp, synthetic construct
  source 1..110: mol_type = other DNA
tcttattttgtggagtgtgttcatatctgaatgttgtatttggctgaggctgatcccttaagacaagagttttaaatgaagaccaatatattcagtattgtggatgtcag

SEQ ID NO: 27415 - DNA, 110 bp, synthetic construct
  source 1..110: mol_type = other DNA
ccttaagacaagagttttaaatgaagaccaatatattcagtattgtggatgtcaggtatgagcagtgtgtaaaagataaaaaacaaatgtttgcctttattactctgaac

SEQ ID NO: 27416 - DNA, 110 bp, synthetic construct
  source 1..110: mol_type = other DNA
catttcaaattggcagatcactccacaggggtattcatctgcaaaaatgaaagtggcaaatgcattccacaggtggggaaaggcaatgcagtttgttgtggcataaacaa

SEQ ID NO: 27417 - DNA, 110 bp, synthetic construct
  source 1..110: mol_type = other DNA
gagtttgagaattccagcttaacatgagattttgtcacaactactaggaaagcttatcaaaaagcaatggacacaagccaggcaaaagatattctggtaattcaactgca

SEQ ID NO: 27418 - DNA, 110 bp, synthetic construct
  source 1..110: mol_type = other DNA
atcaaaaagcaatggacacaagccaggcaaaagatattctggtaattcaactgcatgcattgttaaaccaagagataaaatctttccttttaaagggttggaggaaaagc

SEQ ID NO: 27419 - DNA, 110 bp, synthetic construct
  source 1..110: mol_type = other DNA
tgtaagacttctttgccattttaatacaatccagctttgtctctgtgctcccagtggtggggtcaggtggtgcccaccgggtagaaagagaggagaacagatggggcact

SEQ ID NO: 27420 - DNA, 110 bp, synthetic construct
  source 1..110: mol_type = other DNA
accaagtcctctgagtgggcttgagccaaaaagggaaatttctggtctttagcagtgattctattcttaacctacttccccaatgaagctctaaaagccccagaccgtga

SEQ ID NO: 27421 - DNA, 110 bp, synthetic construct
  source 1..110: mol_type = other DNA
tgattctattcttaacctacttccccaatgaagctctaaaagccccagaccgtgacaaatacacttgctttctagacactgccatatttaggtaaccttacttgtcttag

SEQ ID NO: 27422 - DNA, 110 bp, synthetic construct
  source 1..110: mol_type = other DNA
aactagagactcttgctagccaacacagaggaataattcctgctgaaatagtcgtagcttgaggagccttaaagagcttgaggaaggaacgtgttaagtattgattagca

SEQ ID NO: 27423 - DNA, 110 bp, synthetic construct
  source 1..110: mol_type = other DNA
ctcttttgataatttagaaatacacagccctgtttgtggagacagagaaagctatgttgattgcttcactttctcttcctttttagttttaagcaaccagttgtcatatg

SEQ ID NO: 27424 - DNA, 110 bp, synthetic construct
  source 1..110: mol_type = other DNA
ccccctgaccttttgcctgtgcccctcactggctaagtctacctctcctggatcattataacaggagctctgtttaagcaattctcagaagctagcctcctggagcacag

SEQ ID NO: 27425 - DNA, 110 bp, synthetic construct
  source 1..110: mol_type = other DNA
aggagtgtgatttgcagggggcaggggactgccctgactgcagcttcttcaacctattccactggcacctaaggaaaagatactgaaaaaccactggtggtcactgtcat

SEQ ID NO: 27426 - DNA, 110 bp, synthetic construct
  source 1..110: mol_type = other DNA
attccactggcacctaaggaaaagatactgaaaaaccactggtggtcactgtcatgaattaaaacagcagggccgaacaaggctgcttttctgtggaaaggccagagtgt

SEQ ID NO: 27427 - DNA, 110 bp, synthetic construct
  source 1..110: mol_type = other DNA
ccatatcctcaaagagcctcggcccacaggccctgctgcatctcccctggccttccaagaggcaacgcccagctttgctgcctgcccttagggaaaagtggaaataaagc

SEQ ID NO: 27428 - DNA, 110 bp, synthetic construct
  source 1..110: mol_type = other DNA
tctccaaatcatcttttccggtgaggccatgaaggaatcaaaggcctgacatatgaaaatacaatttatatgcatgttcttatatgtcctctgctgcatcctttctcctt

SEQ ID NO: 27429 - DNA, 110 bp, synthetic construct
  source 1..110: mol_type = other DNA
gcccgcattaatcgatagaaagaaaggggtctaccctgcacacttgagttcattggctaaggtttatacccgctgtactgagtgtaacattgagtatttgaagatatgag

SEQ ID NO: 27430 - DNA, 110 bp, synthetic construct
  source 1..110: mol_type = other DNA
tgaaaccaattcagcatttctttatcgataaccatgttgaatgcctgacaggtcagctatctgcatatttaatagcaatgatttttcccatcctaaacaagtttaaaata

SEQ ID NO: 27431 - DNA, 110 bp, synthetic construct
  source 1..110: mol_type = other DNA
acccacttaaaaaaaaaaaaaaaaaaaaagagctatagagaagtaaatgtcagtctgggccctgtttgaatgatcacagattccaaataaaaaagttgtatttcgcagtt

SEQ ID NO: 27432 - DNA, 110 bp, synthetic construct
  source 1..110: mol_type = other DNA
aggtctagatcacagtacatgtaaagttgattttccttccacatactttagaatctaatgttatttaaaacactaactctttgttcttcaaagtttgtgaagtgtttgta

SEQ ID NO: 27433 - DNA, 110 bp, synthetic construct
  source 1..110: mol_type = other DNA
tatatagcaacattgactatgctataggaagtaccaggagctctagaaaggaaggtaagctgaaccctacctggagttcaaggaaggccaagaaaaccaagtttgatgga

SEQ ID NO: 27434 - DNA, 110 bp, synthetic construct
  source 1..110: mol_type = other DNA
taagctgaaccctacctggagttcaaggaaggccaagaaaaccaagtttgatggatcagtaggaatttctcatggcaaaaagcaggaaggtggaagtacattccaataca

SEQ ID NO: 27435 - DNA, 110 bp, synthetic construct
  source 1..110: mol_type = other DNA
aaacaacaaccaacaccttaatttcagccttatgagactctgagtagataatccagcctggccaacctggatttctgaccttagaactctaagatggaggtttttttttt

SEQ ID NO: 27436 - DNA, 110 bp, synthetic construct
  source 1..110: mol_type = other DNA
ggtccacattgtaagacttatcgaccatgactaacttaataacagcagaaagagcactgacgttattataatggtgtttaatggaagaattagaaatggaagtttttctg

SEQ ID NO: 27437 - DNA, 110 bp, synthetic construct
  source 1..110: mol_type = other DNA
actgacgttattataatggtgtttaatggaagaattagaaatggaagtttttctgaattagcttggagctaaccaaacaatccaagatggagagcacccaatccgcagcc

SEQ ID NO: 27438 - DNA, 110 bp, synthetic construct
  source 1..110: mol_type = other DNA
tgtcattcttttcaagtcccctgagctgctggacctgtctgttggccataagacgatgctgcaacctggtttcctgccctcagccctctctatgagctcagacttcccag

SEQ ID NO: 27439 - DNA, 110 bp, synthetic construct
  source 1..110: mol_type = other DNA
tcctcagagttgtattgctctgtgtggcatcatttctggactcagaccctagatgttctcagagctttcaaagcgtttcatctctcagctaagactaatgaaatcaaact

SEQ ID NO: 27440 - DNA, 110 bp, synthetic construct
  source 1..110: mol_type = other DNA
ccctgtgctattaaaattatgcttacgttccatctgcttctcttaataatttttaagctataagagtgtgcctaatgctaaaatctaaaaggtaaggtagaaagaggcaa

SEQ ID NO: 27441 - DNA, 110 bp, synthetic construct; identical to SEQ ID NO: 27440
  source 1..110: mol_type = other DNA

SEQ ID NO: 27442 - DNA, 110 bp, synthetic construct; identical to SEQ ID NO: 27440
  source 1..110: mol_type = other DNA

SEQ ID NO: 27443 - DNA, 110 bp, synthetic construct; identical to SEQ ID NO: 27440
  source 1..110: mol_type = other DNA

SEQ ID NO: 27444 - DNA, 110 bp, synthetic construct
  source 1..110: mol_type = other DNA
cagcacataaaaagcctttagtaaacgttagctcctgttaatagctcatctcaagcatagtcccctctgtcaccatttcaaactgggcactatatcaaatgtaacaattg

SEQ ID NO: 27445 - DNA, 110 bp, synthetic construct
  source 1..110: mol_type = other DNA
tattaaggcattttcagcataacatagctctctccactaagggttaaaatatatcccaccatggctcaactgaaactaacccaactagtatccatgaggacacaggttcg

SEQ ID NO: 27446 - DNA, 110 bp, synthetic construct
  source 1..110: mol_type = other DNA
gttgtacaatgggtatagagtttcatctttgcaagataagaatgttctagggatccactgcacaacgatgtacatatagctatcactattatacacttaaaatcaccctt

SEQ ID NO: 27447 - DNA, 110 bp, synthetic construct
  source 1..110: mol_type = other DNA
tggctaaaatcatactcaataatgaaaagctgcaaaccttttctaagtaccaaaataaagatgccatctctcaccattgctatttaacatagtattggaagtcccaacca

SEQ ID NO: 27448 - DNA, 110 bp, synthetic construct
  source 1..110: mol_type = other DNA
agagaagctcagtcatcccagtatcccaaccaagcttaacccctcctgctgcatgcccatcagctaaagacaggcacaggagtgaccaccagggaaataactgcctgcag

SEQ ID NO: 27449 - DNA, 110 bp, synthetic construct
  source 1..110: mol_type = other DNA
tatgtctatcacctaaaataagagcttcctgagataacagaagtgtctccatataattcttaggccaaatcctccaaggcatggaggtcagtgttaaagaggacactgtg

SEQ ID NO: 27450 - DNA, 110 bp, synthetic construct
  source 1..110: mol_type = other DNA
ggaagatgaatacctgaataactttggcacaaaagcagaagataagaagggctgcaaagacaaaactgcgccctctgctggatgacccagctcatctagctgtccgtggg

SEQ ID NO: 27451 - DNA, 110 bp, synthetic construct
  source 1..110: mol_type = other DNA
aaagacaaaactgcgccctctgctggatgacccagctcatctagctgtccgtgggcctgaggctactggagaatgaacccagcccacccaggaggagaggcgtcaggcct

SEQ ID NO: 27452 - DNA, 110 bp, synthetic construct
  source 1..110: mol_type = other DNA
aaggtaaaaggcaaagttccagaggttagcccccaaattgagccagaccaaacatgtgaaactaaacagctacaccattgggaccatggacgtgcatcagttcagtctgc

SEQ ID NO: 27453 - DNA, 110 bp, synthetic construct
  source 1..110: mol_type = other DNA
tgtacttaggcctgcagttctcctcactagagaaaactgagctataactgtgagtcacttagcccagaggaggtgggccaggtaaacaggaaccttaatagaacagagaa

SEQ ID NO: 27454 - DNA, 110 bp, synthetic construct
  source 1..110: mol_type = other DNA
ttgttaacctctgcgccacgacgggaattctcgaatgttgtttaaagctatactaactctcctacatacaatgacctacaagaccctggctttctaaaaatgactcagag

SEQ ID NO: 27455 - DNA, 110 bp, synthetic construct; identical to SEQ ID NO: 27454
  source 1..110: mol_type = other DNA

SEQ ID NO: 27456 - DNA, 110 bp, synthetic construct
  source 1..110: mol_type = other DNA
ctcgtgcttctcgtacgctgagctataatttatgaaactgagccccagatccagccaatcacttagctcctcataacaagtccaactggctctggaaagctgaaagggct

SEQ ID NO: 27457 - DNA, 110 bp, synthetic construct
  source 1..110: mol_type = other DNA
caatcacttagctcctcataacaagtccaactggctctggaaagctgaaagggctgcactagaacaacaaagatgagatattctacacaacaatcagcttatctggaatc

SEQ ID NO: 27458 - DNA, 110 bp, synthetic construct
  source 1..110: mol_type = other DNA
atagtaataataatagcaataacaactccttattgaaaatggactttgccagacattgtgccaaacattttagttatattagctcatttggttctcccaacgaacatttt

SEQ ID NO: 27459 - DNA, 110 bp, synthetic construct
  source 1..110: mol_type = other DNA
ttttatacatgcattcttctagggaatagatgcaaagttttcttcagcttttccgaatggtccattagccctctactcatccacttacccccctccccccaaaaaaggtc

SEQ ID NO: 27460 - DNA, 110 bp, synthetic construct
  source 1..110: mol_type = other DNA
cactaaaactaatcaaagccataacaaaccatattagacatgtactaaatctggaagttcacttttaggtaacttgacatgaaagtaaaaaattcagagcatactaccta

SEQ ID NO: 27461 - DNA, 110 bp, synthetic construct
  source 1..110: mol_type = other DNA
ttttagcttctaaaccatgcccaaagaaaatatagatccgttcaattgatgctgtcatatcttcacaaagacctcaacattatctaacacattgggttatccaggccatt

SEQ ID NO: 27462 - DNA, 110 bp, synthetic construct
  source 1..110: mol_type = other DNA
catatcttcacaaagacctcaacattatctaacacattgggttatccaggccatttttaattagaaagagcattaaggtttcatttaataagcttgtttctcatttacaa

SEQ ID NO: 27463 - DNA, 110 bp, synthetic construct
  source 1..110: mol_type = other DNA
gagatacaaagaagtaagtctacccaaatacttgtactccacttttttcatagaagctttattcataacaaccaaaaaatgcaaaccactcaagtagcgagtggattaaa

SEQ ID NO: 27464 - DNA, 110 bp, synthetic construct
  source 1..110: mol_type = other DNA
tgacgttgccataagctgcagcttaggctgcagatgccacttggatccattgttatggctgcgacttaggcccgcagctgctgctctgattctaccccggcccaggaatt

SEQ ID NO: 27465 - DNA, 110 bp, synthetic construct
  source 1..110: mol_type = other DNA
gattttgttgtcatagttccaagattcatgttcctagcatagttgggatggattatgatgctaactgtacaaagcttgtggggaatccactccattcctttcatactctt

SEQ ID NO: 27466 - DNA, 110 bp, synthetic construct
  source 1..110: mol_type = other DNA
aagggtgtagtaaatgatgccattagaattatactttcctcattacagaagtaatatgatcctgctttagggctccaagctccctcggatgctgaaatttaaaagacagg

SEQ ID NO: 27467 - DNA, 110 bp, synthetic construct
  source 1..110: mol_type = other DNA
atgatcctgctttagggctccaagctccctcggatgctgaaatttaaaagacagggcctagaacagagccccagagtaaaaaggatgatggtagaaagccatataaatgg

SEQ ID NO: 27468 - DNA, 110 bp, synthetic construct
  source 1..110: mol_type = other DNA
gaggtgggactggaacccactcgccaagctggaggtggcctcagctgaatgccaatcacttggggcagtgaacactttgaactccctgtggccgttgagtctggaggaag

SEQ ID NO: 27469 - DNA, 110 bp, synthetic construct
  source 1..110: mol_type = other DNA
tactggtcatattattcgaattcctcatgccacagtgttccctaacccttgttttcacaggatactgatttcaagctactagaagtgaatatttaaaatattctgcctgt

SEQ ID NO: 27470 - DNA, 110 bp, synthetic construct
  source 1..110: mol_type = other DNA
cacaggatactgatttcaagctactagaagtgaatatttaaaatattctgcctgtggggtggggagttcttgtcgtggcacagcggaaacaaatctgactagcatccata

SEQ ID NO: 27471 - DNA, 110 bp, synthetic construct
  source 1..110: mol_type = other DNA
aggaatgacctgattcaacttacatgtcaaaggggcttgagagatcggcctgggaaagggcaaggaaaggcaggacaacacagaaggaagacagggaggcagtgagctgc

SEQ ID NO: 27472 - DNA, 110 bp, synthetic construct
  source 1..110: mol_type = other DNA
aagggcaaggaaaggcaggacaacacagaaggaagacagggaggcagtgagctgctatccgaaaggcacctggtgtgggctctcctgcccttgcagctgcccactgccac

SEQ ID NO: 27473 - DNA, 110 bp, synthetic construct
  source 1..110: mol_type = other DNA
ctcagatctggcattgctctggccatggcgtagccagtatctatagctctgatttgcactagcctgggaacttccatatgacccacctgcagccctaaaaatcaatcaat

SEQ ID NO: 27474 - DNA, 110 bp, synthetic construct; identical to SEQ ID NO: 27473
  source 1..110: mol_type = other DNA

SEQ ID NO: 27475 - DNA, 110 bp, synthetic construct
  source 1..110: mol_type = other DNA
atcagatttccctccatcttgtgggcaagcctcgattagctaaaaccctgacatccctcaagtaggagtgaattttgcagcacacaacctttagacttgaactataagaa

SEQ ID NO: 27476 - DNA, 110 bp, synthetic construct
  source 1..110: mol_type = other DNA
cctcaagtaggagtgaattttgcagcacacaacctttagacttgaactataagaacagctctttcctgggtctccagcctgctagcccaccctgcagactttggacttgc

SEQ ID NO: 27477 - DNA, 110 bp, synthetic construct
  source 1..110: mol_type = other DNA
tttcctttcctcagtggctctttcctttttctccattattgtctccatctcctcttaatttcaatgtttatattactcaggggtcagtcctaccctttccttccttcctt

SEQ ID NO: 27478 - DNA, 110 bp, synthetic construct
  source 1..110: mol_type = other DNA
taatttcaatgtttatattactcaggggtcagtcctaccctttccttccttcctttcttccttccttcctccctttcttactttttctctagatactccccccaccccag

SEQ ID NO: 27479 - DNA, 110 bp, synthetic construct
  source 1..110: mol_type = other DNA
ttccagagaatcattaatttgatgacgggtacgaccctgaaatcagcaaaggtttccctcatcagagttatgttaacaagtgacatgtgattttaaaaaaaatcaaaacc

SEQ ID NO: 27480 - DNA, 110 bp, synthetic construct
  source 1..110: mol_type = other DNA
ccctcatcagagttatgttaacaagtgacatgtgattttaaaaaaaatcaaaaccaaaggcaggggtgcgggtaggaataggctttcatttagctgaagaacaagaaaat

SEQ ID NO: 27481 - DNA, 110 bp, synthetic construct
  source 1..110: mol_type = other DNA
gaggtgcagacaatgattgtcagtacttcaagcaccccttttatgagagtgggaacatctttttttataagaaggatatctgcatcttgtttggcaaaagtatgaattta

SEQ ID NO: 27482 - DNA, 110 bp, synthetic construct
  source 1..110: mol_type = other DNA
cttcaagcaccccttttatgagagtgggaacatctttttttataagaaggatatctgcatcttgtttggcaaaagtatgaatttattattgctctatgaaaattcaaata

SEQ ID NO: 27483 - DNA, 110 bp, synthetic construct
  source 1..110: mol_type = other DNA
catccaaggaattgaaaccatgcaggatgaaagacaaaatcagaacagtggtctttaagatttggttgattggagggcagggcggagctgatgaataaatattcctgctc

SEQ ID NO: 27484 - DNA, 110 bp, synthetic construct
  source 1..110: mol_type = other DNA
taagatttggttgattggagggcagggcggagctgatgaataaatattcctgctcttctctgaagtatcacttattcctctgaagaggggggaaaataggggaactctgt

SEQ ID NO: 27485 - DNA, 110 bp, synthetic construct
  source 1..110: mol_type = other DNA
gccatgggaaattacagaaaattgggctgtgaatttagaagcaggggtctggagcaagtcctgaggtaggatttgtacacaagctagaagacaggacaaggcaatatgtc

SEQ ID NO: 27486 - DNA, 110 bp, synthetic construct
  source 1..110: mol_type = other DNA
aagtcctgaggtaggatttgtacacaagctagaagacaggacaaggcaatatgtcaaggccaggaatttggttagagatctgaaaatctataggaatgagagaaggtata

SEQ ID NO: 27487 - DNA, 110 bp, synthetic construct
  source 1..110: mol_type = other DNA
cttggagcttatgaaacttgaatcttctacagagggcagtaggcgtgagtaccctgtgctctgaagggccacattctccctcgcccaaggctggtcactaaacaaaactc

SEQ ID NO: 27488 - DNA, 110 bp, synthetic construct
  source 1..110: mol_type = other DNA
ccacaaagccaagttgccttatttctggccaggttgttttgagttgtgatttagggggggtgtcagtaaggcgtcttgctgacatactggaaaatttttaaagatgaaaa

SEQ ID NO: 27489 - DNA, 110 bp, synthetic construct
  source 1..110: mol_type = other DNA
tactagttgggtccttaacctgatgagacacaccaggaattcctgaatgcctcttctaactgtgctctgaggttgctttttgtacctcatgagctggagcgtccagaggc

SEQ ID NO: 27490 - DNA, 110 bp, synthetic construct
  source 1..110: mol_type = other DNA
ctaactgtgctctgaggttgctttttgtacctcatgagctggagcgtccagaggcactggtttctcagtccttaaggaattttagttcaactcagaccaacacaagaact

SEQ ID NO: 27491 - DNA, 110 bp, synthetic construct
  source 1..110: mol_type = other DNA
gcaacttcttcaaagtagagaggcaaggactgtgtcagtgagggcacaaaagaaaaagtgggcaaagatgagactggttagaaggaaagccttgagctccccctagaggt

SEQ ID NO: 27492 - DNA, 110 bp, synthetic construct
  source 1..110: mol_type = other DNA
aagtgggcaaagatgagactggttagaaggaaagccttgagctccccctagaggtacatatctggtcaccactactgtggtaagaaacttgagaacaaaatttgtttagg

SEQ ID NO: 27493 - DNA, 110 bp, synthetic construct
  source 1..110: mol_type = other DNA
catcaattcttgatagtgcctcttttaattcactatttcttttccaggctcacaatgatcatctttctaggtcctcagcagtccatacctaagttgcaacctaacacatt

SEQ ID NO: 27494 - DNA, 110 bp, synthetic construct
  source 1..110: mol_type = other DNA
tgatcatctttctaggtcctcagcagtccatacctaagttgcaacctaacacatttatttgcagttccctgctcttctgaggatgggccttgtgaggaagttcattctgt

SEQ ID NO: 27495 - DNA, 110 bp, synthetic construct
  source 1..110: mol_type = other DNA
tcaggttttcaaatcagcaggaacattttgcaaatattctactgttctaatatgtaagacaaatatcctgactccaaaagtcattagatgtgagctttggagaaattatt

SEQ ID NO: 27496 - DNA, 110 bp, synthetic construct
  source 1..110: mol_type = other DNA
gaactagttttctccacttctgcccacccccttctccctcagtattcttttcaaggcagctggagagaccttaaaacatttctgtgtgatcatgaatcttcatgtttaaa

SEQ ID NO: 27497 - DNA, 110 bp, synthetic construct
  source 1..110: mol_type = other DNA
aacatgaaagaatggtgtggattccttcgaaaatggtgaacactgaccaaatagtaattttagactgtaaaagctggagtacgctggaaatgccactctaatgaggactt

SEQ ID NO: 27498 - DNA, 110 bp, synthetic construct
  source 1..110: mol_type = other DNA
tgtgacaacttgtataaattctgcacttcttagtggtttactaccttcttgtcctttggcatagtgtagtacatgctttaaaaaatacaattaagaatttagttccattc

SEQ ID NO: 27499 - DNA, 110 bp, synthetic construct; identical to SEQ ID NO: 27498
  source 1..110: mol_type = other DNA

SEQ ID NO: 27500 - DNA, 110 bp, synthetic construct; identical to SEQ ID NO: 27498
  source 1..110: mol_type = other DNA

SEQ ID NO: 27501 - DNA, 110 bp, synthetic construct; identical to SEQ ID NO: 27498
  source 1..110: mol_type = other DNA

SEQ ID NO: 27502 - DNA, 110 bp, synthetic construct
  source 1..110: mol_type = other DNA
aactccaaacttatatgaatatttgtttaaggggagtaatactacagtgagatcttaatcttttttccctttctcttcttctacagacagagctgagataagaaaataat

SEQ ID NO: 27503 - DNA, 110 bp, synthetic construct
  source 1..110: mol_type = other DNA
taatcttttttccctttctcttcttctacagacagagctgagataagaaaataatctttagcacctctttgtatagtttgtcatccttctgaggccctacctttattaat

SEQ ID NO: 27504 - DNA, 110 bp, synthetic construct
  source 1..110: mol_type = other DNA
tgggggttaggtcttcaagacaggaatttgtagcagacaaaaaattcagcccatagcctttggccctgttcataaatttctaaaggagttggggttaggacagctggtga

SEQ ID NO: 27505 - DNA, 110 bp, synthetic construct
  source 1..110: mol_type = other DNA
gcctttggccctgttcataaatttctaaaggagttggggttaggacagctggtgaacatactaatgcctctattgctgctagagaggtgagtgaaaatacttgtctcaga

SEQ ID NO: 27506 - DNA, 110 bp, synthetic construct; identical to SEQ ID NO: 27504
  source 1..110: mol_type = other DNA

SEQ ID NO: 27507 - DNA, 110 bp, synthetic construct; identical to SEQ ID NO: 27505
  source 1..110: mol_type = other DNA

SEQ ID NO: 27508 - DNA, 110 bp, synthetic construct
  source 1..110: mol_type = other DNA
acacagtttgagaaacactgaactgtgcaagatgagacatcaaaattatcatctacaagaaatggtcttaatttctttctgacttctctgcatacatctaatactttgtt

SEQ ID NO: 27509 - DNA, 110 bp, synthetic construct
  source 1..110: mol_type = other DNA
cactgaactgtgcaagatgagacatcaaaattatcatctacaagaaatggtcttaatttctttctgacttctctgcatacatctaatactttgttactgtgtccttaata

SEQ ID NO: 27510 - DNA, 110 bp, synthetic construct
  source 1..110: mol_type = other DNA
ctgtgttaccccattttgggaataggagaatctgcctaccagcaatgagctttgcatcttggaattgtcccataagaaaaaaaaaaataaaatagctatcttaattgaat

SEQ ID NO: 27511 - DNA, 110 bp, synthetic construct
  source 1..110: mol_type = other DNA
atcttggaattgtcccataagaaaaaaaaaaataaaatagctatcttaattgaatcattgtgctgctggtctcttcactgcagcagcttgtgccatctgtggatattgta

SEQ ID NO: 27512 - DNA, 110 bp, synthetic construct
  source 1..110: mol_type = other DNA
ttatttgttgtcagccatgggccagctctcctgaaggcttttcacttccttatcatacatccctctctacctttaaagccatgaagggcatgttgaatccttctcatggt

SEQ ID NO: 27513 - DNA, 110 bp, synthetic construct
  source 1..110: mol_type = other DNA
tacatccctctctacctttaaagccatgaagggcatgttgaatccttctcatggttggaaatctctctgacttccaggtctgccatcaaacagagaaaattctctgcttt

SEQ ID NO: 27514 - DNA, 110 bp, synthetic construct; identical to SEQ ID NO: 27512
  source 1..110: mol_type = other DNA

SEQ ID NO: 27515 - DNA, 110 bp, synthetic construct; identical to SEQ ID NO: 27513
  source 1..110: mol_type = other DNA

SEQ ID NO: 27516 - DNA, 110 bp, synthetic construct
  source 1..110: mol_type = other DNA
ttctttttccttgttagtatgatgatacagtgagcctgccatacacctacataccaaggagtggaaaagcaaaacaaaatgaaacaatttatttaaataggctgagtgat

SEQ ID NO: 27517 - DNA, 110 bp, synthetic construct
  source 1..110: mol_type = other DNA
ctgccatacacctacataccaaggagtggaaaagcaaaacaaaatgaaacaatttatttaaataggctgagtgatccaaatgagactacataaataaatcccgatacaat

SEQ ID NO: 27518 - DNA, 110 bp, synthetic construct
  source 1..110: mol_type = other DNA
cagaagagagccacatgccagtctcccaagtgaagagttagctgtgttgcacttattaacgctaatgcaggtggcacagttacaccacattgtgcagaaaataattagag

SEQ ID NO: 27519 - DNA, 110 bp, synthetic construct
  source 1..110: mol_type = other DNA
ctcataaattggtggggaattttaaatggtgaagccactttaaaaagcaatctgacagctcatcaaaagattaaacagagttgtaaagtaacccagcaattctgccccta

SEQ ID NO: 27520 - DNA, 110 bp, synthetic construct
  source 1..110: mol_type = other DNA
cagctcatcaaaagattaaacagagttgtaaagtaacccagcaattctgcccctagatacacaacaaagagaaatgaaaatatgtccacacaaaaacttgtatacagatg

SEQ ID NO: 27521 - DNA, 110 bp, synthetic construct
  source 1..110: mol_type = other DNA
aagaggagcgaatactcccgaactcatttgacaaagccagcatttcatttgatactaaagctatgtagtggctctacaagaattacaggccaatgtccccaataaataca

SEQ ID NO: 27522 - DNA, 110 bp, synthetic construct
  source 1..110: mol_type = other DNA
catttgatactaaagctatgtagtggctctacaagaattacaggccaatgtccccaataaatacagatgcaaaagttctcaataaaataccagcaaaccaaattcaacag

SEQ ID NO: 27523 - DNA, 110 bp, synthetic construct
  source 1..110: mol_type = other DNA
agtcagactgcagccactcctcttagtgagcagaggaaactcaagctgtagaagctcaggatactagtcccagagagctgaggtgcacatcaaagacatgctttcagtga

SEQ ID NO: 27524 - DNA, 110 bp, synthetic construct
  source 1..110: mol_type = other DNA
cactgttagtagaactaggaatactgcattgtttttggaaataatctgatgatatctattgaaatttaaaatacgtaatgtttgacctgcgacttgatgtggggtgttta

SEQ ID NO: 27525 - DNA, 110 bp, synthetic construct
  source 1..110: mol_type = other DNA
ctattgaaatttaaaatacgtaatgtttgacctgcgacttgatgtggggtgtttaacctagatgtagatgtacaggatgtttaggtggtagacttgctctctaactctgg

SEQ ID NO: 27526 - DNA, 110 bp, synthetic construct; identical to SEQ ID NO: 27524
  source 1..110: mol_type = other DNA

SEQ ID NO: 27527 - DNA, 110 bp, synthetic construct; identical to SEQ ID NO: 27525
  source 1..110: mol_type = other DNA

SEQ ID NO: 27528 - DNA, 110 bp, synthetic construct
  source 1..110: mol_type = other DNA
ttttaaaaaagaaatcactcttctagaatgactttctgtgctgaaactacagttatttctctaaatgccagatccatggtaataggatcttctgccgataaatgtatttt

SEQ ID NO: 27529 - DNA, 110 bp, synthetic construct
  source 1..110: mol_type = other DNA
cactcttctagaatgactttctgtgctgaaactacagttatttctctaaatgccagatccatggtaataggatcttctgccgataaatgtatttttttaacttcaatttt

SEQ ID NO: 27530 - DNA, 110 bp, synthetic construct
  source 1..110: mol_type = other DNA
ttctctacttgagtattaagttcagctgggtagcttttaaaatagataggtacgactccctacaaattgaatcaggatttccagagaggacggccttggcattgaaatat

SEQ ID NO: 27531 - DNA, 110 bp, synthetic construct
  source 1..110: mol_type = other DNA
tacaagaagagcttatttacgcgggataattgggatcaggtaagagctcttagtgcagggaacaagaattcataataagtatagttttttaaaaagtttggcctggattt

SEQ ID NO: 27532 - DNA, 110 bp, synthetic construct
  source 1..110: mol_type = other DNA
tttacgcgggataattgggatcaggtaagagctcttagtgcagggaacaagaattcataataagtatagttttttaaaaagtttggcctggattttgtctttaaaaaaat

SEQ ID NO: 27533 - DNA, 110 bp, synthetic construct
  source 1..110: mol_type = other DNA
actgtgggatgaggagtaaaagggagggaaaaccaagaagcagtagtaggttcagtttttcaaggaagaagaacagctaggttttgattgtagaagcctggtatgtttgt

SEQ ID NO: 27534 - DNA, 110 bp, synthetic construct
  source 1..110: mol_type = other DNA
tttttcaaggaagaagaacagctaggttttgattgtagaagcctggtatgtttgtcattttgctggtagatctagttgactgctacctttatacatgaggaaaccaagtt

SEQ ID NO: 27535 - DNA, 110 bp, synthetic construct; identical to SEQ ID NO: 27533
  source 1..110: mol_type = other DNA

SEQ ID NO: 27536 - DNA, 110 bp, synthetic construct; identical to SEQ ID NO: 27534
  source 1..110: mol_type = other DNA

SEQ ID NO: 27537 - DNA, 110 bp, synthetic construct
  source 1..110: mol_type = other DNA
cttatgccttcagctatgactgaacttaatctcattctagatgtgtatctattgctgaaatcctaagctctattgctccattaacaagttcttttctttttctgtggcca

SEQ ID NO: 27538 - DNA, 110 bp, synthetic construct
  source 1..110: mol_type = other DNA
gcaacctcatgcttcctagttggattaatttccactgtgtcacaacaggaacttcaaattctagagaagtttctgatagatgctccagagggaagggcagctggctataa

SEQ ID NO: 27539 - DNA, 110 bp, synthetic construct
  source 1..110: mol_type = other DNA
aaattctagagaagtttctgatagatgctccagagggaagggcagctggctataattaggctgagttgaagaactgtacttgagaagaaaggtattttaatcttactcta

SEQ ID NO: 27540 - DNA, 110 bp, synthetic construct; identical to SEQ ID NO: 27538
  source 1..110: mol_type = other DNA

SEQ ID NO: 27541 - DNA, 110 bp, synthetic construct; identical to SEQ ID NO: 27539
  source 1..110: mol_type = other DNA

SEQ ID NO: 27542 - DNA, 110 bp, synthetic construct
  source 1..110: mol_type = other DNA
ggtttgataattttctttggtgttatgcttcagttcattttcctttgttttttttgtgtgtatccactataggtttttgatttgtggttatcatgaggttcatgtatatc

SEQ ID NO: 27543 - DNA, 110 bp, synthetic construct; identical to SEQ ID NO: 27542
  source 1..110: mol_type = other DNA

SEQ ID NO: 27544 - DNA, 110 bp, synthetic construct
  source 1..110: mol_type = other DNA
aacttaatttatattctcttaggggaactgtatgtccttaatatctgccccgtccagagctgctgcagggaaatggggaatcctggaggagggacggtgctgcataacaa

SEQ ID NO: 27545 - DNA, 110 bp, synthetic construct
  source 1..110: mol_type = other DNA
agagctgctgcagggaaatggggaatcctggaggagggacggtgctgcataacaaaacacacaggacttttacatttagaaagtgggggtccaggaggcactctgttctg

SEQ ID NO: 27546 - DNA, 110 bp, synthetic construct
  source 1..110: mol_type = other DNA
gtgtaagagcattacagataaaccctggctctgaaacttactatctctgtgattctgaataagccacctgtctgagaaagagctcactgagagggagcatgagaggaacc

SEQ ID NO: 27547 - DNA, 110 bp, synthetic construct
  source 1..110: mol_type = other DNA
tgaataagccacctgtctgagaaagagctcactgagagggagcatgagaggaaccttcaggatgtaaacaaggttctctttcttcagcaggattgtggttacacagatgt

SEQ ID NO: 27548 - DNA, 110 bp, synthetic construct
  source 1..110: mol_type = other DNA
taaaagaaatgcaaattctcaggtcccattccagacttacagaagtagaaactatgggaggcagcccagaaatctgtttcaatcaatgctccaggtgattttgatgtatg

SEQ ID NO: 27549 - DNA, 110 bp, synthetic construct
  source 1..110: mol_type = other DNA
gggaggcagcccagaaatctgtttcaatcaatgctccaggtgattttgatgtatgaaaatttgagaaccactattcaaaagaagccaggaaaaaaatatctaaccatgta

SEQ ID NO: 27550 - DNA, 110 bp, synthetic construct
  source 1..110: mol_type = other DNA
aaaggagtatttctgccaccagaactaggttcaggctgagacatcctttcctcgggacaggcagggctgagctcagctttttggcttctgtgactctcattttcttaatt

SEQ ID NO: 27551 - DNA, 110 bp, synthetic construct
  source 1..110: mol_type = other DNA
ttaccttttcatattttcctagcacttagcacttactaaaatactgtaatttagtaaaataagtaaatttacttacttacatgtcttttgtctgctagactctgggcccc

SEQ ID NO: 27552 - DNA, 110 bp, synthetic construct
  source 1..110: mol_type = other DNA
ctttacctccacttcttttacttgcattaatccttgtgtgaggtcagtaggctggccatcagcttctagaaaccatgtttcccactgggaaggaatagggttgtagatgg

SEQ ID NO: 27553 - DNA, 110 bp, synthetic construct
  source 1..110: mol_type = other DNA
ccatcagcttctagaaaccatgtttcccactgggaaggaatagggttgtagatggacacaatatcctgggtgatccagagggggcacaatctgctgtgcactggggctgg

SEQ ID NO: 27554 - DNA, 110 bp, synthetic construct
  source 1..110: mol_type = other DNA
ccaggagacagcctctcatatagctctaagaaactgctctgaagacgtcagggaggaggtaaacatacatgtgatttttggtgaagagggtccatacagtcaaatacaca

SEQ ID NO: 27555 - DNA, 110 bp, synthetic construct
  source 1..110: mol_type = other DNA
gaggtaaacatacatgtgatttttggtgaagagggtccatacagtcaaatacacatctcagtacaaggttgctgctaatcatggtgcacatttatcttagttaatgattt

SEQ ID NO: 27556 - DNA, 110 bp, synthetic construct
  source 1..110: mol_type = other DNA
ccctaccctcttctcctccagagctagggaagttcttcaaagggagaggaggaggaaagtactttgagagatacctccagttcccatttgttattctttgttctgttctt

SEQ ID NO: 27557 - DNA, 110 bp, synthetic construct
  source 1..110: mol_type = other DNA
atgaaaattttttccatttaaaaacaaaaacaataaaaactcttatccccccattcccctctagttactgctcttcagctctgtccctctttccagaaaacctccatgaa

SEQ ID NO: 27558 - DNA, 110 bp, synthetic construct
  source 1..110: mol_type = other DNA
actttatccctgctgaaaaaagagcagagcaggccaggaaaggaatctgagacgggttcccagaggagatgcctcagctaatagaggggagagaagtgtatcaacataaa

SEQ ID NO: 27559 - DNA, 110 bp, synthetic construct
  source 1..110: mol_type = other DNA
tgtcaggttactgacatctcagaccccacccctacccccgacccccagagtccttggatcactttttcacctccagggcacagacagcttttagcaagacccacgtgagg

SEQ ID NO: 27560 - DNA, 110 bp, synthetic construct
  source 1..110: mol_type = other DNA
ctgcagtggatgatatctcaatccaactacagtctttgttctggaatcattccagacagggaggctcagctgtaatgcacacacagttcacctctcaggcctacgagcta

SEQ ID NO: 27561 - DNA, 110 bp, synthetic construct
  source 1..110: mol_type = other DNA
tctcattccctctgtctgctctgcagcccaggggacagcagcctgcacttttgtgggcggcagctgctctcataactgtacccattttgggcagacactgagggaacagg

SEQ ID NO: 27562 - DNA, 110 bp, synthetic construct
  source 1..110: mol_type = other DNA
ggcggcagctgctctcataactgtacccattttgggcagacactgagggaacaggcaagaattcctgtagagtcagattgggaaagaaaggatctgctctggatttagca

SEQ ID NO: 27563 - DNA, 110 bp, synthetic construct
  source 1..110: mol_type = other DNA
ttaaaacccaaattcagtagccgttttgttccagggatcttaggagatttcaggagctgctcaggctttcttagagtcatttacttgagggagactgagacctgccaaag

SEQ ID NO: 27564 - DNA, 110 bp, synthetic construct
  source 1..110: mol_type = other DNA
gaggagagtctaagagacctctggaacattaaacaattttcacatcataggagcctcagaaggagaagagagaaagggctagagaaaatatttgagtagactacacacaa

SEQ ID NO: 27565 - DNA, 110 bp, synthetic construct
  source 1..110: mol_type = other DNA
acattaaacaattttcacatcataggagcctcagaaggagaagagagaaagggctagagaaaatatttgagtagactacacacaaacaaaacttccctaatatgggaaag

SEQ ID NO: 27566 - DNA, 110 bp, synthetic construct
  source 1..110: mol_type = other DNA
atccatgagcatgcaggttcagcctgtggctgtgctcagagggctaaggatctgacattgctgtgagctgctgtgtatgttacatacatggtttggatctgtcatggctg

SEQ ID NO: 27567 - DNA, 110 bp, synthetic construct
  source 1..110: mol_type = other DNA
ctcatctttattcttagtggtgattagaattacagtgctcatctcccaattcccagctgtaggattgaggaatggaagaagggcacacctcttcaaggaggcatcttgac

SEQ ID NO: 27568 - DNA, 110 bp, synthetic construct
  source 1..110: mol_type = other DNA
tagtaacagctacctataatatggaatactaaaataagtattctgaaatacaaatgtgtcacctgtttgttagcaaaaatcaggagcaaagcatctcggagttccttttc

SEQ ID NO: 27569 - DNA, 110 bp, synthetic construct; identical to SEQ ID NO: 27568
  source 1..110: mol_type = other DNA

SEQ ID NO: 27570 - DNA, 110 bp, synthetic construct
  source 1..110: mol_type = other DNA
gctagtgaacctgaattcaactgacctagccagtgttattaaggatttctaaacgtattttactatgtacttagcataattggccatgcttttcaataccaaactgcagg

SEQ ID NO: 27571 - DNA, 110 bp, synthetic construct
  source 1..110: mol_type = other DNA
agggtactgagaagaaagtgtgtctaattagatgggtgaagaggtgaacagccagacaaccaacatgtgtttagctgttggttgaacttggattcctgctttgttgtttt

SEQ ID NO: 27572 - DNA, 110 bp, synthetic construct
  source 1..110: mol_type = other DNA
aatatccttctacctgtttacacttggattacccatctggggggacaaggagttttacctaatctagaccaggagttctgcacttactaagccaaatacacttgcagggt

SEQ ID NO: 27573 - DNA, 110 bp, synthetic construct
  source 1..110: mol_type = other DNA
tacctaatctagaccaggagttctgcacttactaagccaaatacacttgcagggtttctgaagtagcagccctcctactctcagatatggcaagtccaggcccacctttt

SEQ ID NO: 27574 - DNA, 110 bp, synthetic construct
  source 1..110: mol_type = other DNA
tttggctttttagagccacacatgtggcatgtggaagttccctggctggaggtttaatcagagctatagctgccgacttacgccacagctgaggaacataggacctgagc

SEQ ID NO: 27575 - DNA, 110 bp, synthetic construct
  source 1..110: mol_type = other DNA
agttccctggctggaggtttaatcagagctatagctgccgacttacgccacagctgaggaacataggacctgagccacatctgggacctacaccatagctcatggcaaca

SEQ ID NO: 27576 - DNA, 110 bp, synthetic construct
  source 1..110: mol_type = other DNA
taatgctactaagtcaagtgagatatgaacttggaattgtttgttggatttggtagtatgtaggccattaataatctaggaagaacagtttccattgatgggacaaaagt

SEQ ID NO: 27577 - DNA, 110 bp, synthetic construct
  source 1..110: mol_type = other DNA
ttgatatgggaatgccagagaggttagttaaggtctttctttttaattgaattaaaaggctcagaaaaaatgggttgaaagtgtgtgatcaaacagaaagcagttcattg

SEQ ID NO: 27578 - DNA, 110 bp, synthetic construct
  source 1..110: mol_type = other DNA
aaggctcagaaaaaatgggttgaaagtgtgtgatcaaacagaaagcagttcattgaacctgaaaaaaatctcgtgactggggacaaaatgctggaaaaggctgttcactt

SEQ ID NO: 27579 - DNA, 110 bp, synthetic construct
  source 1..110: mol_type = other DNA
cagggtggagtggtccaatactggtcacagtgacagagctagggcatgccagggatattttgtggagagatccatagaggaatcagtggaagtgactgacactgtgacct

SEQ ID NO: 27580 - DNA, 110 bp, synthetic construct
  source 1..110: mol_type = other DNA
ccagtatccatttcccgtgtatagagagggagcagagcggggcatagaaggcaggcttaagcagttgtatttccttggcctgtagctgagttcaaaagttaggcatcact

SEQ ID NO: 27581 - DNA, 110 bp, synthetic construct
  source 1..110: mol_type = other DNA
tagtgcgaagggcagcaaagcataattgctaaaaacctcaccctgcagagtgaaccccaccttcagcttttcttggggaagcccaggcatcacgttgggcgggaagccca

SEQ ID NO: 27582 - DNA, 110 bp, synthetic construct
  source 1..110: mol_type = other DNA
gatgacccaaccctcctgctgcagtcatccggggagggaggtaaggtaagtgtaatgctggctaaaggaagctctctgagcagctcgcctccatccttagcacgctgctc

SEQ ID NO: 27583 - DNA, 110 bp, synthetic construct
  source 1..110: mol_type = other DNA
accctgccctcagtcccaagcttccacgcattctgatcttggctcccagtgtgtagcctggcactaggatgcctacaaggatctaacctgtgctcccagtctccatccta

SEQ ID NO: 27584 - DNA, 110 bp, synthetic construct
  source 1..110: mol_type = other DNA
attctggaactagtgttgatggttgcacaactttgtgaacaatatatgaaagcccactgagttgtaaattttaaaagggtgaattttatggcatttgaactctatctcaa

SEQ ID NO: 27585 - DNA, 110 bp, synthetic construct
  source 1..110: mol_type = other DNA
actgagttgtaaattttaaaagggtgaattttatggcatttgaactctatctcaaaaaaagagacatctgttcatttgaaatcgagggtttccctgacatagcgtagttc

SEQ ID NO: 27586 - DNA, 110 bp, synthetic construct; identical to SEQ ID NO: 27584
  source 1..110: mol_type = other DNA

SEQ ID NO: 27587 - DNA, 110 bp, synthetic construct; identical to SEQ ID NO: 27585
  source 1..110: mol_type = other DNA

SEQ ID NO: 27588 - DNA, 110 bp, synthetic construct
  source 1..110: mol_type = other DNA
cttcttttagaagtcagaaatttgctcagcaagcaagtctttaaagagctcaagagtttggcactttagcaaatttcagcaaattagtgagaggaaaaaaagagccattc

SEQ ID NO: 27589 - DNA, 110 bp, synthetic construct
  source 1..110: mol_type = other DNA
gttttgctgtaatttttgtagacaggtgatttttcatggcaccttcatgagtctctccctctcccctcatagctggctccattttcctacctgctgttctcagaagctgt

SEQ ID NO: 27590 - DNA, 110 bp, synthetic construct
  source 1..110: mol_type = other DNA
aaatgtggcaaacacaacagaggaattgaattgcaatagttggatgtgactaatgcattgaagagagcagctctggagcacctggccctagactgtctgattccaatggc

SEQ ID NO: 27591 - DNA, 110 bp, synthetic construct
  source 1..110: mol_type = other DNA
cattgaagagagcagctctggagcacctggccctagactgtctgattccaatggctcagcatccagcaccatttctgacacaaaagagacacttaataaatatttctaga

SEQ ID NO: 27592 - DNA, 110 bp, synthetic construct
  source 1..110: mol_type = other DNA
tgctatctctcagagactgacagcagaattggatctttctccccaagaggatcatcagatccttagatcagtaggagaatctgctttttttaaacagtagactccaaaca

SEQ ID NO: 27593 - DNA, 110 bp, synthetic construct
  source 1..110: mol_type = other DNA
cagatccttagatcagtaggagaatctgctttttttaaacagtagactccaaacagaaaaattttgggtctggaatttacttgctgcttggaatattctgggccatgtgt

SEQ ID NO: 27594 - DNA, 110 bp, synthetic construct
  source 1..110: mol_type = other DNA
tgttccttctggagtagggtgaaagagtagacactacctggaagcatttctcatggtgctaggaagctaaccagctccccagaaaaggcaagctctgacttgtagaattt

SEQ ID NO: 27595 - DNA, 110 bp, synthetic construct
  source 1..110: mol_type = other DNA
gagggagccagtctcaaaaaatggccaacactggagagttcatgagcccagcttatgcggaagcgaaggcgttgttagtaagctgccactggggtgccttgctattagac

SEQ ID NO: 27596 - DNA, 110 bp, synthetic construct
  source 1..110: mol_type = other DNA
caagctgctgatgccaagaggatgttttgcatttaccagaggggtggggcgatgacaagagaggactctgcccgcagtgcctggcttctctgccaggggaccgtcctagg

SEQ ID NO: 27597 - DNA, 110 bp, synthetic construct
  source 1..110: mol_type = other DNA
agatgagtcttcccaagaaagcctttctacatgtttatagaacagggtggcaggatatacataaggctgtttctcacagtatcactaaatggaagcctgcatgctgggtg

SEQ ID NO: 27598 - DNA, 110 bp, synthetic construct
  source 1..110: mol_type = other DNA
gataaatctcattataggctcacctgggcccatccacagagtagccagtttaacaggagtcttttaaacaaagatcagcttaaaaatgaactgtaaaatccttgccataa

SEQ ID NO: 27599 - DNA, 110 bp, synthetic construct
  source 1..110: mol_type = other DNA
acagctcagtgagcacctgcatcagggatgtggtacctgtgtccctgctcagtcttctctccgctgctgtggaaattcaacttaggcaaaagagatgagccctgagtcgt

SEQ ID NO: 27600 - DNA, 110 bp, synthetic construct
  source 1..110: mol_type = other DNA
tctctccgctgctgtggaaattcaacttaggcaaaagagatgagccctgagtcgtgagctgcatttgtgttctttattgggaaatgtgcaggaagacgtcctcttcttct

SEQ ID NO: 27601 - DNA, 110 bp, synthetic construct; identical to SEQ ID NO: 27599
  source 1..110: mol_type = other DNA

SEQ ID NO: 27602 - DNA, 110 bp, synthetic construct; identical to SEQ ID NO: 27600
  source 1..110: mol_type = other DNA

SEQ ID NO: 27603 - DNA, 110 bp, synthetic construct
  source 1..110: mol_type = other DNA
tgtgtaatgtcaattaaaaatgcatgtactctatactgttgttttgcatgagctcatacaaatagctgaatatccatcaggcgtattagaaaggtggcctggagttccct

SEQ ID NO: 27604 - DNA, 110 bp, synthetic construct
  source 1..110: mol_type = other DNA
atacaaatagctgaatatccatcaggcgtattagaaaggtggcctggagttcccttgtggtacagtggattagggacctggtggttgtcattgtggcagctcggttgctg

SEQ ID NO: 27605 - DNA, 110 bp, synthetic construct
  source 1..110: mol_type = other DNA
aatttagaagggaagtgagccaaggcccaccataccatagagggcctgcactgtaggaacagaggtcagaagtagctaaatcatacccaatgtgcatccagccttgaatc

SEQ ID NO: 27606 - DNA, 110 bp, synthetic construct
  source 1..110: mol_type = other DNA
tcctgactggtctccctacctcctcctttggttatttcagtctagcaggcagaatgattctcttaaaacaaaagtcagactatgtttaaagcctttcaatggcttctgtt

SEQ ID NO: 27607 - DNA, 110 bp, synthetic construct
  source 1..110: mol_type = other DNA
gattctcttaaaacaaaagtcagactatgtttaaagcctttcaatggcttctgttttcgcagtctccatgctttggcctgcaaaccactgcagagttgcccctgtctcca

SEQ ID NO: 27608 - DNA, 110 bp, synthetic construct
  source 1..110: mol_type = other DNA
aagctagaattgtacataagctgtggaatcttctggccctcggagggagtttccggtggtctcagtgactgaggaggcatccgtgggcatagatgaggccacatgggtgg

SEQ ID NO: 27609 - DNA, 110 bp, synthetic construct
  source 1..110: mol_type = other DNA
aacttatttcccaccatctgtgacctgcagtcagatttgctttagtcgttcaagagacaggagtagctgtccaagaatgggtgtcactgctctgtgtggagcagaatttt

SEQ ID NO: 27610 - DNA, 110 bp, synthetic construct
  source 1..110: mol_type = other DNA
gacaggagtagctgtccaagaatgggtgtcactgctctgtgtggagcagaattttgaggagtgattttactcactcaagccaaatatgagaagcagtggcatttgaagat

SEQ ID NO: 27611 - DNA, 110 bp, synthetic construct
  source 1..110: mol_type = other DNA
cctgcaagtaatggtcctgtcccctctctggtgctgttatgatctctgctgataccccagcctcgccagaaactgctactcatgaagccagcttattgtgtaccctcccc

SEQ ID NO: 27612 - DNA, 110 bp, synthetic construct
  source 1..110: mol_type = other DNA
cccagcctcgccagaaactgctactcatgaagccagcttattgtgtaccctcccccgtgagtgtgccggatgcttgcctttttccatcagctttcattgtaaatgtggtg

SEQ ID NO: 27613 - DNA, 110 bp, synthetic construct
  source 1..110: mol_type = other DNA
gttttgtgaaccaggcatttttactcctcagtcaggagacatactcagacaattgctcagttttgtaaaaactcttctccataattctacagctgtgtcttaggtagtaa

SEQ ID NO: 27614 - DNA, 110 bp, synthetic construct
  source 1..110: mol_type = other DNA
ctcagttttgtaaaaactcttctccataattctacagctgtgtcttaggtagtaaccgaatagtgatgttttgatcatagttttacagatggtgaggccctagacacagc

SEQ ID NO: 27615 - DNA, 110 bp, synthetic construct
  source 1..110: mol_type = other DNA
tctctcagctttatctgggaaggtgaccctgacgagggatatgttggtggtggttgacctcgtaaagagagtgttggtgagcctgcctgaaagaggaagggtgagccact

SEQ ID NO: 27616 - DNA, 110 bp, synthetic construct
  source 1..110: mol_type = other DNA
gacctcgtaaagagagtgttggtgagcctgcctgaaagaggaagggtgagccactcctgaaaaatgacctctctgctggtgaaaccaatgctcttggatgactcagtgga

SEQ ID NO: 27617 - DNA, 110 bp, synthetic construct
  source 1..110: mol_type = other DNA
agatgttcttactcagtttttctcctctcagtgtatggtgcctgtcagcccaacagtatgagctggaaactgaaagtcgtctttgacttctgcctctctttcagtcccca

SEQ ID NO: 27618 - DNA, 110 bp, synthetic construct
  source 1..110: mol_type = other DNA
atacaagtcattcaaaaaatatcagaacctgtttcctttcttcacagcttcaggcaggagagcattttatgactacttcctcatgaacatcatgtgtcctagccatggtg

SEQ ID NO: 27619 - DNA, 110 bp, synthetic construct
  source 1..110: mol_type = other DNA
accagtcgtttgattgactggtaggaattcctagccatcacaactagctttataatcctttgtcagaagtcagcagagccctgtggccattccaactatctttggaacta

SEQ ID NO: 27620 - DNA, 110 bp, synthetic construct
  source 1..110: mol_type = other DNA
ggagaccagaattttaaacgatgaaacagaattgaaaattccatgcttcatatagagtgaggttctgttttgttttaggaagctgttctttagttttctttcctgtgttg

SEQ ID NO: 27621 - DNA, 110 bp, synthetic construct
  source 1..110: mol_type = other DNA
aggccttgtctttcaagcttaggagtttgaacattatttgaaaataggaagcttagaaagcatttcgattaagaaaaagaaagaaagaaaaaaactgtccctgagaaata

SEQ ID NO: 27622 - DNA, 110 bp, synthetic construct
  source 1..110: mol_type = other DNA
tctttggcaggacactgtggcatgtcatggatagctaggggcagaattacaaccggctcccacagcaactgcttgtaaactgcagcaagaggctgttgccagtaagaatg

SEQ ID NO: 27623 - DNA, 110 bp, synthetic construct
  source 1..110: mol_type = other DNA
atattctgggctgtgtggagtcaacctggaaaaaaattaatgaggggaggggagagggagagagagagagagaggagaaatgagacgagacagagaggatatcttttcca

SEQ ID NO: 27624 - DNA, 110 bp, synthetic construct
  source 1..110: mol_type = other DNA
atccccatgattatattacattaacatggccatataaagtaagggattatgcaggagtaattaagttcccaaattggttgacattatgagagcagattatgaaggtggac

SEQ ID NO: 27625 - DNA, 110 bp, synthetic construct
  source 1..110: mol_type = other DNA
agtaattaagttcccaaattggttgacattatgagagcagattatgaaggtggacctgaccttatcacataaactttctacatcatagatcaaagagagaagaagccaga

SEQ ID NO: 27626 - DNA, 110 bp, synthetic construct
  source 1..110: mol_type = other DNA
tcttgatggagctatttgtgaacttatttatacctttttgaacattttttccacatttagcctacatatgttggagtaataagttttgaaaccttacatatcagccctac

SEQ ID NO: 27627 - DNA, 110 bp, synthetic construct; identical to SEQ ID NO: 27626
  source 1..110: mol_type = other DNA

SEQ ID NO: 27628 - DNA, 110 bp, synthetic construct
  source 1..110: mol_type = other DNA
tctcattgtgaggcagttactccctctccagtgttggtgtctctggtcattaattgcttttgtaatggggagattataatacgtacattcatcagtgttcttgtgtcagc

SEQ ID NO: 27629 - DNA, 110 bp, synthetic construct
  source 1..110: mol_type = other DNA
gcttttgtaatggggagattataatacgtacattcatcagtgttcttgtgtcagctggaatttatttatgctttgcaaaattcccaagaaatggtgcttggaactttggt

SEQ ID NO: 27630 - DNA, 110 bp, synthetic construct
  source 1..110: mol_type = other DNA
ccattaaaaaaaaatagccattcatttacagatgtattaaaataatctacaatctttcccttagcattgtagaattgtttttaatggcctcaatgcctaggtcaaactag

SEQ ID NO: 27631 - DNA, 110 bp, synthetic construct
  source 1..110: mol_type = other DNA
ccagagcttttgccacattctaccaccagggccatccagctccttccccagagcagagcttccagctctctgcaccgctatggttccccgctttgttgatgaagcccagc

SEQ ID NO: 27632 - DNA, 110 bp, synthetic construct
  source 1..110: mol_type = other DNA
gagcttccagctctctgcaccgctatggttccccgctttgttgatgaagcccagctccttgaactctcattgcagagagctctgacaactaccacctctcactttgatgt

SEQ ID NO: 27633 - DNA, 110 bp, synthetic construct
  source 1..110: mol_type = other DNA
attgtgcatcttcaaaaggaaacccatatagctgttgctatcagaaagctcagcctgtaaaacaactagacgccaaagcaagataggattccatccaccctccatctcca

SEQ ID NO: 27634 - DNA, 110 bp, synthetic construct
  source 1..110: mol_type = other DNA
tgtaaaacaactagacgccaaagcaagataggattccatccaccctccatctccacgttccaactgcagtgttacaacactatagatttgccctgctgccatgaaaattg

SEQ ID NO: 27635 - DNA, 110 bp, synthetic construct
  source 1..110: mol_type = other DNA
agacagggaagcaatggcacaatgatgccatgatggctgtcagcacagcctctgaagaacctggggagcatctcagctggactagagatagtgctggttaaattctaaag

SEQ ID NO: 27636 - DNA, 110 bp, synthetic construct
  source 1..110: mol_type = other DNA
agaacctggggagcatctcagctggactagagatagtgctggttaaattctaaagatggagacagcattagcatgaaaaagaaagagaagaaggatccatattacacaac

SEQ ID NO: 27637 - DNA, 110 bp, synthetic construct; identical to SEQ ID NO: 27635
  source 1..110: mol_type = other DNA

SEQ ID NO: 27638 - DNA, 110 bp, synthetic construct; identical to SEQ ID NO: 27636
  source 1..110: mol_type = other DNA

SEQ ID NO: 27639 - DNA, 110 bp, synthetic construct
  source 1..110: mol_type = other DNA
cattgcattcaggtcaacaaatgtatattgattgaattataggttgtatgaattaataaaaagattgatcaagatgaaaaagataggagaggcaccttcaaggaacttgt

SEQ ID NO: 27640 - DNA, 110 bp, synthetic construct
  source 1..110: mol_type = other DNA
gaaaaacacccctcctggtttttggttaaaccacagcagttaagttctggtgatggccagacatatctaattcccagctaagccaataagcaaccaccaggaatgtaagc

SEQ ID NO: 27641 - DNA, 110 bp, synthetic construct
  source 1..110: mol_type = other DNA
gccagacatatctaattcccagctaagccaataagcaaccaccaggaatgtaagccatccaggaatgtttagaaatccttgagatgtcagggcttctgtacccaagatgg

SEQ ID NO: 27642 - DNA, 110 bp, synthetic construct
  source 1..110: mol_type = other DNA
tccacctggacaaattaggacggttttgttgacccagctctctcatctgcttacatactcttccatttgattcccagacccccacgttcacatactcactatgtcctgta

SEQ ID NO: 27643 - DNA, 110 bp, synthetic construct
  source 1..110: mol_type = other DNA
ttcctaagttcaatggcggctcccctctgcaatccaggaatgacgttagcagaggatactacagagctgggctcactgagaaccacggggatactaggaccctgaaaata

SEQ ID NO: 27644 - DNA, 110 bp, synthetic construct
  source 1..110: mol_type = other DNA
atactacagagctgggctcactgagaaccacggggatactaggaccctgaaaataacagaggccagatggcagcacttaaatattaaaagcctaggcgatgcaattatca

SEQ ID NO: 27645 - DNA, 110 bp, synthetic construct
  source 1..110: mol_type = other DNA
catgatcctacctgccgctagtcaggttcataactgctgagcctcgatgggaactccagctttggcaccttctacctttccttgacttcaacccactgttacctccagtc

SEQ ID NO: 27646 - DNA, 110 bp, synthetic construct
  source 1..110: mol_type = other DNA
catcaagcaccctctccaatgccctggagctgccatggtgcccagttacagagctagattggttccaccattgctagagcctctcagatccccagcatatcccaaaacag

SEQ ID NO: 27647 - DNA, 110 bp, synthetic construct
  source 1..110: mol_type = other DNA
agagcagaggttcaagggacacagcaggaatcttgcagtctcactttcatcctctcaaaccccttggaattgccaagcccaaagttcctataaccaagtcccggcactgt

SEQ ID NO: 27648 - DNA, 110 bp, synthetic construct
  source 1..110: mol_type = other DNA
atcaagggttgcaggagcactgtgtcaggaactgagggtcacagaccaaatagtagaacaaaagatgctgtttgtgctctttccacctcagaatttacgtgggttttagg

SEQ ID NO: 27649 - DNA, 110 bp, synthetic construct
  source 1..110: mol_type = other DNA
gaacaaaagatgctgtttgtgctctttccacctcagaatttacgtgggttttaggagctctgtgccaggaaccggggcagagaccaacatatatattttctatgatcgca

SEQ ID NO: 27650 - DNA, 110 bp, synthetic construct
  source 1..110: mol_type = other DNA
gtacccatgccagggatcaaaccccaaccacagcatcagtctgagcagctgcagtgacatcgccagatccttaactactgcaccacagaagaactccaaattaatcttag

SEQ ID NO: 27651 - DNA, 110 bp, synthetic construct
  source 1..110: mol_type = other DNA
tctttaaaagaggagtgaagcatgacttttgcattcataagacacttaagttaggactccagcttacttctcctgagcctactttcagctccaacctctggttctttttc

SEQ ID NO: 27652 - DNA, 110 bp, synthetic construct
  source 1..110: mol_type = other DNA
gaatctggcagattgaaaatggaagccctgactgacagggaacatggaatgatggacctggacagtggggatgaagcccagcttggtggagggcagcctacagaggaagc

SEQ ID NO: 27653 - DNA, 110 bp, synthetic construct
  source 1..110: mol_type = other DNA
ccagggatcagatccgagccgcatttgtaacctacaccacagcggtggctgcagcaaatcctttaacccactgtgccaggctggggatcgaaccttcatcctggcgttgc

SEQ ID NO: 27654 - DNA, 110 bp, synthetic construct; identical to SEQ ID NO: 27653
  source 1..110: mol_type = other DNA

SEQ ID NO: 27655 - DNA, 110 bp, synthetic construct
  source 1..110: mol_type = other DNA
ctgtggcttcacgtgggggaaaatgcaactagctagagtggaagtgccccatccgtgaacagactttcagaacccagcagcatggaggatggaggacccgtgtgtccagg

SEQ ID NO: 27656 - DNA, 110 bp, synthetic construct
  source 1..110: mol_type = other DNA
agcaggtttaaggatccggtgttgtcattgcacatcttgggtcactaccgtgggtgggttcagtccctggcccagcagcttccacatgctgcaggcacggccaaataaat

SEQ ID NO: 27657 - DNA, 110 bp, synthetic construct
  source 1..110: mol_type = other DNA
gggttcagtccctggcccagcagcttccacatgctgcaggcacggccaaataaataaaacaaccctcatttaatggtgtacagtgtgtaaaaacactgaatcactgtact

SEQ ID NO: 27658 - DNA, 110 bp, synthetic construct
  source 1..110: mol_type = other DNA
cttttgtactataattattttcatggaagtggattgactttccaatattatagaagtttagaaaccattcacttgtgtacatgtgtaagcttagtgctttaaaccaaact

SEQ ID NO: 27659 - DNA, 110 bp, synthetic construct
  source 1..110: mol_type = other DNA
gggaactccccttatgacttttatgttcgtacctccagagctaagagttcatacaattctagagaaaaagagtatatgagaaaggaataaagaatagttcccaagttttc

SEQ ID NO: 27660 - DNA, 110 bp, synthetic construct
  source 1..110: mol_type = other DNA
gatgaaatacaccaacttgagttttacacacagccttctccccaggatgtggctaataattcatacaatgggtttgcagaattctgtgggctcccctttatttccatggt

SEQ ID NO: 27661 - DNA, 110 bp, synthetic construct
  source 1..110: mol_type = other DNA
tgtcctagacatgtctcagatttggcagccagctggcatccagctggttggcatctggatagcggtcagggtcttatgtttcaatatgggcccatttccgagtcattttg

SEQ ID NO: 27662 - DNA, 110 bp, synthetic construct
  source 1..110: mol_type = other DNA
tggatagcggtcagggtcttatgtttcaatatgggcccatttccgagtcattttgtccatagccaggatcattctaaaaatagccagtggctcagttctgaagagagagc

SEQ ID NO: 27663 - DNA, 110 bp, synthetic construct
  source 1..110: mol_type = other DNA
aacaggaggcaaaaaagaagcagtctccttatcctgctggcattccctctcggcagagctcaaggcagccaactggcagagcagaaatgtggtttgcagaggcccagtcc

SEQ ID NO: 27664 - DNA, 110 bp, synthetic construct
  source 1..110: mol_type = other DNA
gagctcaaggcagccaactggcagagcagaaatgtggtttgcagaggcccagtcccaggatcacagaacagaacagaggaagggggtaggctgaagttgagagacagtag

SEQ ID NO: 27665 - DNA, 110 bp, synthetic construct
  source 1..110: mol_type = other DNA
ttgaaataagaaagctcggaaacgcatctggttctaaaataacgcatctgccctcaaagccaagtttgctgctgcttctgacaaagttaattctcttgattcctgggata

SEQ ID NO: 27666 - DNA, 110 bp, synthetic construct
  source 1..110: mol_type = other DNA
tgtttgcagagtttaggggtctgagttgtccttgcaaggggcagccagtgttaggaaagggtactaagtaaatcacagggccttttgtttccaggctctggccaaggtca

SEQ ID NO: 27667 - DNA, 110 bp, synthetic construct
  source 1..110: mol_type = other DNA
taacgaggaaccagtcacaaggcttagttgctgttagtcttgggattcatctccggtgcacagctggctgggtgctcactggcttaaaaacattctgctcccccaccttc

SEQ ID NO: 27668 - DNA, 110 bp, synthetic construct
  source 1..110: mol_type = other DNA
agacagtcctgctctcccaggtgcagccttgccgggaggagaggagaagatggatgggttctcatccagctgatttcttgcaattggttgcctaaaagttataggccatg

SEQ ID NO: 27669 - DNA, 110 bp, synthetic construct
  source 1..110: mol_type = other DNA
cctttagcagacatctatgtgcccaggccaggtctctgctaataggtcctgatataacaccactcctcgccacagctaagctgggctcaagcggacaagtgctcttgaga

SEQ ID NO: 27670 - DNA, 110 bp, synthetic construct
  source 1..110: mol_type = other DNA
gatccacctagttccactctcaccctgttcagagatcttgttaaccatcttgctaaaacccagagctccactgtctgttgtatttcctcattagccacgcaagtaatcca

SEQ ID NO: 27671 - DNA, 110 bp, synthetic construct
  source 1..110: mol_type = other DNA
ttttacacttttaaaatgaaggaacaccaagcaaggtagaagaacacggcctatggaaaaatttccctgaaaagtacagcagtatcagctttccaaaacaagacgggtag

SEQ ID NO: 27672 - DNA, 110 bp, synthetic construct
  source 1..110: mol_type = other DNA
caaacaaacaaacgaacgaacaaaccctgcaaaaaccacagacacatggaagctaaacaatacactactacaaaaccagtgggtcactgaataaatcaaataatattaaa

SEQ ID NO: 27673 - DNA, 110 bp, synthetic construct
  source 1..110: mol_type = other DNA
ccacagacacatggaagctaaacaatacactactacaaaaccagtgggtcactgaataaatcaaataatattaaactacctagagaaaaatgaaagtgaaaatacaatga

SEQ ID NO: 27674 - DNA, 110 bp, synthetic construct
  source 1..110: mol_type = other DNA
cttccatattccctcaccatccccatcctccactgtgtcagtccctccctcccaccctcacacacacaaaggctctcaaggaggcctcagaatagggaggacctcgccca

SEQ ID NO: 27675 - DNA, 110 bp, synthetic construct
  source 1..110: mol_type = other DNA
gagtgcccatataatgctcttggtaccattgaccaaagtcagcacagtgactgacatggtagcttatgaagattaaataaatggaaatgtattaacacagcatagtccat

SEQ ID NO: 27676 - DNA, 110 bp, synthetic construct
  source 1..110: mol_type = other DNA
gtgatcagtaattttccctcattcctctgctaccacaacatttggtatgtaccgcactgataatagccagaatagaacatacgatttaatcaagaggaagtgtcccatgc

SEQ ID NO: 27677 - DNA, 110 bp, synthetic construct
  source 1..110: mol_type = other DNA
agatattttcattatttgtgggtagaaaattctagaccggtgttctaggtgtaattaacagagatagctctgtggggagtggatttccaacatgtgggggtgtgctgaga

SEQ ID NO: 27678 - DNA, 110 bp, synthetic construct
  source 1..110: mol_type = other DNA
tgagctgtttatgagaaatctaaaaatttccctttccccagaagaattctctttcaggcctctcttatgcggcagcatactcgtgggataagacacgtgaggtcaatcag

SEQ ID NO: 27679 - DNA, 110 bp, synthetic construct
  source 1..110: mol_type = other DNA
aggcctctcttatgcggcagcatactcgtgggataagacacgtgaggtcaatcagagggcttgtcccaggtttgatgtccataaaattaactctgtgacttcagtgcgag

SEQ ID NO: 27680 - DNA, 110 bp, synthetic construct
  source 1..110: mol_type = other DNA
ggtgagttatggccattaacgagaatagtggaaataacattagttgccattcactgagtgcttcatatgtgccagacactttagagaaagttttttgtgacacatcccat

SEQ ID NO: 27681 - DNA, 110 bp, synthetic construct
  source 1..110: mol_type = other DNA
aaataattttgccctccttagtcccgtatggttcctgcataaattactctgcatgaccagcctgccgtgagcatgcttgcctgactgcctccgctccccttcaaatctgc

SEQ ID NO: 27682 - DNA, 110 bp, synthetic construct
  source 1..110: mol_type = other DNA
ttccattccaagcctaagccttaggaaggtctggcaggttccactttcccattcttggccaccctgagctccagagaagaagtctggctatgctgttggagagacaaatg

SEQ ID NO: 27683 - DNA, 110 bp, synthetic construct
  source 1..110: mol_type = other DNA
ttctccaacgtgacttctctacttgctccacgttgagctccaacccttggcccggatgaaaccagtctggtccagatttaatgaaggcacacatacagccagatgtcatt

SEQ ID NO: 27684 - DNA, 110 bp, synthetic construct
  source 1..110: mol_type = other DNA
attgaaatccaggcctgccctcttcaccacggccttgtctcagctcttagaaacacttcctactgtttgtacaaaaagattttatcagaatgcaggagagtggtctagca

SEQ ID NO: 27685 - DNA, 110 bp, synthetic construct
  source 1..110: mol_type = other DNA
cagctgcaggccttaagagaaaagactgaggtccctcgaggaagaagaaatccgggttccagcccagctttggacttaagctgtaacattgattctcccctgggtctcca

SEQ ID NO: 27686 - DNA, 110 bp, synthetic construct
  source 1..110: mol_type = other DNA
aagtgtctgagagactcaccactccgtcaggacctgggggcagagtcattatcactccttctttctttcttctccttttttttttttttggtcttgtatagatacagtat

SEQ ID NO: 27687 - DNA, 110 bp, synthetic construct
  source 1..110: mol_type = other DNA
tagtctctggccaactccttccccttcctctgtatctctcagtgaaaatggtgtcctaggtctggcaaagaaggagagttctttatcctcttatttacggaaaggatccc

SEQ ID NO: 27688 - DNA, 110 bp, synthetic construct
  source 1..110: mol_type = other DNA
aacccagccaactttccttcggatctcatcgtttaaaattgggccaagagaggttgaacagctggcactttcagccttacgagtagaagacagtctcttcaaagaaaagg

SEQ ID NO: 27689 - DNA, 110 bp, synthetic construct
  source 1..110: mol_type = other DNA
aaggttaactcctaagcagttgtcttgttgatgctaggacttgctcttgatggttgagcaggtatttctgctcgcatgatggcctttgacggtttcatcttcctcatcct

SEQ ID NO: 27690 - DNA, 110 bp, synthetic construct
  source 1..110: mol_type = other DNA
ggcagagtgctgtggctgagtccccccagcaagcaagcagcagagccaggacacaaaacttctctatctgacataaaagcagctgaccagagaagtttcaaaagaggagc

SEQ ID NO: 27691 - DNA, 110 bp, synthetic construct
  source 1..110: mol_type = other DNA
atgttccacttctcaagagcttgctccaatggcctggagagagacccaccaaatttagatttaagtgtatttcatcaagtgaagaaatcaagcccagatttacactagtc

SEQ ID NO: 27692 - DNA, 110 bp, synthetic construct
  source 1..110: mol_type = other DNA
gacccacaggagagttttcatggacacgaaccgccactttaatcagtggatccgggtcgctgtcagatgcagaattataatctgcaccagaccaactaagagagtcctag

SEQ ID NO: 27693 - DNA, 110 bp, synthetic construct
  source 1..110: mol_type = other DNA
gagcaaagatgtgggattcaccgcggagccacagatgcattcacgtttcctgaaggtggtgcattttccgcatgttgaactgagcggatggctgtgcttggcttgcaaaa

SEQ ID NO: 27694 - DNA, 110 bp, synthetic construct
  source 1..110: mol_type = other DNA
cccagccaaaatctgagtctaaccccaaccattcatgtgccgccaccgttatgtgcagatgttggtctgtgactgtggttgttggagaccttgaactccatggctgtacc

SEQ ID NO: 27695 - DNA, 110 bp, synthetic construct
  source 1..110: mol_type = other DNA
gcacacatgcaggcctttgtttaattcacagccatcctgagtggtcaccatggtgattcccgagtccgagataaggagacacccttgagggtgttaagcaacttgtccaa

SEQ ID NO: 27696 - DNA, 110 bp, synthetic construct
  source 1..110: mol_type = other DNA
attcccgagtccgagataaggagacacccttgagggtgttaagcaacttgtccaaggtctcttggccatgaagtcatgcagcacgctccgcctggccgtggagacccggg

SEQ ID NO: 27697 - DNA, 110 bp, synthetic construct
  source 1..110: mol_type = other DNA
tgccgtgtgaatttctcacagagatatccattccccacagcacaatttcacctccttcatggatccctgccaggtcttagtcagcaagagctcccaacatctcttaggtc

SEQ ID NO: 27698 - DNA, 110 bp, synthetic construct
  source 1..110: mol_type = other DNA
ttcatggatccctgccaggtcttagtcagcaagagctcccaacatctcttaggtcacatggaagggaaaccttcaagggcactgagaccccagaatgcaatgattttgct

SEQ ID NO: 27699 - DNA, 110 bp, synthetic construct
  source 1..110: mol_type = other DNA
tttttccatttcatcaccttgagacagcacaattgcctgggcctaaaaatttacagcacttcatggaaaatatttgaaattatatggcttttccacatttccaaagttga

SEQ ID NO: 27700 - DNA, 110 bp, synthetic construct
  source 1..110: mol_type = other DNA
cccctgatcatctctcgtccccatatagctaagctggaaaatcaccattccagattaaggtgcatcagaggcagagaggggctttgtatagcaggtttgattcctggccc

SEQ ID NO: 27701 - DNA, 110 bp, synthetic construct
  source 1..110: mol_type = other DNA
ctctctgcttccttttgtctttctctctctctctctctctgcctttttctggacggaggttgtttgtttgtcctgcttgtttggccaaagtgcggcttagggtggcggct

SEQ ID NO: 27702 - DNA, 110 bp, synthetic construct
  source 1..110: mol_type = other DNA
gtaattctatgaccccaaacagttgtagtctgtccacagaataggctctattaaaacttgggagcaagtccagaatagggactaaaactctattttacacctttcctgga

SEQ ID NO: 27703 - DNA, 110 bp, synthetic construct
  source 1..110: mol_type = other DNA
acttgggagcaagtccagaatagggactaaaactctattttacacctttcctggagctttgtaggctcaggcactgttgtagtcaactgccaagaaacagcatcaaggga

SEQ ID NO: 27704 - DNA, 110 bp, synthetic construct
  source 1..110: mol_type = other DNA
ggtctgtttcgccaagactgaaaatttctaggacatctaatagttcttgtggggtttttggcttttggtttggttttggttttttgccagcgctgagttgaacatgcact

SEQ ID NO: 27705 - DNA, 110 bp, synthetic construct
  source 1..110: mol_type = other DNA
atgatctaaagcaggacaaaggatgcccggtacgtggggcctgtcctcctgagcatgtcactaggggctgccaagctagacatcctggagggcttccactgacaccgaga

SEQ ID NO: 27706 - DNA, 110 bp, synthetic construct
  source 1..110: mol_type = other DNA
tgagaccagagtaatgatgattaaggaatgttgggaaaaggcgttcttacaggtctccaaagcatttgaaagctctcagagttcaggagagtggtttaggcaggcggggc

SEQ ID NO: 27707 - DNA, 110 bp, synthetic construct
  source 1..110: mol_type = other DNA
tggctcgtggtgactacatgtgtggttctgagtggcagtcagaagtgcagatgttggccctcgccccattgctgtgtgaaccaggcaagtcgctgcacagtttggagcct

SEQ ID NO: 27708 - DNA, 110 bp, synthetic construct
  source 1..110: mol_type = other DNA
cctccatgcttccctcctcatcgtcctcgcctctcctctgggcaggcgggctttctacagcagagaagggctgctgcagcctggggttctcacccttgaccgtgcttcag

SEQ ID NO: 27709 - DNA, 110 bp, synthetic construct
  source 1..110: mol_type = other DNA
ttctgccttttcctgaagtcgctgacccagcttgcgcttggcatgttcaggtcgtgtctattgatctgtatcgagatgaaataaactgaactgaacctaatgaagccaat

SEQ ID NO: 27710 - DNA, 110 bp, synthetic construct
  source 1..110: mol_type = other DNA
gtcactctgtttgggaacataccaaagtcacatgaggaggaatttcaccatgaacttgttttgctgcatgtgggtttagtcactctttgtgattcaagagggcccccctc

SEQ ID NO: 27711 - DNA, 110 bp, synthetic construct
  source 1..110: mol_type = other DNA
caagtgtgatggttccctggatcggagcagcttgtggcctgtgaacccagacattaagacagaagcaaaatcgtgaacggcactcgggtagattgtgggtaccatggaca

SEQ ID NO: 27712 - DNA, 110 bp, synthetic construct
  source 1..110: mol_type = other DNA
atctggcattgctgtggctatggggtatgccagcagctacagctccagttcatcctctagcgcaggaccctccatataccacaggtatagtcctaaaaggaccccccccc

SEQ ID NO: 27713 - DNA, 110 bp, synthetic construct; identical to SEQ ID NO: 27712
  source 1..110: mol_type = other DNA

SEQ ID NO: 27714 - DNA, 110 bp, synthetic construct
  source 1..110: mol_type = other DNA
gctgaagaatgctagcagccttcagcaagtaataatctttttgtaatagtaacatcaaaaatccccgtaacagaagtttcctatagtggctcagtgggttaagaacccaa

SEQ ID NO: 27715 - DNA, 110 bp, synthetic construct
  source 1..110: mol_type = other DNA
cagccttcagcaagtaataatctttttgtaatagtaacatcaaaaatccccgtaacagaagtttcctatagtggctcagtgggttaagaacccaacgagtatccatgagg

SEQ ID NO: 27716 - DNA, 110 bp, synthetic construct
  source 1..110: mol_type = other DNA
atctcactgtaatttaatactaataggtaacgtttggttttcaggtttaccaagtgccattgcgtgcattagcttacgtggttgcattagcttatgtggtcctcacggaa

SEQ ID NO: 27717 - DNA, 110 bp, synthetic construct
  source 1..110: mol_type = other DNA
cgcccaccctctctaagtaaccaatactgttggtttctgatttatcctgttttgttttataccaatgagctgacgcatgtgtctgcattccttccttcctttttctattg

SEQ ID NO: 27718 - DNA, 110 bp, synthetic construct
  source 1..110: mol_type = other DNA
ggccaagtacttcaacctcggaagtctaggcactgagaagaccgctctggaatgctacgtggagaactgagcttaggaatctgggtttttgctttttttttttttttttt

SEQ ID NO: 27719 - DNA, 110 bp, synthetic construct
  source 1..110: mol_type = other DNA
ccctgacgagaagggtgtcttgacggccccgacgcctctgcctttagcagatcgaggcacccttttgtcctttgaggggcgtgtttgggaagcacgtgactcccggaaga

SEQ ID NO: 27720 - DNA, 110 bp, synthetic construct
  source 1..110: mol_type = other DNA
tggggtctcctaggcacccccgccaggcccgtggccccctgaggcatccacctattctctgttgcagttctcccagcaggaggagaagagacagaagtcggagcggttgc

SEQ ID NO: 27721 - DNA, 110 bp, synthetic construct
  source 1..110: mol_type = other DNA
cccgagcatgggacaagaaatgcctcagagggataataagcaagcatggagctatgagagactatggaaaatgtaaggagccagagcagaaggtaggggagagtagtgag

SEQ ID NO: 27722 - DNA, 110 bp, synthetic construct
  source 1..110: mol_type = other DNA
cccaaatgtgaagtaatcctcgcccccaggtgatagacataaaagttattgtgccaaaattcattaatggagaaacatgtgtatcttggaggcccttccccctgccttct

SEQ ID NO: 27723 - DNA, 110 bp, synthetic construct
  source 1..110: mol_type = other DNA
aaaattcattaatggagaaacatgtgtatcttggaggcccttccccctgccttctttttaaggcacatgtgaactaatgactcatttggttaatggcacatctgaatgtg

SEQ ID NO: 27724 - DNA, 110 bp, synthetic construct
  source 1..110: mol_type = other DNA
ctcccgaaaaaccaatcccccagtcggaggaggaggtgagcccagggggcagcgggagcagggacaagacaagacgccgtggttctgattggactgattttttgaaagtt

SEQ ID NO: 27725 - DNA, 110 bp, synthetic construct
  source 1..110: mol_type = other DNA
tctaccgtgaaacccggggccaactgccttctcctatgggcctcagtttccccatctacaaaatgggtttcctgacacctagcttgcaaggttcttgtgccgatcaaatg

SEQ ID NO: 27726 - DNA, 110 bp, synthetic construct
  source 1..110: mol_type = other DNA
agaggtcaagtaacttgtctacggtcacacagccaagacaagacagagtgactatttgaaccaggccagcagactctagagcctttaatgagcctgggtcccaggttagg

SEQ ID NO: 27727 - DNA, 110 bp, synthetic construct
  source 1..110: mol_type = other DNA
gaaatagagttgaggcaccaagattattagctaaaccgtatgaacctgctctggttagaggtggcagtttcatagggttctacgtagctgaccccaccctgctctgttca

SEQ ID NO: 27728 - DNA, 110 bp, synthetic construct
  source 1..110: mol_type = other DNA
ctttatggccttgggtgactaagtaaagatttcttaggacaggacccaaaagataagaactgtaagagaaaaaagtaataaattggacatcctcaaaactgaaaactttt

SEQ ID NO: 27729 - DNA, 110 bp, synthetic construct
  source 1..110: mol_type = other DNA
actatcattaaaaaatctgttgctttaaaataagtgtttgctgagtccagccagtaaaattttctgagtccagccttttaccagtgtgatattaatgcctatcacaatct

SEQ ID NO: 27730 - DNA, 110 bp, synthetic construct
  source 1..110: mol_type = other DNA
aacacagttttaatgttaaagcttatttgagtaacacgatcaaatactaactgagaagaaagactaagggaaggaacccccaatttctgtatgtaatttctataatgtct

SEQ ID NO: 27731 - DNA, 110 bp, synthetic construct
  source 1..110: mol_type = other DNA
aattcagtgtttacagaaactttatagaacataaataccagaaaaggagaatcaactctgattctcagaatctgacaaaggtcattctcaacaggctatgctccaactat

SEQ ID NO: 27732 - DNA, 110 bp, synthetic construct
  source 1..110: mol_type = other DNA
gagaaaaaatgagtctgctttttttggcatccttctctgtaagaaggtaagctacaatctgctctgctaagtgagctattctacttcattctctttataaattttaaaaa

SEQ ID NO: 27733 - DNA, 110 bp, synthetic construct
  source 1..110: mol_type = other DNA
tagagagtgttatgaggatgctatagcaagtatatattccctcttaaaggcctctccaagaggactttcaccttgactcttgagtatggtgaacgtgtgacttggagcct

SEQ ID NO: 27734 - DNA, 110 bp, synthetic construct
  source 1..110: mol_type = other DNA
gtggaacaccttctgcatgagctctcccagctcagactattggtataagtggcgcaggtgtcactgctctaaatggtgcctctgagtgggtgttccaggtcttcctgtgg

SEQ ID NO: 27735 - DNA, 110 bp, synthetic construct
  source 1..110: mol_type = other DNA
ccataccatgcacgtttaattccatctggccagtgagtaccttgcgtgtttggtgatctttacttaggtggttcttggggaaaattgagggcatgtatatcaagcaattt

SEQ ID NO: 27736 - DNA, 110 bp, synthetic construct
  source 1..110: mol_type = other DNA
caaaccttcacacccaggaactctctgaaatccaaggtatttattctaaaaggttataaacctctgctggaccagtggtacagctatacccactccatcacctgctctgt

SEQ ID NO: 27737 - DNA, 110 bp, synthetic construct
  source 1..110: mol_type = other DNA
aagcccagttgtcacgctgtgtctgatgacactgcttgacctgctgaaactgtatttattaaactatatctcgatgaccattcgggggtttatctatacggagggcaaac

SEQ ID NO: 27738 - DNA, 110 bp, synthetic construct
  source 1..110: mol_type = other DNA
ccttttgacaactccacacagcgggtaactgtggaatccgcttttacagctcaggagaggggcccaggggtattgagtccctcggccaaggtcacacagcagcaagaggg

SEQ ID NO: 27739 - DNA, 110 bp, synthetic construct
  source 1..110: mol_type = other DNA
agaggggcccaggggtattgagtccctcggccaaggtcacacagcagcaagagggaggcacccatcgcgggttggagcctcagcaggctgggctctggagcccgagtgct

SEQ ID NO: 27740 - DNA, 110 bp, synthetic construct
  source 1..110: mol_type = other DNA
cattgctccaagcccctggcgtggatcatgttattttatcctcacaatgacccgatggagacgccatattttctttagttttaagtcacagatgaggaaactgcagcaca

SEQ ID NO: 27741 - DNA, 110 bp, synthetic construct
  source 1..110: mol_type = other DNA
tccctgagggtggcccagagctggctcagctccctgctgaaacaccggtacctgtcggggtctgggacagagaagatgcttaaatgacctttgtcaggtgtgggatcgtg

SEQ ID NO: 27742 - DNA, 110 bp, synthetic construct
  source 1..110: mol_type = other DNA
tcacttcaagcacgtcgggtgctgtgcagcaatgcttcattcactcagttctgttagtgaagcacccactctggcctgggtgctgggtgattagctctggctacaatggt

SEQ ID NO: 27743 - DNA, 110 bp, synthetic construct
  source 1..110: mol_type = other DNA
ttccctccctccctcctgtcttccttcttctttcttcagtgtaggagctaccaggtcctttaaatctcgtttgctgcaattttctttttttcttttttttttttttttgt

SEQ ID NO: 27744 - DNA, 110 bp, synthetic construct
  source 1..110: mol_type = other DNA
tattcacctgagagacgcggacccccggctgaacttcaggacgtgcagtccccctgcatccagggtagttttattctgttttcttatttcctgggctctaaggctgtggc

SEQ ID NO: 27745 - DNA, 110 bp, synthetic construct
  source 1..110: mol_type = other DNA
tggtgccaatgtaatgaaatccaagtacaaactgcagacacttaggctaaggtgagccttcctgtgccagcaggtaaacagggtgatgggttctgaggacacagaagcta

SEQ ID NO: 27746 - DNA, 110 bp, synthetic construct
  source 1..110: mol_type = other DNA
gccttcctgtgccagcaggtaaacagggtgatgggttctgaggacacagaagctatgtgtttgggaccctcccagacctcaccctatgcccctcttcatttggctggacc

SEQ ID NO: 27747 - DNA, 110 bp, synthetic construct
  source 1..110: mol_type = other DNA
gccccgtctacacgacgacgggtgtgtgaagattaaatgagatgccgtacacgaagctggtggtccagggcctcaggtcccaggagttcttaataatgtcatttgtgtca

SEQ ID NO: 27748 - DNA, 110 bp, synthetic construct
  source 1..110: mol_type = other DNA
gcctatctgagcactggaagccggctccgcctgctagtgaccatcacacacaccctcgatgttcagaaaacacgcagagctggcagagagtgtgaaagtgggactctcgg

SEQ ID NO: 27749 - DNA, 110 bp, synthetic construct
  source 1..110: mol_type = other DNA
aacaattttctgctgctgggctcacaggagctccaggtgtccttgggtggaggttggaaagctgagaagagccttccacgtagatcatggtgagctcagccactcagctc

SEQ ID NO: 27750 - DNA, 110 bp, synthetic construct
  source 1..110: mol_type = other DNA
tctccagagcttcggtttcacattctgttccactttcagatgatgacaaacaacagcaatactacttcctgacggtgaccgtaacgctctatgaccactcacaaaatgtg

SEQ ID NO: 27751 - DNA, 110 bp, synthetic construct
  source 1..110: mol_type = other DNA
ttggagccatgctctagagtaacaattatggggcatctacatcaacactcacacgtaaatgcttcagctattagtgagcaggagctggacaaagccagggccagggctgc

SEQ ID NO: 27752 - DNA, 110 bp, synthetic construct
  source 1..110: mol_type = other DNA
tctgtcatccctcgccgctgagcagaacgacacagcttgatggcttgggcaccgtccataagatcacagtggctgggtcctgggccagtgaaaggcgatcaagagctcca

SEQ ID NO: 27753 - DNA, 110 bp, synthetic construct
  source 1..110: mol_type = other DNA
tttctcttgcactgctcctttgaaacccacaccactgagatttaccatactttctcccgttggctgtgttcagttcagcagacctttgaaattcataattggtcattctt

SEQ ID NO: 27754 - DNA, 110 bp, synthetic construct
  source 1..110: mol_type = other DNA
aactaaatagagagaagacaataacattcacccagagagagccatcattagtacttcactgtgctgccttcgtctttctttgtactttatattaatttgtatagtacagt

SEQ ID NO: 27755 - DNA, 110 bp, synthetic construct
  source 1..110: mol_type = other DNA
gagcaccatacctatatcgcttgagagttgtgagaattagttataagtatttcacactgacctgcgcccaactgccaattaatggtgatggttgctatggtattattatt

SEQ ID NO: 27756 - DNA, 110 bp, synthetic construct
  source 1..110: mol_type = other DNA
atgactaggatgaactttgaaaacattatgctaagcaaaataagccagacacaaaagcacaaatattgtgcagttctacttacgcaaaatatccagaataggcaacttta

SEQ ID NO: 27757 - DNA, 110 bp, synthetic construct
  source 1..110: mol_type = other DNA
agcacaaatattgtgcagttctacttacgcaaaatatccagaataggcaactttatagagacagaaagtaaattagtggagaggtgagtgggacgggggagtagggaatt

SEQ ID NO: 27758 - DNA, 110 bp, synthetic construct
  source 1..110: mol_type = other DNA
ttctgaggatatgtcacatgcatgactcaaacttttaatcatctgcttggaggactttggaggtcagcagagcctgtggctgaggagacctagcttttgtgacggccacc

SEQ ID NO: 27759 - DNA, 110 bp, synthetic construct
  source 1..110: mol_type = other DNA
tttggaggtcagcagagcctgtggctgaggagacctagcttttgtgacggccaccttcatgttggcagcagccagggcctgggcaagtggagttgctggcacaggccgtc

SEQ ID NO: 27760 - DNA, 110 bp, synthetic construct
  source 1..110: mol_type = other DNA
tgcacttcaggatgggcactgggactcgtgtattgggggtgttaggcaagtgctagttattgacagtgaacagctccatgactttgaacctgaacgtcctgccggcagtg

SEQ ID NO: 27761 - DNA, 110 bp, synthetic construct
  source 1..110: mol_type = other DNA
gggatgggagaccactgagggggacctgccatcaggccgcttcctcatgccccaggtggagagcaggtccccagcagagctccttgcatcctttgttgggcttggaattg

SEQ ID NO: 27762 - DNA, 110 bp, synthetic construct
  source 1..110: mol_type = other DNA
gtggagagcaggtccccagcagagctccttgcatcctttgttgggcttggaattgttgaagaccctgctggccctttctcggatggtttccacggtcctttcatccctga

SEQ ID NO: 27763 - DNA, 110 bp, synthetic construct
  source 1..110: mol_type = other DNA
gagggcttagggaaggggatgttgacaaagacagagatgggtcataagtgccagggagcagtgatggttcagcacagaagctgtagcaacagcgagaagctaatccgccc

SEQ ID NO: 27764 - DNA, 110 bp, synthetic construct
  source 1..110: mol_type = other DNA
gagcagtgatggttcagcacagaagctgtagcaacagcgagaagctaatccgcccgtaggcctgaggtggggcggtgagcagaagcagtggttcccagaacgaggtgaga

SEQ ID NO: 27765 - DNA, 110 bp, synthetic construct
  source 1..110: mol_type = other DNA
agtcttgtacggcttagccgaccttgaccaactgtctgttgcctaaggcagagaaaccacctctgctctccatctgacccagctaattggcccggagaaggtaaattacg

SEQ ID NO: 27766 - DNA, 110 bp, synthetic construct
  source 1..110: mol_type = other DNA
accacctctgctctccatctgacccagctaattggcccggagaaggtaaattacgtagagaaagagccatcagtggctcttgccacatatatctcctaagcataggcgac

SEQ ID NO: 27767 - DNA, 110 bp, synthetic construct; identical to SEQ ID NO: 27765
  source 1..110: mol_type = other DNA

SEQ ID NO: 27768 - DNA, 110 bp, synthetic construct; identical to SEQ ID NO: 27766
  source 1..110: mol_type = other DNA

SEQ ID NO: 27769 - DNA, 110 bp, synthetic construct
  source 1..110: mol_type = other DNA
gcccaagatgtaatgattactcaggcacagagtgacatctgaagaaaacaaacgtaatgagaatacatgtaattagaaaaaggggaaataacctcaccactgggcgcact

SEQ ID NO: 27770 - DNA, 110 bp, synthetic construct
  source 1..110: mol_type = other DNA
ccctgcctctagttaagttgttgctcttgctctccggagatttggccccgtgcttgaagctgttgtgattccgtaagaatgaagcatcctgagaggggagattagcaacc

SEQ ID NO: 27771 - DNA, 110 bp, synthetic construct
  source 1..110: mol_type = other DNA
aggctgagtctccctgcaggacccagggaagctgtgagacacagtggctgagtagaacccagctactgctttctttggtattgaacttgacttggagttactgctttaca

SEQ ID NO: 27772 - DNA, 110 bp, synthetic construct
  source 1..110: mol_type = other DNA
ttctagaacctccttatcaggcgacttgctgccgtggccccgcactagctgtgcccccgccactctctctggcatcacgtcgacttatgtattgctagaaatacattgtg

SEQ ID NO: 27773 - DNA, 110 bp, synthetic construct
  source 1..110: mol_type = other DNA
cagctgtgcctaagaaaccttaacctgtgaagtatctttcaactcccaggccctggaaacagggagggaagggagcagaggccgaggcaaagactgccgggcagcccttt

SEQ ID NO: 27774 - DNA, 110 bp, synthetic construct
  source 1..110: mol_type = other DNA
gaaacagggagggaagggagcagaggccgaggcaaagactgccgggcagcccttttgaagcctattagaaggaggagagaaatagacacatgcacacacacacgcacaca

SEQ ID NO: 27775 - DNA, 110 bp, synthetic construct
  source 1..110: mol_type = other DNA
acccaggagatttttacccaccccggcctttaggaaagcaagggaaaatgtcccgactgcaggagatccagcacagcttccatttatagagcattcactgtatgccagga

SEQ ID NO: 27776 - DNA, 110 bp, synthetic construct
  source 1..110: mol_type = other DNA
gacttctgattccatcccaagtctgtacgattcggaagttcatctctgggagtgctcattgtgccgcagcagaaacgaaatcagctagcatccatgcggattcgggttcc

SEQ ID NO: 27777 - DNA, 110 bp, synthetic construct
  source 1..110: mol_type = other DNA
tgctgcagggcaggctgagacctcaggctgttgcctgaaatatcccaggaactttgtgaggctctgtcgccacctagtggtcagatctcagcatccaggggagcttaacc

SEQ ID NO: 27778 - DNA, 110 bp, synthetic construct
  source 1..110: mol_type = other DNA
gtgaggctctgtcgccacctagtggtcagatctcagcatccaggggagcttaaccagcaagtggaggaacagaccacttgtcccatagtggtgaaggatcctgtgccttg

SEQ ID NO: 27779 - DNA, 110 bp, synthetic construct
  source 1..110: mol_type = other DNA
gtctgcaggttctttatccacttctctgctcctcatggacgtctggggacactcggtggcccgtagaccatgaagggaccatcaattgaggggaggttaaggcttgctta

SEQ ID NO: 27780 - DNA, 110 bp, synthetic construct
  source 1..110: mol_type = other DNA
cccacctgcccctccaacgcaactcacgtggcctttatttagctgttccttctcggctaccttgttatcttccactgacaataggaggagaggtgggaggagggctgcca

SEQ ID NO: 27781 - DNA, 110 bp, synthetic construct
  source 1..110: mol_type = other DNA
ggtgaagacaagtacagcatttattgcagggtaacaagcaaggagaacaatagctagtgctcggaagacctgaactcccttgtggctttcagggaagagctttaaaaggc

SEQ ID NO: 27782 - DNA, 110 bp, synthetic construct
  source 1..110: mol_type = other DNA
agtgctcggaagacctgaactcccttgtggctttcagggaagagctttaaaaggcaaagtgagggagagggttggggagtatgcgatagctcatgcacggttttctgacg

SEQ ID NO: 27783 - DNA, 110 bp, synthetic construct; identical to SEQ ID NO: 27781
  source 1..110: mol_type = other DNA

SEQ ID NO: 27784 - DNA, 110 bp, synthetic construct; identical to SEQ ID NO: 27782
  source 1..110: mol_type = other DNA

SEQ ID NO: 27785 - DNA, 110 bp, synthetic construct
  source 1..110: mol_type = other DNA
tagttctcccagagaagccagcggagtctcaaactcaaagcttgttgaaactgctgggaaaggcagttcccctttcctctgggcttgctaacctggtagtatgtaagctt

SEQ ID NO: 27786 - DNA, 110 bp, synthetic construct
  source 1..110: mol_type = other DNA
tggctgcggatttccttaattctccaagaccacagaggcctagagggacggacgacagagcagctctgcacaagaggtgagaagaaaagggctttcacctgtgaaaagga

SEQ ID NO: 27787 - DNA, 110 bp, synthetic construct
  source 1..110: mol_type = other DNA
cttcgaaacctgatgggcctggattcagatgccaactctgcctctttctacctgtatggccttgagtgtgtcacgtggccagccttaggctcagtttccccatctgcaga

SEQ ID NO: 27788 - DNA, 110 bp, synthetic construct
  source 1..110: mol_type = other DNA
atggccttgagtgtgtcacgtggccagccttaggctcagtttccccatctgcagaatgccaggaaaataccataagcaacaaagtgtgcttggcacatgccaggtactac

SEQ ID NO: 27789 - DNA, 110 bp, synthetic construct
  source 1..110: mol_type = other DNA
tgataaacatatcacaggggaggaaactgaggcttcagaggttaggtgaagagtccagacttagctagaaaggggagcagttggactttaaatggtaagatactgttaag

SEQ ID NO: 27790 - DNA, 110 bp, synthetic construct
  source 1..110: mol_type = other DNA
cccatggatatgatgagtagttcttagcctgctgagccacagctgggaactcctaggttatttcctgaatgccaacacctaccgattgggaatggctgccgggaggatgg

SEQ ID NO: 27791 - DNA, 110 bp, synthetic construct
  source 1..110: mol_type = other DNA
ggttatttcctgaatgccaacacctaccgattgggaatggctgccgggaggatgggaggagaagattctgaagccaagttcaagctcagctgtaaagagtgctgtgactc

SEQ ID NO: 27792 - DNA, 110 bp, synthetic construct
  source 1..110: mol_type = other DNA
ggatcaaacctgcatcctcatggataccagtcggatttgtttcctctgtgctacaatgggaactcccagctgcagctgcttcagaaaacaccacctcacactcagcggct

SEQ ID NO: 27793 - DNA, 110 bp, synthetic construct; identical to SEQ ID NO: 27792
  source 1..110: mol_type = other DNA

SEQ ID NO: 27794 - DNA, 110 bp, synthetic construct
  source 1..110: mol_type = other DNA
cctgcctgcctcccgttttgcactatcatccaattctctctgttctggacacggctgaaaacacttctatagcttcccatggaccttgggggtaatgtcagaagtcccta

SEQ ID NO: 27795 - DNA, 110 bp, synthetic construct
  source 1..110: mol_type = other DNA
agtaagccttatgtggtttagctcttcagatgggggctagatggtttgttcctcgaacatttttatgttgtctaatgggcatgagatattttcctgtaggagaggaccac

SEQ ID NO: 27796 - DNA, 110 bp, synthetic construct
  source 1..110: mol_type = other DNA
tggactcccatccaactctctcagaactctgctttccaaactatcagccacttcctagaatttttaaaaagtctactgtaacagaacacatgaatttctgcacagctctc

SEQ ID NO: 27797 - DNA, 110 bp, synthetic construct
  source 1..110: mol_type = other DNA
tagaatttttaaaaagtctactgtaacagaacacatgaatttctgcacagctctccccacaaaaacttcacattttctaccatgaggggatctgtgattctagaggagat

SEQ ID NO: 27798 - DNA, 110 bp, synthetic construct
  source 1..110: mol_type = other DNA
tttgggttggacgattcctcactgaagaggctagcctatgtattacaggatattcagcagtatctgtgatctctacccgctacagaccagtaacatcccccagctgtgaa

SEQ ID NO: 27799 - DNA, 110 bp, synthetic construct
  source 1..110: mol_type = other DNA
agcagtatctgtgatctctacccgctacagaccagtaacatcccccagctgtgaaaaaccaaaggagtctgcagacattgccaaatgtttctggggtggagtcgtgtgaa

SEQ ID NO: 27800 - DNA, 110 bp, synthetic construct
  source 1..110: mol_type = other DNA
tatatctgggtttcttgtgcccaccagcctagcagaacattaagcctgagaagtgagctcatgggccctttttgaggtatctaaaacaaagacaaatcatgcaaagaccg

SEQ ID NO: 27801 - DNA, 110 bp, synthetic construct
  source 1..110: mol_type = other DNA
agctcatgggccctttttgaggtatctaaaacaaagacaaatcatgcaaagaccgcaaaggcatattcaatttgcctccctcaaaccctgcaccccatcctaccccaaca

SEQ ID NO: 27802 - DNA, 110 bp, synthetic construct
  source 1..110: mol_type = other DNA
gcccccaaaccctcaggattgatcatgttaacccctgtgacactgccttgctaccccatcagccagtcagagcactgtgcccgagctaattacacagcctgtgacccctc

SEQ ID NO: 27803 - DNA, 110 bp, synthetic construct
  source 1..110: mol_type = other DNA
ccatcagccagtcagagcactgtgcccgagctaattacacagcctgtgacccctcccttacctggcttttaaaaatgctctgctgaaacccctctgggagttcaggattt

SEQ ID NO: 27804 - DNA, 110 bp, synthetic construct
  source 1..110: mol_type = other DNA
ctggaaacaagcagaatggttccaatcctggctgctgtgcttgagtcgatggtcatgtggttttagttaaatctgctcaattctgtgaggctaattttcttcatccataa

SEQ ID NO: 27805 - DNA, 110 bp, synthetic construct
  source 1..110: mol_type = other DNA
tgtggttttagttaaatctgctcaattctgtgaggctaattttcttcatccataaagggccaagggaccagagcaagcaacaaacttaaaatgcctggtaccatgcctgg

SEQ ID NO: 27806 - DNA, 110 bp, synthetic construct
  source 1..110: mol_type = other DNA
taatctgagcctgactttctttttccaagaaggtcagaatgaaacttcacatgctcttttcaggcacggcagggtcctgttctctgaaggctcatttaaaataccctcca

SEQ ID NO: 27807 - DNA, 110 bp, synthetic construct
  source 1..110: mol_type = other DNA
cttttcaggcacggcagggtcctgttctctgaaggctcatttaaaataccctccaagggaaactttgcctccatgcagatagctaaagactggaggaaaatggccttaga

SEQ ID NO: 27808 - DNA, 110 bp, synthetic construct
  source 1..110: mol_type = other DNA
attcttgacatttataattacaagctgtaatgctggttccttctcttaaattgacacgggctttttacactagaaggcttgatacttacatggtgaaatcacacacattg

SEQ ID NO: 27809 - DNA, 110 bp, synthetic construct
  source 1..110: mol_type = other DNA
attcatgaataataaggactaactgtattatgaaataagacatgcctttatcaaatggagattatcccttgacataataaaagggaaaggagtgaaaatagcacacacct

SEQ ID NO: 27810 - DNA, 110 bp, synthetic construct
  source 1..110: mol_type = other DNA
tggagattatcccttgacataataaaagggaaaggagtgaaaatagcacacaccttgctggctgtatgatttgaggcactcaaggttagagtatcaccattggtacttgt

SEQ ID NO: 27811 - DNA, 110 bp, synthetic construct
  source 1..110: mol_type = other DNA
tcactcatatcaattttaacaatggttttgtgggtctgactctaaaggcaagggaaacaaaagcaaaaacaaaccagtaggtacatcaaactaaagtttctgcacagcaa

SEQ ID NO: 27812 - DNA, 110 bp, synthetic construct
  source 1..110: mol_type = other DNA
aacaaaagcaaaaacaaaccagtaggtacatcaaactaaagtttctgcacagcaaaggaaaccatcatcaaaacaaaaaggcagcctacttagtgggagaatatgttttc

SEQ ID NO: 27813 - DNA, 110 bp, synthetic construct
  source 1..110: mol_type = other DNA
taagaaaactagaacaattccctaagagtagaagctgtctaaagtaacgaatccttaaattgaaggggactccatgtgttcccaacaaatactgaaatgtggcaagaaaa

SEQ ID NO: 27814 - DNA, 110 bp, synthetic construct
  source 1..110: mol_type = other DNA
taaattgaaggggactccatgtgttcccaacaaatactgaaatgtggcaagaaaatattttgcattcaatagtccgcataggctctaagcaatgaaaccccctcaagagg

SEQ ID NO: 27815 - DNA, 110 bp, synthetic construct
  source 1..110: mol_type = other DNA
aactggatacatgcaagccaagcaggcagcccttcaggggaccaatggaagaatttgaaatggcctcattcccagcacaaacgtgtatgcaacactatggtccatctgcc

SEQ ID NO: 27816 - DNA, 110 bp, synthetic construct
  source 1..110: mol_type = other DNA
tgaaatggcctcattcccagcacaaacgtgtatgcaacactatggtccatctgccacaatgctacagtgtattgatgtcattccagaagaaagcctgaaggccatttgga

SEQ ID NO: 27817 - DNA, 110 bp, synthetic construct
  source 1..110: mol_type = other DNA
taaatctcataactgtgagttattcaaatgcatcattgccagtgttccaggataagtcacaacaataaataaggtacctgctcagttcaagataccctaatgatatgtga

SEQ ID NO: 27818 - DNA, 110 bp, synthetic construct
  source 1..110: mol_type = other DNA
atattgcagtgtgaaaggaaactggctaatgaagacaaatgaggaagattgattttgatgtgctaaccgccactatgatctaaaaagagagaggtacatagtaataacaa

SEQ ID NO: 27819 - DNA, 110 bp, synthetic construct
  source 1..110: mol_type = other DNA
gaactgtgatgggattttggttcagttccatcaaactgtgtgacagccttggacatccaagctgggtaaaatcttcctgtaggaggcatgagtgcttcttctcattctag

SEQ ID NO: 27820 - DNA, 110 bp, synthetic construct
  source 1..110: mol_type = other DNA
aacttagactattgaatattttttcatagggcagacccagttctgtctctctccctccctcctaccctctaccaacacctgtatgtgatattttctttgggagacatgac

SEQ ID NO: 27821 - DNA, 110 bp, synthetic construct
  source 1..110: mol_type = other DNA
atgaatacagaagtgatcacaatataaacactcatgcctctttccattttaaacatctcatttttaaatggggatgaatctttttttctaggaggaagttctctttcagt

SEQ ID NO: 27822 - DNA, 110 bp, synthetic construct
  source 1..110: mol_type = other DNA
aaaaagttggagaaagtcacagcatgtttgtgtcctcgtaggaatgaaaaaaagcagttcctttaagaaagagaggtgggaattcccttcatggtacagaggaaacaaat

SEQ ID NO: 27823 - DNA, 110 bp, synthetic construct
  source 1..110: mol_type = other DNA
tgggaatgctgagtccctcaaaagaaggataatgacaataatcacaggcaagcagggccgatggaattccagggcctgagcttcctccacagaggtgatcagtaggttaa

SEQ ID NO: 27824 - DNA, 110 bp, synthetic construct
  source 1..110: mol_type = other DNA
acccacaattattctccctccttgaactcacacggagcacttaacgtccttttagcatatgctccctggcatccttaatgatctttctttatgtacctgtcctgtctgtc

SEQ ID NO: 27825 - DNA, 110 bp, synthetic construct
  source 1..110: mol_type = other DNA
catatgctccctggcatccttaatgatctttctttatgtacctgtcctgtctgtccaagtagtggaccttccttgacggtaagggctgtatctcagagtactctatttat

SEQ ID NO: 27826 - DNA, 110 bp, synthetic construct
  source 1..110: mol_type = other DNA
cttgaccttccgtaccattgcttctaatcatgagtgtgaatgtgaggaataaaatagacgacaatgagggatgatttacagcaaatcatggtgaaaaataacataatggg

SEQ ID NO: 27827 - DNA, 110 bp, synthetic construct
  source 1..110: mol_type = other DNA
aaccgttaaccaacatgcaagctcacctcttacaccagaaggaaaaggtttttacaatggtatttaacaattgctacaaagccctcaaaagtagccaggggaaagaaaca

SEQ ID NO: 27828 - DNA, 110 bp, synthetic construct
  source 1..110: mol_type = other DNA
tccttaacccagtgagccactgtgggaactcctgaaattttatttttttcctgggtctgtctacttcacaagactccaaaatcaaaagctacttttttgatcatgttgct

SEQ ID NO: 27829 - DNA, 110 bp, synthetic construct
  source 1..110: mol_type = other DNA
tcaataaataccatctatttttattaactattatatactttagcatctcatactgaaataatttggtttttgtcagtgttttacccctggtgggtcttgggtgacatgat

SEQ ID NO: 27830 - DNA, 110 bp, synthetic construct
  source 1..110: mol_type = other DNA
agggagaggtggctggagctgcccagagaaatagtcagatgccattgtgtgcctttcattttggcaaggccagataatcagtcggaattcacttttaaactctaaacaaa

SEQ ID NO: 27831 - DNA, 110 bp, synthetic construct
  source 1..110: mol_type = other DNA
tcattttggcaaggccagataatcagtcggaattcacttttaaactctaaacaaaatgttcgatattcttacatcccacaagaataaaatcaagcagaaaaagaaatgtc

SEQ ID NO: 27832 - DNA, 110 bp, synthetic construct
  source 1..110: mol_type = other DNA
ttagtttgtagagaaaatttgttggaatgcctccgaataaggataccacttggcgacaagctgtaatagtttgtctgtatttatgaaaacatttacaccgttcttttcct

SEQ ID NO: 27833 - DNA, 110 bp, synthetic construct
  source 1..110: mol_type = other DNA
cctatttacatagccattggccaccagagcttggatctcaaagaactcagatctcatactacagatcccatactacagttactagtctctgaaaattgaatgggatgagt

SEQ ID NO: 27834 - DNA, 110 bp, synthetic construct
  source 1..110: mol_type = other DNA
catcagactctacaactagtgtgttcaagttctgggtagataggcttttttcacgtagaagcacctcattcctgcttggtttaggcagtggaatgatgtttaagagctca

SEQ ID NO: 27835 - DNA, 110 bp, synthetic construct
  source 1..110: mol_type = other DNA
aaagttgactatggatagctagtgagctgaataagtagacaggtaattgaaccacttcattgttgcttatgtcagtttgttaacggttaaagagttcacctaccattctc

SEQ ID NO: 27836 - DNA, 110 bp, synthetic construct
  source 1..110: mol_type = other DNA
tatcgtcctaaggtcaaatacgctggaaggatattgcagctctcacacagccacgccagagtgctacagtcccccgccttcccttaagataacaagtataggctctcctt

SEQ ID NO: 27837 - DNA, 110 bp, synthetic construct
  source 1..110: mol_type = other DNA
ttgtaggggctggctcttagtctgagaggaagaaactctaggaccacagaatatgcttccgaggttgagagcatgaattggttcttcctttttagtatttgcctcatcct

SEQ ID NO: 27838 - DNA, 110 bp, synthetic construct
  source 1..110: mol_type = other DNA
cttctatttgcccagtttcagttccttcctgccctgggtcctctttgcttctccacttcctatagctctcagccttgaccccagtctggttactaccctgttgttctcag

SEQ ID NO: 27839 - DNA, 110 bp, synthetic construct
  source 1..110: mol_type = other DNA
aactcaggacagtgcctggcagaaagtaggaggtcattaaatgataaagaaatgtagtaattctatgggtcactggaacagtgaattgttcaagtgacttgggataacga

SEQ ID NO: 27840 - DNA, 110 bp, synthetic construct
  source 1..110: mol_type = other DNA
atgggtgtagtcaattcagtttagcaacattacacagtagtagcagagctattgcatgtcccatcctgtggggctgtcagcatatagagtcattttccaactgtcagggc

SEQ ID NO: 27841 - DNA, 110 bp, synthetic construct
  source 1..110: mol_type = other DNA
tttacatcttccttgatagaggacaagaactgaacagctgattgtcagcataatccttgtgccatattgcacaatatgaaatagaaatcttgtctctagcgtgtctaaag

SEQ ID NO: 27842 - DNA, 110 bp, synthetic construct
  source 1..110: mol_type = other DNA
agctcctctttcagactatatatgtttgctttggcagagagtttttaaccagtcagaacgacttgacttactgagtatgtctgcaggtaatatcattgtgcaggtgggta

SEQ ID NO: 27843 - DNA, 110 bp, synthetic construct
  source 1..110: mol_type = other DNA
gaacgacttgacttactgagtatgtctgcaggtaatatcattgtgcaggtgggtattgctattgtggtctatttttaggtgagacaactgcttgatctgtgaggatgaga

SEQ ID NO: 27844 - DNA, 110 bp, synthetic construct
  source 1..110: mol_type = other DNA
ttgtgaagcaatgaatatccaggataagtatttctctttgcacatattcattctgaatgactggcttgacaaaatgccaatttcagttcacttgattattattaacaatc

SEQ ID NO: 27845 - DNA, 110 bp, synthetic construct; identical to SEQ ID NO: 27844
  source 1..110: mol_type = other DNA

SEQ ID NO: 27846 - DNA, 110 bp, synthetic construct
  source 1..110: mol_type = other DNA
cctccagcagatctcagtgcaatggtgtgactttccaagacctcatgcagaatattacacatttagtcataagagggaaatgagattaattacaaatgagagctggtgaa

SEQ ID NO: 27847 - DNA, 110 bp, synthetic construct
  source 1..110: mol_type = other DNA
tacacatttagtcataagagggaaatgagattaattacaaatgagagctggtgaaggacaacaatacaagaagctacaaaccaggtgacattttaaatgaactccttgat

SEQ ID NO: 27848 - DNA, 110 bp, synthetic construct
  source 1..110: mol_type = other DNA
atccatccttcttgccaaagagatttgttcattgaggaacatgtgactcaaactctgacagatattgtcttgccctcctcctcaatttccctcaagatctgaatactata

SEQ ID NO: 27849 - DNA, 110 bp, synthetic construct
  source 1..110: mol_type = other DNA
tccaaaaatacttcagggctttataaattttcccaatggccttttataaaccagaggcttttgaagcaccacccatttcactgttcttgttgatttttccttaagagata

SEQ ID NO: 27850 - DNA, 110 bp, synthetic construct
  source 1..110: mol_type = other DNA
attggaattgcacatttagcctgcaaactgggataggtgatgaggccctcaaacaggataaggaccgtgtcttagttcactaggtctgctattacaaaatactgcatact

SEQ ID NO: 27851 - DNA, 110 bp, synthetic construct
  source 1..110: mol_type = other DNA
tcatattccttgttattggtatactcccaaagtaggtatatcaacatttaaaacatggcctcttccctgaatttctacacagtctattgagggagacatgactaaaaata

SEQ ID NO: 27852 - DNA, 110 bp, synthetic construct
  source 1..110: mol_type = other DNA
acataaggtcgtgttgcaaggattaaagagatgatgtatgttaagcactcatgtgtagggcttttcatatagaagctacccatctttgaggttagactttggaagaaaac

SEQ ID NO: 27853 - DNA, 110 bp, synthetic construct
  source 1..110: mol_type = other DNA
tagagaattcaaaagagggatcttctgctttttgaggatggcacatcatgagtttgtctctgaaaatgttggatttggaaacctgaaggggacgtaaatgaacaaatgta

SEQ ID NO: 27854 - DNA, 110 bp, synthetic construct
  source 1..110: mol_type = other DNA
aattctatgaacaaagatgtcagccttagctgatattgctgtaccttcagaacgtatttggagaaggcagagtatttgtgctgatgaaggtagttcaggtggtgggagga

SEQ ID NO: 27855 - DNA, 110 bp, synthetic construct
  source 1..110: mol_type = other DNA
tacgagcctgtaatacctgactgtttgagcgcctcctacctttgggtacctgtatgtacaaaattattattattattattattttctcctgttaatctgtcttatgtgag

SEQ ID NO: 27856 - DNA, 110 bp, synthetic construct
  source 1..110: mol_type = other DNA
gaataagaacaaaacgaatcatgattttaataccctgaatgccctcaatgcatccccatacaaaaatttaaatgctaccgagcgacgcagcattgtcaatttgtcaaagg

SEQ ID NO: 27857 - DNA, 110 bp, synthetic construct
  source 1..110: mol_type = other DNA
ccatacaaaaatttaaatgctaccgagcgacgcagcattgtcaatttgtcaaaggtgagggttaattattaaaggcatacacctatctaaatagcgccactttggtacaa

SEQ ID NO: 27858 - DNA, 110 bp, synthetic construct
  source 1..110: mol_type = other DNA
cagcttattcttaatttctttactattatcttctattcccagctatcttcccaaccactcctgtcattatgcatgatagattggccatgatggtgtggattgaagcttct

SEQ ID NO: 27859 - DNA, 110 bp, synthetic construct
  source 1..110: mol_type = other DNA
ctagatatgagagtatcagctctcagtctctagccaggaaactttgatttgagtaccaacatttaaaaactgtcacttgagcagaaagttctataaagcaagttctataa

SEQ ID NO: 27860 - DNA, 110 bp, synthetic construct
  source 1..110: mol_type = other DNA
tgatcctccttctcacagtgcattgaggcagcagacttatggttcaagctccatcagacaaactctaccttgagaaatctttagagaatgacataatcttgagagtaaaa

SEQ ID NO: 27861 - DNA, 110 bp, synthetic construct
  source 1..110: mol_type = other DNA
caggatctatttcataccattcagtgaggtactgggtatagagagagagagagggaaagagagcttaaagataaattgttatatatattgatgtcaatttcaagtctgta

SEQ ID NO: 27862 - DNA, 110 bp, synthetic construct
  source 1..110: mol_type = other DNA
tcttcactgggagggagggtggtatagtgaaaaacctgaaaatgacacttctagattttcttgcccaggtccctaattggctctatacatgggaagcaatggtaggaagc

SEQ ID NO: 27863 - DNA, 110 bp, synthetic construct
  source 1..110: mol_type = other DNA
gccaggctatcatctagcagcattttaaaactgtcctctgtcagaaataatgggtagggtgtttgtttcctctgtaatgcacttaagagaacattttctgatcattttcc

SEQ ID NO: 27864 - DNA, 110 bp, synthetic construct
  source 1..110: mol_type = other DNA
taccttttatatccatccttaatatgcttcacctttttgcttttaaacagtgtccttattgttgaacacaggtgttttacatctgtgagtgcttctgcataacataaatt

SEQ ID NO: 27865 - DNA, 110 bp, synthetic construct
  source 1..110: mol_type = other DNA
tgctcttaatcactgagcactactaatgattaattcaataaaaaacacaccaatccagtttctcttggagagttaaaaataatgagctgatgacgacttctcctgttcca

SEQ ID NO: 27866 - DNA, 110 bp, synthetic construct
  source 1..110: mol_type = other DNA
agagaaattttaagcaccctaatatttgagaactactgaaataagctaaaaatgtaaacaaaggaatgcctatgtgaagacatgtcagcatttatttctaagcaccttta

SEQ ID NO: 27867 - DNA, 110 bp, synthetic construct
  source 1..110: mol_type = other DNA
tcaattcagcaataagaaaatttgataccagcagtagcttcacaaaggatttgaacatttatacttattttggatacctgctaaggccataagatgatatctgggttaga

SEQ ID NO: 27868 - DNA, 110 bp, synthetic construct
  source 1..110: mol_type = other DNA
aaatatggaactagaagtgcccagggtgttttctatttgggggctagtttggatcatctgagctctgaacaatatcttggagataacccagtgatataaatgtttttgca

SEQ ID NO: 27869 - DNA, 110 bp, synthetic construct
  source 1..110: mol_type = other DNA
tctccccaccacaaaaccaggaaccttccagatggtggagcctctgtcaggtgaggtcccagaaagcagcaatgtaaagtagaggccttcagttaaaggtagtagcttaa

SEQ ID NO: 27870 - DNA, 110 bp, synthetic construct
  source 1..110: mol_type = other DNA
tcctgggattgttattcccaactataacaactctgaatttataattttatttgtacatgttaaaatacagcaccagatatctcagcatggcctatagaccttatagagat

SEQ ID NO: 27871 - DNA, 110 bp, synthetic construct
  source 1..110: mol_type = other DNA
ggttctgtgtttcttcacagctcagtcatctaacttggtggaagattatgtttaaaaaggggaggggactgtgtaagagagcattccctggagagtgagtaggagttcag

SEQ ID NO: 27872 - DNA, 110 bp, synthetic construct
  source 1..110: mol_type = other DNA
ggtttcaggactgccagtgggaaagagagtacctcatctttacgggcagcctggttacttcctaaatctacctctctgatttgatgaaagaagatgacctacctaaaaat

SEQ ID NO: 27873 - DNA, 110 bp, synthetic construct
  source 1..110: mol_type = other DNA
aggatactatcatgggaggtgagaattttaccacaaattcttaactcgaaagtcctttggaagaaaatatgggtaccagctttatataaacaaacaaatcaataaacaag

SEQ ID NO: 27874 - DNA, 110 bp, synthetic construct
  source 1..110: mol_type = other DNA
cttatcgctttgttacaaatttcttaatctgtaaaacagggataaaagcttttcttcatctgttgggaagactaaatatgtgaaatgtttagaacagtgccatatactta

SEQ ID NO: 27875 - DNA, 110 bp, synthetic construct
  source 1..110: mol_type = other DNA
ttaacacttagcaagaataaagaacatctgcctagacactttgccagtgtcaagcatgtgattttaaaacatatcaaatacattgtagggcatattaaattatgaaaaca

SEQ ID NO: 27876 - DNA, 110 bp, synthetic construct
  source 1..110: mol_type = other DNA
caaggacaagagcagacaggcaaattctaacagagcacatgtccattcccttagcaaaacatggtttctatttcacagaactactgaaggagaagccatattgaaagttg

SEQ ID NO: 27877 - DNA, 110 bp, synthetic construct
  source 1..110: mol_type = other DNA
agttctggcacctaccttggcaaggtctgtgctgtcatctgccttctgtcctcagtccagggctttgattctatgaattgaacagtcttccacaaagaagttaattttgc

SEQ ID NO: 27878 - DNA, 110 bp, synthetic construct
  source 1..110: mol_type = other DNA
ttagtctaaggggcagaatgatcatgagcttgatacaaagtgtacattttaatgaacggatggcattctgatgaaaaggctgaaatagataaataatgggttttagtgtt

SEQ ID NO: 27879 - DNA, 110 bp, synthetic construct
  source 1..110: mol_type = other DNA
taggtctacaatacagtgccaatacacacaggcactagaatggttcaaataaaaaacatgaacacaatttggtgtaggtgagaatgggaggcagctggaactttcggatg

SEQ ID NO: 27880 - DNA, 110 bp, synthetic construct
  source 1..110: mol_type = other DNA
acatgaacacaatttggtgtaggtgagaatgggaggcagctggaactttcggatggatactacccagtagagtataaaagaagagagccccttgggggctgacggttcca

SEQ ID NO: 27881 - DNA, 110 bp, synthetic construct
  source 1..110: mol_type = other DNA
gggccacagaaaagctccagggctcttccttgctctccgagagctcactggccccccactgcaagagggcactaattgaatttaagagagtaataagcgagaagggaaca

SEQ ID NO: 27882 - DNA, 110 bp, synthetic construct
  source 1..110: mol_type = other DNA
aggaactcctcttgtgttctttttctaagacattcataagagtggtactctttatttgagtattagaaagctaagttcttcaaagattacatctcacaaaaaccttttaa

SEQ ID NO: 27883 - DNA, 110 bp, synthetic construct
  source 1..110: mol_type = other DNA
aaaatgtcacacagagaaaaactaatattgtagattcactcatgggtagaaatctaaacaagctaatagaaaccaactcatagaaacagaggctagaattgtagttagca

SEQ ID NO: 27884 - DNA, 110 bp, synthetic construct
  source 1..110: mol_type = other DNA
acatttcccagttccctttaccagtaaaagcagtcatgtgactaagttctagccaacagaatgtgaagagaactaagggccataacttacaaacctgacacctaaggctt

SEQ ID NO: 27885 - DNA, 110 bp, synthetic construct
  source 1..110: mol_type = other DNA
ctctatgcagaaattttactacagacgtaactgtgcagtttcagactgcttccaagggccttttaacaaacaatgatgcagctaaaatagtttctgctctgtccaacatt

SEQ ID NO: 27886 - DNA, 110 bp, synthetic construct
  source 1..110: mol_type = other DNA
agaaactctggcagtgcatccagacctctgagttttaacaagaaccccagggactgattcttagtcagctaagactgctataacatgataccacagactgacaggggcat

SEQ ID NO: 27887 - DNA, 110 bp, synthetic construct
  source 1..110: mol_type = other DNA
tcttgtaagggtttttttagggtagttttaggttcacagcaaaattgaggaaacgatacagagtttccccaaatactccctgctcccatatatgtacagtatcccccatc

SEQ ID NO: 27888 - DNA, 110 bp, synthetic construct
  source 1..110: mol_type = other DNA
aaataaatgactcttattaagctgaacagtgattgacagcttccttctacttctgtgaaaaagcaggatgattggagttcccgtggtggctcagtgggttaagaacccga

SEQ ID NO: 27889 - DNA, 110 bp, synthetic construct
  source 1..110: mol_type = other DNA
gagctttatatcagtgttgcagtaaaattaataaataaagacatgcatttcacgtacccatgtgtagttaaaatatgatagaacaaggcatcaattcgttcaggtcttaa

SEQ ID NO: 27890 - DNA, 110 bp, synthetic construct; identical to SEQ ID NO: 27889
  source 1..110: mol_type = other DNA

SEQ ID NO: 27891 - DNA, 110 bp, synthetic construct; identical to SEQ ID NO: 27889
  source 1..110: mol_type = other DNA

SEQ ID NO: 27892 - DNA, 110 bp, synthetic construct; identical to SEQ ID NO: 27889
  source 1..110: mol_type = other DNA

SEQ ID NO: 27893 - DNA, 110 bp, synthetic construct
  source 1..110: mol_type = other DNA
ctatcctgatgaggatgtctggaggggactgcccagagctcttgcaattcatcatgattcctgaggctgctctagttgggcccccttagaaatctgtcgtgttcactttc

SEQ ID NO: 27894 - DNA, 110 bp, synthetic construct
  source 1..110: mol_type = other DNA
gaacctgcatcctcgtggatctagttgtgttcataagctgctgatccacaaaaggaactccttccagccaatttttaatcaggttatttatctttttattcttaaattgg

SEQ ID NO: 27895 - DNA, 110 bp, synthetic construct; identical to SEQ ID NO: 27894
  source 1..110: mol_type = other DNA

SEQ ID NO: 27896 - DNA, 110 bp, synthetic construct
  source 1..110: mol_type = other DNA
aaggaataagctgcctatgtaaacaaacaaacactaccagaaaattttatctaaaaatccatatttatggctttttgtgagaagtccaaacacatggcagtgttggccaa

SEQ ID NO: 27897 - DNA, 110 bp, synthetic construct; identical to SEQ ID NO: 27896
  source 1..110: mol_type = other DNA

SEQ ID NO: 27898 - DNA, 110 bp, synthetic construct; identical to SEQ ID NO: 27896
  source 1..110: mol_type = other DNA

SEQ ID NO: 27899 - DNA, 110 bp, synthetic construct; identical to SEQ ID NO: 27896
  source 1..110: mol_type = other DNA

SEQ ID NO: 27900 - DNA, 110 bp, synthetic construct
  source 1..110: mol_type = other DNA
gatttgaattccttgcttagtaatctgtatgtccatgttacactgcactaaaattactgatttgcatgtcaatctcactattactccatctctgttcacccagctcttgc

SEQ ID NO: 27901 - DNA, 110 bp, synthetic construct
  source 1..110: mol_type = other DNA
ttccaaactcctaatttacccactcccactacttttcccctttggtaaatacaaatttggttttgaagttcataaatctgtttctctttgtgaataagctaatttgtata

SEQ ID NO: 27902 - DNA, 110 bp, synthetic construct
  source 1..110: mol_type = other DNA
gcctttggatgtagaattaatttttttggtaggttccattgttttgttatcaatagttgttcctcagttagttgtgcttttggtgtttttgtgagaggaggtaagttcaa

SEQ ID NO: 27903 - DNA, 110 bp, synthetic construct
  source 1..110: mol_type = other DNA
attaatttttttggtaggttccattgttttgttatcaatagttgttcctcagttagttgtgcttttggtgtttttgtgagaggaggtaagttcaagtccttctactccac

SEQ ID NO: 27904 - DNA, 110 bp, synthetic construct
  source 1..110: mol_type = other DNA
tgcagggagttttatagtaaaaaggagaacaacaggttttcagatgggaatcaggattgggaaagatgcgcattcctctttctttgggggagtcgtagtcatcaaagctg

SEQ ID NO: 27905 - DNA, 110 bp, synthetic construct; identical to SEQ ID NO: 27904
  source 1..110: mol_type = other DNA

SEQ ID NO: 27906 - DNA, 110 bp, synthetic construct
  source 1..110: mol_type = other DNA
agtactgtgtttaaagttcttagaatttgagtttccacagttaaataaatctatcttcactagcaaactaggtatatcccccgtaatatccaagtcatgttttctttctc

SEQ ID NO: 27907 - DNA, 110 bp, synthetic construct
  source 1..110: mol_type = other DNA
ttcactagcaaactaggtatatcccccgtaatatccaagtcatgttttctttctcttttctgaaaattcacatttacagggaatgcaatgagaagaaaccaaatgaagtt

SEQ ID NO: 27908 - DNA, 110 bp, synthetic construct
  source 1..110: mol_type = other DNA
taactgccttctaaataaatggaaaccagaggttaagtggtttgcccaaagtcgtacagctggtttcatcctgtccaactccaaagtgtgtgttcttagtgaatgtgata

SEQ ID NO: 27909 - DNA, 110 bp, synthetic construct
  source 1..110: mol_type = other DNA
gtaaggatgacattgaataaagaatgcaaacacagaaagacataataaatctttatgatttatgctcccttaatttcagtttttacagccctttagctggccattttgat

SEQ ID NO: 27910 - DNA, 110 bp, synthetic construct
  source 1..110: mol_type = other DNA
tgatttatgctcccttaatttcagtttttacagccctttagctggccattttgattttactgttttagcaaggaaaaagttagcagctgtagcaccagaaaaggtgaata

SEQ ID NO: 27911 - DNA, 110 bp, synthetic construct
  source 1..110: mol_type = other DNA
cttcccagagtgtaggttcctcgcttctttcacagctccctctcaagtgtgctagtcctatcctgattttctttttttctctctctttttttattttgttgtgcccagtt

SEQ ID NO: 27912 - DNA, 110 bp, synthetic construct; identical to SEQ ID NO: 27911
  source 1..110: mol_type = other DNA

SEQ ID NO: 27913 - DNA, 110 bp, synthetic construct
  source 1..110: mol_type = other DNA
tacaattgcttttcctgaatgtctggcactgttataagtagtcaataccaccccttaaatctgatagtatgtcaatcatggctcttgagtttttttttttgttttttttt

SEQ ID NO: 27914 - DNA, 110 bp, synthetic construct
  source 1..110: mol_type = other DNA
tatattctagcggttttatcattgaataagtattgaatttgtacaacaaaaatggaaacacttgctattcagctcttccttatagtttaacaaagctcagattctggcaa

SEQ ID NO: 27915 - DNA, 110 bp, synthetic construct
  source 1..110: mol_type = other DNA
aatccttgctctgtcgcatagaggcagccagaataaccttagaacaatctcatcacttctctgagctaagggttttacatttattttcagtagagttaataacaatattg

SEQ ID NO: 27916 - DNA, 110 bp, synthetic construct
  source 1..110: mol_type = other DNA
atgagacatatgggcttaacccacagtgggaccccctagtcccatggggcccgtagcttgaagctgaaaacacagggaagcccaggctagttcatttgaccactagaaaa

SEQ ID NO: 27917 - DNA, 110 bp, synthetic construct
  source 1..110: mol_type = other DNA
accatgtagtccttccgctcagattttcttttgagaatctaaagtaacatccagtcttccttaatgagttaagtgcaagctttgtcatatgttcactttatatctatatg

SEQ ID NO: 27918 - DNA, 110 bp, synthetic construct
  source 1..110: mol_type = other DNA
tttcttaataaacctttgtagcaaactttgttgtttccacagcttagaattctatccccttcttggaaaacctataatctgattgccagtatggaactgggctcttttcc

SEQ ID NO: 27919 - DNA, 110 bp, synthetic construct
  source 1..110: mol_type = other DNA
atggaaatacttccaagcctcacaactcctaaggatgaatgactgtgttttagtgtccacattttaaagtagcaggacacacacacaaaagccaagaacagaaggtatta

SEQ ID NO: 27920 - DNA, 110 bp, synthetic construct
  source 1..110: mol_type = other DNA
tcattgcaagcttggaatataatctaatcatataggggcataaggccagtcttgtattgcctgaggtgccaagggtgagtcagctaattctggaatggattgacccaatg

SEQ ID NO: 27921 - DNA, 110 bp, synthetic construct
  source 1..110: mol_type = other DNA
agaataacatctatttttggaggtttaacatgtggacctatgtggagagatacaagaacaaggatccagcaccaagaaatgtgcaacaattaacaacacccctccttcat

SEQ ID NO: 27922 - DNA, 110 bp, synthetic construct
  source 1..110: mol_type = other DNA
gaacaaggatccagcaccaagaaatgtgcaacaattaacaacacccctccttcatcctgcctttaaaagggctttgctgaaagtcttcagagaatccggggcttttggtg

SEQ ID NO: 27923 - DNA, 110 bp, synthetic construct
  source 1..110: mol_type = other DNA
tggtccatgccaaatggttttagacaggacccttaggaccaaagtcctttggtatggactgaacgtcatatggatattttagacaggaccaaatatgaccacgtgtcaag

SEQ ID NO: 27924 - DNA, 110 bp, synthetic construct
  source 1..110: mol_type = other DNA
caaacccacaacctcatggttcttagctggattcattaaccaccaagccacaacgggaactcctcattttcccttttgactagtttttagagaatcaacagggtcacaca

SEQ ID NO: 27925 - DNA, 110 bp, synthetic construct
  source 1..110: mol_type = other DNA
ggaactcctcattttcccttttgactagtttttagagaatcaacagggtcacacagcttgtaggtggctaatttttctaagctgctttaaaccatccaatattccctagt

SEQ ID NO: 27926 - DNA, 110 bp, synthetic construct
  source 1..110: mol_type = other DNA
ttatgaggggcatacaaataaaggctcagaatattcactggggaaggaggagtttacgagtcatattcctaattttcattccagttccacctccccaaagggagaaggga

SEQ ID NO: 27927 - DNA, 110 bp, synthetic construct
  source 1..110: mol_type = other DNA
acgagtcatattcctaattttcattccagttccacctccccaaagggagaagggatttctgtccttagttagccttgatgggaagtgtcatggtgtctgtgcctgatggg

SEQ ID NO: 27928 - DNA, 110 bp, synthetic construct; identical to SEQ ID NO: 27926
  source 1..110: mol_type = other DNA

SEQ ID NO: 27929 - DNA, 110 bp, synthetic construct
  source 1..110: mol_type = other DNA
aaataaaggctcagaatattcactggggaaggaggagtttacgagtcatattcctaattttcattccagttccacctccccaaagggagaagggatttctgtccttagtt

SEQ ID NO: 27930 - DNA, 110 bp, synthetic construct
  source 1..110: mol_type = other DNA
aatgactgatgttttcaagcctttagtcaccagtagccatcttgtgctaaaccgtgaattcttcagagtggggataatgtctttgagctcttttcaatcagtccttagca

SEQ ID NO: 27931 - DNA, 110 bp, synthetic construct
  source 1..110: mol_type = other DNA
tataagtctgtggatattaggagttctggaatcgattcctaatttttctaccatctagtgaaaactaccttctctgagattctgttttttatgtcttaggggaggtaatt

SEQ ID NO: 27932 - DNA, 110 bp, synthetic construct
  source 1..110: mol_type = other DNA
tagtgaaaactaccttctctgagattctgttttttatgtcttaggggaggtaattagactggattgctagatggtaaactttgctttcctttttttaaaatgaggcaaac

SEQ ID NO: 27933 - DNA, 110 bp, synthetic construct; identical to SEQ ID NO: 27931
  source 1..110: mol_type = other DNA

SEQ ID NO: 27934 - DNA, 110 bp, synthetic construct; identical to SEQ ID NO: 27932
  source 1..110: mol_type = other DNA

SEQ ID NO: 27935 - DNA, 110 bp, synthetic construct
  source 1..110: mol_type = other DNA
ttcaaacattcttattaagttataggcttgtttagtgcccactgagtatcaacggatagaccagaaatgaaagggaagaaagaaggatgttctaagaatttgcatgagat

SEQ ID NO: 27936 - DNA, 110 bp, synthetic construct
  source 1..110: mol_type = other DNA
tgttcacagccaattagaaatgaacaccaaacagaaaatatagggcaaacagggccttgggaacacaatagatgagtctttcaggtttcttaatgctgcagtgagtacct

SEQ ID NO: 27937 - DNA, 110 bp, synthetic construct
  source 1..110: mol_type = other DNA
gctgttgtttggaaggatatgaaatgattcttccactggacccaaggttccatacattgttgagaaagattaatattaactgcctgaaggagggaggtggggttaataga

SEQ ID NO: 27938 - DNA, 110 bp, synthetic construct
  source 1..110: mol_type = other DNA
gttcaaggctcctgagaggcatgcctgtacattgtgccaggccagggctgcagtcacaaaggagggggtgccacttcagctccagaaatgctggactgttggggcacttc

SEQ ID NO: 27939 - DNA, 110 bp, synthetic construct
  source 1..110: mol_type = other DNA
acctcagaacatgtttcccactgaccttataattgagtgcatcttttcctcagacatcggatgccagctactcaaggaaagtgtgtgtgcatggtgatggtggaggagag

SEQ ID NO: 27940 - DNA, 110 bp, synthetic construct
  source 1..110: mol_type = other DNA
ggatgtgggttcaatccgtggcctcgctcatgggtaaagtaatcagcgttgccatcagctatgctgtagtttacagctgcggcttggatcccatattgctctggctgtgg

SEQ ID NO: 27941 - DNA, 110 bp, synthetic construct
  source 1..110: mol_type = other DNA
tagataaagctttctaaaaccctactttacgctttaccttgttgcttgaaaactttagacaattttcatatcttacaatatcaaatcagaattgcagttccagagctgag

SEQ ID NO: 27942 - DNA, 110 bp, synthetic construct
  source 1..110: mol_type = other DNA
aaaaccctactttacgctttaccttgttgcttgaaaactttagacaattttcatatcttacaatatcaaatcagaattgcagttccagagctgaggaatctaaatgtaca

SEQ ID NO: 27943 - DNA, 110 bp, synthetic construct; identical to SEQ ID NO: 27941
  source 1..110: mol_type = other DNA

SEQ ID NO: 27944 - DNA, 110 bp, synthetic construct; identical to SEQ ID NO: 27942
  source 1..110: mol_type = other DNA

SEQ ID NO: 27945 - DNA, 110 bp, synthetic construct
  source 1..110: mol_type = other DNA
tttttcctccaaccccacaagcttttgacagcatacctaaagaagattttatgatttatataatcaaaagacaatcccaaatagaaaagttagtggaattagaagtatct

SEQ ID NO: 27946 - DNA, 110 bp, synthetic construct
  source 1..110: mol_type = other DNA
tggcacgatcatgggcctggggtccagcctcatggtcatccaggactaatgactttcagtgctgggccagagctgctctccacgaaggctttctctaaagctttctaggt

SEQ ID NO: 27947 - DNA, 110 bp, synthetic construct
  source 1..110: mol_type = other DNA
tcagtgctgggccagagctgctctccacgaaggctttctctaaagctttctaggtgacacatacttaatgagtgacactttagcctttggaagatcttgggcaagtattg

SEQ ID NO: 27948 - DNA, 110 bp, synthetic construct
  source 1..110: mol_type = other DNA
agatgtgcaggggttttctgatcccaccagttcccattgtagagatggaagaactgagactcagaagcaccataggatcttataagtgagctagtgcttaaccaaggtgt

SEQ ID NO: 27949 - DNA, 110 bp, synthetic construct
  source 1..110: mol_type = other DNA
gagactcagaagcaccataggatcttataagtgagctagtgcttaaccaaggtgttttaacctccatcacaagaggtcacataaaccacatcacagaagtacatgcagtg

SEQ ID NO: 27950 - DNA, 110 bp, synthetic construct; identical to SEQ ID NO: 27948
  source 1..110: mol_type = other DNA

SEQ ID NO: 27951 - DNA, 110 bp, synthetic construct; identical to SEQ ID NO: 27949
  source 1..110: mol_type = other DNA

SEQ ID NO: 27952 - DNA, 110 bp, synthetic construct
  source 1..110: mol_type = other DNA
tctgcaggctgtggggttttggttttcttgcatctagggtggttaaagctgatccagaagctagaacaggcttcctggaggtgagggctagtgcctgcccacttgtgggt

SEQ ID NO: 27953 - DNA, 110 bp, synthetic construct
  source 1..110: mol_type = other DNA
gaggcatcttttcaataacctaaaaatattacagctgcatatctgtgacttccttatgatgacaagataacaaccattgctctagggatcatgtctacattcaaaataga

SEQ ID NO: 27954 - DNA, 110 bp, synthetic construct
  source 1..110: mol_type = other DNA
atgatgacaagataacaaccattgctctagggatcatgtctacattcaaaatagaatgaagctcagacagcagataccttccacaactctactttcctgttaacaaatac

SEQ ID NO: 27955 - DNA, 110 bp, synthetic construct
  source 1..110: mol_type = other DNA
gtcattctctttctgatttatttcactcatcatgagagtctctagttttgtacagtaattttgtatccaacaacattgctatcattgcttattagtttaaaagggtcttt

SEQ ID NO: 27956 - DNA, 110 bp, synthetic construct; identical to SEQ ID NO: 27955
  source 1..110: mol_type = other DNA

SEQ ID NO: 27957 - DNA, 110 bp, synthetic construct
  source 1..110: mol_type = other DNA
gataagaaggtttggcaaagacaaagtctgcgctcagttctggtgctccaaacatgcctcccagacagcttcccactcaattttaagtgtcagatgtcagggcctatgac

SEQ ID NO: 27958 - DNA, 110 bp, synthetic construct
  source 1..110: mol_type = other DNA
caagatgagtgttgtattttatgtttttatatgcattaatcttacttagaaaactgaataagtcagggggagctgagtgtttgcttagtctttgcaagtccaggtcttca

SEQ ID NO: 27959 - DNA, 110 bp, synthetic construct
  source 1..110: mol_type = other DNA
gaataagtcagggggagctgagtgtttgcttagtctttgcaagtccaggtcttcaaactgccctcctctgtttggttttcctgaatctgatattttgccctaggccccga

SEQ ID NO: 27960 - DNA, 110 bp, synthetic construct
  source 1..110: mol_type = other DNA
caccttgctattcagaaaaggcatcatgggaacagcttactggatgaattcaatcctctaatttacacaacatatcacactgtagcagccagagccttctgctcttggac

SEQ ID NO: 27961 - DNA, 110 bp, synthetic construct
  source 1..110: mol_type = other DNA
ctctaatttacacaacatatcacactgtagcagccagagccttctgctcttggaccaaagtcccaggagacactttatataccactatttataatcatgggttggatatt

SEQ ID NO: 27962 - DNA, 110 bp, synthetic construct
  source 1..110: mol_type = other DNA
ctctgcccctgcgactgctcagcaagctcaaccagcgtagctcccgctagcatatagatgtcatacctgcatctctgagccacctctgcaggagccaggtctggtggggt

SEQ ID NO: 27963 - DNA, 110 bp, synthetic construct
  source 1..110: mol_type = other DNA
tgagtgcaggaaaaatatgtctgaacaacactcccttaaggccccttgcccatctggtgacagctgcccgtatttccagaatccttcattcacgcactcattccccaaat

SEQ ID NO: 27964 - DNA, 110 bp, synthetic construct
  source 1..110: mol_type = other DNA
ttggcccactccacccttagcccatgcaagaggtgcccagctgcctatagcctgcacaagaggttccctgctgcccgagagcccacacatgtgcagagaaagatagtcct

SEQ ID NO: 27965 - DNA, 110 bp, synthetic construct
  source 1..110: mol_type = other DNA
acagtcttgtgacttatgcctgttttctcaaactgcaagacactgcctgcctcagctaggaaaccacttggctatagtggctgcctagcaatggttaggaagcagccatg

SEQ ID NO: 27966 - DNA, 110 bp, synthetic construct
  source 1..110: mol_type = other DNA
ctaggaaaccacttggctatagtggctgcctagcaatggttaggaagcagccatgcccttagggtacagatttcctggagcaggtgcagtaactgcctgagggaataaaa

SEQ ID NO: 27967 - DNA, 110 bp, synthetic construct
  source 1..110: mol_type = other DNA
gactaaactttgagggaaagtggtttttgttcagtgtcacaagccctgccttccccagctcacctacattcccacaaaatacagtgaaagatattcctccagatgcagat

SEQ ID NO: 27968 - DNA, 110 bp, synthetic construct
  source 1..110: mol_type = other DNA
cagctcacctacattcccacaaaatacagtgaaagatattcctccagatgcagatgataaactcagagataagtggctgtgcccagggacacccagtagtttagagttag

SEQ ID NO: 27969 - DNA, 110 bp, synthetic construct; identical to SEQ ID NO: 27967
  source 1..110: mol_type = other DNA

SEQ ID NO: 27970 - DNA, 110 bp, synthetic construct; identical to SEQ ID NO: 27968
  source 1..110: mol_type = other DNA

SEQ ID NO: 27971 - DNA, 110 bp, synthetic construct
  source 1..110: mol_type = other DNA
acttcgagcctaggccagagatgtgagaaacagcaattcccaactgacagatgatagcacccatatgaaagtggctgcttgggtcagataaaaccaacactttacctcgg

SEQ ID NO: 27972 - DNA, 110 bp, synthetic construct
  source 1..110: mol_type = other DNA
agcacccatatgaaagtggctgcttgggtcagataaaaccaacactttacctcggtaaataccttgtgtttgccactgatccaacagtccttaccaaatccctctcatct

SEQ ID NO: 27973 - DNA, 110 bp, synthetic construct
  source 1..110: mol_type = other DNA
gctcttcccctgaacccaccctccctattcctgcagagcctgagacttggcccttctgtctccggtcttccaaattctccagccgaccttggatctgctctctccgatgt

SEQ ID NO: 27974 - DNA, 110 bp, synthetic construct
  source 1..110: mol_type = other DNA
ctgtctccggtcttccaaattctccagccgaccttggatctgctctctccgatgtccctcgagtccatgatgatagagatatcccagctgaagaactaaacttcacaggt

SEQ ID NO: 27975 - DNA, 110 bp, synthetic construct
  source 1..110: mol_type = other DNA
atttatagacatttttataccccaaaataaaccaaaccataatagtaactaaaactcacaaaggctttctccacaaagaaccccttttgggtgttcaggcatcagctcgt

SEQ ID NO: 27976 - DNA, 110 bp, synthetic construct
  source 1..110: mol_type = other DNA
tcacaaaggctttctccacaaagaaccccttttgggtgttcaggcatcagctcgtataatcctctggacaacttcccaaggtcacagattacgatgctgagccaggatct

SEQ ID NO: 27977 - DNA, 110 bp, synthetic construct; identical to SEQ ID NO: 27975
  source 1..110: mol_type = other DNA

SEQ ID NO: 27978 - DNA, 110 bp, synthetic construct; identical to SEQ ID NO: 27976
  source 1..110: mol_type = other DNA

SEQ ID NO: 27979 - DNA, 110 bp, synthetic construct
  source 1..110: mol_type = other DNA
tctttctcactctgtatgatgtaaattcgaagagggaaagactgtgtttaccacgtccccagcgtgttacactagctactaattaatactaattttaactctttctttct

SEQ ID NO: 27980 - DNA, 110 bp, synthetic construct
  source 1..110: mol_type = other DNA
ccacagcagggattactccctttgagcttttttaagagtgtgttttatttttaacatgtaatacaggcatctgttcaattgagacagtacagtcaaagctgtacctccca

SEQ ID NO: 27981 - DNA, 110 bp, synthetic construct
  source 1..110: mol_type = other DNA
atgtaatacaggcatctgttcaattgagacagtacagtcaaagctgtacctcccaccccttctcaactccatagttctcctctcaagagggagccaccactaccaggttg

SEQ ID NO: 27982 - DNA, 110 bp, synthetic construct
  source 1..110: mol_type = other DNA
tttgtgagagcagtataaactccatcagctcagttatctgagaatcctcaactatttgtgtccaagcaagaatgttctcatctcccctcccagccactcacaggagcagg

SEQ ID NO: 27983 - DNA, 110 bp, synthetic construct
  source 1..110: mol_type = other DNA
aaaaaaaaaaaaatccaaaatatatggaagcacctaatgttaaaaattagttctctgccagctctgtagccccagtcccacagtttggtgtgtaaccttccaaatccagg

SEQ ID NO: 27984 - DNA, 110 bp, synthetic construct
  source 1..110: mol_type = other DNA
agcacttttttcagagcctggcagaaagtatatgagtgtgttaagtaaaagttactagggctagctaggtttgcagctttaccaccaccgattcgtagtctacccccagc

SEQ ID NO: 27985 - DNA, 110 bp, synthetic construct
  source 1..110: mol_type = other DNA
tccaatttgactcctagcctgcgaacatccataagccatgggtgcaaccctagaaagacaaaaaaaaaaaaaaaaattaggtcatttttgtattttgcatatgtggcaac

SEQ ID NO: 27986 - DNA, 110 bp, synthetic construct; identical to SEQ ID NO: 27985
  source 1..110: mol_type = other DNA

SEQ ID NO: 27987 - DNA, 110 bp, synthetic construct; identical to SEQ ID NO: 27985
  source 1..110: mol_type = other DNA

SEQ ID NO: 27988 - DNA, 110 bp, synthetic construct; identical to SEQ ID NO: 27985
  source 1..110: mol_type = other DNA

SEQ ID NO: 27989 - DNA, 110 bp, synthetic construct
  source 1..110: mol_type = other DNA
agtttaaatggttgagttcacccacaacgtttgggtgtgaactcaatagccagcctcttgtaccacattttccttttttaattgtttgggcattactttaaacaggtgaa

SEQ ID NO: 27990 - DNA, 110 bp, synthetic construct
  source 1..110: mol_type = other DNA
tgtgggatgagaaatgagtggtgaggttgtgggggctgtcaaaaaccttcagattccaaatgccccttccactcctcctgtggtcactccgctggacctttgccatcaga

SEQ ID NO: 27991 - DNA, 110 bp, synthetic construct
  source 1..110: mol_type = other DNA
acctgctggcctgatttgtgacaagggctgcctcattaggtttttgttccactaccccggattgttgtaagaaataagacgctggacagaagggcccagtgcaaaggcaa

SEQ ID NO: 27992 - DNA, 110 bp, synthetic construct
  source 1..110: mol_type = other DNA
tcttggcaggggccacctttgccctccacaggggacaggacactgtttccaaactagaagagtgggaagtgcttactgggctgttgccaagaggctgggacactggccag

SEQ ID NO: 27993 - DNA, 110 bp, synthetic construct
  source 1..110: mol_type = other DNA
agaagagtgggaagtgcttactgggctgttgccaagaggctgggacactggccagagccctctctgtctacagtccccccttcttggctgtgccccagtgttccctaggt

SEQ ID NO: 27994 - DNA, 110 bp, synthetic construct
  source 1..110: mol_type = other DNA
tttaaaaaaaagtagatttcattttggtttcagtcagacaacagtcttctactcactgaaagtgctcgctcattccaaagtgcaccccatttattcgaggatcccctgat

SEQ ID NO: 27995 - DNA, 110 bp, synthetic construct; identical to SEQ ID NO: 27994
  source 1..110: mol_type = other DNA

SEQ ID NO: 27996 - DNA, 110 bp, synthetic construct; identical to SEQ ID NO: 27994
  source 1..110: mol_type = other DNA

SEQ ID NO: 27997 - DNA, 110 bp, synthetic construct; identical to SEQ ID NO: 27994
  source 1..110: mol_type = other DNA

SEQ ID NO: 27998 - DNA, 110 bp, synthetic construct
  source 1..110: mol_type = other DNA
aagaagcaggtttagaaacaagaagtgacatccttgtgccatccctttagtaaatggtacagctgtgttttattttattttcactattctactttcaaaatcaatgactt

SEQ ID NO: 27999 - DNA, 110 bp, synthetic construct
  source 1..110: mol_type = other DNA
gttcccaggcaatatgagcttgattttggtaaggtgatttacaaataatgaggttgcatttatatataggatatcagtatttttagaagagtaaatactactccaggaag

SEQ ID NO: 28000 - DNA, 110 bp, synthetic construct; identical to SEQ ID NO: 27999
  source 1..110: mol_type = other DNA

SEQ ID NO: 28001 - DNA, 110 bp, synthetic construct
  source 1..110: mol_type = other DNA
ctgcaacctatgctacagcttgcaggaaggctggatccttaatccattgagtgaggccagggattgaccctacattctcagggacactatgttaggttcttaatctgctg

SEQ ID NO: 28002 - DNA, 110 bp, synthetic construct; identical to SEQ ID NO: 28001
  source 1..110: mol_type = other DNA

SEQ ID NO: 28003 - DNA, 110 bp, synthetic construct
  source 1..110: mol_type = other DNA
cccaccccccaccaaggccctgtacccagtgctatcgcaggcatctttggccaattacatctttaaaagaggcacattgggcctttggaaaggattctggatgcatgtga

SEQ ID NO: 28004 - DNA, 110 bp, synthetic construct
  source 1..110: mol_type = other DNA
ctaccttagtggctaaaacttttatggagagcttgctctgggctgagcagcatgccaaatgctgcatagacattacctatttaatccctgatgcatcctgaaagggacct

SEQ ID NO: 28005 - DNA, 110 bp, synthetic construct
  source 1..110: mol_type = other DNA
gagaaagagagaaaaaaaaaggtcctattatcttccaacaatgaaaaaaaaaatgatccaacttctatttccccaggagccatggtccccgctggaataatccctgccag

SEQ ID NO: 28006 - DNA, 110 bp, synthetic construct
  source 1..110: mol_type = other DNA
atccaacttctatttccccaggagccatggtccccgctggaataatccctgccagtgggccctgacacttgccctcaaaggcaggtccttggagcatccaggggaggagg

SEQ ID NO: 28007 - DNA, 110 bp, synthetic construct
  source 1..110: mol_type = other DNA
agagcgtggacttgggagtcagattggctccaccctctaatcagtcatgtgatttagcttctttgagactcagtttcctcacttctaaaatggggatgataacaggacct

SEQ ID NO: 28008 - DNA, 110 bp, synthetic construct
  source 1..110: mol_type = other DNA
agcttctttgagactcagtttcctcacttctaaaatggggatgataacaggacctacctgagaggctggttttggagactaaataaaatacacctaatgccttagaatag

SEQ ID NO: 28009 - DNA, 110 bp, synthetic construct
  source 1..110: mol_type = other DNA
gccccagagaggctcctgagcttgagagtaagggggaaagatatacgtttattcaatcagttccttcctacctgacagcaaagtgaaagatacgccatttgaagtcgaga

SEQ ID NO: 28010 - DNA, 110 bp, synthetic construct
  source 1..110: mol_type = other DNA
atcagttccttcctacctgacagcaaagtgaaagatacgccatttgaagtcgagacaatatcaaaaaaatctgaagtaagttaccttagaatctttggctatcagaaggg

SEQ ID NO: 28011 - DNA, 110 bp, synthetic construct
  source 1..110: mol_type = other DNA
agccatggattcctatacctggaatgagaccagcttcaagctaaacactttgatactaataggtaggactgccacaaagggccatccaggttgtatactatgcaactcca

SEQ ID NO: 28012 - DNA, 110 bp, synthetic construct
  source 1..110: mol_type = other DNA
agccgagatccatcatgatctccaccttaaagagattctggagtcagacaaacggcagttcaaatcccagctctaccacttgactgtgtgactttagccaagttaactgc

SEQ ID NO: 28013 - DNA, 110 bp, synthetic construct
  source 1..110: mol_type = other DNA
cagttcaaatcccagctctaccacttgactgtgtgactttagccaagttaactgccctctctgtgcctcatattccttctccaaacaagggaaaatactaataagtagca

SEQ ID NO: 28014 - DNA, 110 bp, synthetic construct
  source 1..110: mol_type = other DNA
aggaatttgggcagcctcttaagagttcattttactgaaattttatgatttctgtctattcacacaggctttaataattaattaaacccctctaggctggaccctctctg

SEQ ID NO: 28015 - DNA, 110 bp, synthetic construct
  source 1..110: mol_type = other DNA
ctattcacacaggctttaataattaattaaacccctctaggctggaccctctctgctagactctggaataagacagacataatttctgccatcagagagctcagtatggt

SEQ ID NO: 28016 - DNA, 110 bp, synthetic construct
  source 1..110: mol_type = other DNA
agggttctagggattgggagttgaggaaatacctggcagagttcagacacagacttagggcctatactgtaaccccactacatactggggaagaagtggcagtatacaga

SEQ ID NO: 28017 - DNA, 110 bp, synthetic construct
  source 1..110: mol_type = other DNA
tagggcctatactgtaaccccactacatactggggaagaagtggcagtatacagagcagggaggcaaaacacactgtaaaggatgttctcaggtgcccacgtatgaaacg

SEQ ID NO: 28018 - DNA, 110 bp, synthetic construct
  source 1..110: mol_type = other DNA
ttactgtcgcagaagggcgtcatttctttaagaatcacacaccagagagaaaaagagaaagaaagtactatcgtaagatggtggaaagagaagcaaggtttgctgtacct

SEQ ID NO: 28019 - DNA, 110 bp, synthetic construct
  source 1..110: mol_type = other DNA
aaagatatgtctcagctttttcactccataaaatgctgatagtttcttcaaggactgttgtaaagattcagttaagattaagcatgtaaaaaactaagcacagtgtctga

SEQ ID NO: 28020 - DNA, 110 bp, synthetic construct
  source 1..110: mol_type = other DNA
aacgaacaaacaaacaaaaaaaccactgatgggttgaatcatggcctgtggcatgccctccatccacttgattaatgaaaagccaagggcaaagagaaaaatactttgta

SEQ ID NO: 28021 - DNA, 110 bp, synthetic construct
  source 1..110: mol_type = other DNA
ggtggtttgggactccaaattttgagagtcagacgtaatttttcttacttgagggagatagctatggcttaagacccaccccagcatatgtgggtgagtattactgtttg

SEQ ID NO: 28022 - DNA, 110 bp, synthetic construct
  source 1..110: mol_type = other DNA
agtgagcaaagggtcagactggcggtggggggctcatggagaaaagaacccaggccacctgcctggatcattttctcatccacccatttttgtcttgcgagatgggagaa

SEQ ID NO: 28023 - DNA, 110 bp, synthetic construct
  source 1..110: mol_type = other DNA
cacctgcctggatcattttctcatccacccatttttgtcttgcgagatgggagaagtgaaatgatctaaatatgattcttaatgttcatgttatcttgactaatcttgat

SEQ ID NO: 28024 - DNA, 110 bp, synthetic construct
  source 1..110: mol_type = other DNA
tttaattggcaggggattacagttgatcaccgtgactaagccctctgtgtgagggtttccaagagcctcacggccatttgtatacatcatttgacatgaagacattgtgt

SEQ ID NO: 28025 - DNA, 110 bp, synthetic construct
  source 1..110: mol_type = other DNA
ctctcatctgattggaagcttgttctagggaataccaggcctttaccccccagtgttataaaaatgattgggtgactgttagcgaagcaataataccagtgggatgtgga

SEQ ID NO: 28026 - DNA, 110 bp, synthetic construct
  source 1..110: mol_type = other DNA
ttataaaaatgattgggtgactgttagcgaagcaataataccagtgggatgtggatattaacctgtctgtggggggaaaatgctgagagcaacaggcctataatttaggt

SEQ ID NO: 28027 - DNA, 110 bp, synthetic construct
  source 1..110: mol_type = other DNA
tcctggcataatctgtcttctctgccaattgtttattcactcatcatggggcagagcagatgttaatgggctaccgggcaccggagtgaactcagtgggggaacgttgga

SEQ ID NO: 28028 - DNA, 110 bp, synthetic construct
  source 1..110: mol_type = other DNA
gcagatgttaatgggctaccgggcaccggagtgaactcagtgggggaacgttggagggtaaaaagttaggtaactaagaacatatgattttatcttgtaattctcccaag

SEQ ID NO: 28029 - DNA, 110 bp, synthetic construct
  source 1..110: mol_type = other DNA
tatgcattaaaaaaatcccgtaactctacttttgttacgggaaatattaagttgcataatgtgacccagtggtgtatgataattgcttaagaatctgtattatacagata

SEQ ID NO: 28030 - DNA, 110 bp, synthetic construct; identical to SEQ ID NO: 28029
  source 1..110: mol_type = other DNA

SEQ ID NO: 28031 - DNA, 110 bp, synthetic construct
  source 1..110: mol_type = other DNA
gaagagtctgttcttgattgctgatgaggggtatttttgctgtgtgccttaaagggcgaatgtaattcagccacttgccaccttactcttgcagttccactcagttacat

SEQ ID NO: 28032 - DNA, 110 bp, synthetic construct
  source 1..110: mol_type = other DNA
aagggggagactgggactattttatttatttgcaaggatgttctaactcatctctgtagaaatcatttgttgaccatatggataccctggcacatacgcaaggtagagaa

SEQ ID NO: 28033 - DNA, 110 bp, synthetic construct
  source 1..110: mol_type = other DNA
gtagaaatcatttgttgaccatatggataccctggcacatacgcaaggtagagaaaaaggagaccatgagaaaagtgtgggattgggagtgagatgcctgttaggacact

SEQ ID NO: 28034 - DNA, 110 bp, synthetic construct
  source 1..110: mol_type = other DNA
ctgtgtctgcttcccatctctcatggtcagtcagcagcctcactttgcacccggaggccatagcaggggtgcctcgcctggttggccactggggactcttccactcttgt

SEQ ID NO: 28035 - DNA, 110 bp, synthetic construct
  source 1..110: mol_type = other DNA
ggccatagcaggggtgcctcgcctggttggccactggggactcttccactcttgtgatctgagtctggagaagagaaactgctcgtccaggcagctgggagggagcatca

SEQ ID NO: 28036 - DNA, 110 bp, synthetic construct
  source 1..110: mol_type = other DNA
caaccagagtccacttggaatcgagttgaatttaaggatgctttgaagaaggtatagtcagtatgaggacaagaaggcccactctctccaaatattatgacaggtttgct

SEQ ID NO: 28037 - DNA, 110 bp, synthetic construct
  source 1..110: mol_type = other DNA
accagagaggaccagctgacacagaacagagagcagttcttcagatgtataaggagagaagattggataaagaaggtaggaccggctggtggtggaaatcttttgcagcc

SEQ ID NO: 28038 - DNA, 110 bp, synthetic construct
  source 1..110: mol_type = other DNA
gagaagattggataaagaaggtaggaccggctggtggtggaaatcttttgcagcccctgtagaaccccatgcctgaattccaggaagacagagtgtcttgaaagttgacc

SEQ ID NO: 28039 - DNA, 110 bp, synthetic construct
  source 1..110: mol_type = other DNA
gacaaccacattccaccctctcgcgccaaactctcccaagctctgccagacttcccatcttgtctttgttcttatcaaatcaaaaactgtgttgcctctcaagccagtag

SEQ ID NO: 28040 - DNA, 110 bp, synthetic construct
  source 1..110: mol_type = other DNA
aaaaaaacatacattagcctgggtcagattattcaacagagcaaggcattttagacaagcatagcagttaaggacagggactatggaaacagagatttgggtttgaatct

SEQ ID NO: 28041 - DNA, 110 bp, synthetic construct
  source 1..110: mol_type = other DNA
caagcatagcagttaaggacagggactatggaaacagagatttgggtttgaatctctgtttttcttttttcttttttttccagatggtagttctatttttaattttttaa

SEQ ID NO: 28042 - DNA, 110 bp, synthetic construct
  source 1..110: mol_type = other DNA
ttagtcctctggtctgaagctccaagttaaaagaggaactagattaaaataatgacctcacagtacatgtgaagattagcctcacaggcaagttactacaatcagccact

SEQ ID NO: 28043 - DNA, 110 bp, synthetic construct
  source 1..110: mol_type = other DNA
cctcacagtacatgtgaagattagcctcacaggcaagttactacaatcagccacttccaagtgtatctcatgaattagccctgaggccacacgcctcagtccctgttgac

SEQ ID NO: 28044 - DNA, 110 bp, synthetic construct
  source 1..110: mol_type = other DNA
ctcttctccttaaaatctcactttagaaaggccaaaggagcccaatttggacactgtgttgttgaaactggtggagatgtttgtctttccctctctaagtagtgacactg

SEQ ID NO: 28045 - DNA, 110 bp, synthetic construct
  source 1..110: mol_type = other DNA
cccagggcttcctgttcttattaagactttagaggctcagctcaagcgccacctgcttcacaaagcctgttgtgaagtcagttcactcttcttagactcctccaatagcc

SEQ ID NO: 28046 - DNA, 110 bp, synthetic construct
  source 1..110: mol_type = other DNA
tgggcgcttaacccattaagattactgaagatgccaagaggaaatgtttatagatactttttaacatagtctataaaataggaggttgattcaaacataaattacctacc

SEQ ID NO: 28047 - DNA, 110 bp, synthetic construct
  source 1..110: mol_type = other DNA
gcaaatgggcaagtgttagcttctcagcagagcttcctactcccattcctgactccaacttccttaaggatacttaatgacaatgcacaggcttctaaaatccccccagc

SEQ ID NO: 28048 - DNA, 110 bp, synthetic construct
  source 1..110: mol_type = other DNA
aaacctccactgtgatgcctgtcttgcaataaacatttgattcattcagtaaatacatactgagcacaagatgctgtgggacgtacagctgtgtgaaaacacttcttgtt

SEQ ID NO: 28049 - DNA, 110 bp, synthetic construct
  source 1..110: mol_type = other DNA
catactgagcacaagatgctgtgggacgtacagctgtgtgaaaacacttcttgttactatgcccttgaagcaaacagtctagaggagagacattaatcaaagagccacaa

SEQ ID NO: 28050 - DNA, 110 bp, synthetic construct
  source 1..110: mol_type = other DNA
tcccttgggattaggaactgtaaggtgagtgcaaaatcttgctccattccccccacactcaatggaagaaatacttgaaataccagtgtctgaaaaatcacatcatatgc

SEQ ID NO: 28051 - DNA, 110 bp, synthetic construct
  source 1..110: mol_type = other DNA
aaaatggtcttagatttctattatgtgtcctggctggtagaacataagctaagaacagtcaaggaccaccctgtggagagggcgtgcgtacaagtaaagtcaacagaaag

SEQ ID NO: 28052 - DNA, 110 bp, synthetic construct
  source 1..110: mol_type = other DNA
cagtcaaggaccaccctgtggagagggcgtgcgtacaagtaaagtcaacagaaaggaaggaaatgctaagagatggagagagagaacaagaccccaggatgatatttaga

SEQ ID NO: 28053 - DNA, 110 bp, synthetic construct
  source 1..110: mol_type = other DNA
ctctcatcgccatgtgacctctcctctttaagatggaccatggacagcagtactacgccagtgtattcaggagaagactgacggagacatgcctgtaatgaaggcacaca

SEQ ID NO: 28054 - DNA, 110 bp, synthetic construct
  source 1..110: mol_type = other DNA
cgccagtgtattcaggagaagactgacggagacatgcctgtaatgaaggcacacagagcttggtattcaacagtttctcaacctcagttcaactgacatttggggactga

SEQ ID NO: 28055 - DNA, 110 bp, synthetic construct
  source 1..110: mol_type = other DNA
aagagagttggatgtgtgactgagtggcttcagcgggtccctgacgagactgagagctgctaattacatcataaagtcctggaggacaggacatcacctgttcttttccc

SEQ ID NO: 28056 - DNA, 110 bp, synthetic construct
  source 1..110: mol_type = other DNA
tctctagaaggacctcatttctataagactctaaatgccttcatgaatgtctttttcgccttgtaaaaacacaacgccacacggtttaaaaacaaatcaacaaggaaaga

SEQ ID NO: 28057 - DNA, 110 bp, synthetic construct
  source 1..110: mol_type = other DNA
tcgccttgtaaaaacacaacgccacacggtttaaaaacaaatcaacaaggaaagagaagacctgaacccaggtcaagagaacttgactccaggctggcccatgtcacact

SEQ ID NO: 28058 - DNA, 110 bp, synthetic construct
  source 1..110: mol_type = other DNA
gtgagctgccccagggataagcctacatagcaaggagctgaggtcgatagccagtgaggaaatgacaacaccggctgaaagacctgtgtggacctgaatcctgccaacac

SEQ ID NO: 28059 - DNA, 110 bp, synthetic construct
  source 1..110: mol_type = other DNA
cctatttcagtggtccctatactgtcacaatggttctgaataaagcctgcctttcacaagtatcattgactatttggggggaagataaagttgggtactttcagttatga

SEQ ID NO: 28060 - DNA, 110 bp, synthetic construct
  source 1..110: mol_type = other DNA
ctactgctcccagtggacccctagcctaggaacatccatacactgcaggtatagccctgaaaaaaaaaaaaaagaagaagaagacgttgctggagagacacttctcttga

SEQ ID NO: 28061 - DNA, 110 bp, synthetic construct; identical to SEQ ID NO: 28060
  source 1..110: mol_type = other DNA

SEQ ID NO: 28062 - DNA, 110 bp, synthetic construct
  source 1..110: mol_type = other DNA
aaatagtaggcagatatattagggtaacaactctccccctcatcccaaatctcagtgatttgagagattaaggtttatgttgcggtctctacataggggaggtaaaagaa

SEQ ID NO: 28063 - DNA, 110 bp, synthetic construct
  source 1..110: mol_type = other DNA
caaatctcagtgatttgagagattaaggtttatgttgcggtctctacataggggaggtaaaagaattttccagatttaaaacaaggtgtagaaaagacaggtttattgag

SEQ ID NO: 28064 - DNA, 110 bp, synthetic construct
  source 1..110: mol_type = other DNA
gtgtgggaaatatgtgtgcattcttcattgtcagctgtgagtttctaggtattcctctctgccaaaatgaaacccttcagacatgattcacaggcacacggcatctcaaa

SEQ ID NO: 28065 - DNA, 110 bp, synthetic construct
  source 1..110: mol_type = other DNA
aaccaacctgctgaatgtgtagagtgtggcccttttgatctgcgcttgaatgtactcaccccatgctgctctgaattgtgactgatccactgtctttcttccaatggtga

SEQ ID NO: 28066 - DNA, 110 bp, synthetic construct
  source 1..110: mol_type = other DNA
gagagctttcatttttattagaggagtaaaagagaacttacaaacattagaaaaatactcaaaaccctgagagtaaaggaggcccaaccctttctcagagcccaggaaac

SEQ ID NO: 28067 - DNA, 110 bp, synthetic construct; identical to SEQ ID NO: 28066
  source 1..110: mol_type = other DNA

SEQ ID NO: 28068 - DNA, 110 bp, synthetic construct
  source 1..110: mol_type = other DNA
ccgctgaagagtcaggccgcagatacctagccaacaagatagctcggcaaaggctgaagagctgaaataatgcacccgagggtgcctcttcccactagggccgtgctaac

SEQ ID NO: 28069 - DNA, 110 bp, synthetic construct
  source 1..110: mol_type = other DNA
gagcacacagtgaagattctcggagttgtgagagcatggatgggacctcctactacaacagtcatagccacagtggggaggaatacttaaatcccatgcctcagctggac

SEQ ID NO: 28070 - DNA, 110 bp, synthetic construct
  source 1..110: mol_type = other DNA
caacagtcatagccacagtggggaggaatacttaaatcccatgcctcagctggacattggagccttggagaacgtcttcacagccccgacatcaactccttctagcatcc

SEQ ID NO: 28071 - DNA, 110 bp, synthetic construct
  source 1..110: mol_type = other DNA
tttcaagaagaggaaggcagcagagcttccattctgcacacaagcagagaagataccacttgaggcagccatctacaagcgaggaagaaaggccttatcagaaaccagcc

SEQ ID NO: 28072 - DNA, 110 bp, synthetic construct
  source 1..110: mol_type = other DNA
gatgcacacggcccatggttacccctgcactgaggctctgttctttctgcaagctgttcagctggcccattctcaccttccctcttgggagggtcttgtgggtgctgtgg

SEQ ID NO: 28073 - DNA, 110 bp, synthetic construct
  source 1..110: mol_type = other DNA
gagagaaggtgagctccagttcttccactctgccttcttaatcacctttgcttctttttttaatttctgctctaagttctccgctgactgagaggtttctttcagaaaat

SEQ ID NO: 28074 - DNA, 110 bp, synthetic construct
  source 1..110: mol_type = other DNA
ttttttaatttctgctctaagttctccgctgactgagaggtttctttcagaaaatctctgatttactacccgcctcccccactccctgccaccccttgcttaccttttag

SEQ ID NO: 28075 - DNA, 110 bp, synthetic construct
  source 1..110: mol_type = other DNA
gcaaagactgtcaaggcagaaacctgtgccttggattcacacgctgcacaatagacacagaaatgccccatccacccctcctctcatctctgcccgtcatcaatagggca

SEQ ID NO: 28076 - DNA, 110 bp, synthetic construct
  source 1..110: mol_type = other DNA
cacagaaatgccccatccacccctcctctcatctctgcccgtcatcaatagggcactctccttaagagcaaagagctcacttactggtgagaaatccagcccaccacatc

SEQ ID NO: 28077 - DNA, 110 bp, synthetic construct
  source 1..110: mol_type = other DNA
agacgatgcaacaattctgggtaaagctgggataaggagtccttcgactctccagcagacatttctttccatggtagccctaggcagtcaaccaggcccctcactttgtc

SEQ ID NO: 28078 - DNA, 110 bp, synthetic construct
  source 1..110: mol_type = other DNA
aggcggctctctgcaaaccaggaagagggctcgcattagacactgcatctgctggcaccttaaccttgaacttcccagcctctggaactgtgagaaatcaacgctgttaa

SEQ ID NO: 28079 - DNA, 110 bp, synthetic construct
  source 1..110: mol_type = other DNA
caccttaaccttgaacttcccagcctctggaactgtgagaaatcaacgctgttaaagcaccagtctacggtactcttgttacagcaacctgaactaagactgtacattct

SEQ ID NO: 28080 - DNA, 110 bp, synthetic construct
  source 1..110: mol_type = other DNA
tcatgggtcccaggctctgtgctctgtgctggggcacaggccactgaacaaggatgacggggactctgccctgtggacagttcagctgaccatcagtcagatttgttaca

SEQ ID NO: 28081 - DNA, 110 bp, synthetic construct
  source 1..110: mol_type = other DNA
gacggggactctgccctgtggacagttcagctgaccatcagtcagatttgttacataattatgcctggaatacagaggtcagggtggtgtggtgagatgagccctgggct

SEQ ID NO: 28082 - DNA, 110 bp, synthetic construct; identical to SEQ ID NO: 28080
  source 1..110: mol_type = other DNA

SEQ ID NO: 28083 - DNA, 110 bp, synthetic construct; identical to SEQ ID NO: 28081
  source 1..110: mol_type = other DNA

SEQ ID NO: 28084 - DNA, 110 bp, synthetic construct
  source 1..110: mol_type = other DNA
tatagccatatgatagaatattattcaatgataaaaacaaatgaactatcaagccatgaaaagccatgggggaatcctaaatacatattgctaagtgaaagaagccagcc

SEQ ID NO: 28085 - DNA, 110 bp, synthetic construct
  source 1..110: mol_type = other DNA
atgaaaagccatgggggaatcctaaatacatattgctaagtgaaagaagccagcctgaaaatgctgtataccgtatgattccagccatgtaactttctggaaaaggcaaa

SEQ ID NO: 28086 - DNA, 110 bp, synthetic construct
  source 1..110: mol_type = other DNA
cagacgtggcttggatcctaccatgctgtgactgtggtgtaggccagtgtctacagctcctattcaacccctagccttcatatgccgcaagagcggctcaagaaatggca

SEQ ID NO: 28087 - DNA, 110 bp, synthetic construct
  source 1..110: mol_type = other DNA
tcctaccatgctgtgactgtggtgtaggccagtgtctacagctcctattcaacccctagccttcatatgccgcaagagcggctcaagaaatggcaaaaagacaaaaaaaa

SEQ ID NO: 28088 - DNA, 110 bp, synthetic construct
  source 1..110: mol_type = other DNA
ctcaccaagaaatgggttcagagacttttggatttcatgatccactaaaatttccaaccccccaaagaattttgatgatctgtctattttgccacataagggaagaaaaa

SEQ ID NO: 28089 - DNA, 110 bp, synthetic construct
  source 1..110: mol_type = other DNA
aaccccccaaagaattttgatgatctgtctattttgccacataagggaagaaaaatttctactattgccatcccttcatttttgaggttttttgtttttgattttgtttg

SEQ ID NO: 28090 - DNA, 110 bp, synthetic construct
  source 1..110: mol_type = other DNA
catatggaggcacccaggctaggggtcgaatccgagcagtacacctgtgcaaagccacagcaactgggataggaagctatgcctgtggcctaaacgacaactcattggaa

SEQ ID NO: 28091 - DNA, 110 bp, synthetic construct
  source 1..110: mol_type = other DNA
gcagtacacctgtgcaaagccacagcaactgggataggaagctatgcctgtggcctaaacgacaactcattggaacaccagatccctaacccactgagagaggccaggga

SEQ ID NO: 28092 - DNA, 110 bp, synthetic construct
  source 1..110: mol_type = other DNA
tatggatactagccagattagtttctgctgtgccacactgggaactccacttcgttgtagttttgacttgaatttccctaataattagtgatgttaagcatctcttcttg

SEQ ID NO: 28093 - DNA, 110 bp, synthetic construct
  source 1..110: mol_type = other DNA
tgctatagctgtggtgtaggctggcagttccagctctgattcagccactagcagggaacttccacatgtcctaagaggacaatacagatgtatatgaagtcattcagagt

SEQ ID NO: 28094 - DNA, 110 bp, synthetic construct; identical to SEQ ID NO: 28093
  source 1..110: mol_type = other DNA

SEQ ID NO: 28095 - DNA, 110 bp, synthetic construct
  source 1..110: mol_type = other DNA
gttcaaggtcacatagtcctagcccctgtgatagagcccggtctgaaaccaggcccaaaggactccgtgcttttaagcaacaccccgtatttcacagtgggagctccatg

SEQ ID NO: 28096 - DNA, 110 bp, synthetic construct
  source 1..110: mol_type = other DNA
caaaggactccgtgcttttaagcaacaccccgtatttcacagtgggagctccatgtctatgaaatggaagcactaacctgtgttggtccgaaacagattttagcttactc

SEQ ID NO: 28097 - DNA, 110 bp, synthetic construct
  source 1..110: mol_type = other DNA
ccttgggtgaataatgagtttctttgcctaaatgaattattgattagacctttgtatcatctgcctggtagaagaaggaaaattgtttaatttttttctattaatcactg

SEQ ID NO: 28098 - DNA, 110 bp, synthetic construct; identical to SEQ ID NO: 28097
  source 1..110: mol_type = other DNA

SEQ ID NO: 28099 - DNA, 110 bp, synthetic construct
  source 1..110: mol_type = other DNA
agtttaaaatttctttggctctgaatgtacatgtgcacatgtatttaaaagccacttgcattttcccctgccaatcatctttccatattatttccacttttgagggggaa

SEQ ID NO: 28100 - DNA, 110 bp, synthetic construct
  source 1..110: mol_type = other DNA
atgctatgctgggcattttcacataaagacccattctctctggtatatccatttgcttttgtgtccttagtgtagtcatatttggaacaggtaaaattggaggatgtggt

SEQ ID NO: 28101 - DNA, 110 bp, synthetic construct
  source 1..110: mol_type = other DNA
cttttgtgtccttagtgtagtcatatttggaacaggtaaaattggaggatgtggttaattttatggcatgaatcaaaattttatgggtatgttagccatttgtgggtata

SEQ ID NO: 28102 - DNA, 110 bp, synthetic construct
  source 1..110: mol_type = other DNA
tttgatgttaaacctgaagtagagctttgtaaccatcacagggaccagaaggacattttcaaagacctcattcttctgtgaaatggatggagagaccaccttcaatccct

SEQ ID NO: 28103 - DNA, 110 bp, synthetic construct
  source 1..110: mol_type = other DNA
cctgctctgtgagagagagattgaaagatacatttgtgcaaacttaatgttactttggcagaaagccaaccacatggccttagcagtgctgattaaagcaggaccttcca

SEQ ID NO: 28104 - DNA, 110 bp, synthetic construct
  source 1..110: mol_type = other DNA
taccaagaataggggataaatggttaagaactggatggcatcatctaagagactccattgttggagtgaagaatatgcatgtatttcatgtcaccagaatcagcactgat

SEQ ID NO: 28105 - DNA, 110 bp, synthetic construct
  source 1..110: mol_type = other DNA
cattgttggagtgaagaatatgcatgtatttcatgtcaccagaatcagcactgatgcctaaaaccagtggcttctctcatgtgactggacatgtactggtggccataagc

SEQ ID NO: 28106 - DNA, 110 bp, synthetic construct
  source 1..110: mol_type = other DNA
acagaggttggagagttggatgcatcacctgggggcacagtcaacacaatgaatggagctaaatgccatgaatgctttacacaacccaaaacacacatattctgccactg

SEQ ID NO: 28107 - DNA, 110 bp, synthetic construct
  source 1..110: mol_type = other DNA
gagactgaatccatggaaaataactatgacaaaaaatgtgacatcacttccattgagatctatgctctcctggtatgaagggcacagattttaacatttgcttttgatgg

SEQ ID NO: 28108 - DNA, 110 bp, synthetic construct
  source 1..110: mol_type = other DNA
atatgtatcggtctgaaaagcctcatttactttggtatatgcctagaggtggaaacactgctgataaaaacagaatcattcatggaaatggaaagtcccacagtcataat

SEQ ID NO: 28109 - DNA, 110 bp, synthetic construct
  source 1..110: mol_type = other DNA
tctatgtttttcctcttgttcacattatctaagggatggttcatagaaaaatgaatggataaaattaaaatgcacatcagtagggagttcccatcatgtcagcagtaaca

SEQ ID NO: 28110 - DNA, 110 bp, synthetic construct
  source 1..110: mol_type = other DNA
gaaaaatgaatggataaaattaaaatgcacatcagtagggagttcccatcatgtcagcagtaacaaatccagctaatatccatgaggacgtgggttcaaaccctggcctt

SEQ ID NO: 28111 - DNA, 110 bp, synthetic construct
  source 1..110: mol_type = other DNA
agttctgggttcaggtccccttcatatcctagctctgtcaattactgaaaccacagaaaaggtgacgtgacttctcttctaagcctcaatttactcatctggggaaggca

SEQ ID NO: 28112 - DNA, 110 bp, synthetic construct
  source 1..110: mol_type = other DNA
ttcattacattgcatcctcacctgagaaagtatctagactacaaacctgatcacatctctctttctcctgttgaaaacccttatctgaattttgtgtgtctacagagaaa

SEQ ID NO: 28113 - DNA, 110 bp, synthetic construct
  source 1..110: mol_type = other DNA
tctctctttctcctgttgaaaacccttatctgaattttgtgtgtctacagagaaagcagtctcaagtttaaaaagcatttcctgattctgatttagaagtagaagttact

SEQ ID NO: 28114 - DNA, 110 bp, synthetic construct
  source 1..110: mol_type = other DNA
atcagagaaccagggcacaagagtcctcagtgagggaatcactctcactgttctctaaggaacagactacaagggacaagaatgctagcagagaaaccagaggcctgtgc

SEQ ID NO: 28115 - DNA, 110 bp, synthetic construct
  source 1..110: mol_type = other DNA
taaggaacagactacaagggacaagaatgctagcagagaaaccagaggcctgtgcctcctgcatttaccaaagagaggtgacagcagcccagatatgggtggaagttgag

SEQ ID NO: 28116 - DNA, 110 bp, synthetic construct
  source 1..110: mol_type = other DNA
ggtcttttgagcattattttccattttccttgcttggacttgcaataaacgctgtactttacttcaccacaagctggtgtcactagattggctttaccacatgtgggcaa

SEQ ID NO: 28117 - DNA, 110 bp, synthetic construct
  source 1..110: mol_type = other DNA
caggttcagaattacaaagcacagattatatgtttcatgctaatatttataactctcaaaacctgaaaagtgagctagtaaaaccttcctgattctgcctttttgaattt

SEQ ID NO: 28118 - DNA, 110 bp, synthetic construct
  source 1..110: mol_type = other DNA
tttatttatctatgacaaatgcagacagagatcctccaaattctcacactttgcctcaaaagtgatgagtggctatctctgtactcactgactaacctagacaaaaacgc

SEQ ID NO: 28119 - DNA, 110 bp, synthetic construct
  source 1..110: mol_type = other DNA
tcaaaagtgatgagtggctatctctgtactcactgactaacctagacaaaaacgcaggcctgctaacttgacaaaactcaactttagtcaagcttctctccttctcttca

SEQ ID NO: 28120 - DNA, 110 bp, synthetic construct
  source 1..110: mol_type = other DNA
gtacagtaggtctgcagggagctgcacagctgggatttaaggctctttgtagtctttccctgcacagccaggcttgggaactctggaaaatgaactctgaagaggagtca

SEQ ID NO: 28121 - DNA, 110 bp, synthetic construct
  source 1..110: mol_type = other DNA
gcttcgtgtgctttgacttactcttctctgattatctctattcttgagacagtgcagccttcactttctcccatttatccatcccaccatatcccatgaggctggtaaca

SEQ ID NO: 28122 - DNA, 110 bp, synthetic construct
  source 1..110: mol_type = other DNA
acttgttccagcataatatgttgaagagactattctttcaccaaaaaattaccttggcactcctgtcaaagatcagctgactgtaactgtacaaattcattttgagacta

SEQ ID NO: 28123 - DNA, 110 bp, synthetic construct
  source 1..110: mol_type = other DNA
taacgagtagccaaggagcacctggagccaccagaagctgaacgagacaagcagtgattcttttccagagactttagaagaggatcgccttgtgaacacccttactttgg

SEQ ID NO: 28124 - DNA, 110 bp, synthetic construct
  source 1..110: mol_type = other DNA
ggaaagcaaggagccaacattttcagcttccgtaaatggcaggaaggctgtgacgcccaccttgcttcctagagtaaggagttttccaaacatggaaacaagtgccagat

SEQ ID NO: 28125 - DNA, 110 bp, synthetic construct
  source 1..110: mol_type = other DNA
tctctcttgctaagacaccccatgattctccagggtgttggtctgtcctggctatgacttgttcaactacagatatgttcccttgggtctttgatggacagcacatgtaa

SEQ ID NO: 28126 - DNA, 110 bp, synthetic construct
  source 1..110: mol_type = other DNA
gacttgttcaactacagatatgttcccttgggtctttgatggacagcacatgtaatgctatcactacaatatcctgctgtatctcctctctttctttgccctgtaacaga

SEQ ID NO: 28127 - DNA, 110 bp, synthetic construct
  source 1..110: mol_type = other DNA
catgctaggcctactgtacttaccattttcacccctggaaaacacggctcctgagagccctcatttctttcagacattaggaagcaaaccttccccggagacctatttta

SEQ ID NO: 28128 - DNA, 110 bp, synthetic construct
  source 1..110: mol_type = other DNA
agccctcatttctttcagacattaggaagcaaaccttccccggagacctattttaaatttctagttgccagctgtccatattcccacatgccccgataccacctgacttc

SEQ ID NO: 28129 - DNA, 110 bp, synthetic construct
  source 1..110: mol_type = other DNA
atggttctatccatggaaaaggaaggagaagagcaatgtcaaggccacagtcagggagaacagcaaggggaagatacacccagcaagcgttatcactgcatctgccaccc

SEQ ID NO: 28130 - DNA, 110 bp, synthetic construct
  source 1..110: mol_type = other DNA
ctcactagcaggctaagtccacatttgagacaactcagaacctaaagctagctatatcaggaataggccatatccactaggaacactagtcttgcaactacccatcctag

SEQ ID NO: 28131 - DNA, 110 bp, synthetic construct
  source 1..110: mol_type = other DNA
tgcctgtctgacttcagtctcttttataccatcctacttgacaatagaataacgaagtgcacacccaaatttatgtctgtgtatatcagatatacacagttcatggcaag

SEQ ID NO: 28132 - DNA, 110 bp, synthetic construct
  source 1..110: mol_type = other DNA
agtgcacacccaaatttatgtctgtgtatatcagatatacacagttcatggcaagaagctcaggccacatggtcatctgatgtgccataattaggcatctgtttccacaa

SEQ ID NO: 28133 - DNA, 110 bp, synthetic construct
  source 1..110: mol_type = other DNA
aaacaggttcatttgtattatattttagattcaacatataagtcatatcatataataggtcctctctgtctgatttacttcatttggtatggtgatctctaggtccatcc

SEQ ID NO: 28134 - DNA, 110 bp, synthetic construct; identical to SEQ ID NO: 28133
  source 1..110: mol_type = other DNA

SEQ ID NO: 28135 - DNA, 110 bp, synthetic construct
  source 1..110: mol_type = other DNA
actcctaccattctaggcacctcagatgtcattttctcagacagatgtaacttttctttgaagagtcacatctcaatcctatgacactaagttttacttcctgttacagc

SEQ ID NO: 28136 - DNA, 110 bp, synthetic construct
  source 1..110: mol_type = other DNA
ctttgaagagtcacatctcaatcctatgacactaagttttacttcctgttacagctcttgccattcttaccctattcctcgccactagaataaaaacgcccagaggacag

SEQ ID NO: 28137 - DNA, 110 bp, synthetic construct
  source 1..110: mol_type = other DNA
aattgatatttaagtttaggtacagtgattctcgcatcatagttccagccaggacaaacaaaaccaagctgccaaagcaccaatacacaatgtgacctcaaattaaaaaa

SEQ ID NO: 28138 - DNA, 110 bp, synthetic construct
  source 1..110: mol_type = other DNA
aaacaaaaccaagctgccaaagcaccaatacacaatgtgacctcaaattaaaaaaaaaaaaatcataaaaaaatctttcccccgtatctccttccagtgggtacctttac

SEQ ID NO: 28139 - DNA, 110 bp, synthetic construct
  source 1..110: mol_type = other DNA
tattttatctgtgtctgtctatctatctatcatttatctatatatctggaagagataacatcaaaatgttagcagtgtcctgggaggggagcagatttcatacagctttt

SEQ ID NO: 28140 - DNA, 110 bp, synthetic construct
  source 1..110: mol_type = other DNA
taacatcaaaatgttagcagtgtcctgggaggggagcagatttcatacagcttttcattctcagttaaacaatgaacatgtgttatttccagtatgtttttcaaactatt

SEQ ID NO: 28141 - DNA, 110 bp, synthetic construct
  source 1..110: mol_type = other DNA
ctggcatgggcccaggacataacagccccatgaaaagccaaggaagtatgggagtcacaagcatggagttaggttgccagtgctgagctacgtgatttcaaatgtttgac

SEQ ID NO: 28142 - DNA, 110 bp, synthetic construct
  source 1..110: mol_type = other DNA
cacaagcatggagttaggttgccagtgctgagctacgtgatttcaaatgtttgacttcacttctgtgagctttggttttccactggtaaaaaacaagaagtgataacaga

SEQ ID NO: 28143 - DNA, 110 bp, synthetic construct
  source 1..110: mol_type = other DNA
tgacttggaaagaggacactcattaaccaagacaatgagcagctgatttgtgctggcttgctttctcttgttaaaaacacccgtatacaatttacactaaaataaaatta

SEQ ID NO: 28144 - DNA, 110 bp, synthetic construct
  source 1..110: mol_type = other DNA
gcttgctttctcttgttaaaaacacccgtatacaatttacactaaaataaaattagagttcctgataattccaagaagagagcgtaggggagcaaaatttgccaccccaa

SEQ ID NO: 28145 - DNA, 110 bp, synthetic construct
  source 1..110: mol_type = other DNA
atcatgaattcattcatcagtgcaagcctctggacactcaccgttagatgaaaaagcatggacttggctgtctatccagcttgcaatctgctgggaatgataatatcaga

SEQ ID NO: 28146 - DNA, 110 bp, synthetic construct
  source 1..110: mol_type = other DNA
gcatggacttggctgtctatccagcttgcaatctgctgggaatgataatatcagactataaaagaaatacagtagaatgtgtatatgtatgtgtaactgggtcaccatgc

SEQ ID NO: 28147 - DNA, 110 bp, synthetic construct
  source 1..110: mol_type = other DNA
ttaataagaagtgtggagttaggatgctctagagtttattaatcaagcagctcgtcagcatcgataaggacccaaactctttccatcttcaataaggaaacattatccaa

SEQ ID NO: 28148 - DNA, 110 bp, synthetic construct
  source 1..110: mol_type = other DNA
gcagtgatgagtccattgtggatactgcaaaaatgtgtattgactgaatgagctgagaaacctgggaatggcattaagcactgcatggctcccctccacacccacagcct

SEQ ID NO: 28149 - DNA, 110 bp, synthetic construct
  source 1..110: mol_type = other DNA
agaaacctgggaatggcattaagcactgcatggctcccctccacacccacagcctttcttgttgaaaatacattcatgttggaagttcccattgtggctcggcagttaac

SEQ ID NO: 28150 - DNA, 110 bp, synthetic construct
  source 1..110: mol_type = other DNA
ttaaggacagggggtaccaacctggagtccagacatcattccttttcccattggccttgtccagtcacctacatcaggccttgttcaatagggttcttagagatggatat

SEQ ID NO: 28151 - DNA, 110 bp, synthetic construct
  source 1..110: mol_type = other DNA
cttgtccagtcacctacatcaggccttgttcaatagggttcttagagatggatatgcctgataggtttgatggctactttattcttctcttccctagactgggagtcacc

SEQ ID NO: 28152 - DNA, 110 bp, synthetic construct
  source 1..110: mol_type = other DNA
gaagagtaagagagagaataccctatgtgtacatatatatgtatatgtacatatacccaaacacagtaatttagcttctaggcacgtctgtacaagtttggagtgggcct

SEQ ID NO: 28153 - DNA, 110 bp, synthetic construct
  source 1..110: mol_type = other DNA
ctcctaacagctttccctgtttccatccgtgccttgcacacagaagccagagatactactgaacaataaaccagcttatctcactcccttgtcccactccccacccaaaa

SEQ ID NO: 28154 - DNA, 110 bp, synthetic construct
  source 1..110: mol_type = other DNA
ggaacttccatatgctgcagatgcaacaccctctcccccggaaaaaaaaagcagaacatcctaagagaatagaggtagaattttctttcccctcttgttaaagtttccta

SEQ ID NO: 28155 - DNA, 110 bp, synthetic construct
  source 1..110: mol_type = other DNA
cctcactctctcaattcactgcctcttctccattttcatcaccagtgcctgctgccacttcgcctcacacctgaactctacttgagtagcattcagcccaatcctaggca

SEQ ID NO: 28156 - DNA, 110 bp, synthetic construct
  source 1..110: mol_type = other DNA
tcctgcagttttaatgaagctgggtttactcaaacctcttctctccccaccctcgacccccacccttgcaatctccttaacatagccagttggctgcagaaggacactgc

SEQ ID NO: 28157 - DNA, 110 bp, synthetic construct
  source 1..110: mol_type = other DNA
acccccacccttgcaatctccttaacatagccagttggctgcagaaggacactgcatagtggctaagtataaaccttctggacagacacccataaaatatccaaagtttc

SEQ ID NO: 28158 - DNA, 110 bp, synthetic construct
  source 1..110: mol_type = other DNA
caccatgagcatagtgcaccagacggatggagaggtgaccacttcatcccgcctggccaaaggcatttgtttcttagagctgccacaacaaagtaccacaacaagttggc

SEQ ID NO: 28159 - DNA, 110 bp, synthetic construct
  source 1..110: mol_type = other DNA
gaattccacgatcctttctatttctgtggtatcattatcacatcttctcttccatttctaattttatttattagagtcctctctctttttgcttgttgagcctagctaaa

SEQ ID NO: 28160 - DNA, 110 bp, synthetic construct
  source 1..110: mol_type = other DNA
tatcacatcttctcttccatttctaattttatttattagagtcctctctctttttgcttgttgagcctagctaaaggcttgtcagcttttttttgctattttttttttct

SEQ ID NO: 28161 - DNA, 110 bp, synthetic construct
  source 1..110: mol_type = other DNA
atgtatttctcataaaccacggtatcgcatttggtcacttgctcttccttgagacacattctttacttgcgttccagggcattgcacagtctgggttttcctctcacctc

SEQ ID NO: 28162 - DNA, 110 bp, synthetic construct
  source 1..110: mol_type = other DNA
acattctttacttgcgttccagggcattgcacagtctgggttttcctctcacctctagacacttctcctgtctcctcctcaccctaatctgtgtatgttggctgccccag

SEQ ID NO: 28163 - DNA, 110 bp, synthetic construct
  source 1..110: mol_type = other DNA
ggtgcggttgggccagccttgctagggaatgaatgacttaataaaggctccaacctagcgattttccggaaactcgtcaggatccggaaaaactggataacacctcacaa

SEQ ID NO: 28164 - DNA, 110 bp, synthetic construct
  source 1..110: mol_type = other DNA
cctgtccatctttaagcccctctgatactttgtacacgcctctgttatggctgccatcatgtggcatagtaatggtcagtttcacatgtttagcccagcttaactaggtt

SEQ ID NO: 28165 - DNA, 110 bp, synthetic construct
  source 1..110: mol_type = other DNA
atcatgtggcatagtaatggtcagtttcacatgtttagcccagcttaactaggttttgagctcccctgtctgcatactgcaaaacacccctcactcacatctgtcacagg

SEQ ID NO: 28166 - DNA, 110 bp, synthetic construct
  source 1..110: mol_type = other DNA
agtgcagcaggcatcctgaagaatcttgaagctgctttcagctgactatgttagagggcaagtcaatggttgatctgatctacattcaaaaacagattttgacatcattt

SEQ ID NO: 28167 - DNA, 110 bp, synthetic construct
  source 1..110: mol_type = other DNA
tgttcatgtcatgtccacggggattaggggcctgagtgcctgttgtcagccacgcgccctaccacaccaagctcttctttggcttttcctgccctcggcaattcttaaag

SEQ ID NO: 28168 - DNA, 110 bp, synthetic construct
  source 1..110: mol_type = other DNA
gtatccatgaggatgtgtgtttgattcctggcatcgctcagtgtgttaaggatctggcgttgccttgagctgcagatgcagcctggattccatgttgctgtggctgtggt

SEQ ID NO: 28169 - DNA, 110 bp, synthetic construct
  source 1..110: mol_type = other DNA
tgtgtttgattcctggcatcgctcagtgtgttaaggatctggcgttgccttgagctgcagatgcagcctggattccatgttgctgtggctgtggtgtaggttggcagctg

SEQ ID NO: 28170 - DNA, 110 bp, synthetic construct
  source 1..110: mol_type = other DNA
tactggtaccagtgcccaaagctaattaatcatcatcacagctgaggtgtatccgcagtcagtgaagctcctggccaccatgcaccagatccctaacccaacttcgctga

SEQ ID NO: 28171 - DNA, 110 bp, synthetic construct
  source 1..110: mol_type = other DNA
gatgattcctatcaagtccactggcctggcctggtaccacagtgacttctctgacattcagtgggcatagccatgtcttttccaatgagatcaggatctcggctcaggtt

SEQ ID NO: 28172 - DNA, 110 bp, synthetic construct
  source 1..110: mol_type = other DNA
cgagagccttccagccagcacactcagaggctgggcatggagcaggagctggatgcctgcagcacccacagaccctgcacactgtaaacaggtccagttcccaccaagac

SEQ ID NO: 28173 - DNA, 110 bp, synthetic construct
  source 1..110: mol_type = other DNA
cctgcagcacccacagaccctgcacactgtaaacaggtccagttcccaccaagacacccttacagcccagcatcctgttagccacagggctgggatgagagctgcaaagt

SEQ ID NO: 28174 - DNA, 110 bp, synthetic construct
  source 1..110: mol_type = other DNA
tccactgtcgcttctcagcctgcagaggactatgttgaaattctagttacaaagatcttttaaagttttgttttgttttattttgtttttgctttttagggccacccctg

SEQ ID NO: 28175 - DNA, 110 bp, synthetic construct
  source 1..110: mol_type = other DNA
atactgatggaaccctgcattatgcctgcccacagtgggtacctgggtcaatcggagaggataagaggatgttcaggcagctgcgaagccctggctgaagtgttgagaac

SEQ ID NO: 28176 - DNA, 110 bp, synthetic construct
  source 1..110: mol_type = other DNA
tattcttaccttccattcttttgaagctctacgcagtttaattacttccaaggagaatgaagcccccaaagttgcctcagcaggtgtggggcactgagttgtctagaagg

SEQ ID NO: 28177 - DNA, 110 bp, synthetic construct
  source 1..110: mol_type = other DNA
aatgaagcccccaaagttgcctcagcaggtgtggggcactgagttgtctagaaggggagaacctggggaacctggcatcctgcagccaaaggagccaacttcaattccac

SEQ ID NO: 28178 - DNA, 110 bp, synthetic construct
  source 1..110: mol_type = other DNA
ctttctaaattccactgcagatggctctaagggagccccagtgacaagaaagcgcagtggtgagacctcagcctgtcctctgtccgagtgggtttgcaccctccctgacc

SEQ ID NO: 28179 - DNA, 110 bp, synthetic construct
  source 1..110: mol_type = other DNA
gtgaagattatctattctgatgattcattcgtctgaatagtgtctttgcagctgtgcaagtcactacatttgctcgggctctcgactttctgagccgtctgagactgaac

SEQ ID NO: 28180 - DNA, 110 bp, synthetic construct
  source 1..110: mol_type = other DNA
gcaagtcactacatttgctcgggctctcgactttctgagccgtctgagactgaacacagccacactttcccccctcgggccttagggggttagactcagtggtttcgaaa

SEQ ID NO: 28181 - DNA, 110 bp, synthetic construct
  source 1..110: mol_type = other DNA
ggaatagacagcccgggacgcagggattggtcagcagtgagcatgtgacctaagccaagccaatcagaataaagaggcattaatggtcttggaatttttgtttccataac

SEQ ID NO: 28182 - DNA, 110 bp, synthetic construct
  source 1..110: mol_type = other DNA
caagccaatcagaataaagaggcattaatggtcttggaatttttgtttccataaccaggggaaagaacggctggataaggtgccaagcggagctgctgggcctcacggag

SEQ ID NO: 28183 - DNA, 110 bp, synthetic construct
  source 1..110: mol_type = other DNA
tcagctggaattgctctgccaagtcaagctgaaggtcagttactcctgttattcgtcttccccaagaattcggggcaactgggggctgcctcagagggacctggctgcat

SEQ ID NO: 28184 - DNA, 110 bp, synthetic construct
  source 1..110: mol_type = other DNA
agatggatcctgccactgccaagtgttatgggtctccccccagggcagctgatgcttcagaaaacaggcgacagggacctgagcctgaaacacaaagacacaagctagca

SEQ ID NO: 28185 - DNA, 110 bp, synthetic construct
  source 1..110: mol_type = other DNA
ttcagaaaacaggcgacagggacctgagcctgaaacacaaagacacaagctagcactggtcatcaaaggaacagctatgtctcccatatctacccctctgactgaggaca

SEQ ID NO: 28186 - DNA, 110 bp, synthetic construct; identical to SEQ ID NO: 28184
  source 1..110: mol_type = other DNA

SEQ ID NO: 28187 - DNA, 110 bp, synthetic construct; identical to SEQ ID NO: 28185
  source 1..110: mol_type = other DNA

SEQ ID NO: 28188 - DNA, 110 bp, synthetic construct
  source 1..110: mol_type = other DNA
ctggtctgccaggcaacattccaagtcccatcatctcactggatcccaggttcctcttatattgataagggggctggacaacaggcaagtcttgtgtgtctgctccatac

SEQ ID NO: 28189 - DNA, 110 bp, synthetic construct
  source 1..110: mol_type = other DNA
cttatattgataagggggctggacaacaggcaagtcttgtgtgtctgctccatactccttcttcttcttttggtaacagctcctgattttccttggggactccccatccc

SEQ ID NO: 28190 - DNA, 110 bp, synthetic construct
  source 1..110: mol_type = other DNA
ttgctctgaagtctgctaattgcattatcgcacataccatctgaccttgctaataactgctcaagctgcaaacttcctacaaaagtcaccatgttataagcaattatttg

SEQ ID NO: 28191 - DNA, 110 bp, synthetic construct
  source 1..110: mol_type = other DNA
caccactgtttctagccccagggtactacacggtccttggctgttaccctataccctgtcccatgggcctcttagtaaatgtgtctcacatttcccagagtaggaaaacc

SEQ ID NO: 28192 - DNA, 110 bp, synthetic construct
  source 1..110: mol_type = other DNA
ctgtcccatgggcctcttagtaaatgtgtctcacatttcccagagtaggaaaaccatgcattttctgctgggaccctacctgaatcaaggggagaagcttcccgagaacc

SEQ ID NO: 28193 - DNA, 110 bp, synthetic construct
  source 1..110: mol_type = other DNA
agggacaggaaacacactccttttctgaggcagtcattttttgatacttctacccattaaaaataaatagtcctattttgagtccaatctgtcttcctatagcttctgcc

SEQ ID NO: 28194 - DNA, 110 bp, synthetic construct
  source 1..110: mol_type = other DNA
attaaaaataaatagtcctattttgagtccaatctgtcttcctatagcttctgcctccttgtcctgggagtcacagagaataagccaaatgactttggaatgacccagaa

SEQ ID NO: 28195 - DNA, 110 bp, synthetic construct
  source 1..110: mol_type = other DNA
ggcaaagcctcaccagtgtcttcttggaggccacactttcatgaccaaaccaatgacaggcgcttctcaggcaaatgggctgagagcttctcctttgcaccccagccaga

SEQ ID NO: 28196 - DNA, 110 bp, synthetic construct
  source 1..110: mol_type = other DNA
acaggcgcttctcaggcaaatgggctgagagcttctcctttgcaccccagccagacattagcccagagtcaaacttcaggatcttctgtgatagaaatacacagtcactt

SEQ ID NO: 28197 - DNA, 110 bp, synthetic construct
  source 1..110: mol_type = other DNA
catgctttaaccacagcacacgtgttcactgcagatgaacccccattcactttctctgagccttgcctgatgctatttcctccgcctgaaagctttccttgcccttccct

SEQ ID NO: 28198 - DNA, 110 bp, synthetic construct
  source 1..110: mol_type = other DNA
ctgagccttgcctgatgctatttcctccgcctgaaagctttccttgcccttccctcctcctaagcttgtcattccttagacaagattttctttgactggtatgtctattc

SEQ ID NO: 28199 - DNA, 110 bp, synthetic construct
  source 1..110: mol_type = other DNA
ggctcactcgggctgcgatggagaagctaatgcttattgtccctgcctgtggcaagcatacctgtagcatgtccttctggaaagcgccacctccaccaaacatgtactgc

SEQ ID NO: 28200 - DNA, 110 bp, synthetic construct
  source 1..110: mol_type = other DNA
tgtccattccacttggctggtctcattctaatctaagctttgtttgtacagtcgatctgtaataaccacactgattaattcacatcttacatgtgtttggtcaggaccct

SEQ ID NO: 28201 - DNA, 110 bp, synthetic construct
  source 1..110: mol_type = other DNA
cctacgggggaaaataggaggctgtttccaaagatgtaccccaaactggatggggctattggggcagttggggcaagtccttgctctcctcagcttcagctacagttgcc

SEQ ID NO: 28202 - DNA, 110 bp, synthetic construct
  source 1..110: mol_type = other DNA
ctattggggcagttggggcaagtccttgctctcctcagcttcagctacagttgccacagtaggtaaggtcatcagtcattttactaatttctgtgtgtattttgctacaa

SEQ ID NO: 28203 - DNA, 110 bp, synthetic construct
  source 1..110: mol_type = other DNA
ctcagtgtggttttgatttgcatttcccaatgcattttctaattcttgcttgactttcttagctcatatcaccatttagtgcatattgtatacatgaatatgtatataca

SEQ ID NO: 28204 - DNA, 110 bp, synthetic construct
  source 1..110: mol_type = other DNA
aggaagtttagtgcttggtgcaaacttctgtttctgagttttatatttttctacatcctttttgaagtgtctgcctttcctccatcctaatttctatcatgcgcccaggg

SEQ ID NO: 28205 - DNA, 110 bp, synthetic construct
  source 1..110: mol_type = other DNA
tcctttttgaagtgtctgcctttcctccatcctaatttctatcatgcgcccaggggctgtgttacaggaaagatgttatcagaatccgtgttcttgttcatggagccaaa

SEQ ID NO: 28206 - DNA, 110 bp, synthetic construct
  source 1..110: mol_type = other DNA
tgctctgagttggacacttgggtgagaagttttctgaggcatgctttggagtatgctccaggtttaccacttaactagctggtttaccatgagcagattacttaatcgct

SEQ ID NO: 28207 - DNA, 110 bp, synthetic construct
  source 1..110: mol_type = other DNA
ctccaggtttaccacttaactagctggtttaccatgagcagattacttaatcgcttcatgtctcagtttcttcctctaaactatgtaaatgatacaagcacagatctaca

SEQ ID NO: 28208 - DNA, 110 bp, synthetic construct
  source 1..110: mol_type = other DNA
cctacagaatctatgagacgatacatttgttactttaaaccactaagtttggggtattcttgctctgcagcagtataaaactaatatgcccagtctttctcattgtgaga

SEQ ID NO: 28209 - DNA, 110 bp, synthetic construct
  source 1..110: mol_type = other DNA
attcttgctctgcagcagtataaaactaatatgcccagtctttctcattgtgagatctgagcttgaatttttttccattttagggttgttcatttccttgcctttcagta

SEQ ID NO: 28210 - DNA, 110 bp, synthetic construct
  source 1..110: mol_type = other DNA
gatgggaaagttgagctttaaagaatggttacccagctaattaatagaaaaaacgaaagaattcaaatccttgtcatcagacttccagccaagacttttgatctcatctt

SEQ ID NO: 28211 - DNA, 110 bp, synthetic construct
  source 1..110: mol_type = other DNA
cttggctgccctgtggtctatcccccagagccctttcagccacctacctgttccaaggcctctatcactggagagcacagagtggaattttttcctttaagcttccgtgg

SEQ ID NO: 28212 - DNA, 110 bp, synthetic construct
  source 1..110: mol_type = other DNA
aggcctctatcactggagagcacagagtggaattttttcctttaagcttccgtggttcctgatattaaaaagatgcatttgtgaagaagtctttttatttacaaggttag

SEQ ID NO: 28213 - DNA, 110 bp, synthetic construct
  source 1..110: mol_type = other DNA
gacatagaaactcgagttctccaggtcagcaaaaccgtaagcttcacctttggtctctcagtcatagaacagggcacaccattgaaggttccacagtttataggcttcaa

SEQ ID NO: 28214 - DNA, 110 bp, synthetic construct
  source 1..110: mol_type = other DNA
tctcagtcatagaacagggcacaccattgaaggttccacagtttataggcttcaatgaagcttcttttcccaaagttcttccatcaactttcttttgcatttagcttgca

SEQ ID NO: 28215 - DNA, 110 bp, synthetic construct
  source 1..110: mol_type = other DNA
ttcaaacgttggggtctcctgcgcattgtctttcccggtcatggataaggacctgtggggttgctgtccatcgggagtggcacagccctgcaggtacatcttcatgctca

SEQ ID NO: 28216 - DNA, 110 bp, synthetic construct
  source 1..110: mol_type = other DNA
agggagggtgcgggggtgagaggaagagaataccaatgactgcatcttttactgaatgcttattacatgtcagcctaagtattttaaattccttatcttcccttttcttt

SEQ ID NO: 28217 - DNA, 110 bp, synthetic construct; identical to SEQ ID NO: 28216
  source 1..110: mol_type = other DNA

SEQ ID NO: 28218 - DNA, 110 bp, synthetic construct
  source 1..110: mol_type = other DNA
ctccagagttcactctctttctgcttctctaagaccaaggaaaagtaagaacatcactgcaaatcaggcacaaagctgtacctgttcaagaagcagaaacttcatttgca

SEQ ID NO: 28219 - DNA, 110 bp, synthetic construct
  source 1..110: mol_type = other DNA
actgcaaatcaggcacaaagctgtacctgttcaagaagcagaaacttcatttgcagcctgtggcatctgagcatccagacactgttgctcttctcaccactttccaatac

SEQ ID NO: 28220 - DNA, 110 bp, synthetic construct
  source 1..110: mol_type = other DNA
atatttcattcaatgcggacagcaactttgtgaggtcaagggcattattcctcttttgcccctttcggagatgatataactgaggtccagggaggataaatgagctcaag

SEQ ID NO: 28221 - DNA, 110 bp, synthetic construct
  source 1..110: mol_type = other DNA
ttgcccctttcggagatgatataactgaggtccagggaggataaatgagctcaaggtcatatgcttaataaagagtaaggcagagacttaattccaggtgtgtctctaaa

SEQ ID NO: 28222 - DNA, 110 bp, synthetic construct
  source 1..110: mol_type = other DNA
aaggtcaccagcaagtctgtggaagagaatggatgctgcccatccctcccccgtgctcttccccatgccacagatatgaggttttctctacctgatcaattttcatctct

SEQ ID NO: 28223 - DNA, 110 bp, synthetic construct
  source 1..110: mol_type = other DNA
ctcttccccatgccacagatatgaggttttctctacctgatcaattttcatctctacaaagcactttttagtgggaatcaaactttcttccccaatgggtgaagttcatt

SEQ ID NO: 28224 - DNA, 110 bp, synthetic construct
  source 1..110: mol_type = other DNA
ctcttggttcccctaaaaatctctggacagacactttctattgaaaatgcaaatatctctgagaaaagtcacatatttatccccattcatagctgggtctaaattaatct

SEQ ID NO: 28225 - DNA, 110 bp, synthetic construct
  source 1..110: mol_type = other DNA
tctctgagaaaagtcacatatttatccccattcatagctgggtctaaattaatctataagtccttcctgaccatataatattggacagccaaggcaagagagttttgaag

SEQ ID NO: 28226 - DNA, 110 bp, synthetic construct
  source 1..110: mol_type = other DNA
ttccagatcttccaggcacatgaagagcagaatgataacaaccctataaaaactttaggagctctttctccacaaaatgatccaaaactaacctgcatttaccaagtata

SEQ ID NO: 28227 - DNA, 110 bp, synthetic construct
  source 1..110: mol_type = other DNA
taggagctctttctccacaaaatgatccaaaactaacctgcatttaccaagtatataaagccaaatttggaagaaataaacctaggaaggtcaaatagtgctgtagtgga

SEQ ID NO: 28228 - DNA, 110 bp, synthetic construct
  source 1..110: mol_type = other DNA
atggtaatatattcatgaggataattggatggtatgtaacatggtccccagcttatcagtaaatgaacaagctcaaacagagggatagaattttattttctgaacccttt

SEQ ID NO: 28229 - DNA, 110 bp, synthetic construct
  source 1..110: mol_type = other DNA
tcagtaaatgaacaagctcaaacagagggatagaattttattttctgaaccctttgattaacttcgcttctttcccccacttacagcaccataaaaatggacactctttt

SEQ ID NO: 28230 - DNA, 110 bp, synthetic construct
  source 1..110: mol_type = other DNA
agaggtatctgttgaaacatctttaagcaaaacctgtcatacgacgtctctctcagctcatcctccatctcagctacccccccattaggatgttgacacacgcaaacatc

SEQ ID NO: 28231 - DNA, 110 bp, synthetic construct
  source 1..110: mol_type = other DNA
gctcatcctccatctcagctacccccccattaggatgttgacacacgcaaacatcaaagtcagagatgccccacagagcagcactgccaaggtaccagtgagtggctctg

SEQ ID NO: 28232 - DNA, 110 bp, synthetic construct
  source 1..110: mol_type = other DNA
ctcttgcacagaggtcagcaacaatggcccataagaaaaacctagcccccatctgtttttgtataacctctgagctaaggatagtttcaataatttaaaatggttgaaga

SEQ ID NO: 28233 - DNA, 110 bp, synthetic construct
  source 1..110: mol_type = other DNA
cccccatctgtttttgtataacctctgagctaaggatagtttcaataatttaaaatggttgaagaaataaaaaagaggagttccccttgtggctcagcgggttaagaacc

SEQ ID NO: 28234 - DNA, 110 bp, synthetic construct
  source 1..110: mol_type = other DNA
acatttctgcttccttaaaagcattggacccagtacctgaagaaccaggaaagccttccttgagttcaataggtttttattggggggctcaaaaggtgattaagagtttc

SEQ ID NO: 28235 - DNA, 110 bp, synthetic construct
  source 1..110: mol_type = other DNA
ttccttgagttcaataggtttttattggggggctcaaaaggtgattaagagtttcttaggacagcatagccaaggcctagaggggtattgcagcaggtgtttgggggcct

SEQ ID NO: 28236 - DNA, 110 bp, synthetic construct
  source 1..110: mol_type = other DNA
tttgcctctcctttctacttcttgaggccacctctgttctgttttgtgctcacaggtgagcctaaaagctatgtaagccatcaattacttcaaagcattttagacccact

SEQ ID NO: 28237 - DNA, 110 bp, synthetic construct
  source 1..110: mol_type = other DNA
gtgagcctaaaagctatgtaagccatcaattacttcaaagcattttagacccactcaaggcatccattttaaaacagttattggtcatttctaaaaataggaaatgagat

SEQ ID NO: 28238 - DNA, 110 bp, synthetic construct
  source 1..110: mol_type = other DNA
ccatatctgagaaaatgagataaaacaggattccctgccctctgggagctcacagtctgaaacttaaatgtacaaaccaataacagatcatgcagaactcatcatttcta

SEQ ID NO: 28239 - DNA, 110 bp, synthetic construct
  source 1..110: mol_type = other DNA
tctgaaacttaaatgtacaaaccaataacagatcatgcagaactcatcatttctatggtagaaacctgcacaggttgtgatgggatcacatctaaggagacgtcctagac

SEQ ID NO: 28240 - DNA, 110 bp, synthetic construct; identical to SEQ ID NO: 28238
  source 1..110: mol_type = other DNA

SEQ ID NO: 28241 - DNA, 110 bp, synthetic construct; identical to SEQ ID NO: 28239
  source 1..110: mol_type = other DNA

SEQ ID NO: 28242 - DNA, 110 bp, synthetic construct
  source 1..110: mol_type = other DNA
caatggggactctccgtcttgtaatcttaagtgaacatctgaagacatctctcaactctcatcccccttagggcaagagatattctatttctagcagctggaccagggtg

SEQ ID NO: 28243 - DNA, 110 bp, synthetic construct
  source 1..110: mol_type = other DNA
ctctcatcccccttagggcaagagatattctatttctagcagctggaccagggtgagtgcacaaggagtatctattcagtgaggtaatggtatggctagaagaagaagag

SEQ ID NO: 28244 - DNA, 110 bp, synthetic construct
  source 1..110: mol_type = other DNA
ccaggatttcttgcttctctctctctgctcacatagcattttatacatctccattgaccactcatcccaatggttttaaacatctcttcacacagacaccttctccctta

SEQ ID NO: 28245 - DNA, 110 bp, synthetic construct
  source 1..110: mol_type = other DNA
ttcctacttcgttctcctttctcaactatagcttttgaactatgtcaagtgacatcataacagctgaaaagcattagcaaccactgaagtaactgacacttcttggcaat

SEQ ID NO: 28246 - DNA, 110 bp, synthetic construct
  source 1..110: mol_type = other DNA
atccagcattgccatgagctgtggtgtggatcctaaacatggcttgggtcccccactgctgtgactgcagtgtaggcagtgactcgacccctagccgggaacgtccatat

SEQ ID NO: 28247 - DNA, 110 bp, synthetic construct; identical to SEQ ID NO: 28246
  source 1..110: mol_type = other DNA

SEQ ID NO: 28248 - DNA, 110 bp, synthetic construct; identical to SEQ ID NO: 28246
  source 1..110: mol_type = other DNA

SEQ ID NO: 28249 - DNA, 110 bp, synthetic construct; identical to SEQ ID NO: 28246
  source 1..110: mol_type = other DNA

SEQ ID NO: 28250 - DNA, 110 bp, synthetic construct
  source 1..110: mol_type = other DNA
gggcaaatagagctgtagggccctgggacaggctctatctctggattgtggagacattgttctcatcacacttccaaaagctcctcaaagaaagatggtttcaggaaccc

SEQ ID NO: 28251 - DNA, 110 bp, synthetic construct
  source 1..110: mol_type = other DNA
ttatggcctccttgagctaagagagacactaaacattatgtcgtttagctatgctcagactttaatgattaaaaaaaatctggcatgatgatggagatccacgatcctag

SEQ ID NO: 28252 - DNA, 110 bp, synthetic construct
  source 1..110: mol_type = other DNA
cagactttaatgattaaaaaaaatctggcatgatgatggagatccacgatcctaggcatcagccctggtgttctgacatgcgggcatgggcccaggaatcttcatttcac

SEQ ID NO: 28253 - DNA, 110 bp, synthetic construct
  source 1..110: mol_type = other DNA
gaagggtggtgggagggatggattgaggggttgggattggcaaagtcatactcttgtataaggaatgagtggatgtatagcataggggaatctcaatgttctgtgataat

SEQ ID NO: 28254 - DNA, 110 bp, synthetic construct
  source 1..110: mol_type = other DNA
gtataaggaatgagtggatgtatagcataggggaatctcaatgttctgtgataatctgtatggaaatggatgtgtgtgtgtgtgtgtgtgtgtgtgttgctgaataattt

SEQ ID NO: 28255 - DNA, 110 bp, synthetic construct
  source 1..110: mol_type = other DNA
cctcctctgactatgtagttgctgctatgttggcgacagtctctgctcccacctttcccacatccacctgaccagatctgctaatccaacacggagcacctttatgaagg

SEQ ID NO: 28256 - DNA, 110 bp, synthetic construct
  source 1..110: mol_type = other DNA
taagctagggggttttattgctcttgcttttcagatgaatgagctgaggcgctgagggttcaaggtcttgcacagagtcacctggttaatggtggtcagagccagaaccg

SEQ ID NO: 28257 - DNA, 110 bp, synthetic construct
  source 1..110: mol_type = other DNA
aaggccttgaaaatccattaacttcatgtttttggctatatttatatgctttgatactgacaatattaatttccataacagcttggtgcctttatagtccagccttcctc

SEQ ID NO: 28258 - DNA, 110 bp, synthetic construct
  source 1..110: mol_type = other DNA
cagagataatactgtaggagtttgcttgtggctcagggagttaaggatccagcaccatcactgccgcagcttgggtcatcattgtggctagggtttgcttctttgcctgg

SEQ ID NO: 28259 - DNA, 110 bp, synthetic construct
  source 1..110: mol_type = other DNA
catcactgccgcagcttgggtcatcattgtggctagggtttgcttctttgcctgggaactgtggcatgcagcaggtgcagccagtaaaataaaaataatgtaatctatta

SEQ ID NO: 28260 - DNA, 110 bp, synthetic construct
  source 1..110: mol_type = other DNA
gaccttgaatgaccattaatgaatattatagtcattcatctccctgaaagtcaggagctaagagagcaacgtttgagatacatttaggaagcaaaatcaaaagtattatg

SEQ ID NO: 28261 - DNA, 110 bp, synthetic construct
  source 1..110: mol_type = other DNA
aaagtccattgataaccacgtttttcttatggcctcagtgaccacacatgtagccgcactgcctctgtgcatgtctggacatcagacgtgttgtacctggtctcttagct

SEQ ID NO: 28262 - DNA, 110 bp, synthetic construct
  source 1..110: mol_type = other DNA
tctgctttggagaaatgtctaattagatctcctgcccattttttgatttcctttttgatattgagctgcaagaggtgtttatgtatattggagattaatcctttgtcagt

SEQ ID NO: 28263 - DNA, 110 bp, synthetic construct; identical to SEQ ID NO: 28262
  source 1..110: mol_type = other DNA

SEQ ID NO: 28264 - DNA, 110 bp, synthetic construct
  source 1..110: mol_type = other DNA
gtgtttttgcattcaagggactcctcaatactaaagaaagaccacttctgcttagcagtcagctacaaattttggctaatatgttctcatccctttgaatggtggctttg

SEQ ID NO: 28265 - DNA, 110 bp, synthetic construct
  source 1..110: mol_type = other DNA
cagtcagctacaaattttggctaatatgttctcatccctttgaatggtggctttgtcttcttcccatgctcttctccaggaaaaccagtgactagcctttccttgcaggt

SEQ ID NO: 28266 - DNA, 110 bp, synthetic construct
  source 1..110: mol_type = other DNA
tgtttgcaggggtctatcaggcagattatctaactaatgctgatcttatttctgattaactgttttaaaattgcctttctgaatgagctgaaactgtaattaagtctcag

SEQ ID NO: 28267 - DNA, 110 bp, synthetic construct
  source 1..110: mol_type = other DNA
gaataaatacactgcctaataacaactgatgaaggcaaaagatgaaacttcctcttagaaacagcgattctttgttgaaatttcccctggggcaaagggtcacccagctg

SEQ ID NO: 28268 - DNA, 110 bp, synthetic construct
  source 1..110: mol_type = other DNA
tagaaacagcgattctttgttgaaatttcccctggggcaaagggtcacccagctgagataatcgttaattaagactggacagaccaggcaggaagccagaccagtacccc

SEQ ID NO: 28269 - DNA, 110 bp, synthetic construct; identical to SEQ ID NO: 28267
  source 1..110: mol_type = other DNA

SEQ ID NO: 28270 - DNA, 110 bp, synthetic construct; identical to SEQ ID NO: 28268
  source 1..110: mol_type = other DNA

SEQ ID NO: 28271 - DNA, 110 bp, synthetic construct
  source 1..110: mol_type = other DNA
gacccttagacctctttcaatcagtttctctataagaaaaatgggaattttcatagtattaatgccacgatgtggtcatagacgtttagttagacaatacttagcaagcc

SEQ ID NO: 28272 - DNA, 110 bp, synthetic construct
  source 1..110: mol_type = other DNA
gtattaatgccacgatgtggtcatagacgtttagttagacaatacttagcaagccttttggctcagatctgacatatagaactcaataaagttagtcatcaatttaaatg

SEQ ID NO: 28273 - DNA, 110 bp, synthetic construct
  source 1..110: mol_type = other DNA
ttccacgcctacccacagatggctttacccagttccacagcacaagtctgatttctttccaaagcttcaacttataactaggggatcacggaagcggtagatgaatagaa

SEQ ID NO: 28274 - DNA, 110 bp, synthetic construct
  source 1..110: mol_type = other DNA
aggaatggtcacaagacacaagtcaagccaagagtggagctatttccttgtggaatttactggggaaagaaatgttctccttcactggaggcttcttaaatgagtagagt

SEQ ID NO: 28275 - DNA, 110 bp, synthetic construct
  source 1..110: mol_type = other DNA
ctactgaataccatgtcgatgtggaaattgataagcaacatagttacacttacttgtcaataaaagctgtacctcataaagtaaaaacagcaacggcaacaaaaaaacag

SEQ ID NO: 28276 - DNA, 110 bp, synthetic construct
  source 1..110: mol_type = other DNA
gtcaataaaagctgtacctcataaagtaaaaacagcaacggcaacaaaaaaacaggcgatagcatgtttaattactccattttatgaaaaaatgcaatcatgatgctcat

SEQ ID NO: 28277 - DNA, 110 bp, synthetic construct
  source 1..110: mol_type = other DNA
aaaacaaaacagtaacttcccacagagatagcaagaacctgatttccttcacatcatttagctgggtgagctcctctcctctgaactggaatacaaggtaccttttcact

SEQ ID NO: 28278 - DNA, 110 bp, synthetic construct
  source 1..110: mol_type = other DNA
atttagctgggtgagctcctctcctctgaactggaatacaaggtaccttttcactcggtaatcccagatcatgcaattctttccctgtaggacaggaggaaaagaagcag

SEQ ID NO: 28279 - DNA, 110 bp, synthetic construct
  source 1..110: mol_type = other DNA
ttagaatcagagttcttatcaggaaaatactctctaagagctgtaaaaccccatatggctatctcttgagaattcagatagcctgcctgggagaatactgggttttcatg

SEQ ID NO: 28280 - DNA, 110 bp, synthetic construct
  source 1..110: mol_type = other DNA
accatcacagtctatgtctcattccactgggtgtgaccacactcagtcatctcagagcctgtacctctaaaactgtcaggagacttgcagcggaaagaagaagcttccat

SEQ ID NO: 28281 - DNA, 110 bp, synthetic construct
  source 1..110: mol_type = other DNA
agcctgtacctctaaaactgtcaggagacttgcagcggaaagaagaagcttccatgtctcctgatttgccttaccttgggtccactctgcatggacatgttggaatgttt

SEQ ID NO: 28282 - DNA, 110 bp, synthetic construct
  source 1..110: mol_type = other DNA
aggacagtaactccaactctctctgccatcctagttgtcctcagtagactatgtcagctgatccagtctctctttaagtgccgaactcaagaccagagccaatactcttg

SEQ ID NO: 28283 - DNA, 110 bp, synthetic construct
  source 1..110: mol_type = other DNA
agctgatccagtctctctttaagtgccgaactcaagaccagagccaatactcttggtctggtctaaatagtgcataacaggcctgatgataaccctccttgttttggacc

SEQ ID NO: 28284 - DNA, 110 bp, synthetic construct
  source 1..110: mol_type = other DNA
atcggcagaggataggaagccccttgtgtgccttaagttataaatcgtatgcttcactatggtcgtttacagggcagccctccgctggagttttggacacgtaagcagct

SEQ ID NO: 28285 - DNA, 110 bp, synthetic construct
  source 1..110: mol_type = other DNA
actatggtcgtttacagggcagccctccgctggagttttggacacgtaagcagctattaataaagtggcattttgttcttactccatttttccttatagatactacttgt

SEQ ID NO: 28286 - DNA, 110 bp, synthetic construct
  source 1..110: mol_type = other DNA
atccaactctgagaaaaatatagtgtctccctcaagttgctcacagtgctttggggaaaacacatcttgcccactctgtgtgagaagaatgtacagaatgctccaggaat

SEQ ID NO: 28287 - DNA, 110 bp, synthetic construct
  source 1..110: mol_type = other DNA
tacactgaatgagtaaaactgagagcagagaaagaaccagactctcctggtgtctaagcttacttaaaattcttatagctcccgcaaacgaaggaaagtcacatggcctc

SEQ ID NO: 28288 - DNA, 110 bp, synthetic construct
  source 1..110: mol_type = other DNA
aagcttacttaaaattcttatagctcccgcaaacgaaggaaagtcacatggcctcctgtcctaagccattttcccgctggcacttcctctccacccctccctcctcccag

SEQ ID NO: 28289 - DNA, 110 bp, synthetic construct
  source 1..110: mol_type = other DNA
atcactgtcagaaagtgctcagaattgtactagttatctaatactgtataacaaaatatcccagaatttagcagcttaaaactacaaatatgtatgctctcactactttc

SEQ ID NO: 28290 - DNA, 110 bp, synthetic construct
  source 1..110: mol_type = other DNA
atatcccagaatttagcagcttaaaactacaaatatgtatgctctcactactttctgggggtagggattctagtttagttcaagttatcaggcagacctggagacatatg

SEQ ID NO: 28291 - DNA, 110 bp, synthetic construct
  source 1..110: mol_type = other DNA
gatgttatctgtaatggaaagtagcagaaaataaaagcaacagagcaggttagcctgaaactgtatcctccagctgtcctatctcccttttcagaagccaggtttaaagt

SEQ ID NO: 28292 - DNA, 110 bp, synthetic construct
  source 1..110: mol_type = other DNA
tgaaactgtatcctccagctgtcctatctcccttttcagaagccaggtttaaagtgattttacttctttccatcagaccagcctgtatttttgagtccttctcaaatggg

SEQ ID NO: 28293 - DNA, 110 bp, synthetic construct
  source 1..110: mol_type = other DNA
actccaaacggatgttcaaacatacaaaatccctcatacataaagctgacatatgctgttaaaggaagagaattgctgattttccttggagactgttctcattttcacaa

SEQ ID NO: 28294 - DNA, 110 bp, synthetic construct
  source 1..110: mol_type = other DNA
gatagaatgataataatatagaaaaaaaaaggaagtaacctggagctatgatgatgaaacgaagccactaattctttgcaacactaaagctgccctatccctagcctgtt

SEQ ID NO: 28295 - DNA, 110 bp, synthetic construct
  source 1..110: mol_type = other DNA
gaaacgaagccactaattctttgcaacactaaagctgccctatccctagcctgtttgctctttttagttgagaaaataaatgtctattattgcactacttttagtaggtt

SEQ ID NO: 28296 - DNA, 110 bp, synthetic construct
  source 1..110: mol_type = other DNA
attgaaaatgaaactaccatttgatataacaattctactcctgggcatttgtccaaagaaaatgaaaacactaactcaaaaagatatctgcacccccatgttcactgcag

SEQ ID NO: 28297 - DNA, 110 bp, synthetic construct; identical to SEQ ID NO: 28296
  source 1..110: mol_type = other DNA

SEQ ID NO: 28298 - DNA, 110 bp, synthetic construct
  source 1..110: mol_type = other DNA
gtgaagagagaagaattcacatcaagttggaggaaccaccaaaggcttcttgaaagagtgaaccagtaggatttgttggtcagagaggatggagggcattccagatataa

SEQ ID NO: 28299 - DNA, 110 bp, synthetic construct
  source 1..110: mol_type = other DNA
gagtgaaccagtaggatttgttggtcagagaggatggagggcattccagatataagaaacactaaaacagagtgcacaagggaaggaaaactgggaacatccttgaagaa

SEQ ID NO: 28300 - DNA, 110 bp, synthetic construct
  source 1..110: mol_type = other DNA
ctcctcaacagcccacgatgtcagcagatttgccccagggctgttttttgagctgtctcatcctgacctccaataggcaagtagggaagagtaaagatgtgactcttcaa

SEQ ID NO: 28301 - DNA, 110 bp, synthetic construct
  source 1..110: mol_type = other DNA
tctcatcctgacctccaataggcaagtagggaagagtaaagatgtgactcttcaaagagtctggctaccatcatgggcagagttgaagcagccatgcctggagctgggtg

SEQ ID NO: 28302 - DNA, 110 bp, synthetic construct
  source 1..110: mol_type = other DNA
ataatggtaccacctctaccaacgcctatcctattggtccaaggatggataataatccaaagctcagccattcagagccaatccttttcctgggataccttcttcactga

SEQ ID NO: 28303 - DNA, 110 bp, synthetic construct
  source 1..110: mol_type = other DNA
actgagggtttgggattgtcatatgcacattgaggtatatggaactattggccaatggggaccttctataaagcacagagaactataccaatattatgtgataatctatg

SEQ ID NO: 28304 - DNA, 110 bp, synthetic construct
  source 1..110: mol_type = other DNA
tggggaccttctataaagcacagagaactataccaatattatgtgataatctatgtgtgaaaagaatccaagagagaatagatatgtgcatatatatgactgggtcactt

SEQ ID NO: 28305 - DNA, 110 bp, synthetic construct
  source 1..110: mol_type = other DNA
acctcagggtcgctatggtgactagaaaatgccctaactgtccaagttgtggatgtcacccattgctgacatcttcaactcatgcctggttcctgacctctgcttcattc

SEQ ID NO: 28306 - DNA, 110 bp, synthetic construct
  source 1..110: mol_type = other DNA
tttcccccactataggactatgtttttttttaatttttttaccaaaccccattcatcactaacttattttcaccacctttattaaaaggcatacataactgccagaatta

SEQ ID NO: 28307 - DNA, 110 bp, synthetic construct
  source 1..110: mol_type = other DNA
tcactaacttattttcaccacctttattaaaaggcatacataactgccagaattactggggtaagcagtaacatcatgggataagcaatattgccacacggagttgacct

SEQ ID NO: 28308 - DNA, 110 bp, synthetic construct
  source 1..110: mol_type = other DNA
taatttaagcaaatgcagcgccatgcatcagagttagacaatcaaggcacacaatccttatccttaattttcttacttgtaaaatgaggacagacatccccagctctcag

SEQ ID NO: 28309 - DNA, 110 bp, synthetic construct
  source 1..110: mol_type = other DNA
aagtaagccccagacttctctgagccttagtttcctcctccccagtgtctcctgcctacctttccagacttcgctcctgctgaactctgctttctacaaacacagtgtag

SEQ ID NO: 28310 - DNA, 110 bp, synthetic construct
  source 1..110: mol_type = other DNA
ctacctttccagacttcgctcctgctgaactctgctttctacaaacacagtgtagctattagaacacagtcttccatgtacccagacaaaacctgaggctcagctctgta

SEQ ID NO: 28311 - DNA, 110 bp, synthetic construct
  source 1..110: mol_type = other DNA
ctttccccttcccccttgacaacaacaagtctgttctccaagtccacgcatttcttttctgtgtccactcatttctaaggaatttcctttcttcagggtacaacgtgaaa

SEQ ID NO: 28312 - DNA, 110 bp, synthetic construct
  source 1..110: mol_type = other DNA
tttctgtgtccactcatttctaaggaatttcctttcttcagggtacaacgtgaaattgataactcgctcacttccatcccatcccctcatgtttaacagatgaggacggc

SEQ ID NO: 28313 - DNA, 110 bp, synthetic construct
  source 1..110: mol_type = other DNA
aaggaaggatcacgctgctcgtttagactttccgctgcccccgtttcctttggtagctcagaggtggaggaggaggagagcattgaattatattggcggtaacccatccc

SEQ ID NO: 28314 - DNA, 110 bp, synthetic construct
  source 1..110: mol_type = other DNA
gctcagaggtggaggaggaggagagcattgaattatattggcggtaacccatcccctgtcactgacctctgtcctaggcaggatgaaaggagacctgctctctgtagcca

SEQ ID NO: 28315 - DNA, 110 bp, synthetic construct
  source 1..110: mol_type = other DNA
tactgacacgtcttcacactattcattaccattaactataatagcttgcatttaatgtacactttctaggttgccaggctccaaactaagcatattacatgtattaatta

SEQ ID NO: 28316 - DNA, 110 bp, synthetic construct
  source 1..110: mol_type = other DNA
tgtacactttctaggttgccaggctccaaactaagcatattacatgtattaattatctcactgaaccctcacaacaaccctgagagagaggtacatttaaaaaaaaattg

SEQ ID NO: 28317 - DNA, 110 bp, synthetic construct
  source 1..110: mol_type = other DNA
cctgcttagtccaatgacccatcactgagctggctgtaaaatcctggtgtcagtggtccctgcctcaaaggtcactgtgtctgacatagagggtgataatgatgacattc

SEQ ID NO: 28318 - DNA, 110 bp, synthetic construct
  source 1..110: mol_type = other DNA
cggacctgcctcaagccccagtttctcttcttactaactgtgtgaccctgggcaagttgcttaactcttccgaccctgagctacctgtctgaaaagtggtgctaatagtt

SEQ ID NO: 28319 - DNA, 110 bp, synthetic construct
  source 1..110: mol_type = other DNA
gttgcttaactcttccgaccctgagctacctgtctgaaaagtggtgctaatagttctttcttcagagcgttgttgagagatgagcaggataatgtggagccgggcgtaaa

SEQ ID NO: 28320 - DNA, 110 bp, synthetic construct
  source 1..110: mol_type = other DNA
cattcctcccaatgctagactccagggaaatatcgattgactggacgactggatccccagctaggctgtttgtaactcaagggcaaggaccatgtctttttcggggttcc

SEQ ID NO: 28321 - DNA, 110 bp, synthetic construct
  source 1..110: mol_type = other DNA
tgtctccctcttggccaatcacagtgcctgatcatccaccatgacccactgattgacacattacctccccaaagaggtgatgccttaagcattttccagctcagagcctg

SEQ ID NO: 28322 - DNA, 110 bp, synthetic construct
  source 1..110: mol_type = other DNA
acacattacctccccaaagaggtgatgccttaagcattttccagctcagagcctgcagaagcaagaaacgcctccccttgccccacttcctgtgtccttctccattcctg

SEQ ID NO: 28323 - DNA, 110 bp, synthetic construct
  source 1..110: mol_type = other DNA
aggaggtgctgactcagggaggtgtggctacttcagctaagccttgctgttcccaagctaggaatccaatcagattggttggtggtgaagatgctcagggtcttcactgg

SEQ ID NO: 28324 - DNA, 110 bp, synthetic construct
  source 1..110: mol_type = other DNA
ggctgcgtggagctattcagattcttccctcagtcactgactcttggatcagtggcatggatttgcaagatgggctggcctagagttaaacctctggctttgaacttgtc

SEQ ID NO: 28325 - DNA, 110 bp, synthetic construct
  source 1..110: mol_type = other DNA
catggatttgcaagatgggctggcctagagttaaacctctggctttgaacttgtccccactggattctagctattaacctaagccgccagagacaatgcatacagatggg

SEQ ID NO: 28326 - DNA, 110 bp, synthetic construct
  source 1..110: mol_type = other DNA
cggatctgtatttccagctggccctcagcacgccccccactagctcaaggggctcaggcgtcaggtgatacacatccagagagaaaatccacatcctaggcttcccctag

SEQ ID NO: 28327 - DNA, 110 bp, synthetic construct
  source 1..110: mol_type = other DNA
atgaagttttgcaaggatggtggggactaccgatgtcagaactactaattaagttacatagaaagaggtctgaaaactgatcattgaactagcaaagtgaccattgatgg

SEQ ID NO: 28328 - DNA, 110 bp, synthetic construct
  source 1..110: mol_type = other DNA
acatagaaagaggtctgaaaactgatcattgaactagcaaagtgaccattgatggggtttgaaagagtagcttgggacttctgggagtttgatccctggccttgctcagg

SEQ ID NO: 28329 - DNA, 110 bp, synthetic construct
  source 1..110: mol_type = other DNA
gaatttgcagaatttgctgatcgtttagcccaaacttcccttgagtcatcgtcttcttcactctgcagtgttgtagacaaacagaagctcagtgatggaaagtgacttga

SEQ ID NO: 28330 - DNA, 110 bp, synthetic construct
  source 1..110: mol_type = other DNA
ctttccaactcaccccagtccccacatcactgattattcctgccgactgggcagcggctgcctcagagtggtgctattatgtaaagggaaaaaaatgacaggcaagccca

SEQ ID NO: 28331 - DNA, 110 bp, synthetic construct
  source 1..110: mol_type = other DNA
cgcgtgtgtgtgtgtgtgtgtgtgtgtgtgtgtgtgtgcgtgtaagagagagagattttacattaaccctcccccccctcagagttctagtttctcttgaaaatttaggt

SEQ ID NO: 28332 - DNA, 110 bp, synthetic construct
  source 1..110: mol_type = other DNA
ttttacattaaccctcccccccctcagagttctagtttctcttgaaaatttaggtcaggccatcttggggtttcatttcctgctaaggcccatccaccccaacttatcca

SEQ ID NO: 28333 - DNA, 110 bp, synthetic construct
  source 1..110: mol_type = other DNA
ctgggccagggatcaagttccaagccacatgtgcaacttagggccacagctgaagcaacgctggatgcttaacccacagttcaggatgcttaacctacaggtaagttcaa

SEQ ID NO: 28334 - DNA, 110 bp, synthetic construct
  source 1..110: mol_type = other DNA
taggagagcatgggtgggggagagagaggtggacaggttccatcccctcgtgtcttgggtcagcacagagaatcgtgaaaatacacccgaggtcttgccatggctgttgt

SEQ ID NO: 28335 - DNA, 110 bp, synthetic construct
  source 1..110: mol_type = other DNA
tgggtcagcacagagaatcgtgaaaatacacccgaggtcttgccatggctgttgtggagtgtgggtttggggatttgtaacaaatacttgcttatttcaggtgcagcagg

SEQ ID NO: 28336 - DNA, 110 bp, synthetic construct
  source 1..110: mol_type = other DNA
tctgtccagccagggggggttggtctggatactctctaggttttgtttccagagttgataggctaagaagccacttcctttagcagcacagtcttgcaacatgtgtcctt

SEQ ID NO: 28337 - DNA, 110 bp, synthetic construct
  source 1..110: mol_type = other DNA
tgataggctaagaagccacttcctttagcagcacagtcttgcaacatgtgtccttggatcttcttcctttgccaaggatcttgtaacagaatgccctgtgtctgtttcct

SEQ ID NO: 28338 - DNA, 110 bp, synthetic construct
  source 1..110: mol_type = other DNA
ctgggaccacctcccattttcccagacttgcgtagggaactctcagaactcttccggccaaggccatctttaaaggggtggcatctgggctttccccctttcctgctgct

SEQ ID NO: 28339 - DNA, 110 bp, synthetic construct
  source 1..110: mol_type = other DNA
ggccaaggccatctttaaaggggtggcatctgggctttccccctttcctgctgctcacccgtgttttctcaattctcaggaaaggaggcagatgtcccaacacccgccgc

SEQ ID NO: 28340 - DNA, 110 bp, synthetic construct; identical to SEQ ID NO: 28338
  source 1..110: mol_type = other DNA

SEQ ID NO: 28341 - DNA, 110 bp, synthetic construct; identical to SEQ ID NO: 28339
  source 1..110: mol_type = other DNA

SEQ ID NO: 28342 - DNA, 110 bp, synthetic construct
  source 1..110: mol_type = other DNA
ggtgttttatggtttatttacacacgccttccctcgccccgcttttcacggctacaaacaattgctgccgtgagcattcttcctacactttcttgtgcacatgtgatttt

SEQ ID NO: 28343 - DNA, 110 bp, synthetic construct
  source 1..110: mol_type = other DNA
aaacaattgctgccgtgagcattcttcctacactttcttgtgcacatgtgattttatttctccacggcagaaacgggcagtggaaatacaggttaccagggaatgaacgt

SEQ ID NO: 28344 - DNA, 110 bp, synthetic construct
  source 1..110: mol_type = other DNA
taaggaaaactagcaaagagttgtgggaaatgatctggttgtttcctcccttacagagtgttagcaaagtttcattcccaaatctaaggaagcagaatgtaaatctctag

SEQ ID NO: 28345 - DNA, 110 bp, synthetic construct
  source 1..110: mol_type = other DNA
gcatcattccagcatacagcacagtgttggtacagagtgagcatgctgtagtatttggagaaagaatgcacaatgccaagtatatttatcagaattacttgagttttata

SEQ ID NO: 28346 - DNA, 110 bp, synthetic construct
  source 1..110: mol_type = other DNA
tggagaaagaatgcacaatgccaagtatatttatcagaattacttgagttttatacgtccttttgcaccagaaacgactaagcatgagatgtatactagtcaaatactga

SEQ ID NO: 28347 - DNA, 110 bp, synthetic construct
  source 1..110: mol_type = other DNA
gggactaaaataccccctcctctattccttcctcatcatcagcagtaagaatagcaactgcttgtcatagattttaaatggttacaaactttttatagtagcctttattt

SEQ ID NO: 28348 - DNA, 110 bp, synthetic construct
  source 1..110: mol_type = other DNA
aactgcttgtcatagattttaaatggttacaaactttttatagtagcctttatttttccctcacaccttgagtctaggctggtttgtgaactgtctggaccagaagtggt

SEQ ID NO: 28349 - DNA, 110 bp, synthetic construct
  source 1..110: mol_type = other DNA
ttccgtctacaacactagccctcaaagaacttccacaaataaacttacaaggatgatgagctgcacattaaacataaccaaataagtgtgtaaacaagaactaacagaca

SEQ ID NO: 28350 - DNA, 110 bp, synthetic construct
  source 1..110: mol_type = other DNA
atgagctgcacattaaacataaccaaataagtgtgtaaacaagaactaacagacaaaagataaaagaaaccatcctacaaagacttcaggtatggaattatgagacagat

SEQ ID NO: 28351 - DNA, 110 bp, synthetic construct
  source 1..110: mol_type = other DNA
tgcttaacagccctgcccttcgtatttctcttacttctgacctctgactatgagcagctagaagaaagcaggcagccctggcgacacgctggctccaaatctccttgact

SEQ ID NO: 28352 - DNA, 110 bp, synthetic construct
  source 1..110: mol_type = other DNA
agctagaagaaagcaggcagccctggcgacacgctggctccaaatctccttgactaggtcaccagttcatcaggtgtgttttcctcgtccacataactgcaggcaacagt

SEQ ID NO: 28353 - DNA, 110 bp, synthetic construct
  source 1..110: mol_type = other DNA
cctattttgccttcaaaataatcctctgaggtttcactgggctgtctctatcatatcaagaaaacgaggccaaaagtgattaaatagcttgttcaggtttcagagcagaa

SEQ ID NO: 28354 - DNA, 110 bp, synthetic construct
  source 1..110: mol_type = other DNA
cacagcaggagttcctagatatgatatctcttagtgggataaactgaggcatttaaaacataattcattggctaaggcccaagcactcataagcaaggagtggagctggt

SEQ ID NO: 28355 - DNA, 110 bp, synthetic construct
  source 1..110: mol_type = other DNA
aaacataattcattggctaaggcccaagcactcataagcaaggagtggagctggtatttgaaccagattcacctgatacaaaaactgtgccattttccctatttcacagc

SEQ ID NO: 28356 - DNA, 110 bp, synthetic construct
  source 1..110: mol_type = other DNA
agatttggcctcaggactttaattaatagacaatttgtttttaagagaattgctgccactatgaaccaaggaagataaacatgaagataagatcctgagaaaatttgcta

SEQ ID NO: 28357 - DNA, 110 bp, synthetic construct
  source 1..110: mol_type = other DNA
ccactatgaaccaaggaagataaacatgaagataagatcctgagaaaatttgctaatttctaatttgataatttcttgcagttcaccttctctttgcctttcctttaaac

SEQ ID NO: 28358 - DNA, 110 bp, synthetic construct
  source 1..110: mol_type = other DNA
gctttgttacattgctttgggttttgtcaggaatccaattatgtatgtgtcagatcgcctttacctctcctccagatctatccttttctttctactaacaaaaaaaaatc

SEQ ID NO: 28359 - DNA, 110 bp, synthetic construct
  source 1..110: mol_type = other DNA
acagcctattcagaacggctcaaggccaatctgaaaaagcaggagttaagtatttttaacatgatcttaaaaagtaacaccgggcgtgctaggcccatgattcagcgttt

SEQ ID NO: 28360 - DNA, 110 bp, synthetic construct
  source 1..110: mol_type = other DNA
ttaacatgatcttaaaaagtaacaccgggcgtgctaggcccatgattcagcgtttctttgcctgatttggagttgggctcctccaggtggagggcagcagctatgttcag

SEQ ID NO: 28361 - DNA, 110 bp, synthetic construct
  source 1..110: mol_type = other DNA
ctaaaaagcaaaaaagagagagaaagaatggtgatgttctggggaatttcttggggtttttccctgagtttcattgttgctgattccgtccctcttgaaaccttctgtct

SEQ ID NO: 28362 - DNA, 110 bp, synthetic construct
  source 1..110: mol_type = other DNA
ccaatcagagtgcttccctgggagatttggcccggaaatagtctttctctttctggccacaaaatggtgaagatgtaagtgcagagtagttggcagctctgctttcagtc

SEQ ID NO: 28363 - DNA, 110 bp, synthetic construct
  source 1..110: mol_type = other DNA
gccacaaaatggtgaagatgtaagtgcagagtagttggcagctctgctttcagtctagatcaaagctcatctgaaataataaagcctacttggagagaatgagctagaaa

SEQ ID NO: 28364 - DNA, 110 bp, synthetic construct
  source 1..110: mol_type = other DNA
ttgtgaatgtgtggtgcagcaaggtggagcacagttttgtttgagttgacactgtgattaccttcacagacttgaagctaatcaggatttccggggccattctcaacctc

SEQ ID NO: 28365 - DNA, 110 bp, synthetic construct
  source 1..110: mol_type = other DNA
gcctggaggcagtatatcaggaagacaagtccttctgaggcaatgagggggcatcaagcttatcttactccctgagcttgtctgaactggagcaagagaaaaaggttggt

SEQ ID NO: 28366 - DNA, 110 bp, synthetic construct
  source 1..110: mol_type = other DNA
tctcagggcaggaaattgtcccaggcactggaatccacacggcacaggctgagctgctctgcatctaacaccaggagttccccgtccttccagggcaacttgaccgggag

SEQ ID NO: 28367 - DNA, 110 bp, synthetic construct
  source 1..110: mol_type = other DNA
gctctgcatctaacaccaggagttccccgtccttccagggcaacttgaccgggaggtgggctgaggtctgactcggatctgaccctctgccgacagaaaggcatttggga

SEQ ID NO: 28368 - DNA, 110 bp, synthetic construct
  source 1..110: mol_type = other DNA
ctcaaatcaagtttgccatccacaggaagcgtttgagcagaggtcaccctgcaggttctgtaaacccagccgtgtctcagctcttcgtccttctcagtgattcccatgct

SEQ ID NO: 28369 - DNA, 110 bp, synthetic construct
  source 1..110: mol_type = other DNA
ttctgtaaacccagccgtgtctcagctcttcgtccttctcagtgattcccatgctccatgcagagaaggctcagggacacgtgtgacagtttccctgtgacagagcactg

SEQ ID NO: 28370 - DNA, 110 bp, synthetic construct
  source 1..110: mol_type = other DNA
agggcgtggagcacttgattggaacatggagcgaacacaggggatgcgaaaagaggcagaaaagagtctgaggacagatcacaggaggccaagacaccagcttgagagtt

SEQ ID NO: 28371 - DNA, 110 bp, synthetic construct
  source 1..110: mol_type = other DNA
agaaaggaagaagacagaaccgtaggtactagatataagtgaaaggaatgtgggactttaaagctttgctttgcaaatgtgtagtcaactcacaatgataaggcttagca

SEQ ID NO: 28372 - DNA, 110 bp, synthetic construct
  source 1..110: mol_type = other DNA
ctttaaagctttgctttgcaaatgtgtagtcaactcacaatgataaggcttagcatttctgtttgtttttatttttcggtagaacaccacaacagcccttgctcagaagg

SEQ ID NO: 28373 - DNA, 110 bp, synthetic construct
  source 1..110: mol_type = other DNA
tccatggaaaactgtcaccattccaagctgatgactgacaggtgaggccagccctgtacgtttctcatcgcagagtcagaaattctctgaggtgtccttctcactaaacc

SEQ ID NO: 28374 - DNA, 110 bp, synthetic construct
  source 1..110: mol_type = other DNA
ggagaccactgtaagctaatacttgctcaagaaaaccatcagcacaaagcaggctggctcgactagtggaggcctgagacattgggtgggggatgggatgaggtctgcat

SEQ ID NO: 28375 - DNA, 110 bp, synthetic construct; identical to SEQ ID NO: 28374
  source 1..110: mol_type = other DNA

SEQ ID NO: 28376 - DNA, 110 bp, synthetic construct
  source 1..110: mol_type = other DNA
ttgggagcggtcaacagattagcagtttaaactttttagaccagagcctggtaagcaggaaatactcaacacatgccagctattgatacatgaaagacacatagtaagac

SEQ ID NO: 28377 - DNA, 110 bp, synthetic construct
  source 1..110: mol_type = other DNA
caggaaatactcaacacatgccagctattgatacatgaaagacacatagtaagacccttgactgaggaccgcctacgtctcagatgtttgtgacttccctgtgtagtcac

SEQ ID NO: 28378 - DNA, 110 bp, synthetic construct
  source 1..110: mol_type = other DNA
gttgcagactgaaaccaccttcttctacgggagctcacatctctcatgggaccacgatccaataagtgtctagaaaaagaggcgacatgtaaacatttcaaagaactcac

SEQ ID NO: 28379 - DNA, 110 bp, synthetic construct
  source 1..110: mol_type = other DNA
gatccaataagtgtctagaaaaagaggcgacatgtaaacatttcaaagaactcaccgttgtcagtgtgcttaatattgggttcttgtactcaaatcttgttgtcctttgt

SEQ ID NO: 28380 - DNA, 110 bp, synthetic construct
  source 1..110: mol_type = other DNA
gggcagcctgagtcagtggagcagcgcaggctgctgatccgaatctggaatctggtccttgagacgggagtaacgctgatcttccagtagccccgagcaaagcttcttac

SEQ ID NO: 28381 - DNA, 110 bp, synthetic construct
  source 1..110: mol_type = other DNA
tccttgagacgggagtaacgctgatcttccagtagccccgagcaaagcttcttacctctctctgctctccctaaaatgggatcatggtacttaattgcttccctagctca

SEQ ID NO: 28382 - DNA, 110 bp, synthetic construct
  source 1..110: mol_type = other DNA
cacttgacttgaaatgcggacatccagccctttgcagacactttccctggtccctcctggagcttcagcttgtgggttcctcctgcagccccagagcggttagcagctgc

SEQ ID NO: 28383 - DNA, 110 bp, synthetic construct
  source 1..110: mol_type = other DNA
cctggagcttcagcttgtgggttcctcctgcagccccagagcggttagcagctgccctctgtggactgataggccatctgaccatgagctgcctgaatctccatgctgga

SEQ ID NO: 28384 - DNA, 110 bp, synthetic construct
  source 1..110: mol_type = other DNA
gttgcctaaaaatagagacctcagaccttggtatgttcgctttctgaatcttaacccaacctcctctcttagccccttcccactactcccctttatagctcctggggtca

SEQ ID NO: 28385 - DNA, 110 bp, synthetic construct
  source 1..110: mol_type = other DNA
ccaacctcctctcttagccccttcccactactcccctttatagctcctggggtcaaggtcaagggccgtaaactattcccaagacatcttgcctgctgcttcctcttgcc

SEQ ID NO: 28386 - DNA, 110 bp, synthetic construct
  source 1..110: mol_type = other DNA
actgcatgaaatccgtagaggaacgagtgtagatagaaaagagaagaggtttgatgagtgaaccctggagtaagtccggatgcggcgtttggagagatgaggcagccagt

SEQ ID NO: 28387 - DNA, 110 bp, synthetic construct
  source 1..110: mol_type = other DNA
gagtgaaccctggagtaagtccggatgcggcgtttggagagatgaggcagccagtaagacaggggaagggacaatcagatctcctggaagccaagggagaaaatttccct

SEQ ID NO: 28388 - DNA, 110 bp, synthetic construct
  source 1..110: mol_type = other DNA
ggagcagccctagaaaaggcaaaaagacaaacaaacaaacaaacgaacaaacaaaccaaacaccctaaggttctatgatattcctgacactctgccctgccatccccggg

SEQ ID NO: 28389 - DNA, 110 bp, synthetic construct
  source 1..110: mol_type = other DNA
ccaaacaccctaaggttctatgatattcctgacactctgccctgccatccccggggttacccggtggcaaacggctttatttgtacttctgtcagtcctctggtcatcac

SEQ ID NO: 28390 - DNA, 110 bp, synthetic construct
  source 1..110: mol_type = other DNA
tgaggccactcaaacacactcggcaccgatcttgggctgtgtccccttagttaccatgacttccttagaaaacatgcacaattcctgccttcaagtcacctatcctgcca

SEQ ID NO: 28391 - DNA, 110 bp, synthetic construct
  source 1..110: mol_type = other DNA
atgacttccttagaaaacatgcacaattcctgccttcaagtcacctatcctgccagcgtgttttgaggatgatgtaggagtctggggttagtaggtgcatactcttgcat

SEQ ID NO: 28392 - DNA, 110 bp, synthetic construct
  source 1..110: mol_type = other DNA
ccagcttctcatctgcatgaagttaaggagacgctcatcccttcatgaatttcgttggaggccaatccatcgcttctgaaaaagttgcaaaatcaccgtccagaggctcc

SEQ ID NO: 28393 - DNA, 110 bp, synthetic construct
  source 1..110: mol_type = other DNA
cttgcccaacctgctccctggccccttccacaaggggaagaaccatcgggacacctgcagccacttccaaggcttctgggacccagcatccttaccccttcattcggcga

SEQ ID NO: 28394 - DNA, 110 bp, synthetic construct
  source 1..110: mol_type = other DNA
tgcagccacttccaaggcttctgggacccagcatccttaccccttcattcggcgagtggattgtccaacaactgagttcttggtgggtgtgaagcattgttctaggcgct

SEQ ID NO: 28395 - DNA, 110 bp, synthetic construct
  source 1..110: mol_type = other DNA
tttttctgagtcattgtgcccagtgcaggcctcctactgtccggcaattggcttgctcagtaagaggcatgagtcctttttccaaggaagtctgtgttttggagaaaacc

SEQ ID NO: 28396 - DNA, 110 bp, synthetic construct
  source 1..110: mol_type = other DNA
gtaggcacgagagtatgtgacaaaccttgtggattctgcctcgtatctcatccacgtgtgctggaggctacagctagacgcacctgccctgcctcctcctctttcgtgtg

SEQ ID NO: 28397 - DNA, 110 bp, synthetic construct
  source 1..110: mol_type = other DNA
gacacaggtttgatcccagcccggcacagtggattaacgatctggtgttgcagagctgcagaataggtcacaactgtagctccgatctgatctctggcctgggaactgca

SEQ ID NO: 28398 - DNA, 110 bp, synthetic construct
  source 1..110: mol_type = other DNA
ctgcagaataggtcacaactgtagctccgatctgatctctggcctgggaactgcatatgcctcagggaagccaaaaaaaggaaaaagagagagaagaggcgagatgacaa

SEQ ID NO: 28399 - DNA, 110 bp, synthetic construct
  source 1..110: mol_type = other DNA
atacacaatatactttagtttgcatttcgatttggaaagagtaaggtgtgtgcagccagagagttttaaaacaaattttgatcctatgatacttgtcatttggttttgct

SEQ ID NO: 28400 - DNA, 110 bp, synthetic construct
  source 1..110: mol_type = other DNA
ccagagagttttaaaacaaattttgatcctatgatacttgtcatttggttttgctcctggcagactgttcttcctttgggggaaagttacataagcatttaattatatca

SEQ ID NO: 28401 - DNA, 110 bp, synthetic construct
  source 1..110: mol_type = other DNA
gaaccttgacctcttccacctgctgtcccagtcagaggatctttcatttcacctgatgcttcacggccattctgagtgcagtgctctaggagtgcttcctgcccttgact

SEQ ID NO: 28402 - DNA, 110 bp, synthetic construct
  source 1..110: mol_type = other DNA
atgcttcacggccattctgagtgcagtgctctaggagtgcttcctgcccttgactttgtcagagtgaacactggcggggccggggccatctcactcccagcgtgggcctg

SEQ ID NO: 28403 - DNA, 110 bp, synthetic construct
  source 1..110: mol_type = other DNA
gaaaaactcaaagacattgttaagtatattccctgaggagggccaggcccctgcccccaaagctgagctcttgtctcttgattgctcgtctcctgcctctgcatcccctc

SEQ ID NO: 28404 - DNA, 110 bp, synthetic construct
  source 1..110: mol_type = other DNA
catcctctgccagcacaagctttgtggctttgcagacttacgctctctgccttccccccaatgccctccttcatctcacatccccggaacggggtacctggaggagcact

SEQ ID NO: 28405 - DNA, 110 bp, synthetic construct
  source 1..110: mol_type = other DNA
cctctatgtgcagcaaaattagctttctaaagtgaaagagaaatgaagattcttgcaggtaaacaaaaattgggggaatttgttgccagttgacttttcttgcaagaaaa

SEQ ID NO: 28406 - DNA, 110 bp, synthetic construct
  source 1..110: mol_type = other DNA
agctggagaaagttaaggccaaaagctagttgtttccattataagtggctaagaataagagtttattatgaatgtaactcctaaaacatagctgattatattccatagat

SEQ ID NO: 28407 - DNA, 110 bp, synthetic construct; identical to SEQ ID NO: 28406
  source 1..110: mol_type = other DNA

SEQ ID NO: 28408 - DNA, 110 bp, synthetic construct
  source 1..110: mol_type = other DNA
tggatgaaagtccctaagtcattttatggagcagatccctcagctcaacggcttggcatccatatcgtttgctaaagatagactttcttgatgaagctcctgaggctggg

SEQ ID NO: 28409 - DNA, 110 bp, synthetic construct
  source 1..110: mol_type = other DNA
gcatccatatcgtttgctaaagatagactttcttgatgaagctcctgaggctgggcgtttgtttattacttcaacacagtctatcttcttcagattaacatgagctagac

SEQ ID NO: 28410 - DNA, 110 bp, synthetic construct
  source 1..110: mol_type = other DNA
ggagtactgtctatcaaggaagctcactgaagagactctaaggagctggttgtgtggacattctctgccaaccactgtaatccctgacccccggaaggaaaggacttgtc

SEQ ID NO: 28411 - DNA, 110 bp, synthetic construct
  source 1..110: mol_type = other DNA
ctggtaaaacgtgagttcaaagtagacatgagcattaaaatataaacaagctaatgcagaacatgtactaggaaattcaataagaggagttcccgtcatgactcagtggt

SEQ ID NO: 28412 - DNA, 110 bp, synthetic construct
  source 1..110: mol_type = other DNA
gagagaagctggaaatcttccttcagcatccccctttggaggaatggagtcacggtatccttgttagtttctacggtggatatactcccaccctggccagtttcaagcta

SEQ ID NO: 28413 - DNA, 110 bp, synthetic construct
  source 1..110: mol_type = other DNA
tatccttgttagtttctacggtggatatactcccaccctggccagtttcaagctactaacttgttgttaaccggctcaccaaattcctgaaaatttcccaacgtggcttt

SEQ ID NO: 28414 - DNA, 110 bp, synthetic construct
  source 1..110: mol_type = other DNA
gagtcatagactcttctgttcccaagaaagcattaaccctcagactccaaagacataaaacaaagccagattcagatgattatttacagatatgcaagctttggagtctc

SEQ ID NO: 28415 - DNA, 110 bp, synthetic construct
  source 1..110: mol_type = other DNA
taaaacaaagccagattcagatgattatttacagatatgcaagctttggagtctcaggataagcaacatgaaattgaatttaaaagatacccaaacagggagttcctgct

SEQ ID NO: 28416 - DNA, 110 bp, synthetic construct
  source 1..110: mol_type = other DNA
tccacgctattttgagaaaaaggactttgtgataggctgagtcatgtccttccaaaattctgggatcttggcatgtgactgtctttggagagagaatctttaaagaggtc

SEQ ID NO: 28417 - DNA, 110 bp, synthetic construct
  source 1..110: mol_type = other DNA
aattctgggatcttggcatgtgactgtctttggagagagaatctttaaagaggtcattcggttaaaaggtggatattacagtgtgccctagtccagtatggcttgtgatg

SEQ ID NO: 28418 - DNA, 110 bp, synthetic construct
  source 1..110: mol_type = other DNA
ccactggggactctggacaggactctggacaggactctggatgtttattctctatctgcagctgccactctgaaatacaggagatttcccagactccctcttttttaacc

SEQ ID NO: 28419 - DNA, 110 bp, synthetic construct
  source 1..110: mol_type = other DNA
ggcactctgcacacacgggtttttattaaatccagccttcacgggactcaatagctgttatggcctttctctcttcatcaccgtagaattattatttctggtcgcatttt

SEQ ID NO: 28420 - DNA, 110 bp, synthetic construct
  source 1..110: mol_type = other DNA
tgttatggcctttctctcttcatcaccgtagaattattatttctggtcgcatttttcccgttacagtttacccttccgtgatctagccagctgccactcacagaaagcag

SEQ ID NO: 28421 - DNA, 110 bp, synthetic construct
  source 1..110: mol_type = other DNA
agacccaattaaatagaatcaaagactcctctcgggccaggctgcttattgcagctgggcccctctctctgctgttgcctgcccacataagtatttctcaggggaagaga

SEQ ID NO: 28422 - DNA, 110 bp, synthetic construct
  source 1..110: mol_type = other DNA
tgggcccctctctctgctgttgcctgcccacataagtatttctcaggggaagagagcttcctgtggctgatttccgttggtgagggtccttattgtcctgttgctggagg

SEQ ID NO: 28423 - DNA, 110 bp, synthetic construct
  source 1..110: mol_type = other DNA
tctgttgccacctggtcctctctctctcctgctgcctgatggcaggaggatgtatgactattgttgggaccaggctgcccctcggccacgcaaatcctagttagaggaaa

SEQ ID NO: 28424 - DNA, 110 bp, synthetic construct
  source 1..110: mol_type = other DNA
gactattgttgggaccaggctgcccctcggccacgcaaatcctagttagaggaaaacactggattttgttaggactcataatttgtcttctgcccaagtgagcactgggc

SEQ ID NO: 28425 - DNA, 110 bp, synthetic construct; identical to SEQ ID NO: 28423
  source 1..110: mol_type = other DNA

SEQ ID NO: 28426 - DNA, 110 bp, synthetic construct; identical to SEQ ID NO: 28424
  source 1..110: mol_type = other DNA

SEQ ID NO: 28427 - DNA, 110 bp, synthetic construct
  source 1..110: mol_type = other DNA
gtcccagctgagcactcggggcttttaggaacatggctgggccacgtgcgccttctctagtgctcacatccttcctggacatcgcctctggctctgtgctctctcttggc

SEQ ID NO: 28428 - DNA, 110 bp, synthetic construct
  source 1..110: mol_type = other DNA
tctagtgctcacatccttcctggacatcgcctctggctctgtgctctctcttggctgcagtgggattgtgctgacggcaagcagaagctttgctgacgccacacccgagg

SEQ ID NO: 28429 - DNA, 110 bp, synthetic construct
  source 1..110: mol_type = other DNA
aagtcacttctagaaaacagactgtcaagctatgaggagcacagctgctctagtatccagcttctaaaccttgaggttgcactgagttcacactgaggcctccctcgggc

SEQ ID NO: 28430 - DNA, 110 bp, synthetic construct
  source 1..110: mol_type = other DNA
ttaatatatgtctgatttagtggtggcccctcacaccctggtctcctcaccactaccaccaggtaccaggctctgtgttcagcatggaaaccaggctaaggctgaatctt

SEQ ID NO: 28431 - DNA, 110 bp, synthetic construct
  source 1..110: mol_type = other DNA
ctgggtgcgccctgaatccgcatgtattttcacatcatttcttcacggtagtttggtttcctcggaagtagggcagtggacccgagggtcaagcgttggaccgtgttgga

SEQ ID NO: 28432 - DNA, 110 bp, synthetic construct
  source 1..110: mol_type = other DNA
gtttcctcggaagtagggcagtggacccgagggtcaagcgttggaccgtgttggacagttactggtgctgattcctgacaggcagcaaaggagcgacacggctgcaacaa

SEQ ID NO: 28433 - DNA, 110 bp, synthetic construct
  source 1..110: mol_type = other DNA
gcctggcctgggcactctgtacggatgaatttgctctgttacacccagggaactgtaaaacaagaatgggctgtaactaaatgtcataaatccatggtcactatattttt

SEQ ID NO: 28434 - DNA, 110 bp, synthetic construct
  source 1..110: mol_type = other DNA
gggtcccaccccagggcctgtgcttctccagcacctcgtctgtccctctgggaaacctcaacgaaggtccggtctccctccagcctttctcccacttctgcagaagcaaa

SEQ ID NO: 28435 - DNA, 110 bp, synthetic construct
  source 1..110: mol_type = other DNA
cctcaacgaaggtccggtctccctccagcctttctcccacttctgcagaagcaaactctacgcatcggtagaaccttgattgttccattcacgttcaacccaccatcttc

SEQ ID NO: 28436 - DNA, 110 bp, synthetic construct
  source 1..110: mol_type = other DNA
agcgtgttggcacagacagacccctgttagagacctcagtccagagggtctgtctctgcacacagctgtacccttctctgaacacccacatccagagactgagcaggagg

SEQ ID NO: 28437 - DNA, 110 bp, synthetic construct
  source 1..110: mol_type = other DNA
ctgcacacagctgtacccttctctgaacacccacatccagagactgagcaggaggcagataaacaatggacccattcagtctaatgccagcaagtcctctgccaagctcc

SEQ ID NO: 28438 - DNA, 110 bp, synthetic construct
  source 1..110: mol_type = other DNA
acaaacttcttggagtgagaacctttgttctcacagctgtctgcataggtcagatcatgatgttcctgtaaatctccaaaaggacaaatgctagtctctcttctgtaatg

SEQ ID NO: 28439 - DNA, 110 bp, synthetic construct
  source 1..110: mol_type = other DNA
acgtctgggtagttgcaaccagccaacttcaccttacctattgtttcctccacctcccgtttcagccccgtagcctcttggcctcacgtgtgaatccaccctcggggtgg

SEQ ID NO: 28440 - DNA, 110 bp, synthetic construct
  source 1..110: mol_type = other DNA
tcacaaacgagggacaaacggtgcagtcagaaagtgcattgtatcctcctgaagagacagtcttcttgccgaaatgaggcgccgcttcaggatgccaggttgctttggga

SEQ ID NO: 28441 - DNA, 110 bp, synthetic construct
  source 1..110: mol_type = other DNA
gacagtcttcttgccgaaatgaggcgccgcttcaggatgccaggttgctttgggaaagggacctggacatctcggcgttcacaaagtacgtcttcaggtccccctttccc

SEQ ID NO: 28442 - DNA, 110 bp, synthetic construct
  source 1..110: mol_type = other DNA
cttggttattcccaaacacatcacttctttgtttcatcctaaccatcaaagaactcaaagcaaaccttggttgaggcagagctacctggatggggtgagcctttactctt

SEQ ID NO: 28443 - DNA, 110 bp, synthetic construct
  source 1..110: mol_type = other DNA
aactgtaatgacaacattattctatgtaagcaagtcttctctaacagtacaaggaaagaaactgtagctacaacaccgaaaactattagggatataaacagagactgcat

SEQ ID NO: 28444 - DNA, 110 bp, synthetic construct
  source 1..110: mol_type = other DNA
tgaaaccttaatttcatgtgattttcatgtgtcagggacgacgactgtctttctgatctttcagaaaagtcatctagcagcatagaacactttcttagctcaagaggccg

SEQ ID NO: 28445 - DNA, 110 bp, synthetic construct
  source 1..110: mol_type = other DNA
atctttcagaaaagtcatctagcagcatagaacactttcttagctcaagaggccgttacagaagcagatggtggctggatctgacccccgagctgtgttcggtgactcct

SEQ ID NO: 28446 - DNA, 110 bp, synthetic construct; identical to SEQ ID NO: 28444
  source 1..110: mol_type = other DNA

SEQ ID NO: 28447 - DNA, 110 bp, synthetic construct; identical to SEQ ID NO: 28445
  source 1..110: mol_type = other DNA

SEQ ID NO: 28448 - DNA, 110 bp, synthetic construct
  source 1..110: mol_type = other DNA
ggagccagacggctggtggagcgagaagagggcaaacataagagatggcaggtgcagcgacacaactgcattgacagcctccatccttggtccctctctatcttcttaca

SEQ ID NO: 28449 - DNA, 110 bp, synthetic construct
  source 1..110: mol_type = other DNA
agcgacacaactgcattgacagcctccatccttggtccctctctatcttcttacagcagttactttcttaacttttaagaaggatccaaagcattgcaaatatccaaaag

SEQ ID NO: 28450 - DNA, 110 bp, synthetic construct
  source 1..110: mol_type = other DNA
ccataggctcggtgtcaccacccacaaccggatcacccaaactggcaacaggacaccattcaccgtcatgtgtctgtccccatgcatctgacactcactaagctctgaca

SEQ ID NO: 28451 - DNA, 110 bp, synthetic construct
  source 1..110: mol_type = other DNA
ccattcaccgtcatgtgtctgtccccatgcatctgacactcactaagctctgacagtgttatctgttaaatatctcttgaatccatgccccctcctttccatcccccttc

SEQ ID NO: 28452 - DNA, 110 bp, synthetic construct
  source 1..110: mol_type = other DNA
cgctttgagtcccaagggatgagatgaagtcagtcctgcgaatgacgttacgttgggcctgaaagcaagggccttatgcctttgcagacaagggtttggatctgaactcc

SEQ ID NO: 28453 - DNA, 110 bp, synthetic construct
  source 1..110: mol_type = other DNA
ggcctgaaagcaagggccttatgcctttgcagacaagggtttggatctgaactccatctgccattgatcatttaattctgcgtggtccttcctatctgagcctcaaactc

SEQ ID NO: 28454 - DNA, 110 bp, synthetic construct
  source 1..110: mol_type = other DNA
catgcctatcaccctgacctgcatgtgaccgcctggggctgagcttagtggaaaaagggcacaaatgggagagcagagagatgccccataaataccctcataggaggctc

SEQ ID NO: 28455 - DNA, 110 bp, synthetic construct
  source 1..110: mol_type = other DNA
ctgatgattagcgaggttgaatatcttctaatgcacttgttggccatttgtacgtctttggaaaaatgtctattcagctctctgcttatttttaaagatgtttgtttctg

SEQ ID NO: 28456 - DNA, 110 bp, synthetic construct
  source 1..110: mol_type = other DNA
agcaaatgtttggttaatacagcagaataatgttaagttctctgtggaccgggaaggagtagccaggagtgttgggcaggatttcaaactccagtggagcaatggggcca

SEQ ID NO: 28457 - DNA, 110 bp, synthetic construct
  source 1..110: mol_type = other DNA
aaatagtaataatacaaaaggaacagagcaacccaagttacgaaacggtcccacacttggtcaaaatatcttcccgtctcagaaggcaaaagatgtcctattagaattat

SEQ ID NO: 28458 - DNA, 110 bp, synthetic construct
  source 1..110: mol_type = other DNA
cttggtcaaaatatcttcccgtctcagaaggcaaaagatgtcctattagaattataagtcgagacagggctgggtgaacttcttacgtaacagctagatcattaaaatct

SEQ ID NO: 28459 - DNA, 110 bp, synthetic construct
  source 1..110: mol_type = other DNA
gtgagaggtagggcttaggttttatctcggatggtctgctttcaaagcgcatgctctgaagggcctcatgtagtgtaggaaagaagaggaagaatagcattagttcttta

SEQ ID NO: 28460 - DNA, 110 bp, synthetic construct
  source 1..110: mol_type = other DNA
tgcatcttttaaagggaaggacctttaacaagagggaaagcaaagggacgaagagagggaggcgcgcataggctttgaccttgtttctatttagatgcttttaactctgg

SEQ ID NO: 28461 - DNA, 110 bp, synthetic construct
  source 1..110: mol_type = other DNA
agggaggcgcgcataggctttgaccttgtttctatttagatgcttttaactctggggacaggatgtcctttacgtgaaaggttgaaggttggccaaagacgacttaaaag

SEQ ID NO: 28462 - DNA, 110 bp, synthetic construct; identical to SEQ ID NO: 28460
  source 1..110: mol_type = other DNA

SEQ ID NO: 28463 - DNA, 110 bp, synthetic construct; identical to SEQ ID NO: 28461
  source 1..110: mol_type = other DNA

SEQ ID NO: 28464 - DNA, 110 bp, synthetic construct
  source 1..110: mol_type = other DNA
cgtcttgacatcctaacccccaaggtgactgactacctttggagacagggtttgtagagagctaattaagtttatcttgggttatgcaggtggagtcctaatgcaccagt

SEQ ID NO: 28465 - DNA, 110 bp, synthetic construct
  source 1..110: mol_type = other DNA
agagagctaattaagtttatcttgggttatgcaggtggagtcctaatgcaccagtggaccagtgtccttataagaagagggagagacaccagcgacgtgcacacacagag

SEQ ID NO: 28466 - DNA, 110 bp, synthetic construct
  source 1..110: mol_type = other DNA
ggtaatatcatgtgatgtttgcctttctctgttggcctttatcatcatctctgggtccatccagcaatctttcatgcaaaacctgcttgcttttacgactattcagcaga

SEQ ID NO: 28467 - DNA, 110 bp, synthetic construct
  source 1..110: mol_type = other DNA
tccatccagcaatctttcatgcaaaacctgcttgcttttacgactattcagcagaagttgaaaggtgggatgaaataaaatgttcttggtgtctcctagttatttcagtg

SEQ ID NO: 28468 - DNA, 110 bp, synthetic construct
  source 1..110: mol_type = other DNA
cgcgacagcgttatcagaatgtacaaagagcacatcccttgatgggtcagttctcggacaggaggttatctttcagacacacatggggaaggacacatgcctacggcacc

SEQ ID NO: 28469 - DNA, 110 bp, synthetic construct
  source 1..110: mol_type = other DNA
ggacaggaggttatctttcagacacacatggggaaggacacatgcctacggcaccctatgcgctgaggcgttgctccaagttgcaaaaccctggacgcactacctacctg

SEQ ID NO: 28470 - DNA, 110 bp, synthetic construct
  source 1..110: mol_type = other DNA
ctgtcacatcttgttttgcctaagggagaccaaccctcagaacgacctggaccaaatctaatcaggaagggaaagctacagaaagaagacactccccggggtctttcaaa

SEQ ID NO: 28471 - DNA, 110 bp, synthetic construct
  source 1..110: mol_type = other DNA
atctaatcaggaagggaaagctacagaaagaagacactccccggggtctttcaaagttaaacagaacttagtatttcaactgcaatatgtccttatgcttttctctcttt

SEQ ID NO: 28472 - DNA, 110 bp, synthetic construct
  source 1..110: mol_type = other DNA
aggtgccaaatgtttcctgcttggatctgtgtcaccgttgaaggatgtcaaaggtagctgtcaagcccaagaattagggaggagcatggacaaagcgggtgaaaagaaag

SEQ ID NO: 28473 - DNA, 110 bp, synthetic construct
  source 1..110: mol_type = other DNA
agctgtcaagcccaagaattagggaggagcatggacaaagcgggtgaaaagaaagccacgtgcatgtgtgatttcaccagtgttgtcatgacggctaagcccaacacatt

SEQ ID NO: 28474 - DNA, 110 bp, synthetic construct
  source 1..110: mol_type = other DNA
ggctcagctcagcaatcttgcctggctgcctctctggcttgacctgaccccagcctctcatgacctaaagttgagattacacattgtcccctaagccctgaccaaaatca

SEQ ID NO: 28475 - DNA, 110 bp, synthetic construct
  source 1..110: mol_type = other DNA
tctcatgacctaaagttgagattacacattgtcccctaagccctgaccaaaatcatagtttgccaggcctgatacaagcctatgctgatggaaaagaattgggtcagctc

SEQ ID NO: 28476 - DNA, 110 bp, synthetic construct
  source 1..110: mol_type = other DNA
tcacaatcactaactttgggaactctttcttttacatattttaacagctctgaagtataactgatgtacaaagcattgcacataattaatgtgtacaaattgatgagttc

SEQ ID NO: 28477 - DNA, 110 bp, synthetic construct
  source 1..110: mol_type = other DNA
ggcatcccaagaaagtgacattgagctgaaacctgaagggttagtaggtattagccaggaacaaggggaagcaggagcagcatgttcaaaggccctgtagtagaggctgc

SEQ ID NO: 28478 - DNA, 110 bp, synthetic construct
  source 1..110: mol_type = other DNA
acggtccacggagggcgctgccctcgtgctgaccctcccggcccccgcttctgttttctgcactgtacacaaaacacgtgtcgaagctgcacagcgcccggaaaaataac

SEQ ID NO: 28479 - DNA, 110 bp, synthetic construct
  source 1..110: mol_type = other DNA
tggggtcagcattcccggtgtcctggcgagctccacgtcacccccatcccctgcctgacgttaacttgactgttgagtccagcagcggaattcaaggaggccagcaggag

SEQ ID NO: 28480 - DNA, 110 bp, synthetic construct; identical to SEQ ID NO: 28479
  source 1..110: mol_type = other DNA

SEQ ID NO: 28481 - DNA, 110 bp, synthetic construct
  source 1..110: mol_type = other DNA
gctttttttggcagggcatccgagcagggatacaggaagtgctcggctctccccgtcagctgttgaggggcacgttcactgtggcggtagggagggaggaagggcggagg

SEQ ID NO: 28482 - DNA, 110 bp, synthetic construct
  source 1..110: mol_type = other DNA
gcgtcactctctccgtgatgtcacgttgtgcttcaggaaaaccgcctgtgcctttcttcccttaaaaacttagtagacatttacaaggagctgcttgaggaccatgtgta

SEQ ID NO: 28483 - DNA, 110 bp, synthetic construct
  source 1..110: mol_type = other DNA
cttcccttaaaaacttagtagacatttacaaggagctgcttgaggaccatgtgtatacgcctcttcgttactagctttcactcgcggctttagcgtctcttggtaatttt

SEQ ID NO: 28484 - DNA, 110 bp, synthetic construct
  source 1..110: mol_type = other DNA
tgagaaagcaagtgccagaagacttcgtataagaggagagcctttccccatagcttttaagatgcacagctggagttctcaggtggttctcagcaggttgaggatccggt

SEQ ID NO: 28485 - DNA, 110 bp, synthetic construct
  source 1..110: mol_type = other DNA
ctggtcctctgcccccaaagactgagtgatggagcttgttcagaggccctggtgttggactcagccacccaggctactcaaccagacctgtgtgtttcttattcaaccca

SEQ ID NO: 28486 - DNA, 110 bp, synthetic construct
  source 1..110: mol_type = other DNA
gctggaatgagagctggaacccaaagtctgcattgctgaaccgtgtctgagcttcaccgagacctctccccatgctcttggctctaagaattgttaagttttattgaagt

SEQ ID NO: 28487 - DNA, 110 bp, synthetic construct
  source 1..110: mol_type = other DNA
ccggaggttggaactgtttcagactgaagataaggaagaggatggagagtcaccaagaggagtctggctgtgccacaacccgcagcgttggaagctgcatccacacgtgg

SEQ ID NO: 28488 - DNA, 110 bp, synthetic construct
  source 1..110: mol_type = other DNA
agaggagtctggctgtgccacaacccgcagcgttggaagctgcatccacacgtgggagaaagcatgtgtgcagctggagcttccccgggagtggattagaagctgcttta

SEQ ID NO: 28489 - DNA, 110 bp, synthetic construct
  source 1..110: mol_type = other DNA
ttcccaggggcagatcacgctgacctcgcagggaaaccaaacagccctatccaccatcagcagagctcagcaggtcttctgcatgcagcatcctgccacctacaccttct

SEQ ID NO: 28490 - DNA, 110 bp, synthetic construct
  source 1..110: mol_type = other DNA
gagggcagggcttccagatgccaaggccacagctgagctcaggtggttaagacgtcaggctgctccttcccaaagcacgttctgtaaaccggggtgtgttgagaattact

SEQ ID NO: 28491 - DNA, 110 bp, synthetic construct
  source 1..110: mol_type = other DNA
caggctgctccttcccaaagcacgttctgtaaaccggggtgtgttgagaattactgatttgattccactgtcaacgtcgccccgaaaagcagatacatgcctctctgtga

SEQ ID NO: 28492 - DNA, 110 bp, synthetic construct
  source 1..110: mol_type = other DNA
tcttctaagttgtcgaattaatgagcataagattatctattcttcttccttgttttgcttttgatgtcggaaggatgtatagcgtagctctcatcccattccaatattat

SEQ ID NO: 28493 - DNA, 110 bp, synthetic construct
  source 1..110: mol_type = other DNA
tgcttttgatgtcggaaggatgtatagcgtagctctcatcccattccaatattattgattaattttgttttaaagatgaacgtttccaagtcataatccttcggtgggtt

SEQ ID NO: 28494 - DNA, 110 bp, synthetic construct
  source 1..110: mol_type = other DNA
aaatccaaaccttcgctgaatgtaaaaggcttgacagttacaggagccgtacacctctgaccagcagaagactcagtcatgaatctcctgcacccgacgatcacaattat

SEQ ID NO: 28495 - DNA, 110 bp, synthetic construct
  source 1..110: mol_type = other DNA
tctgaccagcagaagactcagtcatgaatctcctgcacccgacgatcacaattatgatgagagaggcaccgtttgagttggtgatttcgttaaagtcttgctagttaggg

SEQ ID NO: 28496 - DNA, 110 bp, synthetic construct
  source 1..110: mol_type = other DNA
gggtcattagaacctcccacctacagcctgttggccagaagcccacgtgacagtctggatttgagtgccctcggaagcggttgggggtgagggctggtagggctgaggac

SEQ ID NO: 28497 - DNA, 110 bp, synthetic construct
  source 1..110: mol_type = other DNA
gtgaaaattgtcccaggatgctgaacactggctctctggcagcatctccctaagtaggatcggcaagggacctaccggccccgtgagctagagacctcccaactgaggga

SEQ ID NO: 28498 - DNA, 110 bp, synthetic construct
  source 1..110: mol_type = other DNA
aggatcggcaagggacctaccggccccgtgagctagagacctcccaactgagggataaacacacccacagaggtgcgactatacacgcaagaaaggcatgttaagggaaa

SEQ ID NO: 28499 - DNA, 110 bp, synthetic construct
  source 1..110: mol_type = other DNA
gtggttgctcatggtcttgtgattctcatcatctctagacagatacggaaaccaaggccctctaaaactgagttcccctgctgaattcaggattaacctctctagtcaaa

SEQ ID NO: 28500 - DNA, 110 bp, synthetic construct
  source 1..110: mol_type = other DNA
gatcattttatccactcaaaagcagctgcgacaaaatgcgtttaaaacatctcccccaggagttcccatcgtggatcagtggttaacaaacctgaccgggatccatgagg

SEQ ID NO: 28501 - DNA, 110 bp, synthetic construct
  source 1..110: mol_type = other DNA
tcaaaagcagctgcgacaaaatgcgtttaaaacatctcccccaggagttcccatcgtggatcagtggttaacaaacctgaccgggatccatgaggacttgggttcaaacc

SEQ ID NO: 28502 - DNA, 110 bp, synthetic construct
  source 1..110: mol_type = other DNA
tattttactgtcgtgtcttttacagtttcccgttgaaggccaacctcatgcaattcctaatggtggaggcaagacccacattcaggacacggtccaccaagcacagctgc

SEQ ID NO: 28503 - DNA, 110 bp, synthetic construct
  source 1..110: mol_type = other DNA
cctaatggtggaggcaagacccacattcaggacacggtccaccaagcacagctgcccagtcctctgtctacacaggctgtgggccctcacctggtggggacccaggagca

SEQ ID NO: 28504 - DNA, 110 bp, synthetic construct
  source 1..110: mol_type = other DNA
agggcacatgtttataggagtattttggtttttcaaacacacgtttgccacgtgtttataaaggatgcactctgtgtccgacccccttggaggcaagggaaaggccagtc

SEQ ID NO: 28505 - DNA, 110 bp, synthetic construct
  source 1..110: mol_type = other DNA
ttataaaggatgcactctgtgtccgacccccttggaggcaagggaaaggccagtcaaaagctgaccacatcacactcccgtgttgttcacgcctccctctgctgcctcca

SEQ ID NO: 28506 - DNA, 110 bp, synthetic construct
  source 1..110: mol_type = other DNA
cacctgccagggaagaccggagcaagagagagccgtcgaaagaggccactgacgacgtgtgcttgtacactggggcgtaggtgcttgtcagctctaggactttggagacc

SEQ ID NO: 28507 - DNA, 110 bp, synthetic construct
  source 1..110: mol_type = other DNA
cacgcagggccaggcccctctcaaggtggccctttctgtgtgactctctgctctggcttccccacaccgcttcctgccagcaggtgttcccgggcagccccagctgttgc

SEQ ID NO: 28508 - DNA, 110 bp, synthetic construct
  source 1..110: mol_type = other DNA
gcttccccacaccgcttcctgccagcaggtgttcccgggcagccccagctgttgcggtagctctggaaccctgcgtcgcctgtggcttccactgacccccagccctccag

SEQ ID NO: 28509 - DNA, 110 bp, synthetic construct
  source 1..110: mol_type = other DNA
ctcgtaaaggtcaggcttcagggcaaatggaaaacatccagcaaaaccactttcaaaagcttgttttctatgtctgtgagtctcttcccgttttgtaaataagttcatgt

SEQ ID NO: 28510 - DNA, 110 bp, synthetic construct
  source 1..110: mol_type = other DNA
gcagaacaattatccaaagatagattgtgtgatcttccatcttctacgcaaataacaacatgggtttcttccaacaagcctgacttgccaaagagggctgacttcaccac

SEQ ID NO: 28511 - DNA, 110 bp, synthetic construct
  source 1..110: mol_type = other DNA
caacatgggtttcttccaacaagcctgacttgccaaagagggctgacttcaccactttagggttctgtaatttcaaagggaaagcatctttagctgtattggaatgggct

SEQ ID NO: 28512 - DNA, 110 bp, synthetic construct
  source 1..110: mol_type = other DNA
gggggactgtgtcacggccatgggggactctactgaggccaacttcagaacgcacagtttggggagcttccgttgtggctccctgggtaaagaatccaaataggatccat

SEQ ID NO: 28513 - DNA, 110 bp, synthetic construct
  source 1..110: mol_type = other DNA
cagaaccggtatcagaggacagctggtcgaggatgctgagcccttctgaaggtgtcttagaattaatggtaggaaataaacgggttggaaatgaaatcagaggggccccg

SEQ ID NO: 28514 - DNA, 110 bp, synthetic construct
  source 1..110: mol_type = other DNA
cttagaattaatggtaggaaataaacgggttggaaatgaaatcagaggggccccgggggatctgaatgtcagtccaagggatttagtttttcactgatgtggacaacaga

SEQ ID NO: 28515 - DNA, 110 bp, synthetic construct
  source 1..110: mol_type = other DNA
tatggcaccgctggagggacttccactgtgggcctcaactccgaattcgacgaagaaaagcaggacttgagagtcccggggtggggatgggggattctggctaaactgag

SEQ ID NO: 28516 - DNA, 110 bp, synthetic construct
  source 1..110: mol_type = other DNA
aaaagcaggacttgagagtcccggggtggggatgggggattctggctaaactgagctaacaggattcttgctgaagggagtccagggcaatcagccatcaccctggggcc

SEQ ID NO: 28517 - DNA, 110 bp, synthetic construct; identical to SEQ ID NO: 28515
  source 1..110: mol_type = other DNA

SEQ ID NO: 28518 - DNA, 110 bp, synthetic construct; identical to SEQ ID NO: 28516
  source 1..110: mol_type = other DNA

SEQ ID NO: 28519 - DNA, 110 bp, synthetic construct
  source 1..110: mol_type = other DNA
tgctgcaagtgcaagcagaaacacttttaggagttccctggcagttcagtgggataaggatctggagttgttatggcagcagcctgggtcactgccgtggcgtgggtgtg

SEQ ID NO: 28520 - DNA, 110 bp, synthetic construct
  source 1..110: mol_type = other DNA
ttcctaaccctgaagcacatgggtcacggccacagcacatgtgcaacagacctgctctttaaaaagcttgtgacaccctacgaaaatcaaaaccaatgacaaaaccaaaa

SEQ ID NO: 28521 - DNA, 110 bp, synthetic construct
  source 1..110: mol_type = other DNA
aactcctcctgtttcctcccaacacttaaaccttctaaagtcgcatctgcacacatgcgtcgcacacttgacagcagtgaaatgtccccactatgtccctagtgcctaga

SEQ ID NO: 28522 - DNA, 110 bp, synthetic construct
  source 1..110: mol_type = other DNA
tgcgtcgcacacttgacagcagtgaaatgtccccactatgtccctagtgcctagagcaccaggtggactaggtgataatttaattaccgtgaacaccacggtggctcgct

SEQ ID NO: 28523 - DNA, 110 bp, synthetic construct
  source 1..110: mol_type = other DNA
cctttttctttcttttttagggccatacatgcagcatatggaagttcccgggccaggggatgaattagagctgcagctgcagtctacgccacggcaacactggacctgag

SEQ ID NO: 28524 - DNA, 110 bp, synthetic construct
  source 1..110: mol_type = other DNA
ggggatgaattagagctgcagctgcagtctacgccacggcaacactggacctgagctgcatctgcattctacacagcagcttgaggcaatactggatctttagcccactg

SEQ ID NO: 28525 - DNA, 110 bp, synthetic construct
  source 1..110: mol_type = other DNA
gaccaggcagtttctgctccttttgcctccactggcccggaggacacaccagcaggtggcacttcaatgccccagactcgggagcaccaaggactcagcttctagttgca

SEQ ID NO: 28526 - DNA, 110 bp, synthetic construct
  source 1..110: mol_type = other DNA
tggtcgatgttaattctgctaatatccacgtgggttcttcaccctcaccacacacgaaagctgcacagggtgtagcttcgtgttcaatggcagtggtttttccactgatg

SEQ ID NO: 28527 - DNA, 110 bp, synthetic construct
  source 1..110: mol_type = other DNA
gaaagctgcacagggtgtagcttcgtgttcaatggcagtggtttttccactgatggatcccctcactgggcacagctgcattctgccagcaaagtgtcgtgtaggcgtct

SEQ ID NO: 28528 - DNA, 110 bp, synthetic construct
  source 1..110: mol_type = other DNA
aactcttgactaaaacccagacccctttggggcttctgccttggcttagtttatggagacacctcaagctacagtgcctgggggaactcttaatagggtcctttgcaggt

SEQ ID NO: 28529 - DNA, 110 bp, synthetic construct
  source 1..110: mol_type = other DNA
gagatccttctcatattgttaatacattgaaatgccagagcaatgcaggcagtagagctgactgcagaaatgcctgccctggcacagtaagtccttgctttcatatcaat

SEQ ID NO: 28530 - DNA, 110 bp, synthetic construct
  source 1..110: mol_type = other DNA
cagccctcctatttgcccttactttgccattctacagtaaaactgcctattccctgcttctctgatgggacaattcactcctcggacccaactctgacgggttctagtga

SEQ ID NO: 28531 - DNA, 110 bp, synthetic construct
  source 1..110: mol_type = other DNA
gcttctctgatgggacaattcactcctcggacccaactctgacgggttctagtgacgcacagctgtgaagcacattcattattcatatcagattcaaagtaaaatgctca

SEQ ID NO: 28532 - DNA, 110 bp, synthetic construct
  source 1..110: mol_type = other DNA
tgaaattcagaagtcctaccacagaagacagcccttctagaaatcagtctatcttttcctgctgtgcccaggcagaggctcgcaaactttgtcaacacggacagccccac

SEQ ID NO: 28533 - DNA, 110 bp, synthetic construct
  source 1..110: mol_type = other DNA
tcactcattcatttaggccaatgaccttctagctctcaagagattgccacactttcacaactgaaataacacagaaacccaggatgcatcaggagtattttggaacagat

SEQ ID NO: 28534 - DNA, 110 bp, synthetic construct
  source 1..110: mol_type = other DNA
gcaaagagaaggaggacacagcagctccctttactgtggagaaggccattggccgcagcgcctccacctccggccaagagggcttcccgtccgacagccttgaagaaacc

SEQ ID NO: 28535 - DNA, 110 bp, synthetic construct
  source 1..110: mol_type = other DNA
ttcccatgtggctgcgggctctcctccggggatcagggtggtactgtggttgcaggcctgggaggaacccacaaatatcttcctcgaatttcctgcattcttgtgtttga

SEQ ID NO: 28536 - DNA, 110 bp, synthetic construct
  source 1..110: mol_type = other DNA
gcctgggaggaacccacaaatatcttcctcgaatttcctgcattcttgtgtttgagctattggactggccttggtcgtgtgtgtgacgggaaagtctgcttgacatccga

SEQ ID NO: 28537 - DNA, 110 bp, synthetic construct
  source 1..110: mol_type = other DNA
ggaaagagacagcgccagtctgcaacctctctttcaatccttgtaacaaatagttgacataatgggactgttggaaaacgagacgggcccagctcccttcgcaggttctc

SEQ ID NO: 28538 - DNA, 110 bp, synthetic construct
  source 1..110: mol_type = other DNA
gacataatgggactgttggaaaacgagacgggcccagctcccttcgcaggttctccgtcggtcagaatgtctgcggtccaccagctgctcttcttcctttgctaccgtca

SEQ ID NO: 28539 - DNA, 110 bp, synthetic construct
  source 1..110: mol_type = other DNA
actctttctacccacgcctaatttttattttatagcttcagtaatcaagactgtacggtatgatagaggaatcaacgtagcttgtagaacagaagagaaaacttaaaccc

SEQ ID NO: 28540 - DNA, 110 bp, synthetic construct
  source 1..110: mol_type = other DNA
cggtatgatagaggaatcaacgtagcttgtagaacagaagagaaaacttaaacccagaaataactcccctacacacacgacaacaagcagctgaagagaggaaggagcat

SEQ ID NO: 28541 - DNA, 110 bp, synthetic construct
  source 1..110: mol_type = other DNA
gcacttggttcctaggccccatcagcgctgtcacagttggccaagtgtaaagccaagctgcaagtgtcagttattaagcttgtggaggagcttgagcaaaactcttgctt

SEQ ID NO: 28542 - DNA, 110 bp, synthetic construct
  source 1..110: mol_type = other DNA
gtgagccagggagtcatgtgaagagcagtcctgcctttacctgggtagagacggctcatcagcacgagctgttcacaagccacgtcccgcactgtggacatttttgctca

SEQ ID NO: 28543 - DNA, 110 bp, synthetic construct
  source 1..110: mol_type = other DNA
tcatcagcacgagctgttcacaagccacgtcccgcactgtggacatttttgctcaccagggcacagtcctccatggacctgagcctggtgaccgcctcctttcgctgggc

SEQ ID NO: 28544 - DNA, 110 bp, synthetic construct
  source 1..110: mol_type = other DNA
gtctccactgtgtctctttaaacgatgctcatctccagcttggctagtcaggtggcagggctatgctgggaagctggaagaccgtgtttgtgtccctccaaaatttttgt

SEQ ID NO: 28545 - DNA, 110 bp, synthetic construct
  source 1..110: mol_type = other DNA
cagggctatgctgggaagctggaagaccgtgtttgtgtccctccaaaatttttgtgttgaaacctaacccctaaagtgatggaatcaagacgtgggaacctttgtgtcgt

SEQ ID NO: 28546 - DNA, 110 bp, synthetic construct
  source 1..110: mol_type = other DNA
ccagttctggggaccaaacatctgaggtcaaggtgtcgtcaagatgggtcttctccttggcttggagatggttgtcttctctacatgtcttttgccccttgccagctccg

SEQ ID NO: 28547 - DNA, 110 bp, synthetic construct
  source 1..110: mol_type = other DNA
cttggcttggagatggttgtcttctctacatgtcttttgccccttgccagctccgagacacaccttcacagaaacagcagatctttaacccacggagcgaggccagggat

SEQ ID NO: 28548 - DNA, 110 bp, synthetic construct
  source 1..110: mol_type = other DNA
cactgccctgtacctctgcatccctgccttttgctaagtgcagctgatctgcccgttcacacctaaagtggtccacgttcccaccagcctcggatgcggtactgggccag

SEQ ID NO: 28549 - DNA, 110 bp, synthetic construct
  source 1..110: mol_type = other DNA
atgaaactgaagcgtgaataatttgctcaaagtcccccaaatggtgcgttaagtgcggggccgtgggcgcctcggaggctccaggcacagtccaaacacccttcctgctg

SEQ ID NO: 28550 - DNA, 110 bp, synthetic construct
  source 1..110: mol_type = other DNA
aggttgtatggaagtcacggcttctggggtttaagacagttaaagtcattttactgactgtcaatgggagatgagactctatgtgttacacatcaaaaattggacctcaa

SEQ ID NO: 28551 - DNA, 110 bp, synthetic construct
  source 1..110: mol_type = other DNA
ttatcagtgtgcccacagtctgaggtcctgccacaacagaaggacacacgccaccactctaggggctccacctagaacacacagctctggtgaccagagaggacagtgct

SEQ ID NO: 28552 - DNA, 110 bp, synthetic construct
  source 1..110: mol_type = other DNA
actctaggggctccacctagaacacacagctctggtgaccagagaggacagtgctgctcggccatccagtcaatttcttacatttagtcaacagagcttcagttggaata

SEQ ID NO: 28553 - DNA, 110 bp, synthetic construct
  source 1..110: mol_type = other DNA
cagaggaagccccgggcccagcgtgtcttggacggggctggcccaagagttcaacatctaccaaggagaacggaaacccgctagagaatttgaagcgtacaattgcgatg

SEQ ID NO: 28554 - DNA, 110 bp, synthetic construct
  source 1..110: mol_type = other DNA
aagtatgagtaaagtagtctttaaaagtctattgcctcgcacaaatctccctgagagtgtggactttattctgaacccattcccctggcctggacttcttcctacactgc

SEQ ID NO: 28555 - DNA, 110 bp, synthetic construct
  source 1..110: mol_type = other DNA
agtgtggactttattctgaacccattcccctggcctggacttcttcctacactgcagctatacatgcactgaaccgtgtgttccacttgtgttcatcccaacctaagaga

SEQ ID NO: 28556 - DNA, 110 bp, synthetic construct
  source 1..110: mol_type = other DNA
atggtgacatgagggccctcgtttttgcttataggcagcatcttctcccttcatcttcacgtgatagaaggtgttgagggggagttcccttcgtggctcagtggttaaca

SEQ ID NO: 28557 - DNA, 110 bp, synthetic construct
  source 1..110: mol_type = other DNA
cttgacgtctgctctcgtctctcggtgctgtgtgtttccatggcttgcacaacgcagttccctggagtggcttggagtattggcctggctacaccacactggccagggag

SEQ ID NO: 28558 - DNA, 110 bp, synthetic construct
  source 1..110: mol_type = other DNA
gaattttcagatctgacctcaggaagctcatggtgttatcccagcggactgggtctctttacctctggatccaataagaaaacgaaagcataatcttaagtgagggaata

SEQ ID NO: 28559 - DNA, 110 bp, synthetic construct
  source 1..110: mol_type = other DNA
tctttacctctggatccaataagaaaacgaaagcataatcttaagtgagggaatacgggtaagagtgtatacatgggcatgtatgtatgtatgcgtgtgtgtatgtacac

SEQ ID NO: 28560 - DNA, 110 bp, synthetic construct
  source 1..110: mol_type = other DNA
ttcaggcagtagcactcaagccaggagagtgtggggccctgttaggacagatgtggcggtgggaagaggagctgccgtgcccgcgagggacaatgagcaggacgtgttcc

SEQ ID NO: 28561 - DNA, 110 bp, synthetic construct
  source 1..110: mol_type = other DNA
gcggtgggaagaggagctgccgtgcccgcgagggacaatgagcaggacgtgttcctttctggctgcgctgaacaagccggtttgtggtggaaagtggggagaccaaagca

SEQ ID NO: 28562 - DNA, 110 bp, synthetic construct
  source 1..110: mol_type = other DNA
gaagcactggagctcttttcctcagcgatgtccccttctgtggaagctggagattatttctgcctctaggaacttctcagtgtttcttgtttctaaaggcagaactgacg

SEQ ID NO: 28563 - DNA, 110 bp, synthetic construct
  source 1..110: mol_type = other DNA
ctttgaaatctgtcttatgttttaccgcgagggttcacttcagttggactggctgcatctcaagggttcaggagccacacacaactaacaggtaccggaccagacagctt

SEQ ID NO: 28564 - DNA, 110 bp, synthetic construct
  source 1..110: mol_type = other DNA
catctcaagggttcaggagccacacacaactaacaggtaccggaccagacagcttagctctctgaggttcaggaaactacttctgtgaaacccagtggtaaatattttag

SEQ ID NO: 28565 - DNA, 110 bp, synthetic construct
  source 1..110: mol_type = other DNA
ttgccaaacagagaacaatactatgtgttgatggagctggtacagcagattctgctcccagcccatctcccccagtctagctaggaaatcaataaactgcaaaactactg

SEQ ID NO: 28566 - DNA, 110 bp, synthetic construct
  source 1..110: mol_type = other DNA
gctggtacagcagattctgctcccagcccatctcccccagtctagctaggaaatcaataaactgcaaaactactgcggcccagggagttcccgtcgtggctcagtggtta

SEQ ID NO: 28567 - DNA, 110 bp, synthetic construct
  source 1..110: mol_type = other DNA
tcacgcatccatttataagcaccagaaagacttgaagcttttgacttggagaaatattgactggccagcaatgaaaaccttgcacaggaaatattgcactaaatgctcac

SEQ ID NO: 28568 - DNA, 110 bp, synthetic construct
  source 1..110: mol_type = other DNA
accaggtgtaagataaatcctagaccgtctaggctcctcttgcctgtttgctgcccagtatcactgattccttttattagagtacagtatggaaaccaagcttttggtgt

SEQ ID NO: 28569 - DNA, 110 bp, synthetic construct
  source 1..110: mol_type = other DNA
cagtatcactgattccttttattagagtacagtatggaaaccaagcttttggtgtcagctgttctttttgctgttggggcgtcattgcttccagacgctctcagcaaaga

SEQ ID NO: 28570 - DNA, 110 bp, synthetic construct
  source 1..110: mol_type = other DNA
cgcccagctgctccacccaggctgggccgatgctgcgcgctgccaccctactgcccagccccaggaagggactccagctcaaatgggttttgaccattcgcattcccggt

SEQ ID NO: 28571 - DNA, 110 bp, synthetic construct
  source 1..110: mol_type = other DNA
cagccccaggaagggactccagctcaaatgggttttgaccattcgcattcccggtgtgtgctgggtactcggattccgatccttaaggaaagtaaggaatattgaaattg

SEQ ID NO: 28572 - DNA, 110 bp, synthetic construct
  source 1..110: mol_type = other DNA
tgaggacaaggccacaagcttgggaactggggcagcccgcagaagctagaaacggcaaggtcacgacttctcctctggacctttgagagaagaacagccctgcagacacc

SEQ ID NO: 28573 - DNA, 110 bp, synthetic construct
  source 1..110: mol_type = other DNA
catgttatctctgtcttttgggtttgtttgttgcattgtcacagtcatcttaactggtgatttttatttccctggtgagtaatgatgctaagcacattttcacatacctg

SEQ ID NO: 28574 - DNA, 110 bp, synthetic construct
  source 1..110: mol_type = other DNA
tggctgtatacagacacacacactccattttttcaaacgctgtggttcatgtatatattacacgacccagctacatgctttacatatgcatagtcataggtatgatttga

SEQ ID NO: 28575 - DNA, 110 bp, synthetic construct
  source 1..110: mol_type = other DNA
tattacacgacccagctacatgctttacatatgcatagtcataggtatgatttgacaggttttcagtgttctggttggaaaatgggatttcatttgcttacattgtgttt

SEQ ID NO: 28576 - DNA, 110 bp, synthetic construct
  source 1..110: mol_type = other DNA
cgggatccaactgcagggggacaagcccccttccttagctgtactgggaatgcgtggggcttccagagggctggggaatctgggatctcacttgtgcaaccacagtcttg

SEQ ID NO: 28577 - DNA, 110 bp, synthetic construct
  source 1..110: mol_type = other DNA
ctcatccctgtggatgtagaagccgaggttgatgcctttggctgcgataacaaaacccaacaaagagcagcttctgcagaatgaggctgcaccttctcacctatcagaat

SEQ ID NO: 28578 - DNA, 110 bp, synthetic construct
  source 1..110: mol_type = other DNA
ccctctggatgggcgggtcctgcccatgctctgtgaaggaaagaaggaccaacaccctctcggccaaggactgctgcgtctcgggtgcagctgagggcagagccaagctg

SEQ ID NO: 28579 - DNA, 110 bp, synthetic construct
  source 1..110: mol_type = other DNA
cctctcggccaaggactgctgcgtctcgggtgcagctgagggcagagccaagctgagacgaggtctccagaatcctgccacctgtcttgggttgctccggcggctgtgac

SEQ ID NO: 28580 - DNA, 110 bp, synthetic construct
  source 1..110: mol_type = other DNA
gaaggccagcgtgtgacgaggggagggggaggtggtgacctggtctcaggcctggtggtgacatttagaagaatccaggactgtgtgaagactttggagcctttgggcaa

SEQ ID NO: 28581 - DNA, 110 bp, synthetic construct
  source 1..110: mol_type = other DNA
tggtgacatttagaagaatccaggactgtgtgaagactttggagcctttgggcaaactgcctgcagctggaggtggctggtttaggatggggcaccgggaaggccacagg

SEQ ID NO: 28582 - DNA, 110 bp, synthetic construct
  source 1..110: mol_type = other DNA
ttgtcactgggatgcagatgctgttggtcagtagaagctccggatacttcctccgcccccgagggcggggctggcctagaatgagttatccgcaaacacctgctggctga

SEQ ID NO: 28583 - DNA, 110 bp, synthetic construct
  source 1..110: mol_type = other DNA
ctcccctctttagttgctgtacgtgtagagtcctttttgctcggggcttttacccgatgtgccttccgaggggagaacattccaggagctgtcctcgtccaaacccgccg

SEQ ID NO: 28584 - DNA, 110 bp, synthetic construct
  source 1..110: mol_type = other DNA
gatgtgccttccgaggggagaacattccaggagctgtcctcgtccaaacccgccgcggtacctgcgtctgggcaggcttgcgctgggcaggattgcgtggccgagagttt

SEQ ID NO: 28585 - DNA, 110 bp, synthetic construct
  source 1..110: mol_type = other DNA
agtccgggtgggctcttgcgaggaagagggactgtaacaaaaccacaacctacagctgcacggtgaccgtggaaggaagagacgccgcagccccgtgggccagggcggca

SEQ ID NO: 28586 - DNA, 110 bp, synthetic construct
  source 1..110: mol_type = other DNA
ctgcacggtgaccgtggaaggaagagacgccgcagccccgtgggccagggcggcactggccttggagacggacccgactcctactctgcggggagggcctctgctgacca

SEQ ID NO: 28587 - DNA, 110 bp, synthetic construct
  source 1..110: mol_type = other DNA
ggaagcaaagtcggggacgtccgtgtggtgaccgggtgtgggatttgcagttacagagaagagacgagctgaagacggcttccggctaacgaggttctgggcagaggagc

SEQ ID NO: 28588 - DNA, 110 bp, synthetic construct
  source 1..110: mol_type = other DNA
gagaagagacgagctgaagacggcttccggctaacgaggttctgggcagaggagctgagattagacgccaccccggagaaggagggaccactgctcctctggaaccatgt

SEQ ID NO: 28589 - DNA, 110 bp, synthetic construct
  source 1..110: mol_type = other DNA
tttgaaaacaatgcagcggggacccctcaccctctgcagcctcggagatgctcccagcctcccaggataagcagaaaatccacccctctgcccctgagcctcgtgctgac

SEQ ID NO: 28590 - DNA, 110 bp, synthetic construct
  source 1..110: mol_type = other DNA
agcctcccaggataagcagaaaatccacccctctgcccctgagcctcgtgctgacgggaggacgtgctcaggtcaagagcctggctccgagggcccagggactcggggcg

SEQ ID NO: 28591 - DNA, 110 bp, synthetic construct
  source 1..110: mol_type = other DNA
tctggtcacacagatacggcggcttcattctcagcatcactgcagttctacagtgctgctggtcagtgggacggcttcgcacgcgtgtggtcactgacattccccagagt

SEQ ID NO: 28592 - DNA, 110 bp, synthetic construct
  source 1..110: mol_type = other DNA
ctgctggtcagtgggacggcttcgcacgcgtgtggtcactgacattccccagagttgtccaggagtttgtgggatgttgagagcttctacttccatcccagcatgctaac

SEQ ID NO: 28593 - DNA, 110 bp, synthetic construct
  source 1..110: mol_type = other DNA
ttttcccttacactggctaaaaatcaaacatccggagctgctcaaattgggctaaactgattcacaatgtcactgaagagacatggcagatcctggaggacgcttcttgg

SEQ ID NO: 28594 - DNA, 110 bp, synthetic construct
  source 1..110: mol_type = other DNA
gaaaaatagggccacagataaggatcaggttggaagcaagcttgcattgttttcaaagccagcttcctcttagtgggcttcttgcgaatgaagtaggcttcctgaacatt

SEQ ID NO: 28595 - DNA, 110 bp, synthetic construct
  source 1..110: mol_type = other DNA
aagccagcttcctcttagtgggcttcttgcgaatgaagtaggcttcctgaacattttccttgtgtgggggggtttcgttccacagagacatcaaaggcactgttctgtgt

SEQ ID NO: 28596 - DNA, 110 bp, synthetic construct
  source 1..110: mol_type = other DNA
gtggaatcgaaagtgacctcagaatccaccttcttgttgagactgtatttgccgctttcatctgtgcacccgtctgtctgtctggctctgagccgggggcagagctgctc

SEQ ID NO: 28597 - DNA, 110 bp, synthetic construct
  source 1..110: mol_type = other DNA
tttcatctgtgcacccgtctgtctgtctggctctgagccgggggcagagctgctcatcgtgggctcaggggcaggagcagcgcgtgatggcccgacagccacgtgtgtga

SEQ ID NO: 28598 - DNA, 110 bp, synthetic construct
  source 1..110: mol_type = other DNA
tcggatttgttaaccactgagccacggtgggaactcccaaggaacctatttttaaaaagtcagtaccactcaattctgccactcagagctaattgttgagtttcaggaat

SEQ ID NO: 28599 - DNA, 110 bp, synthetic construct; identical to SEQ ID NO: 28598
  source 1..110: mol_type = other DNA

SEQ ID NO: 28600 - DNA, 110 bp, synthetic construct
  source 1..110: mol_type = other DNA
gtgatagaaattccgcaaatgagaatgaaccgtggccaaccgtctgccgccgacatccttctcttctccggtgaaacatttatctccaagctacaatacccagtgcttct

SEQ ID NO: 28601 - DNA, 110 bp, synthetic construct
  source 1..110: mol_type = other DNA
tccttctcttctccggtgaaacatttatctccaagctacaatacccagtgcttctctaggcgtatggccacacatttcagacagagtttgaaaataaacagccggagtgg

SEQ ID NO: 28602 - DNA, 110 bp, synthetic construct
  source 1..110: mol_type = other DNA
tgcttccataacttggctctcgtgaacagcactgctatgaacattggatgtgcatatctttttgaaatagaaaacctatagactgggagaaaatatgggtaaatgaagct

SEQ ID NO: 28603 - DNA, 110 bp, synthetic construct; identical to SEQ ID NO: 28602
  source 1..110: mol_type = other DNA

SEQ ID NO: 28604 - DNA, 110 bp, synthetic construct
  source 1..110: mol_type = other DNA
aatggtacattgcatctttttatcactcctttttcagttattacacgtgaataaatatagctttcgagacgcccgagtgtccaaagtcgcatcatgaaccagtgcattac

SEQ ID NO: 28605 - DNA, 110 bp, synthetic construct
  source 1..110: mol_type = other DNA
tatagctttcgagacgcccgagtgtccaaagtcgcatcatgaaccagtgcattacagagccgggtttcatcagccccacaggtgcccctcagtgggaaccggctcatcta

SEQ ID NO: 28606 - DNA, 110 bp, synthetic construct
  source 1..110: mol_type = other DNA
tgccatgtaacccacacacacacacacacacacacgcgcgcgcccgtgcttctcttcacaagttgggatcccgccttgctccgagggaatccagctcaccgaggggcagc

SEQ ID NO: 28607 - DNA, 110 bp, synthetic construct
  source 1..110: mol_type = other DNA
tcacaagttgggatcccgccttgctccgagggaatccagctcaccgaggggcagcgaaacgttttggagagctgtacaagagccgggcggcgtttgcaggggcgtctaac

SEQ ID NO: 28608 - DNA, 110 bp, synthetic construct
  source 1..110: mol_type = other DNA
cctcattttctgaatttaggaagaaaaaggtacgttgtgaaaacgcttacactgagtcacggtttaaagttttaataaacctctcattattttttaaacacttgagcatt

SEQ ID NO: 28609 - DNA, 110 bp, synthetic construct
  source 1..110: mol_type = other DNA
aaaggtacgttgtgaaaacgcttacactgagtcacggtttaaagttttaataaacctctcattattttttaaacacttgagcatttaacaaagattccaaataacctgct

SEQ ID NO: 28610 - DNA, 110 bp, synthetic construct; identical to SEQ ID NO: 28608
  source 1..110: mol_type = other DNA

SEQ ID NO: 28611 - DNA, 110 bp, synthetic construct; identical to SEQ ID NO: 28609
  source 1..110: mol_type = other DNA

SEQ ID NO: 28612 - DNA, 110 bp, synthetic construct
  source 1..110: mol_type = other DNA
cctcccagtttgcccctttctgtcgccttcttcttgttttctgctgtaacctgcacaacgtgagcacaggctacaactcccccactttctccatccttcgtgttcctaga

SEQ ID NO: 28613 - DNA, 110 bp, synthetic construct
  source 1..110: mol_type = other DNA
caacgtgagcacaggctacaactcccccactttctccatccttcgtgttcctagaagctgccttgaataaaggactcatgatcagcggccccgcaagggccccagacgtc

SEQ ID NO: 28614 - DNA, 110 bp, synthetic construct
  source 1..110: mol_type = other DNA
cgtcgttaacccatttggtgagcctgggcggactccaggatcgagtacaagtacgtgcgtctgggcatattccttcgggcgccgacgcggaggccgcagcacaaaacagt

SEQ ID NO: 28615 - DNA, 110 bp, synthetic construct
  source 1..110: mol_type = other DNA
tgcgtctgggcatattccttcgggcgccgacgcggaggccgcagcacaaaacagtttcctgtcatcatttaaatgatgaggaccaatgtgcaaaacaccgaaaccatttc

SEQ ID NO: 28616 - DNA, 110 bp, synthetic construct
  source 1..110: mol_type = other DNA
acccaggtggaggcgcgcccagagaaacaagggctctaagtgaagaagcgacgttggagggggtctgatgcagatgctccccgcgggggaggcggggcagggccggtttg

SEQ ID NO: 28617 - DNA, 110 bp, synthetic construct
  source 1..110: mol_type = other DNA
aacaagggctctaagtgaagaagcgacgttggagggggtctgatgcagatgctccccgcgggggaggcggggcagggccggtttgcaccgggccccacagggaggagagg

SEQ ID NO: 28618 - DNA, 110 bp, synthetic construct
  source 1..110: mol_type = other DNA
atggacattatgatttgtcatccgtgccagccctgcccacgtctttcctgtgtccctctgcggttgtctgcctgctccttgtctgctcggagtccaagctgtcacttact

SEQ ID NO: 28619 - DNA, 110 bp, synthetic construct
  source 1..110: mol_type = other DNA
ctctgcggttgtctgcctgctccttgtctgctcggagtccaagctgtcacttacttacgtcgaggctgcctttcccgcccctccgtgagccctgggctgtcacgggccgg

SEQ ID NO: 28620 - DNA, 110 bp, synthetic construct
  source 1..110: mol_type = other DNA
cagtaaacacttcaccaattactgcagcgcatccatttcttttaaacggcaagtgggatgtttgctctgactgaccacattctggccggagagtaagtccaagctcttcc

SEQ ID NO: 28621 - DNA, 110 bp, synthetic construct
  source 1..110: mol_type = other DNA
ggatgtttgctctgactgaccacattctggccggagagtaagtccaagctcttcctcaggagggaattcacacagggcgtgcgctctgcttggtgtgattcaactgagac

SEQ ID NO: 28622 - DNA, 110 bp, synthetic construct
  source 1..110: mol_type = other DNA
gggggcaggcctggggtgcaggtggggaaggcatgagggaagggctccaaggagagctgtccctcctagaagcagccccgccggccacctggccccagagtccagcactt

SEQ ID NO: 28623 - DNA, 110 bp, synthetic construct
  source 1..110: mol_type = other DNA
gctgtccctcctagaagcagccccgccggccacctggccccagagtccagcacttgagcccctgccgttcacttgctgtttccacttctgttgttggtaaaagtaagagc

SEQ ID NO: 28624 - DNA, 110 bp, synthetic construct
  source 1..110: mol_type = other DNA
taaacctaaacctaaacatcactccacttggcatctggctatttgtcctgactcctgacacacaatattatttttgtgtgctctgttcttaagctggctttgatgcttgg

SEQ ID NO: 28625 - DNA, 110 bp, synthetic construct
  source 1..110: mol_type = other DNA
tgacacacaatattatttttgtgtgctctgttcttaagctggctttgatgcttggctgctgccacacctggcagggacctaagaaagattttcactgggttccactctat

SEQ ID NO: 28626 - DNA, 110 bp, synthetic construct
  source 1..110: mol_type = other DNA
atgagcactaataataatgagctcactatcctttatagtttggctaaagcaaaagggagagctaggatatttcctctttcttactcttcacactttttctactctcccca

SEQ ID NO: 28627 - DNA, 110 bp, synthetic construct
  source 1..110: mol_type = other DNA
ggagagctaggatatttcctctttcttactcttcacactttttctactctccccatctcccaatggcttcttccttttttcgatcattagagagcagaatctatttttgt

SEQ ID NO: 28628 - DNA, 110 bp, synthetic construct
  source 1..110: mol_type = other DNA
cctattgaattagactttttcccccacccattcctccttagcatttctattttaagtagagcaaacccacttcttgttcaaagtgatcacatgggagttagtctgaggac

SEQ ID NO: 28629 - DNA, 110 bp, synthetic construct
  source 1..110: mol_type = other DNA
agctgagccactgacttcactacttaaagagctgcagttcatttggcttctaaataccattccaagggccaatttcagtttcggaccagtatctttctgcagcctgggaa

SEQ ID NO: 28630 - DNA, 110 bp, synthetic construct
  source 1..110: mol_type = other DNA
accattccaagggccaatttcagtttcggaccagtatctttctgcagcctgggaacagtttactgttttactcattcttccagtgctgggaaaccctatgccattttagc

SEQ ID NO: 28631 - DNA, 110 bp, synthetic construct
  source 1..110: mol_type = other DNA
cacgcagctttcggaaccagtctcgggtcctgacctcatcgttcccctggttctcctctctagctctagggcggcacctccccgccactctcgttctctcagggtctcac

SEQ ID NO: 28632 - DNA, 110 bp, synthetic construct
  source 1..110: mol_type = other DNA
ctctctagctctagggcggcacctccccgccactctcgttctctcagggtctcacagagaaggctgcatgaagagacgcagaacacctctgtgcaccttttggaaaaggg

SEQ ID NO: 28633 - DNA, 110 bp, synthetic construct; identical to SEQ ID NO: 28631
  source 1..110: mol_type = other DNA

SEQ ID NO: 28634 - DNA, 110 bp, synthetic construct; identical to SEQ ID NO: 28632
  source 1..110: mol_type = other DNA

SEQ ID NO: 28635 - DNA, 110 bp, synthetic construct
  source 1..110: mol_type = other DNA
gcaggtgcggccctaaaaagacaaaaaagcaaaacaaaaaaaacacacacatgataaaagaaggttcagtctgtgctttcagaaatgagcctaggtgatcaagctggatt

SEQ ID NO: 28636 - DNA, 110 bp, synthetic construct
  source 1..110: mol_type = other DNA
aaaagaaggttcagtctgtgctttcagaaatgagcctaggtgatcaagctggattgagaagacagttgccttttaatgtaacatagttcattcatttattcagcaggttt

SEQ ID NO: 28637 - DNA, 110 bp, synthetic construct
  source 1..110: mol_type = other DNA
agggggtccaatattcccaaggacagcacacagtgagtctcagagagactaggtgacatgccaagagtctgtacagctggtgagtgatgggacacaggttggaaccatgt

SEQ ID NO: 28638 - DNA, 110 bp, synthetic construct
  source 1..110: mol_type = other DNA
acatgccaagagtctgtacagctggtgagtgatgggacacaggttggaaccatgtctcctgggatcaaacacagcattctcccttccacatttctgaagaatggtgcact

SEQ ID NO: 28639 - DNA, 110 bp, synthetic construct
  source 1..110: mol_type = other DNA
tcttggagcaaagtgaacatgtggttgctccgcggatgggtttgctcctctggctctttcagagggagtgggaggaagccacttgcttccaccaccccctccatgaggaa

SEQ ID NO: 28640 - DNA, 110 bp, synthetic construct
  source 1..110: mol_type = other DNA
ctttcagagggagtgggaggaagccacttgcttccaccaccccctccatgaggaaggaagagtctgttcttttaaggacaagacaaggctatgccttgtccctcgcacat

SEQ ID NO: 28641 - DNA, 110 bp, synthetic construct
  source 1..110: mol_type = other DNA
tttctccagtttttgctttaggaacaagcatgtgaacaaattttggccacaaagacttgaggggaacacatgcccaaggtcccaggagtatatcctcactcctaagagag

SEQ ID NO: 28642 - DNA, 110 bp, synthetic construct
  source 1..110: mol_type = other DNA
actctctggatgccacaggtacactctgttctgtgtgtccttgaatggcatgcagtgtcctcccccaccccgggttgtgacctatagctgtggacctcacctatccaata

SEQ ID NO: 28643 - DNA, 110 bp, synthetic construct
  source 1..110: mol_type = other DNA
tgtcctcccccaccccgggttgtgacctatagctgtggacctcacctatccaatattggtgtcatgtcttcagccatcccagtaaccccagggcaggaatccttccctaa

SEQ ID NO: 28644 - DNA, 110 bp, synthetic construct
  source 1..110: mol_type = other DNA
ttttaatgaggaaaataaaatgattctgaagctgtgtgcccctaataaaaaaacccctcaacatttataaagcaaatattggtagaattggagaaactgaccaacatgtc

SEQ ID NO: 28645 - DNA, 110 bp, synthetic construct
  source 1..110: mol_type = other DNA
atatttagttcatattataaaaaatattgggtttgtattagctgcctagtcttttgctgtgtctgataaaagtaacgagcaccacagttgtgagtttggatgagtaattt

SEQ ID NO: 28646 - DNA, 110 bp, synthetic construct; identical to SEQ ID NO: 28645
  source 1..110: mol_type = other DNA

SEQ ID NO: 28647 - DNA, 110 bp, synthetic construct
  source 1..110: mol_type = other DNA
ctgagaatctcttgctgagttttaagtagatgagtggtgtgatgagatgtgcaattttcaaagatcacgccagcttctctgaggagaacatcttgggaagaagagaactg

SEQ ID NO: 28648 - DNA, 110 bp, synthetic construct
  source 1..110: mol_type = other DNA
tttcaaagatcacgccagcttctctgaggagaacatcttgggaagaagagaactggaggtggcattaacaagtaacaggcgacagttgaggaaagagaattgactgctgc

SEQ ID NO: 28649 - DNA, 110 bp, synthetic construct
  source 1..110: mol_type = other DNA
agtggaccctcccatctccattccaacgcagaatagtccattaacttttagtgtcttgttttcttatataaacatatagctaatgctcaccagatatataaggaaggctg

SEQ ID NO: 28650 - DNA, 110 bp, synthetic construct
  source 1..110: mol_type = other DNA
ttttagtgtcttgttttcttatataaacatatagctaatgctcaccagatatataaggaaggctgataacatgaaaggtagaacaacaacaacaacaaaagaacgtgaat

SEQ ID NO: 28651 - DNA, 110 bp, synthetic construct
  source 1..110: mol_type = other DNA
aaagtccagttgtgggctaggttcgggtgtggctgagagcagggctcaataatcaaccaaacctgcctgttcttgtcccttccctcagctctccttttctatatgggcta

SEQ ID NO: 28652 - DNA, 110 bp, synthetic construct
  source 1..110: mol_type = other DNA
accaaacctgcctgttcttgtcccttccctcagctctccttttctatatgggctatcttcttaattctacttctggggtggcaagatggttacagcagccctagcctcat

SEQ ID NO: 28653 - DNA, 110 bp, synthetic construct
  source 1..110: mol_type = other DNA
atctatcttactgcatgcaatttgaatagctgtctatgcttaatattccaagcaattttttttttcttttttgactgcacctgcagcatgtggaagttcccgggccagta

SEQ ID NO: 28654 - DNA, 110 bp, synthetic construct
  source 1..110: mol_type = other DNA
tgcaatttgaatagctgtctatgcttaatattccaagcaattttttttttcttttttgactgcacctgcagcatgtggaagttcccgggccagtaaaggaacatgtgcca

SEQ ID NO: 28655 - DNA, 110 bp, synthetic construct
  source 1..110: mol_type = other DNA
cttaacctgacattactgtagggaggcctctttttgtgagtgatatcatcctaccctgaggtgcaacagctgtaaaagaaagcaaaacaaagcaaaaataacccagacat

SEQ ID NO: 28656 - DNA, 110 bp, synthetic construct
  source 1..110: mol_type = other DNA
atttccataggcccacattccaatgcataggtcaaagagtaaaagttccttttccttttttttttcgattttataaataaaccacagtcttggaagttctggaagtcatc

SEQ ID NO: 28657 - DNA, 110 bp, synthetic construct
  source 1..110: mol_type = other DNA
aatgccaaagtaaataagtgaggcctgtattgtgggctttaagatgtcacctttacttatatttttgggtatctataaagcaagagattcccatagttattcctcccaag

SEQ ID NO: 28658 - DNA, 110 bp, synthetic construct
  source 1..110: mol_type = other DNA
gtcagattcatttctgctgcaccacgacgggaactccctcttcagcttttaaattgacattttgtatacaacctctttctctttgaatttttctaatttgagtgtttctt

SEQ ID NO: 28659 - DNA, 110 bp, synthetic construct; identical to SEQ ID NO: 28658
  source 1..110: mol_type = other DNA

SEQ ID NO: 28660 - DNA, 110 bp, synthetic construct
  source 1..110: mol_type = other DNA
agttccctaagctgtacagtaggagcatattgcttatccccagcagatatttataaagcaggtaaagcttcctgaaaaatatcttatataaccaggataaaatatgattg

SEQ ID NO: 28661 - DNA, 110 bp, synthetic construct; identical to SEQ ID NO: 28660
  source 1..110: mol_type = other DNA

SEQ ID NO: 28662 - DNA, 110 bp, synthetic construct
  source 1..110: mol_type = other DNA
ctcccttcctgttctgtgctctccagctatactgacctcttactttctcaaaattgagtggccacattcaggatatttatacactttcttccctgtgcttggaagatgct

SEQ ID NO: 28663 - DNA, 110 bp, synthetic construct
  source 1..110: mol_type = other DNA
gagtggccacattcaggatatttatacactttcttccctgtgcttggaagatgcttcctttccttcttcgatgaagttgctagctttagaaaaagtatatagagtgtcca

SEQ ID NO: 28664 - DNA, 110 bp, synthetic construct
  source 1..110: mol_type = other DNA
taacagtagttcattgatagccaatgtttatttaatacatgagcattgttcaagtttcagtggactctaaagagggaaaaatgactgtgcaggaaagtatgtctttaaaa

SEQ ID NO: 28665 - DNA, 110 bp, synthetic construct
  source 1..110: mol_type = other DNA
ttcagtggactctaaagagggaaaaatgactgtgcaggaaagtatgtctttaaaactgatggagaagtttcctggtggattgaggatccagtgttgtctctactgaggta

SEQ ID NO: 28666 - DNA, 110 bp, synthetic construct; identical to SEQ ID NO: 28664
  source 1..110: mol_type = other DNA

SEQ ID NO: 28667 - DNA, 110 bp, synthetic construct; identical to SEQ ID NO: 28665
  source 1..110: mol_type = other DNA

SEQ ID NO: 28668 - DNA, 110 bp, synthetic construct
  source 1..110: mol_type = other DNA
caaaaacaaaaactggcgtttccattgtggctcaatatgttaagaacccaactagtatccaggtctggagagccccaaagctctctcaaacatacagcctaagtcaacca

SEQ ID NO: 28669 - DNA, 110 bp, synthetic construct
  source 1..110: mol_type = other DNA
acaaactgtccttttatgagcaaattttatttgtgcaaaagaagcattgttaatatagctggattgcaagagtttgatgtagaatgaagtttaactctattgggagaaaa

SEQ ID NO: 28670 - DNA, 110 bp, synthetic construct
  source 1..110: mol_type = other DNA
ggaacacctataaactacttaaaattgtatgtatttatttacttgtgcttgtatttagatattttcctcagcttttagtggattctaccaaagatgtctgagcttacaaa

SEQ ID NO: 28671 - DNA, 110 bp, synthetic construct
  source 1..110: mol_type = other DNA
aacctgtggagacctaccaattccattacaccacagcgggtactcccaatacctttttaacttctactctaactatggaattaatcctaatagctgagttcatagagcaa

SEQ ID NO: 28672 - DNA, 110 bp, synthetic construct
  source 1..110: mol_type = other DNA
tttaacttctactctaactatggaattaatcctaatagctgagttcatagagcaatttagcaaatatggagccaacagtacctcatcacaacaaacctgtaaaacagaca

SEQ ID NO: 28673 - DNA, 110 bp, synthetic construct
  source 1..110: mol_type = other DNA
aattcagaaaggtgatctgggctagagacactaatttgtgagtactcagtatacaaagggcatttcaagaaatgaaacccatactattcagataaaatagtaaaacctaa

SEQ ID NO: 28674 - DNA, 110 bp, synthetic construct
  source 1..110: mol_type = other DNA
aagggcatttcaagaaatgaaacccatactattcagataaaatagtaaaacctaagaattctgccccaggggatcacagtattactaggccaaatgaggtagaagtaact

SEQ ID NO: 28675 - DNA, 110 bp, synthetic construct
  source 1..110: mol_type = other DNA
tgtgcttcccatacaaattacctcaagggaaggttccttctgctaagaaattactcaatatttcttctaattattaccaactcacttgcaaaataatttaccacaaatgt

SEQ ID NO: 28676 - DNA, 110 bp, synthetic construct
  source 1..110: mol_type = other DNA
tttattcctattcattttttggcttatctaattttgtgaccatgaataaagctcacacatttaaaccttaaagtagaagtctcccagcaagaataagaaagctctttcca

SEQ ID NO: 28677 - DNA, 110 bp, synthetic construct
  source 1..110: mol_type = other DNA
ggtagagagaggagaatggagcaggtgacagagacaagaggggataattagaggcccgtgaaaaagatggaggagaagctgttttctagagccacttcactcctgactgc

SEQ ID NO: 28678 - DNA, 110 bp, synthetic construct
  source 1..110: mol_type = other DNA
ttgtggtctatcattcaggtaaaatgctcctgaagtcatcacactctttaataattccaggaagacaagaaatctgcaattaacttgtctttaatatttttcagagagga

SEQ ID NO: 28679 - DNA, 110 bp, synthetic construct; identical to SEQ ID NO: 28678
  source 1..110: mol_type = other DNA

SEQ ID NO: 28680 - DNA, 110 bp, synthetic construct
  source 1..110: mol_type = other DNA
gtctcttgtgttgtgttttcattcacattcattatcttcccaccctcatattaaccctaagcaaccagtaatctgtcctctgcttctataagtttaccattttaagaatg

SEQ ID NO: 28681 - DNA, 110 bp, synthetic construct
  source 1..110: mol_type = other DNA
cctaagcaaccagtaatctgtcctctgcttctataagtttaccattttaagaatgttatataatcagaatcacatagtatgtactttttgattgtctttttcactcagca

SEQ ID NO: 28682 - DNA, 110 bp, synthetic construct
  source 1..110: mol_type = other DNA
tgcagctacagagagagccttttagcaacagttagggagcagcccttgccctaatggctacagagaaagagtcccagagtggccagaggaatgactgcagaacagcacct

SEQ ID NO: 28683 - DNA, 110 bp, synthetic construct
  source 1..110: mol_type = other DNA
aaaaggtttaacacatgacccacaaggacattcttgaaaccactgttttgttgcttctgattaactgttttacatgcaaatggtgaattcaagacagactgattagaatt

SEQ ID NO: 28684 - DNA, 110 bp, synthetic construct
  source 1..110: mol_type = other DNA
gtgcctcaccttctgatatgaacaagaaggcctatgaacttcccagcaacctatttctaaacaacagagcacaaggtgagaaccagaggaagctccccctgggtttttca

SEQ ID NO: 28685 - DNA, 110 bp, synthetic construct
  source 1..110: mol_type = other DNA
tctaaacaacagagcacaaggtgagaaccagaggaagctccccctgggtttttcagctgtgttccttaggatgttgggttattaaggattcaggggccactgcactagga

SEQ ID NO: 28686 - DNA, 110 bp, synthetic construct
  source 1..110: mol_type = other DNA
catctagatgagcaaagttcctgctttataagaaaactgttctgggtaactagtcctatatacaccagtggccttaacctacactcctaagaatgtaggtacatcagagt

SEQ ID NO: 28687 - DNA, 110 bp, synthetic construct
  source 1..110: mol_type = other DNA
ctatatacaccagtggccttaacctacactcctaagaatgtaggtacatcagagtgtatgggtgggtgcaagcagcagtgaggcataactgttttcaaaagaacaaggcc

SEQ ID NO: 28688 - DNA, 110 bp, synthetic construct
  source 1..110: mol_type = other DNA
agaactaaagactttaggcctgcaccagatctagggcacctttctcagaataactaccagctggaattcctcatcaaaagctattcctgtctcagtttatactcttagga

SEQ ID NO: 28689 - DNA, 110 bp, synthetic construct
  source 1..110: mol_type = other DNA
agggagctctgtggggtcacttgtataagagcagtagtttcattcatgagggctccaccctaatcacctaaccacctcccaatgtccccctcttctaacaccatcacaat

SEQ ID NO: 28690 - DNA, 110 bp, synthetic construct
  source 1..110: mol_type = other DNA
caccctaatcacctaaccacctcccaatgtccccctcttctaacaccatcacaatgagcattagggttctaacacatgaatttgggggtgcacaaacatgaagaccatag

SEQ ID NO: 28691 - DNA, 110 bp, synthetic construct
  source 1..110: mol_type = other DNA
tcaattcagagcattccagagaacatctgcccacacacccatgctttcatgcaaaatgaagcttaactgccattcaatagtacttgcatgtatctcagatgcttatttat

SEQ ID NO: 28692 - DNA, 110 bp, synthetic construct
  source 1..110: mol_type = other DNA
tttaaagcatcttttggaaaggaacacggcaatgtggagctaaaagaggcatcgcagttctagcatagatagcactctcagtttttagcaaataaggaagttgaggctca

SEQ ID NO: 28693 - DNA, 110 bp, synthetic construct
  source 1..110: mol_type = other DNA
ttgtataaacatttcctcagcactatgctacaacaataaagcaataatgaaataagagaaagagcctaaataactgcaatgaagaaaatgaagatgaagttggagaagaa

SEQ ID NO: 28694 - DNA, 110 bp, synthetic construct
  source 1..110: mol_type = other DNA
gagaaagagcctaaataactgcaatgaagaaaatgaagatgaagttggagaagaaagaaaagcagtgaaaatagagagttgtccatttgcataataaatccaactctctt

SEQ ID NO: 28695 - DNA, 110 bp, synthetic construct
  source 1..110: mol_type = other DNA
gatactcttggagaaacgtaacttgccaggggacacatgattaatacatgttagttcaaggccgcaccagaaaccctgtcattgttggaagcacatgaagcacctgagtt

SEQ ID NO: 28696 - DNA, 110 bp, synthetic construct
  source 1..110: mol_type = other DNA
tctcatagtttacccacttatgactgttgagagaaccaagttcaggagcatatatttgattttttaaaagcttaattatgcgtgacaattttattacataaactgataga

SEQ ID NO: 28697 - DNA, 110 bp, synthetic construct
  source 1..110: mol_type = other DNA
tattgtttgggaggcataccattctaaggctctaaaacccgctaacacagtcaccattgaatggagcaagttagacagctgtcatctttagaaatgggactggaggtgtg

SEQ ID NO: 28698 - DNA, 110 bp, synthetic construct
  source 1..110: mol_type = other DNA
ccatatttttcttaaacatatttatcctcagaatccagtgttcgcctaatgttgactaacagtccaccgaatcattattccataggcatacattttcaaaacagctattc

SEQ ID NO: 28699 - DNA, 110 bp, synthetic construct
  source 1..110: mol_type = other DNA
cagtgttcgcctaatgttgactaacagtccaccgaatcattattccataggcatacattttcaaaacagctattctgaaatgaaaccaatttttttatatccataaatta

SEQ ID NO: 28700 - DNA, 110 bp, synthetic construct
  source 1..110: mol_type = other DNA
ctcactctctcttgctccttgtccttctctctgactccaaatggtaatggatgtcattccacctttccagaatagctgatctcacccatgaggggcagctggagtcttgt

SEQ ID NO: 28701 - DNA, 110 bp, synthetic construct
  source 1..110: mol_type = other DNA
ttatatacaccgaattaaccacatccaaaactagacagccttattaagagcacgataagctgaaatagtatttaaatagcattgctctggcaaaatgtgcaaattctggt

SEQ ID NO: 28702 - DNA, 110 bp, synthetic construct
  source 1..110: mol_type = other DNA
ggtgcagccctaaaaggacaaaaagacaaaaaaaaagtattccagatataatggagtaatggcgtagtatttttttggaataatacctaagtgaaactattaataagagc

SEQ ID NO: 28703 - DNA, 110 bp, synthetic construct; identical to SEQ ID NO: 28702
  source 1..110: mol_type = other DNA

SEQ ID NO: 28704 - DNA, 110 bp, synthetic construct
  source 1..110: mol_type = other DNA
caagagaaaagagtggacctgggggatagcccagcatagatgttaggtatgctagtttccacctgctagaaaacagtccacctctagcctgagagagatgctgatttgct

SEQ ID NO: 28705 - DNA, 110 bp, synthetic construct
  source 1..110: mol_type = other DNA
tggggtgggcttaatccaattagttgaaggccttaatagaacaaagactgatcttaactgaagaaggaattccaccagcagactgactttggactcatgcttcaactatt

SEQ ID NO: 28706 - DNA, 110 bp, synthetic construct
  source 1..110: mol_type = other DNA
aactgaagaaggaattccaccagcagactgactttggactcatgcttcaactattccctgagtgtccagctgccagcctcctccatcagattttggtttcacttaaagct

SEQ ID NO: 28707 - DNA, 110 bp, synthetic construct
  source 1..110: mol_type = other DNA
tggatttaggagtggagggcatagtttgaaaccactttagagaaatagatcaacctaacattattttaagctagctattatacttggtgtccaactgggtcttcatctag

SEQ ID NO: 28708 - DNA, 110 bp, synthetic construct
  source 1..110: mol_type = other DNA
gcttttaaaatgtgttaccaacccagtttagctatatataaaatagcaaaaggcaggttgcaggaatggctcattcagcattttcaaattaattaaaaactaggtactgt

SEQ ID NO: 28709 - DNA, 110 bp, synthetic construct
  source 1..110: mol_type = other DNA
ggtgctaaattatgaaggaccttgaaagctgtggtaatttgttcttaatcataagagcagtaggaaattatagggtgatgtgaagaaaaagtgggtgatgtgattggaga

SEQ ID NO: 28710 - DNA, 110 bp, synthetic construct
  source 1..110: mol_type = other DNA
caagatcatcactccatcctccccctgggttagggcctcagttcttgcagaacgcaaagatgtatattccttgagtaaccaggacactgccctaaggctgcactagtgtt

SEQ ID NO: 28711 - DNA, 110 bp, synthetic construct
  source 1..110: mol_type = other DNA
gcagactgggaatccttgaatgatgagaatacaatggaaaaaatagcagtatgcgcattttaactattctcctgagaacaaaggctcagatggtgtcatctgacatactt

SEQ ID NO: 28712 - DNA, 110 bp, synthetic construct
  source 1..110: mol_type = other DNA
gcaggtgggtgctgggagcattcctctttcctgctggtcctggcctattgtaccgtcatcctcagctacgctacaagcaaataaatacacatcttctgtctgtgatcagc

SEQ ID NO: 28713 - DNA, 110 bp, synthetic construct
  source 1..110: mol_type = other DNA
cttaaataaaaaatcaatgaagcactatagggaaaaggtgttaccatcaatctttgtggcctctttcactcaatgccatagatagtcagcgacctctatggttgtgtgat

SEQ ID NO: 28714 - DNA, 110 bp, synthetic construct; identical to SEQ ID NO: 28713
  source 1..110: mol_type = other DNA

SEQ ID NO: 28715 - DNA, 110 bp, synthetic construct
  source 1..110: mol_type = other DNA
ctcgtcagatttatggtctggaaaaggcaacgggagttctcttgtgtcacagtgggttaaggatctggcattgttgctgctctggagtgggttcgatccctggtctggga

SEQ ID NO: 28716 - DNA, 110 bp, synthetic construct
  source 1..110: mol_type = other DNA
gttaaggatctggcattgttgctgctctggagtgggttcgatccctggtctgggaacttccacactgggtaggcacagtcaaaatttttttggaaaaaaaaatagaaaat

SEQ ID NO: 28717 - DNA, 110 bp, synthetic construct
  source 1..110: mol_type = other DNA
gaaggacagggtcttgaaatctatgggccttggtatctatcattgttataccttaaaaagataaggaggaggactccctttctctggaatgtatttctctttgagccaag

SEQ ID NO: 28718 - DNA, 110 bp, synthetic construct
  source 1..110: mol_type = other DNA
aaaagataaggaggaggactccctttctctggaatgtatttctctttgagccaaggtgatggggcaatagatgggggccctttgagtctcctgcctgtggcactcaggta

SEQ ID NO: 28719 - DNA, 110 bp, synthetic construct
  source 1..110: mol_type = other DNA
agcaagagagagtaattctacagccacccattgcctgctttggctgtttcctagccactcataggatgagtagttctagactaggacctgtggtggatgttctctgattc

SEQ ID NO: 28720 - DNA, 110 bp, synthetic construct
  source 1..110: mol_type = other DNA
agtagggggaatggagaggtggggaggaaccaacagtaaattaagcaagtgaatatacactatggccaaaaagcgagtcaagtggcatctattttacaaagttgatcaga

SEQ ID NO: 28721 - DNA, 110 bp, synthetic construct
  source 1..110: mol_type = other DNA
tacactatggccaaaaagcgagtcaagtggcatctattttacaaagttgatcagacaacctatgtgaggggatgaggtattaggaaaggcttgaagaaaggcagtgatag

SEQ ID NO: 28722 - DNA, 110 bp, synthetic construct
  source 1..110: mol_type = other DNA
taactcaggttgctgcagaggcacgggtttgatcccaggcctgacacagtggattaaagggtctggcattggccacagccctataggtcatagctacagctcagattgag

SEQ ID NO: 28723 - DNA, 110 bp, synthetic construct
  source 1..110: mol_type = other DNA
acagtggattaaagggtctggcattggccacagccctataggtcatagctacagctcagattgagtcctttggctgagaacttccatatgccatgggtgtggccataaaa

SEQ ID NO: 28724 - DNA, 110 bp, synthetic construct
  source 1..110: mol_type = other DNA
gattggaaggtaaactgaaagacaatataccttctccttggcattgcatgctgtgtgctgtgttttgtttgtgctcataactgttcaggactctgtgaattgttatcaga

SEQ ID NO: 28725 - DNA, 110 bp, synthetic construct
  source 1..110: mol_type = other DNA
tgctgtgttttgtttgtgctcataactgttcaggactctgtgaattgttatcagattgacttactggaatggatagaagacactggaatgtatgctcctcatcatttctg

SEQ ID NO: 28726 - DNA, 110 bp, synthetic construct
  source 1..110: mol_type = other DNA
taataccttacaataatacattcattaggacacaaattataactattctttttgacctcacactggcaggcccttaatagaagaaaaattgcaagaaatattgcacaggt

SEQ ID NO: 28727 - DNA, 110 bp, synthetic construct; identical to SEQ ID NO: 28726
  source 1..110: mol_type = other DNA

SEQ ID NO: 28728 - DNA, 110 bp, synthetic construct
  source 1..110: mol_type = other DNA
tttgaaatatacattagaaacctcttgtgtaccagtgcacagtctgggccccaatttttgctctgacttctactaaagcatccagtttacaatgagcttcatccacaact

SEQ ID NO: 28729 - DNA, 110 bp, synthetic construct
  source 1..110: mol_type = other DNA
ttttgctctgacttctactaaagcatccagtttacaatgagcttcatccacaactagacacctcccacattttcccaatatcttatcatgtacctcttgcttcctatgcc

SEQ ID NO: 28730 - DNA, 110 bp, synthetic construct
  source 1..110: mol_type = other DNA
tgggttgaatcagagctgcagctgtgggtttaggccacagtcacagtgacagcagatctgaaccacatctgtgatgtacaccacagcttgtggcaccactgaatccttaa

SEQ ID NO: 28731 - DNA, 110 bp, synthetic construct; identical to SEQ ID NO: 28730
  source 1..110: mol_type = other DNA

SEQ ID NO: 28732 - DNA, 110 bp, synthetic construct
  source 1..110: mol_type = other DNA
acaatgtattttgttagccactggctacatgttatgggttgaattgtgtccccacaaatatgttgacgacttaatccttagcagtcagaatatgacctatttggacatag

SEQ ID NO: 28733 - DNA, 110 bp, synthetic construct
  source 1..110: mol_type = other DNA
agaaattttccttcagtaggttgtggtatctgaggactggtgttattccaataaaccatttgctttttatagtcaaaccccagcttcaggaatcataagataattttcct

SEQ ID NO: 28734 - DNA, 110 bp, synthetic construct
  source 1..110: mol_type = other DNA
catacttttaatcaaatttaactgctggttttgtaaattccagtctcaatcatatcaaacatacttatttattagtttattctgtgcttgacaatcttgctgctgtcagc

SEQ ID NO: 28735 - DNA, 110 bp, synthetic construct
  source 1..110: mol_type = other DNA
caaacatacttatttattagtttattctgtgcttgacaatcttgctgctgtcagcagaagggagctgattgtagcagattttggctgaacttcattcctaatttctaact

SEQ ID NO: 28736 - DNA, 110 bp, synthetic construct
  source 1..110: mol_type = other DNA
caaaagctctgataagcccatactccattttgaggctaatatggagatgattatacatcagttatttggatttattctatctattgtggtaagcagaataatgcccaccc

SEQ ID NO: 28737 - DNA, 110 bp, synthetic construct
  source 1..110: mol_type = other DNA
tcccttactcacacttcagtaaagccatcattttgtaaattctgtccatgatcacaaatctttttaaaaagtacctatttttctatatgaagggagagtcaaagatcacc

SEQ ID NO: 28738 - DNA, 110 bp, synthetic construct
  source 1..110: mol_type = other DNA
ccatgatcacaaatctttttaaaaagtacctatttttctatatgaagggagagtcaaagatcaccccatgtattaagaatgactttattacaaaacaaaggcacaaaaca

SEQ ID NO: 28739 - DNA, 110 bp, synthetic construct
  source 1..110: mol_type = other DNA
cggcatggccttgaggacctcggagctcttgatgagtccaggctctacctgggctctgagatcttcctctgagtttgccagtggggctctagtagccatttctcctctgg

SEQ ID NO: 28740 - DNA, 110 bp, synthetic construct
  source 1..110: mol_type = other DNA
aattctacatttgttaaattaattaatatttggtctgtgctaatagaaggttcagtctcaactgataaccagaaacttactcctcatgtgatactagagctgcttcccct

SEQ ID NO: 28741 - DNA, 110 bp, synthetic construct
  source 1..110: mol_type = other DNA
tctcaactgataaccagaaacttactcctcatgtgatactagagctgcttccccttcaggcagaacacagacaccaaataaaatgaggattttccatgaactttaatgcc

SEQ ID NO: 28742 - DNA, 110 bp, synthetic construct
  source 1..110: mol_type = other DNA
caaatgaccgaacattcaaggtccgtaggtttcttttacacagctcggccaaagtggctaaggatataaaacatgaaatgcatatgaggcacacaccatagccaaagtga

SEQ ID NO: 28743 - DNA, 110 bp, synthetic construct
  source 1..110: mol_type = other DNA
ggttatttcaaaaacagctgatgaaaatgtggcatctaatgaacatttaatacagctaaaatttaggaaaaggaggaatttacatgtttttctctactcttactgtatgg

SEQ ID NO: 28744 - DNA, 110 bp, synthetic construct; identical to SEQ ID NO: 28743
  source 1..110: mol_type = other DNA

SEQ ID NO: 28745 - DNA, 110 bp, synthetic construct
  source 1..110: mol_type = other DNA
ccagaaatttggagggaaatggttgaaagagggagagtcaaagctggtgagtcctcatagttatctccaattcttcaccttatcaaggttttgccctgccttgattttat

SEQ ID NO: 28746 - DNA, 110 bp, synthetic construct
  source 1..110: mol_type = other DNA
gttctttttgctttttaagctctccaggccaaatcttcctcccttactgcaaagccccatcacaatagaccccagaataaagtttgtcttaccatcttgaacaagtgtca

SEQ ID NO: 28747 - DNA, 110 bp, synthetic construct
  source 1..110: mol_type = other DNA
tttaattttatgggtgaggaaacagacttccatgcgttagaagtcatcagggaagctaggtctagcaccggaatcctcaacccagagttgaccactctaatttcctccca

SEQ ID NO: 28748 - DNA, 110 bp, synthetic construct
  source 1..110: mol_type = other DNA
ctaggtctagcaccggaatcctcaacccagagttgaccactctaatttcctcccaactttagccaggtctagaagaagtctggaattcaacagatgccccctctaccctt

SEQ ID NO: 28749 - DNA, 110 bp, synthetic construct
  source 1..110: mol_type = other DNA
atactcaacaaggtaacctggattaagaacttaaatgttagcttgactgaattactgcctttgtagcatttatgttaactaacaggcctattgtaataaagttgataatc

SEQ ID NO: 28750 - DNA, 110 bp, synthetic construct
  source 1..110: mol_type = other DNA
tttatatttacctcattagatggcagcacaacacccgaaactaaagtcttaacgttttggcgaggaatatgatagctcttagaagttggaaaaggtaattaaatgtgctg

SEQ ID NO: 28751 - DNA, 110 bp, synthetic construct
  source 1..110: mol_type = other DNA
acttcagtttatcaacttctttagcatcagatgagctcatttccttgtctcctgatacacattcctattttggcctccctctctctccctcacaacaataataaattccc

SEQ ID NO: 28752 - DNA, 110 bp, synthetic construct
  source 1..110: mol_type = other DNA
gaaacttctcacatggacttctctgccactgccacccccttcgttgatactggcagggtcaccttcatcctgggtctccaaatgactatgtgaagcagagccccttgact

SEQ ID NO: 28753 - DNA, 110 bp, synthetic construct
  source 1..110: mol_type = other DNA
gggtcaccttcatcctgggtctccaaatgactatgtgaagcagagccccttgactgtaccctaacccctgtcctagcatgtcttctttggtctcttaagagagagaaatg

SEQ ID NO: 28754 - DNA, 110 bp, synthetic construct
  source 1..110: mol_type = other DNA
actcttgagttcatcgtcctatttgctcagcacactactgctttttctaaaactttatccctgcccctcttagccactttgtcgctcttccacatgccattcctgtagct

SEQ ID NO: 28755 - DNA, 110 bp, synthetic construct
  source 1..110: mol_type = other DNA
tatccctgcccctcttagccactttgtcgctcttccacatgccattcctgtagctgcagatggataaccctagttcttcatgctgacttctggttggctagagcaaccac

SEQ ID NO: 28756 - DNA, 110 bp, synthetic construct
  source 1..110: mol_type = other DNA
tgcatgaccaatgtcctgccaccaagaaaagtctgcctaggatgccactgctgaccttgatgccactggacacttgacacatgctgcaggattttgttgcacctggtggc

SEQ ID NO: 28757 - DNA, 110 bp, synthetic construct
  source 1..110: mol_type = other DNA
ttaagttctaaattaaaaaatttatagataatacgcacttgtggttctaaattaaataataacggtgcaggtgttcttaacctccttctccctacctccttctcctcttc

SEQ ID NO: 28758 - DNA, 110 bp, synthetic construct
  source 1..110: mol_type = other DNA
ataataacggtgcaggtgttcttaacctccttctccctacctccttctcctcttcacaaggagccgttgttgctaaatgtcatgtgtgcttttcagatataaatctgtat

SEQ ID NO: 28759 - DNA, 110 bp, synthetic construct
  source 1..110: mol_type = other DNA
agacatagttccattagtcttgactgagcagcaaaagaggggaagctgtgtgacgatcgcttcctaaacttgtgattccacatttaatttctaaggcacttgctttattc

SEQ ID NO: 28760 - DNA, 110 bp, synthetic construct
  source 1..110: mol_type = other DNA
gacgctcaatctgcagccatgggcagagctggttccagtgagagagtgagccaggcaccactctgttctcgggggttgctctgtccttggggatgctgctgcagtaccag

SEQ ID NO: 28761 - DNA, 110 bp, synthetic construct
  source 1..110: mol_type = other DNA
caccactctgttctcgggggttgctctgtccttggggatgctgctgcagtaccagccaggcactccacacaaccagccttggtctctgtcccagccctggccatgactca

SEQ ID NO: 28762 - DNA, 110 bp, synthetic construct
  source 1..110: mol_type = other DNA
cacgatttgccatcgcattaagctgcagtgtcagcaaaacagaacagtcaccaatgacattcaggacatgcaacaatcacaacatttcacggctgtccgtaagaacactc

SEQ ID NO: 28763 - DNA, 110 bp, synthetic construct
  source 1..110: mol_type = other DNA
gtacctggtatacaaacattactgaacctctacttgacagcggtgccatgaagcacctctatctctggccatctctatgtctatctttgatgatgttcaaataatcagtg

SEQ ID NO: 28764 - DNA, 110 bp, synthetic construct
  source 1..110: mol_type = other DNA
cctctatctctggccatctctatgtctatctttgatgatgttcaaataatcagtgtttaaagtgagtaaacagatcaagcggatgtgactctgtacagaaaaagacaaaa

SEQ ID NO: 28765 - DNA, 110 bp, synthetic construct
  source 1..110: mol_type = other DNA
attaaagaccaaaggagaggtgggaaaagtagggaatgactcaatgatgatttcccgtaactttatattaattacctttttatggccaggatccctgaaaatcaaagcag

SEQ ID NO: 28766 - DNA, 110 bp, synthetic construct
  source 1..110: mol_type = other DNA
aagatgaaaatgacacaccttggtgggatgtagcctaagcttcctcttcctcaatgaagtcaccgcctcagctggtgtgcccggtcactccctcggtgagtcagtcacgt

SEQ ID NO: 28767 - DNA, 110 bp, synthetic construct
  source 1..110: mol_type = other DNA
gaagtcaccgcctcagctggtgtgcccggtcactccctcggtgagtcagtcacgtaatcatgtgtggaaactggcctaccatcgtgtggttttgttccaagaggagattc

SEQ ID NO: 28768 - DNA, 110 bp, synthetic construct
  source 1..110: mol_type = other DNA
tgccaaatcccccacccacggaatgaggccagagctcctcatcctcatggatactagtccaattcatttctgctgcaccacagcgggagctccttttaagtaaaatttat

SEQ ID NO: 28769 - DNA, 110 bp, synthetic construct
  source 1..110: mol_type = other DNA
aggccagagctcctcatcctcatggatactagtccaattcatttctgctgcaccacagcgggagctccttttaagtaaaatttatttgtatttattttatttttattaat

SEQ ID NO: 28770 - DNA, 110 bp, synthetic construct
  source 1..110: mol_type = other DNA
gaattgctttgtctaatgcaggaatgtactcattgaatcatattttaaaccagcatcctctatgattctatatgcgcctcaaagtctaatcacattggagctagataaag

SEQ ID NO: 28771 - DNA, 110 bp, synthetic construct
  source 1..110: mol_type = other DNA
atcagctgagatcagatggcagaggggtggctttagaaactcaggctggagtgttagagttggagaagttggcaggaggcccgttcgatacaactgatgagctaccagag

SEQ ID NO: 28772 - DNA, 110 bp, synthetic construct
  source 1..110: mol_type = other DNA
agagttggagaagttggcaggaggcccgttcgatacaactgatgagctaccagagagtcgaagcatgaaaattcagctcattctgcacgttttgtagctctctgttattt

SEQ ID NO: 28773 - DNA, 110 bp, synthetic construct
  source 1..110: mol_type = other DNA
gggctgcagtaaacaatataaaatacagcactctttgcagtactctctaggggaatgggttttattcaggttgttctttttggaagaatataaactgacacggtgtaaag

SEQ ID NO: 28774 - DNA, 110 bp, synthetic construct
  source 1..110: mol_type = other DNA
tgggttttattcaggttgttctttttggaagaatataaactgacacggtgtaaaggtaggtatgttaaattagttgccaccacatcaaaataatttggggaatgtgcttt

SEQ ID NO: 28775 - DNA, 110 bp, synthetic construct
  source 1..110: mol_type = other DNA
aatggcatcactgtagacttgtagtcaccacgttcccagaatctgtgatgagctcctttctggaagctccacagtcagaggctgcttgtctgaaggcctcctcgtgttgt

SEQ ID NO: 28776 - DNA, 110 bp, synthetic construct
  source 1..110: mol_type = other DNA
ctttctggaagctccacagtcagaggctgcttgtctgaaggcctcctcgtgttgtctttatgagaactatgagctgaggctttgggggcagcactcccgaagcccctgtg

SEQ ID NO: 28777 - DNA, 110 bp, synthetic construct
  source 1..110: mol_type = other DNA
tcttatctaaaaaaagaaagaagaaatgcaaactagtgttttagcagcactccaccaaattctcaaaaaaggattatttctgggtggtaaaaagaagggttgtttttaaa

SEQ ID NO: 28778 - DNA, 110 bp, synthetic construct; identical to SEQ ID NO: 28777
  source 1..110: mol_type = other DNA

SEQ ID NO: 28779 - DNA, 110 bp, synthetic construct
  source 1..110: mol_type = other DNA
agaaaacattgacattattttttttaagagtacatgtcttcaaattttaacctcagagcaaatgagcaagtgaactgccctcaacctagagctggaaaagcatgttgtga

SEQ ID NO: 28780 - DNA, 110 bp, synthetic construct; identical to SEQ ID NO: 28779
  source 1..110: mol_type = other DNA

SEQ ID NO: 28781 - DNA, 110 bp, synthetic construct
  source 1..110: mol_type = other DNA
caacctgtaccaaattaaaatcaaattccttcttccagaggaggtcctttctgaagctgcagataaaccctgcttcaacagctgcgaggttgtaggcaacccagggattc

SEQ ID NO: 28782 - DNA, 110 bp, synthetic construct
  source 1..110: mol_type = other DNA
ctcagaaaccataatcaacagctatcaatataagcaagtgatgtcttattcaagttatttgtttggtggcaccttagggattgttctttcatagggcaatgcagaaacta

SEQ ID NO: 28783 - DNA, 110 bp, synthetic construct
  source 1..110: mol_type = other DNA
ctcctccatcagacatgtcacaataaacagagaattctgctgggctctggagaggtttgattttgtaaaatccactctgcttgaaaccatcattgaaaatctctgaacaa

SEQ ID NO: 28784 - DNA, 110 bp, synthetic construct
  source 1..110: mol_type = other DNA
tctggagaggtttgattttgtaaaatccactctgcttgaaaccatcattgaaaatctctgaacaatctgcaaaacaacaaaatgtaatattcttatgtgtctttttcttt

SEQ ID NO: 28785 - DNA, 110 bp, synthetic construct
  source 1..110: mol_type = other DNA
gaacccgcatccttatgaatactagttgggctcgtgacctgctgagccacagttgggactcgttaaaagctttttttgattgacctaagacacttgatcagacattgata

SEQ ID NO: 28786 - DNA, 110 bp, synthetic construct; identical to SEQ ID NO: 28785
  source 1..110: mol_type = other DNA

SEQ ID NO: 28787 - DNA, 110 bp, synthetic construct
  source 1..110: mol_type = other DNA
catacattaagcactcaggaaatacttagaaaatgagttagaatggatccaccagacctccgctatggttttcagatgagtcagtataatttgaagtatagtttgaaaac

SEQ ID NO: 28788 - DNA, 110 bp, synthetic construct
  source 1..110: mol_type = other DNA
acctccgctatggttttcagatgagtcagtataatttgaagtatagtttgaaaacagttggcctgtgggatgcaaatcagattcaacatcgcttataaaactttttttgc

SEQ ID NO: 28789 - DNA, 110 bp, synthetic construct
  source 1..110: mol_type = other DNA
aaatgaattcagcttctgactaatcataatttcacacgcaaaattctgccctacgattcaataaataattgttgttcctcctgttacaggcagatgtgaccacccttccc

SEQ ID NO: 28790 - DNA, 110 bp, synthetic construct
  source 1..110: mol_type = other DNA
tatcacatgccataaattaactgacacagatatagcaataaggatcaactgagcagggcaagaaggggacagaatacagggctgtggaagtggccaatctgcaacccaaa

SEQ ID NO: 28791 - DNA, 110 bp, synthetic construct
  source 1..110: mol_type = other DNA
gcacaatgtatctacttccacaaggtggtgctgtttcccttctaataacacagggcagctgattcccaagaacacaaactagtcttaaaatattaccaaagttcctattc

SEQ ID NO: 28792 - DNA, 110 bp, synthetic construct
  source 1..110: mol_type = other DNA
tggaattctccatctgctttggtttggcacaaggccagctgactggcttgacagcaggctgtgaactcaccttctaagtgatatatatttcctgagtgttttctctgtac

SEQ ID NO: 28793 - DNA, 110 bp, synthetic construct
  source 1..110: mol_type = other DNA
attggtttgactttttagagatatgtgaatacagtgaatagaacctcatctcctttttaagaagaagatcaaatataccaaagttaccctccaagagtgttaatacgggg

SEQ ID NO: 28794 - DNA, 110 bp, synthetic construct
  source 1..110: mol_type = other DNA
tgcatgttctctcaaaactctctttgtcccttattatatcattttgtggtgggtaaaagtctccaaaccaattttgtctggctctgatatagtgtgggagagtctggcat

SEQ ID NO: 28795 - DNA, 110 bp, synthetic construct
  source 1..110: mol_type = other DNA
attcaggttgatttgcccaaaatttaattcctggttctcccattaaatgggccccccaactcaactaccttacctcttttaccgacactattattctctcagttacccgg

SEQ ID NO: 28796 - DNA, 110 bp, synthetic construct
  source 1..110: mol_type = other DNA
ccaactcaactaccttacctcttttaccgacactattattctctcagttacccgggttcaaaaaatataagctacttttgattcctttccactctacatctgctgtgtct

SEQ ID NO: 28797 - DNA, 110 bp, synthetic construct
  source 1..110: mol_type = other DNA
atttacatttagcatctttattacacaggtctgtggcctgaatgccatctttctgtcctctaagatggagttcaaatgccacccaaacttaccttatccttgtccttatc

SEQ ID NO: 28798 - DNA, 110 bp, synthetic construct
  source 1..110: mol_type = other DNA
gtgttctggctacattcaggccattagtgctgtcagtttcactactttgactacatattacttcatctttttccttagatgacttttctatttaaatcatttattttaaa

SEQ ID NO: 28799 - DNA, 110 bp, synthetic construct
  source 1..110: mol_type = other DNA
gccttgctcagtgggttaggattctgtagttgctgtgagctctaagtagcaaatgcggctggtataccgcattgctgggtctgtggcagctgcatctccaattcagcccc

SEQ ID NO: 28800 - DNA, 110 bp, synthetic construct; identical to SEQ ID NO: 28799
  source 1..110: mol_type = other DNA

SEQ ID NO: 28801 - DNA, 110 bp, synthetic construct
  source 1..110: mol_type = other DNA
ctaagccaaagtttgaagaagccaaggacttgatctcaaccttagtcatgtctttgtgcttgttgaaatccaattactcttatggtatttatctaagtaataagcttaag

SEQ ID NO: 28802 - DNA, 110 bp, synthetic construct
  source 1..110: mol_type = other DNA
aagaagccaaggacttgatctcaaccttagtcatgtctttgtgcttgttgaaatccaattactcttatggtatttatctaagtaataagcttaagcataaatcatcttct

SEQ ID NO: 28803 - DNA, 110 bp, synthetic construct
  source 1..110: mol_type = other DNA
attcttgcaaaggcttctcattggcaactctgctggctggggatgctgctagtgatgctgggaggctgctgtgtgcccacaagataagaagccgccgcaaggtttgtcgg

SEQ ID NO: 28804 - DNA, 110 bp, synthetic construct
  source 1..110: mol_type = other DNA
tgctgggaggctgctgtgtgcccacaagataagaagccgccgcaaggtttgtcgggagtactctagaatgttttaatacggtatctctcatttgaagagatttggtatgg

SEQ ID NO: 28805 - DNA, 110 bp, synthetic construct
  source 1..110: mol_type = other DNA
gaaaagggcactaaattttaaagttttctggccttctgaaatcttttatgagctttatttcagtgaaaaggaccatttaagccttggacccagcacatttgtattctttg

SEQ ID NO: 28806 - DNA, 110 bp, synthetic construct
  source 1..110: mol_type = other DNA
tatttcagtgaaaaggaccatttaagccttggacccagcacatttgtattctttgaaactgttcccaaactctatatcaatatattatgtgtacatttgaaatgaggttc

SEQ ID NO: 28807 - DNA, 110 bp, synthetic construct
  source 1..110: mol_type = other DNA
atccagtctgcagtaatctgttttgtatattgggttcaaatcttagaaactattagattagacacaattgaaagatccttaaagctcataaaactctacgatgcaagcac

SEQ ID NO: 28808 - DNA, 110 bp, synthetic construct
  source 1..110: mol_type = other DNA
tgagagctacctacccaagaagggagctgcaatatagccccacccactgtggtttcttgttcttgaatagctgttagatgctcttcttatcctgtctgaccagaagggca

SEQ ID NO: 28809 - DNA, 110 bp, synthetic construct
  source 1..110: mol_type = other DNA
atcgtgccagcctagtcctgggctactgttatttcgactcctaattgtctgcctgcttctgcacttgcttcttatcccagtagactatactcagcgcatcaaagtgctcc

SEQ ID NO: 28810 - DNA, 110 bp, synthetic construct
  source 1..110: mol_type = other DNA
cttctgcacttgcttcttatcccagtagactatactcagcgcatcaaagtgctccttttaaacacaagatactgcctatagcactctagggcttccatcttgcagcctgt

SEQ ID NO: 28811 - DNA, 110 bp, synthetic construct
  source 1..110: mol_type = other DNA
ttctatttattttatatacaaaaatggaagtgacagagagatgaaaaaacctattggtgattaaaaaacattgccagattctttggtggcctcgtggttaaggatccagt

SEQ ID NO: 28812 - DNA, 110 bp, synthetic construct
  source 1..110: mol_type = other DNA
atacaaaaatggaagtgacagagagatgaaaaaacctattggtgattaaaaaacattgccagattctttggtggcctcgtggttaaggatccagtgttgtcactgctgtg

SEQ ID NO: 28813 - DNA, 110 bp, synthetic construct
  source 1..110: mol_type = other DNA
gtgctgtatcaagctttctgtttgattctgcaatcacacaggccatctgtttccgctgcaaggctgacatggatacaaaattctccttcatcagtggcttctttatcagg

SEQ ID NO: 28814 - DNA, 110 bp, synthetic construct
  source 1..110: mol_type = other DNA
aatgtctcctgaaagtcaataaaaatcctgtatcaatctagacactgattatgtccattgtctcttttaagtaacatttagtttattttcacagaaatgccccaggtgaa

SEQ ID NO: 28815 - DNA, 110 bp, synthetic construct
  source 1..110: mol_type = other DNA
tgttgggtctagaggggtctgaccccatgggaacatatttgccctaagcatcttggatagtggcttgattcctccagtctctaccattggccttccatcaaattgagatt

SEQ ID NO: 28816 - DNA, 110 bp, synthetic construct
  source 1..110: mol_type = other DNA
gtttataagtggatgtccatatatgtgcatttcatgaagggaatttgttcagagaaagagatgcaggtctgtgtattatgcccgtgattccttaccttttccagctatgt

SEQ ID NO: 28817 - DNA, 110 bp, synthetic construct
  source 1..110: mol_type = other DNA
aagagatgcaggtctgtgtattatgcccgtgattccttaccttttccagctatgtcatgctatcagatctcctggtaactttgtattcttcaaattgtcaagattcaagg

SEQ ID NO: 28818 - DNA, 110 bp, synthetic construct
  source 1..110: mol_type = other DNA
ggcacttacacaacctccttgcccatagctggcaatgaaacagagaaatgtgcaaagtcagtattctagtaggtggtttgtgacagtattaatgattttaacatgccagt

SEQ ID NO: 28819 - DNA, 110 bp, synthetic construct
  source 1..110: mol_type = other DNA
tcatacttatttattcaggtgaattcctgctttggatggttgaagtctacttgggaaaaaattgttcatgtaattcagtcttattgagcattctcaaataaattaagatg

SEQ ID NO: 28820 - DNA, 110 bp, synthetic construct
  source 1..110: mol_type = other DNA
aatttgactaccaatttggatttttgagaactaaaagttgagaaaaaagtatagggaaagtaactgtaaatagcaatcaaggagttcttttgtgatgcagctggttaagg

SEQ ID NO: 28821 - DNA, 110 bp, synthetic construct
  source 1..110: mol_type = other DNA
gaaagtaactgtaaatagcaatcaaggagttcttttgtgatgcagctggttaaggacccagcattgtcactagcatgggttgctgccatggtttgaggtcaatccctggc

SEQ ID NO: 28822 - DNA, 110 bp, synthetic construct
  source 1..110: mol_type = other DNA
gcagaaaatacagtgttggcaccagacatacttagatacaaaactcagctcttcaacttattgagaaagagaacactgaaatcttagttttctaatttgtaaaataggca

SEQ ID NO: 28823 - DNA, 110 bp, synthetic construct
  source 1..110: mol_type = other DNA
tggaatagaaaactgcacggcctttgaataaataatcaccaggttctcaaaaaaagtgaagagattaggagaggaaaaagtttattgtagaacttccccccagaatcctg

SEQ ID NO: 28824 - DNA, 110 bp, synthetic construct
  source 1..110: mol_type = other DNA
gtgaagagattaggagaggaaaaagtttattgtagaacttccccccagaatcctgtcttgcaaaacctgctctccctaagaaatggctagtgggatctcagggtgaccaa

SEQ ID NO: 28825 - DNA, 110 bp, synthetic construct
  source 1..110: mol_type = other DNA
gaagctgctacatatttagaaattctttaaaacatctgtgcttttagaaggaaatatgtaaccttattagctcatttatttggacttttaccattactctggagagagat

SEQ ID NO: 28826 - DNA, 110 bp, synthetic construct; identical to SEQ ID NO: 28825
  source 1..110: mol_type = other DNA

SEQ ID NO: 28827 - DNA, 110 bp, synthetic construct
  source 1..110: mol_type = other DNA
tcctctgcctaagattacctcctattttctctattctcatacaaaccacacctatctttttaaaatcacttttttttttaaattgaacatgcccattacaaaaattcagg

SEQ ID NO: 28828 - DNA, 110 bp, synthetic construct
  source 1..110: mol_type = other DNA
aatctaaggagagataggcatcagcagagagaacatggaatgccagcagtgctttacagggcaagatgaagccagtgagaagcgctcagctaaagtgactggcaaactgg

SEQ ID NO: 28829 - DNA, 110 bp, synthetic construct
  source 1..110: mol_type = other DNA
acagggcaagatgaagccagtgagaagcgctcagctaaagtgactggcaaactggtggagaccctgccacgatagggtgaagaccctgggggccctggatgtagagggag

SEQ ID NO: 28830 - DNA, 110 bp, synthetic construct
  source 1..110: mol_type = other DNA
atgtccatagagaggaagatccaaaaacattataaagatgtcatctgtgcccagtcataccaattaaaattctaataagctagtttatggcattccttttgggaagttgg

SEQ ID NO: 28831 - DNA, 110 bp, synthetic construct
  source 1..110: mol_type = other DNA
agctctaaatgtatataactaaaagcagctcttgtagtctttgttattataatcagtattttaaaactcacaccaaggtttttgatcagtggagatattgtggacagggg

SEQ ID NO: 28832 - DNA, 110 bp, synthetic construct
  source 1..110: mol_type = other DNA
tgtgatgtaggctggcagctgcacttccgattggacctccagcctgggaacttccatatgctgaaggtgcagtatggaaaggctaaatacatacatacatacacagaaag

SEQ ID NO: 28833 - DNA, 110 bp, synthetic construct; identical to SEQ ID NO: 28832
  source 1..110: mol_type = other DNA

SEQ ID NO: 28834 - DNA, 110 bp, synthetic construct
  source 1..110: mol_type = other DNA
cactaagagtcacgcatgaacagggcccctgatcttccaagctgcatcgttgtgtttttcactatccactctctccagggacctgttctcctcagtgctatttcctggtt

SEQ ID NO: 28835 - DNA, 110 bp, synthetic construct
  source 1..110: mol_type = other DNA
tggtcttcagagttcattccccaggtcaaccgactggtgagcacgtaagccaactccacaaagtgagatgccagctccaaactttctccttccttctttcctccgctata

SEQ ID NO: 28836 - DNA, 110 bp, synthetic construct
  source 1..110: mol_type = other DNA
ttttcacatcaagttcaaatacatgtttgtgattgaggagctggctctgcagcttctctcattcctccttacttggcctctaccatcacctactcagtcttctaagttgt

SEQ ID NO: 28837 - DNA, 110 bp, synthetic construct
  source 1..110: mol_type = other DNA
aaaagaaacaaacatattgaagtctaccaatgtaatttaacacatgagctacttaatatactgtatgtagaacacagactatttgaagtctccataaataccaaggaagc

SEQ ID NO: 28838 - DNA, 110 bp, synthetic construct; identical to SEQ ID NO: 28837
  source 1..110: mol_type = other DNA

SEQ ID NO: 28839 - DNA, 110 bp, synthetic construct
  source 1..110: mol_type = other DNA
acaccactttatagcaaatagaaagagaactggtcaaaagtgcaaacacttcctagctctatattttctcaatgatcccaacgtgcccctattaagtgtaaaatagtctt

SEQ ID NO: 28840 - DNA, 110 bp, synthetic construct
  source 1..110: mol_type = other DNA
agaactggtcaaaagtgcaaacacttcctagctctatattttctcaatgatcccaacgtgcccctattaagtgtaaaatagtcttttacaattttttgaaacattttcaa

SEQ ID NO: 28841 - DNA, 110 bp, synthetic construct
  source 1..110: mol_type = other DNA
atagagacccagaagtgcttacatcttgagaggttaccaagaaaaacagggggttttagagatgatgagtctatggagcctcagtttttcaaatagactaaccctagaat

SEQ ID NO: 28842 - DNA, 110 bp, synthetic construct
  source 1..110: mol_type = other DNA
taaacacaagctaaaattaaggataccatttctcactgaggcagaatattaactcaggtactcagtgtaggagcatgggctgtgaagcattctttgatatggccattgat

SEQ ID NO: 28843 - DNA, 110 bp, synthetic construct; identical to SEQ ID NO: 28842
  source 1..110: mol_type = other DNA

SEQ ID NO: 28844 - DNA, 110 bp, synthetic construct
  source 1..110: mol_type = other DNA
tgtttatacatgctcagcagtaattctagccttggggcaaaggtcacctaaagtgtctgctaaacagtttctagctacttatgggtaaaaatagaccattacaggttaag

SEQ ID NO: 28845 - DNA, 110 bp, synthetic construct
  source 1..110: mol_type = other DNA
tctgctaaacagtttctagctacttatgggtaaaaatagaccattacaggttaagaaatcccaaaaagcccatttccccatattagtctgtggattttgctctgggaaat

SEQ ID NO: 28846 - DNA, 110 bp, synthetic construct
  source 1..110: mol_type = other DNA
gtgaaggaaggcatatttgaaatagtgtcaggggacttgggttttggtcacatatcagcatccacctgtatgcctgtggacagaccactttatccttctgtgcttggtgg

SEQ ID NO: 28847 - DNA, 110 bp, synthetic construct
  source 1..110: mol_type = other DNA
cagcatccacctgtatgcctgtggacagaccactttatccttctgtgcttggtggagtgaggatgtataaaaatagacaagacaagaaagatcctttgttatagatggca

SEQ ID NO: 28848 - DNA, 110 bp, synthetic construct
  source 1..110: mol_type = other DNA
gcaatttattcagtcagagctagtgccttaggtaattaaaacataagcacacacggatttctgcacatgcatatttggcaggaaagtaatataagaatctgacaagtctg

SEQ ID NO: 28849 - DNA, 110 bp, synthetic construct
  source 1..110: mol_type = other DNA
ccatgtcatgattatttcacattatcccctatttcctcaaacatcaaacatttcccgctagtcccatcagttttttttttttttttttttttttcctggtcattttaggg

SEQ ID NO: 28850 - DNA, 110 bp, synthetic construct
  source 1..110: mol_type = other DNA
cctgctcttggtgtttctatcccccaggaacctgtcatgacagtgctttgatgagtgatctcctcggagctggtgccaacattatttcttgttcctaaatcgaaaacttt

SEQ ID NO: 28851 - DNA, 110 bp, synthetic construct
  source 1..110: mol_type = other DNA
ggatgtgggttcagtccctggcctcaatcagcagattaaaggagctggcattgctgcaagccatggtgtagatctcggatgaggctcagatctggagttgctgtggctat

SEQ ID NO: 28852 - DNA, 110 bp, synthetic construct
  source 1..110: mol_type = other DNA
aagaaatggatggtgccattatcactatatgtttctattttttaacaccagcatccgcaaggcctagctgagtgtctatccaaatgctgaatttctgtcatgaactcata

SEQ ID NO: 28853 - DNA, 110 bp, synthetic construct
  source 1..110: mol_type = other DNA
gcagtaaaaggtcttccacatgtaaaatttttatgtttttccctgtatttcccattgccttctgattgcaactggtagcctgtccatgctttaaacacacactactctgg

SEQ ID NO: 28854 - DNA, 110 bp, synthetic construct
  source 1..110: mol_type = other DNA
tgccttctgattgcaactggtagcctgtccatgctttaaacacacactactctggatctgtgacccaaatagtaaaaactgttccaggattcttcaagatgaaataatat

SEQ ID NO: 28855 - DNA, 110 bp, synthetic construct
  source 1..110: mol_type = other DNA
acctctctgggaaaaaataatgtattggggcagaaaaatcttagacctaggagcttaggaatctaagaagacttacattattggtggaaaatcaattggttatgacacat

SEQ ID NO: 28856 - DNA, 110 bp, synthetic construct
  source 1..110: mol_type = other DNA
taggaatctaagaagacttacattattggtggaaaatcaattggttatgacacattttcgaggaaggatttgagatcagtttagcctaaggctatacttgctcctgccac

SEQ ID NO: 28857 - DNA, 110 bp, synthetic construct
  source 1..110: mol_type = other DNA
tgctttgtaaggagttaagtgccttcgtgtagacatcctagcctgtagattcaagctccattcatatttcccaacagcaagctgtccctgcccacccctgtggtccattc

SEQ ID NO: 28858 - DNA, 110 bp, synthetic construct
  source 1..110: mol_type = other DNA
ttactctgaggaacattaattcttattgtttaaaaaaaatcaagcagtagctaaactccacctgcaaattctatctcctctatgatgagtaaaaccttagttagtctatt

SEQ ID NO: 28859 - DNA, 110 bp, synthetic construct; identical to SEQ ID NO: 28858
  source 1..110: mol_type = other DNA

SEQ ID NO: 28860 - DNA, 110 bp, synthetic construct
  source 1..110: mol_type = other DNA
gtaggtaaccatctgtatgtatattcagctggacatgaggttataatgatgccttcaactctagtctatcagcacatgcattattctaacctcctcctcttgctgatctg

SEQ ID NO: 28861 - DNA, 110 bp, synthetic construct
  source 1..110: mol_type = other DNA
caactctagtctatcagcacatgcattattctaacctcctcctcttgctgatctgtaaatgctcactccaactgtaagaaacctgactgcctccacccaccatctgttac

SEQ ID NO: 28862 - DNA, 110 bp, synthetic construct
  source 1..110: mol_type = other DNA
tgccagttgtttaaactaaacggatgaactgctatcaagcacatcagccaaatttccttccagggcaatttggcagctgtcatatagatataatagcagggttcctttgg

SEQ ID NO: 28863 - DNA, 110 bp, synthetic construct
  source 1..110: mol_type = other DNA
ttttgggaggctgtctgcctcatcccattagaaccataacacagggcaaatgcaaattgtgtcgacgctttctacagacttcttggaaagatgtgggattgtttttctaa

SEQ ID NO: 28864 - DNA, 110 bp, synthetic construct
  source 1..110: mol_type = other DNA
aatcttgttctcaaacaagggaataaaaaaggcttaaggagttcttgttgtggctcagaggtaacgaatccggtatccatgaggacgagggttccatccctggcctaagt

SEQ ID NO: 28865 - DNA, 110 bp, synthetic construct
  source 1..110: mol_type = other DNA
aaggagttcttgttgtggctcagaggtaacgaatccggtatccatgaggacgagggttccatccctggcctaagtgggttaaggatccgcgttgcagtgagctatggtgt

SEQ ID NO: 28866 - DNA, 110 bp, synthetic construct
  source 1..110: mol_type = other DNA
aaacaggttatgtgttttctatgcattcatcacccccttcaacaaagattttatcattcaaatgggagagctgtgtgaggaaaagtttgtacctctctcttgctggcaat

SEQ ID NO: 28867 - DNA, 110 bp, synthetic construct
  source 1..110: mol_type = other DNA
attcaaatgggagagctgtgtgaggaaaagtttgtacctctctcttgctggcaattttgttaggtaagataaactacaaagcttgctcttcagaccttctctgaattctg

SEQ ID NO: 28868 - DNA, 110 bp, synthetic construct
  source 1..110: mol_type = other DNA
ttcagaaaaggaaccactaagaatttcattctattgagaggcattgagatgtcgggagaaggggctgcttttttgcggaaaatgatagcttagtttgaaaaatgtgaaca

SEQ ID NO: 28869 - DNA, 110 bp, synthetic construct
  source 1..110: mol_type = other DNA
atgaggctaagtaatttacatatgctgtttcaatgaattagctcaacaatcctatctactaggtaaaatatgccttttatatgtgggaaaactgaaatgagaagaattga

SEQ ID NO: 28870 - DNA, 110 bp, synthetic construct
  source 1..110: mol_type = other DNA
caaggttcagccattgctctcagtatcaatctcagtctttttcgtcctgacacttgaaccaccaatagcagctcctttggcattggcatcatgtaaagttatcaataaag

SEQ ID NO: 28871 - DNA, 110 bp, synthetic construct
  source 1..110: mol_type = other DNA
gaaccaccaatagcagctcctttggcattggcatcatgtaaagttatcaataaagcagaggtgaatgtgtgcattgataaaagagagtgtctcttctcattcccatctga

SEQ ID NO: 28872 - DNA, 110 bp, synthetic construct
  source 1..110: mol_type = other DNA
agcactgccatgagctggataggcaatgctggatcctagcagacacaggataggtgtaggctgcagacacagtttggaccccgcgttgctgtggctgtggaataagctag

SEQ ID NO: 28873 - DNA, 110 bp, synthetic construct
  source 1..110: mol_type = other DNA
tggataggcaatgctggatcctagcagacacaggataggtgtaggctgcagacacagtttggaccccgcgttgctgtggctgtggaataagctagcagctacagctccaa

SEQ ID NO: 28874 - DNA, 110 bp, synthetic construct
  source 1..110: mol_type = other DNA
caatcctttatttctctgctgtcatgtaatcaaaagagatgacgttccacttcgcaaatattttcaagttccaagaaagatattgccattaaattatgcctatgtaaaca

SEQ ID NO: 28875 - DNA, 110 bp, synthetic construct
  source 1..110: mol_type = other DNA
tccacttcgcaaatattttcaagttccaagaaagatattgccattaaattatgcctatgtaaacatctacttatatcaaaatagctcttgttttgcacctctgatattgt

SEQ ID NO: 28876 - DNA, 110 bp, synthetic construct
  source 1..110: mol_type = other DNA
ggagccattttcttaactaaatttaaaaacaggcaatgcccagaagtgcctatatctgctgagcttataaattgtgaatgaatggcataggttttgcattgttgtggaaa

SEQ ID NO: 28877 - DNA, 110 bp, synthetic construct
  source 1..110: mol_type = other DNA
acaaactataaatgcatataatacatacagctccttcacgagatggtatccaggtgaatgaagaggaaatcagatgctctcttagcaaaagggggagagagacttaagtc

SEQ ID NO: 28878 - DNA, 110 bp, synthetic construct
  source 1..110: mol_type = other DNA
cagctccaattcaacccctagcctcggaatttccatatgctgagggtttggccctaaaaaaagataataaaataaaataaaataaaataggactatggtctctattccac

SEQ ID NO: 28879 - DNA, 110 bp, synthetic construct
  source 1..110: mol_type = other DNA
aaaaaaagataataaaataaaataaaataaaataggactatggtctctattccactgctgggtttatggaccagtctcacacaagtacatccccgaagagagttctccct

SEQ ID NO: 28880 - DNA, 110 bp, synthetic construct
  source 1..110: mol_type = other DNA
gccatgagctaaaaaaagacactaatttgagctggttaaatctaatgcagtgggatatatatagttttacataacttctggcatcaagtaaggtattagttaattaatca

SEQ ID NO: 28881 - DNA, 110 bp, synthetic construct
  source 1..110: mol_type = other DNA
caatccataaatccctactagtacagggtttatctgaatacagcagcatgtcccaccaaaagtcctgaaccaagaggagcttccggccaccaaatggtaattcttcaagt

SEQ ID NO: 28882 - DNA, 110 bp, synthetic construct
  source 1..110: mol_type = other DNA
agccatttgtacacatatggcctacggctgcttcagcaccacagctgcaggaccgcataatgagggtgcagtccacacaacagaatccacaaagcctaaaacatctccta

SEQ ID NO: 28883 - DNA, 110 bp, synthetic construct
  source 1..110: mol_type = other DNA
ttcagatcttacagaaccagttactttagaggatgccattttaatcactttattatgaacaagaaaatataatttatggcagaaaaaaaactactgtagtgacctctacc

SEQ ID NO: 28884 - DNA, 110 bp, synthetic construct
  source 1..110: mol_type = other DNA
tgaacaagaaaatataatttatggcagaaaaaaaactactgtagtgacctctaccactgctagtttggggtgcctgaggaactcaccttcagaacatgtaaaaaaaatta

SEQ ID NO: 28885 - DNA, 110 bp, synthetic construct
  source 1..110: mol_type = other DNA
aggacattaatctcattcataagggttcccttctcaaaagcctcacctcctaagatcatcacaatggaggttaggatgacaacgtgtgaatttgggaagttgacaaacac

SEQ ID NO: 28886 - DNA, 110 bp, synthetic construct
  source 1..110: mol_type = other DNA
tcatcacaatggaggttaggatgacaacgtgtgaatttgggaagttgacaaacactgagatcagagcagggtgtcaaatgtaaacctttgcattttctctttagggtaga

SEQ ID NO: 28887 - DNA, 110 bp, synthetic construct
  source 1..110: mol_type = other DNA
taaatctcagttctttattttgcggaaacatccataggatgagctgtcaaaataaatgtgagggagaactctgccttttattagaaaaatctcaaactgaaataatactt

SEQ ID NO: 28888 - DNA, 110 bp, synthetic construct; identical to SEQ ID NO: 28887
  source 1..110: mol_type = other DNA

SEQ ID NO: 28889 - DNA, 110 bp, synthetic construct
  source 1..110: mol_type = other DNA
gaaaagcaggttatagcacaagacagagaatctgtgaggtcaaagatggccattttatcttattttagggcagcacccacggcacacggaggtgcccaggctatgggtca

SEQ ID NO: 28890 - DNA, 110 bp, synthetic construct
  source 1..110: mol_type = other DNA
gaggtcaaagatggccattttatcttattttagggcagcacccacggcacacggaggtgcccaggctatgggtcaaataggagttgacacacagccacagcaacgcagga

SEQ ID NO: 28891 - DNA, 110 bp, synthetic construct
  source 1..110: mol_type = other DNA
ggctaatgaattggggtcttaaccaaagcaatatggttataagtctatggctctttataaatccatactctaaaccactctgatttattaccttcataaggattatgacc

SEQ ID NO: 28892 - DNA, 110 bp, synthetic construct
  source 1..110: mol_type = other DNA
tataaatccatactctaaaccactctgatttattaccttcataaggattatgaccctaatgtgggatcatttctgtccataccattattctatgtcattgttatcagaaa

SEQ ID NO: 28893 - DNA, 110 bp, synthetic construct
  source 1..110: mol_type = other DNA
aagggtggggtcctaagaggacatttggctttatcccttcagccttccttaaaaatctcgaagcatgacacagttgccaaaggatagctgatattgtctaagtcacatgt

SEQ ID NO: 28894 - DNA, 110 bp, synthetic construct
  source 1..110: mol_type = other DNA
gttattatgactagagtaattatcacatgccgaaactgtttgcttttgttttttctttttaagcacccactggcatatggaagttcccagactaggggtcaagttggggt

SEQ ID NO: 28895 - DNA, 110 bp, synthetic construct
  source 1..110: mol_type = other DNA
tttttaagcacccactggcatatggaagttcccagactaggggtcaagttggggttacagctaccggctgacgccacagcagtgttgggtctgagctgcatctgcgacct

SEQ ID NO: 28896 - DNA, 110 bp, synthetic construct
  source 1..110: mol_type = other DNA
gcgttcattgattaatctacgactgtgatgctgatgactaaatgaccttagactagggaattctcagctctcaacatctgcatgcacatatagacaacgaggagaggcca

SEQ ID NO: 28897 - DNA, 110 bp, synthetic construct
  source 1..110: mol_type = other DNA
atagtgaggctttgcctccaggatcttggagaaaaaactggcttccgggtcctcaccttctgtgatgagtgatgagcggttttgctggcctgttaaggggtgtgcatgca

SEQ ID NO: 28898 - DNA, 110 bp, synthetic construct
  source 1..110: mol_type = other DNA
ctaaggaagagctgtccccatctgaggttgctcagaaagggcgggagtgatcccagagctgcaggatgagaaaatgctcagcctgggaggtggtgataagatatccaaga

SEQ ID NO: 28899 - DNA, 110 bp, synthetic construct
  source 1..110: mol_type = other DNA
gagctgcaggatgagaaaatgctcagcctgggaggtggtgataagatatccaagagcaggtgtgggaggcggcggggcaggaggctacactggcttgtcaaggcttaaag

SEQ ID NO: 28900 - DNA, 110 bp, synthetic construct
  source 1..110: mol_type = other DNA
tactcctgttcaggattcagttagtcagttgagaaagaaagatgggtggatggatggatgggatggctatagcccttttggcgtagatgtaaaatctgcaattcccaaat

SEQ ID NO: 28901 - DNA, 110 bp, synthetic construct
  source 1..110: mol_type = other DNA
ggatgggatggctatagcccttttggcgtagatgtaaaatctgcaattcccaaatcaggctgtacttacaaatgttgccactaggtggtgacatatggctacttgatatt

SEQ ID NO: 28902 - DNA, 110 bp, synthetic construct
  source 1..110: mol_type = other DNA
attgctttcccagaacaggagttagcgacccacttgagagctttcaaagagctagagcgagatcaaaggcctgggatttagggaagtcgtggctggcttgagaaataatg

SEQ ID NO: 28903 - DNA, 110 bp, synthetic construct
  source 1..110: mol_type = other DNA
agcgagatcaaaggcctgggatttagggaagtcgtggctggcttgagaaataatgtggtgagagatttctcagagaatgtagatgattccagaaaaaaaagaaagatgta

SEQ ID NO: 28904 - DNA, 110 bp, synthetic construct
  source 1..110: mol_type = other DNA
ttcaattgggtagttggtttttgtttttgttgttgtttttgttttgctgctgagttgtataaatcatttgtatgttttagtcaagattaagttcttgtcaggtgcattgt

SEQ ID NO: 28905 - DNA, 110 bp, synthetic construct; identical to SEQ ID NO: 28904
  source 1..110: mol_type = other DNA

SEQ ID NO: 28906 - DNA, 110 bp, synthetic construct
  source 1..110: mol_type = other DNA
cagcctgctgtggactagtccatagaccctaaagtgactttattcaacatgtggagaattctgcataggtttgtttacttcagagctttgctcattggcagcctggtcga

SEQ ID NO: 28907 - DNA, 110 bp, synthetic construct
  source 1..110: mol_type = other DNA
gaattctgcataggtttgtttacttcagagctttgctcattggcagcctggtcgatcctgatttagtgctcaaggaagcactacatctgaatctcttttttcaattctac

SEQ ID NO: 28908 - DNA, 110 bp, synthetic construct
  source 1..110: mol_type = other DNA
aaaacccaaggagtggtaggccagaatgtgctctcatgcttttctcattcacatctgctgtgctcacagcttctacaccacagtgttccccctgcttgaaatgttcctgt

SEQ ID NO: 28909 - DNA, 110 bp, synthetic construct
  source 1..110: mol_type = other DNA
tgctgtgctcacagcttctacaccacagtgttccccctgcttgaaatgttcctgttgtgctcgtcctggaaaactcctactctttttttttttttgccacctgactcaaa

SEQ ID NO: 28910 - DNA, 110 bp, synthetic construct
  source 1..110: mol_type = other DNA
acagctgtgacaacactgaatcactctgccatgagatgttacaggctcatttgcattttgtctgatgccctggaattaggaacccaatttctccaactttgttcttcttt

SEQ ID NO: 28911 - DNA, 110 bp, synthetic construct
  source 1..110: mol_type = other DNA
catgcttcttcggccgtgatcctctcggaggaactaagcgggttgggctcttttgaacccgggatgctgtcacatcccaaacagaaaacaccccagggtccactcctgct

SEQ ID NO: 28912 - DNA, 110 bp, synthetic construct
  source 1..110: mol_type = other DNA
aacccgggatgctgtcacatcccaaacagaaaacaccccagggtccactcctgctgccagctggcctcggatggccctgctgactgctcccatctcaagagaggatgctg

SEQ ID NO: 28913 - DNA, 110 bp, synthetic construct
  source 1..110: mol_type = other DNA
agattttatggcgtgtgtgtctgtctgtctgtgtgtccgcgtctgtgtgcgcgcgtgtgcacacctggtcaggggcttggaaggtcccagagtgacctgatgagacaggt

SEQ ID NO: 28914 - DNA, 110 bp, synthetic construct
  source 1..110: mol_type = other DNA
atctctatggaacatcctggcctcccagtaaaaactgtggagaaacttgccaaaggtgcagggtgttttattttttctatttgtttatgtttacggggaagttcccgggc

SEQ ID NO: 28915 - DNA, 110 bp, synthetic construct
  source 1..110: mol_type = other DNA
ggcttaaacccacatcctcatggacactagtcgggttcgttgccactgagccacgaacgatgagagctcccaactctcaacttttaagttgtgcttatttatttatttat

SEQ ID NO: 28916 - DNA, 110 bp, synthetic construct
  source 1..110: mol_type = other DNA
tgaagacagtaagacagatctcatacacgccaacccagctcccattaaaattatgatatttctttattagtactatgcatttgtcacaattcttgaaccaatattattac

SEQ ID NO: 28917 - DNA, 110 bp, synthetic construct; identical to SEQ ID NO: 28916
  source 1..110: mol_type = other DNA

SEQ ID NO: 28918 - DNA, 110 bp, synthetic construct
  source 1..110: mol_type = other DNA
tgtttcattcatttaaacaaggaaccgtgtcttaaacctttttttgtgtcttttctgaaaattaatgagaacagcactgggtgcatgatttcgtaaaaggctgagagttt

SEQ ID NO: 28919 - DNA, 110 bp, synthetic construct
  source 1..110: mol_type = other DNA
gcttctgcttcgtggcttcttcagcaaggaacgtgaataagaaagacctggactcttagcttggctctactgtttaattatttcttgactgcaggtcccttgtctttgtg

SEQ ID NO: 28920 - DNA, 110 bp, synthetic construct
  source 1..110: mol_type = other DNA
ttagcttggctctactgtttaattatttcttgactgcaggtcccttgtctttgtgaatctccatttatccacctgcaaaatggtgttattcacagccatctcacaaattg

SEQ ID NO: 28921 - DNA, 110 bp, synthetic construct
  source 1..110: mol_type = other DNA
ttgcctatccattccaaaggcaattctgcatctatgaacccactcttgatctctacactgagctctgctcagggggtgctgtgggtgggcagctgcagcagctcatgatt

SEQ ID NO: 28922 - DNA, 110 bp, synthetic construct; identical to SEQ ID NO: 28921
  source 1..110: mol_type = other DNA

SEQ ID NO: 28923 - DNA, 110 bp, synthetic construct
  source 1..110: mol_type = other DNA
tgaaatgatttcatggaagagaatgcttccagctactaggttttcttatttgagaataacaggaaacttgcagcataactcagtaatgaagttcatataccatacgtaga

SEQ ID NO: 28924 - DNA, 110 bp, synthetic construct
  source 1..110: mol_type = other DNA
gttttatttatcaaagtgcatcaaagacctcccaaagaatctccttcatttttcaggaattactcattcacaacacagaccaccattttataacttaaatcctagggctc

SEQ ID NO: 28925 - DNA, 110 bp, synthetic construct; identical to SEQ ID NO: 28924
  source 1..110: mol_type = other DNA

SEQ ID NO: 28926 - DNA, 110 bp, synthetic construct
  source 1..110: mol_type = other DNA
atctgcaacatggagccctatttcctcttcccacccctgtcttcctttagctgctttatgtgctctgcacacaatatagactgcactgtatagtcaatccaggttagaac

SEQ ID NO: 28927 - DNA, 110 bp, synthetic construct
  source 1..110: mol_type = other DNA
ttatgtgctctgcacacaatatagactgcactgtatagtcaatccaggttagaaccttccatgcatagtctacgcagcatagagccttcaatgcatggtctatgcagcat

SEQ ID NO: 28928 - DNA, 110 bp, synthetic construct
  source 1..110: mol_type = other DNA
tagggtgggcatccttttaaccaggatgtctttaaggaagcccaaatgcctttgggacacatttgcgattgctgaagccctcagtcatttcttctgcatttgagttgcaa

SEQ ID NO: 28929 - DNA, 110 bp, synthetic construct
  source 1..110: mol_type = other DNA
gacacatttgcgattgctgaagccctcagtcatttcttctgcatttgagttgcaaatttggaatggcagtggcactcacattaggaattggttaattggtgaactgtgca

SEQ ID NO: 28930 - DNA, 110 bp, synthetic construct
  source 1..110: mol_type = other DNA
cagatgaattcatccctttatcacgggccacactcaacatcactgggagttataaagataatgaccaatgaggaattaaaattctagctagaatgcctaaaaaactgagc

SEQ ID NO: 28931 - DNA, 110 bp, synthetic construct
  source 1..110: mol_type = other DNA
aacatcactgggagttataaagataatgaccaatgaggaattaaaattctagctagaatgcctaaaaaactgagcttggcaggagaactacaataatatgaaatctaaac

SEQ ID NO: 28932 - DNA, 110 bp, synthetic construct
  source 1..110: mol_type = other DNA
aatttgtgaaagtgaagagggcagtggatttgtgaaagtgaggctcatctcacagttacatcactccccgtggtcttgctttgcctcccttcagagcatgtaccagggcc

SEQ ID NO: 28933 - DNA, 110 bp, synthetic construct
  source 1..110: mol_type = other DNA
ttacatcactccccgtggtcttgctttgcctcccttcagagcatgtaccagggcctgcctggctccacctgacctcacacctgcccataggatggtttgtctcacctcta

SEQ ID NO: 28934 - DNA, 110 bp, synthetic construct
  source 1..110: mol_type = other DNA
ggttcgattttactagaccagtaacagctgccttacctcaccatgtgtttgtattccttgatcctttttggtttgttttctctaccaagaatataatccctttttgtggg

SEQ ID NO: 28935 - DNA, 110 bp, synthetic construct
  source 1..110: mol_type = other DNA
gtccccaccgcttcagatgatcatttcttcttcaccaaagagactgatctcacgtgacacagaccccctgcctccttccctccaattaataagacactcatgatcccctt

SEQ ID NO: 28936 - DNA, 110 bp, synthetic construct
  source 1..110: mol_type = other DNA
aggcccccaggaagcaggagacaccctggtagccatttgcaagagacagagtccaagaaggattcaaaggtgaaatatgaacataaaaaaagcccaaattgtcattatct

SEQ ID NO: 28937 - DNA, 110 bp, synthetic construct
  source 1..110: mol_type = other DNA
agaaggattcaaaggtgaaatatgaacataaaaaaagcccaaattgtcattatctccttggaatcacattataaatgagattgtcctctctccctctttctctctcacta

SEQ ID NO: 28938 - DNA, 110 bp, synthetic construct
  source 1..110: mol_type = other DNA
ctgacctccaaggcgatgtcaatgagccactggggtgctgtttctgtaccggcatttgcagctgtagctggaaaaacccatggtccagctgctttctgagcagggacaga

SEQ ID NO: 28939 - DNA, 110 bp, synthetic construct
  source 1..110: mol_type = other DNA
ttactacctgttatttcaggtagaatcctaactctacaagggccttctccatttcataaactagatagttttagggttctcatctttagtcaatgatttaaaagttgttg

SEQ ID NO: 28940 - DNA, 110 bp, synthetic construct
  source 1..110: mol_type = other DNA
ataaactagatagttttagggttctcatctttagtcaatgatttaaaagttgttgccaggggagttcccaccatggcccagtgggttatgaacctgactagtatccatga

SEQ ID NO: 28941 - DNA, 110 bp, synthetic construct
  source 1..110: mol_type = other DNA
aaacttttgagagctcatttcaggtatttaactcactataaagcttgaggaaatacattttgtgttgcagccatttttctggctctccttacagagaatggaccgccata

SEQ ID NO: 28942 - DNA, 110 bp, synthetic construct
  source 1..110: mol_type = other DNA
cattttgtgttgcagccatttttctggctctccttacagagaatggaccgccatacagctgcccatagtcaagtgcaaagtttagtgcccacagtcggccattgtcctct

SEQ ID NO: 28943 - DNA, 110 bp, synthetic construct
  source 1..110: mol_type = other DNA
acccacattgcctgtcaatcccccccaccaaaaccagctagattttgatactcagagcaacaccagaaacaaagatggtggagtctcggtcaactttcttttttctttta

SEQ ID NO: 28944 - DNA, 110 bp, synthetic construct
  source 1..110: mol_type = other DNA
caggctccactgtggtgatggttactatcatgccatctgaattgaacttgatgatgctaagttccataatgtcaaagaagtcatagttcggtaacacgtcctacccactg

SEQ ID NO: 28945 - DNA, 110 bp, synthetic construct
  source 1..110: mol_type = other DNA
accttcccacctctgcaggttctgagtctaagggtctgcacctggaccgcttcccaggtctgtcctgggctctccaagtcagctgggcccaggagaactgaggtccctag

SEQ ID NO: 28946 - DNA, 110 bp, synthetic construct
  source 1..110: mol_type = other DNA
ctgggctctctgttttctaacaatgagtagctgcctcaagtcacagagatcgtccagttactgtgagtgtataaaagagctgggtgcaggagtttccactgtggcgcgac

SEQ ID NO: 28947 - DNA, 110 bp, synthetic construct
  source 1..110: mol_type = other DNA
gagatcgtccagttactgtgagtgtataaaagagctgggtgcaggagtttccactgtggcgcgacaggatcaatagcatctctgcagtgccaggacgcaggttcaaacac

SEQ ID NO: 28948 - DNA, 110 bp, synthetic construct
  source 1..110: mol_type = other DNA
acaacacacacactcacaaacacacattttcattaggactggactccaggtactctccaggagccacaggggtcaaagctcaggggattccttcccaaatgccaggctta

SEQ ID NO: 28949 - DNA, 110 bp, synthetic construct
  source 1..110: mol_type = other DNA
tccaggagccacaggggtcaaagctcaggggattccttcccaaatgccaggcttactgtggatacctgtgggctgaggttgtggggtcagtggggagggggtcaaggagg

SEQ ID NO: 28950 - DNA, 110 bp, synthetic construct
  source 1..110: mol_type = other DNA
tcttccaaaggtgaagtttatcttggcctcaggcaggtttggatgaagccaagcatctgaaaagttaatgggagtcagcagagctggcctcctgtcaaaaagggaaccat

SEQ ID NO: 28951 - DNA, 110 bp, synthetic construct
  source 1..110: mol_type = other DNA
gcccctgggggggtcgggggagctgggaggagcggctggaatccacgctcgccgggctgacgcgctgcacacacaccagcccgtgcatgtgtgcaaacacacagcttgaa

SEQ ID NO: 28952 - DNA, 110 bp, synthetic construct
  source 1..110: mol_type = other DNA
gctgacgcgctgcacacacaccagcccgtgcatgtgtgcaaacacacagcttgaatctacactcagccctcagactcacacatacacactcagatgtggatgcacatgca

SEQ ID NO: 28953 - DNA, 110 bp, synthetic construct; identical to SEQ ID NO: 28951
  source 1..110: mol_type = other DNA

SEQ ID NO: 28954 - DNA, 110 bp, synthetic construct; identical to SEQ ID NO: 28952
  source 1..110: mol_type = other DNA

SEQ ID NO: 28955 - DNA, 110 bp, synthetic construct
  source 1..110: mol_type = other DNA
ctgcgctggaagctggacgttgcctgtatgtgttgattgactggccaattcacagagccgtacccgaggggtccaagtggtatgcagctcactctcccccccctggtaac

SEQ ID NO: 28956 - DNA, 110 bp, synthetic construct
  source 1..110: mol_type = other DNA
agccgtacccgaggggtccaagtggtatgcagctcactctcccccccctggtaaccgaaggatccgaggatgctgtgactaaagccaccagggccacggcacaggctcct

SEQ ID NO: 28957 - DNA, 110 bp, synthetic construct
  source 1..110: mol_type = other DNA
agcatcaaaaaagacttttaaaatgcaaagctgaccactggaatccacagcacagaactctacagaagaacttctccaactttgaggtgtttaagaagcccctcagggag

SEQ ID NO: 28958 - DNA, 110 bp, synthetic construct
  source 1..110: mol_type = other DNA
gatcaaacccgaattgtcatggatattagttggattcgttaccactgagctacaatgggaatacctcaaaaaatgtctcattttggattttttttttttaatgatctctg

SEQ ID NO: 28959 - DNA, 110 bp, synthetic construct; identical to SEQ ID NO: 28958
  source 1..110: mol_type = other DNA

SEQ ID NO: 28960 - DNA, 110 bp, synthetic construct
  source 1..110: mol_type = other DNA
tttaaatctctgcctgccactcgtctgttttacaacttaggcaagttggacagtttgtctgcagcactttctcagctgtcaagtggagttaataatggtagcctcgcaga

SEQ ID NO: 28961 - DNA, 110 bp, synthetic construct
  source 1..110: mol_type = other DNA
actaggttatgggctggtttgttacacagcaaataagcaaataatgaaatattaaagaattttaaacactcagagtttctgtcgtggtgcagcggaaatgaatgtgacta

SEQ ID NO: 28962 - DNA, 110 bp, synthetic construct
  source 1..110: mol_type = other DNA
acagcaaataagcaaataatgaaatattaaagaattttaaacactcagagtttctgtcgtggtgcagcggaaatgaatgtgactaggaaccatgaggctgcgggttcgat

SEQ ID NO: 28963 - DNA, 110 bp, synthetic construct
  source 1..110: mol_type = other DNA
gtagcagcgctgacaccctgattcttggacctacgtacctgggcacagagcaaaacccaccagctgctactgtcggctgcacaggattaggcctgactaaccagcaattt

SEQ ID NO: 28964 - DNA, 110 bp, synthetic construct
  source 1..110: mol_type = other DNA
cccaccagctgctactgtcggctgcacaggattaggcctgactaaccagcaattttccagcttcttagatacgaccagaaagcacccctcccccacctgccaggcctcat

SEQ ID NO: 28965 - DNA, 110 bp, synthetic construct
  source 1..110: mol_type = other DNA
tttgtctaacacagtcattgcttactgcattttagaaaggtcagaccatatttttcaattgaaaacttggaagttctccatagagaattttcataaccattcttcttagc

SEQ ID NO: 28966 - DNA, 110 bp, synthetic construct
  source 1..110: mol_type = other DNA
caacaaatcctgatcaaaagacttggcctttggctgctgtagaaaagttgattctgtagctctcatttcaggggctccatctattggaaaggctgaaaaccctatacctt

SEQ ID NO: 28967 - DNA, 110 bp, synthetic construct
  source 1..110: mol_type = other DNA
gtagctctcatttcaggggctccatctattggaaaggctgaaaaccctataccttcaagatgagtacgtagcagtggtggggtacacgtacaaggcatgtgtggaaattt

SEQ ID NO: 28968 - DNA, 110 bp, synthetic construct
  source 1..110: mol_type = other DNA
tcatttcctttttcttttcttttttggacgccctgaggcatatggaattcccaggccacagatcagatgggagccacagttttgacctaagccacggctgtggcgatgcc

SEQ ID NO: 28969 - DNA, 110 bp, synthetic construct
  source 1..110: mol_type = other DNA
ggacgccctgaggcatatggaattcccaggccacagatcagatgggagccacagttttgacctaagccacggctgtggcgatgcccaacctttaacccactgtgccaggc

SEQ ID NO: 28970 - DNA, 110 bp, synthetic construct
  source 1..110: mol_type = other DNA
gcctgcctccacctcgctgatgtcccctcccgtcctcctctgggggcctttggggaaacacctgagagctggttttcggaagctgcctccacaagacttcaagggaaaac

SEQ ID NO: 28971 - DNA, 110 bp, synthetic construct
  source 1..110: mol_type = other DNA
aaacacctgagagctggttttcggaagctgcctccacaagacttcaagggaaaacctcaaatgtggcatttcctagaaaaaacatctgaggtttctccttgtggcttcat

SEQ ID NO: 28972 - DNA, 110 bp, synthetic construct
  source 1..110: mol_type = other DNA
gtagatctcatgctaagtgctcttgccacaagcagaaaaaataaaaacaacaacaaaaacccctaggggacacaaggaaatgtttccgagggatgggacatgtttattac

SEQ ID NO: 28973 - DNA, 110 bp, synthetic construct
  source 1..110: mol_type = other DNA
aaaacccctaggggacacaaggaaatgtttccgagggatgggacatgtttattaccacgattgtattgatggcatcaagggtgtaggatatgcccaaattcatcagagtg

SEQ ID NO: 28974 - DNA, 110 bp, synthetic construct
  source 1..110: mol_type = other DNA
cacccgtctgcacccatctagcttggctctttgtggggaacacacacattctctccccaggtagttaggaggcccacacaggtgggatgtatttcattttgcagaatcag

SEQ ID NO: 28975 - DNA, 110 bp, synthetic construct
  source 1..110: mol_type = other DNA
aagatttccaaccagctcccccaaccccattctgttattatgagtttatgcaattcaaccgatgtgtgttcttaaaagaaacattattaataattaatgaggcttcccaa

SEQ ID NO: 28976 - DNA, 110 bp, synthetic construct
  source 1..110: mol_type = other DNA
ctcaagtgctgccctaaaaattggggtgtggggaaggaatctgactacagcggctcagttcgctgcagaggtatgagttcaacgcccagcccagcacagtgggttaaaag

SEQ ID NO: 28977 - DNA, 110 bp, synthetic construct
  source 1..110: mol_type = other DNA
cagttcgctgcagaggtatgagttcaacgcccagcccagcacagtgggttaaaagatcctgtgttgccgcagctcttgtgtaggtcaaaggtgcagcttgggtttgatcc

SEQ ID NO: 28978 - DNA, 110 bp, synthetic construct
  source 1..110: mol_type = other DNA
ccactgtccacatctgccactcacgttggctagctgttcctgtgacctacccagaaggataggcccagctttgggaagtgctcttgaaaatggttgtttctggagttccc

SEQ ID NO: 28979 - DNA, 110 bp, synthetic construct
  source 1..110: mol_type = other DNA
ctcaccggtaccagaggagcccagagaggccgaacgaagtaaaatctgttctgggccaggacagcacgtggcagaggggctcggacaacctgtccgcgggtgcagagagc

SEQ ID NO: 28980 - DNA, 110 bp, synthetic construct
  source 1..110: mol_type = other DNA
ccaggacagcacgtggcagaggggctcggacaacctgtccgcgggtgcagagagctcccagcagcctctcgagggtggtgagtcagatgaggattaagtttgttgatatt

SEQ ID NO: 28981 - DNA, 110 bp, synthetic construct
  source 1..110: mol_type = other DNA
ccccttaccagttctttcctttgcgtgcacctgccctattcctgcttctggcagcaattgtggttggcaagggaaatttcccacagtgatggtggttgcctaggtaagaa

SEQ ID NO: 28982 - DNA, 110 bp, synthetic construct
  source 1..110: mol_type = other DNA
aattgtggttggcaagggaaatttcccacagtgatggtggttgcctaggtaagaaggaagtgagagcagaaaaattttcaagtgacacatgtgagagtcagagccagtcc

SEQ ID NO: 28983 - DNA, 110 bp, synthetic construct
  source 1..110: mol_type = other DNA
ggtgctgtacacttagtatcaggaagacttaatttcctctgaatttttttggattccagtattgtatattggctcgaaggtagccatcacccaccaaatagctaaaatta

SEQ ID NO: 28984 - DNA, 110 bp, synthetic construct
  source 1..110: mol_type = other DNA
ccagtattgtatattggctcgaaggtagccatcacccaccaaatagctaaaattagcttcttgactccaagttcagaaccccaaagcccctgagggagggcgccttcttt

SEQ ID NO: 28985 - DNA, 110 bp, synthetic construct; identical to SEQ ID NO: 28983
  source 1..110: mol_type = other DNA

SEQ ID NO: 28986 - DNA, 110 bp, synthetic construct; identical to SEQ ID NO: 28984
  source 1..110: mol_type = other DNA

SEQ ID NO: 28987 - DNA, 110 bp, synthetic construct
  source 1..110: mol_type = other DNA
gaggtcacatgctcaggttcctggagatccgcatgcagcccccacagtgcatgtcaagggtccccttcctgtccatgccatacagcactgcagcccgtacttcctgggcc

SEQ ID NO: 28988 - DNA, 110 bp, synthetic construct
  source 1..110: mol_type = other DNA
aagggtccccttcctgtccatgccatacagcactgcagcccgtacttcctgggcccatggccttaacatagctgtgatcccactgaatgttgctctgagagcccaggaca

SEQ ID NO: 28989 - DNA, 110 bp, synthetic construct
  source 1..110: mol_type = other DNA
tgggtagatttgttcttttgttttacttttattttctgagttttctataatgaatctaagcttactatccaggggcaccagttctaaaccagttctcacaacaaccaggt

SEQ ID NO: 28990 - DNA, 110 bp, synthetic construct
  source 1..110: mol_type = other DNA
gacgactgaagatgccttggttacactggggaaatgagaggctttatttcagacactccgcaagaagctacctaattgaaacactaaacaaaactaatccactcaatctt

SEQ ID NO: 28991 - DNA, 110 bp, synthetic construct
  source 1..110: mol_type = other DNA
ctccgcaagaagctacctaattgaaacactaaacaaaactaatccactcaatcttaggaagaatttacagtaatacagggaaattctttaacatcagcacttcagaaaaa

SEQ ID NO: 28992 - DNA, 110 bp, synthetic construct
  source 1..110: mol_type = other DNA
cactggccaacaacattcaaatagcaactggggtcttttctggggccaagagaataaaataaaatctagtacttgacattattattatttttctggctgcagctggggcc

SEQ ID NO: 28993 - DNA, 110 bp, synthetic construct
  source 1..110: mol_type = other DNA
aaaataaaatctagtacttgacattattattatttttctggctgcagctggggcctgtggaagttcccaggccagggactgagcccagcccacagcagtgacaacgcaga

SEQ ID NO: 28994 - DNA, 110 bp, synthetic construct
  source 1..110: mol_type = other DNA
atgtctaagctcttacctacccaactgaaatggaaacagtcttatccagctcctcccctggatacattcacaggtcacctctctctctacatttacctggtcagatataa

SEQ ID NO: 28995 - DNA, 110 bp, synthetic construct
  source 1..110: mol_type = other DNA
atggattacagtgttcacgaggcctggaatgaagccaccaacgtttacctggttgtgatccttgtcagctttgggctcttcatgtatgccaagaggtaaatgctttaaca

SEQ ID NO: 28996 - DNA, 110 bp, synthetic construct
  source 1..110: mol_type = other DNA
ctgaagggctccctccttcaagatctctccagaccagcatctgatgctaaaaggctcattccgtctgagctccagttccaaataactgtgggcaaaagagagcatgggag

SEQ ID NO: 28997 - DNA, 110 bp, synthetic construct
  source 1..110: mol_type = other DNA
tcacagtctgctgtcacatacatttcctgtgagggtggaccatgggggatatttttgtcacatgagatttgaagacagaagtgaagatgtagctgctggtttttatctca

SEQ ID NO: 28998 - DNA, 110 bp, synthetic construct
  source 1..110: mol_type = other DNA
tgtcacatgagatttgaagacagaagtgaagatgtagctgctggtttttatctcagaaggtgagagcaggaccataaggtgcttttgaggctcacagaacttgttgctta

SEQ ID NO: 28999 - DNA, 110 bp, synthetic construct
  source 1..110: mol_type = other DNA
ggaccctgccccaagctgctttgttgtttcttgacttttcctcccgattatcaactctttgaacctgccctttggaactcagagaaggccatggaggcttaagcttattc

SEQ ID NO: 29000 - DNA, 110 bp, synthetic construct
  source 1..110: mol_type = other DNA
tcattattttaaagagcatcctggttcttcagggagatatttgggagtctttggggagagtctattctttttggagagagtcagagggcagtctggaagctcacaggcac

SEQ ID NO: 29001 - DNA, 110 bp, synthetic construct
  source 1..110: mol_type = other DNA
gagagtctattctttttggagagagtcagagggcagtctggaagctcacaggcacacctcgctctgtcttgttgctctgggaatgggtctgtccgcaggtggcaggtagg

SEQ ID NO: 29002 - DNA, 110 bp, synthetic construct
  source 1..110: mol_type = other DNA
ggaaaaggtgtgttccaggccagttgtccccacccccaggaattaaatgagagggacagacactttgtaaacaacagctgtgtgtcctggttcaccagcctgaacttcaa

SEQ ID NO: 29003 - DNA, 110 bp, synthetic construct
  source 1..110: mol_type = other DNA
acagacactttgtaaacaacagctgtgtgtcctggttcaccagcctgaacttcaatcatccacatcacgtttataatactggagtaaaatacacaacataaaaattacca

SEQ ID NO: 29004 - DNA, 110 bp, synthetic construct; identical to SEQ ID NO: 29002
  source 1..110: mol_type = other DNA

SEQ ID NO: 29005 - DNA, 110 bp, synthetic construct; identical to SEQ ID NO: 29003
  source 1..110: mol_type = other DNA

SEQ ID NO: 29006 - DNA, 110 bp, synthetic construct
  source 1..110: mol_type = other DNA
ctgaacctgagaagggaagccgagatcaactgtgtcaaagccctaaaaaccagagcatctggtgctccacatcaccggccttccttgaaaggctccacatccaaaggcag

SEQ ID NO: 29007 - DNA, 110 bp, synthetic construct
  source 1..110: mol_type = other DNA
catctggtgctccacatcaccggccttccttgaaaggctccacatccaaaggcagaatgcacaacttgctgacctctcatgcctaacaagggtaatggtcacttaaagtg

SEQ ID NO: 29008 - DNA, 110 bp, synthetic construct
  source 1..110: mol_type = other DNA
acgggaacaaaactgccagtgaaaaagcattacggagaaagttgtaaaagtttctcagttagcagttgactccacagacctcaaattcagaggagtccaaacaggaaata

SEQ ID NO: 29009 - DNA, 110 bp, synthetic construct
  source 1..110: mol_type = other DNA
cagttagcagttgactccacagacctcaaattcagaggagtccaaacaggaaatatcaatttggctatctcttaattgaagcaataagtgtggattaaatcattcacaga

SEQ ID NO: 29010 - DNA, 110 bp, synthetic construct
  source 1..110: mol_type = other DNA
aacttctgtggaggcagttgactgcaggaagacagtatatttctggaattatattaagggttaaaattaatgggctttttcctttagcttaaactatgactggttcataa

SEQ ID NO: 29011 - DNA, 110 bp, synthetic construct
  source 1..110: mol_type = other DNA
aagggttaaaattaatgggctttttcctttagcttaaactatgactggttcataagttacagccaaatagacctgttactagaaaaatctaagaaaatggctttgtatgt

SEQ ID NO: 29012 - DNA, 110 bp, synthetic construct
  source 1..110: mol_type = other DNA
tgcacgtagactttggcatctggcagacccaggctttagttttggatctgccacctgaagctgctggctctctccccagccttaccttccttggctgtaggatggggctg

SEQ ID NO: 29013 - DNA, 110 bp, synthetic construct
  source 1..110: mol_type = other DNA
tgaagctgctggctctctccccagccttaccttccttggctgtaggatggggctggtgtcactcccaggatgatgaggttgatgcgagacagtgcaaaggacatgcttta

SEQ ID NO: 29014 - DNA, 110 bp, synthetic construct
  source 1..110: mol_type = other DNA
tttacaggcagccctgcttggctttgagcccaatagaacacagccttgtttccatctttcctaagctcctctgtcacctgaattctgcagtaactcctctttttgtccgg

SEQ ID NO: 29015 - DNA, 110 bp, synthetic construct
  source 1..110: mol_type = other DNA
acaaacctgtggagtctgggggcacctgtgtttgtattttgcctccaagttgcttgtgtgctgctgcagccagggctgccttcttgttcttgttcaggtgctttatcaca

SEQ ID NO: 29016 - DNA, 110 bp, synthetic construct
  source 1..110: mol_type = other DNA
gtgtgctgctgcagccagggctgccttcttgttcttgttcaggtgctttatcacaccaaggtggcctacgaccctgaaggcatcctggggaccatcaactccatcttgat

SEQ ID NO: 29017 - DNA, 110 bp, synthetic construct
  source 1..110: mol_type = other DNA
gtgggtcttaacactaccaggctcctgtgagcatcagtgaacagacatttctctatttcaaagtacatgagaggagttcccctgtggcctagctgttaaagatctgcttt

SEQ ID NO: 29018 - DNA, 110 bp, synthetic construct
  source 1..110: mol_type = other DNA
taaataattatctattttaaaacccagaaattcacactgatattgcccgtttcagtccacaaccacaagttcccctccactcttctctctttccccagcagaccctctct

SEQ ID NO: 29019 - DNA, 110 bp, synthetic construct
  source 1..110: mol_type = other DNA
tccacaaccacaagttcccctccactcttctctctttccccagcagaccctctcttcctcgacagggagcagcctggttcccactatcctcagcacattgttttgttcgc

SEQ ID NO: 29020 - DNA, 110 bp, synthetic construct
  source 1..110: mol_type = other DNA
acctgcatcctcatgggtactagtcagattaatttctgctatgccacgttgggaactcctatacatcctttttaaaaatttttaaatttttattttttttgtctttttgc

SEQ ID NO: 29021 - DNA, 110 bp, synthetic construct; identical to SEQ ID NO: 29020
  source 1..110: mol_type = other DNA

SEQ ID NO: 29022 - DNA, 110 bp, synthetic construct
  source 1..110: mol_type = other DNA
ttctattggtagagaagaaaggagaatgtaggcagctagtgttgtcagacatagtcccacgtagaaatgattgaaatgaacacttgccagatgagtggtttttttttttt

SEQ ID NO: 29023 - DNA, 110 bp, synthetic construct
  source 1..110: mol_type = other DNA
gtaaatcatttaacttagggatagttcgggagttccgctgtggctcaggtgtcaggtctgctgaagacgtgggcgaagggctcggatgtgatcagagctcatttttggga

SEQ ID NO: 29024 - DNA, 110 bp, synthetic construct
  source 1..110: mol_type = other DNA
gtctgctgaagacgtgggcgaagggctcggatgtgatcagagctcatttttgggagatgagtcttgcagtggactctgtgatcatggtcccagcggtatttaaggtaaca

SEQ ID NO: 29025 - DNA, 110 bp, synthetic construct
  source 1..110: mol_type = other DNA
tgccaatttccttcatcctttgtgtacatctcttttattttatttatttatttttgtgtgtgtgtacatctcttttaaagcatgaattaggcttacagagatctgtcgat

SEQ ID NO: 29026 - DNA, 110 bp, synthetic construct
  source 1..110: mol_type = other DNA
gtgtgtgtgtacatctcttttaaagcatgaattaggcttacagagatctgtcgatttctcattctttatttttttagggccgcatttcggcatagggaggttcccaggct

SEQ ID NO: 29027 - DNA, 110 bp, synthetic construct; identical to SEQ ID NO: 29025
  source 1..110: mol_type = other DNA

SEQ ID NO: 29028 - DNA, 110 bp, synthetic construct; identical to SEQ ID NO: 29026
  source 1..110: mol_type = other DNA

SEQ ID NO: 29029 - DNA, 110 bp, synthetic construct
  source 1..110: mol_type = other DNA
gaaccatccagttagttataagaatctttctggggatgatttgtaatctttctttaggcttaagctgcccaaatatgtgctgtaaatggcaagttaagggttaaataaga

SEQ ID NO: 29030 - DNA, 110 bp, synthetic construct
  source 1..110: mol_type = other DNA
gggagatgaaatttaatagataaacatttaggaattctggaggactggccctacaacgctgtgagggtgtggaggtgcagctttaaaattaaaaaagcagaagttcctgc

SEQ ID NO: 29031 - DNA, 110 bp, synthetic construct
  source 1..110: mol_type = other DNA
tggccctacaacgctgtgagggtgtggaggtgcagctttaaaattaaaaaagcagaagttcctgctgtggctcagtggattaaaaaccactagtatccatgaggatgtgg

SEQ ID NO: 29032 - DNA, 110 bp, synthetic construct; identical to SEQ ID NO: 29030
  source 1..110: mol_type = other DNA

SEQ ID NO: 29033 - DNA, 110 bp, synthetic construct; identical to SEQ ID NO: 29031
  source 1..110: mol_type = other DNA

SEQ ID NO: 29034 - DNA, 110 bp, synthetic construct
  source 1..110: mol_type = other DNA
aatgagcatgtcagcctaattagaaaacctacgttaaatgaccacgaatggccttttgaagttgagtactgactgaagtgtcttgaagttggtttgatgcagctcctcat

SEQ ID NO: 29035 - DNA, 110 bp, synthetic construct
  source 1..110: mol_type = other DNA
ttgaagttgagtactgactgaagtgtcttgaagttggtttgatgcagctcctcatttggtggcgcctgacaggatgagggtggggggctcagcaaggaggactcgggatg

SEQ ID NO: 29036 - DNA, 110 bp, synthetic construct
  source 1..110: mol_type = other DNA
cttgggtagtttctggaggaagtgcactgccaacaggcagttataagccaaacactatgcaggaagtaggagaaagtgaaggaagtgacctgacgggaggtgaagggatg

SEQ ID NO: 29037 - DNA, 110 bp, synthetic construct
  source 1..110: mol_type = other DNA
tcttgaacagcacacagaaaatcccacatgcaccaggacccagtgcaaaagtagtaatttgataggaccttgggccaacctatctgctagtctttgacagtctcccagag

SEQ ID NO: 29038 - DNA, 110 bp, synthetic construct
  source 1..110: mol_type = other DNA
aatttgataggaccttgggccaacctatctgctagtctttgacagtctcccagagaggtgggggtggctagggctcaccctgggactgtagacactgggggcagatgtac

SEQ ID NO: 29039 - DNA, 110 bp, synthetic construct
  source 1..110: mol_type = other DNA
tttgcctgaagacttttctttaactggagaacatctttaccctgggggaaagtaagacacttttgcctctaaacctgtgtttgtgtttaaataagaaccagcttgtggcc

SEQ ID NO: 29040 - DNA, 110 bp, synthetic construct
  source 1..110: mol_type = other DNA
gacacttttgcctctaaacctgtgtttgtgtttaaataagaaccagcttgtggcctcaggggtgagtgccatagtttgagtttgaaacagagttggtttttattggcaaa

SEQ ID NO: 29041 - DNA, 110 bp, synthetic construct
  source 1..110: mol_type = other DNA
ctcttctttcccatctgcgcacagagcgtaaaacggaaccgcttattagtgatggaggaagctttgagcaaggattccaaatatttctccttcgaaggaatctgattgtg

SEQ ID NO: 29042 - DNA, 110 bp, synthetic construct
  source 1..110: mol_type = other DNA
aggaagctttgagcaaggattccaaatatttctccttcgaaggaatctgattgtgagttgggaggtccctcgagtttggagaagccactgacagagcagcataagcagta

SEQ ID NO: 29043 - DNA, 110 bp, synthetic construct
  source 1..110: mol_type = other DNA
ttcccctttaatttctttagagagtgaaactaaggtcaggtttctcaaggaaggagataataattaatagggaggtaaaatcggcttttgtaaaatcactcgtgctttca

SEQ ID NO: 29044 - DNA, 110 bp, synthetic construct
  source 1..110: mol_type = other DNA
gataataattaatagggaggtaaaatcggcttttgtaaaatcactcgtgctttcatgcacatattgacctgggatttttgcagagctatttcttttctaattcttttctc

SEQ ID NO: 29045 - DNA, 110 bp, synthetic construct
  source 1..110: mol_type = other DNA
tttccaagctttggaggtatgaatagagctgctctaaacgttcatgtatgggccttgtgtgaacatgttttcatttctcagggaaggtacttaggagtgagagtgttggg

SEQ ID NO: 29046 - DNA, 110 bp, synthetic construct
  source 1..110: mol_type = other DNA
cccgggggtcctgaggactgaggcataggaacagaggttgtcacccaccttcttagagaagaagattggatgttaggtcaagattgggctaaccaggactggatagttaa

SEQ ID NO: 29047 - DNA, 110 bp, synthetic construct
  source 1..110: mol_type = other DNA
gagaagaagattggatgttaggtcaagattgggctaaccaggactggatagttaattactgaattgatcctgtgtttagagtgagatgaacaatttgtaggtccaccaaa

SEQ ID NO: 29048 - DNA, 110 bp, synthetic construct
  source 1..110: mol_type = other DNA
aaaaaaaaaaaaataaccccaaaaaaccagcaataagactatcttccaaagactctttccatacactctggtttaatgttagttgtagtggctacaatggcagtgtcaac

SEQ ID NO: 29049 - DNA, 110 bp, synthetic construct; identical to SEQ ID NO: 29048
  source 1..110: mol_type = other DNA

SEQ ID NO: 29050 - DNA, 110 bp, synthetic construct
  source 1..110: mol_type = other DNA
tcttaccttaatcaagaacagcctttagcctgtcttactgcaagatccagttctaggtattcctttgtttcagtaaaatacaaagctgcccccagatgtggctttcaact

SEQ ID NO: 29051 - DNA, 110 bp, synthetic construct
  source 1..110: mol_type = other DNA
ggtattcctttgtttcagtaaaatacaaagctgcccccagatgtggctttcaacttaagggaaataagtgtggcaatccaggcaacaagacacagcacttaccactcatg

SEQ ID NO: 29052 - DNA, 110 bp, synthetic construct
  source 1..110: mol_type = other DNA
ttttaggttctgacatcgatggattgccctttaagctaacatcatcatcctaataaagaattaatgaatttcttttaacttcctaacactgtggtagttacctagggtat

SEQ ID NO: 29053 - DNA, 110 bp, synthetic construct
  source 1..110: mol_type = other DNA
ggaagttcccagactagggtcgaatcagagctgtagctcccagcctacataccacagccacaataatgtgagaacccagccacgtctgtgacctacagcacagctcatgg

SEQ ID NO: 29054 - DNA, 110 bp, synthetic construct; identical to SEQ ID NO: 29053
  source 1..110: mol_type = other DNA

SEQ ID NO: 29055 - DNA, 110 bp, synthetic construct
  source 1..110: mol_type = other DNA
acctggaggttaacatcttatagctgttctttgcaaatcttcctgtgctgagagtgaggcattgaaaatgcactggagtggccctttgttcttcctgctaatcttactaa

SEQ ID NO: 29056 - DNA, 110 bp, synthetic construct
  source 1..110: mol_type = other DNA
ataactggcgatacaagtaccaggcacttttgacgtatttgatggttagaacttgggaaagatcacgaaggtatattcactacggaaaccagaaagcattttcagattct

SEQ ID NO: 29057 - DNA, 110 bp, synthetic construct
  source 1..110: mol_type = other DNA
ggaaagatcacgaaggtatattcactacggaaaccagaaagcattttcagattctaaaggaagtaattctgatgattcagtccctaatctaaatccattcaggtcatccc

SEQ ID NO: 29058 - DNA, 110 bp, synthetic construct
  source 1..110: mol_type = other DNA
ctgatgccctggttggaccctgtggaggcagagtgcctcctgctctccttctagctaaccgtgcctcctggtggctcatccctgttttacatttgcttgtgtgataattt

SEQ ID NO: 29059 - DNA, 110 bp, synthetic construct
  source 1..110: mol_type = other DNA
ctgtaagtgatgttgttgtacagtctttacagatgaagaactcaaaggctcacgtggtggcctcaggtcatgcagcccacggaaggggcaggttcgataacaatccacta

SEQ ID NO: 29060 - DNA, 110 bp, synthetic construct
  source 1..110: mol_type = other DNA
ccctaactcctcagtaaaacgtttttttaaaacttagagattttctttgctcttgtttatttatccttttaaaggtatactcggctttcagaaattttacttccaggaga

SEQ ID NO: 29061 - DNA, 110 bp, synthetic construct
  source 1..110: mol_type = other DNA
agagattttctttgctcttgtttatttatccttttaaaggtatactcggctttcagaaattttacttccaggagacaaatcatgattaaaagcaaatgttctatctctca

SEQ ID NO: 29062 - DNA, 110 bp, synthetic construct; identical to SEQ ID NO: 29060
  source 1..110: mol_type = other DNA

SEQ ID NO: 29063 - DNA, 110 bp, synthetic construct; identical to SEQ ID NO: 29061
  source 1..110: mol_type = other DNA

SEQ ID NO: 29064 - DNA, 110 bp, synthetic construct
  source 1..110: mol_type = other DNA
gtagcactccagacttaggatctcatggttagccaatggacctccttttctactcctcaaaggactcgttttctttctttgcactaaatatatatttttaaattaaagta

SEQ ID NO: 29065 - DNA, 110 bp, synthetic construct
  source 1..110: mol_type = other DNA
ctcaaaggactcgttttctttctttgcactaaatatatatttttaaattaaagtattgttgatttatagtgtgatgcccttttctgttgtacagcagagtgactcagtta

SEQ ID NO: 29066 - DNA, 110 bp, synthetic construct
  source 1..110: mol_type = other DNA
aaggagttttattcttcagacatagcaagatagtcagaagaggcagtagggaatcatagccttggatctagctcattgcgtcatcaagaacccaggctcggagttcccgt

SEQ ID NO: 29067 - DNA, 110 bp, synthetic construct
  source 1..110: mol_type = other DNA
caagatagtcagaagaggcagtagggaatcatagccttggatctagctcattgcgtcatcaagaacccaggctcggagttcccgttgtggcgcagtggttaatgaatccg

SEQ ID NO: 29068 - DNA, 110 bp, synthetic construct
  source 1..110: mol_type = other DNA
ttttacctttcacacctgctcagacccaggggcctcctctgatgtgcatgcacatattttggccaagatgaagtccagagcaaaacatggtgggaaggttatttagactt

SEQ ID NO: 29069 - DNA, 110 bp, synthetic construct
  source 1..110: mol_type = other DNA
taaacttgaacttcatacatcttaatgggaaaccacaaagttataagggtgtgcgtaaaatcagcttgcgagattgtttaaaatgcaggtctaattctagctcatcagtt

SEQ ID NO: 29070 - DNA, 110 bp, synthetic construct
  source 1..110: mol_type = other DNA
aaaacaaagttgaacataaaaaagtcatcaatttactcagcccgtaatttgacaaaaggtaacaaaggcccagcgagaatgcagcttgcctgggctcacaaagccaaagg

SEQ ID NO: 29071 - DNA, 110 bp, synthetic construct; identical to SEQ ID NO: 29070
  source 1..110: mol_type = other DNA

SEQ ID NO: 29072 - DNA, 110 bp, synthetic construct
  source 1..110: mol_type = other DNA
ggtatctataaggtggacgttggtatggtcatgacaatgattatgtgcaattatatgcattaaattatcagatgttttcaatcttaagaacttgctaatttatcttcagg

SEQ ID NO: 29073 - DNA, 110 bp, synthetic construct
  source 1..110: mol_type = other DNA
aatgattatgtgcaattatatgcattaaattatcagatgttttcaatcttaagaacttgctaatttatcttcaggaactcacggtccacaatactaatgacgattttccc

SEQ ID NO: 29074 - DNA, 110 bp, synthetic construct
  source 1..110: mol_type = other DNA
acgagaaggaaggaagaaggagaaggaggagaagaagaagcagcagaagcagaagcaaaagcagcagtagcagcagcagcccctccccattgggggtgggcatcatcatc

SEQ ID NO: 29075 - DNA, 110 bp, synthetic construct; identical to SEQ ID NO: 29074
  source 1..110: mol_type = other DNA

SEQ ID NO: 29076 - DNA, 110 bp, synthetic construct
  source 1..110: mol_type = other DNA
tggctgtggtgtaggcaggaagctgaggttctgatttgacccctaacctgggtaggaactttcatatgctgcggggggtggtgcacggagtcaaacacggagaatgggag

SEQ ID NO: 29077 - DNA, 110 bp, synthetic construct
  source 1..110: mol_type = other DNA
aaaccacagggaaaccactgcaccagctctctgggggttcgagggagccctgcctcataccatttaccaagagtggcatggtattctgtgcccaggttttaacttataac

SEQ ID NO: 29078 - DNA, 110 bp, synthetic construct
  source 1..110: mol_type = other DNA
cataccatttaccaagagtggcatggtattctgtgcccaggttttaacttataacggtgactgagtgaccacacgagagggcaatgccatgggtcacacagttcccctag

SEQ ID NO: 29079 - DNA, 110 bp, synthetic construct
  source 1..110: mol_type = other DNA
gctggagaaactgttaaattataataatataacttgtatcttccctgtttcttactccttcacacatctgtgctaaaaatagaatgcactaaaaatagaaactacccctt

SEQ ID NO: 29080 - DNA, 110 bp, synthetic construct; identical to SEQ ID NO: 29079
  source 1..110: mol_type = other DNA

SEQ ID NO: 29081 - DNA, 110 bp, synthetic construct
  source 1..110: mol_type = other DNA
gggcagctatctctctaaacaaagtacttataagtggaattttttttggtaactgaactatgtttcaaattagaagggagattacatataatttttctaggaatcctttc

SEQ ID NO: 29082 - DNA, 110 bp, synthetic construct
  source 1..110: mol_type = other DNA
ttgcattagctctgtcaggatttgccattaagataaaattatgatgtttccttcccttctttctcaaagctctagaacagttttaacaatgtaggaagtctctcttcctt

SEQ ID NO: 29083 - DNA, 110 bp, synthetic construct
  source 1..110: mol_type = other DNA
cttctttctcaaagctctagaacagttttaacaatgtaggaagtctctcttccttggaggtgcaatacactgtctaaccaatgaagcacattctttaagaataaaagtcc

SEQ ID NO: 29084 - DNA, 110 bp, synthetic construct
  source 1..110: mol_type = other DNA
cagaaagggcacattaaagccaaaaccagaagggaatttgatgacctccattatagaagactgtactggaagttccaactcatacagtaaaaactttttcaagttcaaat

SEQ ID NO: 29085 - DNA, 110 bp, synthetic construct
  source 1..110: mol_type = other DNA
gaagactgtactggaagttccaactcatacagtaaaaactttttcaagttcaaataacagaagagggagaataagagaattatcgacaggtaatggatacgtttaccaag

SEQ ID NO: 29086 - DNA, 110 bp, synthetic construct
  source 1..110: mol_type = other DNA
cagatggagaaaataagggacaaagattctgtgaccagcacctaaagaaaaatccacactgccctgtccatccaacatccccccaccattctcttacaccagaaagagcc

SEQ ID NO: 29087 - DNA, 110 bp, synthetic construct
  source 1..110: mol_type = other DNA
ccactgtgccacgacaggaactccaaccaaaaaactgttagagctcatcaacgagtttggtaaagttgctagaacttttataagaaatttcttataaaagtttgagtttt

SEQ ID NO: 29088 - DNA, 110 bp, synthetic construct
  source 1..110: mol_type = other DNA
cagcacagcagaggcagtactgacctctgagacatgcccaaagaggattctaagcctaacaaaaattgtcttgatttccagagaagcagtatgtacctataactccaaaa

SEQ ID NO: 29089 - DNA, 110 bp, synthetic construct
  source 1..110: mol_type = other DNA
aaaaacagaagatgctcctctcactctatcactcaggaaattccaaggattttggaagctctgtgcaggagccagggacaaagaccaaatatatatattggggtgtgtgt

SEQ ID NO: 29090 - DNA, 110 bp, synthetic construct
  source 1..110: mol_type = other DNA
tctgcgatggcccacttggtagtgcacctggatggcctaccttcactcccccatctcatgtctgctcccccatctcacatctccaccctcaaaccttcctcctgctggaa

SEQ ID NO: 29091 - DNA, 110 bp, synthetic construct
  source 1..110: mol_type = other DNA
tcctgattgagaagctcccaaacagaagcagaaactgagtttggagcagcatctgtagcagtatctctagctcctttggccagttctgctgggtgatttgaggagttcgt

SEQ ID NO: 29092 - DNA, 110 bp, synthetic construct
  source 1..110: mol_type = other DNA
aagttgaaggctaaaatgttttatcgaaatttctcaaccacagaagtagccatgaaagatttactggaagaaacccccattatacatctgagtttctgaaggctaatggc

SEQ ID NO: 29093 - DNA, 110 bp, synthetic construct
  source 1..110: mol_type = other DNA
aagatttactggaagaaacccccattatacatctgagtttctgaaggctaatggcatctcgcagaatgcaactattaatctcaaatgctccaggccaattgattgttttg

SEQ ID NO: 29094 - DNA, 110 bp, synthetic construct
  source 1..110: mol_type = other DNA
cagatgccctaagcacactttgttatttcatgggaatgtaattcctgtgtttcgagctgtgaaagcattctagttacccctgtaagatgccccggggatcctgattgatg

SEQ ID NO: 29095 - DNA, 110 bp, synthetic construct
  source 1..110: mol_type = other DNA
aaccaatcagcaggtcagcaggtatatcccaagacctcccctctctgggctataaaaacagacaggcccacatgctcactgtcggctcccctaatcaacaggaagttgtt

SEQ ID NO: 29096 - DNA, 110 bp, synthetic construct
  source 1..110: mol_type = other DNA
aaacagacaggcccacatgctcactgtcggctcccctaatcaacaggaagttgttttcctgatgagctggcagtatttctatcctcaataaactcttcttcagtctcgcc

SEQ ID NO: 29097 - DNA, 110 bp, synthetic construct
  source 1..110: mol_type = other DNA
tccttaacccactgccccaggccaggagtcaaaccagcacctccacagagacaagctggatctttaacccagtgtggccaaagcaggaactctaggaagaccatatattc

SEQ ID NO: 29098 - DNA, 110 bp, synthetic construct; identical to SEQ ID NO: 29097
  source 1..110: mol_type = other DNA

SEQ ID NO: 29099 - DNA, 110 bp, synthetic construct
  source 1..110: mol_type = other DNA
ctgttttagccctggaagaaaaggaaagagaaggcaggaatagttagaagattcaaaagccggggaactggataaaattgcctccaaagtcaaagtgagcacctgtctgt

SEQ ID NO: 29100 - DNA, 110 bp, synthetic construct
  source 1..110: mol_type = other DNA
aaagccggggaactggataaaattgcctccaaagtcaaagtgagcacctgtctgtatacaggctgcaatttggcagaggccttaaagatcacctggtacagcccggtggc

SEQ ID NO: 29101 - DNA, 110 bp, synthetic construct
  source 1..110: mol_type = other DNA
agacccaggcctctgcagtcagactgttcacccactgtgccacaggggaactccaggacaagctcttaaaatcatctttgtatacacagcctttattattttactcaata

SEQ ID NO: 29102 - DNA, 110 bp, synthetic construct
  source 1..110: mol_type = other DNA
tctgaaacctctctgcttggcacagagtataggataaagacatatttgctgagcaagaaaataaataaatatgaaaatgagacgatacaatgagtattgttttggagctt

SEQ ID NO: 29103 - DNA, 110 bp, synthetic construct
  source 1..110: mol_type = other DNA
agaaaataaataaatatgaaaatgagacgatacaatgagtattgttttggagctttcgcagtttctctctagcttaatatgtaacctcaaaactaacctatcatgtgctg

SEQ ID NO: 29104 - DNA, 110 bp, synthetic construct
  source 1..110: mol_type = other DNA
ttttctgtactttcctcttgacccttaggaaacaccacctgaaaattccaggggaccatggaaatcaccagaatctacagctgatctatatagactccactgttattaaa

SEQ ID NO: 29105 - DNA, 110 bp, synthetic construct
  source 1..110: mol_type = other DNA
ccatggaaatcaccagaatctacagctgatctatatagactccactgttattaaaaaatattttgggggagttcccgtcgtggctcagcggttgacaaatctgactcgga

SEQ ID NO: 29106 - DNA, 110 bp, synthetic construct
  source 1..110: mol_type = other DNA
tttagtgttgtgaccttcaccagtgcttctgtccctcccccagtggtacagctccctgatcatcccctcccccactcccttccatgggtgctgtgccaatctgcctcctt

SEQ ID NO: 29107 - DNA, 110 bp, synthetic construct
  source 1..110: mol_type = other DNA
ctgatcatcccctcccccactcccttccatgggtgctgtgccaatctgcctccttgaagcccttttttttttttgtctttttgtcttttctagggctgcacccatggcat

SEQ ID NO: 29108 - DNA, 110 bp, synthetic construct
  source 1..110: mol_type = other DNA
caaagtgattcagttgtacatgttcacacagtcattttctttcagattctttctcacatagattatcataggatattgggtagaggtctctgtgctatacagcaggtctc

SEQ ID NO: 29109 - DNA, 110 bp, synthetic construct; identical to SEQ ID NO: 29108
  source 1..110: mol_type = other DNA

SEQ ID NO: 29110 - DNA, 110 bp, synthetic construct
  source 1..110: mol_type = other DNA
atgaccaccatgacagtatattggcaggtggtagcagagagtctgaggggcctgggtgatgctttctctactttgcacaaagcaaccttaccagcaagagggggctgcct

SEQ ID NO: 29111 - DNA, 110 bp, synthetic construct
  source 1..110: mol_type = other DNA
caggctaggggttgaattggagctgccgtggctggcttatgccacagctatagaagcacaggatatgagccacacctgtgatctacaccacagctcgcggcaacaccaga

SEQ ID NO: 29112 - DNA, 110 bp, synthetic construct; identical to SEQ ID NO: 29111
  source 1..110: mol_type = other DNA

SEQ ID NO: 29113 - DNA, 110 bp, synthetic construct
  source 1..110: mol_type = other DNA
acgacatgtaaagttcctccgtgtaaagtacttaataaaacatgatatttgcacagatttatcacacacaggcaggaaacacgtctcaacattgttaaatctttttcagc

SEQ ID NO: 29114 - DNA, 110 bp, synthetic construct
  source 1..110: mol_type = other DNA
gatttatcacacacaggcaggaaacacgtctcaacattgttaaatctttttcagctattttatatgtatttcaccatttgattcaaattttaagtttacccctttccccc

SEQ ID NO: 29115 - DNA, 110 bp, synthetic construct; identical to SEQ ID NO: 29113
  source 1..110: mol_type = other DNA

SEQ ID NO: 29116 - DNA, 110 bp, synthetic construct; identical to SEQ ID NO: 29114
  source 1..110: mol_type = other DNA

SEQ ID NO: 29117 - DNA, 110 bp, synthetic construct
  source 1..110: mol_type = other DNA
tcttagatgaaatttctcttatagtttcataaatatccttccagtgataagatacttcatacatgcacccccatgttcattgcaacactatttgcaatagtcaagacatg

SEQ ID NO: 29118 - DNA, 110 bp, synthetic construct
  source 1..110: mol_type = other DNA
agtggaagtggtatcccaaactcagcaacaatgatagcatctaacattgactgtgaattttgcagctttcaaatcacataactatgccatcatttcttcctgaaaacaat

SEQ ID NO: 29119 - DNA, 110 bp, synthetic construct
  source 1..110: mol_type = other DNA
ttgttgagttaaaaaatctttatggggtttttctccatgtgtgaggctggtatgaagcccctctagtggtgtctagagacgagtcacactagaggaaatcagctcaggag

SEQ ID NO: 29120 - DNA, 110 bp, synthetic construct
  source 1..110: mol_type = other DNA
agcccctctagtggtgtctagagacgagtcacactagaggaaatcagctcaggagaagaatgtttgatattaattctagctaaggtattataatgatatacacagaaatt

SEQ ID NO: 29121 - DNA, 110 bp, synthetic construct
  source 1..110: mol_type = other DNA
agtcctcggatgcctctggatactaagtaaggagttcaatctctagtcattcaggatagatctagaaactctggagacgtgtcgttttatatccagctgcttttcacaag

SEQ ID NO: 29122 - DNA, 110 bp, synthetic construct
  source 1..110: mol_type = other DNA
atagatctagaaactctggagacgtgtcgttttatatccagctgcttttcacaaggattcacctataggagtacttgtggagtacatgaataaaaaatggtaagtgaatt

SEQ ID NO: 29123 - DNA, 110 bp, synthetic construct
  source 1..110: mol_type = other DNA
gttttctacaaagggcatctcttctactgagtaaacccaccagcagccccaaatgaccatccgcgagacaaaattgtctgggtggcgtcatatattttatcagtgaaaag

SEQ ID NO: 29124 - DNA, 110 bp, synthetic construct
  source 1..110: mol_type = other DNA
accatccgcgagacaaaattgtctgggtggcgtcatatattttatcagtgaaaagataagatgattcagatgggggcagggggaactattgccatcttcacataagggaa

SEQ ID NO: 29125 - DNA, 110 bp, synthetic construct; identical to SEQ ID NO: 29123
  source 1..110: mol_type = other DNA

SEQ ID NO: 29126 - DNA, 110 bp, synthetic construct; identical to SEQ ID NO: 29124
  source 1..110: mol_type = other DNA

SEQ ID NO: 29127 - DNA, 110 bp, synthetic construct
  source 1..110: mol_type = other DNA
atgaaaagcagagttcccttgtggcaatgaatctgcttaatatccatgaggatgcaggtttaatccctggcttcgctcagtgagttgggtaaccggcgttgccatgagct

SEQ ID NO: 29128 - DNA, 110 bp, synthetic construct; identical to SEQ ID NO: 29127
  source 1..110: mol_type = other DNA

SEQ ID NO: 29129 - DNA, 110 bp, synthetic construct
  source 1..110: mol_type = other DNA
tgtgtctgaaggtggcttcacgcagcttgtgtggccagaacatctagcttttttttcaataagttctctttcaaacttatttacatggtagctgtaacatgtaaatgaag

SEQ ID NO: 29130 - DNA, 110 bp, synthetic construct
  source 1..110: mol_type = other DNA
gtcagtggggaggtgagcagtaaagatattctataactttcatcatcttagctttggagtttattgtatctttgttttcagtaaaattatcttttacttaatctaatact

SEQ ID NO: 29131 - DNA, 110 bp, synthetic construct
  source 1..110: mol_type = other DNA
ttggatattagtcaggtttgttaaccattgagccgtgacaggaacttccattattacattatttatgagaggacttacaaacgtctctcccttaccacacatccatccct

SEQ ID NO: 29132 - DNA, 110 bp, synthetic construct
  source 1..110: mol_type = other DNA
acattatttatgagaggacttacaaacgtctctcccttaccacacatccatccctgtcatgtaggtaacccactgacaatgcctctaggagaaagacccttacacaaggt

SEQ ID NO: 29133 - DNA, 110 bp, synthetic construct
  source 1..110: mol_type = other DNA
tggaacagagtgaggactggaccaatgaagtgaggccaagtcatacagagattcacagagaagctggtgcccaccatcaaggccaatgtcaacgtgagtccccagggctg

SEQ ID NO: 29134 - DNA, 110 bp, synthetic construct
  source 1..110: mol_type = other DNA
cagagaagctggtgcccaccatcaaggccaatgtcaacgtgagtccccagggctggtttactgtagtagatgaaatttgggttttgagatactaattcagcatgcctttt

SEQ ID NO: 29135 - DNA, 110 bp, synthetic construct
  source 1..110: mol_type = other DNA
gagcagaggccaaatcagggctagtgaccatgaccatactgtttcttctagttcctatctccttggttgtctttatttttttaactgactgattttaaccttttgtattt

SEQ ID NO: 29136 - DNA, 110 bp, synthetic construct
  source 1..110: mol_type = other DNA
aatatcattatggcacaatagctccttctgtggtgatgctatagagtattttacttgtggagaggagacacagaagttacttttggtagctccctttgtattgaactgca

SEQ ID NO: 29137 - DNA, 110 bp, synthetic construct
  source 1..110: mol_type = other DNA
tctgacaagggagtttttattagcctctgtgactaatgccaaacattgaaatttccaagaccttgtcacaattttatggaatttgtggaacagagtattctaatcaaaat

SEQ ID NO: 29138 - DNA, 110 bp, synthetic construct
  source 1..110: mol_type = other DNA
tctgtgactaatgccaaacattgaaatttccaagaccttgtcacaattttatggaatttgtggaacagagtattctaatcaaaattgacactgacttgaaaaatcaatat

SEQ ID NO: 29139 - DNA, 110 bp, synthetic construct; identical to SEQ ID NO: 29137
  source 1..110: mol_type = other DNA

SEQ ID NO: 29140 - DNA, 110 bp, synthetic construct; identical to SEQ ID NO: 29138
  source 1..110: mol_type = other DNA

SEQ ID NO: 29141 - DNA, 110 bp, synthetic construct
  source 1..110: mol_type = other DNA
tcatctgctatgcgtattgcaactcatgctttcctttccattcacatgaaatatctttctccattccctcactttccatttacatgcgtcctttgccctaagatgggtct

SEQ ID NO: 29142 - DNA, 110 bp, synthetic construct
  source 1..110: mol_type = other DNA
attgcaactcatgctttcctttccattcacatgaaatatctttctccattccctcactttccatttacatgcgtcctttgccctaagatgggtctcttataggcagcatg

SEQ ID NO: 29143 - DNA, 110 bp, synthetic construct
  source 1..110: mol_type = other DNA
gtcacttttttttttttttttccatgaccagcatttgtatttctgttgatttactctctccatttcttagtttcacatatgaaaacaagattgggacagaggggaaaatt

SEQ ID NO: 29144 - DNA, 110 bp, synthetic construct
  source 1..110: mol_type = other DNA
ctctccatttcttagtttcacatatgaaaacaagattgggacagaggggaaaattagcttgttcatacccctgtgatgttaagattggcatcttatataaatcttactgt

SEQ ID NO: 29145 - DNA, 110 bp, synthetic construct; identical to SEQ ID NO: 29143
  source 1..110: mol_type = other DNA

SEQ ID NO: 29146 - DNA, 110 bp, synthetic construct; identical to SEQ ID NO: 29144
  source 1..110: mol_type = other DNA

SEQ ID NO: 29147 - DNA, 110 bp, synthetic construct
  source 1..110: mol_type = other DNA
accttctgggcatgcaggtagtgaaaactacacagacctgggagcaggaggggcagcagggctgcaggtctggatttgggagactttagcagccaggctgagggtaaagc

SEQ ID NO: 29148 - DNA, 110 bp, synthetic construct
  source 1..110: mol_type = other DNA
gcagggctgcaggtctggatttgggagactttagcagccaggctgagggtaaagcagccctttgggtttctgcatggaaggggaggaagagggctcctgcagggccccag

SEQ ID NO: 29149 - DNA, 110 bp, synthetic construct
  source 1..110: mol_type = other DNA
cttctgggacacctataatgctcccataagggagtgtctctacacagacagcctgtgttcaatactttttgtaggggagctgaatttgacatggtttataagccacatct

SEQ ID NO: 29150 - DNA, 110 bp, synthetic construct
  source 1..110: mol_type = other DNA
tgttcaatactttttgtaggggagctgaatttgacatggtttataagccacatctttccttgtggtgtgctggcagctatcacctcatggtaggtattcctggaaatgga

SEQ ID NO: 29151 - DNA, 110 bp, synthetic construct; identical to SEQ ID NO: 29149
  source 1..110: mol_type = other DNA

SEQ ID NO: 29152 - DNA, 110 bp, synthetic construct; identical to SEQ ID NO: 29150
  source 1..110: mol_type = other DNA

SEQ ID NO: 29153 - DNA, 110 bp, synthetic construct
  source 1..110: mol_type = other DNA
ggaactccaataacttatttataaaacagaagcaaactcagagatttcaaaaccaatcttacggttatcatgggtgaaaccgctgtgtggagggaagaattggtagggcc

SEQ ID NO: 29154 - DNA, 110 bp, synthetic construct
  source 1..110: mol_type = other DNA
atcttacggttatcatgggtgaaaccgctgtgtggagggaagaattggtagggcctgaataatatacacactactgtataaaataaatgattaatgggaacctattgtat

SEQ ID NO: 29155 - DNA, 110 bp, synthetic construct
  source 1..110: mol_type = other DNA
atggtagtgatcatggccaaggggcatttcagattatgtgaatgaataaaagctgcttttcaaaagccaagcttttttttttcccccctcattgatgtattgctttatat

SEQ ID NO: 29156 - DNA, 110 bp, synthetic construct
  source 1..110: mol_type = other DNA
cttttcaaaagccaagcttttttttttcccccctcattgatgtattgctttatattgagagtggtaacattttgtttcctgttgctgaaattgtgggattttggtggggc

SEQ ID NO: 29157 - DNA, 110 bp, synthetic construct
  source 1..110: mol_type = other DNA
ttttctaagctttaatgtgctccctcctcttattctaactcttcttcttcttcttttttttttttccattacaaataaaaatctggcatgtctttgaagtcttaactgca

SEQ ID NO: 29158 - DNA, 110 bp, synthetic construct
  source 1..110: mol_type = other DNA
ttttttttttccattacaaataaaaatctggcatgtctttgaagtcttaactgcatcaaagacttgctcccattaattttaaattactcctctaaaagcctacctgcagt

SEQ ID NO: 29159 - DNA, 110 bp, synthetic construct
  source 1..110: mol_type = other DNA
gccctttgtgaagcagaaaacaggggagaagaaagagccctatacttggaaagagtttgtagggaacatgggaataggtcttagggccactggtcattgggtgacatcag

SEQ ID NO: 29160 - DNA, 110 bp, synthetic construct
  source 1..110: mol_type = other DNA
tcagactacaatttaaatccttggctttactaatagagtactgatattcaccctcacagcttggataggagctggcatttctgaagtatacactcttatagaataaattt

SEQ ID NO: 29161 - DNA, 110 bp, synthetic construct
  source 1..110: mol_type = other DNA
aattcaaagtggagaatgaggctatagtttgaccataagaatgactataagcccagttactagtgttggactacagattttacagtcacatttgcccttgaagctgagct

SEQ ID NO: 29162 - DNA, 110 bp, synthetic construct
  source 1..110: mol_type = other DNA
gttactagtgttggactacagattttacagtcacatttgcccttgaagctgagctttcaagctataggatatagagatggacacttaaggaacaggctatgagtgagtct

SEQ ID NO: 29163 - DNA, 110 bp, synthetic construct
  source 1..110: mol_type = other DNA
tatttttgaattttgagatttctttttatagtctagatacaattctttggccaaccgtatgatctgtacacattttctccaagactgctgttggtctttttattgcctta

SEQ ID NO: 29164 - DNA, 110 bp, synthetic construct
  source 1..110: mol_type = other DNA
ggtgaagagatcgggatggaaatcactttgactgattgctgctaatggttgagggaggtatggtttatgaccaaagaagttacataactaaatacagactcatgggtgtc

SEQ ID NO: 29165 - DNA, 110 bp, synthetic construct
  source 1..110: mol_type = other DNA
aggtatggtttatgaccaaagaagttacataactaaatacagactcatgggtgtccaagtctgtctcattatctggtaagtctggatatctcatagaaaatggacaaatt

SEQ ID NO: 29166 - DNA, 110 bp, synthetic construct
  source 1..110: mol_type = other DNA
acaaactatttgttcttatcaagctggtgcaccatgattatcaaacagccattttacatctgtctctagaatatacctcccatattctttaagtccaatcaatcttcaat

SEQ ID NO: 29167 - DNA, 110 bp, synthetic construct
  source 1..110: mol_type = other DNA
atgtcttctcattatacattttcttatttacagaaattacacgtgaaagaaattgtccagcttcctcttcagatctggcacaccctcacaagtttgccatttgagtttct

SEQ ID NO: 29168 - DNA, 110 bp, synthetic construct
  source 1..110: mol_type = other DNA
ctgtagctcacccttggcactgactcatacaaggagtgcagctttcttcactacgcaagtagaggttcctagaaacctttgcaagcctaaatggcataaagtgaagaggc

SEQ ID NO: 29169 - DNA, 110 bp, synthetic construct
  source 1..110: mol_type = other DNA
tggggatcaccaaaaagaaagcaaggtctgtttacggagagctcagatttaagtgggtaagactggatattcacaattaaataagtcaaaaagttgatcataactgactg

SEQ ID NO: 29170 - DNA, 110 bp, synthetic construct
  source 1..110: mol_type = other DNA
aattccaatataacctccttcatcgtcacagaacctgaaatcaattccatgacagatatacacaatctcttatgatctgcctctttgtaattttcatcatttacactaag

SEQ ID NO: 29171 - DNA, 110 bp, synthetic construct
  source 1..110: mol_type = other DNA
gagccaagtttaagtttaatacaaatgacttaaatccaaatgattccaatctcatccccatatcccaagcacccagcaaattcatttatctccatcaagaagcctaccct

SEQ ID NO: 29172 - DNA, 110 bp, synthetic construct
  source 1..110: mol_type = other DNA
cctaatgtctttcaagtatgtcactctcctgcactctcctggggggcctgcttgcatgcgcctaaagtgataaattaattactttggagggattgtgattgatagataaa

SEQ ID NO: 29173 - DNA, 110 bp, synthetic construct
  source 1..110: mol_type = other DNA
gtgataactattcaagatacatagataagtaaaaacacctatagtctattctttgttctcagagtatacagtctagcggcagaggaaaacaatcacataatcatagccgg

SEQ ID NO: 29174 - DNA, 110 bp, synthetic construct
  source 1..110: mol_type = other DNA
ttctcagagtatacagtctagcggcagaggaaaacaatcacataatcatagccgggactataaacagagatagacgatatatcaagaaaaaagacatgcaataaaaacta

SEQ ID NO: 29175 - DNA, 110 bp, synthetic construct
  source 1..110: mol_type = other DNA
tccattatttccaaatcatctttatttgacttgaagtcaattcatttgatgattgggcattattcaaagagctaatttatgctgaggttgcttcacaatcacaatatggc

SEQ ID NO: 29176 - DNA, 110 bp, synthetic construct
  source 1..110: mol_type = other DNA
tactttttaaattttataaatgtcaaccagaatcagctatttcagagaaagtacatggacccaagcaaatttttctcccctgctcacttgagtgacccttgatatatgga

SEQ ID NO: 29177 - DNA, 110 bp, synthetic construct; identical to SEQ ID NO: 29176
  source 1..110: mol_type = other DNA

SEQ ID NO: 29178 - DNA, 110 bp, synthetic construct
  source 1..110: mol_type = other DNA
gtcaagttaacaatttatccaaggttcctaaaagggatgaaatattcactaagcattgttatcaactgactcatgggccaacccttactttcaaggaaattttgaagtta

SEQ ID NO: 29179 - DNA, 110 bp, synthetic construct
  source 1..110: mol_type = other DNA
gcaaagggcactgactggtttagccaactagtgtaaccaaccctttccccatggtagagttgtactgcccagtacagtagcctctagatgaatgttgctttttaacattt

SEQ ID NO: 29180 - DNA, 110 bp, synthetic construct
  source 1..110: mol_type = other DNA
ctggtgattacaaagatggatgccttggaggcagagtaggccatcctctgagagtacatgacaaaggaacctggctcagagaaccctgagcaagtgggagctgaagtcta

SEQ ID NO: 29181 - DNA, 110 bp, synthetic construct
  source 1..110: mol_type = other DNA
acatgacaaaggaacctggctcagagaaccctgagcaagtgggagctgaagtctaggtaacgtgtgggtgtgggtggaggggcacctcgtgttctaggttagtgagtcct

SEQ ID NO: 29182 - DNA, 110 bp, synthetic construct
  source 1..110: mol_type = other DNA
gataggtgacagcagtgtccagacatcatctcagagtttatagggatttctgtgtaggtaaacaaatctctggttaaatggtggccttctagtaggaaaggcaaagctgc

SEQ ID NO: 29183 - DNA, 110 bp, synthetic construct
  source 1..110: mol_type = other DNA
gttgcatcagattaacttctccaggtgaagagccagatttctgttttactttcgaatgctattaattgaataacgttgcattttccccctgagtatccatcttgtttatg

SEQ ID NO: 29184 - DNA, 110 bp, synthetic construct
  source 1..110: mol_type = other DNA
cagctgcacaaaatctctgtcctctctttttggtgattaactggatctgccctcttaggatgaaagcttcggagtcacacattcgctcacttaaacagcagtgtgtaact

SEQ ID NO: 29185 - DNA, 110 bp, synthetic construct
  source 1..110: mol_type = other DNA
taggatgaaagcttcggagtcacacattcgctcacttaaacagcagtgtgtaactttgggcaggttacttaccatctcagtgcttctgtttcctcacctgggaaatgggg

SEQ ID NO: 29186 - DNA, 110 bp, synthetic construct
  source 1..110: mol_type = other DNA
ctgcctcaatagattgttgcaaggattaaatgagaaaatatatagaaaacataaaaggggagctgacaccaagtaagtgttcagtaaatgatagatatactgtcatcatt

SEQ ID NO: 29187 - DNA, 110 bp, synthetic construct
  source 1..110: mol_type = other DNA
aggggagctgacaccaagtaagtgttcagtaaatgatagatatactgtcatcattatcatcatcatcatcatcatcatcataattgtggctggatgttttcagatgataa

SEQ ID NO: 29188 - DNA, 110 bp, synthetic construct
  source 1..110: mol_type = other DNA
ttttctgtatacctgaaagtaacacaacgttgtaaatcaagtatagtcctatataaaataaaaattacgtctggggagtttccattgtggcttagaggaaacaaacctga

SEQ ID NO: 29189 - DNA, 110 bp, synthetic construct
  source 1..110: mol_type = other DNA
aaagtaacacaacgttgtaaatcaagtatagtcctatataaaataaaaattacgtctggggagtttccattgtggcttagaggaaacaaacctgactagtatccatgaag

SEQ ID NO: 29190 - DNA, 110 bp, synthetic construct
  source 1..110: mol_type = other DNA
atatatatatatatatcacatcttcttaatccataaaaagaaagttgcttgtaatctaacaggattagctgtcctctacttccgctggggtgactgggatttttccacat

SEQ ID NO: 29191 - DNA, 110 bp, synthetic construct
  source 1..110: mol_type = other DNA
ctaacaggattagctgtcctctacttccgctggggtgactgggatttttccacataggacaggcatcaagtccttctcatttgttttgaatctgatagagaagggccaag

SEQ ID NO: 29192 - DNA, 110 bp, synthetic construct
  source 1..110: mol_type = other DNA
tgaggctagtaagatttaagttatagggtctctgcttacacaagcctttctcagagctcttagagactttgtaacattatgtttcatatggttatagattttttaaaaat

SEQ ID NO: 29193 - DNA, 110 bp, synthetic construct
  source 1..110: mol_type = other DNA
actaacagactctctttctattagtgctcagtatagaagaaggtccatactgcgaccctcaactgtgtttctgccccaactctagatagcatggttgtattttggttctg

SEQ ID NO: 29194 - DNA, 110 bp, synthetic construct
  source 1..110: mol_type = other DNA
ccgttatcgatgacagcaacagggctttgccagtaaatggaaaatagagagctattaaaattgttaggaccgtcatatgtctcacaaatattaaaaatttctgttttaaa

SEQ ID NO: 29195 - DNA, 110 bp, synthetic construct
  source 1..110: mol_type = other DNA
gaatctgtgccatggctctgttttatttctccaccggcccaagtgggagcatgggaatacatggtaaccccacccacacactacttacgcacctcagggtagctggtttt

SEQ ID NO: 29196 - DNA, 110 bp, synthetic construct
  source 1..110: mol_type = other DNA
aatacatggtaaccccacccacacactacttacgcacctcagggtagctggttttctcatagagatttcctgggcctcccccctttcctgtggcatcactttcaaaacac

SEQ ID NO: 29197 - DNA, 110 bp, synthetic construct
  source 1..110: mol_type = other DNA
ctttgtgtctgtttggtttggggtgttagcatgttaatggccaatagttttccgaaagtagagctttcagctaccaaaaaagtaaaggatctctacttttttgttgaaga

SEQ ID NO: 29198 - DNA, 110 bp, synthetic construct
  source 1..110: mol_type = other DNA
gttccctttgcagctcagcagcttaagaacccgactggtatccatgagaatgtgggtttgattcctgactttggtcagtgggctaaggatcaggcattgctgcaagctgc

SEQ ID NO: 29199 - DNA, 110 bp, synthetic construct
  source 1..110: mol_type = other DNA
gagaatgtgggtttgattcctgactttggtcagtgggctaaggatcaggcattgctgcaagctgcagtggagggcacagatatatctcggatctggcgttgctatggctg

SEQ ID NO: 29200 - DNA, 110 bp, synthetic construct
  source 1..110: mol_type = other DNA
gaagaatcaaagagaatgcaatttccggttccattgcatttgtgaggggaagcgttgaggtaggtaaaggaggtggaggttttaaatctccattctagaaggcactccaa

SEQ ID NO: 29201 - DNA, 110 bp, synthetic construct
  source 1..110: mol_type = other DNA
ggcaaaatttctctggtggagcagcaagagcaaaaaggaatttagctaaagggaatgttaccaagctgctggcaccatccagaatgtggatgaggagggtggtcaggtca

SEQ ID NO: 29202 - DNA, 110 bp, synthetic construct
  source 1..110: mol_type = other DNA
ttccagcatcctatatttttgtactgtgacttagtagattctcccatcaaaagggagcattctcccatctccacccttgaacagggctggccttaggatgagctttagct

SEQ ID NO: 29203 - DNA, 110 bp, synthetic construct
  source 1..110: mol_type = other DNA
agcattctcccatctccacccttgaacagggctggccttaggatgagctttagctaagagtgaaatgactccaataatcaagttctcagactggatctccatcttttgga

SEQ ID NO: 29204 - DNA, 110 bp, synthetic construct
  source 1..110: mol_type = other DNA
gatagggcatctcatctcaggccagtctctagctttttaggaatcatctgcccccctaccttcaatcagagattgatgcatacttcctagcatcccataaagtatcagaa

SEQ ID NO: 29205 - DNA, 110 bp, synthetic construct
  source 1..110: mol_type = other DNA
gctcttaaccaatgcaaaagaggagtcagtagataaatacctcagcttctttgttttatccgaaatatattactcagggtttgccagagaaacaaaatccatagaagaac

SEQ ID NO: 29206 - DNA, 110 bp, synthetic construct
  source 1..110: mol_type = other DNA
agacagggtcgaagacacctgggtctccattgttgcatgaagcagggctgttcgctaaccaggaaaaccacatgttccccaagagaaaatctttgatggtcaatacttgc

SEQ ID NO: 29207 - DNA, 110 bp, synthetic construct
  source 1..110: mol_type = other DNA
aagaggggacagagaatgctggagcaggagtgagaattgcaatttaaaatggaatgattgggagttaccctgtggtgcaacagattaaggatccagtgttgtcgctgcag

SEQ ID NO: 29208 - DNA, 110 bp, synthetic construct
  source 1..110: mol_type = other DNA
tcatttttttatacaataagaaattcaaaggtggagagtcttttttagctgccttgaggcatatggatcccaggccagggatcagatctgagctacaacctctgccacag

SEQ ID NO: 29209 - DNA, 110 bp, synthetic construct
  source 1..110: mol_type = other DNA
agaaaatgtataaataatgagtaaataaaatataaggagtgagctgaggagctatttaagtctctggagtattactgtgctgtcctaaagaatctggttgaaatcagtgg

SEQ ID NO: 29210 - DNA, 110 bp, synthetic construct
  source 1..110: mol_type = other DNA
cacgtgggaagatttggctcccttaggaaaccacatccacccggttcctccatgggaagatggaaatgacatgtgcacactacttactgtataggataattaataagaag

SEQ ID NO: 29211 - DNA, 110 bp, synthetic construct
  source 1..110: mol_type = other DNA
cctctaatgcataatgccaggtgtcctggcactgcagagatgccatcaatcccattgtgccacagtagaaactcccagaggtgtttttatttttatttgtaattaattaa

SEQ ID NO: 29212 - DNA, 110 bp, synthetic construct
  source 1..110: mol_type = other DNA
agcaattccacttctgggtctttatccaaaggaaatgaaaacactatcaggaagagatctctgcacctccatattcatcccagcactattcacaatagccatgacacagg

SEQ ID NO: 29213 - DNA, 110 bp, synthetic construct
  source 1..110: mol_type = other DNA
ccaaaggaaatgaaaacactatcaggaagagatctctgcacctccatattcatcccagcactattcacaatagccatgacacaggaacaacctaagtgtctatcaacaga

SEQ ID NO: 29214 - DNA, 110 bp, synthetic construct
  source 1..110: mol_type = other DNA
gtcaaacccccagttagagttccctcgccattctggaggtctccctgcttcataccctagatcgcctctgggtgtgactggaggctcctgtgtcctcctggcggtgggga

SEQ ID NO: 29215 - DNA, 110 bp, synthetic construct
  source 1..110: mol_type = other DNA
cctagatcgcctctgggtgtgactggaggctcctgtgtcctcctggcggtggggagaagcagatggtctcccctgttgcatggtctgaactgccctgtactgcagccctg

SEQ ID NO: 29216 - DNA, 110 bp, synthetic construct
  source 1..110: mol_type = other DNA
aaaaaaattctgcggcagcatccatctgtcaccgtggcctttggcactggtgatagggaggctgcggctggatagtgctggacgtgtgcatgcgcgcacgcacacatgcg

SEQ ID NO: 29217 - DNA, 110 bp, synthetic construct
  source 1..110: mol_type = other DNA
gccttgtggtagaatcggcagtgcccagtgaacacgtgcaaggccatgctctggaccagaacctccacgctggatactgggtgagaaacaaactcctattttgttgagct

SEQ ID NO: 29218 - DNA, 110 bp, synthetic construct
  source 1..110: mol_type = other DNA
ccagaacctccacgctggatactgggtgagaaacaaactcctattttgttgagcttatttactgggatatatgggttaatatgttacagcagctggaattaccttaactc

SEQ ID NO: 29219 - DNA, 110 bp, synthetic construct
  source 1..110: mol_type = other DNA
agtcacatggcagttggtggtgactcagctgggctgtctgagcacccacacaatgtttcttcaggggtactgatgtcgtacactgtgcaaggctcttcccagagacagca

SEQ ID NO: 29220 - DNA, 110 bp, synthetic construct
  source 1..110: mol_type = other DNA
tatgccatataggtataaaagttctatgaagttaataaaataagatcacagatcaaattgtgctttttgatgtggtaacatacgactactgagcccctgaaatggagcta

SEQ ID NO: 29221 - DNA, 110 bp, synthetic construct
  source 1..110: mol_type = other DNA
aattgtgctttttgatgtggtaacatacgactactgagcccctgaaatggagctagtatacaataaacaccaaattgtgaagacttgatataaaaaagaatgtaaaatat

SEQ ID NO: 29222 - DNA, 110 bp, synthetic construct
  source 1..110: mol_type = other DNA
aggcacgagagaacttaagagagaaaaagaaaaatccaagctcagtatatgagctcttataaagccaaatttaaagaaactcgcttaggaattaaaataatttttctatt

SEQ ID NO: 29223 - DNA, 110 bp, synthetic construct
  source 1..110: mol_type = other DNA
gagaacactcaagcagccctgtggagaagcccacgtggtgaggaactgaggcctcctgccaacagccgtgtgaatgagcttgcaagcagacccctagtcccagtcaaaat

SEQ ID NO: 29224 - DNA, 110 bp, synthetic construct
  source 1..110: mol_type = other DNA
ctgccaacagccgtgtgaatgagcttgcaagcagacccctagtcccagtcaaaatctccaagagacaacaggcctgatcaataccatcactatagcctcataagagaacc

SEQ ID NO: 29225 - DNA, 110 bp, synthetic construct
  source 1..110: mol_type = other DNA
cttagaattggaggtttaggggaagctggaccatgcatgctcactttgctagcgggctggcaaactagttggctagttgagcctctactcaagtatgaaccagtctgttg

SEQ ID NO: 29226 - DNA, 110 bp, synthetic construct
  source 1..110: mol_type = other DNA
ttcatccagaaaacttcctacttgccttcttttgtagtattctttcacaattcccttctgtttcttttgtactcaagctgttctttgttccactcctaaaagatatgaat

SEQ ID NO: 29227 - DNA, 110 bp, synthetic construct
  source 1..110: mol_type = other DNA
agctgactaaccatatattagattatatctagatatgcaagaaagggtatgaatgaggaacaatttattaaaaggaagaggaacaaggaggaaagcctaggaattgaggg

SEQ ID NO: 29228 - DNA, 110 bp, synthetic construct
  source 1..110: mol_type = other DNA
tcttcaaagggaggatggaataaaactatgacttcaagaagggcagagtctgggtactggattctcgcgatgctactgggaagccatttgcaggcaacctagaaggagac

SEQ ID NO: 29229 - DNA, 110 bp, synthetic construct
  source 1..110: mol_type = other DNA
actggattctcgcgatgctactgggaagccatttgcaggcaacctagaaggagacagctctgatgcatcctgtccattttcgagccccgagggaaggagccttctggccc

SEQ ID NO: 29230 - DNA, 110 bp, synthetic construct
  source 1..110: mol_type = other DNA
agctttctgcttaaccttggtgctcaccctgatgtgcaagatggaatgggctgtactccagccatgagagctgcagaactgggccatgaattgtccatggaaatactagc

SEQ ID NO: 29231 - DNA, 110 bp, synthetic construct
  source 1..110: mol_type = other DNA
tgcttaaaaggaaattctgaacaagtccctacaatggggaaggaaacccagtgagactgaagccccccagctggcaggtcctttgaggctccagccctcattaattctgc

SEQ ID NO: 29232 - DNA, 110 bp, synthetic construct
  source 1..110: mol_type = other DNA
ggatttgcctccatcatctgctcttattccagcaacaaagatgttggcttggttctgacatctttcccagaggtgaggaaatacagagatcaaagggaagatttttaact

SEQ ID NO: 29233 - DNA, 110 bp, synthetic construct
  source 1..110: mol_type = other DNA
tgacatctttcccagaggtgaggaaatacagagatcaaagggaagatttttaacttgtcagcttccttctgctgctagaaattttcatgcttaaaaatatagcataatgc

SEQ ID NO: 29234 - DNA, 110 bp, synthetic construct
  source 1..110: mol_type = other DNA
gggatcaactggggaaaacctgaggtcaaacaaggacgttggcaaaggaagaccacaagcagaggagtcagatggcctcgtccttgtagaggctttgcacgcccctttga

SEQ ID NO: 29235 - DNA, 110 bp, synthetic construct
  source 1..110: mol_type = other DNA
aaaagtcacacagttaaggagctcccactgtggctcagcaagttaacaacatagtgtccacgaggatgcgggttcagtctctggcttcattcagcgggttacagatccag

SEQ ID NO: 29236 - DNA, 110 bp, synthetic construct
  source 1..110: mol_type = other DNA
gaaaactgtcaaatgttagaaggagacagttaaatgcggctgagctggaggtcttgatgggcagggccacatggggaagcctgcaggtggctggtccaccaggggagcag

SEQ ID NO: 29237 - DNA, 110 bp, synthetic construct
  source 1..110: mol_type = other DNA
cttctccggacttgcaagggccaggtgttctggctcaggaaggttgtccttgttgggaatttggaaaacagggctgcttttgattttgtgccaccccaaatgtatgagtc

SEQ ID NO: 29238 - DNA, 110 bp, synthetic construct
  source 1..110: mol_type = other DNA
tggatactagtcggattcatttctgctgagccacaatagaaactccatagagggtgatattaactcatccatgactgactgaggcctgtaggttgtctgttcagaaaagg

SEQ ID NO: 29239 - DNA, 110 bp, synthetic construct
  source 1..110: mol_type = other DNA
cttccttttccaagtgttttctccacctttctggccagacactcaattttctgggctgtgtttccacaatcctttcccatgtgtatcagctcatctgttcattttgggga

SEQ ID NO: 29240 - DNA, 110 bp, synthetic construct
  source 1..110: mol_type = other DNA
ctgtgtttccacaatcctttcccatgtgtatcagctcatctgttcattttggggatgattaggaagtgtttaagtacagccctggcttctcctcaccctcttttcagtta

SEQ ID NO: 29241 - DNA, 110 bp, synthetic construct
  source 1..110: mol_type = other DNA
cagagtgtcagagatagtggagtgacctggggctggagaggcaggggccagactcctcagaggcttacagctaaaaagactctatgggttattgtgcagattggatcagc

SEQ ID NO: 29242 - DNA, 110 bp, synthetic construct
  source 1..110: mol_type = other DNA
cttgacttttttggaactgggtaaaaagatagactagcttcagacttgttagggtaaatgttcattgtaaaaattatagtgtggagttcccgttgaggctcagcagttaa

SEQ ID NO: 29243 - DNA, 110 bp, synthetic construct
  source 1..110: mol_type = other DNA
gctaccccaaaatgcaaaccatcgtggacagctctggatgggcaccggcttcctgggggaatagctacctgacgcgtgggcggatggaaggcccaggaaggggcccttgc

SEQ ID NO: 29244 - DNA, 110 bp, synthetic construct
  source 1..110: mol_type = other DNA
ggatatgagtttgcaccccttttccaccaagagatgaaacccatttccccaccccatgaatctattttggcctcatgacttgttccagctacgaattagtgcagaagtga

SEQ ID NO: 29245 - DNA, 110 bp, synthetic construct
  source 1..110: mol_type = other DNA
ttgttgggtaaaataattaaacttagctccaagagaaaaatgaaagagggggcacatttgttccattatgttggaactgggggagtagttgggtgtctatattttttttt

SEQ ID NO: 29246 - DNA, 110 bp, synthetic construct
  source 1..110: mol_type = other DNA
tatctctctgtgagtctgtccttaaccatcgctttctgggccagcacttctgcggtggtggaaatgttttatgccatagctgctcacctgagcacttgacctgtggttag

SEQ ID NO: 29247 - DNA, 110 bp, synthetic construct
  source 1..110: mol_type = other DNA
caataggctgcatagctgagcgtgtccactcaggtctgggctatgatgcttctccgcagaccccaccctcctatcctaggagctgaacctgtgggttggcagctttccaa

SEQ ID NO: 29248 - DNA, 110 bp, synthetic construct
  source 1..110: mol_type = other DNA
ctcgaccaagatctttgaagggagtcagtgagcgtccgttgctttctaggaatggaagctgaaggaaaggaagggaaaaaagataagctccttactacttcgctgctcta

SEQ ID NO: 29249 - DNA, 110 bp, synthetic construct
  source 1..110: mol_type = other DNA
aagctgaaggaaaggaagggaaaaaagataagctccttactacttcgctgctctattctgggccaggcctgcctgttttctcttaagttctgagggcctgtctcaaattc

SEQ ID NO: 29250 - DNA, 110 bp, synthetic construct; identical to SEQ ID NO: 29248
  source 1..110: mol_type = other DNA

SEQ ID NO: 29251 - DNA, 110 bp, synthetic construct; identical to SEQ ID NO: 29249
  source 1..110: mol_type = other DNA

SEQ ID NO: 29252 - DNA, 110 bp, synthetic construct
  source 1..110: mol_type = other DNA
tagagagttgatactcttagccagtaggtccaaggcaagcttcagcttgttattactgagattgctgaaaggtggtaaaaaccctcaggagttttagtaaaaaactcact

SEQ ID NO: 29253 - DNA, 110 bp, synthetic construct
  source 1..110: mol_type = other DNA
tatagttgtaccagtgtctttcactataatcatggtctcatcatgggcagaaatatttctggagcatgtttgagaagcttaggggtaagtaatatacaacttctctcatg

SEQ ID NO: 29254 - DNA, 110 bp, synthetic construct
  source 1..110: mol_type = other DNA
aaaaaaaagtcaaaatacatttcatagccatgtataaattcaaacatgaaagcgtttagtcattcatattacaggttcacaagtcctcctggctgggctttagaagaaga

SEQ ID NO: 29255 - DNA, 110 bp, synthetic construct
  source 1..110: mol_type = other DNA
gttggtttttttccctgaatttgtttgtttgtttgtttgtttttgcagaggtttggggtgatgtgctcctcccctggcctccatggaaggtgtctctggaaagtcacctg

SEQ ID NO: 29256 - DNA, 110 bp, synthetic construct
  source 1..110: mol_type = other DNA
tgaatttgtttgtttgtttgtttgtttttgcagaggtttggggtgatgtgctcctcccctggcctccatggaaggtgtctctggaaagtcacctgtgccatgggtgccct

SEQ ID NO: 29257 - DNA, 110 bp, synthetic construct
  source 1..110: mol_type = other DNA
gcaaagtaatgtggaacattaagatgctttgcatagaaaatgaacactgcatcaatgaaaaccaaaccaaaaatcccatcatattttcttttagttagtctggtagttga

SEQ ID NO: 29258 - DNA, 110 bp, synthetic construct
  source 1..110: mol_type = other DNA
tgaaaaccaaaccaaaaatcccatcatattttcttttagttagtctggtagttgaggccagaatactttctgacacaaactagcacatgccttcacatctttcacaatat

SEQ ID NO: 29259 - DNA, 110 bp, synthetic construct
  source 1..110: mol_type = other DNA
tttggcaggacatgttgactgatgggatatagggaattaagaggacaaagttgtcaaagatgtccccaaggttttatgcctgaaaaaactaggaggtggggaagtgagag

SEQ ID NO: 29260 - DNA, 110 bp, synthetic construct
  source 1..110: mol_type = other DNA
aaagatgtccccaaggttttatgcctgaaaaaactaggaggtggggaagtgagagggagagctaataaattcactatatttacctgttgatttaaagatataaacaaatt

SEQ ID NO: 29261 - DNA, 110 bp, synthetic construct
  source 1..110: mol_type = other DNA
tccgcttaccgtacatggcttgtcctggactcctgattgccacattggaaaaacgactctgagtagttaactaatgtggtggaatgttttgaacataaagaaaatttact

SEQ ID NO: 29262 - DNA, 110 bp, synthetic construct
  source 1..110: mol_type = other DNA
ggatgcatgatctaggatgacctcacacacgtctggaaattgacaggtgattggccaagggctggctgactctcagctggtcccctttggatctctgccatgtagcctcc

SEQ ID NO: 29263 - DNA, 110 bp, synthetic construct
  source 1..110: mol_type = other DNA
ctacctgccattcctataagtcctattaacaaatcctaaaagctcattaaacctaataaaagggaaaaaaactctgggaatcaggttacataaaagaaaaagattccaca

SEQ ID NO: 29264 - DNA, 110 bp, synthetic construct
  source 1..110: mol_type = other DNA
tttgtttagcgtgcgctctaggggagaggatggtctgagaaacaggaaatgagaagttaaagtactgcattgttacatcataagcccaaagcgttaaatttcaaggttgc

SEQ ID NO: 29265 - DNA, 110 bp, synthetic construct
  source 1..110: mol_type = other DNA
ccactgagccatgacgggaactcctgaagtgcttttccctctagagcaatcccatgtatgttgccaaatcacatggaaacatagcttagtaaaagctgatgctatacagc

SEQ ID NO: 29266 - DNA, 110 bp, synthetic construct
  source 1..110: mol_type = other DNA
gtatgttgccaaatcacatggaaacatagcttagtaaaagctgatgctatacagctaaccggtctaagcatttttaaccatataaatgcatctcgcccctgctccccagt

SEQ ID NO: 29267 - DNA, 110 bp, synthetic construct
  source 1..110: mol_type = other DNA
atttttcattgtttcccttaaacatcatttactgcagatatggagagaaatgaaggagaataatggacccaatggctcccagcttgttctggggatgttgtgacttcctt

SEQ ID NO: 29268 - DNA, 110 bp, synthetic construct
  source 1..110: mol_type = other DNA
agatgatttgcaacagtctgtaataaaacttggaaaagatagctacagcactcattcaataattacgagaattgcttttagatgcaattttccaacaaagtgttcataca

SEQ ID NO: 29269 - DNA, 110 bp, synthetic construct
  source 1..110: mol_type = other DNA
aacagggaagcgaacaaactggacgtgagcagaagcttgaataaggggttaagcctttgtccttgccctcttggacccctgcagggctttaagagcattcctgtgctggc

SEQ ID NO: 29270 - DNA, 110 bp, synthetic construct
  source 1..110: mol_type = other DNA
cagaagagggaagttattcagcaaagaagggccacccttaggaggcttcagtggcttcttcagcctcactcctccaagtgtggaacccagaccagcagcatcagcaccag

SEQ ID NO: 29271 - DNA, 110 bp, synthetic construct
  source 1..110: mol_type = other DNA
tgggccacatctacagcttgatttcatttttgctaaaacctcatcaaggctatccaagctagttttctgcatcccagcaacattgatgtgttttaaaattcagtggtaaa

SEQ ID NO: 29272 - DNA, 110 bp, synthetic construct
  source 1..110: mol_type = other DNA
aagctagttttctgcatcccagcaacattgatgtgttttaaaattcagtggtaaacacagaagctctcaacaggcaaaagcactaaatagataaaataacaaagtctagt

SEQ ID NO: 29273 - DNA, 110 bp, synthetic construct
  source 1..110: mol_type = other DNA
ggagttggaagaacagaaatagggcagggcaaggacctaagaaaggctgcggtttcagctgaagtcaagcttcagtctgataccatgggcagttctggtgctggaattat

SEQ ID NO: 29274 - DNA, 110 bp, synthetic construct
  source 1..110: mol_type = other DNA
cagctgaagtcaagcttcagtctgataccatgggcagttctggtgctggaattataccacagttggtaccgccttgagccaaaggaaccaccagtatctctgacatgggg

SEQ ID NO: 29275 - DNA, 110 bp, synthetic construct
  source 1..110: mol_type = other DNA
ataataatactgtccataccccttgagccaccatgctctagaggaaaatctatcacttaaatgaattctcaattccagctacatgtgtagttctacagtatatatcctgt

SEQ ID NO: 29276 - DNA, 110 bp, synthetic construct
  source 1..110: mol_type = other DNA
cttaaatgaattctcaattccagctacatgtgtagttctacagtatatatcctgtatgatggttctattgctacatttctgccttaataatatcacatttctatctactt

SEQ ID NO: 29277 - DNA, 110 bp, synthetic construct
  source 1..110: mol_type = other DNA
atgtctaatctcaagtccatggcttttcactgtaatcattccctttctagtattgccagctccgtctccctcccattctctctccagggtaagctcttcctccaaacctt

SEQ ID NO: 29278 - DNA, 110 bp, synthetic construct
  source 1..110: mol_type = other DNA
gcatatttcaataagcactgtagaacttcttcatgggaatcagtagattttctagttaacatactattcaatgagtgcttctttggaacctatgggatcagcccatactt

SEQ ID NO: 29279 - DNA, 110 bp, synthetic construct
  source 1..110: mol_type = other DNA
aggtttcaggtgcaagctgttagcagcaaagcacacagagcaggaaagtgggtacccagaaccagtgccctgggtcccagagtacctggacggggcactggcacgtccgt

SEQ ID NO: 29280 - DNA, 110 bp, synthetic construct
  source 1..110: mol_type = other DNA
gctgagaagaatccatgtctttaagattgtgtggagtcgagtggtccaataaccgagaagtccaactggtacataaaagatcaataaatttccactttatttggcccagt

SEQ ID NO: 29281 - DNA, 110 bp, synthetic construct
  source 1..110: mol_type = other DNA
tcctttggatccctgacattttatatgggatttcaattgatttcttcttgcattttgattgtaggcagcccaggtgtattcaaagatacaaagtctatctcaagcttttc

SEQ ID NO: 29282 - DNA, 110 bp, synthetic construct
  source 1..110: mol_type = other DNA
tgattgtaggcagcccaggtgtattcaaagatacaaagtctatctcaagcttttcatttaaagtgatatttttctccacctgtgtgtctttgctcatcttgctgacataa

SEQ ID NO: 29283 - DNA, 110 bp, synthetic construct; identical to SEQ ID NO: 29281
  source 1..110: mol_type = other DNA

SEQ ID NO: 29284 - DNA, 110 bp, synthetic construct; identical to SEQ ID NO: 29282
  source 1..110: mol_type = other DNA

SEQ ID NO: 29285 - DNA, 110 bp, synthetic construct
  source 1..110: mol_type = other DNA
ttcaagaacacatagttgttggcagaattccatttcttgtggttgtaggacttaggttttcttgctggctcacttgggtccacgctcatgctaggtgatacctgcagctc

SEQ ID NO: 29286 - DNA, 110 bp, synthetic construct
  source 1..110: mol_type = other DNA
gttttcttgctggctcacttgggtccacgctcatgctaggtgatacctgcagctctttgctgtatagctctcatatgacagcttacttcttttttttttccccccttttt

SEQ ID NO: 29287 - DNA, 110 bp, synthetic construct
  source 1..110: mol_type = other DNA
agatttactttctcccccctgagtacagaatgtcacagctatgctcaggctcaccatagttatgttctcctgacaccatggactcccttccataccttactgtagaaccc

SEQ ID NO: 29288 - DNA, 110 bp, synthetic construct
  source 1..110: mol_type = other DNA
atactaataccattttaataagcattactatgtcccagaaatattggttggaaatgtttataccatctttgacccttttccctctgaccagcctccaggcagatgccact

SEQ ID NO: 29289 - DNA, 110 bp, synthetic construct; identical to SEQ ID NO: 29288
  source 1..110: mol_type = other DNA

SEQ ID NO: 29290 - DNA, 110 bp, synthetic construct
  source 1..110: mol_type = other DNA
agttgagtccatcaagttggttgacagctcagatttgcagcatagaagagagggtgtttgggatgatggcagattttggccaaatcaattgggaaaaaaagggggtttca

SEQ ID NO: 29291 - DNA, 110 bp, synthetic construct
  source 1..110: mol_type = other DNA
gttgttttattaaagaaaggattcaattcaattgaagtaaatcatctctgagcttcccttctttgatgatggatctgttgtagtaattttacaccctatggctttttaaa

SEQ ID NO: 29292 - DNA, 110 bp, synthetic construct
  source 1..110: mol_type = other DNA
actatagataactcaagagagagaatcactgagttttcaccaaaacatttatgcacttaagtggccccgaatccctaggattttgttgtgttacagttagaaacagtact

SEQ ID NO: 29293 - DNA, 110 bp, synthetic construct
  source 1..110: mol_type = other DNA
ccacaaagtagaagaggttctaccctccaccatctcaggaagctagagccactgtttctgtacaacacacatgtcttgggtcagattcccagaagctgaccctgaggtaa

SEQ ID NO: 29294 - DNA, 110 bp, synthetic construct
  source 1..110: mol_type = other DNA
agcacttacagtggaagccagtctgaaaacagcaggaattcaacagcactggagggggtgggggtgagagagctacagagaaggacagtttaaaggccttctggttacag

SEQ ID NO: 29295 - DNA, 110 bp, synthetic construct
  source 1..110: mol_type = other DNA
gggtgggggtgagagagctacagagaaggacagtttaaaggccttctggttacagttaccaggtccttagaggagaaggtagagatattcttggaacctgaatatttgcc

SEQ ID NO: 29296 - DNA, 110 bp, synthetic construct
  source 1..110: mol_type = other DNA
tcatcagcaacttcttattgctggcagcccatgtcagctgcattaagaacacatgcagttattaagtaagaggctgatagtctgttgagagtagaacagatagcaaatgc

SEQ ID NO: 29297 - DNA, 110 bp, synthetic construct
  source 1..110: mol_type = other DNA
atgatctggtgttgccacaagctgcagcataggttgcagacatggatcagatccagtgtcgtcgtagctgtggcacaggcctacagccgtgactccgatttgaccccagc

SEQ ID NO: 29298 - DNA, 110 bp, synthetic construct
  source 1..110: mol_type = other DNA
gtgtcgtcgtagctgtggcacaggcctacagccgtgactccgatttgaccccagcctaaaattctatatgctgcagttgcagctgttaaaagaaaaaagaaaaaaaagaa

SEQ ID NO: 29299 - DNA, 110 bp, synthetic construct
  source 1..110: mol_type = other DNA
cttcacatcaacagcatgtgggcagacagcttgctatatgatcaggattttgcctgctctttgcccttccaggaaggagtcaataaacccatggaagtttctcagtaaca

SEQ ID NO: 29300 - DNA, 110 bp, synthetic construct
  source 1..110: mol_type = other DNA
gggctaaaccatatttcatcagtgtcttccttcactatttttttctggtatctgtcttcctccatagctatttcgttgttttattgaagtgcatgctcagttattactga

SEQ ID NO: 29301 - DNA, 110 bp, synthetic construct
  source 1..110: mol_type = other DNA
aagagataaagaaagaggcagccagcaaggcagaagaaacagtgtctttcttgtgagggaagtatgaaggaagccagagagcgacttctctttaggaagacactctttga

SEQ ID NO: 29302 - DNA, 110 bp, synthetic construct
  source 1..110: mol_type = other DNA
aaataggccttttctcttgaaaattgtgcgtttaaatgacattgatcttagttaattgtccaaaatgcatcttcgtcaagatctcagaggcctaggtgatttattacatt

SEQ ID NO: 29303 - DNA, 110 bp, synthetic construct; identical to SEQ ID NO: 29302
  source 1..110: mol_type = other DNA

SEQ ID NO: 29304 - DNA, 110 bp, synthetic construct
  source 1..110: mol_type = other DNA
cactttgcttacccatggatcctgttcagcaggtccctgagggtctgtacctctaaacaagctctcaagtgatattcatggatgctgctggcaatggaccacattgtgtg

SEQ ID NO: 29305 - DNA, 110 bp, synthetic construct
  source 1..110: mol_type = other DNA
tcctatagctaatacataggtgtataacctataatatattgtgaaaaactgaaggaaagggagaagacactgtttccttggaaaggattctcctatttttccaggattcc

SEQ ID NO: 29306 - DNA, 110 bp, synthetic construct; identical to SEQ ID NO: 29305
  source 1..110: mol_type = other DNA

SEQ ID NO: 29307 - DNA, 110 bp, synthetic construct
  source 1..110: mol_type = other DNA
tcttgagaacagaatggtagcttccttctcttttgtaccctacagcacatactgtagccccttgaatatagaatgtgtttaataaaaatctgtatatcatttagtgttgt

SEQ ID NO: 29308 - DNA, 110 bp, synthetic construct
  source 1..110: mol_type = other DNA
atgtgctctattgcatccccgctcatgaccacccccaaagaaagcctctgagagtcttactcttctttcttgaacctcagctaactgaatgagttctaataggagaatga

SEQ ID NO: 29309 - DNA, 110 bp, synthetic construct
  source 1..110: mol_type = other DNA
aaaaaaaaaaaaaaaaaaaaaagaatcagaagtcctggtttggattccagctcttcaccttccttgcttttcaccccaggaacatgaattctccaggctagtgtccatac

SEQ ID NO: 29310 - DNA, 110 bp, synthetic construct
  source 1..110: mol_type = other DNA
ctcaaccaggaatctatgtacagccaaattataaatatttgtaagagggagaataaagacatttcagacacatccctgaactgaaaaataattgcctccatgtgcccttt

SEQ ID NO: 29311 - DNA, 110 bp, synthetic construct
  source 1..110: mol_type = other DNA
aagacatttcagacacatccctgaactgaaaaataattgcctccatgtgccctttcttaggaaaccactagagaagatgatcctagaaaaggagagagttacctaagaaa

SEQ ID NO: 29312 - DNA, 110 bp, synthetic construct
  source 1..110: mol_type = other DNA
gttggagtttctaagaagaacagagggaccatatctccttcaggtaatcctcttggattctgcttccctgcacaagcttttcctgaggactaaacctatcaagcagagtt

SEQ ID NO: 29313 - DNA, 110 bp, synthetic construct
  source 1..110: mol_type = other DNA
ctagcaacacaaatgtggtatctggctcatgaggcttacagctcagtgaaacaacctccatttagaaggaggtaatcttcttaacgtcatacttactgatgaacttgttt

SEQ ID NO: 29314 - DNA, 110 bp, synthetic construct
  source 1..110: mol_type = other DNA
gagtgtaaactgcagtcagctggggtcaatttcagttcctagtgcagcagcctctacccactccccatgagtttataccacgtaagcatacttaaagccactgaaaacta

SEQ ID NO: 29315 - DNA, 110 bp, synthetic construct
  source 1..110: mol_type = other DNA
ttacctttggcccttcccctcccactaatcaccttactcccttccatctagtggaatcagctgccatgctattccttaaatatgctgggcagggagttcccattgtggct

SEQ ID NO: 29316 - DNA, 110 bp, synthetic construct
  source 1..110: mol_type = other DNA
cccctcccactaatcaccttactcccttccatctagtggaatcagctgccatgctattccttaaatatgctgggcagggagttcccattgtggctcagcagaaatgaacc

SEQ ID NO: 29317 - DNA, 110 bp, synthetic construct
  source 1..110: mol_type = other DNA
ccccagattgtggattaccagaactcataaagaaaccgagagatctctgtacagcaataggtgtaatttttagaagcgacattactgagaggggtgaaagtgttacttaa

SEQ ID NO: 29318 - DNA, 110 bp, synthetic construct
  source 1..110: mol_type = other DNA
aataggtgtaatttttagaagcgacattactgagaggggtgaaagtgttacttaaaaaccagaccgtaattcatagagtgtaactggttagcaggctgtagaaataagag

SEQ ID NO: 29319 - DNA, 110 bp, synthetic construct
  source 1..110: mol_type = other DNA
ttattcttagggattctctagtaacagaatctattaaagaaatctatgataggtcgagcattctttgtgtccaataaggtataagaattttagaatcccaactagcaata

SEQ ID NO: 29320 - DNA, 110 bp, synthetic construct
  source 1..110: mol_type = other DNA
gagcattctttgtgtccaataaggtataagaattttagaatcccaactagcaatatgtacagctagaagcctgcagtgtttcaacagcaaatgcaaaagctttcccttgg

SEQ ID NO: 29321 - DNA, 110 bp, synthetic construct
  source 1..110: mol_type = other DNA
acaacaaaatcggcatcaattaaccaaaagaactgatccttaaaatggttgccgctgtcacagaaatttcagctagtcatatgactcagaattattcctattctgataat

SEQ ID NO: 29322 - DNA, 110 bp, synthetic construct
  source 1..110: mol_type = other DNA
gcttctctctgtgtctctctctcctgcctgctttccttccctctgccatccaagcaccaagctccctgagttgggctgtgttttacttggtagacattcagcttcatttt

SEQ ID NO: 29323 - DNA, 110 bp, synthetic construct
  source 1..110: mol_type = other DNA
tatataaaatttaactcatattatttcaaaacatgcacatggacgtggatgataggaaggtggattagagagcagctctcttctaatctttaaagtcactcatgagctag

SEQ ID NO: 29324 - DNA, 110 bp, synthetic construct
  source 1..110: mol_type = other DNA
gtatgttgggagaatggaggagttgatatttttttgtggattttgaagttttaaagccagaaagagaaaacctagggaaagtgtagctatttttaactgagtgttcaaaa

SEQ ID NO: 29325 - DNA, 110 bp, synthetic construct
  source 1..110: mol_type = other DNA
agagggaaatggccaaatgggtttgtcataattttgattttaagctgttttaacaaaaggaaaccaaaaattgccaaacagtataaaatgagggatttcccattgtagct

SEQ ID NO: 29326 - DNA, 110 bp, synthetic construct; identical to SEQ ID NO: 29325
  source 1..110: mol_type = other DNA

SEQ ID NO: 29327 - DNA, 110 bp, synthetic construct
  source 1..110: mol_type = other DNA
acagttttgaaaaggttgatttttttatagtgttgaatgtctttattcaagaatatagctttccaagcaaaaaatagaattatcatttgatccagcagtcccactcctag

SEQ ID NO: 29328 - DNA, 110 bp, synthetic construct
  source 1..110: mol_type = other DNA
tatagtgttgaatgtctttattcaagaatatagctttccaagcaaaaaatagaattatcatttgatccagcagtcccactcctaggcatctatccagagaagaccatgac

SEQ ID NO: 29329 - DNA, 110 bp, synthetic construct
  source 1..110: mol_type = other DNA
aatgcaaacacctattatctattttccatatcccatgaatttaccttcaactggtgtgtacccaaatgtgatttaaaggatctagattttggtactgcacactaagctaa

SEQ ID NO: 29330 - DNA, 110 bp, synthetic construct
  source 1..110: mol_type = other DNA
gtgtggttagagtagaagtgagaagagtgttctctggtcagttcaggtggagtctgggcacagaagctttgtggattggagagttgccaagcatcagagaatgaacaaag

SEQ ID NO: 29331 - DNA, 110 bp, synthetic construct
  source 1..110: mol_type = other DNA
gggcacagaagctttgtggattggagagttgccaagcatcagagaatgaacaaaggaaaactgtggcctcttagagccctgcagaggcaggaagttatgcccctcccctt

SEQ ID NO: 29332 - DNA, 110 bp, synthetic construct
  source 1..110: mol_type = other DNA
actgcattctagagctaagacctggcaaagccaagaatatatcccaagaagaatatatgttctcactagcactgctagctgaatgattgaataatagatggtaggtggta

SEQ ID NO: 29333 - DNA, 110 bp, synthetic construct
  source 1..110: mol_type = other DNA
tatgttctcactagcactgctagctgaatgattgaataatagatggtaggtggtaaaacatgcttaaagttctgttttgttatgcaaattacaggtttacctttcctgct

SEQ ID NO: 29334 - DNA, 110 bp, synthetic construct
  source 1..110: mol_type = other DNA
ttttgaagaatgacaggtctgtgttgtattagagacagatttctccctgcccccgcctcacctccagatattgtagtcttcttactcacatttcttttagttttactttg

SEQ ID NO: 29335 - DNA, 110 bp, synthetic construct
  source 1..110: mol_type = other DNA
cctgcccccgcctcacctccagatattgtagtcttcttactcacatttcttttagttttactttgaaaaagagaaatcattgaaataagtgattgtcattattcatttct

SEQ ID NO: 29336 - DNA, 110 bp, synthetic construct
  source 1..110: mol_type = other DNA
aaaatacagtagtatgtggaacagagctgtttgggcagtgacaaagattggatgttcatgtgtagccatgaataaccaaaatcaaaggtgtgattagatcaaccaacttc

SEQ ID NO: 29337 - DNA, 110 bp, synthetic construct
  source 1..110: mol_type = other DNA
gccctcagggcattccagttccctccaagcccttttggagccagcttttcattctgatgtggccctacttccaaggaaaccttagaaaacctttctgttggtgatgtcac

SEQ ID NO: 29338 - DNA, 110 bp, synthetic construct
  source 1..110: mol_type = other DNA
tcactaccagagggcagatactaaccccagggtcaccatagatcctcagcttgtctcctcagggctagccacactccagcaggcggacaccatcccttggaccttcttgc

SEQ ID NO: 29339 - DNA, 110 bp, synthetic construct
  source 1..110: mol_type = other DNA
ccatcatcccttttcactttgagttcctaggcaagagaacgctgggtcgaggtgcgttaacaccatctgacatcagctccttgaagggctggcaagagccggtttcttta

SEQ ID NO: 29340 - DNA, 110 bp, synthetic construct
  source 1..110: mol_type = other DNA
ttctggatcttatttaaccctcctcctttaactgatttcctctgactcagctctggtagagaaggagggacactgcctcatattgctgggtaaaagaactccaagtaccc

SEQ ID NO: 29341 - DNA, 110 bp, synthetic construct
  source 1..110: mol_type = other DNA
gtagagaaggagggacactgcctcatattgctgggtaaaagaactccaagtaccctactggaccactcttctcacccaaagataagttcttgttgctgctggtgggagtg

SEQ ID NO: 29342 - DNA, 110 bp, synthetic construct
  source 1..110: mol_type = other DNA
attgtggctcagtgtgttaccaacctgactaatatccatgaggcatgtttgatccctggctttgctcagtgagtgaaggatctagcactgctacgagctatgggtagtcc

SEQ ID NO: 29343 - DNA, 110 bp, synthetic construct
  source 1..110: mol_type = other DNA
ctggctttgctcagtgagtgaaggatctagcactgctacgagctatgggtagtcccctacagctcctattcaacccctagcctgggaacttcatatgcagcaggtgcagt

SEQ ID NO: 29344 - DNA, 110 bp, synthetic construct
  source 1..110: mol_type = other DNA
ccatttattttcccatctccatgtctttgcatttttctttccccttccagacatgccttttccacctggcctttcaagtctactcacctttcaagactcctctgaaatgt

SEQ ID NO: 29345 - DNA, 110 bp, synthetic construct
  source 1..110: mol_type = other DNA
aataaatgctgtagcataaaagtaatcggtattttctctaaatagatcatatttatgagttaatttctgaaagcattcttggtaggacagtttacagagtcatgggcttt

SEQ ID NO: 29346 - DNA, 110 bp, synthetic construct; identical to SEQ ID NO: 29345
  source 1..110: mol_type = other DNA

SEQ ID NO: 29347 - DNA, 110 bp, synthetic construct
  source 1..110: mol_type = other DNA
acataagactttttgtttttacctccatgacttcttttattcagttgccttaacattctaatgtccttttctctaattctccacttctcttaagggtcagtgtgatagaa

SEQ ID NO: 29348 - DNA, 110 bp, synthetic construct
  source 1..110: mol_type = other DNA
ttctaatgtccttttctctaattctccacttctcttaagggtcagtgtgatagaaagaatataaccttcagtcatgatgcagcagaatccaaactatgctcttcctctta

SEQ ID NO: 29349 - DNA, 110 bp, synthetic construct
  source 1..110: mol_type = other DNA
gagaaaatgacagtttttagcagctcctgccccatatggaagaactctcccgtcccttttagccctaagatattgtgattactttgcccatctacttcatattgatgact

SEQ ID NO: 29350 - DNA, 110 bp, synthetic construct
  source 1..110: mol_type = other DNA
aactaagaagatgtcttacctcattgggactctggaatgagatggctgaaatcagagctttgcaaaaaaggacaccagagaccatttggttcccaggaaaactttatggc

SEQ ID NO: 29351 - DNA, 110 bp, synthetic construct
  source 1..110: mol_type = other DNA
agctttgcaaaaaaggacaccagagaccatttggttcccaggaaaactttatggccaggaaatttactgaaaaaataagaaacataggagcagctctgcctttggagagt

SEQ ID NO: 29352 - DNA, 110 bp, synthetic construct
  source 1..110: mol_type = other DNA
gtatatgtcaggtttgtcactggagtcttagtttgggcttttattaaaaaaatatcctagactgggtggcttttaagtatagaaatttattttttcacagctaatgaggc

SEQ ID NO: 29353 - DNA, 110 bp, synthetic construct
  source 1..110: mol_type = other DNA
cctagactgggtggcttttaagtatagaaatttattttttcacagctaatgaggccagtacatccaagatcaaggtgccagcaaattcggtgtctggcaagggcctgtgc

SEQ ID NO: 29354 - DNA, 110 bp, synthetic construct
  source 1..110: mol_type = other DNA
catgatttaaatcctcacctcttaataacctaactgtttcttccctgtggagaggttggcctgggaggaaataagtatctctgttctccttactgcccaaatctgtccta

SEQ ID NO: 29355 - DNA, 110 bp, synthetic construct
  source 1..110: mol_type = other DNA
attttccttccccttgaatttatagcccccggggagatgaaattagcttagatgttaatgaactttggtctccagcacagaaaaattgcagtggaatataaggacagttt

SEQ ID NO: 29356 - DNA, 110 bp, synthetic construct
  source 1..110: mol_type = other DNA
tttattgtgttagccatttaatcctcataacagtcttaaaaggcaggcactctttatttatttttttttctttcgaaggccacacctgaggcatatagaagttcctaggc

SEQ ID NO: 29357 - DNA, 110 bp, synthetic construct
  source 1..110: mol_type = other DNA
atttaatcctcataacagtcttaaaaggcaggcactctttatttatttttttttctttcgaaggccacacctgaggcatatagaagttcctaggctaggggtcacattgg

SEQ ID NO: 29358 - DNA, 110 bp, synthetic construct
  source 1..110: mol_type = other DNA
cagcagttattcttctggactccttcattgtttccgtaactcctgccagtgactccttccggcccagcccttcatcccaccaccattattcctgtccttcctccagtccc

SEQ ID NO: 29359 - DNA, 110 bp, synthetic construct
  source 1..110: mol_type = other DNA
gtttgcctgctctagaatcacatgtggatatttacatcttaaggaatccaggagacattcactactatgttctctcactcccctgagttctcacttgaaaggtcatctta

SEQ ID NO: 29360 - DNA, 110 bp, synthetic construct
  source 1..110: mol_type = other DNA
caccctgaatgttgatgactagcaggaatcatgggacagaatagacagaatcacaatcagaatgttcttttttttttttctttttgtttggactcttatgccccttaaat

SEQ ID NO: 29361 - DNA, 110 bp, synthetic construct
  source 1..110: mol_type = other DNA
gcttcgcctttgaggggctggagagcagagaggcaaccagtacaggttgtgaggatgttttggccgagagctaaaataagccgcatttatagtgcagcaggaacataatg

SEQ ID NO: 29362 - DNA, 110 bp, synthetic construct
  source 1..110: mol_type = other DNA
tgttttggccgagagctaaaataagccgcatttatagtgcagcaggaacataatggtgattaagccttagatttggatgtggttttcattccaaagaactcaaagtatgg

SEQ ID NO: 29363 - DNA, 110 bp, synthetic construct
  source 1..110: mol_type = other DNA
tatccccagtcacatcctgaatgtttttatctcaccacaaaatattaagtgtatatcttcccagggaatcgatctcaggaacaagatgaggataactaatcaaatgaaca

SEQ ID NO: 29364 - DNA, 110 bp, synthetic construct
  source 1..110: mol_type = other DNA
agtgctgccattttcttctctactaggatcaagtgacccaatagcagacatcttagacttttttccacaagtccttgaaaacgactcagggagctctcactgagacacaa

SEQ ID NO: 29365 - DNA, 110 bp, synthetic construct
  source 1..110: mol_type = other DNA
gacttttttccacaagtccttgaaaacgactcagggagctctcactgagacacaatgagatctgtggcatcttgggagcactagaaagcaggtttgatccccagcccacc

SEQ ID NO: 29366 - DNA, 110 bp, synthetic construct
  source 1..110: mol_type = other DNA
agagcctctacatgcactactgtcatttctcttttgcttgaaaattgggaccacgtactcgagctctgatgctttacaggaacagaattgtgatgtctccctaatatgaa

SEQ ID NO: 29367 - DNA, 110 bp, synthetic construct
  source 1..110: mol_type = other DNA
ggaaaaagggggggatgaggaaaagtatataaatttaaaattaacgcattaagagtgatcggcagctgaatatacctctaacttaaaggtataacatcaattatattata

SEQ ID NO: 29368 - DNA, 110 bp, synthetic construct; identical to SEQ ID NO: 29367
  source 1..110: mol_type = other DNA

SEQ ID NO: 29369 - DNA, 110 bp, synthetic construct; identical to SEQ ID NO: 29367
  source 1..110: mol_type = other DNA

SEQ ID NO: 29370 - DNA, 110 bp, synthetic construct; identical to SEQ ID NO: 29367
  source 1..110: mol_type = other DNA

SEQ ID NO: 29371 - DNA, 110 bp, synthetic construct
  source 1..110: mol_type = other DNA
gaaatggtgagaagaggaataatacatgaagttccttccagagataggcctaatgccctatgaatttttcccccttggacaacaaatgtggtgcttcaagccgtattgac

SEQ ID NO: 29372 - DNA, 110 bp, synthetic construct
  source 1..110: mol_type = other DNA
ccctatgaatttttcccccttggacaacaaatgtggtgcttcaagccgtattgaccaaatcattgaaatatcaattgttattgagttagagctgaacaaaaaaaaaattt

SEQ ID NO: 29373 - DNA, 110 bp, synthetic construct
  source 1..110: mol_type = other DNA
tcttattcagaactcagttgtgactatcccatttttcagatcagttttacttttatatttctttattgacatttgaaagactattctatttgaagaaagtggtccaaggc

SEQ ID NO: 29374 - DNA, 110 bp, synthetic construct
  source 1..110: mol_type = other DNA
tatttctttattgacatttgaaagactattctatttgaagaaagtggtccaaggctaaaaaaggggaaaaaaataaagcaggcaaatgaaactcccaacactttgtaact

SEQ ID NO: 29375 - DNA, 110 bp, synthetic construct
  source 1..110: mol_type = other DNA
gactgttaagtccaagtatgggttcagagcaaaagagtactgttatcaattagtgatgtgtgccagggaaggagagatcaggtgtggaagagctaaatatttgccatatg

SEQ ID NO: 29376 - DNA, 110 bp, synthetic construct
  source 1..110: mol_type = other DNA
atgtgtgccagggaaggagagatcaggtgtggaagagctaaatatttgccatatgtgacttacactgtgaggaccatttgattcagcttactccagtcactaatatagag

SEQ ID NO: 29377 - DNA, 110 bp, synthetic construct
  source 1..110: mol_type = other DNA
tgaaaggaggaagaaaatgtgacaaggtggctgagtgtattggtgagcagagtcaggaggtgggggaggcagttggggtgccgaggatgcacaatttaaggaagcaactc

SEQ ID NO: 29378 - DNA, 110 bp, synthetic construct
  source 1..110: mol_type = other DNA
ggaggtgggggaggcagttggggtgccgaggatgcacaatttaaggaagcaactctcagatgccagccttgcataggtatgactcagagggtgagcacctccttaacctc

SEQ ID NO: 29379 - DNA, 110 bp, synthetic construct
  source 1..110: mol_type = other DNA
acactgagaaatgctggtccatcttactttgtgactctccttatttcctcaaagatgtcccaccctcagaagctagaagatgcttctttttctctgtaccttacttaccc

SEQ ID NO: 29380 - DNA, 110 bp, synthetic construct
  source 1..110: mol_type = other DNA
gggcatttcacatctccaacaaaaattgttagtatccatctccagagctatgctgggacaatgacttctcagggatatttctgggttggatgctaatgtgccattcacca

SEQ ID NO: 29381 - DNA, 110 bp, synthetic construct
  source 1..110: mol_type = other DNA
cattgaacacagtgggacaaaaatgtaaaataccaattagctggtatctagagcccattctagctctagtacactgcgtctgtgggggaaaaaaaaaaaatagcacttgc

SEQ ID NO: 29382 - DNA, 110 bp, synthetic construct
  source 1..110: mol_type = other DNA
cattctagctctagtacactgcgtctgtgggggaaaaaaaaaaaatagcacttgcctacaccttagattctagagtcttcatctacgacatcagggagacattggttgga

SEQ ID NO: 29383 - DNA, 110 bp, synthetic construct
  source 1..110: mol_type = other DNA
agaccagtactatccaggggtgcccttatcagctctggttcccagcattcttacaaaatgactgaatcttcatacttgaagaacatggagctggactgtggggtctggtc

SEQ ID NO: 29384 - DNA, 110 bp, synthetic construct
  source 1..110: mol_type = other DNA
gaatataggttttggttaggagtttagtcagactggtggcctcctatcttgtgccttttacaacaaatctttcaatgaggctattgtggaattttgaagctttgggaagt

SEQ ID NO: 29385 - DNA, 110 bp, synthetic construct
  source 1..110: mol_type = other DNA
ctctccaaagcatcttaaagcttagaggatgaagaactcaatgggttttcacttgcttatttgccccaaggctaaaacttgtggcatatttcaacatagttttcttaatg

SEQ ID NO: 29386 - DNA, 110 bp, synthetic construct
  source 1..110: mol_type = other DNA
gcagattgtacctgtatttctgcatttttaagtattcttaaaagaaagtgttcattcatgtaaaaaatgcaacttgccaaagtgtgtgattgcaaatgtcttgtcaatat

SEQ ID NO: 29387 - DNA, 110 bp, synthetic construct; identical to SEQ ID NO: 29386
  source 1..110: mol_type = other DNA

SEQ ID NO: 29388 - DNA, 110 bp, synthetic construct
  source 1..110: mol_type = other DNA
agtttgtagattgccttggtataattacatgtatcattgttcaagctaccaagcatgaggtcaatgcatggggaagttgaggagagataggtatagtcagctataccaga

SEQ ID NO: 29389 - DNA, 110 bp, synthetic construct
  source 1..110: mol_type = other DNA
taactacatatgcagtaggcactcaaacatgatagctggtatcactattattactattaattctttaggtgatagatacccatttttttctctccatgggaagaaatcca

SEQ ID NO: 29390 - DNA, 110 bp, synthetic construct
  source 1..110: mol_type = other DNA
gcaggtcagcaacatgccttttcttcaaatagacaggattaaaattccagctccatcactttttggctggatgaccctgagcaatattctttactttttcaagccctagt

SEQ ID NO: 29391 - DNA, 110 bp, synthetic construct
  source 1..110: mol_type = other DNA
gcagaacagtaaatatctttgagctcttctgaaggaaacaaaggcccccaacccggtggagaacagtaacttcgggcagagcatgcgattcctcaccaccaatcagaaga

SEQ ID NO: 29392 - DNA, 110 bp, synthetic construct
  source 1..110: mol_type = other DNA
ctgagcaatgtaataaaactaaaaggggcggggttgctttataagccttttgattaaattcaatggtgctaaacggactgacacactttaataggcaaaagcgtttatga

SEQ ID NO: 29393 - DNA, 110 bp, synthetic construct
  source 1..110: mol_type = other DNA
aaattcaatggtgctaaacggactgacacactttaataggcaaaagcgtttatgaggaagaactgccttttctgactttggctcctaaaaaaaacaaaatcccgtctcag

SEQ ID NO: 29394 - DNA, 110 bp, synthetic construct
  source 1..110: mol_type = other DNA
tctcacaactccatgggtcagaagtctggcagggcactcaccatggctaaaatccagatgtcagcagctccatttatttctggaatctctagtctctagggaagaatctg

SEQ ID NO: 29395 - DNA, 110 bp, synthetic construct
  source 1..110: mol_type = other DNA
agatgtcagcagctccatttatttctggaatctctagtctctagggaagaatctgttttcagtccctttggggtgtcagcagcattcagttccttgaagttgcaggaccg

SEQ ID NO: 29396 - DNA, 110 bp, synthetic construct
  source 1..110: mol_type = other DNA
gtgtacatctctttccagattccacctccactcaaggcacagcggccccaactctgctgaaggtgacagtcagtccctgggaacacacagctgagcccttgctgaaggaa

SEQ ID NO: 29397 - DNA, 110 bp, synthetic construct
  source 1..110: mol_type = other DNA
gctgaaggtgacagtcagtccctgggaacacacagctgagcccttgctgaaggaaggaccacacccacttcctctctggctaaaaggccatgctgggaccagggtgagga

SEQ ID NO: 29398 - DNA, 110 bp, synthetic construct
  source 1..110: mol_type = other DNA
ggtgagctggcatggctgggggaggggcagaggaggaaatcaactccatctacccaaggacttgcagctgttattgcagacggctccggagggcccattataagctgctg

SEQ ID NO: 29399 - DNA, 110 bp, synthetic construct
  source 1..110: mol_type = other DNA
ccatctacccaaggacttgcagctgttattgcagacggctccggagggcccattataagctgctgtgctatgctgtgcgtccctggagcgctcgtcacgtggcgtctccc

SEQ ID NO: 29400 - DNA, 110 bp, synthetic construct
  source 1..110: mol_type = other DNA
ttaaaccaccgctctatgctgctcaatcagtgtgaagaggtttatagagttgcatttctggattttaaaaatcagcagataattccttttgagccaacactatgtatatt

SEQ ID NO: 29401 - DNA, 110 bp, synthetic construct
  source 1..110: mol_type = other DNA
gtgctgtgagttctacgttttggagaattcaaatttttgagctggtaaaagccagtctttactctctaatttaaaaatatggaaataattcaaacacacctttagaaatt

SEQ ID NO: 29402 - DNA, 110 bp, synthetic construct
  source 1..110: mol_type = other DNA
tttgaaatctgctttagggctccacattctgaattcaaccatactttagtaagcccatcctcagcttcaccgaccacacccaccactacaccacaaacacagacatacac

SEQ ID NO: 29403 - DNA, 110 bp, synthetic construct
  source 1..110: mol_type = other DNA
tggagctctcatgccctaggaaagcagaacccaatggcaagaagacaagacttcctcttctagcctggcaagagttcagtcaatgaaaagctactctacgtggaactctc

SEQ ID NO: 29404 - DNA, 110 bp, synthetic construct
  source 1..110: mol_type = other DNA
taacctgtcttaaatacctacatacttcttaaaccaccacttttgccaagagactctactgcctggaattaagagaaatgatgatcatccttaggcaaaaatcaacccag

SEQ ID NO: 29405 - DNA, 110 bp, synthetic construct
  source 1..110: mol_type = other DNA
tcatgtttgattttaattatgaattgcacgctctgtcacgataagcacttgtttaggctcacataatgctgtttttgcactgctttcttcccccctgaagtacgtggcag

SEQ ID NO: 29406 - DNA, 110 bp, synthetic construct
  source 1..110: mol_type = other DNA
gacggcctgtctcctaacactgtctcatcaagtttcctcacatctgtggtaacaaatgttaccttgaagactttttattttgcttttctttgattaggagaggagtgagc

SEQ ID NO: 29407 - DNA, 110 bp, synthetic construct
  source 1..110: mol_type = other DNA
atgttaccttgaagactttttattttgcttttctttgattaggagaggagtgagcattctttcctccattttaaaatcatcagtagttccatttccggggacaatctggt

SEQ ID NO: 29408 - DNA, 110 bp, synthetic construct
  source 1..110: mol_type = other DNA
ctttgtctcccactttctttccaatactcaaccctagtgtgtgtcctccagaacagcttctcagagaccctggctcttgtgggtttgtctccatgcctggagaaccaggc

SEQ ID NO: 29409 - DNA, 110 bp, synthetic construct
  source 1..110: mol_type = other DNA
gctgcctaagcaagaccagatctgggcaggaaaaccatgaggctaaccttgtaggtgttttagatttatagtatgcatctatctacctaatttatttaactcaatcctga

SEQ ID NO: 29410 - DNA, 110 bp, synthetic construct
  source 1..110: mol_type = other DNA
cagaatgtgaggaatgaactcatattctttcctcccccatgctcccagctctcgagtcccagcaaatacatgtgtcccaaagcagtcaggacttgggcctggactgtgca

SEQ ID NO: 29411 - DNA, 110 bp, synthetic construct
  source 1..110: mol_type = other DNA
ctggcttcaccttgccaactaaatttttaaaatcaatggaaaaagcccattagactgatctcatattgaaggtattttaggaggtccattctctgcctttaggaaagtag

SEQ ID NO: 29412 - DNA, 110 bp, synthetic construct
  source 1..110: mol_type = other DNA
tgatctcatattgaaggtattttaggaggtccattctctgcctttaggaaagtagtagttgctgccaagtcgccagcatcctggaaaaggaaaagaatgttccttgagct

SEQ ID NO: 29413 - DNA, 110 bp, synthetic construct
  source 1..110: mol_type = other DNA
accacgaccaagtaaataaacaaggtatgtcaggtagtgatgtgcatccaaacagcatagcacagccatgtgatggtcagatcggattgaggaagtggggaatggctggt

SEQ ID NO: 29414 - DNA, 110 bp, synthetic construct
  source 1..110: mol_type = other DNA
catagcacagccatgtgatggtcagatcggattgaggaagtggggaatggctggtaaactggtctgttggtggagacatattggccagagacctgaaggcctatttctgg

SEQ ID NO: 29415 - DNA, 110 bp, synthetic construct
  source 1..110: mol_type = other DNA
tagttatttatgaaatgaataaaaatttaattttttctattaaggaaagctaagtaactatgccaagatccttgcataaaaatgatcccactgtcactccctcctcagtc

SEQ ID NO: 29416 - DNA, 110 bp, synthetic construct
  source 1..110: mol_type = other DNA
ctatggctttggatgccttctgctaagtacaaatgatgcattggaaatattcaataaaaggtcaagagtgattaatcatcaaattaaggcagaacatgaaagtcagagga

SEQ ID NO: 29417 - DNA, 110 bp, synthetic construct
  source 1..110: mol_type = other DNA
aaaaggtcaagagtgattaatcatcaaattaaggcagaacatgaaagtcagaggacctccttgccattgtataaaggaacagtcatatcctgcagctggaaggcagtaaa

SEQ ID NO: 29418 - DNA, 110 bp, synthetic construct
  source 1..110: mol_type = other DNA
cttcctccagaggcagtttcatggcccttataaatatccaggcttcccaaatacccactgaggtctagaggcttatagtattttgtcaacgtcaatgaaattgatttgat

SEQ ID NO: 29419 - DNA, 110 bp, synthetic construct
  source 1..110: mol_type = other DNA
cttagaggtatgcctggcacatagtaggtatgttataggtgtcgactactattaacaaggccatggactggttttgagccatgtggtattttgcaaccactgatataggg

SEQ ID NO: 29420 - DNA, 110 bp, synthetic construct
  source 1..110: mol_type = other DNA
caaggccatggactggttttgagccatgtggtattttgcaaccactgatataggggctttggctttttgtttcttaacgcccctggttacccaggaaatgtaccccatct

SEQ ID NO: 29421 - DNA, 110 bp, synthetic construct
  source 1..110: mol_type = other DNA
gagcaattattaacttacagtgacctcccaaggtcccctaggtttccttcttcatctatggtccttattgggacttctacagttacctgtgcctactccatccctatcaa

SEQ ID NO: 29422 - DNA, 110 bp, synthetic construct
  source 1..110: mol_type = other DNA
ctatggtccttattgggacttctacagttacctgtgcctactccatccctatcaatggcaagtgccaaaattcagttcacaaaggttatgccttcgaggtggtagtggac

SEQ ID NO: 29423 - DNA, 110 bp, synthetic construct
  source 1..110: mol_type = other DNA
gaaacagaaacaaacttggccaatttggtaattggactgcagacaaaactggtgaggacttagggaaagattccaggcattctggttgtgggataaccctgcgtctgatg

SEQ ID NO: 29424 - DNA, 110 bp, synthetic construct
  source 1..110: mol_type = other DNA
atatctagatgtttaatccccatctcttcttgttgcatcacagagaaaaatataagggcgatacccacattgagcaaagggcgtataaaattctgatgtgtgtgtatgta

SEQ ID NO: 29425 - DNA, 110 bp, synthetic construct
  source 1..110: mol_type = other DNA
gggcgatacccacattgagcaaagggcgtataaaattctgatgtgtgtgtatgtatgtgtgtgttcgtaaaaagagttttatatgagaataaactcttcaaatgtactga

SEQ ID NO: 29426 - DNA, 110 bp, synthetic construct
  source 1..110: mol_type = other DNA
tgacacacagccctgtgtggccaaagggtgctgctggcagtgtcaaaagcagctgagagatggctgggccagaacaggaaccttaggaatgctgttagttcaggcgagta

SEQ ID NO: 29427 - DNA, 110 bp, synthetic construct
  source 1..110: mol_type = other DNA
agagatggctgggccagaacaggaaccttaggaatgctgttagttcaggcgagtaacaacaacccatgtttatatattgctgctgccaaattgtagcaatttacagaatg

SEQ ID NO: 29428 - DNA, 110 bp, synthetic construct
  source 1..110: mol_type = other DNA
aaactatcccttaaatccaggtcccctgttaacaaactcactgcttcttccatcctaagctgagatctgcctgacaaggaaagaaatgtttatgaaactgaacacataat

SEQ ID NO: 29429 - DNA, 110 bp, synthetic construct
  source 1..110: mol_type = other DNA
aaattggtctcattcaaaggtaatattcaaacaacgtcttcatgaaagggaacaggatccactttgcttttttcccagctgtgaacactgagatatttacaatgtctcat

SEQ ID NO: 29430 - DNA, 110 bp, synthetic construct
  source 1..110: mol_type = other DNA
gatccactttgcttttttcccagctgtgaacactgagatatttacaatgtctcatcaccctttttgctcatctcccaaggtcaaaatactctcttatctatcttttcctc

SEQ ID NO: 29431 - DNA, 110 bp, synthetic construct
  source 1..110: mol_type = other DNA
ctgtcctcatttttccaccacccacaatgacagtcagccttcaagtatttaagtaatttgcccaagctctcctaaccatagagcatagacgcaataagcatagaccaata

SEQ ID NO: 29432 - DNA, 110 bp, synthetic construct
  source 1..110: mol_type = other DNA
tttacatctagcccagtgggtcatcgaagtgtggtcccgggaccacaccatctggaaataactagaaatgtaaaaaatctgcagtcctcttgcggcacaatgggttaagg

SEQ ID NO: 29433 - DNA, 110 bp, synthetic construct
  source 1..110: mol_type = other DNA
aggcatttgcggagtgtcttgtgtttttgctgcctacaggccaggcatcccagtggcgtttgtgcattttattgaccatcattcagagatgaccagaggaagctagtcca

SEQ ID NO: 29434 - DNA, 110 bp, synthetic construct
  source 1..110: mol_type = other DNA
gcgtttgtgcattttattgaccatcattcagagatgaccagaggaagctagtccaaaaagctggcgccagcaccgtgggccccattgatgagccccatgaccctgcagcc

SEQ ID NO: 29435 - DNA, 110 bp, synthetic construct
  source 1..110: mol_type = other DNA
tttaggaaggtggtgggtccccaacccaggtcgattgtggccagggccttttcctggctgaggcgccatcagccattgcttctggctcggtgcccatcccttagctgctg

SEQ ID NO: 29436 - DNA, 110 bp, synthetic construct
  source 1..110: mol_type = other DNA
ggctgaggcgccatcagccattgcttctggctcggtgcccatcccttagctgctgcgttggcctgcaggctgccagctgaagcgtggaagccgtaggtgggggagggtgt

SEQ ID NO: 29437 - DNA, 110 bp, synthetic construct
  source 1..110: mol_type = other DNA
cagggccacctgcaaggtgacccaagaggctgcctcactcccaacggctcctgtctagaaaaacactgtccagcagaacctactgtactgacggaggtggtcatctgctc

SEQ ID NO: 29438 - DNA, 110 bp, synthetic construct
  source 1..110: mol_type = other DNA
tagaaaaacactgtccagcagaacctactgtactgacggaggtggtcatctgctctgtccaaaaggaaagccactggccacgggaccgaggctttcactgatgatcttca

SEQ ID NO: 29439 - DNA, 110 bp, synthetic construct
  source 1..110: mol_type = other DNA
ccagtttctttgaaattaaggttttctgagaggccaaagggcggctgccagctaatctgctccataccacttctccccaaccccctggctgcagaacctcttcctaatat

SEQ ID NO: 29440 - DNA, 110 bp, synthetic construct
  source 1..110: mol_type = other DNA
ttgaaaccaaaaatgactggaaggtaccgaatgtgcgagtttgtcgttggtcatcagtggccatgaaggctgaagagttaacatccaattagagaaaaagagagaaattt

SEQ ID NO: 29441 - DNA, 110 bp, synthetic construct
  source 1..110: mol_type = other DNA
agtggccatgaaggctgaagagttaacatccaattagagaaaaagagagaaatttgttcattgcctagtgtatgcctcatgggtgctgaagggctggaaacttgcagagg

SEQ ID NO: 29442 - DNA, 110 bp, synthetic construct
  source 1..110: mol_type = other DNA
ctggcaaccttgtaggtatcctggccgccatgtgggcagaggttggaaccctagctaatctgaacgtggggggaggcaaaataatgcccccacagatgtccacatcccag

SEQ ID NO: 29443 - DNA, 110 bp, synthetic construct
  source 1..110: mol_type = other DNA
aagttgggacccgagagatatatcagcaactgttggtggaataggaggtgctcacatagaaacaaaaaatagtggtagccggttcagacgttgggagctaggagcttagt

SEQ ID NO: 29444 - DNA, 110 bp, synthetic construct
  source 1..110: mol_type = other DNA
atagaaacaaaaaatagtggtagccggttcagacgttgggagctaggagcttagtcttcatcttagctatgctgggatgaagagctattgtctaaagatggtaattgagg

SEQ ID NO: 29445 - DNA, 110 bp, synthetic construct
  source 1..110: mol_type = other DNA
tagtcaggttcttaacccgatgggccacaacaggaactctgaaaagcaatatctttttaaagcctttacacttggctagatcagccatatcttcttcgtgaaggagttca

SEQ ID NO: 29446 - DNA, 110 bp, synthetic construct; identical to SEQ ID NO: 29445
  source 1..110: mol_type = other DNA

SEQ ID NO: 29447 - DNA, 110 bp, synthetic construct
  source 1..110: mol_type = other DNA
gaaaagactgtcagcccaacagtctaagcaaataagaggccaggatttcttccgtctattcactgaattgtttaacactactcattggcagggttgacatgactcaagtc

SEQ ID NO: 29448 - DNA, 110 bp, synthetic construct
  source 1..110: mol_type = other DNA
gaggataaattgctcttctgagacttcctcacagaagtgcagagcacagcctaccgtcctgagctctgagacagtccgatagattcaaagccatctgcactcaaagctat

SEQ ID NO: 29449 - DNA, 110 bp, synthetic construct
  source 1..110: mol_type = other DNA
aggcagtggtggatgaataacccaactccccacctcttgggctgcccagaagtccccagcggggctgaggcctggttgcccatagcagtaacgtgctccaagctgaccct

SEQ ID NO: 29450 - DNA, 110 bp, synthetic construct
  source 1..110: mol_type = other DNA
ccagcggggctgaggcctggttgcccatagcagtaacgtgctccaagctgacccttgggtttcttctcttctgtgtggttttgtgttttttgaggggcgggggtgctgca

SEQ ID NO: 29451 - DNA, 110 bp, synthetic construct
  source 1..110: mol_type = other DNA
aatttttacttattgacaaaggggaaccataaaatgctctcagtaaaagctgtacttgtctgatgagcctggcacatgtggttagagtggcaatcaatgcccagaccact

SEQ ID NO: 29452 - DNA, 110 bp, synthetic construct
  source 1..110: mol_type = other DNA
ttgtctgatgagcctggcacatgtggttagagtggcaatcaatgcccagaccactcctgacagctcaacagacacacccccaggtgctggtggtgctggggtccacttgg

SEQ ID NO: 29453 - DNA, 110 bp, synthetic construct
  source 1..110: mol_type = other DNA
aggagggaagacctctcccaggaagagtaacggagactttcccaatccttagctaaccctcgggttattcctccccatccccctgcctgggcagcggagttgcgggagtg

SEQ ID NO: 29454 - DNA, 110 bp, synthetic construct
  source 1..110: mol_type = other DNA
tttctttgatcttcagggtaagaagctggtgaagctcctggtggtgaaactcatgcaaatgtaaatcagggcctccctggagttatgttctcagactctccctgcagggc

SEQ ID NO: 29455 - DNA, 110 bp, synthetic construct
  source 1..110: mol_type = other DNA
cagttgacagagctgctggctgaggaacctagggactgagattaaaacagccttcaacttcttcacccctgcctgccaaataagaaaggctctgagctgaagggtggcag

SEQ ID NO: 29456 - DNA, 110 bp, synthetic construct
  source 1..110: mol_type = other DNA
tgttgccatgagctgtagtgtaggttacagacatggcttggaccctgtgttgctgtggctatggtgtaagctgcagctactgctctcattcgtcccttagcttggggact

SEQ ID NO: 29457 - DNA, 110 bp, synthetic construct
  source 1..110: mol_type = other DNA
tggctatggtgtaagctgcagctactgctctcattcgtcccttagcttggggacttccatatgccatggccctaaaaagaccaaaaaaaaaaaaaaaaaaaaaaaaaagg

SEQ ID NO: 29458 - DNA, 110 bp, synthetic construct
  source 1..110: mol_type = other DNA
aagggtgggttttcttcactcaactttgacatcttgtgccttataaaagccccatcaggggtccgagccccagctggtttcccaggaaacaaagcttgttgtaagggtgg

SEQ ID NO: 29459 - DNA, 110 bp, synthetic construct
  source 1..110: mol_type = other DNA
aggtggaggccagtcccgcccagacaggcaaccccgaggaaacagacaagctgctcaagaggatagaagtcttggggttcggaacagtcaattgtggagagtgtggactc

SEQ ID NO: 29460 - DNA, 110 bp, synthetic construct
  source 1..110: mol_type = other DNA
caagaggatagaagtcttggggttcggaacagtcaattgtggagagtgtggactcggcttcagcaagatgaccaacctgcttagtcatcagaggatacactccggggaga

SEQ ID NO: 29461 - DNA, 110 bp, synthetic construct
  source 1..110: mol_type = other DNA
ccaggcagaagcctgtgctgggacttaggctccatgctctgagccatggtcctcacctttgggcctggaaacagaaagcatcgcacagacctccttaggaagagctctgt

SEQ ID NO: 29462 - DNA, 110 bp, synthetic construct
  source 1..110: mol_type = other DNA
cctttgggcctggaaacagaaagcatcgcacagacctccttaggaagagctctgtgctgggtaacatactgtcacaaacgtgtcacaaacaacccacatgtcttacctgg

SEQ ID NO: 29463 - DNA, 110 bp, synthetic construct
  source 1..110: mol_type = other DNA
ctcctcccctgggctggttcacagggaagagaacacaaactcagagtcacaacttcttcccagccaccagctcctccttcgggggaggtctcacctcagcaaaaaggcca

SEQ ID NO: 29464 - DNA, 110 bp, synthetic construct
  source 1..110: mol_type = other DNA
acatgtatttctccaagtatatttcaggctcttattgttctttaagctatgtcatgatttaaaacaactgaccaaaaaagatttttttaaatgtaggtcatggagttctc

SEQ ID NO: 29465 - DNA, 110 bp, synthetic construct
  source 1..110: mol_type = other DNA
gtgctcctggacagcagcagcattctggctgataggatcctcctgatggatacgttcttccaaattgtcatttatctcggtgaggtaagatgatgttcgtttctttccat

SEQ ID NO: 29466 - DNA, 110 bp, synthetic construct
  source 1..110: mol_type = other DNA
ttctctgctcaaggtcttgagagcccctatcactactgtatgtcatgacccccagggacgtcaggcaggcgtggtcccctgagtctgcaatgtggcatctttattccggg

SEQ ID NO: 29467 - DNA, 110 bp, synthetic construct
  source 1..110: mol_type = other DNA
tttccctcttttccctgaggtttggatatggagggtaaaactgtgtgagctgccaccagtagttgtgtctgaggctagagtcatgagagttgttgaccaagcagagagtc

SEQ ID NO: 29468 - DNA, 110 bp, synthetic construct
  source 1..110: mol_type = other DNA
tggggcaccctctagatacccgtgtaacttccttacaacggttaggatgatgttggggttgtttcccaggatggggaatcatatatggctatctaaatttaaatagatta

SEQ ID NO: 29469 - DNA, 110 bp, synthetic construct
  source 1..110: mol_type = other DNA
gggttgtttcccaggatggggaatcatatatggctatctaaatttaaatagattatagctaaatagggagttcccaccggggtgcagcagaaacaaatctgactaggaac

SEQ ID NO: 29470 - DNA, 110 bp, synthetic construct
  source 1..110: mol_type = other DNA
gctcctaggaggaactgcccctttgccaccgaggtcttgggtgcttgggcctgaaaatcccactcagggctaatcaaacccagggaagctactgagaggtctgaaatgag

SEQ ID NO: 29471 - DNA, 110 bp, synthetic construct
  source 1..110: mol_type = other DNA
actcacagacacagaagcaagccaagcccgttcctagctgacctgtttgttacgcagcattattgtggctgtggttggctgcacagagctgttaggtgagcagacatttc

SEQ ID NO: 29472 - DNA, 110 bp, synthetic construct
  source 1..110: mol_type = other DNA
gagttgtgaccgagcaaagtgtatttcaaccagctttccaggtaattctgatgcaaactttagctttagaactgttgctctgtagttcccgtcatggctcagtggttaac

SEQ ID NO: 29473 - DNA, 110 bp, synthetic construct; identical to SEQ ID NO: 29472
  source 1..110: mol_type = other DNA

SEQ ID NO: 29474 - DNA, 110 bp, synthetic construct
  source 1..110: mol_type = other DNA
ggaactcctgcagctggggttttggtctctctctcagctttgtcagtacctacggccctttcttgctgaccaggccccctgctgccttcactatgcccaccgtcccccct

SEQ ID NO: 29475 - DNA, 110 bp, synthetic construct
  source 1..110: mol_type = other DNA
cgtcaccaattcagttcctgatgagaatccccttcccgacttgttggtggcaatttttctttgtacatgcactcagggtgagagtgctctctctctctctgcctctcctt

SEQ ID NO: 29476 - DNA, 110 bp, synthetic construct
  source 1..110: mol_type = other DNA
agttttgatgagcgcaaagccagcctgttttttgcaccactttcagaaagggctgtttcaagtcaatgacatgccggccattttcctgcatgttggggttctgtgaacca

SEQ ID NO: 29477 - DNA, 110 bp, synthetic construct
  source 1..110: mol_type = other DNA
gcagcgcccaggccatcaagcctccagcttcttcccctcccagttccctctagagcctcgctcttcttccagctggaaaatctgtgtaaagatccgctggcaaggaccag

SEQ ID NO: 29478 - DNA, 110 bp, synthetic construct
  source 1..110: mol_type = other DNA
cctcgctcttcttccagctggaaaatctgtgtaaagatccgctggcaaggaccagcccttctgtcctccctcctgttccctgttcacccacagagggtgcaaaccacagc

SEQ ID NO: 29479 - DNA, 110 bp, synthetic construct
  source 1..110: mol_type = other DNA
ccagaattccacgtcctgcctcattcctccttttatccctccctccatccattatttcctcctcctccacctgtccctcccacttcctttccccccccccccaaaccctg

SEQ ID NO: 29480 - DNA, 110 bp, synthetic construct
  source 1..110: mol_type = other DNA
cctgcctcaagccgtctgatgtttgaagtcagacaaatgaatgagaaggtctgtgcatctcaacctgtggatgttccagcatttcaacatgtgaagatctcaacagctgg

SEQ ID NO: 29481 - DNA, 110 bp, synthetic construct
  source 1..110: mol_type = other DNA
catctcaacctgtggatgttccagcatttcaacatgtgaagatctcaacagctggatctgggagtgtttcaatacgtcaccctgtgaatgtgtcagcagtgaatagcttc

SEQ ID NO: 29482 - DNA, 110 bp, synthetic construct; identical to SEQ ID NO: 29480
  source 1..110: mol_type = other DNA

SEQ ID NO: 29483 - DNA, 110 bp, synthetic construct; identical to SEQ ID NO: 29481
  source 1..110: mol_type = other DNA

SEQ ID NO: 29484 - DNA, 110 bp, synthetic construct
  source 1..110: mol_type = other DNA
tcattaatgctggtatgcttatagttgctcagattgctgcaaactgggcccccaggagcccctaaaagccagctcctgtgtttcgtggtctccatccagtgccgagccct

SEQ ID NO: 29485 - DNA, 110 bp, synthetic construct
  source 1..110: mol_type = other DNA
gggtaaagggaaggagcagcaccagaccatgctaccactggtgtaaaatcagccgtcacttatgtaaaggaaaggaggccccgtttatgcctgtgtgctcatatatgcct

SEQ ID NO: 29486 - DNA, 110 bp, synthetic construct
  source 1..110: mol_type = other DNA
tcacttatgtaaaggaaaggaggccccgtttatgcctgtgtgctcatatatgcctaagaatatttgtgcctgagcctaggagggactgggcaccctggttgttgctgcgc

SEQ ID NO: 29487 - DNA, 110 bp, synthetic construct
  source 1..110: mol_type = other DNA
atgaaggcaggcctgcagactcctggcagagtgtctacaccccataggaaatgccccacctgtacacagcaagaatttacagtgtgtgtgcacctgcctgacccccagct

SEQ ID NO: 29488 - DNA, 110 bp, synthetic construct
  source 1..110: mol_type = other DNA
ccacctgtacacagcaagaatttacagtgtgtgtgcacctgcctgacccccagctgtcagctcctgggactctgggctttttctggtccccagagcccattctgccagaa

SEQ ID NO: 29489 - DNA, 110 bp, synthetic construct
  source 1..110: mol_type = other DNA
gtgagtgacaaaatggctccccttcctgggtggagcagcccaaacagggcatagcactaagccacagggtagagactgggagcgccttcccctcagctggaagacctatg

SEQ ID NO: 29490 - DNA, 110 bp, synthetic construct
  source 1..110: mol_type = other DNA
actaagccacagggtagagactgggagcgccttcccctcagctggaagacctatgtggtagacagactgcatggctgttcccagaagtctctgcagtcttgggaagaaag

SEQ ID NO: 29491 - DNA, 110 bp, synthetic construct
  source 1..110: mol_type = other DNA
gagtctgagccatagaacttggggtgggattcagggagcagggagccctgaggatgtcaggctggacatcagaagttacttggagctcagagggaagctgggaaagcttt

SEQ ID NO: 29492 - DNA, 110 bp, synthetic construct
  source 1..110: mol_type = other DNA
gtcaggctggacatcagaagttacttggagctcagagggaagctgggaaagcttttgacgaccgttctggtagatggaaagggtccagagatacagagaccccctagcta

SEQ ID NO: 29493 - DNA, 110 bp, synthetic construct
  source 1..110: mol_type = other DNA
ggcttggaaaagtgcctgagacattcatctgggaaggaagttcagacatgttggctgtgtcaaagtaaagctgtatgtctgagtcagctattgctgtgtaacaagcagtc

SEQ ID NO: 29494 - DNA, 110 bp, synthetic construct
  source 1..110: mol_type = other DNA
tggagggagggcctcttcttcgccttctgagctgtacctgctgggttatactcaccgggtgatggttataatcgcgggggactgacccgaggcccagtcattatccagtt

SEQ ID NO: 29495 - DNA, 110 bp, synthetic construct
  source 1..110: mol_type = other DNA
ggtggatttggaaggcaggagagtcatattttagctcaatgagccctcatttatattgggtaggggaaactgcagagaactcaatggaagggccaagatccatctcatca

SEQ ID NO: 29496 - DNA, 110 bp, synthetic construct
  source 1..110: mol_type = other DNA
ttacatagcactaagtatatccttagcagatgatcatatttttgtagtgccttatgaaatgcttttacaggtaatatctccactgtttatcacatcgataataatcattc

SEQ ID NO: 29497 - DNA, 110 bp, synthetic construct
  source 1..110: mol_type = other DNA
gaaatgcttttacaggtaatatctccactgtttatcacatcgataataatcattccattggagaggtgggaagacagaagcctggagaggtcagagcaccaagttggaac

SEQ ID NO: 29498 - DNA, 110 bp, synthetic construct
  source 1..110: mol_type = other DNA
gtcagggttaaggaaccacagcttcttctggccgaggccagaagaccatgccaaggagatgaggagtaggacttccaaattcctaataatacagtgatgcagatcacaat

SEQ ID NO: 29499 - DNA, 110 bp, synthetic construct
  source 1..110: mol_type = other DNA
tttgtgctttgttttctgtttgtttgtaagcaggatgactgcaggcaggtacgtaggtaattctgaaaaggttagggtgttgatacaaaaaaaaaaaaaagaaagaaata

SEQ ID NO: 29500 - DNA, 110 bp, synthetic construct
  source 1..110: mol_type = other DNA
gggactcaggtttctatgagtctattagcaggagcagtaggagacagaaaggccaacagaaacagtgcatccagctgagcattaggcgtggttgacctgcagtcagaact

SEQ ID NO: 29501 - DNA, 110 bp, synthetic construct
  source 1..110: mol_type = other DNA
acagaaacagtgcatccagctgagcattaggcgtggttgacctgcagtcagaactgggtctaccggcctgaccacgtattagataacacacagaagtctaagtcctcaac

SEQ ID NO: 29502 - DNA, 110 bp, synthetic construct
  source 1..110: mol_type = other DNA
cttggctgagtgcctgattccctagccgccctttacctctgagacaggggaactgttggtcttaactgaccaggaagaaaatgtgtttgaccacagggaccctgctgttc

SEQ ID NO: 29503 - DNA, 110 bp, synthetic construct
  source 1..110: mol_type = other DNA
cacaattctcatacaaatagtgagtatgcatcaaagattgatctaaggccttaaggagaaaatcaataggacattaaagctgatcacaggtgacagagactggtaaataa

SEQ ID NO: 29504 - DNA, 110 bp, synthetic construct
  source 1..110: mol_type = other DNA
gagaaaatcaataggacattaaagctgatcacaggtgacagagactggtaaataaatagtggacaacagacttttaccttgaactagctttaacatcaactgtcagccag

SEQ ID NO: 29505 - DNA, 110 bp, synthetic construct
  source 1..110: mol_type = other DNA
tcaggccttggtttccttgctcataaaatgggccttaactactcaataagaaggtcagtgttgggtgtcaaaggaggtgatggaactcaatacgatattattttttatta

SEQ ID NO: 29506 - DNA, 110 bp, synthetic construct
  source 1..110: mol_type = other DNA
cagtgttgggtgtcaaaggaggtgatggaactcaatacgatattattttttattaggctttcattcccatatcatacaattgagtggttttcacagagttggacagccct

SEQ ID NO: 29507 - DNA, 110 bp, synthetic construct
  source 1..110: mol_type = other DNA
atgtagcgcttccagtgcctcttctcctggatgggcgggacgttggcgatggcacgctcatacacttctcgcacagtctctgcttcggcgtcactctccaccaagcgcaa

SEQ ID NO: 29508 - DNA, 110 bp, synthetic construct
  source 1..110: mol_type = other DNA
caatagctcttgagttttgctacctgctaagcagtgttggtttcaggaagctccagttgtgctccataaataaaaggacgtgaaccatggacaaagatgacaatgacaag

SEQ ID NO: 29509 - DNA, 110 bp, synthetic construct
  source 1..110: mol_type = other DNA
acttggtttcagacttattcactgcactgatatttattgtgctggaggtgatcgtctatgaataaatatatactgcaaagctgactcaccccaccagttgtcagctttgc

SEQ ID NO: 29510 - DNA, 110 bp, synthetic construct
  source 1..110: mol_type = other DNA
aggcactttttgaatatttataggtaatcagaatcaaagtctcaaatgttttcgctccagatttcactctcagaagagctaaagtctatttgaacattataaacatcatg

SEQ ID NO: 29511 - DNA, 110 bp, synthetic construct
  source 1..110: mol_type = other DNA
aaagaaaaatatggctatttagaaaatgaattcattttttccttagcttgtgggtaggattttgttgctctcaatcttatgcaaagtatttgacttagaggggaaatcag

SEQ ID NO: 29512 - DNA, 110 bp, synthetic construct
  source 1..110: mol_type = other DNA
tcagagacagagaactgaggaaacatctgtggcctaaagaaagatccagtgaggccgagcttccttgcctgcccacttgcctttctcacaaatgtcctatcttaataaat

SEQ ID NO: 29513 - DNA, 110 bp, synthetic construct
  source 1..110: mol_type = other DNA
accccacctagactttctctgtatgaaaaaagtatacctatgccttttgaaagccagagttcttttgaattttttaataactgcaatcaaacctaaagctaatgcagggg

SEQ ID NO: 29514 - DNA, 110 bp, synthetic construct
  source 1..110: mol_type = other DNA
agagttcttttgaattttttaataactgcaatcaaacctaaagctaatgcaggggatatccaggaaactgggctagaaagtttcagaaagttgctagaaaggctcgggaa

SEQ ID NO: 29515 - DNA, 110 bp, synthetic construct
  source 1..110: mol_type = other DNA
aagcccactccttcgctgtggctcttgggaactgcagccttgacctcagaagacactgtgacggtcacctacccaagctaaatgtcctccctgctgtctgcgtgaggtgg

SEQ ID NO: 29516 - DNA, 110 bp, synthetic construct
  source 1..110: mol_type = other DNA
tcctcacccactgaaaggacagaatgagcttcttttccagcccaagggctgtatgaaaggtacatgtttggttgtcagagataatgacgatggaaaagcccatctgatgc

SEQ ID NO: 29517 - DNA, 110 bp, synthetic construct
  source 1..110: mol_type = other DNA
caagcaacataccctttctcaagaatgtccctccatgtctgagagcatccccaaggcctggaggacactcattagaaaacaaaaccctctccccactctaagttggccct

SEQ ID NO: 29518 - DNA, 110 bp, synthetic construct
  source 1..110: mol_type = other DNA
aaagctccctcttctccgaaacactcctggtcaagctagctttggctcgaccttcctttggtcacatatgggcctggggatgaatgtgacagcaacgctacacctcgcct

SEQ ID NO: 29519 - DNA, 110 bp, synthetic construct
  source 1..110: mol_type = other DNA
aactgtgtactctagacagataaatggattgatctgaaatacatttttgtttgtcccaaagtcagcagaggagagaaagcttaattttattctccaaggagtaatctgga

SEQ ID NO: 29520 - DNA, 110 bp, synthetic construct
  source 1..110: mol_type = other DNA
ggggtccctggcccagtgtagcaggttaaggatttggtgtttccatttgtgacataggtcgcagctgcactcagatttgatccttggcctcggaacttccacatgccatg

SEQ ID NO: 29521 - DNA, 110 bp, synthetic construct
  source 1..110: mol_type = other DNA
aatcattttcacgtctgtgtgtcttttcctagctgatcaaaacaaggcccagcaaccatttaaaactctcaactgctgaatccagaaggttctcaaagtcaagtgaatca

SEQ ID NO: 29522 - DNA, 110 bp, synthetic construct
  source 1..110: mol_type = other DNA
tctggaggtaaggaaagtgtataaaggctgagtctcctgaagtcctggctggcacacagcgagctctctgtcctggacgttctgtcacccttagttccttggcatgtatt

SEQ ID NO: 29523 - DNA, 110 bp, synthetic construct
  source 1..110: mol_type = other DNA
acagcgagctctctgtcctggacgttctgtcacccttagttccttggcatgtatttgatgggaatggaataggcacaggtatttttagaagtcccaataaaggaccacag

SEQ ID NO: 29524 - DNA, 110 bp, synthetic construct
  source 1..110: mol_type = other DNA
ccgatgtggccctaaaaaccaaaccaaaacaaacaaacaacaacaaaaaagtgaaccagggccgtgagtggcctcagactcacgagtgtggcttctgggtcctgggagga

SEQ ID NO: 29525 - DNA, 110 bp, synthetic construct
  source 1..110: mol_type = other DNA
ccagggccgtgagtggcctcagactcacgagtgtggcttctgggtcctgggaggaggtgaaccccacctggggtagcagaagcacccaccccagtcggttctgctgtttc

SEQ ID NO: 29526 - DNA, 110 bp, synthetic construct
  source 1..110: mol_type = other DNA
ttaagataacatccaatagcacatacttaataaacacatgtgtcctgttatgattttcatatgcaggtattttcttttcttatgaaagccacccctgaggcagttcaggt

SEQ ID NO: 29527 - DNA, 110 bp, synthetic construct; identical to SEQ ID NO: 29526
  source 1..110: mol_type = other DNA

SEQ ID NO: 29528 - DNA, 110 bp, synthetic construct
  source 1..110: mol_type = other DNA
tctggtgctcttctcttgatttggtgcagttttaagcctgtctttaatttcaaataactttatcagagacagtcctggacacggtaggaaaggcagtgctcacgataaga

SEQ ID NO: 29529 - DNA, 110 bp, synthetic construct
  source 1..110: mol_type = other DNA
aactttatcagagacagtcctggacacggtaggaaaggcagtgctcacgataagaaatgccagggcacactgaaattccttcaaggcaggcctctggctggagctgtaca

SEQ ID NO: 29530 - DNA, 110 bp, synthetic construct; identical to SEQ ID NO: 29528
  source 1..110: mol_type = other DNA

SEQ ID NO: 29531 - DNA, 110 bp, synthetic construct; identical to SEQ ID NO: 29529
  source 1..110: mol_type = other DNA

SEQ ID NO: 29532 - DNA, 110 bp, synthetic construct
  source 1..110: mol_type = other DNA
tgcatcctcacagatgctatgttgcgttcttaactcacgagccacaacaggaactccatgatctcttgaccacagaaaccacaagcagtaataaaacagtagttggagat

SEQ ID NO: 29533 - DNA, 110 bp, synthetic construct
  source 1..110: mol_type = other DNA
ccatgatctcttgaccacagaaaccacaagcagtaataaaacagtagttggagatcacgctggtaattttagcctgttacacagcaaaacactgcatcttcttttttttt

SEQ ID NO: 29534 - DNA, 110 bp, synthetic construct
  source 1..110: mol_type = other DNA
catcatattgaatcagggccaacgtcattgactcatggtcacgtaattacctcattaaaagctctgtcttcaagagctgtcacattctgagtactggggttagagcttca

SEQ ID NO: 29535 - DNA, 110 bp, synthetic construct
  source 1..110: mol_type = other DNA
gatgagaggaggaccattcgagctggataagggagggctgtatggggagtgtgcgcacctgggccaggcggggagacactggaaaaccagcagttacgcagaacgggagc

SEQ ID NO: 29536 - DNA, 110 bp, synthetic construct
  source 1..110: mol_type = other DNA
atcgtttacagttgtgaacatacagtccattgcttagtttaattatgtccctaagtttctggggtcttcctttaaaactttaattgtctcctgaatcattcctggtaatg

SEQ ID NO: 29537 - DNA, 110 bp, synthetic construct
  source 1..110: mol_type = other DNA
atcctttgcccttactagccattgaattctttttcctcactatagagacaactgtacataaaacagcatgtaaagctgggataaatcaatgttctggggcaaatattaat

SEQ ID NO: 29538 - DNA, 110 bp, synthetic construct
  source 1..110: mol_type = other DNA
cagactgccttcatgcagttcttacaagctcagagatcaaaagggtggtagaaatggtggtttgggaattgctttctaaagacaccagaggaggaattcccgttgtggct

SEQ ID NO: 29539 - DNA, 110 bp, synthetic construct
  source 1..110: mol_type = other DNA
ttcagatgagaagggatagccttgttttctccgcaccctttccatctgaactactgttgcaagaggaatttttatcccatttcctcactggtttaattaacccagctgca

SEQ ID NO: 29540 - DNA, 110 bp, synthetic construct
  source 1..110: mol_type = other DNA
gttgcaagaggaatttttatcccatttcctcactggtttaattaacccagctgcaaccattgtttcaacactcccccacctgccagcagcctctccagcactttgcccaa

SEQ ID NO: 29541 - DNA, 110 bp, synthetic construct
  source 1..110: mol_type = other DNA
agcagttcatgtttgaagactgtcaggctggcgaattccttcttgcctggggagagggagacagctttccttccattcaggctttcagttgattggacaaagcccaccca

SEQ ID NO: 29542 - DNA, 110 bp, synthetic construct
  source 1..110: mol_type = other DNA
tacacaatgtctgaaacatcttctgggacaagacgctttctgtgtcttcgctgccaaaggcagatgaatccggagacagtttctttgggcttactgtggccctcaccatc

SEQ ID NO: 29543 - DNA, 110 bp, synthetic construct
  source 1..110: mol_type = other DNA
aaaggcagatgaatccggagacagtttctttgggcttactgtggccctcaccatccagccaagtttctttagagcgtttatgctcctgggtacatttggcacttggaact

SEQ ID NO: 29544 - DNA, 110 bp, synthetic construct
  source 1..110: mol_type = other DNA
ttctaacaatgctctgaaatgtatgttattatcttcactttacagatgaggaaactgaactttaaagcattaagtaactcacccaagccctcgtgtttctacatttatga

SEQ ID NO: 29545 - DNA, 110 bp, synthetic construct
  source 1..110: mol_type = other DNA
tgaactttaaagcattaagtaactcacccaagccctcgtgtttctacatttatgaagcctggattcgaagtaaggttggacaccaaagtgcttggtcttcctgctgtctc

SEQ ID NO: 29546 - DNA, 110 bp, synthetic construct
  source 1..110: mol_type = other DNA
ctgtcataggcttctttgcaggttaataagtataggtctgcaccgtcatttttattgattgcataatctgtaaagttgatttaatcctgctctgtgcctgtgctaaatgt

SEQ ID NO: 29547 - DNA, 110 bp, synthetic construct
  source 1..110: mol_type = other DNA
gaactccacgagcactttctgtgttccaggtattaggagttttatttcattctcgcatgagaggctggtaagtttccttattttaagaattaggcttaagcaggttacat

SEQ ID NO: 29548 - DNA, 110 bp, synthetic construct
  source 1..110: mol_type = other DNA
tttcttgttttttcatgcttagctttcattaccctacagggagtcctgaaataccttgacacaacaaataccatgttctaaaaagaaacagtccattgtcatgaaggctc

SEQ ID NO: 29549 - DNA, 110 bp, synthetic construct
  source 1..110: mol_type = other DNA
tcagctgaggctttttcagaactatggtctgaagcttttctctccttgctgtttgcagcgtaattcagacagcattatggtttaagggtgctccccacctcctcctgtgc

SEQ ID NO: 29550 - DNA, 110 bp, synthetic construct
  source 1..110: mol_type = other DNA
ataagccttacttaggagaaaagagaacatccctcttatttaacaaacaatcccgagcggcatttagatagagctgttgcatagttaccgtctaaatactccatgagaat

SEQ ID NO: 29551 - DNA, 110 bp, synthetic construct
  source 1..110: mol_type = other DNA
acccccggatggaggctagggattgaacccgcatcctcatggatcctcgttcctgctgagctgccatgggaatgccaaaagagctccttctaccacatggcttttgttga

SEQ ID NO: 29552 - DNA, 110 bp, synthetic construct
  source 1..110: mol_type = other DNA
tgccccgttccttgtggcaggctggattcctgtctcctaattaatgcttttcagtgagaaggaatgaaaccttgaattctggtcccaattgaaccggtgctcacggtgga

SEQ ID NO: 29553 - DNA, 110 bp, synthetic construct
  source 1..110: mol_type = other DNA
gactcagagaggaatagaatttaatagaaacattcctggtcccctcccctcaagatgagctgacaccaaaggcaaaaacctggtctcagattgcctataaaactggctgc

SEQ ID NO: 29554 - DNA, 110 bp, synthetic construct
  source 1..110: mol_type = other DNA
gatagggattctgaagaccaggggcaatgaaagggttccgagagcagagcagaggtggggtctaggtgtagattgcttatgcagcttccctggggtcagagcctttggaa

SEQ ID NO: 29555 - DNA, 110 bp, synthetic construct
  source 1..110: mol_type = other DNA
caacatctttaatcatatggaactttcagaatccctcattcattcatgcatccctaccctcagctatacatttatttcagagcctcatgtgttaaccagggcccttgagt

SEQ ID NO: 29556 - DNA, 110 bp, synthetic construct
  source 1..110: mol_type = other DNA
actgttcccacgtagcactgttcccaagtagtaggaagctaggattacaaggaactaagagataatctggccccaacatgcttgttttcaaagggggatgctggagttcc

SEQ ID NO: 29557 - DNA, 110 bp, synthetic construct
  source 1..110: mol_type = other DNA
cagccttgtcttccgaacactctcactggctgagttttctcgggatagttctcccgaaagaatgaaaagagaacagtgtcgcatgagcagctaagaagccccgagtcccg

SEQ ID NO: 29558 - DNA, 110 bp, synthetic construct
  source 1..110: mol_type = other DNA
gaaagaatgaaaagagaacagtgtcgcatgagcagctaagaagccccgagtcccgacaaaatcctgaaagtttttgtttgtttgttttgctttttagggccatgcctgca

SEQ ID NO: 29559 - DNA, 110 bp, synthetic construct
  source 1..110: mol_type = other DNA
gccatgacaggaatgccacctcttatcttcttagaagcaaaataaaaatcggtatagcccatgctgggggtaagggcgggggcttcttttctcaacagcttggcagggct

SEQ ID NO: 29560 - DNA, 110 bp, synthetic construct
  source 1..110: mol_type = other DNA
ccacccttccaggaaaggaaccctcgatagggcccagcctgcaccagcttccttcctccggacttctgcctccgtttcttttgtaagagaacccacgctctagtgaggtc

SEQ ID NO: 29561 - DNA, 110 bp, synthetic construct
  source 1..110: mol_type = other DNA
ctccggacttctgcctccgtttcttttgtaagagaacccacgctctagtgaggtctagattttttttgtttttttcttttcttttgaggcatatggaagttcccaggcta

SEQ ID NO: 29562 - DNA, 110 bp, synthetic construct
  source 1..110: mol_type = other DNA
tgtggccatggccatggggcttgtgggaggcctccaggcgctccatctccggccgcagaacgtgagatcagctctttaggaaacacgtctcaacgggaggcctctggctt

SEQ ID NO: 29563 - DNA, 110 bp, synthetic construct
  source 1..110: mol_type = other DNA
gagggaccctggggccctgacatcttgtacatagctcgaccccccaaaggggcggaacatcaatgccctaagcccggaaacccagcaatgggtccagattaagcagaaag

SEQ ID NO: 29564 - DNA, 110 bp, synthetic construct
  source 1..110: mol_type = other DNA
gtgggattgtcaactggcccctgagaagcagggcttttgccatttggaacctgttaggagggaagcttcaggtagggaccggtcactcctgagcaaaggcagaggccccg

SEQ ID NO: 29565 - DNA, 110 bp, synthetic construct
  source 1..110: mol_type = other DNA
aggagggaagcttcaggtagggaccggtcactcctgagcaaaggcagaggccccgggtgggggtggggagcaccgtacccccaggtctgatttgatgtgggggagggggt

SEQ ID NO: 29566 - DNA, 110 bp, synthetic construct
  source 1..110: mol_type = other DNA
atcactgacttttatctctctttcctttccctggccctgcccttgggaccagcaggaaaccagaaaattcgtccgcaacgcagcaaggtccagagaggctccgggcgggc

SEQ ID NO: 29567 - DNA, 110 bp, synthetic construct
  source 1..110: mol_type = other DNA
tggccccatggtcctcctctcagactctctcgcttctgttctatctgaaccatttgagaattagctataggatcctacatacacactccccagatattccatctggattt

SEQ ID NO: 29568 - DNA, 110 bp, synthetic construct
  source 1..110: mol_type = other DNA
gagaattagctataggatcctacatacacactccccagatattccatctggattttcttcaggacacaaggaccttccctcccgtatccacagtacaataatcaactggg

SEQ ID NO: 29569 - DNA, 110 bp, synthetic construct
  source 1..110: mol_type = other DNA
gctcttagataataaacgccctcgcaccaaagacgggggagtagagagggagctgatttcagtgccagggaagtttatgaaatgaccttgacccaaactactctgaacta

SEQ ID NO: 29570 - DNA, 110 bp, synthetic construct
  source 1..110: mol_type = other DNA
atttcagtgccagggaagtttatgaaatgaccttgacccaaactactctgaactactcaggaagcacgtgccctgagctcaccacacacacacacatcaggcagcagcca

SEQ ID NO: 29571 - DNA, 110 bp, synthetic construct
  source 1..110: mol_type = other DNA
catagcgaaaaaaaaaagcccaggttgcaaatgctctcaggcctggaatggcccaggcgagtgccctgcccttccttccaccctgcccaaggcaatggacaccagctttg

SEQ ID NO: 29572 - DNA, 110 bp, synthetic construct
  source 1..110: mol_type = other DNA
agtcactgaatgtacccatgttggtgagaagaatctcagctgtttttttgttttgtttttagggccacactcgtcacatatgaaagtttcctggttaggggtcgaattgg

SEQ ID NO: 29573 - DNA, 110 bp, synthetic construct
  source 1..110: mol_type = other DNA
ggaagggcttggtaaccttggtgacagccatgccatcctcaggaatgcacctgcgaccagcttgcctcatgttgagagcagttctttctagactgttctgtcgaattagg

SEQ ID NO: 29574 - DNA, 110 bp, synthetic construct
  source 1..110: mol_type = other DNA
ctctaggtgcacggtggaaagctttgagggctcagagtggagaggcaggagcctggagagaaggagaaacagatcgctgaacaattattgcagtaacgctatctggccct

SEQ ID NO: 29575 - DNA, 110 bp, synthetic construct
  source 1..110: mol_type = other DNA
gagagaaggagaaacagatcgctgaacaattattgcagtaacgctatctggccctgcagcctgaccagctccagaatttctgctgaggaggcttcagctatagcaatcta

SEQ ID NO: 29576 - DNA, 110 bp, synthetic construct
  source 1..110: mol_type = other DNA
acggcgtgtggaattccctcgcccagagctatgaccagtcaccagaattgaccgtgtccgtgactgccaggggttcctgaaaagacacgtcgcatgtttaccaagcacaa

SEQ ID NO: 29577 - DNA, 110 bp, synthetic construct
  source 1..110: mol_type = other DNA
ttcattaaccactgaaccacgaagggaacgcccttctctgtattctttcctggatttgaaaaacaaagtgtcatggttgtcacagttttttaaatgtggatagctctggt

SEQ ID NO: 29578 - DNA, 110 bp, synthetic construct
  source 1..110: mol_type = other DNA
ttgaaaaacaaagtgtcatggttgtcacagttttttaaatgtggatagctctggtttaggaggacttgggctccgaggctctcagagaacacagaacaagtctgggccct

SEQ ID NO: 29579 - DNA, 110 bp, synthetic construct
  source 1..110: mol_type = other DNA
ctgtcatcctgctgggaaacagtgacagaaaaacgacccagaaatccagaaggagcccacctttatgagagccaatattttctgttgtttcctcagcaaaccatttccca

SEQ ID NO: 29580 - DNA, 110 bp, synthetic construct
  source 1..110: mol_type = other DNA
cccacctttatgagagccaatattttctgttgtttcctcagcaaaccatttcccagcacttcctgaaagcagcaggggaagctcacctgggagaaagggctggctggcgc

SEQ ID NO: 29581 - DNA, 110 bp, synthetic construct
  source 1..110: mol_type = other DNA
ttctggttatccacaccttggggctaatgttaaggtccagctccacctgcagctgtggaacaggagcaacgctttcccaggctgacacagggcagcctggcccaggctcc

SEQ ID NO: 29582 - DNA, 110 bp, synthetic construct
  source 1..110: mol_type = other DNA
ctctcgcctctgagcaggtgtccagcatggcgggcacagccacatggccgcttaatcataagccccataagtgggaaatgcagctccctggtcacggtagccacatggag

SEQ ID NO: 29583 - DNA, 110 bp, synthetic construct
  source 1..110: mol_type = other DNA
ccagggcaggcctgtgggcctccccctcaccaggctgcagcccctccgattcccacaacccggccacccctcagcaccccaacccccagcaacccatgcacagcagaagg

SEQ ID NO: 29584 - DNA, 110 bp, synthetic construct
  source 1..110: mol_type = other DNA
caacccggccacccctcagcaccccaacccccagcaacccatgcacagcagaagggggttcacagaagagagaagtcctctccaagggaggcatttgtcaggcatgctcc

SEQ ID NO: 29585 - DNA, 110 bp, synthetic construct
  source 1..110: mol_type = other DNA
caaatgaaaacacctggaaatcagaaatgccgtgggcttcaaaaatatctgcagtatgcatggcatctgaaacccttcctaaaagcacagctaaatttaacctctgcaga

SEQ ID NO: 29586 - DNA, 110 bp, synthetic construct
  source 1..110: mol_type = other DNA
atgcatggcatctgaaacccttcctaaaagcacagctaaatttaacctctgcagatgaagaatttgccaaccctgtgtgtatgtgcgcttgtgtatgtgcacgcacgcac

SEQ ID NO: 29587 - DNA, 110 bp, synthetic construct
  source 1..110: mol_type = other DNA
cctacacttccccctggcagctcagaggagggaagccttcctgaagccgcacgtccttgtgttatacatgctctgatggtgcaggctggtccaggccagaaataggcagg

SEQ ID NO: 29588 - DNA, 110 bp, synthetic construct
  source 1..110: mol_type = other DNA
cttacatttttcatcaggaattacttcttatatttgagcagagttaagtagttgattttgtgcttcactggtagtgccaaagcgcttttactaatgaatatattttggct

SEQ ID NO: 29589 - DNA, 110 bp, synthetic construct
  source 1..110: mol_type = other DNA
ttttgtgcttcactggtagtgccaaagcgcttttactaatgaatatattttggctctaaaaatagatgggttactgatcttttgtttcactttgtttttgttagtatagt

SEQ ID NO: 29590 - DNA, 110 bp, synthetic construct
  source 1..110: mol_type = other DNA
ctccagccggtccctctcctgggtcagtcttgcgtggccctggtccagctccacaatcctctgcagccggtccctcaggccacggacgacctcctgcgattctgagtgca

SEQ ID NO: 29591 - DNA, 110 bp, synthetic construct
  source 1..110: mol_type = other DNA
caccctgcaggtctgcaaaccttgcagctgcccagccgagagatggaagaaagaacccagatccagcaccagagataacaacggtttgttggatggaggaccttacacat

SEQ ID NO: 29592 - DNA, 110 bp, synthetic construct
  source 1..110: mol_type = other DNA
cccagatccagcaccagagataacaacggtttgttggatggaggaccttacacatctgaagctaaagggcctcaggagttttactgtagctcctgggatggcctggctga

SEQ ID NO: 29593 - DNA, 110 bp, synthetic construct
  source 1..110: mol_type = other DNA
attattagggagatagatttatatggatatgcaggtcttcttaaggaaatgcatgccttattgggggacattgcccagccttaattagggacagctcagggatctagttg

SEQ ID NO: 29594 - DNA, 110 bp, synthetic construct
  source 1..110: mol_type = other DNA
tggctctcttgcagggaatgggtgctgccacaggcagctcttctggcactaatcgtgtgccgctagagcgagtacctgcagagtctctgggtggagccaaagcacctatg

SEQ ID NO: 29595 - DNA, 110 bp, synthetic construct
  source 1..110: mol_type = other DNA
aacaaaattatactaaagatgtcccaggtatttagacatatgccttatatcccagctagaacccatctaggctggagcagaagctagatcataagggatgagtgaagcct

SEQ ID NO: 29596 - DNA, 110 bp, synthetic construct; identical to SEQ ID NO: 29595
  source 1..110: mol_type = other DNA

SEQ ID NO: 29597 - DNA, 110 bp, synthetic construct
  source 1..110: mol_type = other DNA
agatacttccaaagtgtggttgggagaaatgagattttacagtgcttgtcaaacatgaaattgcacaaaaatcagctgaagagcttgtgaaagcagattcctggtcccca

SEQ ID NO: 29598 - DNA, 110 bp, synthetic construct
  source 1..110: mol_type = other DNA
tgaaattgcacaaaaatcagctgaagagcttgtgaaagcagattcctggtccccatctgcagactgtaattcaggacgactggggtggggcctatgactggcatttctaa

SEQ ID NO: 29599 - DNA, 110 bp, synthetic construct
  source 1..110: mol_type = other DNA
tcatccctgacatcaagtttcgtcccaccaggatgacaggagtgttgggataacggtgttgcacttcaggataccactttgcacaaacattttcaaatgctgcagcactt

SEQ ID NO: 29600 - DNA, 110 bp, synthetic construct
  source 1..110: mol_type = other DNA
catacctagcatgcttccctttagactgctcatgtgctagccaaaatacatcagcagcaagcacaccatcctggtgccagagtgagtgtttataaaaattgttcagatgc

SEQ ID NO: 29601 - DNA, 110 bp, synthetic construct
  source 1..110: mol_type = other DNA
agcaagcacaccatcctggtgccagagtgagtgtttataaaaattgttcagatgcttatttcttgtttctagaaactgccttctatctgatccagcttataaattcatgt

SEQ ID NO: 29602 - DNA, 110 bp, synthetic construct
  source 1..110: mol_type = other DNA
gaagggcataggaagtacagctccttttttaatcttccacaagctctctggacacagagcagatgtgcctgccacagccacagcaacaacagatcccagccgaatcttcg

SEQ ID NO: 29603 - DNA, 110 bp, synthetic construct
  source 1..110: mol_type = other DNA
tttttaatcttccacaagctctctggacacagagcagatgtgcctgccacagccacagcaacaacagatcccagccgaatcttcgaccctacaccacagctcacagcaat

SEQ ID NO: 29604 - DNA, 110 bp, synthetic construct
  source 1..110: mol_type = other DNA
aagccactaacaggagttgtccatccatgtcccgagatatctctctagcatgcgctttcctgacactgaatctcctaattttagcttcatttgcaatctggataaactga

SEQ ID NO: 29605 - DNA, 110 bp, synthetic construct
  source 1..110: mol_type = other DNA
cttttggtctctccctagccagtctttctagtgaacaagaggcaccgcaaacctactcttccacctgttccaggttcatgccagctctacattccctctgccctccggtc

SEQ ID NO: 29606 - DNA, 110 bp, synthetic construct
  source 1..110: mol_type = other DNA
tgatggaacagaggtcaatgccttggcccaagctgggacagggctgatggctcgttctacctccccatccatagccgaggtaccagatgccctgaggcaagttgccactg

SEQ ID NO: 29607 - DNA, 110 bp, synthetic construct
  source 1..110: mol_type = other DNA
aggcaagggggcagtgcttttacgtgtcagtcagctgttggctacaggctgccaggggagggactcataccctaccagtcacggagctccttctgggctcaaggtagttc

SEQ ID NO: 29608 - DNA, 110 bp, synthetic construct
  source 1..110: mol_type = other DNA
gggagggactcataccctaccagtcacggagctccttctgggctcaaggtagttctacagggaatgaagaagacaacagtgagccagcagcaagcaacattgacagacct

SEQ ID NO: 29609 - DNA, 110 bp, synthetic construct
  source 1..110: mol_type = other DNA
attagtgagaaataataaataattacggtattatgccactacattctggggcagtttattacacagcaaaaggaaactgatacaccccttgtcctctgcttactgactct

SEQ ID NO: 29610 - DNA, 110 bp, synthetic construct
  source 1..110: mol_type = other DNA
ttattacacagcaaaaggaaactgatacaccccttgtcctctgcttactgactctcagagtcttcccagatcatactcctcactccaaggattcaaagtcttcctcataa

SEQ ID NO: 29611 - DNA, 110 bp, synthetic construct
  source 1..110: mol_type = other DNA
gggtgaggccccctcatttttttttcccattctctctgacctctgtctccttcactgcttcttccatcctttcctgcacaccacacgagagctcctcatgtgccaggcag

SEQ ID NO: 29612 - DNA, 110 bp, synthetic construct
  source 1..110: mol_type = other DNA
tgcttcttccatcctttcctgcacaccacacgagagctcctcatgtgccaggcaggacactggggaggttgaaatgagcaggaccacatagtccctgcctccttgagtct

SEQ ID NO: 29613 - DNA, 110 bp, synthetic construct
  source 1..110: mol_type = other DNA
tttatttttctaacatattaacacctcgcccagagacatttgtcattgtccccaagatttaatctactttctcagaaatttcagaattgcttttaagaagggtgttagct

SEQ ID NO: 29614 - DNA, 110 bp, synthetic construct
  source 1..110: mol_type = other DNA
gatttaatctactttctcagaaatttcagaattgcttttaagaagggtgttagctaaaggaataaggaaacaatgtccaaaacaagatccaagcctttaaaaatattctc

SEQ ID NO: 29615 - DNA, 110 bp, synthetic construct
  source 1..110: mol_type = other DNA
atatgcttcaaaaaatattaaaaacaaagagtaactgataaatctacaaatcagtggaacctcaaattctgaagaacaaaaccaaaccacatccgttttccacaacatct

SEQ ID NO: 29616 - DNA, 110 bp, synthetic construct; identical to SEQ ID NO: 29615
  source 1..110: mol_type = other DNA

SEQ ID NO: 29617 - DNA, 110 bp, synthetic construct
  source 1..110: mol_type = other DNA
agaactaaatggccaaaccccactaaccacagacccacatgccaccagcatctgcaaggagaaagcagagggaagcctcaagttttaatctggggacagctaaaactttg

SEQ ID NO: 29618 - DNA, 110 bp, synthetic construct
  source 1..110: mol_type = other DNA
aaggagaaagcagagggaagcctcaagttttaatctggggacagctaaaactttgatgggttcggctcactgtgataggggctcatggcaagtgctaagaggctggccat

SEQ ID NO: 29619 - DNA, 110 bp, synthetic construct
  source 1..110: mol_type = other DNA
cagttacctccaattcttcttctgacattcaaatgaggtcatagtcttgctgtgggagctcagagctctcttctttagggagatcccagggagcgggagggaggaggcct

SEQ ID NO: 29620 - DNA, 110 bp, synthetic construct
  source 1..110: mol_type = other DNA
ccagctggacttcctctccgtgatccacagcctccacctgcatcctttcctcactggcggtgggacacccagcttgtggccaggagttcaaagctcagtcctggtggtgc

SEQ ID NO: 29621 - DNA, 110 bp, synthetic construct
  source 1..110: mol_type = other DNA
atctcctggcctcttacccactgcttaggtccagacatagctcatgcagggactgccctctgggcagtgttcaccccatggagctgggcctgacaaccactggagagccc

SEQ ID NO: 29622 - DNA, 110 bp, synthetic construct
  source 1..110: mol_type = other DNA
ttattgtttcattcccagctagtaatcaaataaagaaactacatttcccagccttccttgcagctagggagtggtcatgtgatatcttcaggccaatgagtgaaattcac

SEQ ID NO: 29623 - DNA, 110 bp, synthetic construct
  source 1..110: mol_type = other DNA
ccttgcagctagggagtggtcatgtgatatcttcaggccaatgagtgaaattcacagataaggctttcaggagagttctttaaaaaggagcagacttgggtgatctggtt

SEQ ID NO: 29624 - DNA, 110 bp, synthetic construct
  source 1..110: mol_type = other DNA
ctcctttttgtattggtaactgattaacctgatgttcattagggaaggcaagtccgggtggagctgattcctacagcgggaaaaggacagacaggctcagagcccagctg

SEQ ID NO: 29625 - DNA, 110 bp, synthetic construct
  source 1..110: mol_type = other DNA
tgcagtgattaagaagatttatgctggaatgagaaacacaagggttcaactctgggctctgctgaccatacagagagctgcagtgtattaacaaaagcactgggcctaag

SEQ ID NO: 29626 - DNA, 110 bp, synthetic construct
  source 1..110: mol_type = other DNA
gctctgctgaccatacagagagctgcagtgtattaacaaaagcactgggcctaagtcagtttgcctgggtttcaattcaggcccctccacttggctctccgtaactttgg

SEQ ID NO: 29627 - DNA, 110 bp, synthetic construct
  source 1..110: mol_type = other DNA
aagtggctgacagtataactgctattcaagatgtcacctgctctgagaagaatatatgcgagcacctgtgagcttctcttaactcctgggggctaagggttatggtcagg

SEQ ID NO: 29628 - DNA, 110 bp, synthetic construct
  source 1..110: mol_type = other DNA
atgcgagcacctgtgagcttctcttaactcctgggggctaagggttatggtcagggaaagccttcttgaagaggggccatacatgctgcgtcctccaacatcaagaagtc

SEQ ID NO: 29629 - DNA, 110 bp, synthetic construct
  source 1..110: mol_type = other DNA
ccttaacccactgaaccacatgagaactcctgattcattttaaagccaagaataagctgttcaggtataaacacagaatatatttgttgaaaaaaatcacaatacataac

SEQ ID NO: 29630 - DNA, 110 bp, synthetic construct
  source 1..110: mol_type = other DNA
gctgttcaggtataaacacagaatatatttgttgaaaaaaatcacaatacataaccggaatgtttctcatcctccacaggtaaccactggtcactttatgtatattcttc

SEQ ID NO: 29631 - DNA, 110 bp, synthetic construct; identical to SEQ ID NO: 29629
  source 1..110: mol_type = other DNA

SEQ ID NO: 29632 - DNA, 110 bp, synthetic construct; identical to SEQ ID NO: 29630
  source 1..110: mol_type = other DNA

SEQ ID NO: 29633 - DNA, 110 bp, synthetic construct
  source 1..110: mol_type = other DNA
ccagccacccacacacatttcccccttatctagtatgtgctctccatctttcttgtgtacctaataaccacagaatctctgatagggcaaaaatcagcacgaaataggat

SEQ ID NO: 29634 - DNA, 110 bp, synthetic construct
  source 1..110: mol_type = other DNA
tgtacctaataaccacagaatctctgatagggcaaaaatcagcacgaaataggattacatttaaccaaagaccaaccctgctggcaatcggctctttaaaactatatccc

SEQ ID NO: 29635 - DNA, 110 bp, synthetic construct
  source 1..110: mol_type = other DNA
cctatataatatctgtaataatttctgattgagctatgcccatcatgtattgactgttaaatatctttttttttggtctttttagggcctcactcatggcctatggaagt

SEQ ID NO: 29636 - DNA, 110 bp, synthetic construct
  source 1..110: mol_type = other DNA
tcttcagctaaaaatgaaagcgggggggatgttggaagttttgaggagaagctataaaattcatccaggagaatgagggaaaatgagttgaataaggaaatattttagga

SEQ ID NO: 29637 - DNA, 110 bp, synthetic construct
  source 1..110: mol_type = other DNA
catgactcaggacagaagcagtaatttgataagagcctgggccagacttaccttttggtcccagagggtcaggagacaactacaccacatcctgagagtatagcagcagc

SEQ ID NO: 29638 - DNA, 110 bp, synthetic construct
  source 1..110: mol_type = other DNA
ctttttcatcaggaggcccagcagctacgcacacccaaataacttatcccaaagagaacaagaacgcaggctgaaggtggcttccaatagcccgtcacaaatgacctccc

SEQ ID NO: 29639 - DNA, 110 bp, synthetic construct
  source 1..110: mol_type = other DNA
cctgctctcagggagaccccagtctagcctgggagacagggcccaggcagtaaagtaagaagaatgaagcttgtactgcagagttggggaccatgaggatctgtgctgga

SEQ ID NO: 29640 - DNA, 110 bp, synthetic construct
  source 1..110: mol_type = other DNA
agtgcctcagctcacggggatctgtgtagccaaagctagttaccaaaccactcagaacctcatgcatgcaacacattttctggcctcttttggccacactcacagcatgt

SEQ ID NO: 29641 - DNA, 110 bp, synthetic construct
  source 1..110: mol_type = other DNA
gcccagctttgagatgctctctgcttcctactcatgaactgacaatgagcagaacctaggccttctgccctctcccccacgaaagtgagtgagtttacttcccaagtgca

SEQ ID NO: 29642 - DNA, 110 bp, synthetic construct
  source 1..110: mol_type = other DNA
tactgggaaaggattcacttccatggtcactcacgcagtaggtgcagaattcacggggccttactgaacctcagatgtctgtggaggtctccagtgacgttggccttgag

SEQ ID NO: 29643 - DNA, 110 bp, synthetic construct
  source 1..110: mol_type = other DNA
catccacaacatgggaattagggaaagaaactagattgtttttccctctggtgttatctggccaagttccagtgaatgatggcaaagagacattaagctctggctcagag

SEQ ID NO: 29644 - DNA, 110 bp, synthetic construct
  source 1..110: mol_type = other DNA
ctgtggggctcctaggcacaaaagcttttctttgccatttcttgtgtgtaggaaagaagtttcattcagcctccataacctcccctgggttccaaaggacaagttcaaag

SEQ ID NO: 29645 - DNA, 110 bp, synthetic construct
  source 1..110: mol_type = other DNA
gtgtaggaaagaagtttcattcagcctccataacctcccctgggttccaaaggacaagttcaaagagttgctaatcagggaagggatgcaaagaccagggaggaatagtc

SEQ ID NO: 29646 - DNA, 110 bp, synthetic construct
  source 1..110: mol_type = other DNA
tggtggctcagtgggttaaggacctggtattgtcattgctgtggctccagttactgccatgggtgggttcatccctggcctaggaacttctgagtgccacccacccaaaa

SEQ ID NO: 29647 - DNA, 110 bp, synthetic construct
  source 1..110: mol_type = other DNA
gccatgggtgggttcatccctggcctaggaacttctgagtgccacccacccaaaaaaagaaagaaaagaaaggaaaggaaagggaaggaaatttgtggaaatatgttttt

SEQ ID NO: 29648 - DNA, 110 bp, synthetic construct
  source 1..110: mol_type = other DNA
gctacttatatttcctaacctacattaaaataaatagctattataataaaaagcattcatccctgagatcatctgaagaattcccatccaatgggatctgaacacagggg

SEQ ID NO: 29649 - DNA, 110 bp, synthetic construct; identical to SEQ ID NO: 29648
  source 1..110: mol_type = other DNA

SEQ ID NO: 29650 - DNA, 110 bp, synthetic construct
  source 1..110: mol_type = other DNA
ggctcctgagtgatgtccatggccagcaatgtacagccaagtcaatgagggactcaagactggtatcctggcttcatcgctgacagaaactttaagaacaggcattgaga

SEQ ID NO: 29651 - DNA, 110 bp, synthetic construct
  source 1..110: mol_type = other DNA
aagatatctggaccttctgtacaccatgcagaacaccccgattctcctctgtactgctgacatcatgctggttgagcaagacaagcatatcatggcgagcaccctggagg

SEQ ID NO: 29652 - DNA, 110 bp, synthetic construct
  source 1..110: mol_type = other DNA
gctgacatcatgctggttgagcaagacaagcatatcatggcgagcaccctggaggccttggtcagacacaggcactccagatggtgggaagtaacctctgaagattcagg

SEQ ID NO: 29653 - DNA, 110 bp, synthetic construct
  source 1..110: mol_type = other DNA
cccacatgacccccagggcacagggggactctcttattaatcccttctacttcccctccctcaaatgcttccagctctgaaacggacgcagtggggaaggaagtacagtt

SEQ ID NO: 29654 - DNA, 110 bp, synthetic construct
  source 1..110: mol_type = other DNA
ctccctcaaatgcttccagctctgaaacggacgcagtggggaaggaagtacagttcattctgcaggcaagagggaaaacctcagtctcacttcagcactgacccagcaga

SEQ ID NO: 29655 - DNA, 110 bp, synthetic construct
  source 1..110: mol_type = other DNA
gttgtgcaattttggctgtacagcaaagtgacccggctatacagatacgtacattctttgtctcctattatcttccctcctgttttatcccaagagactggacatagttc

SEQ ID NO: 29656 - DNA, 110 bp, synthetic construct; identical to SEQ ID NO: 29655
  source 1..110: mol_type = other DNA

SEQ ID NO: 29657 - DNA, 110 bp, synthetic construct
  source 1..110: mol_type = other DNA
ctccggagcctcgggtcagtgagctcttcgctctttaccgagatggaagcggggcctggggcgcgctggcccggaccctgactcaacgtgattcttcctggctggcttcg

SEQ ID NO: 29658 - DNA, 110 bp, synthetic construct
  source 1..110: mol_type = other DNA
ctggggcgcgctggcccggaccctgactcaacgtgattcttcctggctggcttcgtgcttttaagttatattttatttatcttttaaaatgagggcggcaggctatgaag

SEQ ID NO: 29659 - DNA, 110 bp, synthetic construct
  source 1..110: mol_type = other DNA
tttcatgctccccgagacttccagtcagctggagatctcatttccataagcatcgagcttgctctttttccactgttaataaaagatgtgttcccatgatacctgagtgg

SEQ ID NO: 29660 - DNA, 110 bp, synthetic construct
  source 1..110: mol_type = other DNA
ccagggagagctccaggatggagctaggctctcaaagaaggcagaggggcagaaggagtggtcaagggattaaggagaaaggtctcttgtggtcaagaccagttccatgt

SEQ ID NO: 29661 - DNA, 110 bp, synthetic construct
  source 1..110: mol_type = other DNA
tgtgtcccagcggtccagagacgccactggtcccactgccccacagtgggaattcctaggtttgccttctaatgatgctgacaggcctcaagaaaaaaacggagggaaag

SEQ ID NO: 29662 - DNA, 110 bp, synthetic construct
  source 1..110: mol_type = other DNA
ctaggtttgccttctaatgatgctgacaggcctcaagaaaaaaacggagggaaagccctaaacactggtgagttgggattatgtttatttattttctgaaaagctggctc

SEQ ID NO: 29663 - DNA, 110 bp, synthetic construct
  source 1..110: mol_type = other DNA
ttgtactcctagcctgtgccgaaaagctgggacttctctatctcataaatgagcacaggctactaaggaaaaacaaagaccctcacgttgcctagggggtcagcaaagta

SEQ ID NO: 29664 - DNA, 110 bp, synthetic construct
  source 1..110: mol_type = other DNA
caggctactaaggaaaaacaaagaccctcacgttgcctagggggtcagcaaagtaaaaaccctggatgcccaaggctattcttgaaaatcaactaaaaccctcctgaagt

SEQ ID NO: 29665 - DNA, 110 bp, synthetic construct
  source 1..110: mol_type = other DNA
gatccttaatgcagtgagcaaggccagagatcgaaccctcatcctcatgggcactagttgggttcatcaaccactgaaccgcaatgggaacccctgagctgacttttctc

SEQ ID NO: 29666 - DNA, 110 bp, synthetic construct
  source 1..110: mol_type = other DNA
agttgggttcatcaaccactgaaccgcaatgggaacccctgagctgacttttctcatgcccccagccccacttctgcctctcatgcttctcaatgcccccatccccaccc

SEQ ID NO: 29667 - DNA, 110 bp, synthetic construct; identical to SEQ ID NO: 29666
  source 1..110: mol_type = other DNA

SEQ ID NO: 29668 - DNA, 110 bp, synthetic construct; identical to SEQ ID NO: 29666
  source 1..110: mol_type = other DNA

SEQ ID NO: 29669 - DNA, 110 bp, synthetic construct
  source 1..110: mol_type = other DNA
agcatcctcaatctttccttaacagtcaggctgcagctcagcatctatccctacgattctccaaagaaggaactctctgctctcctctgcaaaccctcagagctctgagt

SEQ ID NO: 29670 - DNA, 110 bp, synthetic construct
  source 1..110: mol_type = other DNA
ttttcaaaacagttggcaaacacccttagccttacttctgtcttcctccacttggtgcccaggggctagatgcaatgtggacatatctctagaccatgcatgcccttggg

SEQ ID NO: 29671 - DNA, 110 bp, synthetic construct
  source 1..110: mol_type = other DNA
tgcccaggggctagatgcaatgtggacatatctctagaccatgcatgcccttgggatcgcagagtgggggcctcacagagccctgggggcaggtgtagctgccctaccca

SEQ ID NO: 29672 - DNA, 110 bp, synthetic construct
  source 1..110: mol_type = other DNA
aggagatgggtttctgagaaagcttgtgctttcctgataaaaagagtcagaactcactggctctgcccttttccatttcttgctgcctgggaggaaggtttaacaccagg

SEQ ID NO: 29673 - DNA, 110 bp, synthetic construct
  source 1..110: mol_type = other DNA
atgccttcctgggaggaattcacttcctccaatcacaggagtataaatacctccgctcccttaccctccaaatgggacaagtctgagctatgacctctgtgtatctctga

SEQ ID NO: 29674 - DNA, 110 bp, synthetic construct
  source 1..110: mol_type = other DNA
acagaagaggagcaggctgggagggcagtgctgcagggccgttctagctctcgtgccaaagcccttccgaacaagagggaaagtgaggcctctctcctacaggttttcaa

SEQ ID NO: 29675 - DNA, 110 bp, synthetic construct
  source 1..110: mol_type = other DNA
gctttgctgaataccttgggtgaaagctgagaagaaattcgtagtctggactgatcgctagaagctgttgcctcttcccagagcagctaccgacacgggccacggagggt

SEQ ID NO: 29676 - DNA, 110 bp, synthetic construct
  source 1..110: mol_type = other DNA
tgggaagggaccgattggctgggtcggctctttacgtgggggaagccccagctgcgagcacctgtgggccttttttcttcgattgctcatttgcccctgagtagaacctt

SEQ ID NO: 29677 - DNA, 110 bp, synthetic construct
  source 1..110: mol_type = other DNA
aggcgcacacctgttgaaaggactaaattttgtcctggtggtaagaaaaggataacatttaaaaaaacctggagctcctactgtggtgaaaagggatcggcagcatcttg

SEQ ID NO: 29678 - DNA, 110 bp, synthetic construct
  source 1..110: mol_type = other DNA
gaaaggactaaattttgtcctggtggtaagaaaaggataacatttaaaaaaacctggagctcctactgtggtgaaaagggatcggcagcatcttgggagcactgggatgc

SEQ ID NO: 29679 - DNA, 110 bp, synthetic construct
  source 1..110: mol_type = other DNA
tgctacaggagacatcgtggccctggagcccgggactgtgcctggcgcacagacgtgcataatcaacggcagttattattatccgtatcaataccactgcacggggctgt

SEQ ID NO: 29680 - DNA, 110 bp, synthetic construct
  source 1..110: mol_type = other DNA
ctgaaatgtggggagaggaccagtttgtcagtgacgttcttcccagccatcctaaggccatagtcagggcccggatgtaggataagccttgtgagcacacgccctctgtg

SEQ ID NO: 29681 - DNA, 110 bp, synthetic construct
  source 1..110: mol_type = other DNA
ggctgcttgatcagaggctctgctcacagcctgccagggcccatgttttcccctcaaggtcagcagtgtcagggccaatgtgaagctcacccttaattcataattcctca

SEQ ID NO: 29682 - DNA, 110 bp, synthetic construct
  source 1..110: mol_type = other DNA
aggcccgagagtatgtgcctttcattaattttattttggccacactcaaccatgtggagttcccgggccagcaatcacatctaagctgctgttacaacctttcccacaga

SEQ ID NO: 29683 - DNA, 110 bp, synthetic construct
  source 1..110: mol_type = other DNA
ggagttcccgggccagcaatcacatctaagctgctgttacaacctttcccacagatgtcccaatgctggattctttaacctgctgggccaggccaggaatccagcctggg

SEQ ID NO: 29684 - DNA, 110 bp, synthetic construct
  source 1..110: mol_type = other DNA
tccggccgtgatctggttgtaatgttttccctgcagatgaacctgctgaggcctctccccatccctcacagccctcctccatcctctaaaacaacaacagccgcgcttcc

SEQ ID NO: 29685 - DNA, 110 bp, synthetic construct
  source 1..110: mol_type = other DNA
gttcaggatatggcagttgattgtatgaaacaatctctgtatttactctttagggtgtcattatgggcccccagggtacctgcagcagcagtaagtatagacagtcttca

SEQ ID NO: 29686 - DNA, 110 bp, synthetic construct
  source 1..110: mol_type = other DNA
tgtcattatgggcccccagggtacctgcagcagcagtaagtatagacagtcttcaaagtggctatgaattaggcttcatttcatctacattgcccctactcaccagggtc

SEQ ID NO: 29687 - DNA, 110 bp, synthetic construct
  source 1..110: mol_type = other DNA
caggggtcagagaggtctttgatctctgccagtgtagcaaggatgtgatcccagaggttatacagaagctggccccaacttcgccatgggggcactgaggcgtgggcggt

SEQ ID NO: 29688 - DNA, 110 bp, synthetic construct
  source 1..110: mol_type = other DNA
ggttatacagaagctggccccaacttcgccatgggggcactgaggcgtgggcggtgggggcgctcacctggggccttacctgagattcctctgtgtcctccaggcctcct

SEQ ID NO: 29689 - DNA, 110 bp, synthetic construct
  source 1..110: mol_type = other DNA
tgccattctgggattacccctcaggtccttccatataggggaggggtccagatacggaagcctggagtttgtcctactagtcttcaaacgtcgtgcaagtggaggaaatc

SEQ ID NO: 29690 - DNA, 110 bp, synthetic construct
  source 1..110: mol_type = other DNA
ggaagcctggagtttgtcctactagtcttcaaacgtcgtgcaagtggaggaaatccagaagtgctcgtgaggcccctgttgagagggcccagggtttgagctgagtgcca

SEQ ID NO: 29691 - DNA, 110 bp, synthetic construct
  source 1..110: mol_type = other DNA
acatcaacaacaaagcataggtcttggtaccggacaggcctgggtttgtgtcccagattcgccacctccttctcagatgagcgacttggacgtgccactctgggccgtgt

SEQ ID NO: 29692 - DNA, 110 bp, synthetic construct
  source 1..110: mol_type = other DNA
gattcgccacctccttctcagatgagcgacttggacgtgccactctgggccgtgttctcagtgtaaagtaggatcatcctattgactttaaagaacagttgtgagaatta

SEQ ID NO: 29693 - DNA, 110 bp, synthetic construct
  source 1..110: mol_type = other DNA
gagaaccactgctctgctacacagcattcctgtcccagaatgccagcatgttttggctgctcctctggggtcaaaaccccccacctctccctgtatctcatcccatcttt

SEQ ID NO: 29694 - DNA, 110 bp, synthetic construct
  source 1..110: mol_type = other DNA
gagaatcctgcagtcaggtaaacagctgctgagagggccactgggcctctttcgggctcccttctcagcagcagccagcttggtaacccacagcatctcctgaaataagc

SEQ ID NO: 29695 - DNA, 110 bp, synthetic construct
  source 1..110: mol_type = other DNA
tcctgtgggtagtttactctgtgtgtgtgtgtgtgtgtgcgcgcgcgtgtgtgtgccttgtcccttcctggggtccgggtgctagtgtggtctgtggatctgtgggtcac

SEQ ID NO: 29696 - DNA, 110 bp, synthetic construct
  source 1..110: mol_type = other DNA
ccttgtcccttcctggggtccgggtgctagtgtggtctgtggatctgtgggtcactgcgtagcttcccaagtctgtgcatgctgaatgtggaaaaagcctcttgggggta

SEQ ID NO: 29697 - DNA, 110 bp, synthetic construct
  source 1..110: mol_type = other DNA
taacgggaactccatgagcccccagtcttatctacccatatggcctcagtaataatgatagctggcacctaccgagctcttgctatttataagacaccttatttggttga

SEQ ID NO: 29698 - DNA, 110 bp, synthetic construct
  source 1..110: mol_type = other DNA
aggcgtggaagatttccagaccatgatgcagctctgagatccatgaaagaaggagaggaagacatgaggatgggacaggaggagccataggcttggtgcagttctgagaa

SEQ ID NO: 29699 - DNA, 110 bp, synthetic construct
  source 1..110: mol_type = other DNA
cctgcatccctgacccccaccctgcccagccaaccaatctcccttctagcatctggcccagcacaggtagttttattatttggagaaaagaacccaagaggttctaaaaa

SEQ ID NO: 29700 - DNA, 110 bp, synthetic construct
  source 1..110: mol_type = other DNA
tcctttacaccaaaggctcctggaggccagaggctatgtctgctttagttttgcatccacagcccataggccactcaagagatgcttgcgttggggagtacatggatgcc

SEQ ID NO: 29701 - DNA, 110 bp, synthetic construct
  source 1..110: mol_type = other DNA
tacctgcagactcacccgtgcacctaccagtctccagggcctttctctggctcagagggaagacgttcctccatgggccctacctgtgggtcccatcccctgtagccccg

SEQ ID NO: 29702 - DNA, 110 bp, synthetic construct
  source 1..110: mol_type = other DNA
agggaagacgttcctccatgggccctacctgtgggtcccatcccctgtagccccgcaaccacctcaagccgcctatcccctcctgtgtctctaacagctcctccttctct

SEQ ID NO: 29703 - DNA, 110 bp, synthetic construct
  source 1..110: mol_type = other DNA
tcctttgtttatcatttctaacagctttattgagctgcaatttacacaccacataaatcgccctgtgcattttaattccatttacgtatatgtaaataaataactcggac

SEQ ID NO: 29704 - DNA, 110 bp, synthetic construct
  source 1..110: mol_type = other DNA
ctatttttagttagatgcacctaataaatcctctagggcactgctgtccactagaatattctgtgagggtgaaatgttctgttggggtttgtcagtacacttggccacta

SEQ ID NO: 29705 - DNA, 110 bp, synthetic construct
  source 1..110: mol_type = other DNA
atattctgtgagggtgaaatgttctgttggggtttgtcagtacacttggccactagctacatgtgactgttgagaccttgaaatgtgattagtgcaacagaggaactgaa

SEQ ID NO: 29706 - DNA, 110 bp, synthetic construct; identical to SEQ ID NO: 29704
  source 1..110: mol_type = other DNA

SEQ ID NO: 29707 - DNA, 110 bp, synthetic construct; identical to SEQ ID NO: 29705
  source 1..110: mol_type = other DNA

SEQ ID NO: 29708 - DNA, 110 bp, synthetic construct
  source 1..110: mol_type = other DNA
tgaaacccatttctccctttctcagcccacgtgctggggaggctgggggtgagcagaaggggatcccgctcagcttggcctctgctcccagaagaccagctgtgtgacct

SEQ ID NO: 29709 - DNA, 110 bp, synthetic construct
  source 1..110: mol_type = other DNA
gaaggggatcccgctcagcttggcctctgctcccagaagaccagctgtgtgaccttgagcaagtgactttccgtctcagagcctcggtttttgcatctataaaatggtgt

SEQ ID NO: 29710 - DNA, 110 bp, synthetic construct
  source 1..110: mol_type = other DNA
caggtgttgttttgctttgttttgttgtttccatttaaatcatctattgcttcctaccctggcgttgctctttatttcaagtgatcccacggggaatgagcatgaccctc

SEQ ID NO: 29711 - DNA, 110 bp, synthetic construct
  source 1..110: mol_type = other DNA
ggggatagcttacaaacagcaagttcgctagttggagcttctaatgctgtaacgaagcttattccaactcagcagcaataaatattgcaactgacaacttggaccaagtg

SEQ ID NO: 29712 - DNA, 110 bp, synthetic construct
  source 1..110: mol_type = other DNA
agcttattccaactcagcagcaataaatattgcaactgacaacttggaccaagtgcattctcctggctgagcctcaatttacctattcatgaaatgaacacagtaacact

SEQ ID NO: 29713 - DNA, 110 bp, synthetic construct
  source 1..110: mol_type = other DNA
gccctatttgtttccttcataacagacttcacaatatgtaagttctaagtatacacacatttaatttgtgaatgacacaaagaaagggactatgtctgtcttttcagctg

SEQ ID NO: 29714 - DNA, 110 bp, synthetic construct
  source 1..110: mol_type = other DNA
cacatttaatttgtgaatgacacaaagaaagggactatgtctgtcttttcagctgtgtgtccccagtgcctggcaaaatgcccaacacagtagatgctcaacaaatatat

SEQ ID NO: 29715 - DNA, 110 bp, synthetic construct
  source 1..110: mol_type = other DNA
ttcatgccccagtcctcccaggtgtttaggttcaagctctgtcctagaagttgtttttctggggtcttgaagatataatcctgagttcagaaaacattttatacctaaaa

SEQ ID NO: 29716 - DNA, 110 bp, synthetic construct
  source 1..110: mol_type = other DNA
ctccagtaaaatgttgtcttgagttctataagcccttctagcaagttgaacacaagagggttttgtagaaaccactgagtttgcagctgggcatgcagcagtgtcagggg

SEQ ID NO: 29717 - DNA, 110 bp, synthetic construct
  source 1..110: mol_type = other DNA
atgttaaacgcttagagctgtgccgcccggcacctggtagatactaaaggagtggaaactggaggctcaaggagagccggcacctataacaggaattgcacgcttggcct

SEQ ID NO: 29718 - DNA, 110 bp, synthetic construct
  source 1..110: mol_type = other DNA
aaactggaggctcaaggagagccggcacctataacaggaattgcacgcttggcctgggaagccctggtgccactagctgtttggagaagcatccctgtgcagccccaagg

SEQ ID NO: 29719 - DNA, 110 bp, synthetic construct
  source 1..110: mol_type = other DNA
agtaaatgctcttgagaaaaccaaaaggcatttattaagaggaaggtctggaggggttatagctctgggtagagcatttgacagcagaaagagtcatagaaactttaaac

SEQ ID NO: 29720 - DNA, 110 bp, synthetic construct
  source 1..110: mol_type = other DNA
gttatagctctgggtagagcatttgacagcagaaagagtcatagaaactttaaacgatagaatgtggtgaaagtaatgctgtgccagctctggtcttagctttcaagggg

SEQ ID NO: 29721 - DNA, 110 bp, synthetic construct
  source 1..110: mol_type = other DNA
ggccagggggtgaatcagagcttcagctgctggcctccgccacagccaaggcaatgctggatctgagccgaatctgcagtctatgccacagcttgggtcaacaccggatt

SEQ ID NO: 29722 - DNA, 110 bp, synthetic construct
  source 1..110: mol_type = other DNA
cagagcttcagctgctggcctccgccacagccaaggcaatgctggatctgagccgaatctgcagtctatgccacagcttgggtcaacaccggattcttaacccactgagc

SEQ ID NO: 29723 - DNA, 110 bp, synthetic construct
  source 1..110: mol_type = other DNA
atgctcatgtctaactctaatcttaaccatatgttgtcatcccagtttaatcatcaaatatttacatagccttcacaaattctaaaattgttccaggtactggcacagaa

SEQ ID NO: 29724 - DNA, 110 bp, synthetic construct
  source 1..110: mol_type = other DNA
gtactcctctccccagccaatggtgcactgactcctagcccctcagattgtctccacacagctaaccctagtcctttccttgtaactgacctccaaaggctgagtctcag

SEQ ID NO: 29725 - DNA, 110 bp, synthetic construct
  source 1..110: mol_type = other DNA
acacagctaaccctagtcctttccttgtaactgacctccaaaggctgagtctcagagcccagcccccaccagagtgtctcaggccatggtgtcctgtgtggtagaaatgt

SEQ ID NO: 29726 - DNA, 110 bp, synthetic construct
  source 1..110: mol_type = other DNA
ccttcaggagtcaacctggaggggaagcccatgcagtccctgaaagcaggcataggattttttggacagggagctccaggctctagctactcaaagcatgatccttcccc

SEQ ID NO: 29727 - DNA, 110 bp, synthetic construct
  source 1..110: mol_type = other DNA
agcgtccagatcaagtcacccaaacattctgagtctttccagatgaaactccaggcacggttattagacactttttcctgtatattttgtttatggcctcaccttcggca

SEQ ID NO: 29728 - DNA, 110 bp, synthetic construct
  source 1..110: mol_type = other DNA
tttccagatgaaactccaggcacggttattagacactttttcctgtatattttgtttatggcctcaccttcggcatatgaaagttcccaggccagggattgaagccgagt

SEQ ID NO: 29729 - DNA, 110 bp, synthetic construct
  source 1..110: mol_type = other DNA
agaccctattcttagctcctacctctgtgcccagcccagaccctgaccatacctcaaaggagctcttttcctcattcccattaaaacagtagtccccccaccaaattggg

SEQ ID NO: 29730 - DNA, 110 bp, synthetic construct
  source 1..110: mol_type = other DNA
tcacagcctgccctcctgtacctggtccccgcctgcatcggctttcctgtcctggtggccctggccaagggagaagtgacagagatgttcaggtaagagggctgggggca

SEQ ID NO: 29731 - DNA, 110 bp, synthetic construct
  source 1..110: mol_type = other DNA
ccacttggcactgttttaactgtgttccacaaaatttgttatgttgtattttcatttcatttagctcaatgtatttttttttaaatttcccttgagacttcctctttgac

SEQ ID NO: 29732 - DNA, 110 bp, synthetic construct
  source 1..110: mol_type = other DNA
ctcaaatcactaaagcagacttttagagctggaagaagcacggatacatctgatgcactctatccacaatttcagccaccactggtttgacctcactggtcattattatc

SEQ ID NO: 29733 - DNA, 110 bp, synthetic construct
  source 1..110: mol_type = other DNA
agctaaggagcttctgggggacagcaatcccaaaaggacctggcccacctcagtcctcatcgcataacagtccacattcccactggaaagctccagaaacactctgtccc

SEQ ID NO: 29734 - DNA, 110 bp, synthetic construct
  source 1..110: mol_type = other DNA
taatagtacctattttacaggattgctgtgaggatttagtaagttaatacatgaaaacactgccaacagtgtctggcttgtcataaatactcagtaattaatagctatta

SEQ ID NO: 29735 - DNA, 110 bp, synthetic construct
  source 1..110: mol_type = other DNA
tacaggattgctgtgaggatttagtaagttaatacatgaaaacactgccaacagtgtctggcttgtcataaatactcagtaattaatagctattatttttaactatgttt

SEQ ID NO: 29736 - DNA, 110 bp, synthetic construct
  source 1..110: mol_type = other DNA
agtgtgtggaggagggaactcatggaaaacaatggatgctcccaaaggggaccgagccggggtttatccaggcctcctgatgtcaccccacgaggcctgctggaaggctt

SEQ ID NO: 29737 - DNA, 110 bp, synthetic construct
  source 1..110: mol_type = other DNA
ccagtttgggtgtgccttttcagagctgtgagattcatttaaagacatagttcagagcccaggaaacacatgtaggactcttatgtgcactgcagggtcggaaggtgggg

SEQ ID NO: 29738 - DNA, 110 bp, synthetic construct
  source 1..110: mol_type = other DNA
acagagggtctaacccagtctggagggatcagggaggaccttcctgagatggttacatttaggatccaataataaacagttagctgagcaaaaggcaggaaaagagaggt

SEQ ID NO: 29739 - DNA, 110 bp, synthetic construct
  source 1..110: mol_type = other DNA
taccgctggtggtggaggaatttcctagtgtctgggggatccgcgttctatgtgctggtctatgccatcttttattttgtaaacaaggtactaccctgtatgaaggagcc

SEQ ID NO: 29740 - DNA, 110 bp, synthetic construct
  source 1..110: mol_type = other DNA
cagccccaaagcccatctcacctctggatatccatgtaaggaaaaacaatcttgtttaagttagagtttctattagatgcaaacaaaaccatcgtcactgaggcagccac

SEQ ID NO: 29741 - DNA, 110 bp, synthetic construct
  source 1..110: mol_type = other DNA
ttaagttagagtttctattagatgcaaacaaaaccatcgtcactgaggcagccacttggagggttggaggtggaggggaaggggagacagctgaaggggctttttcatcc

SEQ ID NO: 29742 - DNA, 110 bp, synthetic construct
  source 1..110: mol_type = other DNA
aaaaaaaaaaaaaatttcgttgccaacattatattccctcttactgacatagtttatttatccattcccctactgttggacacaatagtttcctattctacgcgaagctg

SEQ ID NO: 29743 - DNA, 110 bp, synthetic construct
  source 1..110: mol_type = other DNA
atttatccattcccctactgttggacacaatagtttcctattctacgcgaagctgggatgaatatacttgagtctaaatctttaggagcctctccttattttctcagaat

SEQ ID NO: 29744 - DNA, 110 bp, synthetic construct
  source 1..110: mol_type = other DNA
actttgtggccttgggcacattaatctctgtgagccttttctttatttgtaaaatgcattaatgaaccactgtgagagtccattgagacaggtatatcaggtagcttggc

SEQ ID NO: 29745 - DNA, 110 bp, synthetic construct
  source 1..110: mol_type = other DNA
gcattaatgaaccactgtgagagtccattgagacaggtatatcaggtagcttggcatagtaagtgctcagcaagctgttctgaggcatgtggggtggtttgggcaaggct

SEQ ID NO: 29746 - DNA, 110 bp, synthetic construct
  source 1..110: mol_type = other DNA
tagactgaacatacccatcttgcaaatctgagagttgaaagctccaggtagcactctagatgaatgctgatgtctccaggtgactgttcagaccacgggtggttgagtga

SEQ ID NO: 29747 - DNA, 110 bp, synthetic construct
  source 1..110: mol_type = other DNA
ctagatgaatgctgatgtctccaggtgactgttcagaccacgggtggttgagtgaccatagaacttttctacaaaggcaaacaaagaaagccaggtggacaggcagggtt

SEQ ID NO: 29748 - DNA, 110 bp, synthetic construct
  source 1..110: mol_type = other DNA
gcagggagttccttaaagagttttaaaaactcttagtaaaagaaatagatgaccacacttgaggtatccatccattaaaatccagagtttgcaaataaaagaaagggaaa

SEQ ID NO: 29749 - DNA, 110 bp, synthetic construct
  source 1..110: mol_type = other DNA
ttttttataacttagtatgttgagtggaagcttgtgttgggtttgggggtgcaagccttccatagtgtgtacctcccacccccggcagggctgtgtgcaaggctagtatg

SEQ ID NO: 29750 - DNA, 110 bp, synthetic construct
  source 1..110: mol_type = other DNA
ctaaaaccagttaccacggctgagtagcttagagttcagtgcaaccgactgcggtggcccacaccagcccgagcaccgtgctgggtggtgtatatgttaccttatcgaac

SEQ ID NO: 29751 - DNA, 110 bp, synthetic construct
  source 1..110: mol_type = other DNA
ttctaagaacttgaggtagggctaccctcacgtttattccacagaccagctcacagaggtcgagaaaggtgtgggaatttgcctcggccacccagctgtcaaagagaaga

SEQ ID NO: 29752 - DNA, 110 bp, synthetic construct
  source 1..110: mol_type = other DNA
gcacgggccgatggcagtggccgtactaacatgacccgccgatgacggatatcactgggggccgggctccaaaccacataatcctcaagctcaagatgaggaaactgcca

SEQ ID NO: 29753 - DNA, 110 bp, synthetic construct
  source 1..110: mol_type = other DNA
tgggggccgggctccaaaccacataatcctcaagctcaagatgaggaaactgccacccagagaggcaaagtgccttatgcaggccacccagccaaaagcacaggacccca

SEQ ID NO: 29754 - DNA, 110 bp, synthetic construct
  source 1..110: mol_type = other DNA
tgattgtcaccctgcctgccatagttcccttggcagggtgagatatctctcactctggcacctcaagctccccaagtggtctcattcagacccatgactgcacaatttgg

SEQ ID NO: 29755 - DNA, 110 bp, synthetic construct
  source 1..110: mol_type = other DNA
ataacaggggctgcctcctcggggtggggagaactagggaagtggggcatgggtggggagaagggagtaccgagcactgtattttctgcatcttgggcaggtattatcct

SEQ ID NO: 29756 - DNA, 110 bp, synthetic construct
  source 1..110: mol_type = other DNA
catcatccctttcagtcctcaccagcccctgctgcccagatgggggaagtgaactcagacaggtgagctcccaaggtcagatgacaactggcagaagtgagactttttct

SEQ ID NO: 29757 - DNA, 110 bp, synthetic construct
  source 1..110: mol_type = other DNA
gctgcaaacaatacttttcttactatgtccttggtgcattcctcaacatgtccggagtttaggtgaggaagagcagagaaagtgggctggggtggaggctgacgtgggaa

SEQ ID NO: 29758 - DNA, 110 bp, synthetic construct
  source 1..110: mol_type = other DNA
tctcatgatctcgctaatcctcaaagtatttgaaggggtggccttgataaagtgtggaggtctgagggacgtgaccgatatgtgaagtagagccatgtgtgctcagtagg

SEQ ID NO: 29759 - DNA, 110 bp, synthetic construct
  source 1..110: mol_type = other DNA
ggaggtctgagggacgtgaccgatatgtgaagtagagccatgtgtgctcagtaggctaataagagaagagcagtgtattctaagtcatcctggagaaatttagttgattt

SEQ ID NO: 29760 - DNA, 110 bp, synthetic construct
  source 1..110: mol_type = other DNA
gccagcagccttgctgttctctgagcactaagctcttgctcacctcagggcctcgacacatgctgttccttcaggctgccgtgtcctgccccacgtatgttataccctac

SEQ ID NO: 29761 - DNA, 110 bp, synthetic construct
  source 1..110: mol_type = other DNA
cctgtaggttgtggctggtcaaaccatttccctggttccgcccaagcttctgattacctggaagggccatttggatagtgtggcagacatcctgtatgtggacagcttcc

SEQ ID NO: 29762 - DNA, 110 bp, synthetic construct
  source 1..110: mol_type = other DNA
gggactgaatccaagctgcagctgcaacctacgtcacagctgtggcaacaccagatcctttaatacactgtaccaggctcaatcctgtgtctctgcagtgacctgagctg

SEQ ID NO: 29763 - DNA, 110 bp, synthetic construct
  source 1..110: mol_type = other DNA
tcctttaatacactgtaccaggctcaatcctgtgtctctgcagtgacctgagctgctgcagttggattttatttatttattaatttatggccgcacctgcagcatatgga

SEQ ID NO: 29764 - DNA, 110 bp, synthetic construct
  source 1..110: mol_type = other DNA
ccaggaaaatgactcatgtacgggtgtcagatggcctggggctgaatcctggtactgctgatagctggctgtgacttctggcaagtcactgttttacttggagactttcc

SEQ ID NO: 29765 - DNA, 110 bp, synthetic construct
  source 1..110: mol_type = other DNA
gccttggtccccggggccacatagccaacgatttaaagaaaacaccactgttccccgcgccaggctggggcccactcttactttccggtaactcttgtctcctctggaca

SEQ ID NO: 29766 - DNA, 110 bp, synthetic construct
  source 1..110: mol_type = other DNA
cgcgccaggctggggcccactcttactttccggtaactcttgtctcctctggacacagctgtgccccgtggtggacagtgtgctgggcgtggtgaatgagctcctggggg

SEQ ID NO: 29767 - DNA, 110 bp, synthetic construct
  source 1..110: mol_type = other DNA
tgccgggcttgttctcagcattttgcatagatgagtcatttgactcacaacatccttctgaggccagggtgttctggtcaccagctcagaaccaaagaaacaagtttgga

SEQ ID NO: 29768 - DNA, 110 bp, synthetic construct
  source 1..110: mol_type = other DNA
agcctctctcattcactggctgattgaatgtaagttttttcttctcatgctcgtccccaccgcctcccagccctactcctatctttatgtggagctgttctttgtccaga

SEQ ID NO: 29769 - DNA, 110 bp, synthetic construct
  source 1..110: mol_type = other DNA
cccaccgcctcccagccctactcctatctttatgtggagctgttctttgtccagagtcctgaaagtaggtgtaaaatggaatcgcagagtgctcacttgatgcagaatcc

SEQ ID NO: 29770 - DNA, 110 bp, synthetic construct
  source 1..110: mol_type = other DNA
tcccctttttcttgtctccttgccttgcttcacctatcaagatccaccatcaaacccccacctgcctctcctaccacccacatgctgtccctcctgccacagtagcctcc

SEQ ID NO: 29771 - DNA, 110 bp, synthetic construct
  source 1..110: mol_type = other DNA
ccccacctgcctctcctaccacccacatgctgtccctcctgccacagtagcctcctcaggacattgacaccccaggatctttgcacttgctattccccctgcctggaaca

SEQ ID NO: 29772 - DNA, 110 bp, synthetic construct
  source 1..110: mol_type = other DNA
tgggacctttcaaaagtccttagcttccattggatttgtaaaagatctgttgcccaaaagagatccagaggccccaagccaagttgacctccctagggaggccatgacgg

SEQ ID NO: 29773 - DNA, 110 bp, synthetic construct
  source 1..110: mol_type = other DNA
caggtgcagctataaaaggaaaaaaaaaataaccatgagagtgacccaggacctctaagaggagtggccccagaggaaggtggcctggggtggcagggtaaagggataag

SEQ ID NO: 29774 - DNA, 110 bp, synthetic construct
  source 1..110: mol_type = other DNA
agtgaccttcccaagttcactcagcaagttgctgcagagctagaatgaaaacatagacaccctggagttcccattgtggcgcagcaggaacggatcagactagtatccat

SEQ ID NO: 29775 - DNA, 110 bp, synthetic construct
  source 1..110: mol_type = other DNA
ctggcgaaatgctcaagcaaattgtcgctcaaagtgccaagcagagctctgtcatggtaagcctcatccacgtggcccctccactctcctatttgcttaagtctagtctc

SEQ ID NO: 29776 - DNA, 110 bp, synthetic construct
  source 1..110: mol_type = other DNA
gccccttagccacagagacccctcagcctccaacccaaacataaggcaagctgcccctgaggtgactggggatgagaagtgatccaggcaaattcattccttccaacaag

SEQ ID NO: 29777 - DNA, 110 bp, synthetic construct
  source 1..110: mol_type = other DNA
cctgaggtgactggggatgagaagtgatccaggcaaattcattccttccaacaagaaaatggcagacaaccaggactatcccctcactgcaggaaatacacatcactctc

SEQ ID NO: 29778 - DNA, 110 bp, synthetic construct
  source 1..110: mol_type = other DNA
ccggccatggactacacctatgatgtagcttacgatatgagctacatcataaacgtccattagctgaaaaatatccctaggaaaagttgagtgattcagcacactcttgg

SEQ ID NO: 29779 - DNA, 110 bp, synthetic construct
  source 1..110: mol_type = other DNA
ggtcacaaatacatccctgtagctgagaagaggctcaagacatctgtacaaagccctgagcccacggagggaaaggtccagaagacaggctggggttgctgaggcctagc

SEQ ID NO: 29780 - DNA, 110 bp, synthetic construct
  source 1..110: mol_type = other DNA
gagccctgatatacactgggactcgaatcctgtctggctagcgtgagagtgacagaaatgctgcatggaggtcagccatgtctgacttggcaaggctggacgagttttta

SEQ ID NO: 29781 - DNA, 110 bp, synthetic construct
  source 1..110: mol_type = other DNA
gtttgcatcagagctgcagctatcagcctacaccatagccacagcaacaccaggcccaagttgtatctgagacctgcactatagctcatgccaatgccagttccttaacc

SEQ ID NO: 29782 - DNA, 110 bp, synthetic construct; identical to SEQ ID NO: 29781
  source 1..110: mol_type = other DNA

SEQ ID NO: 29783 - DNA, 110 bp, synthetic construct
  source 1..110: mol_type = other DNA
taatgaaagcattattgtaggaggatgttttgctaaatgtcctacaaagacctatgtgttctgtgcaagcctaccatgtggtagacacttaataataattgggaaataag

SEQ ID NO: 29784 - DNA, 110 bp, synthetic construct
  source 1..110: mol_type = other DNA
catcaccacttgatgttgcttgccttgtcttagtttccttgaattgtcataacaaagtccggcaaactgggtagcttaagtcaacactattctctcacagttcaggaggc

SEQ ID NO: 29785 - DNA, 110 bp, synthetic construct
  source 1..110: mol_type = other DNA
ttggtgtgtttttctctgagagctaaagggcaatggcagccacctagactgctgctgtctttccagcacctggcctggcactgagccagtccctggtacaggtttcaatg

SEQ ID NO: 29786 - DNA, 110 bp, synthetic construct
  source 1..110: mol_type = other DNA
gccatacaaaacttctagaaatatcacttgatactcgcatgaggaaataattacctagccctgacacatggcccagagtcaagagagggtgtttggaaattatttggttc

SEQ ID NO: 29787 - DNA, 110 bp, synthetic construct
  source 1..110: mol_type = other DNA
tagccctgacacatggcccagagtcaagagagggtgtttggaaattatttggttccataaagttcttcctaagtgctgtcttttgctaagccctttctcttgataagttt

SEQ ID NO: 29788 - DNA, 110 bp, synthetic construct
  source 1..110: mol_type = other DNA
tggcccaaactcacacagctagtaagtcgtggagctgggattcaggctggggtggccgcctccatgtgccctcagtcactcagctctgctgaaatatgggttgaggagtt

SEQ ID NO: 29789 - DNA, 110 bp, synthetic construct
  source 1..110: mol_type = other DNA
ccagggatggaaccggcattctcacagagtcaacgaagggtccttaacccggagttacaaagggagctcctgagacttcggttcttgacctgaagccgctcccccaaggg

SEQ ID NO: 29790 - DNA, 110 bp, synthetic construct
  source 1..110: mol_type = other DNA
cacctcaatatgcaatgcaccgtggcctcacagatctcggatttgcccctacccagtgcctggcacttagcagtgatcagaaagtatgtcaagctgaactgtgaatctgg

SEQ ID NO: 29791 - DNA, 110 bp, synthetic construct
  source 1..110: mol_type = other DNA
cagcaccacagatgtggcaacaccagatcctttaacctcttactctgggccggagatcgaagccactcttctgcagcaacctaaactgttgcagtcagaattcttttttt

SEQ ID NO: 29792 - DNA, 110 bp, synthetic construct
  source 1..110: mol_type = other DNA
cttttgcctggccagaaaaagaattgtggacaaagaccactggcttaccttctaactgacagaacggggctagggtcttgtgctagtgtcaagctcccagcccccaggtg

SEQ ID NO: 29793 - DNA, 110 bp, synthetic construct
  source 1..110: mol_type = other DNA
ctgacagaacggggctagggtcttgtgctagtgtcaagctcccagcccccaggtgacatccctgtactccatccactcccagtaaagagcagtgaactgcaggccatcaa

SEQ ID NO: 29794 - DNA, 110 bp, synthetic construct
  source 1..110: mol_type = other DNA
gagaagtaaaccagtttgtacatgtcatatatctggatagtagcaaagccaaagctggattccagctcttcagtcttctggtcactttttttttttggtctatttggggc

SEQ ID NO: 29795 - DNA, 110 bp, synthetic construct
  source 1..110: mol_type = other DNA
gcatgtcacaggtgtggccaaaaaaagaaacagaaaaaaacctgaagtttaaaaaggtaactcacttgtcagagctacacattagcaagtggctgcaatttgagcctgga

SEQ ID NO: 29796 - DNA, 110 bp, synthetic construct
  source 1..110: mol_type = other DNA
tctcatttcagtttcacttaatataaatacacatcaacatgtcccccctctgatgcattatggcttcatgtaaatttgtagaaatagaattacttttggagttcccgtca

SEQ ID NO: 29797 - DNA, 110 bp, synthetic construct
  source 1..110: mol_type = other DNA
agtgaaatctgggatagaatgtataaaattggaaccgttagtatatagatgatgtttaaagctctaacactggatgatatccttgaggaaatgagtatggaaagatgaga

SEQ ID NO: 29798 - DNA, 110 bp, synthetic construct
  source 1..110: mol_type = other DNA
atggtaaaaagacacacacacacacacacacaaaatgtccgctctggagcagccgagttaacacggtgttatcaagctttaacacactgcttccacaaagtactgggagt

SEQ ID NO: 29799 - DNA, 110 bp, synthetic construct
  source 1..110: mol_type = other DNA
gcaggagcagcagggcttggcctgcccactcgcctgtttatcttcactcagaggcccactcctacaggtagagttctttctaacagctgatcagtttcacttcctggttg

SEQ ID NO: 29800 - DNA, 110 bp, synthetic construct
  source 1..110: mol_type = other DNA
ccactcctacaggtagagttctttctaacagctgatcagtttcacttcctggttgacacccagcagtcccaaaacaataacaaagacttgcttcctctgaagtctgccct

SEQ ID NO: 29801 - DNA, 110 bp, synthetic construct
  source 1..110: mol_type = other DNA
ttaaatgtttttttactgtatctcataggtctctctcacttttacccccctattttctatccttttctctccaagcttctgtttggatattttctacagacctatcttcc

SEQ ID NO: 29802 - DNA, 110 bp, synthetic construct
  source 1..110: mol_type = other DNA
actcactccacttagcacgcccttttctcatcccgacccttcctcaagcagatctttcctcagaccacgcccctcagctcaggacccgagggggacacaccccctcatat

SEQ ID NO: 29803 - DNA, 110 bp, synthetic construct
  source 1..110: mol_type = other DNA
acccaccctttgctagtggcgctatgcttgggaatatggccataggttcactcttctagctttacatctaacaactctcccacaagccaaagcaagtcaaggagaggcaa

SEQ ID NO: 29804 - DNA, 110 bp, synthetic construct
  source 1..110: mol_type = other DNA
acagtaacaacaaagtaaaagaacaaggcagaacaccagcttggagtagctaatagagccttaggctttggtgttagatagactttgaatttaagctcagctttacctct

SEQ ID NO: 29805 - DNA, 110 bp, synthetic construct
  source 1..110: mol_type = other DNA
acatgttgactagagacatgatgggacttgaggttgacagaacctcggcagcccagatgttatatcactcctcaaatctactggccctgtgactttccctataacctggg

SEQ ID NO: 29806 - DNA, 110 bp, synthetic construct
  source 1..110: mol_type = other DNA
tgtatcaggcgggcagattgaggaggaagactggagggtttcatgttttatgtagacttctaattttcttctctcacttctccctgagtttcctgacccctgaggcctta

SEQ ID NO: 29807 - DNA, 110 bp, synthetic construct
  source 1..110: mol_type = other DNA
acacatagaaaccaaaggaccacccaccagctccacaggagattctgggacctgggagaggtggctgggcaataatttagggaacagagcaggaagggggaattgcatat

SEQ ID NO: 29808 - DNA, 110 bp, synthetic construct
  source 1..110: mol_type = other DNA
gagcgctggactgggagtcagagctcatcacctgtccagactctgccccaaaccgtctgtgacctcggagacttgctctttccccaggccctgtctggaaaataggacac

SEQ ID NO: 29809 - DNA, 110 bp, synthetic construct
  source 1..110: mol_type = other DNA
ccgttaggcattcctattctcccactaaggggctgagggcctttggatgaatcgcttaactcttcagagctttgccctttcccagtcggcaccatctcttacccagggtc

SEQ ID NO: 29810 - DNA, 110 bp, synthetic construct
  source 1..110: mol_type = other DNA
tttttctacaaattcgacatgaactttttcggagatcaaatataaaacactagataaaagacagggttggggactgagagccttgcctacccagcctcttcttcaatccc

SEQ ID NO: 29811 - DNA, 110 bp, synthetic construct
  source 1..110: mol_type = other DNA
ttcttcaggatataggaattaacctacagaaacaaaatgacaaaagcaaaagtataaaagaaaggaaaaaaacccaaaagtacgactattggctcttagctgtcaaagac

SEQ ID NO: 29812 - DNA, 110 bp, synthetic construct
  source 1..110: mol_type = other DNA
aaaagaaaggaaaaaaacccaaaagtacgactattggctcttagctgtcaaagacacttagcagaacagagagagggtccctaacagattaaactgccagtccatcctaa

SEQ ID NO: 29813 - DNA, 110 bp, synthetic construct
  source 1..110: mol_type = other DNA
ttaatataatttaaggaggtagatggactaaatttctacccagacaatacaaaccgttctggtcctcagatgacttcatgtttatttcattctaactttggaagacttca

SEQ ID NO: 29814 - DNA, 110 bp, synthetic construct
  source 1..110: mol_type = other DNA
ggggccactggcttggccgtgtctgagggcttcttccgcaagatccgaagctcggccgctagcagcccatccttctccagggcgctaatgtcaaacacgtacctttgctt

SEQ ID NO: 29815 - DNA, 110 bp, synthetic construct
  source 1..110: mol_type = other DNA
gcagtaacaataccgaagccttaactgctaggccactagggaactcctagtccgtttttaaaatttctaccttgtcccattggcctaatcatttatacccatgccaaacc

SEQ ID NO: 29816 - DNA, 110 bp, synthetic construct
  source 1..110: mol_type = other DNA
tcaggatcacacatgtagttattagaaatgccattcctactcccattctagtaatgctaaatgaatttctgttaagctgcacccatactactctgttgcacagcaggaat

SEQ ID NO: 29817 - DNA, 110 bp, synthetic construct
  source 1..110: mol_type = other DNA
gctaaatgaatttctgttaagctgcacccatactactctgttgcacagcaggaatctgggaacatctggtctcttggctgtgaccatgtgtgattcctcattctgttcta

SEQ ID NO: 29818 - DNA, 110 bp, synthetic construct
  source 1..110: mol_type = other DNA
catcctgtaaaaggacacagagtgggtcagacttggagccgatgtccttgtcagtgaggtggtcacatgaaatggacagctgaaccaaggtcacgcagtgggccatctga

SEQ ID NO: 29819 - DNA, 110 bp, synthetic construct
  source 1..110: mol_type = other DNA
ggtctcacatgtggctcggatctggcattgctattgctatggcataggccaacaacttacagctccgattcgatccctagaccggaaacttccatatgccttgggtgtgg

SEQ ID NO: 29820 - DNA, 110 bp, synthetic construct; identical to SEQ ID NO: 29819
  source 1..110: mol_type = other DNA

SEQ ID NO: 29821 - DNA, 110 bp, synthetic construct
  source 1..110: mol_type = other DNA
tccttgacattcttctaagcggagctgccctcccaagtatctgtcactaacgtcgtggtgcagtggttaacgaaccacgaggtggagggttcgatccttggccttgctaa

SEQ ID NO: 29822 - DNA, 110 bp, synthetic construct
  source 1..110: mol_type = other DNA
tgtgttgtcagaactttttcacctttccaaacagaaactctgtacctattaaatggtaactcctcattcttgccccatcagctcctagcagccaccatcctactttttgt

SEQ ID NO: 29823 - DNA, 110 bp, synthetic construct
  source 1..110: mol_type = other DNA
ttagtaggtccttgttgattatctgttttacatatggtggtgagcatacattaatcccaaactcctaatttacacctccccctgactatcccttttggtaaccataagtt

SEQ ID NO: 29824 - DNA, 110 bp, synthetic construct
  source 1..110: mol_type = other DNA
tgattatctgttttacatatggtggtgagcatacattaatcccaaactcctaatttacacctccccctgactatcccttttggtaaccataagtttgttttctacatctg

SEQ ID NO: 29825 - DNA, 110 bp, synthetic construct
  source 1..110: mol_type = other DNA
atgagagccatatcccttataatccagcagactaagctctttgttatgttgccttaagggtggtgatatgacatcacttgaaattggcagtgaatggttcctatatcact

SEQ ID NO: 29826 - DNA, 110 bp, synthetic construct
  source 1..110: mol_type = other DNA
gattttctacaggggcagtcatgtctctgcagacagttttatttctttagttccaatttatattttatttccttatcttattgtactagctaggatgactagtacagtct

SEQ ID NO: 29827 - DNA, 110 bp, synthetic construct
  source 1..110: mol_type = other DNA
atttatattttatttccttatcttattgtactagctaggatgactagtacagtcttgaataagactgttgagagggtgcatccttgccttgttcctgctcttaagacatc

SEQ ID NO: 29828 - DNA, 110 bp, synthetic construct
  source 1..110: mol_type = other DNA
cccaaagaaatggaggctagtttcataacttgtctgtttcttgttctttatttccctggcagctgtatttgatatctccatctctgggatgtgccttttggggggcctcc

SEQ ID NO: 29829 - DNA, 110 bp, synthetic construct
  source 1..110: mol_type = other DNA
gcagggaacaatcagcatttagaaaggtgggaagaaaggccaaaggttggtctgaagaaggcacaggattgtgtatgaggcttaggctgcttgaggaacaggcactacag

SEQ ID NO: 29830 - DNA, 110 bp, synthetic construct
  source 1..110: mol_type = other DNA
agaaggcacaggattgtgtatgaggcttaggctgcttgaggaacaggcactacagggtcttcctctttctgcacctctggttccagggtccataaggtactcagtacagg

SEQ ID NO: 29831 - DNA, 110 bp, synthetic construct
  source 1..110: mol_type = other DNA
atgatgggaactcctgactgctgttacttgtgcacactcttttctggactgcagtgaaagagttgtgctggtgatgctttaatagctggctcctggggagggagattccc

SEQ ID NO: 29832 - DNA, 110 bp, synthetic construct
  source 1..110: mol_type = other DNA
ctgaggtcgaactttctgggacttcttttctccagggccttcaccagatcctcctcccggacagcctacatgacatgcggcctttgatcctcgtgagcctgggagctgag

SEQ ID NO: 29833 - DNA, 110 bp, synthetic construct
  source 1..110: mol_type = other DNA
cccggacagcctacatgacatgcggcctttgatcctcgtgagcctgggagctgaggtgatacgggtggggaaagaaaaattctgtgaactgattgacagtgagacaatag

SEQ ID NO: 29834 - DNA, 110 bp, synthetic construct
  source 1..110: mol_type = other DNA
ccttaactccacagagactgcttctaacggagctctccaaagaggagactggtccccctgcaggccagaggaacactttcaccactccaccactgccaaataccaaggct

SEQ ID NO: 29835 - DNA, 110 bp, synthetic construct
  source 1..110: mol_type = other DNA
tgtaaggtagcctctccctttcctcccagaaccatcccttttcctggggtgccatttcccccaaaggtgtctctctgggttagtgtttgggctttcagttcgaggggtaa

SEQ ID NO: 29836 - DNA, 110 bp, synthetic construct
  source 1..110: mol_type = other DNA
tattccctttggctgctgtaagctgctgcctgggccacacggctgcttataccttgagtgtccttggacaagttcttgaccttcccaggaccacagtttgtccacctgtc

SEQ ID NO: 29837 - DNA, 110 bp, synthetic construct
  source 1..110: mol_type = other DNA
agggagcagccccagaaaaaggcaaaaagacaaaacaaaacaaaatgaaaaactcttttgacttaaagtacactgacatctaatgtccaggtaccccacacagcagctcc

SEQ ID NO: 29838 - DNA, 110 bp, synthetic construct
  source 1..110: mol_type = other DNA
ttttgacttaaagtacactgacatctaatgtccaggtaccccacacagcagctccctgaggtagacaaagctcaggcaactgaagataggagacagatgtaagtgaaatg

SEQ ID NO: 29839 - DNA, 110 bp, synthetic construct
  source 1..110: mol_type = other DNA
agggccaacctccaggaactggaccagttcctgggaccctacccatatgccacgctcaagaagtggatctcactcaccagcttcatcagtgagaccacagtggagaagct

SEQ ID NO: 29840 - DNA, 110 bp, synthetic construct
  source 1..110: mol_type = other DNA
ccatctgtggggccaccaatactgtggggctgtccagctgctattattggtatgttattacccaaagacacaccactagtattagaccctgtgtctggtcaaatgtggtt

SEQ ID NO: 29841 - DNA, 110 bp, synthetic construct
  source 1..110: mol_type = other DNA
tggggtggctcccaacaggcttgccccccccttcacaggaggaagggagcccattctgagggttggcctgagcttgagtctggctctgctccccagctgtgtgaccttca

SEQ ID NO: 29842 - DNA, 110 bp, synthetic construct
  source 1..110: mol_type = other DNA
ctgagggttggcctgagcttgagtctggctctgctccccagctgtgtgaccttcagccagtcacagaaacctctctgagcctcagtttccatgggataacagcgtttctg

SEQ ID NO: 29843 - DNA, 110 bp, synthetic construct
  source 1..110: mol_type = other DNA
ctctcccacacactcatggtctcacacacgctcacacacaatgccagctacatgctcacttatgcacctgccattcctctacctgggatagtctttccccgggtatccgc

SEQ ID NO: 29844 - DNA, 110 bp, synthetic construct
  source 1..110: mol_type = other DNA
aggcaagacattgttacctgaacgctgagaggtagctcagagaagtgactggacgcacagaatctggacccaaactgcttatgttcaaatcccagatccattatgttcta

SEQ ID NO: 29845 - DNA, 110 bp, synthetic construct
  source 1..110: mol_type = other DNA
ttgaacgaagatgcggttacagcctctgctaatccctggggagctctggagctgggatggcccttgagggttgttctgaaccgagtgagggaaccagacctgggtgctgc

SEQ ID NO: 29846 - DNA, 110 bp, synthetic construct
  source 1..110: mol_type = other DNA
gatggcccttgagggttgttctgaaccgagtgagggaaccagacctgggtgctgcacatcatttgggtaatggacacgggctgcccctggggaaggagcatcagcttggg

SEQ ID NO: 29847 - DNA, 110 bp, synthetic construct
  source 1..110: mol_type = other DNA
tgtgggcacttacctcaacccctggcggtttcttcttaagcacccagacagcctgcaagccctttgttctgcttgcagtcccagtcccagggacggagagcacagagctg

SEQ ID NO: 29848 - DNA, 110 bp, synthetic construct
  source 1..110: mol_type = other DNA
caagccctttgttctgcttgcagtcccagtcccagggacggagagcacagagctggaggggcaggagccgtgcttccccaggagttgagaggtggcctccgacaagaccc

SEQ ID NO: 29849 - DNA, 110 bp, synthetic construct
  source 1..110: mol_type = other DNA
accatcaagcctgcccagctgaataatacctctgactagagcaaagggtgtgtctggtccgtgtgggcatcctccactggacttggtcttgattcagcatgtggatagga

SEQ ID NO: 29850 - DNA, 110 bp, synthetic construct
  source 1..110: mol_type = other DNA
ttggttaggttgtttgtctttttgttgttgagtttgacttctttatgtattctggataataggccctggtcagatatatgatctgtaaatattttctcccattctgtaga

SEQ ID NO: 29851 - DNA, 110 bp, synthetic construct
  source 1..110: mol_type = other DNA
gacttctttatgtattctggataataggccctggtcagatatatgatctgtaaatattttctcccattctgtagattgtcttttcactttattgatagtgtcctttgatg

SEQ ID NO: 29852 - DNA, 110 bp, synthetic construct
  source 1..110: mol_type = other DNA
atgtgagcccttcaaacccaagaatccttgtgtggccctcagccttctttagacagtgtgctctagagttctgtcaagagccgttttccatgttgatttctcatttactc

SEQ ID NO: 29853 - DNA, 110 bp, synthetic construct
  source 1..110: mol_type = other DNA
gtgtgctctagagttctgtcaagagccgttttccatgttgatttctcatttactctgttttgcttttccgtgatttctgagggactaggaagtagttttgtatctctgcc

SEQ ID NO: 29854 - DNA, 110 bp, synthetic construct
  source 1..110: mol_type = other DNA
ctactatggtgcaggctcaatgcctggtacaggaacttccacatgctgtaggcgaagccaaaaaaaagtagctaggcacctcaatgcccaacattcaataatggatggaa

SEQ ID NO: 29855 - DNA, 110 bp, synthetic construct; identical to SEQ ID NO: 29854
  source 1..110: mol_type = other DNA

SEQ ID NO: 29856 - DNA, 110 bp, synthetic construct
  source 1..110: mol_type = other DNA
cctttatcattcgcagctgctctccttgctctggctccaaagctggctgcctcctgattcttcccgctggcaacctctgccccccccccttcagctgtgcatattttttg

SEQ ID NO: 29857 - DNA, 110 bp, synthetic construct
  source 1..110: mol_type = other DNA
gattcttcccgctggcaacctctgccccccccccttcagctgtgcatattttttgagcttctgtgtaagcttttttgcttaaataaagggcttgtcccacaagcacaagt

SEQ ID NO: 29858 - DNA, 110 bp, synthetic construct
  source 1..110: mol_type = other DNA
acactttaaaggcagtgaaaaagtagacgattgagccctcccatcttttattgtgctcctgtggcacagttgacactagcccctggtcacagctccatttgttaacaagc

SEQ ID NO: 29859 - DNA, 110 bp, synthetic construct
  source 1..110: mol_type = other DNA
ctcctgtggcacagttgacactagcccctggtcacagctccatttgttaacaagccactgaaagtgagtctgcataaccacaaggttgaattaaaaggatttttgggggg

SEQ ID NO: 29860 - DNA, 110 bp, synthetic construct
  source 1..110: mol_type = other DNA
ccatgagcacagatagtgctgagggcagtctacctaccccagctcttcatctgctctcttccccttgacataccttcactcattcgtgtatccacatctgccgagcactt

SEQ ID NO: 29861 - DNA, 110 bp, synthetic construct
  source 1..110: mol_type = other DNA
ctcttccccttgacataccttcactcattcgtgtatccacatctgccgagcacttatacaaaccggcacttcaccagcccaagacacaggtgatcagatcttcatactcg

SEQ ID NO: 29862 - DNA, 110 bp, synthetic construct
  source 1..110: mol_type = other DNA
tctcaacactaaacatattaacattgttgtctttgggttctaggattatgagagttctctagctaccttataatctgtgctctacaaatattcaactatgagcatgttct

SEQ ID NO: 29863 - DNA, 110 bp, synthetic construct
  source 1..110: mol_type = other DNA
attatgcccgcccggggaactacgaagatggtgcctgagctggcgccatcttcaaggtagaataattgccgttcttgttcgtggtttcaattcctcctggccaacttcga

SEQ ID NO: 29864 - DNA, 110 bp, synthetic construct
  source 1..110: mol_type = other DNA
ccttgcacagtggcttaaggatctggtgttgctgcaggctgcagtgtaggccagtagctgcatctccaatttgactcctagcttgggaacctccatgtgttggaagtatg

SEQ ID NO: 29865 - DNA, 110 bp, synthetic construct
  source 1..110: mol_type = other DNA
agctgcatctccaatttgactcctagcttgggaacctccatgtgttggaagtatggccctaagacgacaaaaaaaatctgaatgtggtggcttgggtcactgcagaggca

SEQ ID NO: 29866 - DNA, 110 bp, synthetic construct
  source 1..110: mol_type = other DNA
aggtcagggtcagggcaggccctgaggctgggaagtatgttggggagcagggcctgtgtgaatacacactcacttttggggtgtctatatacacaggcgcataattgttt

SEQ ID NO: 29867 - DNA, 110 bp, synthetic construct
  source 1..110: mol_type = other DNA
gtgtgaatacacactcacttttggggtgtctatatacacaggcgcataattgtttctctgaaattctttggggccaggtgtgcttggaattcagaagtaatcaagattta

SEQ ID NO: 29868 - DNA, 110 bp, synthetic construct
  source 1..110: mol_type = other DNA
tgagggtgagaatactgataacttgtatttaccaaggccttactctccctaagcattttacctgcttgtcatttttctcccctaaggctgcacccgaacctgtggcatat

SEQ ID NO: 29869 - DNA, 110 bp, synthetic construct
  source 1..110: mol_type = other DNA
aattcctgggctagggctgagcaatgcgggctcctttaactcactgtgcaggcctggggatggaacctgtgtcctggctctacagagacaccgctgatcctgctgtgccg

SEQ ID NO: 29870 - DNA, 110 bp, synthetic construct
  source 1..110: mol_type = other DNA
ggggatggaacctgtgtcctggctctacagagacaccgctgatcctgctgtgccgcgtaggaactcctggagatacctttttttttttttttttttttttgtcttttttg

SEQ ID NO: 29871 - DNA, 110 bp, synthetic construct
  source 1..110: mol_type = other DNA
tggttgggacaaccaaccctaaaactgggcttgcacagctgtcaagtgaatggctttacgatgtcagagggctagaaaactccaccttcagatcatgccaagcacctcta

SEQ ID NO: 29872 - DNA, 110 bp, synthetic construct
  source 1..110: mol_type = other DNA
ttcattatacctatgtcagggatatcttctaattctatgaggacctttccccaaatcagctagcaactttggaaaatggcaggtcttcggaatttttccctatttctgct

SEQ ID NO: 29873 - DNA, 110 bp, synthetic construct
  source 1..110: mol_type = other DNA
agtgaagactcctctgtgacccagatctaccatgcagttgcagctctcagtggctttggccttcccttggcttcccaagaagcgctcggtgctctcactgctcgcctcag

SEQ ID NO: 29874 - DNA, 110 bp, synthetic construct
  source 1..110: mol_type = other DNA
ttggccttcccttggcttcccaagaagcgctcggtgctctcactgctcgcctcagcaaggaagagaccgtgctagcgtaagtcctcatctccagcgcatctcagccttca

SEQ ID NO: 29875 - DNA, 110 bp, synthetic construct
  source 1..110: mol_type = other DNA
tagaagaggttttcatattacagcagagcactgtgggggagacatatagacagaagagataaaggcttctttgagatatggtacagcctcacagagtgggtcggggaggg

SEQ ID NO: 29876 - DNA, 110 bp, synthetic construct
  source 1..110: mol_type = other DNA
gagataaaggcttctttgagatatggtacagcctcacagagtgggtcggggaggggcctaagattggaattccaattcaagatggtgtggataggatatataaaatggta

SEQ ID NO: 29877 - DNA, 110 bp, synthetic construct
  source 1..110: mol_type = other DNA
agtcttaaacataaagtttagggccaagagagttcctgttgtgtttcagcgggttgagaatgcaacatggtgtccaggaggacgtgggtttgatccctggtcttgctgaa

SEQ ID NO: 29878 - DNA, 110 bp, synthetic construct
  source 1..110: mol_type = other DNA
gagaatgcaacatggtgtccaggaggacgtgggtttgatccctggtcttgctgaatgggttaagtttctggcgttgctaccagctgcagcgtaggtcgcagacactgctc

SEQ ID NO: 29879 - DNA, 110 bp, synthetic construct
  source 1..110: mol_type = other DNA
tgggaccagtatcttctcttgtatctcctcctcagtccagcactcttgggccttgtgctctgaaaatcttattttaatccaagtcccagtcctgccctcattggagggac

SEQ ID NO: 29880 - DNA, 110 bp, synthetic construct
  source 1..110: mol_type = other DNA
ggtcccctgaaggccccaccccccttcttctggtttattgtctacctgttaaatgtacacagcatctcgctctccttgcttctgtcctgatctctctcgctcagctgtgc

SEQ ID NO: 29881 - DNA, 110 bp, synthetic construct
  source 1..110: mol_type = other DNA
tacacagcatctcgctctccttgcttctgtcctgatctctctcgctcagctgtgctttcccactcccctgagaaagtgttatccaattccgctctgcgtgtgtgcgtcat

SEQ ID NO: 29882 - DNA, 110 bp, synthetic construct
  source 1..110: mol_type = other DNA
tgatatttgtgtgtactggacagtggggtcccgtgacttgggtcctgagtggtcacccaggcatcactctccaacaggaaggcggcccatggctctaaaagtctgacatg

SEQ ID NO: 29883 - DNA, 110 bp, synthetic construct
  source 1..110: mol_type = other DNA
cccaggcatcactctccaacaggaaggcggcccatggctctaaaagtctgacatggtcagggccccaaacggtggcaggagggagtggtcacccagggcaaactctcccc

SEQ ID NO: 29884 - DNA, 110 bp, synthetic construct
  source 1..110: mol_type = other DNA
acaggcaagagaaccttactctcctttccccttgactttcccactggttcttccattggtcaaactcagctagaagccagagggcagggagcatgggtggtggtcagcca

SEQ ID NO: 29885 - DNA, 110 bp, synthetic construct
  source 1..110: mol_type = other DNA
ggaggtggggaaaaagaagggcagaaaccaccctttcaatccagggccagccccccgctaaagtgggacatgcatttatttcttcactcaattattcaacataggtttat

SEQ ID NO: 29886 - DNA, 110 bp, synthetic construct
  source 1..110: mol_type = other DNA
ttggccaacctgagtccctggtggagcaacgaggtgactccagcccctctgcaaatagggaaaggggttcccaaaaagcaccagaagaaggtaagctgaaacagagtgct

SEQ ID NO: 29887 - DNA, 110 bp, synthetic construct
  source 1..110: mol_type = other DNA
tagggaaaggggttcccaaaaagcaccagaagaaggtaagctgaaacagagtgctgaatatactaaaataggagacctcctgtgctgtcgtctgtctgctctgtggggca

SEQ ID NO: 29888 - DNA, 110 bp, synthetic construct; identical to SEQ ID NO: 29886
  source 1..110: mol_type = other DNA

SEQ ID NO: 29889 - DNA, 110 bp, synthetic construct; identical to SEQ ID NO: 29887
  source 1..110: mol_type = other DNA

SEQ ID NO: 29890 - DNA, 110 bp, synthetic construct
  source 1..110: mol_type = other DNA
gtaccaccctaatctaataaagattttcgcatttccacagtccttatgtattttgcatggctgtaaccattgttcctataccattttgtgttctatgttttaatttaccg

SEQ ID NO: 29891 - DNA, 110 bp, synthetic construct
  source 1..110: mol_type = other DNA
ctaacattctcccttactattgcagtgacctttaggtaagtctcttaaccactctgagctttagcgttcttatccaggaaatggagatcacacttataatgctcttgtga

SEQ ID NO: 29892 - DNA, 110 bp, synthetic construct
  source 1..110: mol_type = other DNA
gagctttagcgttcttatccaggaaatggagatcacacttataatgctcttgtgagaattcagtagcacagcacttggtgtaatgatgactttttagaaatggtggtcat

SEQ ID NO: 29893 - DNA, 110 bp, synthetic construct
  source 1..110: mol_type = other DNA
tctaggttgtagttaaattgaaaatggtttgttccttttgaggcttacttttaagctctgttaggtgagactagtatttagtttatggcaaatataactccttactaaag

SEQ ID NO: 29894 - DNA, 110 bp, synthetic construct
  source 1..110: mol_type = other DNA
ctctgttaggtgagactagtatttagtttatggcaaatataactccttactaaagcaatgctcttctgaatactctatctgcctcattgggaattcacaaggtttttcca

SEQ ID NO: 29895 - DNA, 110 bp, synthetic construct
  source 1..110: mol_type = other DNA
gccctcagttctttatttgaaaactgtaaactggttgccctgggtgtgtggaaggattagcttgcaagaggtgaggatagcaaagcactccatgtatttatttgccaatt

SEQ ID NO: 29896 - DNA, 110 bp, synthetic construct
  source 1..110: mol_type = other DNA
attagcttgcaagaggtgaggatagcaaagcactccatgtatttatttgccaattggtgattatagcctgttagtcaaacagaatatagcatccgtcttcacgaactcgg

SEQ ID NO: 29897 - DNA, 110 bp, synthetic construct
  source 1..110: mol_type = other DNA
agcagcagcagcaccgctgaactgctggagccacagagctgggggaaagctgaacttggggtcaatttcacaaatgagagaacaggccccaagagagtcggtgactgtca

SEQ ID NO: 29898 - DNA, 110 bp, synthetic construct
  source 1..110: mol_type = other DNA
ttggggtcaatttcacaaatgagagaacaggccccaagagagtcggtgactgtcataaggtcttacaggatctgcggacccagccctccaaaactaccctcgtgttggct

SEQ ID NO: 29899 - DNA, 110 bp, synthetic construct; identical to SEQ ID NO: 29897
  source 1..110: mol_type = other DNA

SEQ ID NO: 29900 - DNA, 110 bp, synthetic construct; identical to SEQ ID NO: 29898
  source 1..110: mol_type = other DNA

SEQ ID NO: 29901 - DNA, 110 bp, synthetic construct
  source 1..110: mol_type = other DNA
aacaagcctgggtcctggcactgggctggggatcgaacctgcatcctggtgctgtagagacacttccgatcccattgtaccacagcaggaactctgagagggagttcatt

SEQ ID NO: 29902 - DNA, 110 bp, synthetic construct
  source 1..110: mol_type = other DNA
agagacacttccgatcccattgtaccacagcaggaactctgagagggagttcattcatttaacaaatatttttggagttcccatttggctcattgtgttgagaacctgag

SEQ ID NO: 29903 - DNA, 110 bp, synthetic construct
  source 1..110: mol_type = other DNA
actaataaactaaaatatttagttccccagttgtaccagccacattgcaagggctcagtagacacccgtggccagtggccatcatattagctagtgcagacataaaacgc

SEQ ID NO: 29904 - DNA, 110 bp, synthetic construct
  source 1..110: mol_type = other DNA
cagtagacacccgtggccagtggccatcatattagctagtgcagacataaaacgcttccatcactgaaggaagttctattagacagtgctaccccgcaagaaagacacct

SEQ ID NO: 29905 - DNA, 110 bp, synthetic construct
  source 1..110: mol_type = other DNA
tgcacagcatttaacagtgcctgttacaaagttaaaaaataggagtggagttcccttgtggcacagtaagttaagtatccagcaatgtcactgcagtgccctgggttgct

SEQ ID NO: 29906 - DNA, 110 bp, synthetic construct
  source 1..110: mol_type = other DNA
ctactgtttcttttctttagtagaacagacgaacaaaaacattaagaaaaaaataaagccctcagtattgacttggttttcacgtcaaacaacgtttggtcagttaatgt

SEQ ID NO: 29907 - DNA, 110 bp, synthetic construct
  source 1..110: mol_type = other DNA
aagccctcagtattgacttggttttcacgtcaaacaacgtttggtcagttaatgtgtaaggtagaaaacaggaactacatccttggctccagaagaaaacatttcattaa

SEQ ID NO: 29908 - DNA, 110 bp, synthetic construct
  source 1..110: mol_type = other DNA
tcaggaagaaaactgccccatataatgtacatcatgtacttgatgaccttaaggatgtagttcattgacatttgagacttcaagttgtaaaaagtgtcatgatttcagag

SEQ ID NO: 29909 - DNA, 110 bp, synthetic construct
  source 1..110: mol_type = other DNA
tgtagttcattgacatttgagacttcaagttgtaaaaagtgtcatgatttcagagctctcccaactcaaattccataattccatagcattgttttcatatgtgtagttca

SEQ ID NO: 29910 - DNA, 110 bp, synthetic construct
  source 1..110: mol_type = other DNA
tttggtgggaggagaggacgcaattcaacccataacaatagctatcccagtgggtaggaagtgatatctcactgtggttttgatgtgtattttcctaatgactaatgaca

SEQ ID NO: 29911 - DNA, 110 bp, synthetic construct
  source 1..110: mol_type = other DNA
aggaagtgatatctcactgtggttttgatgtgtattttcctaatgactaatgacattgtgcatcttttcatgtgcttcttgcacatttgtgtgtctttggagaagtgttt

SEQ ID NO: 29912 - DNA, 110 bp, synthetic construct
  source 1..110: mol_type = other DNA
gaacgactctccccaggtacacatccattctgctagtgttgaacttttaggctgttttcagctttgggatattatgggggtgagaggaagctgctaggaacatccttgca

SEQ ID NO: 29913 - DNA, 110 bp, synthetic construct
  source 1..110: mol_type = other DNA
tttcagctttgggatattatgggggtgagaggaagctgctaggaacatccttgcatgtgtctttcggagaatatgtggactcacttctgttgggtaaacattcgtgagag

SEQ ID NO: 29914 - DNA, 110 bp, synthetic construct
  source 1..110: mol_type = other DNA
tcgagtgcctgccacccctcgtagcccggctgcaggtctggcctggtcatccacgactccacccagcagtggaagttcctgttggggaaacgaagcagaacatgggccag

SEQ ID NO: 29915 - DNA, 110 bp, synthetic construct
  source 1..110: mol_type = other DNA
acggggcgatggggccaaagagagcctctgagaagccatctgagctcgtccttctcctgccgaaacccccaggggagctctttagcctggccttcaagtccctgcagctc

SEQ ID NO: 29916 - DNA, 110 bp, synthetic construct
  source 1..110: mol_type = other DNA
cctgccgaaacccccaggggagctctttagcctggccttcaagtccctgcagctctggcccaacttaccttccaatgagatctcccccatttgcaccctccagcctcacc

SEQ ID NO: 29917 - DNA, 110 bp, synthetic construct
  source 1..110: mol_type = other DNA
gccacgacgcacgttctttttgagaagtatgcctattgtttcatgccagtttcagggaacacaaggccctagagcttgctgaagcatggcaagagcagaaagcagcaata

SEQ ID NO: 29918 - DNA, 110 bp, synthetic construct
  source 1..110: mol_type = other DNA
gagtcctgcataaaacacttcccactttggctcaggagaggcctccctgagatatgggtttgaaggagtctccaagcaagagtcctgatgccacaagggctttggtggaa

SEQ ID NO: 29919 - DNA, 110 bp, synthetic construct
  source 1..110: mol_type = other DNA
tgaacaagtccctacacatcccggacctctgtttggttatgttaattccagactaataatccccaatagctccaccatgccttccagccagaggatcgctcgatgatacg

SEQ ID NO: 29920 - DNA, 110 bp, synthetic construct
  source 1..110: mol_type = other DNA
ataatccccaatagctccaccatgccttccagccagaggatcgctcgatgatacgtattcagcaatcaaataaacctccctccacctgcaggagccagtctggatggttt

SEQ ID NO: 29921 - DNA, 110 bp, synthetic construct
  source 1..110: mol_type = other DNA
caggaagagggaatggagagtgcaaagggttttagacaggaagagagcaggtcaaacttgaggaagtcccatgtggctggagctagaggccaagacgcagtggcatggga

SEQ ID NO: 29922 - DNA, 110 bp, synthetic construct
  source 1..110: mol_type = other DNA
acttgaggaagtcccatgtggctggagctagaggccaagacgcagtggcatgggaggtgaggtgggcaggatggcaggtgctgagctgtgcagtctttaggttttattcc

SEQ ID NO: 29923 - DNA, 110 bp, synthetic construct; identical to SEQ ID NO: 29921
  source 1..110: mol_type = other DNA

SEQ ID NO: 29924 - DNA, 110 bp, synthetic construct; identical to SEQ ID NO: 29922
  source 1..110: mol_type = other DNA

SEQ ID NO: 29925 - DNA, 110 bp, synthetic construct
  source 1..110: mol_type = other DNA
gtcaggttcttaatccactgagccacgacaggaactctgcagaccccactttaatagctgtgtagtattctaccatacgaacgtgtctccatttaacaagtccctagctg

SEQ ID NO: 29926 - DNA, 110 bp, synthetic construct
  source 1..110: mol_type = other DNA
agctgtgtagtattctaccatacgaacgtgtctccatttaacaagtccctagctgctggacagttaggtttattgtgtccttgctattgccaacagcagggtggggggac

SEQ ID NO: 29927 - DNA, 110 bp, synthetic construct
  source 1..110: mol_type = other DNA
gtgtttgttgtcacttatttgtcattgatttgtaggaattgtcactcttccatgtaaagagctttaattatcaagagctcgtgttgattgtgttgagtttgaacaacaga

SEQ ID NO: 29928 - DNA, 110 bp, synthetic construct
  source 1..110: mol_type = other DNA
acagttcccctggtgtgatgttctctgggaagtaggtagaggagtgacgagggtggcttcgtcctggccttctctggggccttcaagaacacacctggtttctatttatg

SEQ ID NO: 29929 - DNA, 110 bp, synthetic construct
  source 1..110: mol_type = other DNA
agaaaatgggtacatgtaaagttgggaaggagattgattgatctgcgggggagcactgtcgtactgccagagcatcgaaagtagagtcttctctgcaagcagcttaggtt

SEQ ID NO: 29930 - DNA, 110 bp, synthetic construct
  source 1..110: mol_type = other DNA
ctgtcgtactgccagagcatcgaaagtagagtcttctctgcaagcagcttaggttaatagccagaagagcctatctgggaaggagattcatcagatcctaacacagcagt

SEQ ID NO: 29931 - DNA, 110 bp, synthetic construct
  source 1..110: mol_type = other DNA
ggattcagaaaagagttacagaggattggatgattgtgttggacttagagaagttgactggtgtttagactatggtagcaagttgggtagggtcatctatccaaatctgt

SEQ ID NO: 29932 - DNA, 110 bp, synthetic construct
  source 1..110: mol_type = other DNA
gactggtgtttagactatggtagcaagttgggtagggtcatctatccaaatctgtgacttcaatctttttgaatggctctgccattcattaagttgcttatgccagaaac

SEQ ID NO: 29933 - DNA, 110 bp, synthetic construct
  source 1..110: mol_type = other DNA
aaaagttagaagacagcagtgatgcctccacgctctccgttgttgcctagctcagtgacataatgacaggctaaccatttgtaattccttggttaaatactaagaaatat

SEQ ID NO: 29934 - DNA, 110 bp, synthetic construct
  source 1..110: mol_type = other DNA
ccaaaacatattggatcagaatctctagaagtggagccaatgaatcttctcagagagctttttatgtttccaccagctttttggggccacgcccatggcatttggaagtt

SEQ ID NO: 29935 - DNA, 110 bp, synthetic construct
  source 1..110: mol_type = other DNA
tagaagtggagccaatgaatcttctcagagagctttttatgtttccaccagctttttggggccacgcccatggcatttggaagttcccaggctgggggtcgaatcagagc

SEQ ID NO: 29936 - DNA, 110 bp, synthetic construct
  source 1..110: mol_type = other DNA
acagagactcagaaatccacactatgactgctggctgtgatgagagctataaaggtagtcagcagaatgttgtattatttcccagggtccatgccaacctggcctcccgg

SEQ ID NO: 29937 - DNA, 110 bp, synthetic construct
  source 1..110: mol_type = other DNA
tagtcagcagaatgttgtattatttcccagggtccatgccaacctggcctcccgggcatctcttgccctgaggaaccctcctcaagtccaagctggggttcacacagcca

SEQ ID NO: 29938 - DNA, 110 bp, synthetic construct
  source 1..110: mol_type = other DNA
tttgaggatggattgtggctgctccggttgcaggagctcctagaggatggccagatggatcagttccacaaagccctgatagagctgaacatggactccccggaggagct

SEQ ID NO: 29939 - DNA, 110 bp, synthetic construct
  source 1..110: mol_type = other DNA
cctggttttcacatctgtaaagtggaagtaatagtactgcctgctctgtggggttgggaggattctgtgagcccacgatgcgtagaaagtgcttagtatggcacctggca

SEQ ID NO: 29940 - DNA, 110 bp, synthetic construct
  source 1..110: mol_type = other DNA
gggaggattctgtgagcccacgatgcgtagaaagtgcttagtatggcacctggcaccggcaggaatgcaggaaatggttctcgtcaccatcaccaccatttcctcctccg

SEQ ID NO: 29941 - DNA, 110 bp, synthetic construct
  source 1..110: mol_type = other DNA
tggtacaggaagcacgaggcgcgagcactcccggccttcctccaggctgctgccaatattgtgcggagaagaatagctgaagaacaaggaaaaaaaatcttaacgttttc

SEQ ID NO: 29942 - DNA, 110 bp, synthetic construct
  source 1..110: mol_type = other DNA
atattgtgcggagaagaatagctgaagaacaaggaaaaaaaatcttaacgttttcttttaacagcgtgaactttgagacactgtctgactcatgttttaaagtctcttca

SEQ ID NO: 29943 - DNA, 110 bp, synthetic construct
  source 1..110: mol_type = other DNA
agctgttgtgctacttatctgttgttgcatagcagatgagctcaaaatttagaagcttaggagttcccttgtggcatagcagggtaaggatccagtgttgtcatcgcagt

SEQ ID NO: 29944 - DNA, 110 bp, synthetic construct
  source 1..110: mol_type = other DNA
tgcatggtccacccttgggaagctggatctggggaagagatctgtgcaggccacacattcaggcttggagccatttgaaaagggaagggtgagatgggtcagaaggggaa

SEQ ID NO: 29945 - DNA, 110 bp, synthetic construct
  source 1..110: mol_type = other DNA
cccagccaatctgtggccccatagtttgtaatgtctggctggccagccatgtgccatcctcaatagctggcaagcatcaggcatttataaatcagatgataccagttttt

SEQ ID NO: 29946 - DNA, 110 bp, synthetic construct
  source 1..110: mol_type = other DNA
ttctcctttaacgctgaagcctttcctcaagagtttgcctctgttcgtggccaatgcggatcaaggagctgggagaaagctggcaaggttgaccagatgcccagctccta

SEQ ID NO: 29947 - DNA, 110 bp, synthetic construct
  source 1..110: mol_type = other DNA
tgatgagagggtttgctgctggagctgcctctcttatcaggaaacccgggagctggcacacgtctccctgtgctgaattgtcaggacggctggaactctggactggtcca

SEQ ID NO: 29948 - DNA, 110 bp, synthetic construct
  source 1..110: mol_type = other DNA
gcacacgtctccctgtgctgaattgtcaggacggctggaactctggactggtccaatcagtgaacacatactggaggggtctcgtgcactcactgcaaacctagtttgca

SEQ ID NO: 29949 - DNA, 110 bp, synthetic construct
  source 1..110: mol_type = other DNA
tggtcatctagtctttgggccttggttgatgctatgatcggttctttgcacaccctcctgcctggattcttctccctctggattgtcttctcccttgtttgtgcatcact

SEQ ID NO: 29950 - DNA, 110 bp, synthetic construct
  source 1..110: mol_type = other DNA
cccactgctcctgctgttaggcaggctgggaggagacattgaggcagggattgctacgtattcacctacgctacccatatttagccagaggtgatggtagttttcatagt

SEQ ID NO: 29951 - DNA, 110 bp, synthetic construct
  source 1..110: mol_type = other DNA
acgtattcacctacgctacccatatttagccagaggtgatggtagttttcatagtccttagtagcctggaaaaccacgagcaaataatgtgacttagagtcctcactaaa

SEQ ID NO: 29952 - DNA, 110 bp, synthetic construct
  source 1..110: mol_type = other DNA
gctgagaccctgtgacattttcccaacagggggctcccctctgtgtccaggcgaggtgtcatgggcctgggatctggctcagtatgcgatgcacctgcccctgggtcatc

SEQ ID NO: 29953 - DNA, 110 bp, synthetic construct
  source 1..110: mol_type = other DNA
gtggtgaggagggagttaacacgagcagggcacagtgtggatttggactaagtaaatgtttttggtggtacaggagtcacctggaatggccaggagattttgtccctaga

SEQ ID NO: 29954 - DNA, 110 bp, synthetic construct
  source 1..110: mol_type = other DNA
tcacctccctgggttccagagtctgtggctgaacaggagggtgccggggacaggcgaccagctgggctcgagttgtctgcattgggttctttgcccccattaggttgttc

SEQ ID NO: 29955 - DNA, 110 bp, synthetic construct
  source 1..110: mol_type = other DNA
gaccagctgggctcgagttgtctgcattgggttctttgcccccattaggttgttcccagactggatgattcattctcccccctcccccgctttctgaggggacctcaatg

SEQ ID NO: 29956 - DNA, 110 bp, synthetic construct
  source 1..110: mol_type = other DNA
ccaaactttgagtataaacttagtagcatgatcggagctttcaactgctgagttacccagcaaggatggaggatggactattcctgacccagtgtcaggtatagggaggc

SEQ ID NO: 29957 - DNA, 110 bp, synthetic construct
  source 1..110: mol_type = other DNA
cccagcaaggatggaggatggactattcctgacccagtgtcaggtatagggaggctgaggagctccctgatgacagccttgctggggcccacagagtccctcttctttaa

SEQ ID NO: 29958 - DNA, 110 bp, synthetic construct
  source 1..110: mol_type = other DNA
aaaaatagaagccatcagagagatggatgctttgaactttctgttctccactctgcctgcccactttcaattatatctttgcctgcatccgtctcgtcttccttcccacg

SEQ ID NO: 29959 - DNA, 110 bp, synthetic construct
  source 1..110: mol_type = other DNA
ttcaaagctggtgttcagtggtctggaggtctgctttctggaataaaaaaatgcttcattaacatcttccacttgttggtggttttagttgtgcagaagaactcaaagat

SEQ ID NO: 29960 - DNA, 110 bp, synthetic construct; identical to SEQ ID NO: 29959
  source 1..110: mol_type = other DNA

SEQ ID NO: 29961 - DNA, 110 bp, synthetic construct
  source 1..110: mol_type = other DNA
tgcagacgtatttccaaactccctttcctcctacttggtagacagaagaagccataggagggagttcctgttgtgacacagtagaaactgactggtatccatgagaatgt

SEQ ID NO: 29962 - DNA, 110 bp, synthetic construct
  source 1..110: mol_type = other DNA
aaactccctttcctcctacttggtagacagaagaagccataggagggagttcctgttgtgacacagtagaaactgactggtatccatgagaatgtgggttcaatccctgg

SEQ ID NO: 29963 - DNA, 110 bp, synthetic construct
  source 1..110: mol_type = other DNA
gaagagaattgccaagtggcacaagaaaggctacatcaataaattgtccctagatcaagctatacctaaagccaactatacttccttaaacttcttggttactaaggggg

SEQ ID NO: 29964 - DNA, 110 bp, synthetic construct
  source 1..110: mol_type = other DNA
caagctatacctaaagccaactatacttccttaaacttcttggttactaagggggttaatttcacttgttttacattattaaatacagtgaacttggagttcctattgtg

SEQ ID NO: 29965 - DNA, 110 bp, synthetic construct
  source 1..110: mol_type = other DNA
gaggtcaccacactgctctcagggacaaatgaccccagcaagaccatcagttccaagagagcatgtgattcatcatcaaagtcattccctggatgtttctaacttgaatt

SEQ ID NO: 29966 - DNA, 110 bp, synthetic construct
  source 1..110: mol_type = other DNA
acttgtgaaaagcctttaaggacagggagcccctaagcttttggacaaatcaggcttgtcctgaaattgacatatgcctaactgtggcaagggctttacttccctctggg

SEQ ID NO: 29967 - DNA, 110 bp, synthetic construct
  source 1..110: mol_type = other DNA
ttgtcctgaaattgacatatgcctaactgtggcaagggctttacttccctctgggtggctaggacttgagggaggcatggctttgtggttgaatggatttaggagggagt

SEQ ID NO: 29968 - DNA, 110 bp, synthetic construct
  source 1..110: mol_type = other DNA
ttctagcccccttcagccatgttttagtaatgggggtttccaggggaaggatcccaagggagtgagcaccccacctcccccatttatatttaatcagatgctaagaggtc

SEQ ID NO: 29969 - DNA, 110 bp, synthetic construct
  source 1..110: mol_type = other DNA
gaagtgtagttttgaccaaacaggtgctgggaagaacacaacagagtttgcctatatgaaggcagaacagtagatagatgtgaaagctgtcagataaaccatcaagcaat

SEQ ID NO: 29970 - DNA, 110 bp, synthetic construct
  source 1..110: mol_type = other DNA
agttgctgatgagtgtgtgtggaaggggcagtttcaccaactgagttgatccattggtctcgtgtgtgtatcggctgtcgctgtcctaacgtgggaactgaagttctctc

SEQ ID NO: 29971 - DNA, 110 bp, synthetic construct
  source 1..110: mol_type = other DNA
acaaaaggcacctactgaactactaggaatggaattctattcatctctttaccccagatgtgtcctgggcaggaatgaccatctgagctaggaggatggcatttggagga

SEQ ID NO: 29972 - DNA, 110 bp, synthetic construct
  source 1..110: mol_type = other DNA
cgtcctcagcctaggagatgagcagcagctgcagcccagggtgtcagctgctcggaagctgggaaggggtcagaacaacagctccatgacatgctactcaaccgcctcta

SEQ ID NO: 29973 - DNA, 110 bp, synthetic construct
  source 1..110: mol_type = other DNA
ttccagatggagacactgaggacagcagattagaaagattttactcaagctcagttgtgcgactagttgacaacatcagtgtgaccaaagcttctcaaccgattcaaagg

SEQ ID NO: 29974 - DNA, 110 bp, synthetic construct
  source 1..110: mol_type = other DNA
tagcctgggaacatccatatgccgtgagtgcggccctagaaaaggtaaagaggcaaaaaaaatatatatataggtatgttaatattttttttctttttatagctgctcct

SEQ ID NO: 29975 - DNA, 110 bp, synthetic construct; identical to SEQ ID NO: 29974
  source 1..110: mol_type = other DNA

SEQ ID NO: 29976 - DNA, 110 bp, synthetic construct
  source 1..110: mol_type = other DNA
agttcaggtcaccgctgggcagtctgggctggtgaagacactcaccctaagaatatttcagccccagtaattagtggaggcctggagggtttcatagggaccgtagggtg

SEQ ID NO: 29977 - DNA, 110 bp, synthetic construct
  source 1..110: mol_type = other DNA
aaggcagagtttgtggccacagaaacaggactacctctcccaggaggtcaggaagctatgcagatcaccttgaaaaaggcccgtcactgggagttcccgccgtggctcag

SEQ ID NO: 29978 - DNA, 110 bp, synthetic construct
  source 1..110: mol_type = other DNA
gccacagaaacaggactacctctcccaggaggtcaggaagctatgcagatcaccttgaaaaaggcccgtcactgggagttcccgccgtggctcagtggttaacaaatccg

SEQ ID NO: 29979 - DNA, 110 bp, synthetic construct
  source 1..110: mol_type = other DNA
caccatgatgggaactcctacattagatttttaatcataaaaatataacagcttatataatgactagtatttattaaaggcacgcatcatcctaaatagcctgctaagag

SEQ ID NO: 29980 - DNA, 110 bp, synthetic construct
  source 1..110: mol_type = other DNA
tataatgactagtatttattaaaggcacgcatcatcctaaatagcctgctaagagttttatatgctttttttcattccctgctcaaatccactccttgaagcaggcacta

SEQ ID NO: 29981 - DNA, 110 bp, synthetic construct
  source 1..110: mol_type = other DNA
aacatctctgtctctctctcaaacacacacacacacagagccagagacgtctggcagagtcattcctgtataatctttctacaattccacccagcctcctagctttgcat

SEQ ID NO: 29982 - DNA, 110 bp, synthetic construct
  source 1..110: mol_type = other DNA
agagtcattcctgtataatctttctacaattccacccagcctcctagctttgcatcagaagggttttctagagctctctgtgcagcccttgtctctggagaaaaagaatg

SEQ ID NO: 29983 - DNA, 110 bp, synthetic construct; identical to SEQ ID NO: 29981
  source 1..110: mol_type = other DNA

SEQ ID NO: 29984 - DNA, 110 bp, synthetic construct; identical to SEQ ID NO: 29982
  source 1..110: mol_type = other DNA

SEQ ID NO: 29985 - DNA, 110 bp, synthetic construct
  source 1..110: mol_type = other DNA
ctattgtctgtgggttttatgctccagaggcttttttttgtcataatccaaagcctgcagaaccctgggtgggtggaggcagggggaggaagcgtgggagggccagggga

SEQ ID NO: 29986 - DNA, 110 bp, synthetic construct
  source 1..110: mol_type = other DNA
tgcagaaccctgggtgggtggaggcagggggaggaagcgtgggagggccaggggatgtcagagggagacactagggggcaacgcctggcatccccagaaaaccagacttc

SEQ ID NO: 29987 - DNA, 110 bp, synthetic construct
  source 1..110: mol_type = other DNA
agcaggtgaggggagtggagtgactgaaatttcactttctcagaaacagcagattcagcaactgtcaccactacaggagacatggatctgcaccagctcgatttctctgg

SEQ ID NO: 29988 - DNA, 110 bp, synthetic construct
  source 1..110: mol_type = other DNA
cagcaactgtcaccactacaggagacatggatctgcaccagctcgatttctctgggcctttatctccacagagagagcgacagcaatcagggccttcctgtcggccaagg

SEQ ID NO: 29989 - DNA, 110 bp, synthetic construct
  source 1..110: mol_type = other DNA
gcccctgtcatgaagattacatttatacaacactgtgatcagatataaatgcattggattatatggactattacatgccactgtcactagatgcctatatttgtcagaaa

SEQ ID NO: 29990 - DNA, 110 bp, synthetic construct
  source 1..110: mol_type = other DNA
gggcctccataaacatgttatagggccaattcctgagataaatctcctcttacgtatgtctctatgtagcttattggttctgtttctctggagaaccctgattaatacac

SEQ ID NO: 29991 - DNA, 110 bp, synthetic construct
  source 1..110: mol_type = other DNA
ctggtgctgttccctttacctggagtccctcccccatgatggccacacagctagatctctcttcacattcagatctcaggtcaaatatggtccaattagagaatctttct

SEQ ID NO: 29992 - DNA, 110 bp, synthetic construct
  source 1..110: mol_type = other DNA
aagacaagagaccaaaccactttctccttcctagttccctagtctcaaggaagttggttagagtgactcggcctggatcagcttgggtcgcacagctgtagccagaggga

SEQ ID NO: 29993 - DNA, 110 bp, synthetic construct
  source 1..110: mol_type = other DNA
ccttcctcccagtatctaaaaccaaaatgttctctgaaagattagcatccacattcctggtcctagtgggttcttttccctgagcttttggattaaatggggtccctggg

SEQ ID NO: 29994 - DNA, 110 bp, synthetic construct
  source 1..110: mol_type = other DNA
agagtgctttgttcagagaagcatggtgcccatgcttccctgggggatctttgagagcagcctgctaacaggtgataagactttaggccgagcccagggtgaggggtggc

SEQ ID NO: 29995 - DNA, 110 bp, synthetic construct
  source 1..110: mol_type = other DNA
agcagcctgctaacaggtgataagactttaggccgagcccagggtgaggggtggcttctagcagctgtggccagaatcagccaaatttgggtctgagactcacctcttcc

SEQ ID NO: 29996 - DNA, 110 bp, synthetic construct
  source 1..110: mol_type = other DNA
cgtacatctctctcgggggcagcaactccacgtgtggcctcaccctgggagtgcgggctacacatgaccttgattaggcttactttttatttctttcggtgcttctattg

SEQ ID NO: 29997 - DNA, 110 bp, synthetic construct
  source 1..110: mol_type = other DNA
tctttggtttaaagaatttctctgggcttcttacttccaatcagaagattccacacacatgttgtctgacactttagccactggccagatgtggctactcagaacttcaa

SEQ ID NO: 29998 - DNA, 110 bp, synthetic construct
  source 1..110: mol_type = other DNA
cacatgttgtctgacactttagccactggccagatgtggctactcagaacttcaactgtggggtgcgcaaattgagatggactgtaagggtgaaatacgcactgaatttg

SEQ ID NO: 29999 - DNA, 110 bp, synthetic construct
  source 1..110: mol_type = other DNA
agtgttccaagagagggaggaacatcaacttctaaaacaaaggcagtcagaagcatatgggatgaggggagagaaccaatactccagcacttgtgccgcgaaaaggatgt

SEQ ID NO: 30000 - DNA, 110 bp, synthetic construct
  source 1..110: mol_type = other DNA
aaaaaaaaaaaaattcttaacttttttgtttcttttttggccgtcccatggcatatggagttcctgggcaaggatcagatccgagacacagttgcaacctacgctgcagc

SEQ ID NO: 30001 - DNA, 110 bp, synthetic construct
  source 1..110: mol_type = other DNA
cttaacttttttgtttcttttttggccgtcccatggcatatggagttcctgggcaaggatcagatccgagacacagttgcaacctacgctgcagctgcagcaacgccaga

SEQ ID NO: 30002 - DNA, 110 bp, synthetic construct
  source 1..110: mol_type = other DNA
tgagctgagtctgtgacctacaccgcagctcaagaacagtgccggatccttaaaccactgagaggccaggggtcaaacccgtgtcctcatggaaactagtttgttaccgc

SEQ ID NO: 30003 - DNA, 110 bp, synthetic construct
  source 1..110: mol_type = other DNA
cactgagaggccaggggtcaaacccgtgtcctcatggaaactagtttgttaccgctgagccacaatgggaactccagaattaacacccttataaaagagggctttaagag

SEQ ID NO: 30004 - DNA, 110 bp, synthetic construct
  source 1..110: mol_type = other DNA
gagttctcatctctcctgatccacctgggcctcaggactgttcattctccttctgcctctcaggcctggcccagctcttttcctaagtcctctccctgcagaggccccag

SEQ ID NO: 30005 - DNA, 110 bp, synthetic construct
  source 1..110: mol_type = other DNA
tgtgtagaactcaaagagactgagctgtggtggagtatttaggctggtgggggtcctggggtagggatgtcaatgatgtggcgttcgcacacacagtaggcccataagtg

SEQ ID NO: 30006 - DNA, 110 bp, synthetic construct
  source 1..110: mol_type = other DNA
aagtaggacaaccgaaatagggataagagatttacaaatgaaaaatcgttgtgcctgaggaagaggagtttgctgttcagtgtacagcggtcgccagctgtacctaatgg

SEQ ID NO: 30007 - DNA, 110 bp, synthetic construct
  source 1..110: mol_type = other DNA
gtcagcataacccatagttaaattggtcatttcttttaatactttttgtataaattacatgttataagtaccaacagaatcctcaaggatcaggacattcaacaaaactg

SEQ ID NO: 30008 - DNA, 110 bp, synthetic construct; identical to SEQ ID NO: 30007
  source 1..110: mol_type = other DNA

SEQ ID NO: 30009 - DNA, 110 bp, synthetic construct
  source 1..110: mol_type = other DNA
ggcgtaatccccaaattcagaatgatttaaaatgactcctgatgccaattaccaccttcacagacattcacgcatcaagggagcccagcccgggaaccaccagccacttg

SEQ ID NO: 30010 - DNA, 110 bp, synthetic construct
  source 1..110: mol_type = other DNA
tacccaaagcaatctacagattcaatgtaatccttatcaaaataccaacggcattttccacagaactggaattttaaggaaccacaaaagactcggaatatccaaagcta

SEQ ID NO: 30011 - DNA, 110 bp, synthetic construct; identical to SEQ ID NO: 30010
  source 1..110: mol_type = other DNA

SEQ ID NO: 30012 - DNA, 110 bp, synthetic construct
  source 1..110: mol_type = other DNA
agagtaaaataaatgattcaagcaacaaccaatagtgaaggtcagattaggaccattagacgaaaggtggacagacctggaaatctgtaggttgtcagaaagttacccta

SEQ ID NO: 30013 - DNA, 110 bp, synthetic construct
  source 1..110: mol_type = other DNA
ttagacgaaaggtggacagacctggaaatctgtaggttgtcagaaagttaccctatggactttggtggccaaatgggttaacacaacttgacaacaaagggctatgccaa

SEQ ID NO: 30014 - DNA, 110 bp, synthetic construct
  source 1..110: mol_type = other DNA
cactcctggcaaacgggcttctttccaaggaccttcccccagaccccccgccccgcacatcccgggagttttcacccccgggagtcttctgtaaaatcagatgtcgagct

SEQ ID NO: 30015 - DNA, 110 bp, synthetic construct
  source 1..110: mol_type = other DNA
cacatcccgggagttttcacccccgggagtcttctgtaaaatcagatgtcgagctacgagctacgctgtgtttagttcaggcctgtctccttcaccatccttgtagcatc

SEQ ID NO: 30016 - DNA, 110 bp, synthetic construct
  source 1..110: mol_type = other DNA
ctttttctttcattccatgttcaatttgtcagcaagtcctatcagctgacatacatatcttcaacatagattcagaatctaactaaatttcactaccggttgtatcttgg

SEQ ID NO: 30017 - DNA, 110 bp, synthetic construct
  source 1..110: mol_type = other DNA
ctgttctttgcttaggctcagggatcaggacacctctatacttgctgtccttctgttcctaggacactgcctctctctgcatggtctgatatggcccattacggctgcca

SEQ ID NO: 30018 - DNA, 110 bp, synthetic construct
  source 1..110: mol_type = other DNA
ctctctcttgggtttgaccaagtacagggtcaatccaggaaagtggagggccagcctccttaaattttataccctagctgcttctcttgcctcatcctggtcctggccct

SEQ ID NO: 30019 - DNA, 110 bp, synthetic construct
  source 1..110: mol_type = other DNA
atgccaggagctagcttaccacttggaacaaatggtgaataaacaccagtggtcagagggaaatggaagatgatcatcttttatctaagacactgagactggttctaaag

SEQ ID NO: 30020 - DNA, 110 bp, synthetic construct
  source 1..110: mol_type = other DNA
gagggaaatggaagatgatcatcttttatctaagacactgagactggttctaaagcaacctccttgctccacatggttctggccagtccctccccatcccctgtccttct

SEQ ID NO: 30021 - DNA, 110 bp, synthetic construct
  source 1..110: mol_type = other DNA
cccaagcagaaaacatcaaggagtctttggcaacaaattccaggtaaatactagtggttgcttcttttcatctatgttccctcttcctggagccctctcagaagggcact

SEQ ID NO: 30022 - DNA, 110 bp, synthetic construct
  source 1..110: mol_type = other DNA
aagacaagcggtgtggagaagctagctctccatgaccatacagattagatgcatgtaacagatgcctactgtctcccagaatgttctcagataactgatgttctcatggc

SEQ ID NO: 30023 - DNA, 110 bp, synthetic construct
  source 1..110: mol_type = other DNA
atctgtgttctccaaattgtcgagaacactgggctgaggatggagaggtcagcattctgatcccagccctttcacttgttcactgtgacatcttagacaaggtgattcct

SEQ ID NO: 30024 - DNA, 110 bp, synthetic construct
  source 1..110: mol_type = other DNA
agtgccctgctgtggccttgcactgtagctggcccatagcaggcactcaggaacacctgtgcaataaatgaatgaaggaaggagggaaggaaggatgaatcggaaaacag

SEQ ID NO: 30025 - DNA, 110 bp, synthetic construct
  source 1..110: mol_type = other DNA
ctccaggcaaaaaagatcaaataattcacaagggtaacagaattaggctgtcatgagatgactccaaagcaacacacaaggccaagaaatacaaagcagcattttcaaga

SEQ ID NO: 30026 - DNA, 110 bp, synthetic construct
  source 1..110: mol_type = other DNA
atggctcccaaagctaataggagctgggtaggccaacttctctggatctcattttctcacctgagaaatggggatcacttctttctactacagtgtgatgctgggggtat

SEQ ID NO: 30027 - DNA, 110 bp, synthetic construct
  source 1..110: mol_type = other DNA
ggtaagactgaagaggtgatccagaatcccattttgaagcttgaactaatcccgctttggagctggtgggactaataaaaggtagtaatcaaagagtgacacgagtagac

SEQ ID NO: 30028 - DNA, 110 bp, synthetic construct
  source 1..110: mol_type = other DNA
gagcaatggtttgaggaatgaatgggagggagaggaagtggaaacagttgagatcgtgttagtttccttgagctgctgtaataaattaccatgaagggagtggcttccac

SEQ ID NO: 30029 - DNA, 110 bp, synthetic construct
  source 1..110: mol_type = other DNA
ctgattcaggaagtctgttggaggtctgcgatgctgtacttctaaccagctcctgggtaattaatgccattgctgctggtctggggaccccactgagtaagggctaagac

SEQ ID NO: 30030 - DNA, 110 bp, synthetic construct
  source 1..110: mol_type = other DNA
gaccacattgccactccttgaaagtctatgtcacattttctgcaaccagtgagcatgaatgtctatagcttgaaagagatggctgggtgctttctgcattgatcctacta

SEQ ID NO: 30031 - DNA, 110 bp, synthetic construct
  source 1..110: mol_type = other DNA
gtttttgttttgctatttgaatttttttgtacgttcataggagagaactgggggaaatgcaaaactacaatgccagtgtcatcttccaggaagcagctttttctctttta

SEQ ID NO: 30032 - DNA, 110 bp, synthetic construct
  source 1..110: mol_type = other DNA
aatgcaaaactacaatgccagtgtcatcttccaggaagcagctttttctcttttaaacaacttaatctgacaatgtctcttttaattagtgagtttagtacaatggcaca

SEQ ID NO: 30033 - DNA, 110 bp, synthetic construct
  source 1..110: mol_type = other DNA
tccagaaattcaaaccctaattcatagtccaaacgacttctcgcagagctatgggtaaaagtggatcaggatgtcatatgcggtgggggtgatttggggacctattctgg

SEQ ID NO: 30034 - DNA, 110 bp, synthetic construct
  source 1..110: mol_type = other DNA
acgaggtcctgggatcacccttaaacctatgaacccttgtgagtttgctgcacataccgctctgctgcttggacgtctaatgagctttgaccttgactcaagacagatcc

SEQ ID NO: 30035 - DNA, 110 bp, synthetic construct
  source 1..110: mol_type = other DNA
ggttcccttttgcaggaaagctaatagcggctttcttagggcccagcactttctgatttcagctcatagcatgagtctatctattgggacctcatgttcccaggggccat

SEQ ID NO: 30036 - DNA, 110 bp, synthetic construct
  source 1..110: mol_type = other DNA
atttcagctcatagcatgagtctatctattgggacctcatgttcccaggggccatactttctaagccaaatatcgaaagaaaatttcacaatggttgagaaacaaaatca

SEQ ID NO: 30037 - DNA, 110 bp, synthetic construct
  source 1..110: mol_type = other DNA
catagaacaagctcaaactagcttgttggaggatgtcaggccaggtggagcaaatggagtcacccgagctgaggccaccctgaaccatccagccctagctgacttgccaa

SEQ ID NO: 30038 - DNA, 110 bp, synthetic construct
  source 1..110: mol_type = other DNA
ggagtcacccgagctgaggccaccctgaaccatccagccctagctgacttgccaactgattcaagatgcatattagccagggatggcctaagtcagtagaaccctccagg

SEQ ID NO: 30039 - DNA, 110 bp, synthetic construct
  source 1..110: mol_type = other DNA
tgaagcccagcactcaaaggtttctcatggacaaaatctctctttcctctcttcccaacatacattatactatctgccccatcaccacctctattctttagaaatgtcaa

SEQ ID NO: 30040 - DNA, 110 bp, synthetic construct
  source 1..110: mol_type = other DNA
caacatacattatactatctgccccatcaccacctctattctttagaaatgtcaaccagatacctaaaatgggacccttcgatttctttaacattttcttttcagtctta

SEQ ID NO: 30041 - DNA, 110 bp, synthetic construct
  source 1..110: mol_type = other DNA
aaatgccccgttataaacgtcatccttaatttatccttattgtgtgcttgtggggggaccactagcgtttcagcagaagccccacgtggaagggacgcctggtggaggca

SEQ ID NO: 30042 - DNA, 110 bp, synthetic construct
  source 1..110: mol_type = other DNA
ataacttcttaactcacgctcgccaacatctcagcgaaatagctcaacatccccggaggaaaaataagtatcactgtcggacaccaacccagaacagaatgagctctcgc

SEQ ID NO: 30043 - DNA, 110 bp, synthetic construct
  source 1..110: mol_type = other DNA
ggtctattggtttccgcaggctgccataaggaagcaccacgaactggatagcttacaatggtaggaatttactggctcacagctctgcgggacagacgtctaaaatcaag

SEQ ID NO: 30044 - DNA, 110 bp, synthetic construct
  source 1..110: mol_type = other DNA
caatggtaggaatttactggctcacagctctgcgggacagacgtctaaaatcaaggtgtgggcagggccatgccccctctgacacctgcaggggagaacccttcctggcg

SEQ ID NO: 30045 - DNA, 110 bp, synthetic construct
  source 1..110: mol_type = other DNA
tggcacagctgctcccttaattcagaaagatcacactgcaccatatgccaagaaggggagggagggagcccattagcattcattgtacacagcttttcatttggaaaagc

SEQ ID NO: 30046 - DNA, 110 bp, synthetic construct
  source 1..110: mol_type = other DNA
tgcctacaaaagcctcacacatttaggaccggttgagagctattagtttatggcctcagtttttttatatgtagattaacatttaattacataaagtaaaagtgaggatt

SEQ ID NO: 30047 - DNA, 110 bp, synthetic construct
  source 1..110: mol_type = other DNA
agaaattaaatgtgaaggcttctaaggcacaagaggaagagctgggagttacatgaatgacctctacgtggcacatccaaagctgactgaagacaaatgcatttcccaga

SEQ ID NO: 30048 - DNA, 110 bp, synthetic construct
  source 1..110: mol_type = other DNA
attgtaaatcaactatactttaataaattaaaaaaaatactttctagtagagctttacctccccccaccccgttgataggaagcctgaccatgtgatttggggtgcttct

SEQ ID NO: 30049 - DNA, 110 bp, synthetic construct
  source 1..110: mol_type = other DNA
tacctccccccaccccgttgataggaagcctgaccatgtgatttggggtgcttctccccggaggaagattagatgcccctgccctgatggtagactttgctatgattcct

SEQ ID NO: 30050 - DNA, 110 bp, synthetic construct
  source 1..110: mol_type = other DNA
ataagaaatcctgccttcctggaatcttgttcattttagaagttttacctccaaacctacttgttaaaaaaaaaaaataggggctggcagagaagggttaaacaatagtc

SEQ ID NO: 30051 - DNA, 110 bp, synthetic construct
  source 1..110: mol_type = other DNA
cctacttgttaaaaaaaaaaaataggggctggcagagaagggttaaacaatagtcagatttggagatattgcagacgtgttaggatcttgagctcaacctacctccccac

SEQ ID NO: 30052 - DNA, 110 bp, synthetic construct
  source 1..110: mol_type = other DNA
caccctggatctccactggtttatccccagcctatctcatgcctcctggtctggtctgtgtgtgccagtgtgggcatctgattcagctctctagactataaggctccctg

SEQ ID NO: 30053 - DNA, 110 bp, synthetic construct
  source 1..110: mol_type = other DNA
ctgtgtgtgccagtgtgggcatctgattcagctctctagactataaggctccctgggaccagagcttgcctttctcatccctgtaacctcacagcctgacacagctggca

SEQ ID NO: 30054 - DNA, 110 bp, synthetic construct; identical to SEQ ID NO: 30052
  source 1..110: mol_type = other DNA

SEQ ID NO: 30055 - DNA, 110 bp, synthetic construct; identical to SEQ ID NO: 30053
  source 1..110: mol_type = other DNA

SEQ ID NO: 30056 - DNA, 110 bp, synthetic construct
  source 1..110: mol_type = other DNA
gtcacagaaccaacattgatatgtgagtatgcaagacccctcactctgcaccatacaccagctttcaatcttcacgataattctatgacaagaagtctttagggtttcat

SEQ ID NO: 30057 - DNA, 110 bp, synthetic construct
  source 1..110: mol_type = other DNA
atgcactgagaagcatcagcagaatcaagtagcctgaaattcagccttagggcatctaaatgaaagctcttagctgccaaagccactagccacttctcagacccacacta

SEQ ID NO: 30058 - DNA, 110 bp, synthetic construct
  source 1..110: mol_type = other DNA
ctaaatgaaagctcttagctgccaaagccactagccacttctcagacccacactaaacattacatccagaggcagaggccgggactggcatctcttaggtctcctcattg

SEQ ID NO: 30059 - DNA, 110 bp, synthetic construct; identical to SEQ ID NO: 30057
  source 1..110: mol_type = other DNA

SEQ ID NO: 30060 - DNA, 110 bp, synthetic construct; identical to SEQ ID NO: 30058
  source 1..110: mol_type = other DNA

SEQ ID NO: 30061 - DNA, 110 bp, synthetic construct
  source 1..110: mol_type = other DNA
agaaccagggggccaaagattcatgtcttctggaactcagagcagcacaaagaagggctccagtgacacaattccctcccttcgccccttcccttggcagattaagaagg

SEQ ID NO: 30062 - DNA, 110 bp, synthetic construct
  source 1..110: mol_type = other DNA
ggctccagtgacacaattccctcccttcgccccttcccttggcagattaagaagggtactgataatctccctctgttcccagactccagatgtctcagcaccgcttctgg

SEQ ID NO: 30063 - DNA, 110 bp, synthetic construct
  source 1..110: mol_type = other DNA
gttactggtaaacaaaaataaataagttttgtttactgggaagccagatctcccataataagctttgggctaggttctccccgaagcaggagcatgtggcattatagttt

SEQ ID NO: 30064 - DNA, 110 bp, synthetic construct
  source 1..110: mol_type = other DNA
taataagctttgggctaggttctccccgaagcaggagcatgtggcattatagtttaaggtgagtttgtttctttgaggctttgctctcccaatttctcaggccttaccta

SEQ ID NO: 30065 - DNA, 110 bp, synthetic construct
  source 1..110: mol_type = other DNA
tcaccagaataacaggcaaaggggaagcttgaagccaggttctctgacttgaagtccagcccttgttctgctgtttctccccgcttccctgatccgtagctgcctgagtc

SEQ ID NO: 30066 - DNA, 110 bp, synthetic construct
  source 1..110: mol_type = other DNA
ccagcccttgttctgctgtttctccccgcttccctgatccgtagctgcctgagtcggaagtggcgttatgagcaccaggctcagaatcaagtgttcaagcccagagcagg

SEQ ID NO: 30067 - DNA, 110 bp, synthetic construct
  source 1..110: mol_type = other DNA
aggacaaagacaaaaagaggtcaagacacaagaagtgagaacacagtatgcaggaagtggtccacagttttgaggggccagtaggttccaggttctaaaaatcagaccag

SEQ ID NO: 30068 - DNA, 110 bp, synthetic construct
  source 1..110: mol_type = other DNA
acataagaccctgtgtggctacgctgctggggtggggacttccagccaccagtgcttgaaacccacctcagctacccacttccagcttcattcgggagatcaggccccac

SEQ ID NO: 30069 - DNA, 110 bp, synthetic construct
  source 1..110: mol_type = other DNA
ttgaaacccacctcagctacccacttccagcttcattcgggagatcaggccccacccagaccctcaggccactgtccagtgtgatgaggagtgaggtctgggcactatca

SEQ ID NO: 30070 - DNA, 110 bp, synthetic construct
  source 1..110: mol_type = other DNA
ggcgtcattgtcctagggcagttgttcctgaaccagcagcatcagcactgcccagtatcttatcaaattattgggccccaccccagacctactgaatcagaaactctgga

SEQ ID NO: 30071 - DNA, 110 bp, synthetic construct
  source 1..110: mol_type = other DNA
gccacgacaggaactccaggactttggattttaatcctaaatgtgatgggcagcagctagagtttttgagcaacagggtcacatgatctgttttgtttcgttttgttgtg

SEQ ID NO: 30072 - DNA, 110 bp, synthetic construct; identical to SEQ ID NO: 30071
  source 1..110: mol_type = other DNA

SEQ ID NO: 30073 - DNA, 110 bp, synthetic construct
  source 1..110: mol_type = other DNA
gtcgttccagcctttgggggttcggatctgccggtgggcatttcttaatgttctgggaagcacagagcgcctcgagctctctccctcgacctgggaaggatgctggggtg

SEQ ID NO: 30074 - DNA, 110 bp, synthetic construct
  source 1..110: mol_type = other DNA
gcatactaggttaagaatctgactgcagtggcttgggtcactgtgaaggcaccggttcgatccctggcccagtgcagtggatgaaaaagatctagcaaggcaacagctgt

SEQ ID NO: 30075 - DNA, 110 bp, synthetic construct
  source 1..110: mol_type = other DNA
ttcgatccctggcccagtgcagtggatgaaaaagatctagcaaggcaacagctgtgacggctcagatgcagtccctggtccaggaacttccatatgctgcgggtgcagcc

SEQ ID NO: 30076 - DNA, 110 bp, synthetic construct
  source 1..110: mol_type = other DNA
cgaatcggagctgtagcaaaatgttttaaaatccagtgccctgttgatagtctgtttccttcttttctttctaatattatcaatgctggagtgatgatgcttgagcctgt

SEQ ID NO: 30077 - DNA, 110 bp, synthetic construct; identical to SEQ ID NO: 30076
  source 1..110: mol_type = other DNA

SEQ ID NO: 30078 - DNA, 110 bp, synthetic construct
  source 1..110: mol_type = other DNA
tgagccacaacaggaactcctaagttcccattgtaatgacatgttgccctcgacgccagccgagcccgggcaagaaagttgaaatgggagtcaagagagttgatggttga

SEQ ID NO: 30079 - DNA, 110 bp, synthetic construct
  source 1..110: mol_type = other DNA
tccccaatccgttctccacccgaagccagaggcccgtttctaaaatgcagctgaccatccaggcttcagtctcaacccccactccaccagctcccagcaaactccccact

SEQ ID NO: 30080 - DNA, 110 bp, synthetic construct
  source 1..110: mol_type = other DNA
catccaggcttcagtctcaacccccactccaccagctcccagcaaactccccactccagtgtagccctcaaagccccacggagataaggtcttctttgcctttgcatctc

SEQ ID NO: 30081 - DNA, 110 bp, synthetic construct
  source 1..110: mol_type = other DNA
cagacctgtggtaggcggagttaggaaccttcatggtggggaaaagagtgaggatactgtgcacagagctgctgctgttcctttgctctgtgtccccagggaagttcctt

SEQ ID NO: 30082 - DNA, 110 bp, synthetic construct
  source 1..110: mol_type = other DNA
actgtgcacagagctgctgctgttcctttgctctgtgtccccagggaagttccttcatgtctctgaaactcccagcaaggccaatagcaactgtcaccgagagggctggc

SEQ ID NO: 30083 - DNA, 110 bp, synthetic construct
  source 1..110: mol_type = other DNA
tcagcttggtgtccacttgtccctgtgtctgtctcattcagccccatgccaggcaagagctggcagctcactgatgtggggcattttcaagaacaggaccactcatgctc

SEQ ID NO: 30084 - DNA, 110 bp, synthetic construct
  source 1..110: mol_type = other DNA
agagctggcagctcactgatgtggggcattttcaagaacaggaccactcatgctcactgtggtcacagattccttacgctggccttcaggggggcaaggaccgctccttg

SEQ ID NO: 30085 - DNA, 110 bp, synthetic construct
  source 1..110: mol_type = other DNA
tcacagagaaagtgagaaacaaagctcagaatggtacccttcgctgacccagtagccccagggcatgaatagctagctctaacatcactaaaaatgggggctgagagagg

SEQ ID NO: 30086 - DNA, 110 bp, synthetic construct
  source 1..110: mol_type = other DNA
ccccagggcatgaatagctagctctaacatcactaaaaatgggggctgagagaggacctgattgtgccctcttggctggcggggcccacccacagtcagcctgtgggcaa

SEQ ID NO: 30087 - DNA, 110 bp, synthetic construct
  source 1..110: mol_type = other DNA
ctccaacaaagtcttatttaaaattctgaggctgtggtcttatttccacatccatgtgagctggtcagatggagaagagaagaaagaagtgaggaaagggtgatctaata

SEQ ID NO: 30088 - DNA, 110 bp, synthetic construct
  source 1..110: mol_type = other DNA
gaatcctttggctcttggaggaaacagctcccagaaaaacacagatagtccctatacacaggcacacaccttgcttgcagtttggggccatgtatgggcatctgaggcca

SEQ ID NO: 30089 - DNA, 110 bp, synthetic construct
  source 1..110: mol_type = other DNA
atgactagcctcaggtccccagagcggggtccccaacctgaagccatagctcaggtcccttgctcactactaggccatcctgtctccctctgggtaacttgccaaagggg

SEQ ID NO: 30090 - DNA, 110 bp, synthetic construct
  source 1..110: mol_type = other DNA
tcccttgctcactactaggccatcctgtctccctctgggtaacttgccaaaggggtgacatggcttattgggtgcagagacagcaggagtcagacctggggacccagagg

SEQ ID NO: 30091 - DNA, 110 bp, synthetic construct; identical to SEQ ID NO: 30089
  source 1..110: mol_type = other DNA

SEQ ID NO: 30092 - DNA, 110 bp, synthetic construct; identical to SEQ ID NO: 30090
  source 1..110: mol_type = other DNA

SEQ ID NO: 30093 - DNA, 110 bp, synthetic construct
  source 1..110: mol_type = other DNA
tccagtaatcacaaagatgagacagctgacggtggcgaagtaccatccgagcctggggcctggaccctcactgctctccaccccgctcccaaaccccccagctggatccc

SEQ ID NO: 30094 - DNA, 110 bp, synthetic construct
  source 1..110: mol_type = other DNA
tagccttctgccttcatttgacattcattaaatgaatatttactgatcatctgtgatatgccagctgttagtgctacaacaatgaataatgtaaacatggtgcctgctgt

SEQ ID NO: 30095 - DNA, 110 bp, synthetic construct
  source 1..110: mol_type = other DNA
ctgccagcattcagcagatgttctgtggaaatcgttctacatgtggatggttttgttttttttgtttttttttttttaatgtgtttgtgggagaaggtgagcaccctgtc

SEQ ID NO: 30096 - DNA, 110 bp, synthetic construct
  source 1..110: mol_type = other DNA
agatgttctgtggaaatcgttctacatgtggatggttttgttttttttgtttttttttttttaatgtgtttgtgggagaaggtgagcaccctgtcttaactcctacacca

SEQ ID NO: 30097 - DNA, 110 bp, synthetic construct
  source 1..110: mol_type = other DNA
gagaccggatggcagtttgtgaattctggtgccccctagtgggcaaagagagcaaacctctggattcccaagttgctgagagtcagccttgtcaagtcagctgcgtggtg

SEQ ID NO: 30098 - DNA, 110 bp, synthetic construct
  source 1..110: mol_type = other DNA
acctctggattcccaagttgctgagagtcagccttgtcaagtcagctgcgtggtggttgccatgcgacacgtacttaacacgtgtaggcacttttacatttaatctaatg

SEQ ID NO: 30099 - DNA, 110 bp, synthetic construct
  source 1..110: mol_type = other DNA
agtttttatccaaaggctcggcgaccagagggcatggtgagaaccacagaaccaaaatactgtcataggcaagggtttggctgaagggcctgaactatgtaagcaccaaa

SEQ ID NO: 30100 - DNA, 110 bp, synthetic construct
  source 1..110: mol_type = other DNA
aatactgtcataggcaagggtttggctgaagggcctgaactatgtaagcaccaaagagggagaaagagatcaagcaacatatgaaaaagaggagcggggcccgatctcca

SEQ ID NO: 30101 - DNA, 110 bp, synthetic construct
  source 1..110: mol_type = other DNA
ccaagaaatgttaagtaagcccatgaccatgaccaaaaccaagaccatgctgccggtaagtggcagacctagaatttgaacccgggagtctgcttccggggttcacagct

SEQ ID NO: 30102 - DNA, 110 bp, synthetic construct
  source 1..110: mol_type = other DNA
gtaagtggcagacctagaatttgaacccgggagtctgcttccggggttcacagctactctgctgcactgtctctgtgtgccctgagggagccttagctttgcccggaaca

SEQ ID NO: 30103 - DNA, 110 bp, synthetic construct
  source 1..110: mol_type = other DNA
taaggatctagtgttgccacaagctgcgccatagatcgcagaggcggcttagatccactgtggctgtgactgtggcataagcctcagctgaagctccgatttgaccccta

SEQ ID NO: 30104 - DNA, 110 bp, synthetic construct; identical to SEQ ID NO: 30103
  source 1..110: mol_type = other DNA

SEQ ID NO: 30105 - DNA, 110 bp, synthetic construct
  source 1..110: mol_type = other DNA
cctacaatacacattttaaaggtcagtgtatcactaaaggtggcctttggggctgagactggttgctgagggggcgatgaggtttctgcccacgccgggagcccttcttg

SEQ ID NO: 30106 - DNA, 110 bp, synthetic construct
  source 1..110: mol_type = other DNA
aaaaattttatcagttggcctgtgcattgatgtgtggcgccacccatgtcaccaccagaactagctgactactctgatcacaattggggccttgctcttaaaaggaggca

SEQ ID NO: 30107 - DNA, 110 bp, synthetic construct
  source 1..110: mol_type = other DNA
cagaactagctgactactctgatcacaattggggccttgctcttaaaaggaggcagcaacttaatttcatcttttagaaccagaagtcagcgtgttgtgaagagggggaa

SEQ ID NO: 30108 - DNA, 110 bp, synthetic construct
  source 1..110: mol_type = other DNA
tgggggggggcttcccgtgcccaggtggcccatatcgacccctcccccatcccggggcattcacagctacatctaggggtcttaactcctagggcgtgaacctgtatgtg

SEQ ID NO: 30109 - DNA, 110 bp, synthetic construct
  source 1..110: mol_type = other DNA
gtaagagacaattttctttttctttttttccctcaagtatagttggtttacaacgttgtgagactattttcaagatgggcaaactgaggcccagaagagttgagacacag

SEQ ID NO: 30110 - DNA, 110 bp, synthetic construct
  source 1..110: mol_type = other DNA
tatggaagtgcaattgcatgaagacattcaagatacttttggacaagaagacaaatgaggttggatttacatgcacaaaaccgcaataatgaaacattgtgattttgcca

SEQ ID NO: 30111 - DNA, 110 bp, synthetic construct
  source 1..110: mol_type = other DNA
tgaggttggatttacatgcacaaaaccgcaataatgaaacattgtgattttgccagaagagtagaatataaatcagtggtacagaggatagagctgagaaacatacctgt

SEQ ID NO: 30112 - DNA, 110 bp, synthetic construct
  source 1..110: mol_type = other DNA
ttttcgaatcttgaaacactcagaccacttccaattgcagcacacatgtttcaccaatagatgccgcccttgtgcttcttgtgtgcacagcttcctgggtggaataattt

SEQ ID NO: 30113 - DNA, 110 bp, synthetic construct
  source 1..110: mol_type = other DNA
aatagatgccgcccttgtgcttcttgtgtgcacagcttcctgggtggaataatttccttgtgatgcagagaggttgccagctgtgtaaaattaatgatatcacttcatca

SEQ ID NO: 30114 - DNA, 110 bp, synthetic construct
  source 1..110: mol_type = other DNA
cgccctgattccacacacctgcattcaaatgccacctttgacactaactcaagatcaggtctctggccttgggcagagggtttcccattgagcctgtttcctgatctgga

SEQ ID NO: 30115 - DNA, 110 bp, synthetic construct
  source 1..110: mol_type = other DNA
atgctaagtgaagtcagtcggacagtgagacaccaacatctaaagctatcactgacaggtggaatctcaaaaaaggacacaacgaacttctttccagaacagatactgac

SEQ ID NO: 30116 - DNA, 110 bp, synthetic construct; identical to SEQ ID NO: 30115
  source 1..110: mol_type = other DNA

SEQ ID NO: 30117 - DNA, 110 bp, synthetic construct
  source 1..110: mol_type = other DNA
ggtggattattgccgtgtggtgaagccgagggttcctggtgtgagtgatcccgggagtccgttcccacgaaacctggaatattgggctttccaaaagaaggccttggttc

SEQ ID NO: 30118 - DNA, 110 bp, synthetic construct
  source 1..110: mol_type = other DNA
agtccgttcccacgaaacctggaatattgggctttccaaaagaaggccttggttctaccatgaatacttcctttgtgcctggtcttttgtgtgtccttggcacccagaag

SEQ ID NO: 30119 - DNA, 110 bp, synthetic construct
  source 1..110: mol_type = other DNA
aactcggaacatggaggggccccagggcccttggtggagatggaggtcaaaggtcaactgcaaagctgctgcttagatctgggttctcagctgaggcgttgcgcaatgca

SEQ ID NO: 30120 - DNA, 110 bp, synthetic construct
  source 1..110: mol_type = other DNA
aactgcaaagctgctgcttagatctgggttctcagctgaggcgttgcgcaatgcacccctaattctctcactcctgggctcccatgaaattgtgaaactctctacggatt

SEQ ID NO: 30121 - DNA, 110 bp, synthetic construct
  source 1..110: mol_type = other DNA
tcccaggccacggatcagacccgtaccacagcagttaccagagccacagcaatgacaatggcaggtccttaaccctctgaacgaccagggagctccctgtaatttacttt

SEQ ID NO: 30122 - DNA, 110 bp, synthetic construct
  source 1..110: mol_type = other DNA
caatggcaggtccttaaccctctgaacgaccagggagctccctgtaatttactttttgtgagaaatttgaaggaaggatcttgtttcatttttttcctaaagtgtttccc

SEQ ID NO: 30123 - DNA, 110 bp, synthetic construct
  source 1..110: mol_type = other DNA
ctcaggactcttgccaacagtcagcaccatctcgccaggcatgtacgtgcgccatcttggaagtggctcctcccgtccagtcaagctttcagaggactacagctttgacc

SEQ ID NO: 30124 - DNA, 110 bp, synthetic construct
  source 1..110: mol_type = other DNA
cttggaagtggctcctcccgtccagtcaagctttcagaggactacagctttgaccaacgctgggactacaacctcagaagaccctggaaccagctaactaattcctgacc

SEQ ID NO: 30125 - DNA, 110 bp, synthetic construct
  source 1..110: mol_type = other DNA
atttctctgaattctaaagtaataaagcagggtctagaggcaagttccagacaggcctgggcagtggaagtaacaagtaacatccattgagtgctgcataaatagatgcc

SEQ ID NO: 30126 - DNA, 110 bp, synthetic construct
  source 1..110: mol_type = other DNA
cctgggcagtggaagtaacaagtaacatccattgagtgctgcataaatagatgcccagcagcagactgactgagtgcttcacctccccttgctcaatcttcacaacaagc

SEQ ID NO: 30127 - DNA, 110 bp, synthetic construct
  source 1..110: mol_type = other DNA
gtaaacactcctgccgtggctgatttcaagctgccagtgtcatgtcactgaaagcagagctgaacagaaatgcacggtagcatataccattgtatgtcatatatttctgc

SEQ ID NO: 30128 - DNA, 110 bp, synthetic construct
  source 1..110: mol_type = other DNA
tgtttgatgcctttgtcaccgggcagggaaagaaaggtaagctgccttagcagcacatccctcccttcccgtcaccagccccgtcccctcggtgcggaggagcaggccta

SEQ ID NO: 30129 - DNA, 110 bp, synthetic construct
  source 1..110: mol_type = other DNA
catccctcccttcccgtcaccagccccgtcccctcggtgcggaggagcaggcctagtcccacccctgctcatcgccgccctctgctcctcagactggtccctgttccgga

SEQ ID NO: 30130 - DNA, 110 bp, synthetic construct
  source 1..110: mol_type = other DNA
tgctgagcccctacctggctccagcctcatggctgtgcactgttctctgtgctcagagtcaacagccctggtcccttcctacagggaccgagctccatcccaagctggac

SEQ ID NO: 30131 - DNA, 110 bp, synthetic construct
  source 1..110: mol_type = other DNA
gagtcaacagccctggtcccttcctacagggaccgagctccatcccaagctggacctggaagagggggaggcgtcctcagcgttgtttgccaggatccacctgtggggac

SEQ ID NO: 30132 - DNA, 110 bp, synthetic construct
  source 1..110: mol_type = other DNA
agcctggatgcatctgtggggacagtagctggatgtagttccatcaccaagtcctactcaactgttatcccaatggtcactgaccccgaccccttctaccccccagtagc

SEQ ID NO: 30133 - DNA, 110 bp, synthetic construct
  source 1..110: mol_type = other DNA
actcaactgttatcccaatggtcactgaccccgaccccttctaccccccagtagcaaagacctgagactgaacagacctcagactgtcgaagcaggaaggatgtctcaag

SEQ ID NO: 30134 - DNA, 110 bp, synthetic construct
  source 1..110: mol_type = other DNA
ttcctccagcaggattaagaaatccaatgagctgtcaataccacattaagagtgttagtctcggcccccttgttgcttatcgagcacccactagccttctggtagtttct

SEQ ID NO: 30135 - DNA, 110 bp, synthetic construct
  source 1..110: mol_type = other DNA
ctgcatgataagacccttggttctctcccctccaaaaaagatggctgggggctaaaaataatcctttcttatcttggctgatggctccggtgccccactctttttccgat

SEQ ID NO: 30136 - DNA, 110 bp, synthetic construct
  source 1..110: mol_type = other DNA
aaataatcctttcttatcttggctgatggctccggtgccccactctttttccgataaaactcttcctttttatacgactcctcagagtgccttctgatcctttgacggat

SEQ ID NO: 30137 - DNA, 110 bp, synthetic construct
  source 1..110: mol_type = other DNA
ggggataaggagtggggagggacttgggtggctggtgtcagtgaatgcaatactcgtggggcaacagctagtgaaatctacagggggctgtggcagctatgctggccgct

SEQ ID NO: 30138 - DNA, 110 bp, synthetic construct
  source 1..110: mol_type = other DNA
ctcaccggcagcatgaaacctgcgctgcttctccagcttctgctgttgactcgattagcacctcagctggtgtctgggagtcccaagcaacattttaccagtaggtgctg

SEQ ID NO: 30139 - DNA, 110 bp, synthetic construct
  source 1..110: mol_type = other DNA
acttccgctagggaaggacatggcagaaatgtgaaatttcaaaactttttaggccaagaaggtccttctgagccctcaaacccacttcccttctcttgtaaatagacaga

SEQ ID NO: 30140 - DNA, 110 bp, synthetic construct
  source 1..110: mol_type = other DNA
aagaaggtccttctgagccctcaaacccacttcccttctcttgtaaatagacagacagacatgtagaaataggagggactggtcacagaattgggtcaaacctaagccac

SEQ ID NO: 30141 - DNA, 110 bp, synthetic construct
  source 1..110: mol_type = other DNA
ggcctccaggtctcttaccttaaatactgttcaatgagggcctcgtggctcagcagctcctcgggcaggggcacggtgggcatggagaactggtgctgaagggggctggg

SEQ ID NO: 30142 - DNA, 110 bp, synthetic construct
  source 1..110: mol_type = other DNA
cttggagaggtcgtgggggccatgcttcagtaaagcttaggggcttcgtgtgtcgttgcagcttcaggaagtgtcccacatcgtaagcagctctggcctcaacatctaca

SEQ ID NO: 30143 - DNA, 110 bp, synthetic construct
  source 1..110: mol_type = other DNA
caggggctcccacttactcagagatgttgtagtagaagtggccttccctgccccgcagatccggaatggtaatggtctccagctcttgctccagaaagcgcagcccctcc

SEQ ID NO: 30144 - DNA, 110 bp, synthetic construct
  source 1..110: mol_type = other DNA
cagatccggaatggtaatggtctccagctcttgctccagaaagcgcagcccctcctgcttcactgaagcagcagtgagacccttagctcctgcatcgctgcaggggcgac

SEQ ID NO: 30145 - DNA, 110 bp, synthetic construct
  source 1..110: mol_type = other DNA
agggtcttgagggcagagaaggctgagaaacctggagctccttctgggaccacgccctctgcatccaggctcacctcctcatgacccctgggccttcacacccaacccag

SEQ ID NO: 30146 - DNA, 110 bp, synthetic construct
  source 1..110: mol_type = other DNA
gggcactctagcccaggttcagatccatttcctccccactccaccaccttccctcaacagtcagctcttggccgcccctccggctgggggtgcacgcttaggtagatggc

SEQ ID NO: 30147 - DNA, 110 bp, synthetic construct
  source 1..110: mol_type = other DNA
tggggaggagctgggaaaaaaacactgatcctgggctccattccaactaaatcaggatctctggatatggggccctggcatctgtgtttttttcgcactcccctggtggt

SEQ ID NO: 30148 - DNA, 110 bp, synthetic construct
  source 1..110: mol_type = other DNA
ctttggtggggaacaaacatctttgtacagagctagttcttagatcacagacacgtagtaaaaaccaaagaaacattgacagtgtctctcagattcaaaaagaccatgtg

SEQ ID NO: 30149 - DNA, 110 bp, synthetic construct
  source 1..110: mol_type = other DNA
tggcaaaaagtaggatgaagaagtcctgaatgtccttcacccagattccccacatgctgagcattttgccttgtttcaaatatagctgtttctctgtaatatctctgtat

SEQ ID NO: 30150 - DNA, 110 bp, synthetic construct
  source 1..110: mol_type = other DNA
gctgagcattttgccttgtttcaaatatagctgtttctctgtaatatctctgtattatctaatccagtttgattcagtaattagtatctctatattacttctgcagtatc

SEQ ID NO: 30151 - DNA, 110 bp, synthetic construct
  source 1..110: mol_type = other DNA
tggggagcccctgggcgtcccacctccttttgacctcccaactgctctaggagctgctgcttctcagtcagatggtgcccccttccccccaagcagtatctcaggataaa

SEQ ID NO: 30152 - DNA, 110 bp, synthetic construct
  source 1..110: mol_type = other DNA
gctgcttctcagtcagatggtgcccccttccccccaagcagtatctcaggataaaaataaaccgtcctgttctcttttcctgctgtgccaactgagggggagcctagcca

SEQ ID NO: 30153 - DNA, 110 bp, synthetic construct
  source 1..110: mol_type = other DNA
tggaaggtaacttccaagagaaaacagccctggagtttccgttgtggctcagtggggatgaacccgactactatccatgagggtgcagtggaggggttgatccctggcct

SEQ ID NO: 30154 - DNA, 110 bp, synthetic construct; identical to SEQ ID NO: 30153
  source 1..110: mol_type = other DNA

SEQ ID NO: 30155 - DNA, 110 bp, synthetic construct
  source 1..110: mol_type = other DNA
acactgatggtctggatgagctgaagggtgaagagggggtagggagctgatgcaaggctgagcccgctctgggctggagtagagggtaccctggcagcaacccccagccc

SEQ ID NO: 30156 - DNA, 110 bp, synthetic construct
  source 1..110: mol_type = other DNA
cacacagacactgatgtgcctcacacatttacgttcaacgtacatgacacatatgaggtcacacgcccacacagacgcctagctgctggcacacactcttattctcccac

SEQ ID NO: 30157 - DNA, 110 bp, synthetic construct
  source 1..110: mol_type = other DNA
gaaaaagaatgtatatatgtgtgtgtgcgtgtgtgtgtatgaaggggtcactttgctgtaccgattgacaggacatgataaatcaactatactttaattttaaaaaaatt

SEQ ID NO: 30158 - DNA, 110 bp, synthetic construct; identical to SEQ ID NO: 30157
  source 1..110: mol_type = other DNA

SEQ ID NO: 30159 - DNA, 110 bp, synthetic construct
  source 1..110: mol_type = other DNA
ctgtctgcagcagcacacatttgctgatttattatctgcctccatgtcctttaatggaagctctgcatgtcagggctttgtctgttgtgctcagtgctgaatcgctggca

SEQ ID NO: 30160 - DNA, 110 bp, synthetic construct
  source 1..110: mol_type = other DNA
gaacataggtcaaatgagccgagaacgttcatgtcctgtgctttagtttatgctcttccccgggaacacaccttcctgctgcgtctgtttccgggcccagaactttccca

SEQ ID NO: 30161 - DNA, 110 bp, synthetic construct
  source 1..110: mol_type = other DNA
ttccccgggaacacaccttcctgctgcgtctgtttccgggcccagaactttcccaagtctctacccatgtggcggaggctgctggtcacctatctggctccccctcttcc

SEQ ID NO: 30162 - DNA, 110 bp, synthetic construct
  source 1..110: mol_type = other DNA
tggggaaatccttcaccacccatttccctggccaactcactctcactcacccagaggctaccctgaatcttctcctctcctccgcctcaactcctcactcttggttaatg

SEQ ID NO: 30163 - DNA, 110 bp, synthetic construct
  source 1..110: mol_type = other DNA
ggctaccctgaatcttctcctctcctccgcctcaactcctcactcttggttaatgattttatcatctctctgacaaagaaagaaaaagaaagagagagagagaaagagga

SEQ ID NO: 30164 - DNA, 110 bp, synthetic construct
  source 1..110: mol_type = other DNA
ctcttttacaattctctagtacagtttctgaaatattgggttattccttacatatttggtagaattgttaagccatgatatctgggaccccaaattttaaattatgggat

SEQ ID NO: 30165 - DNA, 110 bp, synthetic construct; identical to SEQ ID NO: 30164
  source 1..110: mol_type = other DNA

SEQ ID NO: 30166 - DNA, 110 bp, synthetic construct
  source 1..110: mol_type = other DNA
ccaggatggagtaccatggttagtccccttaattaccacctctgcacatgaagggattggggtccattactggaaggctatggagacagaggtagaagacaaagcacagc

SEQ ID NO: 30167 - DNA, 110 bp, synthetic construct
  source 1..110: mol_type = other DNA
attggggtccattactggaaggctatggagacagaggtagaagacaaagcacagctcctttaatctgagaatttaaaatgccataaattgggaaatcatataaactattc

SEQ ID NO: 30168 - DNA, 110 bp, synthetic construct
  source 1..110: mol_type = other DNA
ggggcagctgtatgtgggcgctgggcgggcagcagcgggcagccgggggcggtgaagcgcagctcccactggaaggagtggtgggaagagaggaaggggctctctggagg

SEQ ID NO: 30169 - DNA, 110 bp, synthetic construct
  source 1..110: mol_type = other DNA
caaaatattatccttgcaacatgtaatagatatttgaaaatattaaggaggatctggataggctgcatcaaaggactcccttgcatttctggcttctgttgatgtgatgg

SEQ ID NO: 30170 - DNA, 110 bp, synthetic construct; identical to SEQ ID NO: 30169
  source 1..110: mol_type = other DNA

SEQ ID NO: 30171 - DNA, 110 bp, synthetic construct
  source 1..110: mol_type = other DNA
atggggttccagagagtgggcatcagtctttggcagcagactcagcacaagctctgtatgggtagatgcttacaatgaattctcaggctgcagagtagtgagtggctggg

SEQ ID NO: 30172 - DNA, 110 bp, synthetic construct
  source 1..110: mol_type = other DNA
gtatgggtagatgcttacaatgaattctcaggctgcagagtagtgagtggctgggccaatcgcagaacccatatctcaaaagctggattcaaagcccccagatatggtgc

SEQ ID NO: 30173 - DNA, 110 bp, synthetic construct
  source 1..110: mol_type = other DNA
cagcttctgccgggtttcctcactcttgggacactcacccttgaaacttaacttccatatttgaagttcaaactaaaccaggcagtaaaaccacacagagagaaaccaag

SEQ ID NO: 30174 - DNA, 110 bp, synthetic construct
  source 1..110: mol_type = other DNA
catatttgaagttcaaactaaaccaggcagtaaaaccacacagagagaaaccaaggttcccagcccgctgccagcaagaactaactggcatgtgagaggatgagccttct

SEQ ID NO: 30175 - DNA, 110 bp, synthetic construct
  source 1..110: mol_type = other DNA
tctcatgcacagggtaatggggaccaactccagctctgactccagagtccatgctcttaatcaccaaagcatcctgctccagagcctgaggaaaagtgaggcccagagag

SEQ ID NO: 30176 - DNA, 110 bp, synthetic construct
  source 1..110: mol_type = other DNA
tattcctctgtgtggcttcatgttcaagcaggtttctcgaatggtggcaaagatgtccccgaggcactccaggctgtcgttctgtctccaaaaccccagtagaacggtac

SEQ ID NO: 30177 - DNA, 110 bp, synthetic construct
  source 1..110: mol_type = other DNA
acccttgaacaacaggactttgaattgcagtgggtccacttatacatggattttttttgataaatacatactgcagtgttacatgagctgtggttggctgaatctgcaga

SEQ ID NO: 30178 - DNA, 110 bp, synthetic construct
  source 1..110: mol_type = other DNA
tttgataaatacatactgcagtgttacatgagctgtggttggctgaatctgcagacgcaggaccacagatgtggagggcccactgtaaagttattcttggatttttgacc

SEQ ID NO: 30179 - DNA, 110 bp, synthetic construct; identical to SEQ ID NO: 30177
  source 1..110: mol_type = other DNA

SEQ ID NO: 30180 - DNA, 110 bp, synthetic construct; identical to SEQ ID NO: 30178
  source 1..110: mol_type = other DNA

SEQ ID NO: 30181 - DNA, 110 bp, synthetic construct
  source 1..110: mol_type = other DNA
tactgggccaatgatgtgcctttaagctattggtcaatggagtcctttttcagcatcaagagaatgtgggcagtggttaataacacagaccctgaacacaggcagatctg

SEQ ID NO: 30182 - DNA, 110 bp, synthetic construct
  source 1..110: mol_type = other DNA
gaatcagtcctgagatagaggttcattgcatcactgattaaaatggccacaaaaggagttcccatcgtggcacagcagaaacgaatccacctgggaaccatgaggttgca

SEQ ID NO: 30183 - DNA, 110 bp, synthetic construct; identical to SEQ ID NO: 30182
  source 1..110: mol_type = other DNA

SEQ ID NO: 30184 - DNA, 110 bp, synthetic construct
  source 1..110: mol_type = other DNA
acaaaataccgtggactgggtggcttgaacaaccgaaatatatttgctcacagttctgaagacgagggagtccctgaatgagatgccagcagattcagtttcgggtgaga

SEQ ID NO: 30185 - DNA, 110 bp, synthetic construct
  source 1..110: mol_type = other DNA
ctgaagacgagggagtccctgaatgagatgccagcagattcagtttcgggtgagagctctcttcccggcttggagactgtgactttctcctggtgccctttcgtgacctt

SEQ ID NO: 30186 - DNA, 110 bp, synthetic construct
  source 1..110: mol_type = other DNA
atgaatcaatggcccatttagtggcaggtgctgaaaaatcatgacaatagctaacacgggggagggcttctggggaccaggcaccaggctgcgcacgtggccggcgttca

SEQ ID NO: 30187 - DNA, 110 bp, synthetic construct
  source 1..110: mol_type = other DNA
acgggggagggcttctggggaccaggcaccaggctgcgcacgtggccggcgttcactccctgggtctgcacgtgagcgcttatggcaagttcgttacatctgacggaaga

SEQ ID NO: 30188 - DNA, 110 bp, synthetic construct
  source 1..110: mol_type = other DNA
gtgactatgtcttagttctcgctgcgtccctgctttctagtagagcacattctccgtgcccaccattagctgtcaaattaattgtctttcacctgtaacctaactcaagc

SEQ ID NO: 30189 - DNA, 110 bp, synthetic construct
  source 1..110: mol_type = other DNA
cagtggttctgtacatgtggtcccctgaccagcagcagcatcacctggagacgtgctgggaaggcagattctccggccccagcttcagacctcagatctggggtgggccc

SEQ ID NO: 30190 - DNA, 110 bp, synthetic construct
  source 1..110: mol_type = other DNA
ggctgtggcatagactatggcgacagctccaatttgaccccggcctacaacctcccatacgccacagttgctgccataaaacggggaaagaaaaaaaaaacccacacata

SEQ ID NO: 30191 - DNA, 110 bp, synthetic construct
  source 1..110: mol_type = other DNA
agtctgacaacacaggttcaacaggcaggagctgcttcctttagaaaaccacgttgtccttcaggcaaccatccaaatcctccagttaaccccaacccctagagctgggc

SEQ ID NO: 30192 - DNA, 110 bp, synthetic construct
  source 1..110: mol_type = other DNA
gtccttcaggcaaccatccaaatcctccagttaaccccaacccctagagctgggccaactgccccaactgcacagaggcacagtggccaggacccatgaaatcaaaacac

SEQ ID NO: 30193 - DNA, 110 bp, synthetic construct
  source 1..110: mol_type = other DNA
aaagcaacacggcgtccacagcaggtccagggatacctgttcacatggagggactgggtggccgccaccacggagctggcagaacaaagcagcaggtgagaaaaccaaga

SEQ ID NO: 30194 - DNA, 110 bp, synthetic construct
  source 1..110: mol_type = other DNA
gggtggccgccaccacggagctggcagaacaaagcagcaggtgagaaaaccaagactcaaggacacacacttctcacgagaagtttggctttgaagaggccagaactagg

SEQ ID NO: 30195 - DNA, 110 bp, synthetic construct; identical to SEQ ID NO: 30193
  source 1..110: mol_type = other DNA

SEQ ID NO: 30196 - DNA, 110 bp, synthetic construct; identical to SEQ ID NO: 30194
  source 1..110: mol_type = other DNA

SEQ ID NO: 30197 - DNA, 110 bp, synthetic construct
  source 1..110: mol_type = other DNA
taggtcatatgctgtaaaattgccagtctgtgctatctgtccattggtccaaacgtgccagctccccttcctccactagaacaaacaaactgtttctttgtattctagaa

SEQ ID NO: 30198 - DNA, 110 bp, synthetic construct
  source 1..110: mol_type = other DNA
attctggtgcagtagctgattgggaggtggtcccaggaggccccagtggagggatgaggagggaagttgtgtgtggggaggggagaaagccactgcaggtgtgttaatga

SEQ ID NO: 30199 - DNA, 110 bp, synthetic construct
  source 1..110: mol_type = other DNA
gttgtcctttataggtgatagtactccgtgagatgatacttccggacagaatacacagtgaatatactatgtccaacaacctttcatcttttttttgtctttttttttgt

SEQ ID NO: 30200 - DNA, 110 bp, synthetic construct
  source 1..110: mol_type = other DNA
taataagttaattttctccttggtgagacagctctgaagacattgtgtgaatcattaacaatttgtagttttacagcatgttttggtaacatctgaagtttatgttttcc

SEQ ID NO: 30201 - DNA, 110 bp, synthetic construct; identical to SEQ ID NO: 30200
  source 1..110: mol_type = other DNA

SEQ ID NO: 30202 - DNA, 110 bp, synthetic construct
  source 1..110: mol_type = other DNA
cccagagaaaatctgactttatgaatgctttgagcttctgttgaagatactctttcggctacgaaattgcactttccctcttcctcctaatgcggaacattaaagcttca

SEQ ID NO: 30203 - DNA, 110 bp, synthetic construct
  source 1..110: mol_type = other DNA
cggctacgaaattgcactttccctcttcctcctaatgcggaacattaaagcttcacatactagccaggggcttctccgcacaaacgtctttgaaatgtgaaagggcactg

SEQ ID NO: 30204 - DNA, 110 bp, synthetic construct
  source 1..110: mol_type = other DNA
tgacacctgagggccagacctgagcctccctctcctggcggagctgcaagcagaggtggaacttgcactgcctaaagccaaaagcatttcgagacagctattaaggaggc

SEQ ID NO: 30205 - DNA, 110 bp, synthetic construct
  source 1..110: mol_type = other DNA
gtggaacttgcactgcctaaagccaaaagcatttcgagacagctattaaggaggcaaaggccttggggcgtggggggtggtggtgcgagggccccaaatgcccttctctc

SEQ ID NO: 30206 - DNA, 110 bp, synthetic construct
  source 1..110: mol_type = other DNA
ttgctcttaagagtgggcattcgctcattcaccttggtataggtctcaagtctagcagtcaccactgatgcttctcttttccttttttatttttagggccacgcctgcag

SEQ ID NO: 30207 - DNA, 110 bp, synthetic construct
  source 1..110: mol_type = other DNA
ggcattctttaacatgttctaatgacaaaaaacaaagcttagagtgtgactcacacccatgtgacgctcatcctccgacccataaaatgtgtgccttaatatccagcatg

SEQ ID NO: 30208 - DNA, 110 bp, synthetic construct
  source 1..110: mol_type = other DNA
cccaggtcagacttggaggctggagcaggggcgggtgaggcctcatgcccacgcatctgtctggtgcattttcctgactctgatgactttctcactgggcaccatctcag

SEQ ID NO: 30209 - DNA, 110 bp, synthetic construct
  source 1..110: mol_type = other DNA
acctatcccatgcctgacctcactactcactacataggtgaccgtggacaaggcacttaatttcactaatttccctgggtcttcgtttctttgttagatgagaacaggac

SEQ ID NO: 30210 - DNA, 110 bp, synthetic construct
  source 1..110: mol_type = other DNA
cttaatttcactaatttccctgggtcttcgtttctttgttagatgagaacaggaccagtactttgcctgtgtgttgttatgagaatccagtgtggtcatgaaccaaaaat

SEQ ID NO: 30211 - DNA, 110 bp, synthetic construct
  source 1..110: mol_type = other DNA
acccaggcacagcctctgtcctcgtccccgccttggcccaggctgcttcctctccctgggctcaaattgtgctctgcctcttttcagctgtgtgagatgaggcaagtcac

SEQ ID NO: 30212 - DNA, 110 bp, synthetic construct
  source 1..110: mol_type = other DNA
ctgggctcaaattgtgctctgcctcttttcagctgtgtgagatgaggcaagtcaccaaacctctctgtgcctcattttctcatctgtaaaatcatgtaaccaagtgcaat

SEQ ID NO: 30213 - DNA, 110 bp, synthetic construct
  source 1..110: mol_type = other DNA
ccaattatttcatttggtaggaaaaaaggattccattttccatttattccctcctctcaatctagattcagagtccctccccccactctttgggatctgtttgaaatccc

SEQ ID NO: 30214 - DNA, 110 bp, synthetic construct
  source 1..110: mol_type = other DNA
acactgggttcacaacgtctggctccagctgaagagatcagagaaagaatcacgcatgtggtcacaggaggaagagaggctgcggggctaggccttgacctggacgggca

SEQ ID NO: 30215 - DNA, 110 bp, synthetic construct
  source 1..110: mol_type = other DNA
caggagtctgtgtgtggcttaggcgggtcctccgactctgggctacaatcaaggaaggggtcagctgaggctacgggctcactgagaggttcacctggagctgggggacc

SEQ ID NO: 30216 - DNA, 110 bp, synthetic construct
  source 1..110: mol_type = other DNA
aggggtcagctgaggctacgggctcactgagaggttcacctggagctgggggacctgcctccaagctgactcgagtggttgttggtaggatttcgttcctcgcaggctgt

SEQ ID NO: 30217 - DNA, 110 bp, synthetic construct
  source 1..110: mol_type = other DNA
agggtatcagcgcagaagggctctgggttttcagagtgtcctgagggcagatggcgtctggaatccccaaagcagctcaggtccgggctgaatgcagagtgggtgcaggg

SEQ ID NO: 30218 - DNA, 110 bp, synthetic construct
  source 1..110: mol_type = other DNA
agtcaggttcctaacccgctgagccacaacgggaactcctgtttcatactttttaaatgctgattaggaccagctaaattgatttcatgatccgtgactagctggcaagt

SEQ ID NO: 30219 - DNA, 110 bp, synthetic construct; identical to SEQ ID NO: 30218
  source 1..110: mol_type = other DNA

SEQ ID NO: 30220 - DNA, 110 bp, synthetic construct
  source 1..110: mol_type = other DNA
atagcctggggcccaacagctgcatggacttgctcagcccgggcatgtgtctgcccagactccataactgccctgacctttgggggctcacgtgtcagttgtgcctgatc

SEQ ID NO: 30221 - DNA, 110 bp, synthetic construct
  source 1..110: mol_type = other DNA
tagactttgctctggaaccttcctgagggacctcccatcacactcagccgtcacccgatatagtctatactctgcacagaagccagggaaggaggaccctttgaaaatgt

SEQ ID NO: 30222 - DNA, 110 bp, synthetic construct
  source 1..110: mol_type = other DNA
cgatatagtctatactctgcacagaagccagggaaggaggaccctttgaaaatgtaagtcagctccaagggagcagagaccttgtctctcctgtggctccagggcttaaa

SEQ ID NO: 30223 - DNA, 110 bp, synthetic construct
  source 1..110: mol_type = other DNA
tattaaaaggcttaacagtgcacacgtaggagataaaaatatttttaaaaagcaagaaagtatcatcacaagactcaggcagggtttacttctagcgagaaggaggtgct

SEQ ID NO: 30224 - DNA, 110 bp, synthetic construct
  source 1..110: mol_type = other DNA
gaaagtatcatcacaagactcaggcagggtttacttctagcgagaaggaggtgctgtgatctgggaggggcacgtggggtgcttctggggtgcaggcagcagtgtacttg

SEQ ID NO: 30225 - DNA, 110 bp, synthetic construct
  source 1..110: mol_type = other DNA
agaaaaaaaaggcagccttgaagatagaagtgtcactggggggaggaggttcgagcaaaaggaacacagccaccttctgtagctacctcagccagctccagggtcctgca

SEQ ID NO: 30226 - DNA, 110 bp, synthetic construct
  source 1..110: mol_type = other DNA
caaaaggaacacagccaccttctgtagctacctcagccagctccagggtcctgcacccaactgtggctctgtctgtccccagacctccacccacggcagcaccatcggag

SEQ ID NO: 30227 - DNA, 110 bp, synthetic construct
  source 1..110: mol_type = other DNA
gggcctgaccaacgcctggcacagggcagatactgagtaaaaatggcttcagcaggtgactggtgaccagcttgcctgtccgtggtaacaatcccatgaggagtgttgcg

SEQ ID NO: 30228 - DNA, 110 bp, synthetic construct
  source 1..110: mol_type = other DNA
aatgggggagacgtcttccttacagaagagcgccaattaataagagcagaaggaaggaagggaaggaggacacagcctgaaggtggccatctgcaaagcaggaagagagc

SEQ ID NO: 30229 - DNA, 110 bp, synthetic construct
  source 1..110: mol_type = other DNA
accttgatattttcatccatgaaatgggaagaagatccctcagcttgctctagctcctagaggtaaggagcttatatggaacgaaccaaatgtcagaataacagatgaaa

SEQ ID NO: 30230 - DNA, 110 bp, synthetic construct
  source 1..110: mol_type = other DNA
cctagaggtaaggagcttatatggaacgaaccaaatgtcagaataacagatgaaaaataaagcttacagttataggccagggcctgctctcagcactctccccatccgaa

SEQ ID NO: 30231 - DNA, 110 bp, synthetic construct
  source 1..110: mol_type = other DNA
ctcagccttctcatcagtgcagtgggaataaacttgatgccttagctcatggattcctacacacagggttatgtgttcattcgttcggagtgcttgggacagggcctagc

SEQ ID NO: 30232 - DNA, 110 bp, synthetic construct
  source 1..110: mol_type = other DNA
agtcagcatcaccagttggggtgtctgtgctgacctagcagggttatcactgaagccatcccacagggtggtttaggccttattcttggggtccaggctgctaaaactga

SEQ ID NO: 30233 - DNA, 110 bp, synthetic construct
  source 1..110: mol_type = other DNA
cacccttctttccaccataatctattggtcaaggcaagtcacggggggtggagaaatagacttcacttctcgacaggaggagctgcaaagctacacgacagcaatggaat

SEQ ID NO: 30234 - DNA, 110 bp, synthetic construct
  source 1..110: mol_type = other DNA
gacaatctgagtttcaaaccccagctctgctacttctctaggctaacactggctccactgtcttctccctgagaccccctttatttcctcattcgtaaacttgagaaaac

SEQ ID NO: 30235 - DNA, 110 bp, synthetic construct
  source 1..110: mol_type = other DNA
ggtttaggtttttacattatttacgtacatgagagaagagaggctatggaattagctggaagggcccctgggggagtgttctgctgtgaatggagaatgctagggtgttg

SEQ ID NO: 30236 - DNA, 110 bp, synthetic construct
  source 1..110: mol_type = other DNA
ctggaagggcccctgggggagtgttctgctgtgaatggagaatgctagggtgttggccatcctggtcctggaatcccttacatcttcgctccgcagcatgaagcctacct

SEQ ID NO: 30237 - DNA, 110 bp, synthetic construct
  source 1..110: mol_type = other DNA
ttcttagcaacatcatgcttattttcacctggctgtttttgtaatctcactcagtgcagagatgtgacacagctgacggaaagtaattctccagggtctaaggtagtagc

SEQ ID NO: 30238 - DNA, 110 bp, synthetic construct
  source 1..110: mol_type = other DNA
cacagctcatggcaatgccagatggcacactcaagcttcaggtgtgtgatgttcacaacaaagagtattacgtcctattggtaaactgtgtgttccacttccttcctatc

SEQ ID NO: 30239 - DNA, 110 bp, synthetic construct
  source 1..110: mol_type = other DNA
ctggccacaacgcttccagctgccatgttcaatggatcactaagactgttctctagcttatcaggactccagtctattcacctatttagctacccccaccctccactggc

SEQ ID NO: 30240 - DNA, 110 bp, synthetic construct
  source 1..110: mol_type = other DNA
gctcaggacactacaagcacagaaatcgagaataagctttcagaaagttttctagcaagctgacatttccctaacattgttattgtatttttcaaaagtaccagtctgca

SEQ ID NO: 30241 - DNA, 110 bp, synthetic construct
  source 1..110: mol_type = other DNA
caagctgacatttccctaacattgttattgtatttttcaaaagtaccagtctgcagtggactggaaatttaaaattctggcccttcactgtaggcagtgcacttgcagaa

SEQ ID NO: 30242 - DNA, 110 bp, synthetic construct
  source 1..110: mol_type = other DNA
tctaccagatcctaagcttcctaagggcaaggttgtttcttctgtttaccactgtatcctcagggccttgtatagtatctcacacacagtaaggaggattgaatgactgg

SEQ ID NO: 30243 - DNA, 110 bp, synthetic construct
  source 1..110: mol_type = other DNA
atcctcagggccttgtatagtatctcacacacagtaaggaggattgaatgactgggagggattgaagcctgttgggaaatccgccggcttgtttcctgctgagagccccc

SEQ ID NO: 30244 - DNA, 110 bp, synthetic construct
  source 1..110: mol_type = other DNA
tagaaccattaccctgagcttaaggggatttaggagcttgggtcaaagaggacatatctaacccattctctctgtgcacagcgaagaagcagaagccggtgaagaaatcc

SEQ ID NO: 30245 - DNA, 110 bp, synthetic construct
  source 1..110: mol_type = other DNA
atctaacccattctctctgtgcacagcgaagaagcagaagccggtgaagaaatccgtatttgatgaagaactcaccaacacgagcaagaaggccctgaaacagtatcgag

SEQ ID NO: 30246 - DNA, 110 bp, synthetic construct
  source 1..110: mol_type = other DNA
tccaacccccaccttgcttgtggctgtggggccatgagcaagtgaacttacctcccattctcctgcagcttgcttctgcccagctgatgtcctggggccaaggttgtcta

SEQ ID NO: 30247 - DNA, 110 bp, synthetic construct
  source 1..110: mol_type = other DNA
agggggaagtctccagggtcctgagagagtctaagaaaaaatggaggagtctctggcacccaggagcccagtaggtcctgataatgatattttagggtcaagggagagcc

SEQ ID NO: 30248 - DNA, 110 bp, synthetic construct
  source 1..110: mol_type = other DNA
gcacccaggagcccagtaggtcctgataatgatattttagggtcaagggagagccagggctgtgtggggacatgaagaaggtgccaaggcaaggctgaagaggagagcgg

SEQ ID NO: 30249 - DNA, 110 bp, synthetic construct
  source 1..110: mol_type = other DNA
tagcagaagtgatgtgcctgacttctgaggctgtcgtaaggagccctgtagcttccaccttggctttggaatgtcattctgggataaatcagttgccattgaagaagtct

SEQ ID NO: 30250 - DNA, 110 bp, synthetic construct
  source 1..110: mol_type = other DNA
gaacttcatggctgcctgaagcttgtttaaatgcccatacattaattgtgaaaattgagctcccgatcaactttttaaaagcttgtcacagcaccatctgtttggcgttt

SEQ ID NO: 30251 - DNA, 110 bp, synthetic construct
  source 1..110: mol_type = other DNA
actttaggctccagggataaagcagtgaacaaatcaggcaaaaatcccagcttgtgtagagctgactgttttgaggagggaaggatacacaatgaacagtaacaaggcaa

SEQ ID NO: 30252 - DNA, 110 bp, synthetic construct
  source 1..110: mol_type = other DNA
gtagagctgactgttttgaggagggaaggatacacaatgaacagtaacaaggcaatgagataatctggagtggtgataactgctaggaaaaaatgaaggcagtgcctggg

SEQ ID NO: 30253 - DNA, 110 bp, synthetic construct
  source 1..110: mol_type = other DNA
aggaagcaaagacactttcttttctgtctctcttccttctcaagtgagaaaaatccagttctcctgaggtagatgcttcagttaagaaagtctgttctagctaaaagtct

SEQ ID NO: 30254 - DNA, 110 bp, synthetic construct
  source 1..110: mol_type = other DNA
caggagacacggaactcactcacagcttctccggcccctccccgatgttttcacttcttttataattagaaggaagacaatgagcttttagactgcacgagatgttttca

SEQ ID NO: 30255 - DNA, 110 bp, synthetic construct
  source 1..110: mol_type = other DNA
cagcacttcattcctttttgttgacacagagtattccattgtatgcatatgccacagtgtgtttatccacgcatcagctgatcgacgtttggatagttcccacttcggag

SEQ ID NO: 30256 - DNA, 110 bp, synthetic construct
  source 1..110: mol_type = other DNA
agtgtgtttatccacgcatcagctgatcgacgtttggatagttcccacttcggagctctttaatacccttgagtggttgtgttaactctgatatggaacctatctttccg

SEQ ID NO: 30257 - DNA, 110 bp, synthetic construct
  source 1..110: mol_type = other DNA
tcggctttattggccctgcaaagccctgccttctagatgcttttcctgacccagaggcgatgcttcctggagacagatctctgtggatgaccatcagactgcgtgcaccc

SEQ ID NO: 30258 - DNA, 110 bp, synthetic construct
  source 1..110: mol_type = other DNA
ggcgatgcttcctggagacagatctctgtggatgaccatcagactgcgtgcaccccttaggggtggatgcacagtcttatttcctcagtatcttgggtgggggagaatga

SEQ ID NO: 30259 - DNA, 110 bp, synthetic construct
  source 1..110: mol_type = other DNA
cttttttttttttttttttgactgagaaaagcatgaattttggaaccagctgaatgtagaatgcaacttctgtttggccttaaggaggtcacttggcctttcgaagcctc

SEQ ID NO: 30260 - DNA, 110 bp, synthetic construct
  source 1..110: mol_type = other DNA
ccacgaggacttacacacagtaggtgctcagtaaataccttatgcaggcatactgctggctggatgtgtggttttagggaagctgtttttcctctctgggccttggtttc

SEQ ID NO: 30261 - DNA, 110 bp, synthetic construct
  source 1..110: mol_type = other DNA
gtggctcaggtcaccgcagagctgtgcgttcaattgtcagccctgcacagtgggttaaaggagccggcatcgccatagctgtggcttggattcaactccaggcccaggaa

SEQ ID NO: 30262 - DNA, 110 bp, synthetic construct
  source 1..110: mol_type = other DNA
taaaggagccggcatcgccatagctgtggcttggattcaactccaggcccaggaacttccatatgccataaaaaaaaaaaaaaaagaaaagaaagaaagaaagaaaagga

SEQ ID NO: 30263 - DNA, 110 bp, synthetic construct
  source 1..110: mol_type = other DNA
tcagaatgtcaagaggagagattgagaaagctccatctagaaaaaggagcagtctaccttgagggctaatttcgtgctcaattagcgcagcccccgggcacagaagcagc

SEQ ID NO: 30264 - DNA, 110 bp, synthetic construct
  source 1..110: mol_type = other DNA
accttgagggctaatttcgtgctcaattagcgcagcccccgggcacagaagcagccctcagtaagtgggaactactatatttatgactggacttcccccaaattaaaaga

SEQ ID NO: 30265 - DNA, 110 bp, synthetic construct; identical to SEQ ID NO: 30263
  source 1..110: mol_type = other DNA

SEQ ID NO: 30266 - DNA, 110 bp, synthetic construct; identical to SEQ ID NO: 30264
  source 1..110: mol_type = other DNA

SEQ ID NO: 30267 - DNA, 110 bp, synthetic construct
  source 1..110: mol_type = other DNA
gtctccttttaaaagactacaaccttttcagttgaccctaatcctcaccagggcctatctaggatttgtttacacactctgatttgtttacaccctctgatctaacccaa

SEQ ID NO: 30268 - DNA, 110 bp, synthetic construct
  source 1..110: mol_type = other DNA
tatctaggatttgtttacacactctgatttgtttacaccctctgatctaacccaaagaggaaaacactatataaaaatcagaatttcatgtttttaccctccagggagtt

SEQ ID NO: 30269 - DNA, 110 bp, synthetic construct
  source 1..110: mol_type = other DNA
ttccacatctataaatgacactgagacggacctgctcacagtgctgcaagatggaaaggtctcagggactcaggtacctccagccggctgggacagggagaaagagggcc

SEQ ID NO: 30270 - DNA, 110 bp, synthetic construct
  source 1..110: mol_type = other DNA
aaggtctcagggactcaggtacctccagccggctgggacagggagaaagagggccgaggccagcgggctccagttaggaaggggatggtagagatctagctgactcggaa

SEQ ID NO: 30271 - DNA, 110 bp, synthetic construct
  source 1..110: mol_type = other DNA
gttttatttatttatttatttggcctcacccatggtgtgtgaaagttccagggccaggcaagggatcaaacctatgccgcagttgcagccagagcaacagcagtgacaac

SEQ ID NO: 30272 - DNA, 110 bp, synthetic construct
  source 1..110: mol_type = other DNA
ttatttggcctcacccatggtgtgtgaaagttccagggccaggcaagggatcaaacctatgccgcagttgcagccagagcaacagcagtgacaacgccagatccttaacc

SEQ ID NO: 30273 - DNA, 110 bp, synthetic construct
  source 1..110: mol_type = other DNA
ggccagtgaaggggactgggtgagcctcacagtgtctcccacagaaggcagctggtaagctctttacagaattaaaaatgtctgttcccctgacctggcagttctctttt

SEQ ID NO: 30274 - DNA, 110 bp, synthetic construct
  source 1..110: mol_type = other DNA
taagctctttacagaattaaaaatgtctgttcccctgacctggcagttctcttttagttttgcctatggctgcccttacccaggtggaatgatgtacttacacggggatg

SEQ ID NO: 30275 - DNA, 110 bp, synthetic construct
  source 1..110: mol_type = other DNA
tcaggaatttcagtctcttagtgttttgtcagattccctttcttgaaagaagggtctctctgcaaagaaaaacaatctgtaatgacgaacttgcacctgttacctcggga

SEQ ID NO: 30276 - DNA, 110 bp, synthetic construct
  source 1..110: mol_type = other DNA
gatgtgtgtgtagatgctcccaccatctcagaagattctggatgctgagaacattgggtttgtctgatggggggcgtcggggcctgggaagaggaggggagggcactgac

SEQ ID NO: 30277 - DNA, 110 bp, synthetic construct
  source 1..110: mol_type = other DNA
ctgaggattgtgagaatctcactacacgtaaaacctcacgtaattcttagaacaatcctgtgaagtggatacagagaggcccgtggccacacagctggtagacgtggaag

SEQ ID NO: 30278 - DNA, 110 bp, synthetic construct
  source 1..110: mol_type = other DNA
tcctgtgaagtggatacagagaggcccgtggccacacagctggtagacgtggaagtgggttggcgcacctgactccagggcctgcgctggcaccccctgagatggagagg

SEQ ID NO: 30279 - DNA, 110 bp, synthetic construct
  source 1..110: mol_type = other DNA
cttaggtttcacagagaccaccacaccatttcagcacacataaatctgtttcactcttttcagaagctaaacagtacataatatggtctattcaaagacactgagatgat

SEQ ID NO: 30280 - DNA, 110 bp, synthetic construct
  source 1..110: mol_type = other DNA
tgtcccagccaccacctaggccacagacccctctttcctctcacctccacagtcacactggaggctcacctatcacagctcatccagagtttgatgactttccaccacct

SEQ ID NO: 30281 - DNA, 110 bp, synthetic construct
  source 1..110: mol_type = other DNA
cactggaggctcacctatcacagctcatccagagtttgatgactttccaccacctccactgccctcctggggtctgggccaccatcttcacctcctctctggcccttcct

SEQ ID NO: 30282 - DNA, 110 bp, synthetic construct
  source 1..110: mol_type = other DNA
acaaaatctgaagcaaaacaccatggggtcaagctgaacacaagtctgggctggatttggctgttggctgccagtttgagaccctccctggactcctccccaggttccta

SEQ ID NO: 30283 - DNA, 110 bp, synthetic construct
  source 1..110: mol_type = other DNA
tatcatgggactggcattctggtggtagctcaggggccataaaccaatacagcatcaagtagcactgggttccatgaagaactgcagtcctggtggaggtgctgctgctt

SEQ ID NO: 30284 - DNA, 110 bp, synthetic construct
  source 1..110: mol_type = other DNA
actgctggtaagagccctgtgcaggggtattattattcccattttatggctggaaacactgaggctcagagatattaaataccttgattccagggcctctaatctttacc

SEQ ID NO: 30285 - DNA, 110 bp, synthetic construct
  source 1..110: mol_type = other DNA
cttgagaaaaaacctccttcttccttataaatgaagggagaggggtctcagaaaggtgggaggttgaggaacaccctggagataagtcagaaatagccaaggcagcctac

SEQ ID NO: 30286 - DNA, 110 bp, synthetic construct
  source 1..110: mol_type = other DNA
gtgggaggttgaggaacaccctggagataagtcagaaatagccaaggcagcctactctcctccttccagagttactgaaacatcactactgccgaaggattttggagcca

SEQ ID NO: 30287 - DNA, 110 bp, synthetic construct
  source 1..110: mol_type = other DNA
cctttggggaacacccctcccagccctctgccctcatcctttcactcctctctgtagttcaggttccttttgatgcctcccatgagcagcctgcccagccccagaagtct

SEQ ID NO: 30288 - DNA, 110 bp, synthetic construct
  source 1..110: mol_type = other DNA
agttcaggttccttttgatgcctcccatgagcagcctgcccagccccagaagtcttctaggtgtaactgtaaagttgcttgtctccccctcaccccccatcccctcgcac

SEQ ID NO: 30289 - DNA, 110 bp, synthetic construct
  source 1..110: mol_type = other DNA
atttgacccaaaatgtcaatagtaccaagattgagaaaccctaccttaaatggatgcaattttttttaacataaattacacctcaataaagttgacttaaaaggaagatg

SEQ ID NO: 30290 - DNA, 110 bp, synthetic construct
  source 1..110: mol_type = other DNA
cagggaggggctactgcgattgtccaggcaggaaacgagggtgggcagagagaagtgggtggattccagagcactttaggagtcccaacaggcagcttcgctgacggact

SEQ ID NO: 30291 - DNA, 110 bp, synthetic construct
  source 1..110: mol_type = other DNA
tgggtggattccagagcactttaggagtcccaacaggcagcttcgctgacggactggacgtcctggggggagggcggaggagagtcagtgtctctggctcactcagtcat

SEQ ID NO: 30292 - DNA, 110 bp, synthetic construct
  source 1..110: mol_type = other DNA
gggaatttttttttttaacatttaaattcctgtggaattgagatattcagttagccaagtttatttgtctgtgacccaatcatttggagttcatgaaagacagtaagaca

SEQ ID NO: 30293 - DNA, 110 bp, synthetic construct
  source 1..110: mol_type = other DNA
caagtttatttgtctgtgacccaatcatttggagttcatgaaagacagtaagacagagcttcttcctagttgctaccaaacaaatcctgagatgaaccctgattggacta

SEQ ID NO: 30294 - DNA, 110 bp, synthetic construct
  source 1..110: mol_type = other DNA
ttcagctaagttcaaagcacttttttttagctttgactgtttcagtgatgaatcattttcctaccagctgaagcagagtgtcacaggcataatagaaccccttctggatg

SEQ ID NO: 30295 - DNA, 110 bp, synthetic construct
  source 1..110: mol_type = other DNA
ttttcctaccagctgaagcagagtgtcacaggcataatagaaccccttctggatgactcagcaacagtattattagaccctgagcattgtaatgaactataatggtgccc

SEQ ID NO: 30296 - DNA, 110 bp, synthetic construct
  source 1..110: mol_type = other DNA
tccttggtgcttctgaaccacagtgaaaatgagttccacggtcagcaggccgccacccagctccactgtggcatttgggctgcagcttgggtcacgggagtgaatcgtgg

SEQ ID NO: 30297 - DNA, 110 bp, synthetic construct
  source 1..110: mol_type = other DNA
gcaggtggcgtgctcgatgtcaaccccctgaaattgctcagttccgaccccgcacatcacagtcgggccccccacccccagtacctacagccaaagaagtggctggttgt

SEQ ID NO: 30298 - DNA, 110 bp, synthetic construct
  source 1..110: mol_type = other DNA
ggtaaagaacttgacataccatgaggatgcaggtttgacccctggcctctacacaggcctcagctgcagctccaatccagcccccagccctggaacttcctcatgccaca

SEQ ID NO: 30299 - DNA, 110 bp, synthetic construct
  source 1..110: mol_type = other DNA
ttttttccgttggttgggtaggtcttgacttgatcttcccttggctgaacacaaatgctttcttccctccctcctgctgcttcgggccacaccccgggtaccaggaggag

SEQ ID NO: 30300 - DNA, 110 bp, synthetic construct
  source 1..110: mol_type = other DNA
tgctttcttccctccctcctgctgcttcgggccacaccccgggtaccaggaggaggtggtggggagcgaccgtcgtggacaggccgcaataatgtgggcacgcttgcccc

SEQ ID NO: 30301 - DNA, 110 bp, synthetic construct
  source 1..110: mol_type = other DNA
tctctctctttcctccctcctccctctcccttccctcctccctgcctccctcccctttcttctgataataaaagtagttcatgtccatggtagagaaaattctgtagaag

SEQ ID NO: 30302 - DNA, 110 bp, synthetic construct
  source 1..110: mol_type = other DNA
tttcttctgataataaaagtagttcatgtccatggtagagaaaattctgtagaagtcacctatactccccagggtggaccacgagccgccgcctcctctgccccctctcc

SEQ ID NO: 30303 - DNA, 110 bp, synthetic construct
  source 1..110: mol_type = other DNA
cccaagttgtgacactcaaaaagacgtccagaaatcaccacatgtcccctggatgctaagctgccccagggtaggccgccctgtgcaggtgagtggcccctgtcaaaaca

SEQ ID NO: 30304 - DNA, 110 bp, synthetic construct
  source 1..110: mol_type = other DNA
cagttgccagcaattgaaaaatcaaggccagctcacataacgaactgggtttctgattgctcttcaacaactgaactatctggcaatgttgggctcattcttgcaatggg

SEQ ID NO: 30305 - DNA, 110 bp, synthetic construct
  source 1..110: mol_type = other DNA
catcctcaaaagcatttaaagattcttctggtttttcattcattgaataaaacactttctcagtagacaaaacaggtacatagtataggaacataataagcaaagaaggc

SEQ ID NO: 30306 - DNA, 110 bp, synthetic construct
  source 1..110: mol_type = other DNA
tttctcagtagacaaaacaggtacatagtataggaacataataagcaaagaaggctccctcctactcctagcctccatttcttgtgtatgcttcttgagttttctgtgac

SEQ ID NO: 30307 - DNA, 110 bp, synthetic construct
  source 1..110: mol_type = other DNA
agtagaagagtggataccagatgtagccattgtcagaatcagctgagggagctgacacccattctagacctacctattcaatctgaaaggttggcaaaatagccagagcc

SEQ ID NO: 30308 - DNA, 110 bp, synthetic construct
  source 1..110: mol_type = other DNA
atcagaagctgctacacatccagctcacatcgccgtgcaggaacgtgggcatggtgttgacaaatcacacagtgttttaagaaaatctgaatatttggcgttttctgtga

SEQ ID NO: 30309 - DNA, 110 bp, synthetic construct
  source 1..110: mol_type = other DNA
gttgacaaatcacacagtgttttaagaaaatctgaatatttggcgttttctgtgaaatctccttttttttttttttggtcttttcatttaggacggcacccaaggcatat

SEQ ID NO: 30310 - DNA, 110 bp, synthetic construct
  source 1..110: mol_type = other DNA
gctgcgttccctcttatttcattttcatctgaaatcctgagctcaccctcctcggagctgacgggaccatttatttccaaggttgcagccggtcggagggctgctgggga

SEQ ID NO: 30311 - DNA, 110 bp, synthetic construct
  source 1..110: mol_type = other DNA
atctaagccaatcatgtgcacaccccagtgctaacacttcctgcatctcttgcagctagatgttgccctgtgacacagttccggtcagtgagatgcaaggggagatgggc

SEQ ID NO: 30312 - DNA, 110 bp, synthetic construct
  source 1..110: mol_type = other DNA
ctagatgttgccctgtgacacagttccggtcagtgagatgcaaggggagatgggctgggggattatgggaaagaaattgctcctttcatgaggtgttctggagaggagag

SEQ ID NO: 30313 - DNA, 110 bp, synthetic construct
  source 1..110: mol_type = other DNA
taagaagcacagcctggagaaccacaaagacctctctcttgatgttgttgagttgctgcaccatagccagtaagaaccagcctctggggttttggtcataggttttctga

SEQ ID NO: 30314 - DNA, 110 bp, synthetic construct
  source 1..110: mol_type = other DNA
aggcgggaggtttattctaagagcaattctaagagcttctggcgctttgcagcggggccatgacgagttggggtcacactgtaaaatactgctcaggtggccgtgggcaa

SEQ ID NO: 30315 - DNA, 110 bp, synthetic construct
  source 1..110: mol_type = other DNA
gaaagcagtcacaggcgaagtgcaaatggatgagcatggctatgttccagaactgtgattacaaaaacaagaattgccccgattggctgtgcggctgaggttcgctgacc

SEQ ID NO: 30316 - DNA, 110 bp, synthetic construct
  source 1..110: mol_type = other DNA
tgattacaaaaacaagaattgccccgattggctgtgcggctgaggttcgctgacccttagagtttggctgggaattgaacaggtgattaggagtgtgggtatgatgagaa

SEQ ID NO: 30317 - DNA, 110 bp, synthetic construct
  source 1..110: mol_type = other DNA
ggatgctgaggtttttggtcctcaggatgagcttccccacgctcaccttctcctccgtgcatgtgctgcacctctggccctaccccacttctcctggctgagtcctactc

SEQ ID NO: 30318 - DNA, 110 bp, synthetic construct
  source 1..110: mol_type = other DNA
atccctgcaatcaatgttgagacacgagcagagctgtgagcctcctcattcacgggtgaggaaatggagaggcatggaagtggcagccctgccacgggacactggctgct

SEQ ID NO: 30319 - DNA, 110 bp, synthetic construct
  source 1..110: mol_type = other DNA
gtgtgtgggccagacctgggcctgagggttgctgggtgagcgcagctgtcctgtgcatggatctgctagcatccaggccacaaaagcatcacatgacctggaaccaggac

SEQ ID NO: 30320 - DNA, 110 bp, synthetic construct
  source 1..110: mol_type = other DNA
acctccttagaacaaaagacgctgctttcagccaggaaattctgagggacttaggaactttgtgtcgggagctggggtcagacgccacatattagaagaaagagtgctcc

SEQ ID NO: 30321 - DNA, 110 bp, synthetic construct
  source 1..110: mol_type = other DNA
aactttgtgtcgggagctggggtcagacgccacatattagaagaaagagtgctcctagcacccctgtttacgagggctttgggagctctgtgtcaggaaccagggtgagc

SEQ ID NO: 30322 - DNA, 110 bp, synthetic construct
  source 1..110: mol_type = other DNA
tcagatacagaaatacacaatctgtcaccttgaccaagcacacaactagcttccagccacctgagagcataggcacatgtctttaagcgggatggcgttagagcagaagg

SEQ ID NO: 30323 - DNA, 110 bp, synthetic construct
  source 1..110: mol_type = other DNA
cgaattaagatgcccctggccctgtcacagagcagagggcctgataaacacttaatccactcatcaattcagtacctactgagcacctgttaggtccaaagccctggcac

SEQ ID NO: 30324 - DNA, 110 bp, synthetic construct
  source 1..110: mol_type = other DNA
tggccagactacccaaagcaatccacagatataatgtaatcaaattacctgtgacattttttacagaatcagaacaaataatccaaaaatgtatatggtgccattaaaga

SEQ ID NO: 30325 - DNA, 110 bp, synthetic construct; identical to SEQ ID NO: 30324
  source 1..110: mol_type = other DNA

SEQ ID NO: 30326 - DNA, 110 bp, synthetic construct
  source 1..110: mol_type = other DNA
cccggtgctaggagacaggtcctatgtgcagagaagccgtggaagaagacaaccgacccatgtatacaaaaatgatgtacttttcctgaaatcgaaagcggcaatccttc

SEQ ID NO: 30327 - DNA, 110 bp, synthetic construct
  source 1..110: mol_type = other DNA
cgcctggtaaggagaaaaccccacctggcttctttctcccctgtctgagatatcatttaaagtgagtcgcagatagtataaatgctgagatccaacaggctgagcagcac

SEQ ID NO: 30328 - DNA, 110 bp, synthetic construct
  source 1..110: mol_type = other DNA
tttaaagtgagtcgcagatagtataaatgctgagatccaacaggctgagcagcactgccccacaatctgttttacgagatgaaagctggaggactttactggcctcctcc

SEQ ID NO: 30329 - DNA, 110 bp, synthetic construct
  source 1..110: mol_type = other DNA
ccacttcatcccagatttccttgggcacagagatcaaagcgttaagactgcagtgcaggtgcaggagcacagctggtccgagccaggcagcctccgccagagacctaatg

SEQ ID NO: 30330 - DNA, 110 bp, synthetic construct
  source 1..110: mol_type = other DNA
cagtctcttatcacactgtcgacacatttaggggctgctcagtggcacgtttcctgctaagacaaggctgctgaaaatgcctgagggtgtcctcagacagccccgggctt

SEQ ID NO: 30331 - DNA, 110 bp, synthetic construct
  source 1..110: mol_type = other DNA
gctaagacaaggctgctgaaaatgcctgagggtgtcctcagacagccccgggctttataatcaataccaggtctgaacaaagcaagacaacacctcagaaacttttttac

SEQ ID NO: 30332 - DNA, 110 bp, synthetic construct
  source 1..110: mol_type = other DNA
caggtccctgagccaaagacacacgatggaattcggtttacaggacacgcacccacacaggcaagtgagcctccccggggctggaaggcaacaggggctgctttgtgaca

SEQ ID NO: 30333 - DNA, 110 bp, synthetic construct
  source 1..110: mol_type = other DNA
aaaaaaaaaaaaaaaaaaaaaaaacctatctcaatatgaaagaattcatggaaaagacaaaaaaatgggtcccagggtggcttctacctgctcataggaggcacttcctt

SEQ ID NO: 30334 - DNA, 110 bp, synthetic construct
  source 1..110: mol_type = other DNA
gacaaaaaaatgggtcccagggtggcttctacctgctcataggaggcacttccttgatcactcacaccaagaaacaggcacattaaaagtcgtgtcaccgtgagcccctc

SEQ ID NO: 30335 - DNA, 110 bp, synthetic construct
  source 1..110: mol_type = other DNA
caattgtgttaattacgcttctgtttgcactttctttccaggctaattatccacttgctgcgtttagcccttgatcacaagctagtctgggaaaacattcctggtatgaa

SEQ ID NO: 30336 - DNA, 110 bp, synthetic construct
  source 1..110: mol_type = other DNA
ctcctagcctgggaaactccatgtgctgtgggagagtgggggaaggcctaaaaagacaaaatatatatgacacatacacacacactgtttctctgcccaatgacttgtac

SEQ ID NO: 30337 - DNA, 110 bp, synthetic construct; identical to SEQ ID NO: 30336
  source 1..110: mol_type = other DNA

SEQ ID NO: 30338 - DNA, 110 bp, synthetic construct
  source 1..110: mol_type = other DNA
ccggccctgcaagcgacaaaggcgtgttcatcgggggagcgcaactaattagcatccgggctcagattggctggatcgtggacgaaatcagaggggggacccatcctcgc

SEQ ID NO: 30339 - DNA, 110 bp, synthetic construct
  source 1..110: mol_type = other DNA
ggagcgcaactaattagcatccgggctcagattggctggatcgtggacgaaatcagaggggggacccatcctcgcttcagctatttgagtccttggagagaaaaagaaaa

SEQ ID NO: 30340 - DNA, 110 bp, synthetic construct
  source 1..110: mol_type = other DNA
ctaccctttccatacactagactcttactgatttttaccctgagctcctagagctgatcagtctgagtttcagacacatgcatttcttgaatgtctcagcttgaattgga

SEQ ID NO: 30341 - DNA, 110 bp, synthetic construct
  source 1..110: mol_type = other DNA
taacacacaacccttgactccatggggagcccagcttagatgaagagacagaattaggcctctggctgtagggagtatttgatcctgaagagaccagagagagaaaacct

SEQ ID NO: 30342 - DNA, 110 bp, synthetic construct
  source 1..110: mol_type = other DNA
tactcaccaagagaaacttggaaaaaggcatattttccttgttaaccagaagggtaggagaagggccccggagggtcagacttgcagctgaactgcgtttgcatgttcaa

SEQ ID NO: 30343 - DNA, 110 bp, synthetic construct
  source 1..110: mol_type = other DNA
ccaccctgtagcatatggagtacctgggccagggattgaatccaaggcagagctgtgaccgatgccacagctgcagcaacaggagatccttaacccacagtattgggcca

SEQ ID NO: 30344 - DNA, 110 bp, synthetic construct
  source 1..110: mol_type = other DNA
tgaccgatgccacagctgcagcaacaggagatccttaacccacagtattgggccagggattgaacccgtatccctgccacttcagagacaccactgatcctgttgcatta

SEQ ID NO: 30345 - DNA, 110 bp, synthetic construct
  source 1..110: mol_type = other DNA
attcttggcccagccttttgggaactcaaccattctctttgtagaaggcatgctttgtttcccaaagagtcctttgggaaagctaattaagcctctgaacagtgtgtgtg

SEQ ID NO: 30346 - DNA, 110 bp, synthetic construct
  source 1..110: mol_type = other DNA
tcacctggaggatgccagtccagagcgcaaacctgcgccacagcagttcccgtcatggctcagcggaaaggcatctgactaggaggcccgagggcatgggttccatcctt

SEQ ID NO: 30347 - DNA, 110 bp, synthetic construct
  source 1..110: mol_type = other DNA
tacagtgtctttaacaagatagaagtttattttctttccactgagatctgggtaggtggtctagggctgtgatgagcttcttggacccaggctgctgctctctctcctct

SEQ ID NO: 30348 - DNA, 110 bp, synthetic construct
  source 1..110: mol_type = other DNA
gtggtctagggctgtgatgagcttcttggacccaggctgctgctctctctcctctgctttgcatactcgacggatctcatggccccagatggcacagccaagtgccaggc

SEQ ID NO: 30349 - DNA, 110 bp, synthetic construct
  source 1..110: mol_type = other DNA
tgctcctaatgcaatcaggggacactagatcccacgtcagcccccaaatcaaaagccaggacaaaatcttggacaaattacagctgctctcaagaagccacctttcacct

SEQ ID NO: 30350 - DNA, 110 bp, synthetic construct
  source 1..110: mol_type = other DNA
gttttatggcgaaaaaattgttggaacatttttactttaaaaagttccccttcagagttcccactgtggctcagtagtaaggaacccaactagtatccatgaggacgagg

SEQ ID NO: 30351 - DNA, 110 bp, synthetic construct; identical to SEQ ID NO: 30350
  source 1..110: mol_type = other DNA

SEQ ID NO: 30352 - DNA, 110 bp, synthetic construct
  source 1..110: mol_type = other DNA
gaaccctctcagcactgctcaccctttagctggtatactcataactgaaagccgccttcttcttagatttggctcagttagtccaaagacgttgggacgaggaaacaagg

SEQ ID NO: 30353 - DNA, 110 bp, synthetic construct
  source 1..110: mol_type = other DNA
tggcttcagtatttgactttataatttgaactctctgcttattactaaatttagcttgtatatttgtgtctctccctgaattcgagcaaatggcaggctctgaacataaa

SEQ ID NO: 30354 - DNA, 110 bp, synthetic construct
  source 1..110: mol_type = other DNA
ttgtatatttgtgtctctccctgaattcgagcaaatggcaggctctgaacataaaatgccaaattatctatttcatctgcgtcaacttatgtctctgtcggcgcactgat

SEQ ID NO: 30355 - DNA, 110 bp, synthetic construct
  source 1..110: mol_type = other DNA
caagtaatttcagttttagtcagcattccattgccagcatgttgttggagcaaattggaggatttttagatttttgagagaatgaatcatcaaggaggagctgttgggta

SEQ ID NO: 30356 - DNA, 110 bp, synthetic construct
  source 1..110: mol_type = other DNA
tggaggatttttagatttttgagagaatgaatcatcaaggaggagctgttgggtaagcccaagtttcagctgtctttatcttttgagaagggttgatctccaggcaggaa

SEQ ID NO: 30357 - DNA, 110 bp, synthetic construct
  source 1..110: mol_type = other DNA
acggcaaggacgactggcggccagcgtggcgctgagttatcacaagtgactagattcagtttttctcttaattggtctgggttccgctcaattgtaggaaaataaagaaa

SEQ ID NO: 30358 - DNA, 110 bp, synthetic construct
  source 1..110: mol_type = other DNA
cagaggttcccctcggtctcagattcctacctgatgcaaatctctgctgagccaccatcagctgaagagtttctcttaacctgtggaggacacagagtgaagaagcttaa

SEQ ID NO: 30359 - DNA, 110 bp, synthetic construct
  source 1..110: mol_type = other DNA
catcagctgaagagtttctcttaacctgtggaggacacagagtgaagaagcttaacaggaagagaggacaaaggttagaaaaataggccaactcaatttcaatatacaac

SEQ ID NO: 30360 - DNA, 110 bp, synthetic construct
  source 1..110: mol_type = other DNA
tcaatgaagtggcaaaatctgccacgtttgctgtatatgcaaaatatttcacggaactctactggagtaatgtgttttttgagcagctactgtagttgctgaagctaaat

SEQ ID NO: 30361 - DNA, 110 bp, synthetic construct
  source 1..110: mol_type = other DNA
agaaaaacatctcatttaaaaagccattcttggagttcccactgtggcacaacagattaaggatttggtggagtcaccactgtggtttgggttgttgctgtggtgtgggt

SEQ ID NO: 30362 - DNA, 110 bp, synthetic construct
  source 1..110: mol_type = other DNA
tctatctctaccaggaaaatatccaggctagcttgctggagaatcacacatttggttcaggtgcagcagccaacagcaagacagagagtgaatgaacctcacatgactga

SEQ ID NO: 30363 - DNA, 110 bp, synthetic construct
  source 1..110: mol_type = other DNA
ttcaggtgcagcagccaacagcaagacagagagtgaatgaacctcacatgactgactagaaaaactgtccagtgcagcccagccaagtccaaatctctgatctgcatacc

SEQ ID NO: 30364 - DNA, 110 bp, synthetic construct
  source 1..110: mol_type = other DNA
ttcaactccgcaaaggaaaagatctgagctttttaataggtgggggttagggacggctgaagaacccttgaacctgcacagacctccaggtggcctcaatttctcagtag

SEQ ID NO: 30365 - DNA, 110 bp, synthetic construct
  source 1..110: mol_type = other DNA
tcctcttagcagcaccatgaggagaggatgctcttagcatctctttttgttgatgcagaccttgaacttagctagggaaaggaacttctccagcttagtggtggaggcag

SEQ ID NO: 30366 - DNA, 110 bp, synthetic construct
  source 1..110: mol_type = other DNA
ttgcagccaaaagcattctgggtaatatgattatttcctatcattcttaatctgctcccaaacttacagctttgtgatagaaatgtttactttaagaaataccttttaag

SEQ ID NO: 30367 - DNA, 110 bp, synthetic construct
  source 1..110: mol_type = other DNA
agcatgcctgggataatgtggaattatttataaagatgacttgttcagagcagcttattgtgctaaggagatggaaatcccaccttctctcttcattcgctaactctgat

SEQ ID NO: 30368 - DNA, 110 bp, synthetic construct
  source 1..110: mol_type = other DNA
tattgtgctaaggagatggaaatcccaccttctctcttcattcgctaactctgattagaaccaatatatttcagatgtatcagagagggataaaaggtaaagtcaatttg

SEQ ID NO: 30369 - DNA, 110 bp, synthetic construct
  source 1..110: mol_type = other DNA
agggcagagggttaactctcatccgaatcttgaagggcaccatgtgacaggatgtacgttatggtttcccaggaaactgggtagaggagcccaaagacctactgagtaat

SEQ ID NO: 30370 - DNA, 110 bp, synthetic construct
  source 1..110: mol_type = other DNA
acgttatggtttcccaggaaactgggtagaggagcccaaagacctactgagtaatatgactttgaaaataacttttgtgtgtaagagacttcaactttaccgtgtggttt

SEQ ID NO: 30371 - DNA, 110 bp, synthetic construct
  source 1..110: mol_type = other DNA
aggagtaaaaataaatattacccattactctgtcatgcaggatagcctgtgtttttcatttcagtgtgcttacttcgatgatgttctctctctgaaataatggtatttta

SEQ ID NO: 30372 - DNA, 110 bp, synthetic construct
  source 1..110: mol_type = other DNA
tcatttcagtgtgcttacttcgatgatgttctctctctgaaataatggtattttatcacttaatgatatagaacagaggtccgcaaaccttttctgtaatgggccagatg

SEQ ID NO: 30373 - DNA, 110 bp, synthetic construct
  source 1..110: mol_type = other DNA
cttttatagtactaaaggtgaggattattcctttgttgacttgtttattatctctacctcccaccctccaattaaattcaagctccatgaaggaagtgactcacctatct

SEQ ID NO: 30374 - DNA, 110 bp, synthetic construct
  source 1..110: mol_type = other DNA
taaggtcttagtaaattcagacattccacttttactaataagacctaatacctcctccaaaacaatagatttcctcctctgaccaacacctcccattcaatacctacttt

SEQ ID NO: 30375 - DNA, 110 bp, synthetic construct
  source 1..110: mol_type = other DNA
tccaaaacaatagatttcctcctctgaccaacacctcccattcaatacctactttgcgagttgttgcaaggatttaatgaagtgatgcatgtcaaatccttaggacaaag

SEQ ID NO: 30376 - DNA, 110 bp, synthetic construct
  source 1..110: mol_type = other DNA
gaagtgaggaactagccaagtgcagatctgggagaaacatgccaggcagacgaagcagtgaacaccttaaggccagaagtgattgtgtgctcgaggagtacacgggaggc

SEQ ID NO: 30377 - DNA, 110 bp, synthetic construct
  source 1..110: mol_type = other DNA
cagtgaacaccttaaggccagaagtgattgtgtgctcgaggagtacacgggaggccactgtggccagagcagatgaaggcagggagtgatgggaggtgagatgggagaga

SEQ ID NO: 30378 - DNA, 110 bp, synthetic construct
  source 1..110: mol_type = other DNA
agcaaaggtcagaggtaagggaccaaatgccctccctttttaaatggctgagcggggatttcatctcgggctgaccgacaccagatctttgcttgctctgtgccacgtac

SEQ ID NO: 30379 - DNA, 110 bp, synthetic construct
  source 1..110: mol_type = other DNA
aaacagcggatggcatctttcttgaaggtttggtatgtaagttgcatgggctgtgcggcatcacttcatccacatgatctttgccagggcccttaacttcatcatgcctc

SEQ ID NO: 30380 - DNA, 110 bp, synthetic construct
  source 1..110: mol_type = other DNA
cggcatcacttcatccacatgatctttgccagggcccttaacttcatcatgcctcagttgtcttatctgcagtgtgatgatcaggataaaacctacttaaaggggttgtt

SEQ ID NO: 30381 - DNA, 110 bp, synthetic construct
  source 1..110: mol_type = other DNA
gtgatttgagcgttgtgtggattttgcattcatatatatttgacttcatctgtgaggaaccctaggtgaacacagaaaactgcacacctccaaatcaagctacctagaag

SEQ ID NO: 30382 - DNA, 110 bp, synthetic construct
  source 1..110: mol_type = other DNA
ggaaccctaggtgaacacagaaaactgcacacctccaaatcaagctacctagaagtatgcaaaagatgaacacctaccacctactagctaaccaggtgtgttacaagcca

SEQ ID NO: 30383 - DNA, 110 bp, synthetic construct
  source 1..110: mol_type = other DNA
cagaaaacatttgctgacgcctgtactaagcagtaaaagtcactaaatactatgtttaacacgctagttatgtttgtatttctactcttattaaaaacgatctcatagct

SEQ ID NO: 30384 - DNA, 110 bp, synthetic construct; identical to SEQ ID NO: 30383
  source 1..110: mol_type = other DNA

SEQ ID NO: 30385 - DNA, 110 bp, synthetic construct; identical to SEQ ID NO: 30383
  source 1..110: mol_type = other DNA

SEQ ID NO: 30386 - DNA, 110 bp, synthetic construct; identical to SEQ ID NO: 30383
  source 1..110: mol_type = other DNA

SEQ ID NO: 30387 - DNA, 110 bp, synthetic construct
  source 1..110: mol_type = other DNA
actgatgagagaagagggtgccaagggtgctaaggaggacatcgattacagtatatcttccatcctgctgttctagaatccccagaaagtggttgatcttttattccgtc

SEQ ID NO: 30388 - DNA, 110 bp, synthetic construct
  source 1..110: mol_type = other DNA
gaataagttccaggtgagaatcgatgctggctctctccttaagctctgtgtccgccttgcacagcacagagtaactgctcaggaaatacggatggaatacaggtatgatg

SEQ ID NO: 30389 - DNA, 110 bp, synthetic construct
  source 1..110: mol_type = other DNA
tgattacaataccagttttcagtttgtcagtctattgtgctggcttagagaccagaatagcagcatgtttgatcgttccatgccgacctgaaagcactctcaccacgccc

SEQ ID NO: 30390 - DNA, 110 bp, synthetic construct
  source 1..110: mol_type = other DNA
gtggcttagaacagccatctcagcctcagcagtcctccacttggggccagatcactctttcttggggactggggcgccgtgcattgcagggcgtttagcagcttcctagg

SEQ ID NO: 30391 - DNA, 110 bp, synthetic construct
  source 1..110: mol_type = other DNA
tctttcttggggactggggcgccgtgcattgcagggcgtttagcagcttcctaggtacatcctgctgaatgccagtaacagtgggagacagcagtgccccccagatattg

SEQ ID NO: 30392 - DNA, 110 bp, synthetic construct
  source 1..110: mol_type = other DNA
gtaactcagcttctgactgcacagcctctacgaccgagctgaagagagagagtaaaaaagaaaaaccggaggagctccgcacggatgagaaagtcctgaaaagcgaggac

SEQ ID NO: 30393 - DNA, 110 bp, synthetic construct
  source 1..110: mol_type = other DNA
aaaagaaaaaccggaggagctccgcacggatgagaaagtcctgaaaagcgaggactatgaagaccctctccagaagcctttagaccccgcgatgaagtatcagtatctgc

SEQ ID NO: 30394 - DNA, 110 bp, synthetic construct
  source 1..110: mol_type = other DNA
gctgatgctgttggtccagagaccacactttgagacacgggcctgagtggaggaaagcgagttgcctttcagtttggtggctgcagtgggtcgtcaaaggtcctgggagt

SEQ ID NO: 30395 - DNA, 110 bp, synthetic construct
  source 1..110: mol_type = other DNA
aaatatgtttatctgacatctgtctgggattcatctgaagtacgtagggctccatctcaatcctttcccacagtgcacctggcctcactgtgcaagggataaagttctca

SEQ ID NO: 30396 - DNA, 110 bp, synthetic construct
  source 1..110: mol_type = other DNA
aaagcagtttaactcagcaaaatgacctggtctgcttcactatcctttattcgaagggactttgggctttgctcgaagattcgatctctctgcaaagcccagctagactg

SEQ ID NO: 30397 - DNA, 110 bp, synthetic construct
  source 1..110: mol_type = other DNA
gggactttgggctttgctcgaagattcgatctctctgcaaagcccagctagactgggtgtcaggtgcattcccaaggctctgccactaagaaattgtgcctcagaatcct

SEQ ID NO: 30398 - DNA, 110 bp, synthetic construct
  source 1..110: mol_type = other DNA
caaggttcttggtttataactctggaaagtcagactgttttaaacggaaacacagctacttggaaacaaggatggttttcctctcagagatgatatattgtttctgaaga

SEQ ID NO: 30399 - DNA, 110 bp, synthetic construct
  source 1..110: mol_type = other DNA
ctacttggaaacaaggatggttttcctctcagagatgatatattgtttctgaagaaattcctttctcagccctaagtaataagaaataaccaactgtttccagtttgact

SEQ ID NO: 30400 - DNA, 110 bp, synthetic construct
  source 1..110: mol_type = other DNA
aggtgaagttttccttccctggttttcctcgtggtgtagacatgaccttaggcatatgtggcctcccctctcactttgtcccccagcctgccttgcatcatcttattttc

SEQ ID NO: 30401 - DNA, 110 bp, synthetic construct
  source 1..110: mol_type = other DNA
atcagaacaagcaggaagatgagcgcattgcagggtggaaagttcagcagcagtcgtttctggtcgtttctttccgcaggacctgttgtttatgggctgtgtgggaaaca

SEQ ID NO: 30402 - DNA, 110 bp, synthetic construct
  source 1..110: mol_type = other DNA
cttgacacgggggacctaagttgtgatatgagaggcacagtcacgtaagctccggcacgaggcttggcaaagggtaagccccatatgatggtcactgggtctaagctctg

SEQ ID NO: 30403 - DNA, 110 bp, synthetic construct
  source 1..110: mol_type = other DNA
cacgaggcttggcaaagggtaagccccatatgatggtcactgggtctaagctctgggtaccagcagtacgtgtctcaggacttcccggggccagcagcaaggcccccaga

SEQ ID NO: 30404 - DNA, 110 bp, synthetic construct
  source 1..110: mol_type = other DNA
actccagagacccgagttctagtcctaagtcacaaccttaaagctgtcacgaccacctccccctctttctccgtctgcttaacgcagatggttcaattatacggtgacct

SEQ ID NO: 30405 - DNA, 110 bp, synthetic construct
  source 1..110: mol_type = other DNA
cctccccctctttctccgtctgcttaacgcagatggttcaattatacggtgacctgcagagtgccagtgttgaatctacatttatggacacacatactcaaaagagtatt

SEQ ID NO: 30406 - DNA, 110 bp, synthetic construct
  source 1..110: mol_type = other DNA
atccttaacccacggtttgagccagggatcgaacccgagtctcagtgctcccaagatggctgtcaatcccgctgcgccacagcgggagctcctcttgtttcattctcatc

SEQ ID NO: 30407 - DNA, 110 bp, synthetic construct
  source 1..110: mol_type = other DNA
atggctgtcaatcccgctgcgccacagcgggagctcctcttgtttcattctcatctgcgtagtaatctcctaaccggtcctccagtacctgtccccttcctgacccagaa

SEQ ID NO: 30408 - DNA, 110 bp, synthetic construct
  source 1..110: mol_type = other DNA
aaaatgattaccagagtaagtgtagttaacatccatcatctcatatagatactgggggggaaagctgctacgttcttagcgatttttataaatacaccagacagcagtgc

SEQ ID NO: 30409 - DNA, 110 bp, synthetic construct
  source 1..110: mol_type = other DNA
gggggaaagctgctacgttcttagcgatttttataaatacaccagacagcagtgctaactctagtcatcagattgtacatgataccccgaggtttatctatcttatacct

SEQ ID NO: 30410 - DNA, 110 bp, synthetic construct
  source 1..110: mol_type = other DNA
tgttcctgaggtttcacaaagaccttccggttccttatgtccagatgggcagcggccagccgagggacaaccctgctggcactgagctaagcagagagccccagggagca

SEQ ID NO: 30411 - DNA, 110 bp, synthetic construct
  source 1..110: mol_type = other DNA
tcactgagtgacatttctgggtgtctggtacacgtcagcacatggaaattgacctccttcttactaatgactgctgggtaacctatggcatggatgtagcttagtttact

SEQ ID NO: 30412 - DNA, 110 bp, synthetic construct
  source 1..110: mol_type = other DNA
ccttcttactaatgactgctgggtaacctatggcatggatgtagcttagtttactgagccaatctcctacggatgcatttaggttgtttccaggttttaaattacttgat

SEQ ID NO: 30413 - DNA, 110 bp, synthetic construct
  source 1..110: mol_type = other DNA
cttgatgaggcaggctgttcactgccttggactgtctatcccaccatttccttactgatcagcggattgcctcctgtggtcagtgagccagagtcatgtctgtcttgaga

SEQ ID NO: 30414 - DNA, 110 bp, synthetic construct
  source 1..110: mol_type = other DNA
tgatcagcggattgcctcctgtggtcagtgagccagagtcatgtctgtcttgagaggtttgtaaactacagctcaggggccaaatttggctctctgtctcttttggggca

SEQ ID NO: 30415 - DNA, 110 bp, synthetic construct
  source 1..110: mol_type = other DNA
tttttacaaaaatcaagcctttggatagttcatgccttcctgtggtttgaaaagacaatataaaaaggaaaataacgagaaggtgaattcctgtctccatccgacccagt

SEQ ID NO: 30416 - DNA, 110 bp, synthetic construct
  source 1..110: mol_type = other DNA
caatataaaaaggaaaataacgagaaggtgaattcctgtctccatccgacccagtcctgtctccataggcccctttttattagtttcttaaaggtcctttcagggttttc

SEQ ID NO: 30417 - DNA, 110 bp, synthetic construct
  source 1..110: mol_type = other DNA
caatacggtacctctgcgtttaaccatctgaggaactgccaggtggtttttccaaagtggttgcaccatcgtacgtgttaccatgggcagcacatgagggtccagcttct

SEQ ID NO: 30418 - DNA, 110 bp, synthetic construct
  source 1..110: mol_type = other DNA
agtggttgcaccatcgtacgtgttaccatgggcagcacatgagggtccagcttctccacatcctctccagccaggacatacctgtttacctgtctgtcatctccacctct

SEQ ID NO: 30419 - DNA, 110 bp, synthetic construct
  source 1..110: mol_type = other DNA
ctatttacaagagaaaatcatttttcctggctcctaagtctagaagtcattcatacaagaaggcacaacattcttgagctgtttttatttcctcagttctcctgtaggca

SEQ ID NO: 30420 - DNA, 110 bp, synthetic construct
  source 1..110: mol_type = other DNA
gtgtgtcattgggcaaactagtgacctctctgagccgcatctatgatctgggactagccatgtgagaggctgaatgaagtacttgagaacagcagatgtttggtaagtgt

SEQ ID NO: 30421 - DNA, 110 bp, synthetic construct
  source 1..110: mol_type = other DNA
agccatgtgagaggctgaatgaagtacttgagaacagcagatgtttggtaagtgtgatgtcattttcacaccatcctcctggtcctgtgaagcaggacatggcccagtcc

SEQ ID NO: 30422 - DNA, 110 bp, synthetic construct
  source 1..110: mol_type = other DNA
cggtacatgttccaatttgccctcccgttttcgtttatcctactgggcttgggtccgacatagggttacttacgtcacacacccgagtcttcaggaataataaagcgtaa

SEQ ID NO: 30423 - DNA, 110 bp, synthetic construct
  source 1..110: mol_type = other DNA
cgacatagggttacttacgtcacacacccgagtcttcaggaataataaagcgtaatcaatacgggagaggcagcatcaaagacgacaaaagatgctgtgttgtttctgag

SEQ ID NO: 30424 - DNA, 110 bp, synthetic construct
  source 1..110: mol_type = other DNA
tgctgctcccaccaggacacatgtcatgctcacacgggaataaggccagctcacacatgactcatccactgtgtggcctggagtgaccccttctccccacgtggctgagt

SEQ ID NO: 30425 - DNA, 110 bp, synthetic construct
  source 1..110: mol_type = other DNA
tatatggaagttcccccactagtggtcgaatcagaactgcagctaccggtctgcaccacagacacagccaagccagatccaagctgcatttgcgaccccctggggcaaca

SEQ ID NO: 30426 - DNA, 110 bp, synthetic construct
  source 1..110: mol_type = other DNA
ccacagacacagccaagccagatccaagctgcatttgcgaccccctggggcaacatggaatccttaacccactgatgaggccagggtttcaaccctcatcctcacagaca

SEQ ID NO: 30427 - DNA, 110 bp, synthetic construct
  source 1..110: mol_type = other DNA
atgtgtgttcaccattccaggttgaaacagaagatggtaccccagttcacaagacaagccaacacttaagctgagaagacagtgagaaacccagggacttactgcaccct

SEQ ID NO: 30428 - DNA, 110 bp, synthetic construct
  source 1..110: mol_type = other DNA
tgcatttctaataagctcccagagatgcttctagagaccaagcttgggccagaggaaccagagccctcacctacctctacctattagaggtcaccaaagcctatggatat

SEQ ID NO: 30429 - DNA, 110 bp, synthetic construct
  source 1..110: mol_type = other DNA
aaccagagccctcacctacctctacctattagaggtcaccaaagcctatggatattcatggggaggagataggaaagaaccagactgacacaaataaagacctcaagcct

SEQ ID NO: 30430 - DNA, 110 bp, synthetic construct
  source 1..110: mol_type = other DNA
caacaaagcagacttcaaagctctttcacccaacaagaattacaacacagccattccaacttttattccacatcacagacatatctgaaacatgtttggattttcaactt

SEQ ID NO: 30431 - DNA, 110 bp, synthetic construct
  source 1..110: mol_type = other DNA
atgagagccaggttgacagaaggaggtgggtgtaggtatgtgggtgtcacaaacagcccccattcacaaaactctttggcgatccagctccatgagcagggaccccacag

SEQ ID NO: 30432 - DNA, 110 bp, synthetic construct
  source 1..110: mol_type = other DNA
gcccccattcacaaaactctttggcgatccagctccatgagcagggaccccacagctcagcgggcaaggccatgagattttatcactagcggcattcagctgggacctca

SEQ ID NO: 30433 - DNA, 110 bp, synthetic construct
  source 1..110: mol_type = other DNA
ctttgaggtatgtttgcatatatcaggtctcacccactaatacattgcttgcttgtgaaacttctagaaatgcggagggcaccataccatttctttggtctcactgatgt

SEQ ID NO: 30434 - DNA, 110 bp, synthetic construct
  source 1..110: mol_type = other DNA
agatattcttcccggatcattagaggaagaagacttttcctcttccttcctgtttgtgatgcggctgagaggatgtgctttttggactttggcagccagcttgcgacgag

SEQ ID NO: 30435 - DNA, 110 bp, synthetic construct
  source 1..110: mol_type = other DNA
gtgatgcggctgagaggatgtgctttttggactttggcagccagcttgcgacgaggaaggagatgcaagaacagaaagaacgcagggggtgagggcagccaggcagagga

SEQ ID NO: 30436 - DNA, 110 bp, synthetic construct
  source 1..110: mol_type = other DNA
gttgctccagaggtaaataaatggggactggagttaaatagaggacttgcccacggccccgaacacatgctaaaaacccggctgcatagaaagcggggcaagggtttcag

SEQ ID NO: 30437 - DNA, 110 bp, synthetic construct
  source 1..110: mol_type = other DNA
gcaacacgcagtcgggcagagaattcaacgttttcctgggtctgcctttaacaattgaaaaggcctgcatgtggcaagtcaacagcttgtaaattcataattggggcgag

SEQ ID NO: 30438 - DNA, 110 bp, synthetic construct
  source 1..110: mol_type = other DNA
tgaaaaggcctgcatgtggcaagtcaacagcttgtaaattcataattggggcgaggctgcctgtggctctagttgcccttaacatgtgaccatgaggctcagagggtcca

SEQ ID NO: 30439 - DNA, 110 bp, synthetic construct
  source 1..110: mol_type = other DNA
tggatatccaggtgatgccagcatccgtgagcaatttgaaaacaagaaaacgctagaaggatccttttatctttgggggaaaaaaaagtttagctagcagagtacttcag

SEQ ID NO: 30440 - DNA, 110 bp, synthetic construct
  source 1..110: mol_type = other DNA
gaaggatccttttatctttgggggaaaaaaaagtttagctagcagagtacttcagcagcccttgtgtagcagcaaatgacaaataaccctcaccatttagatcttattac

SEQ ID NO: 30441 - DNA, 110 bp, synthetic construct
  source 1..110: mol_type = other DNA
gtcccagctcctatgtgccctagacttgggacattttagaagatgaggatcagagggcggagaggtaagattcccgctgtgcaagggatttaaaaagaaaatcattaaaa

SEQ ID NO: 30442 - DNA, 110 bp, synthetic construct
  source 1..110: mol_type = other DNA
ggcggagaggtaagattcccgctgtgcaagggatttaaaaagaaaatcattaaaagtctaattttttttctaggtggtaatacacttcactaacttttcctgctggggaa

SEQ ID NO: 30443 - DNA, 110 bp, synthetic construct
  source 1..110: mol_type = other DNA
gaccccttccctcatgaagctcatcttctcgctgacccttgatcgtgagcctcccgaggggagggtctatgtcgggttcatcattgcatctctactaaattcagtgtagg

SEQ ID NO: 30444 - DNA, 110 bp, synthetic construct
  source 1..110: mol_type = other DNA
gtaacacggcccaggattcagcacggtctgtttgcaggtttagtcagcttatttcccccccttgtaataacggtcaccatattgacagtaatttgcaggtttgtaagttc

SEQ ID NO: 30445 - DNA, 110 bp, synthetic construct
  source 1..110: mol_type = other DNA
gcattgatttttgtaacctcagacttaggaatttgctggaattttaaatgtacataaatataatttctaccccaggataaaggcttgtcagtttgatgacctcattttta

SEQ ID NO: 30446 - DNA, 110 bp, synthetic construct
  source 1..110: mol_type = other DNA
caaattgaatcaaattcaaaaaattcagctcctccattgcaccggctactttctgaggctcggtagtgatgctttgttagtggctcccgtgttgggttgggcagtgcgga

SEQ ID NO: 30447 - DNA, 110 bp, synthetic construct
  source 1..110: mol_type = other DNA
tcgtatgaacaactgagcccgatttactgaatgaggatatatactgcagtagacaaagagtaaaagattaaaaaccagggacaacctacttttgtctcttaaatctttaa

SEQ ID NO: 30448 - DNA, 110 bp, synthetic construct
  source 1..110: mol_type = other DNA
gttctaactgtggcagcatcccccatggacctaatcttgaagcattattgtttaaagcaagatggcaggtgtccagtaagctgccctgtgagtttcaccactggctgccg

SEQ ID NO: 30449 - DNA, 110 bp, synthetic construct
  source 1..110: mol_type = other DNA
gatggagccaagattcagatccaggtgttgctgcctccagtgtccacagtgctgtacttcctcggctaaaattaaattaatgaaatcagaagtcataataaacactcttg

SEQ ID NO: 30450 - DNA, 110 bp, synthetic construct
  source 1..110: mol_type = other DNA
acagtgctgtacttcctcggctaaaattaaattaatgaaatcagaagtcataataaacactcttggcgaattcattagaaattaaaagaggctaagtgttgttaagctat

SEQ ID NO: 30451 - DNA, 110 bp, synthetic construct
  source 1..110: mol_type = other DNA
cctttgtgcagttccgcttctcacacttgtacgttcagaacctgcctctcttcttctgccgtcaaggaacccctccttcctctttctggtgcatttctttcccttcctgg

SEQ ID NO: 30452 - DNA, 110 bp, synthetic construct
  source 1..110: mol_type = other DNA
tacctgctatgagggtggctgcctttcttccctcagggcatctgcttccagtgtgtaagctcaggagcttcccaggtgaaatgcggagctggcctctgtacacagaggac

SEQ ID NO: 30453 - DNA, 110 bp, synthetic construct
  source 1..110: mol_type = other DNA
tttgatttttatagaaaatggaaaatgactagaaataaatggatgccagctatttatttcaaaatcccttacttcagggtgaatttagagccccaaattattggggccaa

SEQ ID NO: 30454 - DNA, 110 bp, synthetic construct
  source 1..110: mol_type = other DNA
atttcaaaatcccttacttcagggtgaatttagagccccaaattattggggccaatcttcacttccttttcatcctccatctgtaagatcgagaactgacattctgcatg

SEQ ID NO: 30455 - DNA, 110 bp, synthetic construct
  source 1..110: mol_type = other DNA
tgcttttttttttaatccactctgaaatctgccttctgattatgtttcccattcaaagcggttactgaggaatacctaccacatttgttttgttgcatttctcattgttt

SEQ ID NO: 30456 - DNA, 110 bp, synthetic construct
  source 1..110: mol_type = other DNA
ttcccattcaaagcggttactgaggaatacctaccacatttgttttgttgcatttctcattgttttttcctcctcttttcctgccttcttaggttttatttggaatcatg

SEQ ID NO: 30457 - DNA, 110 bp, synthetic construct
  source 1..110: mol_type = other DNA
ccctcccccaagaccctaagctttcttttttgactaatatgtggtacatacatgttcatcaggaacatggagatgggtcacagaccctttgaggggagcctgcaggtaac

SEQ ID NO: 30458 - DNA, 110 bp, synthetic construct
  source 1..110: mol_type = other DNA
tcatcaggaacatggagatgggtcacagaccctttgaggggagcctgcaggtaacataagtaagtgaagcagtcggaagaagagacgccaaatgacaaagtgaggccatc

SEQ ID NO: 30459 - DNA, 110 bp, synthetic construct
  source 1..110: mol_type = other DNA
ctctgtacgaggctagtgctgggtgcttgggctgtaaatggtgaggaaacccagaggtagttcctgccctcatcactctcctggtagatttgggaaatacctcaggtttg

SEQ ID NO: 30460 - DNA, 110 bp, synthetic construct
  source 1..110: mol_type = other DNA
ggtagttcctgccctcatcactctcctggtagatttgggaaatacctcaggtttgtattttagatgatgttatggtcagtgtcaatcggatagtggagtagaacaaccat

SEQ ID NO: 30461 - DNA, 110 bp, synthetic construct
  source 1..110: mol_type = other DNA
caccctgtggagctagtagtttatgtagggagatagtcttagaataaataaaccagtagatgacccacgcaactaaccacaccctgatttttccactggaaggtgataca

SEQ ID NO: 30462 - DNA, 110 bp, synthetic construct
  source 1..110: mol_type = other DNA
gtagatgacccacgcaactaaccacaccctgatttttccactggaaggtgatacaggtccttttaccctggattgctatcctttttctttatttctcataaatactagta

SEQ ID NO: 30463 - DNA, 110 bp, synthetic construct
  source 1..110: mol_type = other DNA
tcaagcagactttcttgggctgcttgcgtttcttcatcaccagtttctccacagccaccatcaccattgttacgcgtagcctctgttctggaatcagtaactcttctctc

SEQ ID NO: 30464 - DNA, 110 bp, synthetic construct
  source 1..110: mol_type = other DNA
caccatcaccattgttacgcgtagcctctgttctggaatcagtaactcttctctctttgtacgtaagtagacaagtatttgactctgagtgtgaatctctttttaagtat

SEQ ID NO: 30465 - DNA, 110 bp, synthetic construct; identical to SEQ ID NO: 30463
  source 1..110: mol_type = other DNA

SEQ ID NO: 30466 - DNA, 110 bp, synthetic construct; identical to SEQ ID NO: 30464
  source 1..110: mol_type = other DNA

SEQ ID NO: 30467 - DNA, 110 bp, synthetic construct
  source 1..110: mol_type = other DNA
gcagaaacgtgttttttggatgcccctgaaattgtgaagctctttattgtgtagcaatattacagaaatataaatttgcccttcttgaagaaaaactcccactaataatc

SEQ ID NO: 30468 - DNA, 110 bp, synthetic construct
  source 1..110: mol_type = other DNA
tgctctgcccccagcccggctgatgacatgcagtttgtggaactgacttagagcgaagagaaaacagaagctctctctcccactggggtggctgaggtggtggggtgcag

SEQ ID NO: 30469 - DNA, 110 bp, synthetic construct
  source 1..110: mol_type = other DNA
aagagaaaacagaagctctctctcccactggggtggctgaggtggtggggtgcagtcatagaactgccagagacttttgctaacagaaaggaatagcccacctaccagtg

SEQ ID NO: 30470 - DNA, 110 bp, synthetic construct
  source 1..110: mol_type = other DNA
taaatattaagatattatcaagcagaactctggcactttaaggaaagctggctgcataaattacctaagtcatgaaacttaagcgtggggatgctcagttaccttcattc

SEQ ID NO: 30471 - DNA, 110 bp, synthetic construct
  source 1..110: mol_type = other DNA
ttctgattctcttccctgtgctgtacattacatgcctgtgatttattttgtagttagtagcttgtaccttaatctcctttacctattttttccattccctcacttccatc

SEQ ID NO: 30472 - DNA, 110 bp, synthetic construct
  source 1..110: mol_type = other DNA
tttaagactgagcccttgcaggagtctgcccaaagtcctgggagttcatgtcagatttgaatagaattgttggacacccagtgaatgtgagaatggattggtattgggaa

SEQ ID NO: 30473 - DNA, 110 bp, synthetic construct
  source 1..110: mol_type = other DNA
tttgaatagaattgttggacacccagtgaatgtgagaatggattggtattgggaaaaaaatgcatctggtgtgagaaatggtgtcagaaactgacccaacatccagcaca

SEQ ID NO: 30474 - DNA, 110 bp, synthetic construct
  source 1..110: mol_type = other DNA
gctaggctaccaggaagcaattgtggcaattaacactgggtgatctgggagcagtcatacttctgcttcttccttatcaatatatgaatctttaaacttgcagataagtg

SEQ ID NO: 30475 - DNA, 110 bp, synthetic construct
  source 1..110: mol_type = other DNA
tgggagcagtcatacttctgcttcttccttatcaatatatgaatctttaaacttgcagataagtgtgaatttcttttcatgttatcttttcatttctgatgtctggtgtt

SEQ ID NO: 30476 - DNA, 110 bp, synthetic construct; identical to SEQ ID NO: 30474
  source 1..110: mol_type = other DNA

SEQ ID NO: 30477 - DNA, 110 bp, synthetic construct; identical to SEQ ID NO: 30475
  source 1..110: mol_type = other DNA

SEQ ID NO: 30478 - DNA, 110 bp, synthetic construct
  source 1..110: mol_type = other DNA
gccgtctctcctttataaagagtaaaggcaattgaattgatgatcacctagtgtcttttcgtctccagatgttcttcatgggaagtgagcttcattccacgtcttataca

SEQ ID NO: 30479 - DNA, 110 bp, synthetic construct
  source 1..110: mol_type = other DNA
ttttcgtctccagatgttcttcatgggaagtgagcttcattccacgtcttatacacagatatgggagaagccagtactgtgaaggaagcgcagtctgggtcagaggcccc

SEQ ID NO: 30480 - DNA, 110 bp, synthetic construct
  source 1..110: mol_type = other DNA
cattccaaatgtaacagtttgcatccagaaaccctgaagtgcccgtccatcccactccctccctctcccctgcccctgggaaccacaagtctgttctccttggccgtggt

SEQ ID NO: 30481 - DNA, 110 bp, synthetic construct; identical to SEQ ID NO: 30480
  source 1..110: mol_type = other DNA

SEQ ID NO: 30482 - DNA, 110 bp, synthetic construct
  source 1..110: mol_type = other DNA
aaggtttaactgtttctctcaacatgagatgggattagttaggccattgcagggggggaaaaaaaacctctctaggttgagcgtggctgtagttgtaactatcatatttg

SEQ ID NO: 30483 - DNA, 110 bp, synthetic construct
  source 1..110: mol_type = other DNA
gggaaaaaaaacctctctaggttgagcgtggctgtagttgtaactatcatatttgatgcgaggactttgttgtacctgataccttgaaaatctggaccacacccctttgg

SEQ ID NO: 30484 - DNA, 110 bp, synthetic construct
  source 1..110: mol_type = other DNA
aatatatgagctttccacgagtccttcaaagtctgcaggtccttaaataactgttgtacctgttctgttgggttttctagctgcattcagtgatgagccacaatggcgtg

SEQ ID NO: 30485 - DNA, 110 bp, synthetic construct
  source 1..110: mol_type = other DNA
gtacctgttctgttgggttttctagctgcattcagtgatgagccacaatggcgtgtgcttataccatctcatccagaactggagccctgttacttcttaaaaagattttg

SEQ ID NO: 30486 - DNA, 110 bp, synthetic construct
  source 1..110: mol_type = other DNA
gagacactggcgtctaattttaataagttgggaacaacatgttcttaaaactctgcccaggtttctcctgccactcccttccttgcagtgctcacacatccagtttcagc

SEQ ID NO: 30487 - DNA, 110 bp, synthetic construct
  source 1..110: mol_type = other DNA
cccaggtttctcctgccactcccttccttgcagtgctcacacatccagtttcagctcattgaggagagtatttcctctgaaccctctgctttcggaagtcataacagctg

SEQ ID NO: 30488 - DNA, 110 bp, synthetic construct
  source 1..110: mol_type = other DNA
ttattttggacaaaaacatcagaagaatctggaggcttaaaaaacgtaattccttttaaattcatgctttggaaaatctcaagaggtccttcattccccttggtattaaa

SEQ ID NO: 30489 - DNA, 110 bp, synthetic construct; identical to SEQ ID NO: 30488
  source 1..110: mol_type = other DNA

SEQ ID NO: 30490 - DNA, 110 bp, synthetic construct
  source 1..110: mol_type = other DNA
tatcctaaacactgtgctagatcctggaatttatagaaatgaatgatactgtgaagtacaggccagtcgttcctttacttactagacgtgtctctcgaggttcactctgt

SEQ ID NO: 30491 - DNA, 110 bp, synthetic construct
  source 1..110: mol_type = other DNA
gtacaggccagtcgttcctttacttactagacgtgtctctcgaggttcactctgtgtgagacaatatacgtatcagtcaaccgagagggttcctgcctcagcaatgtcac

SEQ ID NO: 30492 - DNA, 110 bp, synthetic construct
  source 1..110: mol_type = other DNA
caaacgtggcgtcggtttattgtcatcatgaacagagtgcgtttgggagctggactccacctgtctggtctcgagaatgttatgaaacatgctaagcctcagtgtccacc

SEQ ID NO: 30493 - DNA, 110 bp, synthetic construct
  source 1..110: mol_type = other DNA
accatgttcaagagagcccagctgtcccaggcaaggccgtcctagaccaggcaacacctggccaaccccaaacataggcaagagctcagctaggatgagctgagctgcct

SEQ ID NO: 30494 - DNA, 110 bp, synthetic construct
  source 1..110: mol_type = other DNA
tccttttgttttacaaaatgtacctcaccctttaaatttgcagagaggggagttcctgctgtggcgcagtggattaaggccctgactgcagtggctcgggttgctgtgga

SEQ ID NO: 30495 - DNA, 110 bp, synthetic construct
  source 1..110: mol_type = other DNA
aaatgtacctcaccctttaaatttgcagagaggggagttcctgctgtggcgcagtggattaaggccctgactgcagtggctcgggttgctgtggaggtgcaggtttgatc

SEQ ID NO: 30496 - DNA, 110 bp, synthetic construct
  source 1..110: mol_type = other DNA
tgggaggagagagaggggcaatgagctgttttctgtgtacagtgatagctcaatgtcagggggcaataaagggtccgaggtattagaccagtggagaggaaagttgagct

SEQ ID NO: 30497 - DNA, 110 bp, synthetic construct
  source 1..110: mol_type = other DNA
tcagggggcaataaagggtccgaggtattagaccagtggagaggaaagttgagctttactgggagaggcccgatgtcctttatctgccggatagtttaaaagtgttgcca

SEQ ID NO: 30498 - DNA, 110 bp, synthetic construct
  source 1..110: mol_type = other DNA
accaagcaagccacaaaggttggagcaagtaggagtggctgaggtcatcaagccttctcattttatgggtatcagaacccaacggagtatggctttctggaatctatgag

SEQ ID NO: 30499 - DNA, 110 bp, synthetic construct
  source 1..110: mol_type = other DNA
tctcattttatgggtatcagaacccaacggagtatggctttctggaatctatgagtgcagctgtaaaatgagagccctggatgattttctgccagttcatgccacgtctt

SEQ ID NO: 30500 - DNA, 110 bp, synthetic construct
  source 1..110: mol_type = other DNA
gttgtagacgcagctcggatcccctcgttgctgtgcctgtggcttaggctcccattggaccccccgcctggaaactcgatgtgccgcgggagtggccctagaaaaggcaa

SEQ ID NO: 30501 - DNA, 110 bp, synthetic construct
  source 1..110: mol_type = other DNA
gcatctgctctgctcgagcccctgaatgccgtggacacaatctcacaacacaggaacactcatgtgtgtcttggcaagtcatcctctagcaccatctcgcagcttttggg

SEQ ID NO: 30502 - DNA, 110 bp, synthetic construct
  source 1..110: mol_type = other DNA
acactcatgtgtgtcttggcaagtcatcctctagcaccatctcgcagcttttgggtctcccagtcatgcatgtagatcctttatcttagaccatcttttaggttcctgga

SEQ ID NO: 30503 - DNA, 110 bp, synthetic construct
  source 1..110: mol_type = other DNA
ttcttgtccctttgcctcttctctggacgttctccccttcttctgtctctaaccaaagcttgactgtaggtaaacatggccagccccccgcacacccctgcacaccccac

SEQ ID NO: 30504 - DNA, 110 bp, synthetic construct
  source 1..110: mol_type = other DNA
tgtacattataaggggaactttgtagtcagtggcatagagcacattgattacatcaacatctcctttgtatcttctcaacaatccttctacaaagtcctaagttaaaaaa

SEQ ID NO: 30505 - DNA, 110 bp, synthetic construct
  source 1..110: mol_type = other DNA
cccagtggggacatctcagacggccacccctccaccctgagcgccacctttgaacatcaattacatggacatgtttttaagtgtattttttaaaggaagtttaaatttca

SEQ ID NO: 30506 - DNA, 110 bp, synthetic construct
  source 1..110: mol_type = other DNA
atcaattacatggacatgtttttaagtgtattttttaaaggaagtttaaatttcataagtaatgcgggcgttcgttctacttgtgaaagtgcaaacggtgcagatgaaac

SEQ ID NO: 30507 - DNA, 110 bp, synthetic construct
  source 1..110: mol_type = other DNA
gtgctgctggtttgaaatgatgaccccggagtctgttttcagttttaagactcagtgctaagctgctatccccggggtttctcatcacccaaaccccagagctccaggtc

SEQ ID NO: 30508 - DNA, 110 bp, synthetic construct
  source 1..110: mol_type = other DNA
gctgtgtcagcctcggtggtaaggattccaagaggacttttcaaggcacctctgaccctgaggggtttcccttgtacactaatttcaggagcccgcccttgaatacaaag

SEQ ID NO: 30509 - DNA, 110 bp, synthetic construct
  source 1..110: mol_type = other DNA
ccctgaggggtttcccttgtacactaatttcaggagcccgcccttgaatacaaagcaacttcaagagatttttccgtctgtttggggaaacctcaactgctggtaatgtc

SEQ ID NO: 30510 - DNA, 110 bp, synthetic construct
  source 1..110: mol_type = other DNA
gtctcactgcaccaatgcattttctcatcaagcagtttcttgcacagaccaactgcaatgtctccatccatagaaataattaacatgcccctggcagcctttattgatat

SEQ ID NO: 30511 - DNA, 110 bp, synthetic construct
  source 1..110: mol_type = other DNA
caatgtctccatccatagaaataattaacatgcccctggcagcctttattgatattcggtttataaagcagtgacctggagatggggcatctcttgcagattaatggctc

SEQ ID NO: 30512 - DNA, 110 bp, synthetic construct
  source 1..110: mol_type = other DNA
ggatggacctacagattattatcctaaatgaagcacatcaggcagagaaagacaaatatcatctgctatcacctatacgtggcatctaaaaaaaatgatagaaatgaact

SEQ ID NO: 30513 - DNA, 110 bp, synthetic construct; identical to SEQ ID NO: 30512
  source 1..110: mol_type = other DNA

SEQ ID NO: 30514 - DNA, 110 bp, synthetic construct
  source 1..110: mol_type = other DNA
caaacctgcaccacggcagtgacaacgccgggtccttaatccactgcaccgccagggaactcctgatgaagtattaaagtcaactgctaaattctgccgtttacattttc

SEQ ID NO: 30515 - DNA, 110 bp, synthetic construct
  source 1..110: mol_type = other DNA
ttttctcactgggcataacaaaaccccaccaaagaaagtaaacctttactcagcttgtctgaagctaatgacgtgtccctccagccagcagattcccagccctgactaca

SEQ ID NO: 30516 - DNA, 110 bp, synthetic construct
  source 1..110: mol_type = other DNA
tgatggacatttaggtcgttctgtatcttggccactgtaaatagtgctgcaactaccctgggagtacagatctctcttccagatagtgacttcatttcctttggataaat

SEQ ID NO: 30517 - DNA, 110 bp, synthetic construct
  source 1..110: mol_type = other DNA
gcacaaatccagaggattaacagtgatggggctgccggttgcaccaaggacgtgtgtcagtcccttgtaaccgaaagatgtctgagccttcgcagggtgggcactttgat

SEQ ID NO: 30518 - DNA, 110 bp, synthetic construct
  source 1..110: mol_type = other DNA
cacctctccatgcacgaccaaagccagtcttgcagtcaggcctttctaaggatgcttatcaggcctgttagctcagctctcctgcacagagtcaaaaggctcttcttaca

SEQ ID NO: 30519 - DNA, 110 bp, synthetic construct
  source 1..110: mol_type = other DNA
tgtggccttaaaatgctgctcggttcctctgggctccggccgtcgctgctgtctagtctacaccatcagctctctctgcctctgatccggcacatcaagggcaggtgtga

SEQ ID NO: 30520 - DNA, 110 bp, synthetic construct
  source 1..110: mol_type = other DNA
aagagacaaacaggcaaatcattttcgcaagatatacaactggttgtgcaaattaaatgaaccgtccgaaggatgcgttatgcaccattgacacacagcaggggtgtgcc

SEQ ID NO: 30521 - DNA, 110 bp, synthetic construct
  source 1..110: mol_type = other DNA
aatgaaccgtccgaaggatgcgttatgcaccattgacacacagcaggggtgtgcctgagatgtgcctggttatcccaggaactcatgttctcacctcagccctatcctga

SEQ ID NO: 30522 - DNA, 110 bp, synthetic construct
  source 1..110: mol_type = other DNA
ctgtgcccacagcatgtggaatttcccaggccagggactgaacctgcaccacagaagcaaccagagctgctgcagtaccaatgcgggaacctcaacccactgggcacaag

SEQ ID NO: 30523 - DNA, 110 bp, synthetic construct
  source 1..110: mol_type = other DNA
agcaaccagagctgctgcagtaccaatgcgggaacctcaacccactgggcacaagagaactcctagaattcttaacttttgaacgagagcctgcattttcattttgcact

SEQ ID NO: 30524 - DNA, 110 bp, synthetic construct
  source 1..110: mol_type = other DNA
ctgagcaggagagctgtgtgtcaagggacattggaagtttcgttttctctcccgcgcaagactgcttggctgcgccacgtcacgcactcgctgggcctcagctatgtagg

SEQ ID NO: 30525 - DNA, 110 bp, synthetic construct
  source 1..110: mol_type = other DNA
gcaagactgcttggctgcgccacgtcacgcactcgctgggcctcagctatgtaggtgccatcctcgccacacgagggctgttgggaagtgtgcgagggaggcttgatggg

SEQ ID NO: 30526 - DNA, 110 bp, synthetic construct
  source 1..110: mol_type = other DNA
taaattagacagagtcaaaattccgggaaaactaatggctcttctgccattagttttaggcagctccacattccaggacaactcactgcttcctctaacagccaggctgt

SEQ ID NO: 30527 - DNA, 110 bp, synthetic construct
  source 1..110: mol_type = other DNA
ttaggcagctccacattccaggacaactcactgcttcctctaacagccaggctgtcccgcccctggcgggggcagggaagcaagagtgggccacttggcaggtgttgcag

SEQ ID NO: 30528 - DNA, 110 bp, synthetic construct
  source 1..110: mol_type = other DNA
agtaagctgcccccaaacacacagctaggaagaggagggttctttgagcttagtgctccaggtcctacattcataactgctgtcctgcgtagctttggtggtgaatgcgg

SEQ ID NO: 30529 - DNA, 110 bp, synthetic construct
  source 1..110: mol_type = other DNA
gtagccacttgtttcttattcttccattgtgagagttatttatatgttttggatactagtcttttataagctgtatcttttgtaaatatagtgtcccagtctgtggcttg

SEQ ID NO: 30530 - DNA, 110 bp, synthetic construct
  source 1..110: mol_type = other DNA
ctagtcttttataagctgtatcttttgtaaatatagtgtcccagtctgtggcttggtttgtcttttcagtttttgtaacagttccttttaaagagcagaaatttttttgg

SEQ ID NO: 30531 - DNA, 110 bp, synthetic construct
  source 1..110: mol_type = other DNA
ctctggaatgcagcagtgaccgtgaggcttggccacttcctgctcttgtgacacccagctgcagaggctgacattaaacaagagaacatctgggatgagtgtcgtgaggg

SEQ ID NO: 30532 - DNA, 110 bp, synthetic construct
  source 1..110: mol_type = other DNA
gaaggatagagattcgctaggcagatgagagtgatgagccttctgaagccctgtggtttccgcctacctcctgcagagatgatcaataataaggaatatttgtaaataag

SEQ ID NO: 30533 - DNA, 110 bp, synthetic construct
  source 1..110: mol_type = other DNA
gtttccgcctacctcctgcagagatgatcaataataaggaatatttgtaaataagtaataaaaatggaggcgttcccgctgtggcaccgtgggttcataatccaaacaca

SEQ ID NO: 30534 - DNA, 110 bp, synthetic construct
  source 1..110: mol_type = other DNA
caagctggttggctttggaggtgagacctctggcctctggagataacaacagctagtatttgaactcagtgagcccagccgtacggcggtgatctcatctctgtcgtcct

SEQ ID NO: 30535 - DNA, 110 bp, synthetic construct
  source 1..110: mol_type = other DNA
cgcaaggtaccctgggcacagaggatgctggtctctgtccttgtggagctttcttgggtggcagggtggagggagaccgtcaactaagtggatgaacaactaggtaattt

SEQ ID NO: 30536 - DNA, 110 bp, synthetic construct
  source 1..110: mol_type = other DNA
gatgcagagggacggaccccactccctccgctcacctgctctggtgtcccttgcaggggcttgtaaatgcctgcggagaggtaagcccgaaaaccggcaagatcggggcc

SEQ ID NO: 30537 - DNA, 110 bp, synthetic construct
  source 1..110: mol_type = other DNA
ggggcttgtaaatgcctgcggagaggtaagcccgaaaaccggcaagatcggggccctgatcccaagctgtttgtgtgtcaggatctccctggagctttatgttcacacca

SEQ ID NO: 30538 - DNA, 110 bp, synthetic construct
  source 1..110: mol_type = other DNA
cctttctagcctgagccccactgtccccatctgtaagatgcagagtgtttttggagggctgggattcttggtgtcagtaacaacagctttcttttccagctacgacccac

SEQ ID NO: 30539 - DNA, 110 bp, synthetic construct
  source 1..110: mol_type = other DNA
gggctgggattcttggtgtcagtaacaacagctttcttttccagctacgacccacctcctggatgcttgtgtcctgaggtctcctgagacccccttctcgtcccctcctt

SEQ ID NO: 30540 - DNA, 110 bp, synthetic construct
  source 1..110: mol_type = other DNA
gaacttgaacttgtttccccaatcctgaagtgcggcaccccaggggctttgtcagagggcaaatcagtcgctatcaagtagcaaaagctcacaaaacctggcgctgaaga

SEQ ID NO: 30541 - DNA, 110 bp, synthetic construct
  source 1..110: mol_type = other DNA
tatcacccctgagcgggctgttctacccacgcggttacctgcgaatctacaaagacattttaaacagttcctgagccttcccctctacggctcgtcatgtcacggcccag

SEQ ID NO: 30542 - DNA, 110 bp, synthetic construct
  source 1..110: mol_type = other DNA
gcagggcccagcagagcccagtagcacccagtagagaccaacagagcccaggagagaccagcagagctacattcaacccgtcggactgctttgagccactgcgtttaggg

SEQ ID NO: 30543 - DNA, 110 bp, synthetic construct
  source 1..110: mol_type = other DNA
gaccagcagagctacattcaacccgtcggactgctttgagccactgcgtttagggatggtgtgtcacgtggcgttgttgtgtccgtggctgacacagaggtgaacacgta

SEQ ID NO: 30544 - DNA, 110 bp, synthetic construct
  source 1..110: mol_type = other DNA
agaaagcctgcatttctaacgggggaggcccctagcgctggtgggggcctccctttgagcaccagggcctttcccaatccagctcctgcccactgcgtcatcgtcttatg

SEQ ID NO: 30545 - DNA, 110 bp, synthetic construct
  source 1..110: mol_type = other DNA
tgagcaccagggcctttcccaatccagctcctgcccactgcgtcatcgtcttatgcaaaaggggaagggactggtttccatttgggatcaagaggctgggcttcactgac

SEQ ID NO: 30546 - DNA, 110 bp, synthetic construct
  source 1..110: mol_type = other DNA
aagattccaaacccagacgcacaaaagttcagtgaagcaggcggacgagggagagaggaagtgactgcagcagtgaagtctgcggacagaagctagtgcggcaagacccg

SEQ ID NO: 30547 - DNA, 110 bp, synthetic construct
  source 1..110: mol_type = other DNA
aggaagtgactgcagcagtgaagtctgcggacagaagctagtgcggcaagacccgcagtcaaggtttttgaaaacaaaagccaatcgggacaactcagggtgccggggac

SEQ ID NO: 30548 - DNA, 110 bp, synthetic construct
  source 1..110: mol_type = other DNA
agggcagagaatggaagcgcgttgctattttcagctcaactagtgattctcaaacggcgagtctggccccctgcccccaggggactctgggcaatgagtggactcttttg

SEQ ID NO: 30549 - DNA, 110 bp, synthetic construct
  source 1..110: mol_type = other DNA
tgtgagagagccttcacctagatagtgtggtcaccactaatgccatttcccaggttctttctggtgctcccctttccaaacttggggtggagctaaaatctcctgccacc

SEQ ID NO: 30550 - DNA, 110 bp, synthetic construct
  source 1..110: mol_type = other DNA
tctttctggtgctcccctttccaaacttggggtggagctaaaatctcctgccaccagggtctgatcatgtgactggctttgaccaatgaaacgtgggcagaagcgcctgt

SEQ ID NO: 30551 - DNA, 110 bp, synthetic construct
  source 1..110: mol_type = other DNA
acaccgcctgactcagaatcaggagttgggattgtcgctgacaccctgtcacagaggcaaggcccctgaggggctcatcacgtggcccagcctcgccagggagatcaggt

SEQ ID NO: 30552 - DNA, 110 bp, synthetic construct
  source 1..110: mol_type = other DNA
gaagggcagccatgtatccagccctctcaggcaccagagtctgaacaggaggctgggtcaccgtagaagactctatgtgagcactcgcagacttgggagctgcagggata

SEQ ID NO: 30553 - DNA, 110 bp, synthetic construct
  source 1..110: mol_type = other DNA
ggtcaccgtagaagactctatgtgagcactcgcagacttgggagctgcagggataagaagcttcgagagacagagtgggcagaggagagaaagactctggggcggggact

SEQ ID NO: 30554 - DNA, 110 bp, synthetic construct
  source 1..110: mol_type = other DNA
ttgctcaggggagctacagctaatcttgatattgagacctataaatatataaatggacgtatataaatgtatcctgaacggagagcacgtttcaatggctcttgcttcta

SEQ ID NO: 30555 - DNA, 110 bp, synthetic construct
  source 1..110: mol_type = other DNA
tgaacacccagggccccgtgcaaaaggcaagagttatatgaatttcaagagtcataagaatttcaagatggccgttcctgtcatggctcagcggttagcaaacccaacta

SEQ ID NO: 30556 - DNA, 110 bp, synthetic construct
  source 1..110: mol_type = other DNA
ccgtgcaaaaggcaagagttatatgaatttcaagagtcataagaatttcaagatggccgttcctgtcatggctcagcggttagcaaacccaactagcatccatgaggatg

SEQ ID NO: 30557 - DNA, 110 bp, synthetic construct
  source 1..110: mol_type = other DNA
acttccgaagaccgtgaaaggcggggttctcctcgacccattctgtggatgcggacactgaggctcagagagctcctgactccggggagccggggccctgtgacaggaga

SEQ ID NO: 30558 - DNA, 110 bp, synthetic construct
  source 1..110: mol_type = other DNA
cactgaggctcagagagctcctgactccggggagccggggccctgtgacaggagacacccggcccagccccctttcttttaaaaccagggtccagagagctgccggcttc

SEQ ID NO: 30559 - DNA, 110 bp, synthetic construct
  source 1..110: mol_type = other DNA
tgcggtccccacggctcgtccctgcagaaaacattccaggggtttccctgcttagctgggcacatccatcactcaatgtcctccatctcctccgaaagcctcctccttcc

SEQ ID NO: 30560 - DNA, 110 bp, synthetic construct
  source 1..110: mol_type = other DNA
tgcaagttacatttatgaagttgcctaattatctacactgggggaaaactaatcagatggactgagcaagcacagaggtatgcggacagggaaactctttataggctgtg

SEQ ID NO: 30561 - DNA, 110 bp, synthetic construct; identical to SEQ ID NO: 30560
  source 1..110: mol_type = other DNA

SEQ ID NO: 30562 - DNA, 110 bp, synthetic construct
  source 1..110: mol_type = other DNA
tcgacccctgagaacaggttataatccaagctgccttgactcgactcgatccaacttcaactctttcatgtccgaactcagatggtcaggggttaaacctcctggaatca

SEQ ID NO: 30563 - DNA, 110 bp, synthetic construct
  source 1..110: mol_type = other DNA
ttcaactctttcatgtccgaactcagatggtcaggggttaaacctcctggaatcacaggttgctgcaggtgcccggcgcccctctggtgtgggttgcagtcaccccacaa

SEQ ID NO: 30564 - DNA, 110 bp, synthetic construct
  source 1..110: mol_type = other DNA
gatgggatggcagactcagctccgtgtccccccagccagagcctaacagagaaggtgccacagtacactgtcccagaggcggtgaaacttccgggagcccaggggaccca

SEQ ID NO: 30565 - DNA, 110 bp, synthetic construct
  source 1..110: mol_type = other DNA
tgccacagtacactgtcccagaggcggtgaaacttccgggagcccaggggacccaggcagtcaaggtgcattcatgagacaataactacagcaccaggtggagagagctt

SEQ ID NO: 30566 - DNA, 110 bp, synthetic construct
  source 1..110: mol_type = other DNA
gtgagataatctcccacaaatggaatcgctgccccaaaggtgttcccaagaggtgctgcctcctttatgtgcagttttaatggtgggtctggactccagggcctgagggc

SEQ ID NO: 30567 - DNA, 110 bp, synthetic construct
  source 1..110: mol_type = other DNA
ccgttccctcagctgaaaaggctcctggaggaaatactgacaatgaatcgcagcaagaagacaatgagggcagaagagagtcttggatttcaagagcagggccgcggtgt

SEQ ID NO: 30568 - DNA, 110 bp, synthetic construct
  source 1..110: mol_type = other DNA
agaagacaatgagggcagaagagagtcttggatttcaagagcagggccgcggtgtggcctggaggaagcaggggctgcggctgagggcccaggagatgcctgctgtgtga

SEQ ID NO: 30569 - DNA, 110 bp, synthetic construct
  source 1..110: mol_type = other DNA
tctgctccccacgctcctcaccccccgtggagccgtcccggaccgatctctggccagagaaacatcaaacgcaccaaatgacgtggcgaaccacaaaccagaggctgcgc

SEQ ID NO: 30570 - DNA, 110 bp, synthetic construct
  source 1..110: mol_type = other DNA
agagaaacatcaaacgcaccaaatgacgtggcgaaccacaaaccagaggctgcgctcaccctttccacgtaaagcaccctgggtgattgacttatttacaaactcttagg

SEQ ID NO: 30571 - DNA, 110 bp, synthetic construct
  source 1..110: mol_type = other DNA
ttctccatgggtatgcgtctctgtgtgggtgggagcatctgttcgctgtgttggtttgaacatctggcccacacagaatatttccaggtcacatccacgtccctctggac

SEQ ID NO: 30572 - DNA, 110 bp, synthetic construct
  source 1..110: mol_type = other DNA
ttaacactttatcttttctggtcactgtttgcagactctctctccttgtctgtccgtctcaatctgccccctcttatctgaacgccccaatttgcatagttttttttctg

SEQ ID NO: 30573 - DNA, 110 bp, synthetic construct
  source 1..110: mol_type = other DNA
gtctcaatctgccccctcttatctgaacgccccaatttgcatagttttttttctgagccttttcggaaaactgtacctgtctctactatagcgtgcattgcccaggaaaa

SEQ ID NO: 30574 - DNA, 110 bp, synthetic construct
  source 1..110: mol_type = other DNA
gcttcctcgcagtaaggttccatcctctgaacgcccccaccccctcagctacacatccccactcatccttgtgttggcaccgaccccagttctttatgaggtctcccctc

SEQ ID NO: 30575 - DNA, 110 bp, synthetic construct
  source 1..110: mol_type = other DNA
agttgccacattccaaggattcaagcgctggttttcacctagtagaatgcagtgccaaacgtgaggttccaattacactgataatttaaagattacacaacacagagatg

SEQ ID NO: 30576 - DNA, 110 bp, synthetic construct
  source 1..110: mol_type = other DNA
tggacacgctgctggagcgtcccggatgtgaccgctgcccattattagtaggaagagtcccattcatagggaagctatagcacttaggaagcccttcctgcattccagat

SEQ ID NO: 30577 - DNA, 110 bp, synthetic construct
  source 1..110: mol_type = other DNA
agtcccattcatagggaagctatagcacttaggaagcccttcctgcattccagatgcagttctgagtgccttacccggatgaacgcttcgtatcctgtgagaggaggtta

SEQ ID NO: 30578 - DNA, 110 bp, synthetic construct
  source 1..110: mol_type = other DNA
aggtagcttccactctacaaggaaggttaacacctgacacctctgtttccctggacggcggcaggtcagtgctggggacactattagatctctgcccaacagccaccctg

SEQ ID NO: 30579 - DNA, 110 bp, synthetic construct
  source 1..110: mol_type = other DNA
acacctctcagaactgtctacctaaggacctagctgaagaagtatttaatcataagctcccactccccgttgcttgagggtttccccctgggtgttaattctcctgaact

SEQ ID NO: 30580 - DNA, 110 bp, synthetic construct
  source 1..110: mol_type = other DNA
gctgcgggcacatctcgttccatgagtttcacaagctgaaaggtacaggtcacgctgcacacgacctcgtgacatgctcctgctcttgttttgtccagtgagcacagggc

SEQ ID NO: 30581 - DNA, 110 bp, synthetic construct
  source 1..110: mol_type = other DNA
agggcagcgggtaatacccaaacttgagctgcaggaagagaagtttcgaggcctttaacaacttcggcgcgtggggattcgcttcaccacgaggcaggctggctgtggac

SEQ ID NO: 30582 - DNA, 110 bp, synthetic construct
  source 1..110: mol_type = other DNA
ctcacggcatccacagtacaaaaaagctgaaagagctgtaagcatccacaaaagctaaagacacgaagatcatgaagatgtacaaggtccacggcgcacagacgaacttc

SEQ ID NO: 30583 - DNA, 110 bp, synthetic construct
  source 1..110: mol_type = other DNA
cattgccgtgagctggggtgtagatctcagactcagctcgcatctctcgttgttgtggctggtaggccagtagctgtagctccgatttgacccctagactggaaacttcc

SEQ ID NO: 30584 - DNA, 110 bp, synthetic construct
  source 1..110: mol_type = other DNA
gggtgtagatctcagactcagctcgcatctctcgttgttgtggctggtaggccagtagctgtagctccgatttgacccctagactggaaacttccatatgctgcaggtgt

SEQ ID NO: 30585 - DNA, 110 bp, synthetic construct
  source 1..110: mol_type = other DNA
tttgataacaggcatatgctgctgattcttggtccctgcgctccccccctgccgcccaggctcccagttttgcattagctatggatcatttcctccggacagtgggaatg

SEQ ID NO: 30586 - DNA, 110 bp, synthetic construct
  source 1..110: mol_type = other DNA
cactaagaagacccctccagaatcactctgagcccagacaagacaagagcatcgtccaaaccccaaaactgagctctccccaaggttgcatctgagtgatggtgaggctt

SEQ ID NO: 30587 - DNA, 110 bp, synthetic construct
  source 1..110: mol_type = other DNA
gtctgcttgtgtaaaagcccggaggaggtggagggcctcccgcagttgctgccagttacctcaggggacagggagcacttactaacctcctctttatacatcttttattg

SEQ ID NO: 30588 - DNA, 110 bp, synthetic construct
  source 1..110: mol_type = other DNA
acacgcgtgtcccttccctctcatctcattgaccagaattaatcacatggctacatgaaccacgtgagggccagaggttcattcttgccatgtgttcagggcagagagag

SEQ ID NO: 30589 - DNA, 110 bp, synthetic construct
  source 1..110: mol_type = other DNA
tgaaccacgtgagggccagaggttcattcttgccatgtgttcagggcagagagagctggcagaacgtcaaactgcctgacacccaaactcagtcaggccatgccgtcgtg

SEQ ID NO: 30590 - DNA, 110 bp, synthetic construct
  source 1..110: mol_type = other DNA
gcacaaaggactgaaaccacaactgggggaatacgggctgttaggatgagtgacgagagctgggctcaagagaccacatgacgtatgattccattcacaggacagtcccg

SEQ ID NO: 30591 - DNA, 110 bp, synthetic construct
  source 1..110: mol_type = other DNA
agagctgggctcaagagaccacatgacgtatgattccattcacaggacagtcccgtcctagaaaaagcagatctatagggtgcagaaagggcactgggtgaaagggggca

SEQ ID NO: 30592 - DNA, 110 bp, synthetic construct
  source 1..110: mol_type = other DNA
tcgtttgtcactcagggcaccgtcctcgataggatcgactacagtgttgaacaggcctgtatgaagacggaggacggcctgaagcagcttcacaaggtaatctcgcaggg

SEQ ID NO: 30593 - DNA, 110 bp, synthetic construct
  source 1..110: mol_type = other DNA
tcgatgctagatctgaggccctgtttcaccgtttaagcaagcctcagtttcttacagatgaggtcaaaatagcttactttcagtagtgcctgctgggtcgttttcacgca

SEQ ID NO: 30594 - DNA, 110 bp, synthetic construct
  source 1..110: mol_type = other DNA
gcagcatctgtgtcacccctctgctctcagggaacaaacacacccacaggcggggcccaggggtgtggccttatctgagacttcagttagatttggccctggggccaagc

SEQ ID NO: 30595 - DNA, 110 bp, synthetic construct
  source 1..110: mol_type = other DNA
cccaggggtgtggccttatctgagacttcagttagatttggccctggggccaagctttgccgacctggcctcagacccagagttcctcggaggaggagcggtgccagccc

SEQ ID NO: 30596 - DNA, 110 bp, synthetic construct
  source 1..110: mol_type = other DNA
ccgggccacccagagaacgcccacgagcccaggtctcccggcccaatgtcatggcaaagtcaaggaggccccggccagcagcccagaggctcattccaaaggccctcgtt

SEQ ID NO: 30597 - DNA, 110 bp, synthetic construct
  source 1..110: mol_type = other DNA
aaagtcaaggaggccccggccagcagcccagaggctcattccaaaggccctcgttcctcgtgggataataatagctccactttgctgggtggagggcacgtgcaaatgcc

SEQ ID NO: 30598 - DNA, 110 bp, synthetic construct
  source 1..110: mol_type = other DNA
atcattcaggctttcgtcaggacgggcaggggacgttctgccaccccttgtagatctgcccccggcccccgaggaaacatcatggctcagctctgccgctctcactgtat

SEQ ID NO: 30599 - DNA, 110 bp, synthetic construct
  source 1..110: mol_type = other DNA
ctgcccccggcccccgaggaaacatcatggctcagctctgccgctctcactgtattcgactgcacatttttatgagcgaaaaagtcctgagttgtggcagccttaattac

SEQ ID NO: 30600 - DNA, 110 bp, synthetic construct
  source 1..110: mol_type = other DNA
cgcgtcctgacttctggaatctttgagaccaagttccaggtggacaaagtcaacttccagtaagtaaacggttccttttttttagaaagaaaaataggtttctcgaggtc

SEQ ID NO: 30601 - DNA, 110 bp, synthetic construct
  source 1..110: mol_type = other DNA
tccagtaagtaaacggttccttttttttagaaagaaaaataggtttctcgaggtccccccgcagtgagcatggtggaccatggtagcccttgtggtgaccaggcgtcctc

SEQ ID NO: 30602 - DNA, 110 bp, synthetic construct
  source 1..110: mol_type = other DNA
tgacagtggccaagagggaagccacggtgtcttcttatgacctatgtggagacatctcaccccgccctgcttatcccattcattagaacggaatagctccgtgcagccca

SEQ ID NO: 30603 - DNA, 110 bp, synthetic construct
  source 1..110: mol_type = other DNA
ctcaccccgccctgcttatcccattcattagaacggaatagctccgtgcagcccactctccagaagaggcgagatcgagctccctctcaaagagaggcgcgttccaaagc

SEQ ID NO: 30604 - DNA, 110 bp, synthetic construct
  source 1..110: mol_type = other DNA
aattaaaacacactgtaaaataagtttaaaaacacttttcactcacttctctgaatcttgaggatgtggtttgtatataagcctctcatctactgaaaccatatttgtaa

SEQ ID NO: 30605 - DNA, 110 bp, synthetic construct
  source 1..110: mol_type = other DNA
ggctgatgtggggcggttagcgggagtaggaagaggtgaggctcagaagctccagtggagtcatctgctgccctcgagattcgagaggtagggagtctgtgtaggtcatc

SEQ ID NO: 30606 - DNA, 110 bp, synthetic construct
  source 1..110: mol_type = other DNA
tggagtcatctgctgccctcgagattcgagaggtagggagtctgtgtaggtcatctttatcgccccccagattcctattaggtgcttagtaaacgtttgttggttaataa

SEQ ID NO: 30607 - DNA, 110 bp, synthetic construct
  source 1..110: mol_type = other DNA
ggcattttcggggtgggggaggagaggtctgtgtttggcaaaatagaagctgggaacttcgatgtccaagtagaagtaaggagccagtttgtaaatctgtcaagtctgag

SEQ ID NO: 30608 - DNA, 110 bp, synthetic construct
  source 1..110: mol_type = other DNA
tgcagggaggtcacatctggggcccgtggtccaggcaggctgcgctggatgtcctcgtgttgattatgtggttgtgcttggtgtgatattataggctaatgactcatcac

SEQ ID NO: 30609 - DNA, 110 bp, synthetic construct
  source 1..110: mol_type = other DNA
cgtgttgattatgtggttgtgcttggtgtgatattataggctaatgactcatcacagtctatcagcggcaccgctttaccagcagaagtggaatgtagagcccttacctc

SEQ ID NO: 30610 - DNA, 110 bp, synthetic construct
  source 1..110: mol_type = other DNA
ggcagagccctggtggaggctaaaatcttgccttcagagttggtgcctctgagcctcttaacccaccagaggtcacgcgctggcctcactctaggccacgttcaggccgc

SEQ ID NO: 30611 - DNA, 110 bp, synthetic construct
  source 1..110: mol_type = other DNA
gacgcggggccacccggcgcgacggcggaggaagctcccgtcggaaactcaccatgcagatttcatcacagtttcatcggagggagaaagagcctgtaggagaaaggatg

SEQ ID NO: 30612 - DNA, 110 bp, synthetic construct
  source 1..110: mol_type = other DNA
gtgcagtggaaaatggtgccaatggctggtgatacattatatgtatcccaaagtgggagggaatcttagctggattccatgcccaagaccgaagcacaaaaatgggaggt

SEQ ID NO: 30613 - DNA, 110 bp, synthetic construct
  source 1..110: mol_type = other DNA
gccagaccggggtcccagggcaagatcaaatggaccaggcacaaaggggccacctggaaaggagcagctccggagtatttgctgagcttgagtagctttgcttgaacttc

SEQ ID NO: 30614 - DNA, 110 bp, synthetic construct
  source 1..110: mol_type = other DNA
tgccagtcgttttgggggtgtctataaagcccattcttttttggctgcaaccatggcatagggaagttccaggggcatggattgaatccaagttgtagctgcaacctaca

SEQ ID NO: 30615 - DNA, 110 bp, synthetic construct
  source 1..110: mol_type = other DNA
gggtgtctataaagcccattcttttttggctgcaaccatggcatagggaagttccaggggcatggattgaatccaagttgtagctgcaacctacaccacagctgcagcaa

SEQ ID NO: 30616 - DNA, 110 bp, synthetic construct
  source 1..110: mol_type = other DNA
agcccctcgctgcagtgccccctcccccccgccgcccggtggctctgctccaagtccttatgactccttctacatttgtttccctaaaatctctctccaccattgggctc

SEQ ID NO: 30617 - DNA, 110 bp, synthetic construct; identical to SEQ ID NO: 30616
  source 1..110: mol_type = other DNA

SEQ ID NO: 30618 - DNA, 110 bp, synthetic construct
  source 1..110: mol_type = other DNA
tctggatccaggatttctggagagccatccccttgtccctgcgtctgtgcctccacgaagggcgtcattgtcaggggctgctcgggccaccaggggccaatagccctccc

SEQ ID NO: 30619 - DNA, 110 bp, synthetic construct
  source 1..110: mol_type = other DNA
cgaagggcgtcattgtcaggggctgctcgggccaccaggggccaatagccctcccctgactctggctgccccaaacaggtgtcccaccccacagctgtgggaaagggata

SEQ ID NO: 30620 - DNA, 110 bp, synthetic construct
  source 1..110: mol_type = other DNA
gggaaggaaggaaagaagggagggagggaggaagatgctgctatggacgtggaggtgcatctccttaagcccttgctctcagtgcttttgggtacataccaaaagcgaaa

SEQ ID NO: 30621 - DNA, 110 bp, synthetic construct; identical to SEQ ID NO: 30620
  source 1..110: mol_type = other DNA

SEQ ID NO: 30622 - DNA, 110 bp, synthetic construct
  source 1..110: mol_type = other DNA
caatttatagagcacagaaatcagttggtaactatgtgaattgtaacagtaagggcatgaaggaatctttgattcgggttcagctgcacgggagctttgcctcaggaggt

SEQ ID NO: 30623 - DNA, 110 bp, synthetic construct
  source 1..110: mol_type = other DNA
tgaactccttattatttcaggccactgagctgtggggtggtttgtcacctgtcatagataaggatgcccactcccaccaggacgtctgaagagcccgtggccccttcctc

SEQ ID NO: 30624 - DNA, 110 bp, synthetic construct
  source 1..110: mol_type = other DNA
tgccaccagctccacgcacttgtcaggtgggcagtggtcccaggtgccctgagcccatcactgtttctgatgtaacccagacggggctctgactatgatgggatcccaga

SEQ ID NO: 30625 - DNA, 110 bp, synthetic construct
  source 1..110: mol_type = other DNA
catcactgtttctgatgtaacccagacggggctctgactatgatgggatcccagagtcagatggcggttctctttgaattctctttcagtcttctggttgtaaatcaaag

SEQ ID NO: 30626 - DNA, 110 bp, synthetic construct
  source 1..110: mol_type = other DNA
gaggggaatggagcatggggtccagtctggctggaccgctgaggggatgggggaccatgtagaaagtctggtgacagtggggctctgtcttggtcaaagccatgtccaca

SEQ ID NO: 30627 - DNA, 110 bp, synthetic construct
  source 1..110: mol_type = other DNA
catgtagaaagtctggtgacagtggggctctgtcttggtcaaagccatgtccacagctcctggaagggtgcctggaccccataattgttcagggacccttgtggatggat

SEQ ID NO: 30628 - DNA, 110 bp, synthetic construct
  source 1..110: mol_type = other DNA
tccacccgggagaggacggggagcctttcccgggttttaggaagaacgtcacccgagtccgctgttcgcggtctccaggcacggcagtttccgctttaatcgtttacgaa

SEQ ID NO: 30629 - DNA, 110 bp, synthetic construct
  source 1..110: mol_type = other DNA
ccagtttcaccggtactggttctcgactgggatgtgctaagatctcattacctgcatgttgggcactagctttggaagtgcttcagtaccttctgacactgagggggaac

SEQ ID NO: 30630 - DNA, 110 bp, synthetic construct
  source 1..110: mol_type = other DNA
atgttgggcactagctttggaagtgcttcagtaccttctgacactgagggggaaccaggctccatgctcccagcctccactcacccaggccgggcccccaggtttctctg

SEQ ID NO: 30631 - DNA, 110 bp, synthetic construct
  source 1..110: mol_type = other DNA
atcatccaaacgtgatgtgggacgttttcatcacccctccctctaaaagttccatggtcctctttctagattatccccttaaaaggcaagaactttctgatttctgtcaa

SEQ ID NO: 30632 - DNA, 110 bp, synthetic construct
  source 1..110: mol_type = other DNA
ctgcagcctcttcttgcagaggagggagttgaggtgccctgagggggtcccagagggcttcagctcgtcttcccaagtgggagggaatcatctgacctggcagtatgggt

SEQ ID NO: 30633 - DNA, 110 bp, synthetic construct
  source 1..110: mol_type = other DNA
ggcttcagctcgtcttcccaagtgggagggaatcatctgacctggcagtatgggtgtggggtcattgagggttaaccaggtggtagactctggttctacagaagagggat

SEQ ID NO: 30634 - DNA, 110 bp, synthetic construct
  source 1..110: mol_type = other DNA
agtgtatcctttagaccctggtacaggatgcacgcgctcttgtgcaggacagacagttaccaaagagaagcttgtgccatgacatacttattcagcatgattaatgcagt

SEQ ID NO: 30635 - DNA, 110 bp, synthetic construct
  source 1..110: mol_type = other DNA
gttaccaaagagaagcttgtgccatgacatacttattcagcatgattaatgcagtggttctgaaacactgattcatggcttagtgttatttagtaatgacatactttaaa

SEQ ID NO: 30636 - DNA, 110 bp, synthetic construct
  source 1..110: mol_type = other DNA
ggtgcagggtagacgctggcaggagcgttggactgtgaggccaccccgaggtcggccgtagaaaggggcccagtcttcctgcattgaaaggtgtggtgtggggctgcagg

SEQ ID NO: 30637 - DNA, 110 bp, synthetic construct
  source 1..110: mol_type = other DNA
ccgtagaaaggggcccagtcttcctgcattgaaaggtgtggtgtggggctgcaggtgcagctggggataatcaggctcccacaccaagtgtgcccacaatatattgatgc

SEQ ID NO: 30638 - DNA, 110 bp, synthetic construct
  source 1..110: mol_type = other DNA
ccctgaaggtgaggtgctgatttgcattcacgtgcaggtacttagcatattgattgctcatttccagtcaaggtctgaaagcccagcctcagggggggctgctccccacc

SEQ ID NO: 30639 - DNA, 110 bp, synthetic construct
  source 1..110: mol_type = other DNA
gctcatttccagtcaaggtctgaaagcccagcctcagggggggctgctccccaccccccatggagaacctcagaggcaaaaccaacacatgtatttggaggctccgcctt

SEQ ID NO: 30640 - DNA, 110 bp, synthetic construct
  source 1..110: mol_type = other DNA
agactggaaagccacagagtcaacgtctctgggcagtcgtggctttcttcgtaagagactgtccagcctggacagtagcggaaagctttcctatcatattttaatccatt

SEQ ID NO: 30641 - DNA, 110 bp, synthetic construct
  source 1..110: mol_type = other DNA
agactgtccagcctggacagtagcggaaagctttcctatcatattttaatccatttccattttacaaatgtccccaaatgtcaagttaaggagccactgaaaattgttgg

SEQ ID NO: 30642 - DNA, 110 bp, synthetic construct
  source 1..110: mol_type = other DNA
ccccgagccgttcgcaccgctcttatcctctctatcttgaagatgctgacaagctccttacccattcaggcagctccctcgccattacgtacttgctgacctagaatatt

SEQ ID NO: 30643 - DNA, 110 bp, synthetic construct
  source 1..110: mol_type = other DNA
ccttacccattcaggcagctccctcgccattacgtacttgctgacctagaatattggtctttggtgtgcgtctgtgtcaaatgcgtgctggaagccaagtaaattacagc

SEQ ID NO: 30644 - DNA, 110 bp, synthetic construct
  source 1..110: mol_type = other DNA
gggctctgtgtccttcgtctccgtcatctggttggttaggggtttcgcgttgcagcacagcaccaagtagccctgatctcggtggagtcgcacaacagcaggggcccttt

SEQ ID NO: 30645 - DNA, 110 bp, synthetic construct
  source 1..110: mol_type = other DNA
cacagcaccaagtagccctgatctcggtggagtcgcacaacagcaggggccctttggagcctggccccgagctgctccccgccctcgcgcctttcatcttgcaggacctc

SEQ ID NO: 30646 - DNA, 110 bp, synthetic construct
  source 1..110: mol_type = other DNA
gttcctggaaagcagaaggccacctggaatgccagctcccccttaaactccagatgtaatacactggagctcaacacacagatacctgccaatgataggtttttcatcct

SEQ ID NO: 30647 - DNA, 110 bp, synthetic construct
  source 1..110: mol_type = other DNA
gtaatacactggagctcaacacacagatacctgccaatgataggtttttcatcctatgccctcatgcccagggaagcggccgggactagaggtttcctaatggacgtttg

SEQ ID NO: 30648 - DNA, 110 bp, synthetic construct
  source 1..110: mol_type = other DNA
agagatgtcgcaacagcactgcagtaattattttctgtggcagaaaaaaaccccatatattagctatttagccaggagaaaagacaacttacagaaatatcccccaccgt

SEQ ID NO: 30649 - DNA, 110 bp, synthetic construct
  source 1..110: mol_type = other DNA
tatattagctatttagccaggagaaaagacaacttacagaaatatcccccaccgtgaagaaaaacgcacaggatcaactgtgtgtgtgtgggggggagtgtaatgatcag

SEQ ID NO: 30650 - DNA, 110 bp, synthetic construct
  source 1..110: mol_type = other DNA
aggaggagggtcccagagaaatggagaggacgccgggatggccgtgagcaagactggacctctagcacccaagccggaagtccgtgcaggaggaagcagtaggtgccagg

SEQ ID NO: 30651 - DNA, 110 bp, synthetic construct
  source 1..110: mol_type = other DNA
ggacctctagcacccaagccggaagtccgtgcaggaggaagcagtaggtgccaggaggaggttcttagttgttggcacacagtccctgttgaatggagctcacatctccc

SEQ ID NO: 30652 - DNA, 110 bp, synthetic construct
  source 1..110: mol_type = other DNA
gatccgactaagggagtaagtcagacagacaaatgtcatatgataccgtttctacgtagactcaaagagaagatgcacatgaccttacagaaacaagccaacagaagcag

SEQ ID NO: 30653 - DNA, 110 bp, synthetic construct
  source 1..110: mol_type = other DNA
gtagactcaaagagaagatgcacatgaccttacagaaacaagccaacagaagcagactcacagatagagtaaacaaacttatggttaccgaaagggaaacggggagagac

SEQ ID NO: 30654 - DNA, 110 bp, synthetic construct
  source 1..110: mol_type = other DNA
ggaagagaacatcacgtctcagagagtttgaacatttgccgaagatcatccaacgattagggcagagctgggttttgcagtcagagctgtggaaccagaaacatcggcct

SEQ ID NO: 30655 - DNA, 110 bp, synthetic construct
  source 1..110: mol_type = other DNA
gggtgctaatcaccagccctcggggacgtggccttttccagcaagtcaagcattttgtcacttgcattcttgactccttatagtctcaactccttgcagctccatagata

SEQ ID NO: 30656 - DNA, 110 bp, synthetic construct
  source 1..110: mol_type = other DNA
tgtcacttgcattcttgactccttatagtctcaactccttgcagctccatagatactggaggtgtctaagatgggtgtccttgtcccagttaacagagcggaaaaacaag

SEQ ID NO: 30657 - DNA, 110 bp, synthetic construct
  source 1..110: mol_type = other DNA
tcaccgcccacccaggctcccagacttaaacatgtcaccttctctctctgttgcctgatttctctatttagtaaccggattcagccagatctaccccagaaacgtcctgt

SEQ ID NO: 30658 - DNA, 110 bp, synthetic construct
  source 1..110: mol_type = other DNA
tgatttctctatttagtaaccggattcagccagatctaccccagaaacgtcctgtgcgctatgttttcctctccagcctcaactactctctaaatatcacctctgacttg

SEQ ID NO: 30659 - DNA, 110 bp, synthetic construct
  source 1..110: mol_type = other DNA
ttcatttgacgatcccttaaagaagtgtcccctcagtgcagaaatcttccgaggaggagcagggcaaagggacattcctgacggctctttggcagggtggggggtggatt

SEQ ID NO: 30660 - DNA, 110 bp, synthetic construct
  source 1..110: mol_type = other DNA
ggagcagggcaaagggacattcctgacggctctttggcagggtggggggtggatttctggctttcccttcctggagcctttaacttctttcttgacttctcaggcctaat

SEQ ID NO: 30661 - DNA, 110 bp, synthetic construct
  source 1..110: mol_type = other DNA
ttgcgggataggtctggtgggccctgctcacctctgcctggagcacaaaagcagctgtagacaactggtcacgaatggggtgactgtgtgcctgtaagactgcatgtaaa

SEQ ID NO: 30662 - DNA, 110 bp, synthetic construct
  source 1..110: mol_type = other DNA
tgtagacaactggtcacgaatggggtgactgtgtgcctgtaagactgcatgtaaaacaggctgcaggcggagttcctgttgtgcatggcacagtggaggcgagtccagct

SEQ ID NO: 30663 - DNA, 110 bp, synthetic construct
  source 1..110: mol_type = other DNA
aacagatgaagattccacctgtgcagagggttgagccccttgtccagggtcctgcagctggaaggtgacacttctggtctctaagctacactattctcctttgacgccca

SEQ ID NO: 30664 - DNA, 110 bp, synthetic construct
  source 1..110: mol_type = other DNA
gccaaggagacagcgccagcccagtggcgacgtccatgcaaaattaagacgccattaaaaattgaggtgacacaagaatggctgctgctggtactcctggttgaggctcc

SEQ ID NO: 30665 - DNA, 110 bp, synthetic construct
  source 1..110: mol_type = other DNA
taaaaattgaggtgacacaagaatggctgctgctggtactcctggttgaggctccggcgtggcgctcacatgacttgaaattaccaagtcaccatgagggtttttgacaa

SEQ ID NO: 30666 - DNA, 110 bp, synthetic construct
  source 1..110: mol_type = other DNA
tcgtaagtgacgggagcctctgtttctaatatgctgtattagtagtgagtttatacaactgaatctttaacagcggcttgctcaccagcaggctgacagctcctctcgac

SEQ ID NO: 30667 - DNA, 110 bp, synthetic construct
  source 1..110: mol_type = other DNA
caactgaatctttaacagcggcttgctcaccagcaggctgacagctcctctcgacattgagcggggggctctgtggcgtctgtaggcgtctgcggcacacatctggctgg

SEQ ID NO: 30668 - DNA, 110 bp, synthetic construct
  source 1..110: mol_type = other DNA
tgggttttttgtgtgtttggttttggcaaattataaattcagttcatcaaaaccggatctttttttcaaaataggatctggacaccagtcaggttctttttgtacatttt

SEQ ID NO: 30669 - DNA, 110 bp, synthetic construct
  source 1..110: mol_type = other DNA
ccatacagcctgtcgcctccgttcgtaggcagcaaagtcaggcacagagactgcaagtcatttgcccagggtcacacagctaggatggaaggggtccgaggctgccgatc

SEQ ID NO: 30670 - DNA, 110 bp, synthetic construct
  source 1..110: mol_type = other DNA
cactgagtctgcagctcccaccacaggcctgcctgctgtgccgcgtgcttgcccgggatcgctcgggagtccaggttcatgctttcatgacttggacatttggatgctca

SEQ ID NO: 30671 - DNA, 110 bp, synthetic construct
  source 1..110: mol_type = other DNA
gaaagaaaatgcgaactcactgagaaacctaggatagagctggctgaaggtgcggctggttccaggtgacccaggctatttgctcttgctttcctctgggttggttccat

SEQ ID NO: 30672 - DNA, 110 bp, synthetic construct
  source 1..110: mol_type = other DNA
gttccctgcacaggattggaggctgagggggggtaggggggccgacgtttccgtggcgtcattttttatcctattggccttcggcctccatggtcaccacctcccgctct

SEQ ID NO: 30673 - DNA, 110 bp, synthetic construct
  source 1..110: mol_type = other DNA
gcgtcattttttatcctattggccttcggcctccatggtcaccacctcccgctctgcactccagacgagcgagctgccctggggaatacacgccagcacagcgagagggg

SEQ ID NO: 30674 - DNA, 110 bp, synthetic construct
  source 1..110: mol_type = other DNA
gtattttttttttaataattgaaaggctgaagctatttcctgaggtggcggtgtggtggcgcagaagctctgaagacttcctcccaggctggactggccaaagggctgcc

SEQ ID NO: 30675 - DNA, 110 bp, synthetic construct
  source 1..110: mol_type = other DNA
tccagcagcctttggcataaaaccaccgggctaaatatagctgcggaacttcccggaacatattattccaagtgtccaataattaatgccccacagcgcacggagtctgc

SEQ ID NO: 30676 - DNA, 110 bp, synthetic construct
  source 1..110: mol_type = other DNA
ccctggaagaagggacattcccagtcagtactgtccctgtgggtgtggcccgaacagaaggaagttaaccctcccaggccatgtggagacacaattagtgacggttacag

SEQ ID NO: 30677 - DNA, 110 bp, synthetic construct
  source 1..110: mol_type = other DNA
accctgccactttggaactttcctagcacgggagcccctcccagcctggagtggcctccggtagagctttgttcccaataggtgcttgtgtcatgcgggctggcgggatg

SEQ ID NO: 30678 - DNA, 110 bp, synthetic construct
  source 1..110: mol_type = other DNA
ctggtttatgagggtaatagaagttatcctcatgtcgaagggtgatgagcccgagtttttcctcccatgatgcaatttctttcccttttaacatcaaagctccatgcact

SEQ ID NO: 30679 - DNA, 110 bp, synthetic construct
  source 1..110: mol_type = other DNA
tttttcctcccatgatgcaatttctttcccttttaacatcaaagctccatgcactgaggagaacttctcacttattgactatctgatgcagacaaattgcaaagggaaag

SEQ ID NO: 30680 - DNA, 110 bp, synthetic construct
  source 1..110: mol_type = other DNA
tccaggaggtcccaaatatacacacaggatgcgtcgtcctggaccaggaacacagcaggtctggtcggggcccagcgcaggccggtgaccgcacggccgccggtgctgtc

SEQ ID NO: 30681 - DNA, 110 bp, synthetic construct
  source 1..110: mol_type = other DNA
ccaccccaggaggagacacagaaatgctgcaaaaagctctagtgaagggcgggggtcccaaaggaagaactttgatcagaaggaaggggttagggtgcctcttagcggcc

SEQ ID NO: 30682 - DNA, 110 bp, synthetic construct
  source 1..110: mol_type = other DNA
tgccaaacgtcaagaaaagggcattgatgaatagttaatgctggatgatcagctggcaatcctgccttttccaagaagccacttcaggataccctccctcccctgacccc

SEQ ID NO: 30683 - DNA, 110 bp, synthetic construct
  source 1..110: mol_type = other DNA
aaggagaagtgtgctgcacacaaccgtgtttatacacacttctccctccgaccgtctgcatctgcgttaggctgaacaccagctcctacccgtctctccagctctagtcc

SEQ ID NO: 30684 - DNA, 110 bp, synthetic construct
  source 1..110: mol_type = other DNA
ttccgaacactggaaaggtgctgcatgacaggtcagccgtgggaaatgccagggttttaagataatgctgtgtcaacccagcatccaggcatgtttccaagctcattcac

SEQ ID NO: 30685 - DNA, 110 bp, synthetic construct
  source 1..110: mol_type = other DNA
tttaagataatgctgtgtcaacccagcatccaggcatgtttccaagctcattcactccgtcgacacgatgtcttcagtccctgccctgacttgggctctgtgcaaattcc

SEQ ID NO: 30686 - DNA, 110 bp, synthetic construct
  source 1..110: mol_type = other DNA
ttctggagagatgcgaggctgctgccagtattgctgtttcagatgaggcgaccaaggcacagagaggttaggtggtttgcccaaggtcacacagccaggactcagaatta

SEQ ID NO: 30687 - DNA, 110 bp, synthetic construct
  source 1..110: mol_type = other DNA
tatttgcagagtcccagctgccccatctagtgatctctgcatggagccacccggcaggccctggtaaccaggtcgagacacattttcctttgtcccattgtccaaactgg

SEQ ID NO: 30688 - DNA, 110 bp, synthetic construct
  source 1..110: mol_type = other DNA
aggccctggtaaccaggtcgagacacattttcctttgtcccattgtccaaactggcagaaggaaattgcttctggcctacaaccatctcaagactggctcctggggagtt

SEQ ID NO: 30689 - DNA, 110 bp, synthetic construct
  source 1..110: mol_type = other DNA
cagcctaaccctcccgcacctgcgcagttggggagaccctgatttcaggaaggtccccggtgctggttctccctactcgctgcaggttataatacacgcatccttggagt

SEQ ID NO: 30690 - DNA, 110 bp, synthetic construct
  source 1..110: mol_type = other DNA
taatatagataggtaagtttgccctcttatacgggcgcaggtcctgggccccccaaaattacatcaaagatcactgattacagggagttcctgctgtggtgcagcaggtt

SEQ ID NO: 30691 - DNA, 110 bp, synthetic construct
  source 1..110: mol_type = other DNA
agcttctatatgccatgggtgcagctggaagaaaaaaaaaaaaggcaaaagaaaagaatcctaccgcccagaaattagcagtatttgtgtctgagtacatatcttcccag

SEQ ID NO: 30692 - DNA, 110 bp, synthetic construct
  source 1..110: mol_type = other DNA
gaatcctaccgcccagaaattagcagtatttgtgtctgagtacatatcttcccagatacaaatatagatgcacatgtatggacgtacatatgttggtgcatttacaaaca

SEQ ID NO: 30693 - DNA, 110 bp, synthetic construct
  source 1..110: mol_type = other DNA
ggtgcattttcccagaagacgtagcagcccttaatgtttatgtgcttaacaacggagcatcagagtacatgaacaaaaactgatggagctgccaagagaagtggatgaat

SEQ ID NO: 30694 - DNA, 110 bp, synthetic construct
  source 1..110: mol_type = other DNA
caggctgcccttcttttctctgtgatcatagtttctgaaatgctggctgcctcgctagctccaaactgaccttgtctgacgggccccgtggatgtgctgaaagctctgcg

SEQ ID NO: 30695 - DNA, 110 bp, synthetic construct
  source 1..110: mol_type = other DNA
taaatggttttttagatgttttatcctaatgccatcatgagagccacgggggcaaaaatgattttctaatttatcaaatccccatagtaaatggtgtaaaccagtgttga

SEQ ID NO: 30696 - DNA, 110 bp, synthetic construct
  source 1..110: mol_type = other DNA
aaatgattttctaatttatcaaatccccatagtaaatggtgtaaaccagtgttgagacgtagcccctgtggtatttaacttgcactttagtatttgtactttcaaatgaa

SEQ ID NO: 30697 - DNA, 110 bp, synthetic construct
  source 1..110: mol_type = other DNA
tcccaagtccctgatcctgcagtggtcctctgagcacggggacagaaaacacacgcgctttgcggggccctgactcccttgggtttgacgtaagggtggttcagtaaccc

SEQ ID NO: 30698 - DNA, 110 bp, synthetic construct
  source 1..110: mol_type = other DNA
gcagcggtgtcaccgacacggaacaccctcagcgcctgagactgacatctcccgaggctctggggtttattgaaggtgagacgttgctttcctgtgcagctcccggcgtc

SEQ ID NO: 30699 - DNA, 110 bp, synthetic construct
  source 1..110: mol_type = other DNA
ggctctggggtttattgaaggtgagacgttgctttcctgtgcagctcccggcgtcacctagatgttttcttgagaatttgatggaagagagcccccacccctgccccttg

SEQ ID NO: 30700 - DNA, 110 bp, synthetic construct
  source 1..110: mol_type = other DNA
agcccccaccccacctcccaaattacacggctcatcaagcacacagatttgcacgttttggtctccggctgaggagctgtctgcttgcgggacgtaaattattccagcgc

SEQ ID NO: 30701 - DNA, 110 bp, synthetic construct
  source 1..110: mol_type = other DNA
tctgctgatggacattgaggttgcttccatgtctagccaagaacattctcgacggatataaagagtttccttggttttcatgctggcagtgccagggcaccaaatccctc

SEQ ID NO: 30702 - DNA, 110 bp, synthetic construct
  source 1..110: mol_type = other DNA
atataaagagtttccttggttttcatgctggcagtgccagggcaccaaatccctcagagctcgtcaaccagcccggctgcactccacgctggctgtgactttacagatag

SEQ ID NO: 30703 - DNA, 110 bp, synthetic construct
  source 1..110: mol_type = other DNA
ggacctcctagggcgggaggtggcagggtttgtcctgcacgttggttccatcaatgaggcaacagggcacctggcattgaagtgcctcccctgtcacacacgtccttcct

SEQ ID NO: 30704 - DNA, 110 bp, synthetic construct
  source 1..110: mol_type = other DNA
actcacggcccccctcacggggctataggacccaagggctgagaccgaggggtgggggggtccccggagcagcctagcacccgtggtccttaacacacagcccatcacta

SEQ ID NO: 30705 - DNA, 110 bp, synthetic construct
  source 1..110: mol_type = other DNA
gggggtccccggagcagcctagcacccgtggtccttaacacacagcccatcactaagccaaggaaccagctgtccccgggcctggggggcccagtgcagcactgggaaag

SEQ ID NO: 30706 - DNA, 110 bp, synthetic construct
  source 1..110: mol_type = other DNA
gaaagcagtgtgtacgtgatgagactggagcaagggtcctgcaagcaccagccaaggcgtaaagctgagaggagagcggggagagggacccgtccttgtctcctgtctct

SEQ ID NO: 30707 - DNA, 110 bp, synthetic construct
  source 1..110: mol_type = other DNA
cttgcatctggctcaatacactggtgagcatccgtgccagtcaaccagccccaggggtgcgagaagcaagagaaaaggggctgcctccggtccaggatcttgcattcttc

SEQ ID NO: 30708 - DNA, 110 bp, synthetic construct
  source 1..110: mol_type = other DNA
ggtgcgagaagcaagagaaaaggggctgcctccggtccaggatcttgcattcttctcggggaagcaacacctggacactgaaacacaggaccagaaggcgatgccacatc

SEQ ID NO: 30709 - DNA, 110 bp, synthetic construct
  source 1..110: mol_type = other DNA
cagggaggcacaggaagccacccctaaattgcagtgtaagagggcttagtggccagcgggcccctccatgcccaaatttttcgccccattttcaaagtcccaccattaca

SEQ ID NO: 30710 - DNA, 110 bp, synthetic construct
  source 1..110: mol_type = other DNA
gcgggcccctccatgcccaaatttttcgccccattttcaaagtcccaccattacagctttcttcctttagacccatcttctcattgtatcagtggcctcaatgtccccaa

SEQ ID NO: 30711 - DNA, 110 bp, synthetic construct
  source 1..110: mol_type = other DNA
ccagccctgcccacacccaggtcttagatgtccagcttccaggactgagagagactctgtttctgctgcttaagctgccctgggaaactaacgcagaacaagtaaataaa

SEQ ID NO: 30712 - DNA, 110 bp, synthetic construct
  source 1..110: mol_type = other DNA
tctgtttctgctgcttaagctgccctgggaaactaacgcagaacaagtaaataaacccaaacatcctgggaagaggctgagccatcaggggaggtaactgcaggtcaccc

SEQ ID NO: 30713 - DNA, 110 bp, synthetic construct
  source 1..110: mol_type = other DNA
ctccctcctcctggcaagcactccacagaacaacccccatctgcccggccccatggtcccccccaacccagagtgtggctttatctcccaggaagttcctccccagtcag

SEQ ID NO: 30714 - DNA, 110 bp, synthetic construct
  source 1..110: mol_type = other DNA
ctccagcttcagagtaagacgtctcatggtcacgtccacctcctagtcagaccgaggaccacacatcaagcaggtgcagcagctcccgcgggacgagggccccactcccc

SEQ ID NO: 30715 - DNA, 110 bp, synthetic construct
  source 1..110: mol_type = other DNA
ctaagtagaaggtctgctaaattttgatttttactttgccacaggcggagatgagggaaagcattctctcctccaccccttcatccatttctaggaggacgcagttcctg

SEQ ID NO: 30716 - DNA, 110 bp, synthetic construct
  source 1..110: mol_type = other DNA
ggaaagcattctctcctccaccccttcatccatttctaggaggacgcagttcctgggttgtgagaatgaactcagagagagactgaagtggttagttttccagctgcctg

SEQ ID NO: 30717 - DNA, 110 bp, synthetic construct
  source 1..110: mol_type = other DNA
ccagtgtgtcaagggcaggacacgaagtaggtgactctctgcccacaaccctacgaggtgggcccttagtatcaccctcctttcccaagcccacgtggctgggaaccaga

SEQ ID NO: 30718 - DNA, 110 bp, synthetic construct
  source 1..110: mol_type = other DNA
gttatcagagaaatgcaaacgaaaaccatgatgcgataatcactggaagaactaaacggaaaagattaacagtaccaaacagtggggacctgagactctcacacacaact

SEQ ID NO: 30719 - DNA, 110 bp, synthetic construct
  source 1..110: mol_type = other DNA
acggaaaagattaacagtaccaaacagtggggacctgagactctcacacacaacttacataaaatggtacaaacactttggaaaacaaatagctattatcaggaggaaac

SEQ ID NO: 30720 - DNA, 110 bp, synthetic construct
  source 1..110: mol_type = other DNA
ttcatctcagagaggcagagagctaaaaagagcctcactcccaagcttacaccgagaaaacgctacaaccaactgccgttttcttgagcccaccagagaacttgggtttc

SEQ ID NO: 30721 - DNA, 110 bp, synthetic construct
  source 1..110: mol_type = other DNA
ttgccggggtcgatgctgaggtaccctgagccccgacacggactcacatttacccgaaaccaggcctgctcgcccccacggttaaggctactcggctttgagacaaccag

SEQ ID NO: 30722 - DNA, 110 bp, synthetic construct
  source 1..110: mol_type = other DNA
gaaaccaggcctgctcgcccccacggttaaggctactcggctttgagacaaccaggctgaaatcacctgtgttttgttggtgctccgtctgccaagcagcgaaagccttc

SEQ ID NO: 30723 - DNA, 110 bp, synthetic construct
  source 1..110: mol_type = other DNA
ccagcccgttaggctcaaactcagcatttcaaagggaggccctgacatcctggatctgaacctcgagagccagcccagctcgcagcccttctcttagtttggctgcagaa

SEQ ID NO: 30724 - DNA, 110 bp, synthetic construct
  source 1..110: mol_type = other DNA
ctgaacctcgagagccagcccagctcgcagcccttctcttagtttggctgcagaaatggcgtttcatcagtagatctgagttcaccacgtgcccaaacctgcgcccctcc

SEQ ID NO: 30725 - DNA, 110 bp, synthetic construct
  source 1..110: mol_type = other DNA
tatatggcaaccaaaaacatggcagggcgatgaatgggagtgggtggtcgttacagctggtgatgagcgtattttagttcattgttctagtctctggactttggtgtcag

SEQ ID NO: 30726 - DNA, 110 bp, synthetic construct
  source 1..110: mol_type = other DNA
tttgaactcgaagggaccttaaagtgtgctaacgtcacacagcctttgacaaaccagaaaacgggaatggctcggacagaccaaaacctaaacaatgcgactccccgtcc

SEQ ID NO: 30727 - DNA, 110 bp, synthetic construct
  source 1..110: mol_type = other DNA
agaaaacgggaatggctcggacagaccaaaacctaaacaatgcgactccccgtccagctctctgctccgcactgggatgaaaggccagcgccctggcctcagctactaga

SEQ ID NO: 30728 - DNA, 110 bp, synthetic construct
  source 1..110: mol_type = other DNA
ggagaggtggaatatctacctccagagacagacggcttcgtctgcttacagaccgtctcttatgtattgttatacttggccttagtcaatgagactcgggagcccaggga

SEQ ID NO: 30729 - DNA, 110 bp, synthetic construct
  source 1..110: mol_type = other DNA
tctcttatgtattgttatacttggccttagtcaatgagactcgggagcccagggacagtcgcaggtaacgagggtgctacactggatactgtctatccaacaagccccac

SEQ ID NO: 30730 - DNA, 110 bp, synthetic construct
  source 1..110: mol_type = other DNA
gggtagagggaggggctcactccgaaactgacggcactgacggccggaacccagccggaacgcagactgggactcgaacccacggttttaaatgagaatccctcaccctg

SEQ ID NO: 30731 - DNA, 110 bp, synthetic construct
  source 1..110: mol_type = other DNA
ctcactccgaaactgacggcactgacggccggaacccagccggaacgcagactgggactcgaacccacggttttaaatgagaatccctcaccctgtgtctggactccctg

SEQ ID NO: 30732 - DNA, 110 bp, synthetic construct
  source 1..110: mol_type = other DNA
aactctaagtaggtatcaacgtcaattgagagaaacatcaagctttattgaccggagaggtaaatattgatggagcttaaataccaaatcagtatgtacctcgagggaca

SEQ ID NO: 30733 - DNA, 110 bp, synthetic construct
  source 1..110: mol_type = other DNA
gggaaacgcggaagaccgtcttccaccaaagggcaaaggaaacggtcagcagaggaagaggcagcctgcagaacaggagaaaatacttgcaaataatgttcttgttaagg

SEQ ID NO: 30734 - DNA, 110 bp, synthetic construct
  source 1..110: mol_type = other DNA
aagaggcagcctgcagaacaggagaaaatacttgcaaataatgttcttgttaaggggttcatttccaaagcgtataaggaactcctacgactcagtaacaaaactcaacc

SEQ ID NO: 30735 - DNA, 110 bp, synthetic construct
  source 1..110: mol_type = other DNA
aaggcaaaaagacagaaaaaaaaaagagggagtcagctttactgagacaagtgtcaggagagggacctgccagtgtttggagttgctgccaaggtcctctctgagcaggt

SEQ ID NO: 30736 - DNA, 110 bp, synthetic construct
  source 1..110: mol_type = other DNA
aggagagggacctgccagtgtttggagttgctgccaaggtcctctctgagcaggtgactccccagtggccttgggggatgctgacttatgtccagggcctcacatccttc

SEQ ID NO: 30737 - DNA, 110 bp, synthetic construct
  source 1..110: mol_type = other DNA
tgatgcctcaaatacttcctgtctggcccatcacggaaaaaagtttctgttccctgatctgatctctccggacttctctccccatctgtaaaataaaatgcagtatgtca

SEQ ID NO: 30738 - DNA, 110 bp, synthetic construct
  source 1..110: mol_type = other DNA
gatctgatctctccggacttctctccccatctgtaaaataaaatgcagtatgtcagtagcgcagtgacttccacgaggagaggtaagtgtcacgtttgcattatggtgac

SEQ ID NO: 30739 - DNA, 110 bp, synthetic construct
  source 1..110: mol_type = other DNA
aatttttttgtaagttttcattgaaatcgagaagcatgaaggaatttaataacaaaatccgcagaaaaagtatgtcgcttagttgtggaggagggcatgggtttccaggg

SEQ ID NO: 30740 - DNA, 110 bp, synthetic construct; identical to SEQ ID NO: 30739
  source 1..110: mol_type = other DNA

SEQ ID NO: 30741 - DNA, 110 bp, synthetic construct
  source 1..110: mol_type = other DNA
ctacctggcaggtgccaagtacacgggctacctctgccgcagcaacacggtcctcatctgcaaagagtgagtgcgccgcgggtgttgccgccgcagctctcagtttgtcg

SEQ ID NO: 30742 - DNA, 110 bp, synthetic construct
  source 1..110: mol_type = other DNA
atctgcaaagagtgagtgcgccgcgggtgttgccgccgcagctctcagtttgtcgtggttttgtggtagaagtttgagcaggaaaatcaagtccgttaaaaggatggcag

SEQ ID NO: 30743 - DNA, 110 bp, synthetic construct
  source 1..110: mol_type = other DNA
ctgaacgtccttaaaccaagttttcacaaccccagatccacacgtaggatgaaggtataacctaacgtatcagcaggcatgcacgcatttttcagtagctctcatctgca

SEQ ID NO: 30744 - DNA, 110 bp, synthetic construct
  source 1..110: mol_type = other DNA
tataacctaacgtatcagcaggcatgcacgcatttttcagtagctctcatctgcaagagggtttgacctagaaaagagccaccaattaccatgtagaagcaaagaacagc

SEQ ID NO: 30745 - DNA, 110 bp, synthetic construct
  source 1..110: mol_type = other DNA
ggaccgagctgtgtcgtttcatgaacactgagcatagcgcattgctgcgatcagggctgggaaccatgactctgaaaacatggtaggactgttgggtcccgaaaggagtg

SEQ ID NO: 30746 - DNA, 110 bp, synthetic construct
  source 1..110: mol_type = other DNA
gctgggaaccatgactctgaaaacatggtaggactgttgggtcccgaaaggagtgagaagggtgacagtgacaatgtcacagccaggaaggctatgagcaggtttgatta

SEQ ID NO: 30747 - DNA, 110 bp, synthetic construct
  source 1..110: mol_type = other DNA
caaacactgcacctggcactgccgtgcggctctcaggtttactgcgatctgaacgttttcagatgggagctaaagtcccatgagctacgtccctccttccccacccatca

SEQ ID NO: 30748 - DNA, 110 bp, synthetic construct
  source 1..110: mol_type = other DNA
tgggctccgtctcccaggctgtctgtctggccccatcacaggagtgaccagctccatttagcagcagctgctgtgaaggcgttcttgcctttctggtttgaggggaagca

SEQ ID NO: 30749 - DNA, 110 bp, synthetic construct
  source 1..110: mol_type = other DNA
atttagcagcagctgctgtgaaggcgttcttgcctttctggtttgaggggaagcagagcctgtttgaggtggccttcctataaacatgtggctggctccccagagcccat

SEQ ID NO: 30750 - DNA, 110 bp, synthetic construct
  source 1..110: mol_type = other DNA
catgggtgctggtcagattcgcttccgctgagccacgatgggaactccccaaacctcagtgctttcaaacaacacacgttcgttccttgttaatgttacgtcctgggaag

SEQ ID NO: 30751 - DNA, 110 bp, synthetic construct; identical to SEQ ID NO: 30750
  source 1..110: mol_type = other DNA

SEQ ID NO: 30752 - DNA, 110 bp, synthetic construct
  source 1..110: mol_type = other DNA
agcgcattatttgaaatgaagagagcagcagcagccatgtaactcctccgtgggtcagatgtcggggacacctgcttggagcaagtgtgggccagtgttacccgggggcc

SEQ ID NO: 30753 - DNA, 110 bp, synthetic construct
  source 1..110: mol_type = other DNA
cagatgtcggggacacctgcttggagcaagtgtgggccagtgttacccgggggccacgtggatgggtctgggcctttctcttcccaatcccaaggtgctcggcaggcaga

SEQ ID NO: 30754 - DNA, 110 bp, synthetic construct
  source 1..110: mol_type = other DNA
attcgttaaccactgcgccaggacgggaactcccagatttgtttttgaaacaatgatcaatacagctctgcagtcacataacacgagtcccagttgctagtcgttactag

SEQ ID NO: 30755 - DNA, 110 bp, synthetic construct
  source 1..110: mol_type = other DNA
gagcagagcgggtgctcggtgaggacaggagctcaggccacctgctccccgccttcagcctcccagcatctccagctctgcataccaacctccttgagacatatggcctt

SEQ ID NO: 30756 - DNA, 110 bp, synthetic construct
  source 1..110: mol_type = other DNA
cagcctcccagcatctccagctctgcataccaacctccttgagacatatggccttggaggaaccctgaagcccccaacaggctggtgggagtggggggcgggtggtcacg

SEQ ID NO: 30757 - DNA, 110 bp, synthetic construct
  source 1..110: mol_type = other DNA
ccaccggtgctctgatgcgcggtgaagctggctgccttttccagctggaaatcctaaatgatttcgagcagttctgccggtgtggacggttggactgctgggctgttatg

SEQ ID NO: 30758 - DNA, 110 bp, synthetic construct
  source 1..110: mol_type = other DNA
tgccacggtagagacacgtaaggtgcccttctaaggactctttctcctacatttgggctgcatggtggcacctcctcggggggtacaaacaatcctagccatgtgacttc

SEQ ID NO: 30759 - DNA, 110 bp, synthetic construct
  source 1..110: mol_type = other DNA
ggctgcatggtggcacctcctcggggggtacaaacaatcctagccatgtgacttccggcagctctgcgcagtgtgtcctggggaaggagatgcaggcactggcgctctca

SEQ ID NO: 30760 - DNA, 110 bp, synthetic construct
  source 1..110: mol_type = other DNA
atctttcatgagattttgagtcttccccccccttcactacattacaatgacggccattcataacagaagcaattaagtggcttctacgtcatgcctcactgtgccactca

SEQ ID NO: 30761 - DNA, 110 bp, synthetic construct
  source 1..110: mol_type = other DNA
attcataacagaagcaattaagtggcttctacgtcatgcctcactgtgccactcagctcctcacttacatttcttcatttcccttatcactgaggacacaactcccccgg

SEQ ID NO: 30762 - DNA, 110 bp, synthetic construct
  source 1..110: mol_type = other DNA
gggttgcagaagggatgtgttctccagacataaaaacaacatacctctcatcgtccacctcttgggtgaccaggtgctgctggatcaatggcctggcaggtggaggtcaa

SEQ ID NO: 30763 - DNA, 110 bp, synthetic construct
  source 1..110: mol_type = other DNA
acgggtcaacacggactgggtggggtggggagggcggccagacaccaggccacacctctcatggcagggcttcacggtggaaggcatggagataggcgcatgatggaaaa

SEQ ID NO: 30764 - DNA, 110 bp, synthetic construct
  source 1..110: mol_type = other DNA
catcagagaaaggagattaaaatgacaatgagatcccattacccacccaccaatctgtcaaaaatgggggaggggagctgctggcctccacactgctgatgcgcgtgtaa

SEQ ID NO: 30765 - DNA, 110 bp, synthetic construct
  source 1..110: mol_type = other DNA
ttgcgatccgtgctgatggaaggctgcttctccccagatactgacccgtagcgctttctttttttcttcaagatgtcaacctgctcccttagatcttcagtctttaaaat

SEQ ID NO: 30766 - DNA, 110 bp, synthetic construct
  source 1..110: mol_type = other DNA
ttctttttttcttcaagatgtcaacctgctcccttagatcttcagtctttaaaataaggacacatctgctttggtctgaggtttgcaaagtgactttcttcctcctctga

SEQ ID NO: 30767 - DNA, 110 bp, synthetic construct
  source 1..110: mol_type = other DNA
ttcaaagtcccctgacagatgaaggccatctccttgcgaagccatcagatggacgaatggccctcatgctgcccaagggagctctctgtcactgtctggtctgtgttcca

SEQ ID NO: 30768 - DNA, 110 bp, synthetic construct
  source 1..110: mol_type = other DNA
gaagatatttagtcccaaatcagaaaaattccattcctgcctacgactatgactcgacttgctctgaggtctcatgtcagctcaactatagtttttttttttcttctttg

SEQ ID NO: 30769 - DNA, 110 bp, synthetic construct
  source 1..110: mol_type = other DNA
gacttgctctgaggtctcatgtcagctcaactatagtttttttttttcttctttgaccttcacctgtgacctttttaacacacttaaagccctggacttccttgttcctg

SEQ ID NO: 30770 - DNA, 110 bp, synthetic construct
  source 1..110: mol_type = other DNA
ctgcagtgccgatgccttttctaccaaactgcactggtaggtcagtggactggttagcccctggaggacaaggaattcattaacctttctgactccctttttggattaac

SEQ ID NO: 30771 - DNA, 110 bp, synthetic construct
  source 1..110: mol_type = other DNA
agcccctggaggacaaggaattcattaacctttctgactccctttttggattaacagctttaaaacattctttcctggagttccctggcggtgcagtgggttcaggatcg

SEQ ID NO: 30772 - DNA, 110 bp, synthetic construct
  source 1..110: mol_type = other DNA
accacagctggaaggtcctgtagatatgagagcaaaggagcatcgtgacctgtctccttgtcgctgaagggcaacgccactgtttctctgactctctctgcagccaactg

SEQ ID NO: 30773 - DNA, 110 bp, synthetic construct
  source 1..110: mol_type = other DNA
ccttgtcgctgaagggcaacgccactgtttctctgactctctctgcagccaactggtggtgggagctgcacagaggcttgtttactgctgggggcagagggggatgcaga

SEQ ID NO: 30774 - DNA, 110 bp, synthetic construct
  source 1..110: mol_type = other DNA
acatgttttttaatgttaaaatgtcctttcttttataaaatcatggtgataaaagacagtcattttggtttctccttgagcctggctcgtcgggatggtgagtctggaag

SEQ ID NO: 30775 - DNA, 110 bp, synthetic construct
  source 1..110: mol_type = other DNA
acagtcattttggtttctccttgagcctggctcgtcgggatggtgagtctggaaggcacccagaccccatggctgagggcggagggcatgcacggagttgggtctttgaa

SEQ ID NO: 30776 - DNA, 110 bp, synthetic construct
  source 1..110: mol_type = other DNA
acggcttcccatcaccctgaaaagggtgacctcgggtgtgagccccacgaccccctctcccagtcctttcccatcacttcgccccgtcgacgcaacacccctctttaggt

SEQ ID NO: 30777 - DNA, 110 bp, synthetic construct
  source 1..110: mol_type = other DNA
tctcccagtcctttcccatcacttcgccccgtcgacgcaacacccctctttaggtccacctgcgtgcgtgggtgccctgagcctctttcgagggcctgggcccttgaagg

SEQ ID NO: 30778 - DNA, 110 bp, synthetic construct
  source 1..110: mol_type = other DNA
tggtgttgtcactgctgtggcacaggttggatccctgaactagaaccttccatggatacagccagaaaaaaataaaggtgtaattgctttaaagagaggctcaagctctg

SEQ ID NO: 30779 - DNA, 110 bp, synthetic construct
  source 1..110: mol_type = other DNA
atacagccagaaaaaaataaaggtgtaattgctttaaagagaggctcaagctctggaggctccaatcaggaactcatcactcaggaagcagcctgaaaaatcacaacaaa

SEQ ID NO: 30780 - DNA, 110 bp, synthetic construct
  source 1..110: mol_type = other DNA
cagacggggggaaggtcacgggtatcaggcagacatcagtgaaaataaccatgagctcttcttctttcatccaaggtcatggacccctgagacccgatgctcagaaatct

SEQ ID NO: 30781 - DNA, 110 bp, synthetic construct
  source 1..110: mol_type = other DNA
ctcttcttctttcatccaaggtcatggacccctgagacccgatgctcagaaatcttgtttgagcgttggggtgagaaggaggggtccaggcttatggtttaaaaggatcc

SEQ ID NO: 30782 - DNA, 110 bp, synthetic construct
  source 1..110: mol_type = other DNA
aggcagtgcccctcttagtaaagatgacacctaaaggtgcttccctgagtccaagcaggtgatgtgctgggtgactgagaagctggggtattaaccaccatctatttttc

SEQ ID NO: 30783 - DNA, 110 bp, synthetic construct
  source 1..110: mol_type = other DNA
taagatgaatgacccaggggtcagtgccgaattagggaaggataaacccttccgtgcctcatcctcttccctgtacacccagagtccgtggcattcggatgaggaagtcc

SEQ ID NO: 30784 - DNA, 110 bp, synthetic construct
  source 1..110: mol_type = other DNA
gcctcatcctcttccctgtacacccagagtccgtggcattcggatgaggaagtccgccagctcccgtcaccaggatccctgtggtcagctgggatgtgggtggatgtgga

SEQ ID NO: 30785 - DNA, 110 bp, synthetic construct
  source 1..110: mol_type = other DNA
cgctgcccagatctggaaagctcgcctgctcatctgagcccaacgcaggagcagaatgaagggcagagagaaggtgggaaacaggagccaggaggtgccagacacagcac

SEQ ID NO: 30786 - DNA, 110 bp, synthetic construct
  source 1..110: mol_type = other DNA
atgaagggcagagagaaggtgggaaacaggagccaggaggtgccagacacagcacacggcctgggtctcagggtccacgcagcctccaagcggggagggggaatgggggc

SEQ ID NO: 30787 - DNA, 110 bp, synthetic construct
  source 1..110: mol_type = other DNA
ggggttggggggtggcggtgggcaggtgtctaacattaatatgagtggatgtctcgctccaacatgcaaagctccctcctgtcataaagccacaagggcttgctttctct

SEQ ID NO: 30788 - DNA, 110 bp, synthetic construct
  source 1..110: mol_type = other DNA
gctccaacatgcaaagctccctcctgtcataaagccacaagggcttgctttctctctggatgaagccaaaaaaatgacacagacactcacccattgaccaggtccagttg

SEQ ID NO: 30789 - DNA, 110 bp, synthetic construct
  source 1..110: mol_type = other DNA
agcagcaggcgggggagttattattgcaagccagcggggtgggtttaattccttgcacagcaagccggaaacgcgctcgcagataaggttttcagaggaagcaaacggtt

SEQ ID NO: 30790 - DNA, 110 bp, synthetic construct
  source 1..110: mol_type = other DNA
ttgagttgtttttaaaactattgcaactgaagtctcacttggtctgtccagtacttttcaagttgcactgttcactcctgccggctacatgcccctcactctcgccagaa

SEQ ID NO: 30791 - DNA, 110 bp, synthetic construct; identical to SEQ ID NO: 30790
  source 1..110: mol_type = other DNA

SEQ ID NO: 30792 - DNA, 110 bp, synthetic construct
  source 1..110: mol_type = other DNA
ctgggtggggagttcctctaaaggcacctagtatgcaggcttaatgggtggaaacccagcctcgtgttaatggggagattaaaacaaggcaatgctgccttagaaatgca

SEQ ID NO: 30793 - DNA, 110 bp, synthetic construct
  source 1..110: mol_type = other DNA
caggcttaatgggtggaaacccagcctcgtgttaatggggagattaaaacaaggcaatgctgccttagaaatgcagcttccgggagttcccgtcgtggcgcagtggtgaa

SEQ ID NO: 30794 - DNA, 110 bp, synthetic construct
  source 1..110: mol_type = other DNA
tttatcgtgcagctacctatcctatagcatcaggtggaagctacaaagatctgcaaaagatgcttttctggtggaatgattttggcacattgctcttaggaccatgaagt

SEQ ID NO: 30795 - DNA, 110 bp, synthetic construct
  source 1..110: mol_type = other DNA
aacctatgaatgtgtttttctccatggcaaagaggaagtaagattgccaatcagctgatcataacataatggaattctcctgagttatatgtgcaggtgcactaaaatcc

SEQ ID NO: 30796 - DNA, 110 bp, synthetic construct
  source 1..110: mol_type = other DNA
tgatcataacataatggaattctcctgagttatatgtgcaggtgcactaaaatcccaagagaccctaaaagtgggagagggagggagagcaggaggtcagagtgatatga

SEQ ID NO: 30797 - DNA, 110 bp, synthetic construct; identical to SEQ ID NO: 30795
  source 1..110: mol_type = other DNA

SEQ ID NO: 30798 - DNA, 110 bp, synthetic construct; identical to SEQ ID NO: 30796
  source 1..110: mol_type = other DNA

SEQ ID NO: 30799 - DNA, 110 bp, synthetic construct
  source 1..110: mol_type = other DNA
cacaggctgatgcccacacgagggtctcaatgggccatgggaacagatgcaatgccgtgcaaacatttccagctgggttgttggcagcccgtgactcagggtccccatct

SEQ ID NO: 30800 - DNA, 110 bp, synthetic construct
  source 1..110: mol_type = other DNA
agtgctgtcagatgataaattcgccccatactaaaaagcatatggagtctagctaaaactgcacttaaagaaacataaagctgtaactttatgtttaaatgaaagaaagg

SEQ ID NO: 30801 - DNA, 110 bp, synthetic construct
  source 1..110: mol_type = other DNA
taaattcgccccatactaaaaagcatatggagtctagctaaaactgcacttaaagaaacataaagctgtaactttatgtttaaatgaaagaaaggttaaaagtgaatgag

SEQ ID NO: 30802 - DNA, 110 bp, synthetic construct
  source 1..110: mol_type = other DNA
gggggtggtatttgaagacacgcagagtctcatcttgagcccaggttcttggctgcggggctccctctcttgatgctgactaatatcagctgaggctttgtcatagcacc

SEQ ID NO: 30803 - DNA, 110 bp, synthetic construct
  source 1..110: mol_type = other DNA
cggggctccctctcttgatgctgactaatatcagctgaggctttgtcatagcaccgcagaatgggagacctgaggatggagaggaaaacagaatcatcatacctgcctga

SEQ ID NO: 30804 - DNA, 110 bp, synthetic construct
  source 1..110: mol_type = other DNA
gaactcccctgccgtgattccaatttgggcttaaaccgtcccttctgcccagtgcagctggctctggcctcctgccccaccccctgtgctgtctgcatgttgatcttctc

SEQ ID NO: 30805 - DNA, 110 bp, synthetic construct
  source 1..110: mol_type = other DNA
gcttctttttctgctccaggactaacgctgaggcccgcatgctaggagcttgataagtactggtttaatggattaagaaaaacagatagatctaaaatctcttttaatat

SEQ ID NO: 30806 - DNA, 110 bp, synthetic construct
  source 1..110: mol_type = other DNA
agtactggtttaatggattaagaaaaacagatagatctaaaatctcttttaatatctggctgaatgtctgacaccaagtaatggtgggggaatagagttatgatttatat

SEQ ID NO: 30807 - DNA, 110 bp, synthetic construct
  source 1..110: mol_type = other DNA
tcagtattatacagagccacgaattttgaatccggtgatatactgcccttccctccaatccaggaccaaaagcatccagtcttaaaattcaacaagaagaaacttttttt

SEQ ID NO: 30808 - DNA, 110 bp, synthetic construct
  source 1..110: mol_type = other DNA
caatccaggaccaaaagcatccagtcttaaaattcaacaagaagaaacttttttttttttttctttttctttttaaagcggcacctacctacctgcgtcatatggaaatt

SEQ ID NO: 30809 - DNA, 110 bp, synthetic construct; identical to SEQ ID NO: 30807
  source 1..110: mol_type = other DNA

SEQ ID NO: 30810 - DNA, 110 bp, synthetic construct; identical to SEQ ID NO: 30808
  source 1..110: mol_type = other DNA

SEQ ID NO: 30811 - DNA, 110 bp, synthetic construct
  source 1..110: mol_type = other DNA
ccaacccataaacagaggcctagatcccgtcttctagatagtacgaaggctctgtctgtcaagatagtgttctcctggaggtccctggtggcctagtgggagctggcagt

SEQ ID NO: 30812 - DNA, 110 bp, synthetic construct
  source 1..110: mol_type = other DNA
ctgtcaagatagtgttctcctggaggtccctggtggcctagtgggagctggcagtggctcaggctgctgtggtgtgggttcagtcactggtccagcaacttctgaatgcc

SEQ ID NO: 30813 - DNA, 110 bp, synthetic construct
  source 1..110: mol_type = other DNA
taactgagccaccagggagctcctgctttttttccttttttcaccacaacagcagcacacggaagttcccaggtcagttaacgtcaagctactccaaatccaagctgtaa

SEQ ID NO: 30814 - DNA, 110 bp, synthetic construct
  source 1..110: mol_type = other DNA
cacacggaagttcccaggtcagttaacgtcaagctactccaaatccaagctgtaactctgacctacacctacaccacagccgtggcaatgctagacccttaacccactgg

SEQ ID NO: 30815 - DNA, 110 bp, synthetic construct
  source 1..110: mol_type = other DNA
actagaagccatgtggaaatgctggtgaagaatgagaccccaaacgtcacccacctcagccatctccaaagaaagctgtgccacagaggtgggacctttcaccgaaacct

SEQ ID NO: 30816 - DNA, 110 bp, synthetic construct
  source 1..110: mol_type = other DNA
tcagccatctccaaagaaagctgtgccacagaggtgggacctttcaccgaaacctgcagtgaccataaatgtgcagcccttgccactgttcaggacacgtggcatttatg

SEQ ID NO: 30817 - DNA, 110 bp, synthetic construct
  source 1..110: mol_type = other DNA
ggctgctactggcatttagtgggcagagcccgggaagcacatcgcatcatccacaggacagggccctcccagcggaggattcccagcccgaaatctcagcggggcccggg

SEQ ID NO: 30818 - DNA, 110 bp, synthetic construct
  source 1..110: mol_type = other DNA
ggacagggccctcccagcggaggattcccagcccgaaatctcagcggggcccgggccgagggtttctgatcagcagcgggctttcctcgacggctcagtgagactttctc

SEQ ID NO: 30819 - DNA, 110 bp, synthetic construct
  source 1..110: mol_type = other DNA
atgtgaccgctgcagtgctttacactgtgtgtaataagaaagaaaactacgtgccctgccccttttcaatatgctcttgaccaaggtcaatttccatggaaaattctgca

SEQ ID NO: 30820 - DNA, 110 bp, synthetic construct
  source 1..110: mol_type = other DNA
ctgccccttttcaatatgctcttgaccaaggtcaatttccatggaaaattctgcagtttggggttggctctaagtctggaggaggagtgagtgaggagagagcagctcct

SEQ ID NO: 30821 - DNA, 110 bp, synthetic construct
  source 1..110: mol_type = other DNA
ctcagagctccgtgctcctcactccccactgtaactccttccagagccccaactacccaagccatttgccacttggttcgggacccttcacattccttgagaaaatagga

SEQ ID NO: 30822 - DNA, 110 bp, synthetic construct
  source 1..110: mol_type = other DNA
gggcaactttcctcacgcacttggtgcaaccgcacgccacagagaagaggttaagtgtctggcactttccttctcccagggcggctgcgggcaggatcagagcttcgagg

SEQ ID NO: 30823 - DNA, 110 bp, synthetic construct
  source 1..110: mol_type = other DNA
tgtctggcactttccttctcccagggcggctgcgggcaggatcagagcttcgaggcagccattctgggctcttgttgcatcatttatcatgaaaacgaggcattcgaatt

SEQ ID NO: 30824 - DNA, 110 bp, synthetic construct
  source 1..110: mol_type = other DNA
aggaggaccagctctgcgcggagaaaagccatagattagggaggaaggccccatgcgcagtctgaacaaggcagagggacgtgtgctctgttcatctcaagtctcgaatg

SEQ ID NO: 30825 - DNA, 110 bp, synthetic construct
  source 1..110: mol_type = other DNA
cgcagtctgaacaaggcagagggacgtgtgctctgttcatctcaagtctcgaatgctgaaaacacgtcgggatggagagaacccctatggggtgttgctggaaggggcca

SEQ ID NO: 30826 - DNA, 110 bp, synthetic construct
  source 1..110: mol_type = other DNA
cagcccatcaagtactttacaaaaacaaactatcttcaaacatgtgagaacttgggagaatctggttcctacaaacccttcagtaatcaactatcagaagataagcttta

SEQ ID NO: 30827 - DNA, 110 bp, synthetic construct
  source 1..110: mol_type = other DNA
gagaatctggttcctacaaacccttcagtaatcaactatcagaagataagctttagccaaacaacaggaaggcaaaaaagtacagccagacttagagtgaacaattaatc

SEQ ID NO: 30828 - DNA, 110 bp, synthetic construct
  source 1..110: mol_type = other DNA
ctgggaaccagccaggccctggaccagtagctgcacaggcacctgcacagggccaggtaagcccagcctccccagctcccaaatgctcttccctgaccctagcaccttcc

SEQ ID NO: 30829 - DNA, 110 bp, synthetic construct
  source 1..110: mol_type = other DNA
ggtaagcccagcctccccagctcccaaatgctcttccctgaccctagcaccttccacaggcagacctgcagaatggaaagcaaagagcctctggactccaactcacttgc

SEQ ID NO: 30830 - DNA, 110 bp, synthetic construct
  source 1..110: mol_type = other DNA
gtgaaaagtgagttaaagtgcatccttatggacaaacccttgataagctctcactgtttcgtggctttaaaagaatgtgctatccaccttttgaccctatttccaagttt

SEQ ID NO: 30831 - DNA, 110 bp, synthetic construct
  source 1..110: mol_type = other DNA
tttaggaaagttgcaatgcatttctgatttttcatttgtaactcccttaagaagttgtgaatttggaaaatgtttctgtagaactgttatttctgtaaaagggatgaaag

SEQ ID NO: 30832 - DNA, 110 bp, synthetic construct
  source 1..110: mol_type = other DNA
tgtgaatttggaaaatgtttctgtagaactgttatttctgtaaaagggatgaaagcaaggagcctaccccatctgcctttcacaccagagaccatggaaagtcagagcat

SEQ ID NO: 30833 - DNA, 110 bp, synthetic construct
  source 1..110: mol_type = other DNA
atctgccagcaacatttgccccacgcgtgaagaacatggccctggggacacagtgaactgcaggcaaaggggggcgttgctccataatttcatgttattgtttgcaacta

SEQ ID NO: 30834 - DNA, 110 bp, synthetic construct
  source 1..110: mol_type = other DNA
ccttccaccgtcacctctgtgccatcggtctgtttccgtggccggctctgtgtgagcggctttgaggagcaggtgggttagcgcgaggggaccatccttgcatgtggggg

SEQ ID NO: 30835 - DNA, 110 bp, synthetic construct
  source 1..110: mol_type = other DNA
gcggctttgaggagcaggtgggttagcgcgaggggaccatccttgcatgtgggggatcgagttgaggaaacagcaccagtgcctcctgaaatgcttgtgagaacgtcagc

SEQ ID NO: 30836 - DNA, 110 bp, synthetic construct
  source 1..110: mol_type = other DNA
ggtcccagctgaggcccggtggagaagcctcagagctgcttggttgaggttggtcaggaagagaatctttgcccttagttctggaactgagtttggggagagtctggttc

SEQ ID NO: 30837 - DNA, 110 bp, synthetic construct
  source 1..110: mol_type = other DNA
gcctaggccaccagggaactcggagcttgtgctctttagataacaagaaggggaagccaactctggctcactcaaggagatttatctgatgatacttagctgttcacaga

SEQ ID NO: 30838 - DNA, 110 bp, synthetic construct
  source 1..110: mol_type = other DNA
ggggttgaatcagagctacagttgccgacacacaccacagccacagcactgtgggatctgagccaagtctgtgacttacactacacatcatggcaacgctggatccttga

SEQ ID NO: 30839 - DNA, 110 bp, synthetic construct; identical to SEQ ID NO: 30838
  source 1..110: mol_type = other DNA

SEQ ID NO: 30840 - DNA, 110 bp, synthetic construct
  source 1..110: mol_type = other DNA
tgtctttctcgactcttgccctgcgcgtgttgcctctttgtatgcgacgcgcctacgttcattttcacacagctgccatcatttcgtatgtattgcttcatgagctgctt

SEQ ID NO: 30841 - DNA, 110 bp, synthetic construct
  source 1..110: mol_type = other DNA
taagaaagagctatgggtagatgaagatgctcaataaattgatcttttatggctattctgagttgaaagcttattttttacctgaatgaagtcccagtggcttttggttt

SEQ ID NO: 30842 - DNA, 110 bp, synthetic construct
  source 1..110: mol_type = other DNA
ttctgagttgaaagcttattttttacctgaatgaagtcccagtggcttttggtttctctgatctagaaaggtttttacatgcctcagactaactcattttgctgaagaag

SEQ ID NO: 30843 - DNA, 110 bp, synthetic construct
  source 1..110: mol_type = other DNA
aaaaaaaaaaaaaaatccttagccctcagttttccctcatgtctgcagttccacgtgtatcattttaggtgttgagctctgtagttgtatgtgcatatatattacacaca

SEQ ID NO: 30844 - DNA, 110 bp, synthetic construct
  source 1..110: mol_type = other DNA
gcttccttgcagtcttgtgatacggagctccttgagaagagggccgacggagacaccgctggctccaacacagctggtggtcatgggcctgctcacttgcctgccgaaga

SEQ ID NO: 30845 - DNA, 110 bp, synthetic construct
  source 1..110: mol_type = other DNA
ccgctggctccaacacagctggtggtcatgggcctgctcacttgcctgccgaagatgtgataaacccttgcgggataacgggatcgactccagttctctcaagtttactc

SEQ ID NO: 30846 - DNA, 110 bp, synthetic construct
  source 1..110: mol_type = other DNA
tctccctggaagcacacacagcgccctagaaataaaaaggaagctctcccaaaacacccaggggtgctcacgcatataaacatccctccaagactacattagttgttttc

SEQ ID NO: 30847 - DNA, 110 bp, synthetic construct
  source 1..110: mol_type = other DNA
acacagcgccctagaaataaaaaggaagctctcccaaaacacccaggggtgctcacgcatataaacatccctccaagactacattagttgttttccctaaactcacagaa

SEQ ID NO: 30848 - DNA, 110 bp, synthetic construct
  source 1..110: mol_type = other DNA
ctgtgataaaggtaagaaggtgaaatacatgcaagtttgttcagacccctccctgtcttctctccatccagaaacaccggttggatttggagtcacaggcctcaattccg

SEQ ID NO: 30849 - DNA, 110 bp, synthetic construct
  source 1..110: mol_type = other DNA
agataagatgattttgcagaaggacatggaaataattgtcctaccagttataaaaatttcttaccaagctatcctaatcaagagaggctagaaatatacaagtacaataa

SEQ ID NO: 30850 - DNA, 110 bp, synthetic construct
  source 1..110: mol_type = other DNA
atttcttaccaagctatcctaatcaagagaggctagaaatatacaagtacaataattgagaagccagaaataaaggcaggaatatatagacataagtgatagaagcagca

SEQ ID NO: 30851 - DNA, 110 bp, synthetic construct
  source 1..110: mol_type = other DNA
gactacccagtgtctctgttcgagttgagcctcggaaaatggccccggtgccccacaagccctgtctggagtgttacagccgcagagccttcccttcccgcagatgcaga

SEQ ID NO: 30852 - DNA, 110 bp, synthetic construct
  source 1..110: mol_type = other DNA
caagccctgtctggagtgttacagccgcagagccttcccttcccgcagatgcagaatgggctttgggataaacaccctgggctgcaggccctctgggagatccctggtca

SEQ ID NO: 30853 - DNA, 110 bp, synthetic construct
  source 1..110: mol_type = other DNA
actcgcgtggagtcagtctccctgttgctgcagactttgtgcagaaagctttgtttgtagtttgcattgtctttgggacggatccctaaaaaggggaattaccaccctag

SEQ ID NO: 30854 - DNA, 110 bp, synthetic construct
  source 1..110: mol_type = other DNA
tgtagtttgcattgtctttgggacggatccctaaaaaggggaattaccaccctagagagtgcaagtacattcctctttttttgtctgtctttttgtctttttagggccac

SEQ ID NO: 30855 - DNA, 110 bp, synthetic construct
  source 1..110: mol_type = other DNA
cctgggaacctccgtatgtcgcacctgtggccctgaaagaaaaacaaacatacaaacgatgaagtcagcgtgacatcacccatctctgacaccggaagtactctagggtt

SEQ ID NO: 30856 - DNA, 110 bp, synthetic construct
  source 1..110: mol_type = other DNA
acgatgaagtcagcgtgacatcacccatctctgacaccggaagtactctagggtttcagtaaccaccgcattggcactatctggaatgccagggagtaaagacatgcgat

SEQ ID NO: 30857 - DNA, 110 bp, synthetic construct
  source 1..110: mol_type = other DNA
taaaagaagggttaggtacacagacaactataaaacgttgctaaaaaaaaaaaaaaaaaaaaaaagaagacacacataagggagagacatcccatgtgcatggatttgtg

SEQ ID NO: 30858 - DNA, 110 bp, synthetic construct
  source 1..110: mol_type = other DNA
aaaaaaaaaagaagacacacataagggagagacatcccatgtgcatggatttgtggacttaacgtggttaaaacgtcactgctccccaaagtcatctccaaagtcaagga

SEQ ID NO: 30859 - DNA, 110 bp, synthetic construct
  source 1..110: mol_type = other DNA
gtcccctcctggggagacaaggctggaagaagcagagaggagttcccattgtgattcagtgggttatgaacctgactagtactcatgaggacgcaggttcgatccctggc

SEQ ID NO: 30860 - DNA, 110 bp, synthetic construct; identical to SEQ ID NO: 30859
  source 1..110: mol_type = other DNA

SEQ ID NO: 30861 - DNA, 110 bp, synthetic construct
  source 1..110: mol_type = other DNA
tgggcagcagcccctgagggctgggaagggaggaagcacgactaaccccagacagatgaggggccagaggaagggctggcagcctgatcgcacacggagcagctgggctc

SEQ ID NO: 30862 - DNA, 110 bp, synthetic construct
  source 1..110: mol_type = other DNA
atgaggggccagaggaagggctggcagcctgatcgcacacggagcagctgggctcgcaaaatccaagctcctcaaggtctgcctgggccgcttctcccttgcccaccgtt

SEQ ID NO: 30863 - DNA, 110 bp, synthetic construct
  source 1..110: mol_type = other DNA
cagatcatccgaatgttggcacatttcattccacgatatccaaaaagcaaaatcgcatttattaataactctaccaagctccctggagaagtctccgagtgtggggaagc

SEQ ID NO: 30864 - DNA, 110 bp, synthetic construct
  source 1..110: mol_type = other DNA
ctaacagcacacacttggtttgcttttgaattgttctgccaacatggtaacacaaggaaaggcaagtctgggtttcagctgcacagctgacagccctgtttgtgtcctaa

SEQ ID NO: 30865 - DNA, 110 bp, synthetic construct
  source 1..110: mol_type = other DNA
ataaaaatgatataagcaaatttatttacaaaaatagaaataggcagaaaataaactttcggttaccaatggggaaagtgttagggggagggataaattaagagtttggg

SEQ ID NO: 30866 - DNA, 110 bp, synthetic construct
  source 1..110: mol_type = other DNA
ctttcggttaccaatggggaaagtgttagggggagggataaattaagagtttgggattaacagacccacacactactgtatgtgaaatagggcaacaacaagaacctgct

SEQ ID NO: 30867 - DNA, 110 bp, synthetic construct
  source 1..110: mol_type = other DNA
tcagaatcacttgggggtgaggcccagccagttgtttgggggattccctaggtgattccagaatgtggctaagtttgaggacggtgtcctcaacttcagaacctggtttg

SEQ ID NO: 30868 - DNA, 110 bp, synthetic construct
  source 1..110: mol_type = other DNA
ttccagaatgtggctaagtttgaggacggtgtcctcaacttcagaacctggtttggaaatcgctgtgggtggggagcttggtagaaatggaaaacccctcccccacccca

SEQ ID NO: 30869 - DNA, 110 bp, synthetic construct
  source 1..110: mol_type = other DNA
gcaaaagccgacgtccgtccatcttcttcgggaaagcatacactccttggccaccggagctggcctccggcagcagatttgaactagagcagagcaggaaacctctgctc

SEQ ID NO: 30870 - DNA, 110 bp, synthetic construct
  source 1..110: mol_type = other DNA
ggagctggcctccggcagcagatttgaactagagcagagcaggaaacctctgctcctctgacattgagcgggtcagaggatgtcttcacctctcaatccagaaggttccg

SEQ ID NO: 30871 - DNA, 110 bp, synthetic construct
  source 1..110: mol_type = other DNA
ttttattttttcaaatcccagatttatgtatgtatgtatgtattttatttatgcatttatttttggtttttaggaccataccgacggcgtatggaagttcccaggctagg

SEQ ID NO: 30872 - DNA, 110 bp, synthetic construct
  source 1..110: mol_type = other DNA
atgtatgtatgtatgtattttatttatgcatttatttttggtttttaggaccataccgacggcgtatggaagttcccaggctagggcctgaatcagagccacagctgcag

SEQ ID NO: 30873 - DNA, 110 bp, synthetic construct
  source 1..110: mol_type = other DNA
actatgtccagctggagcaccgcgtagttgtccaccgtatccagcagctccgtgcagcacttgctgccaaagacaaaaggaacaacatcatgacaagtagctttcaaaaa

SEQ ID NO: 30874 - DNA, 110 bp, synthetic construct
  source 1..110: mol_type = other DNA
agcacttgctgccaaagacaaaaggaacaacatcatgacaagtagctttcaaaaaccttctgtggatttctggaattttttcccagtgttttggtatatttccaaagacg

SEQ ID NO: 30875 - DNA, 110 bp, synthetic construct
  source 1..110: mol_type = other DNA
gcacagtccagggtggctcaggactacgtccacattccaggcaaagagaagggaagaggtgaaggggagtcacatgcctcccctttgcttgtcatccccttggccaacac

SEQ ID NO: 30876 - DNA, 110 bp, synthetic construct
  source 1..110: mol_type = other DNA
gaggtgaaggggagtcacatgcctcccctttgcttgtcatccccttggccaacacttagtcacatggccatctaggtgcaagggaggctgggaaatgtagtcaaatttag

SEQ ID NO: 30877 - DNA, 110 bp, synthetic construct
  source 1..110: mol_type = other DNA
aagcctctattatgtacccagcactgcaaagccatcacaccaagtactgacccgtcacttttgaagtacaataccgtacaccttttttttttttcttttttggccacaac

SEQ ID NO: 30878 - DNA, 110 bp, synthetic construct
  source 1..110: mol_type = other DNA
gagacggtatagaaaagagactgacgcggcaaacctgggagacggcagcgccgtgaacggtgtttttaaaaactaaccgggaagagctgtgctcgtttctgaacggaggt

SEQ ID NO: 30879 - DNA, 110 bp, synthetic construct
  source 1..110: mol_type = other DNA
aacggtgtttttaaaaactaaccgggaagagctgtgctcgtttctgaacggaggttagcagcagcagtggacacggtaccaggacacgggggagacctcctggggctgcg

SEQ ID NO: 30880 - DNA, 110 bp, synthetic construct
  source 1..110: mol_type = other DNA
aaatgtgttaaatgttcaaatactttgaagtgtttctttctttcttttctttttttttttgaatttccttttaagcccgcacccacagcatgtggaagttcccagcctag

SEQ ID NO: 30881 - DNA, 110 bp, synthetic construct; identical to SEQ ID NO: 30880
  source 1..110: mol_type = other DNA

SEQ ID NO: 30882 - DNA, 110 bp, synthetic construct
  source 1..110: mol_type = other DNA
tgtaaacctccaacctcaatgttcctgccggccctcatctctctcccaaacctttgctcactatttccagaccttccagaagctcggcctttactggggacctcactctg

SEQ ID NO: 30883 - DNA, 110 bp, synthetic construct
  source 1..110: mol_type = other DNA
tgggtctgaggggtcccttctttggcatctcctgtccctgcttcactgactgctctttttttttttttttttttttggtcttcttagggccccacctggggcctatggag

SEQ ID NO: 30884 - DNA, 110 bp, synthetic construct
  source 1..110: mol_type = other DNA
ccttctttggcatctcctgtccctgcttcactgactgctctttttttttttttttttttttggtcttcttagggccccacctggggcctatggaggttcccaggctaggg

SEQ ID NO: 30885 - DNA, 110 bp, synthetic construct
  source 1..110: mol_type = other DNA
agaccttcatcagacacaagccatatgctgggatctgtacaaagacatgatttctgtattcaggacaatacagttcagctgctactgctgttcttctgcaaacaggataa

SEQ ID NO: 30886 - DNA, 110 bp, synthetic construct
  source 1..110: mol_type = other DNA
gtattcaggacaatacagttcagctgctactgctgttcttctgcaaacaggataaaatctgtacccttcagccctccgtgaatggctccagcctatggctccacgggcac

SEQ ID NO: 30887 - DNA, 110 bp, synthetic construct
  source 1..110: mol_type = other DNA
agctgtcctcctgccatactctatcttccacatggtactcagatgtgatggctggagctccagcagtcactttggactaggaagcccaggtccatatcctaggtggctgc

SEQ ID NO: 30888 - DNA, 110 bp, synthetic construct
  source 1..110: mol_type = other DNA
agctccagcagtcactttggactaggaagcccaggtccatatcctaggtggctgctgttgaaaaggaaggaggctgcaccctgaatatgtcttcatggagctcctcctcc

SEQ ID NO: 30889 - DNA, 110 bp, synthetic construct
  source 1..110: mol_type = other DNA
ctgcttattcctcaaagtatctttttcagtgcacctgtcctcgaggctgaaacgccacagttactccttgagcccattataaggaaaatactctgagactttgcgcacgg

SEQ ID NO: 30890 - DNA, 110 bp, synthetic construct
  source 1..110: mol_type = other DNA
taatgggtagtgagttgctgtcgtgtgaactgtcgtcgataatgaaccaaccaaaccaaccccacagtgtgactcatttaaactggacaggaaagagaggaaggccagga

SEQ ID NO: 30891 - DNA, 110 bp, synthetic construct
  source 1..110: mol_type = other DNA
ccaaccccacagtgtgactcatttaaactggacaggaaagagaggaaggccaggatgctggtggattgcatctcctcccaccggggctgcatcctcgcttgcaggtgtgc

SEQ ID NO: 30892 - DNA, 110 bp, synthetic construct
  source 1..110: mol_type = other DNA
tacgggatgaaaactggtgatcggctggtgggtttccacaacatcttctcctgtcccgtgcacatctgggagaaacagctctctgcgccaggtgagatgagccaggtcag

SEQ ID NO: 30893 - DNA, 110 bp, synthetic construct
  source 1..110: mol_type = other DNA
ccctagatcttctttcctggtgaggagaatgatcacgtggtgtatgaatttgtttccaaacattcttcggagggtgttcagcacggcctcatctttctcattgaaagagc

SEQ ID NO: 30894 - DNA, 110 bp, synthetic construct
  source 1..110: mol_type = other DNA
ggcctcggggaggcctggagagcaaaggacctaaaggggagcccgggtagattgggaagttacactgagagcccctgggagtttagaatatcttgtcccgtcctttctca

SEQ ID NO: 30895 - DNA, 110 bp, synthetic construct
  source 1..110: mol_type = other DNA
ccttgatcaagttcaggtagaagagttgggaatttaccctgaagacagggagcaggatggaagggttttgagcaggaacagacaaatgctgagatggatgttggaaagat

SEQ ID NO: 30896 - DNA, 110 bp, synthetic construct
  source 1..110: mol_type = other DNA
caagatgtgtctcttaccctgccttcccccgtgtctattaccttgctaggccctgaagaaagggagagggagaaatacaagggtgtagttcaagtccaaggtagaattag

SEQ ID NO: 30897 - DNA, 110 bp, synthetic construct
  source 1..110: mol_type = other DNA
ccatgctactggttaacaaagccaggctttcggctcagttccgcaacttccgtctcagcaacccagctgcctctctgacctcactgtccatagtcaaagtgcaattatca

SEQ ID NO: 30898 - DNA, 110 bp, synthetic construct
  source 1..110: mol_type = other DNA
taaaacatcctggaggggactgtccctctgcagtggtgggggtcttaggatgatcagaagaatctggaggaggagggaacttgcagaagcgggaagcttggcgtccttcc

SEQ ID NO: 30899 - DNA, 110 bp, synthetic construct
  source 1..110: mol_type = other DNA
agaagaatctggaggaggagggaacttgcagaagcgggaagcttggcgtccttcctgagagcggggcggttaggaggagagagtagagggacgagagagctgtctgactc

SEQ ID NO: 30900 - DNA, 110 bp, synthetic construct; identical to SEQ ID NO: 30898
  source 1..110: mol_type = other DNA

SEQ ID NO: 30901 - DNA, 110 bp, synthetic construct; identical to SEQ ID NO: 30899
  source 1..110: mol_type = other DNA

SEQ ID NO: 30902 - DNA, 110 bp, synthetic construct
  source 1..110: mol_type = other DNA
tgattctctagcccagatcgataaagaggagtgggaggccacagatgtagcaggaaggctgtgagtctccatgagctgcgtcgctctaggaagtaggtgtgggaggaaaa

SEQ ID NO: 30903 - DNA, 110 bp, synthetic construct
  source 1..110: mol_type = other DNA
aggctgtgagtctccatgagctgcgtcgctctaggaagtaggtgtgggaggaaaactggttattacattcagccctctgtagccacaggttctgtaatcactcagattca

SEQ ID NO: 30904 - DNA, 110 bp, synthetic construct
  source 1..110: mol_type = other DNA
tgactgagctaacggatgcccagagagctgataaaacatagcttccgggtgcgcctgcaagggtgtttccagaagagattagtatttgagtcacagactgaggatggttc

SEQ ID NO: 30905 - DNA, 110 bp, synthetic construct
  source 1..110: mol_type = other DNA
tgcaagggtgtttccagaagagattagtatttgagtcacagactgaggatggttcttaccaatgtgggttttcatcatccggtccattaagggcccagtagaacgaggca

SEQ ID NO: 30906 - DNA, 110 bp, synthetic construct
  source 1..110: mol_type = other DNA
tacttttagaacccataattttttgggggcaaaaactactaggaatatttgaatcgtagaataaccctactcaaaagctttcaataggcagtactggcaacgtggtgatt

SEQ ID NO: 30907 - DNA, 110 bp, synthetic construct
  source 1..110: mol_type = other DNA
gtagaataaccctactcaaaagctttcaataggcagtactggcaacgtggtgattgtccttgaggctgtgctacatagaggatcttcttatttccctactgctctgtctg

SEQ ID NO: 30908 - DNA, 110 bp, synthetic construct
  source 1..110: mol_type = other DNA
tggcaacaatgacattgttaaaaatgatgcagttaatgaaagcacaggaaggcatcttttttgggggggtggtggtgggagaatagcagttgaaaataacagctattaaa

SEQ ID NO: 30909 - DNA, 110 bp, synthetic construct
  source 1..110: mol_type = other DNA
cttttttgggggggtggtggtgggagaatagcagttgaaaataacagctattaaattgaaggaaagtcaggttagggttagacactgaagaattcactgccccctccccc

SEQ ID NO: 30910 - DNA, 110 bp, synthetic construct
  source 1..110: mol_type = other DNA
gcccctcatttgctgtgggtcttagggcccccgctttccctttcggcgagaacggcccctccctcctctgagtctttgtctcaccctcttcatggacaaggagaacccat

SEQ ID NO: 30911 - DNA, 110 bp, synthetic construct
  source 1..110: mol_type = other DNA
cccctccctcctctgagtctttgtctcaccctcttcatggacaaggagaacccataccctctcctcaggaaagcttcttggagagaacacagctctaacatttctggatc

SEQ ID NO: 30912 - DNA, 110 bp, synthetic construct
  source 1..110: mol_type = other DNA
ataagtgaagacaagcacatattcccctacaaaatattcagatgtacaagtgagagattgctgttgaacagtgtctcaactgctcactatccatgttgcttcctcttgtg

SEQ ID NO: 30913 - DNA, 110 bp, synthetic construct
  source 1..110: mol_type = other DNA
gattgctgttgaacagtgtctcaactgctcactatccatgttgcttcctcttgtgcctcttgttatgtgggtcttgacaactggttgtttagacaactggtactatttga

SEQ ID NO: 30914 - DNA, 110 bp, synthetic construct
  source 1..110: mol_type = other DNA
actacactgtcagggtgtgaagctgggatgatttcagctgctgggaagctgaagaacccagggagatggaggaggaaatgcaggccttaagaaagagggcatgaggacaa

SEQ ID NO: 30915 - DNA, 110 bp, synthetic construct
  source 1..110: mol_type = other DNA
acccagggagatggaggaggaaatgcaggccttaagaaagagggcatgaggacaaggacccaggagagcagggaagggcatggtggccctcttcctccctccactttctg

SEQ ID NO: 30916 - DNA, 110 bp, synthetic construct
  source 1..110: mol_type = other DNA
tagcatttttcagtcctaatgagggaatcacatcttccccatttgagattatcgccagggcctctcagctactgccctgggtgtatggtgcagagatgtgaccttgggaa

SEQ ID NO: 30917 - DNA, 110 bp, synthetic construct
  source 1..110: mol_type = other DNA
cattataatccttgcttagcttaatgccgcaggctctgccctctaaaccccaccctggacacagtctcggtagctctctcttcaagcgctggccacctgccttgaaaagg

SEQ ID NO: 30918 - DNA, 110 bp, synthetic construct
  source 1..110: mol_type = other DNA
tggacacagtctcggtagctctctcttcaagcgctggccacctgccttgaaaaggatgcccatggcctttaaggaggcatccagagcagacagtgaggaggtggctttcc

SEQ ID NO: 30919 - DNA, 110 bp, synthetic construct
  source 1..110: mol_type = other DNA
ccattcctttattgatgggcatttacatctttcctacatattaccatttataaacaacactatcgcataaatccaggcaaaattttcttcctctatgtacatgtattttt

SEQ ID NO: 30920 - DNA, 110 bp, synthetic construct
  source 1..110: mol_type = other DNA
agaacccacctggtgccctgtcctgtgctgaagaccaggcttttagaaaagtgcaagcacagaaacaaatgtaaatgttttagaagagagcagctgggctgtggagagga

SEQ ID NO: 30921 - DNA, 110 bp, synthetic construct
  source 1..110: mol_type = other DNA
agcacagaaacaaatgtaaatgttttagaagagagcagctgggctgtggagaggagaaagtgttcaaaactgtgccttgcgagtgaaaaaaaaaaaattagagagctgga

SEQ ID NO: 30922 - DNA, 110 bp, synthetic construct
  source 1..110: mol_type = other DNA
cctcagaattacaatccaactttgctgcatactctacatggagctagtattgttcttcatagcagatttagcagcaggttggttgatgactttgtatagcagagggaagc

SEQ ID NO: 30923 - DNA, 110 bp, synthetic construct
  source 1..110: mol_type = other DNA
ttcatagcagatttagcagcaggttggttgatgactttgtatagcagagggaagctgtacacagattcacctgtccaagttcattaaagggccacgcttagaacccaggt

SEQ ID NO: 30924 - DNA, 110 bp, synthetic construct
  source 1..110: mol_type = other DNA
tccatttggaaggcagccacctggtcaatcctgtgggctgacctgtccaagaggatcttcaaaggctcccaaggctcagaattgagtgttcagtccacacaggcaccaat

SEQ ID NO: 30925 - DNA, 110 bp, synthetic construct
  source 1..110: mol_type = other DNA
tcttcaaaggctcccaaggctcagaattgagtgttcagtccacacaggcaccaatgcagctccaatctgaggaccatccaagttcagggccgctttgtttgagcaggttc

SEQ ID NO: 30926 - DNA, 110 bp, synthetic construct
  source 1..110: mol_type = other DNA
cagcaattcccccatcctctgactgatggcctcagactctctactcctctccacagcatcagcattgaccccagactttccctccagagaaggccatacctagtcccagg

SEQ ID NO: 30927 - DNA, 110 bp, synthetic construct
  source 1..110: mol_type = other DNA
gcatcagcattgaccccagactttccctccagagaaggccatacctagtcccaggagaagtagcaggagagtcaacatcttcaggtgacagcctcccctcttccctgaga

SEQ ID NO: 30928 - DNA, 110 bp, synthetic construct
  source 1..110: mol_type = other DNA
aacccatattccctctgacttaccttccaccacaggcagaacacagacctctcggtatcacccacatgcttttgccaaaagcttttgttatatgttcagggatgtgatcc

SEQ ID NO: 30929 - DNA, 110 bp, synthetic construct
  source 1..110: mol_type = other DNA
ctttgggcaccatcgaagtccagggcatattaagacacagctatagagctacagatggagaccagggaggcagatccattagctcaggggccagatcacccctgagagta

SEQ ID NO: 30930 - DNA, 110 bp, synthetic construct
  source 1..110: mol_type = other DNA
tggagaccagggaggcagatccattagctcaggggccagatcacccctgagagtagcctggcgcccgtggcagggctgggcatgaagggaagcctataggttggaccccg

SEQ ID NO: 30931 - DNA, 110 bp, synthetic construct
  source 1..110: mol_type = other DNA
tcaggattacctgatagtaattaattaagtatagctaagatgctggcaactccaaggtacacccttctcttatgggccattaagaaagaaggaaaagggagttcctgctg

SEQ ID NO: 30932 - DNA, 110 bp, synthetic construct
  source 1..110: mol_type = other DNA
agagattggctatgcctggggttttaggcataaactaagcaacagccctgcagatattagcatcttgatttgttcaaggaatactcctggaaccatagctaggcgcaggc

SEQ ID NO: 30933 - DNA, 110 bp, synthetic construct
  source 1..110: mol_type = other DNA
attagcatcttgatttgttcaaggaatactcctggaaccatagctaggcgcaggcacaaagctttgacatgttcacccccagaattctattggggtaaagaaggagagtg

SEQ ID NO: 30934 - DNA, 110 bp, synthetic construct
  source 1..110: mol_type = other DNA
cataaatgtgtatatttcaagtcatttgaaagtaacatggggcaacatttgacagaaattaaccacaatactatgttgtgtaactttaaaaaatgatcggacagtacctt

SEQ ID NO: 30935 - DNA, 110 bp, synthetic construct; identical to SEQ ID NO: 30934
  source 1..110: mol_type = other DNA

SEQ ID NO: 30936 - DNA, 110 bp, synthetic construct
  source 1..110: mol_type = other DNA
tccccgacacttccccatgtactcacttcccacactcactgggtaccttggcactgcaccctctcagctgcttcacagagactcctagatccacgcctctgactctgggc

SEQ ID NO: 30937 - DNA, 110 bp, synthetic construct
  source 1..110: mol_type = other DNA
ttgggactgtccagagcatgagacagtctaggcacagcaccaggagctgcaagactaagagcttacaattgttacacgcttttgactaatcaggcattggtccaagttct

SEQ ID NO: 30938 - DNA, 110 bp, synthetic construct
  source 1..110: mol_type = other DNA
taagagcttacaattgttacacgcttttgactaatcaggcattggtccaagttctgcagatggtaaacccctccgcatcggcacgaggcagatgatgattagcccattct

SEQ ID NO: 30939 - DNA, 110 bp, synthetic construct
  source 1..110: mol_type = other DNA
atgtgcattaaacctgcacatgataagcagtatcttgcagatttcacagctgaggaagtacaggtaaagaagtataaagcaactttccaaaatacatgtaactagtaaat

SEQ ID NO: 30940 - DNA, 110 bp, synthetic construct
  source 1..110: mol_type = other DNA
aagtacaggtaaagaagtataaagcaactttccaaaatacatgtaactagtaaatgactgaaatggtatgtgattccagatcttttaacatgtcacatgcttaacccgct

SEQ ID NO: 30941 - DNA, 110 bp, synthetic construct
  source 1..110: mol_type = other DNA
agacagactgccgagccattcccgaaaggagtcttcatgtttgttaaatgaccagctgggaaacatgagggtggggtgttggcaaacttccagacgataaacagagctta

SEQ ID NO: 30942 - DNA, 110 bp, synthetic construct
  source 1..110: mol_type = other DNA
ctgggaaacatgagggtggggtgttggcaaacttccagacgataaacagagcttactgatatcttagaggattagacctgaaaccttggtcttattcatatttatcaagc

SEQ ID NO: 30943 - DNA, 110 bp, synthetic construct
  source 1..110: mol_type = other DNA
tttgcttgtcacactatgttatacttgcctgtgtgtccatgtgacctaaagagctcaagagctagagtcttcgccatcgtcctcactgctgtgtcccctgtgcttagcgt

SEQ ID NO: 30944 - DNA, 110 bp, synthetic construct
  source 1..110: mol_type = other DNA
tggagccagcctccagaggacctggagctcctgcctcaggaccaagtctggctcacctgcatttgtgttcacaaggtcaccctccacttgatagccatgatttgtagaat

SEQ ID NO: 30945 - DNA, 110 bp, synthetic construct
  source 1..110: mol_type = other DNA
ctggacactgtttccatgttaagtcttcagatgggagttcgtggtcccctgcatggcgtcatggaaagagcatgaggtttggaatcaaactagcctgggtttgaatactg

SEQ ID NO: 30946 - DNA, 110 bp, synthetic construct
  source 1..110: mol_type = other DNA
caggtaatgtgtatgacatgattctcctctccagcctccaggttcttttgtgctcaatccttaaagtctgttctcaaggcctcctttccctcgaaattcttttgcaggac

SEQ ID NO: 30947 - DNA, 110 bp, synthetic construct
  source 1..110: mol_type = other DNA
aactgggtctccatgctgtacagtggcaaaataaacaataaataaatacaaagaatttggaatggtctcctgggccccagggatcacgacatagtcctgcctgcagttct

SEQ ID NO: 30948 - DNA, 110 bp, synthetic construct
  source 1..110: mol_type = other DNA
tttggaatggtctcctgggccccagggatcacgacatagtcctgcctgcagttctagagagacctttctgccaatacagcctactgacccaaaggtgccacagccttgca

SEQ ID NO: 30949 - DNA, 110 bp, synthetic construct
  source 1..110: mol_type = other DNA
gttggtttgaatcttaatgctgtacaggttaccgactggatttcctgagcacaggaaataaaggatatttttattcctatatgtattttcataaggcctcttgtctccct

SEQ ID NO: 30950 - DNA, 110 bp, synthetic construct
  source 1..110: mol_type = other DNA
ctcactcgtgctctcctttctccgtagctgcctttttcaacttgatttttggcagcaaatataacatggatattacttcaacagaaaatcagggagttcccatcgtggct

SEQ ID NO: 30951 - DNA, 110 bp, synthetic construct
  source 1..110: mol_type = other DNA
tcccgttaactagttagtcatggactttttaaaaaaaagaaagcccctcatcctcataatttgcagactttaataaggctacggcaaagcctcccattatcttcagtaaa

SEQ ID NO: 30952 - DNA, 110 bp, synthetic construct
  source 1..110: mol_type = other DNA
ataatttgcagactttaataaggctacggcaaagcctcccattatcttcagtaaagggctctccttacagatgtctacattcgtgatagcgcatcatgcagtctccatag

SEQ ID NO: 30953 - DNA, 110 bp, synthetic construct
  source 1..110: mol_type = other DNA
aagatcagaggggcaaatacgagccaaaagcatggtgacaggttataacctaatgagtgtatctctctctcctgcaacatatttgcgagtattagcgcactgctatcaat

SEQ ID NO: 30954 - DNA, 110 bp, synthetic construct
  source 1..110: mol_type = other DNA
tgcgccatgatgggaactcctacctctacatgttttgatgttcaggaatcaacacaggaatctgtacttttgttaagctccacccccttcccctgggccattctgatagc

SEQ ID NO: 30955 - DNA, 110 bp, synthetic construct
  source 1..110: mol_type = other DNA
agattggaaaaggagctaggtttaggtttggacattttgatcttctgtttatatagaaaatctagtgagatagagattatgagtttaattcctgatatacagcttgagga

SEQ ID NO: 30956 - DNA, 110 bp, synthetic construct
  source 1..110: mol_type = other DNA
gaaaatctagtgagatagagattatgagtttaattcctgatatacagcttgaggatattgaacgaggggattgggagggggttcccaccaaagatcaggaaaaggaagtc

SEQ ID NO: 30957 - DNA, 110 bp, synthetic construct
  source 1..110: mol_type = other DNA
agttgggctcattaccactgagccacattgggaacttcctactacattttcttaatccatttatctgccaatggacatttaggttgtttccatgtctcgtatattgtgca

SEQ ID NO: 30958 - DNA, 110 bp, synthetic construct; identical to SEQ ID NO: 30957
  source 1..110: mol_type = other DNA

SEQ ID NO: 30959 - DNA, 110 bp, synthetic construct
  source 1..110: mol_type = other DNA
tgcatggcttcacagttctggagtctagaagtctaaaaccaaggtgtaagcagggctctgagagagaacctgttccttgcttctggcagtctttgctgttcttggcttgt

SEQ ID NO: 30960 - DNA, 110 bp, synthetic construct
  source 1..110: mol_type = other DNA
ctctgagagagaacctgttccttgcttctggcagtctttgctgttcttggcttgtggatgtatctctgatctctgctgccttcactctcacacggtgttagcctgtgtct

SEQ ID NO: 30961 - DNA, 110 bp, synthetic construct
  source 1..110: mol_type = other DNA
tcacatatcacgaaataaaattcttctttggactttcttccaaccatttaaaaaataaaaatcaattttgagcttgcaggctatactaaaacaggtagcagatcagtctg

SEQ ID NO: 30962 - DNA, 110 bp, synthetic construct
  source 1..110: mol_type = other DNA
taaaaatcaattttgagcttgcaggctatactaaaacaggtagcagatcagtctgccaacctctactgtatttcaaaaaaaatttagcatattgtctatacagtaccacc

SEQ ID NO: 30963 - DNA, 110 bp, synthetic construct
  source 1..110: mol_type = other DNA
gcaaagggaggaactgcaggagcagctgctgacatgaggaactaaaggaaatagtcctgagagctacctggcagtaggaggggtcacaggagccactgctgcatgtgcat

SEQ ID NO: 30964 - DNA, 110 bp, synthetic construct
  source 1..110: mol_type = other DNA
gcaggagcagctgctgacatgaggaactaaaggaaatagtcctgagagctacctggcagtaggaggggtcacaggagccactgctgcatgtgcatgctacaaaagcaatc

SEQ ID NO: 30965 - DNA, 110 bp, synthetic construct
  source 1..110: mol_type = other DNA
agagagacagagagagagaccattgcaggtaagtgccgacatgatgaactgaacgacctggaacaagatctcccccagggaacccagaaagcttgggaagagcagttgaa

SEQ ID NO: 30966 - DNA, 110 bp, synthetic construct
  source 1..110: mol_type = other DNA
acctggaacaagatctcccccagggaacccagaaagcttgggaagagcagttgaagaggaatgagcaatacttaaattctctttactttctgcaaagagggtcatttcct

SEQ ID NO: 30967 - DNA, 110 bp, synthetic construct
  source 1..110: mol_type = other DNA
cagggatgaacaagcagttccaaaagatatttagagagatgggcaaacaaagacgacgaccaggcccttgctctcaaaacctttactttttctgaggatgcaaagccata

SEQ ID NO: 30968 - DNA, 110 bp, synthetic construct
  source 1..110: mol_type = other DNA
aaaggcatctgagaatgaaaaggtagataaaaggctttggactctgagcacaaactggttgttagcttgaggttactttctgaggagtgaaaacatggggcgagagtagc

SEQ ID NO: 30969 - DNA, 110 bp, synthetic construct
  source 1..110: mol_type = other DNA
tggttgttagcttgaggttactttctgaggagtgaaaacatggggcgagagtagcaaggagaggctctctgactgcacctcctgcaataagcacgcaccagcatgggctc

SEQ ID NO: 30970 - DNA, 110 bp, synthetic construct
  source 1..110: mol_type = other DNA
ctgtggctttgccccctttgtctcataggcatcactcctggcagtgtcatgtggtagcctgactccagcttgagagcctctgcatctcaaatgcatgtctgatcttgcca

SEQ ID NO: 30971 - DNA, 110 bp, synthetic construct
  source 1..110: mol_type = other DNA
agactgcctctggtaccaacagaaaccaccacagaccaacagagaggactctatccctgggtcttagcttccggatcccaaagcaggaataacaggagtccccatcatgg

SEQ ID NO: 30972 - DNA, 110 bp, synthetic construct
  source 1..110: mol_type = other DNA
ggactctatccctgggtcttagcttccggatcccaaagcaggaataacaggagtccccatcatggctcagcagtactgaacctgattaggatccatgaggatgtgggttt

SEQ ID NO: 30973 - DNA, 110 bp, synthetic construct
  source 1..110: mol_type = other DNA
aggaattcctagctgtttactagccccgcacaggcaaacgccgagggtatcatgctagccccgttcatgagccacgatgttctgacgctcattaagaacggctcactctt

SEQ ID NO: 30974 - DNA, 110 bp, synthetic construct
  source 1..110: mol_type = other DNA
gatcacggcaggaagtggaagaggacttactatgtttcatataaccaccacagctcctcaaacctgtctactcgctgtagcctatttccatgataccataaatgctttaa

SEQ ID NO: 30975 - DNA, 110 bp, synthetic construct
  source 1..110: mol_type = other DNA
cctcaaacctgtctactcgctgtagcctatttccatgataccataaatgctttaatgttctttgaggataacttattccaaaacaagaaaacaaaaaaactacagaattt

SEQ ID NO: 30976 - DNA, 110 bp, synthetic construct
  source 1..110: mol_type = other DNA
aggatctaaaatataatttaagatcattccctgaaagacagtgaggtttttataatgcccttccagcatgtgcattaataatcagacatcagaagcagaggaggagttgg

SEQ ID NO: 30977 - DNA, 110 bp, synthetic construct
  source 1..110: mol_type = other DNA
tgcccttccagcatgtgcattaataatcagacatcagaagcagaggaggagttggagttcaggatgttagctcatcaccaaaatctgagactctgagacttttctgttgt

SEQ ID NO: 30978 - DNA, 110 bp, synthetic construct
  source 1..110: mol_type = other DNA
acagttctacgtcactcacatagggaatgccttattccaccgaataataatccatccaatggtgagtcactgaattaccactggatggatgaatgggcagaagggtagac

SEQ ID NO: 30979 - DNA, 110 bp, synthetic construct
  source 1..110: mol_type = other DNA
atccattttctgggtctcgcccagagcacttgatattcctttatagctcggaaggcctttatgccatgtttgtctgactttcccactttgagtagatctgtaatgttgca

SEQ ID NO: 30980 - DNA, 110 bp, synthetic construct
  source 1..110: mol_type = other DNA
gagcaaacctctgacaggagggcatcctgatgttgtctgagtccatctctatccttgcgttccagggatttgcccaagtgacgatgataaaacaatgttgtttttcgagc

SEQ ID NO: 30981 - DNA, 110 bp, synthetic construct
  source 1..110: mol_type = other DNA
tgcgttccagggatttgcccaagtgacgatgataaaacaatgttgtttttcgagctgtcttaatatgctcctcactacaagctagggatataggcaggaaaacacatgga

SEQ ID NO: 30982 - DNA, 110 bp, synthetic construct
  source 1..110: mol_type = other DNA
gggtttctggacaggacacatcatgaggcatgagttaactttgtatcagcagctggttatgggctgagaacaaggcacggggcgtctgggctctcaccccactgaggatg

SEQ ID NO: 30983 - DNA, 110 bp, synthetic construct
  source 1..110: mol_type = other DNA
gttatgggctgagaacaaggcacggggcgtctgggctctcaccccactgaggatgtctaacatggggatccagcctaagagcaacagatgtaaaaagaggggagatggca

SEQ ID NO: 30984 - DNA, 110 bp, synthetic construct
  source 1..110: mol_type = other DNA
actgcatctgcttattctgccctctgtacaccagtcccgccttattctcccatgacaagggcctggctgccatggccacttacatcaccagtttctccaagcaaagggct

SEQ ID NO: 30985 - DNA, 110 bp, synthetic construct
  source 1..110: mol_type = other DNA
caagggcctggctgccatggccacttacatcaccagtttctccaagcaaagggctccactctcccctctccaggatggacagctgcattcctagccctggtgagccctca

SEQ ID NO: 30986 - DNA, 110 bp, synthetic construct
  source 1..110: mol_type = other DNA
tccaacaccttccctactgcgctatgctcctcaagttcagcgctaacccacacacacacccccaaagctcaagcagatgcattcccctctcggacacacacacacacaca

SEQ ID NO: 30987 - DNA, 110 bp, synthetic construct
  source 1..110: mol_type = other DNA
aatgactctgagggaaaaagagaaaataggttttttgggtccatggaacctccccgtggaataccaataggtgagatgtttgggtggaaagtttgagcaagaggttcccg

SEQ ID NO: 30988 - DNA, 110 bp, synthetic construct
  source 1..110: mol_type = other DNA
tgcctcttctagtctccgctgtctgctggcagttcttgacatttctcagcttacagatgcttcactccgatctctacatgtgtcagcacatgaccattttctctcacatc

SEQ ID NO: 30989 - DNA, 110 bp, synthetic construct
  source 1..110: mol_type = other DNA
ttcaactgtaaaaggaagccaatcttgaatgagcttctccatttccacactaatcctggccagagcaagggttggatcctttgaactgcagaaggtggctgtgggccgta

SEQ ID NO: 30990 - DNA, 110 bp, synthetic construct
  source 1..110: mol_type = other DNA
aagctgctgcagtgaaaatgccaggtccttaacccactgcactgcaagagaacgcctctaatttctttcttgtgactcaggttccatctcttcttactgtctctagggct

SEQ ID NO: 30991 - DNA, 110 bp, synthetic construct
  source 1..110: mol_type = other DNA
ctctaatttctttcttgtgactcaggttccatctcttcttactgtctctagggcttctttcctgcagttaggatctcttttctacatcaatttttctctctttgttgaat

SEQ ID NO: 30992 - DNA, 110 bp, synthetic construct
  source 1..110: mol_type = other DNA
tagattgagcattttgttaacattttgcttgatttatacctcttaagaaattactttacctgcccgaaatctaggaagattgtcagtttcataatgttatgtctagtaca

SEQ ID NO: 30993 - DNA, 110 bp, synthetic construct
  source 1..110: mol_type = other DNA
gctgggaaatgccattgttttaatctgtgtttctcctttatggcctttcataaatgtagtattgcatctatttggggtagtagggagaaatgataatccaccatactacg

SEQ ID NO: 30994 - DNA, 110 bp, synthetic construct
  source 1..110: mol_type = other DNA
cctcgctctaggacagggaccattctgtatgtttatctatttcccaactgcacttcccacggagtcctgtgctcagctccttgatgaatcttatggattaattccacttc

SEQ ID NO: 30995 - DNA, 110 bp, synthetic construct
  source 1..110: mol_type = other DNA
ctcacaactcggcagacagtgagttgcttggtgtcctttcagctgcctctgctataaggtgtgacacaggagacccttctggaagtgtgcgtgcttccctcgtcctcacc

SEQ ID NO: 30996 - DNA, 110 bp, synthetic construct
  source 1..110: mol_type = other DNA
ggtgattggcatcccctgcagcagatcacctaagatactagtttttttgtttgtttttttaatgtttgcagggctgcacccatggcctatggaaggtcccaggctagggg

SEQ ID NO: 30997 - DNA, 110 bp, synthetic construct
  source 1..110: mol_type = other DNA
tactagtttttttgtttgtttttttaatgtttgcagggctgcacccatggcctatggaaggtcccaggctaggggtcctgcagctgcgggcctacaccacacccacagca

SEQ ID NO: 30998 - DNA, 110 bp, synthetic construct
  source 1..110: mol_type = other DNA
atcgaatgatatttgtctttctgaagtaatagatattaaaactattaagaattgataaaattgaaaatgtttgtgcccctgggaattatgtgacctgtagccgtggcagc

SEQ ID NO: 30999 - DNA, 110 bp, synthetic construct
  source 1..110: mol_type = other DNA
taaaattgaaaatgtttgtgcccctgggaattatgtgacctgtagccgtggcagctaaaggtcggctgaggagtccgtttcagcgaactccttccaggggatcttgagcc

SEQ ID NO: 31000 - DNA, 110 bp, synthetic construct
  source 1..110: mol_type = other DNA
cttctggtaatgattactgatcaagaaaaagtaaacgcagctgacttagaccccgcccttggagagcttctagaagtagaaaggaaatggtaaaatgcctggatgcttac

SEQ ID NO: 31001 - DNA, 110 bp, synthetic construct
  source 1..110: mol_type = other DNA
cttttacgctgagcaaaaacgtatattgactccaaaccttttaaagtgggtaaagggctttgaatttgctgaccgagaagagatcagtgtcgctggagtttatttattta

SEQ ID NO: 31002 - DNA, 110 bp, synthetic construct
  source 1..110: mol_type = other DNA
gtgggtaaagggctttgaatttgctgaccgagaagagatcagtgtcgctggagtttatttatttattggaaccaaaaatatctttatataaactattaatagatacctaa

SEQ ID NO: 31003 - DNA, 110 bp, synthetic construct
  source 1..110: mol_type = other DNA
atggtctacccacgcatgcacccacatacgctcccacgcccgcacatccggccgtgctctcctggcgaggctctaagtgttatcaaatgtgtcctcctgggtgacgagct

SEQ ID NO: 31004 - DNA, 110 bp, synthetic construct
  source 1..110: mol_type = other DNA
gctctcctggcgaggctctaagtgttatcaaatgtgtcctcctgggtgacgagcttgcacttgctgccactggtcctgaatcctccttccagagcaacacagacggctgt

SEQ ID NO: 31005 - DNA, 110 bp, synthetic construct
  source 1..110: mol_type = other DNA
gggtggggatggaagaaatacaacggacaacacgtggataattgttgaggccggagggtgggcacatggagtttattatacttctctatttctgtgaacgtgaccatttt

SEQ ID NO: 31006 - DNA, 110 bp, synthetic construct
  source 1..110: mol_type = other DNA
gggtgggcacatggagtttattatacttctctatttctgtgaacgtgaccattttttttccataataagatttaaaaaaaaaaagcaaaaacagctgcagttcagtagtt

SEQ ID NO: 31007 - DNA, 110 bp, synthetic construct
  source 1..110: mol_type = other DNA
ggccctaaaaaaaaacaaaagacaaaataaaaattggggctattactaaggaataagatgaaatcgaggagttctcttgtggcacagctggttaaggagtaggtgttgtc

SEQ ID NO: 31008 - DNA, 110 bp, synthetic construct; identical to SEQ ID NO: 31007
  source 1..110: mol_type = other DNA

SEQ ID NO: 31009 - DNA, 110 bp, synthetic construct
  source 1..110: mol_type = other DNA
cccctaaagtttcatgagcaggtcagtgtagatcagtgagttgttttaggaagatgctctgagctgaactggaggaatgagaatctaaagctttggagaatttctggtac

SEQ ID NO: 31010 - DNA, 110 bp, synthetic construct
  source 1..110: mol_type = other DNA
gctctgagctgaactggaggaatgagaatctaaagctttggagaatttctggtactgaggattgtaagaatccaggtgtgtggcaggaaggaaggaggggatggaagaaa

SEQ ID NO: 31011 - DNA, 110 bp, synthetic construct
  source 1..110: mol_type = other DNA
tttctgcattgaggagatgggacccagacatgttaagtcttttgcccaaggtctcagagtaagtcatagctaaacaaggagtcaaagccaagtctcctgatttcggtttc

SEQ ID NO: 31012 - DNA, 110 bp, synthetic construct
  source 1..110: mol_type = other DNA
cataaatgcagagaaacggatcctggaaaagctatgccaatcccacaaccatctaggaacacttactctcctgaggacagagagccaggaagatgggttaaagacggtgc

SEQ ID NO: 31013 - DNA, 110 bp, synthetic construct
  source 1..110: mol_type = other DNA
ttcccaggctaggagtcaaatcagagctacaaccacacgggatacgagccacctctgcaacctatactacgggtcccagcaacgctggatccctgacccactgagcgagg

SEQ ID NO: 31014 - DNA, 110 bp, synthetic construct; identical to SEQ ID NO: 31013
  source 1..110: mol_type = other DNA

SEQ ID NO: 31015 - DNA, 110 bp, synthetic construct
  source 1..110: mol_type = other DNA
tctcacttattcaagatcaaaagccacctaatggtataagcccaagatcattcaaaatgcggccacttgtttggaagatgggattaagatgacagaatagaaggactgga

SEQ ID NO: 31016 - DNA, 110 bp, synthetic construct
  source 1..110: mol_type = other DNA
ggctctggagcattttctctggggagagacggacaatcagcaagtagacaaagaagcaactgcgagctgagaaccgctgtgacggtcaggaccacgaggttacgtctggg

SEQ ID NO: 31017 - DNA, 110 bp, synthetic construct
  source 1..110: mol_type = other DNA
gcaactgcgagctgagaaccgctgtgacggtcaggaccacgaggttacgtctgggaataacaggtaacctatggagagggcacggcaggaaaacgcggctgaggagggga

SEQ ID NO: 31018 - DNA, 110 bp, synthetic construct
  source 1..110: mol_type = other DNA
catgcagccctagggggaaaaaaaaaagagagagagagagctcagccagcaaccatctaacctccacctgtcagcatcatccaggttccctgtcacacggtggggatgct

SEQ ID NO: 31019 - DNA, 110 bp, synthetic construct
  source 1..110: mol_type = other DNA
tagtatagttgatttacagtgttctgtccacttctgctgtgcagcaaagtgacttacacatttatacgcattctttttttcacgttatcctccgtcatgttccatcacaa

SEQ ID NO: 31020 - DNA, 110 bp, synthetic construct; identical to SEQ ID NO: 31019
  source 1..110: mol_type = other DNA

SEQ ID NO: 31021 - DNA, 110 bp, synthetic construct
  source 1..110: mol_type = other DNA
ccttttacagataaccacgtcgtacctggaagagggtgtgcggtgtttgaaatgctgtcctgtgtgtcgttcacgacgaacacgcagctggagggtgggagcgccacgcg

SEQ ID NO: 31022 - DNA, 110 bp, synthetic construct
  source 1..110: mol_type = other DNA
tgtcctgtgtgtcgttcacgacgaacacgcagctggagggtgggagcgccacgcgtgtgaaccccggtcctgtcattttacgcgctcatgacctttggcagcgaagcctt

SEQ ID NO: 31023 - DNA, 110 bp, synthetic construct
  source 1..110: mol_type = other DNA
ggagaaagttaagtaccagatacaattcaagggggtgcgttgggtgctgaggtgagaataaagggcaggggtggatttctggaaagtgggtgaggggaaaacagctgtga

SEQ ID NO: 31024 - DNA, 110 bp, synthetic construct
  source 1..110: mol_type = other DNA
gaataaagggcaggggtggatttctggaaagtgggtgaggggaaaacagctgtgagtctgggatggatgagctgatgagggtggctgcgtccgggagagctgggtcagtg

SEQ ID NO: 31025 - DNA, 110 bp, synthetic construct
  source 1..110: mol_type = other DNA
gcgcacctcccaagatctggtgggttccgagccggaaacatgaaccatcccctcgccctgaaggagctgccagtccagagggaggccgaacccgtgcagccagcccagcc

SEQ ID NO: 31026 - DNA, 110 bp, synthetic construct
  source 1..110: mol_type = other DNA
cactgcctttacgaaggctctctgactagcttgataaccataaaatccacgctgcccagctcctttgccgctggtctggaaggacatgaggtgtggggagttcctgactg

SEQ ID NO: 31027 - DNA, 110 bp, synthetic construct
  source 1..110: mol_type = other DNA
ccagctcctttgccgctggtctggaaggacatgaggtgtggggagttcctgactgaccggtagcatcattccctcccagggagccttgtgggggtgggggcttcctggat

SEQ ID NO: 31028 - DNA, 110 bp, synthetic construct
  source 1..110: mol_type = other DNA
caacttcccgttccccgcatccaccctcatccaggtcttcctggatgttgagctccagacccagagagagcaggacctttgtcccttagaagagctgcgtctgcgcagcg

SEQ ID NO: 31029 - DNA, 110 bp, synthetic construct
  source 1..110: mol_type = other DNA
ggtcacacccgagtcctcatggatactagtagggatcgaacctgaaccatagctgggacccacatgacagctgaggcaactcaggattcttaacccactgcactggaact

SEQ ID NO: 31030 - DNA, 110 bp, synthetic construct
  source 1..110: mol_type = other DNA
ggacccacatgacagctgaggcaactcaggattcttaacccactgcactggaactggggattgaacctgtgccaccacagagacaacgctggaccctgcaacccactgca

SEQ ID NO: 31031 - DNA, 110 bp, synthetic construct
  source 1..110: mol_type = other DNA
atgacaaaaaaagttctatgttacagggagaaagttcttgggaaacaattactcttcagaatcaagaatactcagaaggtttcaaaaagatatgaactgaacaagaggaa

SEQ ID NO: 31032 - DNA, 110 bp, synthetic construct
  source 1..110: mol_type = other DNA
ccacccaaagtttggagagcttttaccattgaaattcagaaggggtgtagaaccgaaaatgcaaaggcaaggtggcagcgggaggaggagaattaacgtaattatccact

SEQ ID NO: 31033 - DNA, 110 bp, synthetic construct
  source 1..110: mol_type = other DNA
agcacacggaagttcccaggccagagactaaacccacgccactcagtgacaatgtcggatccttaacccatggaaccattggacaactcagattttttttcaaaggtggt

SEQ ID NO: 31034 - DNA, 110 bp, synthetic construct
  source 1..110: mol_type = other DNA
acaatctctctgcttcagactggggggcgtgtcccccaaggttttctcttcctttctactgaaagcactgctagagctcccccagcataacccaacaacgcaacttgcag

SEQ ID NO: 31035 - DNA, 110 bp, synthetic construct
  source 1..110: mol_type = other DNA
ctactgaaagcactgctagagctcccccagcataacccaacaacgcaacttgcagggcccccagattttgtggggaaagcaaaaagaaaaagctggctaggaacggcgtt

SEQ ID NO: 31036 - DNA, 110 bp, synthetic construct
  source 1..110: mol_type = other DNA
actgaacccatttcctggccaagggctgcattgaccactcctttgaggatgtattcctgcaaacatggattatcactaattaaatgaaaaggaatgtagatccatgagat

SEQ ID NO: 31037 - DNA, 110 bp, synthetic construct
  source 1..110: mol_type = other DNA
attggcatgtgcccattaagggaggagatggtttccttccttccggcaggagcatccttagttctgtcaacaaggtaccaggaatgttaaccaaagatcgtgtgtgaggc

SEQ ID NO: 31038 - DNA, 110 bp, synthetic construct
  source 1..110: mol_type = other DNA
caaagaactaagggcaaactcatgctcccctatttaatgaattaggttaattgttactgggaagtaggaaggggtgaggtgcagaaagagactggcttggagctgagttc

SEQ ID NO: 31039 - DNA, 110 bp, synthetic construct
  source 1..110: mol_type = other DNA
actgggaagtaggaaggggtgaggtgcagaaagagactggcttggagctgagttcttgtccctccaattattcagtcaacaagtatgaactgaggcttacaacctgccaa

SEQ ID NO: 31040 - DNA, 110 bp, synthetic construct; identical to SEQ ID NO: 31038
  source 1..110: mol_type = other DNA

SEQ ID NO: 31041 - DNA, 110 bp, synthetic construct; identical to SEQ ID NO: 31039
  source 1..110: mol_type = other DNA

SEQ ID NO: 31042 - DNA, 110 bp, synthetic construct
  source 1..110: mol_type = other DNA
cctgtgccctgccgactcgccgccgccgccgtcgtcgtccgtttagatcttcttgtttccagcaaatgtctgagcacaggcacccttatctggagtcagttcatgagtcc

SEQ ID NO: 31043 - DNA, 110 bp, synthetic construct
  source 1..110: mol_type = other DNA
tttccagcaaatgtctgagcacaggcacccttatctggagtcagttcatgagtccacatcttgagtcgtcgtaagagagggactcaagccatttccagaaatctggaata

SEQ ID NO: 31044 - DNA, 110 bp, synthetic construct
  source 1..110: mol_type = other DNA
tgtctctgggcaaaacatttttttactgttatcacatggtacactttaaacacacaatttttgtccatcacacctcagggaagctgaaaaaagataaaaacattgtcatc

SEQ ID NO: 31045 - DNA, 110 bp, synthetic construct
  source 1..110: mol_type = other DNA
ggaccgggccaggaagatatgttgaagaaagagacaagagctggagaagcatcggcacaggtcacaactctggtgagggttcgatccctgcccaccccccaaaaagcagg

SEQ ID NO: 31046 - DNA, 110 bp, synthetic construct
  source 1..110: mol_type = other DNA
ctcctccaccagccactccctccatgggtcacctcttgtgccagcctctgtgccagtgaaagacgttagtcttgttttaaacgtcagcctgtgccaggcagtcaatggca

SEQ ID NO: 31047 - DNA, 110 bp, synthetic construct
  source 1..110: mol_type = other DNA
gtgaaagacgttagtcttgttttaaacgtcagcctgtgccaggcagtcaatggcatgattgtgctcagctaactggacgcaggacctcaggtattatatctataagccgt

SEQ ID NO: 31048 - DNA, 110 bp, synthetic construct; identical to SEQ ID NO: 31046
  source 1..110: mol_type = other DNA

SEQ ID NO: 31049 - DNA, 110 bp, synthetic construct; identical to SEQ ID NO: 31047
  source 1..110: mol_type = other DNA

SEQ ID NO: 31050 - DNA, 110 bp, synthetic construct
  source 1..110: mol_type = other DNA
atgggatgtacagctttattcttccttctcctcaatatttgcacttcaaggtattttctttccttcttttttgctttttttttcttttagggctgaacccacagcatatg

SEQ ID NO: 31051 - DNA, 110 bp, synthetic construct
  source 1..110: mol_type = other DNA
ttattcttccttctcctcaatatttgcacttcaaggtattttctttccttcttttttgctttttttttcttttagggctgaacccacagcatatggaggtccccaggcta

SEQ ID NO: 31052 - DNA, 110 bp, synthetic construct
  source 1..110: mol_type = other DNA
caaagatgtcttggctgcgtgtatacggtcaggcaaacaacctgtgacatatcataaatgaaaactccaaagatcatattagtagcaatttataatgaaaatgaaaagat

SEQ ID NO: 31053 - DNA, 110 bp, synthetic construct
  source 1..110: mol_type = other DNA
aaatgaaaactccaaagatcatattagtagcaatttataatgaaaatgaaaagatagcagtattgagaaccacggtcgaccactgacacaactcaagcttcagtaatttc

SEQ ID NO: 31054 - DNA, 110 bp, synthetic construct
  source 1..110: mol_type = other DNA
acagtcactacaagatgacaggaaggatggtatggggcaagcaaagcagctgtcgggcactagctgcctcctgggcaggggacgttctctagttaaaactctcactttgg

SEQ ID NO: 31055 - DNA, 110 bp, synthetic construct
  source 1..110: mol_type = other DNA
ggtttcttagcgggagggtggatggagctaagatcactgaatgcccacttcgttttttcgtttgtttgcttttggctatttagggccgcatccgaggcatatggaagttc

SEQ ID NO: 31056 - DNA, 110 bp, synthetic construct
  source 1..110: mol_type = other DNA
cactttgaatttttctccaagtagccactctttcctaacaatgatgtctcatcacacaagtttccccacggagctctctcttcaggatagtcgggacttccttgtaactt

SEQ ID NO: 31057 - DNA, 110 bp, synthetic construct
  source 1..110: mol_type = other DNA
cacaagtgtgggcatcagagggaaatcgtaggggacttaacgtgaccccaattaaaacacagttaaaaatccctggagaagtagtccagagaaaacaataccctctccct

SEQ ID NO: 31058 - DNA, 110 bp, synthetic construct
  source 1..110: mol_type = other DNA
cagagggaaatcgtaggggacttaacgtgaccccaattaaaacacagttaaaaatccctggagaagtagtccagagaaaacaataccctctccctctacaaggaaggatg

SEQ ID NO: 31059 - DNA, 110 bp, synthetic construct
  source 1..110: mol_type = other DNA
cacataactgtgtagaacaaagggaaaaagagagagaggagagaaagaagagaaaaaaaggatgggactggcactcctgagaaggagctgggaaagaggaaaggaacctg

SEQ ID NO: 31060 - DNA, 110 bp, synthetic construct
  source 1..110: mol_type = other DNA
gaggagagaaagaagagaaaaaaaggatgggactggcactcctgagaaggagctgggaaagaggaaaggaacctgaaccctgggaagccacataactgatggggagagca

SEQ ID NO: 31061 - DNA, 110 bp, synthetic construct
  source 1..110: mol_type = other DNA
gccctaagggttcaaaaattccccaccatctttggggaaacttgagctaaagatctaaaagatctatatctggaggaggctaactgtctccagaaaagcgaggatatgcc

SEQ ID NO: 31062 - DNA, 110 bp, synthetic construct
  source 1..110: mol_type = other DNA
ctgcagaagacttgaaaaatgcagaaaaacataaagaagaaaataggattcacagccagagatagccacagttagtactttaatgtttttctttctaatattgatacttt

SEQ ID NO: 31063 - DNA, 110 bp, synthetic construct
  source 1..110: mol_type = other DNA
tttaagaaggtttgagtacctcagggctcagtgctgaaatgttacctcttctcgctctgtaaccgttctttgggcagctcctgtcgtttcagttcccatctacatgatga

SEQ ID NO: 31064 - DNA, 110 bp, synthetic construct
  source 1..110: mol_type = other DNA
tgttatttcacctgtgagaatggtctaacattccaggtgaagctttgtactacgtatgctgattgtaacattcagaacctggatggtgaaacagaaattaaaatagccca

SEQ ID NO: 31065 - DNA, 110 bp, synthetic construct
  source 1..110: mol_type = other DNA
cctattaggatgtgcccaggacctgcggcttccctgcctctgtcctgatgagatgcagccattcctcatggttgtgctcttgttgagacccccaaatcaaactcgggggc

SEQ ID NO: 31066 - DNA, 110 bp, synthetic construct
  source 1..110: mol_type = other DNA
cagccattcctcatggttgtgctcttgttgagacccccaaatcaaactcgggggcctcctctctgtggtctgcttctgtcctttgttaaaggacttgtgccccacagcta

SEQ ID NO: 31067 - DNA, 110 bp, synthetic construct
  source 1..110: mol_type = other DNA
agactgttagaaatcagtggccattaaacaaccattttcatttgcagtggactaagaatatgattagctttgagtttggaaagcatgtgccaatgaatgccaagtaaaac

SEQ ID NO: 31068 - DNA, 110 bp, synthetic construct
  source 1..110: mol_type = other DNA
ccaattgtttttctatttgcccattccttttctgtcttagatagccatacttcgtatagtttcaataatgatgttattagaccttatatctcagtgttttcattgagcat

SEQ ID NO: 31069 - DNA, 110 bp, synthetic construct
  source 1..110: mol_type = other DNA
agaagtttcatcactgtttgacagaataattgaagcaagggggaaaggattgagtggttcatattttcatttatatttcttcacccacgactaaataaaatattccagag

SEQ ID NO: 31070 - DNA, 110 bp, synthetic construct
  source 1..110: mol_type = other DNA
gtctatgcgttttgattgcatggtttttctcactctctagatacttacccgtcgtgatagaaagaatctggatttagagttacacagtcttgggttgcaggcactgtatt

SEQ ID NO: 31071 - DNA, 110 bp, synthetic construct
  source 1..110: mol_type = other DNA
agagactgaggccacattattgaggccttcattgacttttcctctggcttatctctggaaaaactggagtgagctgaggcagagatggagaggagagagctatgtggaga

SEQ ID NO: 31072 - DNA, 110 bp, synthetic construct
  source 1..110: mol_type = other DNA
tggaaaaactggagtgagctgaggcagagatggagaggagagagctatgtggagaattaagccgacatcgtgttccctggtggagttgctccgtatacacatgtgatgtg

SEQ ID NO: 31073 - DNA, 110 bp, synthetic construct
  source 1..110: mol_type = other DNA
agttatggccaagtctgaaagctgaagaccatacaccgagtttggagagctgccactggttaaggtcagacacctactgggagggctgagagcagaaagttattccactc

SEQ ID NO: 31074 - DNA, 110 bp, synthetic construct
  source 1..110: mol_type = other DNA
gttctggcccagagcccctttgctgcccagccaccctttcatcacctgcccttggcttaagggtggggctgatggaagcagcgacttgggaattgtgtctgcagtgagaa

SEQ ID NO: 31075 - DNA, 110 bp, synthetic construct
  source 1..110: mol_type = other DNA
cttaagggtggggctgatggaagcagcgacttgggaattgtgtctgcagtgagaagctgccaggcctgtgctttcgttgaaccagcagcgggctctggcctcggacgtct

SEQ ID NO: 31076 - DNA, 110 bp, synthetic construct
  source 1..110: mol_type = other DNA
tggcagtttagacagtcagcagtgggagtagcagtggtagttgtggaggcccatgctcctggacccaagcttggcgttcatcgctgcagccatagctactccaagcctga

SEQ ID NO: 31077 - DNA, 110 bp, synthetic construct
  source 1..110: mol_type = other DNA
tcccaccttgctgtgaacacatgtgctctctttttgttaatctgtagtccagttgaatggttacaacacaactcgtacttgaaccctgtggcaaagctttggttaagtaa

SEQ ID NO: 31078 - DNA, 110 bp, synthetic construct
  source 1..110: mol_type = other DNA
aatggttacaacacaactcgtacttgaaccctgtggcaaagctttggttaagtaagtaatctgtagttaagacagattgcagtggtggtgtattttaatacttcaggcag

SEQ ID NO: 31079 - DNA, 110 bp, synthetic construct
  source 1..110: mol_type = other DNA
ccaagattctggtttgaaagtgaactctttcttcttagcaagaagaggcagtactgccttgggtgcgtccaggtgcacatgacgcccagctccgctctctccttggtatc

SEQ ID NO: 31080 - DNA, 110 bp, synthetic construct
  source 1..110: mol_type = other DNA
gccttgggtgcgtccaggtgcacatgacgcccagctccgctctctccttggtatctgaccacttggttcttgttttgcagtccccagtctgtcccagaccgcctgaggat

SEQ ID NO: 31081 - DNA, 110 bp, synthetic construct
  source 1..110: mol_type = other DNA
agactgccttgttcatgaggacttggctgccaggcaatgaatggtttatttgcagtgcgccccgcagagtctagaggtagcatagcttctagacgaacctactgtctctc

SEQ ID NO: 31082 - DNA, 110 bp, synthetic construct
  source 1..110: mol_type = other DNA
tgcgccccgcagagtctagaggtagcatagcttctagacgaacctactgtctctcctgtgttttctgttctaattccatgatggtgactagtgaatgaaggggtctgagc

SEQ ID NO: 31083 - DNA, 110 bp, synthetic construct
  source 1..110: mol_type = other DNA
gcaccatgagttggtctagtttacagagagcacccaaggaaagggttgaaagctgcaataaaacaggagctgaagcccagtacggttgacctagggctgccgcccatgag

SEQ ID NO: 31084 - DNA, 110 bp, synthetic construct
  source 1..110: mol_type = other DNA
caataaaacaggagctgaagcccagtacggttgacctagggctgccgcccatgagagagggggcagggaaaagttaatacagaaggtcagccccacagtggcgttctctg

SEQ ID NO: 31085 - DNA, 110 bp, synthetic construct
  source 1..110: mol_type = other DNA
attcccaccaccaaacctggcctaagagaatagccaccgtaagatgtcagaacccctctcacaaagctctttggcacacatacacacacaccatgcaccctgcccatcat

SEQ ID NO: 31086 - DNA, 110 bp, synthetic construct
  source 1..110: mol_type = other DNA
gaatacgttgttttattaaatgctgtaaagcgttcagagagaggaaaacacactgttcccttgaataattcagagctctttcaaccagaggcctgagccaaacagtaaat

SEQ ID NO: 31087 - DNA, 110 bp, synthetic construct
  source 1..110: mol_type = other DNA
tacatgctgataatacactttgcacaattcatccagctttgggtgcttccctaatctatttgcaacaccagtgctgtggttgttgaaaggcatactatcaaacaggggga

SEQ ID NO: 31088 - DNA, 110 bp, synthetic construct
  source 1..110: mol_type = other DNA
tatcctaaattgcaaatatgacaattacgtgcttctccttccagtcattctttttcaatttccccaatacattttttttctactgcacaacatgctgacccagctacaca

SEQ ID NO: 31089 - DNA, 110 bp, synthetic construct
  source 1..110: mol_type = other DNA
tgacattcttgattttctctgagcatttttctatatcctatccttaaaaagccctgaatatcccctttacctatcttccttaagtctgacatttcccttaagctctaagc

SEQ ID NO: 31090 - DNA, 110 bp, synthetic construct; identical to SEQ ID NO: 31089
  source 1..110: mol_type = other DNA

SEQ ID NO: 31091 - DNA, 110 bp, synthetic construct
  source 1..110: mol_type = other DNA
atgccctggttttccagtgggattttctactccagataaatttgtaggtgccccagccctgtgtgtgctttgagaaatgttaagcttttagcttctctgacactctttag

SEQ ID NO: 31092 - DNA, 110 bp, synthetic construct
  source 1..110: mol_type = other DNA
gccctgtgtgtgctttgagaaatgttaagcttttagcttctctgacactctttagctggagtcccagatttcaccagaggcatgcagagcttcttccttagtaacagttt

SEQ ID NO: 31093 - DNA, 110 bp, synthetic construct
  source 1..110: mol_type = other DNA
caattccctcttactccatagactagctaatgttctcctctcatataagccttcacatcatcccccacgattagtctccgtaagatggacagcccctcattttatgttct

SEQ ID NO: 31094 - DNA, 110 bp, synthetic construct
  source 1..110: mol_type = other DNA
agagattttcagctctccttaagaaggcagatgttatattccttctgcgaagcttgatgaggcctagaaagggcttataacttagaaagattcaagatatgcattccctg

SEQ ID NO: 31095 - DNA, 110 bp, synthetic construct
  source 1..110: mol_type = other DNA
agctgtttgagataataacttttttttcaccttgttatacaataaacagagaatccactataagggtttaatgtagacacatcgtttaccatagcatacagcaatcttta

SEQ ID NO: 31096 - DNA, 110 bp, synthetic construct
  source 1..110: mol_type = other DNA
cactataagggtttaatgtagacacatcgtttaccatagcatacagcaatctttaaactctaaataatctttaagctaaagcatttaacattttttaactctgctcagct

SEQ ID NO: 31097 - DNA, 110 bp, synthetic construct
  source 1..110: mol_type = other DNA
aacaaacccaaaggcagacaaagaaggaggagacatggaagacactggacagcacacaaaaggaactctgcttcatttattctttcagctagtcaatcaagcagcaaata

SEQ ID NO: 31098 - DNA, 110 bp, synthetic construct
  source 1..110: mol_type = other DNA
acaaaaggaactctgcttcatttattctttcagctagtcaatcaagcagcaaatagttataaaaactctaataaatgcaaaatgcaagctttggtgcatcttccaatttt

SEQ ID NO: 31099 - DNA, 110 bp, synthetic construct
  source 1..110: mol_type = other DNA
aatacccactcaaagttgtagaatgaagtttggtgtggattcgaggcccaagacatcaaagctcactaaccaaggcttttagaaaaaaacaaataaatcgttctgaacac

SEQ ID NO: 31100 - DNA, 110 bp, synthetic construct
  source 1..110: mol_type = other DNA
tgacccgtgtacacgctgtggagtaatctctcctttctggccttcgaggagctgaacggagcataaagcaatgttcctgtgatccagatgagtatggagcgacctgctga

SEQ ID NO: 31101 - DNA, 110 bp, synthetic construct
  source 1..110: mol_type = other DNA
acggagcataaagcaatgttcctgtgatccagatgagtatggagcgacctgctgaagaggggactgcaggaccggacagcctgcagagactttccgttacaggaaactgt

SEQ ID NO: 31102 - DNA, 110 bp, synthetic construct
  source 1..110: mol_type = other DNA
tcttttttttttctttcttggccatccctgtgcagcatatggacctcccagtccagggatcagatccgagaatccaactaagcgcagctgcagccacgagggatccttaa

SEQ ID NO: 31103 - DNA, 110 bp, synthetic construct
  source 1..110: mol_type = other DNA
tcccagtccagggatcagatccgagaatccaactaagcgcagctgcagccacgagggatccttaacccattgtgccaggccagggatcgaactggcgtcccagcgctgcc

SEQ ID NO: 31104 - DNA, 110 bp, synthetic construct
  source 1..110: mol_type = other DNA
actattcactcacctcagacagccacataaagtaaggtgctagtgtgtccttgcttgcctgaaatgtggggctgcagaggactagggggcaagacctggtccaaatcctt

SEQ ID NO: 31105 - DNA, 110 bp, synthetic construct
  source 1..110: mol_type = other DNA
tgcctgaaatgtggggctgcagaggactagggggcaagacctggtccaaatccttccttagagcctccgtgcttagctctccatcccgtggcaaccgcatttgatggagt

SEQ ID NO: 31106 - DNA, 110 bp, synthetic construct
  source 1..110: mol_type = other DNA
gaggatgtggctcagatctgttgctgtgggtgtggcgtgggcctcagctgccactgcgatttgacccctagccctggaatgtccatttgctgcaggtgcagccataaaaa

SEQ ID NO: 31107 - DNA, 110 bp, synthetic construct
  source 1..110: mol_type = other DNA
gcgatttgacccctagccctggaatgtccatttgctgcaggtgcagccataaaaagaaaaaaaaaaaaaaaacacaaaaacaaaaaccagtaaccacggagtggaattaa

SEQ ID NO: 31108 - DNA, 110 bp, synthetic construct
  source 1..110: mol_type = other DNA
acagattttaatttggcaattgcagttttaatttccttgttatattctactctctcagccagcttctttttcctgtcagctggaatctcagtttgttcgttttgtgtgtt

SEQ ID NO: 31109 - DNA, 110 bp, synthetic construct
  source 1..110: mol_type = other DNA
gaatttacccccttaggctgtctgctataaactttacaacaaaaatacgtaactgctgattcttgtgcagctctgatgctggtgacccacaactgtttcaggctactctg

SEQ ID NO: 31110 - DNA, 110 bp, synthetic construct
  source 1..110: mol_type = other DNA
caatttttttttttcttttttggctgcctggtggcttaaggcatttctcaggccagggaccacatcagatctgcagtttcaactaacaaagcagctgtagcaatgctgat

SEQ ID NO: 31111 - DNA, 110 bp, synthetic construct
  source 1..110: mol_type = other DNA
gggaccacatcagatctgcagtttcaactaacaaagcagctgtagcaatgctgatccttaacccgccgtgccaggtggaggctctaaccgacgtcccagccctcagagat

SEQ ID NO: 31112 - DNA, 110 bp, synthetic construct
  source 1..110: mol_type = other DNA
caggcatctgggccctgccctggacctagaaatgaaatgcggatcggaatgatggcagggataatcatttaatgagtacttctggtgtgcatcagcttcagtgcttacgg

SEQ ID NO: 31113 - DNA, 110 bp, synthetic construct
  source 1..110: mol_type = other DNA
cagggataatcatttaatgagtacttctggtgtgcatcagcttcagtgcttacggctttatgtgcctgatcttatttaatcacctctagagccttggaagatattattac

SEQ ID NO: 31114 - DNA, 110 bp, synthetic construct
  source 1..110: mol_type = other DNA
gaccagcatttcacaagctctgccagcctccccgtgacaaggcaataaccttgagggaaagcacaattatttattagctgaatgtctacagcccacatacgcgaagccgg

SEQ ID NO: 31115 - DNA, 110 bp, synthetic construct
  source 1..110: mol_type = other DNA
ggaaagcacaattatttattagctgaatgtctacagcccacatacgcgaagccgggcctcgggttgggtcctgagttacaaggctgagcaaaactgctaccgtcctctct

SEQ ID NO: 31116 - DNA, 110 bp, synthetic construct; identical to SEQ ID NO: 31114
  source 1..110: mol_type = other DNA

SEQ ID NO: 31117 - DNA, 110 bp, synthetic construct; identical to SEQ ID NO: 31115
  source 1..110: mol_type = other DNA

SEQ ID NO: 31118 - DNA, 110 bp, synthetic construct
  source 1..110: mol_type = other DNA
gcgctgccctgcaaggaaagggtatatgtgcgtatccaagtgcgttgccctcagcagtatagacgtgcacacgcatatactaagacatacagcagctgactctttggaga

SEQ ID NO: 31119 - DNA, 110 bp, synthetic construct
  source 1..110: mol_type = other DNA
agtatagacgtgcacacgcatatactaagacatacagcagctgactctttggagattcctgggggttttttctttttctttcttttttttttttttttttttttggtctt

SEQ ID NO: 31120 - DNA, 110 bp, synthetic construct
  source 1..110: mol_type = other DNA
tcatcaccaaaaagaatattcattttgtgggatggaagtgttagctaataccatcacggtagtgattttgcaacagctaagtatatcacacgaatacgttgtgcccttta

SEQ ID NO: 31121 - DNA, 110 bp, synthetic construct
  source 1..110: mol_type = other DNA
acggtagtgattttgcaacagctaagtatatcacacgaatacgttgtgccctttattaaaaaaaaatggaaagaaacaaggtttatcacttataggtcctggaaattaca

SEQ ID NO: 31122 - DNA, 110 bp, synthetic construct
  source 1..110: mol_type = other DNA
tccggggaggatgtgttccacatgtaaataaagcacttggtaaaagatgaggagctatgtgaatgtcagctattacctaccacttaaaaaaaaaccagaaaagtttcatc

SEQ ID NO: 31123 - DNA, 110 bp, synthetic construct
  source 1..110: mol_type = other DNA
aattaacaggctatcctactggatggactcaactggccagctttggtttgcttattttgcagggcattttggtttgggggttgctggtacatttatttatttgtttgtcg

SEQ ID NO: 31124 - DNA, 110 bp, synthetic construct
  source 1..110: mol_type = other DNA
ggttgacattccctctagacaaggtctgaagagaggcactgtgtccagacaggctggtacccccggggcttcccaaccctcctccccagctctgctcatctctttgccag

SEQ ID NO: 31125 - DNA, 110 bp, synthetic construct
  source 1..110: mol_type = other DNA
caatctaacaatggcactgtctagtttctagtcaagaacagtgggcatccctcaccttccagagagtggtcccaaagagcctctgcagcaggtaaattagggcaaatgca

SEQ ID NO: 31126 - DNA, 110 bp, synthetic construct
  source 1..110: mol_type = other DNA
aggaggcatgtgggagggaccagaaaattgatttttgagattgaaaattcctcggcgctctttgggattgcgagagcattcttgtactccttgggatgtatggatgtatg

SEQ ID NO: 31127 - DNA, 110 bp, synthetic construct
  source 1..110: mol_type = other DNA
taatgctcatgttaccagtcagatggaggattatagtgagtatgtttagggaggtgggactctttggacttggctaagtgggctaaagaccccagcaggaggaaatttaa

SEQ ID NO: 31128 - DNA, 110 bp, synthetic construct
  source 1..110: mol_type = other DNA
gatactggattgatgacactgatctagagattttgatctagaaatctttggtaaaaccttcctaggtaaagcattaaatgttaatgaatcagtgcttttgaaattgcagc

SEQ ID NO: 31129 - DNA, 110 bp, synthetic construct
  source 1..110: mol_type = other DNA
acctgcgtgagctgtgctttgatcctggggtccggggaagattctctgcgactggggtagacaatggcacccactaaatgtgtccctgagctctgtgttgtcccccagtc

SEQ ID NO: 31130 - DNA, 110 bp, synthetic construct
  source 1..110: mol_type = other DNA
attgacagtggcggccaagcagagcaagccataccctggtatctcattgttcatagtctgttagaggctaaacagctgtgtgtcccaccctttgcggtctgtcctagcct

SEQ ID NO: 31131 - DNA, 110 bp, synthetic construct
  source 1..110: mol_type = other DNA
caggcagatgacccaggcgagataacatctaaaggggtcagcactcaatggagaaggatgcagaacccaacctcctgcctccatgagtcactgagattctacccccctgc

SEQ ID NO: 31132 - DNA, 110 bp, synthetic construct
  source 1..110: mol_type = other DNA
ggatgcagaacccaacctcctgcctccatgagtcactgagattctacccccctgccccccgccaattttccctgtaaaaactgtcatggttgagcagaatcttgggggat

SEQ ID NO: 31133 - DNA, 110 bp, synthetic construct; identical to SEQ ID NO: 31131
  source 1..110: mol_type = other DNA

SEQ ID NO: 31134 - DNA, 110 bp, synthetic construct; identical to SEQ ID NO: 31132
  source 1..110: mol_type = other DNA

SEQ ID NO: 31135 - DNA, 110 bp, synthetic construct
  source 1..110: mol_type = other DNA
agaagttgagctcccgtccttctattctgccatcttaatctatcttttatttctttaaacagaatctcattcttagtatcaagctgacagactcaggcccagagcctctt

SEQ ID NO: 31136 - DNA, 110 bp, synthetic construct; identical to SEQ ID NO: 31135
  source 1..110: mol_type = other DNA

SEQ ID NO: 31137 - DNA, 110 bp, synthetic construct
  source 1..110: mol_type = other DNA
aaaatggatcaaaggagctaccaattctgctacctcataaactcagctctgggcctgctagttatgttattactattagtgtggaaagagttttgtgatatagacaaagg

SEQ ID NO: 31138 - DNA, 110 bp, synthetic construct
  source 1..110: mol_type = other DNA
ttctttccctgttgctctaatgcattctcccctccccccataattccccctcctgtagcatcatcctttatacagtctttatatccctctatattctctctcctctcatc

SEQ ID NO: 31139 - DNA, 110 bp, synthetic construct
  source 1..110: mol_type = other DNA
tagcatcatcctttatacagtctttatatccctctatattctctctcctctcatcctcaagcttagggttggtcttggccttttgcaacatctgtggaaagcaacaatat

SEQ ID NO: 31140 - DNA, 110 bp, synthetic construct
  source 1..110: mol_type = other DNA
atcaggactgactgtaccacgcctgcatctgcaagactcctaagactctcacattctcctgcattatccatattcccctgcccaaccggctctgtgcatctcttcctctg

SEQ ID NO: 31141 - DNA, 110 bp, synthetic construct
  source 1..110: mol_type = other DNA
ctcctgcattatccatattcccctgcccaaccggctctgtgcatctcttcctctgatcccttatcattccccttcctgatttctctagaagttaggatcagtcatcagcc

SEQ ID NO: 31142 - DNA, 110 bp, synthetic construct
  source 1..110: mol_type = other DNA
gggaccagtgaaggcaaatgggaaactatcccatgcagacgtctccataatccaggaaatgccctataatgcctcaaaatgctagagctgtgcttacagctaccaggagg

SEQ ID NO: 31143 - DNA, 110 bp, synthetic construct
  source 1..110: mol_type = other DNA
ctcctgggcatatattcagagaaaaccgtaattcaaagagataccccagtgtatctcacagcattatttacaacagccaagacatggcaacgacctacatgtccatcaac

SEQ ID NO: 31144 - DNA, 110 bp, synthetic construct
  source 1..110: mol_type = other DNA
ctgactacattaaggtgaacctctctagctctattttttagattttaatttattttaattttttttcttttttgctttttagtgctgcaccctttgcatatggaggttcc

SEQ ID NO: 31145 - DNA, 110 bp, synthetic construct; identical to SEQ ID NO: 31144
  source 1..110: mol_type = other DNA

SEQ ID NO: 31146 - DNA, 110 bp, synthetic construct
  source 1..110: mol_type = other DNA
acatagtgtcagatggaccctaaacgtcaaaggtgattaggaaggagttcaaggaattagagaatgacaaggaaattaaacagcgttgagcgcctgggctccttcgtgcc

SEQ ID NO: 31147 - DNA, 110 bp, synthetic construct
  source 1..110: mol_type = other DNA
attagagaatgacaaggaaattaaacagcgttgagcgcctgggctccttcgtgccagcgtagacccttgtaggggactaaaggcaagtgttcactcccagcacctgaaga

SEQ ID NO: 31148 - DNA, 110 bp, synthetic construct
  source 1..110: mol_type = other DNA
gagttccctgtcctatgccgcaggtcttgcatttaaaagcccggagctggagttcccatcgtggctcagtggttaatgaatctgcctagaaatgataaggttgggtgttc

SEQ ID NO: 31149 - DNA, 110 bp, synthetic construct; identical to SEQ ID NO: 31148
  source 1..110: mol_type = other DNA

SEQ ID NO: 31150 - DNA, 110 bp, synthetic construct
  source 1..110: mol_type = other DNA
ctggtctcctcggctttctggcacactagaagatgacacttccccatctcatggcagacagacagggccttgcagctaggtctagccaatggattgtagatagaagggat

SEQ ID NO: 31151 - DNA, 110 bp, synthetic construct
  source 1..110: mol_type = other DNA
atgttccaagctctcccagctttctgggaacttgagctaatgcctcctgcacccgttccctgctgggagctggacttgctcaggtctctcccatctgcccttgacctttg

SEQ ID NO: 31152 - DNA, 110 bp, synthetic construct
  source 1..110: mol_type = other DNA
tcctgaaagtgtcttgggcagagagagaatcacgttacataactgagagagagtggggctccccaagcagtctggccacacttcttctcgaagacccacctctctgctct

SEQ ID NO: 31153 - DNA, 110 bp, synthetic construct
  source 1..110: mol_type = other DNA
cttggaatgcttgttctaaggagagctaggcaccctgtaagaagtctagctattgtgagtctataatattgtgaggaagcacagcctaagagaggccacgatgagagagc

SEQ ID NO: 31154 - DNA, 110 bp, synthetic construct
  source 1..110: mol_type = other DNA
acaacacaagtgtctctgtgtggaattaatggaaacacgtcctgtggagctctgcccttgctgtgatgaagggttcattcagtaacagcagtaacagattgagactgacc

SEQ ID NO: 31155 - DNA, 110 bp, synthetic construct
  source 1..110: mol_type = other DNA
ctgcccaaactgggatgggtgcagctctgcacagtctgcccttcccacactgatgggtgtttctgctgctcaaacgtgacgggccctgatagccttcctattggaattgg

SEQ ID NO: 31156 - DNA, 110 bp, synthetic construct
  source 1..110: mol_type = other DNA
ggaatgttctatcaatgtcaattaaatccttttggttgatgatgctgaattactatatacccttgctgattttgtctaattgatctaccaattgttgagaaagacgtgtt

SEQ ID NO: 31157 - DNA, 110 bp, synthetic construct
  source 1..110: mol_type = other DNA
tatacccttgctgattttgtctaattgatctaccaattgttgagaaagacgtgttgaagtctacaattattcctcctttttgttctgccagttcttgcttcatatatttt

SEQ ID NO: 31158 - DNA, 110 bp, synthetic construct
  source 1..110: mol_type = other DNA
tggaaagcaaggacagcagggaagcatctggtcataggcctctaggaacagcaccagagcaaagctccagagcactcagcgtaggatttttcaaattgcagatacagaat

SEQ ID NO: 31159 - DNA, 110 bp, synthetic construct
  source 1..110: mol_type = other DNA
aagacttaagaaggcctggcagcatcttctcttgtgtctgagagcccaaagctgccatgtaagaacttgagctactctgctgaagagaaaatatggagaggtcacatgga

SEQ ID NO: 31160 - DNA, 110 bp, synthetic construct
  source 1..110: mol_type = other DNA
catgtaagaacttgagctactctgctgaagagaaaatatggagaggtcacatggagaggagcccttgggactaaataaagaggagaaacccagttattccagcatctcgg

SEQ ID NO: 31161 - DNA, 110 bp, synthetic construct
  source 1..110: mol_type = other DNA
tggatattatatattatcagatgggggaaattagaagctgaggtgcagaagaccgctcaaagtaagactggtggactaacttatgctgaattaaggttgaaagttgtggt

SEQ ID NO: 31162 - DNA, 110 bp, synthetic construct
  source 1..110: mol_type = other DNA
caatgtattaatttcagagaagagaaaaggcggagggaattatacagagagaaatcgatctggggctgactgttagggcaaggtgagagtcccctctcaacttgggttta

SEQ ID NO: 31163 - DNA, 110 bp, synthetic construct
  source 1..110: mol_type = other DNA
cgatctggggctgactgttagggcaaggtgagagtcccctctcaacttgggtttagccctagggactggctgggtgccgaccactgagttcactgcggccccgacgtcct

SEQ ID NO: 31164 - DNA, 110 bp, synthetic construct
  source 1..110: mol_type = other DNA
ggggctcgttcctgttttcccggcctgagcatcctcagcatctctaacgaccagcgagtcgtgctgggtttttacctccctgacgctttacctacaggctcaccttgcat

SEQ ID NO: 31165 - DNA, 110 bp, synthetic construct
  source 1..110: mol_type = other DNA
caggacacaatgtattgctttctgttcttgagtcacagtggttcgatcttacacgattctgtgtttctaaggtttaatatcaggctatgttaacatggcccgtttttggc

SEQ ID NO: 31166 - DNA, 110 bp, synthetic construct
  source 1..110: mol_type = other DNA
tattgaaacgggggaagtttcaacatgatgaaacttgagttcaaggacgcttgcgtttccttgagtcgagccaatcctccctggctagtttagagttttcacctgagaat

SEQ ID NO: 31167 - DNA, 110 bp, synthetic construct
  source 1..110: mol_type = other DNA
aatgtgaaagtgccctttggggtgttttagatgatgaatcattatgagctgtttaattctgatctgagcagaaacaaatgtgcaagcccccaagacaacctcccggacta

SEQ ID NO: 31168 - DNA, 110 bp, synthetic construct
  source 1..110: mol_type = other DNA
agaaagacgagactcaagaagttcatttacaagtcattgactatgaacctctccattcagggttcatcttttcaaagttatgaagtctatatccctcagcacataattat

SEQ ID NO: 31169 - DNA, 110 bp, synthetic construct
  source 1..110: mol_type = other DNA
ttcagggttcatcttttcaaagttatgaagtctatatccctcagcacataattatctaataccctgttagttcctgtcgagactttatcacagaagaactttacctgagc

SEQ ID NO: 31170 - DNA, 110 bp, synthetic construct
  source 1..110: mol_type = other DNA
acaggtactttgacccatatgccagctgtgtcttaagctcagtgatgaagggggcaacttatcctgtaggatactcatatcatcagggttggagacagtgagaagacaca

SEQ ID NO: 31171 - DNA, 110 bp, synthetic construct
  source 1..110: mol_type = other DNA
gggtactcagaggcacctttgttcagaggtagaaagtcgtcatcttgggactacagcttagaaagcaggagaaaaattttattctcaagacgcatttactaacatactct

SEQ ID NO: 31172 - DNA, 110 bp, synthetic construct
  source 1..110: mol_type = other DNA
tttatttacaaaaaaagtgacaagctagatttctcctgtgggccactgtttgcccatctctgaaatagtttaggaggggaagggagagaccgtgacaaggagcggggcag

SEQ ID NO: 31173 - DNA, 110 bp, synthetic construct
  source 1..110: mol_type = other DNA
tccctgctggcttatacaactaactctgcaaataaaattaacctttaaaataatacgaggagttcccatcgtgccccagcaggaacaaatccaactagtatccatgaggt

SEQ ID NO: 31174 - DNA, 110 bp, synthetic construct
  source 1..110: mol_type = other DNA
acaactaactctgcaaataaaattaacctttaaaataatacgaggagttcccatcgtgccccagcaggaacaaatccaactagtatccatgaggttgtgggttcgatccc

SEQ ID NO: 31175 - DNA, 110 bp, synthetic construct
  source 1..110: mol_type = other DNA
aaggtgcctgacctcagtcagggacctcacagactgtccattccagtgggaagatgaatgcattagaatccctccacctctaaaattctattacctttcagaaattcagg

SEQ ID NO: 31176 - DNA, 110 bp, synthetic construct
  source 1..110: mol_type = other DNA
cctcttcatatcccacgagagatggaggatcttatgtgtctcatgtacctcggccttaaacacttgaaaatgtgcagctaacggcatgacaggcatgtcactgagcaggt

SEQ ID NO: 31177 - DNA, 110 bp, synthetic construct
  source 1..110: mol_type = other DNA
ttaaacacttgaaaatgtgcagctaacggcatgacaggcatgtcactgagcaggtgacattttggaaggtgctgctgctgctcagaagagcaaaaacatgtatttctatt

SEQ ID NO: 31178 - DNA, 110 bp, synthetic construct; identical to SEQ ID NO: 31176
  source 1..110: mol_type = other DNA

SEQ ID NO: 31179 - DNA, 110 bp, synthetic construct; identical to SEQ ID NO: 31177
  source 1..110: mol_type = other DNA

SEQ ID NO: 31180 - DNA, 110 bp, synthetic construct
  source 1..110: mol_type = other DNA
gtttccactgtgccacagtgggaactccagaacatctattataatgttctactttaatctagagatctactttagatctttagtgttccactcatcagagctggaaactg

SEQ ID NO: 31181 - DNA, 110 bp, synthetic construct
  source 1..110: mol_type = other DNA
aatctagagatctactttagatctttagtgttccactcatcagagctggaaactgctcacaggggtaacagcaatctgttttggagttgaaaacaagaatttctcttagg

SEQ ID NO: 31182 - DNA, 110 bp, synthetic construct
  source 1..110: mol_type = other DNA
agtttttctgtatttcaattaacttggttatacagaacacttccggagaccaacagctataaatcttgtagcttaaaagagaagaccattaccaaaataaagtaaaatca

SEQ ID NO: 31183 - DNA, 110 bp, synthetic construct
  source 1..110: mol_type = other DNA
ggagggagagtgggacggcctgggagtctggggttagtagatgcgaactaaaacatctagaatggatggtccaactgtataacacagggaacggtgtccaagctcttggg

SEQ ID NO: 31184 - DNA, 110 bp, synthetic construct; identical to SEQ ID NO: 31183
  source 1..110: mol_type = other DNA

SEQ ID NO: 31185 - DNA, 110 bp, synthetic construct
  source 1..110: mol_type = other DNA
ccatcagtttgcaggttcatcccttggtcccgctcagcgggctgaggatccagcattgtcatgagctgtggtgggcggtgaaggtcacagacacggctcggatctggcgt

SEQ ID NO: 31186 - DNA, 110 bp, synthetic construct
  source 1..110: mol_type = other DNA
ggaggatggcatctgaaggtgatagagggtgagaactgggcatcagcatcccatcccagctctgaaaggcaagagaaggcagggtggaagaaataaagaggaaacttgcc

SEQ ID NO: 31187 - DNA, 110 bp, synthetic construct
  source 1..110: mol_type = other DNA
agaaagtgatttcttttaaagactttgctgaaactgttttttgccaaaccttgaaccagatcaatgactcgttgcagtaagtatttgcatgtaaagcttttcaggcaaaa

SEQ ID NO: 31188 - DNA, 110 bp, synthetic construct
  source 1..110: mol_type = other DNA
tctgttaagcatacaacttcacttgctcttcgttttccaaagtggatgccccttctctcagctaggctgacctttatggcaattggctgagcaggtggcccgcaactgct

SEQ ID NO: 31189 - DNA, 110 bp, synthetic construct
  source 1..110: mol_type = other DNA
tttttttttttttggcaagttctgatgtagaattaaggctgtttctggtatgtgaattctgttcatttagtatgtttaccagttcttgaaccagtaccacactatttaaa

SEQ ID NO: 31190 - DNA, 110 bp, synthetic construct
  source 1..110: mol_type = other DNA
ctctgtgacatgagtccttatttatgttatagaacttgggcttctgaaactttggtttctatgtagttgctaagtgtaaggatacacggtcatttagacttgatgcatgt

SEQ ID NO: 31191 - DNA, 110 bp, synthetic construct
  source 1..110: mol_type = other DNA
tttctatgtagttgctaagtgtaaggatacacggtcatttagacttgatgcatgtttacattcacctggtcctggatagtctgtggtcacaaaggagctaaacctagtgt

SEQ ID NO: 31192 - DNA, 110 bp, synthetic construct
  source 1..110: mol_type = other DNA
ccgaggctgctctccctccttcagtagttgcctctgatgcacacagatgcccaccttcagggggcacaaagataaattcaaaaggttgactctccggtgttgacttaaaa

SEQ ID NO: 31193 - DNA, 110 bp, synthetic construct
  source 1..110: mol_type = other DNA
ttcagggggcacaaagataaattcaaaaggttgactctccggtgttgacttaaaaagtagtcgagagttaagttttatgtgggcaaaatgtggactgtattcccggaggc

SEQ ID NO: 31194 - DNA, 110 bp, synthetic construct
  source 1..110: mol_type = other DNA
tcagtcttgaaggtccagtcttagcaccttgtcacagctggcattttatgtgcaggggctccgcacctggcctttccccaggtcacccatgtgctctccccactcttcag

SEQ ID NO: 31195 - DNA, 110 bp, synthetic construct
  source 1..110: mol_type = other DNA
cgaaagtgccgtaaacatgggactcaggtcatttacaaagaggcctggaccatcgcatgatagccgtcttctctctcctcccccatgctcaccgctgcctttcttttgag

SEQ ID NO: 31196 - DNA, 110 bp, synthetic construct
  source 1..110: mol_type = other DNA
ctttctgtttacttccgagttaaaaaaaaaaaaaaaaaaaaacccattgattgtagtcctttaagacttgccttttactcagtgttatgtttctcacattatccttaggg

SEQ ID NO: 31197 - DNA, 110 bp, synthetic construct
  source 1..110: mol_type = other DNA
gtcctttaagacttgccttttactcagtgttatgtttctcacattatccttagggctgtgaggagatgagtgacatccatttgtggctgctgcttaatattccgtctgtg

SEQ ID NO: 31198 - DNA, 110 bp, synthetic construct
  source 1..110: mol_type = other DNA
ttcttcctttaataatagtatgtccaaagcatgctgggtagctggtcaatgtctgcctggctagagattatctttcccagggttccttgcagctaagttcagccgtgtga

SEQ ID NO: 31199 - DNA, 110 bp, synthetic construct
  source 1..110: mol_type = other DNA
ctgctaaaagtctgagcagatgcaccagaggaagctgtgagcccatccccacaacttatcatcgctgcctgcctcagcggctgccgttcacacgttaaattgaaagcagc

SEQ ID NO: 31200 - DNA, 110 bp, synthetic construct
  source 1..110: mol_type = other DNA
tcatgtagggggacaagggacagtcctcccactcccacccccccatcgtcatctttgcagtgctctggtctttgtgataaacggcagagggagtgagctcccaccctccc

SEQ ID NO: 31201 - DNA, 110 bp, synthetic construct
  source 1..110: mol_type = other DNA
tgcagtgctctggtctttgtgataaacggcagagggagtgagctcccaccctcccccaccttctgccaccgccactgcctttataaataatctctcacagcgcgtcctga

SEQ ID NO: 31202 - DNA, 110 bp, synthetic construct
  source 1..110: mol_type = other DNA
tgagccacaacaggaactcccttctttctttcactctttttacatatttgagcttccagctacttcaccaagaccgaagagtagacagctccctcactgaggcccgtgtt

SEQ ID NO: 31203 - DNA, 110 bp, synthetic construct
  source 1..110: mol_type = other DNA
ctgattcacatcccaaagccaaaggctgacctgggaagacagaggtgccatgaagccctagggccccaggtggggcttggttagggtgacagtcagcttgtgtcctttct

SEQ ID NO: 31204 - DNA, 110 bp, synthetic construct
  source 1..110: mol_type = other DNA
ccctagggccccaggtggggcttggttagggtgacagtcagcttgtgtcctttctaggacaatcacagggacaaggtcttctgatcccaaaccccaaccgaagtcttggg

SEQ ID NO: 31205 - DNA, 110 bp, synthetic construct
  source 1..110: mol_type = other DNA
ttacctctgcacagcccctatctcctgataaaaccgcattcacagatattgggagtcaggaccttcacgtagctttgcgggaggacgtaattcaacctataaccggtctg

SEQ ID NO: 31206 - DNA, 110 bp, synthetic construct
  source 1..110: mol_type = other DNA
gagccttgtcaaaaagcttcttggcaaatttaaatagcggcaagctctgagctcgggatcagacctgggttctagtcctgtcattggtttatcacgcaactttcgacgag

SEQ ID NO: 31207 - DNA, 110 bp, synthetic construct
  source 1..110: mol_type = other DNA
aactaagtcaacttcagtagtgaccagcttttccaattccagtagaggcatccttgcttgagttacaggaggaggttttataccctgactgcagaaagatggcttcctat

SEQ ID NO: 31208 - DNA, 110 bp, synthetic construct
  source 1..110: mol_type = other DNA
gcttgagttacaggaggaggttttataccctgactgcagaaagatggcttcctatcctctatacaactgctcaactagaagaaaactcaggtaaccctacgctaaatcaa

SEQ ID NO: 31209 - DNA, 110 bp, synthetic construct
  source 1..110: mol_type = other DNA
catcttctggtctggaagtcattcactctggtcttcctttatactcatcaggaaaaattgataaggttcattattgaattattcctagcccattacactttcgtaattgt

SEQ ID NO: 31210 - DNA, 110 bp, synthetic construct
  source 1..110: mol_type = other DNA
aggcccgctctcctttggagaagttatttattttttctaatagacactgtttatcacccacttacaggagctctgactggggcctttgtcgccctttagaccctgaaaac

SEQ ID NO: 31211 - DNA, 110 bp, synthetic construct
  source 1..110: mol_type = other DNA
acccacttacaggagctctgactggggcctttgtcgccctttagaccctgaaaactaggtcaatcccctccagaatgtacttgcaatgggaaacctgcctgctgtggcag

SEQ ID NO: 31212 - DNA, 110 bp, synthetic construct
  source 1..110: mol_type = other DNA
tgtggaaggccatctctactcccctcaactctcagaatctaaaccaggcagagtaggcacctaatcttttaatcagatttaatgaagtgtattttacatacaagaaaatt

SEQ ID NO: 31213 - DNA, 110 bp, synthetic construct
  source 1..110: mol_type = other DNA
ctactcccctcaactctcagaatctaaaccaggcagagtaggcacctaatcttttaatcagatttaatgaagtgtattttacatacaagaaaattcacccatttttatat

SEQ ID NO: 31214 - DNA, 110 bp, synthetic construct
  source 1..110: mol_type = other DNA
gtgaaaagagagctccgactctatgtatcaagtgtcttctctgtccccatcaccttaaatatcttattccatctaatcctcaatgcgaccctgtgaaatagggcagtcag

SEQ ID NO: 31215 - DNA, 110 bp, synthetic construct
  source 1..110: mol_type = other DNA
taaatatcttattccatctaatcctcaatgcgaccctgtgaaatagggcagtcagtttctatagccctcagttgcctcgtctgtaatctgggaacagggttcttagtcaa

SEQ ID NO: 31216 - DNA, 110 bp, synthetic construct
  source 1..110: mol_type = other DNA
ccctttttttttccagagtcactattttgggggttggtctctctcaccccctccttagcaaccattttaatgcgtcaacgtgcctctttcaacttgtgtatgttcccaga

SEQ ID NO: 31217 - DNA, 110 bp, synthetic construct
  source 1..110: mol_type = other DNA
tcttcagatagggaaagtaaagcttagagtttaaatagcagagctaacgtataacaaagccaggattcaaatgtggatccgtatgtccctgggcaaattactgatcctct

SEQ ID NO: 31218 - DNA, 110 bp, synthetic construct
  source 1..110: mol_type = other DNA
aaagccaggattcaaatgtggatccgtatgtccctgggcaaattactgatcctctgtgcctccgcttcctcatctgtaacatggagatgacaacaatgcctgcctcataa

SEQ ID NO: 31219 - DNA, 110 bp, synthetic construct
  source 1..110: mol_type = other DNA
ctgttattttgattataaaacactcagcttccggatgaaggtttggcattaaggtcagtcgtgcaaatgctgaatctacaccaaatgctgcttccaggcagccagagaag

SEQ ID NO: 31220 - DNA, 110 bp, synthetic construct
  source 1..110: mol_type = other DNA
agacagaggctccaagacgttgatgatcatacagtgaagcaggggctggaactccagtctgcctctgaggccccagcaccacagcctcccactccccaccatgaacacac

SEQ ID NO: 31221 - DNA, 110 bp, synthetic construct
  source 1..110: mol_type = other DNA
agtctgcctctgaggccccagcaccacagcctcccactccccaccatgaacacacgccaccagcccccatggcgacccagggcctcaacacgaggactcatcaacctggc

SEQ ID NO: 31222 - DNA, 110 bp, synthetic construct
  source 1..110: mol_type = other DNA
tcatcaaataaaaacttttttaaattaccatgctgtcatagacgaaagcacattttaacactcacacagtagctctaggaacgtaggaaggacatcatgccacagtaaag

SEQ ID NO: 31223 - DNA, 110 bp, synthetic construct
  source 1..110: mol_type = other DNA
taacactcacacagtagctctaggaacgtaggaaggacatcatgccacagtaaaggacagtccttaacgttgcataagcctagcagtatggaaaaaattcactgcatttt

SEQ ID NO: 31224 - DNA, 110 bp, synthetic construct
  source 1..110: mol_type = other DNA
aggtgaagattagtagactaaacaagttctgtgtctgtcacagaggccggcacggtggttttgtcactgtttgtgtgctgccttgtggtccagggtggcaaatccactct

SEQ ID NO: 31225 - DNA, 110 bp, synthetic construct
  source 1..110: mol_type = other DNA
ccccctccgggctcttacaggggcaccagcaccggggctcgtgggctttcacttcccaggggtctgagagtctggagaccccaggtcttaagtcctgtttgcttccagct

SEQ ID NO: 31226 - DNA, 110 bp, synthetic construct
  source 1..110: mol_type = other DNA
ctttccaaaagatctttcttagtttctgatctttcattgcatcctattattgttttatggacgcagtatccttttctctaagaaaagtgatattggtcatcattattttc

SEQ ID NO: 31227 - DNA, 110 bp, synthetic construct; identical to SEQ ID NO: 31226
  source 1..110: mol_type = other DNA

SEQ ID NO: 31228 - DNA, 110 bp, synthetic construct
  source 1..110: mol_type = other DNA
atcacccttcaataccaatttatcatgcagatctgttaacatgggatgttccagtgcaatcttggttttcttttgcagtgattcaaaggcctctgtatagttatgttgtc

SEQ ID NO: 31229 - DNA, 110 bp, synthetic construct
  source 1..110: mol_type = other DNA
aacccaaaacttgtgtaaatgttaaggtaaaacagaagactaaagaaatttcaaattctgcaagagtctgccgtagctcatgtctcctatctcctgagggtaccctttta

SEQ ID NO: 31230 - DNA, 110 bp, synthetic construct
  source 1..110: mol_type = other DNA
aagtgctgtgctcttcttgtctgttaacagccaggtacaggtatttcaagtagtacctctttgtgtagattttcctgactggctgactgtccgttcctctgttcccatac

SEQ ID NO: 31231 - DNA, 110 bp, synthetic construct
  source 1..110: mol_type = other DNA
aaaatatttcaaattgaaaatgtcagggtctctaatagctattgagatgctatggacatatacagagaaaatctaaagctggctaatattcagacacaaagtcacttatc

SEQ ID NO: 31232 - DNA, 110 bp, synthetic construct
  source 1..110: mol_type = other DNA
gggtctctaatagctattgagatgctatggacatatacagagaaaatctaaagctggctaatattcagacacaaagtcacttatcatcaattaattgatagttttagttt

SEQ ID NO: 31233 - DNA, 110 bp, synthetic construct
  source 1..110: mol_type = other DNA
gccaggtaacatatgacaattcccacggccttttttttagcctgactaaatggcaaccaagagccaaagataggttttattccgacaagattccatgctggtgactattt

SEQ ID NO: 31234 - DNA, 110 bp, synthetic construct
  source 1..110: mol_type = other DNA
gaggacagaaggagtgtgctatttttatgagcgtttgctacggaagctgtcattctaaacggccagcactaggaggccacagactcgaagattctgaaggactcatgttc

SEQ ID NO: 31235 - DNA, 110 bp, synthetic construct
  source 1..110: mol_type = other DNA
taatttgttgaaaagatttttccttcgtcattgaattgctttggcacctttattgaaaatcagttaaccacatatgtatgggtctatctcaagggaaccctaaagaatgt

SEQ ID NO: 31236 - DNA, 110 bp, synthetic construct
  source 1..110: mol_type = other DNA
agccatggataagaggcaagaaaacagaagaagtaccgagggggggtttctttttccagttttcgagcttcatggccctgccttgcatgtgtgccagcactaaccaatgg

SEQ ID NO: 31237 - DNA, 110 bp, synthetic construct
  source 1..110: mol_type = other DNA
tggtagggaagcttggtcatattagcctttctgcaaataatgattatatcattagtacaaaactatgctcccctgaaataggaaaacctacgctaattgaaagtactggt

SEQ ID NO: 31238 - DNA, 110 bp, synthetic construct; identical to SEQ ID NO: 31237
  source 1..110: mol_type = other DNA

SEQ ID NO: 31239 - DNA, 110 bp, synthetic construct; identical to SEQ ID NO: 31237
  source 1..110: mol_type = other DNA

SEQ ID NO: 31240 - DNA, 110 bp, synthetic construct; identical to SEQ ID NO: 31237
  source 1..110: mol_type = other DNA

SEQ ID NO: 31241 - DNA, 110 bp, synthetic construct
  source 1..110: mol_type = other DNA
ctgccgcctctgtctctcctgggcagggaacctctggaaatcttaattaataaatcttggccatcagggtgatttttagagggcaaggaataaggggaggtggagcagaa

SEQ ID NO: 31242 - DNA, 110 bp, synthetic construct
  source 1..110: mol_type = other DNA
taatggcagtaaagagatattctgactgatagcagttcaggacttggctctgacaatatatatcttctgggaagaggacattacagatccaaaattcaccagaacttttg

SEQ ID NO: 31243 - DNA, 110 bp, synthetic construct
  source 1..110: mol_type = other DNA
gtgtattatctgttctggaccccaagaacattgttagaggagaaaaaggaaggtctgctattcccccccccttcctcctgaatatctagggagtaaagagacatttctaa

SEQ ID NO: 31244 - DNA, 110 bp, synthetic construct
  source 1..110: mol_type = other DNA
aaacatctttctggctccatgagttcctcatttgtttttctgagtaaatgaaagcttcctagacctcctgccaggcaccagggagactggaggacacagagaaacatgcc

SEQ ID NO: 31245 - DNA, 110 bp, synthetic construct
  source 1..110: mol_type = other DNA
ttcctagacctcctgccaggcaccagggagactggaggacacagagaaacatgcctgttagatattcaacccattgatggccctggggtgcaagggaggaggaagatctg

SEQ ID NO: 31246 - DNA, 110 bp, synthetic construct
  source 1..110: mol_type = other DNA
taaatttttaaaaacagattacagaatagtatgacggcatttttattttttaaaaggctagcttgtgttgtgtgtgtgtgtgcgcgtgcgcgcatacacccacacaggag

SEQ ID NO: 31247 - DNA, 110 bp, synthetic construct
  source 1..110: mol_type = other DNA
atagtatgacggcatttttattttttaaaaggctagcttgtgttgtgtgtgtgtgtgcgcgtgcgcgcatacacccacacaggagaaaaagggaaaggtgatgaaaaaag

SEQ ID NO: 31248 - DNA, 110 bp, synthetic construct
  source 1..110: mol_type = other DNA
tttttaagtccaacatctatagtaaccaaagaaatgcttttttgtttgttttgagggccgaacatgcaggatatggaacttcctgggttaggggtcaaatcagagctaca

SEQ ID NO: 31249 - DNA, 110 bp, synthetic construct
  source 1..110: mol_type = other DNA
gacattttataccaattcttcaatagatatagtataagagtcaatagcacaagctctggagccagtgagagctgagttttttgttttttgttttctttttagggccacag

SEQ ID NO: 31250 - DNA, 110 bp, synthetic construct
  source 1..110: mol_type = other DNA
ggagcccaggtcccattgtcacccgaactcggagctgggactcttccagtcctattgaccgtcctgagcctgaggccgctagccccaccaccagaacccgcccagtgacc

SEQ ID NO: 31251 - DNA, 110 bp, synthetic construct
  source 1..110: mol_type = other DNA
acttccccaggaaggatgggagacagctgtgtcaagaacaaggaaagagcagtggtgagagatggcagtggaaagtcaagaacacagggaaaagccctgagaagtgagat

SEQ ID NO: 31252 - DNA, 110 bp, synthetic construct
  source 1..110: mol_type = other DNA
gaactgtggtctctgcccaggcaggattgtgattctgcagcctctttcaaaattcatccccacctttcagtcttgtctgttccatcagctcagagcccttcctcttatcc

SEQ ID NO: 31253 - DNA, 110 bp, synthetic construct
  source 1..110: mol_type = other DNA
aaaggaggcccctctgacaagaggagcatgagatccggggaccttattcagcctccatgccagctgtgtgtctcacagagcggagggcaactacagctctgtgcctgttt

SEQ ID NO: 31254 - DNA, 110 bp, synthetic construct
  source 1..110: mol_type = other DNA
catgccagctgtgtgtctcacagagcggagggcaactacagctctgtgcctgtttatgtctctggctaaggaattagttcttagggataaaatggcaagccacaaagcct

SEQ ID NO: 31255 - DNA, 110 bp, synthetic construct
  source 1..110: mol_type = other DNA
ggccctgtgcactctcttccccattagcgcagaaaagaccatccatcaccagcagggatggtgatgtcacagctacaagcctccgagcgagcgcacaggaagactgctct

SEQ ID NO: 31256 - DNA, 110 bp, synthetic construct
  source 1..110: mol_type = other DNA
cacaaagagcttcgtggataggacatctgaagttcacccactgtattgagaaagtaccaataccaacacaaagagcttcgtggataggacatctgataccaacacaaaga

SEQ ID NO: 31257 - DNA, 110 bp, synthetic construct
  source 1..110: mol_type = other DNA
tctgaagttcacccactgtattgagaaagtaccaataccaacacaaagagcttcgtggataggacatctgataccaacacaaagagcttcgtggataggacatctgaagt

SEQ ID NO: 31258 - DNA, 110 bp, synthetic construct; identical to SEQ ID NO: 31256
  source 1..110: mol_type = other DNA

SEQ ID NO: 31259 - DNA, 110 bp, synthetic construct; identical to SEQ ID NO: 31257
  source 1..110: mol_type = other DNA

SEQ ID NO: 31260 - DNA, 110 bp, synthetic construct
  source 1..110: mol_type = other DNA
ttctctttcatgatgtgtatatattattattatttttttctttttacagccacccctgtggcatatggacattcccggactaggggttaattcagagctgcagctgctgc

SEQ ID NO: 31261 - DNA, 110 bp, synthetic construct
  source 1..110: mol_type = other DNA
tgtatatattattattatttttttctttttacagccacccctgtggcatatggacattcccggactaggggttaattcagagctgcagctgctgcctacaccatagccac

SEQ ID NO: 31262 - DNA, 110 bp, synthetic construct
  source 1..110: mol_type = other DNA
ctagcttacttaagaagcttccagggatctgattcaagccgcagttgtgacctacgctgcagctgtggcaatgccggatccttaaccacacaggccagggatcgaacctg

SEQ ID NO: 31263 - DNA, 110 bp, synthetic construct
  source 1..110: mol_type = other DNA
agcttccagggatctgattcaagccgcagttgtgacctacgctgcagctgtggcaatgccggatccttaaccacacaggccagggatcgaacctgcgtcccagtgctcca

SEQ ID NO: 31264 - DNA, 110 bp, synthetic construct
  source 1..110: mol_type = other DNA
agacaaaaaaaaaaaaaacaaaaaaaaccagatctaccagacttctaaatagctcaagaacacttcattgtattgctatgctgtaattatacaaccagtcagctactggc

SEQ ID NO: 31265 - DNA, 110 bp, synthetic construct; identical to SEQ ID NO: 31264
  source 1..110: mol_type = other DNA

SEQ ID NO: 31266 - DNA, 110 bp, synthetic construct
  source 1..110: mol_type = other DNA
ccgctgtgtgaagaatcatttgggaaggactaggctagaggcagtcaaatcactgatggaactaattcaatggtccataagggaacactaatgggggcctgaattaagac

SEQ ID NO: 31267 - DNA, 110 bp, synthetic construct
  source 1..110: mol_type = other DNA
caaatcactgatggaactaattcaatggtccataagggaacactaatgggggcctgaattaagacaatggggatagctgggtcactttgctgtacagcagaaatggacag

SEQ ID NO: 31268 - DNA, 110 bp, synthetic construct
  source 1..110: mol_type = other DNA
ttctctggcatggaaggaaaaatggcacatggttaattcaaaccaggtggttctcttgaatgtttcttgatagtttgtgagcacccaaccagtgataacagatggatgtc

SEQ ID NO: 31269 - DNA, 110 bp, synthetic construct
  source 1..110: mol_type = other DNA
ttgaatgtttcttgatagtttgtgagcacccaaccagtgataacagatggatgtcagatcagaaacaggtatctgctcataggaacatctttcaggaacgaaaataagag

SEQ ID NO: 31270 - DNA, 110 bp, synthetic construct
  source 1..110: mol_type = other DNA
gtgacagctttaagttctcccgggacaccaggagaactgaaaggtggctcagacgcaatgtaatttctcaaccatcccaaatagccttttgaaataaacctgtccagagt

SEQ ID NO: 31271 - DNA, 110 bp, synthetic construct
  source 1..110: mol_type = other DNA
attcaactccaaatataacaactttaatggtcctcacttagctttaggattccgaatgggaaaggaatgacatacatacatacaatattatttcagggttttttttctac

SEQ ID NO: 31272 - DNA, 110 bp, synthetic construct
  source 1..110: mol_type = other DNA
ttcacagacatctcttgtagaggcaagaggtcccagagaggggcccaggattgcccatctacactccccggcaggggacacttgcttccagtcatcacctcaggaacaag

SEQ ID NO: 31273 - DNA, 110 bp, synthetic construct
  source 1..110: mol_type = other DNA
catctacactccccggcaggggacacttgcttccagtcatcacctcaggaacaagctgtgtgttcttgcccactcatgatcaatgtgcagtgaggcagctgtggccagag

SEQ ID NO: 31274 - DNA, 110 bp, synthetic construct
  source 1..110: mol_type = other DNA
cctcacagttaccagtcagattcatttccgatgcaccacaacaggaactcctcgtgctgagacatttagatttttccatatagctggctcctaaactcaaaggcaccttg

SEQ ID NO: 31275 - DNA, 110 bp, synthetic construct
  source 1..110: mol_type = other DNA
gcagcatgtttatataaatataaatatgtacgtaaatatgggtataagggtgacgacatagttatttacttcttatatgtttggtcagtggtctgggatggtcaaatgag

SEQ ID NO: 31276 - DNA, 110 bp, synthetic construct
  source 1..110: mol_type = other DNA
gccactttggaagacaacttggcagctccccagaaggctaaaaaaaaaaaaagaggtaccatgggatacagtaattccactcacagttatatacccaagagaaattaaag

SEQ ID NO: 31277 - DNA, 110 bp, synthetic construct
  source 1..110: mol_type = other DNA
gtaccatgggatacagtaattccactcacagttatatacccaagagaaattaaagcacatgccctcacaaaaacttgcacacgaatatgcatagcggcattattctcagt

SEQ ID NO: 31278 - DNA, 110 bp, synthetic construct
  source 1..110: mol_type = other DNA
ccgtggggtctgactctactttgcctccccaggtacaagagggccaggcctgctgctcaggcttggaactacccactgccctgctgcagatggagcggaggcggcgggcc

SEQ ID NO: 31279 - DNA, 110 bp, synthetic construct
  source 1..110: mol_type = other DNA
aaacctgctcttgccaaaaatcccttgcaaagaatgctccactgctcgtgagtcactttactccctcaatccgtggactatttccacttgaataaaggacatcgaactag

SEQ ID NO: 31280 - DNA, 110 bp, synthetic construct
  source 1..110: mol_type = other DNA
ctgtcactgagctactggtctctattatgacaaaaaaattccttttatgtgacaccttttttttctctcctggtggcatttactcatttgcctctgttctcccttttctt

SEQ ID NO: 31281 - DNA, 110 bp, synthetic construct
  source 1..110: mol_type = other DNA
ggtatcagtctctgtgtgagaggaagcagagagaagcaacaggacatctgatgcaactgcaaacaggagagctcccacatctcccgcaggttctcatggaaagtgctgcc

SEQ ID NO: 31282 - DNA, 110 bp, synthetic construct
  source 1..110: mol_type = other DNA
gggagacaagggaggagcgaatcccagctgcgacctttcacctactttgcgggtactccgctgtcagaggaggagctgccgggaaggcggggaagggagaaagttggaga

SEQ ID NO: 31283 - DNA, 110 bp, synthetic construct
  source 1..110: mol_type = other DNA
agccacaaagagatgaaatgcagggactcaccagagagcccccttccagtctgccccagctcccccatctcagaggccaatggcagaaaggtccccatcttgggtctttg

SEQ ID NO: 31284 - DNA, 110 bp, synthetic construct
  source 1..110: mol_type = other DNA
cctgtgtgatgttccgagcctagaggcatacagacttatcccattgcttgttattttttagaaaactccgagtccccaaagaagcagcctaagcctaagaaagccaaagt

SEQ ID NO: 31285 - DNA, 110 bp, synthetic construct
  source 1..110: mol_type = other DNA
tgtttatgcatagatatgctggcaagggatacagttcaacccatatcatttaattctttcatcacctggaatttgtttattcggatatgtcatgtgaaaagaaagtataa

SEQ ID NO: 31286 - DNA, 110 bp, synthetic construct
  source 1..110: mol_type = other DNA
gggatacagttcaacccatatcatttaattctttcatcacctggaatttgtttattcggatatgtcatgtgaaaagaaagtataattttttttcctggatagttaactga

SEQ ID NO: 31287 - DNA, 110 bp, synthetic construct
  source 1..110: mol_type = other DNA
gccacctaatagttacccgatatttatttgatggttgacagctagcacgtattgatcacctactaggccagggacagagatgagacatgcaaacacgactgaggcgggtg

SEQ ID NO: 31288 - DNA, 110 bp, synthetic construct
  source 1..110: mol_type = other DNA
caactgggcttggaggtaacacactccaccaaattaaatataatgagaattgcagcaagctttggccctgcgacctgacagcttccagagcgacccgcctggggaggaag

SEQ ID NO: 31289 - DNA, 110 bp, synthetic construct
  source 1..110: mol_type = other DNA
gaaatacagattctagattaaatcttccatcttctttctgcaggtaggtctgaaacgaaggtggctgcttgcccaagcttccagagctggcaagagctccagtcaaatgt

SEQ ID NO: 31290 - DNA, 110 bp, synthetic construct
  source 1..110: mol_type = other DNA
cgaaggtggctgcttgcccaagcttccagagctggcaagagctccagtcaaatgtgaacgcggtccatccagagccaaaccccacactcagggcacctcttccatccggg

SEQ ID NO: 31291 - DNA, 110 bp, synthetic construct
  source 1..110: mol_type = other DNA
gtgtccggctcagtcccctctgtgtgttcctctcctgctgggaccagggttaaaactactctgttgcaggccctggtcttcggacattttagggcctctgctcacctcat

SEQ ID NO: 31292 - DNA, 110 bp, synthetic construct
  source 1..110: mol_type = other DNA
cttcagcagaatcccactagggacagtgtggaacatggaggcaatcaggaccctcctgtgacctatgtcacaatgcagccagcgaggttctcagggtgggagtgccggca

SEQ ID NO: 31293 - DNA, 110 bp, synthetic construct
  source 1..110: mol_type = other DNA
ctgtgacctatgtcacaatgcagccagcgaggttctcagggtgggagtgccggcaggcaaaccgcacggcaccccagctctctgacactgaggacatttggtgcagggga

SEQ ID NO: 31294 - DNA, 110 bp, synthetic construct
  source 1..110: mol_type = other DNA
acaccagatcttcctgtccttggcagtgtggcagggaattgcctgaaatgaggcaggccaagggggcgtctggcaaagggcgtgtcatcaagcacatggtgtctagaagt

SEQ ID NO: 31295 - DNA, 110 bp, synthetic construct
  source 1..110: mol_type = other DNA
ggccaagggggcgtctggcaaagggcgtgtcatcaagcacatggtgtctagaagtcacccagcttcaaaggtgggggacacgagaaccacctcattttcagggctatacc

SEQ ID NO: 31296 - DNA, 110 bp, synthetic construct
  source 1..110: mol_type = other DNA
tccactttcaaaaacagaaataaaggcaagcaataccttcttcggatggcattttttccttagtggataccctgtaaaacagagacagagacgcagaagggccaagttta

SEQ ID NO: 31297 - DNA, 110 bp, synthetic construct
  source 1..110: mol_type = other DNA
ttccttagtggataccctgtaaaacagagacagagacgcagaagggccaagtttatccaagcccagcccaaagatgggctcatcagtcggcattacacacaggcaccgcg

SEQ ID NO: 31298 - DNA, 110 bp, synthetic construct
  source 1..110: mol_type = other DNA
tgctgcattttctgggcagctgtgatgacaagagccccctccaaaatgtaggcctagcttggggaggtgggatgttctccgcctctcaggggaataagggacaaataagc

SEQ ID NO: 31299 - DNA, 110 bp, synthetic construct
  source 1..110: mol_type = other DNA
tgcagcaaagtaacgccactccacttggtggaggggaggcgtctgctgggctctgcggttccaccacgaggacccagctgaagcccatcccaaccatctgctaatacatt

SEQ ID NO: 31300 - DNA, 110 bp, synthetic construct
  source 1..110: mol_type = other DNA
cggttccaccacgaggacccagctgaagcccatcccaaccatctgctaatacatttctgtcaccactcacctttttcccgataagcttctttcgcagaaattcccgggct

SEQ ID NO: 31301 - DNA, 110 bp, synthetic construct
  source 1..110: mol_type = other DNA
aaaaaaaaaaggcaggatcattgccacacagtgtaagtaagcttcaccaagaatcaggtaccccacttgggatgactctgaggaaatacaagtgcagatgcgctgtttct

SEQ ID NO: 31302 - DNA, 110 bp, synthetic construct
  source 1..110: mol_type = other DNA
tacaaatcgaccccaaggattttttagcaaaggattgtgggcctattcttctattaagccagcctcttccaccccatcttgaaacactttctctcacctcttaacaatga

SEQ ID NO: 31303 - DNA, 110 bp, synthetic construct
  source 1..110: mol_type = other DNA
actttagaagtaatgtgtttatgggcgctttattatacttcaagtcaggattcgtggtgtcctggaaaagtttctcaggatgtcaagctacactggatggtagggatcat

SEQ ID NO: 31304 - DNA, 110 bp, synthetic construct
  source 1..110: mol_type = other DNA
tggtaccatcactctgggtaggatgaccaagttaagagccagattcagctttgtagtctcgtcttttatcctgggaagtctggctcctgcatcacagaccacagtgcagc

SEQ ID NO: 31305 - DNA, 110 bp, synthetic construct
  source 1..110: mol_type = other DNA
agcctctgtggtctggcatgagccccccactttcactgaagctgaccttgtcttttagcgagtgatctctgaactgctgggtcttgcttttcctcttgatgataggatgc

SEQ ID NO: 31306 - DNA, 110 bp, synthetic construct
  source 1..110: mol_type = other DNA
cagaggtatagcatgctggaacttggatcgtgtgatcagtacctgaagcttggtgaaaaggactcaactgtagagaagtggcactccaagagagttggcttgaggatata

SEQ ID NO: 31307 - DNA, 110 bp, synthetic construct
  source 1..110: mol_type = other DNA
gttcaagcatttactcaagttcacatagcaagtaaattacagaattgagacttaacgccaaggtcagctacaaaacatgtgcccttaatcagcttaccttatatttgcag

SEQ ID NO: 31308 - DNA, 110 bp, synthetic construct
  source 1..110: mol_type = other DNA
gtcctcgggtgggagggaggttgcctttctacttgaaaggcccccaagtttcctgcagctcactagatccaactgggtgtaaagaaagcctggggcagagggtagagata

SEQ ID NO: 31309 - DNA, 110 bp, synthetic construct
  source 1..110: mol_type = other DNA
gcacgattagcagatagaatggcctgtaaagaaaaattaactctcaataaagacattaggaatgaaataaaatatgcagagttcatactcttgctgctgggatttttaaa

SEQ ID NO: 31310 - DNA, 110 bp, synthetic construct
  source 1..110: mol_type = other DNA
ttaggaatgaaataaaatatgcagagttcatactcttgctgctgggatttttaaaatgtaccatgaagttctagtagtaaaatttctttgaactacgtgatactccatga

SEQ ID NO: 31311 - DNA, 110 bp, synthetic construct
  source 1..110: mol_type = other DNA
gccaagttctactggatcctcaccatgatgcaaagaactcacagccaggagtacgcccattcgatccgcgtggatggggacatcattctggggggtctcttccctgtcca

SEQ ID NO: 31312 - DNA, 110 bp, synthetic construct
  source 1..110: mol_type = other DNA
ataactaaaggtaggactatggggtcttacaaacattggagacataaactatgtccaaagtgagctggaatgattcctgaaacttcaggaactctcttatggagtgagtg

SEQ ID NO: 31313 - DNA, 110 bp, synthetic construct
  source 1..110: mol_type = other DNA
ggattagttcactgtctttctctacttctttaaatattcatgacatgtgagtgcagtccatttgagtgcacattttatgaatgttatgtttcctgagtggatttgaggac

SEQ ID NO: 31314 - DNA, 110 bp, synthetic construct
  source 1..110: mol_type = other DNA
gtccatttgagtgcacattttatgaatgttatgtttcctgagtggatttgaggactctgcatgacaaaatttgtgaataaaacctttgtgaaccaaacatgtcatctggt

SEQ ID NO: 31315 - DNA, 110 bp, synthetic construct
  source 1..110: mol_type = other DNA
acaagagatgtactgggtatttatttccctcgttatctgtcagagaggggtaaccttcctggagctagctaggtggggaagacgacctgtcttaatcatatttaaattct

SEQ ID NO: 31316 - DNA, 110 bp, synthetic construct
  source 1..110: mol_type = other DNA
ttcctggagctagctaggtggggaagacgacctgtcttaatcatatttaaattctccttgggaatgagaacagtaattctggatgaatgtaacagagtctcttggttcaa

SEQ ID NO: 31317 - DNA, 110 bp, synthetic construct
  source 1..110: mol_type = other DNA
gattcctctgagctgtgctttagggccccttgcttgtgaaaggtgtcttgcctccctaggggatcttttgcaaaccagaaacggggggagaagacgtgggattcacatca

SEQ ID NO: 31318 - DNA, 110 bp, synthetic construct
  source 1..110: mol_type = other DNA
atctttccataataccatgttacactattacttcttgtgtaaacagcaatagtgctctattgtgtgctgcatccagctgaacttctctcttgtagttttttttttttttt

SEQ ID NO: 31319 - DNA, 110 bp, synthetic construct
  source 1..110: mol_type = other DNA
acaacgatgttgatgttactcaggatagcctgtgagaatacagaaaataattctcttgtttttatgaggaaactaagtgaactgtctatgtatcatactaacttagtcat

SEQ ID NO: 31320 - DNA, 110 bp, synthetic construct
  source 1..110: mol_type = other DNA
tcccattaactttttcttgtctgttagacttaaagcagacttaatgctaggctcgtcttttcttgacctgtaggcagctaccatcttgctgtgtgcttgcttgacctttt

SEQ ID NO: 31321 - DNA, 110 bp, synthetic construct
  source 1..110: mol_type = other DNA
agataaactctgcaagtttaattaggcctaagaataaactttgctcctagtgtgttctatggtgaattctgacaagaagattcatcgctcttcatcacaagttattgatc

SEQ ID NO: 31322 - DNA, 110 bp, synthetic construct
  source 1..110: mol_type = other DNA
ctactagggatgaatccaccttgcagctgtgcttggtgtccaggtgtgattccaagggcctcatctttgcaaccatgagaggatgggtctttctaagaggtcacaggaca

SEQ ID NO: 31323 - DNA, 110 bp, synthetic construct
  source 1..110: mol_type = other DNA
gtcactgaaatgttttcctttgagcatttgttttatcattacctgaaagatgaggtttttctgcgtggataatgatgacggtattttctgcctccttgcatcctttgtta

SEQ ID NO: 31324 - DNA, 110 bp, synthetic construct
  source 1..110: mol_type = other DNA
gttttcgaacctctgaattaacctgccctggaatgccctttccttcttgtgttatgagataataataaaccctctcatttttaaagctatgctgcattagattttctctt

SEQ ID NO: 31325 - DNA, 110 bp, synthetic construct
  source 1..110: mol_type = other DNA
gagataataataaaccctctcatttttaaagctatgctgcattagattttctcttatttgcagctgaaagcatactaactaatacaatgtattatcgataagtgggaagg

SEQ ID NO: 31326 - DNA, 110 bp, synthetic construct
  source 1..110: mol_type = other DNA
tcacatgggcgactaagtggaaaatggttgcttataaatgcagctgccacctccgtctgtagaatcacaggcaatggcaccatctggttcagaggctttataaagattag

SEQ ID NO: 31327 - DNA, 110 bp, synthetic construct
  source 1..110: mol_type = other DNA
aataatatttagaaacaagctataaatcaagaacagtgatcgcaagatgaatccggcttatgcattaaacacagtctgcagcctctgtgtttactgattcctggtgagga

SEQ ID NO: 31328 - DNA, 110 bp, synthetic construct
  source 1..110: mol_type = other DNA
ccagcagctaaagctccaattcaatccctagctgggaaccatatgccatggacgtggccctaaacaaacaaacaaacaaaagatcaagccactaccaaaatgttaggtaa

SEQ ID NO: 31329 - DNA, 110 bp, synthetic construct
  source 1..110: mol_type = other DNA
ggccctaaacaaacaaacaaacaaaagatcaagccactaccaaaatgttaggtaattactagaatgtacagtgtaataggactcaataaggtggaaagaaagataatgaa

SEQ ID NO: 31330 - DNA, 110 bp, synthetic construct
  source 1..110: mol_type = other DNA
ggtccacgctgcccattccacccccttaaccttctggaatctggctacttatactttcctttttcctcctaccactgtttccttcagctctgatttccacattgctaaaa

SEQ ID NO: 31331 - DNA, 110 bp, synthetic construct
  source 1..110: mol_type = other DNA
gagacctgtgtatcaatgagccatcttcaaatgtgcttctcctaaggagtccattggtaccattcagcctttaaaatatgcaattataacatttgggcctagcccattcc

SEQ ID NO: 31332 - DNA, 110 bp, synthetic construct
  source 1..110: mol_type = other DNA
tcagaagcagctccaaggcaagaatttgactttgctttaacttttttatctacgcaattaaagcttaatttttgtagtttcctctggccagcttctttacaataatctgc

SEQ ID NO: 31333 - DNA, 110 bp, synthetic construct
  source 1..110: mol_type = other DNA
tttttcactgttaagcaaacatttcccaccaatagctagcggtcctgtggtctatggggttcagttctgaaattcacagatgctaagggtcagagaaggctggaacaact

SEQ ID NO: 31334 - DNA, 110 bp, synthetic construct
  source 1..110: mol_type = other DNA
acagcatagaaattaaatctggtacaccatgagaagaaattcaagggcaagaatctgcagagagaagacaggcacaaagaaaagggattggcatcaggtgaacgtatcaa

SEQ ID NO: 31335 - DNA, 110 bp, synthetic construct
  source 1..110: mol_type = other DNA
aggctcagaaaatagagtaagccatggtttactcatgacgattcatctgtggtacttggccaagactcaagcatcttgcatcatgcagtggctccttcatgtttcttatc

SEQ ID NO: 31336 - DNA, 110 bp, synthetic construct
  source 1..110: mol_type = other DNA
gggatctgatgttatttccaggtagatggtgtcagaattgatttgatgtataaatcacacagctggtatccaagaatttcttggtagagtgcaaaacccctcttctcctg

SEQ ID NO: 31337 - DNA, 110 bp, synthetic construct
  source 1..110: mol_type = other DNA
gagaaagttgatgtatggagaggggaggtgacttgcccgaagtcataaagctaaggcaactggtagaactgggacttgaagccatgctatctggcttcagaatcagattc

SEQ ID NO: 31338 - DNA, 110 bp, synthetic construct
  source 1..110: mol_type = other DNA
atgtagttccctcctgtattctgctgagctataatttaatatagagagccagcatactattctaggcctgtagcagagacagtgactatggccctgacatcagcaaagag

SEQ ID NO: 31339 - DNA, 110 bp, synthetic construct
  source 1..110: mol_type = other DNA
gtctatccttgtgcctggaatcctttgatttggcttctgatatggtacgtcattatctactttaaaagagccacccatccttcctagctttggggaatatattttgatca

SEQ ID NO: 31340 - DNA, 110 bp, synthetic construct
  source 1..110: mol_type = other DNA
aagggagtcaggttgtaaagcttctcatttgaagtgaaatggagcatatggaatatgtaacattgggcttggtgtccctggaatagctcgcgatttgctttgggtctgaa

SEQ ID NO: 31341 - DNA, 110 bp, synthetic construct
  source 1..110: mol_type = other DNA
tgtaacattgggcttggtgtccctggaatagctcgcgatttgctttgggtctgaattcaagatccagctaaactccatattaacattgctcttgaataactagattaaac

SEQ ID NO: 31342 - DNA, 110 bp, synthetic construct
  source 1..110: mol_type = other DNA
ttttttctttttatggccccacttgcagcacatggaagttcccagactagcgggtgatttggatctgcagctggggtctatgccatagtcacggcaacaccagatctgag

SEQ ID NO: 31343 - DNA, 110 bp, synthetic construct
  source 1..110: mol_type = other DNA
tatctgttataattccttcttaatagctataaagaacatttatttagactaaggtatgatttactcagaatcgatcccaataattactagcaagggcaacgatcttgcta

SEQ ID NO: 31344 - DNA, 110 bp, synthetic construct
  source 1..110: mol_type = other DNA
tcagtaagggactctgtctgccagaccagatccaagaatttaagcccattcatcacacctttccagtgcaactgtatgtacagtgttcttaactaccaacctactgatct

SEQ ID NO: 31345 - DNA, 110 bp, synthetic construct
  source 1..110: mol_type = other DNA
cacctttccagtgcaactgtatgtacagtgttcttaactaccaacctactgatctcagatgttttgctttgccaaaattttaattacagaagatttaactttcaacatta

SEQ ID NO: 31346 - DNA, 110 bp, synthetic construct
  source 1..110: mol_type = other DNA
caaagacatttgtcctacatcctgccttcctataccctcccatcctggatctgatcccagcctttggattgaagctaccaaaatgttcattatcttaagggagatacagt

SEQ ID NO: 31347 - DNA, 110 bp, synthetic construct
  source 1..110: mol_type = other DNA
caccttactaggcaaggcatatggcccggcccactcctcaccctgcctctatagggacaagaagacaccaaacacaacatcaagggactttcatgggaacttccctatag

SEQ ID NO: 31348 - DNA, 110 bp, synthetic construct
  source 1..110: mol_type = other DNA
atatgcagtacaattttctcttatgacacagagcagcatcaggccacaactccaagtcagctatgctgtcaagaggtaaacaactgatacagttaaccattctacatgtc

SEQ ID NO: 31349 - DNA, 110 bp, synthetic construct
  source 1..110: mol_type = other DNA
ttcatcgtccagtttccaccagtgtagctatgaggcagtctccatctgttcatgtcttcatgggtggccacattttttgagctaacattatactcttccaaggatagccc

SEQ ID NO: 31350 - DNA, 110 bp, synthetic construct
  source 1..110: mol_type = other DNA
taaaattaaagccatagcttctatgttacaagtttaccgctgttttagacagcttacacagagacaagagtttctcattctaatttcactggtacagaatatggatttag

SEQ ID NO: 31351 - DNA, 110 bp, synthetic construct; identical to SEQ ID NO: 31350
  source 1..110: mol_type = other DNA

SEQ ID NO: 31352 - DNA, 110 bp, synthetic construct
  source 1..110: mol_type = other DNA
atgtagtaacctttcatgatctttcagtgaatgacttatttcataatgtgtcttctgattcattgaaaccacattttatttcagatgacaaattaggtacagggaaaaac

SEQ ID NO: 31353 - DNA, 110 bp, synthetic construct
  source 1..110: mol_type = other DNA
acaaaaagactagatgaatttgattgaagtctctggtatctacatcaagagcacacactcaacatagacaacttttaatcagattaacattacccaatactacctatctg

SEQ ID NO: 31354 - DNA, 110 bp, synthetic construct
  source 1..110: mol_type = other DNA
agatcctcaacccactgagcgaggccagttattgaacccacgacttcacagatagtagtcaggtttgtaacccactgagccaaaacaggaactcctgccaaacattatta

SEQ ID NO: 31355 - DNA, 110 bp, synthetic construct; identical to SEQ ID NO: 31354
  source 1..110: mol_type = other DNA

SEQ ID NO: 31356 - DNA, 110 bp, synthetic construct
  source 1..110: mol_type = other DNA
gagaagaaaaatccccaccagagtattagtgccacagtgaggacttgaaggaggttaattatgaaagttatatcacaagagacatgaccctcactgagcattatactgaa

SEQ ID NO: 31357 - DNA, 110 bp, synthetic construct
  source 1..110: mol_type = other DNA
taattatgaaagttatatcacaagagacatgaccctcactgagcattatactgaaaagaacacaattcctcacagcaaaaggagccgtcttattctgcataaataagcac

SEQ ID NO: 31358 - DNA, 110 bp, synthetic construct
  source 1..110: mol_type = other DNA
gaagatgtatctgttgtacagtaatttggcaagggagactcagatccaaaagagagtgatccaaagtgaagggagcagagatgggatcctgaaagcaagctggggagact

SEQ ID NO: 31359 - DNA, 110 bp, synthetic construct
  source 1..110: mol_type = other DNA
gatatatcaattaaattctgaaagttaacagtgttgaggacagcagatggaggggaaggccagccaatctggaactggccttaagtgcaagaagactgtctctggtcagc

SEQ ID NO: 31360 - DNA, 110 bp, synthetic construct
  source 1..110: mol_type = other DNA
ttgaaataaactatcatggaattagcaaatcctttgaatcccatccaggaaccactaggaaaagaagaataaatctctctgatttatagcagcaattttattcactgcat

SEQ ID NO: 31361 - DNA, 110 bp, synthetic construct
  source 1..110: mol_type = other DNA
ttttttaattttcaagaatacatttaggttataactaaaacataaccaagacttcactgggcattatatgggctagttatgacataaccacacatgctgtatagcagatt

SEQ ID NO: 31362 - DNA, 110 bp, synthetic construct
  source 1..110: mol_type = other DNA
gacacgccaccgcgagcagcaccttagtcaagacctcagagatcaaagccgctatggctcggactaaaaaagagaccacggcacagcacttagggctgcttacggctcgc

SEQ ID NO: 31363 - DNA, 110 bp, synthetic construct
  source 1..110: mol_type = other DNA
caagcaggctgcaggtggaagacagtcgttctcttcaggtcttggttcaaatgtggagatttatggcagcaggaatagaagccctcatgtgctgtggactctaactcctt

SEQ ID NO: 31364 - DNA, 110 bp, synthetic construct
  source 1..110: mol_type = other DNA
ccagcaatagaatgaggacttagaaatgtaagtgaatttctatcaacactagaaatagttttgatcatataaacagagtatgtatactccagtctttaccacacctcaac

SEQ ID NO: 31365 - DNA, 110 bp, synthetic construct; identical to SEQ ID NO: 31364
  source 1..110: mol_type = other DNA

SEQ ID NO: 31366 - DNA, 110 bp, synthetic construct
  source 1..110: mol_type = other DNA
tgtaaactctcaaagaagtttcatagtgtaattcctgtgagatctggccatgaagacctggaactcctcaacctttcagcaccattccttatacaaggaaaaatacatca

SEQ ID NO: 31367 - DNA, 110 bp, synthetic construct
  source 1..110: mol_type = other DNA
ctgacaagggagatactttagagcctattatagagtctggggaaaggaaaggatggaccttcctaagaactggattcatctctcaaacccacaatcgcagtgaggactta

SEQ ID NO: 31368 - DNA, 110 bp, synthetic construct
  source 1..110: mol_type = other DNA
tgatgttgtggtacaagctgggactaagtgtggataacagttttcagaattatctctgtcttaaatatgactctggaccagtcatttagactttaggggaaatagttcac

SEQ ID NO: 31369 - DNA, 110 bp, synthetic construct
  source 1..110: mol_type = other DNA
ctgtcttaaatatgactctggaccagtcatttagactttaggggaaatagttcactaaattactcctggaagaattggactgggtgcttctgagggtctcttcctgcaca

SEQ ID NO: 31370 - DNA, 110 bp, synthetic construct
  source 1..110: mol_type = other DNA
gagagcagagagtacagatttctaatgataccagtctatatgactgtgtggccgtttttagcaggattcacagcctaagaataagaatgaaaaagctgattggttgggga

SEQ ID NO: 31371 - DNA, 110 bp, synthetic construct
  source 1..110: mol_type = other DNA
gctgaatttttcatttaattttgattaatttaaatttaaacttaggcagctacatgtgctggtggtgtctgcattgaacattgcaattctcaagcacagccttgaccatg

SEQ ID NO: 31372 - DNA, 110 bp, synthetic construct
  source 1..110: mol_type = other DNA
attgatagtatccaacgtaaatattgtacccaaagtaaatattctttaaatcatcacaactagtttatgacgacatttttcctggcttacatggctcatgggacttcaaa

SEQ ID NO: 31373 - DNA, 110 bp, synthetic construct
  source 1..110: mol_type = other DNA
actcctggacctcagacctgagcctgggagctcagaaaatgcagatgcagttcgctatggctgatcacactcagacttacccaaacatcgcatgctctgaaatcccgtcc

SEQ ID NO: 31374 - DNA, 110 bp, synthetic construct
  source 1..110: mol_type = other DNA
caattttattggagtaacagcacaacagctctaacactccaaaaacccttgtgtagactgaaaaaagaacactttaaaattcagttttattgactgaacatcagtgactc

SEQ ID NO: 31375 - DNA, 110 bp, synthetic construct
  source 1..110: mol_type = other DNA
gactgaaaaaagaacactttaaaattcagttttattgactgaacatcagtgactcagagaagagcaagtgacctatcacaagggaaataattgatctacagactgagatc

SEQ ID NO: 31376 - DNA, 110 bp, synthetic construct
  source 1..110: mol_type = other DNA
cactgtgttctccatctctgaaagatgccaagattacttatctctgtcaaactagctgccccaagatggcagctggaagatgtttatgccctgcccgtggcaaggtgagc

SEQ ID NO: 31377 - DNA, 110 bp, synthetic construct
  source 1..110: mol_type = other DNA
ctgccccaagatggcagctggaagatgtttatgccctgcccgtggcaaggtgagccacggcaggaattacagcttgtgcttgaaaatatctacaccattatagctcactc

SEQ ID NO: 31378 - DNA, 110 bp, synthetic construct; identical to SEQ ID NO: 31376
  source 1..110: mol_type = other DNA

SEQ ID NO: 31379 - DNA, 110 bp, synthetic construct; identical to SEQ ID NO: 31377
  source 1..110: mol_type = other DNA

SEQ ID NO: 31380 - DNA, 110 bp, synthetic construct
  source 1..110: mol_type = other DNA
ttttgcacaaaatcatggtgaagcaactaatgaggcttccccctatacacactgttaccaactttcagaacaaactaagatcggtataaattttttcctgttttatatgt

SEQ ID NO: 31381 - DNA, 110 bp, synthetic construct
  source 1..110: mol_type = other DNA
taccaactttcagaacaaactaagatcggtataaattttttcctgttttatatgttctcaggccccaccacaccctcaatacatttaaatcattcttcctgaaatgtatc

SEQ ID NO: 31382 - DNA, 110 bp, synthetic construct
  source 1..110: mol_type = other DNA
taaaataatgtgtctaccacttggagtacaatctttgttattgttttctgctatagattttcatttagccttggatagtatccatattcacaaagtgctttgtagtcatt

SEQ ID NO: 31383 - DNA, 110 bp, synthetic construct; identical to SEQ ID NO: 31382
  source 1..110: mol_type = other DNA

SEQ ID NO: 31384 - DNA, 110 bp, synthetic construct
  source 1..110: mol_type = other DNA
aaatcacatccgctactgcacggcttaagaaataggtctgaataaccatcttcaatcaataaataaccaccgactatctccacattggagactgaagtccagatatcacg

SEQ ID NO: 31385 - DNA, 110 bp, synthetic construct
  source 1..110: mol_type = other DNA
ttcaaaggatggttcattcactgagtctaagcaacagagctttgagagctttatgtgtaattaaaattactacttcagggaaaaaaaaaaaaaaccaaaaacattggctg

SEQ ID NO: 31386 - DNA, 110 bp, synthetic construct
  source 1..110: mol_type = other DNA
ctccccatggtgttgtgaaggaggccaggacacctcagatttttagaggtgcaagtcagcttttctttcagatactaggtgcaaatttctagtagcctatccaagctttc

SEQ ID NO: 31387 - DNA, 110 bp, synthetic construct
  source 1..110: mol_type = other DNA
atatctcatccctatagcctgacttcccggtcctcagctgattcatgcctgagcttgcagttggcattgctactaaggtttcctacctgaaataaccctatcaaccttcc

SEQ ID NO: 31388 - DNA, 110 bp, synthetic construct
  source 1..110: mol_type = other DNA
attagaagatgaatcatctgttagtacctgcatcaatactgtcttatataatacgaacatgtaggtgttatatgtaatcctaacactggatgtcaaaaatgaaaagaatg

SEQ ID NO: 31389 - DNA, 110 bp, synthetic construct
  source 1..110: mol_type = other DNA
aaactagagttgagtcgagtggttttcagcctacagagtgtgtcacatcacctggagggctggtgaggcctgcatccagagttccccattgggcaggtctaggggagccc

SEQ ID NO: 31390 - DNA, 110 bp, synthetic construct
  source 1..110: mol_type = other DNA
ctcacttggactcttcgctttctgaggggaaaaacccatttttttccttgtccatcctttctcttctacttccactcctaggcagctctagcaaggggctgttctcagtg

SEQ ID NO: 31391 - DNA, 110 bp, synthetic construct
  source 1..110: mol_type = other DNA
atttcacaagggtaaagaacatcttagagagtggttatggtcagaatcacctttcgacccaagcaatgcctaggtaacagcttccctccctccctcggcgcgtctctccg

SEQ ID NO: 31392 - DNA, 110 bp, synthetic construct
  source 1..110: mol_type = other DNA
tgctttgttccctacaagctacttggaattcctgttgtaaatacttatatgatgtcttctcttcagtatgccttcacacccttctccccaccgcttacccctggcctcag

SEQ ID NO: 31393 - DNA, 110 bp, synthetic construct
  source 1..110: mol_type = other DNA
cttctcttcagtatgccttcacacccttctccccaccgcttacccctggcctcagatctaggatcatctctaaacactttttgaattacagaaagtccaaaggtagacca

SEQ ID NO: 31394 - DNA, 110 bp, synthetic construct
  source 1..110: mol_type = other DNA
aatcatctgattggttagaggaaacttcttcatttggttaatttgacattttccgagcttttttgtagttgttgcagtagtgggagtggtgctctttccagtttccaaag

SEQ ID NO: 31395 - DNA, 110 bp, synthetic construct
  source 1..110: mol_type = other DNA
catcttgttaataagaattatatgtgttttttctgaacccccacacagtgcctaacaatgatgcttgctcgtgacctttacctgtgaggtaagacggggcactttcattc

SEQ ID NO: 31396 - DNA, 110 bp, synthetic construct
  source 1..110: mol_type = other DNA
ataacaagatgggtaggagaatggagagttggtatagtcaggacccatacctcctttggatgggtgacccacaagagggaggaaaattacaattgcagagcttcttcaca

SEQ ID NO: 31397 - DNA, 110 bp, synthetic construct
  source 1..110: mol_type = other DNA
ttggatgggtgacccacaagagggaggaaaattacaattgcagagcttcttcacaaggagcaggggtctgagccctacatcaggcttctcagcctggggatcctgcactg

SEQ ID NO: 31398 - DNA, 110 bp, synthetic construct
  source 1..110: mol_type = other DNA
gttgaggagcagcatgaactgactgacatattgagggtccctctggcctctccatagagcacaggctgaagggagtgggcagtggggactgtgaatcaaggagccttagg

SEQ ID NO: 31399 - DNA, 110 bp, synthetic construct
  source 1..110: mol_type = other DNA
tgaattgttttgtcagatcttttctctctctgatagtggagagagagctcctgaggaacaggagattggctagatgtaaagaaaaaatagaaccattctgtaataaggga

SEQ ID NO: 31400 - DNA, 110 bp, synthetic construct
  source 1..110: mol_type = other DNA
gaatcacctggggagtctgaaaacgctgatcctgaataagggtgtatgtctagagcctgagattctgcatttcccacaagctcccagaacatattgatgctgctggtcca

SEQ ID NO: 31401 - DNA, 110 bp, synthetic construct
  source 1..110: mol_type = other DNA
gagcaatgattcctgtgggacctgaagactctgaccattataatcaaagccctgttgctggggcacatgtagctcttgggttaacttctctggcttctacatcagagtcc

SEQ ID NO: 31402 - DNA, 110 bp, synthetic construct
  source 1..110: mol_type = other DNA
aaaatctcattcattactcagttgattttaaaggatatatgaccaagttgttgtttcgatggtatgaacagagttgtggaagcctggggctggcaaagtgtggtgaaggg

SEQ ID NO: 31403 - DNA, 110 bp, synthetic construct
  source 1..110: mol_type = other DNA
ctcatctccttcagggactccgatgacatgtatattaggctgctggaagttctctctctctccccctccctgcctccctctccctggcttagctttttttttctctgagt

SEQ ID NO: 31404 - DNA, 110 bp, synthetic construct
  source 1..110: mol_type = other DNA
ctctctccccctccctgcctccctctccctggcttagctttttttttctctgagttttgtttcatacacattccattgttatttcttcaaattcacggatctttctatct

SEQ ID NO: 31405 - DNA, 110 bp, synthetic construct
  source 1..110: mol_type = other DNA
actaaatgcaacatgattttgtgggtaagactggaggacagaaaaaggacattaaggaaaagctagtgaaatctgaatacaccgcagaagttaataataacgtatcaatg

SEQ ID NO: 31406 - DNA, 110 bp, synthetic construct
  source 1..110: mol_type = other DNA
ggaaaagctagtgaaatctgaatacaccgcagaagttaataataacgtatcaatgttagaaccttgcttctgacaaacgtacacatacaccctaagtattctaattaaca

SEQ ID NO: 31407 - DNA, 110 bp, synthetic construct
  source 1..110: mol_type = other DNA
ggagcactgatggggtctctcttggggccagggcctctggttggatgtgcacagctccagggagtgttattcccattcacaattgccctggacttggtgtgtttatcacc

SEQ ID NO: 31408 - DNA, 110 bp, synthetic construct
  source 1..110: mol_type = other DNA
aggtaggtaatattttttagcttgacggtaattatactctccattgtcaccttcctcttcatttcgctttcccacttccactgatctgtcatgttcacgggggtcctatc

SEQ ID NO: 31409 - DNA, 110 bp, synthetic construct
  source 1..110: mol_type = other DNA
ggaggttcccatgtactgccttgttggcctagcgactgctgtagctttccttgtatgcttggaatctgcttcatcttggaagtgtcttgtgatacctctgccattcacac

SEQ ID NO: 31410 - DNA, 110 bp, synthetic construct
  source 1..110: mol_type = other DNA
tagaccctggacctgcttgtaagatcctgaccctggaaaactgcttaaacctatctctgcctcagatttttcatccctaagctgggataatgataactattccatatggt

SEQ ID NO: 31411 - DNA, 110 bp, synthetic construct
  source 1..110: mol_type = other DNA
ttgacctcttgattgtcacttagcactgatagctatttcctgttccatgaaacgctgtctgccttgaatgtagtgcatcccacccttctgcttttctttctgcctccttg

SEQ ID NO: 31412 - DNA, 110 bp, synthetic construct
  source 1..110: mol_type = other DNA
ttagttttctgcagagcactcagtttcctgtatttaggcgcatatatttggccatcatccccattttcacacagagcttctaaaacctcgagaatttcctaagtaatgag

SEQ ID NO: 31413 - DNA, 110 bp, synthetic construct
  source 1..110: mol_type = other DNA
aggcctgtggaaatgtacactcttacatcactggttagaaataaccttgctcaccctgagtcatgtcggtagagctgggagggaagggagtgagcaagccgtgcatgtgc

SEQ ID NO: 31414 - DNA, 110 bp, synthetic construct
  source 1..110: mol_type = other DNA
ctgagtcatgtcggtagagctgggagggaagggagtgagcaagccgtgcatgtgcctagggaaaggcttctgggcagtggaagctgcacatgcaaaggcctgaagcagca

SEQ ID NO: 31415 - DNA, 110 bp, synthetic construct
  source 1..110: mol_type = other DNA
aaggggcagagagagaggcactacaagcaacctgagcacagcttaggttgttattctgctattcattgttacagcagaatcttgattgaaagtcccgaaagtattttaag

SEQ ID NO: 31416 - DNA, 110 bp, synthetic construct
  source 1..110: mol_type = other DNA
gacccatttgctggtaactagatttattctttctcctgatcactaaacaatcctgaggctactatcctcattaacctgtgacttatctgtaggtttttaggcatataatc

SEQ ID NO: 31417 - DNA, 110 bp, synthetic construct
  source 1..110: mol_type = other DNA
tataccccaagagagttccagaaaattatttgtcactcctatttcatcatgtgcttcaataataaaaattcagtgtcaggtaactctgaatattcaccaaggaaggaaag

SEQ ID NO: 31418 - DNA, 110 bp, synthetic construct
  source 1..110: mol_type = other DNA
tggccttgaaagtgagcacccagacttgctctctcagccgttctaacagatgctggtgccctggcaaccaggttgggcttaatctcattctgttggtgttatgcgtctta

SEQ ID NO: 31419 - DNA, 110 bp, synthetic construct
  source 1..110: mol_type = other DNA
gctatagataattaacctgagacttaagaagttaagcgttgtgcctaagcttacacagccattacctctaggaagggacttaccaaaatggctagtgaactatatctcct

SEQ ID NO: 31420 - DNA, 110 bp, synthetic construct
  source 1..110: mol_type = other DNA
cagccattacctctaggaagggacttaccaaaatggctagtgaactatatctcctatgctggacagaatggaaatctggagattttatttttcttacttttcatgagacc

SEQ ID NO: 31421 - DNA, 110 bp, synthetic construct
  source 1..110: mol_type = other DNA
atctaccagctactcacagtcacatgttaagctattacctgaaattggaaagacaggtgttggaggtgtggatattactcgaggagacgtactgtcctctaaataaaagt

SEQ ID NO: 31422 - DNA, 110 bp, synthetic construct
  source 1..110: mol_type = other DNA
aggaacacctgaacaggtatttttaattaccattttataaatatggcaagcaagattcagagacattaagtagctcacctaaagctacaaagctataatcaaaatatttc

SEQ ID NO: 31423 - DNA, 110 bp, synthetic construct
  source 1..110: mol_type = other DNA
acaaagggtcacgcatgtcaggaaaagtagttatcaatttattcaggaaactacgagctcaaaagttccttaagtactacgatagtgaagaaaaattattaattgaagtt

SEQ ID NO: 31424 - DNA, 110 bp, synthetic construct
  source 1..110: mol_type = other DNA
ttgcagcatgacaaacaagctttgctcatcttcctgtaataactttaaaaatgggactgttgactgtatttcccaaccgtgacatttctcagcatgattataggatacac

SEQ ID NO: 31425 - DNA, 110 bp, synthetic construct
  source 1..110: mol_type = other DNA
ggccgctttactcctggaaacttcctggaccagattcaggtgccttcctggagtcacaggaagctgatctacggatctagagtatctactgatccctgagaggctgacca

SEQ ID NO: 31426 - DNA, 110 bp, synthetic construct
  source 1..110: mol_type = other DNA
aaaattttttctccctttgagctttcatttcagccattgatgttttccaatcccctgtatacaaatacatttaatttcatagttaaagttgtttctaactgatcacctgt

SEQ ID NO: 31427 - DNA, 110 bp, synthetic construct
  source 1..110: mol_type = other DNA
ccactttgtgcagtgggttaatgagctggctcatctctgtggaggcaccagtgcagtgggttaagaatccagagttgctgcagctgtttcgtaggttgcagctctggctt

SEQ ID NO: 31428 - DNA, 110 bp, synthetic construct
  source 1..110: mol_type = other DNA
caccccttttggaaaagacctaggaagcttccaggcccaagctttctcaccaaagggccacatcatgcccacaggtgacaccagttctcagccccagtggactctaggaa

SEQ ID NO: 31429 - DNA, 110 bp, synthetic construct
  source 1..110: mol_type = other DNA
cattagtgaagctataaggaaacggaccacaacccctgcgccaatttcaagctggtggaactgcagaatatcacagccactatggaggaaaatttgacaatgtctgataa

SEQ ID NO: 31430 - DNA, 110 bp, synthetic construct
  source 1..110: mol_type = other DNA
ctcgctgcagcaagaaagctttcgaatcttctttctggccactctctacagtctttgccaaagtccgcttctctgggttagtatccagttttccaagcttgagctggctg

SEQ ID NO: 31431 - DNA, 110 bp, synthetic construct
  source 1..110: mol_type = other DNA
tttttcccaattttatacaggtgtgagaagctttgtctcacaaattctgtgtcctgttttctcagctcattaagaggctagcattgcttgatagtaagaaacaaaaaatc

SEQ ID NO: 31432 - DNA, 110 bp, synthetic construct
  source 1..110: mol_type = other DNA
cattttgcagtttatgaatgtatgaaatcaacatgccgtacacgtaaacgtacgcaatgttttgtgtcaactacatctcaaaacagctgaaaaaaatgtttaaagagtta

SEQ ID NO: 31433 - DNA, 110 bp, synthetic construct
  source 1..110: mol_type = other DNA
cacagccgcccctagcgtaagccgccgccctgctctcttcctcaatcccagatatttacccgaaaattaggtcaccagccctagggtactcgcctcttctccccggcctc

SEQ ID NO: 31434 - DNA, 110 bp, synthetic construct
  source 1..110: mol_type = other DNA
aaccaagcatctcagtctatgcgcccagttcccacgtccgaaagctctgccggaatctacctagtcagagggtgcctagcaaggagacactgcatgttccagaaatcagc

SEQ ID NO: 31435 - DNA, 110 bp, synthetic construct
  source 1..110: mol_type = other DNA
agttttcaatttcctaaggagaaagtcaagtttatgaaatctcttcaactatcttttaatgaccccatgaccaggagaatccatgtaaacttggctgttttgatgactcg

SEQ ID NO: 31436 - DNA, 110 bp, synthetic construct
  source 1..110: mol_type = other DNA
tccatccaagggaagaaccctttgaagcatcatatcctagctcactgagatatgtgcttcaacccctgatttggacttctttgtgaagatttgagaaggtgggtagggaa

SEQ ID NO: 31437 - DNA, 110 bp, synthetic construct
  source 1..110: mol_type = other DNA
tacctattctaagaagaaacagagagctctttttaattgaaagagagtagtcagaaaatctgcaattgatcattcacttataaatttagaaatggtgatttttggagttc

SEQ ID NO: 31438 - DNA, 110 bp, synthetic construct
  source 1..110: mol_type = other DNA
aggacatggagaaatcttttggggagcaaccatttaactcagtacaccaactaaagctagaaaagaacttggcccttaaggcttgctcgcttgctcttcttgggaacccc

SEQ ID NO: 31439 - DNA, 110 bp, synthetic construct
  source 1..110: mol_type = other DNA
tgtttatttcatttagctgaaatgaagtgaaattctgagataaaataatggccaggactgtctgaaagtaaatataagaagtcgaagctagcatgtgtttcactgtcata

SEQ ID NO: 31440 - DNA, 110 bp, synthetic construct
  source 1..110: mol_type = other DNA
caaaatgttagtgagccctagcacagatttaatcattaaatttaaaaacttcatgtcagctttttcctttttcgtcttttttcctatggtagattttaaccaggtaagga

SEQ ID NO: 31441 - DNA, 110 bp, synthetic construct
  source 1..110: mol_type = other DNA
agggaggaatggaaaagatcacgagaccaaaggaccacagtgacgaagcagtcatgcctacatcaccaggagctacagtgcatggaaatggaggacagtaacagcaacag

SEQ ID NO: 31442 - DNA, 110 bp, synthetic construct
  source 1..110: mol_type = other DNA
aaatagagtcgccagccttgaggcatgatgatttcaaggtttattaacacaaatcccttgggtcttgtactttgtcttgggtgcattttgattctcttgtattctaatat

SEQ ID NO: 31443 - DNA, 110 bp, synthetic construct
  source 1..110: mol_type = other DNA
ttaacttatcatgcataaaacttttcttgcaatgacttttaagtaaagaatcaacaacatgccagggcattttgcctcttctgtccaaataaaaaggatctgatttacag

SEQ ID NO: 31444 - DNA, 110 bp, synthetic construct
  source 1..110: mol_type = other DNA
ttggccttgaggtcccagctcagtggccacttcctatgtgaagctttcccaggccacttcaccccacagcaatccttcctcctctgagctcagtattatttatttgttgt

SEQ ID NO: 31445 - DNA, 110 bp, synthetic construct
  source 1..110: mol_type = other DNA
acttcaccccacagcaatccttcctcctctgagctcagtattatttatttgttgttagcttggttctcgaattttctagtttacaatattttcatgtacaggattagtgt

SEQ ID NO: 31446 - DNA, 110 bp, synthetic construct
  source 1..110: mol_type = other DNA
agaagccacccagctgcatctgtggagctctcacttctccctgtttacatcagcgcactgagttgaggccttagaaacaggggtcagaggaactgagatattggatccta

SEQ ID NO: 31447 - DNA, 110 bp, synthetic construct
  source 1..110: mol_type = other DNA
aaggtatttttctgcgggtctcacacttgtataatatactagctcttcatggatgagtcccagggtacatgcttgtctactgaatgttactgaaaagagataatattttc

SEQ ID NO: 31448 - DNA, 110 bp, synthetic construct
  source 1..110: mol_type = other DNA
gtcatgtgtttcatgttatcttttaaacccaaggaatattattgaatatcttccctatgcaaggcagtgatttaaatgctgtagggccttggtactaagagtgtgctcag

SEQ ID NO: 31449 - DNA, 110 bp, synthetic construct
  source 1..110: mol_type = other DNA
tatgcaaggcagtgatttaaatgctgtagggccttggtactaagagtgtgctcagaaaaaccagaagcattgttgaaaatgcagaatctcagaatccgagattctgctat

SEQ ID NO: 31450 - DNA, 110 bp, synthetic construct
  source 1..110: mol_type = other DNA
gccttagtaaagattgtgtaacgttggaaaatacataaagggtatagacagatttgtgagtcaattcaaatcttgcaaaagcgtgaattctccaagtgtgtggcccttcg

SEQ ID NO: 31451 - DNA, 110 bp, synthetic construct
  source 1..110: mol_type = other DNA
gtgagtcaattcaaatcttgcaaaagcgtgaattctccaagtgtgtggcccttcgggggaagacagagatttcctgccagatatttaattgtgccctcagaattgtaagc

SEQ ID NO: 31452 - DNA, 110 bp, synthetic construct
  source 1..110: mol_type = other DNA
atgagaaaactgaggaactagaattaatttctcccacaccgtgttctggcaaccacttacatagctgaagacatagaaagacatagaaatgaaggttaacatgcatgaaa

SEQ ID NO: 31453 - DNA, 110 bp, synthetic construct
  source 1..110: mol_type = other DNA
cctgagtttgctttaaagcaaaagctggagatgatggacacacatggccaaccgcactggccagctctacacagaggacactgatagctctgtacggtatgcatttggaa

SEQ ID NO: 31454 - DNA, 110 bp, synthetic construct
  source 1..110: mol_type = other DNA
gaattcacgtatttatttcaactatttcatcactgtatgtcatattcctttgcgtgttaactctccctccaatagctgatgattgaataaatgttgaaaatcattgtctt

SEQ ID NO: 31455 - DNA, 110 bp, synthetic construct
  source 1..110: mol_type = other DNA
tccagggcagtacatacagcaggcacacgataaatggctaatcttttgttgctgcttctacaccagcagaagggatttgctaaaatcataagcttttatattaatgcagt

SEQ ID NO: 31456 - DNA, 110 bp, synthetic construct
  source 1..110: mol_type = other DNA
ttctacaccagcagaagggatttgctaaaatcataagcttttatattaatgcagtgaaaaagaatttcaaatgatggggaatttacatatttcttgttgtacaaactagg

SEQ ID NO: 31457 - DNA, 110 bp, synthetic construct
  source 1..110: mol_type = other DNA
ggatcccagcagaggatggtacaggagaacacaggtagtacaacggtaaaggagcttattctataacaaggtttctttgcacaacctttccttcttccctcctcttcaac

SEQ ID NO: 31458 - DNA, 110 bp, synthetic construct
  source 1..110: mol_type = other DNA
tactatggcttttcaaaattccacacttggttacacccaaacactgagccaaactgaagtcttatattcttttcagctatgttttcagttaagtcatggcaacaggattt

SEQ ID NO: 31459 - DNA, 110 bp, synthetic construct
  source 1..110: mol_type = other DNA
aaaataatagccccttgaatatttaatgcatctcctggtaccacttctaattcacaagtcatgaacctaaggtacaatggtaaactgtagctggaccttgttaaatatat

SEQ ID NO: 31460 - DNA, 110 bp, synthetic construct
  source 1..110: mol_type = other DNA
ccatagactcttatacatgcataatagtatttactctgttttaaattctgcacggatggaatggtattcaccgtatatttgcatctcacttgacacacccatagtaggtc

SEQ ID NO: 31461 - DNA, 110 bp, synthetic construct
  source 1..110: mol_type = other DNA
cttattgtggatacagatgatttcctacatttgtcttttaactttccaactagctttgtctgtagctaatttactaccattattgtatatttgcccttaccaatgagatt

SEQ ID NO: 31462 - DNA, 110 bp, synthetic construct; identical to SEQ ID NO: 31461
  source 1..110: mol_type = other DNA

SEQ ID NO: 31463 - DNA, 110 bp, synthetic construct; identical to SEQ ID NO: 31461
  source 1..110: mol_type = other DNA

SEQ ID NO: 31464 - DNA, 110 bp, synthetic construct; identical to SEQ ID NO: 31461
  source 1..110: mol_type = other DNA

SEQ ID NO: 31465 - DNA, 110 bp, synthetic construct
  source 1..110: mol_type = other DNA
tttgctgagatggtgctgattaataaataagcttgaaacccagcgggtcagagcagctaacaattcattgctcactgatctatgcatttttgactgcttctttactgagc

SEQ ID NO: 31466 - DNA, 110 bp, synthetic construct
  source 1..110: mol_type = other DNA
gctaacaattcattgctcactgatctatgcatttttgactgcttctttactgagctatatggactggtttcctgagattacttctgctggattctgctgggattggccac

SEQ ID NO: 31467 - DNA, 110 bp, synthetic construct
  source 1..110: mol_type = other DNA
aacaaacattaattaagtcgcacaatagctctgtaagggaaaacatcattatcgcaatcctggaattgaatagatagttgaacaggactaataatgatggggaacccatt

SEQ ID NO: 31468 - DNA, 110 bp, synthetic construct
  source 1..110: mol_type = other DNA
aaaaagcactggcagaagcaccaagagaaggagggtgataaggcaaatcaccgttctcttctgggctcttctttggctggctatgtcccatgacagctctctctgtctgg

SEQ ID NO: 31469 - DNA, 110 bp, synthetic construct
  source 1..110: mol_type = other DNA
ctcttctgggctcttctttggctggctatgtcccatgacagctctctctgtctgggttattctacaaatttctctgcccatcacttaagcctcagtatgtttctggtgta

SEQ ID NO: 31470 - DNA, 110 bp, synthetic construct
  source 1..110: mol_type = other DNA
gttcctttaagttcatttgataaagacaaaatctacactataacccttgtcatgctcacatgtttctcttattgtatggtaattcccttaactgtccctgagggatgttt

SEQ ID NO: 31471 - DNA, 110 bp, synthetic construct
  source 1..110: mol_type = other DNA
agcctggaatgtctcccattcctcaccaggccaccatataacctgttccccattcaaataaggaatcctgcccaagaccaatcagaagttcaaattgggtctcctctcag

SEQ ID NO: 31472 - DNA, 110 bp, synthetic construct
  source 1..110: mol_type = other DNA
atataacctgttccccattcaaataaggaatcctgcccaagaccaatcagaagttcaaattgggtctcctctcaggtcccatcatgggatataaagactattgcagaatg

SEQ ID NO: 31473 - DNA, 110 bp, synthetic construct
  source 1..110: mol_type = other DNA
atacacagatttgtataaccaacatcataatgtagatatgagactgttacatggcacaaaaatctctctcaggatatcctttcataatcaaacatatgcctagctgacta

SEQ ID NO: 31474 - DNA, 110 bp, synthetic construct; identical to SEQ ID NO: 31473
  source 1..110: mol_type = other DNA

SEQ ID NO: 31475 - DNA, 110 bp, synthetic construct
  source 1..110: mol_type = other DNA
tctggaaatatttttaagtctgttctggatgttctagctgtgtttttattcatccaaatatttataaattatcaagattaagattcaatcaggagttcccgacatggtgc

SEQ ID NO: 31476 - DNA, 110 bp, synthetic construct
  source 1..110: mol_type = other DNA
tgctagcatacctcacttctagcacatagtatggcagctactcttctatggatctttttttcctgatacttcctatgatgattaattttttgtgtcaatttgaatggtcc

SEQ ID NO: 31477 - DNA, 110 bp, synthetic construct
  source 1..110: mol_type = other DNA
ggaaacttagggattttacctgaccaaagtactttataaaagaatgtcagtttcgaaaacctgttgagcttggagaacgccaaaactgtgtcaggacagtactatccaag

SEQ ID NO: 31478 - DNA, 110 bp, synthetic construct
  source 1..110: mol_type = other DNA
acacagacattaatataggagctataaatgcttaaaatagcagctgtcttatagcatgcaattaatggtatttgctagtatgatatttgaataggagactgtgacctaat

SEQ ID NO: 31479 - DNA, 110 bp, synthetic construct
  source 1..110: mol_type = other DNA
tcttctaccttgagcattccctgtgcctgacttccagtacagggccaacaaaacgaatgcctatgcatagagttatttctggaactgctgccgtgcccttggaagtccct

SEQ ID NO: 31480 - DNA, 110 bp, synthetic construct
  source 1..110: mol_type = other DNA
ccatcacagacatccccttctctgaattcagattttacaaccatgcttactttgtcttcttttggttcagcttcctcaccctttctttgatgtttatatcttgtatttct

SEQ ID NO: 31481 - DNA, 110 bp, synthetic construct
  source 1..110: mol_type = other DNA
tggtggtatgaaaaatatagttaccttctgaacaacctgtaggtgaaaagaaacttctggatcatatcactgaaatatttaaattgtaactttgaagctttgtgtttatt

SEQ ID NO: 31482 - DNA, 110 bp, synthetic construct
  source 1..110: mol_type = other DNA
ataaagggagtgtgggacatgctcatgtcttgaagaagctgctcatttcacatctgctcacatttcactgtccagaacatataaccacacccagctgcaaggtaaaatag

SEQ ID NO: 31483 - DNA, 110 bp, synthetic construct
  source 1..110: mol_type = other DNA
gctcacatttcactgtccagaacatataaccacacccagctgcaaggtaaaataggaactgtagctttgtgggggaagggtgtgtgtgcgtgtgcagaaaagagtgcaca

SEQ ID NO: 31484 - DNA, 110 bp, synthetic construct
  source 1..110: mol_type = other DNA
cataatcactgattcccacgagtaatgctatggacaggaaagtgttccacctgcaaagtatggtattgaaacagaaaaagctaaaaatcagtgcttaaagagacagtatg

SEQ ID NO: 31485 - DNA, 110 bp, synthetic construct
  source 1..110: mol_type = other DNA
aagtatggtattgaaacagaaaaagctaaaaatcagtgcttaaagagacagtatggtttcctggactgcagcattcccttgtaatttgattgaatatactaaataccaag

SEQ ID NO: 31486 - DNA, 110 bp, synthetic construct
  source 1..110: mol_type = other DNA
ctaggcttcttctctcatgtttttgatcactactgtctttttagttgaaatagtagcttcagagctgtaagagatccaatcacagctatttttttttttaatattgttga

SEQ ID NO: 31487 - DNA, 110 bp, synthetic construct
  source 1..110: mol_type = other DNA
atcaaaacaggcttaagtggaaattcccaaggcattactgaagagagagcaataatctttcatcattttattcttaacagaagggaaattgaccatttctggaacttgtt

SEQ ID NO: 31488 - DNA, 110 bp, synthetic construct
  source 1..110: mol_type = other DNA
ttttgccttacacttcaatttctaaagataagaagtagctttctctttagagacaagaacaaatgcttcaaatgtgaggtgccttcataactcaaattatctagaaactt

SEQ ID NO: 31489 - DNA, 110 bp, synthetic construct
  source 1..110: mol_type = other DNA
ctgtgggatcaaatgggacttagcacatagcattacctctgtcacatcctattgcataaaaggccatgcaagaatccacttatagtgatttggttaaggtttaaaattta

SEQ ID NO: 31490 - DNA, 110 bp, synthetic construct
  source 1..110: mol_type = other DNA
ataaaaggccatgcaagaatccacttatagtgatttggttaaggtttaaaatttatgaaggccaaatatccaacatgccatatacagcatatggagacatattacgaaca

SEQ ID NO: 31491 - DNA, 110 bp, synthetic construct
  source 1..110: mol_type = other DNA
gcagaggctcatcccaggtgtggtagccacaagcacttgcaccctgattgctctcacactagctcattcaaagggtggaagttctacgtcaggaaaggcaagcttagaag

SEQ ID NO: 31492 - DNA, 110 bp, synthetic construct
  source 1..110: mol_type = other DNA
ttgttttgaatgcacacttagcatgcagagattcctaggccatggactgaacctggagcaaacctagctacttaccatgacaatactggatacataacccaccgtaccac

SEQ ID NO: 31493 - DNA, 110 bp, synthetic construct
  source 1..110: mol_type = other DNA
tgcctggtgactgataggtcatcttctctgggctggcttagaggaaatgggacttctcagtgtgaaactgtccctcatgctgtggagaatttccaggctgggggcactct

SEQ ID NO: 31494 - DNA, 110 bp, synthetic construct
  source 1..110: mol_type = other DNA
atcatagtgagattaaccagcctgaacttctaacttagagtttgcaatgttcaacgcataagtcattatagtttaagatagggtttctaataggcaacaaccctaaaaag

SEQ ID NO: 31495 - DNA, 110 bp, synthetic construct
  source 1..110: mol_type = other DNA
gcataagtcattatagtttaagatagggtttctaataggcaacaaccctaaaaagaagtcagaagatttgaattactcttgctggtcccaccaattacgagacgtgatgt

SEQ ID NO: 31496 - DNA, 110 bp, synthetic construct
  source 1..110: mol_type = other DNA
ttcatttattttccatgaaattgaatgcactgaaactgcagctcccaggactccacaaaaatccatttaacatatgaagacaatatgtaatagacaggaattacattctt

SEQ ID NO: 31497 - DNA, 110 bp, synthetic construct
  source 1..110: mol_type = other DNA
gttttcagggagttaacttcatgaaaaagccacactttatgtgttaaagaaaggttctaggctttaaaaagcaattaatgcagaaagtagacaaataaattatgactttc

SEQ ID NO: 31498 - DNA, 110 bp, synthetic construct
  source 1..110: mol_type = other DNA
aaagccacactttatgtgttaaagaaaggttctaggctttaaaaagcaattaatgcagaaagtagacaaataaattatgactttcaaatacacattgctgtgcttagaac

SEQ ID NO: 31499 - DNA, 110 bp, synthetic construct
  source 1..110: mol_type = other DNA
atttttcagcttatattacttagtattcctacagaaaaaaaaaaaaaaagtgcgtcctccccaagtctgtattccttcagtgatctggccttcgtctttgcagatggaac

SEQ ID NO: 31500 - DNA, 110 bp, synthetic construct
  source 1..110: mol_type = other DNA
tttactataacttttttcagatttccaattttctttccttgactttaaatcctttggaaggcaagcttcaacagctaattaaagaagagactgtgtgtaaactattgaga

SEQ ID NO: 31501 - DNA, 110 bp, synthetic construct; identical to SEQ ID NO: 31500
  source 1..110: mol_type = other DNA

SEQ ID NO: 31502 - DNA, 110 bp, synthetic construct; identical to SEQ ID NO: 31500
  source 1..110: mol_type = other DNA

SEQ ID NO: 31503 - DNA, 110 bp, synthetic construct; identical to SEQ ID NO: 31500
  source 1..110: mol_type = other DNA

SEQ ID NO: 31504 - DNA, 110 bp, synthetic construct
  source 1..110: mol_type = other DNA
ttgtcaaacagttacctaaactgataaaagcttgcatttgtggagatgattcatattaaagaaggggccttggctctaggaaagaattcttcaaggagactttgtctagc

SEQ ID NO: 31505 - DNA, 110 bp, synthetic construct
  source 1..110: mol_type = other DNA
gtggtggtgaccaacattgggttccatggccatgtgtatctttataagggaaatacagaaggtgtatttaagttccacttttccaattaatatgcaaacccttcggttaa

SEQ ID NO: 31506 - DNA, 110 bp, synthetic construct
  source 1..110: mol_type = other DNA
cagaaggtgtatttaagttccacttttccaattaatatgcaaacccttcggttaatcatataaaaatatcaggtttgaactttgcaacctggaaacgtaatattacacag

SEQ ID NO: 31507 - DNA, 110 bp, synthetic construct
  source 1..110: mol_type = other DNA
gactatccaaggaaacagtaagtgctgtgatgttttcctaaaaagctcgtcactggactaacgcttctcaaaatccatcgtgggaaacagcagtcaatactcgttacagg

SEQ ID NO: 31508 - DNA, 110 bp, synthetic construct
  source 1..110: mol_type = other DNA
tgtcatgctatttgaaatgatccttctgaccgaatcattgaaatacaccaggagaggaatactcaagtagataaaaaatacccaaggacttaccatcatactttgctaag

SEQ ID NO: 31509 - DNA, 110 bp, synthetic construct
  source 1..110: mol_type = other DNA
gggtggtcaagaatgggagattggaggagggaagctaaatcactctcccagacatcaggcctctgtctagaactgctcaggggccagacacaggcattggaggctctact

SEQ ID NO: 31510 - DNA, 110 bp, synthetic construct
  source 1..110: mol_type = other DNA
atattccatgactggcccttgaagaatttaatttagggtcatagaaaaggtgctaaattgttctataaaatgactaaaactatcttcgcgtggaagtcccttataaaaat

SEQ ID NO: 31511 - DNA, 110 bp, synthetic construct; identical to SEQ ID NO: 31510
  source 1..110: mol_type = other DNA

SEQ ID NO: 31512 - DNA, 110 bp, synthetic construct
  source 1..110: mol_type = other DNA
aataagtcccaataaggaagttccttatactatattcaaactgatgatttagtaggatctgaaataacacgataactagttgctgtcagaggtctttgttgggctattac

SEQ ID NO: 31513 - DNA, 110 bp, synthetic construct
  source 1..110: mol_type = other DNA
gatctgaaataacacgataactagttgctgtcagaggtctttgttgggctattacttgctatgtttaggcatttgacaacaaataatcaagtccagacatgttagtacat

SEQ ID NO: 31514 - DNA, 110 bp, synthetic construct
  source 1..110: mol_type = other DNA
cactgtgtgctgttcctgatatgtttgttttcaacttcgcttttattaaaatttatttttcattctaagatttgaattaaaaaactcccaacaaacaaaagccaggacca

SEQ ID NO: 31515 - DNA, 110 bp, synthetic construct; identical to SEQ ID NO: 31514
  source 1..110: mol_type = other DNA

SEQ ID NO: 31516 - DNA, 110 bp, synthetic construct
  source 1..110: mol_type = other DNA
caagtcatgacaagcccaggtgctccacgtggtctgacaaagcacatggtagcctgacttccgccttttcaatatctctgggaactatttgcctgaaatgagaacagtga

SEQ ID NO: 31517 - DNA, 110 bp, synthetic construct
  source 1..110: mol_type = other DNA
ctgagatgattgttattacttttaattcttgaaaagagaaaacagagatccagaactgggatgtgaatgaagtcttcagatgcattccaaagcttttcacagagctgcct

SEQ ID NO: 31518 - DNA, 110 bp, synthetic construct
  source 1..110: mol_type = other DNA
ctgggatgtgaatgaagtcttcagatgcattccaaagcttttcacagagctgcctcccaattcaacataatttttctatgatggtttggaagataggttggaaacaaaca

SEQ ID NO: 31519 - DNA, 110 bp, synthetic construct
  source 1..110: mol_type = other DNA
tggaaaggcagacgttttggtcttacaaccctcttacgaggttatttagttacatggaagctggtctttggtttctcttgatcttctgtgttgattctgggtccgccgag

SEQ ID NO: 31520 - DNA, 110 bp, synthetic construct
  source 1..110: mol_type = other DNA
atacacacccaaaatgtcctacatgaaagagagaacttggttagtgctacaatgctttaattgtgcagtattatttaataagctcttcacaatcttcatttcctttattt

SEQ ID NO: 31521 - DNA, 110 bp, synthetic construct
  source 1..110: mol_type = other DNA
tctttcatggaatcgctgagttcagatttctggtgtctcaaattgctatggctatgtgttttaaaagtataaaattgcatattgttttgaaagtatagtaaactcacaaa

SEQ ID NO: 31522 - DNA, 110 bp, synthetic construct; identical to SEQ ID NO: 31521
  source 1..110: mol_type = other DNA

SEQ ID NO: 31523 - DNA, 110 bp, synthetic construct
  source 1..110: mol_type = other DNA
ggagtgaccattgcccaaagtttgtgggcctggaaagctggtatcagcatccaaaattgacttagcaaactttaccctcataggaaatgtcaccagaaactgatgcttat

SEQ ID NO: 31524 - DNA, 110 bp, synthetic construct
  source 1..110: mol_type = other DNA
tttaatgtgcttctggggtttagaaccactgcactaaaggccaggttcataagatgggcaagagctgggaggatggactgagagcaaggacagagtcatgagaaaagtac

SEQ ID NO: 31525 - DNA, 110 bp, synthetic construct
  source 1..110: mol_type = other DNA
cctgactacttttttgggagtttagaaaggagactattagaaggctcttagagagatctgaaagaggtgatgttggccaacagaccagtatcaacctacagtgctaggac

SEQ ID NO: 31526 - DNA, 110 bp, synthetic construct
  source 1..110: mol_type = other DNA
cttttctgtcttaagtcttcactgcccaggcctatcctgttgtcattgctacctgatggctaccctacattcaggagtagaaggcatctctaaagagctcattgtctctt

SEQ ID NO: 31527 - DNA, 110 bp, synthetic construct
  source 1..110: mol_type = other DNA
ttttatagacttaaccagtatagctgaggagaggagtattatgaggatatagtagtttaactcaaactgctttcaaaagttcggtaagaacaaaaatttctaaatgtaca

SEQ ID NO: 31528 - DNA, 110 bp, synthetic construct
  source 1..110: mol_type = other DNA
tttaactcaaactgctttcaaaagttcggtaagaacaaaaatttctaaatgtacactgtccagtttgtaactgctgatatctttttcaccagaaggtctcaaacacatca

SEQ ID NO: 31529 - DNA, 110 bp, synthetic construct
  source 1..110: mol_type = other DNA
gtattcactcataaaggatttgggcttcctgaataagtttttcccattgaatgtgtcattgacttagcttccaccatctgaaaatttgaattatgcagaaaaaatttctc

SEQ ID NO: 31530 - DNA, 110 bp, synthetic construct
  source 1..110: mol_type = other DNA
tggcacctcagtagggcagttcttgttttcaactcaaaatatgagggatttggttgagaaacagaaagggttttgtctttagcaggctgacatggagctgctgctggctg

SEQ ID NO: 31531 - DNA, 110 bp, synthetic construct
  source 1..110: mol_type = other DNA
gagaaacagaaagggttttgtctttagcaggctgacatggagctgctgctggctgcaaggccaagaatcaatgtgatgtggagcaactcgttaaggagagaactttctct

SEQ ID NO: 31532 - DNA, 110 bp, synthetic construct
  source 1..110: mol_type = other DNA
atgtccttacaaaataaccttcttctgtagagaaattattgcaataatgttcataaaagtgtttttttagctaaattatgtatcaggccacatggtgattcaacatcttc

SEQ ID NO: 31533 - DNA, 110 bp, synthetic construct
  source 1..110: mol_type = other DNA
tgctttgacttcaagatgtagactcacaccttaacctctttacttcaggactgtcctgtggcttctttggcaagtactacccagcttatgcctctctgcgttcttcctgt

SEQ ID NO: 31534 - DNA, 110 bp, synthetic construct
  source 1..110: mol_type = other DNA
ccgatatatcagtttgggtgcacggactaccatatgcctttaagtaatacatttaaaatagctattgttgtttaggagttgccgatgtggggcacaatgggttgaggatc

SEQ ID NO: 31535 - DNA, 110 bp, synthetic construct
  source 1..110: mol_type = other DNA
aaatagctattgttgtttaggagttgccgatgtggggcacaatgggttgaggatctggcattgtctctgtagtgtcaatggcacagtgggttggggatccagggttgcca

SEQ ID NO: 31536 - DNA, 110 bp, synthetic construct
  source 1..110: mol_type = other DNA
ttggttacatatttatcatgctgtactagattggccacagtgtaaaagacggattaagtttcagttctcattgaattcattgtctagctagtgagtgggtaaaaaaacaa

SEQ ID NO: 31537 - DNA, 110 bp, synthetic construct
  source 1..110: mol_type = other DNA
aagtttcagttctcattgaattcattgtctagctagtgagtgggtaaaaaaacaaagggccagcattctttgatagggcagtgttgctgaaactatagggagctaacaaa

SEQ ID NO: 31538 - DNA, 110 bp, synthetic construct
  source 1..110: mol_type = other DNA
atctccactgatagtttgtcagtttcaatttgagttaacttactgtatatcactgcctcaaagtctcttatggcagtaagctatggaaatcattgagctcattctttctc

SEQ ID NO: 31539 - DNA, 110 bp, synthetic construct
  source 1..110: mol_type = other DNA
tatctcttgtctcctaagggtgtaacaaagagtaaatgaaataattgaaatgtgtgctcaaagcttagcacagtgcccagtgcctggtgcatattattattgttatcatt

SEQ ID NO: 31540 - DNA, 110 bp, synthetic construct
  source 1..110: mol_type = other DNA
aaagttagcacaaggacaaagcttatagatgtgggaaggaactttgagaattccagagagttgtcatgactggaacactattatcacctaaatcctgccttatcacatgt

SEQ ID NO: 31541 - DNA, 110 bp, synthetic construct
  source 1..110: mol_type = other DNA
gagagttgtcatgactggaacactattatcacctaaatcctgccttatcacatgtcttttctgtggtttaagcaaattctcatttaatattttagccagtttgggtggga

SEQ ID NO: 31542 - DNA, 110 bp, synthetic construct
  source 1..110: mol_type = other DNA
aaatcttgtgtggcatttcatccactttcagctatcatgtgtactgatgttctggaagtcaggtgctactcagataggtaagactattgcatagctacccatctttaaaa

SEQ ID NO: 31543 - DNA, 110 bp, synthetic construct
  source 1..110: mol_type = other DNA
aagtcaggtgctactcagataggtaagactattgcatagctacccatctttaaaaacaatccatacaaatttaaaacagaaatgaaacctattgctgccatgaagctgaa

SEQ ID NO: 31544 - DNA, 110 bp, synthetic construct
  source 1..110: mol_type = other DNA
atatgctattcaattgtccattgcatctctctataccctctattccagtgatttctaaacaaaaaagttgatagcaaggacgttttcattatgatttggtgtatttgtga

SEQ ID NO: 31545 - DNA, 110 bp, synthetic construct; identical to SEQ ID NO: 31544
  source 1..110: mol_type = other DNA

SEQ ID NO: 31546 - DNA, 110 bp, synthetic construct
  source 1..110: mol_type = other DNA
aaggaagcagagcattcatgggagcttccttggtcttacccataactaccttcgtgttaggtaatgtagtagaaggagttggaagcagactttgagagagaaacttgaac

SEQ ID NO: 31547 - DNA, 110 bp, synthetic construct
  source 1..110: mol_type = other DNA
tcaagagtgtgtttgtgtgtgtatgtgtgtgtcctctgaagtccagtggatctttgatttatacctttcatacttaactcttcctagtaataattctgccacctgtctgt

SEQ ID NO: 31548 - DNA, 110 bp, synthetic construct
  source 1..110: mol_type = other DNA
gatttatacctttcatacttaactcttcctagtaataattctgccacctgtctgtcatagctcatacatatcttaccttacctccttgatacaagttctctcagggatag

SEQ ID NO: 31549 - DNA, 110 bp, synthetic construct
  source 1..110: mol_type = other DNA
gaaaaaggatggtttattacttgacaataacagtagctagagtaacagctggttatggaaagagggtcagaggattctgtacatgcagtcaggagccttagaggagagga

SEQ ID NO: 31550 - DNA, 110 bp, synthetic construct
  source 1..110: mol_type = other DNA
cactatgagcatcttgtccaaactctatattcatgacgtcacttggtcgcttggggcacatgttgtaaactgagctccctcccacctcagtttttggaacacttataagt

SEQ ID NO: 31551 - DNA, 110 bp, synthetic construct
  source 1..110: mol_type = other DNA
aggtagaaatgaactctactgtcttttagggaatcttagtcttagaagctggtgtccagaggtctcagtgtgatcctggtggtggtcttctggcttatgggatcttaact

SEQ ID NO: 31552 - DNA, 110 bp, synthetic construct
  source 1..110: mol_type = other DNA
atagacattttaaaagaatttagacttagctctgtcttgtgtatgtggatgcacgtatgtctgtacaatgtacatgattttccctcttcttaagataataaaaagcaaaa

SEQ ID NO: 31553 - DNA, 110 bp, synthetic construct
  source 1..110: mol_type = other DNA
taacagtacactgttcattcatccttccatgaaaaccagctcattgagaagattgaccatttaggatctttcttttgctttctttctgtccctctccagtgaattgcctg

SEQ ID NO: 31554 - DNA, 110 bp, synthetic construct
  source 1..110: mol_type = other DNA
acaattttacatacagttcctttggtataaaagcccacttctgcattccttcctgggccccatttttgtccatcacaaacatcatcaaggacctttaaagctttcttctc

SEQ ID NO: 31555 - DNA, 110 bp, synthetic construct
  source 1..110: mol_type = other DNA
ggccccatttttgtccatcacaaacatcatcaaggacctttaaagctttcttctcagagaggttccttgtcttttgaagggcaagcaagcctttcaaactaacactttta

SEQ ID NO: 31556 - DNA, 110 bp, synthetic construct
  source 1..110: mol_type = other DNA
agaggcaggtgatgtcgtcagttcaagtcagcaggcagaggcattcagagtcagactgcaagaaaagcactagagagaaaacttgaatgatcatgttataagaccatttg

SEQ ID NO: 31557 - DNA, 110 bp, synthetic construct
  source 1..110: mol_type = other DNA
ctgcaagaaaagcactagagagaaaacttgaatgatcatgttataagaccatttgcggtatcccctattttatatcatctggtagttatagccattccaagctactagta

SEQ ID NO: 31558 - DNA, 110 bp, synthetic construct
  source 1..110: mol_type = other DNA
ttcttgatagccagacatgatgtaccctgtaaaaagaacagctataaataggcctttatagatgtggtgtagtgggagggagaagggttctatggtcctgtgattgcgac

SEQ ID NO: 31559 - DNA, 110 bp, synthetic construct
  source 1..110: mol_type = other DNA
gtgttataataaaaacttttgcagcttcatagcatttaattaacaaggtaatcgctaattcctgagaggtcagagaacacagccaagtgcatctagggaaggtgctaaag

SEQ ID NO: 31560 - DNA, 110 bp, synthetic construct
  source 1..110: mol_type = other DNA
cagatgctgcgagggctacgaaactgagtgagatgccagttctgcctttaagcggccttcagctcagtgacggggaaggggaccatccacagacacgctccaacgttgaa

SEQ ID NO: 31561 - DNA, 110 bp, synthetic construct
  source 1..110: mol_type = other DNA
ctctctctctcctagttcacaatttccttctgggcagaactatgtatcatacattttcagtcttcagcatctggtacacagtaggcacacaagaaatattcgttgacagg

SEQ ID NO: 31562 - DNA, 110 bp, synthetic construct
  source 1..110: mol_type = other DNA
agatggagagaacatgaagttatggaaggattacaccactgcagacaccatcacagtcatagaaaaagtatgaaagccccaaccagtaagctcctgctggagaaaactat

SEQ ID NO: 31563 - DNA, 110 bp, synthetic construct
  source 1..110: mol_type = other DNA
ctgctaaggctctgcttgaaagtgggatgaaattgtcagcaagtatttttcttttgcctaattcttcaaagaatgaaataatggaataggtgtggtatagacttaataga

SEQ ID NO: 31564 - DNA, 110 bp, synthetic construct
  source 1..110: mol_type = other DNA
gcctaattcttcaaagaatgaaataatggaataggtgtggtatagacttaatagaaggagccttggatttgaattcattacgtgagagtagacagtgacttttctgatga

SEQ ID NO: 31565 - DNA, 110 bp, synthetic construct
  source 1..110: mol_type = other DNA
caaggccagggatcaaacctccatcctcacagacaccatgttgggttcttaaccagctgagccacaatgcgaactcctgcacatttgttttcgagtagaagcctatcatc

SEQ ID NO: 31566 - DNA, 110 bp, synthetic construct; identical to SEQ ID NO: 31565
  source 1..110: mol_type = other DNA

SEQ ID NO: 31567 - DNA, 110 bp, synthetic construct
  source 1..110: mol_type = other DNA
atcccaagagtattccaggaaatatgaaacctaagtggggttagtgctaacggggtaggaataacagaaatagggggcgccagattgccgccatggttcctaccacttag

SEQ ID NO: 31568 - DNA, 110 bp, synthetic construct
  source 1..110: mol_type = other DNA
tagtccccataatcagcttatgatagaagcaagaatacatgagccatttaaatcgtcagacattatgctttataaggtatgcacagaagttcaagcaataaatacataca

SEQ ID NO: 31569 - DNA, 110 bp, synthetic construct
  source 1..110: mol_type = other DNA
ctgttccaaatacaacttctggtcaaatgatttgtcacagtggtaactttaaattgctatgcctaccacaatttcaaacggacctttttttacagaaagctatcattttg

SEQ ID NO: 31570 - DNA, 110 bp, synthetic construct
  source 1..110: mol_type = other DNA
gctatgcctaccacaatttcaaacggacctttttttacagaaagctatcattttgctgattctggcccctcaagattttaaaacgtagtctgagactatgtcttaaagta

SEQ ID NO: 31571 - DNA, 110 bp, synthetic construct
  source 1..110: mol_type = other DNA
aatgaatttaaaaagactaagggatctaaattttcctatacagttctgcaatcaaaatgctacatttatacggagttcccatcgtggctcattggttaatgagtctgact

SEQ ID NO: 31572 - DNA, 110 bp, synthetic construct
  source 1..110: mol_type = other DNA
ctatacagttctgcaatcaaaatgctacatttatacggagttcccatcgtggctcattggttaatgagtctgactaggaaccatgagggtgtgggttggatccccggcct

SEQ ID NO: 31573 - DNA, 110 bp, synthetic construct
  source 1..110: mol_type = other DNA
cttgtcaagaccatgctacaatattgcagcaaaccagcccagttacttcagaggaaatctcttgattttgcctacgtggcatctgttcctctttttgctaataataccga

SEQ ID NO: 31574 - DNA, 110 bp, synthetic construct
  source 1..110: mol_type = other DNA
tggagcaatctaagaagggccctccaaaacagatccactccaaaagttaatgctttctaataccttactgttaatgctttttaaaatgacgatgttaataaataagcaaa

SEQ ID NO: 31575 - DNA, 110 bp, synthetic construct
  source 1..110: mol_type = other DNA
tccccatgggacaggtaaatcaaagtgagagtcaagtttgatctcattccagacttgaaccacctatggaggccaaactaacctggtacttgctgactccacagaggggc

SEQ ID NO: 31576 - DNA, 110 bp, synthetic construct
  source 1..110: mol_type = other DNA
gcatttttttatgcatcaggcatttatgtgacattatcattcgtaatgatattccaagtatcaagaaaggaaatagccaagattttttaaagcttgttctgcgaagccta

SEQ ID NO: 31577 - DNA, 110 bp, synthetic construct; identical to SEQ ID NO: 31576
  source 1..110: mol_type = other DNA

SEQ ID NO: 31578 - DNA, 110 bp, synthetic construct
  source 1..110: mol_type = other DNA
accaaggcaccagcactctatccaagacacaactgagtacaacagtctcaatctatatggagtaacaccattaaagcttaatatctatttttgttttcttaaagctaaaa

SEQ ID NO: 31579 - DNA, 110 bp, synthetic construct
  source 1..110: mol_type = other DNA
gtacatatgcatattaattcttcctaaatttaagatcacttcaagcaacatttatgagccaaacactttctgaagcactagggataaagcattcactgtctagtggagaa

SEQ ID NO: 31580 - DNA, 110 bp, synthetic construct; identical to SEQ ID NO: 31579
  source 1..110: mol_type = other DNA

SEQ ID NO: 31581 - DNA, 110 bp, synthetic construct
  source 1..110: mol_type = other DNA
gccacaaaaaactgattccttgttattcagtgaaaactaaatcacatgaacattgatttttcagaaagattcaactcctattctgcatgctctgtcattttaaaactatg

SEQ ID NO: 31582 - DNA, 110 bp, synthetic construct
  source 1..110: mol_type = other DNA
tgactacacctgaagacgtttccaaaagttcaggaatagtgacatcaggtagttggaaagaaagatgtacaggccagatttcccaacaaggagaatgcagtgtggagaca

SEQ ID NO: 31583 - DNA, 110 bp, synthetic construct
  source 1..110: mol_type = other DNA
atgaaactgctacgtgtatcaattttgctgccacaaataaattttaacaagtagaagaattcacaaatacagaatgctcaaataatgaagatcacctgtagtgatttcgc

SEQ ID NO: 31584 - DNA, 110 bp, synthetic construct
  source 1..110: mol_type = other DNA
gtctttgaaatatccaagaaaagatgtaaaattctcagtaagggttggagctccggtaagaaatctgaagtagagacagaagtcagtgactatatgtgaataggagccac

SEQ ID NO: 31585 - DNA, 110 bp, synthetic construct
  source 1..110: mol_type = other DNA
ggaggacaggggttagctttcacacactattcttcatttgcatgtgttgatgatagcacccagaagatctctgatcttagaagaagctgaaagcagctgttatgtaagcc

SEQ ID NO: 31586 - DNA, 110 bp, synthetic construct
  source 1..110: mol_type = other DNA
gcacccagaagatctctgatcttagaagaagctgaaagcagctgttatgtaagccagcaggcctgtcattgggtttactaggtcatagacaggatggaggacatggcaga

SEQ ID NO: 31587 - DNA, 110 bp, synthetic construct; identical to SEQ ID NO: 31585
  source 1..110: mol_type = other DNA

SEQ ID NO: 31588 - DNA, 110 bp, synthetic construct; identical to SEQ ID NO: 31586
  source 1..110: mol_type = other DNA

SEQ ID NO: 31589 - DNA, 110 bp, synthetic construct
  source 1..110: mol_type = other DNA
caaagagaacattttcctttatgacaatgacctctataaaatttaagcctctacttgaccatcctaatttctctagctgggacaatagccataatttcatgtcagaagca

SEQ ID NO: 31590 - DNA, 110 bp, synthetic construct
  source 1..110: mol_type = other DNA
tgtacttctacaattgcccaatgggaaaataaagtgcttaaagtttcaactgggaaagatgactcactctgcaacttgctaaacagtttatgagaatttacaatgcttgt

SEQ ID NO: 31591 - DNA, 110 bp, synthetic construct
  source 1..110: mol_type = other DNA
aagatgactcactctgcaacttgctaaacagtttatgagaatttacaatgcttgtggattgctgcttgtgtcttgtgtgccgggcaatggtcaggatgaaacaaggcaaa

SEQ ID NO: 31592 - DNA, 110 bp, synthetic construct
  source 1..110: mol_type = other DNA
atgaaatgtctttatctgtaattgaaacgaatcattcatttcctatggaaacatcctacacttcaaattcatagtgaatttcaaaaattcatttcccctaaggagagaga

SEQ ID NO: 31593 - DNA, 110 bp, synthetic construct; identical to SEQ ID NO: 31592
  source 1..110: mol_type = other DNA

SEQ ID NO: 31594 - DNA, 110 bp, synthetic construct
  source 1..110: mol_type = other DNA
aaggatggagccctcctgaagggaattagtgctgttacaaaatagaccacagacagcttccttgctccctcccccatgtgaggttacagagagaagtctatgaagtccag

SEQ ID NO: 31595 - DNA, 110 bp, synthetic construct
  source 1..110: mol_type = other DNA
caaacttgtgatttccaaaggggagagggttggaggatgcaggaaaatgtaggttggggttagcagatataagctattatatatagaataaataaacaacagggtcatac

SEQ ID NO: 31596 - DNA, 110 bp, synthetic construct
  source 1..110: mol_type = other DNA
caaaggggagagggttggaggatgcaggaaaatgtaggttggggttagcagatataagctattatatatagaataaataaacaacagggtcatactgtatagcacaggga

SEQ ID NO: 31597 - DNA, 110 bp, synthetic construct
  source 1..110: mol_type = other DNA
aagcacagaaagtctgaatcatgccttaaagaaaagatatgcttccgttagacatgagttataattctgttggctgagagtttagggttaatgtaccataatatatataa

SEQ ID NO: 31598 - DNA, 110 bp, synthetic construct
  source 1..110: mol_type = other DNA
gatatgcttccgttagacatgagttataattctgttggctgagagtttagggttaatgtaccataatatatataagtaaggtatctttaatcagaaatacacataaatcc

SEQ ID NO: 31599 - DNA, 110 bp, synthetic construct
  source 1..110: mol_type = other DNA
aaaagtcaagaccgggaggtgtattaaagggagtcttaataagaaaaggaggcatgaagggctctgaaggagagcctaaggagcttgagctttagccagaccgcggacac

SEQ ID NO: 31600 - DNA, 110 bp, synthetic construct
  source 1..110: mol_type = other DNA
atgataaaccctaagaatttagattccaggtatctgcatttgctttggggtagagcagaattttatgtttactcgcaatcctgatttcagctcacagtttttccttttgg

SEQ ID NO: 31601 - DNA, 110 bp, synthetic construct
  source 1..110: mol_type = other DNA
cgaaaatcaagggtatcctcagagaagagactcagacacagccctcaaagtgcacactcaggcacttgacgtagctttagtgctacctcttcaatatcttcgagagtgag

SEQ ID NO: 31602 - DNA, 110 bp, synthetic construct
  source 1..110: mol_type = other DNA
agttcaagagacaaataagcataacaactttaatttaactccccaagctagctggctgtcattcaagatcacttgttctaccaattatctgacattaaatactgttatga

SEQ ID NO: 31603 - DNA, 110 bp, synthetic construct
  source 1..110: mol_type = other DNA
agggcacggccgtgatgagaaacatctccaagggacttacctattaggaatatcacgaaggaaaccagcgccaggctgacaatcagcacaattatcagccccaccaaaaa

SEQ ID NO: 31604 - DNA, 110 bp, synthetic construct
  source 1..110: mol_type = other DNA
cgaaggaaaccagcgccaggctgacaatcagcacaattatcagccccaccaaaaacagcccgtggcttccatttcctgagttactgctgtcggctgggattttctcctcc

SEQ ID NO: 31605 - DNA, 110 bp, synthetic construct
  source 1..110: mol_type = other DNA
ttgaaaacagagccaggtgggtctgatttaatgaaaatcttgagaatgagttcaaggtttctcattaatatttctgagcatgaacctgatctgtttagcatcttaaaaca

SEQ ID NO: 31606 - DNA, 110 bp, synthetic construct
  source 1..110: mol_type = other DNA
ggtttctcattaatatttctgagcatgaacctgatctgtttagcatcttaaaacagcacttgaaagtgtgtcttaagggtgtgtccattatgatatttttctcttgaaga

SEQ ID NO: 31607 - DNA, 110 bp, synthetic construct
  source 1..110: mol_type = other DNA
gtgaagtatgtttagtttcttccatgtgagtccttaagtcagctttggacttgaacttctcatggcagccataacacctacactggtgaatttgccttcgaatgaaattg

SEQ ID NO: 31608 - DNA, 110 bp, synthetic construct
  source 1..110: mol_type = other DNA
cttctcatggcagccataacacctacactggtgaatttgccttcgaatgaaattgaccagttttacttgctgatagaaattcagtcctgaaaatgatagcacatagaatc

SEQ ID NO: 31609 - DNA, 110 bp, synthetic construct
  source 1..110: mol_type = other DNA
aggaagcaaaattaaggctaatattattaattacagctatcgaaaacattttatagatactgacatattacattcgcaatggagtttcccggctgaatggttgtatgagt

SEQ ID NO: 31610 - DNA, 110 bp, synthetic construct
  source 1..110: mol_type = other DNA
caaaagagacggtcagacagagtccggccggggactctcatcccgggttaccctgtgtgtgtgttgacgggcgggggggattggtaaatttcaacatctgcgtcgctctg

SEQ ID NO: 31611 - DNA, 110 bp, synthetic construct
  source 1..110: mol_type = other DNA
tgttgttgctacaggagagtacttcttcatccttaccgtgttccttcctacctttggggagcaaaccagcagctggtgcagaacctcgtgtgtcatccttcagggccggg

SEQ ID NO: 31612 - DNA, 110 bp, synthetic construct
  source 1..110: mol_type = other DNA
gtatggttgtaccagtttacacattcatccactgaaggacatttgggttgtttccactctggagctataataaataaggctgcaataagtgttcatgtataagttttcat

SEQ ID NO: 31613 - DNA, 110 bp, synthetic construct
  source 1..110: mol_type = other DNA
tcagagaggttaaggaagtttcctaaggttgcagaacaagtaaaagctaggatacagtctcaggcagcccagccccagaatgagtgatattagtagcaggttatcctgcc

SEQ ID NO: 31614 - DNA, 110 bp, synthetic construct
  source 1..110: mol_type = other DNA
agtaaattaaaagacatagattttaagaaagctatgaaaagatgcaggaagtttagcttactgagtagatttgggggaatttgtggagatgatgatgagatcctttgtgg

SEQ ID NO: 31615 - DNA, 110 bp, synthetic construct
  source 1..110: mol_type = other DNA
gcttactgagtagatttgggggaatttgtggagatgatgatgagatcctttgtggatgatacaaaatgcttcagatgacagcctctaggagttggattggtctaactgtt

SEQ ID NO: 31616 - DNA, 110 bp, synthetic construct
  source 1..110: mol_type = other DNA
attaaaagccaggactccaggaagccaagagaagctgaacagtccaagtcttacgagacaaagacactttcacatcattggcttcaggggccccaaactgaggagcgttc

SEQ ID NO: 31617 - DNA, 110 bp, synthetic construct
  source 1..110: mol_type = other DNA
aagaataagtaactacagacagaaactgtgtggtttggttccattagagccatacgtatccacagctcacatgtggcagtgcttcaggccacagtgaatggtgaggtcta

SEQ ID NO: 31618 - DNA, 110 bp, synthetic construct
  source 1..110: mol_type = other DNA
tctctcctttgatgggtctcttctctacttttattcatggtctggatgacagcgtttctgtgtgtctctgtcctagaaatgaaatcagtgctccatgactggtctgacca

SEQ ID NO: 31619 - DNA, 110 bp, synthetic construct
  source 1..110: mol_type = other DNA
gcttttttctttcttttttttttttaattaattagggggagtttgttgcttgtctcctgtccttactacggcaaatgacagacagacactatcaacagcttcttgacagt

SEQ ID NO: 31620 - DNA, 110 bp, synthetic construct
  source 1..110: mol_type = other DNA
cctgtccttactacggcaaatgacagacagacactatcaacagcttcttgacagtttcaatactaaagaagaactaagggtaagtatcattttttaaagtgccctttaat

SEQ ID NO: 31621 - DNA, 110 bp, synthetic construct; identical to SEQ ID NO: 31619
  source 1..110: mol_type = other DNA

SEQ ID NO: 31622 - DNA, 110 bp, synthetic construct; identical to SEQ ID NO: 31620
  source 1..110: mol_type = other DNA

SEQ ID NO: 31623 - DNA, 110 bp, synthetic construct
  source 1..110: mol_type = other DNA
atagtgtcaatagaaaagtagttttttcccatgatgtcctgcatgtttttgattacatttatttctgggaattttattctgatctctttctgatgctgtttttggtatga

SEQ ID NO: 31624 - DNA, 110 bp, synthetic construct; identical to SEQ ID NO: 31623
  source 1..110: mol_type = other DNA

SEQ ID NO: 31625 - DNA, 110 bp, synthetic construct
  source 1..110: mol_type = other DNA
tcgcaagccagtgttgctctgtttcggagttttcacacattttttcataagataagaaaaatgagaataatatgactcgcatatattgactcaaatatctaacggtcttt

SEQ ID NO: 31626 - DNA, 110 bp, synthetic construct
  source 1..110: mol_type = other DNA
aaatggtaggtctatttttagttttctgagagtttctcctctctttgaaatgagtataaatccttttgaaaattagataggctttttgtcagccttgggacccagtaatc

SEQ ID NO: 31627 - DNA, 110 bp, synthetic construct
  source 1..110: mol_type = other DNA
acatctctctcactggaggtttaattgaggccaaacagaaagttgactttctatcccactcactggaagcaggccacagctctctggttcctacacagggtggtgttgac

SEQ ID NO: 31628 - DNA, 110 bp, synthetic construct
  source 1..110: mol_type = other DNA
tagccattcagccctttctttgctttgcttcctgcctttctgtgtgcaggtctttccctgagctcctctcagtgaggctcttctgaccacttcctgctcggcaccgccct

SEQ ID NO: 31629 - DNA, 110 bp, synthetic construct
  source 1..110: mol_type = other DNA
catatgcctcaggtgtggtcctaaaaagcaaaataaataaataaaaaataaaagaagacttcatgataaaccttaagctacacagcaggagtaaaaatgattatagccct

SEQ ID NO: 31630 - DNA, 110 bp, synthetic construct
  source 1..110: mol_type = other DNA
agacttcatgataaaccttaagctacacagcaggagtaaaaatgattatagccctttaaggaagcaatttggcagcatgcagaaagagcctaaaaatttcatatgccaaa

SEQ ID NO: 31631 - DNA, 110 bp, synthetic construct
  source 1..110: mol_type = other DNA
tccctagccctgttatggatatattccttagtaagtgcacccatcagttttatgcacatttagctgaacatgtctatccaatcaccattgaattttaaatggaattattc

SEQ ID NO: 31632 - DNA, 110 bp, synthetic construct
  source 1..110: mol_type = other DNA
aattgcaactactgttccagatacagtctttttactagagccagtcatcctggactctggtgtgtagctgctgatcttgcaaaaccttttcctccccttctccaatatcc

SEQ ID NO: 31633 - DNA, 110 bp, synthetic construct
  source 1..110: mol_type = other DNA
taggtctgtctgattgcagaaccttgattttttctacccaccacattagaataatttttttatgtaacatgtctttattgggtcagctttcatctcagcttatatcttaa

SEQ ID NO: 31634 - DNA, 110 bp, synthetic construct
  source 1..110: mol_type = other DNA
ctaaagggagaaaatccttattattgtgcttatgattcaaattccttgtccaccatagtcctttgaatttttctgcttattaaagtacaaaaaggcgatagcatttccgc

SEQ ID NO: 31635 - DNA, 110 bp, synthetic construct
  source 1..110: mol_type = other DNA
tagtcctttgaatttttctgcttattaaagtacaaaaaggcgatagcatttccgcagctcattattttgagaaggaaagtgaataaaatgaaaactactattgattctca

SEQ ID NO: 31636 - DNA, 110 bp, synthetic construct
  source 1..110: mol_type = other DNA
aactctgcttgcaacctcattgctccagcctctgccttcttcctctcctccgttctaacattctctctactccagcagagctcagcttcttcaactagctttttccttga

SEQ ID NO: 31637 - DNA, 110 bp, synthetic construct
  source 1..110: mol_type = other DNA
tttaaaatccactatctttcagatgagtttttgcaatcctaaagcataagaacaaagtgtagcttcttccctgtacctcattgtgtgtattataaagactacagagtctg

SEQ ID NO: 31638 - DNA, 110 bp, synthetic construct
  source 1..110: mol_type = other DNA
agtgtagcttcttccctgtacctcattgtgtgtattataaagactacagagtctgaagaagagaaacatttggatgctgaagttcaaaaattgttaaagataggaggttg

SEQ ID NO: 31639 - DNA, 110 bp, synthetic construct; identical to SEQ ID NO: 31637
  source 1..110: mol_type = other DNA

SEQ ID NO: 31640 - DNA, 110 bp, synthetic construct; identical to SEQ ID NO: 31638
  source 1..110: mol_type = other DNA

SEQ ID NO: 31641 - DNA, 110 bp, synthetic construct
  source 1..110: mol_type = other DNA
acacattcaaatattttaaacaacatgtttaatttcatttcagttcctgatcctattttatatggttaaggtactgcctgtttaactaccactgataagctgtgagaagg

SEQ ID NO: 31642 - DNA, 110 bp, synthetic construct; identical to SEQ ID NO: 31641
  source 1..110: mol_type = other DNA

SEQ ID NO: 31643 - DNA, 110 bp, synthetic construct
  source 1..110: mol_type = other DNA
taattccaatatgaagacagtttgggggatcactgccgtatagtcatctagggagctttgaaaaatacttctatttaaacctcagctcacaccaatcaaactggaacatt

SEQ ID NO: 31644 - DNA, 110 bp, synthetic construct
  source 1..110: mol_type = other DNA
ctttgaaaaatacttctatttaaacctcagctcacaccaatcaaactggaacatttcggaatggggctcagattggagtacaaccaagattgccaaccactgctccagag

SEQ ID NO: 31645 - DNA, 110 bp, synthetic construct
  source 1..110: mol_type = other DNA
tatactcagaaattttggagctgtcactgtaattgccttcttgatacatctttttcccatgttagcactcaaagtcctaagtcccaggaaacccttaagtcctgagcaac

SEQ ID NO: 31646 - DNA, 110 bp, synthetic construct
  source 1..110: mol_type = other DNA
tttgaaaattttaccagctacatgaatattgggtactattacctctgtcatgaggtatttctgagggtaatggccatattatatgaggcacttatgttccttaaaggaag

SEQ ID NO: 31647 - DNA, 110 bp, synthetic construct; identical to SEQ ID NO: 31646
  source 1..110: mol_type = other DNA

SEQ ID NO: 31648 - DNA, 110 bp, synthetic construct
  source 1..110: mol_type = other DNA
gtgagtacttgtcaatgtactcttgggagcataaagttgacattttcaagggagcaaattatgtatagctactggagcctaaatgagaattgttttcttctgcaaaccag

SEQ ID NO: 31649 - DNA, 110 bp, synthetic construct
  source 1..110: mol_type = other DNA
aagatagtctggaacaaagacagtctgtgcctctgctcacaagatagacaataatgcaagcgacctatggagaattgtctcctagtagttcttagttcagcataacctag

SEQ ID NO: 31650 - DNA, 110 bp, synthetic construct
  source 1..110: mol_type = other DNA
gcaagcgacctatggagaattgtctcctagtagttcttagttcagcataacctagcaagagctgccaaatgcaccacgtgttaggcactgctctggaagtttacctttac

SEQ ID NO: 31651 - DNA, 110 bp, synthetic construct
  source 1..110: mol_type = other DNA
aaaggacaacaacaacaaaattatgaatgaagcacatatttggaaaatccagctttgagattgaggtctatagttcatgtattcattgctaatttgggcagtttgaataa

SEQ ID NO: 31652 - DNA, 110 bp, synthetic construct
  source 1..110: mol_type = other DNA
tgagattgaggtctatagttcatgtattcattgctaatttgggcagtttgaataaagtttacataagcaacgtatggaaaggctcgaactgatcagaatattagattcaa

SEQ ID NO: 31653 - DNA, 110 bp, synthetic construct
  source 1..110: mol_type = other DNA
aatcattctgtgtgcaatactttttaaaagcttaaaattttttttttaaagatttcaattatttaggagttgccgttgtggctcggtggttaacaaatccgactaggaac

SEQ ID NO: 31654 - DNA, 110 bp, synthetic construct; identical to SEQ ID NO: 31653
  source 1..110: mol_type = other DNA

SEQ ID NO: 31655 - DNA, 110 bp, synthetic construct
  source 1..110: mol_type = other DNA
acagctatattagtgttagcttacagagatagctctcctttattaacctttgcagtgttcggagtacatgctgccattggaatacatcattcatcttttgtttctcttgt

SEQ ID NO: 31656 - DNA, 110 bp, synthetic construct
  source 1..110: mol_type = other DNA
gcttccagcccctggtagacatctcttccagagaggctagttttaccagggtttagaccagtctttcaattgccttttgttgtgttgtatacttttttctgaattatctc

SEQ ID NO: 31657 - DNA, 110 bp, synthetic construct
  source 1..110: mol_type = other DNA
gaccagtctttcaattgccttttgttgtgttgtatacttttttctgaattatctcttgccacaaacaacacagagaagatcttacatgccaagaacacagctgaaagaaa

SEQ ID NO: 31658 - DNA, 110 bp, synthetic construct
  source 1..110: mol_type = other DNA
tggagatttggctggagaggcagggatctggtttagcatacatctaaggtcatactgagctgaggatacaagggatggaggcgggtggatgctatctttgtgttctccct

SEQ ID NO: 31659 - DNA, 110 bp, synthetic construct
  source 1..110: mol_type = other DNA
tgagctgaggatacaagggatggaggcgggtggatgctatctttgtgttctccctctgcctcatgtcaagatgccagcatctctcagaaaaaaacttggatacttgtctg

SEQ ID NO: 31660 - DNA, 110 bp, synthetic construct
  source 1..110: mol_type = other DNA
tttcacatgacatttacttttaagcctaaataagccatccctagctgagctttttgatgtctcacttttctatcttctcaaacacctttcagagccttatgtatagaact

SEQ ID NO: 31661 - DNA, 110 bp, synthetic construct
  source 1..110: mol_type = other DNA
gtacagcatgatgctttggtatgcctttccattgaaatgattaccacattggtaaatggtcgccaagctagaatatccatcatctcacagagttatgtttgtgtgtgttt

SEQ ID NO: 31662 - DNA, 110 bp, synthetic construct
  source 1..110: mol_type = other DNA
aatgattaccacattggtaaatggtcgccaagctagaatatccatcatctcacagagttatgtttgtgtgtgtttagaccacttaagatctattttcttaactttttttt

SEQ ID NO: 31663 - DNA, 110 bp, synthetic construct
  source 1..110: mol_type = other DNA
tttttttcttccacccagcaacatgggcttggggcagaagaggaatgatagcagaagcttgagtagcatgagatccagcaccgtgcagatgtgatccactttaatatttt

SEQ ID NO: 31664 - DNA, 110 bp, synthetic construct
  source 1..110: mol_type = other DNA
cttcctgtgtctgccttcctcccttcctcttctcagggtcatgacttggcaaacagagcttcaggtagattcttatgcctcatacaggcacccttctgaggacatgatct

SEQ ID NO: 31665 - DNA, 110 bp, synthetic construct
  source 1..110: mol_type = other DNA
gagcttcaggtagattcttatgcctcatacaggcacccttctgaggacatgatctgaagaggtgttggtggaaacctatgtagatttttgatcataaaatggttctcact

SEQ ID NO: 31666 - DNA, 110 bp, synthetic construct
  source 1..110: mol_type = other DNA
gatcctgttgggctgaccaagatcatttgtcggcatctctttctttttcttctttaagctctgctttcatgacaacctactggtgtcttagatagccttgcatcctagat

SEQ ID NO: 31667 - DNA, 110 bp, synthetic construct
  source 1..110: mol_type = other DNA
aagctctgctttcatgacaacctactggtgtcttagatagccttgcatcctagatgcccagtggccaaggtaaacattaatctttgatatctatatgagatgatggaggc

SEQ ID NO: 31668 - DNA, 110 bp, synthetic construct; identical to SEQ ID NO: 31666
  source 1..110: mol_type = other DNA

SEQ ID NO: 31669 - DNA, 110 bp, synthetic construct; identical to SEQ ID NO: 31667
  source 1..110: mol_type = other DNA

SEQ ID NO: 31670 - DNA, 110 bp, synthetic construct
  source 1..110: mol_type = other DNA
tccttctaaagtcggaccaaatgttgtcatcaaccttgactttcttttcatgatataaaaaaacctgctgctctgtcctgtaaattttctcattatttctctctgcctag

SEQ ID NO: 31671 - DNA, 110 bp, synthetic construct
  source 1..110: mol_type = other DNA
taaaaaaacctgctgctctgtcctgtaaattttctcattatttctctctgcctagcttccctgctgatctttccattatcagtatctccctattcagatctactgtacat

SEQ ID NO: 31672 - DNA, 110 bp, synthetic construct
  source 1..110: mol_type = other DNA
tgcttgcaatagtgctggatgccaaacaatctaccagctatcaaacatgcagtcctgagccttaaaaataaataccaaacatgggattgactaattgcagtggcagcacc

SEQ ID NO: 31673 - DNA, 110 bp, synthetic construct
  source 1..110: mol_type = other DNA
gcttcaaaggaacatactattatttcttatttctgtttttgtatgaattctgaaatgtgctcatcttaccacattgttatatcctactctgcatgttggattctaagttc

SEQ ID NO: 31674 - DNA, 110 bp, synthetic construct
  source 1..110: mol_type = other DNA
atcctttttccatccaacagaactgacagtttacattttggtggggtaggtaactttaagaatacagtaacttgccttatgatatgaaatattctgcagcagcactgcag

SEQ ID NO: 31675 - DNA, 110 bp, synthetic construct
  source 1..110: mol_type = other DNA
ttaagaatacagtaacttgccttatgatatgaaatattctgcagcagcactgcagtataattagaaaggcattgttaccctcagtacataaaatgacctcaaaaatgtca

SEQ ID NO: 31676 - DNA, 110 bp, synthetic construct
  source 1..110: mol_type = other DNA
ctaatatctatttgagatagaaccttgtttggaactagtttatagtaaaaatgctcacttagttacaaacatgtccaatttatcctcattacaagagcagtcagcttctg

SEQ ID NO: 31677 - DNA, 110 bp, synthetic construct
  source 1..110: mol_type = other DNA
tcatttaacagtgtttggagaaatttttgattgtcatgtaggattggtaggaaaaggggtgcttggcatatagtggcataagcgggtagaggcctatgatgcacagtaca

SEQ ID NO: 31678 - DNA, 110 bp, synthetic construct
  source 1..110: mol_type = other DNA
ggggtgcttggcatatagtggcataagcgggtagaggcctatgatgcacagtacagctcctgacatcaaagaattatcacccccccgccacacacacacaaatagatatc

SEQ ID NO: 31679 - DNA, 110 bp, synthetic construct
  source 1..110: mol_type = other DNA
gcatccctcgagcagcagtgcacctacccaggccaggcagtggtggtctgccacacgcctttgtcaggtggcatggctggattagctgtggaatccagattcgattcctc

SEQ ID NO: 31680 - DNA, 110 bp, synthetic construct
  source 1..110: mol_type = other DNA
atttgtatgttgtatttaaaggctggggctctcactattcatgaatatataatcataagtctcttctcatttctcctgttcaagtttcttctggccacagagaagaaacc

SEQ ID NO: 31681 - DNA, 110 bp, synthetic construct
  source 1..110: mol_type = other DNA
taagtctcttctcatttctcctgttcaagtttcttctggccacagagaagaaacccaactccaattcttgattttagacttttagatttgaatgattttcaaaatcaccc

SEQ ID NO: 31682 - DNA, 110 bp, synthetic construct; identical to SEQ ID NO: 31680
  source 1..110: mol_type = other DNA

SEQ ID NO: 31683 - DNA, 110 bp, synthetic construct; identical to SEQ ID NO: 31681
  source 1..110: mol_type = other DNA

SEQ ID NO: 31684 - DNA, 110 bp, synthetic construct
  source 1..110: mol_type = other DNA
acagcaacaaaaacccaatttaaaaaatgggcagaaatagacatttctccaaagaagccgtacagatggccaacaggcacatgaaaacagtttcaacattgctaattatt

SEQ ID NO: 31685 - DNA, 110 bp, synthetic construct; identical to SEQ ID NO: 31684
  source 1..110: mol_type = other DNA

SEQ ID NO: 31686 - DNA, 110 bp, synthetic construct
  source 1..110: mol_type = other DNA
tattttgattccttttcactggttaatgaattggctctagactattgtatttctgagtacactgccttctttttgagtcttggcctaattttatgacaacatttggtgca

SEQ ID NO: 31687 - DNA, 110 bp, synthetic construct
  source 1..110: mol_type = other DNA
agtacactgccttctttttgagtcttggcctaattttatgacaacatttggtgcaggtacatccaaaatgtttcccaacctttcacagctactaagtattctgaatcaga

SEQ ID NO: 31688 - DNA, 110 bp, synthetic construct
  source 1..110: mol_type = other DNA
gtatatgggagaagggtaaacaaggggatccaggagcacaggatggcgcattcattcagatggagggggaagaagggagagtgttcctagaatagatggcattagagcta

SEQ ID NO: 31689 - DNA, 110 bp, synthetic construct
  source 1..110: mol_type = other DNA
tcagatggagggggaagaagggagagtgttcctagaatagatggcattagagctagactaacttgaggataggtaagaaaaaagaacaatgagagagatggtcatgcctt

SEQ ID NO: 31690 - DNA, 110 bp, synthetic construct
  source 1..110: mol_type = other DNA
ataacttgtaccctgcacaaaatgctaggcagtggaacaaagatagtggagaacagactttataggagttcacatcttaataggacacaagaagttaaacaaaatagcaa

SEQ ID NO: 31691 - DNA, 110 bp, synthetic construct
  source 1..110: mol_type = other DNA
tgcctttgggaaggtttagttctagatttttttttttaatgctagaccaaaaatggacagcttgactttctgatctccacatcctctttaggaaaaaaaggtgggaatta

SEQ ID NO: 31692 - DNA, 110 bp, synthetic construct
  source 1..110: mol_type = other DNA
aaatacagataagaatagtgcctcctcagaagttatttatagagaataagtaaatatgcgtaaggtgctgattccaatgcctaatacacagtaagagttattaaagagct

SEQ ID NO: 31693 - DNA, 110 bp, synthetic construct
  source 1..110: mol_type = other DNA
atgcgtaaggtgctgattccaatgcctaatacacagtaagagttattaaagagctacctactactatttatcactttatgtggtatggactggctttgagggcggggggt

SEQ ID NO: 31694 - DNA, 110 bp, synthetic construct
  source 1..110: mol_type = other DNA
cagcctgaaggactaatgcaccttcttctaagccctgcacctcctgacatcaatagacctcctagcaggaccctactgtagcaagctcccaagggacacttttctctctg

SEQ ID NO: 31695 - DNA, 110 bp, synthetic construct
  source 1..110: mol_type = other DNA
ccaagagatcacaatgaagctatttatgaggggacttgtactttctaactgggtctcttgggacacttgctgtttgtagcctcacagatcccagatacaattctgtgcaa

SEQ ID NO: 31696 - DNA, 110 bp, synthetic construct
  source 1..110: mol_type = other DNA
aaggatcacagagactgggctggctgaggctttctccgttttctttactaaggcttggtgctcctctttcagtactctgaagctatctcaaaacattccaatcaactcct

SEQ ID NO: 31697 - DNA, 110 bp, synthetic construct
  source 1..110: mol_type = other DNA
ctggcagcctttgcttcccactcatactccaccaccaaaccctgcccccaaatctcaaacaaatttttaaaagctcataagattctccacagatgaagcaatagtttcct

SEQ ID NO: 31698 - DNA, 110 bp, synthetic construct
  source 1..110: mol_type = other DNA
gaattgctctgcatctgcattattcaatacaggagacacaagaggctaatgaacacctgaaatatgtttaatgggacttcccgttgtggctcagtggtaacaaactcaac

SEQ ID NO: 31699 - DNA, 110 bp, synthetic construct
  source 1..110: mol_type = other DNA
tgcattattcaatacaggagacacaagaggctaatgaacacctgaaatatgtttaatgggacttcccgttgtggctcagtggtaacaaactcaactagtatccataagga

SEQ ID NO: 31700 - DNA, 110 bp, synthetic construct
  source 1..110: mol_type = other DNA
caagtgttagcagagcctcaaagctccctcaagacactgcgttctctctgtagtgaggtgtcctctagataagagacaatcctacccagtcgctttctggcccttgttat

SEQ ID NO: 31701 - DNA, 110 bp, synthetic construct
  source 1..110: mol_type = other DNA
ttggaattcctcttcagcgcttactcattttcaacacctaagggaacacggtgttacagcttaattgtgttaacaaaagcaacgagaatgatgggacgtattttaaccta

SEQ ID NO: 31702 - DNA, 110 bp, synthetic construct
  source 1..110: mol_type = other DNA
acagcttaattgtgttaacaaaagcaacgagaatgatgggacgtattttaacctaacagatcttttacctccaaatattttagcacctcgagtctctgcagaaacattgc

SEQ ID NO: 31703 - DNA, 110 bp, synthetic construct
  source 1..110: mol_type = other DNA
attaagcaaaagtttaaatttttagaaatatacacaaaggaaacatattgcatttgaagaagatctactaagtctaaacaaatacatggagatcctgttgtggcccaacc

SEQ ID NO: 31704 - DNA, 110 bp, synthetic construct
  source 1..110: mol_type = other DNA
tattgcatttgaagaagatctactaagtctaaacaaatacatggagatcctgttgtggcccaaccggtcaagaacccagctagtatccataacgatgtgagttcaatccc

SEQ ID NO: 31705 - DNA, 110 bp, synthetic construct
  source 1..110: mol_type = other DNA
aatactttgatgtggctttgaaaatactttttgttttctaacttggaagagacctgttaaattgctctgtgaaggtcacagacgcccttggaaaatggtgcttaagttct

SEQ ID NO: 31706 - DNA, 110 bp, synthetic construct
  source 1..110: mol_type = other DNA
gttaaattgctctgtgaaggtcacagacgcccttggaaaatggtgcttaagttcttttcagcagcagaaagtcctggttgaattagtgcagaccccatggagacttctga

SEQ ID NO: 31707 - DNA, 110 bp, synthetic construct
  source 1..110: mol_type = other DNA
tcctagttgctctcagggagaagaggactggttcgctccaagttgggccatcatagctggaagccaggatatattctgaagacacagtgaatgggatttgctgacaaatt

SEQ ID NO: 31708 - DNA, 110 bp, synthetic construct
  source 1..110: mol_type = other DNA
tataattgttttaatgtaggaaaaaaaaaaaaaacctgctcacttacagagctccgcatgcttcataaaatgctttgtgagtcgagttttatgtcagggaattttggaat

SEQ ID NO: 31709 - DNA, 110 bp, synthetic construct
  source 1..110: mol_type = other DNA
gcatgcttcataaaatgctttgtgagtcgagttttatgtcagggaattttggaatgcaggttggcacgttgtgccatacattgtagaatgaaaagaaagagaaatagtaa

SEQ ID NO: 31710 - DNA, 110 bp, synthetic construct
  source 1..110: mol_type = other DNA
ctggaaacaacctaaagtccaaaataaattgtttgaacgaattggataaattaaatctagaccacacaatactacagaatatcattcagtaattgattatggagctttgg

SEQ ID NO: 31711 - DNA, 110 bp, synthetic construct; identical to SEQ ID NO: 31710
  source 1..110: mol_type = other DNA

SEQ ID NO: 31712 - DNA, 110 bp, synthetic construct
  source 1..110: mol_type = other DNA
cagactctgcacacttcttgacactaagctaaataagcaaagccaatcaggatagaaaataatatccagggacttctgcatgtggccaagatagagtcataagccaaagt

SEQ ID NO: 31713 - DNA, 110 bp, synthetic construct
  source 1..110: mol_type = other DNA
cacaggttgagaagccaaagtagctaacaccgggtggaacttaaaagtgccaacacctaattagtcataacaatagctggcatattttgagcacaaatatttgtcaggaa

SEQ ID NO: 31714 - DNA, 110 bp, synthetic construct
  source 1..110: mol_type = other DNA
cctaattagtcataacaatagctggcatattttgagcacaaatatttgtcaggaattatgtttatctctgcaaatcctgacaacaaactttgagacagtttctatccctg

SEQ ID NO: 31715 - DNA, 110 bp, synthetic construct
  source 1..110: mol_type = other DNA
cagtcactgacatctgcttccaaactggaccccgtaggatgtagagagaaagctttaggtagctatcctcctgtcaccaaacctaaacttggggcctcgcctgcgcacag

SEQ ID NO: 31716 - DNA, 110 bp, synthetic construct
  source 1..110: mol_type = other DNA
taggtagctatcctcctgtcaccaaacctaaacttggggcctcgcctgcgcacagtaaggccaatctagtcacaccaggttgtggagaaggcaagtacagagtttactgc

SEQ ID NO: 31717 - DNA, 110 bp, synthetic construct; identical to SEQ ID NO: 31715
  source 1..110: mol_type = other DNA

SEQ ID NO: 31718 - DNA, 110 bp, synthetic construct; identical to SEQ ID NO: 31716
  source 1..110: mol_type = other DNA

SEQ ID NO: 31719 - DNA, 110 bp, synthetic construct
  source 1..110: mol_type = other DNA
tggggaggctttcccctacaccaccaagtaatgctactgacatcagctaggtgccttaccattcaactcagttttgatactatctacctggagccaaggacagatcccac

SEQ ID NO: 31720 - DNA, 110 bp, synthetic construct
  source 1..110: mol_type = other DNA
attagaattacgtaggcaagtcggccaagctctctttctgcataacgtctattcgcgtgccctctcccaccccaattcttttgcacttacctgaacaagccagatatctc

SEQ ID NO: 31721 - DNA, 110 bp, synthetic construct
  source 1..110: mol_type = other DNA
gccactgagccaagacaggaactccctccatcagtttttaaatgtaagctaacgtggatgtaacatttgcatcctcccatttttcaagtaaaatgtagcatagtttgcaa

SEQ ID NO: 31722 - DNA, 110 bp, synthetic construct
  source 1..110: mol_type = other DNA
cacacacacatatatacacattcacctccagggagtgccaagctgacattcactcttatgtgctctaatggctgcagcttatgtcaatgctgttgttttggagacaaaac

SEQ ID NO: 31723 - DNA, 110 bp, synthetic construct
  source 1..110: mol_type = other DNA
atctgtgcccaccttgatggcctcacttttcttagctgtgttctctggagaaatgtggctagatgtaatcgatggatcccacgcaaaaaaatccatagatcagtcagctg

SEQ ID NO: 31724 - DNA, 110 bp, synthetic construct
  source 1..110: mol_type = other DNA
aggaggattatgcatttgctgcaagaaaaatattaaaccttagaactaattcttaggccatgttgatggtgcttattaaaagcaaagtatagaatgtatcttctctgtac

SEQ ID NO: 31725 - DNA, 110 bp, synthetic construct
  source 1..110: mol_type = other DNA
gacttctatcctacaatccggggagttttgagagcccctcctgaaatgaaagagctaagaggggaaacgctagaggcttttgttgttgtttgtcttgctgggggtgggtg

SEQ ID NO: 31726 - DNA, 110 bp, synthetic construct
  source 1..110: mol_type = other DNA
taagaggggaaacgctagaggcttttgttgttgtttgtcttgctgggggtgggtgtgaggttgtgccagtaaccagagggagaaactaccgaaaaccctgaaagtgggga

SEQ ID NO: 31727 - DNA, 110 bp, synthetic construct
  source 1..110: mol_type = other DNA
ttcctgtgagccagtgttccaggagagccaagtagaagctgcacaactctttatgatctagcctgagaaattctgaagactcttgtgctgtactctattgctgaaagcag

SEQ ID NO: 31728 - DNA, 110 bp, synthetic construct
  source 1..110: mol_type = other DNA
cagtgcctggataaatatccagccagttttcggtttagagacccagtaattttggccttttaaaaacttgagaggttgagacactgctttgggaaaacaagtgttctccg

SEQ ID NO: 31729 - DNA, 110 bp, synthetic construct
  source 1..110: mol_type = other DNA
attggtataatagaattttaggtggtagcattctcaaatgtcccattgtattcagtaaaaatagctttcccctcaggaactgtgcagtacacctggtacacccaggagtg

SEQ ID NO: 31730 - DNA, 110 bp, synthetic construct
  source 1..110: mol_type = other DNA
gggatgagagcctggcttagaacatctgctggccaagggaggtctgagagaggttcacagctgcctgccacctccccactgcagatcggggggagggggggtgtggtcca

SEQ ID NO: 31731 - DNA, 110 bp, synthetic construct
  source 1..110: mol_type = other DNA
caccaggtgattaccccaaagagttccctactccatcagttctgtaagtttaactattgtgtatcatgttaatttctaagagagctgtactgtaactattttgttctttt

SEQ ID NO: 31732 - DNA, 110 bp, synthetic construct
  source 1..110: mol_type = other DNA
agggaggaggaagtcctcttgtacagggttgcgggtgatgagggatgcccctctcccagctgcccacagatgtactgcaggtgatgcaggagcttagccaaaatctcaga

SEQ ID NO: 31733 - DNA, 110 bp, synthetic construct
  source 1..110: mol_type = other DNA
tctcatacttccataaaataccttaagacattcttgcctcatcttggcgctaagtacttgtagataattatcataacctcttcgatagcgtttggtgaaattcaaagatt

SEQ ID NO: 31734 - DNA, 110 bp, synthetic construct
  source 1..110: mol_type = other DNA
acttgtagataattatcataacctcttcgatagcgtttggtgaaattcaaagatttcagacctttcattccttgttaaagaaggcttctgcagctagtccttttgaagct

SEQ ID NO: 31735 - DNA, 110 bp, synthetic construct
  source 1..110: mol_type = other DNA
agtgcaaggctgagatccgagctctgtctctccttggagcagggatttcaagccgcctttctcgaaggccctggggtacagctcaaatgactcatagtgtcagggaaatg

SEQ ID NO: 31736 - DNA, 110 bp, synthetic construct
  source 1..110: mol_type = other DNA
ggggcagatcctgtggtgcctctcacattaaactgcaaagcattataattcagctttgaccaaatgtaaccactatctagactgcttgatgtgagatggtcacaatttca

SEQ ID NO: 31737 - DNA, 110 bp, synthetic construct
  source 1..110: mol_type = other DNA
ttgaccaaatgtaaccactatctagactgcttgatgtgagatggtcacaatttcaaaatttgccaaagatcccaaatttagcattttgcctgagtgaaaaaagaagcagg

SEQ ID NO: 31738 - DNA, 110 bp, synthetic construct
  source 1..110: mol_type = other DNA
cagccactcctggctcttccaggctaccttgagagctgagagaggcagtagtatctctggcagcgggattctttcacttatacgcatataaaaattatcttgtagcatta

SEQ ID NO: 31739 - DNA, 110 bp, synthetic construct
  source 1..110: mol_type = other DNA
tctggcagcgggattctttcacttatacgcatataaaaattatcttgtagcattaatggtgttcatacacctggttcttcaggcaaaacatcaaaaggcggaaaggaaac

SEQ ID NO: 31740 - DNA, 110 bp, synthetic construct
  source 1..110: mol_type = other DNA
agatctataaggcacattccttacttcaaggaactcacgaataggaatatatacatacaccatcctctacggccaggtttctcaaccttggcgctactgacatttagggc

SEQ ID NO: 31741 - DNA, 110 bp, synthetic construct
  source 1..110: mol_type = other DNA
tctgagaaattaagtggcttgcccaagtctacacagtagcagaagctactactggacattctgcttctcaagctttacacattcataaagaaataccaatttaataaagt

SEQ ID NO: 31742 - DNA, 110 bp, synthetic construct
  source 1..110: mol_type = other DNA
acattctgcttctcaagctttacacattcataaagaaataccaatttaataaagtggcgaaggaaccaatctactgtgtgatataagatatacgtgtactatctaaattc

SEQ ID NO: 31743 - DNA, 110 bp, synthetic construct
  source 1..110: mol_type = other DNA
gaaattgctgccaccccctccccctctgctccatcccttactggctgtgaagctttgagcaacttaacactttcctgcctctgtgttcttattgatgagacagggcttct

SEQ ID NO: 31744 - DNA, 110 bp, synthetic construct
  source 1..110: mol_type = other DNA
tgagcaacttaacactttcctgcctctgtgttcttattgatgagacagggcttctgagatctacttcataaggatgttgtcagaactaagatcatacgatctatggtgtt

SEQ ID NO: 31745 - DNA, 110 bp, synthetic construct
  source 1..110: mol_type = other DNA
tatctatacccacagaagaaaatgaggttacctattaacctgtgcagagctctcccattcccaaaattaaatgtaaaaaataggcctcctaggacccccattcctctcca

SEQ ID NO: 31746 - DNA, 110 bp, synthetic construct
  source 1..110: mol_type = other DNA
cattcccaaaattaaatgtaaaaaataggcctcctaggacccccattcctctccagcaacaaccacatttctctccagcctctaatagaggaggttcagcatggggttct

SEQ ID NO: 31747 - DNA, 110 bp, synthetic construct
  source 1..110: mol_type = other DNA
caaagcatggatgtcaagactaacagagttgatgtgtacaaagtgcctgatatcgtgcctggacttatcaagctctcagtgtaaacactggctgaaatcaccactattat

SEQ ID NO: 31748 - DNA, 110 bp, synthetic construct
  source 1..110: mol_type = other DNA
gacacacacaggaacacacatgtatacacagacacacgtgtgtaaaacaggcctttcacataaccacccacatggatgcacatattcccacatccacacattcacccctt

SEQ ID NO: 31749 - DNA, 110 bp, synthetic construct
  source 1..110: mol_type = other DNA
tcacataaccacccacatggatgcacatattcccacatccacacattcaccccttccacccaaatagcacacacccagtagcacgtatacacacacagccacagacacat

SEQ ID NO: 31750 - DNA, 110 bp, synthetic construct
  source 1..110: mol_type = other DNA
tggcctgaacagaggtagtgcaaggggggagaaagagaaaggtctgtattggatagagtcagccagttgaatcaacagaacgtggtcatttatgggatgtcaaaagcgaa

SEQ ID NO: 31751 - DNA, 110 bp, synthetic construct
  source 1..110: mol_type = other DNA
cagatcaacaggggaccaactaatcctcaggaggctgtttcttttaggcaggagggtgtgaggtgtggaggtactgagctctggccacctggtatatccgtcctgtcctc

SEQ ID NO: 31752 - DNA, 110 bp, synthetic construct
  source 1..110: mol_type = other DNA
agtgaggtgtaggtactccttaatatttggaacagatgtgttttgaaagaaatagaaccaacaactgtgcataagaaagcaactttcctattagagatatgaaaagactt

SEQ ID NO: 31753 - DNA, 110 bp, synthetic construct
  source 1..110: mol_type = other DNA
aaccaacaactgtgcataagaaagcaactttcctattagagatatgaaaagacttcactgttatagtctaggatgacatcatgagcagcaggacttctgcatagttcttc

SEQ ID NO: 31754 - DNA, 110 bp, synthetic construct
  source 1..110: mol_type = other DNA
agcccactggacctttgacctaaactagccttctctctgctcgcccgcaccgatttcacccctaaggggaactcaggcccggctttcacaagaggcaggtctagtgagcc

SEQ ID NO: 31755 - DNA, 110 bp, synthetic construct
  source 1..110: mol_type = other DNA
tgagatgcagtttggggccagtgttattatagcctcagaatttttaagtgaaggtagataaattttatatgaggtcttctaatttgtaaatgttgatagctgatttaaac

SEQ ID NO: 31756 - DNA, 110 bp, synthetic construct
  source 1..110: mol_type = other DNA
gagtgaatgtcgacacgttgactagtactttaactctcagtcagtgcatttgttcctggtaggttttatttcctgaaccctgttttactcattagttacccagatttcta

SEQ ID NO: 31757 - DNA, 110 bp, synthetic construct
  source 1..110: mol_type = other DNA
gttcagagaaattcagaagtccaaaaaaattcctcgagctccaattgcttaccggttctgtaaataggaaggatttatgcacactggtctgcaaactggtcttgtgtttg

SEQ ID NO: 31758 - DNA, 110 bp, synthetic construct
  source 1..110: mol_type = other DNA
gaaggttcccacgtagagcttttttcacggggatgcaagcctataaagtttggactggaaaagacaattccgaaaccaggagagacgctggtgccaaggaccaataaact

SEQ ID NO: 31759 - DNA, 110 bp, synthetic construct
  source 1..110: mol_type = other DNA
taaaaaaccttcctgctttggttacttcttcaggtctttattttcttgtgaaagctcccatgtacataaaaattcaatagaatacggatgcttttctcctacgggaaaaa

SEQ ID NO: 31760 - DNA, 110 bp, synthetic construct
  source 1..110: mol_type = other DNA
tcccatgtacataaaaattcaatagaatacggatgcttttctcctacgggaaaaaaatacatgagatttgaccatgctcgaattttggtatccatggggcttctggaacc

SEQ ID NO: 31761 - DNA, 110 bp, synthetic construct
  source 1..110: mol_type = other DNA
tataaatcaactatacttcaaaaaaaattgcctgataaggagagaaaactgcagcctcattcctgtcataaactggagggactgcaaatcttcaggggaaggaagagacg

SEQ ID NO: 31762 - DNA, 110 bp, synthetic construct
  source 1..110: mol_type = other DNA
atagaaacacgatcctctattaaaactgcatgagatgaacagtgtccctgaagaaagctttttaaagaaaactagtcctgccatttgctggggccaaaatacacactcaa

SEQ ID NO: 31763 - DNA, 110 bp, synthetic construct
  source 1..110: mol_type = other DNA
agtaagaagcaagggagagtggaaggaccaggaacagaactcccagtggcctcagaaagacaggccagctcatggggccagtactagatgtgtcatatcagcccctcctt

SEQ ID NO: 31764 - DNA, 110 bp, synthetic construct
  source 1..110: mol_type = other DNA
aaagacaggccagctcatggggccagtactagatgtgtcatatcagcccctccttcagcactgagccacctgcaatgggtaaagactgagcatcccaggggctctgctga

SEQ ID NO: 31765 - DNA, 110 bp, synthetic construct
  source 1..110: mol_type = other DNA
ttagacaattcaaggcatcttaatctccattaagaacaaaaaaataataatttctgtcatgctgttaaatccatcattaaggataaaaccggtgcaaattggtcaaacag

SEQ ID NO: 31766 - DNA, 110 bp, synthetic construct
  source 1..110: mol_type = other DNA
ttagcacagtgctagttttattagcttcttttaataaaatttattggcacagtgcctgacattaaaaacaaacaaacaaacaaacaaactccagtgttacctattaagac

SEQ ID NO: 31767 - DNA, 110 bp, synthetic construct
  source 1..110: mol_type = other DNA
tctgaacccatatcctgccaaattctttctctaggcttgcaccctgttttcttgtcctttccagcaccaggataaagcttaagtcttctctggtcgcccctcagacttgg

SEQ ID NO: 31768 - DNA, 110 bp, synthetic construct
  source 1..110: mol_type = other DNA
cagggaaggaaaagaagccagaagaaggagcgtgttttcagatgaatcagttggagtgcagtcatgctgggaaactcagagtcgtctcgctaggggaccaggaagctaga

SEQ ID NO: 31769 - DNA, 110 bp, synthetic construct
  source 1..110: mol_type = other DNA
gtgcagtcatgctgggaaactcagagtcgtctcgctaggggaccaggaagctagaatatttatccactgactcctgtcagttgagagttggtgtgaggagcattagcttc

SEQ ID NO: 31770 - DNA, 110 bp, synthetic construct; identical to SEQ ID NO: 31768
  source 1..110: mol_type = other DNA

SEQ ID NO: 31771 - DNA, 110 bp, synthetic construct; identical to SEQ ID NO: 31769
  source 1..110: mol_type = other DNA

SEQ ID NO: 31772 - DNA, 110 bp, synthetic construct
  source 1..110: mol_type = other DNA
cctggtcctttctctactgctccggttcctccaggtttgcttcctgcagggccacttggaaagcattagtgctgtcactgcccagcatgaaagcagcgctgatggtgcca

SEQ ID NO: 31773 - DNA, 110 bp, synthetic construct
  source 1..110: mol_type = other DNA
tgtcattgatatccattcagtttagtttttagatacttaaaatcagcccttttgggtagcataataggtgattctgattgctctaggtagcaattttgtatatccatctg

SEQ ID NO: 31774 - DNA, 110 bp, synthetic construct
  source 1..110: mol_type = other DNA
gtagcataataggtgattctgattgctctaggtagcaattttgtatatccatctgatagctaagtctatcaggattatatatttgtgttcagggatttgttgtcttgtgt

SEQ ID NO: 31775 - DNA, 110 bp, synthetic construct
  source 1..110: mol_type = other DNA
ggttgccagggctacagcagcatagcaggtagaaagaggctgcactaaggggctgacagttggggaattggccagacgcccttagagagctaacttgacattttaaattt

SEQ ID NO: 31776 - DNA, 110 bp, synthetic construct
  source 1..110: mol_type = other DNA
acagttggggaattggccagacgcccttagagagctaacttgacattttaaatttttttcttttatttagatataattgacatataatcttacattagtttcaggtatac

SEQ ID NO: 31777 - DNA, 110 bp, synthetic construct
  source 1..110: mol_type = other DNA
agagaggtttggcctgtgataggtctgactctgaataaacgctcattctctcacgctctctcccttctcttcaccccattccatgtatgctagagatgaaatgaaaatgg

SEQ ID NO: 31778 - DNA, 110 bp, synthetic construct
  source 1..110: mol_type = other DNA
tcaaggggtcgtgggtaaggaggggctctgtgctctcagatccaagtttacttgggtctgtggaggtctacaacgtggggagtggggatagggccagcaaggtgagcatc

SEQ ID NO: 31779 - DNA, 110 bp, synthetic construct
  source 1..110: mol_type = other DNA
gtctgtggaggtctacaacgtggggagtggggatagggccagcaaggtgagcatctcacagtgttggagccgaaagagattctatcaatcattcttcaccttgaagggga

SEQ ID NO: 31780 - DNA, 110 bp, synthetic construct
  source 1..110: mol_type = other DNA
aaaaacatggacccacgaaaaggcctctgttaagtgtcctagacatcagggatcctgactgcaggcgactgaactctggcatctgcttgacagaactgaaagcttcagag

SEQ ID NO: 31781 - DNA, 110 bp, synthetic construct
  source 1..110: mol_type = other DNA
tgactgcaggcgactgaactctggcatctgcttgacagaactgaaagcttcagagctgtccccggagcaacagagagagccgcatttccattctccattcaaacccccaa

SEQ ID NO: 31782 - DNA, 110 bp, synthetic construct
  source 1..110: mol_type = other DNA
tgtggaagtggagttttgaggctaaataagttgggtgaaacttacctaaaacgggacttctcaggacctacaatgtgtagctctatgttatgaacagccaagagggagta

SEQ ID NO: 31783 - DNA, 110 bp, synthetic construct
  source 1..110: mol_type = other DNA
acttctcaggacctacaatgtgtagctctatgttatgaacagccaagagggagtacagtgtatagtgttcccaagtatattttaccacaaagaccttctcatttctaccc

SEQ ID NO: 31784 - DNA, 110 bp, synthetic construct
  source 1..110: mol_type = other DNA
tttcccttctctggtgtcccatccagacacctgccgcttgtaccattttggtgaactctgtgggagggctgagtggatgtctgcttagtactttctccagatgtcccata

SEQ ID NO: 31785 - DNA, 110 bp, synthetic construct
  source 1..110: mol_type = other DNA
tcacaggcaggtttttcaaagggcagccttcagacctccgatgctaattctcagccggacgtcaggtttgccccatcttttcccttctgccagccccaccctctgggatc

SEQ ID NO: 31786 - DNA, 110 bp, synthetic construct
  source 1..110: mol_type = other DNA
gctgtgccttgatgtgaactccccatgtctctcactttaaatcaaaagctagaagtgattaagcttagtaaggaagacacattgaaagccaagataggctaaaagttagg

SEQ ID NO: 31787 - DNA, 110 bp, synthetic construct
  source 1..110: mol_type = other DNA
tgattaagcttagtaaggaagacacattgaaagccaagataggctaaaagttaggcctcttgtgccaaacagttaaccaagttgtgaatgcaaaggaaaagttcctgaaa

SEQ ID NO: 31788 - DNA, 110 bp, synthetic construct
  source 1..110: mol_type = other DNA
agggggttgagaggaaatcctcagtctctccagcaatcacagtttctagctagtatttcccttggtgcctggcacgtgatgttccctcagttcaatgcaaagggagcagt

SEQ ID NO: 31789 - DNA, 110 bp, synthetic construct
  source 1..110: mol_type = other DNA
tttcccttggtgcctggcacgtgatgttccctcagttcaatgcaaagggagcagtgggagcagggaaataggcatctcttttgaaaaggccagcagcaaccacttaagat

SEQ ID NO: 31790 - DNA, 110 bp, synthetic construct
  source 1..110: mol_type = other DNA
tcgcttggcaggatcctgcaaaggatgctgggtttgagggtggggagaagagctgaggccaaagtgggaagaccttgaatgtcgccctgaggctcaggctgaatttctga

SEQ ID NO: 31791 - DNA, 110 bp, synthetic construct
  source 1..110: mol_type = other DNA
aggccaaagtgggaagaccttgaatgtcgccctgaggctcaggctgaatttctgaggcagccgcacgccatcgaagcttctgagtgtttttacagcggaaacacttaccc

SEQ ID NO: 31792 - DNA, 110 bp, synthetic construct
  source 1..110: mol_type = other DNA
tttcagatggtgaaagccctgcatgagggatctggccagacagcatgtggtgaacttgtggttcacagctgcatctgccctgctgagcagaagctttgactgatttcagg

SEQ ID NO: 31793 - DNA, 110 bp, synthetic construct
  source 1..110: mol_type = other DNA
aattctgaaatgctatcaatgttttttttcttgggtaatggggctaagtgtgctttttcttctgtctcctttcctgggttttccaaatcttctttaatatgcatgttcta

SEQ ID NO: 31794 - DNA, 110 bp, synthetic construct
  source 1..110: mol_type = other DNA
aatgtacatttgtacattatccagttcgtattttaagccagaacgaaggcctttggacaagagacacactacttggtctccatctcacctttcaggtcggaatgccttca

SEQ ID NO: 31795 - DNA, 110 bp, synthetic construct; identical to SEQ ID NO: 31794
  source 1..110: mol_type = other DNA

SEQ ID NO: 31796 - DNA, 110 bp, synthetic construct
  source 1..110: mol_type = other DNA
aggtttggactattgctttttctctctaggaatagggcttagcctggacttggcttccagctcgccccttatatctaacagtgaaatggaaccaacacacactagaatcc

SEQ ID NO: 31797 - DNA, 110 bp, synthetic construct
  source 1..110: mol_type = other DNA
atgagtactaacacttccttcctcacatatagaaaaattggaactaaaaaatattgaaattacagtataaggaaattcatagtaggacgtgtccctgtgattgtcagcca

SEQ ID NO: 31798 - DNA, 110 bp, synthetic construct
  source 1..110: mol_type = other DNA
atgtcaataaacaaaatgcctgctttcatgaactaacatctaattaagacaaacgcaaaggaataaatctataatattttagacagggagacaaataggaacggggagtg

SEQ ID NO: 31799 - DNA, 110 bp, synthetic construct
  source 1..110: mol_type = other DNA
ctcaggcgacagagcaacattttcgactgcttggggcctctaagccacctgtcactcatcctctttcctggcccagaggtttgggtctcttgtggttgttcacagctccc

SEQ ID NO: 31800 - DNA, 110 bp, synthetic construct
  source 1..110: mol_type = other DNA
tcatcctctttcctggcccagaggtttgggtctcttgtggttgttcacagctcccactgccatgacatgggtgggatggcaccttgcgggccaggtagaacgatggcact

SEQ ID NO: 31801 - DNA, 110 bp, synthetic construct
  source 1..110: mol_type = other DNA
aaaaatgaacaatctaggttatcattagaaacatttcaaagagagaacagtaatcttctccttcaaagccctttactcacaattcttcctcaactaaaggtcacggtaaa

SEQ ID NO: 31802 - DNA, 110 bp, synthetic construct; identical to SEQ ID NO: 31801
  source 1..110: mol_type = other DNA

SEQ ID NO: 31803 - DNA, 110 bp, synthetic construct
  source 1..110: mol_type = other DNA
gcatggaatacacctagaggtacacaaacagaaataaatgaataatgaataaatgaaaagtcttcagctttactgaaccaaggctcagtaacctgctcccaggtaatggc

SEQ ID NO: 31804 - DNA, 110 bp, synthetic construct
  source 1..110: mol_type = other DNA
aaaagtcttcagctttactgaaccaaggctcagtaacctgctcccaggtaatggctgaaagatactacagcatgcctcctccgtgtctcatggaggctgacacataaact

SEQ ID NO: 31805 - DNA, 110 bp, synthetic construct
  source 1..110: mol_type = other DNA
atggcaggatataaacagatatatagatgtaatcaagcttcctcctccaccaatgaaaacagatcttctgcatggccgaactccaccttgcctcctcagaggccctttca

SEQ ID NO: 31806 - DNA, 110 bp, synthetic construct
  source 1..110: mol_type = other DNA
aaatgagcccttttccttttcttgccatttttatcaaagttcaacctttcatcatcatgtaagtagtcaaagctgttacaagcctactgctgacacatcaaacgctttat

SEQ ID NO: 31807 - DNA, 110 bp, synthetic construct
  source 1..110: mol_type = other DNA
catgtaagtagtcaaagctgttacaagcctactgctgacacatcaaacgctttatctacagtctggcccacttccagggagatgaaaagaactatcattcagaactcaca

SEQ ID NO: 31808 - DNA, 110 bp, synthetic construct
  source 1..110: mol_type = other DNA
aatgacagatgccagtcctgaattaccaaggagaataccccagggctgcccttgactatccccatctagctagacttggctgaggactccctcctaaaacaaagaataat

SEQ ID NO: 31809 - DNA, 110 bp, synthetic construct
  source 1..110: mol_type = other DNA
ccctgctacatctgagcaatcatgggatcttgaaaaacatcatgtcaccccccaagcatctctatttccccatttgttaagtcagaactagaataagcaccacctggggg

SEQ ID NO: 31810 - DNA, 110 bp, synthetic construct
  source 1..110: mol_type = other DNA
gcatctctatttccccatttgttaagtcagaactagaataagcaccacctggggggtgaatataacattatctatgaacacctaaaaactggggtttgtctactccaaaa

SEQ ID NO: 31811 - DNA, 110 bp, synthetic construct
  source 1..110: mol_type = other DNA
tctcttccacatggcctctcattctccactagactccactgggcttctttacacggaagctgggctccaagaaagaatgcaagagccttcaaggtttctagaggcccagg

SEQ ID NO: 31812 - DNA, 110 bp, synthetic construct
  source 1..110: mol_type = other DNA
gacgactttttaaacaatcaagttcagctttcatattcttattaacaaaagcaggttacaggaatttccacccatttgttcaaatatttgctaagcaattaccatgtgca

SEQ ID NO: 31813 - DNA, 110 bp, synthetic construct
  source 1..110: mol_type = other DNA
tgaagtctgggaacttgcctgaggtcgaactcaagcagaaggtccaagatgtgaacaccaagctgtcctacccccagggctggcacattcttcccaccctgcatggccag

SEQ ID NO: 31814 - DNA, 110 bp, synthetic construct
  source 1..110: mol_type = other DNA
caccaagctgtcctacccccagggctggcacattcttcccaccctgcatggccagaagcaggtcacatttgataagacttttctttaaggattaaattcacttgcccttc

SEQ ID NO: 31815 - DNA, 110 bp, synthetic construct
  source 1..110: mol_type = other DNA
gctcggattctgcattgttgtggttgtggtataggtcagcggttacagttctgatttgacccctgtcctgggaacctccatatgccacgactgtggccctaaaacacaaa

SEQ ID NO: 31816 - DNA, 110 bp, synthetic construct
  source 1..110: mol_type = other DNA
ttgacccctgtcctgggaacctccatatgccacgactgtggccctaaaacacaaaaaccctaacagcccaatgaaatctcccattttacagaaaaggagattgaggccca

SEQ ID NO: 31817 - DNA, 110 bp, synthetic construct
  source 1..110: mol_type = other DNA
gctttgggcctcttctgataaagcaaaacctccacagaagtcacatgctctcatctctgacctgatatccactggtccccagcttagtcaccacgaaggctccagaaatt

SEQ ID NO: 31818 - DNA, 110 bp, synthetic construct
  source 1..110: mol_type = other DNA
tttgactatttaaaaaacgtctttttcaatttgcccatccctactcctgggtcttcttttctgacactaaacaaaagctctcaggcactccttttctcactgacactgac

SEQ ID NO: 31819 - DNA, 110 bp, synthetic construct
  source 1..110: mol_type = other DNA
cttttctgacactaaacaaaagctctcaggcactccttttctcactgacactgacagagaaagtcattttgcaaagtggatatttatttaagtgactgggcgttgattta

SEQ ID NO: 31820 - DNA, 110 bp, synthetic construct
  source 1..110: mol_type = other DNA
agatcccacatcaggctgctgtacaccatagatagaaaaaagtttttccacctcctccaaagtataacccctcataaaactatatattctctatgactcccagttcagta

SEQ ID NO: 31821 - DNA, 110 bp, synthetic construct
  source 1..110: mol_type = other DNA
cccatcctcccatcctgaccgcaatccaaccaaacatcagaatggatgggactcatctgaattatattagccaactgtattacgctatttacatttttgaaacatggtat

SEQ ID NO: 31822 - DNA, 110 bp, synthetic construct
  source 1..110: mol_type = other DNA
atcagaatggatgggactcatctgaattatattagccaactgtattacgctatttacatttttgaaacatggtatcgtgagatcactccagtaaaattttccttaaaaat

SEQ ID NO: 31823 - DNA, 110 bp, synthetic construct
  source 1..110: mol_type = other DNA
gtggggaactgctcaccacaaaactttcaggctctcagaaatccattctggccagaatgccagaaagataagctgaccactcacatcttagtttacgaattcaggcgagt

SEQ ID NO: 31824 - DNA, 110 bp, synthetic construct
  source 1..110: mol_type = other DNA
agataaaatttaactacttttttccagtaaacctgaaagctaagccaagtattcacagttccattttacagtaatataaactgaggctcaaggtcatgaaataagtggca

SEQ ID NO: 31825 - DNA, 110 bp, synthetic construct
  source 1..110: mol_type = other DNA
gtttggggtagtttgctacagagtaaatttgttcaatgttacaggtagcatttcagctcagtgaggaataatggattatgcaataagcagggactgagacaactagctaa

SEQ ID NO: 31826 - DNA, 110 bp, synthetic construct
  source 1..110: mol_type = other DNA
ctataccacatctgagtgccatttatctccttgctccaccacggtttctgcaacactcccagtgcaattatgttttaattttcacatacttctgctaaacttttaagtac

SEQ ID NO: 31827 - DNA, 110 bp, synthetic construct
  source 1..110: mol_type = other DNA
ttccaggtagatagtgccagcattgagttaaattgtaggacacacacctgatattaagatctgcaaaggaagcttggtacccttcctacccaatcctttgttactccaac

SEQ ID NO: 31828 - DNA, 110 bp, synthetic construct
  source 1..110: mol_type = other DNA
gaccaatcaaagttggttcaggcactgctggaaggaaatctatgtccaagtctgtggtctttccatcgcttcttaaaggcaaacaatgggaatgtttgttaatgccaagc

SEQ ID NO: 31829 - DNA, 110 bp, synthetic construct
  source 1..110: mol_type = other DNA
ctgtgtgcgggatgcagagaaacattaggggacaatgcagtacctctgggggttggtagagggtgctgttggtacgcctgggcctaaaggatctaaggatagaggaggag

SEQ ID NO: 31830 - DNA, 110 bp, synthetic construct
  source 1..110: mol_type = other DNA
tcacaatggtatgcttattacagtcagtatcctaccctggaagttcccatcgtggctcagcgggttaagaacccaacatggtatctgtgaggattcggattcaatccctg

SEQ ID NO: 31831 - DNA, 110 bp, synthetic construct; identical to SEQ ID NO: 31830
  source 1..110: mol_type = other DNA

SEQ ID NO: 31832 - DNA, 110 bp, synthetic construct
  source 1..110: mol_type = other DNA
tttcacctcgcctgcttgtaagcacaagtgcctgggccagagatcaaacctatgccacagctgtaaccagagccacagcattgacagcaaggggaaatctgtggtttatt

SEQ ID NO: 31833 - DNA, 110 bp, synthetic construct
  source 1..110: mol_type = other DNA
cacagctgtaaccagagccacagcattgacagcaaggggaaatctgtggtttattttttaagaaacattgtttcggagttcctgtggtggtggcacagcagaaatgaacc

SEQ ID NO: 31834 - DNA, 110 bp, synthetic construct
  source 1..110: mol_type = other DNA
cacagtatcatcagaattaaaataagggtttctgtatgttggaaaacaaagggccaacaacctttacgcattatatcagccttcagaggacgtgcttactttggatttat

SEQ ID NO: 31835 - DNA, 110 bp, synthetic construct
  source 1..110: mol_type = other DNA
gctataacagatttgttaaaaccaggttcttagctgccattctctgctttgaaaggtaagtataattttaaaaagctgctttcggttagcaaaaagaaaataacccaccc

SEQ ID NO: 31836 - DNA, 110 bp, synthetic construct
  source 1..110: mol_type = other DNA
gtaagtataattttaaaaagctgctttcggttagcaaaaagaaaataacccaccctaggtttctcatctttcattgcattatggcagaatcttctgcgttctcttccatc

SEQ ID NO: 31837 - DNA, 110 bp, synthetic construct
  source 1..110: mol_type = other DNA
gagcctaatcctttaaaaaaagagaatcctggggttccggctgtggcacagtgagttaatgagccagcttgtctctgtgaagatgctggttcaatccctggcctggtgca

SEQ ID NO: 31838 - DNA, 110 bp, synthetic construct
  source 1..110: mol_type = other DNA
gcacagtgagttaatgagccagcttgtctctgtgaagatgctggttcaatccctggcctggtgcagtggattaaggatcagagttgctgctgctgtggcataggtcacat

SEQ ID NO: 31839 - DNA, 110 bp, synthetic construct
  source 1..110: mol_type = other DNA
ttctgctctgcatccttatccatgtcgcactggatgccctcatcaactgtgctgagctgggccgaccagggaggggagaaaccgtggtcctcatagttattctctacctc

SEQ ID NO: 31840 - DNA, 110 bp, synthetic construct
  source 1..110: mol_type = other DNA
actgtgctgagctgggccgaccagggaggggagaaaccgtggtcctcatagttattctctacctcctcttcatactcatcttcatcctggttcccactctccttctgctc

SEQ ID NO: 31841 - DNA, 110 bp, synthetic construct
  source 1..110: mol_type = other DNA
cagctggaagggactagatcatctggtagcagatgctgacttttagtatttaatatgagttgaaaatgtctttattatttttatgaaaagaatacaagcttgttgaaaag

SEQ ID NO: 31842 - DNA, 110 bp, synthetic construct
  source 1..110: mol_type = other DNA
aggctacttaaggggacagctgcagggaggaagtgggcgtggcgattttccccaacttccttgtttggagcaaacttttggcagcatctaagcggtttagatgtttgctt

SEQ ID NO: 31843 - DNA, 110 bp, synthetic construct
  source 1..110: mol_type = other DNA
tcagccctggcgctcacgctttggaggaagaggagctaggacatggatgcccagggccttgtcaccagacagcttggcatgcactctcttgggccttcctctcttgtcac

SEQ ID NO: 31844 - DNA, 110 bp, synthetic construct
  source 1..110: mol_type = other DNA
gccttgtcaccagacagcttggcatgcactctcttgggccttcctctcttgtcacctggcaggaatttgggagccccatatctgtaactccaaatagcaggtccatacga

SEQ ID NO: 31845 - DNA, 110 bp, synthetic construct
  source 1..110: mol_type = other DNA
aaatcaatcctggaacttcccaaaggaatactaggcagtttgacaaatgaatcatccagcagatggtaagacttggatttttcgcatgctttgcagatgctagcatgctt

SEQ ID NO: 31846 - DNA, 110 bp, synthetic construct
  source 1..110: mol_type = other DNA
ccagcagatggtaagacttggatttttcgcatgctttgcagatgctagcatgcttcaaggtagtttatgcattgaacattttccccttagttatgggagaggtggtttct

SEQ ID NO: 31847 - DNA, 110 bp, synthetic construct
  source 1..110: mol_type = other DNA
gtcaagtgtcagtgtgaggctttcatgggctaacatgcttgcaaagggggtagtacatatttacatagaatagagaatagccattgtggttgttattattattattactg

SEQ ID NO: 31848 - DNA, 110 bp, synthetic construct
  source 1..110: mol_type = other DNA
aggactctagtgctagatgatgggagtggtagtagcaataatgacggtacaaagagctaatagttattgatcatttattatgtgctagatacaagaaatgacggtctctg

SEQ ID NO: 31849 - DNA, 110 bp, synthetic construct
  source 1..110: mol_type = other DNA
tggtttttcctgttctctcctggtgagtcctcccttttctttccagccaggggctgatttgcaggtgccctaaggcagcaagtagctcacctgcttactgtggctctcag

SEQ ID NO: 31850 - DNA, 110 bp, synthetic construct
  source 1..110: mol_type = other DNA
gatttgcaggtgccctaaggcagcaagtagctcacctgcttactgtggctctcagtaagaagcaccttttaccctgtgacctggtatgtgttcacactgatgcacacata

SEQ ID NO: 31851 - DNA, 110 bp, synthetic construct
  source 1..110: mol_type = other DNA
taagggcttatcctaactgcctcattttaacttaattgcttctttaaagatatttccaaacacagtcaaagtctgagacactgaaggttgggaagtcaagatatgagttt

SEQ ID NO: 31852 - DNA, 110 bp, synthetic construct
  source 1..110: mol_type = other DNA
tcactgtagttaatatatttaaagcaaaagcaaatacaggattcaccaattgatcaccatccacgaatgagcttatactgtaatatataaaaagttaacatgctcttagg

SEQ ID NO: 31853 - DNA, 110 bp, synthetic construct
  source 1..110: mol_type = other DNA
atgtattatgccaccacgtaggttcaagtgtcgctaaaaaacatcttacatagattgagatttaggaggttttaaaaatgctgcatgaggaagttccagttcagtggggg

SEQ ID NO: 31854 - DNA, 110 bp, synthetic construct
  source 1..110: mol_type = other DNA
tgagatttaggaggttttaaaaatgctgcatgaggaagttccagttcagtgggggctcacactgcttctgaggggagaactccaaagcattagaccatatatatatatat

SEQ ID NO: 31855 - DNA, 110 bp, synthetic construct
  source 1..110: mol_type = other DNA
gatagtatctattgtctccttgctataaaaattagtatacttcctcccgactcttcccacaacacctggttttattaaattgcttaattcttatcgtctgtacctttgtt

SEQ ID NO: 31856 - DNA, 110 bp, synthetic construct
  source 1..110: mol_type = other DNA
cccacaacacctggttttattaaattgcttaattcttatcgtctgtacctttgttatttaaacatagctttattccttatatgtcagctttgaattataaatttgcaccc

SEQ ID NO: 31857 - DNA, 110 bp, synthetic construct
  source 1..110: mol_type = other DNA
agcccctgctacgccaggctgcatgacacaggaggtgcatcctgtccttgttggctggttggagctcactgggtgtcacagtgatctttgttgcccacctccagctagct

SEQ ID NO: 31858 - DNA, 110 bp, synthetic construct
  source 1..110: mol_type = other DNA
gtgttcctgaaattatcaaagcttcctcctgaaactccagcactgctccaggggcatcacattaactcctagcctacctatagcaaagtgactcttagatgataaaataa

SEQ ID NO: 31859 - DNA, 110 bp, synthetic construct
  source 1..110: mol_type = other DNA
gtgagcccaggacccacgacaagcccataggcactaccctggctgcctggcagtgaggagctggcaaagattgtatacagtggtcatccctccacacgaagctgccagga

SEQ ID NO: 31860 - DNA, 110 bp, synthetic construct
  source 1..110: mol_type = other DNA
agaatgaatgggcctgtggagaatgaattcactgcccttccccatgcttgcttccttctagctaagctagtagaattttcaaaattctgagatttgtctggattctgaga

SEQ ID NO: 31861 - DNA, 110 bp, synthetic construct
  source 1..110: mol_type = other DNA
ttctagctaagctagtagaattttcaaaattctgagatttgtctggattctgagaaatctccaccagagaggcagcacaatgagggaactgagcctaatccccactgcgt

SEQ ID NO: 31862 - DNA, 110 bp, synthetic construct
  source 1..110: mol_type = other DNA
taaaatcctggattttaagagattttaaaccaagcttgagccctttaccccagtgtgcagttgcttctcattaataagtactggactgagtgtgaacctgtgtaggtcat

SEQ ID NO: 31863 - DNA, 110 bp, synthetic construct
  source 1..110: mol_type = other DNA
ctgcaacaaaaaagaggagatgaacttaatttccttttttctcatggaagattttctcatcctcaagctaaacaacatgggattgatttccacattcaagactctatagg

SEQ ID NO: 31864 - DNA, 110 bp, synthetic construct
  source 1..110: mol_type = other DNA
ctcatcctcaagctaaacaacatgggattgatttccacattcaagactctataggcctgagatacaaggcgtctctgtagcgaacaagacagaatgtaattaacagctaa

SEQ ID NO: 31865 - DNA, 110 bp, synthetic construct
  source 1..110: mol_type = other DNA
aaggagaaaaatggtcatttagggcataagaaaagcttctcagaagcaaaagtattaattctggctcttaaagatgggctaatggggaggcaaatgttccagacaaggtt

SEQ ID NO: 31866 - DNA, 110 bp, synthetic construct
  source 1..110: mol_type = other DNA
taattctggctcttaaagatgggctaatggggaggcaaatgttccagacaaggttaaaatacatgtaagcctaattatagcataaattttaccaaaggctattaaccagt

SEQ ID NO: 31867 - DNA, 110 bp, synthetic construct
  source 1..110: mol_type = other DNA
aagctgtggctcagatctggtgttgccgtggctgtgggataggcctgtatctgtagctgtgccaggcaggggatcgaacctgcgtcccagcactcccaagatgctaccaa

SEQ ID NO: 31868 - DNA, 110 bp, synthetic construct
  source 1..110: mol_type = other DNA
tctggtgttgccgtggctgtgggataggcctgtatctgtagctgtgccaggcaggggatcgaacctgcgtcccagcactcccaagatgctaccaatcccattgcaccaca

SEQ ID NO: 31869 - DNA, 110 bp, synthetic construct
  source 1..110: mol_type = other DNA
accaaagttaaatgttccgtctctagaacctgacttgctcttcactatttttattgtgttgcagcttaaaaaaaaaaaaattgccaattaagttaaactaaactgtcgca

SEQ ID NO: 31870 - DNA, 110 bp, synthetic construct
  source 1..110: mol_type = other DNA
tgctgaacattctgtatctattgcttcacaaaatataaaggaattaaattagtcatgaaggattttggtgcatttgttttaaaatgtaagtaacagaggacatcctggtg

SEQ ID NO: 31871 - DNA, 110 bp, synthetic construct
  source 1..110: mol_type = other DNA
tgaaggattttggtgcatttgttttaaaatgtaagtaacagaggacatcctggtgaattctgatctgggacagtcactcatcttttatggtggaagaatccaaacttggt

SEQ ID NO: 31872 - DNA, 110 bp, synthetic construct
  source 1..110: mol_type = other DNA
gtcttatttttttaaagcaagggccatacaaacatgaactgtagattcgccccatgcagacaccaatcctagatcccttgcttatcatctgtgtgatcttgggcaggtgt

SEQ ID NO: 31873 - DNA, 110 bp, synthetic construct; identical to SEQ ID NO: 31872
  source 1..110: mol_type = other DNA

SEQ ID NO: 31874 - DNA, 110 bp, synthetic construct
  source 1..110: mol_type = other DNA
gaagcagcagggttagcctaggaacaaggtactgtcaagaggaaagggacatgctaaattccgatttttaaggtggctctctcgtgggcttcccttttcttggtaatcag

SEQ ID NO: 31875 - DNA, 110 bp, synthetic construct
  source 1..110: mol_type = other DNA
aaattccgatttttaaggtggctctctcgtgggcttcccttttcttggtaatcagggagatgctgcagggaagttcagacaggctctggtgggtactggttacatgcatt

SEQ ID NO: 31876 - DNA, 110 bp, synthetic construct
  source 1..110: mol_type = other DNA
ccatgcacaacaccagctcatcatggatatagtttatgcctacttggtgaacatatgaacttgactcagttatgaacttgacccaattatgtctccaatccatgacaaga

SEQ ID NO: 31877 - DNA, 110 bp, synthetic construct
  source 1..110: mol_type = other DNA
ctaaactaaccttcaaggcacattttccctggtcttgaaactggagctcagctttcccggcctcttcgatagcacatgtttgtgtctagaagtagagcctgcagtggaga

SEQ ID NO: 31878 - DNA, 110 bp, synthetic construct
  source 1..110: mol_type = other DNA
cccggcctcttcgatagcacatgtttgtgtctagaagtagagcctgcagtggagattcgtgagcaaatagcttgtggaggggggggccttggggagaaaccgcagaggca

SEQ ID NO: 31879 - DNA, 110 bp, synthetic construct
  source 1..110: mol_type = other DNA
ggagtagttttgctttggggacaaggtccctgaccccatcgggagctctcagccattcacccactccctctggcctgtatccatggggtcacaggagactcggggcccct

SEQ ID NO: 31880 - DNA, 110 bp, synthetic construct
  source 1..110: mol_type = other DNA
ttcacccactccctctggcctgtatccatggggtcacaggagactcggggcccctcctgggggcttcccaggacaccctgtgctcctctgtcctgcagttatcaccccca

SEQ ID NO: 31881 - DNA, 110 bp, synthetic construct
  source 1..110: mol_type = other DNA
cttcaggtgtgtttatgagatgatgggtgcacgtcactgtacacacacccctcctgcagaggcactcggatgtttagaggccgttagatctctgtggattcagatgagga

SEQ ID NO: 31882 - DNA, 110 bp, synthetic construct
  source 1..110: mol_type = other DNA
gcagaggcactcggatgtttagaggccgttagatctctgtggattcagatgaggatgcaggtccacacacacacacacacacacacacacgagctcacgcatacacacac

SEQ ID NO: 31883 - DNA, 110 bp, synthetic construct
  source 1..110: mol_type = other DNA
tgtcaaaggtcctgctacaccttgttctctggaccagtcggagtaaataaccatggaaccagagggaagacccagctcggaggcactggacgtgcacaagcagacatgga

SEQ ID NO: 31884 - DNA, 110 bp, synthetic construct
  source 1..110: mol_type = other DNA
caacagatgttgagggcacagcaaagatgctagtcaagtcattgtcccttcctttttttgtttgttttcaatttcacactgagttggtgccttcagatttattaaaaatg

SEQ ID NO: 31885 - DNA, 110 bp, synthetic construct
  source 1..110: mol_type = other DNA
ttttgtttgttttcaatttcacactgagttggtgccttcagatttattaaaaatgaaatacatgaacacatcccagcttcggcaggtgttatttggggacaaattccagg

SEQ ID NO: 31886 - DNA, 110 bp, synthetic construct
  source 1..110: mol_type = other DNA
agggggtggggggggtgggggacaggacgcaaggtgggagacgggcttatggtgtgctcagagcaggcttggggcggctgagtaggtgaggaggtgaatcaaattggctt

SEQ ID NO: 31887 - DNA, 110 bp, synthetic construct
  source 1..110: mol_type = other DNA
gctcagagcaggcttggggcggctgagtaggtgaggaggtgaatcaaattggcttggctaggatcagatcagattggattggatccacttgcgctgaacctgaggcttca

SEQ ID NO: 31888 - DNA, 110 bp, synthetic construct
  source 1..110: mol_type = other DNA
cctccctctctctggccacacaggctccaccaccaccgtctggctcccacttgctcctgggccacttttagaaacatgactcatggaaaaagaagggaatgggagctgcc

SEQ ID NO: 31889 - DNA, 110 bp, synthetic construct
  source 1..110: mol_type = other DNA
cctgggccacttttagaaacatgactcatggaaaaagaagggaatgggagctgccgtgaagtcactggagccctccctttgtggctgtaccaggagccccctccccaggg

SEQ ID NO: 31890 - DNA, 110 bp, synthetic construct
  source 1..110: mol_type = other DNA
cagttgtattgcattttcctcatagctccacccagggcacagtgaggactggctttccacaaccactggggaatgtgagaatcgccacagtctagaccccagacagccct

SEQ ID NO: 31891 - DNA, 110 bp, synthetic construct
  source 1..110: mol_type = other DNA
aagtctgttttactcccaagttcaggttcttaaagagcaaacccaaagagccccatctggaccaggctgcttgggttgagctatgtgacttcggggcaagtcactcacct

SEQ ID NO: 31892 - DNA, 110 bp, synthetic construct
  source 1..110: mol_type = other DNA
tctggaccaggctgcttgggttgagctatgtgacttcggggcaagtcactcacctctcagagcccgattcctcattgaaagacagagatggtgacaataatcacaatagt

SEQ ID NO: 31893 - DNA, 110 bp, synthetic construct
  source 1..110: mol_type = other DNA
tccacgccgaacgtctcagcccatcctctacacctcctcacaagctgtccactgcagctaccatagcccttggtggactcactctgagcctctgtagcccagatggattg

SEQ ID NO: 31894 - DNA, 110 bp, synthetic construct
  source 1..110: mol_type = other DNA
agctaccatagcccttggtggactcactctgagcctctgtagcccagatggattgctaccttcttctcaactccaaaccatgcattcattcatttcctcactcactcacc

SEQ ID NO: 31895 - DNA, 110 bp, synthetic construct
  source 1..110: mol_type = other DNA
actccaaaggcacagggccccagtttatatactcattctttacacgagatgaacctcagaggtcagccaaataggctgtgatgcctggataacagagaagacagaagttt

SEQ ID NO: 31896 - DNA, 110 bp, synthetic construct
  source 1..110: mol_type = other DNA
tcagaggtcagccaaataggctgtgatgcctggataacagagaagacagaagtttggtctggatgcacccaatgccatgtgtacaatgtaggatgagggggaggatgtca

SEQ ID NO: 31897 - DNA, 110 bp, synthetic construct; identical to SEQ ID NO: 31895
  source 1..110: mol_type = other DNA

SEQ ID NO: 31898 - DNA, 110 bp, synthetic construct; identical to SEQ ID NO: 31896
  source 1..110: mol_type = other DNA

SEQ ID NO: 31899 - DNA, 110 bp, synthetic construct
  source 1..110: mol_type = other DNA
ttatttggtactaagaaataatgacccctcgagccctgagagacatggaggaaacttccgtcacattactaagtgaaggaagccaactggaaaaggctccatgcatactg

SEQ ID NO: 31900 - DNA, 110 bp, synthetic construct
  source 1..110: mol_type = other DNA
ttccgtcacattactaagtgaaggaagccaactggaaaaggctccatgcatactgcatgattcaaaccatatgatggcatccgggaaaagacaaaactatgcaggcggta

SEQ ID NO: 31901 - DNA, 110 bp, synthetic construct
  source 1..110: mol_type = other DNA
ctgtcttaatcaatgtctacggagccccctactatgtgcatataaaactctgcccagaatcaatatttggagacatctgtgacggtatttacgttatgttcaaaaacgaa

SEQ ID NO: 31902 - DNA, 110 bp, synthetic construct
  source 1..110: mol_type = other DNA
agaatcaatatttggagacatctgtgacggtatttacgttatgttcaaaaacgaatttccccttcttctcaagtagcccagggaaaggcaggacaatttgaatccctttt

SEQ ID NO: 31903 - DNA, 110 bp, synthetic construct
  source 1..110: mol_type = other DNA
gagcctcgcctgctcctggcactgctattatagatactaagggatctctgcctctgcagctgcccagagctgagccaagggctctgtccattcaaaggcagaggacagac

SEQ ID NO: 31904 - DNA, 110 bp, synthetic construct
  source 1..110: mol_type = other DNA
agaagctgtttctttggtctgtgataatgagggagaataacattttagaacaataatctaggcattttctgtgcatcctttcgtggcatctgagtgatggtgaaatgcag

SEQ ID NO: 31905 - DNA, 110 bp, synthetic construct
  source 1..110: mol_type = other DNA
atctaggcattttctgtgcatcctttcgtggcatctgagtgatggtgaaatgcagctctgagccagctgccaggatggaggctaaaaactctagagcatgaagaaggagc

SEQ ID NO: 31906 - DNA, 110 bp, synthetic construct
  source 1..110: mol_type = other DNA
tcagggaggaggaaggctttgagaaaacgtgacattttgagttatacgcagaaggggtgaggagtctgccaagtagaggaggaggagaggattctgggtaagtagagata

SEQ ID NO: 31907 - DNA, 110 bp, synthetic construct
  source 1..110: mol_type = other DNA
tttgtgattagggatcaagactagacacgatacacctggtatatggtctgtccagagttgagaggacaggagtatcacctccctggttctgagctcagtacctttgatga

SEQ ID NO: 31908 - DNA, 110 bp, synthetic construct
  source 1..110: mol_type = other DNA
agttgagaggacaggagtatcacctccctggttctgagctcagtacctttgatgatacagcctgagaccaactgaaagatggtgactgttgtgactccaggggagagatg

SEQ ID NO: 31909 - DNA, 110 bp, synthetic construct
  source 1..110: mol_type = other DNA
aaagtaaaaaaaaatgtctcccctttgacccctaaataagctgaacttttgagtgcaaaattcaaggccctcccatcaaccatgctaatctccttccagactcgtctccc

SEQ ID NO: 31910 - DNA, 110 bp, synthetic construct
  source 1..110: mol_type = other DNA
caaaattcaaggccctcccatcaaccatgctaatctccttccagactcgtctcccacttcctgatataaatccagtgctctgttgaaactgaactgctcacccacggctc

SEQ ID NO: 31911 - DNA, 110 bp, synthetic construct
  source 1..110: mol_type = other DNA
ttctaaagtgtctaagaggagtagatggtgcttttttgtaatgaagaaatgagttcaagctttggagcccatcaaccctgggcccacattcagattctgtcacttctgtg

SEQ ID NO: 31912 - DNA, 110 bp, synthetic construct
  source 1..110: mol_type = other DNA
caagctttggagcccatcaaccctgggcccacattcagattctgtcacttctgtgattgtgaccatggccatgttatgtgacttctctgaaaccctgttttcttgtgaaa

SEQ ID NO: 31913 - DNA, 110 bp, synthetic construct
  source 1..110: mol_type = other DNA
cactggggcatggggctgggtcctgggctttctggtgagaagggctgtgtccattgggagctatgggctcagggatgtctctttcttatggccacacccacaggatatga

SEQ ID NO: 31914 - DNA, 110 bp, synthetic construct
  source 1..110: mol_type = other DNA
ttgggctcttagagcctttgggattttggggtcggagaagttgagggccacgccagctggctccacggccactgttttgtttcgtttgctgtttagggctgcacctgcag

SEQ ID NO: 31915 - DNA, 110 bp, synthetic construct
  source 1..110: mol_type = other DNA
ctttgggattttggggtcggagaagttgagggccacgccagctggctccacggccactgttttgtttcgtttgctgtttagggctgcacctgcagcatacggaggttccc

SEQ ID NO: 31916 - DNA, 110 bp, synthetic construct
  source 1..110: mol_type = other DNA
ttaaaactgttttgagagctctttttgaattttcaaaacttaggctaaaagaacaaaaactagagatcctgtcatggcgccacagaaatgaaccccactaggaaccatga

SEQ ID NO: 31917 - DNA, 110 bp, synthetic construct; identical to SEQ ID NO: 31916
  source 1..110: mol_type = other DNA

SEQ ID NO: 31918 - DNA, 110 bp, synthetic construct; identical to SEQ ID NO: 31916
  source 1..110: mol_type = other DNA

SEQ ID NO: 31919 - DNA, 110 bp, synthetic construct; identical to SEQ ID NO: 31916
  source 1..110: mol_type = other DNA

SEQ ID NO: 31920 - DNA, 110 bp, synthetic construct
  source 1..110: mol_type = other DNA
aaataataaacattgcatccataagttcatgggagagaaccatggaaatcaggttctataaggtagaatttaacacgaaggtacttaactgcacaaaaactgtttactgt

SEQ ID NO: 31921 - DNA, 110 bp, synthetic construct
  source 1..110: mol_type = other DNA
ttctctttcagccgtttcgatgttcatgatttggagttcttttttgcacttaggacagaggacagcagcctaccatcacactagtgagtaggtttttggtatttcgcctc

SEQ ID NO: 31922 - DNA, 110 bp, synthetic construct
  source 1..110: mol_type = other DNA
ttcgatgttcatgatttggagttcttttttgcacttaggacagaggacagcagcctaccatcacactagtgagtaggtttttggtatttcgcctcaggagaatttttaca

SEQ ID NO: 31923 - DNA, 110 bp, synthetic construct
  source 1..110: mol_type = other DNA
tcagggttagaccttgagaattcgcattctaacaagcagctctgcaatgctgaggccacaagatcttggaccatccctgagaagcactggtctaagtgacactctcctgg

SEQ ID NO: 31924 - DNA, 110 bp, synthetic construct
  source 1..110: mol_type = other DNA
ttatcatacgggaaagccttactgttgcaaatagttacagaccatttgggagtcataacgttttctgctgctggtgtctgtctttcaggagctaggtggacaacgcagac

SEQ ID NO: 31925 - DNA, 110 bp, synthetic construct
  source 1..110: mol_type = other DNA
taacgttttctgctgctggtgtctgtctttcaggagctaggtggacaacgcagacagagatgagacaagtattttccgttcaaaagtgtctctccctgctcagcatgtgc

SEQ ID NO: 31926 - DNA, 110 bp, synthetic construct
  source 1..110: mol_type = other DNA
ttccaagtgcctatatttatagtccatccttcctcacttggagtttactcacagttgagcttctgatgatatcacttcttgaaagtgctctcactgggatcaccagtgaa

SEQ ID NO: 31927 - DNA, 110 bp, synthetic construct
  source 1..110: mol_type = other DNA
cagacctcggattcctcaccactgtagtgacctgattccgcataactaggtaaagggaccacagacagcgccctgcggctggcgtacactcactggcaccatctcagaaa

SEQ ID NO: 31928 - DNA, 110 bp, synthetic construct
  source 1..110: mol_type = other DNA
ggaccacagacagcgccctgcggctggcgtacactcactggcaccatctcagaaaacagctcccctaagaaccagcagagcggagtaaccggagcagggaaaggaactcc

SEQ ID NO: 31929 - DNA, 110 bp, synthetic construct
  source 1..110: mol_type = other DNA
gtttggggtttcataaaatggtggggcaaagagagggtcctgagctgttctcatgcctgccgccaaacacagggcctccgcaggtttccagccacacaatgtggagcggt

SEQ ID NO: 31930 - DNA, 110 bp, synthetic construct
  source 1..110: mol_type = other DNA
gtcttcctccaatggaactttctcatattaagaagttagtctggacagaaaatttggcctaggcaactgagctttgcaaactctccatttgtgattcgggacaaataagc

SEQ ID NO: 31931 - DNA, 110 bp, synthetic construct
  source 1..110: mol_type = other DNA
ggcctaggcaactgagctttgcaaactctccatttgtgattcgggacaaataagccccattttctgccaggttattaactttgtatgtcatgataaaaatacaaacaata

SEQ ID NO: 31932 - DNA, 110 bp, synthetic construct
  source 1..110: mol_type = other DNA
caacccccaagtctagactccccattgctataaggctatcctggtacaaaaccgtagcatcttctcacttacagctcaactcatgactatgtctgatgggaacactctcc

SEQ ID NO: 31933 - DNA, 110 bp, synthetic construct
  source 1..110: mol_type = other DNA
ccttgggctatggaaaagaaggaaaaggtaataaaaattatacatttttactacagcactacaactcttctttggattagggacagaagttagtaactactatgtatctt

SEQ ID NO: 31934 - DNA, 110 bp, synthetic construct
  source 1..110: mol_type = other DNA
tactcttaactagtgcttttctttgtcattttcccatggcttttctgtcagctcctttctttagttctcataagattacatgcaaggcaatgacacaggcttttttaccc

SEQ ID NO: 31935 - DNA, 110 bp, synthetic construct
  source 1..110: mol_type = other DNA
tttctttagttctcataagattacatgcaaggcaatgacacaggcttttttacccatgcataagtgcctcactcacataatattgtctctcgttcatccccgagagagtt

SEQ ID NO: 31936 - DNA, 110 bp, synthetic construct; identical to SEQ ID NO: 31934
  source 1..110: mol_type = other DNA

SEQ ID NO: 31937 - DNA, 110 bp, synthetic construct; identical to SEQ ID NO: 31935
  source 1..110: mol_type = other DNA

SEQ ID NO: 31938 - DNA, 110 bp, synthetic construct
  source 1..110: mol_type = other DNA
atagtgttatagtaatgaagttctgaccttttggaaaccttgcaggaccaatcaaatgcatcagcttatgcccacagctgatgagcagatacaatttggcatgatgtact

SEQ ID NO: 31939 - DNA, 110 bp, synthetic construct
  source 1..110: mol_type = other DNA
atgcatcagcttatgcccacagctgatgagcagatacaatttggcatgatgtactccccagggaagggaacttgaccttgctcgctgcttctgtctgcaacgagaaagca

SEQ ID NO: 31940 - DNA, 110 bp, synthetic construct
  source 1..110: mol_type = other DNA
tagctttcatcttttactgaaaataggagctgtggtgctcacgccagacctggctctaaggggcagaatgagggtatgagacatgccccagggttttcctcagcagaagg

SEQ ID NO: 31941 - DNA, 110 bp, synthetic construct
  source 1..110: mol_type = other DNA
ctaaggggcagaatgagggtatgagacatgccccagggttttcctcagcagaagggttcaatgcaagcattaagcactaacattctttttctaaaactaaggaaatcagg

SEQ ID NO: 31942 - DNA, 110 bp, synthetic construct
  source 1..110: mol_type = other DNA
ccgacacacacccgaactcacatggacacgagtcctcagaggctcaagaactgaggctcactactgcctcttccttcctgcttccaggagctgacaggcttacagttcaa

SEQ ID NO: 31943 - DNA, 110 bp, synthetic construct
  source 1..110: mol_type = other DNA
gctcactactgcctcttccttcctgcttccaggagctgacaggcttacagttcaaagacaggtctggtacttcctttctggatgccactgtctcaaattcagtgtctcac

SEQ ID NO: 31944 - DNA, 110 bp, synthetic construct
  source 1..110: mol_type = other DNA
tgatggattccacaaaaacagtattttgctgagcttcagctgctggagctaatagatgactgtcaagggtccagcagcatgggcaggtgagaatctggggatcggagata

SEQ ID NO: 31945 - DNA, 110 bp, synthetic construct
  source 1..110: mol_type = other DNA
cccactggtgcttgcggagtggaaaccagaaacgtgggatgggacaaaaaaatgtacagagcgtaaaaatgaacttgcttggtgtgaccaaattcctaagggggctgggg

SEQ ID NO: 31946 - DNA, 110 bp, synthetic construct
  source 1..110: mol_type = other DNA
acagagcgtaaaaatgaacttgcttggtgtgaccaaattcctaagggggctgggggaggctgggggagagtagaagccatgggtgtggagagagatgaggacatgaaaaa

SEQ ID NO: 31947 - DNA, 110 bp, synthetic construct; identical to SEQ ID NO: 31945
  source 1..110: mol_type = other DNA

SEQ ID NO: 31948 - DNA, 110 bp, synthetic construct; identical to SEQ ID NO: 31946
  source 1..110: mol_type = other DNA

SEQ ID NO: 31949 - DNA, 110 bp, synthetic construct
  source 1..110: mol_type = other DNA
taggaacctctgatctttggtttgggagacccaccaccagtggcatactcttgtgttttcccggtgagttgcccatactttccattcctgtcccccttgttgggcagttt

SEQ ID NO: 31950 - DNA, 110 bp, synthetic construct
  source 1..110: mol_type = other DNA
ttttcccggtgagttgcccatactttccattcctgtcccccttgttgggcagtttgggttggccatttgcctttctacttgccttattttgacacctgtgagtggaaaca

SEQ ID NO: 31951 - DNA, 110 bp, synthetic construct
  source 1..110: mol_type = other DNA
ggggggagagggtggagagtttgccagatacaagcctcatttacttcccaggtcagctgaggctggtcctggctccagaatggcacaatggcaatgcgtacacttggtaa

SEQ ID NO: 31952 - DNA, 110 bp, synthetic construct
  source 1..110: mol_type = other DNA
caattttagtcgcaaggtcttttctgcaacgtttcatagaatacttggagagccggagccttgtatggacgggccaaagtcaagaacatggcctggagcagacagaagga

SEQ ID NO: 31953 - DNA, 110 bp, synthetic construct
  source 1..110: mol_type = other DNA
ggtgggggtgggggcagggggggcctctctgctcatttacaggacagttccaggcccgagggaggaagtgtgcacggcagctctcgtgggcccaacaccactttcttcag

SEQ ID NO: 31954 - DNA, 110 bp, synthetic construct
  source 1..110: mol_type = other DNA
ccgagggaggaagtgtgcacggcagctctcgtgggcccaacaccactttcttcaggtcacttaccaggacacatgacagaatcgactgcctaaccattgtcctagagccc

SEQ ID NO: 31955 - DNA, 110 bp, synthetic construct
  source 1..110: mol_type = other DNA
gctgcgtgactctgggtaagtgagtccactgctctgtgcctggtttcatcatcatgaaacagggctggttagacagctcctccctcgcaggagagctgcggggaacagat

SEQ ID NO: 31956 - DNA, 110 bp, synthetic construct
  source 1..110: mol_type = other DNA
gaaacagggctggttagacagctcctccctcgcaggagagctgcggggaacagatcagcaagtccctgagtgcctgcccccccgaagctgctcctggtgtcagcctgcgt

SEQ ID NO: 31957 - DNA, 110 bp, synthetic construct
  source 1..110: mol_type = other DNA
gtatcagcgatctaacgtaggcagctcgacccctcagcacctcagtttctgcacctatgaaatgggcacaacgacaacacctacctcgcagggaggattaaagggagaag

SEQ ID NO: 31958 - DNA, 110 bp, synthetic construct
  source 1..110: mol_type = other DNA
tccggaccccccggacctcacctccagttgccccggccagagttcccccaataactgcaacaaagtcaaacccaataactgcgcttggctatagtggacagtgtctgctt

SEQ ID NO: 31959 - DNA, 110 bp, synthetic construct
  source 1..110: mol_type = other DNA
ggatatccccatggaataaccaagcccaattaacagactgttcttcttatagacgtgtgaaattccctgggtgctcctaagggctttttggtttctgggagtgttgcaga

SEQ ID NO: 31960 - DNA, 110 bp, synthetic construct
  source 1..110: mol_type = other DNA
aaccaccagggcttttaaccgaccagaacctccccagaatctgcaggaacagaaggcttaggggaaccctcaagtcatctggactgatcaacctgtccatttaaaattgt

SEQ ID NO: 31961 - DNA, 110 bp, synthetic construct
  source 1..110: mol_type = other DNA
gcttaggggaaccctcaagtcatctggactgatcaacctgtccatttaaaattgttttcagaaaagccaattcggagttcccactgtggctcagtgggttaagaacccag

SEQ ID NO: 31962 - DNA, 110 bp, synthetic construct
  source 1..110: mol_type = other DNA
ccagttcaatatccttttgttcttgctaaagagggcagttgtgattttgttgctctctgattagctgtgtgaagatattttggctgatttgcttttaaaaattgtgtttc

SEQ ID NO: 31963 - DNA, 110 bp, synthetic construct
  source 1..110: mol_type = other DNA
cctgagcagtagttatttccagaagctctctaaggtggccaagattgagacccagtggctcttgtgtcgccctccatggcttctcgatgctccgctgcacgtgaggaagg

SEQ ID NO: 31964 - DNA, 110 bp, synthetic construct
  source 1..110: mol_type = other DNA
attattaccattcatgttgaaaagctggattaatatcttaggttccaaagcatatggccttacgtgtgtaaactggggctacactgaaaaagctctgctctctggtgtgg

SEQ ID NO: 31965 - DNA, 110 bp, synthetic construct
  source 1..110: mol_type = other DNA
ggccttacgtgtgtaaactggggctacactgaaaaagctctgctctctggtgtggggggtggggcattgtctcccctcttattttaagatcatctcttaaaagaagttgt

SEQ ID NO: 31966 - DNA, 110 bp, synthetic construct
  source 1..110: mol_type = other DNA
ttggagagaagggtggtcggagttcccattaaaatacagatactcgatgttcagacagaagttgacagacacaagggtaggtgttgtttaataagagataaagtaacact

SEQ ID NO: 31967 - DNA, 110 bp, synthetic construct
  source 1..110: mol_type = other DNA
cagaagttgacagacacaagggtaggtgttgtttaataagagataaagtaacactttaaaagacaatacttggacagttccccctcgtggcacagcggaaatgaatccaa

SEQ ID NO: 31968 - DNA, 110 bp, synthetic construct
  source 1..110: mol_type = other DNA
atatataggcaatatataaaatcttcacactaaggtgcaattatttgtaggtaagagctacaccttgacaggcatccaagatgaaaaaagctgaaacttggtttgctgac

SEQ ID NO: 31969 - DNA, 110 bp, synthetic construct
  source 1..110: mol_type = other DNA
ctgcaacctgatcaagctgggatccatctataaacaaagatgttaaatagttaagaggcaggcatttaaatggagacaactctgcccttgctcttactaaaaattagtgc

SEQ ID NO: 31970 - DNA, 110 bp, synthetic construct
  source 1..110: mol_type = other DNA
cctaccaactcctggttcttccgtgtttgttctcaaaccctcctctcccccccaccacactcctaatttccacccttgagtgtctcatctgaaaatttctggactttttt

SEQ ID NO: 31971 - DNA, 110 bp, synthetic construct
  source 1..110: mol_type = other DNA
aagttaaaggacacagtatagaaagagcatggatttcagatatacctgacttgcatctccgctctgcctcttactagctgtgatcctgggccacctccccaacccgactg

SEQ ID NO: 31972 - DNA, 110 bp, synthetic construct
  source 1..110: mol_type = other DNA
gtaccctgcggatgacttgtatattattacacgacgcaacatcctaaaatgaaagcacctctaggagaattacggtgctaaattgggatatacaatccagatgcttccca

SEQ ID NO: 31973 - DNA, 110 bp, synthetic construct
  source 1..110: mol_type = other DNA
cacctctaggagaattacggtgctaaattgggatatacaatccagatgcttcccaactcgggtgaaccccaggaggtctctgcctccgacagactgagacgacacagaaa

SEQ ID NO: 31974 - DNA, 110 bp, synthetic construct
  source 1..110: mol_type = other DNA
caaaaaccataggatgcggtgtgggatccgaaagaaaccctggtcaggcaggggatgaacatcatttggggatggaggagccacgaaaaaatgctaaaaggccagaaggg

SEQ ID NO: 31975 - DNA, 110 bp, synthetic construct
  source 1..110: mol_type = other DNA
tgaacatcatttggggatggaggagccacgaaaaaatgctaaaaggccagaagggaagacctaactgggaaaggaaaaggaaaaagcagactgggagatgttgacaacca

SEQ ID NO: 31976 - DNA, 110 bp, synthetic construct
  source 1..110: mol_type = other DNA
ttgtttttaaaatttaacccacgattcctacagtcccaggggagttggaggggtcagataatttcagagttaaataagctctaatgactatcacatgtacccaggcataa

SEQ ID NO: 31977 - DNA, 110 bp, synthetic construct
  source 1..110: mol_type = other DNA
aggagatcctcaattcacctgaatgtactttttggtttttttttgtttttgtttttgttttgttttgtttgtttgtttgttttttttttggtcccaaggccactcctgct

SEQ ID NO: 31978 - DNA, 110 bp, synthetic construct
  source 1..110: mol_type = other DNA
tgttttgttttgtttgtttgtttgttttttttttggtcccaaggccactcctgctctttgggactgctgaattgaagtttggaacatgacagcaatttctgctacatttt

SEQ ID NO: 31979 - DNA, 110 bp, synthetic construct
  source 1..110: mol_type = other DNA
ccagggactgctgggagaggtttccccaagcctcttcatgtgtctgtgctctaataagcccaaatgctccctggatgtgtacactaagtgccatcactcataacaaagag

SEQ ID NO: 31980 - DNA, 110 bp, synthetic construct
  source 1..110: mol_type = other DNA
aagcccaaatgctccctggatgtgtacactaagtgccatcactcataacaaagagcaatttacaaaaactggtacaaaatggtatatgtgggacagcaagtctaacaagc

SEQ ID NO: 31981 - DNA, 110 bp, synthetic construct
  source 1..110: mol_type = other DNA
tttggcttctccaatgccttggcatttacttttctgactggaatgattctttgctattagggtggtaccaggaatgtcatctatcattgacaacactcattctattgcat

SEQ ID NO: 31982 - DNA, 110 bp, synthetic construct
  source 1..110: mol_type = other DNA
attagggtggtaccaggaatgtcatctatcattgacaacactcattctattgcataagcttgagacagtttaatacatcataagagacattttgccaatgacgaggaaag

SEQ ID NO: 31983 - DNA, 110 bp, synthetic construct
  source 1..110: mol_type = other DNA
atgtatggactgaagtcatcttgaacaaactatctgagaagtttccttcttggacatgaatcagagctacaaacctgaccctttgtatgaaacacagtgatcatcatgcc

SEQ ID NO: 31984 - DNA, 110 bp, synthetic construct
  source 1..110: mol_type = other DNA
ccctatggaaggtggtcaagaacgtgagctcagggatccccataaaacccatccacttttctaaaagtgagccaactctactatatagaaacccaacccatatttatatt

SEQ ID NO: 31985 - DNA, 110 bp, synthetic construct
  source 1..110: mol_type = other DNA
cttttctaaaagtgagccaactctactatatagaaacccaacccatatttatattcaagttcccaggacccaagctagaaagtccaggttactagcagcattctctcgag

SEQ ID NO: 31986 - DNA, 110 bp, synthetic construct
  source 1..110: mol_type = other DNA
cggtggtacgacggccctcgttcataggaaggccaacccaggagaagctagaggcctggagagccggaaacatctgataataacactgctgcatcaaccctccgctctta

SEQ ID NO: 31987 - DNA, 110 bp, synthetic construct
  source 1..110: mol_type = other DNA
tcagggatcattagcaagacatacatgtaccttgcaatactaagactctctgactgagcctccatgtgctaggaatacacagtctatatttctccactctgtttaaggca

SEQ ID NO: 31988 - DNA, 110 bp, synthetic construct
  source 1..110: mol_type = other DNA
gagcctccatgtgctaggaatacacagtctatatttctccactctgtttaaggcaaattcaagaaggggaagtggattgctttgactaaattggctacacaactggttgg

SEQ ID NO: 31989 - DNA, 110 bp, synthetic construct
  source 1..110: mol_type = other DNA
attgtgtcaatttcttctggacagcagagtgacgcagtcatacatgtttccattcccattcttatattatcttccgtcatggcctatcccaagtacatggggcttcttga

SEQ ID NO: 31990 - DNA, 110 bp, synthetic construct
  source 1..110: mol_type = other DNA
ccattcttatattatcttccgtcatggcctatcccaagtacatggggcttcttgatacatataaaacacaggtgatcagctgctttggaagaaggatgataatacaagtc

SEQ ID NO: 31991 - DNA, 110 bp, synthetic construct
  source 1..110: mol_type = other DNA
gtgaaccagggaggagaggaaaccagccactcctgcgacctggtgtcgtcaccacccaacgctcgtgtcaccggaccagggagcagcgcacagcatctgagcagatgctg

SEQ ID NO: 31992 - DNA, 110 bp, synthetic construct
  source 1..110: mol_type = other DNA
ccaacgctcgtgtcaccggaccagggagcagcgcacagcatctgagcagatgctgcatgaggcacctcccatcatcccagggacgtgacggcaaagcccaggggagactc

SEQ ID NO: 31993 - DNA, 110 bp, synthetic construct
  source 1..110: mol_type = other DNA
cagtctgatgtggcaagtaattaaatgccttgttttcctgcattttcatgcagcaacatctcaaactctcagtttatactatgtatttgatacatcattacggagtgcca

SEQ ID NO: 31994 - DNA, 110 bp, synthetic construct
  source 1..110: mol_type = other DNA
acatctcaaactctcagtttatactatgtatttgatacatcattacggagtgccagccatgcgggcactacctagaagctggggagccagttgggaaggacacagttgaa

SEQ ID NO: 31995 - DNA, 110 bp, synthetic construct; identical to SEQ ID NO: 31993
  source 1..110: mol_type = other DNA

SEQ ID NO: 31996 - DNA, 110 bp, synthetic construct; identical to SEQ ID NO: 31994
  source 1..110: mol_type = other DNA

SEQ ID NO: 31997 - DNA, 110 bp, synthetic construct
  source 1..110: mol_type = other DNA
tgtcgcctctgccccctgtagacgggttacaggaagcagggagtttaagctcgcgtcagggacttttaagagagacccttccatccttttaactttttgttcattttgaa

SEQ ID NO: 31998 - DNA, 110 bp, synthetic construct
  source 1..110: mol_type = other DNA
tcagggacttttaagagagacccttccatccttttaactttttgttcattttgaataatcctaatgcctcagacgtcataccaggtgtgaatgtagctgcatggtctgta

SEQ ID NO: 31999 - DNA, 110 bp, synthetic construct
  source 1..110: mol_type = other DNA
ctgtgctgtgggcctgctctccttggcggccccgtccttcatccctgtttgaggtggaggaacacagcactttgtgtgcagtgtgaccaggtaattcaagctggcagtaa

SEQ ID NO: 32000 - DNA, 110 bp, synthetic construct
  source 1..110: mol_type = other DNA
ggaggaacacagcactttgtgtgcagtgtgaccaggtaattcaagctggcagtaatcaagatttggggctcattatcattaaagggtaatttcattgccacccataattg

SEQ ID NO: 32001 - DNA, 110 bp, synthetic construct
  source 1..110: mol_type = other DNA
tgaagtgccctgataatgagccgggagcggaagctgtcagccctcagctggctggaagaatgcaattagagcagttttaatgctgcagagggaccccatccaaccagggc

SEQ ID NO: 32002 - DNA, 110 bp, synthetic construct
  source 1..110: mol_type = other DNA
agtcagagacccaaaagaaatgtctttggatgcttagcatcatggctagagctatgaagtgctgggcccggggtgggaagacaggccaccaggggagacaagagcggagc

SEQ ID NO: 32003 - DNA, 110 bp, synthetic construct
  source 1..110: mol_type = other DNA
caacaaaagttgattgttgacaaacacagtctgaaaatgtaaaggctgaatgctttctaacctgactactgtgctccatgaagtattaaccgggtatcagctgctgtgct

SEQ ID NO: 32004 - DNA, 110 bp, synthetic construct
  source 1..110: mol_type = other DNA
tctaacctgactactgtgctccatgaagtattaaccgggtatcagctgctgtgctctatgtggcttgtctcttttaatcctcatgtgtaggaaccatgtatgaatcactg

SEQ ID NO: 32005 - DNA, 110 bp, synthetic construct
  source 1..110: mol_type = other DNA
gtggctgaagacaatttccttgctgcagtggagtgagctagaacccaaggagagagaggtcagagttggggcagctaaagctactggaatctgtggcccagggactggag

SEQ ID NO: 32006 - DNA, 110 bp, synthetic construct
  source 1..110: mol_type = other DNA
gaggtcagagttggggcagctaaagctactggaatctgtggcccagggactggagatgagggatctgttaaaaagaggccacagcagtctgtacgagggtccttcatgag

SEQ ID NO: 32007 - DNA, 110 bp, synthetic construct; identical to SEQ ID NO: 32005
  source 1..110: mol_type = other DNA

SEQ ID NO: 32008 - DNA, 110 bp, synthetic construct; identical to SEQ ID NO: 32006
  source 1..110: mol_type = other DNA

SEQ ID NO: 32009 - DNA, 110 bp, synthetic construct
  source 1..110: mol_type = other DNA
aaacacaagtccacctgcttgctcctccagtgctctgctaacttggtaaatgaggccagcatgtcccaaagggagttcttcataacatccatcccatgagatgctcttca

SEQ ID NO: 32010 - DNA, 110 bp, synthetic construct
  source 1..110: mol_type = other DNA
ccagcatgtcccaaagggagttcttcataacatccatcccatgagatgctcttcaggagtctgtggtcaagtcggtttggaaaacggtgtgtgtcattgttacctgttca

SEQ ID NO: 32011 - DNA, 110 bp, synthetic construct
  source 1..110: mol_type = other DNA
tcctggcctgtgatttgtttgcttatttgcttacctactgctttgttctcatcgctgccctttcatcttcttcattgattgacttgtgtaacctttaccctgcttcctga

SEQ ID NO: 32012 - DNA, 110 bp, synthetic construct
  source 1..110: mol_type = other DNA
ccatcctgaggatattttcatgtaattgttcatggttacatgcttcggagtggaaaaaactcagaactgtgcttctttacatacatcctgtgagtcttaaatacatagtc

SEQ ID NO: 32013 - DNA, 110 bp, synthetic construct
  source 1..110: mol_type = other DNA
tttaggtaaacaaacacatacacaaaaaatctcttcctcccttccccaaatcaggtaccatgaggagttcccgttgtggctcggcagttaacaaatggactagcattcat

SEQ ID NO: 32014 - DNA, 110 bp, synthetic construct
  source 1..110: mol_type = other DNA
acatacacaaaaaatctcttcctcccttccccaaatcaggtaccatgaggagttcccgttgtggctcggcagttaacaaatggactagcattcatgaggacacaggttcg

SEQ ID NO: 32015 - DNA, 110 bp, synthetic construct
  source 1..110: mol_type = other DNA
aattaccttataaagttctttctcatctttttctgtcttcaactgacattcaagttgttctctttcatattgtgtcttcctgagtttgtcccttaaactgaagtcaaata

SEQ ID NO: 32016 - DNA, 110 bp, synthetic construct; identical to SEQ ID NO: 32015
  source 1..110: mol_type = other DNA

SEQ ID NO: 32017 - DNA, 110 bp, synthetic construct
  source 1..110: mol_type = other DNA
ttgactttcttatggaagatgaaagaatggagttcttccattgggatctaccgcggaatgaaacccaataggccatgtagatacagtggacagcgaaagacagaaagatg

SEQ ID NO: 32018 - DNA, 110 bp, synthetic construct
  source 1..110: mol_type = other DNA
ggtgttaggatgctgggatgctttgctggtctgggtgaggtgggggccagaggtttttatcatgcactatttattggcaggaatgtggttattttctaaaggttatctat

SEQ ID NO: 32019 - DNA, 110 bp, synthetic construct
  source 1..110: mol_type = other DNA
tttatcatgcactatttattggcaggaatgtggttattttctaaaggttatctatcttgctaggctgccccttctttggtcctttggctaaagagagcagcctccccctg

SEQ ID NO: 32020 - DNA, 110 bp, synthetic construct
  source 1..110: mol_type = other DNA
gttgaagcctagaaaggctagactgagtaagccagctgtttgctcaagactaaggttagacttgttttatattccattgcattaggaaataactattttctataaagttc

SEQ ID NO: 32021 - DNA, 110 bp, synthetic construct
  source 1..110: mol_type = other DNA
caaagtgcagtgaattgatggcgggcagtggtctcctttttggctttgcagcttcatcgttctgcttatgaaagatgcctttgagtattagaaacaccagtgacactgac

SEQ ID NO: 32022 - DNA, 110 bp, synthetic construct
  source 1..110: mol_type = other DNA
ggtcactggcagatgggccatctctgaggctgcagcacggtcttggaggccacagcagctcacaggaaggctggccatctccagttagctcctggggcccaggctgagct

SEQ ID NO: 32023 - DNA, 110 bp, synthetic construct
  source 1..110: mol_type = other DNA
cagctcacaggaaggctggccatctccagttagctcctggggcccaggctgagctgaaatgacactggcagcagcctggtggtgaagctcacagagccccatgcagtgta

SEQ ID NO: 32024 - DNA, 110 bp, synthetic construct
  source 1..110: mol_type = other DNA
gacaggctgatgcttcatttcccctggaggtgaaccagttgatagatgggtccgggagctcagagacagtgtgtgaacattattggtacattttctctgctgacagtcca

SEQ ID NO: 32025 - DNA, 110 bp, synthetic construct
  source 1..110: mol_type = other DNA
aagtgttattaaattcacttgatcctcatgctgccccatgaagaagtaccatagttaccctcatttttcagaggagcaaaccaagacacaccgtacctaggtgatatagc

SEQ ID NO: 32026 - DNA, 110 bp, synthetic construct
  source 1..110: mol_type = other DNA
taccctcatttttcagaggagcaaaccaagacacaccgtacctaggtgatatagccaaggttatacgaacccagaaaatcaggctctggagtctatgtgcctgtatgttc

SEQ ID NO: 32027 - DNA, 110 bp, synthetic construct
  source 1..110: mol_type = other DNA
gaagcctgacataccttccagggggcttagaggtccagcccgtaggccttccacttttccaaaccagctgttaaactctataaagtcttggaaggcccctagagtatcag

SEQ ID NO: 32028 - DNA, 110 bp, synthetic construct
  source 1..110: mol_type = other DNA
ggtaccgctcccctctctgcagtgcttgcaggctctcactcaggtgcctaggtttcccttgaatttgacaactgtattgtccacttctttcccctctttttacagaaaat

SEQ ID NO: 32029 - DNA, 110 bp, synthetic construct
  source 1..110: mol_type = other DNA
cccttgaatttgacaactgtattgtccacttctttcccctctttttacagaaaataggctctctctccacccacacattcaatctcttctcacacgcctccaaagaaggc

SEQ ID NO: 32030 - DNA, 110 bp, synthetic construct
  source 1..110: mol_type = other DNA
atccggattcgtttccactgagccatgatgggaactcctaaattgtacattataatggagctattttcaaataagtcatttagaaggcactgagtgatagtaattgagat

SEQ ID NO: 32031 - DNA, 110 bp, synthetic construct; identical to SEQ ID NO: 32030
  source 1..110: mol_type = other DNA

SEQ ID NO: 32032 - DNA, 110 bp, synthetic construct
  source 1..110: mol_type = other DNA
cctataacctcttaccctcataccatgttctctgcctgacccaacctggcctggttcccagaccagaggcctctgagcttgccctgtcttgtagcattctgctgccaaaa

SEQ ID NO: 32033 - DNA, 110 bp, synthetic construct
  source 1..110: mol_type = other DNA
gacatacaccacagcaatgccaaatccgagctgtgtctgtgacctacgcggcaactcatagcaatgcaatgccttatccccatcccactgagaggccagggatcgaaact

SEQ ID NO: 32034 - DNA, 110 bp, synthetic construct; identical to SEQ ID NO: 32033
  source 1..110: mol_type = other DNA

SEQ ID NO: 32035 - DNA, 110 bp, synthetic construct
  source 1..110: mol_type = other DNA
gaagcattaggggtgggggtgcgaatccaggactgctctctagtgtttaaatcttccttaatgggccagtgtctctgagaagccatctgaggctagtgcttttcaaattg

SEQ ID NO: 32036 - DNA, 110 bp, synthetic construct
  source 1..110: mol_type = other DNA
gggtgattagagtacactggggtccggtggctgattccgaaattaaaatggggagcacccaaggcgggccggggtgcacaccataaacaccccacttgttaactgcgcag

SEQ ID NO: 32037 - DNA, 110 bp, synthetic construct
  source 1..110: mol_type = other DNA
cacccaaggcgggccggggtgcacaccataaacaccccacttgttaactgcgcagggcccaggggcccttcaaacagaccccaaaggagggcgcacatctgggcatgggc

SEQ ID NO: 32038 - DNA, 110 bp, synthetic construct
  source 1..110: mol_type = other DNA
gcataatccgtgtggggaaacagaggagagagagagagaattttttttccccccaggtttttcttgtaactctagaaagaagctcattcagctacgcagaatgtagaccc

SEQ ID NO: 32039 - DNA, 110 bp, synthetic construct
  source 1..110: mol_type = other DNA
tgctctcctccccagactggctgtgtggtgacatttagccctcactctggctgtcaaactttctattgttcaagcttgatttctagtcttctcagcaattttttgagcta

SEQ ID NO: 32040 - DNA, 110 bp, synthetic construct
  source 1..110: mol_type = other DNA
tcatctgcatacttcccaatgctttttctgttatgagaactatcatttgtacccaaatggcccctccctgtgaacaggattcgtctttggcttgactcgtttatcactgc

SEQ ID NO: 32041 - DNA, 110 bp, synthetic construct
  source 1..110: mol_type = other DNA
aatggcccctccctgtgaacaggattcgtctttggcttgactcgtttatcactgcaattctgtaatgctttaggaagtggactatttcatttcagggagcagaaaccatt

SEQ ID NO: 32042 - DNA, 110 bp, synthetic construct
  source 1..110: mol_type = other DNA
tgaaatggtcattatggggaggctctggatgaggaaggccaggccgatggccactgcatggcattttaggtgggagatatgccggtaaaattatatgtgtcttgaaagtc

SEQ ID NO: 32043 - DNA, 110 bp, synthetic construct
  source 1..110: mol_type = other DNA
gcatggcattttaggtgggagatatgccggtaaaattatatgtgtcttgaaagtcccatgtagggaaatcagtgttacttaacaagcatgtgtacagaaaattcaggacc

SEQ ID NO: 32044 - DNA, 110 bp, synthetic construct
  source 1..110: mol_type = other DNA
ccagctatgaactgatacacagggcaagactgagaggcctacagaactctccgggaaaagatagcactttccataaggtcctagttctttctgtgtgtggagagctgatt

SEQ ID NO: 32045 - DNA, 110 bp, synthetic construct
  source 1..110: mol_type = other DNA
aaaagatagcactttccataaggtcctagttctttctgtgtgtggagagctgattcttttgacatccattagcatttactgaatttttagtgaacagccggggacaccaa

SEQ ID NO: 32046 - DNA, 110 bp, synthetic construct
  source 1..110: mol_type = other DNA
tgcaggcataagagattaaccaaggctgggcaatgcaacagctcaagagtttcaggcacctcttgttccaacatggaatttagacatcgtgtcagaaaactgcagcagag

SEQ ID NO: 32047 - DNA, 110 bp, synthetic construct
  source 1..110: mol_type = other DNA
gcattgtgaaaagtccctaaggtaaggtgaaaggattcagtgagctagaagacgtatattggctctgcccgtcgatggtaggtcaaaggatcccagcggacgtttgttac

SEQ ID NO: 32048 - DNA, 110 bp, synthetic construct
  source 1..110: mol_type = other DNA
ggatcaaccctgcatcctcatgcatcctagtcgggttcatttccagtgagccacaacaggaactcccatgctgctatttttataaataattttttattggaacacagtca

SEQ ID NO: 32049 - DNA, 110 bp, synthetic construct
  source 1..110: mol_type = other DNA
acaggaactcccatgctgctatttttataaataattttttattggaacacagtcacgcttgtgtgtttacacattgtctctggctattgtgtgctgcaatagcagcagtg

SEQ ID NO: 32050 - DNA, 110 bp, synthetic construct
  source 1..110: mol_type = other DNA
atatttctattgccccagaagacttcatgctttttccactcagtgcacagcccttgccccatcacacccaaaaaggagcttaccacttttctgattttttctttgctata

SEQ ID NO: 32051 - DNA, 110 bp, synthetic construct
  source 1..110: mol_type = other DNA
attcaagtcaaataaacaaaaatttgagtgtatactataggcagggcccatgctgggtgtctgattaatcaataactcagtattaattacttcttgacaagaaatcttgt

SEQ ID NO: 32052 - DNA, 110 bp, synthetic construct
  source 1..110: mol_type = other DNA
agctaagtcacaggaggcatgagacagagaattcctagtcctcagcggagctaccgacatcacccgtgctctctgttttctgtgaacccggcaaaagcaaggtatataaa

SEQ ID NO: 32053 - DNA, 110 bp, synthetic construct
  source 1..110: mol_type = other DNA
catttctcttggctgataggatgccatcaacatagtgccgggctcagaccaacccagctctccatctaccccccaatggaattctctagatggtcctctttctttgcatg

SEQ ID NO: 32054 - DNA, 110 bp, synthetic construct
  source 1..110: mol_type = other DNA
agctctccatctaccccccaatggaattctctagatggtcctctttctttgcatgattcttaccatactcctgctcacacaggcattagacatttttttaatgttagctt

SEQ ID NO: 32055 - DNA, 110 bp, synthetic construct
  source 1..110: mol_type = other DNA
tggataaaagacgggaggattgcttcaggaattggactgctgtgtaatccacattagcttcacacgctccaagaaggtctgcgtcccttaccaaaataatttgcccaata

SEQ ID NO: 32056 - DNA, 110 bp, synthetic construct
  source 1..110: mol_type = other DNA
agcttcacacgctccaagaaggtctgcgtcccttaccaaaataatttgcccaatataatttgcattcggatttcaaagacaccgttttttagttgacccttaagatgacc

SEQ ID NO: 32057 - DNA, 110 bp, synthetic construct
  source 1..110: mol_type = other DNA
gtcgggtcaggtcgggtggggtgggctggcgtgggacccacgcgtgggacccacccgagtcaaaggatctgttttctgcatcttgaccagagtaacctcagctggatcgg

SEQ ID NO: 32058 - DNA, 110 bp, synthetic construct
  source 1..110: mol_type = other DNA
cgagtcaaaggatctgttttctgcatcttgaccagagtaacctcagctggatcggaggcacgtctgccacccacactccttcgcagttgcctgggcagctcccccacctc

SEQ ID NO: 32059 - DNA, 110 bp, synthetic construct
  source 1..110: mol_type = other DNA
ccagaaatgtccccccaagggtaagcagtgaagccatggatggagaatgtctggtctcctaattcattgtctttcactctaatctccaaagccggctttcaaggcagcac

SEQ ID NO: 32060 - DNA, 110 bp, synthetic construct
  source 1..110: mol_type = other DNA
cataaaagacggtcactgtagtgacccaagcaaaacaagaggccgttcagacaagaggatctgaggtggtgcccaaggagtgaatactgtggaaggagatgcctagctca

SEQ ID NO: 32061 - DNA, 110 bp, synthetic construct
  source 1..110: mol_type = other DNA
aggatctgaggtggtgcccaaggagtgaatactgtggaaggagatgcctagctcaggttctgattctaaaaaggtgtgtttacaaagcttgctagaggagccttatggat

SEQ ID NO: 32062 - DNA, 110 bp, synthetic construct
  source 1..110: mol_type = other DNA
tctccagtcaatttcctgtatgcaaatctccatcccagagtctgcttgcttcaagaacagacttaaaactagccaaagaccccatagcttcctaaatgctacctccagga

SEQ ID NO: 32063 - DNA, 110 bp, synthetic construct
  source 1..110: mol_type = other DNA
ctattggaagactctgtaaaacggagaggggttcaaagctgtcaatatgagacactgcttatgctcctcactaaaccctgtgacaatcagcacaaaggaagtcaccttac

SEQ ID NO: 32064 - DNA, 110 bp, synthetic construct
  source 1..110: mol_type = other DNA
atggaggttcccaggctagggcttgaactggagctgtagcctccagcctacgccacagcacacggcaatgctgggtccttaatccactgagcatctgagaccagagagag

SEQ ID NO: 32065 - DNA, 110 bp, synthetic construct; identical to SEQ ID NO: 32064
  source 1..110: mol_type = other DNA

SEQ ID NO: 32066 - DNA, 110 bp, synthetic construct
  source 1..110: mol_type = other DNA
tctttagcataaaccatttgcatagtgtctttagaccagagtttaaatgcagcggaaaatcgtagcttaattttttttttttctcgtttcctctctatcttttgaaaaga

SEQ ID NO: 32067 - DNA, 110 bp, synthetic construct
  source 1..110: mol_type = other DNA
ggctttcaaggacccacgtgatcaaactgggctcacctggataagccaggctatgctccccatctcaaggcccttgatgacatctgcaaggtcccttttgccatgcaggg

SEQ ID NO: 32068 - DNA, 110 bp, synthetic construct
  source 1..110: mol_type = other DNA
atagtaccattatttcctccccattttaattagaatttccaatcatggagtatttaaggaacttgctcaaggtgacacagccggacccctgtgtaaacagaattaaacag

SEQ ID NO: 32069 - DNA, 110 bp, synthetic construct
  source 1..110: mol_type = other DNA
aaggaacttgctcaaggtgacacagccggacccctgtgtaaacagaattaaacagaataaggggaacttctggtgtggtacagttagaaatatacactatcagggaacta

SEQ ID NO: 32070 - DNA, 110 bp, synthetic construct
  source 1..110: mol_type = other DNA
agtcttcattctaagtttagaagggtgaatgttctatgagttagttttaattcagttctaggcgatccaagctaattttgaaagttttaagagttttaaagtaggttcta

SEQ ID NO: 32071 - DNA, 110 bp, synthetic construct
  source 1..110: mol_type = other DNA
ccccttgatgacgaccttgggagacccagaatgagaactacttagttaagccactccagaattcttgacccacagatactgttggataataaagagctgtattagtaagc

SEQ ID NO: 32072 - DNA, 110 bp, synthetic construct
  source 1..110: mol_type = other DNA
ccagaattcttgacccacagatactgttggataataaagagctgtattagtaagccatcgaattttgggacaatttgttacacagcaagaataactaatacaaacgttgt

SEQ ID NO: 32073 - DNA, 110 bp, synthetic construct
  source 1..110: mol_type = other DNA
aagtcttggtaatgatgagtcaactgatacttcacgaggaggaagagtttatctttgttctcttgtttgtctatgatcttctgaaagctgctttggacgctgggatgaag

SEQ ID NO: 32074 - DNA, 110 bp, synthetic construct
  source 1..110: mol_type = other DNA
gcagctgcggaagccagattcgtgctgatgggttagaaagtggtattcctctgtgtgctggaatccagcaggatacattcatttccttgggggacaaatgaaattaatcc

SEQ ID NO: 32075 - DNA, 110 bp, synthetic construct
  source 1..110: mol_type = other DNA
tgctggaatccagcaggatacattcatttccttgggggacaaatgaaattaatcctctctccagatggcagcaaagtgacaagcgtgtggagatcaaaagagaccgtgag

SEQ ID NO: 32076 - DNA, 110 bp, synthetic construct
  source 1..110: mol_type = other DNA
ttctgtaatgcgctggactgattccagatatgtttctagatatgaaatcccactaaaaatgcagagtcgagaaccttgccataggtggaggaaaccccgtggcctcctgc

SEQ ID NO: 32077 - DNA, 110 bp, synthetic construct
  source 1..110: mol_type = other DNA
actcatggcacgtggaagttctggggccagggatccaacctgcgccacagcagcaatgccggatccttaacctgtgagccaccagagaactcctagcaggacctcttcga

SEQ ID NO: 32078 - DNA, 110 bp, synthetic construct
  source 1..110: mol_type = other DNA
atgccggatccttaacctgtgagccaccagagaactcctagcaggacctcttcgaagcccggagatcttcgcctatcaagggagatatgtgaaaacttcatagggagttc

SEQ ID NO: 32079 - DNA, 110 bp, synthetic construct
  source 1..110: mol_type = other DNA
ctgccgctaagatgaagccaaggcagttcaatatgagctcaggcagtgtggacagtgtcaataatcacacacatttcacctgattcttcatcgaacagcccttcaaatat

SEQ ID NO: 32080 - DNA, 110 bp, synthetic construct
  source 1..110: mol_type = other DNA
ccctgttcctttcacctgggaatgatacttagagaccaagactttggtgctagatgtgctcacagctaattggcgggcagttgattttagaatttaaaaaaattagggag

SEQ ID NO: 32081 - DNA, 110 bp, synthetic construct
  source 1..110: mol_type = other DNA
tttgggctcagcaggaattccaaccaaaagggaagcctcagctcaggctggtcgggagtgatgacctaacttccagggcctgtgtgggaggttctgagccggtattcagg

SEQ ID NO: 32082 - DNA, 110 bp, synthetic construct
  source 1..110: mol_type = other DNA
gagtgatgacctaacttccagggcctgtgtgggaggttctgagccggtattcaggttgacttgcggtgatggagcacagacctctgggcagagcctgtctaaactgtgag

SEQ ID NO: 32083 - DNA, 110 bp, synthetic construct
  source 1..110: mol_type = other DNA
ctgaatatcttaatttcaaggtgctttcccacccatgctcctctgcataacgtgtccttaaccacagagccagagcctggcagtttgctgaaatcaagctggctgctgat

SEQ ID NO: 32084 - DNA, 110 bp, synthetic construct
  source 1..110: mol_type = other DNA
ccttaaccacagagccagagcctggcagtttgctgaaatcaagctggctgctgatctcacggagagaaagaatgccccgtggagaccgtggttcttaaccttctttgggc

SEQ ID NO: 32085 - DNA, 110 bp, synthetic construct
  source 1..110: mol_type = other DNA
ctgagcttcgtttcccccatctttccagtggggatgataaaaataacagctagcttccaaggcgtttgcgaagaacaaatgcaatgatgcttgcagcaaactgagcaaca

SEQ ID NO: 32086 - DNA, 110 bp, synthetic construct
  source 1..110: mol_type = other DNA
tccaaggcgtttgcgaagaacaaatgcaatgatgcttgcagcaaactgagcaacatgtctgagtcgagtcggcccccaaaaatgtcgcttgagagcgtgatggtcgccag

SEQ ID NO: 32087 - DNA, 110 bp, synthetic construct; identical to SEQ ID NO: 32085
  source 1..110: mol_type = other DNA

SEQ ID NO: 32088 - DNA, 110 bp, synthetic construct; identical to SEQ ID NO: 32086
  source 1..110: mol_type = other DNA

SEQ ID NO: 32089 - DNA, 110 bp, synthetic construct
  source 1..110: mol_type = other DNA
cgtagagacaccgggagcccacaggtcttccttatacgtaattaaccccaggtctgcaaaaagtgctttcaggattcagaggtggggtacctggctgaaccggggaagta

SEQ ID NO: 32090 - DNA, 110 bp, synthetic construct
  source 1..110: mol_type = other DNA
gcaaaaagtgctttcaggattcagaggtggggtacctggctgaaccggggaagtaggagcgggtgagtgaacccgagggcagagggaggtgggatgcgaggtccaagact

SEQ ID NO: 32091 - DNA, 110 bp, synthetic construct
  source 1..110: mol_type = other DNA
gggcttccgcttaggaaatgttgaccgagctgctaaggtgtggagagtgagtgactgctgctcagggtctggctcctggcgtattatcgagaggcagctgtgacagaggt

SEQ ID NO: 32092 - DNA, 110 bp, synthetic construct
  source 1..110: mol_type = other DNA
gccagaagggtggaaaagtggaggtaacttggagtacgatcacttcctgtgagaccgtgtcaggactaggcccactgtgggctgtggtagaacatgaaaaccctgtgtgg

SEQ ID NO: 32093 - DNA, 110 bp, synthetic construct
  source 1..110: mol_type = other DNA
ggctgagcatttctgttgggcctgctctgatttaaattttgaacagagcatctcgtacttattttcaaaactgaaatatttataatgagttattttgctggtaacaaagg

SEQ ID NO: 32094 - DNA, 110 bp, synthetic construct
  source 1..110: mol_type = other DNA
ttctcaagcatttagaaatagtgaacccacacaaggttagtctatcacctgtgtgtcagatttcaacctgcgctgccagacaaaatctgagggtaaatttctgatcccaa

SEQ ID NO: 32095 - DNA, 110 bp, synthetic construct
  source 1..110: mol_type = other DNA
tcagatttcaacctgcgctgccagacaaaatctgagggtaaatttctgatcccaaagctcccctgcccactgccgccctccatatctggaagagacagaggaagaactca

SEQ ID NO: 32096 - DNA, 110 bp, synthetic construct
  source 1..110: mol_type = other DNA
tgcttgtggtttttactgcgaggtagcagcaccccaccatcatgagcagcggaaaaggggagacaaagggcattttatctccattcccttaatagaagatgtgtgtgtgt

SEQ ID NO: 32097 - DNA, 110 bp, synthetic construct
  source 1..110: mol_type = other DNA
aggggagacaaagggcattttatctccattcccttaatagaagatgtgtgtgtgtgtacacacacgtgtctctattctgcctattgcttgagagtccttcctcagtgcca

SEQ ID NO: 32098 - DNA, 110 bp, synthetic construct
  source 1..110: mol_type = other DNA
gacctacagcaatgtttagtgtatgttctgggtgccccacccaaatcccatcctggtgcacccatcccccagctgctgcaagactggctgctaacaggtcacagctgcac

SEQ ID NO: 32099 - DNA, 110 bp, synthetic construct
  source 1..110: mol_type = other DNA
tctcctagaccgccacttgggccgggacattcagggcatctgccggcgggagcacaatgcggagagcagcatgtctgtcatacgtcccaggcgtgtaatgagatgacatt

SEQ ID NO: 32100 - DNA, 110 bp, synthetic construct
  source 1..110: mol_type = other DNA
aatgcggagagcagcatgtctgtcatacgtcccaggcgtgtaatgagatgacattggagctgagtccgcaaggaagaggagaagtttctattgagaagaagagactgtgg

SEQ ID NO: 32101 - DNA, 110 bp, synthetic construct
  source 1..110: mol_type = other DNA
tgccatgttctcaaagtgtccaatggaaatgctgtgacaggggaaaagctttgctctgggaggcaagagaccagggttctggtcctgattatcttaatgttcaaggaaat

SEQ ID NO: 32102 - DNA, 110 bp, synthetic construct
  source 1..110: mol_type = other DNA
ttcctagatgagcgcttctcaagcttgaatgagcatctgaatctcagctgggggtcttattacaatgcagattccagttcagtggaatcagatggggtcttgagatgctg

SEQ ID NO: 32103 - DNA, 110 bp, synthetic construct
  source 1..110: mol_type = other DNA
gtgaccttggggtagccaagagtttgcccaaactgtttctcagctttctgatctatgctgaggtcattactgcagagaaagggtttcacgtcttcccttctcatacctca

SEQ ID NO: 32104 - DNA, 110 bp, synthetic construct
  source 1..110: mol_type = other DNA
tgctgaggtcattactgcagagaaagggtttcacgtcttcccttctcatacctcaaattgtggtaggttggtgggagaagctagaggtagtacagttcttgacacgaaag

SEQ ID NO: 32105 - DNA, 110 bp, synthetic construct
  source 1..110: mol_type = other DNA
tcacaccgcagcatcctatgcagaagctgtttcaaaaggctctctttttccgcaggtaccaggagttaagggagtcactccaggcatgtaggcttccgtggggcgcagaa

SEQ ID NO: 32106 - DNA, 110 bp, synthetic construct
  source 1..110: mol_type = other DNA
gtaccaggagttaagggagtcactccaggcatgtaggcttccgtggggcgcagaaagggaatacggtggcatgatacccatctcaggccccgaggaacacaggccacggt

SEQ ID NO: 32107 - DNA, 110 bp, synthetic construct
  source 1..110: mol_type = other DNA
caaagcacattagaactacagggaagtgttttggcattgttgttgttgttgttactatatttgtgtgttatccaaagcataacctagccaggttggtcgtagaagtagag

SEQ ID NO: 32108 - DNA, 110 bp, synthetic construct
  source 1..110: mol_type = other DNA
tatatttgtgtgttatccaaagcataacctagccaggttggtcgtagaagtagagcggggacatcagaacatcttggaaagcggatgaaggccccagctggctgaaaaca

SEQ ID NO: 32109 - DNA, 110 bp, synthetic construct
  source 1..110: mol_type = other DNA
ctgagctgcgtctgcaacctataaaacagctcacggcatactggattcttagcccactacgttaagccagggatcgaacccacatcctcgtgaatagtagttgggttcct

SEQ ID NO: 32110 - DNA, 110 bp, synthetic construct
  source 1..110: mol_type = other DNA
actacgttaagccagggatcgaacccacatcctcgtgaatagtagttgggttcctaacccactgagccacaatgggaagtcctgcagcagattcttaacacactgcacca

SEQ ID NO: 32111 - DNA, 110 bp, synthetic construct
  source 1..110: mol_type = other DNA
catgtcggccgcttatagagaatatgccagccagagggcaggatgtctgtcctgttccctaatcgctctatttttcctagaaataaatccgtggatgcttgagcttgtag

SEQ ID NO: 32112 - DNA, 110 bp, synthetic construct
  source 1..110: mol_type = other DNA
tccctaatcgctctatttttcctagaaataaatccgtggatgcttgagcttgtagaccacagcctctgtgagtttggctaatgtgagtctttccttaaaagacagattct

SEQ ID NO: 32113 - DNA, 110 bp, synthetic construct
  source 1..110: mol_type = other DNA
acagactcggaaaatagcattaaccccaaaacaaagtagatgtcacttgtgatttaacatgtggtaccacgggaacaaaagcgtttttactgtcactgaagctttgtttt

SEQ ID NO: 32114 - DNA, 110 bp, synthetic construct
  source 1..110: mol_type = other DNA
aacatgtggtaccacgggaacaaaagcgtttttactgtcactgaagctttgttttcccagaaagaataattaagagagaacaactcgaaatgaactcaccagctttcagt

SEQ ID NO: 32115 - DNA, 110 bp, synthetic construct
  source 1..110: mol_type = other DNA
catcatgtggaacttctaaagctattttggtttgactgcaaatgtttgacatccttatgaagaaagaattaaaaagtactagtctctctcttggtgcagggaataaataa

SEQ ID NO: 32116 - DNA, 110 bp, synthetic construct
  source 1..110: mol_type = other DNA
ttctcctggagggaaaaaataaccactgccttgtcagcagtagtggcagaggtgcttctacctttttttttgcctctttagctctagtccaccaataaccactccagttt

SEQ ID NO: 32117 - DNA, 110 bp, synthetic construct
  source 1..110: mol_type = other DNA
gcagaggtgcttctacctttttttttgcctctttagctctagtccaccaataaccactccagttttggagggtattttttgctttttagggccacacctgcagcacatgg

SEQ ID NO: 32118 - DNA, 110 bp, synthetic construct
  source 1..110: mol_type = other DNA
ggctttttcttgcccctggtcttgtggcgcttatgccacttgtcccgaaagatatccattgctcagttctggctggaaagagctaacctgtacgctaagtggaaaacagg

SEQ ID NO: 32119 - DNA, 110 bp, synthetic construct
  source 1..110: mol_type = other DNA
tataaaagcccagacatgactacaccgcaagacatgaggaggtggtcagatacccctatagacagggtgacagctactaatacagacccatagagatgtattagtaactc

SEQ ID NO: 32120 - DNA, 110 bp, synthetic construct
  source 1..110: mol_type = other DNA
ctatagacagggtgacagctactaatacagacccatagagatgtattagtaactcacatgtcacaggcggcatgaccttcagtgacactattcttcaaaatggtgactga

SEQ ID NO: 32121 - DNA, 110 bp, synthetic construct
  source 1..110: mol_type = other DNA
gaagagctgactttgtctgctcattcacactgtcagctgtcaaaaagctggagaacttttcaaatcacatatgtatttgctcccactcttgccttgtactttggaaccct

SEQ ID NO: 32122 - DNA, 110 bp, synthetic construct
  source 1..110: mol_type = other DNA
ttcaggatttgattgtttggagggatttgggggttgtcgttgttctttcatgggcaatggaaacacttttaaaaggaagattgagtgactaatctatcagctgcagcaat

SEQ ID NO: 32123 - DNA, 110 bp, synthetic construct
  source 1..110: mol_type = other DNA
aatggaaacacttttaaaaggaagattgagtgactaatctatcagctgcagcaataaatttatatatttccaaaacagtgaaacggcaacaagttctgttttatccccaa

SEQ ID NO: 32124 - DNA, 110 bp, synthetic construct
  source 1..110: mol_type = other DNA
gtgtccgggtctcgtctttccactccctggtttcatctcccttatgctaatgacgacacttgataatttattgataggtgcgaaccagctcattggagagtctatattat

SEQ ID NO: 32125 - DNA, 110 bp, synthetic construct
  source 1..110: mol_type = other DNA
caggtctttaaaagttggggtgcctgaggtggggtttaaactcttcacgggaagaagcttgggctttgaagttgcctgcggactgtgggccgctgtgccaggggtgggat

SEQ ID NO: 32126 - DNA, 110 bp, synthetic construct
  source 1..110: mol_type = other DNA
agcttgggctttgaagttgcctgcggactgtgggccgctgtgccaggggtgggatttacagagagatcctacctgtttcgatgtgggtttttcctcattcgtctgatgtg

SEQ ID NO: 32127 - DNA, 110 bp, synthetic construct; identical to SEQ ID NO: 32125
  source 1..110: mol_type = other DNA

SEQ ID NO: 32128 - DNA, 110 bp, synthetic construct; identical to SEQ ID NO: 32126
  source 1..110: mol_type = other DNA

SEQ ID NO: 32129 - DNA, 110 bp, synthetic construct
  source 1..110: mol_type = other DNA
agctcttgaactgaaccttgaagaaccatatgatttcattagggaaatgatccctccatctacatctgaagctgctttttttaaaatcttttaaatctcagaatcttttc

SEQ ID NO: 32130 - DNA, 110 bp, synthetic construct
  source 1..110: mol_type = other DNA
ccatctacatctgaagctgctttttttaaaatcttttaaatctcagaatcttttccacagaaaatgggagttcccataatggctcaggggaaatgaatctgacttgtatc

SEQ ID NO: 32131 - DNA, 110 bp, synthetic construct; identical to SEQ ID NO: 32129
  source 1..110: mol_type = other DNA

SEQ ID NO: 32132 - DNA, 110 bp, synthetic construct; identical to SEQ ID NO: 32130
  source 1..110: mol_type = other DNA

SEQ ID NO: 32133 - DNA, 110 bp, synthetic construct
  source 1..110: mol_type = other DNA
cactcagaaggcactcagatattcaacaacaaataaacaaacacatacatgctactgtctcaaagttccatctcccaagcttcagagtatattttcttgcttaatctctg

SEQ ID NO: 32134 - DNA, 110 bp, synthetic construct
  source 1..110: mol_type = other DNA
gctatttaatggttgcgtcagatacttctacatgcattgttaaaaatagttttctcttccaaacaagttatacctgtaatgcgttcacataaacactttcttcattatca

SEQ ID NO: 32135 - DNA, 110 bp, synthetic construct
  source 1..110: mol_type = other DNA
cttccaaacaagttatacctgtaatgcgttcacataaacactttcttcattatcagctggcaaggaaaatgaaaaagccattggacctagggctgcaagcactcagcttt

SEQ ID NO: 32136 - DNA, 110 bp, synthetic construct
  source 1..110: mol_type = other DNA
aaaaccccaacctacgctttttttcttccctgcctgccgtttgatacctgttatgttggtcactgtcacctagcatttggacgctacacgtgcaagagaaataaagataa

SEQ ID NO: 32137 - DNA, 110 bp, synthetic construct
  source 1..110: mol_type = other DNA
gtcgtaaagtgaggtttatgagcggtttggccttgttccactgtggcttggattgataatgaccttggtcaatgcattgtaatataatgttgaaaggaagccactaaggc

SEQ ID NO: 32138 - DNA, 110 bp, synthetic construct
  source 1..110: mol_type = other DNA
ataatgaccttggtcaatgcattgtaatataatgttgaaaggaagccactaaggccaggttcctcctcagaaaataacagtgaagttaattcagatgactctctctcaaa

SEQ ID NO: 32139 - DNA, 110 bp, synthetic construct
  source 1..110: mol_type = other DNA
aaggaagaataatgggcagcagatgtgctacatgatggttcggtgctggagaccagtgtgacctgggcatatctcaaaggcagtgtaaacccagctccagtcagggggaa

SEQ ID NO: 32140 - DNA, 110 bp, synthetic construct
  source 1..110: mol_type = other DNA
gtgtgacctgggcatatctcaaaggcagtgtaaacccagctccagtcagggggaaataaaaatcagagacggaacaagagcaactctgaaaagtctggcaggatgatcga

SEQ ID NO: 32141 - DNA, 110 bp, synthetic construct
  source 1..110: mol_type = other DNA
catagacccttcaatccatagttgactcctcaggtcacgtggatccaggcgcctttcaaagtgcctgcaggatggccaacttccacaaaggcaaaacttcatttcaagca

SEQ ID NO: 32142 - DNA, 110 bp, synthetic construct
  source 1..110: mol_type = other DNA
tcaaagtgcctgcaggatggccaacttccacaaaggcaaaacttcatttcaagcagcgagcagggaatcaaccacctcccatgagaacatggagcaataaggctgcagaa

SEQ ID NO: 32143 - DNA, 110 bp, synthetic construct
  source 1..110: mol_type = other DNA
acctgtcttccacatttggtagaaaattcctggagaagttactattgatctttttatccccggtgcttagtgcatgtctaatagctactaggtgctcaaaacatgttaag

SEQ ID NO: 32144 - DNA, 110 bp, synthetic construct
  source 1..110: mol_type = other DNA
aagaataaattacattctaccattgaaggagaggtaacattctttctcctgcaaacatgaataaggggacacagggccttgatgtcaacgggcttgcacatgtgacatga

SEQ ID NO: 32145 - DNA, 110 bp, synthetic construct
  source 1..110: mol_type = other DNA
catgaataaggggacacagggccttgatgtcaacgggcttgcacatgtgacatgaggtaaaagagactccattggaaggcaaggctgagaagattcccaaataggcataa

SEQ ID NO: 32146 - DNA, 110 bp, synthetic construct
  source 1..110: mol_type = other DNA
caggtccatcccctgaagttctgggtccttcatgagagtaaagcaagtagacctcagctgatacacccaacaaagtggcaccggctcctggccccatgcccagctctctg

SEQ ID NO: 32147 - DNA, 110 bp, synthetic construct
  source 1..110: mol_type = other DNA
agctgatacacccaacaaagtggcaccggctcctggccccatgcccagctctctggctggcagagcaacagaccgaaggagatgcacagagaaatgagggtggaccctgg

SEQ ID NO: 32148 - DNA, 110 bp, synthetic construct
  source 1..110: mol_type = other DNA
ataaaaatctgccagagacacatgaagggaaggaaaccggacgccttgacagatgctgagacagaaggaggagcagcccaggggaagtccttcaacatgccaaggagacc

SEQ ID NO: 32149 - DNA, 110 bp, synthetic construct
  source 1..110: mol_type = other DNA
ttgccaagaaaacagatttccccaaaaccttctcagcagactaccattcctatctcactggccagaaccatattatgttgtcactgtgagctgcaagggcatctgggaaa

SEQ ID NO: 32150 - DNA, 110 bp, synthetic construct
  source 1..110: mol_type = other DNA
cactggccagaaccatattatgttgtcactgtgagctgcaagggcatctgggaaatccagcatctggctttccctctcctctagcagaaaaagggaagggagaagagact

SEQ ID NO: 32151 - DNA, 110 bp, synthetic construct
  source 1..110: mol_type = other DNA
atattgttactaacagcataactcattctgctaatatcaaattatttgaaagtgtaagccaagaatttactctggattagctccacagacaacaaaagtaaaggttagtg

SEQ ID NO: 32152 - DNA, 110 bp, synthetic construct
  source 1..110: mol_type = other DNA
cactgtgtcaccatgggaagtcctgtctgtgaattttaacacaccagcttaagacaaatcctgggtacgtttataacgcttaccctgttaccatgccagccccaggccag

SEQ ID NO: 32153 - DNA, 110 bp, synthetic construct; identical to SEQ ID NO: 32152
  source 1..110: mol_type = other DNA

SEQ ID NO: 32154 - DNA, 110 bp, synthetic construct
  source 1..110: mol_type = other DNA
aagtgatattataacatagatgcaaaagtcctccacaaaatgttagtaaaccaaatccagctgtatattaaaaggatcatgcgccatgatcaagcaggatttaccccagg

SEQ ID NO: 32155 - DNA, 110 bp, synthetic construct
  source 1..110: mol_type = other DNA
atagatgcaaaagtcctccacaaaatgttagtaaaccaaatccagctgtatattaaaaggatcatgcgccatgatcaagcaggatttaccccagggatgcaagaattctt

SEQ ID NO: 32156 - DNA, 110 bp, synthetic construct
  source 1..110: mol_type = other DNA
tatcctcttttttaatggtttatgaataaatgtaatcctttctacatccgtctggtagtaatggcgctttctcttgctcccttgccctctttctcaaaacctaggaaagt

SEQ ID NO: 32157 - DNA, 110 bp, synthetic construct
  source 1..110: mol_type = other DNA
tagtaatggcgctttctcttgctcccttgccctctttctcaaaacctaggaaagtaagtggacatcaaaatctgtaggtgggcaaactgtagggtatataattcaaccag

SEQ ID NO: 32158 - DNA, 110 bp, synthetic construct
  source 1..110: mol_type = other DNA
gggtagggaagcagtggctattgctggcacttactggagtggcacttcagaagcagcccagatctttgagggcagctgctctgccacagccagtctcccaacacacaccc

SEQ ID NO: 32159 - DNA, 110 bp, synthetic construct
  source 1..110: mol_type = other DNA
gcccagatctttgagggcagctgctctgccacagccagtctcccaacacacacccagagcccaccagccctgcagagaagttccacagtgggtgggggcagcagaggggc

SEQ ID NO: 32160 - DNA, 110 bp, synthetic construct
  source 1..110: mol_type = other DNA
acataacataagctgcaaccacatttttcctgttatttgtgaacatactattacatccttttaactgctcttgtttgagctcaaattcatggaaaagagtgacggaataa

SEQ ID NO: 32161 - DNA, 110 bp, synthetic construct
  source 1..110: mol_type = other DNA
tggtaaaaaacgctaaccatcatctcacaatgcatggttaccacaaatgttcactatattaaaaatgcagtatctgcagtttaataaagtgaagcacaacaaaataaggt

SEQ ID NO: 32162 - DNA, 110 bp, synthetic construct
  source 1..110: mol_type = other DNA
caaccagggggcctcaccagccacacaccagaaaaagagcccaccaagctaaaacccagaaagccttttgggagaaaaggactgataactgttattgcacaaatactgac

SEQ ID NO: 32163 - DNA, 110 bp, synthetic construct
  source 1..110: mol_type = other DNA
ccagaaagccttttgggagaaaaggactgataactgttattgcacaaatactgaccatcttgtagcaaattctgaaaaccaaagcatagtctaatcgttgggtctggcgc

SEQ ID NO: 32164 - DNA, 110 bp, synthetic construct
  source 1..110: mol_type = other DNA
acccagagcgtcagtgggtgtctggctgtatatagcgtgtggagtcttgatgtgacatccacgagtcggcccctggtggtgctgtgagagctggtccagctgacccagct

SEQ ID NO: 32165 - DNA, 110 bp, synthetic construct
  source 1..110: mol_type = other DNA
catccacgagtcggcccctggtggtgctgtgagagctggtccagctgacccagctctcgaggcccttgctcctccagtgccttcctgaggccagtgtggtcccaggttgt

SEQ ID NO: 32166 - DNA, 110 bp, synthetic construct
  source 1..110: mol_type = other DNA
aattcagatttaagtgggcatcctgtatttgcatttgttcaatctggcaaaacccccaatttttgtgtgtgtgctattttagagaatgaggggaactccagccacccaca

SEQ ID NO: 32167 - DNA, 110 bp, synthetic construct
  source 1..110: mol_type = other DNA
ccaatttttgtgtgtgtgctattttagagaatgaggggaactccagccacccacaccttgagctaactagacaccaagtggcgggggtgactcttcagccccaggacagg

SEQ ID NO: 32168 - DNA, 110 bp, synthetic construct
  source 1..110: mol_type = other DNA
cttaacctgctgagccacgatgggaactcattttatctttttctttttggatgtacccatggcatgtagaagcccccaggccagggattgaatttgccactgcagcaacc

SEQ ID NO: 32169 - DNA, 110 bp, synthetic construct
  source 1..110: mol_type = other DNA
atctctgatctgtcctcagcatagaacaagcgtgtcaacttgcactctgagcatcctccagaataaaagctgaagtcttggagttcccgtagtggctcagcggaaatgaa

SEQ ID NO: 32170 - DNA, 110 bp, synthetic construct
  source 1..110: mol_type = other DNA
ctggggctataggtcatggatctcaaaaatgaatatttctctcttacaagaagtccacttaagggtcttttaagcttccctcgtatgttcaaaataagatgcagttttta

SEQ ID NO: 32171 - DNA, 110 bp, synthetic construct
  source 1..110: mol_type = other DNA
cacttaagggtcttttaagcttccctcgtatgttcaaaataagatgcagtttttacaaggtgattgccacacagcttacctggaacccatcactccgctttgagtacatt

SEQ ID NO: 32172 - DNA, 110 bp, synthetic construct
  source 1..110: mol_type = other DNA
tcatctccatctgcacgcttgcaggggtcattccttttttgagcccagagacacacgtctgtgtctaaggaagaaaaaaggccatccgtccaaaccagaagaaaagtctg

SEQ ID NO: 32173 - DNA, 110 bp, synthetic construct
  source 1..110: mol_type = other DNA
cgtctgtgtctaaggaagaaaaaaggccatccgtccaaaccagaagaaaagtctgaaagaaggtgggtacgagctgccctgcagtcctggtcacatcctgtccccgaggc

SEQ ID NO: 32174 - DNA, 110 bp, synthetic construct
  source 1..110: mol_type = other DNA
gctcggattccacccctggcctgggaacttttgcatatgctgtgggtggcaccaaacaaagagagagaaatagagggggaacgagacaaagaaaatgttttcacactgga

SEQ ID NO: 32175 - DNA, 110 bp, synthetic construct
  source 1..110: mol_type = other DNA
acaaagagagagaaatagagggggaacgagacaaagaaaatgttttcacactggagaaccattgactccgagcaccttcatccctgtgtgtttgtctcatcttaggcaag

SEQ ID NO: 32176 - DNA, 110 bp, synthetic construct
  source 1..110: mol_type = other DNA
ttttttccccgcgttatgtttttcaggatcaccagtttttatactcggcactcttagccactgaagtggaagtggaggcgtctgcaagggccccactgatatatgcagtg

SEQ ID NO: 32177 - DNA, 110 bp, synthetic construct
  source 1..110: mol_type = other DNA
agccactgaagtggaagtggaggcgtctgcaagggccccactgatatatgcagtgtcatttattttgggaccccttcacctcaaatattttagttcttgtgctatttaaa

SEQ ID NO: 32178 - DNA, 110 bp, synthetic construct
  source 1..110: mol_type = other DNA
ccctttggaggcctcctctccaaactgtcacattctgagatactgggagttaagactacaatgcatgagttttgaggggtcacagttcagctcacaagagcctctgatta

SEQ ID NO: 32179 - DNA, 110 bp, synthetic construct
  source 1..110: mol_type = other DNA
ctacaatgcatgagttttgaggggtcacagttcagctcacaagagcctctgattagtaagtcacagtggctgaaggtgcctgagatctgcaggaagagatgcctggggac

SEQ ID NO: 32180 - DNA, 110 bp, synthetic construct
  source 1..110: mol_type = other DNA
tggtctgcccgtcctcccttttaacaaagagaacgttgttgaattcctgcagcactgcggacttggcattttgtgtttcctcacctcttaaagcgccttagcagaactca

SEQ ID NO: 32181 - DNA, 110 bp, synthetic construct
  source 1..110: mol_type = other DNA
atgcacaatacaaatgacatgatcggggtgcagactgcacagcttgttgtgacgtcagcagtagacggggcttgtggcacagccagggaaggtgggatttgggggcccgc

SEQ ID NO: 32182 - DNA, 110 bp, synthetic construct
  source 1..110: mol_type = other DNA
ccctggagacttccacacaggcatccgtgaggacgtgaacacactgtcattctctaacacctcgaatttggtcatggccatggccatggccaccacggtttgtgtgcact

SEQ ID NO: 32183 - DNA, 110 bp, synthetic construct
  source 1..110: mol_type = other DNA
gtgctagtcaaatacctgggtcataagggagccgatggtgtgacatcccagctcccccgagtacctaggatcctggaagcatctcctgagagtggaggaccaggatgtac

SEQ ID NO: 32184 - DNA, 110 bp, synthetic construct
  source 1..110: mol_type = other DNA
agctgagcaggcttttccaggagctgttgttgtccgatggttctgggatctatgggaagcaggcaagaccggggaactcgccgcggtgtccttcctcacctgcccaggtg

SEQ ID NO: 32185 - DNA, 110 bp, synthetic construct
  source 1..110: mol_type = other DNA
gaagcaggcaagaccggggaactcgccgcggtgtccttcctcacctgcccaggtgcccaggtccttcttgctgccacagttctggtgcctggggtggtgtgcggtccggg

SEQ ID NO: 32186 - DNA, 110 bp, synthetic construct
  source 1..110: mol_type = other DNA
acgagtcggcgtgcagcccacgcggccgctctgtgccgcagtctcagctcgggggggaacatcacagccactctcctgggaagtattgtgtctccaaaacgcctgcacgc

SEQ ID NO: 32187 - DNA, 110 bp, synthetic construct
  source 1..110: mol_type = other DNA
aacctgctcattaacccacgctgtgttcctgcattgttaacctgtaaccgtgttatgtcaccgcgtttaagggcccccgtgtgtatcttcagcagcagagacctcatcac

SEQ ID NO: 32188 - DNA, 110 bp, synthetic construct
  source 1..110: mol_type = other DNA
taattgatttgcaatgttgtgttgccctcgcttcttttactcagagaacaaatctttcttaagagctacctgaacaagtgcacgttttaagatggtagaacttttggggt

SEQ ID NO: 32189 - DNA, 110 bp, synthetic construct
  source 1..110: mol_type = other DNA
ttcttaagagctacctgaacaagtgcacgttttaagatggtagaacttttggggttcctgctgtggctcaatgggattggcggtgtcttgggagggctgggatgaaggtt

SEQ ID NO: 32190 - DNA, 110 bp, synthetic construct
  source 1..110: mol_type = other DNA
ccgtataagcaagtggagcccattgtcaggctgacccggaggcgctgcagggaagggacttggaaccttactcacagcataaggaagctgacggtgacttcaggaggtca

SEQ ID NO: 32191 - DNA, 110 bp, synthetic construct
  source 1..110: mol_type = other DNA
ggacttggaaccttactcacagcataaggaagctgacggtgacttcaggaggtcaccagttttgatgtgaggctgtatctaaaatcacacatctcatggagaccccgtcg

SEQ ID NO: 32192 - DNA, 110 bp, synthetic construct
  source 1..110: mol_type = other DNA
ggaactcctggaaaaaagaagtattttaaatgttgccttattagaaaaacatctttttaaaaaattctcatgctttaggcacgggtggagcagatgctgtttgcacattc

SEQ ID NO: 32193 - DNA, 110 bp, synthetic construct
  source 1..110: mol_type = other DNA
tttaaaaaattctcatgctttaggcacgggtggagcagatgctgtttgcacattctcaccactagatggcgacatctgagcgccgagctgagccctgggcggtgggctgc

SEQ ID NO: 32194 - DNA, 110 bp, synthetic construct
  source 1..110: mol_type = other DNA
tttcacgtactgagaaaccctcagactgcagctcccgggaattccgctatgctggtgctagttcacattcggcctccatcacgtcgtcagaatcattactgagatgttcc

SEQ ID NO: 32195 - DNA, 110 bp, synthetic construct
  source 1..110: mol_type = other DNA
cgtactgtcttcctcggggccgcatcaactgatagttccaaggacagtgcagaggggtttccttgtctgccccctctcactaccattcctttttcttatcttttcgatga

SEQ ID NO: 32196 - DNA, 110 bp, synthetic construct
  source 1..110: mol_type = other DNA
tatacacatatatacacgcacacattttaaaaaaaattctctatcgacgttgaacagcaagtgataaaaaccacaaggcaaattggagtaagtgataaaacacagttgtg

SEQ ID NO: 32197 - DNA, 110 bp, synthetic construct
  source 1..110: mol_type = other DNA
catgcattcccaagtatatggtcagatgaaaacgtgcatgggcttggatgttggtcttgcttgatttccccatttctaccttttctagaaaacccaattcttgatctcag

SEQ ID NO: 32198 - DNA, 110 bp, synthetic construct
  source 1..110: mol_type = other DNA
catctccagtggcttacacagtctctggcatccagcagaagctgcataaatgttcaccaagtaaatgagagctaagttaggttaatggaaggccgtctgaacacctctct

SEQ ID NO: 32199 - DNA, 110 bp, synthetic construct
  source 1..110: mol_type = other DNA
accaagtaaatgagagctaagttaggttaatggaaggccgtctgaacacctctctgagtctggcaccagatcacaaggggtgagccgagttaatcctgcatggctggccc

SEQ ID NO: 32200 - DNA, 110 bp, synthetic construct
  source 1..110: mol_type = other DNA
aacccatggcatctcccctttgggtgacctgctgtattccccatggtccgggctgactgtggggtgatgtgggattgagcaccccttgttggcacccccttctattgcct

SEQ ID NO: 32201 - DNA, 110 bp, synthetic construct
  source 1..110: mol_type = other DNA
cgctcactgctggcactcacctttcctgctctcgagctctcctaaaagcatctatgtcactccaagtttgagaatggttcgccctttcagctgggtgctaagtgagatgg

SEQ ID NO: 32202 - DNA, 110 bp, synthetic construct
  source 1..110: mol_type = other DNA
ggctcttcccagtggctgctctgatgggtcacatcccgggcacaccccttcccgagagaatacttctgggtttatttatgcctcccgccattgacggaaacctcccactt

SEQ ID NO: 32203 - DNA, 110 bp, synthetic construct
  source 1..110: mol_type = other DNA
gagaatacttctgggtttatttatgcctcccgccattgacggaaacctcccactttggccaagtattataatagctccttgcacgaggtgtcacacagcaggaggtcccg

SEQ ID NO: 32204 - DNA, 110 bp, synthetic construct
  source 1..110: mol_type = other DNA
tccgtcatggaggtcgtcagctcgggcgtacacatactcgtgacagtcctctccacttttataagaggatatctgccagaggcatcagacagggccacacaggcttgaag

SEQ ID NO: 32205 - DNA, 110 bp, synthetic construct
  source 1..110: mol_type = other DNA
cttttataagaggatatctgccagaggcatcagacagggccacacaggcttgaagcacccaactccagagcatgtagggcgccccctagagttgtgcagcgctcagtgta

SEQ ID NO: 32206 - DNA, 110 bp, synthetic construct
  source 1..110: mol_type = other DNA
cagcgcagtttgatacgtgcacacaaaactgttccctttaacgagtcatagcaaccaaagtgccgtctgtgcgagtcaccccgagagaccatctgtgcacattctcacta

SEQ ID NO: 32207 - DNA, 110 bp, synthetic construct
  source 1..110: mol_type = other DNA
caaagtgccgtctgtgcgagtcaccccgagagaccatctgtgcacattctcactagctccttatccgcttgttgtctcctccccttgttatcagcaaaagaggttctcga

SEQ ID NO: 32208 - DNA, 110 bp, synthetic construct
  source 1..110: mol_type = other DNA
gtggtccaggtggcccacagggggcacccagaggtccctggagatgaacctcaggttccagatttctccagctgccctagtcatgttgtcaatcttatgtcgttcttcct

SEQ ID NO: 32209 - DNA, 110 bp, synthetic construct
  source 1..110: mol_type = other DNA
ttccagatttctccagctgccctagtcatgttgtcaatcttatgtcgttcttcctcccaaacccgtacaccctgtcgggggcctgaagggtaccccctcaccaccgaaga

SEQ ID NO: 32210 - DNA, 110 bp, synthetic construct
  source 1..110: mol_type = other DNA
tcttagtcccttacacctgagagtgacagagtttatcagctttttcctgagaacagggttttcagagagggcgagggttcagcggttctgcgaggcacccctgaatgatg

SEQ ID NO: 32211 - DNA, 110 bp, synthetic construct
  source 1..110: mol_type = other DNA
gggttttcagagagggcgagggttcagcggttctgcgaggcacccctgaatgatgccagcagctacccccgctcccagggctcagtcctcccctcactgaagggggatca

SEQ ID NO: 32212 - DNA, 110 bp, synthetic construct
  source 1..110: mol_type = other DNA
gctctgattcaatccctaccctgggaatttccatatgctgcggttgcggccctgaaaaaaaagggggagtttaagacctaaaaaaaccccccaaaaccctgcagtttgaa

SEQ ID NO: 32213 - DNA, 110 bp, synthetic construct
  source 1..110: mol_type = other DNA
tgctcataaggcagttgtgagtaaaagctcttccagcagagccttgagcaacaatggtaaatttttgcagaccttcccttactggttagaagttaataaaaaaaaaaaaa

SEQ ID NO: 32214 - DNA, 110 bp, synthetic construct
  source 1..110: mol_type = other DNA
tggggctggggaatcatggtgctcaggtgtggccctggccctgaagaagctcatgggcttgtaggatctgaggaagcaaaagcttacaccatggtggtgcagcgtacgtg

SEQ ID NO: 32215 - DNA, 110 bp, synthetic construct
  source 1..110: mol_type = other DNA
aaccattcaagtgattcacccacgaaggcgctagtgagcccttctgcagcccatgcagtgtgcatgagtcctggacggccaaggacacaggaggcagacacaccactggc

SEQ ID NO: 32216 - DNA, 110 bp, synthetic construct
  source 1..110: mol_type = other DNA
ggacgaggcggggctggagcttcgggacattgagctggtgatggcacaggccaacgtgtcaagggccaaggctgtgcgggccttgagagacaaccagagcgacattgtca

SEQ ID NO: 32217 - DNA, 110 bp, synthetic construct
  source 1..110: mol_type = other DNA
gtgtcaagggccaaggctgtgcgggccttgagagacaaccagagcgacattgtcaacgccatcatggtgagtggccggcagcccccgcagtggccccgctgctctctgct

SEQ ID NO: 32218 - DNA, 110 bp, synthetic construct
  source 1..110: mol_type = other DNA
gcttccacagaacccaagcatctccaaacacagacacgtgacagacagggaaaccctgaaaacaaacttcacggcaaagggcaaactcacccgccacgccgggcactacg

SEQ ID NO: 32219 - DNA, 110 bp, synthetic construct
  source 1..110: mol_type = other DNA
ctgaaaacaaacttcacggcaaagggcaaactcacccgccacgccgggcactacggaaaatgtatgggaaaacccacgaaccacccaacagaaaaatggctacagaaaga

SEQ ID NO: 32220 - DNA, 110 bp, synthetic construct; identical to SEQ ID NO: 32218
  source 1..110: mol_type = other DNA

SEQ ID NO: 32221 - DNA, 110 bp, synthetic construct; identical to SEQ ID NO: 32219
  source 1..110: mol_type = other DNA

SEQ ID NO: 32222 - DNA, 110 bp, synthetic construct
  source 1..110: mol_type = other DNA
accacctcacccagacacacggtgtcctccacgtcttttaagtccgtgtttctgtgtttcgggagtttctcccatagagattttggacgtttctgtgaattttaagctta

SEQ ID NO: 32223 - DNA, 110 bp, synthetic construct
  source 1..110: mol_type = other DNA
gtttcgggagtttctcccatagagattttggacgtttctgtgaattttaagcttaaagcatgtatctggaaaagcattaacaggatcttcttttttttttttggtgccaa

SEQ ID NO: 32224 - DNA, 110 bp, synthetic construct
  source 1..110: mol_type = other DNA
ccatggaattaacttcacattggttatgggcaatgtctacaccctgttgaccactgaagtgggaaccccacggacatatacatgtgtctgatgcaatgagatgagatcca

SEQ ID NO: 32225 - DNA, 110 bp, synthetic construct
  source 1..110: mol_type = other DNA
gaagtgggaaccccacggacatatacatgtgtctgatgcaatgagatgagatccaggactcagctggtgtctacattgtgtctgaacacagaactaagattctcctggac

SEQ ID NO: 32226 - DNA, 110 bp, synthetic construct
  source 1..110: mol_type = other DNA
ccaacagagattgctgtcttgagcgttggcatgggatggctggctctcaaggaacaggacctcaatcagagtccagctccattcctgtgtcccctcccgtggatgtccac

SEQ ID NO: 32227 - DNA, 110 bp, synthetic construct
  source 1..110: mol_type = other DNA
ctgactgtaagtagacaaaggcggcaaacccaggtaagctgagcttcaggaaaaggtctcccttgcattctgtgtgcttctaccaccaccgacagctctctacctgctag

SEQ ID NO: 32228 - DNA, 110 bp, synthetic construct
  source 1..110: mol_type = other DNA
cagtggcattaagtagatgcatccatcaccaccatctatctccatagctttttcatcttttaaaacggacactctgtaggcattaagcaataattcctcctcccacccac

SEQ ID NO: 32229 - DNA, 110 bp, synthetic construct
  source 1..110: mol_type = other DNA
gcttcgaggtttgagacctcagcctcccatcgcccgtcccagtattcatcccactgtgaatgactgctgcatcttttaccgtcttttggtctttttagggccacacccat

SEQ ID NO: 32230 - DNA, 110 bp, synthetic construct; identical to SEQ ID NO: 32229
  source 1..110: mol_type = other DNA

SEQ ID NO: 32231 - DNA, 110 bp, synthetic construct; identical to SEQ ID NO: 32229
  source 1..110: mol_type = other DNA

SEQ ID NO: 32232 - DNA, 110 bp, synthetic construct; identical to SEQ ID NO: 32229
  source 1..110: mol_type = other DNA

SEQ ID NO: 32233 - DNA, 110 bp, synthetic construct
  source 1..110: mol_type = other DNA
ggcattcacgcacagaggctcccaagtcctgacacctcgcaacagctcgtccaggggctattctctctaaaaccaaacagagcctcagaagacttggttggttccacaaa

SEQ ID NO: 32234 - DNA, 110 bp, synthetic construct
  source 1..110: mol_type = other DNA
gcctaccgtgagctgtccatgagagccaggttttcagctgctcgtgtgcattgtggggcaggagcgctgggcccctggctgcttcacctgggcggtgggcccaggaggca

SEQ ID NO: 32235 - DNA, 110 bp, synthetic construct
  source 1..110: mol_type = other DNA
ccaaggaggcctcctgctcaaagcaccccatcccgatgagcacagcaggcaacgtctatgtcaactctggcttcgagcatcccgacaagagtgtgaatagttccgacagc

SEQ ID NO: 32236 - DNA, 110 bp, synthetic construct
  source 1..110: mol_type = other DNA
ctatgtcaactctggcttcgagcatcccgacaagagtgtgaatagttccgacagctcccagccacacaataggcagaagttctgatggagccagagctcaacggccctga

SEQ ID NO: 32237 - DNA, 110 bp, synthetic construct
  source 1..110: mol_type = other DNA
atgtctggtgtaattgctgagctcgcagggtccaggacttgaagtgcagctcccctgtgtgcacattgaagtggcagctttggtccagtctcactgtgtttgcctctggc

SEQ ID NO: 32238 - DNA, 110 bp, synthetic construct
  source 1..110: mol_type = other DNA
tgtgtgcacattgaagtggcagctttggtccagtctcactgtgtttgcctctggccaccggatgaaggagcatctgaacactggcccgacaggagctgggctcgtgcagc

SEQ ID NO: 32239 - DNA, 110 bp, synthetic construct
  source 1..110: mol_type = other DNA
gctcagcactgcactggagagcttagccggcgcagaaagcagtagaaaaagaccgaaagggtggaaaggtaggaacggggtagacattacttgtaggtgatgtaattgtg

SEQ ID NO: 32240 - DNA, 110 bp, synthetic construct
  source 1..110: mol_type = other DNA
atatgaacacgtgttcatagaagctttgtccacaacagccgaaaaggagaaacaacccaaatgcccatcggctgatgaatggatgtgcacacggtggagtattactcagg

SEQ ID NO: 32241 - DNA, 110 bp, synthetic construct
  source 1..110: mol_type = other DNA
gaatgggcctctctcgtgggcctctgggaggaggggccacgcgggagtgggcacgcacccccctcctggtcccggaccccacgatgcatagctaactttgacgcaaaaca

SEQ ID NO: 32242 - DNA, 110 bp, synthetic construct
  source 1..110: mol_type = other DNA
cacccccctcctggtcccggaccccacgatgcatagctaactttgacgcaaaacacagacatggagaaggatgccccccagcccaggtgtgacctggaggtgaacagaac

SEQ ID NO: 32243 - DNA, 110 bp, synthetic construct
  source 1..110: mol_type = other DNA
ctctccgagaggagggtagaaagccccaccggaacgtctaaacgtggctcttgaggcgtggcacacaagcttcccgggtcagaactactgagcgggagctgcgggcttaa

SEQ ID NO: 32244 - DNA, 110 bp, synthetic construct
  source 1..110: mol_type = other DNA
tccctaccagacttccccttatgtctctgccagacctgatctcattactacctctggctgccagggaggccagggaagtcaacacgctagcctctccatcgtacagccag

SEQ ID NO: 32245 - DNA, 110 bp, synthetic construct
  source 1..110: mol_type = other DNA
ctcgtctacctcctcaacaagctgctcatgcagatccttccatgtccttcgcaacaagctggtcatctagtaggtaaactgttatcctgcgtcccgtgagccgttccaac

SEQ ID NO: 32246 - DNA, 110 bp, synthetic construct
  source 1..110: mol_type = other DNA
aagctggtcatctagtaggtaaactgttatcctgcgtcccgtgagccgttccaacaaatgatcgaatcggaggagagggggtgggaacctcagcttccagctggtcagtt

SEQ ID NO: 32247 - DNA, 110 bp, synthetic construct
  source 1..110: mol_type = other DNA
gcaaactcctccatcaagagttcaacgtgctcctcatgcaggactttccctgttgtgacaaagacggagtgaaaaaggcagccgtcagcaactgtgctcatttcctattt

SEQ ID NO: 32248 - DNA, 110 bp, synthetic construct
  source 1..110: mol_type = other DNA
ttatccaaaatacaaacacttaaaatagaggtaaaatccaagggacgctcccagcagaggagggctctgtggtttgcacagccaaggacttactcccagctctcctcctg

SEQ ID NO: 32249 - DNA, 110 bp, synthetic construct
  source 1..110: mol_type = other DNA
agaggagggctctgtggtttgcacagccaaggacttactcccagctctcctcctgggttccccccacgtgctgggcatcgtcggctgccccacctctgggagctcggccc

SEQ ID NO: 32250 - DNA, 110 bp, synthetic construct
  source 1..110: mol_type = other DNA
ggcaacctggactgaagaacccagtaccccacctgccaggagctcccttcctgcaacggctgctgttgaagagctgtctcgcccagggccatattccttccttgcactgg

SEQ ID NO: 32251 - DNA, 110 bp, synthetic construct
  source 1..110: mol_type = other DNA
tagaagttggagcaagttgtctagaaggtctgcctaagatcattaatgaaggcggccacactaagcagtggattttccgtgtggatgaaagagccttctgttggaataag

SEQ ID NO: 32252 - DNA, 110 bp, synthetic construct
  source 1..110: mol_type = other DNA
ccacactaagcagtggattttccgtgtggatgaaagagccttctgttggaataagctgccatctaggactttaatagtgaagtcagtgctggacttcaaaggacaggccg

SEQ ID NO: 32253 - DNA, 110 bp, synthetic construct
  source 1..110: mol_type = other DNA
ccttttctggattgtgctttaacccttgaattcttggaaaggctcatagggtaaataaggggctcaagccagaatttaaacgagttcaaggcataaatgataaagggtca

SEQ ID NO: 32254 - DNA, 110 bp, synthetic construct
  source 1..110: mol_type = other DNA
taaggggctcaagccagaatttaaacgagttcaaggcataaatgataaagggtcactgaagatgccagtagtactgcgtaccttttagcttttgagtcaaaatactctaa

SEQ ID NO: 32255 - DNA, 110 bp, synthetic construct
  source 1..110: mol_type = other DNA
gcctgagcgggccatctgttttgaagtaaaagcaactgacatttttgtatagaatttggattatgaggttttccgggcccaactgacaggaaacagtatcacgtagtgaa

SEQ ID NO: 32256 - DNA, 110 bp, synthetic construct
  source 1..110: mol_type = other DNA
ttggattatgaggttttccgggcccaactgacaggaaacagtatcacgtagtgaaaagatccttgatttctatgtggaagtcaccctctcgggtatttttttcccagtta

SEQ ID NO: 32257 - DNA, 110 bp, synthetic construct
  source 1..110: mol_type = other DNA
actttcccaatcctgaaatgtgactttcacgtggtttccatgtcacgacacaggactcttttttttccccaatcacttaaaaatgtaaaaagcgttctttctagctggtg

SEQ ID NO: 32258 - DNA, 110 bp, synthetic construct
  source 1..110: mol_type = other DNA
ctcttttttttccccaatcacttaaaaatgtaaaaagcgttctttctagctggtgagcttgacaaaaacaggaggcagcagcaggttgccgagccctgcactgttccacg

SEQ ID NO: 32259 - DNA, 110 bp, synthetic construct; identical to SEQ ID NO: 32257
  source 1..110: mol_type = other DNA

SEQ ID NO: 32260 - DNA, 110 bp, synthetic construct; identical to SEQ ID NO: 32258
  source 1..110: mol_type = other DNA

SEQ ID NO: 32261 - DNA, 110 bp, synthetic construct
  source 1..110: mol_type = other DNA
agagctctctttttcttgattttctcactgctttcccagcgagtgtgctaccagcgcgatgtagtaacaaaatttcacaaccacggtcaacgcatagacacagaaattac

SEQ ID NO: 32262 - DNA, 110 bp, synthetic construct
  source 1..110: mol_type = other DNA
agcatttccctaagttattaaatattctcttaatacagagttttaatgcgtatgtggtatgcagcttgatgaatacataataattcatttcagtatcctctattgttgga

SEQ ID NO: 32263 - DNA, 110 bp, synthetic construct
  source 1..110: mol_type = other DNA
ttgtttgcttaagccccatggtcctgagtggaaaatgcaaacactttgacacatggctgtagctttgtaaacgtcagcttcctgcagcttgagaattaacgtgtatctat

SEQ ID NO: 32264 - DNA, 110 bp, synthetic construct
  source 1..110: mol_type = other DNA
tggatgttaagctcataggccttgagcaacctgggaagactgggcttcattctggtgaaggttaaagacaattagctgctttttcctttcctctttggctctgccctctt

SEQ ID NO: 32265 - DNA, 110 bp, synthetic construct
  source 1..110: mol_type = other DNA
aatcaaggcaaagcaggtagtcagaaatgatggcaaattcctggtgtgtgccgtgacagctgtgagaatgaccacaattacagcatgacccaagggtggggagaggaagg

SEQ ID NO: 32266 - DNA, 110 bp, synthetic construct
  source 1..110: mol_type = other DNA
atctacatgaacgcaccaaatacaagctctacggacctgcagcgttcctcccgggagtgaggttagggttggcagtgggatcctcacttccaaggagctgtttgaggaat

SEQ ID NO: 32267 - DNA, 110 bp, synthetic construct
  source 1..110: mol_type = other DNA
agtgaggttagggttggcagtgggatcctcacttccaaggagctgtttgaggaatgtctagccaaggtgatgccttctgggaggccaggcccctgcaagtcccactggcc

SEQ ID NO: 32268 - DNA, 110 bp, synthetic construct
  source 1..110: mol_type = other DNA
agacgggactgaagaaaaccaactggcaattctcttgccatctaaaactgctgtggtcatagggctgctgcacatggccatatagagtaggtagtcattcacatggacca

SEQ ID NO: 32269 - DNA, 110 bp, synthetic construct
  source 1..110: mol_type = other DNA
gatggggagggaaggatcaggagtttggggttagcaggtgcaagcgctaatatgcaggatggataaacaaggtcctatacagcacagggtactagattcactatcctgtg

SEQ ID NO: 32270 - DNA, 110 bp, synthetic construct
  source 1..110: mol_type = other DNA
actatgcatgttaggaactaagagcttcccaggtaccactgaagttacctgtgacatttttcactctcccacttttcgcctccctcaccggaagtagccaccaccctgaa

SEQ ID NO: 32271 - DNA, 110 bp, synthetic construct
  source 1..110: mol_type = other DNA
aacataataaggaacttagattctaataacagagtagaacaggtagctaatagccacaacaaaagcagggattagaaatgtcagccatctgcacccactttattgtggtg

SEQ ID NO: 32272 - DNA, 110 bp, synthetic construct
  source 1..110: mol_type = other DNA
gtttctaaggatggccagaaagagtccaccagataatgatgaagtgcactgcagacagtgggattagcttgtccaagagtttttttatttctaagagtagttgtgtatct

SEQ ID NO: 32273 - DNA, 110 bp, synthetic construct
  source 1..110: mol_type = other DNA
cagtgggattagcttgtccaagagtttttttatttctaagagtagttgtgtatctggagcaaggtgggatggtgtgagttgagtgacagagtatctataattttatgaag

SEQ ID NO: 32274 - DNA, 110 bp, synthetic construct
  source 1..110: mol_type = other DNA
cctttccgacggagatcaaggtggacgtgtgcaaaagagtgaatttggacatcaccactctaatcacatatgtatctgccctcagctatggaggctgccactttgtcttc

SEQ ID NO: 32275 - DNA, 110 bp, synthetic construct
  source 1..110: mol_type = other DNA
cactctaatcacatatgtatctgccctcagctatggaggctgccactttgtcttcaaagaaaaagtgctcacagaacaagcagagcaagagaggaaagagcaggttctgc

SEQ ID NO: 32276 - DNA, 110 bp, synthetic construct
  source 1..110: mol_type = other DNA
tatccttccgttactgagtactcattgaattccttcatggtgaaagaacatgtaatatctgatttaaatcatgaaatttgtcgagaccggttatatgagactaggatata

SEQ ID NO: 32277 - DNA, 110 bp, synthetic construct
  source 1..110: mol_type = other DNA
tatctgatttaaatcatgaaatttgtcgagaccggttatatgagactaggatatagtctgaggttaaggtcctatgtgtaatttatctgcatgtggatgaatatatccaa

SEQ ID NO: 32278 - DNA, 110 bp, synthetic construct
  source 1..110: mol_type = other DNA
gggttgtatttgcaactcacgaattaagacctacctcttatgagcatgactcaatgcatgagttggcacctgagggagcttaacatctagtacgaggatttagacctatt

SEQ ID NO: 32279 - DNA, 110 bp, synthetic construct
  source 1..110: mol_type = other DNA
tggaactcccggccccagtttcctcgtctggaaaacagagctagggggccagatggatgttctgaaacagtgttccaattggaaaacctggacggtgtttcggcacacgt

SEQ ID NO: 32280 - DNA, 110 bp, synthetic construct
  source 1..110: mol_type = other DNA
tggaggtctgccatttgataaaaggagtaaccttcaaatgtttcttcttgacccctctgggccttgatttcagcagaaagcaaaacccttctacatccagtaagcttttc

SEQ ID NO: 32281 - DNA, 110 bp, synthetic construct
  source 1..110: mol_type = other DNA
ccagaccagctgaatccaaatgatcagaaaagagctcctcatggtgacctgctgaggaaaaacatccttggagttcgtgctgcggctcagcggaaaggaacctgggcagt

SEQ ID NO: 32282 - DNA, 110 bp, synthetic construct
  source 1..110: mol_type = other DNA
aaaaaaaaaaaaaaggtattccccagcagtcactcccttaaaaaatccatctaggaagtactgccctagaaattagcttatgtctcattggccagaacttaggcacaagg

SEQ ID NO: 32283 - DNA, 110 bp, synthetic construct
  source 1..110: mol_type = other DNA
aagtactgccctagaaattagcttatgtctcattggccagaacttaggcacaagggaaactgggggttgtagtctttcagctaggtacttggatttgtagagtccaactg

SEQ ID NO: 32284 - DNA, 110 bp, synthetic construct
  source 1..110: mol_type = other DNA
cccactcagatctcttcatgccttcattcagccacggagtccccttcggggtgatggttcaacttaatcacatcaaaacctggtggcctggggcagtaggacaagctatg

SEQ ID NO: 32285 - DNA, 110 bp, synthetic construct
  source 1..110: mol_type = other DNA
ggttcaacttaatcacatcaaaacctggtggcctggggcagtaggacaagctatgggctgtgggcccctctgccgcatctggtcctgacactgcggttgctcttcaccat

SEQ ID NO: 32286 - DNA, 110 bp, synthetic construct
  source 1..110: mol_type = other DNA
gctgttattttatttgcatttttttattcagggtcttgaagtatacatatggtcgacagattgtatgccttcttctcaggccacgccctttgcctaagacttctcacacc

SEQ ID NO: 32287 - DNA, 110 bp, synthetic construct
  source 1..110: mol_type = other DNA
gtggtagtactcagtggtcaagggacattaagggcttccagaaaaaaatcacaaattcagaatgtacacaacttttttcccttctccgcctgacaaagaaaagggaggca

SEQ ID NO: 32288 - DNA, 110 bp, synthetic construct
  source 1..110: mol_type = other DNA
ttcagaatgtacacaacttttttcccttctccgcctgacaaagaaaagggaggcattatttaaaacaaaaacaaacaaaaaaaaaacctgtatgttattatgctaactaa

SEQ ID NO: 32289 - DNA, 110 bp, synthetic construct
  source 1..110: mol_type = other DNA
ccccaccccctgaccgcctgatgccacgggcttccagcctccactcacctgaaactgctttccaaaggcaccatcaggtcccactattccactgagaatccaagctgact

SEQ ID NO: 32290 - DNA, 110 bp, synthetic construct
  source 1..110: mol_type = other DNA
tgctttccaaaggcaccatcaggtcccactattccactgagaatccaagctgacttattaaaatccgcagtgtcatcgtgtctaacgtcttggtgctcaaagtgaggcct

SEQ ID NO: 32291 - DNA, 110 bp, synthetic construct
  source 1..110: mol_type = other DNA
ggttttcgcaccgtgagcacagctgagaagggagatgtgtagaccgttggataccaagtgcccagggaatgtgggagaagtcacacataacttggtcctctttttgcatg

SEQ ID NO: 32292 - DNA, 110 bp, synthetic construct
  source 1..110: mol_type = other DNA
aagtgcccagggaatgtgggagaagtcacacataacttggtcctctttttgcatgtggagacactagaacttggaggctcttttgccaggcgacctgtggggaagaggcg

SEQ ID NO: 32293 - DNA, 110 bp, synthetic construct
  source 1..110: mol_type = other DNA
ctgttttggtccatgtgctatcttatgtgagcgaggctgggcgggtgtttttgcttttctaaccattaatgttcatgtttaactttgtttagctttagtagagacgttcc

SEQ ID NO: 32294 - DNA, 110 bp, synthetic construct
  source 1..110: mol_type = other DNA
tttctaaccattaatgttcatgtttaactttgtttagctttagtagagacgttccacctggacaacctggcagcacgatcatgtttgaaaagtgatcaaaatggaaagaa

SEQ ID NO: 32295 - DNA, 110 bp, synthetic construct; identical to SEQ ID NO: 32293
  source 1..110: mol_type = other DNA

SEQ ID NO: 32296 - DNA, 110 bp, synthetic construct; identical to SEQ ID NO: 32294
  source 1..110: mol_type = other DNA

SEQ ID NO: 32297 - DNA, 110 bp, synthetic construct
  source 1..110: mol_type = other DNA
gggaacctccatatgcagcaggtgcggtcctaaaaaagtaaataaataaaaggaagaggtgatgagggtgctgcagccccgaaaagagcagcggcgcagacggagagctc

SEQ ID NO: 32298 - DNA, 110 bp, synthetic construct; identical to SEQ ID NO: 32297
  source 1..110: mol_type = other DNA

SEQ ID NO: 32299 - DNA, 110 bp, synthetic construct
  source 1..110: mol_type = other DNA
actacattaaaaatagaggcctcatggaaggttaccagtctggatatgtcgaaagcaggtttgaagctttgcgtgctcagatctgtgttacgggaaagcccggtcccagg

SEQ ID NO: 32300 - DNA, 110 bp, synthetic construct
  source 1..110: mol_type = other DNA
ggtggagagattccgtcaatggggttttttttggaaaattgagggaagtcactcagacttcagcttctgagatcatggcaagtggggatggcgatcaggctcctgctctg

SEQ ID NO: 32301 - DNA, 110 bp, synthetic construct
  source 1..110: mol_type = other DNA
gacttcagcttctgagatcatggcaagtggggatggcgatcaggctcctgctctgacataaaacagaactccaggaatagaaagcaattttctagtgcaaggacttcctg

SEQ ID NO: 32302 - DNA, 110 bp, synthetic construct
  source 1..110: mol_type = other DNA
ggggccggttggaaggaaggtgacatgtgcttctggagcatatattctgaggacgaaagcagttgtaataattaactgctaatgctctcggagctgttgaattacagctg

SEQ ID NO: 32303 - DNA, 110 bp, synthetic construct
  source 1..110: mol_type = other DNA
ctgctccttctgcctggttccagcagagatggcagcatatagagcagaaatgtgactgacccaccagggactgttgagagctgagagcttgtgctgatattatcaagacc

SEQ ID NO: 32304 - DNA, 110 bp, synthetic construct
  source 1..110: mol_type = other DNA
ggtcggacacgggttcatggttttcagtcagcggagaaccttcgttctaactgcaactgtaacactgtcgtgtttcttctcacctgcaatcctcccagcgttaactggag

SEQ ID NO: 32305 - DNA, 110 bp, synthetic construct
  source 1..110: mol_type = other DNA
actgtaacactgtcgtgtttcttctcacctgcaatcctcccagcgttaactggagctttctttgctggatttcacggaagatctgaaaaataaagaatgctgggaaaata

SEQ ID NO: 32306 - DNA, 110 bp, synthetic construct
  source 1..110: mol_type = other DNA
caaaggatatggagccatggagtgtcacactggagaagtacgaggaaagctggagaagaactgtgttctagaaaccaaagatagagagctgcccagataaggcagcagtc

SEQ ID NO: 32307 - DNA, 110 bp, synthetic construct
  source 1..110: mol_type = other DNA
aagaactgtgttctagaaaccaaagatagagagctgcccagataaggcagcagtcagggtgccaaactcagctaatgggccaggtgggaaatgatctgggaagtgtctgt

SEQ ID NO: 32308 - DNA, 110 bp, synthetic construct; identical to SEQ ID NO: 32306
  source 1..110: mol_type = other DNA

SEQ ID NO: 32309 - DNA, 110 bp, synthetic construct; identical to SEQ ID NO: 32307
  source 1..110: mol_type = other DNA

SEQ ID NO: 32310 - DNA, 110 bp, synthetic construct
  source 1..110: mol_type = other DNA
tagattatcacagaacactgagtagagttccctgtgccatacaacaggtgccccctggccagtgattccatatacctccgtgtgcatatgccagtcccaaaacccctgtc

SEQ ID NO: 32311 - DNA, 110 bp, synthetic construct; identical to SEQ ID NO: 32310
  source 1..110: mol_type = other DNA

SEQ ID NO: 32312 - DNA, 110 bp, synthetic construct
  source 1..110: mol_type = other DNA
aggggagcaagtctggtgttgggagtgagaaatcgtgagaagagaatgatgcccccctgacctcttgctcaaggggacggcagtgccatgaactgagacagatgtggagg

SEQ ID NO: 32313 - DNA, 110 bp, synthetic construct
  source 1..110: mol_type = other DNA
cctgacctcttgctcaaggggacggcagtgccatgaactgagacagatgtggaggatgcgggaaaggaagaggtgcggagttggaactgtctgaagaatatccaggaaga

SEQ ID NO: 32314 - DNA, 110 bp, synthetic construct
  source 1..110: mol_type = other DNA
acctctgcggcacgagcagctgcaataagccagctccaacagctttggcgagatacccatcctgggctccccaagaagtgtgcgtagggtcctaagagcgagtgactcag

SEQ ID NO: 32315 - DNA, 110 bp, synthetic construct
  source 1..110: mol_type = other DNA
gttgttttgtatggtgaataggcattggtgaaactattgttttataggtggaatagacattggcagaacactccagacattgcgaaaggtatgtgcaaagatccagaggt

SEQ ID NO: 32316 - DNA, 110 bp, synthetic construct
  source 1..110: mol_type = other DNA
gacattggcagaacactccagacattgcgaaaggtatgtgcaaagatccagaggtctccagggtcctgtgccagtgattcactctggtgaggatctgggcacctgacagg

SEQ ID NO: 32317 - DNA, 110 bp, synthetic construct
  source 1..110: mol_type = other DNA
gacaatgcaataaaagctgggcgtcagcatcatacccaggactgtttaagggcggtgtaacttgagatgcactcttcagaaattctccacaatatctgccacaaaggatg

SEQ ID NO: 32318 - DNA, 110 bp, synthetic construct
  source 1..110: mol_type = other DNA
ccaggatcatgtaaataccagtaataggagctgtgcgaggatagggtacaggagactcaaagaagcccccaaatcagcctggtaggggacagggtgagggtggggggttg

SEQ ID NO: 32319 - DNA, 110 bp, synthetic construct
  source 1..110: mol_type = other DNA
ctcaaagaagcccccaaatcagcctggtaggggacagggtgagggtggggggttgaagggagagagggtagcagtggtttgaaaaacagactagcatgtgaggaacaggc

SEQ ID NO: 32320 - DNA, 110 bp, synthetic construct
  source 1..110: mol_type = other DNA
taggacctggcttcctcaattcttattaaccatgagctgaggctcctttttgatgatcagcagacaactgcgcaaataagtagagttttctaggactcaaaaaactaagt

SEQ ID NO: 32321 - DNA, 110 bp, synthetic construct
  source 1..110: mol_type = other DNA
cacagttccaaccctgtttccacctccgtctcctaagtgctgcaggggctccacttcttaagcacctcatttggcccgtctggtctgagggcaccactctcatttctcca

SEQ ID NO: 32322 - DNA, 110 bp, synthetic construct
  source 1..110: mol_type = other DNA
tcttaagcacctcatttggcccgtctggtctgagggcaccactctcatttctccatgttcactcatactgagaatgattgcataatcacatatgcatgttttgttcacac

SEQ ID NO: 32323 - DNA, 110 bp, synthetic construct
  source 1..110: mol_type = other DNA
aaataaaaagaccatctgaacaagaggacctgagaggactgcaggcagcttcatgtagaagtgacatctgaagtgaggtgtaaaataataatacataagtagacagagag

SEQ ID NO: 32324 - DNA, 110 bp, synthetic construct
  source 1..110: mol_type = other DNA
tggaacagctgcgcagtggagtattattcagctgttaagggagaggggtcatcgtgtcctgagaaggcatggaagaacctcagatggatattcactaaagaaaccgagcc

SEQ ID NO: 32325 - DNA, 110 bp, synthetic construct
  source 1..110: mol_type = other DNA
catgacttacatggcaaccgctctgacccccagcagatgaaattacctccttactgagaaatcagttagctaggagctttatcatctctccccagccgggtatgctgatc

SEQ ID NO: 32326 - DNA, 110 bp, synthetic construct
  source 1..110: mol_type = other DNA
cataacgcctgcttcataaggtcttttgcgagcgttagatgaggcaacgtccataaaaataataagagctacattcgaactgcattcaggctttacaagcataacgcctg

SEQ ID NO: 32327 - DNA, 110 bp, synthetic construct
  source 1..110: mol_type = other DNA
aaaataataagagctacattcgaactgcattcaggctttacaagcataacgcctgacacagaacgataacttaatacgtggtggctctataacaccagtattattacacc

SEQ ID NO: 32328 - DNA, 110 bp, synthetic construct
  source 1..110: mol_type = other DNA
ttaaccactgtgccacgacgggaactgctatctgtttcatttcttacttcagcatctgaacagaacaggcaatactgggatttgagctccaaagagatgagaggtgacag

SEQ ID NO: 32329 - DNA, 110 bp, synthetic construct
  source 1..110: mol_type = other DNA
ccttgacctcctccctcacatctgtggaccttgggacggtgctcagaagatgcagagctggtcctgtgcttgagcgctgcacccggtcaagtgttccatcttaccctgaa

SEQ ID NO: 32330 - DNA, 110 bp, synthetic construct
  source 1..110: mol_type = other DNA
aaggttccagcattgccctaagctgccgtgtaagtggcagaggcagctcagatcgagttgccagggctgtggtgtgggccggcagctgcagctccaagtcgatccctagc

SEQ ID NO: 32331 - DNA, 110 bp, synthetic construct; identical to SEQ ID NO: 32330
  source 1..110: mol_type = other DNA

SEQ ID NO: 32332 - DNA, 110 bp, synthetic construct
  source 1..110: mol_type = other DNA
tacagggaaccatctccaacctcctgggatagatcgtgatggaaaatagtatgagaaaaaaagaacgtacgtctaagtacgactgtgtcgctttgctgcacagcagaaac

SEQ ID NO: 32333 - DNA, 110 bp, synthetic construct
  source 1..110: mol_type = other DNA
aaaaaaagaacgtacgtctaagtacgactgtgtcgctttgctgcacagcagaaactggcacaacaccgtcaaccatcaatcaatcaatcaatcaaggtcaccacgcagac

SEQ ID NO: 32334 - DNA, 110 bp, synthetic construct
  source 1..110: mol_type = other DNA
ttttacagatgagaaaactgaggcacggatcaggtcagcaatgtgcccagggttacgtacctagtaaatggcaagccaggaccggaacccagctactcgggattctggca

SEQ ID NO: 32335 - DNA, 110 bp, synthetic construct
  source 1..110: mol_type = other DNA
cgtacctagtaaatggcaagccaggaccggaacccagctactcgggattctggcactctgcactaaattacatgcagaatcagactccttaagattgctgagtggccttg

SEQ ID NO: 32336 - DNA, 110 bp, synthetic construct
  source 1..110: mol_type = other DNA
tttgttttgtttttggccaaaatgatgacacaggaagccattttcctcctcccgtggacacaatgaatgtgcagctacacacgagcagttctcgccgacagaaatctgga

SEQ ID NO: 32337 - DNA, 110 bp, synthetic construct
  source 1..110: mol_type = other DNA
ggacacaatgaatgtgcagctacacacgagcagttctcgccgacagaaatctggacgccgagaaaagagagacattcagttgaatgactgccccacactgggcaacagag

SEQ ID NO: 32338 - DNA, 110 bp, synthetic construct
  source 1..110: mol_type = other DNA
cggtgtccttttggggaggtgacgatgtcttgggagtccccggtgtgcacacaggtgggaagagcagctttcagcacttgcccgttccgggatgctgggatacagacaat

SEQ ID NO: 32339 - DNA, 110 bp, synthetic construct
  source 1..110: mol_type = other DNA
tgggaagagcagctttcagcacttgcccgttccgggatgctgggatacagacaatcaacagcaaactcagggagggagttcccattgtggcttagcgggttaaggacctg

SEQ ID NO: 32340 - DNA, 110 bp, synthetic construct
  source 1..110: mol_type = other DNA
gccccatcaatcccgcagcaaatagctcaggcatcatttgcgatgatcctctctgtttttgccctgactccaccggtaatgattcatctcggatgaacgcctgagccagg

SEQ ID NO: 32341 - DNA, 110 bp, synthetic construct
  source 1..110: mol_type = other DNA
tttttgccctgactccaccggtaatgattcatctcggatgaacgcctgagccaggacgaggcccatactggtattgtaatgataatttgtggcctaaaagagttccagcc

SEQ ID NO: 32342 - DNA, 110 bp, synthetic construct
  source 1..110: mol_type = other DNA
gcgacttggccatgcacctctgctctcctttcttgagacactgttaaaaactgcacaaccagaatgactccacccaaagagatgtgtagctggcttccctgggggcttat

SEQ ID NO: 32343 - DNA, 110 bp, synthetic construct
  source 1..110: mol_type = other DNA
caaccagaatgactccacccaaagagatgtgtagctggcttccctgggggcttatcctcctgacctttcccggttcaggatgaaggtcctcccactgggaacaaagcggg

SEQ ID NO: 32344 - DNA, 110 bp, synthetic construct
  source 1..110: mol_type = other DNA
ctcttattgttagctgcaggaggcaaggagacaaactgtgtgtgtgtgttgggtgggtgcatgcacacccatgcacatgggctcccggccccactggcatctcccaggtc

SEQ ID NO: 32345 - DNA, 110 bp, synthetic construct
  source 1..110: mol_type = other DNA
aagaagtgggagctttatttgaagaatggggggaggactgagaataggggatgctccaccttccctgtggtcaccccacaaggccccttccggggagccctgagaaaaag

SEQ ID NO: 32346 - DNA, 110 bp, synthetic construct
  source 1..110: mol_type = other DNA
ttttgtttgtttgtttctttttcaatgttctcactatatcactccattttcttcttgcttgcatggtttctgaggagaagttagacgtaattcttatttttattcctcta

SEQ ID NO: 32347 - DNA, 110 bp, synthetic construct
  source 1..110: mol_type = other DNA
tgcttgcatggtttctgaggagaagttagacgtaattcttatttttattcctctataggtgaggcattttgtgttttttttattttccctctgccttctttcaggagttt

SEQ ID NO: 32348 - DNA, 110 bp, synthetic construct
  source 1..110: mol_type = other DNA
gtgcatgacacggtcttaccagaacgtgaactgtctgtccatctgtacctccggcagttagcacaagttggttggtttctccatgttttcactggaatagtcccaggtcc

SEQ ID NO: 32349 - DNA, 110 bp, synthetic construct
  source 1..110: mol_type = other DNA
agttagcacaagttggttggtttctccatgttttcactggaatagtcccaggtcctctgacttcagattgttttgcttttcccgtggctcttgaacgcctcacctgtgtg

SEQ ID NO: 32350 - DNA, 110 bp, synthetic construct
  source 1..110: mol_type = other DNA
agagcgtctgcagtcgacgtctgtgtgcagagaggaggatttgtagatggtgcaaagacagtgaaaggaagtcgcgcctgacagataccggatatcacgtgcatacgtac

SEQ ID NO: 32351 - DNA, 110 bp, synthetic construct
  source 1..110: mol_type = other DNA
ctccttatctgcaggtctcggctcagccactgcactatctccccactctgccatcacagtgtgtaataaacaagcttctttacattctgctcagacccaggctgctcgct

SEQ ID NO: 32352 - DNA, 110 bp, synthetic construct
  source 1..110: mol_type = other DNA
ttcccagttggatttgttaacccctgcgccacaacgggaactcctgtttctgtttctgatagtagccattctaacgcatctcatgatgcctttgacctgcatttccctaa

SEQ ID NO: 32353 - DNA, 110 bp, synthetic construct; identical to SEQ ID NO: 32352
  source 1..110: mol_type = other DNA

SEQ ID NO: 32354 - DNA, 110 bp, synthetic construct
  source 1..110: mol_type = other DNA
gggaaatgaacttcaagctccgaggcagacctcctgcatcaggagagttgggagtgagaccaaagcactctagttaccaaaccctgagaagatgccaaaggagagtggaa

SEQ ID NO: 32355 - DNA, 110 bp, synthetic construct
  source 1..110: mol_type = other DNA
gagaccaaagcactctagttaccaaaccctgagaagatgccaaaggagagtggaactgggaaccaccgctttagctctgtgcccgttttatgggcttgaaagaggccgta

SEQ ID NO: 32356 - DNA, 110 bp, synthetic construct
  source 1..110: mol_type = other DNA
agagggaaaaaaagggtacaggaagccgtctgttcacagcagcactattcacaatagccaagatcaggaaacaacctgcaacatccacccacagatgatgattagatgac

SEQ ID NO: 32357 - DNA, 110 bp, synthetic construct
  source 1..110: mol_type = other DNA
agccaagatcaggaaacaacctgcaacatccacccacagatgatgattagatgacgacagacagacagagatacgcagacagggatgcggatgtgggtctatagaggttc

SEQ ID NO: 32358 - DNA, 110 bp, synthetic construct
  source 1..110: mol_type = other DNA
agaccgtggagacagagatgaagcttaaatgcacattgttgagtgaaagaagccagtctgaaaaggctacgcgctgtgtgagcccagctctgtgacattctggaggagtt

SEQ ID NO: 32359 - DNA, 110 bp, synthetic construct
  source 1..110: mol_type = other DNA
gtctgaaaaggctacgcgctgtgtgagcccagctctgtgacattctggaggagttgtaaaaagatcaacggggggttcccgctgtggcacaggagggttggcagcatctc

SEQ ID NO: 32360 - DNA, 110 bp, synthetic construct
  source 1..110: mol_type = other DNA
cacccttcccgccctcttggtcatttcatttcttccctcgaaattgttgcccaggtggctaagtgcagggctctggggcatctgcttgaagcctgagtgtagaaatccag

SEQ ID NO: 32361 - DNA, 110 bp, synthetic construct
  source 1..110: mol_type = other DNA
caactctttatccttaaccgatcgaacaaggctggggattgaaccctcgtccttgtcgatactaggtgggttcgtttctgctacaccacagagggacctgcctgtaatcc

SEQ ID NO: 32362 - DNA, 110 bp, synthetic construct
  source 1..110: mol_type = other DNA
ggctccacagtccacacacagagagcagcgcgggaagcaggaacgaggagccctctgctctcatgcgcgagctcaggcagagggaagttgggtatcttttaagaagtcac

SEQ ID NO: 32363 - DNA, 110 bp, synthetic construct
  source 1..110: mol_type = other DNA
tgctctcatgcgcgagctcaggcagagggaagttgggtatcttttaagaagtcacgggcagatggagttcctgtcgcggctcagtggtgatgagcccgactatgacccat

SEQ ID NO: 32364 - DNA, 110 bp, synthetic construct
  source 1..110: mol_type = other DNA
aggaactgccagtgtggcacgcgagggaaaaagcagagatgggaccgtgtctcctgccttcccagctgcccccttagcctcgagcctggcctgccctgcttttccactgg

SEQ ID NO: 32365 - DNA, 110 bp, synthetic construct
  source 1..110: mol_type = other DNA
cctaaaaagacacaagacaagaccaaaaaaaaaaaaaaaccaagcagaagtgctccgagcatcgggcatcgtagaacctgcgtgaagaagctcggctttgtggtcctggc

SEQ ID NO: 32366 - DNA, 110 bp, synthetic construct
  source 1..110: mol_type = other DNA
cgagcatcgggcatcgtagaacctgcgtgaagaagctcggctttgtggtcctggccccgcctggcccccaccagcacggcccccatggggccctgaagggaacacccccc

SEQ ID NO: 32367 - DNA, 110 bp, synthetic construct
  source 1..110: mol_type = other DNA
tctcatggtaacggagggagacctcagaatttgatccccaaggtcctgggtacaggaaatggccactctttcccttgacacgcccctgtgggtcacgccgactgagaaaa

SEQ ID NO: 32368 - DNA, 110 bp, synthetic construct
  source 1..110: mol_type = other DNA
aggagacagatggcctggctgcttctcctgataagatagtgcctgttgctctagtgaagcctgggctgtcagctcacagggatttggggggccccgtgccccctcctcga

SEQ ID NO: 32369 - DNA, 110 bp, synthetic construct
  source 1..110: mol_type = other DNA
ggctgcctacttaccctctcctcctctcccaaaagatgaatgggacttggaacaaatggatctggtcagctgaccccagagggatttggagagaagttttcagcctttct

SEQ ID NO: 32370 - DNA, 110 bp, synthetic construct
  source 1..110: mol_type = other DNA
gcacggggtacttaggaaaagagaattagacgatgacataaaggaagccgcaattaacaggggagaggagcaaagtgaaaaactggttcttcaaaaggatgttgaaacag

SEQ ID NO: 32371 - DNA, 110 bp, synthetic construct
  source 1..110: mol_type = other DNA
aacaggggagaggagcaaagtgaaaaactggttcttcaaaaggatgttgaaacagtccgacatctggcatgaaaaccaggtaggaaagggaggaggcgctagctgccttg

SEQ ID NO: 32372 - DNA, 110 bp, synthetic construct
  source 1..110: mol_type = other DNA
agatgaaatctgtaacgcgaaccgtaaatgcccccttctcggatgtgcgtagacgggggtaaaagttatagaatcaggaaagcagggagcgtggggagggggggattcag

SEQ ID NO: 32373 - DNA, 110 bp, synthetic construct
  source 1..110: mol_type = other DNA
tcgtctcagatgggagagctcgcccctctgggtggctggaggccgaagcccccacacctgctgtccaacacctggctgcaggaggagcctctgcgtgcccacaccctcct

SEQ ID NO: 32374 - DNA, 110 bp, synthetic construct
  source 1..110: mol_type = other DNA
acctgctgtccaacacctggctgcaggaggagcctctgcgtgcccacaccctcctgtgtgagcctacctgcgcaggggacgccgccttaaatactgctccctgggccgtt

SEQ ID NO: 32375 - DNA, 110 bp, synthetic construct
  source 1..110: mol_type = other DNA
gcacctcacgggggttcgaacaacgcctgcgaggtgaaggcctgaggcggctcatctgacttactcctccaagtccttcctttcctcgcaccggctgctctatttgcttt

SEQ ID NO: 32376 - DNA, 110 bp, synthetic construct
  source 1..110: mol_type = other DNA
ctgacttactcctccaagtccttcctttcctcgcaccggctgctctatttgcttttttttggctttttagggctgtacttgcggcacagggaggttcctaggctaggggt

SEQ ID NO: 32377 - DNA, 110 bp, synthetic construct
  source 1..110: mol_type = other DNA
tccgggaacttcgagcctggggtgtaaggacccacaactgaaactgagacttgaggcggagacacgaacggcttctccctccatggaaggttgggcaggaaggggtctgc

SEQ ID NO: 32378 - DNA, 110 bp, synthetic construct
  source 1..110: mol_type = other DNA
gcggagacacgaacggcttctccctccatggaaggttgggcaggaaggggtctgcgtgtgggggaggggaaggcagtgcgaggcgtcctctgggaggacagccagagctc

SEQ ID NO: 32379 - DNA, 110 bp, synthetic construct
  source 1..110: mol_type = other DNA
agggccacctccccgctcctcgtcacctcccgtggtggatggagctgtccccaaagatgctcacatcctgacccctggaacccgcacgcacacgcacgcgcgtgcgcgca

SEQ ID NO: 32380 - DNA, 110 bp, synthetic construct
  source 1..110: mol_type = other DNA
tgtccccaaagatgctcacatcctgacccctggaacccgcacgcacacgcacgcgcgtgcgcgcacgcgcgcacacacacacacacacacacacacacacgcatacaggg

SEQ ID NO: 32381 - DNA, 110 bp, synthetic construct
  source 1..110: mol_type = other DNA
tcaaggtatatgggtgttcattttacttcgtattcagttggttggtacgtttctattttcagcctggaaaactgcaggaaaatgtctctgtaagggacacagagatgtcc

SEQ ID NO: 32382 - DNA, 110 bp, synthetic construct
  source 1..110: mol_type = other DNA
ttttcagcctggaaaactgcaggaaaatgtctctgtaagggacacagagatgtccatccagctccctctgccagtagggcagggtccacatacacttcccgctgcccacc

SEQ ID NO: 32383 - DNA, 110 bp, synthetic construct; identical to SEQ ID NO: 32381
  source 1..110: mol_type = other DNA

SEQ ID NO: 32384 - DNA, 110 bp, synthetic construct; identical to SEQ ID NO: 32382
  source 1..110: mol_type = other DNA

SEQ ID NO: 32385 - DNA, 110 bp, synthetic construct
  source 1..110: mol_type = other DNA
gttaattatcccagcaccatttgttgaaaaaacttaccacgtttcagtattttaaaatcacttgctcttttctgtcatttatcgagctttaattagggttcttggcgatt

SEQ ID NO: 32386 - DNA, 110 bp, synthetic construct
  source 1..110: mol_type = other DNA
aatcacttgctcttttctgtcatttatcgagctttaattagggttcttggcgatttctattactttttaaatggacacttagtttgcaaagattcttggcatatttagaa

SEQ ID NO: 32387 - DNA, 110 bp, synthetic construct
  source 1..110: mol_type = other DNA
cacaaagcttcctgcaggtttaggggcttggcacctggacagagctcccaccccatgcccatccgggcagccctgagcctgggagcagcacagagcgttcctgagagccc

SEQ ID NO: 32388 - DNA, 110 bp, synthetic construct
  source 1..110: mol_type = other DNA
tgcccatccgggcagccctgagcctgggagcagcacagagcgttcctgagagccccaagactccgcctgaacaatttaaagccttttcgcaacagacacatcttagtttt

SEQ ID NO: 32389 - DNA, 110 bp, synthetic construct
  source 1..110: mol_type = other DNA
ttcggtcacggttcacgtgcccctcctctttatcggctttcggctccctcactagagggacgtttcgttcacgacttacagaaggcccagcacacagtaggtgctcgttc

SEQ ID NO: 32390 - DNA, 110 bp, synthetic construct
  source 1..110: mol_type = other DNA
agggacgtttcgttcacgacttacagaaggcccagcacacagtaggtgctcgttcaccatttgtcggatgaatgaaggaaaggatgggtgggtgggaggatagatggatg

SEQ ID NO: 32391 - DNA, 110 bp, synthetic construct
  source 1..110: mol_type = other DNA
gtgggggtgcatgggcgtaaacacacggtcccctccgcccgcctggccggtgatccccgcctgatcagctccttagatcgtgagaggtttctgctgcaaacagtgagtgc

SEQ ID NO: 32392 - DNA, 110 bp, synthetic construct
  source 1..110: mol_type = other DNA
ccaggtgggctggggggtccgggtatcacattgtacttcaaagccccctgcatctttttgggcaactcttggggtctcctgtctggcacagtctggagctggttttgagg

SEQ ID NO: 32393 - DNA, 110 bp, synthetic construct
  source 1..110: mol_type = other DNA
ttttgggcaactcttggggtctcctgtctggcacagtctggagctggttttgaggttttgccaaaaaaacacagtgcccgggtacaaggctttgcctgcaggatgccagg

SEQ ID NO: 32394 - DNA, 110 bp, synthetic construct
  source 1..110: mol_type = other DNA
ccgccgtcatcagagctggaggcaaaggccggacgctggtggcgatgggtgttccgctgtcacccctgcaaagaccgcgtcgtggtcacgggggcggatcgccagcatgg

SEQ ID NO: 32395 - DNA, 110 bp, synthetic construct
  source 1..110: mol_type = other DNA
gctgtcacccctgcaaagaccgcgtcgtggtcacgggggcggatcgccagcatggtttgaggattgcgacctgcaggtgccgtggggtgggggcaggggctggctgtgct

SEQ ID NO: 32396 - DNA, 110 bp, synthetic construct
  source 1..110: mol_type = other DNA
gttgtccctgctgtgatttgggttcagtccctggcccgggaacttccgcatgccttgggtgggtcaaaaaatagatatgtgtttcagagctccccagcctcttgaaattc

SEQ ID NO: 32397 - DNA, 110 bp, synthetic construct
  source 1..110: mol_type = other DNA
tgggtgggtcaaaaaatagatatgtgtttcagagctccccagcctcttgaaattccctaaacattgagggcatgatggtgtctcttgttatgtgaatgtggtgacttttg

SEQ ID NO: 32398 - DNA, 110 bp, synthetic construct
  source 1..110: mol_type = other DNA
tttgaggtcaacagagcagggccactcctgtcttgcctaccgcatggccccagtgcctagcatgcctggctgtgtaaactcctgttgaaggccgggtcacagcgtggagg

SEQ ID NO: 32399 - DNA, 110 bp, synthetic construct
  source 1..110: mol_type = other DNA
cctagcatgcctggctgtgtaaactcctgttgaaggccgggtcacagcgtggaggggagtgttgccaggatctcagcaacactgcatggcatgaggtcacgagcagcttt

SEQ ID NO: 32400 - DNA, 110 bp, synthetic construct; identical to SEQ ID NO: 32398
  source 1..110: mol_type = other DNA

SEQ ID NO: 32401 - DNA, 110 bp, synthetic construct; identical to SEQ ID NO: 32399
  source 1..110: mol_type = other DNA

SEQ ID NO: 32402 - DNA, 110 bp, synthetic construct
  source 1..110: mol_type = other DNA
ggcaaaaaaagaaaggacacagtgggggcaggaacaccagtgggaatcatcctttagaagctaatgaacaagtcactgaatacgggattaaaaaccctcaacaatggcag

SEQ ID NO: 32403 - DNA, 110 bp, synthetic construct
  source 1..110: mol_type = other DNA
agaagctaatgaacaagtcactgaatacgggattaaaaaccctcaacaatggcaggatctctgctcatgacgcctgacggcaagcgggaaagggccagggacagagggac

SEQ ID NO: 32404 - DNA, 110 bp, synthetic construct
  source 1..110: mol_type = other DNA
taccttcaacggtactactgcaaaaagattctgactcgctgaaagctcagctaatggttagcattttttagcagtacagtactttttaattaagggatgtacttttttta

SEQ ID NO: 32405 - DNA, 110 bp, synthetic construct
  source 1..110: mol_type = other DNA
tcgctgaaagctcagctaatggttagcattttttagcagtacagtactttttaattaagggatgtactttttttaggcataatgctctttcacatataaaagactatagc

SEQ ID NO: 32406 - DNA, 110 bp, synthetic construct
  source 1..110: mol_type = other DNA
atgaataatttatgttggcgttgggcgctgcattgatcgtggaagaaggagagttgcctcttcccgttggcacagcgatgcccgagctgaccttgcggtctgggacattt

SEQ ID NO: 32407 - DNA, 110 bp, synthetic construct
  source 1..110: mol_type = other DNA
gcctcttcccgttggcacagcgatgcccgagctgaccttgcggtctgggacatttgcggtccccccaacccccccgaactctgatgtcgtaggcaccaagggctcaagga

SEQ ID NO: 32408 - DNA, 110 bp, synthetic construct
  source 1..110: mol_type = other DNA
ctactatccctggtccagtaggaaatgaggctttcctgattgaggctccttgaagctaaaggcctgcattccggagaccagcctcagagaactagcagattacgcaagcc

SEQ ID NO: 32409 - DNA, 110 bp, synthetic construct
  source 1..110: mol_type = other DNA
gatggatggatggttggtggttagatggatgtttgttagatggatggatggataaatggctggatttttggacggcaggctgctagtcttacgtcctcactcctgggtca

SEQ ID NO: 32410 - DNA, 110 bp, synthetic construct; identical to SEQ ID NO: 32409
  source 1..110: mol_type = other DNA

SEQ ID NO: 32411 - DNA, 110 bp, synthetic construct
  source 1..110: mol_type = other DNA
acgttttgacctcacgaccaatagaccctgcagactgagcagctctccctgtcagcagtctctgaggttcattgaattccgggggggtggggggttggcctcggccatgg

SEQ ID NO: 32412 - DNA, 110 bp, synthetic construct
  source 1..110: mol_type = other DNA
ccacctctgcttctcagtctcgctcctttccagcgcggtgcctcctgttctctgagatcttgctccctgtcttgctctgtgtatctgtctctcttgctctctccggctcc

SEQ ID NO: 32413 - DNA, 110 bp, synthetic construct; identical to SEQ ID NO: 32412
  source 1..110: mol_type = other DNA

SEQ ID NO: 32414 - DNA, 110 bp, synthetic construct
  source 1..110: mol_type = other DNA
ctggcatgttcattgccctgagcaagaacggcaaggccaagaaggggaaccgggtgtcacccaccatgaaggtcacccactttctcccccggctgtgaccctcagagccc

SEQ ID NO: 32415 - DNA, 110 bp, synthetic construct
  source 1..110: mol_type = other DNA
gtcacccaccatgaaggtcacccactttctcccccggctgtgaccctcagagccccctggaggggcgtgctgggggccaccgtggtgcactttcttcggacggacagctt

SEQ ID NO: 32416 - DNA, 110 bp, synthetic construct
  source 1..110: mol_type = other DNA
accacgagacctcgctctgcaagggaggaagaaggaagcctggccttcgctccctcacaggtagagatctggaatgtatttcgataactgcattttagtgtaagtggcta

SEQ ID NO: 32417 - DNA, 110 bp, synthetic construct
  source 1..110: mol_type = other DNA
cccctcagtatagtttggtgtcatcaaaccaccatacaccctaaggttaaaggctcaaagaaaacttattaaaaagccccctccccttcgcaagggcgcacgcaatacca

SEQ ID NO: 32418 - DNA, 110 bp, synthetic construct
  source 1..110: mol_type = other DNA
ggcaatacattttctcacatgttattgacacgacaatgcctttgggagttcccagatggcctagggattaaggatccagtattgtcactgctgtggtgtgggtctgatcc

SEQ ID NO: 32419 - DNA, 110 bp, synthetic construct
  source 1..110: mol_type = other DNA
atggcctagggattaaggatccagtattgtcactgctgtggtgtgggtctgatccctggcccgggaatttctgcatacggcagacatgtcagaaaaaaaagaaagaaaaa

SEQ ID NO: 32420 - DNA, 110 bp, synthetic construct
  source 1..110: mol_type = other DNA
cattatcgttagagcatatcatgatgagagcactagagtttgcctgattagaatatatcaactatcaccagctgtaaagtaacacgattcaagtttaccagtttctccga

SEQ ID NO: 32421 - DNA, 110 bp, synthetic construct
  source 1..110: mol_type = other DNA
tatcaactatcaccagctgtaaagtaacacgattcaagtttaccagtttctccgaccccaagtctgcgtttccctccgttaccccacagcaccttcgttactgaattcac

SEQ ID NO: 32422 - DNA, 110 bp, synthetic construct
  source 1..110: mol_type = other DNA
tagccaatatttgtccctttctggtttcatttgtttgtttgttggctgcctggaatctaagctccttttctataggaatatttctcaatttacgagtcttggtggggctt

SEQ ID NO: 32423 - DNA, 110 bp, synthetic construct
  source 1..110: mol_type = other DNA
agattccgaataaaactgctgcatacacatgtgcaggcgtctgtgtgagcgtccgccagcgtatttccccaactccaaggagacgtgagactcttgaatcaagctttggg

SEQ ID NO: 32424 - DNA, 110 bp, synthetic construct
  source 1..110: mol_type = other DNA
tgttccggtccttcgcaccttcgcctccatcaagcaccagagcctcagccagcctcggagacagggggaggcttcacacctcatacaagccaggaaattgaggttcagag

SEQ ID NO: 32425 - DNA, 110 bp, synthetic construct
  source 1..110: mol_type = other DNA
cggagacagggggaggcttcacacctcatacaagccaggaaattgaggttcagagaagttgctttgcctgtctgaggtcacacagccagtgagggtgcaaagggcagagc

SEQ ID NO: 32426 - DNA, 110 bp, synthetic construct
  source 1..110: mol_type = other DNA
agcttggctgagagccgcgctttggaggataccacctaggtcgtgggttatcttttcactccagtctgactcgttcagcgccgggaccccgcatccgaggagacaagttc

SEQ ID NO: 32427 - DNA, 110 bp, synthetic construct
  source 1..110: mol_type = other DNA
tcactccagtctgactcgttcagcgccgggaccccgcatccgaggagacaagttcaagggctgggccacctgcccccctcctcagtgagggccccacatgcctccaccgc

SEQ ID NO: 32428 - DNA, 110 bp, synthetic construct
  source 1..110: mol_type = other DNA
gctcacactctgcccgcgccgtctcgacattcctgatcattttcggggtgctgcgcccagcgcatcattccccagcacgtccgagcctgggcgcctcctcctggaaaggg

SEQ ID NO: 32429 - DNA, 110 bp, synthetic construct
  source 1..110: mol_type = other DNA
cccagcgcatcattccccagcacgtccgagcctgggcgcctcctcctggaaaggggcttccctttcactgagggcggttgtcgttccaggaacaatgccctctgggtgca

SEQ ID NO: 32430 - DNA, 110 bp, synthetic construct
  source 1..110: mol_type = other DNA
gatatgtgtcatgtgacccaattattccactcctagatattctcacaggagaaatggaatgctacgttcacaaggagatttgtgcaggaaagctcatagcaactttacct

SEQ ID NO: 32431 - DNA, 110 bp, synthetic construct
  source 1..110: mol_type = other DNA
ggaatgctacgttcacaaggagatttgtgcaggaaagctcatagcaactttacctgtaataatagcctaaaattggaaaaaacgcaaatgcttatcaggaggaaaatgga

SEQ ID NO: 32432 - DNA, 110 bp, synthetic construct
  source 1..110: mol_type = other DNA
cacatatctgaaattacgccctgcgtgcagcatgtttgggtcaattttcccgctgctatcattttcaccggcattcctgggtgtaagacgtctcagcttggccccggggg

SEQ ID NO: 32433 - DNA, 110 bp, synthetic construct
  source 1..110: mol_type = other DNA
ctatcattttcaccggcattcctgggtgtaagacgtctcagcttggccccgggggcttatcaatggaattaccaggtacggaatgtggggaccccccccccgcagcttta

SEQ ID NO: 32434 - DNA, 110 bp, synthetic construct
  source 1..110: mol_type = other DNA
gaaacaatagcaatttcttctgaatggagctctcccctgagccaaagagtaaacaggagccagggaagagccggcggccagcatagctgctctgcggtgattacataacc

SEQ ID NO: 32435 - DNA, 110 bp, synthetic construct
  source 1..110: mol_type = other DNA
ggagccagggaagagccggcggccagcatagctgctctgcggtgattacataaccaggacatacctgggagaggctctgatccaggggattttaacaggggcgggaggag

SEQ ID NO: 32436 - DNA, 110 bp, synthetic construct
  source 1..110: mol_type = other DNA
tccagatgatgcccaaggcccctcccccatccagcgtccacactgggtgcagcagttttcgccagcaggggcttgggaagactacaagaccaactgaatttgccacccag

SEQ ID NO: 32437 - DNA, 110 bp, synthetic construct
  source 1..110: mol_type = other DNA
ttttcgccagcaggggcttgggaagactacaagaccaactgaatttgccacccagctgcccctttgcttctctgtacctcggtttccccatcagtgaggaacggcggtcc

SEQ ID NO: 32438 - DNA, 110 bp, synthetic construct
  source 1..110: mol_type = other DNA
ggaaccaaaaccaccaacagaaaaacacaactgttcaagggaaagagagctttcacaacgggctcgacagcgatgtcatcaatatcctcggagagacaagccatcacacc

SEQ ID NO: 32439 - DNA, 110 bp, synthetic construct
  source 1..110: mol_type = other DNA
caacgggctcgacagcgatgtcatcaatatcctcggagagacaagccatcacacccaagaacaagaacagggtgctatcaaaaaggaacattcagaggacaaaaaggaaa

SEQ ID NO: 32440 - DNA, 110 bp, synthetic construct; identical to SEQ ID NO: 32438
  source 1..110: mol_type = other DNA

SEQ ID NO: 32441 - DNA, 110 bp, synthetic construct; identical to SEQ ID NO: 32439
  source 1..110: mol_type = other DNA

SEQ ID NO: 32442 - DNA, 110 bp, synthetic construct
  source 1..110: mol_type = other DNA
aaaaaaaagcaatcaaagcagctgcttgttccaaaagacacgggtccatatgtggccatctgaggtgttaccagcctaaggccagctggccttggggacaaggagcagag

SEQ ID NO: 32443 - DNA, 110 bp, synthetic construct; identical to SEQ ID NO: 32442
  source 1..110: mol_type = other DNA

SEQ ID NO: 32444 - DNA, 110 bp, synthetic construct
  source 1..110: mol_type = other DNA
tctctgcagctccaggatgcacatttgatccccgacctggcacagtgggttaaaggacctggcataggtcacaactgcagcttggacttgagccctcgcccaggaattcc

SEQ ID NO: 32445 - DNA, 110 bp, synthetic construct
  source 1..110: mol_type = other DNA
gacctggcataggtcacaactgcagcttggacttgagccctcgcccaggaattccatgtgccacggggtggctaaaaaagcaaaacaagatgttaataaaaacggaaatt

SEQ ID NO: 32446 - DNA, 110 bp, synthetic construct
  source 1..110: mol_type = other DNA
acaaaggagcagcacaattctgagttttatctggaaaacagctccttgggccagaaagcttaggaaacgcggcctcactggagcactcagacttaagagcagctctgcaa

SEQ ID NO: 32447 - DNA, 110 bp, synthetic construct
  source 1..110: mol_type = other DNA
aagcttaggaaacgcggcctcactggagcactcagacttaagagcagctctgcaacgctgccctagttccatggaaaacggtgactaatttgatgcagagttcaaggcat

SEQ ID NO: 32448 - DNA, 110 bp, synthetic construct
  source 1..110: mol_type = other DNA
ggggtgataaggtggggcgggtgaatccagcccatccccaggccagccttgtgggattcctcggtcaatagacaccagagaccgggtcagctccgcttcgggctgtcgca

SEQ ID NO: 32449 - DNA, 110 bp, synthetic construct
  source 1..110: mol_type = other DNA
attcctcggtcaatagacaccagagaccgggtcagctccgcttcgggctgtcgcatttggagtgatgtggggatgggaagagagaggcgctttcaacagacaaggcagtg

SEQ ID NO: 32450 - DNA, 110 bp, synthetic construct
  source 1..110: mol_type = other DNA
ccccagggacagacagaatatgggtcaccagaggctgggggagggaggggtgcagagtccgtgttgaacggggcagagctgaggcttaggaagatgggaacgttctggaa

SEQ ID NO: 32451 - DNA, 110 bp, synthetic construct
  source 1..110: mol_type = other DNA
agtccgtgttgaacggggcagagctgaggcttaggaagatgggaacgttctggaagtggacagggtgatggctgcacaatactgcggaagcacttaatgccgcagagttg

SEQ ID NO: 32452 - DNA, 110 bp, synthetic construct
  source 1..110: mol_type = other DNA
ctgcagggccctccatccatgaccacccatccatccactcaaccatcagttcatcctgcaggtgacatttctgaggccctctgatgtatctgggctggttacagggttcc

SEQ ID NO: 32453 - DNA, 110 bp, synthetic construct
  source 1..110: mol_type = other DNA
ctgcaggtgacatttctgaggccctctgatgtatctgggctggttacagggttcccacacttgggagtttatggtctttgaatactagcctccacctaccccatcctaga

SEQ ID NO: 32454 - DNA, 110 bp, synthetic construct
  source 1..110: mol_type = other DNA
aatttcctgtctgctgcaggcccggacggctcccttgttttcagacctcagtgcgtcttcagctgaagccgtctttgagtgcttcctccaggcggggttaggaatagtcc

SEQ ID NO: 32455 - DNA, 110 bp, synthetic construct
  source 1..110: mol_type = other DNA
gcatcaatgaatgaatgaattgaaaataatgaagtttgattcctttgtaggaaggatgggtaacactcgagaagacgtgctgtatctccgggcaccagcgcggtgagctg

SEQ ID NO: 32456 - DNA, 110 bp, synthetic construct
  source 1..110: mol_type = other DNA
atgggtaacactcgagaagacgtgctgtatctccgggcaccagcgcggtgagctgcgctgaaagccagcctgccgttttctttcgaggaggcgtctgtgcttcccctgcc

SEQ ID NO: 32457 - DNA, 110 bp, synthetic construct
  source 1..110: mol_type = other DNA
aattccaaaaagtaaagagaaaccaaaccagccaacccctggcactgccgtgaaggacaacgaggtcttccgattaaaacccacatgaaaaacagctatgaatcctgact

SEQ ID NO: 32458 - DNA, 110 bp, synthetic construct
  source 1..110: mol_type = other DNA
gacaacgaggtcttccgattaaaacccacatgaaaaacagctatgaatcctgactagcgttcaggatgaaaaactgttctcaaacacagagacgttttccttccatcgag

SEQ ID NO: 32459 - DNA, 110 bp, synthetic construct
  source 1..110: mol_type = other DNA
taagcatatggaagttcttgggccaggaattgagcccacaccacagcagtgacctaagccacagcagcagcaacactggatccttaaccggctgagccacaagggaactc

SEQ ID NO: 32460 - DNA, 110 bp, synthetic construct
  source 1..110: mol_type = other DNA
aagccacagcagcagcaacactggatccttaaccggctgagccacaagggaactcctcttgccctttcttttgcggggcattttcctagttcattctttcgttgaggcag

SEQ ID NO: 32461 - DNA, 110 bp, synthetic construct
  source 1..110: mol_type = other DNA
gaggcttcaaaacatttttctaccccacggacaacaagaactgaattcacatcggccacgtggaggagaagctgtgtcaccgccccctctccgcagaagataccagtacg

SEQ ID NO: 32462 - DNA, 110 bp, synthetic construct
  source 1..110: mol_type = other DNA
ccacgtggaggagaagctgtgtcaccgccccctctccgcagaagataccagtacgcaaccctgacacgggagaggaggcggcaggcgtgacgagttgtggatgagtcagg

SEQ ID NO: 32463 - DNA, 110 bp, synthetic construct
  source 1..110: mol_type = other DNA
ccccgagctaagaaagaaggaccaagacgtgtgatgctgcacaccggccacccactacgttcaaagacctcgagttatgcaaccacacaaactgtgccacgcttcacctg

SEQ ID NO: 32464 - DNA, 110 bp, synthetic construct
  source 1..110: mol_type = other DNA
ttaggcctcatgccccatcccctcccttgcttgcgctaggacagccacgctggcaatgtgtcagcttctgcacacgccaagtaggcctctgcactcaccttccccaatcc

SEQ ID NO: 32465 - DNA, 110 bp, synthetic construct
  source 1..110: mol_type = other DNA
atgtgtcagcttctgcacacgccaagtaggcctctgcactcaccttccccaatcccttccggcctccacacaaatgttctcaataagcttttcctagaccacctaatttt

SEQ ID NO: 32466 - DNA, 110 bp, synthetic construct
  source 1..110: mol_type = other DNA
gacctcagctggagaggactaacccgcaatgcagggcgtgcggaagggaagaaagactccagcggattccagaagagcctcgcgcccaccaagagatagatgaacacgct

SEQ ID NO: 32467 - DNA, 110 bp, synthetic construct
  source 1..110: mol_type = other DNA
actccagcggattccagaagagcctcgcgcccaccaagagatagatgaacacgctcaactgaaaccatgtgtgtctgtgggctgaggacagaacgtggcggtacctgtgt

SEQ ID NO: 32468 - DNA, 110 bp, synthetic construct
  source 1..110: mol_type = other DNA
atccggcgttgctgtgagctgtggcgtgggtcaaaaatgcagctcggatcccgtgttgctgtggctgtggtataagcctcacctgcagcttcgatctggcccccagcctg

SEQ ID NO: 32469 - DNA, 110 bp, synthetic construct; identical to SEQ ID NO: 32468
  source 1..110: mol_type = other DNA

SEQ ID NO: 32470 - DNA, 110 bp, synthetic construct
  source 1..110: mol_type = other DNA
ggctgtggccagcagctgcagctccaacctgacccctagcctaggaacctccacatgccctgagtgcagccctaaaagcaaaaacggtgacaatgccaagagctggcaag

SEQ ID NO: 32471 - DNA, 110 bp, synthetic construct; identical to SEQ ID NO: 32470
  source 1..110: mol_type = other DNA

SEQ ID NO: 32472 - DNA, 110 bp, synthetic construct
  source 1..110: mol_type = other DNA
ggaagccctccctgtcttcccatgtgaatatgggccccaggatatctcaacaccctgctttccccacagcttcggaaactgcccccattactggattttgagcactttta

SEQ ID NO: 32473 - DNA, 110 bp, synthetic construct
  source 1..110: mol_type = other DNA
gacaaggcccaggcaccatccaccccacatgaccaagagccctctgtcccccagggaaccttctggaaccccaggcctctccgactgtgcaacctcatgggaccgtgcct

SEQ ID NO: 32474 - DNA, 110 bp, synthetic construct
  source 1..110: mol_type = other DNA
gaaccttctggaaccccaggcctctccgactgtgcaacctcatgggaccgtgcctctgggccctattagggttcacaccccgtctctgccctcacccccttcctggaact

SEQ ID NO: 32475 - DNA, 110 bp, synthetic construct
  source 1..110: mol_type = other DNA
aatgaacctatccacagagcagaaacatatccatagacatggagagcaaacttacggttgctggggtggcggggaaggaagtgggatggacggggcttttgcaaactgct

SEQ ID NO: 32476 - DNA, 110 bp, synthetic construct; identical to SEQ ID NO: 32475
  source 1..110: mol_type = other DNA

SEQ ID NO: 32477 - DNA, 110 bp, synthetic construct
  source 1..110: mol_type = other DNA
ttgtactcagttgtagatcagtggctgaataagtaagtgtaagtgtcataaatgtctgatgatagacttagcagtggtggctgttttgctgtttaaaatggtctgctaaa

SEQ ID NO: 32478 - DNA, 110 bp, synthetic construct
  source 1..110: mol_type = other DNA
ctgggtggcatggtaagagcgtgctcagttttgtaggaagctgccggactgtcttctgacgggaccgcaccctcttgcatccccgccagcagtgaacaagcgttcccgtg

SEQ ID NO: 32479 - DNA, 110 bp, synthetic construct
  source 1..110: mol_type = other DNA
attcttaattgtaagttaacccttgataagctgtagagcaggagaaattgaaatggtggttttcgtacctgatggacagatagctataaaagcagctctttgttctgcct

SEQ ID NO: 32480 - DNA, 110 bp, synthetic construct
  source 1..110: mol_type = other DNA
gtggttttcgtacctgatggacagatagctataaaagcagctctttgttctgcctgtcatgtcactggtgttgttgagagacctgaggctggcggttaggggcgcagact

SEQ ID NO: 32481 - DNA, 110 bp, synthetic construct
  source 1..110: mol_type = other DNA
agcacagcccctttcttgtaaagaaacgcagcgcttcctcgggtgttggtgctcgtgctggacactggtggtgcctttagatcgtaccggtggcatcagtgggctgagaa

SEQ ID NO: 32482 - DNA, 110 bp, synthetic construct
  source 1..110: mol_type = other DNA
ggaactccccccccccttttttttgagccctcacctgcagcatctggaactccccgtgcgccaattttaagtctcccctgtcctgtgagaatttctcattagaattatcc

SEQ ID NO: 32483 - DNA, 110 bp, synthetic construct
  source 1..110: mol_type = other DNA
gtgcgccaattttaagtctcccctgtcctgtgagaatttctcattagaattatccactgtgcattttctatttttgaataaattctgcaccttgggtaggtctacactgc

SEQ ID NO: 32484 - DNA, 110 bp, synthetic construct
  source 1..110: mol_type = other DNA
cctggagtcgtcaagaacccagtgcctgcagtcaacctgccttcccagcgtgccctgttcctatgccttgggcctggccccatgtcagctttcacctggaattctgcaaa

SEQ ID NO: 32485 - DNA, 110 bp, synthetic construct
  source 1..110: mol_type = other DNA
tgttcctatgccttgggcctggccccatgtcagctttcacctggaattctgcaaagcctccttgaggtctccaagcctcaatgctcgacctctgcagtctcttctttgct

SEQ ID NO: 32486 - DNA, 110 bp, synthetic construct
  source 1..110: mol_type = other DNA
gtgatatgcaaatattttctcccactcatagctagtcatcatcctctcaacagggcattttgtagagtaaactttatttttactcagtttgatttattgatttttccttt

SEQ ID NO: 32487 - DNA, 110 bp, synthetic construct
  source 1..110: mol_type = other DNA
tcatagctagtcatcatcctctcaacagggcattttgtagagtaaactttatttttactcagtttgatttattgatttttccttttatgaggcacattttgtctaatgat

SEQ ID NO: 32488 - DNA, 110 bp, synthetic construct
  source 1..110: mol_type = other DNA
aggtctgggctaagatgaagccggtgaggatctgggtttgggcccggagggaatgagctgggcggctctccgggaggggagatggtaggtgcctgttccaggtgtgctcc

SEQ ID NO: 32489 - DNA, 110 bp, synthetic construct
  source 1..110: mol_type = other DNA
agctgggcggctctccgggaggggagatggtaggtgcctgttccaggtgtgctcctgggaaatgtgggcccagtgtctgcccaggtgagggggccagaacccagcggccc

SEQ ID NO: 32490 - DNA, 110 bp, synthetic construct
  source 1..110: mol_type = other DNA
cctggaactcagtttgaagcaggaggaggatcttggtcaagaagaagatagaaacacagggaggtggatgggagggagagacaggcaggggccggaccctgcagggccgt

SEQ ID NO: 32491 - DNA, 110 bp, synthetic construct
  source 1..110: mol_type = other DNA
acagggaggtggatgggagggagagacaggcaggggccggaccctgcagggccgtgtgggcatctatcgcttacgcagtagctggccagcgaccaggagccagaggggtt

SEQ ID NO: 32492 - DNA, 110 bp, synthetic construct
  source 1..110: mol_type = other DNA
ctgtggtgcaggttcgatccctggctcaggaacttccacatgctgcgggcatggccaaaagaaaaaactagacagaacaaaataggtttgcccttttgctacaagggtgg

SEQ ID NO: 32493 - DNA, 110 bp, synthetic construct
  source 1..110: mol_type = other DNA
caaaagaaaaaactagacagaacaaaataggtttgcccttttgctacaagggtggggctggaaaggaaagtctggacacctggggacagatgaggctcccatagccagga

SEQ ID NO: 32494 - DNA, 110 bp, synthetic construct; identical to SEQ ID NO: 32493
  source 1..110: mol_type = other DNA

SEQ ID NO: 32495 - DNA, 110 bp, synthetic construct; identical to SEQ ID NO: 32493
  source 1..110: mol_type = other DNA

SEQ ID NO: 32496 - DNA, 110 bp, synthetic construct
  source 1..110: mol_type = other DNA
gaacctagagggcaagggctagtgatacaggcctggctgaactctctgatgagtggctccctctcagctccccctgcttctctggagccacaactgcccctgcctttgtc

SEQ ID NO: 32497 - DNA, 110 bp, synthetic construct
  source 1..110: mol_type = other DNA
gcccaggaacatccatacaccttgggtgcagccaagaaaaaaaaaaacacaaaacgaagcgtgggagtaacatgtgcagtgacgccatcctcctgaaagatgactccaga

SEQ ID NO: 32498 - DNA, 110 bp, synthetic construct
  source 1..110: mol_type = other DNA
gaagcgtgggagtaacatgtgcagtgacgccatcctcctgaaagatgactccagacgtgactctggacagaccagaggccgtcacggctgggaggctatcacagtggccc

SEQ ID NO: 32499 - DNA, 110 bp, synthetic construct
  source 1..110: mol_type = other DNA
atatgacacaaatgagcttgtttgtgaaacaaagactcacagacatagaaaacaaatttattgttaccaaaggggaaaggagttgggggaagggtaattgagggagtttg

SEQ ID NO: 32500 - DNA, 110 bp, synthetic construct; identical to SEQ ID NO: 32499
  source 1..110: mol_type = other DNA

SEQ ID NO: 32501 - DNA, 110 bp, synthetic construct
  source 1..110: mol_type = other DNA
ggattgaatccaagccacagctgtgacttacaccacagccgctgtaatgccaggtccttaacccaaggtgccccaggtgggaactccaagaaattcttttttaataaaat

SEQ ID NO: 32502 - DNA, 110 bp, synthetic construct; identical to SEQ ID NO: 32501
  source 1..110: mol_type = other DNA

SEQ ID NO: 32503 - DNA, 110 bp, synthetic construct
  source 1..110: mol_type = other DNA
gcaagaagtccatatttttaacaagtatcatagatgactctgatgcagatcatctgtcaaccacaaacctgtaagaatgcctactcaacagagaaaagctatggtggttc

SEQ ID NO: 32504 - DNA, 110 bp, synthetic construct
  source 1..110: mol_type = other DNA
gtcaaccacaaacctgtaagaatgcctactcaacagagaaaagctatggtggttcattaactttaggatccaagaaattacttcctggaagtccattaagaaaagaagtc

SEQ ID NO: 32505 - DNA, 110 bp, synthetic construct
  source 1..110: mol_type = other DNA
agagcctgtctgcaccaacagctgaagctccacccacagcctgggcacaatccagggcacccagagatctcaacaacgatctccctaacaggctacaaagacaaacccta

SEQ ID NO: 32506 - DNA, 110 bp, synthetic construct
  source 1..110: mol_type = other DNA
ggcacccagagatctcaacaacgatctccctaacaggctacaaagacaaaccctaccctaccggaggcagcggatgaaacataacatcactgcctcttcctctctaccaa

SEQ ID NO: 32507 - DNA, 110 bp, synthetic construct
  source 1..110: mol_type = other DNA
catggcatggaagttcctgggccaaggaccaaattggagcagcaatgccagatcctttaaacctctgggccaggctagtgatcgcacccaagtctctgcagtgacccaag

SEQ ID NO: 32508 - DNA, 110 bp, synthetic construct
  source 1..110: mol_type = other DNA
tttaaacctctgggccaggctagtgatcgcacccaagtctctgcagtgacccaagctactgcagttggattcttaatggcaggaactccaatactataaaatctatgaag

SEQ ID NO: 32509 - DNA, 110 bp, synthetic construct
  source 1..110: mol_type = other DNA
gggaactcctccaccctggacttaatgtaagcaagtgagtgtgtcttagtttgcgttcagctggaagcaaaccctgagacaaagattcaagcgtaatggagttcccgctg

SEQ ID NO: 32510 - DNA, 110 bp, synthetic construct
  source 1..110: mol_type = other DNA
tccctggcacctcgcctgaagctggggggccgccgggcctgggggcagccacctgctcactgggattggctgggctgggatgctaagaagcctacgttcttgggaataaa

SEQ ID NO: 32511 - DNA, 110 bp, synthetic construct
  source 1..110: mol_type = other DNA
ggtcagatatttttgctgcattttctcacccatcctgttagcctctggtctagacctcaccagccctcgggccacacacattttaagcttcagccacgatggcctactaa

SEQ ID NO: 32512 - DNA, 110 bp, synthetic construct
  source 1..110: mol_type = other DNA
actccttgtttcctgactgagctagcgaggcagttggtacccaccctgtgagcataacctctggggatctctctctctatctggaagagggactgaggagtgtgcgtgat

SEQ ID NO: 32513 - DNA, 110 bp, synthetic construct
  source 1..110: mol_type = other DNA
acccctagcctgggaacctccgtatgctgccctaaaaagaaaaaaagaaaaacaagcttcaagtgtggtgctttagaaattagagtataagtctggaatgccacttgggt

SEQ ID NO: 32514 - DNA, 110 bp, synthetic construct
  source 1..110: mol_type = other DNA
gcttcaagtgtggtgctttagaaattagagtataagtctggaatgccacttgggtttgaatttgctcccttccctacagccagtcagctctacagggaatgttgggcttg

SEQ ID NO: 32515 - DNA, 110 bp, synthetic construct
  source 1..110: mol_type = other DNA
ggtgagcctcgtccctgtggggctcccgcagctgcagccctgcttacccggctgccccgcaggtgggctacgagaacgcgggtacggtggagttcctggtggacaagcac

SEQ ID NO: 32516 - DNA, 110 bp, synthetic construct
  source 1..110: mol_type = other DNA
cccgcaggtgggctacgagaacgcgggtacggtggagttcctggtggacaagcacggcaagcactacttcatcgaggtcaactcgcgcctgcaggtggagcacacagtca

SEQ ID NO: 32517 - DNA, 110 bp, synthetic construct
  source 1..110: mol_type = other DNA
atgatccgggtggctcccaagggaaggaaaagcctcctgcggagggggcctagccctgctcttttcctccttgaacgtcaccattgtggtgagttattaccagggtatca

SEQ ID NO: 32518 - DNA, 110 bp, synthetic construct
  source 1..110: mol_type = other DNA
ctgctcttttcctccttgaacgtcaccattgtggtgagttattaccagggtatcaatttttttcagatatgctgtggtacagaaaaagttaaaactcacaaagatgactc

SEQ ID NO: 32519 - DNA, 110 bp, synthetic construct
  source 1..110: mol_type = other DNA
gcataaacacaaaacccagcatctctcttaaatgaagttttccctgggattagctcttctcagatgcccaacgcagtggatcattttttacagctttttcatagatgtct

SEQ ID NO: 32520 - DNA, 110 bp, synthetic construct
  source 1..110: mol_type = other DNA
agatttaaagggaagcttccaaaggggggaaaaaaatccctctgaagaacctggctctctttttgcccttcttggtgtgcagcagcttgatgtggaatcccagttcctgg

SEQ ID NO: 32521 - DNA, 110 bp, synthetic construct
  source 1..110: mol_type = other DNA
tctctttttgcccttcttggtgtgcagcagcttgatgtggaatcccagttcctggacaagggattgaacccaggccatgttgttaaaagcaccaagtcccatccactagt

SEQ ID NO: 32522 - DNA, 110 bp, synthetic construct
  source 1..110: mol_type = other DNA
gatagtcctggaaaaagagttccatggccagataactttggggaacattacatcctgcgttcccgaattccctctggattcgaagtacatattggcatattgaaagctct

SEQ ID NO: 32523 - DNA, 110 bp, synthetic construct
  source 1..110: mol_type = other DNA
tgcgttcccgaattccctctggattcgaagtacatattggcatattgaaagctctggtgggtcttggagttccaatcgtggctcagtggttaatgaatccaaccaggaac

SEQ ID NO: 32524 - DNA, 110 bp, synthetic construct
  source 1..110: mol_type = other DNA
gcggcggatgcagtactcggcctgctccgccgggagttcccgccgcagctcctcagcagtgatgtagttctggggaagaagcagcgttgagggccctccggtccggttcc

SEQ ID NO: 32525 - DNA, 110 bp, synthetic construct; identical to SEQ ID NO: 32524
  source 1..110: mol_type = other DNA

SEQ ID NO: 32526 - DNA, 110 bp, synthetic construct
  source 1..110: mol_type = other DNA
ttaaccacttaattttcagtcacatacaaaagcagagagacatataatgaactcccaaatatccatcatccagcttcaacaacgattagcttatggctaatcttcaaatc

SEQ ID NO: 32527 - DNA, 110 bp, synthetic construct
  source 1..110: mol_type = other DNA
caaatatccatcatccagcttcaacaacgattagcttatggctaatcttcaaatctatgcccttttgataaacataaaactcccctctttcctcccttctactttctctc

SEQ ID NO: 32528 - DNA, 110 bp, synthetic construct
  source 1..110: mol_type = other DNA
atgtgaaaaccaagcagtttggatggcgtaccagagttcttcgccccggactatacacactacatgctttatgaaaggcagctgccgttactttcttctgctcagaaact

SEQ ID NO: 32529 - DNA, 110 bp, synthetic construct
  source 1..110: mol_type = other DNA
tgcccagaggctctgggaaggtggcagtactgggaagcagctggtctgggaaggtggaggtgcagggagtcaactgatcttcatagcttctggctgaggtttcagtcagc

SEQ ID NO: 32530 - DNA, 110 bp, synthetic construct
  source 1..110: mol_type = other DNA
ggaggtgcagggagtcaactgatcttcatagcttctggctgaggtttcagtcagctggccttgtagtgggctagtcagtggatctggaaaagttgcactgctgggcgtca

SEQ ID NO: 32531 - DNA, 110 bp, synthetic construct
  source 1..110: mol_type = other DNA
acataaatatatatataatttatatatatataaatatataaaggagaagtttacatgagaggcagctcaagtcccctgagtgtgttttcgctgtttggctgcaggatctg

SEQ ID NO: 32532 - DNA, 110 bp, synthetic construct
  source 1..110: mol_type = other DNA
tgagaggcagctcaagtcccctgagtgtgttttcgctgtttggctgcaggatctggctgggtaactacacagccgacttccacctccagttgctgtattagcccgtcttg

SEQ ID NO: 32533 - DNA, 110 bp, synthetic construct
  source 1..110: mol_type = other DNA
ctctgttatctctgccactcgcccacccctggctcctgcccctcagccccctgtgatgcctgctgtacatccagctttaccccctgaccaccacttccccatggtctccg

SEQ ID NO: 32534 - DNA, 110 bp, synthetic construct
  source 1..110: mol_type = other DNA
atgcctgctgtacatccagctttaccccctgaccaccacttccccatggtctccgccaactatccagagctgccatctgcccaccgaccccccaccgtctctgccacgga

SEQ ID NO: 32535 - DNA, 110 bp, synthetic construct
  source 1..110: mol_type = other DNA
gatgcaaaattcaaaaggcatatacaagttacaggacactgaccactgtcctcagtcagctcccctccccagaagcacctgctatcatgcggctttggtgtccattgatt

SEQ ID NO: 32536 - DNA, 110 bp, synthetic construct
  source 1..110: mol_type = other DNA
ccctccagacctgctctgcccgcagtcccctgcctatccaacggcatttctgctcctccaggggcttgggccaaagatgccctcatctcctgccagagtcactgtcacag

SEQ ID NO: 32537 - DNA, 110 bp, synthetic construct
  source 1..110: mol_type = other DNA
ctccaggggcttgggccaaagatgccctcatctcctgccagagtcactgtcacagcccatcagctggtcgtctagattcctctttcccacttagagtctcttttccatgc

SEQ ID NO: 32538 - DNA, 110 bp, synthetic construct
  source 1..110: mol_type = other DNA
cctctcggagatgacacagtccaggagggaagacgagccaggactggcatgactctccctgtcctcagctctttgatgccccgtaaggctctggaccacctttcctctta

SEQ ID NO: 32539 - DNA, 110 bp, synthetic construct
  source 1..110: mol_type = other DNA
tccctgtcctcagctctttgatgccccgtaaggctctggaccacctttcctcttacataacatgttaagatattgcgggtaattcggtagaattttgttaggaaggaaaa

SEQ ID NO: 32540 - DNA, 110 bp, synthetic construct
  source 1..110: mol_type = other DNA
aatgagaggcaactcattcacaacaaagaggcacactctcctgcacaacaagcttctaagatttccaacgtcttgccaaggcaactcttaaatagaggaaatgtcttctt

SEQ ID NO: 32541 - DNA, 110 bp, synthetic construct
  source 1..110: mol_type = other DNA
aattacaaatggcaaaaggagaaacaaacttcctcaagagctttgaagaattccgtttcctctctcccaggtaatgtcacttaagataaagagatgatactaatgatgac

SEQ ID NO: 32542 - DNA, 110 bp, synthetic construct
  source 1..110: mol_type = other DNA
tgccctctgtggccagaccctgcacacccctggctccaggagaattaagcctgtctgcagctggagggggaagcctggtggcggagcctggagagacgggaaaggcataa

SEQ ID NO: 32543 - DNA, 110 bp, synthetic construct
  source 1..110: mol_type = other DNA
tgcagctggagggggaagcctggtggcggagcctggagagacgggaaaggcataaccaggacatcttcccacccaaacaggtttaaatgtaatccaggattaattggggg

SEQ ID NO: 32544 - DNA, 110 bp, synthetic construct; identical to SEQ ID NO: 32542
  source 1..110: mol_type = other DNA

SEQ ID NO: 32545 - DNA, 110 bp, synthetic construct; identical to SEQ ID NO: 32543
  source 1..110: mol_type = other DNA

SEQ ID NO: 32546 - DNA, 110 bp, synthetic construct
  source 1..110: mol_type = other DNA
cccacccttagctctacaaagccgtttcattcccatccttgccctggcctcctcccgaggtcagaggggcgggaattatctgccccatcttacccacaacttgccagaga

SEQ ID NO: 32547 - DNA, 110 bp, synthetic construct
  source 1..110: mol_type = other DNA
cccctctccgcagatgtcaatgaatgcctgaccatccccgaggcctgcaagggggaaatgaaatgtatcaaccactacgggggctacttgtgcctgccccgctcggcggc

SEQ ID NO: 32548 - DNA, 110 bp, synthetic construct
  source 1..110: mol_type = other DNA
catcatctaatagcatccagagaaggtgaccttaagaggtaaattttgtgacaccttatctgtctgagaatattgattcttcgctcatatttgactgatagtttaactgg

SEQ ID NO: 32549 - DNA, 110 bp, synthetic construct
  source 1..110: mol_type = other DNA
ttatctgtctgagaatattgattcttcgctcatatttgactgatagtttaactgggtataggattctaggttggctgtgtttttcccttaaattttcagagatattaccc

SEQ ID NO: 32550 - DNA, 110 bp, synthetic construct
  source 1..110: mol_type = other DNA
ttccccaccccctccctggcttcctggaaagctggctcctcctgaagtttacacagcagttaatcatctgggctcccaacaatgggctctggtcatccgggatgagtaaa

SEQ ID NO: 32551 - DNA, 110 bp, synthetic construct
  source 1..110: mol_type = other DNA
ttcccattgtggcacagcagaaacgaatcctctggggaagctagcatccatgaggatatgggttctattcctggcctcactccgtgggttaaggatccagtgttgctttg

SEQ ID NO: 32552 - DNA, 110 bp, synthetic construct; identical to SEQ ID NO: 32551
  source 1..110: mol_type = other DNA

SEQ ID NO: 32553 - DNA, 110 bp, synthetic construct
  source 1..110: mol_type = other DNA
aggcaacccagggtctggttcccaagaccccggcccacctgcgtggtgcgcacgatgatgcggtagctgtgcagagtgccccctccgctgctctccttctcctcccgccg

SEQ ID NO: 32554 - DNA, 110 bp, synthetic construct
  source 1..110: mol_type = other DNA
tgccggtgcgaatgttctgcgaggttcgtgaatggacagaaacccggttcttgatcaatactaggtttcagcaggaagtctggtctgccagaagtgccagctgactgtgt

SEQ ID NO: 32555 - DNA, 110 bp, synthetic construct
  source 1..110: mol_type = other DNA
caatactaggtttcagcaggaagtctggtctgccagaagtgccagctgactgtgtccaggagacaagtgactgtgcagcaggcgtggggacgagcagctggtaagcctca

SEQ ID NO: 32556 - DNA, 110 bp, synthetic construct
  source 1..110: mol_type = other DNA
caatgccatggagtggataaatgccatctggctggtgccaaggacaaataggatggattggactaactgccctttgccaggccctccaaaaagaaggactagattgaatt

SEQ ID NO: 32557 - DNA, 110 bp, synthetic construct
  source 1..110: mol_type = other DNA
actggggaggggaggcttccagggcagaggagggcgagctcagtgcagtacaggttcttgtgaaatagctccctggggagacaagaaagtcctggtggcctccccactgg

SEQ ID NO: 32558 - DNA, 110 bp, synthetic construct
  source 1..110: mol_type = other DNA
tcttgtgaaatagctccctggggagacaagaaagtcctggtggcctccccactggttggggtttaggatgcaggctgagaaggtagaggctgggagctgtccagggccat

SEQ ID NO: 32559 - DNA, 110 bp, synthetic construct
  source 1..110: mol_type = other DNA
tattatttatttagaaatacctaatgctttattgttacgatatttaaacggtatggggtaaagggcctgggaccattgcctcccatcataggcctaaagctaattgctgt

SEQ ID NO: 32560 - DNA, 110 bp, synthetic construct
  source 1..110: mol_type = other DNA
acagtgtggggtacttaacccactgacccacaaccagaactccctgtaatttttttagaaaagcagaataagtgttggtcgggatgtggaaaaacgggaagcctcatgtg

SEQ ID NO: 32561 - DNA, 110 bp, synthetic construct; identical to SEQ ID NO: 32560
  source 1..110: mol_type = other DNA

SEQ ID NO: 32562 - DNA, 110 bp, synthetic construct
  source 1..110: mol_type = other DNA
gctctgaggttggtggggtgtcctccaaagctgccccagagttcaagggcttcatggaaccaaagcagatgaaaaagagcaaaactaaaacctgaagccgggagttcccg

SEQ ID NO: 32563 - DNA, 110 bp, synthetic construct
  source 1..110: mol_type = other DNA
catgctgccaggtcgttgtgggggggcccggccactgtgggccatgcccttgttctgtgagatttcacactctgcacatctccagcccaccaggccacccaagccgcctc

SEQ ID NO: 32564 - DNA, 110 bp, synthetic construct
  source 1..110: mol_type = other DNA
gagttcccactacgtgcagtggagttaagaatctaactgcaggagttcctgttgtggctcagcaggttatgagtctgactagcatccatgaaggcctgggttcgacccct

SEQ ID NO: 32565 - DNA, 110 bp, synthetic construct; identical to SEQ ID NO: 32564
  source 1..110: mol_type = other DNA

SEQ ID NO: 32566 - DNA, 110 bp, synthetic construct
  source 1..110: mol_type = other DNA
gaaaattcttctcctagaaaaagatgcgagtcagaagaaatggagctagtagtcctgacctccttgcataacctcagctgtcagagactaggcacaccatgatccagaga

SEQ ID NO: 32567 - DNA, 110 bp, synthetic construct
  source 1..110: mol_type = other DNA
gacccagatggcccaggctgagccccagttctcggagaaccagtaccctgagtgaaacaaccagtctaaaacagcaccttctgtgccataaagggggtttctgaaagcag

SEQ ID NO: 32568 - DNA, 110 bp, synthetic construct
  source 1..110: mol_type = other DNA
aacaaccagtctaaaacagcaccttctgtgccataaagggggtttctgaaagcagaggccaggtctgatttacctctttctatcccaggcagcacggatgaggcacagtt

SEQ ID NO: 32569 - DNA, 110 bp, synthetic construct
  source 1..110: mol_type = other DNA
agtcggccgaaggtgccccccacctgccctttggtgaggcgcccggggttcacgcagatgcagccgaggatgtcctggggaaggaaaggccaaaaccattagggctgatg

SEQ ID NO: 32570 - DNA, 110 bp, synthetic construct
  source 1..110: mol_type = other DNA
cctaaagctcagccaaagtctgtctgccagaagctgcctcccaggtgtcagctaagccagagcccactgaccaagggtacccttttggcctctaaggatgggaggaatcc

SEQ ID NO: 32571 - DNA, 110 bp, synthetic construct
  source 1..110: mol_type = other DNA
ggaaccggtcccccaggctccggctggccgagtgaccttgggtgagtctctgcccctcttggccttaagtctcccggttcgcgcagcgaatgggatgaaatgagcaagtg

SEQ ID NO: 32572 - DNA, 110 bp, synthetic construct
  source 1..110: mol_type = other DNA
ctcttggccttaagtctcccggttcgcgcagcgaatgggatgaaatgagcaagtgtgggagcccatctttctcgcgcgctctgaggcctcttgaaccctgaaactgcaag

SEQ ID NO: 32573 - DNA, 110 bp, synthetic construct; identical to SEQ ID NO: 32571
  source 1..110: mol_type = other DNA

SEQ ID NO: 32574 - DNA, 110 bp, synthetic construct; identical to SEQ ID NO: 32572
  source 1..110: mol_type = other DNA

SEQ ID NO: 32575 - DNA, 110 bp, synthetic construct
  source 1..110: mol_type = other DNA
tttctcacctatcaggttggcaaaaattgaataatacgttaacatattctctcagtgacactatggggaaacagactttctcatatgttgccaatggaaatacagactgg

SEQ ID NO: 32576 - DNA, 110 bp, synthetic construct
  source 1..110: mol_type = other DNA
tgacactatggggaaacagactttctcatatgttgccaatggaaatacagactggttcaagccttccatggggaaatttggcaatgtctaccaaagctgtatatgtactt

SEQ ID NO: 32577 - DNA, 110 bp, synthetic construct
  source 1..110: mol_type = other DNA
ttggcagggagtgtgctaagccagagcggatcttgatgaggcatgaaagcctagctttcctaagcttggttgggcttccttcttggctctgtgggcagctttagagagtc

SEQ ID NO: 32578 - DNA, 110 bp, synthetic construct
  source 1..110: mol_type = other DNA
tgaatcaacaaatgactcagccaggaatgggggcgaggaacactttattctcacagctgagcaaaagacgaggcccacagccttgacagcagcagacgcagccccctccc

SEQ ID NO: 32579 - DNA, 110 bp, synthetic construct
  source 1..110: mol_type = other DNA
gctgagcaaaagacgaggcccacagccttgacagcagcagacgcagccccctcccagccccagccctctcttcttggtatagttgctgctgccgcaggccaagttaggag

SEQ ID NO: 32580 - DNA, 110 bp, synthetic construct
  source 1..110: mol_type = other DNA
gtcccccaggagcctggggaaggtcctgggagaatgagtaaagcagaagttctttaatcttccaggaagctctcggggttcccgggtggcagtctacctgctggacttca

SEQ ID NO: 32581 - DNA, 110 bp, synthetic construct
  source 1..110: mol_type = other DNA
aatcttccaggaagctctcggggttcccgggtggcagtctacctgctggacttcacccatggattcattaacggagcacttcttacatggaagttaggagtgtgaggccc

SEQ ID NO: 32582 - DNA, 110 bp, synthetic construct
  source 1..110: mol_type = other DNA
agggatagaacctgaaacctcatagttactagtcagattcattaccactaagccatcacaggaatgccctgttcactaatctgtacagacacagcttatgacagggctga

SEQ ID NO: 32583 - DNA, 110 bp, synthetic construct
  source 1..110: mol_type = other DNA
tcacaggaatgccctgttcactaatctgtacagacacagcttatgacagggctgaccttgctaggctgggtgcaggctgaatgcggtggtgtgtggggagtgtctggggg

SEQ ID NO: 32584 - DNA, 110 bp, synthetic construct
  source 1..110: mol_type = other DNA
aacaaacccacaggcaacaaaagaaaataaataaattggacttagttaactttttaaaattgtgcatctatgagcactgccaacagagtgaaaaagaaaaccacagatgg

SEQ ID NO: 32585 - DNA, 110 bp, synthetic construct
  source 1..110: mol_type = other DNA
aaaattgtgcatctatgagcactgccaacagagtgaaaaagaaaaccacagatgggagaaagcatttgcaaatcatatatccgataagagcttcatatccagaatatata

SEQ ID NO: 32586 - DNA, 110 bp, synthetic construct
  source 1..110: mol_type = other DNA
acctttgctctgcccccaccagcaacagtccctacgttgtctcctgtgaactaggcagaaagggctgctccgatcacatgcacgctccccaatggggaaactgatgccca

SEQ ID NO: 32587 - DNA, 110 bp, synthetic construct
  source 1..110: mol_type = other DNA
cagaaagggctgctccgatcacatgcacgctccccaatggggaaactgatgcccaagctaagagccagagacagagaagccgctccttgctgggctcatctgcagacctc

SEQ ID NO: 32588 - DNA, 110 bp, synthetic construct
  source 1..110: mol_type = other DNA
gaaagttttaataggaagttccaaggtcccagttgtcacccttctgttttccttctggaattggatggtggtggctgaggctcattccgtttccactaacatgtcagcag

SEQ ID NO: 32589 - DNA, 110 bp, synthetic construct
  source 1..110: mol_type = other DNA
tggaattggatggtggtggctgaggctcattccgtttccactaacatgtcagcagcttgtaagctgaactcttgacctgggggggggggctgagtgagggaagtgctggt

SEQ ID NO: 32590 - DNA, 110 bp, synthetic construct
  source 1..110: mol_type = other DNA
cgtgccctcagcaagcatagggcagggcgctgggcatgcggtggggcaggtccccccccctcctggccctcctcagctatccgggggaaagcagagcacagaaagaaaaa

SEQ ID NO: 32591 - DNA, 110 bp, synthetic construct
  source 1..110: mol_type = other DNA
ccccctcctggccctcctcagctatccgggggaaagcagagcacagaaagaaaaagaaagcacagctgggaattcctgttggggctcagtgggttaagaaccagactagc

SEQ ID NO: 32592 - DNA, 110 bp, synthetic construct
  source 1..110: mol_type = other DNA
ctcagacttagtggcgcccgggggccagaggtgtggtggccaaggggggctccggcttggcttcctgcgcgcctagaaggattggtgattataaaaccacatggggctgc

SEQ ID NO: 32593 - DNA, 110 bp, synthetic construct
  source 1..110: mol_type = other DNA
ggtgactttcaccttgagttgttgggcttaatacttgaatgccatgtcaaaacgtttctggcataaaagagcttaggggcccacatgtgtccttttctctctctcatgta

SEQ ID NO: 32594 - DNA, 110 bp, synthetic construct
  source 1..110: mol_type = other DNA
tggagggagcaggaaggggaggtaagacctattcacaggaggagagaggacccttcccaaatacctttggcaactgaaagggccctcggagctcaaacagtttgatgtcc

SEQ ID NO: 32595 - DNA, 110 bp, synthetic construct
  source 1..110: mol_type = other DNA
cccaaatacctttggcaactgaaagggccctcggagctcaaacagtttgatgtcccctctcctatgattcaagagccccctctgagcctctctgagcagtagtcatccag

SEQ ID NO: 32596 - DNA, 110 bp, synthetic construct
  source 1..110: mol_type = other DNA
gccgacctcccctgcctcccgctcccccctccccagcccgggccagggtggcaatacagcacagggacagatagagagggaccagggtggcccttttcccagagggagca

SEQ ID NO: 32597 - DNA, 110 bp, synthetic construct
  source 1..110: mol_type = other DNA
cagccacactgggctgctctccagcggggcgaactttaaccctttgaggagttcatggtgggtggggccccaggggccaagttggctcacctgtgtcgcttcctctccat

SEQ ID NO: 32598 - DNA, 110 bp, synthetic construct
  source 1..110: mol_type = other DNA
ggaggcagagaagaggtgccaaggtgtggtggtgacacgtggctggcccggctgcactggggcagagggatctggcagtggaaccttgggatgcttccatggaggggata

SEQ ID NO: 32599 - DNA, 110 bp, synthetic construct
  source 1..110: mol_type = other DNA
actggggcagagggatctggcagtggaaccttgggatgcttccatggaggggatagggagacttgtgatgtcatctgcgaaggtcacaccctgcagatggaccagggaga

SEQ ID NO: 32600 - DNA, 110 bp, synthetic construct
  source 1..110: mol_type = other DNA
tggggttgtggcgtggatcaaagcagatgctgcatggaaacaatagggctccctaagcacccactgctcttgtcactattattgtgagcttggctgctgttcagtgggag

SEQ ID NO: 32601 - DNA, 110 bp, synthetic construct
  source 1..110: mol_type = other DNA
agcacccactgctcttgtcactattattgtgagcttggctgctgttcagtgggagggccgcccatgaagcccgtcgcccgagacacagcagccgtgtatacagagcatgc

SEQ ID NO: 32602 - DNA, 110 bp, synthetic construct
  source 1..110: mol_type = other DNA
tgcacacacacggatgttcgtgttctagtgaaacatggcaacatccagaatgctcatcgctagagaatgatatggaagtgaaagtcaattcaaacaaggggattctgaac

SEQ ID NO: 32603 - DNA, 110 bp, synthetic construct
  source 1..110: mol_type = other DNA
ggagaggaagctgtttagacctgccccctgcagccaggtccacatgcctcggctcgggaggaagaagcttgtgtggacacctcgaatttctgaagtgagacccttttgga

SEQ ID NO: 32604 - DNA, 110 bp, synthetic construct
  source 1..110: mol_type = other DNA
gggaggaagaagcttgtgtggacacctcgaatttctgaagtgagacccttttggacccgaaggggctatgggacatttctccccaagggtcatcgggaaagtcacagggc

SEQ ID NO: 32605 - DNA, 110 bp, synthetic construct
  source 1..110: mol_type = other DNA
gaacttccacatgccataggcatggccaaaaaataaattaattaaattaagtatatacatcatgaataaattggggttatcctaggcatgtaatggtcaattttagaaaa

SEQ ID NO: 32606 - DNA, 110 bp, synthetic construct
  source 1..110: mol_type = other DNA
gctccccacgcccaaaggctcttagagccatctcctgccctgggggcccatttcggtgcctgcgcaagcatctgagctggcttagaaggtgacagcatctggcttttagc

SEQ ID NO: 32607 - DNA, 110 bp, synthetic construct
  source 1..110: mol_type = other DNA
tgtatgagacatggcagagctgtcagatgcacacccaagatgactgtctgaccttcctactgctcacatcaaaagccaaggccaggagttcccttgtggcaaggtaagtt

SEQ ID NO: 32608 - DNA, 110 bp, synthetic construct
  source 1..110: mol_type = other DNA
ttaaaaaaaatttcaattgggcggtgagttgcagacaccttgctatgataggtttaaatggctgcccttcagagagcttggtggggtgtcactgcagtcttggtctctga

SEQ ID NO: 32609 - DNA, 110 bp, synthetic construct
  source 1..110: mol_type = other DNA
aaatggctgcccttcagagagcttggtggggtgtcactgcagtcttggtctctgagagttagaggtcccagccatcctctgctgcgagcgaggctgcaggagctccgggc

SEQ ID NO: 32610 - DNA, 110 bp, synthetic construct
  source 1..110: mol_type = other DNA
cagcgcctgcactgggatgcccaggaaactgcagggcccaggggtggggcctgaactctctggacaagcggggggagctggtacttcaaccctcagcagggtcggtactg

SEQ ID NO: 32611 - DNA, 110 bp, synthetic construct
  source 1..110: mol_type = other DNA
ctctctggacaagcggggggagctggtacttcaaccctcagcagggtcggtactgtcgtggtaaaaatgagagcagccacctgtcatcgtgcaggtgtttacaggggtgg

SEQ ID NO: 32612 - DNA, 110 bp, synthetic construct
  source 1..110: mol_type = other DNA
ggtggccttgggttttaggccttcgtctgtaaaatgggacctcagactatgtacgtccctgggcttctgtgaggacaaactagggcgggggctgagcagagcctgtggca

SEQ ID NO: 32613 - DNA, 110 bp, synthetic construct
  source 1..110: mol_type = other DNA
gtccaccacacaggctgtgtgaggattaaaggagctgatactggctgcaagcttagagcagtgacataaaagtcagccacctttcgatcccaggtgcccagagcagcctg

SEQ ID NO: 32614 - DNA, 110 bp, synthetic construct
  source 1..110: mol_type = other DNA
gagcagtgacataaaagtcagccacctttcgatcccaggtgcccagagcagcctggcgctgtgatccctgatctgtcgccagtacccagagcagtgcctggcatatcatg

SEQ ID NO: 32615 - DNA, 110 bp, synthetic construct
  source 1..110: mol_type = other DNA
ttggccatcaggcacccaacctccccatcccccacagcacagagggttggggcttctcctcacaagcacaaggtcgggatacaggagaggcaggcctgagccccagcaca

SEQ ID NO: 32616 - DNA, 110 bp, synthetic construct
  source 1..110: mol_type = other DNA
ctcctcacaagcacaaggtcgggatacaggagaggcaggcctgagccccagcacagaatttcaagggcagcaaggccccggcccagaaggaactcccagcgaaggggctc

SEQ ID NO: 32617 - DNA, 110 bp, synthetic construct
  source 1..110: mol_type = other DNA
agctcccctgcaggcgtcacagaatgtgggcgcttccctgagagctgggggccctcaggcccatccagaccctctttggaaacctgtccttgtggaggactcgggggctt

SEQ ID NO: 32618 - DNA, 110 bp, synthetic construct
  source 1..110: mol_type = other DNA
caggcccatccagaccctctttggaaacctgtccttgtggaggactcgggggcttcgttgatgtgacactgccatgctgtgcccacaccaccctctccttcatcagttca

SEQ ID NO: 32619 - DNA, 110 bp, synthetic construct
  source 1..110: mol_type = other DNA
accgtcagctcccgcctgccccaggccccacaggcaccatctccctcagcctgtgactgccccgggggcagatgctttcaccttcccgatttcacagatgagcgccatgg

SEQ ID NO: 32620 - DNA, 110 bp, synthetic construct
  source 1..110: mol_type = other DNA
ggggtttttcactaaatacacactacagttctacacaatctgctttttattgaatccatggatgcagaactgcaaatagaaaaggctgactcttcaaaggtcaaccgtac

SEQ ID NO: 32621 - DNA, 110 bp, synthetic construct
  source 1..110: mol_type = other DNA
ccatggatgcagaactgcaaatagaaaaggctgactcttcaaaggtcaaccgtacctcagtgccagcctatttgttttttaaatttttttattatagctgacttcattgt

SEQ ID NO: 32622 - DNA, 110 bp, synthetic construct
  source 1..110: mol_type = other DNA
ctggaaggagcaaggtggggtgagggaggagaagatcgatcagggctttgattttgtccaggtcgggtttgagacgtcttttcagacattcacctggagatgaggagtaa

SEQ ID NO: 32623 - DNA, 110 bp, synthetic construct
  source 1..110: mol_type = other DNA
gtccaggtcgggtttgagacgtcttttcagacattcacctggagatgaggagtaatcagagcctggaactcgggggagagctccaggctggaggtacagatttcagcgca

SEQ ID NO: 32624 - DNA, 110 bp, synthetic construct
  source 1..110: mol_type = other DNA
tctgggcctttgccacagccgcctactgcctgaaacactttgtctccatttctgctcccattcttctttccggttagccttggctcagacacgacaccctccaggcagtt

SEQ ID NO: 32625 - DNA, 110 bp, synthetic construct
  source 1..110: mol_type = other DNA
tttcctcttttccctttctttcctttttttttttaagggcctaggttgaggcatttggaagattcaggctaggggctgaattggagctgcagctgagacctacaccacag

SEQ ID NO: 32626 - DNA, 110 bp, synthetic construct
  source 1..110: mol_type = other DNA
ttctttcctttttttttttaagggcctaggttgaggcatttggaagattcaggctaggggctgaattggagctgcagctgagacctacaccacagccacagcgacaccag

SEQ ID NO: 32627 - DNA, 110 bp, synthetic construct
  source 1..110: mol_type = other DNA
cattctcagtgctttgagatgggtttttaggtttataaataaatggagcttcaaaaggttagaaattttatccacagtcacactgtgactaagtggtggagtttgtgtat

SEQ ID NO: 32628 - DNA, 110 bp, synthetic construct
  source 1..110: mol_type = other DNA
aggttagaaattttatccacagtcacactgtgactaagtggtggagtttgtgtattctgcaaatatttattgggtgtctactctctgcactgttgtggttcttgggagat

SEQ ID NO: 32629 - DNA, 110 bp, synthetic construct
  source 1..110: mol_type = other DNA
ggtcacattttgagatttcaggtggccgtgcatattagcgggaagacactgttcacaccacagatatattttcagatatgaatggtttatcattgaatattgtgtgctca

SEQ ID NO: 32630 - DNA, 110 bp, synthetic construct
  source 1..110: mol_type = other DNA
ggcacgagtgggtctatggtatcctttctgatacaccagcttctcagcctggtagcctctgaggacatgtgaattcatgggcctttaatgatggcagtcacttgctgtgt

SEQ ID NO: 32631 - DNA, 110 bp, synthetic construct
  source 1..110: mol_type = other DNA
agaccctactacttttaaaatgtgaaggacccgtgagccaacagtcactgacactcaggtggggatgaactgtcagccacgttgctaagctcaggagggtttccagagcc

SEQ ID NO: 32632 - DNA, 110 bp, synthetic construct
  source 1..110: mol_type = other DNA
caggtggggatgaactgtcagccacgttgctaagctcaggagggtttccagagcccatgggcaggggctggggaagctgggcccaggactgagggcctcgccatccccca

SEQ ID NO: 32633 - DNA, 110 bp, synthetic construct
  source 1..110: mol_type = other DNA
gcagcttccagaccctgtctgaggctctctctcctctaaggactgaacaggataatatagcagctttcaaacattcctttctttctttctttcttttttaaaaaaaattt

SEQ ID NO: 32634 - DNA, 110 bp, synthetic construct
  source 1..110: mol_type = other DNA
cacgtggccctgtctgccttgtcctctttctatggatctgtgaatttaaacttccttcatgacagttatttccaagtctgcacatcttagcacagctgattaaaacctga

SEQ ID NO: 32635 - DNA, 110 bp, synthetic construct
  source 1..110: mol_type = other DNA
ttcatgacagttatttccaagtctgcacatcttagcacagctgattaaaacctgattgggtacattataaaaatgatttccttgcaaggtgatggtttaaacattttttt

SEQ ID NO: 32636 - DNA, 110 bp, synthetic construct
  source 1..110: mol_type = other DNA
aaggacaaggcaggtctctaagctgttcaatttcaaaaagacgcataaggcatataacttttctctcgggggtatgaggcacctgcatcactagtagaaatatttagggg

SEQ ID NO: 32637 - DNA, 110 bp, synthetic construct
  source 1..110: mol_type = other DNA
ttcagggtggcttcatcatttttattccatttctatgtgcaacttttttaagttcctttaagccctcctctggtttattggttataatcagccaccgagcagattccacc

SEQ ID NO: 32638 - DNA, 110 bp, synthetic construct
  source 1..110: mol_type = other DNA
ctttaagccctcctctggtttattggttataatcagccaccgagcagattccaccagccacctgatgaaaggcacacaagagcagtcgactctctctttcttaattgtcc

SEQ ID NO: 32639 - DNA, 110 bp, synthetic construct
  source 1..110: mol_type = other DNA
gaaagaagacagtaacactgatattttgaaatgaggccttataagggagcggcacatccatgggagaacttaggctctagattcagctcaggaaatgagctagaggcagc

SEQ ID NO: 32640 - DNA, 110 bp, synthetic construct
  source 1..110: mol_type = other DNA
atactagtcagattcatttccactgagccacgacagcaactccggcacctaatattctatttccatttaatcacaccaagaactcacaataattttttaattctttgaaa

SEQ ID NO: 32641 - DNA, 110 bp, synthetic construct
  source 1..110: mol_type = other DNA
gcaactccggcacctaatattctatttccatttaatcacaccaagaactcacaataattttttaattctttgaaatatggatacaagagaaaggtagttatatgttccat

SEQ ID NO: 32642 - DNA, 110 bp, synthetic construct
  source 1..110: mol_type = other DNA
aacctccacatgctatgggtgcagccctaaaaagacaaaaaaaaaaagaggagccagttgtagaggcaggagctggtgcaccttctcaggaggtgcccggggcccagtcg

SEQ ID NO: 32643 - DNA, 110 bp, synthetic construct
  source 1..110: mol_type = other DNA
agttgtagaggcaggagctggtgcaccttctcaggaggtgcccggggcccagtcggatcttaatcttgttcttgggctcctcctgcagatgtggagtgggtgtccacccg

SEQ ID NO: 32644 - DNA, 110 bp, synthetic construct
  source 1..110: mol_type = other DNA
cccgtcccctcccgcagcttccctgtggcagaggaggcaaggtttcctggtccattttacgaggactcttcttctcctgtgctttcaagccagacagggcctctcagagg

SEQ ID NO: 32645 - DNA, 110 bp, synthetic construct
  source 1..110: mol_type = other DNA
ccctctctcccaaactcaaagacatccatccatcaaggcttctctccagcattgtcccccctgtactgaagcaaatgtgctaccattgtgcccttaaaaaaataaagaaa

SEQ ID NO: 32646 - DNA, 110 bp, synthetic construct
  source 1..110: mol_type = other DNA
aggggtccagggaggggctcccacaatggagccgagctggggaagccggggtctgcacccacctatcctcgctgaagctcttggtgaggttctgccactcagccaggaat

SEQ ID NO: 32647 - DNA, 110 bp, synthetic construct
  source 1..110: mol_type = other DNA
cacccacctatcctcgctgaagctcttggtgaggttctgccactcagccaggaatgaagacgcgccctagaaggaaaaaaaaagcagagtccaggagcagggaacacaat

SEQ ID NO: 32648 - DNA, 110 bp, synthetic construct
  source 1..110: mol_type = other DNA
gacttgggagccagcagcttctaggagaaaccatgagatagataagaccacccaaggacagtgggtaaagtgagaataaggataggatacatccctgtggattccaggca

SEQ ID NO: 32649 - DNA, 110 bp, synthetic construct
  source 1..110: mol_type = other DNA
ggacagtgggtaaagtgagaataaggataggatacatccctgtggattccaggcacttgtgataaagggaagaatgtgtccgagagactgcgaagatgaggagaaagcag

SEQ ID NO: 32650 - DNA, 110 bp, synthetic construct
  source 1..110: mol_type = other DNA
gccatgccgtccaatcaggagcagcctcggaaaagtaatcctgcataaacgactccgcctccccagcctccctggccgaccaacccgagggtgtgtgtggggggaaatct

SEQ ID NO: 32651 - DNA, 110 bp, synthetic construct
  source 1..110: mol_type = other DNA
ggcagagtctgacagcccttctgtgggaggagctaaaggtgccccgagtcacggggagctttgggtcggccagagtgggcgaagaaatggggtcagcaaataggtgagag

SEQ ID NO: 32652 - DNA, 110 bp, synthetic construct
  source 1..110: mol_type = other DNA
gagctttgggtcggccagagtgggcgaagaaatggggtcagcaaataggtgagagaaggtcttgtgcttcagataacttcacagggttgggcaagggctagagatgagat

SEQ ID NO: 32653 - DNA, 110 bp, synthetic construct
  source 1..110: mol_type = other DNA
gcccagctccgcaatgtctttgatagagggctgtgctctgcagtttcctacaacaactcatgcttttacaatacagtacataatggacatccaaatacttataaacgtca

SEQ ID NO: 32654 - DNA, 110 bp, synthetic construct
  source 1..110: mol_type = other DNA
tccttcatgtcccaggggagtttgaggaggaatcaaagcagccaggggtgtcggaacagcagcgacatcaactgaagcaccgcgagctttttctttctcggcagtttgaa

SEQ ID NO: 32655 - DNA, 110 bp, synthetic construct
  source 1..110: mol_type = other DNA
acagcagcgacatcaactgaagcaccgcgagctttttctttctcggcagtttgaatcgctaccagccacccacataaggtataggacagtcagggctacttatttaggag

SEQ ID NO: 32656 - DNA, 110 bp, synthetic construct
  source 1..110: mol_type = other DNA
ccagggatggaatttggattgcatctgagacctatgccacaactgtctgatccttaacgtcctgagccacagcaggaactcctctttttccccctacctgttaatttctt

SEQ ID NO: 32657 - DNA, 110 bp, synthetic construct
  source 1..110: mol_type = other DNA
aacgtcctgagccacagcaggaactcctctttttccccctacctgttaatttctttacaatgtgcaggtgttgctctacctatcacttatagatggtttaaaaaatactt

SEQ ID NO: 32658 - DNA, 110 bp, synthetic construct
  source 1..110: mol_type = other DNA
tagttgtgaagacagaggtaggagtggtagtttgagtgtcaggatctttggagacagacctggatcagttcatggcttactggttataggtgggtgggtgtgcgtttttg

SEQ ID NO: 32659 - DNA, 110 bp, synthetic construct
  source 1..110: mol_type = other DNA
gccaggttcacgcttccgagggagggggtggcgccgaagcgagccctattaaccccggtgggtccctaagccccaagctctacagggacacaaacgttttccttagtcag

SEQ ID NO: 32660 - DNA, 110 bp, synthetic construct
  source 1..110: mol_type = other DNA
cggtgggtccctaagccccaagctctacagggacacaaacgttttccttagtcagctttgtactccgaaactgcagtacaggagactcccagcgctgtttatgttaatta

SEQ ID NO: 32661 - DNA, 110 bp, synthetic construct
  source 1..110: mol_type = other DNA
cttcctcccgaggtttacgtttttagagggagcataggattttcaggcagtgtgacttgtttggatggttgcagcttcacctcgtgtttgtatcacaaaaccattggctt

SEQ ID NO: 32662 - DNA, 110 bp, synthetic construct
  source 1..110: mol_type = other DNA
cttgtttggatggttgcagcttcacctcgtgtttgtatcacaaaaccattggcttgatgattggattattttcctccgctaaagtgaatggaaaccaaatgcatccagtc

SEQ ID NO: 32663 - DNA, 110 bp, synthetic construct
  source 1..110: mol_type = other DNA
tggggacagaggttaaggcttcagagttcagggcctctgagaaagggtcaggccctcctccactaatccctgtttgctggattagcctcggaatggaggtacctagaatt

SEQ ID NO: 32664 - DNA, 110 bp, synthetic construct
  source 1..110: mol_type = other DNA
gttggccagagggcactctgactaccatggtcaagtctactgagaaagaggctctgagaatggcaggtgggaataagaggagccaggggccacacagccctgaaaaggtc

SEQ ID NO: 32665 - DNA, 110 bp, synthetic construct
  source 1..110: mol_type = other DNA
gagaatggcaggtgggaataagaggagccaggggccacacagccctgaaaaggtctatggctggtgtcagctgtcctcaagatgtgacggggccagagcagggccccctg

SEQ ID NO: 32666 - DNA, 110 bp, synthetic construct
  source 1..110: mol_type = other DNA
ggtcagccttggtggttttcatactcccctccctggcgttgttaaaatccctgggagagctggctatgggcaggcgactttcggacacagattttcagggctggtaactg

SEQ ID NO: 32667 - DNA, 110 bp, synthetic construct
  source 1..110: mol_type = other DNA
agagctggctatgggcaggcgactttcggacacagattttcagggctggtaactgacccctgcgcccagacaatggggagcctgcagaatgtcagctcattctcttctgc

SEQ ID NO: 32668 - DNA, 110 bp, synthetic construct
  source 1..110: mol_type = other DNA
cgtggccacagcagaacacagccaccaatcagaacaaccagggagggaccagagggaagaaataccccagcttctttctcgtcccatcctctgatctacagccagagcgt

SEQ ID NO: 32669 - DNA, 110 bp, synthetic construct
  source 1..110: mol_type = other DNA
gaagaaataccccagcttctttctcgtcccatcctctgatctacagccagagcgttccattggcctaacattcagccagcaaggcagcctgggctttgtgggccagcctc

SEQ ID NO: 32670 - DNA, 110 bp, synthetic construct
  source 1..110: mol_type = other DNA
tcatcaacctttggaatggttccctgcttcatgtgcacgcaacttgcaaactgcccgatccagaaaggaagcagcaggtaagtaagcgtctctaacgcaaggctcttcaa

SEQ ID NO: 32671 - DNA, 110 bp, synthetic construct
  source 1..110: mol_type = other DNA
cgatccagaaaggaagcagcaggtaagtaagcgtctctaacgcaaggctcttcaagaaaccaggaaaactacacaacgcttactggaattaggcaactctgcgaggcagg

SEQ ID NO: 32672 - DNA, 110 bp, synthetic construct
  source 1..110: mol_type = other DNA
tgccccctgtcaggactcacctgcagagcagtaaacggggagggccaccagcatgagcaccatcgccagcttcatgttggaggcagccgtggttggctcttcagtccaat

SEQ ID NO: 32673 - DNA, 110 bp, synthetic construct
  source 1..110: mol_type = other DNA
agcaccatcgccagcttcatgttggaggcagccgtggttggctcttcagtccaatgtggcagagaaagaggaactccctttggagacgagcgcccagaacgcctcctttt

SEQ ID NO: 32674 - DNA, 110 bp, synthetic construct
  source 1..110: mol_type = other DNA
ccctctccttctcctgcagctccctgaggacggagcaaagcctgtcagagggaagctgagccctggccctgttccgtccctggtggggaagccaggcccccggcacaggc

SEQ ID NO: 32675 - DNA, 110 bp, synthetic construct
  source 1..110: mol_type = other DNA
caaagcctgtcagagggaagctgagccctggccctgttccgtccctggtggggaagccaggcccccggcacaggccccggaagatggaaaggcagaacgggcacgcctgc

SEQ ID NO: 32676 - DNA, 110 bp, synthetic construct
  source 1..110: mol_type = other DNA
tccttcccctcgcgcaggaacaagctacctcaaatccttacaccaagggctgcttctagggggaccaaaacgccccacctccgatctgcccgcccagtcaaggcctgggc

SEQ ID NO: 32677 - DNA, 110 bp, synthetic construct
  source 1..110: mol_type = other DNA
ttaacccccttgacattattcagctcttcagtttttgccaaataggtggaaagtcttatctcattggtttacctcgctattaccttataacccatgaacatctctgccta

SEQ ID NO: 32678 - DNA, 110 bp, synthetic construct
  source 1..110: mol_type = other DNA
ctgaatggtggccccaggacctttccacctgctgaacctccttcctggaggacgctcttcctaatctaactccatggctcacccccacttcaagtcatcttctgaaagga

SEQ ID NO: 32679 - DNA, 110 bp, synthetic construct
  source 1..110: mol_type = other DNA
tgggatactgccctgtgccctgtgctgtgcctctgagtctccccctgcctgcccttggccaccgttcttactcattctattgtagtgggtggcgccgaggtggggtcccc

SEQ ID NO: 32680 - DNA, 110 bp, synthetic construct
  source 1..110: mol_type = other DNA
tggccaccgttcttactcattctattgtagtgggtggcgccgaggtggggtccccaccaagcttgagtgaccgtggactccctctcaactgaggaggtggggctgcctta

SEQ ID NO: 32681 - DNA, 110 bp, synthetic construct
  source 1..110: mol_type = other DNA
tcagtgcgacagagtgggaggaaatggcctggctgtcagatctggcctcgactgggggctaaaggatgtgactctgtgaccccgagctcgtgccatgagtcctccactga

SEQ ID NO: 32682 - DNA, 110 bp, synthetic construct
  source 1..110: mol_type = other DNA
gggctaaaggatgtgactctgtgaccccgagctcgtgccatgagtcctccactgagcctcatttgcatctatggtgaagcaggtgggaccagacccgccgggatcctcct

SEQ ID NO: 32683 - DNA, 110 bp, synthetic construct
  source 1..110: mol_type = other DNA
gacacaggaaggccaacagtgacgccaggattgggctgcagctcttgctctgtgaagggctcataggagttcctgctgtggtgcaaagggattggtggcatcttgggagc

SEQ ID NO: 32684 - DNA, 110 bp, synthetic construct
  source 1..110: mol_type = other DNA
tccttcttccaaagagacacagtttggggtggcaagctctgctcccctagagtgcgaagaatgaagaaaggcaggtcggggaggaaggctgggaactgagcgaataaggg

SEQ ID NO: 32685 - DNA, 110 bp, synthetic construct
  source 1..110: mol_type = other DNA
ggtcccctagccgtgctgcctatgccttggtggggtacccttcttacgagaacacagatgctgggtgatcctaagctgtggacggcaggggcaggtctgaataccctcta

SEQ ID NO: 32686 - DNA, 110 bp, synthetic construct
  source 1..110: mol_type = other DNA
agatgctgggtgatcctaagctgtggacggcaggggcaggtctgaataccctctaagggcagctgccgggaagggagggcggtgtctttttgaacttgggtacagcgtcc

SEQ ID NO: 32687 - DNA, 110 bp, synthetic construct
  source 1..110: mol_type = other DNA
atgaaggagacactgtggcccagaaagggtgagaaccttgcccaaggccacaccgcaagtgccccgcaggatcagcacggcagctcccgattcccttatttctcacgggt

SEQ ID NO: 32688 - DNA, 110 bp, synthetic construct
  source 1..110: mol_type = other DNA
ccaaggtcaaaaccaaagccatcagtcacttgcccgtgacctcagcgcctctatgcctcattcctctccagacaatggggacaggacagtgcctgcctcgctggctgccg

SEQ ID NO: 32689 - DNA, 110 bp, synthetic construct
  source 1..110: mol_type = other DNA
cctcattcctctccagacaatggggacaggacagtgcctgcctcgctggctgccgggggaccggagatgactcggtcaagggcctgcccactgggcctcctccccgtgac

SEQ ID NO: 32690 - DNA, 110 bp, synthetic construct
  source 1..110: mol_type = other DNA
ctgcatatacagaccacgtttcatccatccgtgggcctttggatggttcccaccttttagcatccatgataatcacgcgatgcacgtggctgtatacatatctggtcaag

SEQ ID NO: 32691 - DNA, 110 bp, synthetic construct
  source 1..110: mol_type = other DNA
aaagaattcctgcatggttctcctggaagccagacttgcagatttctttgatagtccagaatcacagaaatgctggaaggaaccttctggatcatctatggatgagggaa

SEQ ID NO: 32692 - DNA, 110 bp, synthetic construct
  source 1..110: mol_type = other DNA
ccagaatcacagaaatgctggaaggaaccttctggatcatctatggatgagggaagtgagacccagggaggggaagacagtcccgaagcccagaccccaatgaatgacca

SEQ ID NO: 32693 - DNA, 110 bp, synthetic construct
  source 1..110: mol_type = other DNA
gccacagcgtctcctgcagcgaccatagtatagtgggtaagagccccggctgtgacccaggctgcttgagtttgcgtctcagctctgccacttcactagctgtgtgacct

SEQ ID NO: 32694 - DNA, 110 bp, synthetic construct
  source 1..110: mol_type = other DNA
cccaggctgcttgagtttgcgtctcagctctgccacttcactagctgtgtgacctgggacgagttcccaacctctctgtgccatggtttccccatcagtaaaagaaagat

SEQ ID NO: 32695 - DNA, 110 bp, synthetic construct
  source 1..110: mol_type = other DNA
gcttcaatgagctgaagttgctttctgttgcttgcgaaagctctgactgctaccccacgtggtcagagcactaacagagtcacgtgatcacagtggcatgaccacggccc

SEQ ID NO: 32696 - DNA, 110 bp, synthetic construct
  source 1..110: mol_type = other DNA
cacgtggtcagagcactaacagagtcacgtgatcacagtggcatgaccacggccccatgtcctcacggccccatcatagccaggaggccccacactgtcagatgccttgt

SEQ ID NO: 32697 - DNA, 110 bp, synthetic construct
  source 1..110: mol_type = other DNA
tcccttttggacatgctgcgtttgcagggcctttcagacacactgcaggactcgagatggcaggtagatgtgcaggctggagctcaaaggaaagcatggtttgaaacaca

SEQ ID NO: 32698 - DNA, 110 bp, synthetic construct
  source 1..110: mol_type = other DNA
gtgccacggctgcggccctaaaaactaaaaagacaaacaaaataaaaaaaataaaaagaagaagaagaaggtaccaaagttagtcggaactggaggctcctttcaaggag

SEQ ID NO: 32699 - DNA, 110 bp, synthetic construct
  source 1..110: mol_type = other DNA
aagaagaagaagaaggtaccaaagttagtcggaactggaggctcctttcaaggagcataaataagagcaaaagatgaaatataatcagcacttgaccccaatgtgcagtg

SEQ ID NO: 32700 - DNA, 110 bp, synthetic construct
  source 1..110: mol_type = other DNA
gagacagacagcgtgacagcccctcaccagactgcacgggcacgtgggacacattggaggagtctgtcatgtggttcagcatgtgcgccacaatctcgtcggcggttgcc

SEQ ID NO: 32701 - DNA, 110 bp, synthetic construct
  source 1..110: mol_type = other DNA
ggaggagtctgtcatgtggttcagcatgtgcgccacaatctcgtcggcggttgccatctgtcagagggagccagggtgagctgcgctgggggcctcggtcttagaccagc

SEQ ID NO: 32702 - DNA, 110 bp, synthetic construct
  source 1..110: mol_type = other DNA
gctctcttttgtgggccagacaaggtaagatgagtctggcgccagctccgggtactcgtgtgaagggttgcagggtggggcagctggcctggctgaccccggccttcggt

SEQ ID NO: 32703 - DNA, 110 bp, synthetic construct
  source 1..110: mol_type = other DNA
ttggggtattgctcactggcaatggtgcctttgggggccaccctgggggagcaggaggtacacaccaggtggcggcctccgggcagctttgctgtcagcagaccttgctg

SEQ ID NO: 32704 - DNA, 110 bp, synthetic construct
  source 1..110: mol_type = other DNA
aggtacacaccaggtggcggcctccgggcagctttgctgtcagcagaccttgctgacctgtacccgcaaggagttccgatgatgggtccttcctcccggccatggcagtg

SEQ ID NO: 32705 - DNA, 110 bp, synthetic construct
  source 1..110: mol_type = other DNA
cgacgggaactccgagagagatcttttaaactaattacacgtctttaaaaatgattttttctttacagaaattatgtaagaaaacattctgtctttaacaaggcagctaa

SEQ ID NO: 32706 - DNA, 110 bp, synthetic construct
  source 1..110: mol_type = other DNA
tttttctttacagaaattatgtaagaaaacattctgtctttaacaaggcagctaagacagaagctcctcttgatactgtggtatcattttccatgtgattgaaatgtaca

SEQ ID NO: 32707 - DNA, 110 bp, synthetic construct
  source 1..110: mol_type = other DNA
actagttgggttcttaacccctgagccacagtcggaactccctagctgtttccttttaaaaagtcatcccgggagttcccgttgtggtgcagtggttaacaaatccaacc

SEQ ID NO: 32708 - DNA, 110 bp, synthetic construct
  source 1..110: mol_type = other DNA
aacccctgagccacagtcggaactccctagctgtttccttttaaaaagtcatcccgggagttcccgttgtggtgcagtggttaacaaatccaaccaggaaccatgaagtt

SEQ ID NO: 32709 - DNA, 110 bp, synthetic construct
  source 1..110: mol_type = other DNA
cttattcatctttcatctccctctgtgagttatatggcgcgcagaagtgttcaagacagtgttttaattaatcccatgtcagcgccgctagttaagagcagcttgggaat

SEQ ID NO: 32710 - DNA, 110 bp, synthetic construct
  source 1..110: mol_type = other DNA
acagtgttttaattaatcccatgtcagcgccgctagttaagagcagcttgggaatgtggctcagggtagggtcatgattcctaatgagcggtttctgccatttgccaact

SEQ ID NO: 32711 - DNA, 110 bp, synthetic construct
  source 1..110: mol_type = other DNA
ctagcccagaatgaggggccagtttgacggtccgatttgaactctggaaggtactggaaagagttggattgaatgacctgtgtgtaactgcagacagaggagatgagtgt

SEQ ID NO: 32712 - DNA, 110 bp, synthetic construct
  source 1..110: mol_type = other DNA
ggaaggtactggaaagagttggattgaatgacctgtgtgtaactgcagacagaggagatgagtgtctgtgagcttgccgtggactgagaagggggtggggggagcacaag

SEQ ID NO: 32713 - DNA, 110 bp, synthetic construct
  source 1..110: mol_type = other DNA
tttgggaaagtcaggcccacacataggacacagtgcctatccaggaagcagcagtcccatccacggccagccctgtttcagcttgtagtgtccacattacccgaatggtg

SEQ ID NO: 32714 - DNA, 110 bp, synthetic construct
  source 1..110: mol_type = other DNA
ctccaagctgagtggctgccatgctggaaagcaggctggttgggcatgttttccagagaagtcagaaatctggatgtttatgcaaaatcccctgatttcaaatgttagct

SEQ ID NO: 32715 - DNA, 110 bp, synthetic construct
  source 1..110: mol_type = other DNA
gagaagtcagaaatctggatgtttatgcaaaatcccctgatttcaaatgttagctcctaatttttttcctctctctctctctctgtcttcctcttcactttttcaaaaat

SEQ ID NO: 32716 - DNA, 110 bp, synthetic construct
  source 1..110: mol_type = other DNA
cgtcacaagggcatttttaggtgacagaaagaccaggaaatggacttgagctggatggccctagactagggtttaattaccacaggaaggaggattcatttagcagtccc

SEQ ID NO: 32717 - DNA, 110 bp, synthetic construct
  source 1..110: mol_type = other DNA
tggccctagactagggtttaattaccacaggaaggaggattcatttagcagtccctgttataccctccggtttccatgaagataagctgagctctgaagacataaaaccc

SEQ ID NO: 32718 - DNA, 110 bp, synthetic construct
  source 1..110: mol_type = other DNA
gtgttctccctgttcgaggtatgtgagtttgatttcgttaagataggaagtagtggaaagaagttgaggccaagagatgcaagcagcaggggccactggctggagacttc

SEQ ID NO: 32719 - DNA, 110 bp, synthetic construct
  source 1..110: mol_type = other DNA
gaaagaagttgaggccaagagatgcaagcagcaggggccactggctggagacttcatgtcccctcactgtggtgtgcaggataccaccgcccaggggccgcacctgcaaa

SEQ ID NO: 32720 - DNA, 110 bp, synthetic construct; identical to SEQ ID NO: 32718
  source 1..110: mol_type = other DNA

SEQ ID NO: 32721 - DNA, 110 bp, synthetic construct; identical to SEQ ID NO: 32719
  source 1..110: mol_type = other DNA

SEQ ID NO: 32722 - DNA, 110 bp, synthetic construct
  source 1..110: mol_type = other DNA
ctgggaatcctcctgggctccagttaaaggattactgcccttcgccccctcctgaattctgaccttaccttgcaagtgtgtcagaggccgaggacgcaggacaccaggga

SEQ ID NO: 32723 - DNA, 110 bp, synthetic construct
  source 1..110: mol_type = other DNA
attctgaccttaccttgcaagtgtgtcagaggccgaggacgcaggacaccagggagagctcggagaccactcagctttgtaggaagatgctgaggatctcagagtggggg

SEQ ID NO: 32724 - DNA, 110 bp, synthetic construct
  source 1..110: mol_type = other DNA
cactagaacatttggtcataagagcccactacctccaagactggctgcagttgttcttattttgacctgtggcccctttccctgcactccactgatcctgcttttggggt

SEQ ID NO: 32725 - DNA, 110 bp, synthetic construct
  source 1..110: mol_type = other DNA
cttattttgacctgtggcccctttccctgcactccactgatcctgcttttggggtccccccgaccagcctctaggctcttgctctcaaccacaccggcatcgccagtctc

SEQ ID NO: 32726 - DNA, 110 bp, synthetic construct
  source 1..110: mol_type = other DNA
tgatggtggtgatttggatgaacagaaggaaggtttgcacagatcaatctgtccagttaggaacacccatcaccttccctagaggctaatcctggtccattccaagcccg

SEQ ID NO: 32727 - DNA, 110 bp, synthetic construct
  source 1..110: mol_type = other DNA
gttaggaacacccatcaccttccctagaggctaatcctggtccattccaagcccgtaaattccctaggccctagagaagcctcagggaaagccaggcacagaactgaaat

SEQ ID NO: 32728 - DNA, 110 bp, synthetic construct
  source 1..110: mol_type = other DNA
ttctcccgagcccggggacgctggtgagagcagaaagctgccaagggctccaccactaatctgttgcgtggccttgaacacatcctaccagctctaggcctcagccttcc

SEQ ID NO: 32729 - DNA, 110 bp, synthetic construct
  source 1..110: mol_type = other DNA
ctaatctgttgcgtggccttgaacacatcctaccagctctaggcctcagccttccagtctgcgaaacggggctggctcttgccttgaccctttggtcctccttagagtca

SEQ ID NO: 32730 - DNA, 110 bp, synthetic construct
  source 1..110: mol_type = other DNA
ggggtgggggggaaggcgcaggagctgggcccagaaggatgagcacgatttcaacaggcagcgatgggctagaagcagcaacaggagctgagaggcagagggctttgcaa

SEQ ID NO: 32731 - DNA, 110 bp, synthetic construct
  source 1..110: mol_type = other DNA
aggcagcgatgggctagaagcagcaacaggagctgagaggcagagggctttgcaagggcagaggcaggcagcccagagctggtcaggaaaggctgagttgtccagttggg

SEQ ID NO: 32732 - DNA, 110 bp, synthetic construct
  source 1..110: mol_type = other DNA
tgccaccatgcttgagaaaagtcagatggcaccagcaaatcctctgtggtcttccagactcagaaatgaacctgcagctctagggagtttccgtgattcagacctgatga

SEQ ID NO: 32733 - DNA, 110 bp, synthetic construct
  source 1..110: mol_type = other DNA
agactcagaaatgaacctgcagctctagggagtttccgtgattcagacctgatgagcagaggctgagccatgccccgcaggtaggagccgccagggcacttagttactgg

SEQ ID NO: 32734 - DNA, 110 bp, synthetic construct
  source 1..110: mol_type = other DNA
caaagtttgtcttaataatcgtgtgggggaggagccttcttgttcccccttttgttttttaagttggagtttcaatttgtcatgtgcacgttctactgtagtttattcct

SEQ ID NO: 32735 - DNA, 110 bp, synthetic construct
  source 1..110: mol_type = other DNA
tttttaagttggagtttcaatttgtcatgtgcacgttctactgtagtttattcctgaggattataagggatgccagggacatgtaaaatacccaatttaacaaaattcag

SEQ ID NO: 32736 - DNA, 110 bp, synthetic construct
  source 1..110: mol_type = other DNA
ttgcccttgacactctgcctctctgagtgtcactcagtggggacagcttctcccaggctctccccgctcttcctttacagcttgctggccaaggttaagtgacccccact

SEQ ID NO: 32737 - DNA, 110 bp, synthetic construct
  source 1..110: mol_type = other DNA
ggctctccccgctcttcctttacagcttgctggccaaggttaagtgacccccactttggaaactggggttcagagcagaggatctgggatcatatgtctggctcagctgc

SEQ ID NO: 32738 - DNA, 110 bp, synthetic construct
  source 1..110: mol_type = other DNA
attcattgtgctattatttttaaaaagcggggtgggtgtcagtgactcaagggcccttccagctctctgaaaacttaataagaagacttcttgccagacaggcagtgact

SEQ ID NO: 32739 - DNA, 110 bp, synthetic construct; identical to SEQ ID NO: 32738
  source 1..110: mol_type = other DNA

SEQ ID NO: 32740 - DNA, 110 bp, synthetic construct
  source 1..110: mol_type = other DNA
aacagttctcctctgagggaaagaatattcattgttgaggaagacaccttgataccttgcttcagggagaggggataagatccgaaggagctgatgaaagaaacgtttgt

SEQ ID NO: 32741 - DNA, 110 bp, synthetic construct
  source 1..110: mol_type = other DNA
tgaggaagacaccttgataccttgcttcagggagaggggataagatccgaaggagctgatgaaagaaacgtttgtaggagttcccatcgtggcgcactggttaacgaatc

SEQ ID NO: 32742 - DNA, 110 bp, synthetic construct
  source 1..110: mol_type = other DNA
gtggtcattttggaaggggtgttgatgggaatagtctcagcactgaaggtttcccccaggaatcaacacatttgcttttgctgtttttcttttcttttaagttagaaatt

SEQ ID NO: 32743 - DNA, 110 bp, synthetic construct
  source 1..110: mol_type = other DNA
taaactatacatcaaatgccatagtgcctgctgccatgttcacagatccatccggggggagactgagctctgcctcactgcacctgccctacaacttcagcaaggtgctt

SEQ ID NO: 32744 - DNA, 110 bp, synthetic construct
  source 1..110: mol_type = other DNA
ttatgctttaaattcaccaataatagtgagctcatgaaatgctagatattctacgctagggccctaataatgcagagccccaggtccatgctctctccctctgtctctac

SEQ ID NO: 32745 - DNA, 110 bp, synthetic construct
  source 1..110: mol_type = other DNA
aaataataaaaatagtaagtcctttcgtgtacatggaaaaattcctttcacattcatagttgatagtggaagctccatgactggctttggaggtagaacattcagcatca

SEQ ID NO: 32746 - DNA, 110 bp, synthetic construct
  source 1..110: mol_type = other DNA
atagttgatagtggaagctccatgactggctttggaggtagaacattcagcatcactataacttccatcaggcctccacaaaaaccacccaaatgaagtattcattaaaa

SEQ ID NO: 32747 - DNA, 110 bp, synthetic construct
  source 1..110: mol_type = other DNA
ctcctctgcttcctccttgtcctttgagacatttgtccttccttagctttcaaggcagaacactctcttaagtccctctcccactttcttagacatcttcaatttatttt

SEQ ID NO: 32748 - DNA, 110 bp, synthetic construct
  source 1..110: mol_type = other DNA
cagtacctactgtgtacttgaaagttgctgtgagagccgagctttaatgttctcaccactcccataataatgaaaacattaattatatgggatgaagaatatgataacta

SEQ ID NO: 32749 - DNA, 110 bp, synthetic construct
  source 1..110: mol_type = other DNA
tgattctcccagatttttcactgtcaaccttgaactcattacctcagagaacatggtattttaatataatagatcttcaaatattactatggtcttgaaagattatcagt

SEQ ID NO: 32750 - DNA, 110 bp, synthetic construct
  source 1..110: mol_type = other DNA
gtattttaatataatagatcttcaaatattactatggtcttgaaagattatcagtggatttccctctggtgtgaagttccacatcctcatagaaccacaaggactggcct

SEQ ID NO: 32751 - DNA, 110 bp, synthetic construct
  source 1..110: mol_type = other DNA
gcttgaggggatagaaagatggaagcagccatcaaaagcacttaggagaggggctgtaatggcataaggtgcaaaaaccaggggcttcaggccgttggtgtgatgacttg

SEQ ID NO: 32752 - DNA, 110 bp, synthetic construct
  source 1..110: mol_type = other DNA
gtaatggcataaggtgcaaaaaccaggggcttcaggccgttggtgtgatgacttgagttcagctgggagttgaaagcaggaagggtctgatgtgaaaatttttcatcata

SEQ ID NO: 32753 - DNA, 110 bp, synthetic construct
  source 1..110: mol_type = other DNA
tagaacagaaagagatgagagtgaaaatcctgacttgttcctgatcttaaggggaaagattcagtgtttcagcattaactacagtgttatctgtgggtatttcacagctg

SEQ ID NO: 32754 - DNA, 110 bp, synthetic construct
  source 1..110: mol_type = other DNA
aagtagcgagttatttctatttaaacagttttagggactataaaaggatgcattatttcctgattccttgaaaagctgagggatgggatggtggggaatcaagagaataa

SEQ ID NO: 32755 - DNA, 110 bp, synthetic construct
  source 1..110: mol_type = other DNA
tttcctgattccttgaaaagctgagggatgggatggtggggaatcaagagaataaccttcattagcataaaatgaaaagaagtctttattatactttgttttgattccaa

SEQ ID NO: 32756 - DNA, 110 bp, synthetic construct
  source 1..110: mol_type = other DNA
ggagtatgttttgctaatggcttcccaccttgacgggtaaaaggagactagatacagaagcatcccatgtaaattgtctttacaatctggggagtagccatggaatcgat

SEQ ID NO: 32757 - DNA, 110 bp, synthetic construct
  source 1..110: mol_type = other DNA
agaagcatcccatgtaaattgtctttacaatctggggagtagccatggaatcgattttgcttagctatctactctttttagcctatcctgtccatatagggacaataaaa

SEQ ID NO: 32758 - DNA, 110 bp, synthetic construct
  source 1..110: mol_type = other DNA
gatagaatacagagaggctgaaaaaaaggtggaggagaccaaaggggtataaaggtaacaggggatcttgaggtgtttggggacaggggagcaagcagcacaaccatccc

SEQ ID NO: 32759 - DNA, 110 bp, synthetic construct
  source 1..110: mol_type = other DNA
actaagtcaggcacttacattataatttttaaaaaaatccttcaagtgcttatactaaagagacacaccttatgtaaatatttgactagcctacacaaagagtagaactg

SEQ ID NO: 32760 - DNA, 110 bp, synthetic construct; identical to SEQ ID NO: 32759
  source 1..110: mol_type = other DNA

SEQ ID NO: 32761 - DNA, 110 bp, synthetic construct
  source 1..110: mol_type = other DNA
ttgctgtccacaggccagaggaggctgagaattaaagccaagatctaattgttcagctcacagaattataatgcaagtttagtgtacatcccaccaaggtctctattgta

SEQ ID NO: 32762 - DNA, 110 bp, synthetic construct
  source 1..110: mol_type = other DNA
gctcacagaattataatgcaagtttagtgtacatcccaccaaggtctctattgtaaggatttgatcattgtctaggaagcagccagatcctgagactcaagataggtatt

SEQ ID NO: 32763 - DNA, 110 bp, synthetic construct
  source 1..110: mol_type = other DNA
gcaggacctaccagctcacctagtcatccgaagatgctccttcaagaaagagctggagagtatttaaccggctagcttcgacctaacgcctagatgtccaagttacatcc

SEQ ID NO: 32764 - DNA, 110 bp, synthetic construct
  source 1..110: mol_type = other DNA
gagagtatttaaccggctagcttcgacctaacgcctagatgtccaagttacatccactctgaggctcttccttcttaacagaaaccacaaggctgctcacctcccagttc

SEQ ID NO: 32765 - DNA, 110 bp, synthetic construct
  source 1..110: mol_type = other DNA
cgtgtggagatactcgaacgccagaagccatgatcttcatcgttagcgtcatcatccttaccatccccttctctctgatctccatctcgtacatcttcatcgtggccgcc

SEQ ID NO: 32766 - DNA, 110 bp, synthetic construct
  source 1..110: mol_type = other DNA
taaatgaaatgggggggggagtgtttaaagtagaacatacccaagtgatatctagcattgtttaacaatacacaatgtttgcttcaatctttttctcctttgatcctcac

SEQ ID NO: 32767 - DNA, 110 bp, synthetic construct
  source 1..110: mol_type = other DNA
cattgtttaacaatacacaatgtttgcttcaatctttttctcctttgatcctcactacttgctgaggcaggtggtggtgtccttgtattaccacctaagagattgtggct

SEQ ID NO: 32768 - DNA, 110 bp, synthetic construct
  source 1..110: mol_type = other DNA
agtagaaaagtgaacagtcagtgttctgtgatttcagttaatggatgtatttgtgtaaagtgcttgttgtgaatagctcacgctagaatagaatgtggtatgcttctgtg

SEQ ID NO: 32769 - DNA, 110 bp, synthetic construct
  source 1..110: mol_type = other DNA
taaagtgcttgttgtgaatagctcacgctagaatagaatgtggtatgcttctgtgacctaatggaaaaaacactgcagttagttagaagtactgatttttttgtccaggt

SEQ ID NO: 32770 - DNA, 110 bp, synthetic construct
  source 1..110: mol_type = other DNA
cgtggcatgacaattcgtagtggggtggccaacacatccggtttacagggtgaaggtcgtgggtttgatgccaagtatagcttctgctgggcttgcaagtttttctcatt

SEQ ID NO: 32771 - DNA, 110 bp, synthetic construct
  source 1..110: mol_type = other DNA
gggcttagagatacctcccccaccatcaccaccaccagatggctgtggctttccagagatgtatataacttctgcagtggtttcactgtacctagcttgaaccccatgag

SEQ ID NO: 32772 - DNA, 110 bp, synthetic construct
  source 1..110: mol_type = other DNA
gagatgtatataacttctgcagtggtttcactgtacctagcttgaaccccatgagccatgtctaatttatgaattatccccagagcaggaatttcaggccaacaccaagg

SEQ ID NO: 32773 - DNA, 110 bp, synthetic construct
  source 1..110: mol_type = other DNA
gcactgtgtacctcatcatcttcagggtgattcttcgagttgtatataaataacaggaacacctattgtcatgttttaatgacaaagctagaaattttaaggagttccct

SEQ ID NO: 32774 - DNA, 110 bp, synthetic construct
  source 1..110: mol_type = other DNA
ggaacacctattgtcatgttttaatgacaaagctagaaattttaaggagttccctttgtggctctgtgggttaagaactctacagagtgtccatgagaatggggtttcaa

SEQ ID NO: 32775 - DNA, 110 bp, synthetic construct
  source 1..110: mol_type = other DNA
tcaaactatttatacaaaatcagtaacaacatcttgatttcactatgcataactttaaccttagctagacatttagaatgtctttacctcattccttggatcctgaaact

SEQ ID NO: 32776 - DNA, 110 bp, synthetic construct
  source 1..110: mol_type = other DNA
ccaggtaaatgcggatttcctcccgtgccgtttctatacaattaagcagtttctggtgagcttgcaatttgcatttcctgagggagtacaaaataacacaggatataggc

SEQ ID NO: 32777 - DNA, 110 bp, synthetic construct
  source 1..110: mol_type = other DNA
gtgagcttgcaatttgcatttcctgagggagtacaaaataacacaggatataggcaaaggtggctcccagttcctggagacctgttggttcttttactgtagagtccttg

SEQ ID NO: 32778 - DNA, 110 bp, synthetic construct
  source 1..110: mol_type = other DNA
catgacataactgagaacctgaagcactgagaaggtacatgctgacatttcaagatgataagctgagatattaccccaagaccgtgaagcactttcccttttccagtgtt

SEQ ID NO: 32779 - DNA, 110 bp, synthetic construct
  source 1..110: mol_type = other DNA
tgataagctgagatattaccccaagaccgtgaagcactttcccttttccagtgttcagtggaggaaaaatgtggcatgcattagcattgtaacactaccatttcacctga

SEQ ID NO: 32780 - DNA, 110 bp, synthetic construct
  source 1..110: mol_type = other DNA
ttatgtaagtttttgtgacagagggctgtgcatcaaatgatgtattgatggttcacataatccagatctgagcattatcagggtggatcacgtgaccccttacgagatca

SEQ ID NO: 32781 - DNA, 110 bp, synthetic construct
  source 1..110: mol_type = other DNA
ctcttagtcttcccaactgcatgaatataaaatttgacacagtcagtagatgcattgttatgctggccaacaacacacttctcttcctggttctcttcctggttctcttc

SEQ ID NO: 32782 - DNA, 110 bp, synthetic construct
  source 1..110: mol_type = other DNA
atgtgaaatccttggtttggggctatagtgacattgctccaacatatataatcctgaaattattgaaatgaaaagaaatatctgaccaagtgtaccataatggtagataa

SEQ ID NO: 32783 - DNA, 110 bp, synthetic construct; identical to SEQ ID NO: 32782
  source 1..110: mol_type = other DNA

SEQ ID NO: 32784 - DNA, 110 bp, synthetic construct
  source 1..110: mol_type = other DNA
agatatctttagatgtttgaattgaacagacctcagaaattatccaatttaattcccttaggtattccctctggttctctacgctctgattccctccctgcaaacacctc

SEQ ID NO: 32785 - DNA, 110 bp, synthetic construct
  source 1..110: mol_type = other DNA
ccttaggtattccctctggttctctacgctctgattccctccctgcaaacacctctgcagcattcagattcaaacttaagaatgactttggggagttcccttgtgatgca

SEQ ID NO: 32786 - DNA, 110 bp, synthetic construct
  source 1..110: mol_type = other DNA
taaggaaagatgtgggcactttctggaggcgagcgggtgaatggagcccttcatatgtgaggacacggtaaacgttcccatatttaacctttctggttacaatttaaagt

SEQ ID NO: 32787 - DNA, 110 bp, synthetic construct
  source 1..110: mol_type = other DNA
tgtgaggacacggtaaacgttcccatatttaacctttctggttacaatttaaagtaggcagctttcgttgcctccgtgacggataagaaggttgtaatacttaaggtcag

SEQ ID NO: 32788 - DNA, 110 bp, synthetic construct
  source 1..110: mol_type = other DNA
aatacagtggttattcgccctcaggagcaggtaagatgccagatgtagaacaaatatgcatctatgttcatgtgtgctgggtgcctacattcctggcaatgtgctggtcc

SEQ ID NO: 32789 - DNA, 110 bp, synthetic construct
  source 1..110: mol_type = other DNA
atgcatctatgttcatgtgtgctgggtgcctacattcctggcaatgtgctggtccctggggatacagaaatgaattaaggtgatggttaacaagtccttgtcctcaaaaa

SEQ ID NO: 32790 - DNA, 110 bp, synthetic construct
  source 1..110: mol_type = other DNA
aaaaaaaaaaacaaggcctagctcatcagattctgtggactaactgtgaaccagcaaaacatcttgtacttgaaaaataactacaaaagctggaaagctggacacaggtg

SEQ ID NO: 32791 - DNA, 110 bp, synthetic construct
  source 1..110: mol_type = other DNA
ctaactttaagtcttcgaatttatgtcctctctccattccctgtcatttctccttaataactgggcagttctcttctggatttgaattttccataggatgcctcctttct

SEQ ID NO: 32792 - DNA, 110 bp, synthetic construct
  source 1..110: mol_type = other DNA
aataactgggcagttctcttctggatttgaattttccataggatgcctcctttctggcagtctcaagaccaacacactatccacatttttctgtcttgcgactttcctca

SEQ ID NO: 32793 - DNA, 110 bp, synthetic construct
  source 1..110: mol_type = other DNA
agatcaaacccacatcctcatggatactcgtctggttcttaacccactgaagcacaacagaaactccccctctttgcagcttcgataccctttagccaaagaccaccaag

SEQ ID NO: 32794 - DNA, 110 bp, synthetic construct
  source 1..110: mol_type = other DNA
aacagaaactccccctctttgcagcttcgataccctttagccaaagaccaccaagacaatacctgtggtcacacaaagttgggtttgtgggcttgtttccatgggcacct

SEQ ID NO: 32795 - DNA, 110 bp, synthetic construct
  source 1..110: mol_type = other DNA
gacgggaactccttgacatgataaattaatgataaagcctacacatgatcacaaactgtgaagtctcatgaagtatgagaactagtaatggaacacaacctgaaaggctg

SEQ ID NO: 32796 - DNA, 110 bp, synthetic construct
  source 1..110: mol_type = other DNA
tcttggagaactgaaatgaattagatgattctcgcttgctaagctttttcatactggtctcctttattggaatggatgttaaggggtgttgagagttaaaaggaagtagt

SEQ ID NO: 32797 - DNA, 110 bp, synthetic construct
  source 1..110: mol_type = other DNA
aacaagattaatcatttcttctgcgacatccctccactcctggctctctcgtgctccgacacacgcgtgagcaagctggtggtcctctttgtcgtgggcttcaacgtctt

SEQ ID NO: 32798 - DNA, 110 bp, synthetic construct
  source 1..110: mol_type = other DNA
ccgacacacgcgtgagcaagctggtggtcctctttgtcgtgggcttcaacgtctttttcaccctcctggtcatcctcatctcttacctcttcatatatgttgccattcaa

SEQ ID NO: 32799 - DNA, 110 bp, synthetic construct
  source 1..110: mol_type = other DNA
ctaggttagggcaatgtttcccagattgtgagtggtagggtacttgtagaatgtgttttcatttcttctcagaacttgagctcttacactcaattcattactttttcttc

SEQ ID NO: 32800 - DNA, 110 bp, synthetic construct
  source 1..110: mol_type = other DNA
aggatgagttgaccgtctcctttcttaccctcatccttcccttcattactatcatctcctagttaaacaacagagatcaagattgaaagctcctagtttgttagctttct

SEQ ID NO: 32801 - DNA, 110 bp, synthetic construct
  source 1..110: mol_type = other DNA
ctcctagttaaacaacagagatcaagattgaaagctcctagtttgttagctttctttagtctgcaggtctattttggtggtgtgttccaaggttaaaaaatttatatgaa

SEQ ID NO: 32802 - DNA, 110 bp, synthetic construct
  source 1..110: mol_type = other DNA
accatggccgggttacttttaggtgataaggtcatttcctacaatgcatgtgctgctcagatgttcttttttgtagcctttgccactgtggaaaattacctcttggcctc

SEQ ID NO: 32803 - DNA, 110 bp, synthetic construct
  source 1..110: mol_type = other DNA
ctcagatgttcttttttgtagcctttgccactgtggaaaattacctcttggcctccatggcctatgatcgctacgcagcagtatgcaaacctctacattacaccaccacc

SEQ ID NO: 32804 - DNA, 110 bp, synthetic construct
  source 1..110: mol_type = other DNA
ctttgggccgtctttcctcagcctggttcttcttcagagttatcaacactctgctcttgtatgtattttttcacctgcacattgatataccactccctgctaactatagc

SEQ ID NO: 32805 - DNA, 110 bp, synthetic construct
  source 1..110: mol_type = other DNA
acactctgctcttgtatgtattttttcacctgcacattgatataccactccctgctaactatagcttaatctggttatttaattggaaatgaaactttgaatcttgattc

SEQ ID NO: 32806 - DNA, 110 bp, synthetic construct
  source 1..110: mol_type = other DNA
acaaaactgtttatctcacctaactagagaacaagcagttaaagcatccatggggatccagctcagcttgctggggagatcacagcggcatttacactatttgcagtcat

SEQ ID NO: 32807 - DNA, 110 bp, synthetic construct
  source 1..110: mol_type = other DNA
atccagctcagcttgctggggagatcacagcggcatttacactatttgcagtcattctctttgatgaggtacgatccagccacagcatgattcccagggctgcagtctgg

SEQ ID NO: 32808 - DNA, 110 bp, synthetic construct
  source 1..110: mol_type = other DNA
aggaaggaggacaccagcctgtggtccccagctggcagttatctgttgatcatcacatgaaaagttgcccattaactctgtcacagctgctcaacctaggaagtttgtct

SEQ ID NO: 32809 - DNA, 110 bp, synthetic construct
  source 1..110: mol_type = other DNA
catgaaaagttgcccattaactctgtcacagctgctcaacctaggaagtttgtcttaaatgtgatttagttggatttgctgtaagaaaagccactggagaaatgtctcct

SEQ ID NO: 32810 - DNA, 110 bp, synthetic construct
  source 1..110: mol_type = other DNA
taatttgtggctgccaaggaaaagagaggagggaaagagatggactaggagtttgggtttagtagatgtaaactattacgtttagaatggataaataacaagatcctact

SEQ ID NO: 32811 - DNA, 110 bp, synthetic construct
  source 1..110: mol_type = other DNA
aaggaaaagagaggagggaaagagatggactaggagtttgggtttagtagatgtaaactattacgtttagaatggataaataacaagatcctactgtataacacagggaa

SEQ ID NO: 32812 - DNA, 110 bp, synthetic construct
  source 1..110: mol_type = other DNA
ggagttccacttgtggtgcagtggtgcagtggtgcagtggctcgggtcactttggaagtgcaagtttggtccctggctctgcacagtgggttaaagtatctggcattgcc

SEQ ID NO: 32813 - DNA, 110 bp, synthetic construct
  source 1..110: mol_type = other DNA
aagtgcaagtttggtccctggctctgcacagtgggttaaagtatctggcattgccatagctgtgcataggtcgcaatggtggctcagactcagtccctggctagggaact

SEQ ID NO: 32814 - DNA, 110 bp, synthetic construct
  source 1..110: mol_type = other DNA
caaggaaaacataaataatgggatttggaacatttctttggattcaatcagcagtggcatttgtagatagcttttttatttgcttcacccattaactgtgccaggcaacg

SEQ ID NO: 32815 - DNA, 110 bp, synthetic construct
  source 1..110: mol_type = other DNA
ggcatttgtagatagcttttttatttgcttcacccattaactgtgccaggcaacgcactacattttacaggtactagagactaagaccaacatggtccctgccctttcac

SEQ ID NO: 32816 - DNA, 110 bp, synthetic construct
  source 1..110: mol_type = other DNA
gaggccaaaagtaccataaacaaactcaaaagatgaacttgggaaaatatttgcaacccaaatgatggaaaaggactgatttacaccatgtacaattactcttacaaatc

SEQ ID NO: 32817 - DNA, 110 bp, synthetic construct
  source 1..110: mol_type = other DNA
tcaaaagatgaacttgggaaaatatttgcaacccaaatgatggaaaaggactgatttacaccatgtacaattactcttacaaatcaatcgacaaagctcataaaaaatgt

SEQ ID NO: 32818 - DNA, 110 bp, synthetic construct
  source 1..110: mol_type = other DNA
tctgctgcaccacaccaggaactcccatggaacttctacatggagtttagtcagctttcccaaaagtggtaagacttgaacgaggtccagaaggaagcagaatccttgag

SEQ ID NO: 32819 - DNA, 110 bp, synthetic construct
  source 1..110: mol_type = other DNA
tttcccaaaagtggtaagacttgaacgaggtccagaaggaagcagaatccttgagcaaagcagactagggggtgaaaccaatctgatcaaacacagcctggttgcatcat

SEQ ID NO: 32820 - DNA, 110 bp, synthetic construct
  source 1..110: mol_type = other DNA
aaccccagcgcatctgactcagaagtcagccatcaccctctgtcatttcctgtcaccaaatgatatacctgcagccctgcctgtgagattaatttctctgcagcccaggg

SEQ ID NO: 32821 - DNA, 110 bp, synthetic construct
  source 1..110: mol_type = other DNA
ccaaatgatatacctgcagccctgcctgtgagattaatttctctgcagcccagggcctgctggaggaatcccgcagggccacggtgaggctcccaggcctcttaactgca

SEQ ID NO: 32822 - DNA, 110 bp, synthetic construct
  source 1..110: mol_type = other DNA
aaaaagctcaaaacaaaacaaaacaaaacaaacagtggttatttttagagtgtatatgagggtgaaagttaagcctaactttctcccctactttttcttgtccattgtat

SEQ ID NO: 32823 - DNA, 110 bp, synthetic construct
  source 1..110: mol_type = other DNA
atgagggtgaaagttaagcctaactttctcccctactttttcttgtccattgtataaatattctgagtctgtctatctcaatttgtattttttttttctggtgaagaaaa

SEQ ID NO: 32824 - DNA, 110 bp, synthetic construct
  source 1..110: mol_type = other DNA
agggtaatcacattaaaatgagctcattaatggggaccttaatccaatgtgactgatattcttttaaaaagggaacttcaggagttcctgttgtggttaatgaacctgac

SEQ ID NO: 32825 - DNA, 110 bp, synthetic construct
  source 1..110: mol_type = other DNA
tcagaggcaaaccatgtgacatcacttacatgtggaacctaaaaaagacaaactcagagttcccttgtggcgaagcaggttaaggacctgccatggtcactgcagcggct

SEQ ID NO: 32826 - DNA, 110 bp, synthetic construct
  source 1..110: mol_type = other DNA
agagttcccttgtggcgaagcaggttaaggacctgccatggtcactgcagcggctgaggtctctgctaccacactggttctttccctggtctgggaacctccacatgcca

SEQ ID NO: 32827 - DNA, 110 bp, synthetic construct
  source 1..110: mol_type = other DNA
tggtatatccatttgattaaaagtcatgcagccatgaaaagttatggtcttgaataattaactgggagatgttataaaacaatgttagacaagcaaagccgttaactggg

SEQ ID NO: 32828 - DNA, 110 bp, synthetic construct
  source 1..110: mol_type = other DNA
ggtcttgaataattaactgggagatgttataaaacaatgttagacaagcaaagccgttaactgggttgtttgtattgcatgagttctattattttttttttaaagtagga

SEQ ID NO: 32829 - DNA, 110 bp, synthetic construct
  source 1..110: mol_type = other DNA
ttaagcttaaattttaaaccaccctaagaaaagaaacaaatcactttacctagaaatgtcatacaatctaccgtctacccttctctccatcttataggaagtccccaagc

SEQ ID NO: 32830 - DNA, 110 bp, synthetic construct
  source 1..110: mol_type = other DNA
atgtcatacaatctaccgtctacccttctctccatcttataggaagtccccaagcaggaaaagtgattttcccatccctcctctatcttttctgtccagccaaagatcac

SEQ ID NO: 32831 - DNA, 110 bp, synthetic construct
  source 1..110: mol_type = other DNA
aaattaggacagcaatggtgtgcatacagaaagatccctgttctaaagattgagataatatccattctagcatatctagctccccatcggctttaaggaaaattatcatt

SEQ ID NO: 32832 - DNA, 110 bp, synthetic construct
  source 1..110: mol_type = other DNA
taatatccattctagcatatctagctccccatcggctttaaggaaaattatcattgttgtttttacatacattactctaacacggagatcttggaaatctaagtgaacac

SEQ ID NO: 32833 - DNA, 110 bp, synthetic construct
  source 1..110: mol_type = other DNA
cagagtgcccagtttgtattaggacgggtagaaagcttaattatccttgcttcattgtaagctatgtaattaaccagattgacaaaggccaaattccttggcagtttgca

SEQ ID NO: 32834 - DNA, 110 bp, synthetic construct
  source 1..110: mol_type = other DNA
aaaagtaaatcccagtctctttattatggaaaaacatcaactggcagtggggaggaggtaggaaggtaagtgaactccaaccatggtaggggctttctcctccaggcccc

SEQ ID NO: 32835 - DNA, 110 bp, synthetic construct
  source 1..110: mol_type = other DNA
aggtaggaaggtaagtgaactccaaccatggtaggggctttctcctccaggccccaccggatgtctcaaacttctattcctcttcttcgcaatctccataaaatagggag

SEQ ID NO: 32836 - DNA, 110 bp, synthetic construct
  source 1..110: mol_type = other DNA
aggttgccagatggaaaactactcattcagctcattttaacctaggatttcagagcaaggacagcgagagggttctggccagttttctgagatttcatgtctgaggatgc

SEQ ID NO: 32837 - DNA, 110 bp, synthetic construct
  source 1..110: mol_type = other DNA
gaaattcctattgttgtggggtcactggcaacagcaaggaggatggtacgtacacatcacaaaaatcagtttttgtaagctagttgttacttccagattcgctcatggac

SEQ ID NO: 32838 - DNA, 110 bp, synthetic construct
  source 1..110: mol_type = other DNA
ggtttatggatccttttttaaaaagttgatgaaggatgaaggagctcccaccgtggcagagcgggtcaaggattaggcattgtcacagctgtggttgaggtgtaggtcac

SEQ ID NO: 32839 - DNA, 110 bp, synthetic construct
  source 1..110: mol_type = other DNA
gcagagcgggtcaaggattaggcattgtcacagctgtggttgaggtgtaggtcacagctctggcttagatttgatcccaaggatgccacaggtatatccggggtgggggg

SEQ ID NO: 32840 - DNA, 110 bp, synthetic construct
  source 1..110: mol_type = other DNA
tgtcctctcttcccccagtgctgggtctccatcaaaatcctgaggaccctgctcggcaccggccttccttccagggcactcacctgggctgtggaagatctgagagactg

SEQ ID NO: 32841 - DNA, 110 bp, synthetic construct
  source 1..110: mol_type = other DNA
gagcttttcagagtggcccttctcttgcccaggagaaaccgccctacaacctcagggccttcaaccttcgcatcagcttcccggaggagtacccattcaagcccccgacg

SEQ ID NO: 32842 - DNA, 110 bp, synthetic construct
  source 1..110: mol_type = other DNA
ggccttcaaccttcgcatcagcttcccggaggagtacccattcaagcccccgacggtgacgtttacaactaggatctaccaccccaacgtggacagcgaaggccaggtgt

SEQ ID NO: 32843 - DNA, 110 bp, synthetic construct
  source 1..110: mol_type = other DNA
ctaaggtaacccaacactcagaccaacagtcagacctctgactaattctacgaagacacccgtgtcatcctgcctctcagaaaacactactcccagctgcacagatcaaa

SEQ ID NO: 32844 - DNA, 110 bp, synthetic construct
  source 1..110: mol_type = other DNA
acacccgtgtcatcctgcctctcagaaaacactactcccagctgcacagatcaaaaccccacccaagcctgccctgcatcgcggtcagtatgatccagccaaggacttgt

SEQ ID NO: 32845 - DNA, 110 bp, synthetic construct
  source 1..110: mol_type = other DNA
ttgtagggaaaagtggtcactgctcttctttcctaaaggaacagggcctggaagagaaccattagccaggatggagactgtctccaggcttagctcctctggcacagaca

SEQ ID NO: 32846 - DNA, 110 bp, synthetic construct
  source 1..110: mol_type = other DNA
gaaccattagccaggatggagactgtctccaggcttagctcctctggcacagacaactcagggtcggctgtagctgctgcttctggacaaatggggaggggaggtgccat

SEQ ID NO: 32847 - DNA, 110 bp, synthetic construct
  source 1..110: mol_type = other DNA
tgtgccttagggcatttaggtcccttcctggctggacacttggccaggtacaggcgggtactgtgtactcaggacttgccacggagctagcccgccctctggtggctacg

SEQ ID NO: 32848 - DNA, 110 bp, synthetic construct
  source 1..110: mol_type = other DNA
gggtactgtgtactcaggacttgccacggagctagcccgccctctggtggctacgggtggatctacagccccaagggaagccagggatcttaggaaaatgggttgaggat

SEQ ID NO: 32849 - DNA, 110 bp, synthetic construct
  source 1..110: mol_type = other DNA
atgtttgtaatctctgacttcagaaagaatccagtccctttaaagagctcaccatactgagtcagactcatcttggatattctccctttcataagattgactgtgccata

SEQ ID NO: 32850 - DNA, 110 bp, synthetic construct
  source 1..110: mol_type = other DNA
aatgggacatgtatttctgggtggacgtgtatcttggtgtgtacctgagtccgtctttgtaagcctgtgcatcccgcatgcaggtgagtctgtgtttgtacatatgcatg

SEQ ID NO: 32851 - DNA, 110 bp, synthetic construct
  source 1..110: mol_type = other DNA
tttgtaagcctgtgcatcccgcatgcaggtgagtctgtgtttgtacatatgcatgcatctgtgtgtgagtcagcatgtatttgtgttgtttgtgtgaacactttttgttt

SEQ ID NO: 32852 - DNA, 110 bp, synthetic construct
  source 1..110: mol_type = other DNA
tggggcttttgaaacagatggagggagggaggcggagtagactttttatccactcgcaagagcttgtgctgatgatgttgctactttggaaaagaagtcagttcgatgtg

SEQ ID NO: 32853 - DNA, 110 bp, synthetic construct
  source 1..110: mol_type = other DNA
ggagaacattaaccccttacaggctaaaggaaggaggagttgtcttgggggggcggcatggaggggtctgggcaagctggatgcttttccccaaggagctgggggaagtt

SEQ ID NO: 32854 - DNA, 110 bp, synthetic construct
  source 1..110: mol_type = other DNA
aggtaagcattgtgatgtgagagattttgaatagtgtttggccatgaggcttctagtattaaacctttcgttaatgagaggaaaaagctagagtcagtgagcctgtcgct

SEQ ID NO: 32855 - DNA, 110 bp, synthetic construct
  source 1..110: mol_type = other DNA
gtattaaacctttcgttaatgagaggaaaaagctagagtcagtgagcctgtcgcttcttgtctgaaggagggttattgccaaagtctggggaactgacattccatattcc

SEQ ID NO: 32856 - DNA, 110 bp, synthetic construct
  source 1..110: mol_type = other DNA
gcaaatggctttatttcactattttttatgactgagtaatattccattgtgtgtgtatgtgtgtatcacatattttttatccatgtatctatcgatggacacttaggttg

SEQ ID NO: 32857 - DNA, 110 bp, synthetic construct
  source 1..110: mol_type = other DNA
tcactattttttatgactgagtaatattccattgtgtgtgtatgtgtgtatcacatattttttatccatgtatctatcgatggacacttaggttgcctccatgtcttggc

SEQ ID NO: 32858 - DNA, 110 bp, synthetic construct
  source 1..110: mol_type = other DNA
gaatattgcagttaggtaagcatagcccattacaaggactgatcatggagtggcttgaatgcagaggaagtgagcaggcagtagaaggagctggataccaagacgggaag

SEQ ID NO: 32859 - DNA, 110 bp, synthetic construct
  source 1..110: mol_type = other DNA
tggagtggcttgaatgcagaggaagtgagcaggcagtagaaggagctggataccaagacgggaaggcagtgtgtaggctaggggtagtcatggcttcagtgaagccattc

SEQ ID NO: 32860 - DNA, 110 bp, synthetic construct
  source 1..110: mol_type = other DNA
gctatcatgggttgtgttgatattctcctagagctctgaacctgagagcccatcgtgtcccccaccttgtatgggacattatatttgattcagagcacctagtggcacag

SEQ ID NO: 32861 - DNA, 110 bp, synthetic construct
  source 1..110: mol_type = other DNA
aggagctagttaaatttagacagagaaaaaaatctatttcctattttctagctacaaatgaaaaagttgttcagagcccagaaatgtggatacatccccatggtttggaa

SEQ ID NO: 32862 - DNA, 110 bp, synthetic construct
  source 1..110: mol_type = other DNA
aaatgaaaaagttgttcagagcccagaaatgtggatacatccccatggtttggaaggtggcgacatgtgaaaggcagtagaataggccaccctaacatatgccactttga

SEQ ID NO: 32863 - DNA, 110 bp, synthetic construct
  source 1..110: mol_type = other DNA
aacactgtacttttctccgaattgctggggggactccaactcagaataaaggagtgcagtgaagtggatgcactttgtttccactcatgtagaccattttcatcttagaa

SEQ ID NO: 32864 - DNA, 110 bp, synthetic construct
  source 1..110: mol_type = other DNA
aagttatccttacatgtatacaacccaattctatagcatttctaccccaaacctccagcctatggccccatccccaacctgtttcctttggaaaccatgtgtttttcaaa

SEQ ID NO: 32865 - DNA, 110 bp, synthetic construct
  source 1..110: mol_type = other DNA
gtatacaacccaattctatagcatttctaccccaaacctccagcctatggccccatccccaacctgtttcctttggaaaccatgtgtttttcaaagtctgtgagttgata

SEQ ID NO: 32866 - DNA, 110 bp, synthetic construct
  source 1..110: mol_type = other DNA
aatcattatttattcatatctagctgtctgccaaacactggacagattgttttatgtgcccttatattctccaactagcaacaaattcaataacaaattatgagacaaat

SEQ ID NO: 32867 - DNA, 110 bp, synthetic construct; identical to SEQ ID NO: 32866
  source 1..110: mol_type = other DNA

SEQ ID NO: 32868 - DNA, 110 bp, synthetic construct
  source 1..110: mol_type = other DNA
aggaatatgtttcagaagaaggaacaaaataaaactccaggagaactatgtgacacagagagatatgcaatccacccaagaaagacttcagagcaatgaccataaagatg

SEQ ID NO: 32869 - DNA, 110 bp, synthetic construct
  source 1..110: mol_type = other DNA
aaaataaaactccaggagaactatgtgacacagagagatatgcaatccacccaagaaagacttcagagcaatgaccataaagatgatcaaagaactcaggaggagcatgg

SEQ ID NO: 32870 - DNA, 110 bp, synthetic construct
  source 1..110: mol_type = other DNA
aaaaatggagaaaaaaaggaatgtgactgaattcattttaatcggttgtacccagaatcctcaaatgcaaaatgtagtgtttgtggtggttttggttgtatacatgataa

SEQ ID NO: 32871 - DNA, 110 bp, synthetic construct; identical to SEQ ID NO: 32870
  source 1..110: mol_type = other DNA

SEQ ID NO: 32872 - DNA, 110 bp, synthetic construct
  source 1..110: mol_type = other DNA
tttgaatatccacgtacagatcgttccccagaagaagaatgtattcttacatagagccaatacttccaccagggagcagctaaaacttcaagttcatcctaatggattaa

SEQ ID NO: 32873 - DNA, 110 bp, synthetic construct
  source 1..110: mol_type = other DNA
agaatgtattcttacatagagccaatacttccaccagggagcagctaaaacttcaagttcatcctaatggattaaacatgatgaagggaaagttgggttatctcaggtga

SEQ ID NO: 32874 - DNA, 110 bp, synthetic construct
  source 1..110: mol_type = other DNA
ccatgatttgggttcagtcattcttaattgattttatgtattctcaaggactcaagctatagatgctttctgatatcattgtcgacaggaatcagttataggtgaaccac

SEQ ID NO: 32875 - DNA, 110 bp, synthetic construct
  source 1..110: mol_type = other DNA
gctatagatgctttctgatatcattgtcgacaggaatcagttataggtgaaccacaatgactactgtgatcagtattatgatgtgcagttggaggatcaggttagtaaca

SEQ ID NO: 32876 - DNA, 110 bp, synthetic construct
  source 1..110: mol_type = other DNA
tgtttctgtaactttgctgttctcaccacagttcctatttctgttctgaccacagaaagacactattgtgccctgagaaaagacctcagcttgtgcaggtttcccagtta

SEQ ID NO: 32877 - DNA, 110 bp, synthetic construct
  source 1..110: mol_type = other DNA
aaagacactattgtgccctgagaaaagacctcagcttgtgcaggtttcccagttagctagtcagaaagcagtaaagccaagctactaatcagagctcctacatctcagaa

SEQ ID NO: 32878 - DNA, 110 bp, synthetic construct
  source 1..110: mol_type = other DNA
cctcattgttcctcagcgtgtagatcagagggttcagcaaaggcggcatgacaatgttaaagaggatgaccagcttgtcagcagccagggtggtggacggacggatgtac

SEQ ID NO: 32879 - DNA, 110 bp, synthetic construct
  source 1..110: mol_type = other DNA
gttaaagaggatgaccagcttgtcagcagccagggtggtggacggacggatgtacatgaacatggggggcacaaggaccagaaggacggtgatgatatgtgagccacatg

SEQ ID NO: 32880 - DNA, 110 bp, synthetic construct
  source 1..110: mol_type = other DNA
tcttgagttgtacaatattgaggtattatttagagatgaaaatagtgatataacaaccactgtttacttataacctgaagcactactgacttcgagaaatttaactgacc

SEQ ID NO: 32881 - DNA, 110 bp, synthetic construct; identical to SEQ ID NO: 32880
  source 1..110: mol_type = other DNA

SEQ ID NO: 32882 - DNA, 110 bp, synthetic construct
  source 1..110: mol_type = other DNA
aaagtataaggaaaaaagctactggctgctggcaagggcacttcctcagcccctctgttgatttttaagcatctccttcctctttcaagctattctccaccgtctcgcag

SEQ ID NO: 32883 - DNA, 110 bp, synthetic construct
  source 1..110: mol_type = other DNA
agctgatggacacttggctacctccatctcttagctactgtggatcatgtactatgaacatcagtgtacaattccagacccttctgtcaattctcctagaaatatatata

SEQ ID NO: 32884 - DNA, 110 bp, synthetic construct
  source 1..110: mol_type = other DNA
tccaagatacccgaagcctggttcctgatgcctgccctcaagaatcctaacacctctctccagagttctgtttccttgtgtggaaaatgaggactgagttcttgttctca

SEQ ID NO: 32885 - DNA, 110 bp, synthetic construct
  source 1..110: mol_type = other DNA
ctctccagagttctgtttccttgtgtggaaaatgaggactgagttcttgttctcaatgcacagggtcacccctgaaaattctatgaagtctgcaaatgactcctccactg

SEQ ID NO: 32886 - DNA, 110 bp, synthetic construct
  source 1..110: mol_type = other DNA
caagaaacattgactggctcgtgatcgccacccaggccaacatatcaaagagctcggggctccacaggtgagcgttcaagggtcacagtcatggcaaaaaggcaagtttc

SEQ ID NO: 32887 - DNA, 110 bp, synthetic construct
  source 1..110: mol_type = other DNA
ggggctccacaggtgagcgttcaagggtcacagtcatggcaaaaaggcaagtttccaaggattaaaatcacactttgactctacattctcaatgcatttggcccacttcg

SEQ ID NO: 32888 - DNA, 110 bp, synthetic construct; identical to SEQ ID NO: 32886
  source 1..110: mol_type = other DNA

SEQ ID NO: 32889 - DNA, 110 bp, synthetic construct; identical to SEQ ID NO: 32887
  source 1..110: mol_type = other DNA

SEQ ID NO: 32890 - DNA, 110 bp, synthetic construct
  source 1..110: mol_type = other DNA
atgccacggttcccaggacagggtcacgtgcccgcccctctgtttgagggagaccaggagaagctgcttctatcaggtcggatgtgggatgactgggaattgaggaggaa

SEQ ID NO: 32891 - DNA, 110 bp, synthetic construct
  source 1..110: mol_type = other DNA
aggagaagctgcttctatcaggtcggatgtgggatgactgggaattgaggaggaaaccagcagcgtccactaggaggatggagccaggacagccaccagacagcccgcat

SEQ ID NO: 32892 - DNA, 110 bp, synthetic construct
  source 1..110: mol_type = other DNA
gctgtagttcaagcagcagcttcaaggtttctaagacagtcctgacttttaaatgttcctccaagagttcccgtatggctcagtgggttaagaacctgacatagtgtccg

SEQ ID NO: 32893 - DNA, 110 bp, synthetic construct
  source 1..110: mol_type = other DNA
gcagcttcaaggtttctaagacagtcctgacttttaaatgttcctccaagagttcccgtatggctcagtgggttaagaacctgacatagtgtccgcaaggaggcaggttt

SEQ ID NO: 32894 - DNA, 110 bp, synthetic construct
  source 1..110: mol_type = other DNA
cccagaaggaaagagatctagcccagcctgctgcccttctctctgttcccaccactctggccactgatgtgtcaataccaaaagcagatcccccatggctccctgtgtgc

SEQ ID NO: 32895 - DNA, 110 bp, synthetic construct
  source 1..110: mol_type = other DNA
acctggtacatactgaaaattattccaaagtgctattttatgattctgagacggagggtttggccatactcaggaataatccagaggcaagttaaagctcctgatggttt

SEQ ID NO: 32896 - DNA, 110 bp, synthetic construct
  source 1..110: mol_type = other DNA
gggtttggccatactcaggaataatccagaggcaagttaaagctcctgatggtttacagtgaaattaacaaatcccttggtggggtgggtgcactgcacacagcccttaa

SEQ ID NO: 32897 - DNA, 110 bp, synthetic construct
  source 1..110: mol_type = other DNA
aatttatgtcagcaaatttagaaattgaaaacaaatttttaagacgttcaaaactccaggttactaaaaataacattgacccttggtatttgtctgaggactctctgggg

SEQ ID NO: 32898 - DNA, 110 bp, synthetic construct
  source 1..110: mol_type = other DNA
atgacattgatatttttgaagagaacaggacagtcttttttttttttttttttttgtctttctagggccacacccacatcatgtggaaattcacaggctaggatttgaat

SEQ ID NO: 32899 - DNA, 110 bp, synthetic construct
  source 1..110: mol_type = other DNA
ttgaagagaacaggacagtcttttttttttttttttttttgtctttctagggccacacccacatcatgtggaaattcacaggctaggatttgaatcagagctgcagctgc

SEQ ID NO: 32900 - DNA, 110 bp, synthetic construct
  source 1..110: mol_type = other DNA
atttaaaagggaaaatacattccaagcttctttttagttcatcaggtggcattaaggtaaggaaagggggatacatttgttggacctcagcaagcattcagagatgctca

SEQ ID NO: 32901 - DNA, 110 bp, synthetic construct
  source 1..110: mol_type = other DNA
cagagagtccaagtactggtaagtgtttttgttctcacgtattaagatcaaggagccaaagtattagaataatatattttacgtttttatgatgccctggagcttacaaa

SEQ ID NO: 32902 - DNA, 110 bp, synthetic construct
  source 1..110: mol_type = other DNA
gatcaaggagccaaagtattagaataatatattttacgtttttatgatgccctggagcttacaaaacacatttgtatatcttatattgtttggtccacacaaaaaagcat

SEQ ID NO: 32903 - DNA, 110 bp, synthetic construct
  source 1..110: mol_type = other DNA
gtcagatttgtttccactaagccacaacaggaacttcatttcaatagttctcattgtagctcagtggtaaggaacccaactagtatccttgaggacgctggttcaatccc

SEQ ID NO: 32904 - DNA, 110 bp, synthetic construct; identical to SEQ ID NO: 32903
  source 1..110: mol_type = other DNA

SEQ ID NO: 32905 - DNA, 110 bp, synthetic construct
  source 1..110: mol_type = other DNA
gatcccgaagtctaggttcccagccttcctgttggggttctgagtctgagcctggtggggtgtggggaggcgctggctggggaggtgcgggtggtggtgaagcctgcaga

SEQ ID NO: 32906 - DNA, 110 bp, synthetic construct
  source 1..110: mol_type = other DNA
tggggtgtggggaggcgctggctggggaggtgcgggtggtggtgaagcctgcagaccaaggctcaggataaaaaagcaaaagctgtgggtctgggcttgggaggcggaga

SEQ ID NO: 32907 - DNA, 110 bp, synthetic construct
  source 1..110: mol_type = other DNA
gggttgccgctgaggcgtgggttcaatcctcacctgggcaacatggattaaggatccagtgttgctgcagcttttgcataggttacagctgaggtttggattctactcct

SEQ ID NO: 32908 - DNA, 110 bp, synthetic construct
  source 1..110: mol_type = other DNA
tctctgtatttttaagtttcagttcgatttgtgggttttggttaattttatcctcagcctgaccctgatcccaggagcttcttcagtctgtgacaccatttctgtgccac

SEQ ID NO: 32909 - DNA, 110 bp, synthetic construct
  source 1..110: mol_type = other DNA
agcctgaccctgatcccaggagcttcttcagtctgtgacaccatttctgtgccactccctggcctgggggcctcaagtcgaatgagactttacctgccctgcatgggttg

SEQ ID NO: 32910 - DNA, 110 bp, synthetic construct
  source 1..110: mol_type = other DNA
aggcaaggtttctgtttggccttttgaaaccttaatagtaaccccaaagtctcagttgcagctttcaggggaccctggagcaagattccagagccttagtgagtacaggg

SEQ ID NO: 32911 - DNA, 110 bp, synthetic construct
  source 1..110: mol_type = other DNA
ttgcagctttcaggggaccctggagcaagattccagagccttagtgagtacaggggtctccttaggatccagttaaaggccagaatcccaggtctcctctcggcgctgca

SEQ ID NO: 32912 - DNA, 110 bp, synthetic construct; identical to SEQ ID NO: 32910
  source 1..110: mol_type = other DNA

SEQ ID NO: 32913 - DNA, 110 bp, synthetic construct; identical to SEQ ID NO: 32911
  source 1..110: mol_type = other DNA

SEQ ID NO: 32914 - DNA, 110 bp, synthetic construct
  source 1..110: mol_type = other DNA
cggcacacatgcatcaccctcatgcaagaactcgtgttcagaagcccgtgtgagctccatggattcacatccatacccacacacgccctccccagctcactggctctacc

SEQ ID NO: 32915 - DNA, 110 bp, synthetic construct
  source 1..110: mol_type = other DNA
aggaacgcaccccacccaacctctcccatcccaaggtagcacagcaagagcctccacccccatgattcctgccctatggggacggcagccctcttccgtgtgaatctctt

SEQ ID NO: 32916 - DNA, 110 bp, synthetic construct
  source 1..110: mol_type = other DNA
acccccatgattcctgccctatggggacggcagccctcttccgtgtgaatctcttgcttggtttccctcctgcccctcctccgcacctgcagagaagatgctgatggcaa

SEQ ID NO: 32917 - DNA, 110 bp, synthetic construct
  source 1..110: mol_type = other DNA
gctggtggagggaggggcggggctttgctggggtctggggtctggaggaggaggaggaagaggaggagaagctggtttaggaagagacgtttggcctgccgggttggggg

SEQ ID NO: 32918 - DNA, 110 bp, synthetic construct
  source 1..110: mol_type = other DNA
ggaagaggaggagaagctggtttaggaagagacgtttggcctgccgggttgggggcctgggttcggaatttttgcgaagccctagggtatttggtggcgggggaggcaag

SEQ ID NO: 32919 - DNA, 110 bp, synthetic construct
  source 1..110: mol_type = other DNA
aacagagtgggggtgtgaaatggggctggtgggtgcttattaaaagctgtgtgggtggtaaaatgcatgcttgcacacatgaatcagggccagggagagacctcggatca

SEQ ID NO: 32920 - DNA, 110 bp, synthetic construct
  source 1..110: mol_type = other DNA
tggtaaaatgcatgcttgcacacatgaatcagggccagggagagacctcggatcacagtcagacagctgagtggcccagggcactggctgtggagcgggccctctgttca

SEQ ID NO: 32921 - DNA, 110 bp, synthetic construct
  source 1..110: mol_type = other DNA
ggatggggctgggctacatgaagtcgaacaagttcctgcagatgactctgatgagcactcaagctggagaaccactgctttaaatctttgcccctggagagcagcttccc

SEQ ID NO: 32922 - DNA, 110 bp, synthetic construct
  source 1..110: mol_type = other DNA
agtgtggtacttggtccccatgaccctgacccaacctactcaacagggagcagcctggtctgagtcagaagtgaagagcaactcattttatgtgatctttgactcaatgc

SEQ ID NO: 32923 - DNA, 110 bp, synthetic construct
  source 1..110: mol_type = other DNA
gcccagagatccctgataactgctctataacagacgtagagataaaataaagacaaagcatatcagaagatcttcgaggaggcttctttaaggataaaacaaagagaaca

SEQ ID NO: 32924 - DNA, 110 bp, synthetic construct
  source 1..110: mol_type = other DNA
aagaggctgatctgatgcttttccttaattcatctgctgtaatgaaatttgctgggataaaggtgaaggtattagatgagagtgtttgctccgaagaaaagggatcagac

SEQ ID NO: 32925 - DNA, 110 bp, synthetic construct
  source 1..110: mol_type = other DNA
gataaaggtgaaggtattagatgagagtgtttgctccgaagaaaagggatcagactcctcctggctgattacagttttctcaggtgactgagagatctaatgggggcggt

SEQ ID NO: 32926 - DNA, 110 bp, synthetic construct
  source 1..110: mol_type = other DNA
gtgaaagctgtggcccttcactccacaaatgtacactttgcctgcagtttcagtggttcacaggtcctacccctctgtccctttgcaggttaggaatccctgctttatgc

SEQ ID NO: 32927 - DNA, 110 bp, synthetic construct
  source 1..110: mol_type = other DNA
cccatgcatcatgaatacactttacctaataatcatgtgctttcaggctccatgaattcccctattaaaaaagcttccacggagttcccatcgtggtgcagcagaaacaa

SEQ ID NO: 32928 - DNA, 110 bp, synthetic construct; identical to SEQ ID NO: 32927
  source 1..110: mol_type = other DNA

SEQ ID NO: 32929 - DNA, 110 bp, synthetic construct
  source 1..110: mol_type = other DNA
gcaaccaccatctctatatagttccaaaatagtagcatttccattacatcatagtaaaactctgtaccattaagcagtttcttcccactctccctctctttctccccaac

SEQ ID NO: 32930 - DNA, 110 bp, synthetic construct
  source 1..110: mol_type = other DNA
aaaactctgtaccattaagcagtttcttcccactctccctctctttctccccaaccctggcaaccaccaatctgcattctgtctctgtggattgatctattctggatatt

SEQ ID NO: 32931 - DNA, 110 bp, synthetic construct
  source 1..110: mol_type = other DNA
gctgtcatggttgatgtaagtttgcaacaaaatgaatatacgtgaatctcagatgtgaaaacactgagcctgtaaataatcagaagttttcggcgttcccatcatggcac

SEQ ID NO: 32932 - DNA, 110 bp, synthetic construct
  source 1..110: mol_type = other DNA
ccactgagcaatgccagggaccaaacccgcatcctcatggatacagtcgggttcgtaaccagctgagccacaataggaatgacgccaggaatttttttacaccagctttt

SEQ ID NO: 32933 - DNA, 110 bp, synthetic construct
  source 1..110: mol_type = other DNA
taaccagctgagccacaataggaatgacgccaggaatttttttacaccagcttttactcaactggtgtacaagaaatgaaaggttgatggaaaaggaatcctctattgat

SEQ ID NO: 32934 - DNA, 110 bp, synthetic construct
  source 1..110: mol_type = other DNA
ggaactgtacttctctggtgctgatgtgaaaagataatttgtatccagttcatcgtggttgcttcccttttcctcttaggatacaaattgattccttcagtaattcagca

SEQ ID NO: 32935 - DNA, 110 bp, synthetic construct
  source 1..110: mol_type = other DNA
cctcacaccagtcagaatgtccatcattaaaaagtctggaaataaacgctgttgagagggcgtggagaaaagggagctctcctacaatgttggtgggaatgtaagttggt

SEQ ID NO: 32936 - DNA, 110 bp, synthetic construct; identical to SEQ ID NO: 32935
  source 1..110: mol_type = other DNA

SEQ ID NO: 32937 - DNA, 110 bp, synthetic construct
  source 1..110: mol_type = other DNA
aaatcctgctcagccatcttctggcagtgtttccttggttacactgatatcaaatgagggttataaagtgttatgagggttacaatagtgccaatcccataggattgttt

SEQ ID NO: 32938 - DNA, 110 bp, synthetic construct
  source 1..110: mol_type = other DNA
gagggttataaagtgttatgagggttacaatagtgccaatcccataggattgtttgagaattaaatgagttaatacacgtcaggccctctgaacagtacttacagtaata

SEQ ID NO: 32939 - DNA, 110 bp, synthetic construct
  source 1..110: mol_type = other DNA
gtgaagaatacaatggctatgagctcacgtgggcgccactgcctgggtctgtgtcaagcctctagtaattttacctaccattgcttttataccataagtatacaaatatt

SEQ ID NO: 32940 - DNA, 110 bp, synthetic construct
  source 1..110: mol_type = other DNA
gagttcgttgttctcggatgtaaatgtctccaccctgcgggggccaagcaggtgcaggctcaggggcagctcccagactcgccaccgcccctccgccctgcccaccagca

SEQ ID NO: 32941 - DNA, 110 bp, synthetic construct
  source 1..110: mol_type = other DNA
cttgttgggtgattgagcatcagacggcttgttggatgttaaccacggctcacctgaattagagtgtgtgtgttggggaggtagggatggccattaggcgtgggaaagga

SEQ ID NO: 32942 - DNA, 110 bp, synthetic construct
  source 1..110: mol_type = other DNA
gaattagagtgtgtgtgttggggaggtagggatggccattaggcgtgggaaaggatgggcccagctaggaaagggttaagcttgccagggttgtgtatatgaaatggcac

SEQ ID NO: 32943 - DNA, 110 bp, synthetic construct; identical to SEQ ID NO: 32941
  source 1..110: mol_type = other DNA

SEQ ID NO: 32944 - DNA, 110 bp, synthetic construct; identical to SEQ ID NO: 32942
  source 1..110: mol_type = other DNA

SEQ ID NO: 32945 - DNA, 110 bp, synthetic construct
  source 1..110: mol_type = other DNA
agtagggagaagattttccttgggaagatggtcatgagctgttttcaacccttaggagggggaaacagctcattcccatgctaggtgtagattttaagagctgttccact

SEQ ID NO: 32946 - DNA, 110 bp, synthetic construct
  source 1..110: mol_type = other DNA
gagggggaaacagctcattcccatgctaggtgtagattttaagagctgttccacttaaatagaagaactgcctgaccctggggctggctctcagtcagtgatgactcagg

SEQ ID NO: 32947 - DNA, 110 bp, synthetic construct
  source 1..110: mol_type = other DNA
ctcagtgggttaaggatcgggtcttgccacaaggtgcttatggctgtggcctaggccagcagctgcagctccttttcaacccttagcctgggaacttccaaatgctacag

SEQ ID NO: 32948 - DNA, 110 bp, synthetic construct
  source 1..110: mol_type = other DNA
ccagcagctgcagctccttttcaacccttagcctgggaacttccaaatgctacaggtgtggccataaacaaaccaaccaaccaaccaaaagaaaggaagtcccactgtgg

SEQ ID NO: 32949 - DNA, 110 bp, synthetic construct
  source 1..110: mol_type = other DNA
gggattaaagttttaggtctctaacctttgacagagttcctttatatctatattcagagctgattttttgaagcatgtttgaatcttcatattaatttgtgctgggaaat

SEQ ID NO: 32950 - DNA, 110 bp, synthetic construct
  source 1..110: mol_type = other DNA
tggactacatagatttttttgttaatgtgaatgttatggaacctttagttttcaggccttaagtcagagttctttttcattcgtgttgtggagctaaacctgtgtagtca

SEQ ID NO: 32951 - DNA, 110 bp, synthetic construct
  source 1..110: mol_type = other DNA
gccttaagtcagagttctttttcattcgtgttgtggagctaaacctgtgtagtcagaaaagattccaattttcttttggggatagaaatggaggaaaatcttaatttctc

SEQ ID NO: 32952 - DNA, 110 bp, synthetic construct
  source 1..110: mol_type = other DNA
agatgagacagttgtttgcaagttatcagaggtactacccctgagcctcatctgctgctaatagctaagattatctagaactctttttaaatgtccagttttcccttttc

SEQ ID NO: 32953 - DNA, 110 bp, synthetic construct
  source 1..110: mol_type = other DNA
gggggacagcatttcagacagctctccgaagagggagggggaaggtcattgttccataagattttagtgaaggggatagatacaatcaggcacacactttgacagaaggt

SEQ ID NO: 32954 - DNA, 110 bp, synthetic construct; identical to SEQ ID NO: 32953
  source 1..110: mol_type = other DNA

SEQ ID NO: 32955 - DNA, 110 bp, synthetic construct
  source 1..110: mol_type = other DNA
taaaatgaaatagtaaacatgcacaacagtttttaaaatccatgtcaggaagttttgctgattagagcttctcttccataacctgtggtatcaaggattgaataccatct

SEQ ID NO: 32956 - DNA, 110 bp, synthetic construct
  source 1..110: mol_type = other DNA
tcgagggcgacagcccccagcggccgcagccgcccgtctgaaggtacacgtggcattagcgagcagaataaggatcccgggctgcgccccaccccccacccccaactcgc

SEQ ID NO: 32957 - DNA, 110 bp, synthetic construct; identical to SEQ ID NO: 32956
  source 1..110: mol_type = other DNA

SEQ ID NO: 32958 - DNA, 110 bp, synthetic construct
  source 1..110: mol_type = other DNA
tcatgaccctagggcctggcatggggcctagtacacagtagaagcttcataaacaagaacgaatgaaccatctacctgtatctctggactatcactgggttggcctctga

SEQ ID NO: 32959 - DNA, 110 bp, synthetic construct
  source 1..110: mol_type = other DNA
tgattggacttctggcccccccgatctgtgagagaagacgtggttgtggttttccgctgccatggtcacgtctagcaatagctctaggaaatgaatatagtaggtttgaa

SEQ ID NO: 32960 - DNA, 110 bp, synthetic construct
  source 1..110: mol_type = other DNA
cttgcctaaggtcacacagcctggtggaggcagagctggaactagaccccagcgtcctgactgtggtcaggctctctttcctgcacacaacatgagacacaccctccctc

SEQ ID NO: 32961 - DNA, 110 bp, synthetic construct
  source 1..110: mol_type = other DNA
tgaaatctcccgaagagaggattctggaaaataatttaaaagaatttttggaagcactttgccagccaaataaagcgtaggaaatggatttagcctactggtccccagtt

SEQ ID NO: 32962 - DNA, 110 bp, synthetic construct
  source 1..110: mol_type = other DNA
actttgccagccaaataaagcgtaggaaatggatttagcctactggtccccagtttgcaaaccctgagttggaggtacagctctaaccttggcctttgcatgcagaggtc

SEQ ID NO: 32963 - DNA, 110 bp, synthetic construct
  source 1..110: mol_type = other DNA
aagtggacctcttaccacaagcctgctaggcactgcgtgttcttatccccatcttatcccacagatggggaaaccaagtctgtggcaacaagggctttggtagctgcctc

SEQ ID NO: 32964 - DNA, 110 bp, synthetic construct
  source 1..110: mol_type = other DNA
atcccacagatggggaaaccaagtctgtggcaacaagggctttggtagctgcctcagtgctccatttgcaggatgttttttgggagccgctccagggcaggggccatatt

SEQ ID NO: 32965 - DNA, 110 bp, synthetic construct
  source 1..110: mol_type = other DNA
ccaccaacttgattttagccacatgagacactgagcggcagcacccaggtgacctgtgcctggactcccggcccaggagtaccgtgagatcattcatgcatgttgtttga

SEQ ID NO: 32966 - DNA, 110 bp, synthetic construct
  source 1..110: mol_type = other DNA
gtgcctggactcccggcccaggagtaccgtgagatcattcatgcatgttgtttgaagccagcacgtgtgtggcaattggttacgcagagctagaaaacggatacaataag

SEQ ID NO: 32967 - DNA, 110 bp, synthetic construct
  source 1..110: mol_type = other DNA
aggatctgcatggaaacaaacactgtaaagagagtgaaaagacaaatgaaaaactgggaaaatgctcgaagctattatcacagacagaggctaaattctataatatgtaa

SEQ ID NO: 32968 - DNA, 110 bp, synthetic construct
  source 1..110: mol_type = other DNA
gggaaaatgctcgaagctattatcacagacagaggctaaattctataatatgtaaagggctcgacaaatcaataagaaaaggaaaaacagaggaaatgtgggaaaagttt

SEQ ID NO: 32969 - DNA, 110 bp, synthetic construct
  source 1..110: mol_type = other DNA
agtagacacgggaaaagcaggataaatgcttgagtctttccctttatttaccaaccaattatcttttaatggagtgatgctaggagcgaacacttgtagggcacttacag

SEQ ID NO: 32970 - DNA, 110 bp, synthetic construct
  source 1..110: mol_type = other DNA
caattatcttttaatggagtgatgctaggagcgaacacttgtagggcacttacagctcagcaaatgtttttatcaacgccatcgcatttaattatcataacaactgtgag

SEQ ID NO: 32971 - DNA, 110 bp, synthetic construct
  source 1..110: mol_type = other DNA
gcaatccagaaaagatgcgaagtaattttccacttgtactaagcaagcagggatcttcaaattgcaattgccttcaatgcccgcccgggattattcaagggctggtccca

SEQ ID NO: 32972 - DNA, 110 bp, synthetic construct
  source 1..110: mol_type = other DNA
ttcaaattgcaattgccttcaatgcccgcccgggattattcaagggctggtcccacaggtctgtgggttctcaaggctggcaccatctccctctctctccatcccttttc

SEQ ID NO: 32973 - DNA, 110 bp, synthetic construct
  source 1..110: mol_type = other DNA
tttttaagccattggaatcaacttccaacggggattttgccatggatacaagtgtttccaagtaggagaactgcccatcctcatggagaacaactcacagctcatatcct

SEQ ID NO: 32974 - DNA, 110 bp, synthetic construct
  source 1..110: mol_type = other DNA
ttccaagtaggagaactgcccatcctcatggagaacaactcacagctcatatcctactgtaatttattccaagggaaagatggatggcaattgatctccatgagccctga

SEQ ID NO: 32975 - DNA, 110 bp, synthetic construct
  source 1..110: mol_type = other DNA
aggaagggcacgcaatccacacctgacatacagcatccacaggggctggtagtagaataatatcagctggaagggagcggggagcattggtgggtgcctactaagcaaag

SEQ ID NO: 32976 - DNA, 110 bp, synthetic construct
  source 1..110: mol_type = other DNA
aataatatcagctggaagggagcggggagcattggtgggtgcctactaagcaaagggcatcacttggcagccaaggaggggatagagcgttctggtaactcagatggacc

SEQ ID NO: 32977 - DNA, 110 bp, synthetic construct
  source 1..110: mol_type = other DNA
gcctctgaacctgtcagctctgatatttactagcttggtggtcttggcctctctcgactgtggtttcttcttctgcgaagtgggcttgggaggcaggctgagctggcttt

SEQ ID NO: 32978 - DNA, 110 bp, synthetic construct
  source 1..110: mol_type = other DNA
cagttgacatctatgaacttcctgcatggccaggctctgtccttaagaaccaaagaccctgcggccttagagtatgctggtgctagacaggcattagctcatgtgatgcc

SEQ ID NO: 32979 - DNA, 110 bp, synthetic construct
  source 1..110: mol_type = other DNA
accctgcggccttagagtatgctggtgctagacaggcattagctcatgtgatgcctccaaacttggtgagggaggtagtatccttatcatcgggggtggttaatttgatg

SEQ ID NO: 32980 - DNA, 110 bp, synthetic construct
  source 1..110: mol_type = other DNA
ggatgtggaggcacaaggtctggaagctcagcctggctcagctacattgtctcaacaaggcccttttcctctctggaccttggtatccccagcggtgaaatgagggtgtc

SEQ ID NO: 32981 - DNA, 110 bp, synthetic construct
  source 1..110: mol_type = other DNA
agcatctattcctgacagtctttgacctttatctccaaccttgaactcctgggcatcaggagttcaaggctcctgggcatctgtgggagaggcagagctggagaagggct

SEQ ID NO: 32982 - DNA, 110 bp, synthetic construct
  source 1..110: mol_type = other DNA
tcaggagttcaaggctcctgggcatctgtgggagaggcagagctggagaagggctggggcttgatttgcctaaaacagggtgaccagaaccacacaggctctgatggttt

SEQ ID NO: 32983 - DNA, 110 bp, synthetic construct
  source 1..110: mol_type = other DNA
ttttcacgggaagcgaagaaagagaatatacaccaaagaaagatgctggagactgggtgtgttccaagtgtgagatcaatgtctttttattgccatcttaacaaaaatac

SEQ ID NO: 32984 - DNA, 110 bp, synthetic construct
  source 1..110: mol_type = other DNA
cctgcaccacactgtacatggtgagaccagcttccttctgggttgaggggagacagagagggaccctgtaatgggcaggaaggatgagtggcacagaggcaaccgaggcc

SEQ ID NO: 32985 - DNA, 110 bp, synthetic construct
  source 1..110: mol_type = other DNA
gagagggaccctgtaatgggcaggaaggatgagtggcacagaggcaaccgaggccaggaagcaggaacaggcgagaccagaaagagacgtagagaggaccagggaggcaa

SEQ ID NO: 32986 - DNA, 110 bp, synthetic construct
  source 1..110: mol_type = other DNA
gacaacaccaagtccttaacccactgaaccacaatgggaactcctaaaaaataatcttttaatttctcaattgacccattattttgtagtatgtgctctggggattttag

SEQ ID NO: 32987 - DNA, 110 bp, synthetic construct; identical to SEQ ID NO: 32986
  source 1..110: mol_type = other DNA

SEQ ID NO: 32988 - DNA, 110 bp, synthetic construct
  source 1..110: mol_type = other DNA
ctgtggccagactgatctgcacattctgcagccaagtgtgggcaaaacacccaaattgattgataaaggaagctggtcagccaaccagactctgggacagaaaagatcag

SEQ ID NO: 32989 - DNA, 110 bp, synthetic construct
  source 1..110: mol_type = other DNA
ttgattgataaaggaagctggtcagccaaccagactctgggacagaaaagatcaggctcttgcaactaatgtgattttaaattctcattcgtaggcagacctagcattga

SEQ ID NO: 32990 - DNA, 110 bp, synthetic construct
  source 1..110: mol_type = other DNA
ggaggtctgattcagtgagcggggatttgctgtgtgtgactcgtggaacgcttgccctctctgggcctcgttcacgtacatgaagtattattctgtgataatagaggcat

SEQ ID NO: 32991 - DNA, 110 bp, synthetic construct
  source 1..110: mol_type = other DNA
tgcagtcagattcttaacacactgcaccatatggggaacttcaaaggcatgcataatagaaccgcacaataggaattcaaactttaagcccaaattaagaagctctgatg

SEQ ID NO: 32992 - DNA, 110 bp, synthetic construct
  source 1..110: mol_type = other DNA
atagaaccgcacaataggaattcaaactttaagcccaaattaagaagctctgatgcgaaattttgtgaaacctggattctatgcttgaccctgtgtgacttggggcaagt

SEQ ID NO: 32993 - DNA, 110 bp, synthetic construct
  source 1..110: mol_type = other DNA
gcttgcagttcccacgtctgcctttttcactgctatgtgctcggagcccagcacggtccctggcacactggaggtgcttactaagtgaatgagtaatgaaataaacgaat

SEQ ID NO: 32994 - DNA, 110 bp, synthetic construct
  source 1..110: mol_type = other DNA
cacacctccctgcccccggccctgagcccccaaagcactttggctgttcctgtgagctgtttccattgctgctcttgcgtattcgtgtgtgtgtctgtctcccgggagct

SEQ ID NO: 32995 - DNA, 110 bp, synthetic construct
  source 1..110: mol_type = other DNA
gctgtttccattgctgctcttgcgtattcgtgtgtgtgtctgtctcccgggagctgtgggctccccaaggacagaccaggaccctagcagccagcatgttgcctggcaca

SEQ ID NO: 32996 - DNA, 110 bp, synthetic construct
  source 1..110: mol_type = other DNA
ttaaaagcatagatggagacagacagacagagccgtcttggccagagggacctgtctttcatcgtgaccccacccgggggacgtcactggatgtttattcatccaggtct

SEQ ID NO: 32997 - DNA, 110 bp, synthetic construct
  source 1..110: mol_type = other DNA
ctttcatcgtgaccccacccgggggacgtcactggatgtttattcatccaggtcttggctgcactaaggtcaaaggttggggtggggagttcccgtcgtggcgcagtggt

SEQ ID NO: 32998 - DNA, 110 bp, synthetic construct
  source 1..110: mol_type = other DNA
ttatacagagagtaaaattgtgcccttcccctagactcccagagcactgccccacagcatggctgactcgtgcaacgcttagaacacgagcacctgcgtgtgtcctgcca

SEQ ID NO: 32999 - DNA, 110 bp, synthetic construct
  source 1..110: mol_type = other DNA
agggacgggtttacttcagactgggatgggttgagaaggacattgagataacgatgcagctgttcccaggctttggttcacccccactctgtacctgggtcatgtgccag

SEQ ID NO: 33000 - DNA, 110 bp, synthetic construct
  source 1..110: mol_type = other DNA
caccctggaggtgagtttaaaaccccttcataccaacactgagagacaggtttcagccctctgattacagctaagatcacacagccagtctggaaaacagcagatcaata

SEQ ID NO: 33001 - DNA, 110 bp, synthetic construct
  source 1..110: mol_type = other DNA
gccctctgattacagctaagatcacacagccagtctggaaaacagcagatcaataacagatctttcactccaaaactagtcacactagaggctgcaaggaatgaatggat

SEQ ID NO: 33002 - DNA, 110 bp, synthetic construct
  source 1..110: mol_type = other DNA
agaggggctcgggttgcccactcctgttccctggacaacaactgtctgagtcccagctctgaagcttccagttctggtgcccgcctgccgggacactcaaagacacacaa

SEQ ID NO: 33003 - DNA, 110 bp, synthetic construct
  source 1..110: mol_type = other DNA
gctctgaagcttccagttctggtgcccgcctgccgggacactcaaagacacacaagctctgcaggaggctcctttggtcgactgattctcactaaggagtgaatgactga

SEQ ID NO: 33004 - DNA, 110 bp, synthetic construct
  source 1..110: mol_type = other DNA
ctgcctgggtgccagggcatatcagcatgggcatatcaccgtgactctgacagatgtggcctctgcttttgtgatgctcacagatcagggggaaagcggtcaactttggg

SEQ ID NO: 33005 - DNA, 110 bp, synthetic construct
  source 1..110: mol_type = other DNA
ctcaagagaaccccttctctgtgatgggcccccagggactcccaccttagagtaggaggcttggtttacctcttgcctgaggctgggggaggagccttctaggctgaccc

SEQ ID NO: 33006 - DNA, 110 bp, synthetic construct
  source 1..110: mol_type = other DNA
gaggcttggtttacctcttgcctgaggctgggggaggagccttctaggctgaccccggaacctggatggccccgaagagccttggaaaaaccgggtggtgtgatggtgca

SEQ ID NO: 33007 - DNA, 110 bp, synthetic construct
  source 1..110: mol_type = other DNA
actgccacttcagaccagggtcccagccttgggatttggaattgaaagcctagtgctgctgtggccttgggcaagtcagtttagctccaggaggctcagtttcctcatct

SEQ ID NO: 33008 - DNA, 110 bp, synthetic construct
  source 1..110: mol_type = other DNA
aggactccgcgctttcactggtgaggcctgggttcaatccctggcctgggaacccagaccccacagcaagctgctgcacagaacagccaaaagaaaaacaaaaatcaaag

SEQ ID NO: 33009 - DNA, 110 bp, synthetic construct
  source 1..110: mol_type = other DNA
agaccccacagcaagctgctgcacagaacagccaaaagaaaaacaaaaatcaaagaacataccgcttttaaatccagtgacatgagaaagagaatagaataatcttatta

SEQ ID NO: 33010 - DNA, 110 bp, synthetic construct
  source 1..110: mol_type = other DNA
gacgcgtgtcatccacatgtgaccttcctctttttggccagagtggcgagtaactccccagcctctctctcccaggtgctgccactggccagaatggacagacgaaggga

SEQ ID NO: 33011 - DNA, 110 bp, synthetic construct
  source 1..110: mol_type = other DNA
ccccagcctctctctcccaggtgctgccactggccagaatggacagacgaagggacaaaaagctaggatcctggtccacagttaattcctgagcatgtctgcttttcctg

SEQ ID NO: 33012 - DNA, 110 bp, synthetic construct
  source 1..110: mol_type = other DNA
tacagggctagttctgtgtgcacttgggcaggtccctcagctggaaagctgaacccatggccgcagctctgcttttctgggaagttattaacacagtagactctcctgaa

SEQ ID NO: 33013 - DNA, 110 bp, synthetic construct
  source 1..110: mol_type = other DNA
catggccgcagctctgcttttctgggaagttattaacacagtagactctcctgaacaagagttttgctccctcagttggtggaatgagccagtgtcctctctgctcttgt

SEQ ID NO: 33014 - DNA, 110 bp, synthetic construct
  source 1..110: mol_type = other DNA
attaaagaaagaataagaaggttccttctattccaggacctcagcaagattctggaaattcaatggtgagctgagcagacactgtgcctgcccccatggggtttatagtc

SEQ ID NO: 33015 - DNA, 110 bp, synthetic construct
  source 1..110: mol_type = other DNA
aaattcaatggtgagctgagcagacactgtgcctgcccccatggggtttatagtccaaggaaagttgggcagagagtaggggctagaattgagggcttgctctgtttgag

SEQ ID NO: 33016 - DNA, 110 bp, synthetic construct
  source 1..110: mol_type = other DNA
ggatgctcagccaggcttggagaggcagtgacctacacaagccaggctggctcatccagggtggagctggtgtgctagcttctcagggctgccacagcaaagtgctgcaa

SEQ ID NO: 33017 - DNA, 110 bp, synthetic construct
  source 1..110: mol_type = other DNA
ccagggtggagctggtgtgctagcttctcagggctgccacagcaaagtgctgcaaactgggggacttgaaacaacaaaaacaaaaacttattctcttccagtcctaggaa

SEQ ID NO: 33018 - DNA, 110 bp, synthetic construct
  source 1..110: mol_type = other DNA
atccttcggtggctgcctgctctttctcctctcccttcttcttgccccatctcatctcctttcatctcagctgtcagccttgaatggaggcactggtccctgcaggcctc

SEQ ID NO: 33019 - DNA, 110 bp, synthetic construct
  source 1..110: mol_type = other DNA
ctcctttcatctcagctgtcagccttgaatggaggcactggtccctgcaggcctcttgttcatgtatctgagccacctttctcctcactgcattcattcaacaaacatct

SEQ ID NO: 33020 - DNA, 110 bp, synthetic construct; identical to SEQ ID NO: 33018
  source 1..110: mol_type = other DNA

SEQ ID NO: 33021 - DNA, 110 bp, synthetic construct; identical to SEQ ID NO: 33019
  source 1..110: mol_type = other DNA

SEQ ID NO: 33022 - DNA, 110 bp, synthetic construct
  source 1..110: mol_type = other DNA
tagattgtaaacccttgaggataaagaccccgacagacacatatctgtagcccctggccttgacctggccatgaccttcactcgagggaaaggctggcactgcctgaagg

SEQ ID NO: 33023 - DNA, 110 bp, synthetic construct
  source 1..110: mol_type = other DNA
ggccttgacctggccatgaccttcactcgagggaaaggctggcactgcctgaaggcccgaccccagtgacgaccactctctcctgtaggtctggttccagaaccggaggg

SEQ ID NO: 33024 - DNA, 110 bp, synthetic construct
  source 1..110: mol_type = other DNA
cccaccctcttttgcagcaatggattgaccacgttgacagtactggtgcagtcccttggagatgtgagttttcctaactaaacgataaagtcttatgaggacaagccttt

SEQ ID NO: 33025 - DNA, 110 bp, synthetic construct
  source 1..110: mol_type = other DNA
ttggagatgtgagttttcctaactaaacgataaagtcttatgaggacaagccttttgatttttcccttggccttctcccttctgcttggctggaaagcagacatgactgg

SEQ ID NO: 33026 - DNA, 110 bp, synthetic construct
  source 1..110: mol_type = other DNA
aagggaattaggaatatggaaagagggaaaaccagaccgcccctggggtgctggatgggatgggagataccgacgtgaatgcgtggttttcagtacatgtagatagagag

SEQ ID NO: 33027 - DNA, 110 bp, synthetic construct
  source 1..110: mol_type = other DNA
tgggatgggagataccgacgtgaatgcgtggttttcagtacatgtagatagagagagcgatccttctagatagacagagaaataaatgcagatgctgacgtgtggtgctc

SEQ ID NO: 33028 - DNA, 110 bp, synthetic construct
  source 1..110: mol_type = other DNA
gggtctctataattaaagttacattatagctaaccacgcctaaaaatggtttatataaaaaataaagacatgtgcccccttacaagaattgtactataatgaacacaatg

SEQ ID NO: 33029 - DNA, 110 bp, synthetic construct
  source 1..110: mol_type = other DNA
gggtgtggaagcctccagctgtttggggagtggtgaggtggccggggtgaccctagtatcatggggacagtatcctgagtagcatgttagagacggggctggtagaggag

SEQ ID NO: 33030 - DNA, 110 bp, synthetic construct
  source 1..110: mol_type = other DNA
cactgcccggggctggggccagaggaggcccagagaccacataaatgcctgctgtccaggaaccatgcaggagcttccccactggacaccggatctcaggatctgatcta

SEQ ID NO: 33031 - DNA, 110 bp, synthetic construct
  source 1..110: mol_type = other DNA
ccaggaaccatgcaggagcttccccactggacaccggatctcaggatctgatctatctggctcagtttccgcatctgcttaaaaaaccaaccaagcacctcacaggactg

SEQ ID NO: 33032 - DNA, 110 bp, synthetic construct; identical to SEQ ID NO: 33030
  source 1..110: mol_type = other DNA

SEQ ID NO: 33033 - DNA, 110 bp, synthetic construct; identical to SEQ ID NO: 33031
  source 1..110: mol_type = other DNA

SEQ ID NO: 33034 - DNA, 110 bp, synthetic construct
  source 1..110: mol_type = other DNA
tcaggttcatttccactgagccaggaagggaactccatgccttgtttcattttgcaagaagctctcagagttcactttacccctcccagctgcctgctttcttcaggtga

SEQ ID NO: 33035 - DNA, 110 bp, synthetic construct
  source 1..110: mol_type = other DNA
aagaagctctcagagttcactttacccctcccagctgcctgctttcttcaggtgattacgttttcacccaacagttttctcatccctggatggcaaaactgatagatact

SEQ ID NO: 33036 - DNA, 110 bp, synthetic construct
  source 1..110: mol_type = other DNA
ccccatggttctttcatgacaaagcacttcagcatttttctttgtaattctgaaaatactaatgttctttattaagcactgcttatgctttggtggctaatgctattcaa

SEQ ID NO: 33037 - DNA, 110 bp, synthetic construct
  source 1..110: mol_type = other DNA
atactaatgttctttattaagcactgcttatgctttggtggctaatgctattcaaacaatggaatgaccttggggataatttatattccttttcatctttactggtttca

SEQ ID NO: 33038 - DNA, 110 bp, synthetic construct
  source 1..110: mol_type = other DNA
ctaagcccgataatgtaacataaatacataaacatataataccattagcctccgtaataatttaaaatagtatagttatgctcccaattactgactgtcttagggaccca

SEQ ID NO: 33039 - DNA, 110 bp, synthetic construct
  source 1..110: mol_type = other DNA
tttaaaatcaaagctgattaaactgtacacaatcagaatttctgtcacataacaatacatccccatctctatactctactcagaatgggttgttctgaaagccagcctcc

SEQ ID NO: 33040 - DNA, 110 bp, synthetic construct; identical to SEQ ID NO: 33039
  source 1..110: mol_type = other DNA

SEQ ID NO: 33041 - DNA, 110 bp, synthetic construct
  source 1..110: mol_type = other DNA
atttcaggactgtgctgacaatgaatttctatagttatcaattatgccctcatcaaaatgttccaacttggcaaaaatttaaacaatgtaacttataaacataacatcct

SEQ ID NO: 33042 - DNA, 110 bp, synthetic construct
  source 1..110: mol_type = other DNA
tgtcacttcgaaactctgcatgactgggctaggtttggtcattaaaacttctcgtctgtttctatccctcagctccatgcctgctctgccttttaggtgctaattttctg

SEQ ID NO: 33043 - DNA, 110 bp, synthetic construct
  source 1..110: mol_type = other DNA
aagaggactcttttcccctaatgctcccccagagggcctgtgggggcaggctgctgtcatgaagcccttgaaaagaactgagtctcctctctttcagggtcagtgaaggc

SEQ ID NO: 33044 - DNA, 110 bp, synthetic construct
  source 1..110: mol_type = other DNA
gtcatgaagcccttgaaaagaactgagtctcctctctttcagggtcagtgaaggccagaaatgtccagcctgtgtctcttgtctcctctccaagcactaaagaaaatgcc

SEQ ID NO: 33045 - DNA, 110 bp, synthetic construct
  source 1..110: mol_type = other DNA
tctctaggtagtctcagtagctaagtacaagctcagtatttcacaaaagggtgttgttgtcatctgaaggaccagaaagaaagaaaaaccagattaaggttgaaaaactc

SEQ ID NO: 33046 - DNA, 110 bp, synthetic construct
  source 1..110: mol_type = other DNA
gtgatcagtttcagtgaacccattctgcagaccctcagagggagtcaggggacagcagcttctaccacccacgtggagactgggctgagctggctgcaaatgtttcctta

SEQ ID NO: 33047 - DNA, 110 bp, synthetic construct
  source 1..110: mol_type = other DNA
tgccaaagaggggagagaggctgggttataaatggtcttatgcatcatgctgtcaagtctgtctttatgctacaggcattggggagcctttgagcccacctctttccact

SEQ ID NO: 33048 - DNA, 110 bp, synthetic construct
  source 1..110: mol_type = other DNA
agtctgtctttatgctacaggcattggggagcctttgagcccacctctttccactttgtccacaaggatatcataagaggctctgttaaatgctttgtttaaatccagag

SEQ ID NO: 33049 - DNA, 110 bp, synthetic construct
  source 1..110: mol_type = other DNA
ggatgataattggaactctggttgtgcttactctccatatcagcatcagctacacgctatctggtatcattatatatttacgcattatttcttcctaactagacaggcta

SEQ ID NO: 33050 - DNA, 110 bp, synthetic construct
  source 1..110: mol_type = other DNA
gctatctggtatcattatatatttacgcattatttcttcctaactagacaggctaggacttttaagtgtgtgtatctacatgtgtggacatataaaaagaaagagagaaa

SEQ ID NO: 33051 - DNA, 110 bp, synthetic construct
  source 1..110: mol_type = other DNA
caagggccatctaggtaccagagtacctgcccacggggagcttatggttttattgggaactgtccctgtcacactgggtgataagcacgagggttccctctgccaggctg

SEQ ID NO: 33052 - DNA, 110 bp, synthetic construct
  source 1..110: mol_type = other DNA
aaccactgagccaggaaggggaactccaggaattcctttcattcaatgtttatggacggtctcctatattgggttaggtgctggtatgtagctgtaaagaaaatagacac

SEQ ID NO: 33053 - DNA, 110 bp, synthetic construct
  source 1..110: mol_type = other DNA
acggtctcctatattgggttaggtgctggtatgtagctgtaaagaaaatagacacaattcctttcctcaagggactgtgagtctggcattcaacattaaagaaatacttg

SEQ ID NO: 33054 - DNA, 110 bp, synthetic construct
  source 1..110: mol_type = other DNA
agtaccccaaacaatgagtatttgcttaactcgtgtatgtatggattgtctgagaactggctgacatggatttgttttcgctcagtggttctgctgatctcagctatggg

SEQ ID NO: 33055 - DNA, 110 bp, synthetic construct
  source 1..110: mol_type = other DNA
actggctgacatggatttgttttcgctcagtggttctgctgatctcagctatgggcttgtgtgctcgcatgtctgggtgttggctggggatcagatgatctaggctggac

SEQ ID NO: 33056 - DNA, 110 bp, synthetic construct
  source 1..110: mol_type = other DNA
agaggtactcttttctaagtcacccagaagcaacccatgtcagtcaagctgtgttcccttgtggctgcaatcatcctaaaaggatgcttgttctcattcatacaacggag

SEQ ID NO: 33057 - DNA, 110 bp, synthetic construct
  source 1..110: mol_type = other DNA
tggatactagttggattcatttctgctgagccccgatgaggactcccggtgctattttcaaagtgagctgaagtataaggacaatttgaatgagtgagctcagccactgg

SEQ ID NO: 33058 - DNA, 110 bp, synthetic construct
  source 1..110: mol_type = other DNA
gttaaaaaaaagttgatttctgggccctccttcagccccactaaatcaaggctctttggtggctggagtccaggaatccgaggaatctgtattagaaggaataacaacaa

SEQ ID NO: 33059 - DNA, 110 bp, synthetic construct
  source 1..110: mol_type = other DNA
cgccacgacgggaactcctatttttcttattatttgttaccacctatcacattaattaatcatttatttattatcttctcccataccagaacgtaagctttatgagagtg

SEQ ID NO: 33060 - DNA, 110 bp, synthetic construct
  source 1..110: mol_type = other DNA
ttaatcatttatttattatcttctcccataccagaacgtaagctttatgagagtggagctcctcagctcattccttgttatcaatgctgctgagacagtgcctagcttat

SEQ ID NO: 33061 - DNA, 110 bp, synthetic construct
  source 1..110: mol_type = other DNA
tccaaagtagagtgaccttgttgaaccccctcagcattcagtctctagttcagcagggaacctcgaaaggccatgctgtagaagtagggctaatttagctctagaataaa

SEQ ID NO: 33062 - DNA, 110 bp, synthetic construct
  source 1..110: mol_type = other DNA
aggaagattgtggttaatccatcaagctttgtagtcacaggccaggattgttaccacacatcatcactaagtcattgtgatttctgacaattggcttgacctctttgaac

SEQ ID NO: 33063 - DNA, 110 bp, synthetic construct
  source 1..110: mol_type = other DNA
ggtatagcagtagatgggcttggtgatggcaattgtagtgtagctatgctaatacagaggggtatcatcatgcaccattatatctctggaaataaatctggaggttccac

SEQ ID NO: 33064 - DNA, 110 bp, synthetic construct
  source 1..110: mol_type = other DNA
aaatggcattatttcattcttttttggagctgagtactattctattgtatacatgtactacatttttatccatttctctgtatatggacatttaggttgcttccatgtct

SEQ ID NO: 33065 - DNA, 110 bp, synthetic construct; identical to SEQ ID NO: 33064
  source 1..110: mol_type = other DNA

SEQ ID NO: 33066 - DNA, 110 bp, synthetic construct
  source 1..110: mol_type = other DNA
aactgaggatgagagtggttaaataactcacttaggtcacacagctactagggtttagagtgataaattaaatccaagccgtctgatgccagacctcatgttcttaatct

SEQ ID NO: 33067 - DNA, 110 bp, synthetic construct
  source 1..110: mol_type = other DNA
atctcagaatggttaagtcacctgtctgaaatcaaagagctaacatgtaaaactgttctgtcccattgttttgatgatggggagtttcatttttacatttggaaactcaa

SEQ ID NO: 33068 - DNA, 110 bp, synthetic construct
  source 1..110: mol_type = other DNA
aaaagctggcaataataaatgtcatgggattgttgtaaacattgagttaggtggtatatggaaagaaatttgtaggggcttgattgccaattcctatttttaaaggcagt

SEQ ID NO: 33069 - DNA, 110 bp, synthetic construct
  source 1..110: mol_type = other DNA
tttgagtcactcctagcctttgaatcttcccagctgaggctctagactgtatgaagcagagatagacttctcttctgggccctatccaaaatcctgtttcaaaaactctg

SEQ ID NO: 33070 - DNA, 110 bp, synthetic construct
  source 1..110: mol_type = other DNA
aaggatgaaaggtttggttgcccagttttattgttggtttaattaaacagtgtggctgtgaggtctaattgctggaggaattgtgtcaccccaactgtggtgtatggctg

SEQ ID NO: 33071 - DNA, 110 bp, synthetic construct
  source 1..110: mol_type = other DNA
ctgtgaggtctaattgctggaggaattgtgtcaccccaactgtggtgtatggctgccagctctttcattcttagtacccctgaagctcagagtggtggcagtccctggag

SEQ ID NO: 33072 - DNA, 110 bp, synthetic construct
  source 1..110: mol_type = other DNA
aactgaggtagtgagtgaagaatttactcattacttcatggttgtatgtacgtatgtaaggtcatatatactatgcttcaaatatttcttggcacacagtaaatgttgtt

SEQ ID NO: 33073 - DNA, 110 bp, synthetic construct
  source 1..110: mol_type = other DNA
atatgttcagtcaagcacatatctcagtaatgctggtcacaagaaacagatttctcaggtaatgattttagtgctttttctacgtatgggaagatgcaagaatcttgtgt

SEQ ID NO: 33074 - DNA, 110 bp, synthetic construct
  source 1..110: mol_type = other DNA
caggtaatgattttagtgctttttctacgtatgggaagatgcaagaatcttgtgttcattaaacttcttcctgagatatatatcttgctgtccaaggggactgttttgcc

SEQ ID NO: 33075 - DNA, 110 bp, synthetic construct
  source 1..110: mol_type = other DNA
agtagcatcagctcctccctgagggtcctctgactataggccaggtctcatcatgctctgccagtcagtttctcctttctaggaaagaaccaatagtcactttcttctca

SEQ ID NO: 33076 - DNA, 110 bp, synthetic construct
  source 1..110: mol_type = other DNA
ttttacagagtctttagagtttccaatccataagatcatgtcatctgcaaacaggaaaactttacttcttcttttccaattcagatggcaataagttctttttctagctt

SEQ ID NO: 33077 - DNA, 110 bp, synthetic construct
  source 1..110: mol_type = other DNA
aaaactttacttcttcttttccaattcagatggcaataagttctttttctagcttaattgttctgtctaggatttcaagtactatgttgaatacaggtggcaagaatggg

SEQ ID NO: 33078 - DNA, 110 bp, synthetic construct
  source 1..110: mol_type = other DNA
ataaatggcactgtgtaaggcactctgagggatactgtcccataggcaagtggaactcaagttccagaagctcactatctagtctttgggtaagacaagcacagagagca

SEQ ID NO: 33079 - DNA, 110 bp, synthetic construct
  source 1..110: mol_type = other DNA
gcacatatatacatattcttctggttaggtggatgtttttgtgatgcctggggttttttgtttcatgtttttgtagctgcagctgtaaatagaatctgaccatacttccc

SEQ ID NO: 33080 - DNA, 110 bp, synthetic construct
  source 1..110: mol_type = other DNA
ttttgtttcatgtttttgtagctgcagctgtaaatagaatctgaccatacttcccataaagcctactttttgggtgaagttagacttctgactctgaagccttgactgat

SEQ ID NO: 33081 - DNA, 110 bp, synthetic construct; identical to SEQ ID NO: 33079
  source 1..110: mol_type = other DNA

SEQ ID NO: 33082 - DNA, 110 bp, synthetic construct; identical to SEQ ID NO: 33080
  source 1..110: mol_type = other DNA

SEQ ID NO: 33083 - DNA, 110 bp, synthetic construct
  source 1..110: mol_type = other DNA
tctattactaatttttggagtatggatttttttccaacacggttagatttagactgcaagttatgtcttgctttctgtgggtgatggtttgaatctcacttctaaggcct

SEQ ID NO: 33084 - DNA, 110 bp, synthetic construct
  source 1..110: mol_type = other DNA
gcaagttatgtcttgctttctgtgggtgatggtttgaatctcacttctaaggcctttttatactggtttagatctatcctgtgctggtgtagctcaggggttagacaaag

SEQ ID NO: 33085 - DNA, 110 bp, synthetic construct
  source 1..110: mol_type = other DNA
aagacgatttctgtgtcttaagttcctcagcacacttcctatgttccatagatcgacactgttgtcattgcttttttgttgttattaaaagtcaataaattttcatccag

SEQ ID NO: 33086 - DNA, 110 bp, synthetic construct
  source 1..110: mol_type = other DNA
gcatcatttatttcacttcatttatcctacaattaaatacacacaaacacacacgcctttttaccaagtgagtctggctgtttcgatgcatggcagagagaggttaaaaa

SEQ ID NO: 33087 - DNA, 110 bp, synthetic construct
  source 1..110: mol_type = other DNA
cctttttaccaagtgagtctggctgtttcgatgcatggcagagagaggttaaaaacaaagaggggttagtgtttgtttctttaaaaaaggcgattctttgtcctgctgga

SEQ ID NO: 33088 - DNA, 110 bp, synthetic construct; identical to SEQ ID NO: 33086
  source 1..110: mol_type = other DNA

SEQ ID NO: 33089 - DNA, 110 bp, synthetic construct; identical to SEQ ID NO: 33087
  source 1..110: mol_type = other DNA

SEQ ID NO: 33090 - DNA, 110 bp, synthetic construct
  source 1..110: mol_type = other DNA
acaaaaaaaataaataaataaaaacaggggtaatacttctagcctgttaatctaccaggtggctttgagaagtctctgaaataaccatccctgtgctcgtaagtcaggcc

SEQ ID NO: 33091 - DNA, 110 bp, synthetic construct
  source 1..110: mol_type = other DNA
caggtggctttgagaagtctctgaaataaccatccctgtgctcgtaagtcaggccataaggagaacaaattaaatcaaaagaaaagagaatagttgaaagcatgttatga

SEQ ID NO: 33092 - DNA, 110 bp, synthetic construct
  source 1..110: mol_type = other DNA
gaatcgtttgtgtgtctttagaaaggagttcaaatagtatcctgctacatgaagatgatattatgggagggaattagcatcccaatccctgaaatgtctgttggtagcag

SEQ ID NO: 33093 - DNA, 110 bp, synthetic construct
  source 1..110: mol_type = other DNA
tgatattatgggagggaattagcatcccaatccctgaaatgtctgttggtagcagtgatatatcaaatccaagtctggataagaaattcctgactctagaaacatttatc

SEQ ID NO: 33094 - DNA, 110 bp, synthetic construct
  source 1..110: mol_type = other DNA
atgcagtgctcaaaatagaggtctttcgatgacaaggaaaaaaatataccttggtaggaaaaatatttgagtaagataacattgaaaacaaatcagtagttaccatttct

SEQ ID NO: 33095 - DNA, 110 bp, synthetic construct; identical to SEQ ID NO: 33094
  source 1..110: mol_type = other DNA

SEQ ID NO: 33096 - DNA, 110 bp, synthetic construct
  source 1..110: mol_type = other DNA
gattttggttgtccttttcacatttaagtctgctaaatatgctttggggaaatttcatccttatttacttcacagtaaatcaagatgtcccataccaccactaccaaagt

SEQ ID NO: 33097 - DNA, 110 bp, synthetic construct
  source 1..110: mol_type = other DNA
catccttatttacttcacagtaaatcaagatgtcccataccaccactaccaaagtcaacagctctcctgggtgtctcctctgttatatcagccctttttccaacaagtat

SEQ ID NO: 33098 - DNA, 110 bp, synthetic construct
  source 1..110: mol_type = other DNA
tttgtatacatttaaataagacctacttgggaaggaaatttggggaagattacccttgatttataaaatagaaccctctgccacttgctggaggctttagcatggacgaa

SEQ ID NO: 33099 - DNA, 110 bp, synthetic construct
  source 1..110: mol_type = other DNA
gcgttcccggaggcctgagatgagggtgccagtttggttggatgagaactttcttcctgcttccagccaggcccttctcacatggtggaaggagcaagggagctcttgag

SEQ ID NO: 33100 - DNA, 110 bp, synthetic construct
  source 1..110: mol_type = other DNA
cctgcttccagccaggcccttctcacatggtggaaggagcaagggagctcttgaggtctcttttatagaccactagacccattcatgagagtgccactctcaaaaactaa

SEQ ID NO: 33101 - DNA, 110 bp, synthetic construct
  source 1..110: mol_type = other DNA
taacacctaggggccatgtttttcttggaatttccttacaccacttggagttcagagtcattgtgcttgcagtgaacacctgaaacaggatatctttctcttttcatttt

SEQ ID NO: 33102 - DNA, 110 bp, synthetic construct
  source 1..110: mol_type = other DNA
ccttgttaattctctttcctgctatcatagttttattgggatacattatgaaacttgtagaaccataaatagccatgggtcatattgcattgtgaaaacagtgagttcca

SEQ ID NO: 33103 - DNA, 110 bp, synthetic construct; identical to SEQ ID NO: 33102
  source 1..110: mol_type = other DNA

SEQ ID NO: 33104 - DNA, 110 bp, synthetic construct
  source 1..110: mol_type = other DNA
tgggatgtcttccccaataactgacacacagtgaataattcttgcctcatggtttctcatctctatactcaatgaatacaccgttctttcgagtgtggggatattactcc

SEQ ID NO: 33105 - DNA, 110 bp, synthetic construct
  source 1..110: mol_type = other DNA
ctcatctctatactcaatgaatacaccgttctttcgagtgtggggatattactccaaagtgttcatcacctctgatgacactgagatttgtgcatgagaatgtgggtcta

SEQ ID NO: 33106 - DNA, 110 bp, synthetic construct
  source 1..110: mol_type = other DNA
tcacacaatagttatctggtctaatgcatcagtaccactgaggttaagaaatcatgtcttgcagttcataacgtggcccagcgggtcaggaatcagactgcagcagcttg

SEQ ID NO: 33107 - DNA, 110 bp, synthetic construct
  source 1..110: mol_type = other DNA
ccatttaaacttttcaccccaccacgcagacctcgcaggaggtagattttgaacccaggggagcttgatgtaatggggccacgttgtggggaaagaaagatcttagtctt

SEQ ID NO: 33108 - DNA, 110 bp, synthetic construct
  source 1..110: mol_type = other DNA
agtaagaagcataaggctttgccattttatagttgaagaagctgaagttcaggaggattaaacagtatgcttgacatcacaataaaaaaaaaaaaaagttcaaatccaga

SEQ ID NO: 33109 - DNA, 110 bp, synthetic construct
  source 1..110: mol_type = other DNA
gtgccagacctaggagtaggcagcaggaaaacttccagctgaaattagaaggactgggggaggcaaaccaaagagaaacaagactaaggaaatacctcacccagggattt

SEQ ID NO: 33110 - DNA, 110 bp, synthetic construct
  source 1..110: mol_type = other DNA
tattgttgtttgtttgatttttttgctttgttttgatttgtttctcccacttgcagcttctcagcatggtgtctggtgtgtctggtataaagcaataataaaaataatag

SEQ ID NO: 33111 - DNA, 110 bp, synthetic construct
  source 1..110: mol_type = other DNA
aggtcagttccttcttagaccctgaatctctctaagctattcttctgcctttcccttccacttttaaagactcatttgattagattcgtcctatctggagaatccttatt

SEQ ID NO: 33112 - DNA, 110 bp, synthetic construct
  source 1..110: mol_type = other DNA
gacacaaattctggagctttccctaaatctctttctctcttggaagctgaaaaacagccaaaagggggtgtatttcatgagtcagcatgaatgtctccctctggatcctg

SEQ ID NO: 33113 - DNA, 110 bp, synthetic construct
  source 1..110: mol_type = other DNA
tgttatataagcagctaaccccattatagctcaaaggtagcaggtgagaggagatggtggaaggaaagcatactggccattccctctctaactatgagtttgccccttta

SEQ ID NO: 33114 - DNA, 110 bp, synthetic construct
  source 1..110: mol_type = other DNA
agaagtcagaaagatttggactgagatttcattgtaaaggaaagtggaaaggaataaaaatatatcacatatgaataaacaattaggccttactatatagaacagggaac

SEQ ID NO: 33115 - DNA, 110 bp, synthetic construct
  source 1..110: mol_type = other DNA
tggccttgcttattatttaaggatctggcattgccacaaacttgatcacagatgcgacttggatccagtgttgctgggctgtggcataggccacagcagcagctctgatt

SEQ ID NO: 33116 - DNA, 110 bp, synthetic construct
  source 1..110: mol_type = other DNA
gacttggatccagtgttgctgggctgtggcataggccacagcagcagctctgatttgacctctaccccgtgaacttccatatgtcacaggtgtgcctgtaaaaataaaaa

SEQ ID NO: 33117 - DNA, 110 bp, synthetic construct
  source 1..110: mol_type = other DNA
ttaatgactgtctttttaattaagctttttattgtgaaacaattgtacactaacgtgtagttttaagaaataatttggagaaatcctatgtgccctttcctccatccccc

SEQ ID NO: 33118 - DNA, 110 bp, synthetic construct
  source 1..110: mol_type = other DNA
tttccctgtgggtggggctgccctaacccctgctgggttgcccccaagatctggggggtcaacattttgatgcttatctgctaagactcaccagacatggaaagctctcc

SEQ ID NO: 33119 - DNA, 110 bp, synthetic construct
  source 1..110: mol_type = other DNA
ttgagcgaaataaggtttttgtttgtttgtttttctgaagggctgtgctgtacattgtagaatgtttagcaacatccctggtctttacggatctgatacaagcaatagta

SEQ ID NO: 33120 - DNA, 110 bp, synthetic construct
  source 1..110: mol_type = other DNA
gctagctggtaaatctttctctgttgcactcagtatttcatatttattttttcctattaatgtttctccagatagaaattgcaggcctattgtgagtttcattaagcttt

SEQ ID NO: 33121 - DNA, 110 bp, synthetic construct
  source 1..110: mol_type = other DNA
aaatgagatggaaattgagaaagtaaagtgaagcttgatttaagtgagaaataggcctccagaggggaggtgggcagacaggggagcagctgccctgcatgtctttggca

SEQ ID NO: 33122 - DNA, 110 bp, synthetic construct
  source 1..110: mol_type = other DNA
cctccagaggggaggtgggcagacaggggagcagctgccctgcatgtctttggcaagccagttaagagagacatacaaaggaatgagtggaatattcattgggaaggagg

SEQ ID NO: 33123 - DNA, 110 bp, synthetic construct
  source 1..110: mol_type = other DNA
gtaaatttctcaacatccaagagtttggccaagtgccttttcacagcttaggtggtgggtgcagaggggggctgtctacccaggcactgcctgtgaaaatggaatcaagg

SEQ ID NO: 33124 - DNA, 110 bp, synthetic construct
  source 1..110: mol_type = other DNA
cccatggtcagattgtgcaggttagctcctctgcatatctagttttcatgccgcaggaaaaagggaggaaatagacaatacatgattcccttttaagaaattgacataaa

SEQ ID NO: 33125 - DNA, 110 bp, synthetic construct
  source 1..110: mol_type = other DNA
ctataaaattccagtgtggagtagcaggcaggaatgcctctccctgtaaacatcctgctttaaagatgaaagtgaagagaatgagttaaaccataactgacagagtctta

SEQ ID NO: 33126 - DNA, 110 bp, synthetic construct
  source 1..110: mol_type = other DNA
ttgtatgttatgtggcaaacgattcttcatcaagtgtttttcaattcaaggctagagcaactcagtaacaagcatggggcagattctactctttccactgtaggagtgag

SEQ ID NO: 33127 - DNA, 110 bp, synthetic construct
  source 1..110: mol_type = other DNA
catttcctaatatttctatacttaatattgcctaagctcagacttaaaggagtagagattaactggaagagcaagattgaaggaaaagaatgagacctttacctcagtgc

SEQ ID NO: 33128 - DNA, 110 bp, synthetic construct
  source 1..110: mol_type = other DNA
agattaactggaagagcaagattgaaggaaaagaatgagacctttacctcagtgccatgccatttttatctgtcactccagtactggtgggccataaaacattttgcctt

SEQ ID NO: 33129 - DNA, 110 bp, synthetic construct
  source 1..110: mol_type = other DNA
tttgtacacctcacatactacaagatatcagccttgtcagtggattccgtgactagagaacttttaaaacaatgaactcaacacggagttcctactggggctcagcaggt

SEQ ID NO: 33130 - DNA, 110 bp, synthetic construct
  source 1..110: mol_type = other DNA
tctggttaagggaaataagaatagtagaagtaatactaacactactactactaacatccaacattactgagttctttcaatatgtaaggcgtcattctaagctccttcat

SEQ ID NO: 33131 - DNA, 110 bp, synthetic construct
  source 1..110: mol_type = other DNA
cttgactaatgctgaggtagaagtaatcaggacaggtctcatagtaaggtgatattttatcttctttcaaataagagatggatttggttgagaaaggaaacatttctgag

SEQ ID NO: 33132 - DNA, 110 bp, synthetic construct
  source 1..110: mol_type = other DNA
tatagtgttctgtttggaatgttggctaccactctgataattttctgcatgttcgtacattgttgttgttctagctaggtactgaacttttccagggtaagaactgtgct

SEQ ID NO: 33133 - DNA, 110 bp, synthetic construct
  source 1..110: mol_type = other DNA
tctgggttgaacacagacataccacagatatctatgcatctcagtgcaaacagggaagctcgctcctggaaaccgatggagggtacacaaaagtattgaaatattgggag

SEQ ID NO: 33134 - DNA, 110 bp, synthetic construct
  source 1..110: mol_type = other DNA
aagctcgctcctggaaaccgatggagggtacacaaaagtattgaaatattgggagcacacatctacaacacagatatttccatcagtcatcagatctttactgagtacca

SEQ ID NO: 33135 - DNA, 110 bp, synthetic construct; identical to SEQ ID NO: 33133
  source 1..110: mol_type = other DNA

SEQ ID NO: 33136 - DNA, 110 bp, synthetic construct; identical to SEQ ID NO: 33134
  source 1..110: mol_type = other DNA

SEQ ID NO: 33137 - DNA, 110 bp, synthetic construct
  source 1..110: mol_type = other DNA
gctcaaagtgaggactttggttatctccaatggcctttctttttcttttcttttttggccacctcatgatgtatggagtccccagaccagggaacagatctgagtcacag

SEQ ID NO: 33138 - DNA, 110 bp, synthetic construct
  source 1..110: mol_type = other DNA
gcctctaataactatttattcattcattgtctcctttttgccctttaattagtggcatctatttttggtgtttttgacttggcagctctttacctccagtatcaacttct

SEQ ID NO: 33139 - DNA, 110 bp, synthetic construct
  source 1..110: mol_type = other DNA
gagatgcctcaaattacttaattctacatatcttcttttttttttttaatttttaaatttttttggccatgcccatggcatgcagaggttcctggtccagagaccaaacc

SEQ ID NO: 33140 - DNA, 110 bp, synthetic construct
  source 1..110: mol_type = other DNA
ttttttttttttaatttttaaatttttttggccatgcccatggcatgcagaggttcctggtccagagaccaaacccaacctacagcagtgacaatgccaaatctttaaac

SEQ ID NO: 33141 - DNA, 110 bp, synthetic construct
  source 1..110: mol_type = other DNA
aacacacatcaaataataatgagaggaaacttgaaggtgacattcttttaatccagtttatagagacaagtttgttcttgcagtagcacaccatgaaactttaataattt

SEQ ID NO: 33142 - DNA, 110 bp, synthetic construct; identical to SEQ ID NO: 33141
  source 1..110: mol_type = other DNA

SEQ ID NO: 33143 - DNA, 110 bp, synthetic construct
  source 1..110: mol_type = other DNA
aaaagatatttagctggtcaccatgacgcaattaatccacgtgttcatttatgtaaacggttagattcacacagcagcagacttgatttagccgtataattaaccttaga

SEQ ID NO: 33144 - DNA, 110 bp, synthetic construct
  source 1..110: mol_type = other DNA
ccaattaactttgaatgcaagttggcccattaaaaacagagcctatttagcctagctttaaatatatcctatttttcagtatggaattaaagattctgatatttcttagt

SEQ ID NO: 33145 - DNA, 110 bp, synthetic construct
  source 1..110: mol_type = other DNA
cgggactccagaaagttgcattttagcgtctttcttcccactccagaaaccacactccagagtatagctcaagaaatggtatttttgctgtggatggatttggatttgtt

SEQ ID NO: 33146 - DNA, 110 bp, synthetic construct
  source 1..110: mol_type = other DNA
ccagagatacatggtcggtctagcaacttactatatactgattatataagcttctataccacaccatttcgtgagtgatttatatgtttatcggcacaatccttaagtca

SEQ ID NO: 33147 - DNA, 110 bp, synthetic construct
  source 1..110: mol_type = other DNA
aaatcctgtctagatgacacttgtgattttgttatcctcaaataataactgtcgtcttaataatgtctttgtgtaaaggtgtgtgagaagcctcttgccttcaaaaataa

SEQ ID NO: 33148 - DNA, 110 bp, synthetic construct
  source 1..110: mol_type = other DNA
tgtgactcagctgaatgtatttgtgtgtgtgtgacattaattttcagtcaatattgggtaccaatttaaatggggaagacgctttaggaagataataagaaacttggaca

SEQ ID NO: 33149 - DNA, 110 bp, synthetic construct
  source 1..110: mol_type = other DNA
ccaaactttttagagataatttattccaatcttacataatttaggctgaaggattttttaaaattatgatcaaccctcctcactgtgtaaagctagtgaaatattgcctc

SEQ ID NO: 33150 - DNA, 110 bp, synthetic construct
  source 1..110: mol_type = other DNA
ttttaaaattatgatcaaccctcctcactgtgtaaagctagtgaaatattgcctcccaagcacagcaagcagattggtcatgtcttttccacccgggtaaagttgagctc

SEQ ID NO: 33151 - DNA, 110 bp, synthetic construct; identical to SEQ ID NO: 33149
  source 1..110: mol_type = other DNA

SEQ ID NO: 33152 - DNA, 110 bp, synthetic construct; identical to SEQ ID NO: 33150
  source 1..110: mol_type = other DNA

SEQ ID NO: 33153 - DNA, 110 bp, synthetic construct
  source 1..110: mol_type = other DNA
tgacaaacagaccctatgggatccagatcaggaaacttttagctgtcttggaagatgctccaatggaatctttaggccaaaaggaactcttaatttcaatcatttcaaat

SEQ ID NO: 33154 - DNA, 110 bp, synthetic construct
  source 1..110: mol_type = other DNA
tgagagaaaaaaatatatatcaatcaacattagtccaaggaaaacagatttaagagtggttaatatgagtgagggactgaacctaaaaagatgtgtcagcaagactttct

SEQ ID NO: 33155 - DNA, 110 bp, synthetic construct
  source 1..110: mol_type = other DNA
gtggttaatatgagtgagggactgaacctaaaaagatgtgtcagcaagactttcttttaggcggtccatatcctcccttgagagggtgacagtttacctagtcagcagtt

SEQ ID NO: 33156 - DNA, 110 bp, synthetic construct
  source 1..110: mol_type = other DNA
aggatccagtgttgctgcaagctacagcataggtcatagatgcagcttgaatctggtgttgccatgggtgtggagtaggccacggctatagctttgactcatcccctagc

SEQ ID NO: 33157 - DNA, 110 bp, synthetic construct
  source 1..110: mol_type = other DNA
tgcaagctacagcataggtcatagatgcagcttgaatctggtgttgccatgggtgtggagtaggccacggctatagctttgactcatcccctagcctggtaacttccata

SEQ ID NO: 33158 - DNA, 110 bp, synthetic construct
  source 1..110: mol_type = other DNA
caccaggataacataggatacagcatgatgttctctgggaagcccacgaactgagtccaatgagagtgtagtcaattcacagtgtacactcttggttcatccctggatat

SEQ ID NO: 33159 - DNA, 110 bp, synthetic construct
  source 1..110: mol_type = other DNA
acccttttacatgttacaagtatttggtagcctacctgagatataaatcacatggcatcagcttggaacaaattaattattgaaaatgctttaaaatatgattaagaaca

SEQ ID NO: 33160 - DNA, 110 bp, synthetic construct
  source 1..110: mol_type = other DNA
cttgtacattcagggtacagacagatgtataatgacattctacccactattacgtatcgtacatagtagtttctttgccttgaaaattttctgtgctctgtctattcatc

SEQ ID NO: 33161 - DNA, 110 bp, synthetic construct
  source 1..110: mol_type = other DNA
cgctatgccacaatgggaactcctgttttctgttttacattgcacctataagtgaaatcatagggtagttttcttcccctgtctgacatatttcacttagcataacatcc

SEQ ID NO: 33162 - DNA, 110 bp, synthetic construct
  source 1..110: mol_type = other DNA
acatacaaactgattttaaacagaggagaaaactgtatctataaaattatttccgagtttagaatgaaaaacctatttgattgtcccagccccaaattgtaattgaaaca

SEQ ID NO: 33163 - DNA, 110 bp, synthetic construct
  source 1..110: mol_type = other DNA
aaaaaataacagctactggttaatagcaatagtgtagttgctgaataatatttaaatgccataaattaaaatgctctagggtttcatgggcagagatatctttaaaggca

SEQ ID NO: 33164 - DNA, 110 bp, synthetic construct; identical to SEQ ID NO: 33163
  source 1..110: mol_type = other DNA

SEQ ID NO: 33165 - DNA, 110 bp, synthetic construct; identical to SEQ ID NO: 33163
  source 1..110: mol_type = other DNA

SEQ ID NO: 33166 - DNA, 110 bp, synthetic construct; identical to SEQ ID NO: 33163
  source 1..110: mol_type = other DNA

SEQ ID NO: 33167 - DNA, 110 bp, synthetic construct
  source 1..110: mol_type = other DNA
tttggtccagccaattatgtgtacttattatgtggcacagcatttatttcaggctacaaacctgtgatagcagggacagtaagagtgtataaatttgggggaatcttgag

SEQ ID NO: 33168 - DNA, 110 bp, synthetic construct
  source 1..110: mol_type = other DNA
acaaacctgtgatagcagggacagtaagagtgtataaatttgggggaatcttgagcagctctcttcacctatctgaacattaatttctttgtatataaaataagaatgac

SEQ ID NO: 33169 - DNA, 110 bp, synthetic construct
  source 1..110: mol_type = other DNA
tcattgaatgatttagtttaccattcaaatgctttgactaccgtgaaagctttgaaataggctttgttagtggtttttcacatggagctttaaggtcagttccttattta

SEQ ID NO: 33170 - DNA, 110 bp, synthetic construct
  source 1..110: mol_type = other DNA
aactaaagactcctaataaattatggagctactcaataagaccccctgtgggtggagatcaaggatccagccttcttgtttgtttgcttgtttatgcatatgattcccac

SEQ ID NO: 33171 - DNA, 110 bp, synthetic construct
  source 1..110: mol_type = other DNA
atccattctaaatgcaataatctgtgtctacttaccccaaacactgtgtccatcccacttcctcccccttcccctttggcaaacgtaagtctgttctctatgtgtttctt

SEQ ID NO: 33172 - DNA, 110 bp, synthetic construct
  source 1..110: mol_type = other DNA
gtctacttaccccaaacactgtgtccatcccacttcctcccccttcccctttggcaaacgtaagtctgttctctatgtgtttcttttttgtagataggttcatttgtgcc

SEQ ID NO: 33173 - DNA, 110 bp, synthetic construct
  source 1..110: mol_type = other DNA
catattctagagcctcttttctatgcacacgcaattctctcattactttctctgcagtatcctctccagaatcatagtagcagcttcacagaatctccaccacttttgcc

SEQ ID NO: 33174 - DNA, 110 bp, synthetic construct
  source 1..110: mol_type = other DNA
gtctcaaacccacatcctcatagatgtagtaacctagtcaggttcgttaccactgagtcacagtgggagctcctgttatgtaggggtttttttgcattcattcctactca

SEQ ID NO: 33175 - DNA, 110 bp, synthetic construct
  source 1..110: mol_type = other DNA
tttgagggcagagacattttgtatctaactcataacttggtaggtagtatctagagcagtgaacagttctggatacataatggatacttaaagttactggcgtacccact

SEQ ID NO: 33176 - DNA, 110 bp, synthetic construct
  source 1..110: mol_type = other DNA
gcagtgaacagttctggatacataatggatacttaaagttactggcgtacccactgtgactcaaaggatcaggaatccaactgcagcagcctggctgctgaggaggtgta

SEQ ID NO: 33177 - DNA, 110 bp, synthetic construct
  source 1..110: mol_type = other DNA
atgtgggagttcccttgtggtatagtaggttaagagccactgtagtggcttgggtcgctgctatgatctaggttctatccctggcctgggaatttccatatgccattggc

SEQ ID NO: 33178 - DNA, 110 bp, synthetic construct
  source 1..110: mol_type = other DNA
ataaaattaactaaaaatggatcatagccctaaatgtaaaatgcaaagttctaaaactcctagaagatgacataggagaaaatatagatgcccttgagtttgtcaatgga

SEQ ID NO: 33179 - DNA, 110 bp, synthetic construct; identical to SEQ ID NO: 33178
  source 1..110: mol_type = other DNA

SEQ ID NO: 33180 - DNA, 110 bp, synthetic construct
  source 1..110: mol_type = other DNA
tttaaggatgattttatccatttttccagaaaatagaagcagaaggaacatttccaactcattctatgaagctagcattatactaatccccaaacaaggtaaaatgcttc

SEQ ID NO: 33181 - DNA, 110 bp, synthetic construct
  source 1..110: mol_type = other DNA
acaatgatgttggcacatttattcaaagtccttgttttatcctcctgtatcccagagccctgctgtttgttcagaaccaaaatgagcttatattgtaatattaagcagct

SEQ ID NO: 33182 - DNA, 110 bp, synthetic construct
  source 1..110: mol_type = other DNA
agccctgctgtttgttcagaaccaaaatgagcttatattgtaatattaagcagctcctacttagtcaatacaagtaagatgcattgctctataaagttaacttccaattc

SEQ ID NO: 33183 - DNA, 110 bp, synthetic construct
  source 1..110: mol_type = other DNA
tacaaggtagggcagtttctctgaaacaatacaattgaaatgagacaagaagaagctgtagtcctggggggaccaacaagttgaaccaatgttttatggctggactgaac

SEQ ID NO: 33184 - DNA, 110 bp, synthetic construct
  source 1..110: mol_type = other DNA
ctgtagtcctggggggaccaacaagttgaaccaatgttttatggctggactgaactgataggaggctaagaagatagggagaagggtcagaggaggagcatttcagaaaa

SEQ ID NO: 33185 - DNA, 110 bp, synthetic construct
  source 1..110: mol_type = other DNA
tttgttgggccctgcagagagaatgggacacagagtggaattttaacagcagactttgctaggttctttcctgtctgcacacctggctcatgctgtagttatctatgaca

SEQ ID NO: 33186 - DNA, 110 bp, synthetic construct
  source 1..110: mol_type = other DNA
ttgctaggttctttcctgtctgcacacctggctcatgctgtagttatctatgacagctctctcccgaaacaggtcctctttctgcattaggtagtcaggaggaaggtcaa

SEQ ID NO: 33187 - DNA, 110 bp, synthetic construct
  source 1..110: mol_type = other DNA
tacaaattgccttcctggccatggaagtcccacatcacaaccccccaacttcctcttttgttttaagctgaagccactatttaaggtgaaggttttggccattttagcaa

SEQ ID NO: 33188 - DNA, 110 bp, synthetic construct
  source 1..110: mol_type = other DNA
actgacatactggtcactaatgaaaaacacagatacagaaagacacaaaagaatactaaaaaatgagatatttttaaagcatatcgccgcattctccgattccagtaatt

SEQ ID NO: 33189 - DNA, 110 bp, synthetic construct
  source 1..110: mol_type = other DNA
atgttcatagcttatccatgctgataagtttttgatagaaatcactttacattctgcccctaaagcatggaattttggccacggaggaaagccacggaggagtttccatc

SEQ ID NO: 33190 - DNA, 110 bp, synthetic construct
  source 1..110: mol_type = other DNA
aagtttttgatagaaatcactttacattctgcccctaaagcatggaattttggccacggaggaaagccacggaggagtttccatcgtggctcagtggttaacgaatctga

SEQ ID NO: 33191 - DNA, 110 bp, synthetic construct
  source 1..110: mol_type = other DNA
aagcattttctttttttctctctttaacacacatgtagttctctctttctctccttgtctctcttcctgtatctgatattcttagcattatcattccatattatttgctc

SEQ ID NO: 33192 - DNA, 110 bp, synthetic construct
  source 1..110: mol_type = other DNA
tgtctctcttcctgtatctgatattcttagcattatcattccatattatttgctcctctgtatgcacgtaactcttgatttcccaattcgacttaagtatgtttagggta

SEQ ID NO: 33193 - DNA, 110 bp, synthetic construct
  source 1..110: mol_type = other DNA
aagcaagccaattgtattgaagtatgtacaatcaatatatgcatgtgcttcatcatttaaacactaaataccaaggcttatctgaagtctaacaataagatttcaaagtt

SEQ ID NO: 33194 - DNA, 110 bp, synthetic construct
  source 1..110: mol_type = other DNA
atactttaacttgctttgaagtctgctctgtctgaaattaatatagctattcctgctttcttttgattagtgttagcatggtatattcttctccatctattagcttttaa

SEQ ID NO: 33195 - DNA, 110 bp, synthetic construct; identical to SEQ ID NO: 33194
  source 1..110: mol_type = other DNA

SEQ ID NO: 33196 - DNA, 110 bp, synthetic construct
  source 1..110: mol_type = other DNA
tgtttggttaatatctcccagggatttatgataattccagaattttatccccaacccaattcaacaggaatagcttgaaatgggttgtttatgatggtactattttcatt

SEQ ID NO: 33197 - DNA, 110 bp, synthetic construct
  source 1..110: mol_type = other DNA
aagcttcagctagaaaaattcaacatgttgagtgactcaaaaagatgggggctaaggccatccaaaggtttattcattcatttctgtccattatgcacctggttcctggc

SEQ ID NO: 33198 - DNA, 110 bp, synthetic construct
  source 1..110: mol_type = other DNA
acctgcatccttacagacactatgttgggtttttaacccactgaggcacaaggagaactcctttatattaaatttttaaatcttgactactatatcctataagccaaacc

SEQ ID NO: 33199 - DNA, 110 bp, synthetic construct
  source 1..110: mol_type = other DNA
aactcctttatattaaatttttaaatcttgactactatatcctataagccaaacctgacccagtcactgatggcagggtgacccattctccatatagaaccaccttagtc

SEQ ID NO: 33200 - DNA, 110 bp, synthetic construct
  source 1..110: mol_type = other DNA
atctgctaattcacttagtggtgggcagaattcaattccttgcaagctgctgtatggagggcttcggtttcttactggcttttggttgagttagtcctcagctccaggcc

SEQ ID NO: 33201 - DNA, 110 bp, synthetic construct
  source 1..110: mol_type = other DNA
ggagggcttcggtttcttactggcttttggttgagttagtcctcagctccaggccagatggccatttccatatggtagctcacaacatgcaaacatactttttcaaaacc

SEQ ID NO: 33202 - DNA, 110 bp, synthetic construct
  source 1..110: mol_type = other DNA
gtgtagtttcttagggctgccattaaaatttaccacaaccaaggtggcttaaaacaacagatatttgttctccagcaggtgtaagggccggaaatccaaaatcaaggtgt

SEQ ID NO: 33203 - DNA, 110 bp, synthetic construct
  source 1..110: mol_type = other DNA
aacagatatttgttctccagcaggtgtaagggccggaaatccaaaatcaaggtgttaagtgggttggttccttctggaggccttgcaggagaaagtgtttcatgactctc

SEQ ID NO: 33204 - DNA, 110 bp, synthetic construct
  source 1..110: mol_type = other DNA
tgccattgatgaactatgtagccatggacaaattccttaattgcattttccatgactcagttttattcatttgcaaaataggcataacaataaaacatgtatcactgagc

SEQ ID NO: 33205 - DNA, 110 bp, synthetic construct
  source 1..110: mol_type = other DNA
ctcagttttattcatttgcaaaataggcataacaataaaacatgtatcactgagctgtcatgagggctaaaggagttaatataaagtcctcagaggcacatctagtatgt

SEQ ID NO: 33206 - DNA, 110 bp, synthetic construct
  source 1..110: mol_type = other DNA
aagttgttgtcaaaatttactcttgtcatctttgttatatcgagaagagctagctgtcaaaaagattctaacagctttcaacgatttgattaatgccacatatatttcag

SEQ ID NO: 33207 - DNA, 110 bp, synthetic construct; identical to SEQ ID NO: 33206
  source 1..110: mol_type = other DNA

SEQ ID NO: 33208 - DNA, 110 bp, synthetic construct
  source 1..110: mol_type = other DNA
tttcctgtatacttctctgagttcctcctatgaaacactgataataacagaaaacagaacaatgactaatttaactcctcttgtgcattaactcatttaatcctcataaa

SEQ ID NO: 33209 - DNA, 110 bp, synthetic construct
  source 1..110: mol_type = other DNA
tattactttaaggaatggaaaattaagaatttttaccgcaggcttccaggcatagtgtcctacagatgacacctggcatgaacctccagtgataaataaaaacatcttgt

SEQ ID NO: 33210 - DNA, 110 bp, synthetic construct
  source 1..110: mol_type = other DNA
tgtcctacagatgacacctggcatgaacctccagtgataaataaaaacatcttgtcagctgaacactgcgtacatttcaaatttttatgaccttgtttgcctttgccata

SEQ ID NO: 33211 - DNA, 110 bp, synthetic construct
  source 1..110: mol_type = other DNA
caattttggtcgcaccattattttaaatgtttctcaaagtgaaaattgcagccgtggctcattgcatcgatcacttgaaaaataaatttcccccaaattcaaagagccaa

SEQ ID NO: 33212 - DNA, 110 bp, synthetic construct
  source 1..110: mol_type = other DNA
tcccaaaatattaatttaattaattgcttacagttaaggattagggtatcttttccctttgtttatgttgttatatgtttgtcttgggggtagttgtctgttttatgtcg

SEQ ID NO: 33213 - DNA, 110 bp, synthetic construct; identical to SEQ ID NO: 33212
  source 1..110: mol_type = other DNA

SEQ ID NO: 33214 - DNA, 110 bp, synthetic construct
  source 1..110: mol_type = other DNA
atcccctgacagggaggcaggaaagcacagcaaacttttgagcagctgaaggtgtaatttggcctagcatgaatctccttgcatgagatgaaaaggaaaacaagacaaaa

SEQ ID NO: 33215 - DNA, 110 bp, synthetic construct
  source 1..110: mol_type = other DNA
tatgagagccaacctccaaaatggtacccactgacttttatttccatgtatttttcatcttctgtagtcttcagtcaccctcaatggagctaacctctgttaacaatagg

SEQ ID NO: 33216 - DNA, 110 bp, synthetic construct
  source 1..110: mol_type = other DNA
catcttctgtagtcttcagtcaccctcaatggagctaacctctgttaacaataggatattgtggaaatgatactatgtgacttggagagctattccacataatgtgctcc

SEQ ID NO: 33217 - DNA, 110 bp, synthetic construct
  source 1..110: mol_type = other DNA
agtgctggaaagggagaatttttcaccatggcacatgtgttgaaagagcccaggtgagaagaaaaggcttcttttagctgccaggccagggctgacagagaccttgacaa

SEQ ID NO: 33218 - DNA, 110 bp, synthetic construct
  source 1..110: mol_type = other DNA
gagaagaaaaggcttcttttagctgccaggccagggctgacagagaccttgacaatccaagttggaagatgtgtatcacagccaagctccatagactccactgtctctta

SEQ ID NO: 33219 - DNA, 110 bp, synthetic construct
  source 1..110: mol_type = other DNA
gttgggtttggggctgggatgtccaacacttgttggcctgctagtgggtagggctgtgacccagcttgtcctagagcagggtttggccttctgcaggcaagctgggtcct

SEQ ID NO: 33220 - DNA, 110 bp, synthetic construct
  source 1..110: mol_type = other DNA
ctgaaggacacatacactaatttcaggcataaggagacttgcaggctaatagtcgcatcttaggggagctgcaagggaaagaatatccttaggagggaatctcatgagag

SEQ ID NO: 33221 - DNA, 110 bp, synthetic construct
  source 1..110: mol_type = other DNA
agagaagaaagcccaagagtcccaaacaatcactgcatccagctcaaactcaactatcttggactcttgtccagtagtctctcattgcatatggacaaagatccttttgg

SEQ ID NO: 33222 - DNA, 110 bp, synthetic construct
  source 1..110: mol_type = other DNA
gtgagagcaagcggatctaatctacaccttctgacctggaagaaggaagagcagtcttcatacaaagcttaccctatctgttcaaatgtctcgcagtccattaatgcagg

SEQ ID NO: 33223 - DNA, 110 bp, synthetic construct
  source 1..110: mol_type = other DNA
tggtccagtgaagagccttcaagtccctgggcttagtggtctcattttaaggagtctgccagtggggtataggattatgcccagaagatcttgtctctatcagatgctcc

SEQ ID NO: 33224 - DNA, 110 bp, synthetic construct
  source 1..110: mol_type = other DNA
ctgccagtggggtataggattatgcccagaagatcttgtctctatcagatgctccttctgttccagtgaaatccttctgtgcatgttgtcaaacaaatgccttatctaaa

SEQ ID NO: 33225 - DNA, 110 bp, synthetic construct
  source 1..110: mol_type = other DNA
ggtacagccctaaaaatacaaaagacaaaaacaaaacaacaacaacaacaacaacaaacaaacaaaaaaaggaagctatagctaccaagggtatgccttcttcatggtag

SEQ ID NO: 33226 - DNA, 110 bp, synthetic construct
  source 1..110: mol_type = other DNA
aaacaaacaaaaaaaggaagctatagctaccaagggtatgccttcttcatggtagataagaaactcagaaggtctggtggaaacttgccagggctcaaaactgatacact

SEQ ID NO: 33227 - DNA, 110 bp, synthetic construct; identical to SEQ ID NO: 33225
  source 1..110: mol_type = other DNA

SEQ ID NO: 33228 - DNA, 110 bp, synthetic construct; identical to SEQ ID NO: 33226
  source 1..110: mol_type = other DNA

SEQ ID NO: 33229 - DNA, 110 bp, synthetic construct
  source 1..110: mol_type = other DNA
actgcctgcccatttcgaacacagaatatatacagtggagttctccagagcaagtttcctggacttgaaactcagctccgcacactcatttttcgtatttctttggcaaa

SEQ ID NO: 33230 - DNA, 110 bp, synthetic construct
  source 1..110: mol_type = other DNA
taaacttattgtggtaatcatttctcagtgtgtgtgtgtgtgtgtgtgtgtatactgaatcattatgttgaacacctaaaacaaatacaatgttatacgtcaattgtatc

SEQ ID NO: 33231 - DNA, 110 bp, synthetic construct; identical to SEQ ID NO: 33230
  source 1..110: mol_type = other DNA

SEQ ID NO: 33232 - DNA, 110 bp, synthetic construct
  source 1..110: mol_type = other DNA
cgcctgaaccaaatttcaagaagtccacagaatgtgaaattatgggaaagattttgtgtgaaagttaatttagcagggaaaagtgggtcattactggaagatctgtggct

SEQ ID NO: 33233 - DNA, 110 bp, synthetic construct
  source 1..110: mol_type = other DNA
gtgtgaaagttaatttagcagggaaaagtgggtcattactggaagatctgtggctcaaagttgagcacttttaacccctactgtattgattgtaccgtttaagaaacagg

SEQ ID NO: 33234 - DNA, 110 bp, synthetic construct
  source 1..110: mol_type = other DNA
gctgcttggggaagtatctgtgatgtatgtgcaaaggtttggccatgagacaaggggcaccaccaagatgctatctgctgctatagagctgggagaagctttgggttcag

SEQ ID NO: 33235 - DNA, 110 bp, synthetic construct
  source 1..110: mol_type = other DNA
ggcaccaccaagatgctatctgctgctatagagctgggagaagctttgggttcagaaaggtaagttgcagccacacccctccacttgggtgaccaagagctcagagcacg

SEQ ID NO: 33236 - DNA, 110 bp, synthetic construct
  source 1..110: mol_type = other DNA
cattttgcttctttgtttggtttattatcttcccagtagaaggtaagctctgtgggaggcacggactttatctattttattcatttctgtatctcccatacctagaccat

SEQ ID NO: 33237 - DNA, 110 bp, synthetic construct
  source 1..110: mol_type = other DNA
ctgaagtgtttgttctgtgcctgcagtagatcggctattgcaccacttctcttatctgcaaaatgcccatagagcccatgggtttgtccatcctccgctaaggaggatgc

SEQ ID NO: 33238 - DNA, 110 bp, synthetic construct
  source 1..110: mol_type = other DNA
ccaaaatatatgcttccagctactctatccggataccacacaagcagtgtcatctagtaccctctgcaggctccagcccacatgctagactagaccattcctgtgcccat

SEQ ID NO: 33239 - DNA, 110 bp, synthetic construct
  source 1..110: mol_type = other DNA
gattctagaacccatgcccttaattacttcactatgtttctctgttcactgcatgacatatataacacccccccccacacacacacacacactactgtactattgctgtc

SEQ ID NO: 33240 - DNA, 110 bp, synthetic construct
  source 1..110: mol_type = other DNA
ggctttgtctcttgctttcccatcttcgtgggattcctttaaaaactttggatggggcttgaatgctggttgaggcagggctgacttctgaccaccaggcttgtccagga

SEQ ID NO: 33241 - DNA, 110 bp, synthetic construct
  source 1..110: mol_type = other DNA
ggcttgaatgctggttgaggcagggctgacttctgaccaccaggcttgtccaggactgctggagattgctccagcgagggtttcccctcggaggaatcctgcttttccgt

SEQ ID NO: 33242 - DNA, 110 bp, synthetic construct
  source 1..110: mol_type = other DNA
tttgaaagttttctgtaaataatatgaacacagctaatgtattatcggtgaaaaggtggcctgcatagctaactatagtatgtgtgtatgtatgtaaagacatttacttt

SEQ ID NO: 33243 - DNA, 110 bp, synthetic construct
  source 1..110: mol_type = other DNA
gtggcctgcatagctaactatagtatgtgtgtatgtatgtaaagacatttactttcttgctgtttctttagaacaattgacaatcacgttactatgagtctgctacattg

SEQ ID NO: 33244 - DNA, 110 bp, synthetic construct
  source 1..110: mol_type = other DNA
acactctattagtacgctgtgaggtctccacccgcttcgacatgggtagtcttcggagggagggttttcagccacgaagtacggactcggggacatagcatccccgcctt

SEQ ID NO: 33245 - DNA, 110 bp, synthetic construct
  source 1..110: mol_type = other DNA
gagggagggttttcagccacgaagtacggactcggggacatagcatccccgccttgtttttaaaaaaaaaacaaaaacttatctgggagttcctgttgtggctcagtggt

SEQ ID NO: 33246 - DNA, 110 bp, synthetic construct
  source 1..110: mol_type = other DNA
gattccagccaatgacacctgtcatcctgataggcaactcttcctcctctccaacttcaggaaagggggaaaaggcccagaatcatggcctagctagaggaccagaagag

SEQ ID NO: 33247 - DNA, 110 bp, synthetic construct
  source 1..110: mol_type = other DNA
ttcaggaaagggggaaaaggcccagaatcatggcctagctagaggaccagaagagaacggcagcagctggcggggagggagagatcaggggtcccatgcctgaggttcca

SEQ ID NO: 33248 - DNA, 110 bp, synthetic construct
  source 1..110: mol_type = other DNA
tgcgccaggacgggaactcctaaacacgttttaaatgcaatcaactgccatgttgagaccatgatgaaaagatattagaggaaacaacatggaagtaagatattgatgtg

SEQ ID NO: 33249 - DNA, 110 bp, synthetic construct; identical to SEQ ID NO: 33248
  source 1..110: mol_type = other DNA

SEQ ID NO: 33250 - DNA, 110 bp, synthetic construct
  source 1..110: mol_type = other DNA
aaaaataaaaaacaagattcacaagttgctcaagtcatcaaaagaagggccatttgaagcagaaggctgtgggtgtctgaaagaatcaaatccaattctgttgctggaat

SEQ ID NO: 33251 - DNA, 110 bp, synthetic construct
  source 1..110: mol_type = other DNA
gcgatcaggggctcccaccagcaggtgcagaagtgtccgttcctcactcctctatgcacacaatcttgtgttcactccaaagcgctcttcaggaatctttttaagccccc

SEQ ID NO: 33252 - DNA, 110 bp, synthetic construct
  source 1..110: mol_type = other DNA
gctggcactttctaggtgtttctccaccgacacagcccttctgaacggcgtgagcttttccttagcagactcagaaacctgtttgtgtttctcatcaacccagtgggatg

SEQ ID NO: 33253 - DNA, 110 bp, synthetic construct
  source 1..110: mol_type = other DNA
ttttccttagcagactcagaaacctgtttgtgtttctcatcaacccagtgggatggatctgccgacagtgggacccacttcgactttgtcacataaagcctctggccgtc

SEQ ID NO: 33254 - DNA, 110 bp, synthetic construct
  source 1..110: mol_type = other DNA
accaagagtcgagactagataaactatttatccaacaagcagacaaaggaataaatgaataaagtgggccctttaagttggagagggcttttaataaaccagcttctact

SEQ ID NO: 33255 - DNA, 110 bp, synthetic construct
  source 1..110: mol_type = other DNA
tgaataaagtgggccctttaagttggagagggcttttaataaaccagcttctacttacaaggaaaacccgtaggcaaaagagagaaaaatttcatttccaccatgcggag

SEQ ID NO: 33256 - DNA, 110 bp, synthetic construct
  source 1..110: mol_type = other DNA
ccaccctccagaggcagtctggctttttttctctttaaatctgaacattttaatattaggtaacctaaaaaaataacgagcctggctgagctactcaggtctgtgaatag

SEQ ID NO: 33257 - DNA, 110 bp, synthetic construct
  source 1..110: mol_type = other DNA
ttaggtaacctaaaaaaataacgagcctggctgagctactcaggtctgtgaatagagacaaagcagttactcatctctggagcaaataaatacgtcaatggtggcggctc

SEQ ID NO: 33258 - DNA, 110 bp, synthetic construct
  source 1..110: mol_type = other DNA
cccaactttagcatctttcgcacagagggggccagctgctcagaggacacaagcacacgcgggtaaagagccacacctgggattcctccttatcaatggctcctcataaa

SEQ ID NO: 33259 - DNA, 110 bp, synthetic construct
  source 1..110: mol_type = other DNA
tgctccagaagcacggtctctccaactacagtgtacaaacagatggcctaggacctcattaaaatgctttaggtcaaaaatggagcttaggattccacattcctaacagg

SEQ ID NO: 33260 - DNA, 110 bp, synthetic construct
  source 1..110: mol_type = other DNA
cctggtacccaaattcagggaagccatcaagggctaaagcaaccttgtaagctaaaagaatccttctccctccaacccatggcacaaaggcagttaagagaaactactct

SEQ ID NO: 33261 - DNA, 110 bp, synthetic construct
  source 1..110: mol_type = other DNA
aagaatccttctccctccaacccatggcacaaaggcagttaagagaaactactctgaaagtgggtgtttaaaatttaaatgtttcaatgagctgactcttccaggctcag

SEQ ID NO: 33262 - DNA, 110 bp, synthetic construct
  source 1..110: mol_type = other DNA
gtttagtctttaccccattatttccctcccatcactcaagtcaccctttccatgtggcattgtgatgtgtttattttacgaaaccggccttttacactctgttttgctcc

SEQ ID NO: 33263 - DNA, 110 bp, synthetic construct
  source 1..110: mol_type = other DNA
ggcattgtgatgtgtttattttacgaaaccggccttttacactctgttttgctcccccgcctcccttggtttccggatccactaaatggcctttggatggtgccctaggt

SEQ ID NO: 33264 - DNA, 110 bp, synthetic construct
  source 1..110: mol_type = other DNA
tttgtaggatttatgagtctgtactatggctgcccattcatgtgtcattttccgcaccaaaccacagctcccaaaggctgggcattctggtaagacttcctttgatattt

SEQ ID NO: 33265 - DNA, 110 bp, synthetic construct
  source 1..110: mol_type = other DNA
agttaaaacagtgacatggccagaactaccatgtacaagggtcactcagtgcagcagaatagaggagcgactgggaaggaagggactgaacacagggagagtagtctgga

SEQ ID NO: 33266 - DNA, 110 bp, synthetic construct
  source 1..110: mol_type = other DNA
agcatggtccagttctgatgagagctctctctctgattcatagatggccagcttctcactttgtcctcacatggtgggggaatttgggggaacactaacatttagtctat

SEQ ID NO: 33267 - DNA, 110 bp, synthetic construct
  source 1..110: mol_type = other DNA
tcactttgtcctcacatggtgggggaatttgggggaacactaacatttagtctatagcaatggctcacctgagatttgatgctgtacagtctggccctagacactatatg

SEQ ID NO: 33268 - DNA, 110 bp, synthetic construct
  source 1..110: mol_type = other DNA
tctgattggacgttctctgcttgttgtgtgacttgccagaggttggccctcacggtaagaagactgggtaagacctggctgtcttactgggactcctagttgttcatatt

SEQ ID NO: 33269 - DNA, 110 bp, synthetic construct
  source 1..110: mol_type = other DNA
tttactgccttggccaggacaaaggacagcttccatggcccttcctataaaaacgacttttcccccatcaggcagggaaccaatgtgaaggatctcttaaagatattcat

SEQ ID NO: 33270 - DNA, 110 bp, synthetic construct
  source 1..110: mol_type = other DNA
gccctctctccttccatctgctgcttcccctggtttatctcatctgctgaactggggaccagagcagggccttactgatgccatctgctgagatcaaactctggggcaca

SEQ ID NO: 33271 - DNA, 110 bp, synthetic construct
  source 1..110: mol_type = other DNA
ggaccagagcagggccttactgatgccatctgctgagatcaaactctggggcacaaagcagggagcagaggctagagagaggtgctggggtggggtagatggcaaatacc

SEQ ID NO: 33272 - DNA, 110 bp, synthetic construct
  source 1..110: mol_type = other DNA
gaaaggtcagacttgacttacaatgaagaacaatagctcttaagaggcaaccagggacccctatctctcttcaaggcagtttggggcctgaatctgccagtcctaccatc

SEQ ID NO: 33273 - DNA, 110 bp, synthetic construct
  source 1..110: mol_type = other DNA
gacccctatctctcttcaaggcagtttggggcctgaatctgccagtcctaccatcgtgctcttcattgctaaaagtctccagtgtcttgcttttcaatgtgctttcaaac

SEQ ID NO: 33274 - DNA, 110 bp, synthetic construct
  source 1..110: mol_type = other DNA
tcactctgatggtctatgaagggacagagttgtcaggacaaggtagaagtgacagggtgcttaattactgctcctctccttctctcagatgaaacgaaagctgaggtgtg

SEQ ID NO: 33275 - DNA, 110 bp, synthetic construct
  source 1..110: mol_type = other DNA
ggtgcttaattactgctcctctccttctctcagatgaaacgaaagctgaggtgtggatccaggagtgtgagttgggctagtctgtggtgatactgatgggcagtggaaaa

SEQ ID NO: 33276 - DNA, 110 bp, synthetic construct
  source 1..110: mol_type = other DNA
aatcatttttgtgtggaagaaaaactatcaccatgtcatttcagacctaactctaatacacaggccaagttccagtactcttcaccaccgccacatagtgacactgctcc

SEQ ID NO: 33277 - DNA, 110 bp, synthetic construct
  source 1..110: mol_type = other DNA
caactactaggaaaatgtcaggtagaaaaattattgaatgaaattgaagtagactcagctcggcttaaattttgctttgaattgttctctggggttgctacctaaggaaa

SEQ ID NO: 33278 - DNA, 110 bp, synthetic construct
  source 1..110: mol_type = other DNA
agcttactacactccggcagtcaggtctctgggctggttttgagctgtgccacagccactgcagaagcacaatttcagttcccactggccgcccgcccatctttcttctc

SEQ ID NO: 33279 - DNA, 110 bp, synthetic construct
  source 1..110: mol_type = other DNA
ccactgcagaagcacaatttcagttcccactggccgcccgcccatctttcttctcattgactgggcaaggctggttcctattctataaacttcagctcttggaatgttct

SEQ ID NO: 33280 - DNA, 110 bp, synthetic construct
  source 1..110: mol_type = other DNA
ttgcctgccaagttggttttcgtaacatacttttacagttgatttatcttctccgaaaaatgagatttaagagctaaaaaaaataaaatacaataacgaagccctcagtg

SEQ ID NO: 33281 - DNA, 110 bp, synthetic construct
  source 1..110: mol_type = other DNA
gataaagcaggactgagaggttaaatgtcttccattttccaacctgaattctgaaaaaaccagagctggattgacctctttttgtataactgaatctctactctgtgcag

SEQ ID NO: 33282 - DNA, 110 bp, synthetic construct
  source 1..110: mol_type = other DNA
ggtcttttcgactctggaccacctgcttggttggccagcagtacttccttggcggggacactcagctgtgctcactgttgtgccctagacagaggctgcagtgagtgtgc

SEQ ID NO: 33283 - DNA, 110 bp, synthetic construct
  source 1..110: mol_type = other DNA
gtaactaatcccatgatctgacttctgcttcctcaggctcatggtttatgcgattcagtgttgcagcttctaggatgtctgggtcctggacccggcactctgcaccacgc

SEQ ID NO: 33284 - DNA, 110 bp, synthetic construct
  source 1..110: mol_type = other DNA
acttaaacgttgacgcaaatccacctgccctcccatcctctctagtcccatggaaataatattctagctttcagcaacccttatccttatagatctcctgtttcagaaga

SEQ ID NO: 33285 - DNA, 110 bp, synthetic construct
  source 1..110: mol_type = other DNA
ataatattctagctttcagcaacccttatccttatagatctcctgtttcagaagacacagaatatgtcaggagttctggcctttgagattgagtcatatggtcatgaact

SEQ ID NO: 33286 - DNA, 110 bp, synthetic construct
  source 1..110: mol_type = other DNA
gactaactgccaagcaggagaaaccccacagaagcacacgttttggcagtaaactgcacagttgtctctagaaaaatagagaagcacaggaatggtcggtgtgtagcttt

SEQ ID NO: 33287 - DNA, 110 bp, synthetic construct
  source 1..110: mol_type = other DNA
gcacagttgtctctagaaaaatagagaagcacaggaatggtcggtgtgtagctttggggttgcaaaaaaaaaaccaattgatgaagcacagatcccacatatgtgacggg

SEQ ID NO: 33288 - DNA, 110 bp, synthetic construct
  source 1..110: mol_type = other DNA
cagccagagcagaagctgccctgctggagttgctttgaggagttttgaccccactcaccagactgtccctggtctgagagctggtggggttgagaagtctgacaagtagg

SEQ ID NO: 33289 - DNA, 110 bp, synthetic construct
  source 1..110: mol_type = other DNA
caccagactgtccctggtctgagagctggtggggttgagaagtctgacaagtaggccccctacccaaggaactgtgggcttcctgcaaacacagtcactgctattcatcc

SEQ ID NO: 33290 - DNA, 110 bp, synthetic construct
  source 1..110: mol_type = other DNA
aaacccctgttcaaattagcttaattcatattcgggaaatttgctattttacattccaataaaggaaaattccaatgttccgttatcaatgactcagtgacatggaaccc

SEQ ID NO: 33291 - DNA, 110 bp, synthetic construct
  source 1..110: mol_type = other DNA
attactttcaacaggatttaattttttcgaggatgctgtaaaacagaaacacgttgattccatttagatgagtgtaaatcccagcagcctcagggaaccaattctagcta

SEQ ID NO: 33292 - DNA, 110 bp, synthetic construct
  source 1..110: mol_type = other DNA
gattccatttagatgagtgtaaatcccagcagcctcagggaaccaattctagctaagaggctgaagatgaaaagcagactctgatgggcccttgctctagggcctgcttc

SEQ ID NO: 33293 - DNA, 110 bp, synthetic construct
  source 1..110: mol_type = other DNA
ctgtgaatacccctaaagcttttcagggcagttgtccaagataagggatagcattgtgataacagctaatacttattgactgctgactgcaacccaggcattgttcaagc

SEQ ID NO: 33294 - DNA, 110 bp, synthetic construct
  source 1..110: mol_type = other DNA
agaagagtagcttctgagtgcagcaaacctaagagctgctggaaattacaggaaatgctcaaggatgaccagaggccctggcatattccatgggttgggactgcccttcc

SEQ ID NO: 33295 - DNA, 110 bp, synthetic construct
  source 1..110: mol_type = other DNA
agtcatttgaaatgcattactaagcagctgagtggaaaatgccatcaattctaaaaggctttcacagccaaataattcagaatgagggccaaaaacacagcttgccagaa

SEQ ID NO: 33296 - DNA, 110 bp, synthetic construct
  source 1..110: mol_type = other DNA
aggctttcacagccaaataattcagaatgagggccaaaaacacagcttgccagaagcatacacaataaaatgtagctgggcttattacacatggtggttcaaacaatctt

SEQ ID NO: 33297 - DNA, 110 bp, synthetic construct
  source 1..110: mol_type = other DNA
tgcagctactgtctgtgaataaacaagttacttaacatccctgggtctccatgtccctgaccgttaaatggggggaatggtcattgtgatgatgctaagaggtaacatcc

SEQ ID NO: 33298 - DNA, 110 bp, synthetic construct
  source 1..110: mol_type = other DNA
cctgaccgttaaatggggggaatggtcattgtgatgatgctaagaggtaacatccgtaaaggggatttgcccagcgcctggcacataggaatccctaagtaagaggtagt

SEQ ID NO: 33299 - DNA, 110 bp, synthetic construct
  source 1..110: mol_type = other DNA
gagtaacaaatggctgaaatctccagctcagaagacaactgtctcccagtttcaactcctctccgcatggacaggtacagacaaatatttgcacacatcagcccgtatct

SEQ ID NO: 33300 - DNA, 110 bp, synthetic construct
  source 1..110: mol_type = other DNA
gtaaaatggagatgatgataacagtaagaccttacccttgggaattgttatgagatttaaatgtattgatacctataaaatgttcagaatagcacctgtcacatgctatg

SEQ ID NO: 33301 - DNA, 110 bp, synthetic construct
  source 1..110: mol_type = other DNA
tttaaatgtattgatacctataaaatgttcagaatagcacctgtcacatgctatgtgccatgtcagggtgagccactattaatctcttaagaggaagccagaggacattc

SEQ ID NO: 33302 - DNA, 110 bp, synthetic construct
  source 1..110: mol_type = other DNA
tagaaaaaaaaggcaaaaagacaataaaataaaatgcctacttaatagctaacatgacgagatgaaggagaagtgggagaatccatggttatccactgagggaatgaata

SEQ ID NO: 33303 - DNA, 110 bp, synthetic construct
  source 1..110: mol_type = other DNA
gcctcacctccttgaatctactctaccaggatggcacagcccaggtgactgacacgtgaaccagactaatcctcccaggtatgtcctagagccagttcccccggagataa

SEQ ID NO: 33304 - DNA, 110 bp, synthetic construct
  source 1..110: mol_type = other DNA
cccataagtgagtccctcgaggatctgagacagtggaaaaaggcgtttattcatggcctgagtcacagcaaagaaggcccaggagaagcctagagttgagacatctccca

SEQ ID NO: 33305 - DNA, 110 bp, synthetic construct
  source 1..110: mol_type = other DNA
gcctgagtcacagcaaagaaggcccaggagaagcctagagttgagacatctcccattaagtaggagtaactcagttccctgctacctgcttgtgacaccacatcacagaa

SEQ ID NO: 33306 - DNA, 110 bp, synthetic construct
  source 1..110: mol_type = other DNA
gagagaatggaagagcaaagtgagcagaattcaaatcaggaggagaggctgtatggaggggtgggggcgctcttaaacctctgtctagagtactaatctgtactcagtcc

SEQ ID NO: 33307 - DNA, 110 bp, synthetic construct
  source 1..110: mol_type = other DNA
tttcccaaggtcatgcagctggtgcataatggaccgggacctgaggtcaagtgcatggttcccagcgactcctcttgcccctgtgacctccctcctccagcctcagggag

SEQ ID NO: 33308 - DNA, 110 bp, synthetic construct
  source 1..110: mol_type = other DNA
tggttcccagcgactcctcttgcccctgtgacctccctcctccagcctcagggagagacacctccaggcacagatgactctaattcctgatggaagatattgcacacctg

SEQ ID NO: 33309 - DNA, 110 bp, synthetic construct
  source 1..110: mol_type = other DNA
aaaatcccactcacactctaatccagaggacatggaggaagaaagagcaagaggactcaaggtgacaggtaaattccattttacagctcctttagcactcagcctggtta

SEQ ID NO: 33310 - DNA, 110 bp, synthetic construct
  source 1..110: mol_type = other DNA
catgggcattctagagtttctcacacaacaactcccctgaagtccccacaggcaaacctgaggctctgttcaagatgagtcactcagaagctccaaggggtttccctgag

SEQ ID NO: 33311 - DNA, 110 bp, synthetic construct
  source 1..110: mol_type = other DNA
acctgaggctctgttcaagatgagtcactcagaagctccaaggggtttccctgagttgagccagtcctaccctcagccagggatgctgagaataggtaagaggtatttat

SEQ ID NO: 33312 - DNA, 110 bp, synthetic construct
  source 1..110: mol_type = other DNA
agtagcactcaccgctttcttctggatgaacagttgtgcgtctttcagatgacccgcaatgttctcacacaggcgtttcctctcctcctcattcagtacgttcaaataga

SEQ ID NO: 33313 - DNA, 110 bp, synthetic construct
  source 1..110: mol_type = other DNA
ctccttccaatgcttcatctggtcactggctggatcccggttgtccgccatggtgtccgactagccttacagaacgttgcaggcagcctccactcgccggtctccggccc

SEQ ID NO: 33314 - DNA, 110 bp, synthetic construct
  source 1..110: mol_type = other DNA
tccgactagccttacagaacgttgcaggcagcctccactcgccggtctccggccctgcgcctgaagtagacgacttcggactcagtcactcagccccgcctcctcgtccc

SEQ ID NO: 33315 - DNA, 110 bp, synthetic construct
  source 1..110: mol_type = other DNA
ctcagggcaggcaactcatttgctctggagtgggtgggaagccttcctgaaggagcctttgatttcctctgagtccactcctagggtgttgggctgttggtgagatctcc

SEQ ID NO: 33316 - DNA, 110 bp, synthetic construct
  source 1..110: mol_type = other DNA
tgctgtgcatacccttaactcagaacagccccgagaggcaggtgttgcttcttcgcattttccaggtgatgctgcagcactgagaggttcagtgacttgcccagagcaac

SEQ ID NO: 33317 - DNA, 110 bp, synthetic construct
  source 1..110: mol_type = other DNA
tgaagacaaaacacttccccatgtcacacactcattcgcctaacttagagctcaggagccctgcagggtaagaatgaacccctgaaaacatgttagcagccagagggctt

SEQ ID NO: 33318 - DNA, 110 bp, synthetic construct
  source 1..110: mol_type = other DNA
ggtcttccctttgacaggaaagtcgcaagaagccaaagatgcagcaggcaggaggccccgaggaaaagtgcagtggttagaatccgatcttctccccgtgggcctctgtc

SEQ ID NO: 33319 - DNA, 110 bp, synthetic construct
  source 1..110: mol_type = other DNA
ccccgaggaaaagtgcagtggttagaatccgatcttctccccgtgggcctctgtcctgggagttgcacgtttaatcctctgtggtccagaagctccccttctttcctcat

SEQ ID NO: 33320 - DNA, 110 bp, synthetic construct
  source 1..110: mol_type = other DNA
gtgagcctggcctcgttagcgccagcacgaaacagctgagttagtttatctggagccacaaaattgttttcttacccagattctcatgctgtcctccagatggcgatgct

SEQ ID NO: 33321 - DNA, 110 bp, synthetic construct
  source 1..110: mol_type = other DNA
taatgcaggcgtgtccatagctaatcagcacacaggcctggagacagctcgtgaatagaaagcatcctgaatcctgagctggcggaagtactgtgggtccccaagaggtc

SEQ ID NO: 33322 - DNA, 110 bp, synthetic construct
  source 1..110: mol_type = other DNA
tagaaagcatcctgaatcctgagctggcggaagtactgtgggtccccaagaggtccatggtaggaggctccatcactgatcttggggaattcaggatgcttcagtggctg

SEQ ID NO: 33323 - DNA, 110 bp, synthetic construct; identical to SEQ ID NO: 33321
  source 1..110: mol_type = other DNA

SEQ ID NO: 33324 - DNA, 110 bp, synthetic construct; identical to SEQ ID NO: 33322
  source 1..110: mol_type = other DNA

SEQ ID NO: 33325 - DNA, 110 bp, synthetic construct
  source 1..110: mol_type = other DNA
atcctgtcctttgctatctcatctcaggccatcacggtagctctttggcttcacaacacttctatggtggaccactctcctaccaggtgcttcagtgtgtacttacttgg

SEQ ID NO: 33326 - DNA, 110 bp, synthetic construct
  source 1..110: mol_type = other DNA
ggacactgaaatggacatcagaggcctaattttgcctctaatgaggggtgtgtctttcagcagacttcaatttcctcatttgaaaaataaggaactaattatagattatc

SEQ ID NO: 33327 - DNA, 110 bp, synthetic construct
  source 1..110: mol_type = other DNA
gggtgtgtctttcagcagacttcaatttcctcatttgaaaaataaggaactaattatagattatctctgggaatttgctatttaaaacttggtttacagataaggaagtg

SEQ ID NO: 33328 - DNA, 110 bp, synthetic construct
  source 1..110: mol_type = other DNA
gcgctgtctggtccatgggctctcctgctctcccagatggatgactggttcctacgtcctcctcatctgagcttgcccctcctgggagcatccagggccccagcgctctg

SEQ ID NO: 33329 - DNA, 110 bp, synthetic construct
  source 1..110: mol_type = other DNA
tgtcctgtgttttccattaagagatagcttaactgaacaacatcagtttagagaacttgtggagcgttttttaaatagagaagtactaggttaagaaaaatgaggtatgc

SEQ ID NO: 33330 - DNA, 110 bp, synthetic construct
  source 1..110: mol_type = other DNA
ttgctcacccttgtgtgtgtgtttcccccacagtgccacccaaaacttactaccagtgttggaggttcgatgaatgcaattttgatttcatttcgagaaacctagcggag

SEQ ID NO: 33331 - DNA, 110 bp, synthetic construct
  source 1..110: mol_type = other DNA
gtgttggaggttcgatgaatgcaattttgatttcatttcgagaaacctagcggagaagaagctgaagtacaactgctgccggaaggacctgtgtaacaagagtgatgcca

SEQ ID NO: 33332 - DNA, 110 bp, synthetic construct
  source 1..110: mol_type = other DNA
ttgcctctacagagaaattgctcatgaaaggaagagctaatcagtgtggcacatttcactgctgtcttattttaagaaattgctggagttcccgtagtggctcagtggtt

SEQ ID NO: 33333 - DNA, 110 bp, synthetic construct
  source 1..110: mol_type = other DNA
accatgcggaggctgagaaacctaggccttcaagaaagctggagggaaggactattctgagcacagggatgaacacatgcaaagacgcagagatgtgaagccacagggca

SEQ ID NO: 33334 - DNA, 110 bp, synthetic construct
  source 1..110: mol_type = other DNA
cagcatggtgctgtgggtccggaggcaaaggccatgagacgactctataaatatgtagtggagtcaccctccgagtgggcagtgaatgaagcatacctgagtggagggat

SEQ ID NO: 33335 - DNA, 110 bp, synthetic construct
  source 1..110: mol_type = other DNA
atcatctattttccatctcagaatttgaccttcttctccagctaccacgcattagctatttgccaaatggtgaaagatcctatttctgttgtggctacggtatccaagga

SEQ ID NO: 33336 - DNA, 110 bp, synthetic construct
  source 1..110: mol_type = other DNA
ctatttgccaaatggtgaaagatcctatttctgttgtggctacggtatccaaggaggaggaaaagaatctaaatagactctggacccaaagagcttcctcttgggtccag

SEQ ID NO: 33337 - DNA, 110 bp, synthetic construct
  source 1..110: mol_type = other DNA
atatttttcttacagctagacactaaggcctgaaagtatctatacagaaggccaaagaagcagaagaagttgccaatattaacaataaatattactactgactcttaatt

SEQ ID NO: 33338 - DNA, 110 bp, synthetic construct
  source 1..110: mol_type = other DNA
agaaggccaaagaagcagaagaagttgccaatattaacaataaatattactactgactcttaattcatattcactgatgccagatttaggcataaattttactacaaaag

SEQ ID NO: 33339 - DNA, 110 bp, synthetic construct
  source 1..110: mol_type = other DNA
cttttccattcagtggaatgtcaagtggaagcctgtctttccactgctcagtgcaacagttcaggagaaaaagaagctctaagtgttcagatttaagctcaaaaagctac

SEQ ID NO: 33340 - DNA, 110 bp, synthetic construct
  source 1..110: mol_type = other DNA
acagttcaggagaaaaagaagctctaagtgttcagatttaagctcaaaaagctaccagattagggtcatccacctcccttacctcacagggctctctgagagccatcagg

SEQ ID NO: 33341 - DNA, 110 bp, synthetic construct
  source 1..110: mol_type = other DNA
gttatgtgggaactctcctactttccactcaattttgctgtgaacttaaaagtgctctaaaaaaatctgtttaaaaaatgataatgggcaaaggattggaactaacattt

SEQ ID NO: 33342 - DNA, 110 bp, synthetic construct
  source 1..110: mol_type = other DNA
caaatgcgttgttacaaatcaaaaccctgacctttggtagtttttgagaaactattcctgttctcacaggttaaaacaaaagctagctttgtttctgttcctcatctaag

SEQ ID NO: 33343 - DNA, 110 bp, synthetic construct; identical to SEQ ID NO: 33342
  source 1..110: mol_type = other DNA

SEQ ID NO: 33344 - DNA, 110 bp, synthetic construct
  source 1..110: mol_type = other DNA
aaccaaacctccttagaaaaatagttttctaagtaagcttgaaacattttgtgatgtcagattgtaagctctgaaggaaggatggggccatgtaaaaaagacagaagaga

SEQ ID NO: 33345 - DNA, 110 bp, synthetic construct
  source 1..110: mol_type = other DNA
gtcagattgtaagctctgaaggaaggatggggccatgtaaaaaagacagaagagaaaacttagaaaggctcttccttgtgttcgctttgaggctcagcgggttaccaacc

SEQ ID NO: 33346 - DNA, 110 bp, synthetic construct; identical to SEQ ID NO: 33344
  source 1..110: mol_type = other DNA

SEQ ID NO: 33347 - DNA, 110 bp, synthetic construct; identical to SEQ ID NO: 33345
  source 1..110: mol_type = other DNA

SEQ ID NO: 33348 - DNA, 110 bp, synthetic construct
  source 1..110: mol_type = other DNA
ttcctttcaagaaagaaaggaaggaaggaaatggctcccacgaaatacagataaaaatattctcattttaatctggaattcacaaatctcatcttgatttgggagctggt

SEQ ID NO: 33349 - DNA, 110 bp, synthetic construct
  source 1..110: mol_type = other DNA
gggaacttctatatgctgcagggatggtcctaaaaagtataaacaaatatgtaaacaaacaaataaaaatgatgaaaaatctctattttcatcatttcactccctagacc

SEQ ID NO: 33350 - DNA, 110 bp, synthetic construct; identical to SEQ ID NO: 33349
  source 1..110: mol_type = other DNA

SEQ ID NO: 33351 - DNA, 110 bp, synthetic construct
  source 1..110: mol_type = other DNA
ttcagttttcaagcagtcttgtctttacgtgcttgaaaacaatagctatttttcaaaagcaaagactgattctttgtatgtatttgaaacctgcccaaaaaaagtttagc

SEQ ID NO: 33352 - DNA, 110 bp, synthetic construct; identical to SEQ ID NO: 33351
  source 1..110: mol_type = other DNA

SEQ ID NO: 33353 - DNA, 110 bp, synthetic construct; identical to SEQ ID NO: 33351
  source 1..110: mol_type = other DNA

SEQ ID NO: 33354 - DNA, 110 bp, synthetic construct; identical to SEQ ID NO: 33351
  source 1..110: mol_type = other DNA

SEQ ID NO: 33355 - DNA, 110 bp, synthetic construct
  source 1..110: mol_type = other DNA
gagagtgaggagggcattaccaacactactgtcaccatctcctcagtcatgccgaagcatgactgagttctccatggacataaactgtgaaggctgctctaacgcagtca

SEQ ID NO: 33356 - DNA, 110 bp, synthetic construct
  source 1..110: mol_type = other DNA
aaagagaatgcagaagaaagaggaacttcccatcaaccagacttggacttagacacctgatagccagcgaacatttatttcactcactcattaattcatttaatcaacta

SEQ ID NO: 33357 - DNA, 110 bp, synthetic construct
  source 1..110: mol_type = other DNA
gttgctacttgctactgaaactattttaaatgagacagctttaatgaaagcctttttgaataccgtgtttgtgtgtgtgtgtaataaaacaaagaacgtgtaagagagtc

SEQ ID NO: 33358 - DNA, 110 bp, synthetic construct
  source 1..110: mol_type = other DNA
aactcacttgatccagctcagttggaatatactggatggccccacaagatgctgccactttaatgaggctgcaatatactgtgtatcttacaggagtattcttatccatc

SEQ ID NO: 33359 - DNA, 110 bp, synthetic construct
  source 1..110: mol_type = other DNA
cactttaatgaggctgcaatatactgtgtatcttacaggagtattcttatccatcccatgaaaaaggttgctaagcctggttaacaaataagaaaacaatatttgagatc

SEQ ID NO: 33360 - DNA, 110 bp, synthetic construct
  source 1..110: mol_type = other DNA
taccttggttgtggacatgaaactggaggcgggacagctgtttcgaagccccaagttcataagctgaagatgaactccataggctaaagggaaagctagaaagaacctgg

SEQ ID NO: 33361 - DNA, 110 bp, synthetic construct
  source 1..110: mol_type = other DNA
gccagaacacaaaagcaatggcaggaagggagcccagagcaaaataaacaacatatatgccaggacacattcagctcagctcattgactagaagcagtgctgttcgtgaa

SEQ ID NO: 33362 - DNA, 110 bp, synthetic construct
  source 1..110: mol_type = other DNA
ataaaatttatagagaatgataccttcagttgtgtctagagtttatcatcctctttcgtttgcttgtcacatccttgagtatgagaccatccatcacccatcactctctg

SEQ ID NO: 33363 - DNA, 110 bp, synthetic construct
  source 1..110: mol_type = other DNA
tcgtttgcttgtcacatccttgagtatgagaccatccatcacccatcactctctgacttttcaggccctcataatccacatgatacttatccttttgattaaaacaactt

SEQ ID NO: 33364 - DNA, 110 bp, synthetic construct
  source 1..110: mol_type = other DNA
tcgccatgtggtctggatcctccactgtaagaagagccgtggttgatactgttcctcccccatccccccgcccccaccccgtctccctttacgctcattttcacaaggaa

SEQ ID NO: 33365 - DNA, 110 bp, synthetic construct
  source 1..110: mol_type = other DNA
gctagaagaggaaaccaaggctgagagacattaagtcccttgcccaaggtcatacagcttctgaacttgtgcttgtcccactgcaccacaccatgcttgggtttgggtgt

SEQ ID NO: 33366 - DNA, 110 bp, synthetic construct
  source 1..110: mol_type = other DNA
ggtgcgacaggtggaactgatgaaagagccacaggtgagttcattatcacggcggcagttgtcacgtgcctctgccacttacaaagaattgtctttcccaggcagagctg

SEQ ID NO: 33367 - DNA, 110 bp, synthetic construct
  source 1..110: mol_type = other DNA
tgccaccctcccccccagtgtgtccagctctttcttaaagttaaccaataactggcctttttgttatcccacttctgcgtgaggaacccttccagcaattctcaccgagg

SEQ ID NO: 33368 - DNA, 110 bp, synthetic construct
  source 1..110: mol_type = other DNA
ctgtcactcaggagccatgttactgttttattctccttccttctgtcttctagcatctctttacctcaaaactctctcttttcttgaccagcttcctcggttcatctgat

SEQ ID NO: 33369 - DNA, 110 bp, synthetic construct
  source 1..110: mol_type = other DNA
tctctttacctcaaaactctctcttttcttgaccagcttcctcggttcatctgatttgtgcttgggcccaaagagctgtgccaactccatacacaggggcctttcacctc

SEQ ID NO: 33370 - DNA, 110 bp, synthetic construct
  source 1..110: mol_type = other DNA
ccggaattcattaaactgctcccgttctgacaacacccagtctggctcagggccaccctcctcgtgggaaaacatatcggctggaagggaaggctgttcttggttatgaa

SEQ ID NO: 33371 - DNA, 110 bp, synthetic construct
  source 1..110: mol_type = other DNA
ccctcctcgtgggaaaacatatcggctggaagggaaggctgttcttggttatgaagacaagtgggaaggcaggtcccagagcacctgacctccaaccatcaagagaccta

SEQ ID NO: 33372 - DNA, 110 bp, synthetic construct
  source 1..110: mol_type = other DNA
attccccccgccgtttcctcttctgccttcctaccctctgcaatgttccgccgtggctggagcttgtattacaaggaggagtcagtgtgctaaggacagtaaagcaacaa

SEQ ID NO: 33373 - DNA, 110 bp, synthetic construct
  source 1..110: mol_type = other DNA
ttggcacccattttccccttatggcatttcttactctggagtaattgcaggttgaaagtcctccatccatgagctcctaaggcctctgtcttatttacccattccccctg

SEQ ID NO: 33374 - DNA, 110 bp, synthetic construct
  source 1..110: mol_type = other DNA
gccccaagcaagaggttgaagacagcagacacccccctgctagcattctgaccgcaccatttgtgagctgtacgtgctttctgaaattccccttcctcaccttcttccct

SEQ ID NO: 33375 - DNA, 110 bp, synthetic construct
  source 1..110: mol_type = other DNA
gccctccctctgccgtgggaaggcgcgagcccctggggagggccctccgaggcaggctgggttagctggcgtgagcctctgcgctcgacaccatcagagatggtttactg

SEQ ID NO: 33376 - DNA, 110 bp, synthetic construct
  source 1..110: mol_type = other DNA
gctgggttagctggcgtgagcctctgcgctcgacaccatcagagatggtttactgccacataaaaggcagcgctcacaaggacttgtatttgctaagcgcaacttgtgaa

SEQ ID NO: 33377 - DNA, 110 bp, synthetic construct; identical to SEQ ID NO: 33375
  source 1..110: mol_type = other DNA

SEQ ID NO: 33378 - DNA, 110 bp, synthetic construct; identical to SEQ ID NO: 33376
  source 1..110: mol_type = other DNA

SEQ ID NO: 33379 - DNA, 110 bp, synthetic construct
  source 1..110: mol_type = other DNA
caaatcccaagttgcggaattggttcacagggtcgcacagggcaggcacatgctggccgaggcaggagctgagccatcctggaccagccacttaccaccgatgtcaacct

SEQ ID NO: 33380 - DNA, 110 bp, synthetic construct
  source 1..110: mol_type = other DNA
gccgaggcaggagctgagccatcctggaccagccacttaccaccgatgtcaacctttcctcctcctccatcttccccaggttgagactgacctacaggccctgtgcattc

SEQ ID NO: 33381 - DNA, 110 bp, synthetic construct
  source 1..110: mol_type = other DNA
ctaaaaagaacctcctggccttgtgtgatggtgtgtttaacactctgttgttcgctttcctggggaaaactgatcgaaaagggaaattcagccaagctaagtagtgactt

SEQ ID NO: 33382 - DNA, 110 bp, synthetic construct
  source 1..110: mol_type = other DNA
gagcttacagtaattttctttcaaggaacagaaactgaaaagatgatggaactcacagggaaaaaggaataggcccctttgggcctagaatagcaaagttatactgaata

SEQ ID NO: 33383 - DNA, 110 bp, synthetic construct
  source 1..110: mol_type = other DNA
ctttttgttaaaagctttttcagtgctacaccatagctacagtataagttggtgaagtatttccaaggttatggggcaggaatatcaacaaacaaccctcctataatcaa

SEQ ID NO: 33384 - DNA, 110 bp, synthetic construct
  source 1..110: mol_type = other DNA
gtacaagtattatacacaatttaaaactgaattggtatattgtctttatacaacggctaaattcagcgtagagcttatgttcgtcatgactctttcagaacaaccagtag

SEQ ID NO: 33385 - DNA, 110 bp, synthetic construct
  source 1..110: mol_type = other DNA
gctaaattcagcgtagagcttatgttcgtcatgactctttcagaacaaccagtagaaaagtcagaacacagtcactttacaagagccaccgttaagcccagttacttatg

SEQ ID NO: 33386 - DNA, 110 bp, synthetic construct
  source 1..110: mol_type = other DNA
gtttattttattttatttttttttggccaccccatggcatatgaggtcctggttcaggtattgaatctgatctagagttgtgacttatgccacagctgcagcaatgctgg

SEQ ID NO: 33387 - DNA, 110 bp, synthetic construct
  source 1..110: mol_type = other DNA
aagcatgcacttgtgcttaaaacgggtgcatttaggacaacgaaagcaaaaccggatgaaaagtacctgtctttgtttttaaaggcatgctatattcctcctgtatgctt

SEQ ID NO: 33388 - DNA, 110 bp, synthetic construct
  source 1..110: mol_type = other DNA
agctgtgcagaaacactgaagtgtgagataatgcagatgggagtcaactagaggtctgagcccgtggggcttcttgaaagaaggcacaggcggaagcaaacttcacagga

SEQ ID NO: 33389 - DNA, 110 bp, synthetic construct
  source 1..110: mol_type = other DNA
ggtcatcaggccttctggtttgtgaaactacacaaccagtttccttagcttctatcttgttgaggatggattgtgggacttttcagctttcataattgcatgagtcaatc

SEQ ID NO: 33390 - DNA, 110 bp, synthetic construct
  source 1..110: mol_type = other DNA
tagagacaaaggactttgttacaatttagcaagagtcatgagcttcatgttcaaattggttctctttgtccccaagtctcatgggggcaatgcagagtggtccaagtgga

SEQ ID NO: 33391 - DNA, 110 bp, synthetic construct
  source 1..110: mol_type = other DNA
ccctgagtagtattggcacactagctaaaataccaaccctattcgaccaggaatatacaccttcacctctgttcctaagtagaaattttgacatagtcatcaactatcaa

SEQ ID NO: 33392 - DNA, 110 bp, synthetic construct
  source 1..110: mol_type = other DNA
taccttaattaaaaaaacaaacaaacaggagttcccattgtgactcaacggtaagcaaccctactagtatctgtgaggaaacggtttaatgcctggcctcactcagtggg

SEQ ID NO: 33393 - DNA, 110 bp, synthetic construct; identical to SEQ ID NO: 33392
  source 1..110: mol_type = other DNA

SEQ ID NO: 33394 - DNA, 110 bp, synthetic construct
  source 1..110: mol_type = other DNA
ccctagactttctacaagtttgaaagtgtttgctaggaccttcgtcttcaccctcaggacagcaatccagatttcaccatagcgacagaaggacagaaggaagccacagc

SEQ ID NO: 33395 - DNA, 110 bp, synthetic construct
  source 1..110: mol_type = other DNA
aggacagcaatccagatttcaccatagcgacagaaggacagaaggaagccacagcacggcttagtgttggccaaggatgggaggtgcttcctcccagcaaaagatctctg

SEQ ID NO: 33396 - DNA, 110 bp, synthetic construct
  source 1..110: mol_type = other DNA
aacttttcttttaaataaaactaccagccccgccttagagcttagagttctaatccttgactaaacaaactgagagctctgcactgccatctgcatccactcagccttct

SEQ ID NO: 33397 - DNA, 110 bp, synthetic construct
  source 1..110: mol_type = other DNA
cttgactaaacaaactgagagctctgcactgccatctgcatccactcagccttcttcccatttggccctgcaaaattgttctttctcaaagttcaagatttttaatccct

SEQ ID NO: 33398 - DNA, 110 bp, synthetic construct
  source 1..110: mol_type = other DNA
gacagaattgagtagttatgacagagatcatatgtctcacaaagcttaaaatacttactgcctggcctttaccgacaaagttacccatccctgttctaagaccgtactga

SEQ ID NO: 33399 - DNA, 110 bp, synthetic construct
  source 1..110: mol_type = other DNA
tactgcctggcctttaccgacaaagttacccatccctgttctaagaccgtactgattgacaactgcaataactagaaagctggagaagaaattgggcttcaggagttccc

SEQ ID NO: 33400 - DNA, 110 bp, synthetic construct
  source 1..110: mol_type = other DNA
accttttgaggcagtcaggcaagctgcccctgccacagaaccagcaccagtagagtctcacaacaccactgtgagaagacttgcctacagccttaaaatcctctgccaaa

SEQ ID NO: 33401 - DNA, 110 bp, synthetic construct
  source 1..110: mol_type = other DNA
agttactggctacacatctggcacagatgccaagagggcatgcaattcattctgataagtgcactaggtagagattttagctaaacctggaaagatagtggaattatgcc

SEQ ID NO: 33402 - DNA, 110 bp, synthetic construct
  source 1..110: mol_type = other DNA
ttgcacaagtggatacgatatttttgactcctgtgctccacatgcctctcccctagcaaaatatgtttttaaacaaaggatggaatcttatcctatatatctgcaattcc

SEQ ID NO: 33403 - DNA, 110 bp, synthetic construct
  source 1..110: mol_type = other DNA
gctgcatgctgcagaactcaaacaatatggggaacaaaggattaagggacagtggaacagttggttccaggaattgtacttttctctcactccctaatactgtttaagtc

SEQ ID NO: 33404 - DNA, 110 bp, synthetic construct
  source 1..110: mol_type = other DNA
tgtgcttcttgcctcttcccttatgttatacaccatcagggaagtctgtctcttatgtatcttagctttttattaataaggggttaggaagactgaaagtgttctctgct

SEQ ID NO: 33405 - DNA, 110 bp, synthetic construct
  source 1..110: mol_type = other DNA
ctaaaaagcagaaaacaaaaataaacaacaacaacaaaaaaaccataaaataaaatgcagttgagggcaaaccataatacatctgggggccaaatctggcttacctgcta

SEQ ID NO: 33406 - DNA, 110 bp, synthetic construct
  source 1..110: mol_type = other DNA
tgcagttgagggcaaaccataatacatctgggggccaaatctggcttacctgctacaagcttctagaattctttttccaggagtttagaaataaaatgaggaagcttctt

SEQ ID NO: 33407 - DNA, 110 bp, synthetic construct
  source 1..110: mol_type = other DNA
aatgacagacctaagtgtgtacttataatactggccctgacctttgtgcctttaaatagctcttaaccggaggcaaattcccggttgttgctggcgagtttagaggcagg

SEQ ID NO: 33408 - DNA, 110 bp, synthetic construct
  source 1..110: mol_type = other DNA
atagctcttaaccggaggcaaattcccggttgttgctggcgagtttagaggcaggagaggtgagggaattttcagagaactgagtgcctgcctgcattcaaacacaccat

SEQ ID NO: 33409 - DNA, 110 bp, synthetic construct
  source 1..110: mol_type = other DNA
caactagtatccacgaggaggagagttcaatccctggcctcactgagagagttgaagattccggcattgctgcaagctgtggcttaggtcgcagatgccgctcggatctg

SEQ ID NO: 33410 - DNA, 110 bp, synthetic construct; identical to SEQ ID NO: 33409
  source 1..110: mol_type = other DNA

SEQ ID NO: 33411 - DNA, 110 bp, synthetic construct
  source 1..110: mol_type = other DNA
catctgggcggccttgcatgtgcgactttacttctctcagctccatactccacacctgtgtaatggggacaattcctactgaaaatggatttcagttgttataacatcaa

SEQ ID NO: 33412 - DNA, 110 bp, synthetic construct
  source 1..110: mol_type = other DNA
ccgccatgatctgactgatataagtcccgctctccttccccatctctatctgatccccaccaatgagtcctgcagattaccctagtaatccctgggaggagagacctgag

SEQ ID NO: 33413 - DNA, 110 bp, synthetic construct
  source 1..110: mol_type = other DNA
cccaccaatgagtcctgcagattaccctagtaatccctgggaggagagacctgagtgggcctctgggaagtgtcccgcagtgtgaggggagctgggtgtccaccttgggc

SEQ ID NO: 33414 - DNA, 110 bp, synthetic construct
  source 1..110: mol_type = other DNA
gatatactagaacaatcctgacttgtgactttcacacaagatgttctttgaaggcccttagggcttcctaagactctttccagctccatattggacagacttgtacttgg

SEQ ID NO: 33415 - DNA, 110 bp, synthetic construct
  source 1..110: mol_type = other DNA
gcagccaaaaaaaggaaaaaaatcattcagctgctttgaaatctttaaaatggggagacaggatcttttgaactgttgcgagtctcaaatgaggcacagtgagtgaaaat

SEQ ID NO: 33416 - DNA, 110 bp, synthetic construct
  source 1..110: mol_type = other DNA
atgttttcagtagcttctgcacagggtctctttgctttaacctttgcatctgtccttatcccagaagctggagtgattcttttctatttgtatttctgtttctccttttt

SEQ ID NO: 33417 - DNA, 110 bp, synthetic construct
  source 1..110: mol_type = other DNA
ggggcccggcatttggggttttaacaaatcttccaggtgattctgatgcatgtgaaattttgagaactactgggctctaatcccttacagctctaccaacaactgatatt

SEQ ID NO: 33418 - DNA, 110 bp, synthetic construct
  source 1..110: mol_type = other DNA
aattttgagaactactgggctctaatcccttacagctctaccaacaactgatattgtaataacaagacatgatttttgatcatgtccaggaattgtgaagggactttata

SEQ ID NO: 33419 - DNA, 110 bp, synthetic construct
  source 1..110: mol_type = other DNA
ttttaaagttgcctttattctcagccacaacttgaggagctcagagaaaaaccctgtgccctgctgcctctttcttaagaagataaaattgcgtagatgatgcattgttt

SEQ ID NO: 33420 - DNA, 110 bp, synthetic construct
  source 1..110: mol_type = other DNA
agaataaatccagtacaggctaaagttattcattcataaccacatgaaaccacgtttagttgcttgcttctatgaattctgagcctaaaatccctgactctttctcagct

SEQ ID NO: 33421 - DNA, 110 bp, synthetic construct
  source 1..110: mol_type = other DNA
atttagtcttctctgtcttttcaggcacagggatggacaagtaggactggccagcagtctgcttccttctcattgtgcagttagaaaccagctgtgagtagtgagggagt

SEQ ID NO: 33422 - DNA, 110 bp, synthetic construct
  source 1..110: mol_type = other DNA
atgtggagccgcagagaacatggacaagactgaatttgctgggtttcatctgtccttaccatgttggtctttaccaggtgtgactacaacagcttttaggaagtattggc

SEQ ID NO: 33423 - DNA, 110 bp, synthetic construct
  source 1..110: mol_type = other DNA
ttaccatgttggtctttaccaggtgtgactacaacagcttttaggaagtattggcttgacttcagttttatctcccaaatcatgtatgagttcctcttgtagccacctct

SEQ ID NO: 33424 - DNA, 110 bp, synthetic construct
  source 1..110: mol_type = other DNA
actgcatagacctgaattctgccaacagcttaaaatattatggaattagattggcccctagagcctccaggaaggaacagagccctgcagacatcttgatcttggctttg

SEQ ID NO: 33425 - DNA, 110 bp, synthetic construct
  source 1..110: mol_type = other DNA
ccctagtcccagtgacctagggaagggctagtcgtgaggtatggctggagggtagagctagggtggaccactgtaggggatcaggatgggaaagatacaatctccatcct

SEQ ID NO: 33426 - DNA, 110 bp, synthetic construct
  source 1..110: mol_type = other DNA
aagagaaactgctcagaaagactcactactagggaaggttgagaggaatgaaggttctggtatcagggcctaggctgctcattccacaggcatcaccctaggacttggtt

SEQ ID NO: 33427 - DNA, 110 bp, synthetic construct
  source 1..110: mol_type = other DNA
tctcgctttattcttctatttcaaaattgttttagctatccaggtcctttagacctccacataaattttagaataatcttgtctacatctacttaaaaccttccctgtaa

SEQ ID NO: 33428 - DNA, 110 bp, synthetic construct
  source 1..110: mol_type = other DNA
gagagcggataaaaatggaaagagtgaccagctaagagggataatttaaaagattgcaaggacctgagaaaaactcagggctctctgtctttggttatggccacttggag

SEQ ID NO: 33429 - DNA, 110 bp, synthetic construct
  source 1..110: mol_type = other DNA
aatatctaccccagagggtgactgcaggattaaatgaaatagctgacaaggccaccttcattgggtgctaagatgttactccctttccttcctctaaaagagcatccagc

SEQ ID NO: 33430 - DNA, 110 bp, synthetic construct
  source 1..110: mol_type = other DNA
aggctgaccttcaaagagcaaggagctatgttgaagggaaggtggtgatttgacaactctggattttcttagggaactccgaaggacgactgttaacgaccattattgtg

SEQ ID NO: 33431 - DNA, 110 bp, synthetic construct
  source 1..110: mol_type = other DNA
atttggaaaatagagtaacaggagaaataggatatgttattcagttaaatacagggctgaggatagcattgtggccaagctgggttaaaatacaagctcctcatcacaga

SEQ ID NO: 33432 - DNA, 110 bp, synthetic construct
  source 1..110: mol_type = other DNA
atactaggacctgcccaaagtaagaagagctagcaggatcaattcagaaatgacaagttgattttatctcatatgcctcacccacagcattggtaatgattgcctaagga

SEQ ID NO: 33433 - DNA, 110 bp, synthetic construct
  source 1..110: mol_type = other DNA
ttgtcccttccttttctttaaaaaatatttattagcatccttccttctgctgtcaggtagctataagtcaggcctgagaaggtaagctgcaggcctgtgcagaagaggcc

SEQ ID NO: 33434 - DNA, 110 bp, synthetic construct
  source 1..110: mol_type = other DNA
ggtagctataagtcaggcctgagaaggtaagctgcaggcctgtgcagaagaggccaagctcagcatagggcaggtccatttgcaaagagggtgggggtccagcagtatca

SEQ ID NO: 33435 - DNA, 110 bp, synthetic construct
  source 1..110: mol_type = other DNA
ttttcacagcaatggatggtagatggagataaagtagtttccgcaaagtctcataatgagtaagtgttgagctgggctttgaacacaataacctgtcggtccatcatctg

SEQ ID NO: 33436 - DNA, 110 bp, synthetic construct
  source 1..110: mol_type = other DNA
gtctctaataaacacttgcatccttaaataccagagggccagcccttcctagccattacataaaaaccctcaccgattgggctagtaaaaaagaactagtaaaaaagaaa

SEQ ID NO: 33437 - DNA, 110 bp, synthetic construct
  source 1..110: mol_type = other DNA
acactgccatcaattgataacatttcttaaaattttcgatgtttgggagagtggtggcaaatgacagattaatatctatacttcttcattaactacctaaccaataatta

SEQ ID NO: 33438 - DNA, 110 bp, synthetic construct
  source 1..110: mol_type = other DNA
aaggttctcagaactcaaggatgtgtggggattaaggaacgagaccctgaatgggtgaatccaaagctgataattataagctagttaccaataaatgttggtgactctgg

SEQ ID NO: 33439 - DNA, 110 bp, synthetic construct
  source 1..110: mol_type = other DNA
tgccttcagtaagactgaggctgacatgactggcccctcaggccaagcattaccttgcatccagcatactttccttagctctccctctctcttgtaactcccccaacccc

SEQ ID NO: 33440 - DNA, 110 bp, synthetic construct
  source 1..110: mol_type = other DNA
tgcatccagcatactttccttagctctccctctctcttgtaactcccccaaccccatgtctttccttgatgtggtgaagctgagaggcaaaggaggagtagaaacaggtg

SEQ ID NO: 33441 - DNA, 110 bp, synthetic construct
  source 1..110: mol_type = other DNA
ttggcgcctcacagtttataactgcagtgaaacctgagggcaaagatgctggggatttgaacaaatcacagctgttctctcttccttcaggatggaataggacattcctt

SEQ ID NO: 33442 - DNA, 110 bp, synthetic construct
  source 1..110: mol_type = other DNA
cttgtgtttgccatgggggagggggagagagtgggatggattgggagcttggggtaatagatgcagagtagtgcatatggaatggataggcaatgagatcctgttgtata

SEQ ID NO: 33443 - DNA, 110 bp, synthetic construct; identical to SEQ ID NO: 33442
  source 1..110: mol_type = other DNA

SEQ ID NO: 33444 - DNA, 110 bp, synthetic construct
  source 1..110: mol_type = other DNA
ttacccaacttttacattttgacttgggagatgctaggctctaagtttttcattcctttgaaatacagcttttaaaatgaattgaaatgaaagagatttttttgagggat

SEQ ID NO: 33445 - DNA, 110 bp, synthetic construct
  source 1..110: mol_type = other DNA
aaacaaagccactcttttaggcatttgggcaggggatgatttttctggtttctctaatgagtgtgaacttgtcagaagcctgaactgtacccttgccttgatgtctgagc

SEQ ID NO: 33446 - DNA, 110 bp, synthetic construct
  source 1..110: mol_type = other DNA
aatgagtgtgaacttgtcagaagcctgaactgtacccttgccttgatgtctgagcttgcacaaaggagcgtatgtgtgtgtgcctcccagaagtgattagaaaagatatg

SEQ ID NO: 33447 - DNA, 110 bp, synthetic construct
  source 1..110: mol_type = other DNA
aagtttcatctttgtatgaggactgggcctacccatgtcattggttcaaacattttagttggttgatgaaattggtcaaaaaatcagttaaaattctttttggggcaaaa

SEQ ID NO: 33448 - DNA, 110 bp, synthetic construct
  source 1..110: mol_type = other DNA
tgcaggtcgtccctgcccagtcccatgtagacctacctcctcagagtagcctaaactcctgtgttatgaaaatcacactcccgttgtcaggtccctcaggggctaattcc

SEQ ID NO: 33449 - DNA, 110 bp, synthetic construct
  source 1..110: mol_type = other DNA
ctcctgtgttatgaaaatcacactcccgttgtcaggtccctcaggggctaattcctggccaagtgaggacctgctgagtgtatacatttaggattagacataggtatgtt

SEQ ID NO: 33450 - DNA, 110 bp, synthetic construct
  source 1..110: mol_type = other DNA
aaaattcaggagcctgacttgtattctcaccccagcagaaggtcttcccaccctatccccctaagtgagccatagcagagcctgtgaaaaagtgcaactttttatttata

SEQ ID NO: 33451 - DNA, 110 bp, synthetic construct
  source 1..110: mol_type = other DNA
tcccaccctatccccctaagtgagccatagcagagcctgtgaaaaagtgcaactttttatttataaagagcttcaggagttcccattgtggctcagagggttaagaacct

SEQ ID NO: 33452 - DNA, 110 bp, synthetic construct
  source 1..110: mol_type = other DNA
gtgtttctttaactctagatatttgtagagcaattgaattgttggaaaaattacagaggagtggagaggtaccaccacagaaacttcaggctttacaaagagtccttcag

SEQ ID NO: 33453 - DNA, 110 bp, synthetic construct
  source 1..110: mol_type = other DNA
gaggagtggagaggtaccaccacagaaacttcaggctttacaaagagtccttcagagtgaattctgcaatgctgtaagagaggtgagtaaatgggattaaaacttagtaa

SEQ ID NO: 33454 - DNA, 110 bp, synthetic construct
  source 1..110: mol_type = other DNA
ttgaatctgtgaattctgattttgaatgaagcagccgcatcttggcgagtcatttactggataactctacaggttgtcttcttgctgcatttagctattttaatgcacct

SEQ ID NO: 33455 - DNA, 110 bp, synthetic construct
  source 1..110: mol_type = other DNA
actggataactctacaggttgtcttcttgctgcatttagctattttaatgcacctaagttggattctttgtcatgaagaccttctttatggtctgtctcaccattcagat

SEQ ID NO: 33456 - DNA, 110 bp, synthetic construct
  source 1..110: mol_type = other DNA
agggcaggcttgggggtaacttaattacccatgctgtctccttatcaggatttttttgaggaaatgttggtttaatgtagaacgttcaagatttcagctcttggagttcc

SEQ ID NO: 33457 - DNA, 110 bp, synthetic construct
  source 1..110: mol_type = other DNA
gtctccttatcaggatttttttgaggaaatgttggtttaatgtagaacgttcaagatttcagctcttggagttccggttgtggctcagcaggttaagaatccaactagta

SEQ ID NO: 33458 - DNA, 110 bp, synthetic construct
  source 1..110: mol_type = other DNA
tgaaggggaggggagcatgggagactttcagcaagagaggatgacttaagtaaaactcctccagcaggagagatgatggagagttgcaggaacagaaagaatctggtgtg

SEQ ID NO: 33459 - DNA, 110 bp, synthetic construct
  source 1..110: mol_type = other DNA
ctcctccagcaggagagatgatggagagttgcaggaacagaaagaatctggtgtggccgctgctttttggagcatggcaggaaatgaggatggagacgccagccatggaa

SEQ ID NO: 33460 - DNA, 110 bp, synthetic construct
  source 1..110: mol_type = other DNA
acttctctgcacgaccaggtttgtgcctcagccaggatgactgagtggttcccacagcactccccattccaaatagcaagaacagggcaagagtcctgtggagcagctga

SEQ ID NO: 33461 - DNA, 110 bp, synthetic construct
  source 1..110: mol_type = other DNA
agcactccccattccaaatagcaagaacagggcaagagtcctgtggagcagctgaggcatagtgagggcaggttatactcaagaggcatttgataccaaagctaggacag

SEQ ID NO: 33462 - DNA, 110 bp, synthetic construct; identical to SEQ ID NO: 33460
  source 1..110: mol_type = other DNA

SEQ ID NO: 33463 - DNA, 110 bp, synthetic construct; identical to SEQ ID NO: 33461
  source 1..110: mol_type = other DNA

SEQ ID NO: 33464 - DNA, 110 bp, synthetic construct
  source 1..110: mol_type = other DNA
ctaggactttaaaacagcttgatattcaccaaatatcagtaattccctaagcttgttacatgtttgttgtaagcagaagttgtagactgttctgtacatgactctttcat

SEQ ID NO: 33465 - DNA, 110 bp, synthetic construct
  source 1..110: mol_type = other DNA
agagtccctgccacagtttagcctccctttagctcatcatttcctccaagtcaacagtaggggacatggttgctagttgcatgcatgtccttaccccttattcaagagaa

SEQ ID NO: 33466 - DNA, 110 bp, synthetic construct
  source 1..110: mol_type = other DNA
tgatagggctaccataagaaaataccacagactgggtggcttgatttaaacaaaaaaactttattttcttatagctctgagagctagaaattcaagatcaaggtattggt

SEQ ID NO: 33467 - DNA, 110 bp, synthetic construct
  source 1..110: mol_type = other DNA
ttctgtctcttgtcatcagtcatcactgactttatcctgcaactcagttaattttgtcctacaaacacaaacaattagttatagaattcatagggttaccatatccaccg

SEQ ID NO: 33468 - DNA, 110 bp, synthetic construct
  source 1..110: mol_type = other DNA
actccttgtgatcaagaatagttgcatctattcttgatgaatagttacctctattcatcttgcatctctgcaagacattcatagtgtctctaaaataatttagtttctcc

SEQ ID NO: 33469 - DNA, 110 bp, synthetic construct
  source 1..110: mol_type = other DNA
gaagggcaactgggctgtcctttatgaaaggtgactaagaattggtgaatcacggtgggaggaaggaggctctctcacgttgaaaagtgctttacacaaaggagaagtct

SEQ ID NO: 33470 - DNA, 110 bp, synthetic construct
  source 1..110: mol_type = other DNA
cccttggcaaccccaagtctgttctcctatttcatccatttcttaaagcttaaaaatttcattcaatttaaaacccatttataggcttccttacagattacaaataatgt

SEQ ID NO: 33471 - DNA, 110 bp, synthetic construct
  source 1..110: mol_type = other DNA
agaatgaacgcggatattttcaataagaggggctccgaatgatgagctcttagaacagtgtaaaatatgtcaaatttgatgccagtctctattttttagacatgatcacg

SEQ ID NO: 33472 - DNA, 110 bp, synthetic construct
  source 1..110: mol_type = other DNA
cctcaacccctcactggctttttctttttcttttttttaaatggaactggagggagattaaaagtcagagtgaactattgtatcaggccctcatcagtacagaaaaatgc

SEQ ID NO: 33473 - DNA, 110 bp, synthetic construct
  source 1..110: mol_type = other DNA
ttgtagttgaccattttttaaatgtgttctttccagatccaaatatcttccatggagaaatagactgaaatgaagataggttttggctagtaaattgtctgaattcatca

SEQ ID NO: 33474 - DNA, 110 bp, synthetic construct
  source 1..110: mol_type = other DNA
ttaagaaaacagaaaggtaaaatagaattccaagattgatgtacttatttaaacataccacagtcagaattctgggttcagctgcatttagaatccttcattgctgacaa

SEQ ID NO: 33475 - DNA, 110 bp, synthetic construct; identical to SEQ ID NO: 33474
  source 1..110: mol_type = other DNA

SEQ ID NO: 33476 - DNA, 110 bp, synthetic construct
  source 1..110: mol_type = other DNA
agaagtttatgttttctcctgtaggtactttcttagaacagtttttaaagtaattgaaaacacacctttactgcctactgacgtggcatccacttgtttctatctgaaca

SEQ ID NO: 33477 - DNA, 110 bp, synthetic construct
  source 1..110: mol_type = other DNA
gaaaacacacctttactgcctactgacgtggcatccacttgtttctatctgaacagctcttctctcaaagggcagcaataatgtataccttcaaagtaaacttccatttc

SEQ ID NO: 33478 - DNA, 110 bp, synthetic construct
  source 1..110: mol_type = other DNA
ggaatttttcattgtaattcaaagatataccaagtaaaatgtagctgctttctgcccatatctctaaatttactttcttagtgaagatccaagcaggtaaacacacaaac

SEQ ID NO: 33479 - DNA, 110 bp, synthetic construct
  source 1..110: mol_type = other DNA
aaactaagtcaaaattcttgatacactggaataaatttaaaataaatttggctacataaaatataaaatcagggaattcccttcatggctcagcagtaacgaacccaact

SEQ ID NO: 33480 - DNA, 110 bp, synthetic construct
  source 1..110: mol_type = other DNA
aatctcagaattagagtctctttccttacgattctcacaaaatcctaggcgacgttctaattggtctattttagccataagctcatgtgatacaggataattaccaacaa

SEQ ID NO: 33481 - DNA, 110 bp, synthetic construct
  source 1..110: mol_type = other DNA
ctttcctttgatttgaatggctccatttaaggtattttaacttctactaatctctttaaattgccagcaggaagctttgttggttttctctcttattcacttgtttcaaa

SEQ ID NO: 33482 - DNA, 110 bp, synthetic construct
  source 1..110: mol_type = other DNA
cacgtactttcacatcttgaattcctgtagggagatgactatcttaacaatctttgtaacgtagcgcaacagtgttccacaacggtacatatgctccagtattcactgaa

SEQ ID NO: 33483 - DNA, 110 bp, synthetic construct
  source 1..110: mol_type = other DNA
gtaacgtagcgcaacagtgttccacaacggtacatatgctccagtattcactgaacatgaaatagattaaattactttcccagtgaagaatgaagaccagtacatagaag

SEQ ID NO: 33484 - DNA, 110 bp, synthetic construct
  source 1..110: mol_type = other DNA
taacctcaaacctcaaagattccttcttattcagagtcttagctgatgggcttccttcctatttctctgagagaaatgaatccactagatagcaactttcataagcacct

SEQ ID NO: 33485 - DNA, 110 bp, synthetic construct
  source 1..110: mol_type = other DNA
ataagagataaactaaggaggaataggactgatggagcaacaattacacatgggctgagttgaatcaggggtgggaggttgactgttctgtcactggaggcatcagaata

SEQ ID NO: 33486 - DNA, 110 bp, synthetic construct
  source 1..110: mol_type = other DNA
tgagcagtttattgcatgacagcaaatagagacccacgctcaggaggatctctacagccctctgtaaaggccatcatcacacacctcatctgtgaacccagacaaaatac

SEQ ID NO: 33487 - DNA, 110 bp, synthetic construct
  source 1..110: mol_type = other DNA
ttgttgcctccccatagacttctgacaagactgcttggtttccactggcctgcttcatctgtcactggtcttttcttatagttagagaggttacatttttgaaactagag

SEQ ID NO: 33488 - DNA, 110 bp, synthetic construct
  source 1..110: mol_type = other DNA
catctgtcactggtcttttcttatagttagagaggttacatttttgaaactagagctgtaaaattgggtcaaaatgtttaccagtcttatagctgctcacatcaatttta

SEQ ID NO: 33489 - DNA, 110 bp, synthetic construct
  source 1..110: mol_type = other DNA
tttcagcggtaagacaagacatacaaccaagtcttccctcagctaggcaagtattttagaacaggcaggtaagattacaaacactaatacaatctgtcacatctagctat

SEQ ID NO: 33490 - DNA, 110 bp, synthetic construct
  source 1..110: mol_type = other DNA
ttagaacaggcaggtaagattacaaacactaatacaatctgtcacatctagctatttattttgatggccaaatagtattccatagtgtgaatgcattctgattcaccatt

SEQ ID NO: 33491 - DNA, 110 bp, synthetic construct
  source 1..110: mol_type = other DNA
ccacacacataggggaggaccctgagttagaccaaatgtggactcaagaccagacaaagcaagataattggccaagaggaatctcagaagaactgtcccatataagtgat

SEQ ID NO: 33492 - DNA, 110 bp, synthetic construct
  source 1..110: mol_type = other DNA
aaagcaagataattggccaagaggaatctcagaagaactgtcccatataagtgatttaatctccctccccagaaccaagccatgtctctctctgagcctgctgtgtttct

SEQ ID NO: 33493 - DNA, 110 bp, synthetic construct
  source 1..110: mol_type = other DNA
tatattgtacacataaagtgacactcagtaatgttcaagatttaaaacagacaaagcatactaatggataaacagctcggtgaaaatcgttttgattattctcttgatga

SEQ ID NO: 33494 - DNA, 110 bp, synthetic construct; identical to SEQ ID NO: 33493
  source 1..110: mol_type = other DNA

SEQ ID NO: 33495 - DNA, 110 bp, synthetic construct; identical to SEQ ID NO: 33493
  source 1..110: mol_type = other DNA

SEQ ID NO: 33496 - DNA, 110 bp, synthetic construct; identical to SEQ ID NO: 33493
  source 1..110: mol_type = other DNA

SEQ ID NO: 33497 - DNA, 110 bp, synthetic construct
  source 1..110: mol_type = other DNA
ttgaagatcatttgaatagtattgtgggagagcctggaacaatttttggcacaatagatgatagccaatatattttactatcgaagctggatatagtaaagcatatgggt

SEQ ID NO: 33498 - DNA, 110 bp, synthetic construct
  source 1..110: mol_type = other DNA
agatgatagccaatatattttactatcgaagctggatatagtaaagcatatgggttttaaaaactgaaaggctctttgttagatgatttggcatttgtgatgatcaaaat

SEQ ID NO: 33499 - DNA, 110 bp, synthetic construct
  source 1..110: mol_type = other DNA
tacctcctcatctgtgacattcaagtatttttgcttggccccctgaccaacgaggcaagctttttgccaagtcattgagtggacatgtatcctaaacttgggccagttct

SEQ ID NO: 33500 - DNA, 110 bp, synthetic construct
  source 1..110: mol_type = other DNA
caagctttttgccaagtcattgagtggacatgtatcctaaacttgggccagttctctttatacctaaggtagttggacagagacactgcctattgggaagatttttcctc

SEQ ID NO: 33501 - DNA, 110 bp, synthetic construct; identical to SEQ ID NO: 33499
  source 1..110: mol_type = other DNA

SEQ ID NO: 33502 - DNA, 110 bp, synthetic construct; identical to SEQ ID NO: 33500
  source 1..110: mol_type = other DNA

SEQ ID NO: 33503 - DNA, 110 bp, synthetic construct
  source 1..110: mol_type = other DNA
gaactgcttgaaacctttcaatttgtcaattaacatcaaaacatctttttaagcatctatggtgcccagaattgtgctaattgctaaataacagaaagcagtttaaactg

SEQ ID NO: 33504 - DNA, 110 bp, synthetic construct
  source 1..110: mol_type = other DNA
tctatggtgcccagaattgtgctaattgctaaataacagaaagcagtttaaactggatcccctgttctcttagagtgtacagtctaatagggcatcataaaataacaaaa

SEQ ID NO: 33505 - DNA, 110 bp, synthetic construct
  source 1..110: mol_type = other DNA
aatctgaccagtatgcatgaggatgtgtattcgatccctggcctcattcagtgtgctaagaatctatctagcattgccacaagctacagtatagaccgcagatgcagctt

SEQ ID NO: 33506 - DNA, 110 bp, synthetic construct
  source 1..110: mol_type = other DNA
cgtgccacctgccatgcatgccaaccagtgctgtgggaacagggcccacgagccacacacagtccagccgtgaaggatagggatatgtggaatttgatgatcttgagtgg

SEQ ID NO: 33507 - DNA, 110 bp, synthetic construct
  source 1..110: mol_type = other DNA
ccacgagccacacacagtccagccgtgaaggatagggatatgtggaatttgatgatcttgagtgggataaatgagagtgagttaaagtttatgaagatttttcaaccttc

SEQ ID NO: 33508 - DNA, 110 bp, synthetic construct
  source 1..110: mol_type = other DNA
tttttgccactttcaatgatttgttgttcatgactgaaaatagctaaggccaattgaacaattggttaaaatgatactcccaaggattattgttttctaaaactttaact

SEQ ID NO: 33509 - DNA, 110 bp, synthetic construct
  source 1..110: mol_type = other DNA
aaatcattttgatatctagatttcagcaccaaggacagtgccaagtcaagtgcttcataaaggagaaattgtgcaaagagataaagaggataaggctggacacaattctc

SEQ ID NO: 33510 - DNA, 110 bp, synthetic construct
  source 1..110: mol_type = other DNA
agagactcacccacggttaagctgctcagctaaaatttaagctcagatttaaccagaatttaagcatcaaggcactggaagagaatcaatacaggaagtggaccagcctt

SEQ ID NO: 33511 - DNA, 110 bp, synthetic construct
  source 1..110: mol_type = other DNA
ttagttgtttcagaaaatttcttatcagatatagatgtctttggtttttgactgatatttcactgagtgcctattatgttttcacagacaacactctctaaggcttttac

SEQ ID NO: 33512 - DNA, 110 bp, synthetic construct
  source 1..110: mol_type = other DNA
tatttcactgagtgcctattatgttttcacagacaacactctctaaggcttttacctactttactaataaggtttattaaagcattttcagaactatcctttgaggaatt

SEQ ID NO: 33513 - DNA, 110 bp, synthetic construct
  source 1..110: mol_type = other DNA
gtgaggcaagacagtgaagcaagggctggaatctctaaccggatcttccagctggtagacagaactgacagagtaaatgtcacgccatgatagaccaacaaacagagatg

SEQ ID NO: 33514 - DNA, 110 bp, synthetic construct
  source 1..110: mol_type = other DNA
tagacagaactgacagagtaaatgtcacgccatgatagaccaacaaacagagatggtacccaggtacccaggaggtatgatgacacacgagagaagctcagtgacatgcc

SEQ ID NO: 33515 - DNA, 110 bp, synthetic construct
  source 1..110: mol_type = other DNA
tgcttgtgttcaaaactcaatgaacataaacacagaaaacagcattcactgagctcttatagaagctaaacggagtccttcacgctagattgattgttacagatgaagaa

SEQ ID NO: 33516 - DNA, 110 bp, synthetic construct
  source 1..110: mol_type = other DNA
cttatagaagctaaacggagtccttcacgctagattgattgttacagatgaagaaccagctcggagtacaaccagcccaagaccaaacaagtgtaatgagtgacagagct

SEQ ID NO: 33517 - DNA, 110 bp, synthetic construct
  source 1..110: mol_type = other DNA
tgggcaaaaatctttggagttactatccccatgttaaagtgaactaagccagttcatgcctaaaaccatctacaggggtgtagaatttcacctccaagacacacagtggt

SEQ ID NO: 33518 - DNA, 110 bp, synthetic construct
  source 1..110: mol_type = other DNA
ttttggatggtgaacctaagtgagattgtggaagctcctgcagatttagaggattgatgtatcatattctgaattccagtatagatctgcctcccagcaaacttttcttc

SEQ ID NO: 33519 - DNA, 110 bp, synthetic construct
  source 1..110: mol_type = other DNA
gaagttttatttatctctgtgtcatttgtcaaggtctcttggaatatgtgaatatatttatcatctgctgcatcaatcagagttattagttcaagcaagagaaaacaact

SEQ ID NO: 33520 - DNA, 110 bp, synthetic construct
  source 1..110: mol_type = other DNA
cttaggtgtaacagagtcatctgttagagacccaaactacttatcaccatggcttttttcaagccttgcttatttctcttgttatttaccgtaaaaatttagctagggca

SEQ ID NO: 33521 - DNA, 110 bp, synthetic construct
  source 1..110: mol_type = other DNA
ttttcaagccttgcttatttctcttgttatttaccgtaaaaatttagctagggcataacaaaatgtatccacatggatcaactgggtgctaatacatttctccccagcct

SEQ ID NO: 33522 - DNA, 110 bp, synthetic construct
  source 1..110: mol_type = other DNA
tacccagaattggaattgctgtatcacagaatagatctatatataattttaaaggaaacttcgtattattttccataatgtctgtaccaagttacatgaccaccagcaat

SEQ ID NO: 33523 - DNA, 110 bp, synthetic construct
  source 1..110: mol_type = other DNA
agggaagaggtactttatgccaagcataacagatttatttcattggggtggttttgtctgaggcccactggatagtagagaaattctctgagatggcacagactagagct

SEQ ID NO: 33524 - DNA, 110 bp, synthetic construct
  source 1..110: mol_type = other DNA
tatggagaggggaagaaaatttatctgttgaggaacatcttgtacagtagactttactgggaatgaaacattattctactgcaccagaggactttttaaatggaaaaact

SEQ ID NO: 33525 - DNA, 110 bp, synthetic construct
  source 1..110: mol_type = other DNA
actgggaatgaaacattattctactgcaccagaggactttttaaatggaaaaactcagaattcctactgtggcatagtgggttaaggatttggtgttgccacagctgtgg

SEQ ID NO: 33526 - DNA, 110 bp, synthetic construct
  source 1..110: mol_type = other DNA
aaattacaaaattatatttttaaaggtatcagagaagtttggaggcaataaggtttagataagctgcatttcacagaagagaaatgtgttttgagatgggtgaagaatga

SEQ ID NO: 33527 - DNA, 110 bp, synthetic construct
  source 1..110: mol_type = other DNA
tagataagctgcatttcacagaagagaaatgtgttttgagatgggtgaagaatgactggatgttttgctttcctcaggacatttgctggttctgcatgtggcctgaggct

SEQ ID NO: 33528 - DNA, 110 bp, synthetic construct
  source 1..110: mol_type = other DNA
gaaatgttcatcttgttggaagcttcctcagcaaactaataatttgacattgcagtgatttcatctcctgttttgaagcacagtggaagttgtgtttggaagtggaaatg

SEQ ID NO: 33529 - DNA, 110 bp, synthetic construct
  source 1..110: mol_type = other DNA
gacattgcagtgatttcatctcctgttttgaagcacagtggaagttgtgtttggaagtggaaatggacatgtataacattgtataggaaaatatttctattagtaaaatg

SEQ ID NO: 33530 - DNA, 110 bp, synthetic construct
  source 1..110: mol_type = other DNA
ctcatgtaaataactgacttaattccaggaagcaaactattgaccaccgtttcatagagaatgtgaagaaatttaagtattgaagtgtaagctaatcactgctttagcta

SEQ ID NO: 33531 - DNA, 110 bp, synthetic construct
  source 1..110: mol_type = other DNA
agagaatgtgaagaaatttaagtattgaagtgtaagctaatcactgctttagctatagtgagcagctaagagtctttcacagtgttaatgaggtgttaacactgttcttc

SEQ ID NO: 33532 - DNA, 110 bp, synthetic construct
  source 1..110: mol_type = other DNA
tattatttttgctagcatccttgctttatagagcagaaacctaaaacctttgaaatagtcaaagttcacccagctagttattgtcagatgtagggcctgaactcaggtct

SEQ ID NO: 33533 - DNA, 110 bp, synthetic construct
  source 1..110: mol_type = other DNA
aagttattttccagagtcttagaataaaagaaagagctcaagattcttgctaatcaaagcaatctagttccagtgtctggaccctcatcaaatgatgtaatatctctcta

SEQ ID NO: 33534 - DNA, 110 bp, synthetic construct
  source 1..110: mol_type = other DNA
tcatccccccagtaggtccatcattagtgccccagttggaccttctgcatgcagtgttctggcatgagtccttctgcaaacaattgtcctgaaggcatgagctgtgcctc

SEQ ID NO: 33535 - DNA, 110 bp, synthetic construct
  source 1..110: mol_type = other DNA
gttctggcatgagtccttctgcaaacaattgtcctgaaggcatgagctgtgcctcattcctttttgtatcaccagcacctgcacagtgactcactctcagtgaaagctta

SEQ ID NO: 33536 - DNA, 110 bp, synthetic construct
  source 1..110: mol_type = other DNA
ttaacttttactataggggttagtaagttccccacttactatgtttacaacagagagcactttttatgaaatatgtgcatagacatgcaaatagcttcttgagacattca

SEQ ID NO: 33537 - DNA, 110 bp, synthetic construct
  source 1..110: mol_type = other DNA
agcactttttatgaaatatgtgcatagacatgcaaatagcttcttgagacattcacgagctattccccactctcatggatattctttctcatacatatattggacttttc

SEQ ID NO: 33538 - DNA, 110 bp, synthetic construct
  source 1..110: mol_type = other DNA
gtccccttttagtgtgtgcttacccctcttccagcacattagcctttaccccagaggggaagaacattgaagcaagtggatcccatgtgggctcttggcttgtgttagtc

SEQ ID NO: 33539 - DNA, 110 bp, synthetic construct
  source 1..110: mol_type = other DNA
tttcaaatatatagtatataaaatatctaaacttgtatccaggtaacctggacagatttcctacagtctcaacatagaaaccgattcacctagtgtgttagatatatagc

SEQ ID NO: 33540 - DNA, 110 bp, synthetic construct
  source 1..110: mol_type = other DNA
atttcctacagtctcaacatagaaaccgattcacctagtgtgttagatatatagcctactccatgtaggtctctgcttaattatcactctcaggaaatttcccatcttcc

SEQ ID NO: 33541 - DNA, 110 bp, synthetic construct
  source 1..110: mol_type = other DNA
ttgtgcccctcaagggaaacttttctattcacttgaggggattgggatttgcaaactttgtaatattgctgagtagaaatctcaaaaagtttccaatggcaagttgctaa

SEQ ID NO: 33542 - DNA, 110 bp, synthetic construct
  source 1..110: mol_type = other DNA
ctttgtaatattgctgagtagaaatctcaaaaagtttccaatggcaagttgctaatcctgcatttgcttcatctgttcacttccagaagcaccactagcaagcatatgac

SEQ ID NO: 33543 - DNA, 110 bp, synthetic construct
  source 1..110: mol_type = other DNA
aaaatacctgtgtcagaattagccctttgaatcctcatgcttgtacagtaggatatctacgtatttgtgtgcatgtacacaattgtgcctgcacagatacacacacatac

SEQ ID NO: 33544 - DNA, 110 bp, synthetic construct
  source 1..110: mol_type = other DNA
tctacgtatttgtgtgcatgtacacaattgtgcctgcacagatacacacacatacttgagtctcattcttgttttattttgttttttgtctttttagggccgcacccacc

SEQ ID NO: 33545 - DNA, 110 bp, synthetic construct
  source 1..110: mol_type = other DNA
atgtttaactaaacattggaaagtaataggtacaaacatagggaaccatgaatgagatttattgttagtagcctccagggtagtttatttctccacactcatcagacaca

SEQ ID NO: 33546 - DNA, 110 bp, synthetic construct
  source 1..110: mol_type = other DNA
gagaagaaagaggaagatttttcaaagtttcaaccataatctgttctagttcattagattgcaaacactgcacaaacatgtattgactagacctttactgaaaatgttaa

SEQ ID NO: 33547 - DNA, 110 bp, synthetic construct
  source 1..110: mol_type = other DNA
agattgcaaacactgcacaaacatgtattgactagacctttactgaaaatgttaagagaaagaaatgtctgggggtggctatgtctgaattccccagctatttgtagatg

SEQ ID NO: 33548 - DNA, 110 bp, synthetic construct
  source 1..110: mol_type = other DNA
tagagttgggaagaaaaaaaggggaaaggatgaggatgacatagcaggagtagatatttttttttgaaatgtatatccagattgtaaatgtaagttcaagaaaatatatt

SEQ ID NO: 33549 - DNA, 110 bp, synthetic construct
  source 1..110: mol_type = other DNA
taacaaaaataccccttttaaatctcatgccatttctctccaacacaaattctttatggaaattaagctggtctctactattcccacaaatgccctttgttcatcctttt

SEQ ID NO: 33550 - DNA, 110 bp, synthetic construct; identical to SEQ ID NO: 33549
  source 1..110: mol_type = other DNA

SEQ ID NO: 33551 - DNA, 110 bp, synthetic construct
  source 1..110: mol_type = other DNA
ttcatactttttaatctttctccctgtctccattctctggtgcttctgagcctctgtgcctgttgtctcctttctgattttgattgaaacactttcctttctactctttt

SEQ ID NO: 33552 - DNA, 110 bp, synthetic construct
  source 1..110: mol_type = other DNA
gtgttctttgacaaaacacaacactgttggtatcaaatgaaataaaaaataagacacgctttctcaagtggtctgcccttcttgaatgccttcccaagctttgaacatac

SEQ ID NO: 33553 - DNA, 110 bp, synthetic construct
  source 1..110: mol_type = other DNA
acgctttctcaagtggtctgcccttcttgaatgccttcccaagctttgaacatacacttatttttaaaaatcaagggcttttgtgtagctgtgtgaggtggaggcagaag

SEQ ID NO: 33554 - DNA, 110 bp, synthetic construct
  source 1..110: mol_type = other DNA
atccaataacataatgatattgacacaattacagcaagcaaaaaaatgtgcatttttcaagtaatccctcccccatcctttttccatctcccagctaaccagaatgtaca

SEQ ID NO: 33555 - DNA, 110 bp, synthetic construct
  source 1..110: mol_type = other DNA
ttcaagtaatccctcccccatcctttttccatctcccagctaaccagaatgtacataaataaagcaaactaaacaatgctctggggaaaaaattaacctaatttctaaac

SEQ ID NO: 33556 - DNA, 110 bp, synthetic construct
  source 1..110: mol_type = other DNA
tatagacacagagcctagtgaatgaaaggagtgctgatctcaagtcttaactacaaagcttccctctaattctcagggtgacttcaactactgattactatgattaggca

SEQ ID NO: 33557 - DNA, 110 bp, synthetic construct
  source 1..110: mol_type = other DNA
ttttgcgctgtcttgacccagttttgaggccctgggtagtctgattacttcccctcccgaagcagccagttaagcttttaccctgactactgcccttattgggctctcta

SEQ ID NO: 33558 - DNA, 110 bp, synthetic construct
  source 1..110: mol_type = other DNA
cccgaagcagccagttaagcttttaccctgactactgcccttattgggctctctaactctgaaccacagtgcacttgccctaatctccatggggccaagaatcagaacta

SEQ ID NO: 33559 - DNA, 110 bp, synthetic construct
  source 1..110: mol_type = other DNA
agggtgggggtgatgataaaatggatattaaaagacaacctataacatcaagagtggcatttcacctttattgtctcatttaatcctccctaggaccctatgaggtaggc

SEQ ID NO: 33560 - DNA, 110 bp, synthetic construct
  source 1..110: mol_type = other DNA
tgttgtccacacctcagctgccactggcagtactgatgtcatgagaagtggtcatatcctccaaccaaactgcagtttgggctgtccattccccagctgatactagtggt

SEQ ID NO: 33561 - DNA, 110 bp, synthetic construct
  source 1..110: mol_type = other DNA
atcctccaaccaaactgcagtttgggctgtccattccccagctgatactagtggtcccttaggtacctaccacctcattaggtttaaggcatgcaaataattttcacatc

SEQ ID NO: 33562 - DNA, 110 bp, synthetic construct
  source 1..110: mol_type = other DNA
attggagtaatgtgtctataagcaaggaatgccaaagattgctggcaaccaccagaagctagaaagaagtaaagaaacgccatccgctagagcctttagagaggcccagc

SEQ ID NO: 33563 - DNA, 110 bp, synthetic construct
  source 1..110: mol_type = other DNA
aagctagaaagaagtaaagaaacgccatccgctagagcctttagagaggcccagctaacacctcgatttcagacttctagcctcagaactgtgagataatacactcctgt

SEQ ID NO: 33564 - DNA, 110 bp, synthetic construct
  source 1..110: mol_type = other DNA
ctaatacgtagttttgtagttttaatacataactacatctgtctgtagtgtcaaacttgcctggagaagctgaaggattgaacacaatcaaagtaaatatgaattataaa

SEQ ID NO: 33565 - DNA, 110 bp, synthetic construct
  source 1..110: mol_type = other DNA
cttgcctggagaagctgaaggattgaacacaatcaaagtaaatatgaattataaatgcattttcttttcaatccatcaatagtataatcaagcttcccttggaagagata

SEQ ID NO: 33566 - DNA, 110 bp, synthetic construct; identical to SEQ ID NO: 33564
  source 1..110: mol_type = other DNA

SEQ ID NO: 33567 - DNA, 110 bp, synthetic construct; identical to SEQ ID NO: 33565
  source 1..110: mol_type = other DNA

SEQ ID NO: 33568 - DNA, 110 bp, synthetic construct
  source 1..110: mol_type = other DNA
tagaggcagaatctggacagaacacaaaaggtcaggtcactggatgacatgctaaagagcttggaaaagtctgtgggtaactgtatttgtttcacaaggctgctgtaaca

SEQ ID NO: 33569 - DNA, 110 bp, synthetic construct
  source 1..110: mol_type = other DNA
agagcttggaaaagtctgtgggtaactgtatttgtttcacaaggctgctgtaacaaattagcacagacttgttgactatagacaacaggcatttattctctcatagttct

SEQ ID NO: 33570 - DNA, 110 bp, synthetic construct
  source 1..110: mol_type = other DNA
caggaatccccacttcaggctttatttctaaaaaaccctccttaagattcctcgtcagaggctttcttgatagctggatctaaagtagaactccatctccccaccattct

SEQ ID NO: 33571 - DNA, 110 bp, synthetic construct
  source 1..110: mol_type = other DNA
gggttcaatctcatcaaccagtcagagaattgttcacaagctgatcacacacaccagttccctcacctggtctttaaaattgtgttcctgggagttcctgctgcggctca

SEQ ID NO: 33572 - DNA, 110 bp, synthetic construct
  source 1..110: mol_type = other DNA
acagatactagaagggttcttaactctgagtcacagtgggaactccagcaaagttattttaaaagtgacatgtttgggcagaagtccaaagctgttcttaacagaacaac

SEQ ID NO: 33573 - DNA, 110 bp, synthetic construct
  source 1..110: mol_type = other DNA
attttaaaagtgacatgtttgggcagaagtccaaagctgttcttaacagaacaactttacactgcttgtcacatatggcagaaggagcaatgcaggtcaagtcatgcttt

SEQ ID NO: 33574 - DNA, 110 bp, synthetic construct; identical to SEQ ID NO: 33572
  source 1..110: mol_type = other DNA

SEQ ID NO: 33575 - DNA, 110 bp, synthetic construct; identical to SEQ ID NO: 33573
  source 1..110: mol_type = other DNA

SEQ ID NO: 33576 - DNA, 110 bp, synthetic construct
  source 1..110: mol_type = other DNA
gtgtaagaggtccatgtggactttcaaacttgaccagttccaccaaatactcatcaaacgtacacaaaaacacccttagacagagtatcacacatgcacacgaataaaaa

SEQ ID NO: 33577 - DNA, 110 bp, synthetic construct
  source 1..110: mol_type = other DNA
aaacgtacacaaaaacacccttagacagagtatcacacatgcacacgaataaaaacacacacaggcacacaccccttatatgaagagatgtgccctgaggtcttctctac

SEQ ID NO: 33578 - DNA, 110 bp, synthetic construct
  source 1..110: mol_type = other DNA
catgtattcagcccttaactgtgtatcaggaccaaggacttttgctacttgatttcatttctcatttcctttattgtacaacaaccttgtgaagtaggtattttttattc

SEQ ID NO: 33579 - DNA, 110 bp, synthetic construct
  source 1..110: mol_type = other DNA
catgcaatatgtctcttattacactagccttctgaaaatgagatttttattttggtagtattcagaatgagtttctggaatatttaaatggagaatgcccccatggaaac

SEQ ID NO: 33580 - DNA, 110 bp, synthetic construct; identical to SEQ ID NO: 33579
  source 1..110: mol_type = other DNA

SEQ ID NO: 33581 - DNA, 110 bp, synthetic construct
  source 1..110: mol_type = other DNA
tagggctttccctggtgcttctcggccctggagctcttccagggggtgagtggtactgggcagctgctccgcaggattgtagtctctccagagggtgggaaggccaggct

SEQ ID NO: 33582 - DNA, 110 bp, synthetic construct
  source 1..110: mol_type = other DNA
ctgggcagctgctccgcaggattgtagtctctccagagggtgggaaggccaggctggggaaagcccccggaggtggttggcttctcacgagtggtgaggctggccctcca

SEQ ID NO: 33583 - DNA, 110 bp, synthetic construct
  source 1..110: mol_type = other DNA
aatacaatcacggtttatgatttcaaaaaagtggttgttaaaaacaaaagatgtacagaaggtgcacttaggaatggtagaatcagaactttgaaaatccacttttccaa

SEQ ID NO: 33584 - DNA, 110 bp, synthetic construct; identical to SEQ ID NO: 33583
  source 1..110: mol_type = other DNA

SEQ ID NO: 33585 - DNA, 110 bp, synthetic construct
  source 1..110: mol_type = other DNA
gcttttctccagtcagtcagcccaaagctcttgcagggagtgggcaccagtggtcctcttgcaggagaatgggcactactgctggcagctcttctggtactgattggtca

SEQ ID NO: 33586 - DNA, 110 bp, synthetic construct
  source 1..110: mol_type = other DNA
atgcctaaagctaccaaagctgtaagaaggaagggaatatttcctcctagagcttccagagggattgtggccttgctgacactcctggtctccaaaatcatgagacagga

SEQ ID NO: 33587 - DNA, 110 bp, synthetic construct
  source 1..110: mol_type = other DNA
actgtgacaacctcatccttctattgttctttttcctatcagcatttcatgtcatgtttcttaaccctaataatcattgccagaatcaataattgcctaagaggttgcaa

SEQ ID NO: 33588 - DNA, 110 bp, synthetic construct
  source 1..110: mol_type = other DNA
cctcattaagtttgatgcccacaatgaacagattgatctcaatttagacaagactaaggttttaaaaccatttctattgagctgctttatttggaaccctctttgagcat

SEQ ID NO: 33589 - DNA, 110 bp, synthetic construct
  source 1..110: mol_type = other DNA
ctcagaagaaggatgtgaaatgacaataaaatgcttacactgcattaatgtatgcgattcatgtttaaaacccccattcccctcaccattaatttctaaattccatagtt

SEQ ID NO: 33590 - DNA, 110 bp, synthetic construct
  source 1..110: mol_type = other DNA
gattcatgtttaaaacccccattcccctcaccattaatttctaaattccatagttacagtaatttatgattgttactcaataatttactgttttcctatgcctcaaatca

SEQ ID NO: 33591 - DNA, 110 bp, synthetic construct
  source 1..110: mol_type = other DNA
gcaagaatgtaagtgtgagaatatgatggcatatgtgtgggtattcattttatcttatttctactcctctgagctatccttattttcacaatgtaatcatatttctttct

SEQ ID NO: 33592 - DNA, 110 bp, synthetic construct
  source 1..110: mol_type = other DNA
aattccatgtaattaatgatcctcatataagtattaacattattcaaaagtaccaactttcccaggattccggagtcatttaatggcatagccagaatgaaaactttgat

SEQ ID NO: 33593 - DNA, 110 bp, synthetic construct
  source 1..110: mol_type = other DNA
aaaagcccttacaggggctcaagtcagctaagcctggagaaaatcatgttccaccccagagcaagcctatgtgtggccagttgcctttgagctaactgatcggtaccttc

SEQ ID NO: 33594 - DNA, 110 bp, synthetic construct
  source 1..110: mol_type = other DNA
taacccacttgagtgaggccagggatagatcctcatagataccagtcagatttgtttcctctgtgctgcaacaggaactccagtgatggcaattttgactagtgtgagct

SEQ ID NO: 33595 - DNA, 110 bp, synthetic construct
  source 1..110: mol_type = other DNA
tcagatttgtttcctctgtgctgcaacaggaactccagtgatggcaattttgactagtgtgagctcgtacctcattatggtttttgatttgcatttctgtaataattagt

SEQ ID NO: 33596 - DNA, 110 bp, synthetic construct
  source 1..110: mol_type = other DNA
agaaatctcttgggtctagttcaaagtacaataaatacagaaaatcttaaccgtgccgaaataggaaggtcaacttccctcttctctcttcattctaatgtcctatcaaa

SEQ ID NO: 33597 - DNA, 110 bp, synthetic construct
  source 1..110: mol_type = other DNA
ccaactagtatccataaggatgcaggctcaatccctgccttgccatgagctgtagcataggtcacaagtgttgcttggatgtagcattgctgtatctgtggtgtaagtca

SEQ ID NO: 33598 - DNA, 110 bp, synthetic construct
  source 1..110: mol_type = other DNA
aagctattttaactcaaagaaggaatgaccgcccaggactttttgtcagagaagtgtgacaatttagcacctctgtggctgacgttgtcaagccaagtggacagtctaat

SEQ ID NO: 33599 - DNA, 110 bp, synthetic construct
  source 1..110: mol_type = other DNA
gtgacaatttagcacctctgtggctgacgttgtcaagccaagtggacagtctaatagcttcacttacaaaagactctgcctggttgtgtgaaagtcaggtttttcccaga

SEQ ID NO: 33600 - DNA, 110 bp, synthetic construct
  source 1..110: mol_type = other DNA
tggaagttcccaggctagggatcgaattagtacacagctgcaggcctacaccacagccatggcaacaatggattctaggcatgccagatccttaacccactgactgaggc

SEQ ID NO: 33601 - DNA, 110 bp, synthetic construct; identical to SEQ ID NO: 33600
  source 1..110: mol_type = other DNA

SEQ ID NO: 33602 - DNA, 110 bp, synthetic construct
  source 1..110: mol_type = other DNA
gactaagagtatatgttatgcttccaatctcagcttcaccacttactaactgtatgacattgggcaactcctatattaataaagaatgaaatgtttctcttatcccttcc

SEQ ID NO: 33603 - DNA, 110 bp, synthetic construct
  source 1..110: mol_type = other DNA
tacagtcttgagggcattagtgttccctagagaggagcagtcttataaaagcttatagatttatgcctggagttccctttgtgtctcagcaagtcaagaacccaactagt

SEQ ID NO: 33604 - DNA, 110 bp, synthetic construct
  source 1..110: mol_type = other DNA
tcccagatacctgcctggcttaccttctccctagttcaagtctctgctcagataccaccctatcagaagggctgtttctatccgccaacagcttcccttcattgttcact

SEQ ID NO: 33605 - DNA, 110 bp, synthetic construct
  source 1..110: mol_type = other DNA
caccctatcagaagggctgtttctatccgccaacagcttcccttcattgttcactctgtagcctcttattctgctttaatttccttcttggtacatatcactaattgaaa

SEQ ID NO: 33606 - DNA, 110 bp, synthetic construct
  source 1..110: mol_type = other DNA
ggcagcagctcatgcctcgccctttcagcagccagcctacctctacagatggtcccgttgcccacgtagcctggtttgcaggtgcagctgtgtccctggacagtgttggt

SEQ ID NO: 33607 - DNA, 110 bp, synthetic construct
  source 1..110: mol_type = other DNA
agaggagcacagggatcagctggctgaagatcccggaagccaactttgtaaaccaaattagactgtacgaagcctgaatacttccattgcctatgacaggggtcagccca

SEQ ID NO: 33608 - DNA, 110 bp, synthetic construct
  source 1..110: mol_type = other DNA
gaggcctccatcttcattttaccaaaggagaaagtggacagttatgtattttgcccgaagtcatgaaactagcaatagtcccagctgaggcttgactacaggccttctga

SEQ ID NO: 33609 - DNA, 110 bp, synthetic construct
  source 1..110: mol_type = other DNA
gtactatggtgaaatgaacaggcatgaagctcaagatcagctctgggtctggcatgaagattcctcagaagacgaggtttgaggatggacttcatgccttcctgtatttc

SEQ ID NO: 33610 - DNA, 110 bp, synthetic construct
  source 1..110: mol_type = other DNA
cagaacaaagcaaagagtatggtgaaaaagccaggtcctcagatctctcatttatgggatctggcctagagtaaatcatttccccccttcaagctttggtctctaagcca

SEQ ID NO: 33611 - DNA, 110 bp, synthetic construct
  source 1..110: mol_type = other DNA
gacttaaaatgaagcacaaggaggcaaagtaacttgccctacatccacagcaagtaactagtagagaagggatttaaacctgggcagtctggctccagagctcatgtcat

SEQ ID NO: 33612 - DNA, 110 bp, synthetic construct
  source 1..110: mol_type = other DNA
aactagtagagaagggatttaaacctgggcagtctggctccagagctcatgtcatatagatttttattagataagaataacaaaggccaaattagttgaggagggttaca

SEQ ID NO: 33613 - DNA, 110 bp, synthetic construct
  source 1..110: mol_type = other DNA
atccatgcccatatcttccagaagtctcagctcgggtttaccctgatcctcgcagataacagagatcaagtcacaatcgtggcccttgccagggtcacccctacttctgt

SEQ ID NO: 33614 - DNA, 110 bp, synthetic construct
  source 1..110: mol_type = other DNA
aaaagaagctcaattcccacttagtcacgtttctaggccttgaactcaaacgaagtgctgcctattgagatgtattgggagaattgtgggaattttgcatgccattagca

SEQ ID NO: 33615 - DNA, 110 bp, synthetic construct
  source 1..110: mol_type = other DNA
gatccctcaaaataaagagagaggtaaagcatggctgtcagctctattagcatcacgaaaaggaaaacaagaaaagtgtgatgaaaagatctttttaatatgaagactgt

SEQ ID NO: 33616 - DNA, 110 bp, synthetic construct
  source 1..110: mol_type = other DNA
taaccactgagccacgacaggaactgtccacagatgtttataaattgcttctctccatttcctgctgttgaaatgagggatctcaaagctcactaaagctagagttggca

SEQ ID NO: 33617 - DNA, 110 bp, synthetic construct
  source 1..110: mol_type = other DNA
catttcctgctgttgaaatgagggatctcaaagctcactaaagctagagttggcaccagctcatctcaacagatggcaagaaaagcacctaacaaaaatgcaacaatctt

SEQ ID NO: 33618 - DNA, 110 bp, synthetic construct
  source 1..110: mol_type = other DNA
ttaagttctctgcgcaggaaatatatatcttatcccataatgtcagttcattcattctaaaataatccttttgttatcttccgaaaaggctaagttaaaagaattctgcc

SEQ ID NO: 33619 - DNA, 110 bp, synthetic construct
  source 1..110: mol_type = other DNA
tctaaaataatccttttgttatcttccgaaaaggctaagttaaaagaattctgccaggcattttcactgaggaatatccaggctcccttactatagtatctgatcaggcc

SEQ ID NO: 33620 - DNA, 110 bp, synthetic construct
  source 1..110: mol_type = other DNA
ggggtgtgggagggaaggatcatctttcttatacgctcaaagcattaagtaatgtcctagttctgcagcatggccgctgttgtggcgaaagaagtggtttatgggaccaa

SEQ ID NO: 33621 - DNA, 110 bp, synthetic construct
  source 1..110: mol_type = other DNA
cctagttctgcagcatggccgctgttgtggcgaaagaagtggtttatgggaccaatgctaagagccagtcacagaaatttcacagggttctgactttagccagatctgtc

SEQ ID NO: 33622 - DNA, 110 bp, synthetic construct
  source 1..110: mol_type = other DNA
ccttaactgagctcatcaggacattcacaggcaaggcaaaacagtctctcaactgactccaatctcgcctcagtctacttgatcaatttcctttaactgttgtgtccact

SEQ ID NO: 33623 - DNA, 110 bp, synthetic construct
  source 1..110: mol_type = other DNA
cttacacagcagagaaataaacctctcctcccaaactttgtttctacccacagccttaggaattttattattcaatgacagtgccactaaattatcttctaaataaagct

SEQ ID NO: 33624 - DNA, 110 bp, synthetic construct
  source 1..110: mol_type = other DNA
ttaggaattttattattcaatgacagtgccactaaattatcttctaaataaagctcatgataagatctgctggcatcaaagcaattgcttcttccaaacctgacgtttga

SEQ ID NO: 33625 - DNA, 110 bp, synthetic construct
  source 1..110: mol_type = other DNA
agagtcctgccacctaaattttactgatttggagaatcaattaaatataatatgaaagatctatgctcaaagggaggaaaaagtaaaaggacaattatcttcaccatgcc

SEQ ID NO: 33626 - DNA, 110 bp, synthetic construct
  source 1..110: mol_type = other DNA
aagatctatgctcaaagggaggaaaaagtaaaaggacaattatcttcaccatgcccttaaaatcagtttcccaaaaatagtttgtcatgactgcttaacttgtcctatga

SEQ ID NO: 33627 - DNA, 110 bp, synthetic construct
  source 1..110: mol_type = other DNA
ccgccccagcttttcttctggtagtacccaggcaacagaatccaacctcatgaccttgaaaggcagaagcgtagtcatccaacttttcaaagtccaccacttcttgattc

SEQ ID NO: 33628 - DNA, 110 bp, synthetic construct
  source 1..110: mol_type = other DNA
ttgaaaggcagaagcgtagtcatccaacttttcaaagtccaccacttcttgattctagaaacaaagacagagctgagtatatacttaatgtggttaaaaacaaaacaaaa

SEQ ID NO: 33629 - DNA, 110 bp, synthetic construct
  source 1..110: mol_type = other DNA
tatttattccaaaggcattcagagaaaaagtgaggtctgagactatataaacaagatgtttagctcacatctcttttgcttacgttcttcccttcagacatgtgacacat

SEQ ID NO: 33630 - DNA, 110 bp, synthetic construct
  source 1..110: mol_type = other DNA
atgtttagctcacatctcttttgcttacgttcttcccttcagacatgtgacacatacaccattgccttcatggaggaatctacagagggggaggcacatggaaagtgaac

SEQ ID NO: 33631 - DNA, 110 bp, synthetic construct
  source 1..110: mol_type = other DNA
gaaggtgcatttctgcaacagaattgagttggacatttgtttttattgagttggacatttgtttttattacagaacagtaatgagactgcagaggagtagctaactttac

SEQ ID NO: 33632 - DNA, 110 bp, synthetic construct
  source 1..110: mol_type = other DNA
catttgtttttattacagaacagtaatgagactgcagaggagtagctaactttacttaaaattattaagaagctaatagtatttaccagtatgaccctaagagtggtaca

SEQ ID NO: 33633 - DNA, 110 bp, synthetic construct
  source 1..110: mol_type = other DNA
aatctgccaaacgtgcctgtcagatgtggacctcataacttgagcaaggtcacacagctggtgaaagaaacagggctggggtttccaaacaagtctagggtcctgttttc

SEQ ID NO: 33634 - DNA, 110 bp, synthetic construct
  source 1..110: mol_type = other DNA
agctggtgaaagaaacagggctggggtttccaaacaagtctagggtcctgttttctataccacagccaatgccatcaaaaatcctcatcacagacccccagccctgtgct

SEQ ID NO: 33635 - DNA, 110 bp, synthetic construct
  source 1..110: mol_type = other DNA
gccagcaaacagggttcgatgagctggggaaggagacaaagagaggatggatctgctaaagctgaaacaaacaccccaaatgaataccttttcaccttgttgtcccagag

SEQ ID NO: 33636 - DNA, 110 bp, synthetic construct
  source 1..110: mol_type = other DNA
ctaaagctgaaacaaacaccccaaatgaataccttttcaccttgttgtcccagagccagcacagtaagggctctgtcaacactggcagagtggggtggaattgctcttca

SEQ ID NO: 33637 - DNA, 110 bp, synthetic construct; identical to SEQ ID NO: 33635
  source 1..110: mol_type = other DNA

SEQ ID NO: 33638 - DNA, 110 bp, synthetic construct; identical to SEQ ID NO: 33636
  source 1..110: mol_type = other DNA

SEQ ID NO: 33639 - DNA, 110 bp, synthetic construct
  source 1..110: mol_type = other DNA
gttcatttcagtgcctcttgtagctgagcatcacaactctgagctgagcatcacgaccattttgcatactatttccctagtgtcatgcataggccctaatatgtagtaag

SEQ ID NO: 33640 - DNA, 110 bp, synthetic construct
  source 1..110: mol_type = other DNA
gaacttcagcagggtctctgtgctgcctaccactgcgggcagccccgctagaacccaatcggaggactctggttcttcttcgtttatgaacttggccaagggcatgcctg

SEQ ID NO: 33641 - DNA, 110 bp, synthetic construct
  source 1..110: mol_type = other DNA
caatcggaggactctggttcttcttcgtttatgaacttggccaagggcatgcctgctttgaaccacagtgctctgacctcatggccacaccactcacctcccagggtcag

SEQ ID NO: 33642 - DNA, 110 bp, synthetic construct
  source 1..110: mol_type = other DNA
aatggtcatggcgaagtgatgagcgagtaaacccactggccccagaggcagcagtaatgctctccgggcttgctcgggatggttgtcatgagatgatcagaccacaggaa

SEQ ID NO: 33643 - DNA, 110 bp, synthetic construct
  source 1..110: mol_type = other DNA
atcctttttttcaggcctgtgaaagcaaagagattcccaaagcagctcctgtccgtcagagtgagaggggaagtggataatggaaggagggagtggaagaatggggccgt

SEQ ID NO: 33644 - DNA, 110 bp, synthetic construct
  source 1..110: mol_type = other DNA
tgcacagagccagcccctcttcctgaagccccaagtcacagaagccacaagggtccatgacagaggccactcccgaagacgatggactgggaaggtcaccaggtgtgacc

SEQ ID NO: 33645 - DNA, 110 bp, synthetic construct
  source 1..110: mol_type = other DNA
catgacagaggccactcccgaagacgatggactgggaaggtcaccaggtgtgaccagcaggacaaaggcaactctgaagcctctgctggaggttctggcaccaagcaagt

SEQ ID NO: 33646 - DNA, 110 bp, synthetic construct
  source 1..110: mol_type = other DNA
gatgttcatgtttgtccttgtttaaagtacgttttggatgcttcaggactaaggttggagcctgtcaagtgacatcaaaccacgcacctagctctgctcacactgctgcc

SEQ ID NO: 33647 - DNA, 110 bp, synthetic construct
  source 1..110: mol_type = other DNA
tggagcctgtcaagtgacatcaaaccacgcacctagctctgctcacactgctgccacttctgcaacacccctgggtccccgtgtccctgggccacttttcctcatcctgg

SEQ ID NO: 33648 - DNA, 110 bp, synthetic construct
  source 1..110: mol_type = other DNA
tataatcaaaaaattagaggcaacttaaatgaaagtggttaaaaatattaaggtaaattccggagttctggttgtaggtcagtggtaatgaacccaactggtatccatga

SEQ ID NO: 33649 - DNA, 110 bp, synthetic construct
  source 1..110: mol_type = other DNA
gttagataccaacttctagaccttaaatacatggctgtctctcaaactaaggtggaagagcagtgtgtatcagataattttcaaccacctggaacccaggagcctcattc

SEQ ID NO: 33650 - DNA, 110 bp, synthetic construct
  source 1..110: mol_type = other DNA
ccttaggcaagtcactcaggtttttgggcttcagtctatccagctgtaaaatgaacacagcaaagtctacatcaaaggtggttgtgaagactcggtgaggcaccatctgg

SEQ ID NO: 33651 - DNA, 110 bp, synthetic construct
  source 1..110: mol_type = other DNA
aacacagacgtgtctatttcgttccccacagtgtcaccaagtgcctggaatggtgtgtggcgaagagtgagagctcagtaaatgcttcccaagtgaaaactgttgacaac

SEQ ID NO: 33652 - DNA, 110 bp, synthetic construct
  source 1..110: mol_type = other DNA
tgtggcgaagagtgagagctcagtaaatgcttcccaagtgaaaactgttgacaactgtcctaccccaagttcatgaagcttcttctgcaatgaggactgagccagaccca

SEQ ID NO: 33653 - DNA, 110 bp, synthetic construct
  source 1..110: mol_type = other DNA
gcgagagcaagagggcaagaaagcaagcttttaaaagaatattctgaacccagtgtggagcgtggactggagctgagtaagattgcacgtgaggaatctggtctagagtt

SEQ ID NO: 33654 - DNA, 110 bp, synthetic construct
  source 1..110: mol_type = other DNA
tggagcgtggactggagctgagtaagattgcacgtgaggaatctggtctagagttttctggagcagatgtggggagagatgctggtgctttggaccagagcgaggtcatg

SEQ ID NO: 33655 - DNA, 110 bp, synthetic construct
  source 1..110: mol_type = other DNA
ccctggtctcccagcagacaagccccatctgccaagtgcatccatcacaccagaggtcaggagatctgctttaggtgtctgggttagctgtaaacaccacctcccccttg

SEQ ID NO: 33656 - DNA, 110 bp, synthetic construct
  source 1..110: mol_type = other DNA
gacctcttctaatccaagtgagttgcccccccgcccccagctcctgtggcagatggacaggggctctagagtcagcccactcaggttcccatctggttccagcacctagt

SEQ ID NO: 33657 - DNA, 110 bp, synthetic construct
  source 1..110: mol_type = other DNA
tcctggctccggaaccaacctctcaccctgaaggcagggccagcaccccctcccgtctagatgtaccctcactgcagacagcgggaccctctctctcatcaggcttccct

SEQ ID NO: 33658 - DNA, 110 bp, synthetic construct
  source 1..110: mol_type = other DNA
gtggagaagagacaaccatggggcaccatacacagggcaatggcaatgccaaccatcggaggcaaaggggtgggaaactaccctgagctatgactggaggagaccggcac

SEQ ID NO: 33659 - DNA, 110 bp, synthetic construct
  source 1..110: mol_type = other DNA
tcggaggcaaaggggtgggaaactaccctgagctatgactggaggagaccggcacacctgtatgacttatctttaaacatgcgttcatgaagccaatatggaaaacaata

SEQ ID NO: 33660 - DNA, 110 bp, synthetic construct
  source 1..110: mol_type = other DNA
agtgcagatgagatgacggcttctcctctcccccagagtaacaccgcaactctctcctgaagtttcatgatttttctcctacatgggaaaattgcatcacagtgaagaag

SEQ ID NO: 33661 - DNA, 110 bp, synthetic construct
  source 1..110: mol_type = other DNA
cctgaagtttcatgatttttctcctacatgggaaaattgcatcacagtgaagaagggccctttcgacacctgcaaatgttggtctcatggtgccagcgggggtccacgtg

SEQ ID NO: 33662 - DNA, 110 bp, synthetic construct; identical to SEQ ID NO: 33660
  source 1..110: mol_type = other DNA

SEQ ID NO: 33663 - DNA, 110 bp, synthetic construct; identical to SEQ ID NO: 33661
  source 1..110: mol_type = other DNA

SEQ ID NO: 33664 - DNA, 110 bp, synthetic construct
  source 1..110: mol_type = other DNA
atggcacaggaacatcacttgagtcattgcagctctcctggaggctgtcgagaggacaatccagacaccaccagtgagttctcagggaaaccccgtgactcagccacact

SEQ ID NO: 33665 - DNA, 110 bp, synthetic construct
  source 1..110: mol_type = other DNA
tgcttcccatgtgtgaggctagggaaagcagctgggcagtacgttggggcagcggcatcttcagggaccacaagcacccttcacatacagcggagatcacccttaagttc

SEQ ID NO: 33666 - DNA, 110 bp, synthetic construct
  source 1..110: mol_type = other DNA
actagcagggcgcctcttaatccctaaactgtgggtctagccggaattaagggtctggatagaaccaagcatcaaaagggaaactgggggagttcctgtcttggcgtagt

SEQ ID NO: 33667 - DNA, 110 bp, synthetic construct
  source 1..110: mol_type = other DNA
ccaacctgggggtcatctcccactgaggttaaaagcatagcctggctctcacacaaaccagtccttggtgtccacttaaaagatataatcctggggtagaggagctgatc

SEQ ID NO: 33668 - DNA, 110 bp, synthetic construct
  source 1..110: mol_type = other DNA
aaccagtccttggtgtccacttaaaagatataatcctggggtagaggagctgatcatactccatgtcctcagatctacagggatggaggaatggtctctgcagaaaactt

SEQ ID NO: 33669 - DNA, 110 bp, synthetic construct
  source 1..110: mol_type = other DNA
caggacttgaacccaggcctgtcgcccaccggggcctgctttctcagccgctgcgttagaccctagctctacctgtgggtgtcatcatgcaccattgtgtcacagacatt

SEQ ID NO: 33670 - DNA, 110 bp, synthetic construct
  source 1..110: mol_type = other DNA
ttgttttccgtcattgtggagctcttcccacagctgatgtctccctgcaggcaaaactgccctccaaccaaactgtagtcggtttaaaaaaaaaagaaccctctgagaca

SEQ ID NO: 33671 - DNA, 110 bp, synthetic construct
  source 1..110: mol_type = other DNA
gtcagtacagaaagtctggtactaattcaagacagaataaatccactgtagcctgcctctcccactgattatagctaaaacctctggagagaataccaaagcaaacagtt

SEQ ID NO: 33672 - DNA, 110 bp, synthetic construct
  source 1..110: mol_type = other DNA
cctctcccactgattatagctaaaacctctggagagaataccaaagcaaacagttgagcactctgaaaagtaaatggtagcaaacagattgagaagtcagaacttgaaga

SEQ ID NO: 33673 - DNA, 110 bp, synthetic construct
  source 1..110: mol_type = other DNA
ataggaggttttatatatttttttctcagtaaaattagctaaggcttggctattcaaagagtgttgcactcccagaagcaccagccctgcctgaagtctgtttgatgtgc

SEQ ID NO: 33674 - DNA, 110 bp, synthetic construct
  source 1..110: mol_type = other DNA
acagttttatcagcagatctagaatatggttcaatgtattgaaaagttaccttgtaaatacatgtatcaaaaggatgcttctcccaggtaaaaggaccatgttcaaatgg

SEQ ID NO: 33675 - DNA, 110 bp, synthetic construct
  source 1..110: mol_type = other DNA
aaatacatgtatcaaaaggatgcttctcccaggtaaaaggaccatgttcaaatggaggaaactgaaataatggtgctgatcaagccattcacttctggtcttcttctctc

SEQ ID NO: 33676 - DNA, 110 bp, synthetic construct
  source 1..110: mol_type = other DNA
tgcagcactcccagcctgcaagatccccatatatgtgacagggagataagcttcaaagcctgatcgttcacatcctaagatggtggccctcctacaaacactctcatttt

SEQ ID NO: 33677 - DNA, 110 bp, synthetic construct
  source 1..110: mol_type = other DNA
aagcctgatcgttcacatcctaagatggtggccctcctacaaacactctcattttcaactgaggacaggtcttatacaaccagtgcttggggggaaaacctaccccaaac

SEQ ID NO: 33678 - DNA, 110 bp, synthetic construct
  source 1..110: mol_type = other DNA
caccgagatgcccgatgctttggggcaagttgctcaatctcgttgtgtttcagtttcctcatctgtacaaatgggacgatacgagtacttccatcacagagctgaagaga

SEQ ID NO: 33679 - DNA, 110 bp, synthetic construct
  source 1..110: mol_type = other DNA
tcctcatctgtacaaatgggacgatacgagtacttccatcacagagctgaagagagaattcaatgagctattgcacgtaacatacttagaagagtgtctgatacatgata

SEQ ID NO: 33680 - DNA, 110 bp, synthetic construct
  source 1..110: mol_type = other DNA
aatagcgttaaggccccaactttatggatataccttccacttcttcccttcttcatgcccaaggacatgagatttttagagcctcaaagtccctccctctctcaaaaatc

SEQ ID NO: 33681 - DNA, 110 bp, synthetic construct
  source 1..110: mol_type = other DNA
agggaggtcctcctgcctgtccctcaggcctgccttccccctcctctctaaacaggctgctgcttactgagcactctccgtgtgccaggcaccaagctaagcactcggca

SEQ ID NO: 33682 - DNA, 110 bp, synthetic construct
  source 1..110: mol_type = other DNA
cactagaggacagccgctccttgctgcattgaggctgcacagggaggctgtccttacagaaaaagaggaagaaaaagaagacatacgaaatatgagcaatacaaaccagc

SEQ ID NO: 33683 - DNA, 110 bp, synthetic construct
  source 1..110: mol_type = other DNA
acagaaaaagaggaagaaaaagaagacatacgaaatatgagcaatacaaaccagcccagaagagtggagggaggcatcctcccacccccaggttgtgcttcttccaggct

SEQ ID NO: 33684 - DNA, 110 bp, synthetic construct
  source 1..110: mol_type = other DNA
gcgctgaagggaagggggcgggcagacggcattgctaagcgccggaagtggtcttgcataggaggggtaggagagaggctagccaagcagttcattcggctgttgctggt

SEQ ID NO: 33685 - DNA, 110 bp, synthetic construct
  source 1..110: mol_type = other DNA
tattctgcttctgttaatgtccaactatgacacctgtttggcacagaaacttcttaggaatttagcttgatgtttatgaatagaagtgtgtttggaggtgaaagtaggta

SEQ ID NO: 33686 - DNA, 110 bp, synthetic construct
  source 1..110: mol_type = other DNA
ctctcaggtaatacgtataatattccaatatgcctgtggctgctggacacatacccatataatccccctatctgttttgttaagcctactagttcaatgactattaaaac

SEQ ID NO: 33687 - DNA, 110 bp, synthetic construct
  source 1..110: mol_type = other DNA
tatcagtcaccaacagaatgtactcctgccctcctagctactgcctgacctctttctaggaccttccatgatggacaggtgcatgatggaataggtgcagccatggccac

SEQ ID NO: 33688 - DNA, 110 bp, synthetic construct
  source 1..110: mol_type = other DNA
tggcagtggcttcctcacttctgccctataacttaagaactgagtgctgaaatagacgttgggaattcccatcgtggctcggccaaaacaaatctgactagtatccatga

SEQ ID NO: 33689 - DNA, 110 bp, synthetic construct
  source 1..110: mol_type = other DNA
ctataacttaagaactgagtgctgaaatagacgttgggaattcccatcgtggctcggccaaaacaaatctgactagtatccatgaagacataagtttgatacctggcctt

SEQ ID NO: 33690 - DNA, 110 bp, synthetic construct
  source 1..110: mol_type = other DNA
tttttctttttacaactgcgtctgcattagttcttgggccagaggtcaaatcagagctgtagctgaggcctacatcacactttgcagcaacataggatccttaaccaact

SEQ ID NO: 33691 - DNA, 110 bp, synthetic construct
  source 1..110: mol_type = other DNA
catggagacatttcaggaagagaatgcttaaacaaaggtatagaagtaatacattgtgtcacgggtttatgtagttcagtatacctggaatgagggtgggctgtggaatg

SEQ ID NO: 33692 - DNA, 110 bp, synthetic construct
  source 1..110: mol_type = other DNA
gggacagagaaagtaggagaaaacatgtctttattgtggtttccatgggaagaagagtgaggtggggtaagcaggtttaggattggctagtttgaatacttccagctggc

SEQ ID NO: 33693 - DNA, 110 bp, synthetic construct
  source 1..110: mol_type = other DNA
agtgaggtggggtaagcaggtttaggattggctagtttgaatacttccagctggctctgggcataagggctggtccctcgttgtctggtacctggtcctggagtaattag

SEQ ID NO: 33694 - DNA, 110 bp, synthetic construct
  source 1..110: mol_type = other DNA
atgccttaatagaaacaggggcaccaagaggctaagacacctaagaaagtcctcaggcagagcaggatttaactcaggtcgttgagctccccagaccgtgccagtaacgg

SEQ ID NO: 33695 - DNA, 110 bp, synthetic construct
  source 1..110: mol_type = other DNA
acattaagccaatgcatgctgcaacaaaacaaacaaacaaacaaaacaaaaaagggggcttccatggcctaggagattccacagtcagagagaaagcagatacttgcatg

SEQ ID NO: 33696 - DNA, 110 bp, synthetic construct
  source 1..110: mol_type = other DNA
atccaagtccaaagcaatggggtagaactggaattaccggagtgtgagagtttgaaatgaagggcaagattagagcttacaaaggtccccagagccactgcagcatagta

SEQ ID NO: 33697 - DNA, 110 bp, synthetic construct
  source 1..110: mol_type = other DNA
gtcagtagatgacttgctgtttccggctcacagttgggaccagttatgagacaggtgcagagcagttagacaggtagagatcaagctatcagcttttgaccgataaaggc

SEQ ID NO: 33698 - DNA, 110 bp, synthetic construct
  source 1..110: mol_type = other DNA
tataatgctctttgcatattaaaggatttggagatttgaatgatagcatggaacttcaggttactctgaccctcttattttatagataaggcaactgaggctcagagaac

SEQ ID NO: 33699 - DNA, 110 bp, synthetic construct; identical to SEQ ID NO: 33698
  source 1..110: mol_type = other DNA

SEQ ID NO: 33700 - DNA, 110 bp, synthetic construct
  source 1..110: mol_type = other DNA
aggctaagctcttacatacactgtctcactatctcacaagctcttatattcacgtttgcatgcactgtgatgtatgtatttcacctacactgtagcacagaacccagttt

SEQ ID NO: 33701 - DNA, 110 bp, synthetic construct
  source 1..110: mol_type = other DNA
actgccttgatggaggatggagcttggtagacctgtaagttggagggctgttgaggagcatgcatggggctcacagcagagtcagaaagcacaaggtttcaggagcgacg

SEQ ID NO: 33702 - DNA, 110 bp, synthetic construct
  source 1..110: mol_type = other DNA
aacaggtgcagacagtcgtcaggccaaggttagagaacagtggtccacttcttggagttgaagcaggtaaggcccggggagatgcagggagctcccctcagtcttacagc

SEQ ID NO: 33703 - DNA, 110 bp, synthetic construct
  source 1..110: mol_type = other DNA
agttgaagcaggtaaggcccggggagatgcagggagctcccctcagtcttacagccccatgggagcagaggccccactaggagtttaatcctcgctacctcatctgctgc

SEQ ID NO: 33704 - DNA, 110 bp, synthetic construct
  source 1..110: mol_type = other DNA
agctggtagggcaccagacctgtcagacccctgcctctggcgccatcagattcaaggatggccctaggacagaggtgaccaaggtctgcacaaggggaggacgtaggggg

SEQ ID NO: 33705 - DNA, 110 bp, synthetic construct
  source 1..110: mol_type = other DNA
ggatggccctaggacagaggtgaccaaggtctgcacaaggggaggacgtagggggctgggagcgccggcaaagccagattcgaggaatcacagccatgccccgtgattca

SEQ ID NO: 33706 - DNA, 110 bp, synthetic construct; identical to SEQ ID NO: 33704
  source 1..110: mol_type = other DNA

SEQ ID NO: 33707 - DNA, 110 bp, synthetic construct; identical to SEQ ID NO: 33705
  source 1..110: mol_type = other DNA

SEQ ID NO: 33708 - DNA, 110 bp, synthetic construct
  source 1..110: mol_type = other DNA
taaggacttcctatgtgcctttagtcctctcagctaagggcctactatgtacctttagtcttcccagctagcgacctactacatgcctttagtcctcccacagacctggt

SEQ ID NO: 33709 - DNA, 110 bp, synthetic construct
  source 1..110: mol_type = other DNA
tagtcttcccagctagcgacctactacatgcctttagtcctcccacagacctggtgagacagctgactgtacctgattataccagaagggaaacccaaggacagagaggt

SEQ ID NO: 33710 - DNA, 110 bp, synthetic construct
  source 1..110: mol_type = other DNA
cccagatctgtccgggttgggaaggaagagtaggcaggagctctctggagcttgccgagccaaatagagggtagacagtcacgtagcacaaatctgcattttgacaatag

SEQ ID NO: 33711 - DNA, 110 bp, synthetic construct
  source 1..110: mol_type = other DNA
cgagccaaatagagggtagacagtcacgtagcacaaatctgcattttgacaatagggagaaatggtgaaaaagcagatcttcgtgttggcgctgcagtgttctgataatg

SEQ ID NO: 33712 - DNA, 110 bp, synthetic construct
  source 1..110: mol_type = other DNA
tttggaaataaaaacctgattggtgtggggaaatcatggaaagcttgacagatctacttaagagagaatcagtgaactaaaaaatagtgccaaggaattctttcaaaata

SEQ ID NO: 33713 - DNA, 110 bp, synthetic construct
  source 1..110: mol_type = other DNA
gaggcactactgactgacttgggggttccaccagctctagcttcaggtggaggagagaagtcaaggtcacagtgactgtgaagcacacttcagagtcatccactcatgcg

SEQ ID NO: 33714 - DNA, 110 bp, synthetic construct
  source 1..110: mol_type = other DNA
agaagtcaaggtcacagtgactgtgaagcacacttcagagtcatccactcatgcggcaaatagttttaagctcctatatgacgagatttttctgtgctctggggataaag

SEQ ID NO: 33715 - DNA, 110 bp, synthetic construct
  source 1..110: mol_type = other DNA
cagacaccttgtgggagagggtgttcagtgtgagtaagacagtacagcttgtctgtcttatttgtccatccctccatcccttcattcatttgtccaactaacagttttca

SEQ ID NO: 33716 - DNA, 110 bp, synthetic construct
  source 1..110: mol_type = other DNA
ctgaaagcacggaggatccagggagagtgagcaacaggtaacaggcaagactcgggatggtagctgagtgctctgcttctcaaccagccctttcttgcaaaccccactag

SEQ ID NO: 33717 - DNA, 110 bp, synthetic construct
  source 1..110: mol_type = other DNA
gatggtagctgagtgctctgcttctcaaccagccctttcttgcaaaccccactaggtagcccagtttttgtctgtcgtctctgggcagaattactaaggcactgctcagg

SEQ ID NO: 33718 - DNA, 110 bp, synthetic construct
  source 1..110: mol_type = other DNA
ctcgaactcctccgccacaaccaaatgcaggcagctcaggcctgtttgagtgcgattcctcacacttctcgcacaggcccaggcaaatccaggctgggtcaccatcgaga

SEQ ID NO: 33719 - DNA, 110 bp, synthetic construct
  source 1..110: mol_type = other DNA
tgccttcactcccagagaaatggttccaggccagaagcttttcagctgccactgccaaggccagcttccctgtgccagattctgcaagcgtgaacccaaggagacaaggc

SEQ ID NO: 33720 - DNA, 110 bp, synthetic construct
  source 1..110: mol_type = other DNA
cctacaggaagtccctacctgattccgaagtatttccacgcaaacactcctcatctcacagttaccaggaaagctaaggcctcttttcagagagagagagcagactcggg

SEQ ID NO: 33721 - DNA, 110 bp, synthetic construct
  source 1..110: mol_type = other DNA
ccactgttgccactctgtacctataggaccatctgccctggcttaggacctagtctggactgccgacttgggctgagctcaaccagaccaagctttctctccttccctgg

SEQ ID NO: 33722 - DNA, 110 bp, synthetic construct
  source 1..110: mol_type = other DNA
accatcccatattttgaggcccctcaccttccagatgtctacactctgtgaaatgtgtttctcccagggctactctccttccctttgagacagactatattctgtttatg

SEQ ID NO: 33723 - DNA, 110 bp, synthetic construct
  source 1..110: mol_type = other DNA
cacatttactttaatatttttctagttgactctgcttcaataatttttctttgcagttcccacccccagctcctcccaaattcccatagcccaacatttatatattcttt

SEQ ID NO: 33724 - DNA, 110 bp, synthetic construct
  source 1..110: mol_type = other DNA
ttttcaaactgagaattgcagcccaaactagtctatcacattagattgtgaacctctgaaaggagctgttctgtttaagggacgcctgtacctgttgtcaaatactatgg

SEQ ID NO: 33725 - DNA, 110 bp, synthetic construct
  source 1..110: mol_type = other DNA
ctgaaaggagctgttctgtttaagggacgcctgtacctgttgtcaaatactatggattagggtcagaactgagtttgaattgtgcccccggcttcaccatctgtaaatgg

SEQ ID NO: 33726 - DNA, 110 bp, synthetic construct
  source 1..110: mol_type = other DNA
tgtgctgggcccaggatcgaacctgcatcccagtgctctggagatgctaccaaccccattgtaccatagtgggagctctcataaataatatttgattctgatactatttt

SEQ ID NO: 33727 - DNA, 110 bp, synthetic construct
  source 1..110: mol_type = other DNA
ttgattttccttctcctacatttgatatcatttataccactcctcaagttgacggaagcagtatacagcaacacaacttagaaacattggagaatgatataaaagataag

SEQ ID NO: 33728 - DNA, 110 bp, synthetic construct
  source 1..110: mol_type = other DNA
cagatacattaaccactgagcaacgacaggaactccttattactaaatgttttaatatttagtttttgtttttaactttaccccaccccccagcttttaatttgggaaat

SEQ ID NO: 33729 - DNA, 110 bp, synthetic construct
  source 1..110: mol_type = other DNA
tatttagtttttgtttttaactttaccccaccccccagcttttaatttgggaaattctccaaccaataaaaaagttgcaaaatatacagtgactacctagattcaccacc

SEQ ID NO: 33730 - DNA, 110 bp, synthetic construct
  source 1..110: mol_type = other DNA
ttggcattcagagaaatgggtagacatctttcagcccagggcttctcatgccttcatagctcaatgacagaagagggtaaaggccagcttacctgggagacctggtggca

SEQ ID NO: 33731 - DNA, 110 bp, synthetic construct
  source 1..110: mol_type = other DNA
tgtgtgtcatttcctgtcttatattacttgataaccgttttgtgtctgggtctctatgaacaaggaccatgccttgttcttactcccctgtttccttcaagcaacaggag

SEQ ID NO: 33732 - DNA, 110 bp, synthetic construct
  source 1..110: mol_type = other DNA
atcttctctgtcccagaccttagactgtccctttctggaattaatgggttgtgaagtgtgttgttaataataacagctcttacttgctgaccttttactgagtgcccagt

SEQ ID NO: 33733 - DNA, 110 bp, synthetic construct
  source 1..110: mol_type = other DNA
gtgtgttgttaataataacagctcttacttgctgaccttttactgagtgcccagttgtgtgctaagtccgttacatgccctctctcaattctcacagcctctgttacata

SEQ ID NO: 33734 - DNA, 110 bp, synthetic construct
  source 1..110: mol_type = other DNA
tatttgaaggtgatcaaatttgaaacctctcatacgtgttggagcacgttggctcctgggtcatctctctatggggtgatctagtctgctggggggtcctgggagagctg

SEQ ID NO: 33735 - DNA, 110 bp, synthetic construct
  source 1..110: mol_type = other DNA
ctgggtcatctctctatggggtgatctagtctgctggggggtcctgggagagctgtgtgtgaaaagggttatgcttatccttacatgtggatacagaggaattgtagagt

SEQ ID NO: 33736 - DNA, 110 bp, synthetic construct; identical to SEQ ID NO: 33734
  source 1..110: mol_type = other DNA

SEQ ID NO: 33737 - DNA, 110 bp, synthetic construct; identical to SEQ ID NO: 33735
  source 1..110: mol_type = other DNA

SEQ ID NO: 33738 - DNA, 110 bp, synthetic construct
  source 1..110: mol_type = other DNA
tcagtaagaggttcttattccccatgggtttctaacctcccatcttagcctcttgatgttatctttctcccggggaaagaattcgaggccagtccttcagccacaggatt

SEQ ID NO: 33739 - DNA, 110 bp, synthetic construct
  source 1..110: mol_type = other DNA
atgttatctttctcccggggaaagaattcgaggccagtccttcagccacaggattattacaccttaaagaagccccagataaggtgtttatagggctgtttatagccagt

SEQ ID NO: 33740 - DNA, 110 bp, synthetic construct
  source 1..110: mol_type = other DNA
tgagtgatatttgccttgaacttagatgatagaaagttttgttttgctttaaataaataaacctcagttccttttagaagtcaccttttttgtcattgttcctgtgggcc

SEQ ID NO: 33741 - DNA, 110 bp, synthetic construct; identical to SEQ ID NO: 33740
  source 1..110: mol_type = other DNA

SEQ ID NO: 33742 - DNA, 110 bp, synthetic construct; identical to SEQ ID NO: 33740
  source 1..110: mol_type = other DNA

SEQ ID NO: 33743 - DNA, 110 bp, synthetic construct; identical to SEQ ID NO: 33740
  source 1..110: mol_type = other DNA

SEQ ID NO: 33744 - DNA, 110 bp, synthetic construct
  source 1..110: mol_type = other DNA
atgcagcagaaatgctgccaccaatccagtgtctctcaggccccaaggccgggcttcatgtgccctggttcatgccgagccctggggagacatacttcaagcttctgctc

SEQ ID NO: 33745 - DNA, 110 bp, synthetic construct
  source 1..110: mol_type = other DNA
gagaatacttataggactggaaaaggtcttgggtcatccagtttaaactgatcacatcagaagctgtagaaatttaattacttaatccctttaattttgttaaattacct

SEQ ID NO: 33746 - DNA, 110 bp, synthetic construct
  source 1..110: mol_type = other DNA
ggaggagatacatattgcagtgtgtcagtgcaaccattttgtgataccttcagtaccttgctgtaatatagatggtaacattggtagcattacatatattgtgtgaatca

SEQ ID NO: 33747 - DNA, 110 bp, synthetic construct
  source 1..110: mol_type = other DNA
aaaatatgatatggaaaaatatccttagaacaaaaatattaattccttactaacgggagggattttgaagttgagtatgccttccttggttgttaaccattattgtcttg

SEQ ID NO: 33748 - DNA, 110 bp, synthetic construct
  source 1..110: mol_type = other DNA
ggagggattttgaagttgagtatgccttccttggttgttaaccattattgtcttgccttcccccacccttgtcccttaatggtagtgtgaactgaggatgaacagtcaga

SEQ ID NO: 33749 - DNA, 110 bp, synthetic construct
  source 1..110: mol_type = other DNA
tgctgaatatttttcaagtaattgatgtgttaataaataaccagtataaccttcaagtatgaaaggcagcatgaagcctgaagggtatttaagaaggtgggtgataatgt

SEQ ID NO: 33750 - DNA, 110 bp, synthetic construct
  source 1..110: mol_type = other DNA
tactactttgaaattaaatctatgacagtttacagcttatacagctatttatggagacacttaagtttcctctggacccaagaataacacttttactcaagttagtaaaa

SEQ ID NO: 33751 - DNA, 110 bp, synthetic construct
  source 1..110: mol_type = other DNA
atagcaattttaggaaggcagagacaaaaaggtaaatgaaggagttttcgtggttcttgttaacacatcagttaattgttaggcatcaagttagttgctagggacataaa

SEQ ID NO: 33752 - DNA, 110 bp, synthetic construct
  source 1..110: mol_type = other DNA
attttttccctctaaaacgataaaaacaaatgaaaagcactacccaaaatatactttaaatggaaatcttttaagtttgtatcaattaaggtcagctgtgaagagcagct

SEQ ID NO: 33753 - DNA, 110 bp, synthetic construct
  source 1..110: mol_type = other DNA
cggtatactttaatgaaaacagctctttcaggttttgcactttgggctcagacctctcagttgcatcccttatagaccacgggagcaaatccaacagggagaagatgtgc

SEQ ID NO: 33754 - DNA, 110 bp, synthetic construct
  source 1..110: mol_type = other DNA
ctcagttgcatcccttatagaccacgggagcaaatccaacagggagaagatgtgcagtacaaccctggcaggtttcctgtcacagatctcctttccttacagacactatg

SEQ ID NO: 33755 - DNA, 110 bp, synthetic construct
  source 1..110: mol_type = other DNA
ctatggttacaaagtatctcctgttctgtcaactcatcactgggctctggggcagaaactagtcttactgacctctgtgtcctagcagtatggcctgggactatgagtgt

SEQ ID NO: 33756 - DNA, 110 bp, synthetic construct
  source 1..110: mol_type = other DNA
aaactagtcttactgacctctgtgtcctagcagtatggcctgggactatgagtgtggactctgcaaccaaaggccaacccttccagctaatgataggtcacctgggaacc

SEQ ID NO: 33757 - DNA, 110 bp, synthetic construct
  source 1..110: mol_type = other DNA
ggctcctgttggtgcccgaataaagagttcaaccttctccccttggcctgggaggctctgcaccatcttccctgtccagctcgccaggcttgtttctggctatctccttc

SEQ ID NO: 33758 - DNA, 110 bp, synthetic construct
  source 1..110: mol_type = other DNA
ctctgcaccatcttccctgtccagctcgccaggcttgtttctggctatctccttcttggcgtttccactctagccccctggccttcttgctggttctagaacacacgatg

SEQ ID NO: 33759 - DNA, 110 bp, synthetic construct
  source 1..110: mol_type = other DNA
aattattggcagaactctggcccatgtcagaaacaattagctgcctgacctgagactgaatgagtacctagcttcctttacttcctttccagctcaagccagacatgcct

SEQ ID NO: 33760 - DNA, 110 bp, synthetic construct
  source 1..110: mol_type = other DNA
tctgttatcagtctcctatacattagttttttccttccaggtttgtgctgagcaggtctgccagaaaaagccatcagctttgctaaggtattcaactcaactgatgttga

SEQ ID NO: 33761 - DNA, 110 bp, synthetic construct
  source 1..110: mol_type = other DNA
gcatgtagccacatccgttcatttgcatattgtctatgtctggtttttcaccacaataagaaagtttaataattgtgacaaaaatatatggtttgcaaagactaaactat

SEQ ID NO: 33762 - DNA, 110 bp, synthetic construct; identical to SEQ ID NO: 33761
  source 1..110: mol_type = other DNA

SEQ ID NO: 33763 - DNA, 110 bp, synthetic construct
  source 1..110: mol_type = other DNA
ctttgccagggaaagcatttcctctcctgcactctgagagccccttgtgcatttttctggaagagccctaattaagtgagcatctgaacctttctccatacccaaatgaa

SEQ ID NO: 33764 - DNA, 110 bp, synthetic construct
  source 1..110: mol_type = other DNA
tctggaagagccctaattaagtgagcatctgaacctttctccatacccaaatgaacgcaggactccaaacttctttatggatgccctccagaaagaaaccattttaggga

SEQ ID NO: 33765 - DNA, 110 bp, synthetic construct
  source 1..110: mol_type = other DNA
gctgtcttgaaatgtcctccataaggagacaaaatgacaactatcaccctccaaattcacatacttcatctggttcctgacacgtcccaaaggcccagagctggaaacca

SEQ ID NO: 33766 - DNA, 110 bp, synthetic construct
  source 1..110: mol_type = other DNA
ttcacatacttcatctggttcctgacacgtcccaaaggcccagagctggaaaccagactaaaagtgaaaagttgagaagtttgtgcttcatctgctctcatttccatttg

SEQ ID NO: 33767 - DNA, 110 bp, synthetic construct
  source 1..110: mol_type = other DNA
aatgacaaggggcatctctgctcccaagggattccagtcacgcgaactctgccaattaaggctggaacgatgtcatctcctgaaatagcattttaatgagtgatggctct

SEQ ID NO: 33768 - DNA, 110 bp, synthetic construct
  source 1..110: mol_type = other DNA
attaactcttgcagcaactggctactaggagaagctgtcagttcctaactgtaagtggctctgtcctccctaggatccctcactccctaccctcaaaccctgggagagaa

SEQ ID NO: 33769 - DNA, 110 bp, synthetic construct
  source 1..110: mol_type = other DNA
ttttcaacaaactgtaaaacaaggcttaatgactatatatgtgggatgtcataatgaaatgtctgcctcctagagagctggagtcaggtgaagtctgatcttcttccagt

SEQ ID NO: 33770 - DNA, 110 bp, synthetic construct
  source 1..110: mol_type = other DNA
gaaatgtctgcctcctagagagctggagtcaggtgaagtctgatcttcttccagtttgagttctattatataatctacaatgaattctctgagacgaagagacactagaa

SEQ ID NO: 33771 - DNA, 110 bp, synthetic construct
  source 1..110: mol_type = other DNA
gccaaggaatcttctgggaagagaaatgagagacagctgaaaaggaaaagtcgcagagctccctcagtaaaggaaaaagcttctagtgttgtgatgcctccatctttcct

SEQ ID NO: 33772 - DNA, 110 bp, synthetic construct
  source 1..110: mol_type = other DNA
gagctccctcagtaaaggaaaaagcttctagtgttgtgatgcctccatctttccttaatcttcagttgcctcactgattaacaagctttgcccatctctgggcagaggac

SEQ ID NO: 33773 - DNA, 110 bp, synthetic construct; identical to SEQ ID NO: 33771
  source 1..110: mol_type = other DNA

SEQ ID NO: 33774 - DNA, 110 bp, synthetic construct; identical to SEQ ID NO: 33772
  source 1..110: mol_type = other DNA

SEQ ID NO: 33775 - DNA, 110 bp, synthetic construct
  source 1..110: mol_type = other DNA
gggtctgagcagctcttttcaacatggcacatcatatttttgtcacagttaccacagcagagctcctaggctctcatctggttaccattctctcttctgattttttacct

SEQ ID NO: 33776 - DNA, 110 bp, synthetic construct
  source 1..110: mol_type = other DNA
agcagagctcctaggctctcatctggttaccattctctcttctgattttttacctaacctttcaattacccatgcttaaaagcagaatcagacttctgagttagagtttt

SEQ ID NO: 33777 - DNA, 110 bp, synthetic construct
  source 1..110: mol_type = other DNA
tttttcttttcttattgcatcagctagaacttttcaaacaatgtgaaataagggggatagcggcgggcattatcttagtatcccttattcagataactgcagtgttattc

SEQ ID NO: 33778 - DNA, 110 bp, synthetic construct
  source 1..110: mol_type = other DNA
gcagggatgaaaattgcatgcacaaaagcagatctcttagggaggaaggaagttccagggaaaagaactaaatctcattgacgaaagacctaaggagtcaaattttgatt

SEQ ID NO: 33779 - DNA, 110 bp, synthetic construct
  source 1..110: mol_type = other DNA
cagggaaaagaactaaatctcattgacgaaagacctaaggagtcaaattttgattcagcataaagattttattcatgatgaagcctgtatggcaatggagcagggctgcc

SEQ ID NO: 33780 - DNA, 110 bp, synthetic construct; identical to SEQ ID NO: 33778
  source 1..110: mol_type = other DNA

SEQ ID NO: 33781 - DNA, 110 bp, synthetic construct; identical to SEQ ID NO: 33779
  source 1..110: mol_type = other DNA

SEQ ID NO: 33782 - DNA, 110 bp, synthetic construct
  source 1..110: mol_type = other DNA
gtgctagagccaagtgtttacagtcatgtttcagaatgcagcatgcagtaagaaaggaagaagcacaaactttggtcccaaagtatcaaagttcacagcccggaacttta

SEQ ID NO: 33783 - DNA, 110 bp, synthetic construct
  source 1..110: mol_type = other DNA
ggaagaagcacaaactttggtcccaaagtatcaaagttcacagcccggaactttaccacttaaattgtctctgcctccatttccccacgtgaaaataacttttgtcagat

SEQ ID NO: 33784 - DNA, 110 bp, synthetic construct
  source 1..110: mol_type = other DNA
aggtgctgaatttacaaagttggcagattaggtgtacattggcttgcacagctgtagaagagatttcaaccctgcttcctaagtcatgtggtccctggggctcagctgtg

SEQ ID NO: 33785 - DNA, 110 bp, synthetic construct
  source 1..110: mol_type = other DNA
agaagagatttcaaccctgcttcctaagtcatgtggtccctggggctcagctgtgatttcagcccaaactctccatgtgggaaactcactagcatctgttcctgggtccc

SEQ ID NO: 33786 - DNA, 110 bp, synthetic construct
  source 1..110: mol_type = other DNA
aaggaaggaaaacaagcaagaaaaaataataagagtttggccattgtaaaaaaggtcaaggatgtttattttagttcctcctcggaagctatatagaattagccatatag

SEQ ID NO: 33787 - DNA, 110 bp, synthetic construct
  source 1..110: mol_type = other DNA
cttcttccctctcatgtcctaaacaagaaattagagaattttaccaaggatggcaactctgggctagagctgaagaaatccaggggaaatataggacatgagtcatggct

SEQ ID NO: 33788 - DNA, 110 bp, synthetic construct
  source 1..110: mol_type = other DNA
actctgggctagagctgaagaaatccaggggaaatataggacatgagtcatggcttcagagggataaaccgacatgaaataactggaaagaaataaatgtcactagaaaa

SEQ ID NO: 33789 - DNA, 110 bp, synthetic construct
  source 1..110: mol_type = other DNA
cccccacaaatccattccgtctcctcaaactgagaagcttagagccaagggttactgagactggagttgttggacgtaggtcacgttcatgatggcaacttcagtcattc

SEQ ID NO: 33790 - DNA, 110 bp, synthetic construct
  source 1..110: mol_type = other DNA
ctgaacccagcccagcagactctagaccccatgtccttaaatgcctctctaaactgcatcatgaaagaccgtgctctgtccccatggcatgtttaggtctgtccggtaga

SEQ ID NO: 33791 - DNA, 110 bp, synthetic construct
  source 1..110: mol_type = other DNA
gcatcatgaaagaccgtgctctgtccccatggcatgtttaggtctgtccggtagaaattataaatgcattctcacacctaggagccgagtctttattgtcctcaagtttc

SEQ ID NO: 33792 - DNA, 110 bp, synthetic construct
  source 1..110: mol_type = other DNA
gagacagacacagaaagataatacgcactataatcactggcatttattgcatcatgcaaagcttttcgtaggtatcaacttcccaaatcctcaagatgccactgggttcg

SEQ ID NO: 33793 - DNA, 110 bp, synthetic construct
  source 1..110: mol_type = other DNA
aattcaattttctcatgctttagttaagatttcattctacctttgttaagtctagaattggggctagtggtatcaaatgggctggcaaacttctgaactttttctatgtt

SEQ ID NO: 33794 - DNA, 110 bp, synthetic construct
  source 1..110: mol_type = other DNA
actgtctaccagtgaaactgtctgtccagtcacattggatgttacaatgagctgctggccattggcagtaccagtagatgccagggattttgatactgggaaattcctat

SEQ ID NO: 33795 - DNA, 110 bp, synthetic construct
  source 1..110: mol_type = other DNA
tcgatccccgacctggcacagtgggttaaaaggatcccacgttgtggcaactgcggcttggagctgatcccctgctcggagctgatccctggcccaggcccatattccat

SEQ ID NO: 33796 - DNA, 110 bp, synthetic construct
  source 1..110: mol_type = other DNA
acacacttcaagtgatcaatagccacaggtagctagagactactgaactgaatggacagataaaaaaatattcctatcacagacatttctgttagacttgaatttaaaaa

SEQ ID NO: 33797 - DNA, 110 bp, synthetic construct
  source 1..110: mol_type = other DNA
ttaacacactgtgccacagcaggaactgccaagctatattttaaatcccaccttctccttgatacctttcagagtcaccctgtaatagtccaggttgcccagagaaaggg

SEQ ID NO: 33798 - DNA, 110 bp, synthetic construct
  source 1..110: mol_type = other DNA
ccttaccactgtctgattccaatcacagaaaagccatggataggagcagcaatgagtaggaagcttgctttcagcttgtcggctcacctgtcatggctttatattaaaaa

SEQ ID NO: 33799 - DNA, 110 bp, synthetic construct
  source 1..110: mol_type = other DNA
gtctgcagtgtgaagggcattctttggagggtgcaaagcacatcctatgctgtcttcagcagcagcctcccatgcatcacacgttctgccaggagcagggtgcaggttcc

SEQ ID NO: 33800 - DNA, 110 bp, synthetic construct
  source 1..110: mol_type = other DNA
tcagcagcagcctcccatgcatcacacgttctgccaggagcagggtgcaggttccagaggcaccaggtactgtaaagaccgtcctttacagtggttcacgagctgctggg

SEQ ID NO: 33801 - DNA, 110 bp, synthetic construct
  source 1..110: mol_type = other DNA
cagagccacagcggtgagaacgaaggaacctcaacccgctaggccatcagagaactccctcttcaagtacttttttagccctattcttttggtcttctccttcccatatg

SEQ ID NO: 33802 - DNA, 110 bp, synthetic construct; identical to SEQ ID NO: 33801
  source 1..110: mol_type = other DNA

SEQ ID NO: 33803 - DNA, 110 bp, synthetic construct
  source 1..110: mol_type = other DNA
acagagcgtgtaaaaccttctgaactgacagggtttctaaatcagggatgccattatttaaatttgacattttagtacagatcttttgctcacagatttcaaaggattta

SEQ ID NO: 33804 - DNA, 110 bp, synthetic construct
  source 1..110: mol_type = other DNA
ggatgccattatttaaatttgacattttagtacagatcttttgctcacagatttcaaaggatttaaattgaaaatttatcttcacacccgttagcattcagctgctattt

SEQ ID NO: 33805 - DNA, 110 bp, synthetic construct
  source 1..110: mol_type = other DNA
ctccttgcccctcttccctgtctccctctcctctccttcctctgaagggagctcccctctagtcctgagagtcactgttagagcaggggctggactgcatcctccctgtg

SEQ ID NO: 33806 - DNA, 110 bp, synthetic construct
  source 1..110: mol_type = other DNA
gtaaggaatggaaacaaggcagacatagcttacgcagcaaatataacttaagagggagttttgaacaactgcagatggaaagacatagtatcattccccacacttagcac

SEQ ID NO: 33807 - DNA, 110 bp, synthetic construct
  source 1..110: mol_type = other DNA
ttatagctctgtggaatgaatttgcatttctacaattgtaaatggggttgagcatattttaaaatatatgaaagccatttgatttccttttctgagaaatgtctgtcttg

SEQ ID NO: 33808 - DNA, 110 bp, synthetic construct
  source 1..110: mol_type = other DNA
gccctaatgatcccatttccatctccactctgccccacccaccccagctcagggtctggcacatagtaggtctcacctaaacaaaggattcccctctcacttgtagatca

SEQ ID NO: 33809 - DNA, 110 bp, synthetic construct
  source 1..110: mol_type = other DNA
tttatagaacgttccactcaacaacaatagaaaatacaaggttttcaattgcacgtggaacattcaccaagttagcttattatatttggggccataagagaaatcttaat

SEQ ID NO: 33810 - DNA, 110 bp, synthetic construct
  source 1..110: mol_type = other DNA
ccaccccattcccccaggaaagggatgtctgagcagagacctggaggaggagggagaaagagccagttagttggctgggccatgagcattccagggagcgactagcaaga

SEQ ID NO: 33811 - DNA, 110 bp, synthetic construct
  source 1..110: mol_type = other DNA
gaaagagccagttagttggctgggccatgagcattccagggagcgactagcaagagaattttaaaggattggtggattacttttgtacaggcagtccagccgctgcattc

SEQ ID NO: 33812 - DNA, 110 bp, synthetic construct
  source 1..110: mol_type = other DNA
ctgccaccacaccagtctgagttgtcaccatctctcagcctcctaattgggccacccacatccgctcttactgtcttccaatccatcttctgaactgaagcctgagcaat

SEQ ID NO: 33813 - DNA, 110 bp, synthetic construct
  source 1..110: mol_type = other DNA
caagtggacttcaggtgtctgttaagtggagctggtacccttcctccctggccgtatcagtggccattctcccttcatctcctgtaagcatcagattgagaagaatgtgt

SEQ ID NO: 33814 - DNA, 110 bp, synthetic construct
  source 1..110: mol_type = other DNA
agaagtttccgtttgccctctggacagcaggtttgtgactctacacagagactgagctgctcccctaaatgactcagccattgattcagcaagcatttaatagatgtcta

SEQ ID NO: 33815 - DNA, 110 bp, synthetic construct
  source 1..110: mol_type = other DNA
tctcaccccaccccttttctttagggatctaaatgttaagccatggttttggcggctactgcagatctgagctggcataccacagcatattcactaggcttttatgagca

SEQ ID NO: 33816 - DNA, 110 bp, synthetic construct
  source 1..110: mol_type = other DNA
gttaagtggctttctagagtttacctaatgactgttaagtagccattgaaaaccactgaagcatttgctggtaaggaaaggaatgaacagttatgtatgttgcttaccac

SEQ ID NO: 33817 - DNA, 110 bp, synthetic construct
  source 1..110: mol_type = other DNA
gctcagtggtttaaggatctggtgatgctgaaagctgtcgcataggtcacagatgcaacttggatccagcactgccatagctctcgcataggcctgcagctgcagctcct

SEQ ID NO: 33818 - DNA, 110 bp, synthetic construct
  source 1..110: mol_type = other DNA
aacatctccccaaccctcactctcagctgatgtctgttttctacttcatggagcaaagaggccagtgaccacatctatcagctacctagatgctgtgggttaggcctcca

SEQ ID NO: 33819 - DNA, 110 bp, synthetic construct
  source 1..110: mol_type = other DNA
aaccaaggtcaaacaaaagtaggtcggcaatgaacgtgacaggtgagtcacaggcagcctttccttctgctcggcagcttcctttacccattggtttgggtcaatgctgc

SEQ ID NO: 33820 - DNA, 110 bp, synthetic construct
  source 1..110: mol_type = other DNA
tacaaactggtccttccctacttctgtgctttcaatgatgccacgttcccacttaccgactccctggaaatacctgggctactcttttctgagaatctaaattctaccca

SEQ ID NO: 33821 - DNA, 110 bp, synthetic construct
  source 1..110: mol_type = other DNA
ccgactccctggaaatacctgggctactcttttctgagaatctaaattctacccatccttaaaagtctggatgaaatctgatcacgtccaggaagcctcctctcgaccat

SEQ ID NO: 33822 - DNA, 110 bp, synthetic construct
  source 1..110: mol_type = other DNA
gtcatgtttttgtctttagacaagaacactcacaaacagatttttttaaaaattggctctagtgaagttctaaacctcagaaatgcattatctgccccagaaatgagtca

SEQ ID NO: 33823 - DNA, 110 bp, synthetic construct
  source 1..110: mol_type = other DNA
tacactgatgcaaagcaagagtcccgtgattcctaaatcaaataaaaaactgcctctgcccttatccctctcacttccttcctgggagacctctcagctgctgtctttgg

SEQ ID NO: 33824 - DNA, 110 bp, synthetic construct
  source 1..110: mol_type = other DNA
ctgcccttatccctctcacttccttcctgggagacctctcagctgctgtctttggcagcccatggggctggaagtgaatggtttagggaaccccctggattccccatggc

SEQ ID NO: 33825 - DNA, 110 bp, synthetic construct
  source 1..110: mol_type = other DNA
tcccactagtctggccacagtagttgatacctgtagttgtttcctgctccagaactactggaatagaggcagacatttaccactgggatggctatgctagcagtatgtta

SEQ ID NO: 33826 - DNA, 110 bp, synthetic construct
  source 1..110: mol_type = other DNA
tactggaatagaggcagacatttaccactgggatggctatgctagcagtatgttagctgacagtgacctccatcggagagagcatgcctgataaaaaacacggaggaaag

SEQ ID NO: 33827 - DNA, 110 bp, synthetic construct
  source 1..110: mol_type = other DNA
ggatgaagacatagtgaaagaaggggaacgttcaggttgtctgaggcaaagaggacaagcagggacatgtatggggcgagctttgggaatcaggctggacggtccctagt

SEQ ID NO: 33828 - DNA, 110 bp, synthetic construct
  source 1..110: mol_type = other DNA
aacaagggctttggagatagagcaatcttgctccatatgctctttccttcctgccctgccttgtgcttccagacaaactcctactcatccatcaacacccacctttaata

SEQ ID NO: 33829 - DNA, 110 bp, synthetic construct
  source 1..110: mol_type = other DNA
gaggttgctttgggggtttacaacaggacttgcctctctcgtatctcctctgtgaaactcaggaaagtttcctagcagctcctccctggggtaagggccttctctttctg

SEQ ID NO: 33830 - DNA, 110 bp, synthetic construct
  source 1..110: mol_type = other DNA
gtacagacactactttgccccataacttgcagaaacaccatgtgaatttacaaaaagcttgcattaatccttgaaaaaagagcctacccttacatcaaatgttttatttc

SEQ ID NO: 33831 - DNA, 110 bp, synthetic construct
  source 1..110: mol_type = other DNA
atttaaaatctaaccagagagagagagggaaaaaaacagagtgtgggtagaactagaggtcatttctccaattttatagacgtcctcatggtccagttatctcagagggg

SEQ ID NO: 33832 - DNA, 110 bp, synthetic construct
  source 1..110: mol_type = other DNA
gggtttttcatcatcatcagctctcccagcaaataccatgacccgcctgccatttctgtggctcctaatctaggtttctgcagccttaggcattcactcactgtgccctg

SEQ ID NO: 33833 - DNA, 110 bp, synthetic construct
  source 1..110: mol_type = other DNA
ccatctatctttactgattcttcttggcattagtgtggtgatgtgatgcctggagctgctgcagcctcctgcagacataagaggtaggagctgacatgcaaaggatgaaa

SEQ ID NO: 33834 - DNA, 110 bp, synthetic construct
  source 1..110: mol_type = other DNA
ctgctgcagcctcctgcagacataagaggtaggagctgacatgcaaaggatgaaagagtgaaaaatgcaaagaaccagctttgatgaggtcactgaactgctgaactaac

SEQ ID NO: 33835 - DNA, 110 bp, synthetic construct; identical to SEQ ID NO: 33833
  source 1..110: mol_type = other DNA

SEQ ID NO: 33836 - DNA, 110 bp, synthetic construct; identical to SEQ ID NO: 33834
  source 1..110: mol_type = other DNA

SEQ ID NO: 33837 - DNA, 110 bp, synthetic construct
  source 1..110: mol_type = other DNA
tcaactgagcagaaagagctttgggtagagtgagaagtcacggaaatccctgggttccctctgggcggttatatctcctttcaggagatacctgatagtccttttctcac

SEQ ID NO: 33838 - DNA, 110 bp, synthetic construct
  source 1..110: mol_type = other DNA
tccctctgggcggttatatctcctttcaggagatacctgatagtccttttctcacaaagctcttctaggcatcactccctaaggtcctgtctgagcagcccagacccact

SEQ ID NO: 33839 - DNA, 110 bp, synthetic construct
  source 1..110: mol_type = other DNA
tccagtttggaccagtactttcttatatagcttttgtgtttgttttcttcccagagtttctaattgccattctatttttgtattgataaaaggataatgtgccttcattt

SEQ ID NO: 33840 - DNA, 110 bp, synthetic construct
  source 1..110: mol_type = other DNA
tcaccaactccgggaagagcagagtaccttctggccgtggttttggcttttccaatcctccgtcttgcatgagctcaaaggcaaaggagacattcagcacctgaaagaga

SEQ ID NO: 33841 - DNA, 110 bp, synthetic construct
  source 1..110: mol_type = other DNA
tcctccgtcttgcatgagctcaaaggcaaaggagacattcagcacctgaaagagaaatgcagagcaggaggtgctgcacactcatttctggacccttgtggtgtcctggg

SEQ ID NO: 33842 - DNA, 110 bp, synthetic construct; identical to SEQ ID NO: 33840
  source 1..110: mol_type = other DNA

SEQ ID NO: 33843 - DNA, 110 bp, synthetic construct; identical to SEQ ID NO: 33841
  source 1..110: mol_type = other DNA

SEQ ID NO: 33844 - DNA, 110 bp, synthetic construct
  source 1..110: mol_type = other DNA
acatatatgataaaccaagtacctcccatatgcaagagtcgagggtgggggggaagagaactattgcttattgaaggttgattttgtaccatacatgcattgatgtgctt

SEQ ID NO: 33845 - DNA, 110 bp, synthetic construct
  source 1..110: mol_type = other DNA
cttattttgaatacaaagaaacaggctcgctagttttatttctataaataccagcttctctccatccccactgcataaatgttgaacacacagttcaggtatttggccta

SEQ ID NO: 33846 - DNA, 110 bp, synthetic construct; identical to SEQ ID NO: 33845
  source 1..110: mol_type = other DNA

SEQ ID NO: 33847 - DNA, 110 bp, synthetic construct
  source 1..110: mol_type = other DNA
cagtctggtgggttccagagccagactgccccccagtaaatgtttgttgaacaaatggacaagccagaaaagctgtcaacaatgttaagaccagagaaactgtaaatttt

SEQ ID NO: 33848 - DNA, 110 bp, synthetic construct
  source 1..110: mol_type = other DNA
tggacaagccagaaaagctgtcaacaatgttaagaccagagaaactgtaaatttttaaacagttaaccactgttcctatcttattcatcatagttaattattattggcga

SEQ ID NO: 33849 - DNA, 110 bp, synthetic construct
  source 1..110: mol_type = other DNA
accagagacacaaccctcttggcaaggaatgggaacattattctctccaaaagtaaacaagttcctggatggaggggaatgtcttcagcttgtccgaagttgttatcttt

SEQ ID NO: 33850 - DNA, 110 bp, synthetic construct
  source 1..110: mol_type = other DNA
aacaagttcctggatggaggggaatgtcttcagcttgtccgaagttgttatcttttgctggaatttggatgttatcagggaagtaagattaaggagggaagaagaattta

SEQ ID NO: 33851 - DNA, 110 bp, synthetic construct
  source 1..110: mol_type = other DNA
tgtggcaggaaggctgaattcagcctgctaccccacccaactgataggaggcaaacagatatattcccactaagtgggaaaaatcccctgccatggaatatactcatttc

SEQ ID NO: 33852 - DNA, 110 bp, synthetic construct
  source 1..110: mol_type = other DNA
aactccagaaagccgtttcaatgtcccactttcacccccaccatagctcccacgcatactaaactcaagccatttgctccctgcagaagcaatttattctaccacataaa

SEQ ID NO: 33853 - DNA, 110 bp, synthetic construct
  source 1..110: mol_type = other DNA
tcagcagcatctttaactctgggttttgggggtggagtcagggtcgctttgggcaaccctcaggaagctgggaccaggagatggggctgcccatcaacaggtgtgaataa

SEQ ID NO: 33854 - DNA, 110 bp, synthetic construct
  source 1..110: mol_type = other DNA
accctcaggaagctgggaccaggagatggggctgcccatcaacaggtgtgaataactgacatccctctcattgaaaaacccagccaaggagttcccattgtggctcagga

SEQ ID NO: 33855 - DNA, 110 bp, synthetic construct
  source 1..110: mol_type = other DNA
ggtaggtgggaaggagacttgcagtggggaggggctgtcctagattgggtccctaccccaccctccacgtggccctgcaacaaggatttgggagcaaataatttatttga

SEQ ID NO: 33856 - DNA, 110 bp, synthetic construct
  source 1..110: mol_type = other DNA
caacagtgtgacagagacaaagaaaagagagtctgctgcatcagtgtttggcattcacttcctagggtatctcttattatgcaacagagaggaaaatgtgtactggttca

SEQ ID NO: 33857 - DNA, 110 bp, synthetic construct
  source 1..110: mol_type = other DNA
attggctaagttttctgccttgccagggtctctctctcctggtcttttggctagaaagaccaggcttattagtttgtaccagttgctatttccagactgccagcttcttc

SEQ ID NO: 33858 - DNA, 110 bp, synthetic construct
  source 1..110: mol_type = other DNA
aagaccaggcttattagtttgtaccagttgctatttccagactgccagcttcttcggctccaaatttgggatatattaggcaaaaagaaaacccagggaactcaccccat

SEQ ID NO: 33859 - DNA, 110 bp, synthetic construct
  source 1..110: mol_type = other DNA
cagaatgccatcgtggttaagagctcaggctctggtatcaaatgcttgggtttagacaccggctctgttaattacagcctgggtaaacttaagtgatgcatttagcctca

SEQ ID NO: 33860 - DNA, 110 bp, synthetic construct
  source 1..110: mol_type = other DNA
atacctgctgccttctgcccacaagttcccgaagcaccaagtgatgcttgctgccatttgtttcaagttcttttcaccatcaatgggattctggggcagggagaaggtga

SEQ ID NO: 33861 - DNA, 110 bp, synthetic construct
  source 1..110: mol_type = other DNA
atttgtttcaagttcttttcaccatcaatgggattctggggcagggagaaggtgaaggtgaggctgcatagtttggtggggctaagtttgaaagggtcttctgggtcatg

SEQ ID NO: 33862 - DNA, 110 bp, synthetic construct; identical to SEQ ID NO: 33860
  source 1..110: mol_type = other DNA

SEQ ID NO: 33863 - DNA, 110 bp, synthetic construct; identical to SEQ ID NO: 33861
  source 1..110: mol_type = other DNA

SEQ ID NO: 33864 - DNA, 110 bp, synthetic construct
  source 1..110: mol_type = other DNA
tttgctctaataacaaattagtgtcagtcactggagtccagctatgcccctctgctgtcaggcacagctgcctcccccatgacatcaatcacagacagcatgtaagaatt

SEQ ID NO: 33865 - DNA, 110 bp, synthetic construct
  source 1..110: mol_type = other DNA
gatcatggggtgacagatgtcacagccaaatcgccctcatatccagtgactgaacccagagttatggggaccagtgaggggaagactaaccttcttagggtcctaggctc

SEQ ID NO: 33866 - DNA, 110 bp, synthetic construct
  source 1..110: mol_type = other DNA
ccagagttatggggaccagtgaggggaagactaaccttcttagggtcctaggctccttgccacagtctggcctggcaggcgagtgaggcaagtgcctacaactctcccgt

SEQ ID NO: 33867 - DNA, 110 bp, synthetic construct
  source 1..110: mol_type = other DNA
agcgttcatgtggaaactgataccagctgcacactcccccaagaggaaggggtgccagtcgtgtctgcaggaactgcactgggctcctggcactgtccacacagatgggg

SEQ ID NO: 33868 - DNA, 110 bp, synthetic construct
  source 1..110: mol_type = other DNA
atccaagaaatatttattgagcaccacatgtgtgccagggacccagtaaggtatcagacaaagaaatttacacaaggagtttatactgtagtgggattcaaagtggaagg

SEQ ID NO: 33869 - DNA, 110 bp, synthetic construct
  source 1..110: mol_type = other DNA
atgtcgctgggctcagtaaacacttgtttttgtccctgttttctccttcaaagatgagctatcctggccatccgggggaatgccgagggagacccagggaggggactggt

SEQ ID NO: 33870 - DNA, 110 bp, synthetic construct
  source 1..110: mol_type = other DNA
gaggtccagtctcacaaggctgtcatcccgccaggtgtcatcagtgtgtgtttcccttgttataacaagcctgagtccgatacatcttagggagaaattaagttcttggt

SEQ ID NO: 33871 - DNA, 110 bp, synthetic construct
  source 1..110: mol_type = other DNA
cttgttataacaagcctgagtccgatacatcttagggagaaattaagttcttggtagtggcttcctctatcctgcaatctaatgtaccatcttggttactgacctttggt

SEQ ID NO: 33872 - DNA, 110 bp, synthetic construct
  source 1..110: mol_type = other DNA
gggacaaggacagaggtggggcagaaatttatttcttctgcttcgaacttgggtagattggccagactggggctaatgaacaaaaacagtgtgtcccaactccactgaat

SEQ ID NO: 33873 - DNA, 110 bp, synthetic construct
  source 1..110: mol_type = other DNA
gattggccagactggggctaatgaacaaaaacagtgtgtcccaactccactgaatgggctgaactcaaaaaggcctccacctcctctccaggggtcacaggtgattgcag

SEQ ID NO: 33874 - DNA, 110 bp, synthetic construct; identical to SEQ ID NO: 33872
  source 1..110: mol_type = other DNA

SEQ ID NO: 33875 - DNA, 110 bp, synthetic construct; identical to SEQ ID NO: 33873
  source 1..110: mol_type = other DNA

SEQ ID NO: 33876 - DNA, 110 bp, synthetic construct
  source 1..110: mol_type = other DNA
ccagttcatctcattatctcctagagaacaagacatcagctctggatcaaggcctcccttctgcaacatctgatgtcctcgtgttgcccagggtccactgtgaagctacc

SEQ ID NO: 33877 - DNA, 110 bp, synthetic construct
  source 1..110: mol_type = other DNA
gagggaaatgctggtgatctttgtacgtcccattcatgagcctcgtgctcatgcatcaattgttaagcttaaacttcctcagtggcttcccactgttcttaagattaaaa

SEQ ID NO: 33878 - DNA, 110 bp, synthetic construct
  source 1..110: mol_type = other DNA
tcaattgttaagcttaaacttcctcagtggcttcccactgttcttaagattaaaaaccctatttcttaacttaggctaccagatactgtgtaagcctcatcatgcatgct

SEQ ID NO: 33879 - DNA, 110 bp, synthetic construct
  source 1..110: mol_type = other DNA
aggtacattacactggcaagtgtggcaaaatggttgtgcaatgttgtttttctatggttcaaacataacctgacaaacgcaatagaaaataaattgaaatttaaaattta

SEQ ID NO: 33880 - DNA, 110 bp, synthetic construct
  source 1..110: mol_type = other DNA
ggttcaaacataacctgacaaacgcaatagaaaataaattgaaatttaaaatttagttctttggttacactagccacatgtcaagtgctgaaagccccatgtgacaagag

SEQ ID NO: 33881 - DNA, 110 bp, synthetic construct
  source 1..110: mol_type = other DNA
aaatcttgtgttttcaattggatgcaaatctaaaaataatcaatatgagtatctcgtgaatcaactggataaccagctcaaaccacagaatttccatgtccgcatgtagg

SEQ ID NO: 33882 - DNA, 110 bp, synthetic construct
  source 1..110: mol_type = other DNA
gtgaatcaactggataaccagctcaaaccacagaatttccatgtccgcatgtaggtttgtgtttatgacagcagagagaccaaatagaaccgctttcagcatctcaagcc

SEQ ID NO: 33883 - DNA, 110 bp, synthetic construct
  source 1..110: mol_type = other DNA
gcagaagcctttgttcctggggcaggagctgtcagggagactaaaggggctcaggggtgatggaggaaccctaagcagtgagcataaaaaaaaatgcctttgagggaaga

SEQ ID NO: 33884 - DNA, 110 bp, synthetic construct
  source 1..110: mol_type = other DNA
aaggccaaaatcataaccactttgaaagaaatgacatcaattgaaggataaacataaaatgggacaatagcaaccctcattgaagagctgtaaatgctcagaagaacctt

SEQ ID NO: 33885 - DNA, 110 bp, synthetic construct
  source 1..110: mol_type = other DNA
aaaatgggacaatagcaaccctcattgaagagctgtaaatgctcagaagaacctttagctgatatccttatatcttcgcagggaattcttctatatttggttaaccctca

SEQ ID NO: 33886 - DNA, 110 bp, synthetic construct
  source 1..110: mol_type = other DNA
atttccttacctgtaaaacaggcatagtcatctgataggtttgtgaagagtaaaggagctagtacacttaaacatgtgcagctagaaacagctgctgccgataactgtgt

SEQ ID NO: 33887 - DNA, 110 bp, synthetic construct
  source 1..110: mol_type = other DNA
gacccctaccctgggagcctccatatgccgagggaagtggccctagaaaagatataaagactaactaaataaatagataaagcgtctctagtcaggcctctgttttccca

SEQ ID NO: 33888 - DNA, 110 bp, synthetic construct
  source 1..110: mol_type = other DNA
aaagactaactaaataaatagataaagcgtctctagtcaggcctctgttttcccaacctagagttttgcaattacataaatatttttcttggaaattctatgatcagttc

SEQ ID NO: 33889 - DNA, 110 bp, synthetic construct
  source 1..110: mol_type = other DNA
ttttttttttttttctcaaagggaactagaaagaatcaaacattttaaaaaggatgacctgtgaaagagtaactgacccagttcccatttggtcagaacaagggtcaatg

SEQ ID NO: 33890 - DNA, 110 bp, synthetic construct
  source 1..110: mol_type = other DNA
gagtgtaaggtctcctgacacagaacttcaagagccagcatacggtagcacgcagatgacttgaacccaggaccttgggagctgtgccctctagtggaccgcgccccctg

SEQ ID NO: 33891 - DNA, 110 bp, synthetic construct
  source 1..110: mol_type = other DNA
caagtggcttccatatccgtgaattaagttattatggtaggaagagccaggtgtagctctctggagctctctctttctaccaagataataaaccaagaacagtctcatgt

SEQ ID NO: 33892 - DNA, 110 bp, synthetic construct
  source 1..110: mol_type = other DNA
atttccacataaccacatcctagttttcttcagaggtcatgtcaaagctttttggcatgaagtagttccaccagtaagaagtctggtctcatggcctcttactttctgtc

SEQ ID NO: 33893 - DNA, 110 bp, synthetic construct
  source 1..110: mol_type = other DNA
atcaaaccaacaaacagaggcacagcacatagcaaaccagtctgctgaggtttcacacaacgcagtcaatacagcatcagggaacaccacccccgcgccccagaagggct

SEQ ID NO: 33894 - DNA, 110 bp, synthetic construct
  source 1..110: mol_type = other DNA
cacaacgcagtcaatacagcatcagggaacaccacccccgcgccccagaagggctagactgcccctccaccgccgccaaatggcccctgccagccagtgctagctcctgg

SEQ ID NO: 33895 - DNA, 110 bp, synthetic construct
  source 1..110: mol_type = other DNA
atgaaatgatggaggactgaactcgagtggtgccagtgatgatgcagaaaggtgtgtacatttgcactgggtcaaatcactttcactggggcagtgaacctcgaacacag

SEQ ID NO: 33896 - DNA, 110 bp, synthetic construct
  source 1..110: mol_type = other DNA
gccaggcctacctcagcatggtcctttctcctagagggtgaaaacagagcttgctgtacactcttactggattctttgtttccatcttcaagtcaacaagcaggagcatt

SEQ ID NO: 33897 - DNA, 110 bp, synthetic construct
  source 1..110: mol_type = other DNA
cctctttttccaggcattagaccatgttttgggtgtgttgtaagaaggtttaacctactacccaaatcttactcacacagctttttctgtctgtgatggtcaagaacaat

SEQ ID NO: 33898 - DNA, 110 bp, synthetic construct
  source 1..110: mol_type = other DNA
gcaggttgaaggtcttaaaggtaagttgccctgtgaccttgggcatcatttccggagataatggcagcagctgtttcaaattccggtcatccttattctaagattcccat

SEQ ID NO: 33899 - DNA, 110 bp, synthetic construct
  source 1..110: mol_type = other DNA
ctctttgtccacacccccttgtccacaccttttctgtcccttcccttctatctatgcaccctctgtcctgtcttccttttgtccacacctctctttgtccacttcacctt

SEQ ID NO: 33900 - DNA, 110 bp, synthetic construct
  source 1..110: mol_type = other DNA
tgatccctcccagctctgaccaccaattcacaaaagttatgagtcctgagcagtccatgagaggggctgcatccatgttcatgctgtgctgtgagctgagcaaggcatcc

SEQ ID NO: 33901 - DNA, 110 bp, synthetic construct
  source 1..110: mol_type = other DNA
agtgactatgattccatattattaagtgtattaaatactggttgatatatcagctaagatctaacttgttagattggttagtaatttgccatcaagtatctggagagctt

SEQ ID NO: 33902 - DNA, 110 bp, synthetic construct; identical to SEQ ID NO: 33901
  source 1..110: mol_type = other DNA

SEQ ID NO: 33903 - DNA, 110 bp, synthetic construct
  source 1..110: mol_type = other DNA
tcactgtgagtgccagtaacagctacaccttggggaaatggaggggcaagcataggctgttttctgtaacttcctcaactaggccatcttccgaattccattctccaaga

SEQ ID NO: 33904 - DNA, 110 bp, synthetic construct
  source 1..110: mol_type = other DNA
gaccttggtcaggtatattctggaactcccagaaatggtgtggtggagccaggctcttgctgatatggggactggggactcttggtagataggcagcttgtgcccctgtt

SEQ ID NO: 33905 - DNA, 110 bp, synthetic construct
  source 1..110: mol_type = other DNA
ctgtacatctgtgctcctgggttttgagctccatcagaaatgataagtgagaggactgtggcagcagctgaaactaaagtttatccagacctagccttgtaggtgcttgt

SEQ ID NO: 33906 - DNA, 110 bp, synthetic construct
  source 1..110: mol_type = other DNA
accaacagtgtaggaaggttccactttatccacaatctctcaagcatttcttattgtcaacttgttaatgatggccattctgacacatatgaggtgtaacctcatagtat

SEQ ID NO: 33907 - DNA, 110 bp, synthetic construct; identical to SEQ ID NO: 33906
  source 1..110: mol_type = other DNA

SEQ ID NO: 33908 - DNA, 110 bp, synthetic construct
  source 1..110: mol_type = other DNA
ttgaaaaactctttaaaaaagggggaggagttccctggtggctcagcaagttaaggatctagtattgtcactactgtggctttgggtgctgctgtggtgtaagttcaatt

SEQ ID NO: 33909 - DNA, 110 bp, synthetic construct
  source 1..110: mol_type = other DNA
gatctagtattgtcactactgtggctttgggtgctgctgtggtgtaagttcaattcctggccctggaactttcacatgccatgggtgtggacaaaagaagaaaaaaaaga

SEQ ID NO: 33910 - DNA, 110 bp, synthetic construct
  source 1..110: mol_type = other DNA
gatgtgtcagcgcaggctaatctgagaactgcagggatctcacagaagaaatgattgatacttcgggaaccacagtaggggaaagtcatggtgacagaggtaagcagaaa

SEQ ID NO: 33911 - DNA, 110 bp, synthetic construct
  source 1..110: mol_type = other DNA
ataactgcttgttgtcatacaattattttcaactaaaaataaaatgcacagttatatcccttttatcaattgaaaagagctgctgaggagttcccatcgtggcgcagtgg

SEQ ID NO: 33912 - DNA, 110 bp, synthetic construct; identical to SEQ ID NO: 33911
  source 1..110: mol_type = other DNA

SEQ ID NO: 33913 - DNA, 110 bp, synthetic construct
  source 1..110: mol_type = other DNA
catcaaagaaagaaaccacatctcagcagtagcaacaaccatcaggctggatcgcaaagattttttttttttttttttttcctgaggatcaaggaattttatctctgcat

SEQ ID NO: 33914 - DNA, 110 bp, synthetic construct
  source 1..110: mol_type = other DNA
aaggagtacatgttttactaaaattaagcacagagaggcatagagaaatatttcatagaaaggaagctttgttccactcttctatttcattgcacacttaaaatctaaga

SEQ ID NO: 33915 - DNA, 110 bp, synthetic construct
  source 1..110: mol_type = other DNA
tagaaaggaagctttgttccactcttctatttcattgcacacttaaaatctaagatttgtaccacatactctatatcagccccagaaataatcaagtactcattattttg

SEQ ID NO: 33916 - DNA, 110 bp, synthetic construct
  source 1..110: mol_type = other DNA
agtccttgcctatgccaattcttgtccactaatctagtcacctcccttaataccagtaatactaatctcatcaacttccctattaatcttatgaccttccttaataaaag

SEQ ID NO: 33917 - DNA, 110 bp, synthetic construct
  source 1..110: mol_type = other DNA
caattcttgtccactaatctagtcacctcccttaataccagtaatactaatctcatcaacttccctattaatcttatgaccttccttaataaaagtcatgtgggctaaag

SEQ ID NO: 33918 - DNA, 110 bp, synthetic construct
  source 1..110: mol_type = other DNA
ctaatatagggcacccagatgcatacaacaaatgctgacagagataaaaggagaaattgatgcaaataagatcatagtaggataatttaacaccacacccacatccatgg

SEQ ID NO: 33919 - DNA, 110 bp, synthetic construct
  source 1..110: mol_type = other DNA
cagatgcatacaacaaatgctgacagagataaaaggagaaattgatgcaaataagatcatagtaggataatttaacaccacacccacatccatggacagattctctagat

SEQ ID NO: 33920 - DNA, 110 bp, synthetic construct
  source 1..110: mol_type = other DNA
cattcatctgtcaatggacttttatgattgcttccacatcttggctatcgtaaacagtgctgcagtaatcattggggggaatgtatcttttcaaatcatggttttctcca

SEQ ID NO: 33921 - DNA, 110 bp, synthetic construct; identical to SEQ ID NO: 33920
  source 1..110: mol_type = other DNA

SEQ ID NO: 33922 - DNA, 110 bp, synthetic construct
  source 1..110: mol_type = other DNA
tcatgctgtgcattcattagatgaccattactttcactggactcattactttttgtgtgtggggttaatcttcagtaaactctactgttccttccttgcaattgtttcta

SEQ ID NO: 33923 - DNA, 110 bp, synthetic construct
  source 1..110: mol_type = other DNA
actggactcattactttttgtgtgtggggttaatcttcagtaaactctactgttccttccttgcaattgtttctaaatatattttgccttttttattactttgttggtta

SEQ ID NO: 33924 - DNA, 110 bp, synthetic construct
  source 1..110: mol_type = other DNA
aactttttcttgtatatgtgttagggggtaatcttgcagtaaactccactgttctttccttgcaattatttctaaaaatattttttctcgtgaaattattggttagtaag

SEQ ID NO: 33925 - DNA, 110 bp, synthetic construct
  source 1..110: mol_type = other DNA
aaagtcccccactattattgtgttactgaagaattctccttgtatggctattagcagttgccttatgtatatcctatcttgggtccatatgcatttacaattactatgtc

SEQ ID NO: 33926 - DNA, 110 bp, synthetic construct; identical to SEQ ID NO: 33925
  source 1..110: mol_type = other DNA

SEQ ID NO: 33927 - DNA, 110 bp, synthetic construct
  source 1..110: mol_type = other DNA
gctgacagcttcttgcaagaccttattaaatctgttgtcagaaaggaaagtaactaagttgaaaaaacatttaagggaaataaatgtaaatgagataagaggtattagat

SEQ ID NO: 33928 - DNA, 110 bp, synthetic construct
  source 1..110: mol_type = other DNA
gtaaggtagaaaatggtgtgaatctccagagtgaaaatgtttcctgtttttattatgctctccttatgaaatatttacctaagtagataagaagtactcattattcactg

SEQ ID NO: 33929 - DNA, 110 bp, synthetic construct
  source 1..110: mol_type = other DNA
tgctctccttatgaaatatttacctaagtagataagaagtactcattattcactggtgacatggactttaattcaaagccaaatgagcatgaaaactgctcctccctttg

SEQ ID NO: 33930 - DNA, 110 bp, synthetic construct
  source 1..110: mol_type = other DNA
caagggaatgcagaaaaaaaaaaaaaaaaggcatcttttaaacctaatacagtaacccagactgctatttctggaatttatgagaggagggtgtaggggttgggcaccac

SEQ ID NO: 33931 - DNA, 110 bp, synthetic construct
  source 1..110: mol_type = other DNA
aaaaaaaaaaaaaaggcatcttttaaacctaatacagtaacccagactgctatttctggaatttatgagaggagggtgtaggggttgggcaccactggatgtaatgggac

SEQ ID NO: 33932 - DNA, 110 bp, synthetic construct
  source 1..110: mol_type = other DNA
cagtaaaggtatttggtgctggaaatttgattatcacctccccacaacatttgctttggcatacttcagaggttattcaccatgggaatgacctttgtggtagggaagga

SEQ ID NO: 33933 - DNA, 110 bp, synthetic construct
  source 1..110: mol_type = other DNA
ttggcatacttcagaggttattcaccatgggaatgacctttgtggtagggaaggaaatgtatgctagaaggctactgcagagaaagtggatgctcctatttggggaggga

SEQ ID NO: 33934 - DNA, 110 bp, synthetic construct
  source 1..110: mol_type = other DNA
ccaaaggcacaaataaattccatcatggatgaatgaaacacaaaagcaagtgagtgaatttggttcacaaataaaatcaggtagagtccaacaacaattcccctctccaa

SEQ ID NO: 33935 - DNA, 110 bp, synthetic construct
  source 1..110: mol_type = other DNA
aggctaggaagagagtctctctgacttcaggaaaggtggaagtggagtttccaccatggttcagaggttagctattcatgaaccccactagcacgcatcagagtgtgcat

SEQ ID NO: 33936 - DNA, 110 bp, synthetic construct
  source 1..110: mol_type = other DNA
atgagaaacatgaatatctagattcatgaagtcccgtgaaatccaaattagctcatcagcaagagatgttcccattgacacactagagtcaatttgtctaaatttaaagg

SEQ ID NO: 33937 - DNA, 110 bp, synthetic construct
  source 1..110: mol_type = other DNA
tcagcaagagatgttcccattgacacactagagtcaatttgtctaaatttaaaggtaaagaaactaccttgaatattgcaacagaaaagcaatttatcacatcaaagtgt

SEQ ID NO: 33938 - DNA, 110 bp, synthetic construct
  source 1..110: mol_type = other DNA
cttgacttagtcatttttgcaattactttcgcaactccattctgaatgatccacttagggtgacagaatttgctgctgtgctaaaagtaaatgtttctctttttatcttc

SEQ ID NO: 33939 - DNA, 110 bp, synthetic construct
  source 1..110: mol_type = other DNA
actttttgcaccttgtctcctcggatgtgttacaggataaaagcttttactaatcagatcatctcacagttggtcctagataaatatgggcctgtgcctaacagtgagtc

SEQ ID NO: 33940 - DNA, 110 bp, synthetic construct
  source 1..110: mol_type = other DNA
ttggaaaccaagaagcaaaaatcatcactgtttgcagatgttatgatagtatacatagaaatcctaaggatgctaccattacactactagaactcatcaataaatttaat

SEQ ID NO: 33941 - DNA, 110 bp, synthetic construct; identical to SEQ ID NO: 33940
  source 1..110: mol_type = other DNA

SEQ ID NO: 33942 - DNA, 110 bp, synthetic construct
  source 1..110: mol_type = other DNA
gcaatgtttctgcgcctcctaaagtcaagaagaagaagctctgaaccccacatccaatgaaggaaatggacctgtttccaaaaaggaaattgtaggccattttggggaca

SEQ ID NO: 33943 - DNA, 110 bp, synthetic construct
  source 1..110: mol_type = other DNA
ccccacatccaatgaaggaaatggacctgtttccaaaaaggaaattgtaggccattttggggacaatagtggagatgtagtttaggtcaatgaaagagagctgactaagt

SEQ ID NO: 33944 - DNA, 110 bp, synthetic construct
  source 1..110: mol_type = other DNA
ggcagtggcaggctgtacacgttcctgggaaggtgggtgcagaggtaagtgcccagttgccagaacctcaggtgaggtctagaattaaatattgattaacctgttgagca
